United States Patent Application Publication US 2005/0244851 A1 - sequence listing, part 78

SEQ ID NO: 3035975 - DNA, 25 bp, Homo sapien
tagagccgggtttcaccttgtcagc

SEQ ID NO: 3035976 - DNA, 25 bp, Homo sapien
taatagagccgggtttcaccttgtc

SEQ ID NO: 3035977 - DNA, 25 bp, Homo sapien
tgtattttaatagagccgggtttca

SEQ ID NO: 3035978 - DNA, 25 bp, Homo sapien
accatgcccagcttttttttgtatt

SEQ ID NO: 3035979 - DNA, 25 bp, Homo sapien
caaaataccccacgataacctctgt

SEQ ID NO: 3035980 - DNA, 25 bp, Homo sapien
caacattgccaggttcccaagggta

SEQ ID NO: 3035981 - DNA, 25 bp, Homo sapien
tccacaattgagctgaagaaccaca

SEQ ID NO: 3035982 - DNA, 25 bp, Homo sapien
aactcttactcgtctcaagacctgg

SEQ ID NO: 3035983 - DNA, 25 bp, Homo sapien
cgcaatgcctgtctaattaaaaaga

SEQ ID NO: 3035984 - DNA, 25 bp, Homo sapien
tccatacatcgcaatgcctgtctaa

SEQ ID NO: 3035985 - DNA, 25 bp, Homo sapien
cctcagccttccatacatcgcaatg

SEQ ID NO: 3035986 - DNA, 25 bp, Homo sapien
gacagggtctcgctgagggaagaga

SEQ ID NO: 3035987 - DNA, 25 bp, Homo sapien
gctgggcactgtggcgtgcacctgt

SEQ ID NO: 3035988 - DNA, 25 bp, Homo sapien
ttagctgggcactgtggcgtgcacc

SEQ ID NO: 3035989 - DNA, 25 bp, Homo sapien
ctgcagtgagctgaagtcataccac

SEQ ID NO: 3035990 - DNA, 25 bp, Homo sapien
aatcccagctacttgggaggctgag

SEQ ID NO: 3035991 - DNA, 25 bp, Homo sapien
catatcctactagggggtttagtct

SEQ ID NO: 3035992 - DNA, 25 bp, Homo sapien
gccacatacccctttagcaatccag

SEQ ID NO: 3035993 - DNA, 25 bp, Homo sapien
tttttgagccacatacccctttagc

SEQ ID NO: 3035994 - DNA, 25 bp, Homo sapien
ttgagccacatacccctttagcaat

SEQ ID NO: 3035995 - DNA, 25 bp, Homo sapien
ttacaggcattagtctggccaagaa

SEQ ID NO: 3035996 - DNA, 25 bp, Homo sapien
caggcattagtctggccaagaatac

SEQ ID NO: 3035997 - DNA, 25 bp, Homo sapien
cattagtctggccaagaatacttat

SEQ ID NO: 3035998 - DNA, 25 bp, Homo sapien
tagtctggccaagaatacttataaa

SEQ ID NO: 3035999 - DNA, 25 bp, Homo sapien
cacacaagagggagctggatctcag

SEQ ID NO: 3036000 - DNA, 25 bp, Homo sapien
tgactgtgccgagaaacgacctctg

SEQ ID NO: 3036001 - DNA, 25 bp, Homo sapien
tgagatccaaagtgagcctgaagcc

SEQ ID NO: 3036002 - DNA, 25 bp, Homo sapien
cctgcttggaattaacgggtctgac

SEQ ID NO: 3036003 - DNA, 25 bp, Homo sapien
gaaaccaccagcgcctcgttgggcc

SEQ ID NO: 3036004 - DNA, 25 bp, Homo sapien
ctcgttgggccccaccgtgtggcaa

SEQ ID NO: 3036005 - DNA, 25 bp, Homo sapien
cgttgggccccaccgtgtggcaatt

SEQ ID NO: 3036006 - DNA, 25 bp, Homo sapien
tgggccccaccgtgtggcaattgcc

SEQ ID NO: 3036007 - DNA, 25 bp, Homo sapien
acggagggccctcgggaccgcacag

SEQ ID NO: 3036008 - DNA, 25 bp, Homo sapien
acagacccggacaacagcagcgggt

SEQ ID NO: 3036009 - DNA, 25 bp, Homo sapien
gggaccgcacagacccggacaacag

SEQ ID NO: 3036010 - DNA, 25 bp, Homo sapien
ctcgggaccgcacagacccggacaa

SEQ ID NO: 3036011 - DNA, 25 bp, Homo sapien
ccggcgcgttgaggcaggagtgagc

SEQ ID NO: 3036012 - DNA, 25 bp, Homo sapien
gcccctctgcggtcgcagccccgcc

SEQ ID NO: 3036013 - DNA, 25 bp, Homo sapien
gccggcgcgttgaggcaggagtgag

SEQ ID NO: 3036014 - DNA, 25 bp, Homo sapien
gggccggcgcgttgaggcaggagtg

SEQ ID NO: 3036015 - DNA, 25 bp, Homo sapien
tactcactgtgagaccctaggcgag

SEQ ID NO: 3036016 - DNA, 25 bp, Homo sapien
taggcgagtcccttagctcgggagc

SEQ ID NO: 3036017 - DNA, 25 bp, Homo sapien
gggcttcagatacagatgaccccag

SEQ ID NO: 3036018 - DNA, 25 bp, Homo sapien
gaagcacagtgtctagcatacccct

SEQ ID NO: 3036019 - DNA, 25 bp, Homo sapien
gatcacaaacccgtcagtgtccagg

SEQ ID NO: 3036020 - DNA, 25 bp, Homo sapien
gcatggcctcgcacacatccgaggt

SEQ ID NO: 3036021 - DNA, 25 bp, Homo sapien
ccagaaagtaaccacggaggtcaag

SEQ ID NO: 3036022 - DNA, 25 bp, Homo sapien
ttttcaaggaccatgaagtgccatg

SEQ ID NO: 3036023 - DNA, 25 bp, Homo sapien
tggatctcaggctcaactttagcct

SEQ ID NO: 3036024 - DNA, 25 bp, Homo sapien
caactttagcctgaattcggtgcgt

SEQ ID NO: 3036025 - DNA, 25 bp, Homo sapien
catcttagacaaatctggtgagctc

SEQ ID NO: 3036026 - DNA, 25 bp, Homo sapien
ggttgagaaactgtgggctcctcag

SEQ ID NO: 3036027 - DNA, 25 bp, Homo sapien
tgggggtcttcatcgggttcagcat

SEQ ID NO: 3036028 - DNA, 25 bp, Homo sapien
gggtcttcatcgggttcagcatcct

SEQ ID NO: 3036029 - DNA, 25 bp, Homo sapien
gtcttcatcgggttcagcatcctcc

SEQ ID NO: 3036030 - DNA, 25 bp, Homo sapien
agccctgccagcctcttgctggcct

SEQ ID NO: 3036031 - DNA, 25 bp, Homo sapien
gctgcccggtcgtctcgggcagctg

SEQ ID NO: 3036032 - DNA, 25 bp, Homo sapien
agccgatgggctgcccggtcgtctc

SEQ ID NO: 3036033 - DNA, 25 bp, Homo sapien
atagccgatgggctgcccggtcgtc

SEQ ID NO: 3036034 - DNA, 25 bp, Homo sapien
ccatagccgatgggctgcccggtcg

SEQ ID NO: 3036035 - DNA, 25 bp, Homo sapien
ttggcaaaatatctcccactgaggg

SEQ ID NO: 3036036 - DNA, 25 bp, Homo sapien
tatctcccactgaggggctcgatgc

SEQ ID NO: 3036037 - DNA, 25 bp, Homo sapien
aaaatatctcccactgaggggctcg

SEQ ID NO: 3036038 - DNA, 25 bp, Homo sapien
gttggcaaaatatctcccactgagg

SEQ ID NO: 3036039 - DNA, 25 bp, Homo sapien
ttgtagagcacaatacaggggtgtc

SEQ ID NO: 3036040 - DNA, 25 bp, Homo sapien
ctcttgtagagcacaatacaggggt

SEQ ID NO: 3036041 - DNA, 25 bp, Homo sapien
tcttgtagagcacaatacaggggtg

SEQ ID NO: 3036042 - DNA, 25 bp, Homo sapien
tagagcacaatacaggggtgtctgg

SEQ ID NO: 3036043 - DNA, 25 bp, Homo sapien
aggaacagctccgagttcacaggcc

SEQ ID NO: 3036044 - DNA, 25 bp, Homo sapien
aaaagtgggcgcagccatccaggaa

SEQ ID NO: 3036045 - DNA, 25 bp, Homo sapien
tcttggtgcccggagcaccagccaa

SEQ ID NO: 3036046 - DNA, 25 bp, Homo sapien
ccatccaggaacatggcgcaggaac

SEQ ID NO: 3036047 - DNA, 25 bp, Homo sapien
tttgaagtcaagacgtccccgacag

SEQ ID NO: 3036048 - DNA, 25 bp, Homo sapien
gcagcaggttaaacgcctcacgggt

SEQ ID NO: 3036049 - DNA, 25 bp, Homo sapien
cgatatggttcacccgaagcagcag

SEQ ID NO: 3036050 - DNA, 25 bp, Homo sapien
gcttagtgtcagcatatgcccgcag

SEQ ID NO: 3036051 - DNA, 25 bp, Homo sapien
aaggcccgcaccgaggccagactgg

SEQ ID NO: 3036052 - DNA, 25 bp, Homo sapien
gatgaggatgtccaaccgtggctca

SEQ ID NO: 3036053 - DNA, 25 bp, Homo sapien
agatgacctcattgttcccactctc

SEQ ID NO: 3036054 - DNA, 25 bp, Homo sapien
gccagactggccaagtccaaggcca

SEQ ID NO: 3036055 - DNA, 25 bp, Homo sapien
gccagcaccacgcgcgctccccggc

SEQ ID NO: 3036056 - DNA, 25 bp, Homo sapien
gtcgaaggcagccgcctccccgcgc

SEQ ID NO: 3036057 - DNA, 25 bp, Homo sapien
cagcaccacgcgcgctccccggcgc

SEQ ID NO: 3036058 - DNA, 25 bp, Homo sapien
gcaccacgcgcgctccccggcgcgc

SEQ ID NO: 3036059 - DNA, 25 bp, Homo sapien
gcgcgccccgccagctcgcactcac

SEQ ID NO: 3036060 - DNA, 25 bp, Homo sapien
agctcgcactcacccgcctccgcac

SEQ ID NO: 3036061 - DNA, 25 bp, Homo sapien
gccagctcgcactcacccgcctccg

SEQ ID NO: 3036062 - DNA, 25 bp, Homo sapien
gccccgccagctcgcactcacccgc

SEQ ID NO: 3036063 - DNA, 25 bp, Homo sapien
cacggccgtgcggccccgcaggttg

SEQ ID NO: 3036064 - DNA, 25 bp, Homo sapien
cccgcaggttgcccatgccgccgca

SEQ ID NO: 3036065 - DNA, 25 bp, Homo sapien
gaccacggccgtgcggccccgcagg

SEQ ID NO: 3036066 - DNA, 25 bp, Homo sapien
ccccgcaggttgcccatgccgccgc

SEQ ID NO: 3036067 - DNA, 25 bp, Homo sapien
ttgtagtagacaagcacgtaagcgc

SEQ ID NO: 3036068 - DNA, 25 bp, Homo sapien
agacaagcacgtaagcgcccagcag

SEQ ID NO: 3036069 - DNA, 25 bp, Homo sapien
aggttgtagtagacaagcacgtaag

SEQ ID NO: 3036070 - DNA, 25 bp, Homo sapien
tagtagacaagcacgtaagcgccca

SEQ ID NO: 3036071 - DNA, 25 bp, Homo sapien
gcggctgccgatccgccctgcacag

SEQ ID NO: 3036072 - DNA, 25 bp, Homo sapien
ccgcaccgccctggatcgccgccag

SEQ ID NO: 3036073 - DNA, 25 bp, Homo sapien
aggcggctgccgatccgccctgcac

SEQ ID NO: 3036074 - DNA, 25 bp, Homo sapien
accgccctggatcgccgccaggcgg

SEQ ID NO: 3036075 - DNA, 25 bp, Homo sapien
tggaacggcgcccgggcgcgtcagc

SEQ ID NO: 3036076 - DNA, 25 bp, Homo sapien
ggaacggcgcccgggcgcgtcagcc

SEQ ID NO: 3036077 - DNA, 25 bp, Homo sapien
ctggaacggcgcccgggcgcgtcag

SEQ ID NO: 3036078 - DNA, 25 bp, Homo sapien
caatagacaatttgagaaaacgctc

SEQ ID NO: 3036079 - DNA, 25 bp, Homo sapien
tagctacctgtagtgcaaccgctgc

SEQ ID NO: 3036080 - DNA, 25 bp, Homo sapien
ccgctgcagaaagggaaaataacgt

SEQ ID NO: 3036081 - DNA, 25 bp, Homo sapien
gctgttcctcagctcaggtctgccg

SEQ ID NO: 3036082 - DNA, 25 bp, Homo sapien
gagagagagcttctcggccaagacc

SEQ ID NO: 3036083 - DNA, 25 bp, Homo sapien
tcgcctttgggctgtttggtcgcaa

SEQ ID NO: 3036084 - DNA, 25 bp, Homo sapien
ctttgcaattgcagggtctccgctg

SEQ ID NO: 3036085 - DNA, 25 bp, Homo sapien
catggtgcagtaaggctgtgccctc

SEQ ID NO: 3036086 - DNA, 25 bp, Homo sapien
cactttggcaacaatactgcttggg

SEQ ID NO: 3036087 - DNA, 25 bp, Homo sapien
tctccgagaagtcacatgaatacag

SEQ ID NO: 3036088 - DNA, 25 bp, Homo sapien
tttaacagctcataatgtttggtat

SEQ ID NO: 3036089 - DNA, 25 bp, Homo sapien
gaatacagcacattgtccaccgttg

SEQ ID NO: 3036090 - DNA, 25 bp, Homo sapien
cagtgaccatagtttgtaaggcaca

SEQ ID NO: 3036091 - DNA, 25 bp, Homo sapien
tttgtaaggcacacatccatgtcag

SEQ ID NO: 3036092 - DNA, 25 bp, Homo sapien
ctcatcgtagaatatgcaggcatgt

SEQ ID NO: 3036093 - DNA, 25 bp, Homo sapien
atgtttcccggacacgtagttacag

SEQ ID NO: 3036094 - DNA, 25 bp, Homo sapien
ctgtcccgatgtagagggttcgata

SEQ ID NO: 3036095 - DNA, 25 bp, Homo sapien
acagctcgggcctgtacctcctttc

SEQ ID NO: 3036096 - DNA, 25 bp, Homo sapien
ttcgatagcacatgttcacagctcc

SEQ ID NO: 3036097 - DNA, 25 bp, Homo sapien
tagagggttcgatagcacatgttca

SEQ ID NO: 3036098 - DNA, 25 bp, Homo sapien
gcatttccaacacagggtacagagg

SEQ ID NO: 3036099 - DNA, 25 bp, Homo sapien
gagctgcggcagggtaaggctttct

SEQ ID NO: 3036100 - DNA, 25 bp, Homo sapien
atttccaacacagggtacagaggac

SEQ ID NO: 3036101 - DNA, 25 bp, Homo sapien
tccaacacagggtacagaggaccat

SEQ ID NO: 3036102 - DNA, 25 bp, Homo sapien
tatttgaaagcaagtaagcagaaag

SEQ ID NO: 3036103 - DNA, 25 bp, Homo sapien
tatacccaaaggtactggtagctgc

SEQ ID NO: 3036104 - DNA, 25 bp, Homo sapien
ctcagtcgggaagcccttctaattc

SEQ ID NO: 3036105 - DNA, 25 bp, Homo sapien
tgctttgctgtgtctcgaagtggac

SEQ ID NO: 3036106 - DNA, 25 bp, Homo sapien
ttaagcccatgaaaagcacacaagg

SEQ ID NO: 3036107 - DNA, 25 bp, Homo sapien
ggaagctcagattctccatggaggc

SEQ ID NO: 3036108 - DNA, 25 bp, Homo sapien
cacacaaggaggtttgagatactgg

SEQ ID NO: 3036109 - DNA, 25 bp, Homo sapien
ggtgaccattcgcacacgtagaggg

SEQ ID NO: 3036110 - DNA, 25 bp, Homo sapien
tccagaagccagctgatgtgtcccg

SEQ ID NO: 3036111 - DNA, 25 bp, Homo sapien
aaagctgatgtattctctgcaaggc

SEQ ID NO: 3036112 - DNA, 25 bp, Homo sapien
tgcaaggccagaaacttgatcagct

SEQ ID NO: 3036113 - DNA, 25 bp, Homo sapien
cactgcccggtgaaggttggacccg

SEQ ID NO: 3036114 - DNA, 25 bp, Homo sapien
gacatccataaatgctcgaagtgag

SEQ ID NO: 3036115 - DNA, 25 bp, Homo sapien
tcgaagtgagttggtgaggtccacc

SEQ ID NO: 3036116 - DNA, 25 bp, Homo sapien
ctccattgacatccataaatgctcg

SEQ ID NO: 3036117 - DNA, 25 bp, Homo sapien
taaatgctcgaagtgagttggtgag

SEQ ID NO: 3036118 - DNA, 25 bp, Homo sapien
aacgtgccggggctgaccttgccat

SEQ ID NO: 3036119 - DNA, 25 bp, Homo sapien
acggttaaagcgcttcctatggata

SEQ ID NO: 3036120 - DNA, 25 bp, Homo sapien
taaagcgcttcctatggataacgtg

SEQ ID NO: 3036121 - DNA, 25 bp, Homo sapien
cgcttcctatggataacgtgccggg

SEQ ID NO: 3036122 - DNA, 25 bp, Homo sapien
gcaggaagactgttacttacgtcgc

SEQ ID NO: 3036123 - DNA, 25 bp, Homo sapien
gagcaggaagactgttacttacgtc

SEQ ID NO: 3036124 - DNA, 25 bp, Homo sapien
ggacggagcaggaagactgttactt

SEQ ID NO: 3036125 - DNA, 25 bp, Homo sapien
cggagcaggaagactgttacttacg

SEQ ID NO: 3036126 - DNA, 25 bp, Homo sapien
taaacgggacaagttaacatgtgct

SEQ ID NO: 3036127 - DNA, 25 bp, Homo sapien
gctttcagagcctaagcagtcccat

SEQ ID NO: 3036128 - DNA, 25 bp, Homo sapien
cctctgaagtattcacagggatata

SEQ ID NO: 3036129 - DNA, 25 bp, Homo sapien
cattttaaggaaatcactgaagctt

SEQ ID NO: 3036130 - DNA, 25 bp, Homo sapien
tcaacccaaggctgagcagcactca

SEQ ID NO: 3036131 - DNA, 25 bp, Homo sapien
caacccaaggctgagcagcactcac

SEQ ID NO: 3036132 - DNA, 25 bp, Homo sapien
tgtcttcacaatgatgccgacggtg

SEQ ID NO: 3036133 - DNA, 25 bp, Homo sapien
gctggtgttctcgatgctggcacaa

SEQ ID NO: 3036134 - DNA, 25 bp, Homo sapien
tttttccgcacaagaactgcagccg

SEQ ID NO: 3036135 - DNA, 25 bp, Homo sapien
tgaatctgtcaacggaggtcctatc

SEQ ID NO: 3036136 - DNA, 25 bp, Homo sapien
taacaggcttaatatcagccttctc

SEQ ID NO: 3036137 - DNA, 25 bp, Homo sapien
tgtttcaatatgctgcactggagcg

SEQ ID NO: 3036138 - DNA, 25 bp, Homo sapien
gagtcccaatgcgaaggcatctgct

SEQ ID NO: 3036139 - DNA, 25 bp, Homo sapien
gagctgtcagtcacaataacaggct

SEQ ID NO: 3036140 - DNA, 25 bp, Homo sapien
gaatggccgcgggtgcaatgagagg

SEQ ID NO: 3036141 - DNA, 25 bp, Homo sapien
taagtgctcagagttcaaaaggtgc

SEQ ID NO: 3036142 - DNA, 25 bp, Homo sapien
gatcagctccccgtcccgaatggcc

SEQ ID NO: 3036143 - DNA, 25 bp, Homo sapien
ctctgcttgggtggctaagtgctca

SEQ ID NO: 3036144 - DNA, 25 bp, Homo sapien
tgacacttggaagttgagaaggatc

SEQ ID NO: 3036145 - DNA, 25 bp, Homo sapien
ggatcttccaggcagataaaggaaa

SEQ ID NO: 3036146 - DNA, 25 bp, Homo sapien
tgttccaagttctagagatccagag

SEQ ID NO: 3036147 - DNA, 25 bp, Homo sapien
acaaggtaatgggttctagaagaga

SEQ ID NO: 3036148 - DNA, 25 bp, Homo sapien
attttagtttgagggactgagtagt

SEQ ID NO: 3036149 - DNA, 25 bp, Homo sapien
aagacttctggtcttatggaggagg

SEQ ID NO: 3036150 - DNA, 25 bp, Homo sapien
tatttactgcaataggagatacagg

SEQ ID NO: 3036151 - DNA, 25 bp, Homo sapien
tgagggactgagtagtgatcattgt

SEQ ID NO: 3036152 - DNA, 25 bp, Homo sapien
tcttttgaccgactggagcacacgc

SEQ ID NO: 3036153 - DNA, 25 bp, Homo sapien
tccactttgacgacatgctgcgaaa

SEQ ID NO: 3036154 - DNA, 25 bp, Homo sapien
tgctgcgaaacggtgtcctggaaac

SEQ ID NO: 3036155 - DNA, 25 bp, Homo sapien
tggaaacgatcaaacacctggcacc

SEQ ID NO: 3036156 - DNA, 25 bp, Homo sapien
caccacatgttcgatgtgattcgga

SEQ ID NO: 3036157 - DNA, 25 bp, Homo sapien
gaggcaatccatgtgaaacaggaga

SEQ ID NO: 3036158 - DNA, 25 bp, Homo sapien
tcacactggatgagaggagccacac

SEQ ID NO: 3036159 - DNA, 25 bp, Homo sapien
tgagcggcggctcgaggcaatccat

SEQ ID NO: 3036160 - DNA, 25 bp, Homo sapien
tgctaaataatgagaaagagcccct

SEQ ID NO: 3036161 - DNA, 25 bp, Homo sapien
tactatcagaatatgggctgttcac

SEQ ID NO: 3036162 - DNA, 25 bp, Homo sapien
taacatacatggtctggaagaggtg

SEQ ID NO: 3036163 - DNA, 25 bp, Homo sapien
cacattcaaggctctcgtcagtcca

SEQ ID NO: 3036164 - DNA, 25 bp, Homo sapien
ggtaagggaacgagaccattgtgat

SEQ ID NO: 3036165 - DNA, 25 bp, Homo sapien
ctgttacacgtgaagcagactttga

SEQ ID NO: 3036166 - DNA, 25 bp, Homo sapien
aacgagaccattgtgatctaattca

SEQ ID NO: 3036167 - DNA, 25 bp, Homo sapien
cgtgaagcagactttgacgggtaag

SEQ ID NO: 3036168 - DNA, 25 bp, Homo sapien
tcagagttcctagcctgcaatatgg

SEQ ID NO: 3036169 - DNA, 25 bp, Homo sapien
tacgtaagtcagaaccagaagtcac

SEQ ID NO: 3036170 - DNA, 25 bp, Homo sapien
cagatcttaagcatgtgtcatggcc

SEQ ID NO: 3036171 - DNA, 25 bp, Homo sapien
taagcatgaattgctctctgaggcc

SEQ ID NO: 3036172 - DNA, 25 bp, Homo sapien
cagaactaggaacaggaacccaaga

SEQ ID NO: 3036173 - DNA, 25 bp, Homo sapien
gaactaggaacaggaacccaagaca

SEQ ID NO: 3036174 - DNA, 25 bp, Homo sapien
tgctcttgtgctggtcctttgggga

SEQ ID NO: 3036175 - DNA, 25 bp, Homo sapien
tggccgatctgtccaacaagtcagt

SEQ ID NO: 3036176 - DNA, 25 bp, Homo sapien
ggtacaagtcagttcattgggcaac

SEQ ID NO: 3036177 - DNA, 25 bp, Homo sapien
tggcggcagcaatcagcagctcaaa

SEQ ID NO: 3036178 - DNA, 25 bp, Homo sapien
gacatcattctgctcagaggtggga

SEQ ID NO: 3036179 - DNA, 25 bp, Homo sapien
gagaataaatttagtgagaccaata

SEQ ID NO: 3036180 - DNA, 25 bp, Homo sapien
ctttgctcaaaataagtgacacttc

SEQ ID NO: 3036181 - DNA, 25 bp, Homo sapien
gagatcactatagagccttctgacc

SEQ ID NO: 3036182 - DNA, 25 bp, Homo sapien
gattaagtgtactcagtaggactgg

SEQ ID NO: 3036183 - DNA, 25 bp, Homo sapien
caatcttaatcatctcatcctgttt

SEQ ID NO: 3036184 - DNA, 25 bp, Homo sapien
aaaccacaatcttaatcatctcatc

SEQ ID NO: 3036185 - DNA, 25 bp, Homo sapien
ataaaccacaatcttaatcatctca

SEQ ID NO: 3036186 - DNA, 25 bp, Homo sapien
accacaatcttaatcatctcatcct

SEQ ID NO: 3036187 - DNA, 25 bp, Homo sapien
atttcagcagcccatgtttggattt

SEQ ID NO: 3036188 - DNA, 25 bp, Homo sapien
catgtttggatttttaggccctact

SEQ ID NO: 3036189 - DNA, 25 bp, Homo sapien
ttcagcagcccatgtttggattttt

SEQ ID NO: 3036190 - DNA, 25 bp, Homo sapien
gcccatttcagcagcccatgtttgg

SEQ ID NO: 3036191 - DNA, 25 bp, Homo sapien
catgggaagagtggggtgattccag

SEQ ID NO: 3036192 - DNA, 25 bp, Homo sapien
atgggaagagtggggtgattccagg

SEQ ID NO: 3036193 - DNA, 25 bp, Homo sapien
tgggaagagtggggtgattccaggg

SEQ ID NO: 3036194 - DNA, 25 bp, Homo sapien
tgctctggatcaggctttctggaca

SEQ ID NO: 3036195 - DNA, 25 bp, Homo sapien
gccttcagggctaggccgtcttagc

SEQ ID NO: 3036196 - DNA, 25 bp, Homo sapien
catatcagtgctctggatcaggctt

SEQ ID NO: 3036197 - DNA, 25 bp, Homo sapien
ggccgtcttagctctagcatatcag

SEQ ID NO: 3036198 - DNA, 25 bp, Homo sapien
ctttcggcgaacagtgcaccggtga

SEQ ID NO: 3036199 - DNA, 25 bp, Homo sapien
gcgaacagtgcaccggtgacacatc

SEQ ID NO: 3036200 - DNA, 25 bp, Homo sapien
cggcgaacagtgcaccggtgacaca

SEQ ID NO: 3036201 - DNA, 25 bp, Homo sapien
ttcggcgaacagtgcaccggtgaca

SEQ ID NO: 3036202 - DNA, 25 bp, Homo sapien
aatggcctgctgggacagatctcca

SEQ ID NO: 3036203 - DNA, 25 bp, Homo sapien
actggaaaaacaatggcctgctggg

SEQ ID NO: 3036204 - DNA, 25 bp, Homo sapien
aggaaactggaaaaacaatggcctg

SEQ ID NO: 3036205 - DNA, 25 bp, Homo sapien
atggcctgctgggacagatctccaa

SEQ ID NO: 3036206 - DNA, 25 bp, Homo sapien
aaatgatcatcataggcatagctgg

SEQ ID NO: 3036207 - DNA, 25 bp, Homo sapien
cctttcaagctatttagaaggcagc

SEQ ID NO: 3036208 - DNA, 25 bp, Homo sapien
cataaagctttctcatgaccatgtt

SEQ ID NO: 3036209 - DNA, 25 bp, Homo sapien
gcctggccaagatttgctgctttct

SEQ ID NO: 3036210 - DNA, 25 bp, Homo sapien
gggtaagctcaggaaccaattctga

SEQ ID NO: 3036211 - DNA, 25 bp, Homo sapien
tctgcagcctcacggtactcatgta

SEQ ID NO: 3036212 - DNA, 25 bp, Homo sapien
aaactccttccgcagctgggtgtgg

SEQ ID NO: 3036213 - DNA, 25 bp, Homo sapien
tactcatgtacttattctgaggact

SEQ ID NO: 3036214 - DNA, 25 bp, Homo sapien
caagcaattctcctctggagtagct

SEQ ID NO: 3036215 - DNA, 25 bp, Homo sapien
aagcaattctcctctggagtagctg

SEQ ID NO: 3036216 - DNA, 25 bp, Homo sapien
tgatctacccgcctatgccttccaa

SEQ ID NO: 3036217 - DNA, 25 bp, Homo sapien
gctgagattacaggcgtaagccact

SEQ ID NO: 3036218 - DNA, 25 bp, Homo sapien
ttccataggcagagatgacagtgcc

SEQ ID NO: 3036219 - DNA, 25 bp, Homo sapien
ctgaactggcttgtcttggaaaact

SEQ ID NO: 3036220 - DNA, 25 bp, Homo sapien
gcttcaaaagagcatagcctgcatt

SEQ ID NO: 3036221 - DNA, 25 bp, Homo sapien
ttttagccaacaagccaaggacctc

SEQ ID NO: 3036222 - DNA, 25 bp, Homo sapien
gaaagctgggtactattctattgcc

SEQ ID NO: 3036223 - DNA, 25 bp, Homo sapien
ggacaaaattctggcctcaacggta

SEQ ID NO: 3036224 - DNA, 25 bp, Homo sapien
acctcatgattgatgctagagccca

SEQ ID NO: 3036225 - DNA, 25 bp, Homo sapien
ggaaatagccaggtgacacacttct

SEQ ID NO: 3036226 - DNA, 25 bp, Homo sapien
tttgcatgtctctcatctgtaatac

SEQ ID NO: 3036227 - DNA, 25 bp, Homo sapien
ctttgcatgtctctcatctgtaata

SEQ ID NO: 3036228 - DNA, 25 bp, Homo sapien
ggcctacttaactgcatacccaagg

SEQ ID NO: 3036229 - DNA, 25 bp, Homo sapien
tgttctggtgacttaaaacgctgga

SEQ ID NO: 3036230 - DNA, 25 bp, Homo sapien
tatataagggctaccataaacccaa

SEQ ID NO: 3036231 - DNA, 25 bp, Homo sapien
ggagcttgtgctgcattaatatata

SEQ ID NO: 3036232 - DNA, 25 bp, Homo sapien
agatgtacccatttctgttcaagaa

SEQ ID NO: 3036233 - DNA, 25 bp, Homo sapien
gagaaaagatgtacccatttctgtt

SEQ ID NO: 3036234 - DNA, 25 bp, Homo sapien
caaaagcccagagtattaatctatt

SEQ ID NO: 3036235 - DNA, 25 bp, Homo sapien
ccattatcaaaagcccagagtatta

SEQ ID NO: 3036236 - DNA, 25 bp, Homo sapien
ttaggtagcaaaaatcctcttggga

SEQ ID NO: 3036237 - DNA, 25 bp, Homo sapien
taaatattctctgcgctctctttat

SEQ ID NO: 3036238 - DNA, 25 bp, Homo sapien
ttatgagccatataaaactgtccag

SEQ ID NO: 3036239 - DNA, 25 bp, Homo sapien
tctgcgctctctttatttactgtta

SEQ ID NO: 3036240 - DNA, 25 bp, Homo sapien
ggagaaatgaaatcggcgcccaagg

SEQ ID NO: 3036241 - DNA, 25 bp, Homo sapien
aaatgcctttctagtgccaccgcac

SEQ ID NO: 3036242 - DNA, 25 bp, Homo sapien
caaagaattttgcagcgaagggctc

SEQ ID NO: 3036243 - DNA, 25 bp, Homo sapien
tcgccgatccggagcggagaaatga

SEQ ID NO: 3036244 - DNA, 25 bp, Homo sapien
accttccttgcagctatcgcagctg

SEQ ID NO: 3036245 - DNA, 25 bp, Homo sapien
agctatcgcagctgtcgtggttggt

SEQ ID NO: 3036246 - DNA, 25 bp, Homo sapien
cttctcaggcttccgactgcgcttt

SEQ ID NO: 3036247 - DNA, 25 bp, Homo sapien
gcagtggtcgcagcacaggagatct

SEQ ID NO: 3036248 - DNA, 25 bp, Homo sapien
catacaaacggcgtgtgtgcacact

SEQ ID NO: 3036249 - DNA, 25 bp, Homo sapien
tgcacactcggagctcccgggcggt

SEQ ID NO: 3036250 - DNA, 25 bp, Homo sapien
aacggcgtgtgtgcacactcggagc

SEQ ID NO: 3036251 - DNA, 25 bp, Homo sapien
acacacatacaaacggcgtgtgtgc

SEQ ID NO: 3036252 - DNA, 25 bp, Homo sapien
actgctgcaaacgtcctcggaggct

SEQ ID NO: 3036253 - DNA, 25 bp, Homo sapien
catctaggcgcttcgagtttaggac

SEQ ID NO: 3036254 - DNA, 25 bp, Homo sapien
caaagcccggtacccggacgtgctg

SEQ ID NO: 3036255 - DNA, 25 bp, Homo sapien
tgcagcacaacaacgagaacagctt

SEQ ID NO: 3036256 - DNA, 25 bp, Homo sapien
cgtacacgatcgtcttggtctccat

SEQ ID NO: 3036257 - DNA, 25 bp, Homo sapien
ccctgatgtgtccaagtcgtacacg

SEQ ID NO: 3036258 - DNA, 25 bp, Homo sapien
gtccaagtcgtacacgatcgtcttg

SEQ ID NO: 3036259 - DNA, 25 bp, Homo sapien
gatgtgtccaagtcgtacacgatcg

SEQ ID NO: 3036260 - DNA, 25 bp, Homo sapien
cagtccccgggacgacagcgtcctc

SEQ ID NO: 3036261 - DNA, 25 bp, Homo sapien
gctgcacagtgggtcccggctccgg

SEQ ID NO: 3036262 - DNA, 25 bp, Homo sapien
gggcctagtcccacaggctaaagcc

SEQ ID NO: 3036263 - DNA, 25 bp, Homo sapien
aaagccggcactggcgacagccggt

SEQ ID NO: 3036264 - DNA, 25 bp, Homo sapien
ggttgtggtacgtgaggtgactggg

SEQ ID NO: 3036265 - DNA, 25 bp, Homo sapien
ttacgtgaggttgtggtacgtgagg

SEQ ID NO: 3036266 - DNA, 25 bp, Homo sapien
tgcgtcccggctgccgcgcacttgg

SEQ ID NO: 3036267 - DNA, 25 bp, Homo sapien
tgccgcgcacttggcgcaaacttac

SEQ ID NO: 3036268 - DNA, 25 bp, Homo sapien
cccgcaaagccacccgcgcaggcgc

SEQ ID NO: 3036269 - DNA, 25 bp, Homo sapien
cgcgcagccgcggtgagggagtacc

SEQ ID NO: 3036270 - DNA, 25 bp, Homo sapien
aggcgccccgggatcggcgctcgcc

SEQ ID NO: 3036271 - DNA, 25 bp, Homo sapien
gcgcgcaaccgcagtgacagccggc

SEQ ID NO: 3036272 - DNA, 25 bp, Homo sapien
tcgtctggaggaccgaagccccacc

SEQ ID NO: 3036273 - DNA, 25 bp, Homo sapien
cgtctggaggaccgaagccccacct

SEQ ID NO: 3036274 - DNA, 25 bp, Homo sapien
ctcgcgcaggcgcttgagaaagctt

SEQ ID NO: 3036275 - DNA, 25 bp, Homo sapien
ggcgggacctgaggtctcgcgcagg

SEQ ID NO: 3036276 - DNA, 25 bp, Homo sapien
aagctagggactgttcatccattgg

SEQ ID NO: 3036277 - DNA, 25 bp, Homo sapien
agccgcaggaagctagggactgttc

SEQ ID NO: 3036278 - DNA, 25 bp, Homo sapien
aactcccagtttgcaacgccaaagg

SEQ ID NO: 3036279 - DNA, 25 bp, Homo sapien
ccaactcccagtttgcaacgccaaa

SEQ ID NO: 3036280 - DNA, 25 bp, Homo sapien
tgcgtaccccggactccaactccca

SEQ ID NO: 3036281 - DNA, 25 bp, Homo sapien
ctcccagtttgcaacgccaaagggt

SEQ ID NO: 3036282 - DNA, 25 bp, Homo sapien
tagcattgagaagggcatcagtggc

SEQ ID NO: 3036283 - DNA, 25 bp, Homo sapien
atttgggagtgtgccagcctgtagt

SEQ ID NO: 3036284 - DNA, 25 bp, Homo sapien
cattgagaagggcatcagtggcgtt

SEQ ID NO: 3036285 - DNA, 25 bp, Homo sapien
agttagcattgagaagggcatcagt

SEQ ID NO: 3036286 - DNA, 25 bp, Homo sapien
aaagattgttctctggctggagccc

SEQ ID NO: 3036287 - DNA, 25 bp, Homo sapien
aaataaaagattgttctctggctgg

SEQ ID NO: 3036288 - DNA, 25 bp, Homo sapien
gagcccagaccccatataatacatt

SEQ ID NO: 3036289 - DNA, 25 bp, Homo sapien
taaaagattgttctctggctggagc

SEQ ID NO: 3036290 - DNA, 25 bp, Homo sapien
agctcctgggcgtctccctggggct

SEQ ID NO: 3036291 - DNA, 25 bp, Homo sapien
tggggctctcctaccacctgttcca

SEQ ID NO: 3036292 - DNA, 25 bp, Homo sapien
ggctctcctaccacctgttccatgc

SEQ ID NO: 3036293 - DNA, 25 bp, Homo sapien
tccctggggctctcctaccacctgt

SEQ ID NO: 3036294 - DNA, 25 bp, Homo sapien
ataaacatcggaggaaagtctccct

SEQ ID NO: 3036295 - DNA, 25 bp, Homo sapien
taacacagtggtcaagaggagagcc

SEQ ID NO: 3036296 - DNA, 25 bp, Homo sapien
gtcagtggaaaatggcgtgtcctgc

SEQ ID NO: 3036297 - DNA, 25 bp, Homo sapien
ggactattagggtgaagatgtttgc

SEQ ID NO: 3036298 - DNA, 25 bp, Homo sapien
ctcctagaattactgcctccactgg

SEQ ID NO: 3036299 - DNA, 25 bp, Homo sapien
taggatctcctagaattactgcctc

SEQ ID NO: 3036300 - DNA, 25 bp, Homo sapien
cctgaaccccttaggatctcctaga

SEQ ID NO: 3036301 - DNA, 25 bp, Homo sapien
cccagggaagcccaacctgaggtgg

SEQ ID NO: 3036302 - DNA, 25 bp, Homo sapien
tgaggagtaccctggtgcagttccc

SEQ ID NO: 3036303 - DNA, 25 bp, Homo sapien
aaggtactcctgctctgctagtgtg

SEQ ID NO: 3036304 - DNA, 25 bp, Homo sapien
gagaactagagacctcccaagaggc

SEQ ID NO: 3036305 - DNA, 25 bp, Homo sapien
tcaccgttgagaggagttttggcca

SEQ ID NO: 3036306 - DNA, 25 bp, Homo sapien
caatgacaccaagaaaataggccat

SEQ ID NO: 3036307 - DNA, 25 bp, Homo sapien
tgttcttcccacaggtagatgcccc

SEQ ID NO: 3036308 - DNA, 25 bp, Homo sapien
gatgcttgtgctccagctatgttct

SEQ ID NO: 3036309 - DNA, 25 bp, Homo sapien
catgggcccaatgaagggccccaag

SEQ ID NO: 3036310 - DNA, 25 bp, Homo sapien
tgagttgacttccctagactgcccc

SEQ ID NO: 3036311 - DNA, 25 bp, Homo sapien
ctaggtggtatatacaggaggtgga

SEQ ID NO: 3036312 - DNA, 25 bp, Homo sapien
tggtatatacaggaggtggagggac

SEQ ID NO: 3036313 - DNA, 25 bp, Homo sapien
tgtggtgcaagtctgagttgacttc

SEQ ID NO: 3036314 - DNA, 25 bp, Homo sapien
tcaaacgctgactctatggtaatgc

SEQ ID NO: 3036315 - DNA, 25 bp, Homo sapien
aaacgctgactctatggtaatgcgg

SEQ ID NO: 3036316 - DNA, 25 bp, Homo sapien
gactctatggtaatgcggttgtagg

SEQ ID NO: 3036317 - DNA, 25 bp, Homo sapien
cgctgactctatggtaatgcggttg

SEQ ID NO: 3036318 - DNA, 25 bp, Homo sapien
tggagaagtagaagtatacacctcc

SEQ ID NO: 3036319 - DNA, 25 bp, Homo sapien
gaagtatacacctcctaccaacaac

SEQ ID NO: 3036320 - DNA, 25 bp, Homo sapien
gccaccagtggcaagaagatggcag

SEQ ID NO: 3036321 - DNA, 25 bp, Homo sapien
aacaccatcgccaccagtggcaaga

SEQ ID NO: 3036322 - DNA, 25 bp, Homo sapien
aagacacagagggtgtgactggagc

SEQ ID NO: 3036323 - DNA, 25 bp, Homo sapien
gactgttgtagaacccatccagaga

SEQ ID NO: 3036324 - DNA, 25 bp, Homo sapien
cgactgttgtagaacccatccagag

SEQ ID NO: 3036325 - DNA, 25 bp, Homo sapien
gcgactgttgtagaacccatccaga

SEQ ID NO: 3036326 - DNA, 25 bp, Homo sapien
cactgagaccatggcatggcttgag

SEQ ID NO: 3036327 - DNA, 25 bp, Homo sapien
gcttctcaggacttcgggcaccatt

SEQ ID NO: 3036328 - DNA, 25 bp, Homo sapien
tgcccaggcacacacttgatgctgg

SEQ ID NO: 3036329 - DNA, 25 bp, Homo sapien
tcactccaatgcgaggggtgcccag

SEQ ID NO: 3036330 - DNA, 25 bp, Homo sapien
cacagatatattgcacggtggcccc

SEQ ID NO: 3036331 - DNA, 25 bp, Homo sapien
ggctgccagcctggcgatcatggca

SEQ ID NO: 3036332 - DNA, 25 bp, Homo sapien
cacatctccaggatcgtggcaggaa

SEQ ID NO: 3036333 - DNA, 25 bp, Homo sapien
gggctggatatgaggcgtcggctgt

SEQ ID NO: 3036334 - DNA, 25 bp, Homo sapien
caggcagctccggacatgtgtcatt

SEQ ID NO: 3036335 - DNA, 25 bp, Homo sapien
cactggcacatgaggacactggatc

SEQ ID NO: 3036336 - DNA, 25 bp, Homo sapien
cactggtaagtgaccacggtgccgt

SEQ ID NO: 3036337 - DNA, 25 bp, Homo sapien
ctcaggctgcgatgggctcttccag

SEQ ID NO: 3036338 - DNA, 25 bp, Homo sapien
caaagaagtggatgacgaagccctg

SEQ ID NO: 3036339 - DNA, 25 bp, Homo sapien
tccgactggaactgaatggtgacat

SEQ ID NO: 3036340 - DNA, 25 bp, Homo sapien
gccatggaggtaaagagcttgaagt

SEQ ID NO: 3036341 - DNA, 25 bp, Homo sapien
ccgtcaggtcatccccatcatagaa

SEQ ID NO: 3036342 - DNA, 25 bp, Homo sapien
gatgggctggacaagggatatcccc

SEQ ID NO: 3036343 - DNA, 25 bp, Homo sapien
ggctcggcctgacccggtaggcact

SEQ ID NO: 3036344 - DNA, 25 bp, Homo sapien
gacctcaggagttggctcggcctga

SEQ ID NO: 3036345 - DNA, 25 bp, Homo sapien
ccccagacctcaggagttggctcgg

SEQ ID NO: 3036346 - DNA, 25 bp, Homo sapien
gttgggagagagtaccacgccagcc

SEQ ID NO: 3036347 - DNA, 25 bp, Homo sapien
gcatgatgcgcttgtcctcttccac

SEQ ID NO: 3036348 - DNA, 25 bp, Homo sapien
gagtctgtgatctccccgctgcaca

SEQ ID NO: 3036349 - DNA, 25 bp, Homo sapien
tacaatcctgcccacgaccgtaggg

SEQ ID NO: 3036350 - DNA, 25 bp, Homo sapien
cgcaggagtgcccacaaattgctgg

SEQ ID NO: 3036351 - DNA, 25 bp, Homo sapien
tgttgcttaccatctgcccgcagga

SEQ ID NO: 3036352 - DNA, 25 bp, Homo sapien
gctctgctgctattctcctggtatg

SEQ ID NO: 3036353 - DNA, 25 bp, Homo sapien
cttggaggaagcctgaaccacgcat

SEQ ID NO: 3036354 - DNA, 25 bp, Homo sapien
cacagtggtacccacagggtaggtg

SEQ ID NO: 3036355 - DNA, 25 bp, Homo sapien
gggtcaacacactcgatgatgatgg

SEQ ID NO: 3036356 - DNA, 25 bp, Homo sapien
gtgtagccagggtcgcagctgaact

SEQ ID NO: 3036357 - DNA, 25 bp, Homo sapien
gctgaactccacagtggtacccaca

SEQ ID NO: 3036358 - DNA, 25 bp, Homo sapien
ctgaagttaccgtatttgacaaagg

SEQ ID NO: 3036359 - DNA, 25 bp, Homo sapien
gctgaagttaccgtatttgacaaag

SEQ ID NO: 3036360 - DNA, 25 bp, Homo sapien
ctgctgaagttaccgtatttgacaa

SEQ ID NO: 3036361 - DNA, 25 bp, Homo sapien
tgctgaagttaccgtatttgacaaa

SEQ ID NO: 3036362 - DNA, 25 bp, Homo sapien
ctcatagcaatggccctgctggaag

SEQ ID NO: 3036363 - DNA, 25 bp, Homo sapien
tcatagcaatggccctgctggaagg

SEQ ID NO: 3036364 - DNA, 25 bp, Homo sapien
aggtcccagcccagctcagccttga

SEQ ID NO: 3036365 - DNA, 25 bp, Homo sapien
acaggtcccagcccagctcagcctt

SEQ ID NO: 3036366 - DNA, 25 bp, Homo sapien
ccacaggtcccagcccagctcagcc

SEQ ID NO: 3036367 - DNA, 25 bp, Homo sapien
ctgtaaaccacaggtcccagcccag

SEQ ID NO: 3036368 - DNA, 25 bp, Homo sapien
tgtgggagaaagaccctaggcccga

SEQ ID NO: 3036369 - DNA, 25 bp, Homo sapien
agaaagaccctaggcccgagcccat

SEQ ID NO: 3036370 - DNA, 25 bp, Homo sapien
tcccttggaccatagggcctgggtc

SEQ ID NO: 3036371 - DNA, 25 bp, Homo sapien
caaagctgtggtagggatcccggac

SEQ ID NO: 3036372 - DNA, 25 bp, Homo sapien
ccgctgctgtcagtactgagctcaa

SEQ ID NO: 3036373 - DNA, 25 bp, Homo sapien
tgtcagtactgagctcaacaaagaa

SEQ ID NO: 3036374 - DNA, 25 bp, Homo sapien
gctgctgtcagtactgagctcaaca

SEQ ID NO: 3036375 - DNA, 25 bp, Homo sapien
ctgccccgctgctgtcagtactgag

SEQ ID NO: 3036376 - DNA, 25 bp, Homo sapien
ctcataggaatcatacactggtggg

SEQ ID NO: 3036377 - DNA, 25 bp, Homo sapien
ccacgttgtccccattgcgaatgat

SEQ ID NO: 3036378 - DNA, 25 bp, Homo sapien
ttccacctcataggaatcatacact

SEQ ID NO: 3036379 - DNA, 25 bp, Homo sapien
gttgtccccattgcgaatgatgagc

SEQ ID NO: 3036380 - DNA, 25 bp, Homo sapien
tgttgctgtagttgcccgggaagcc

SEQ ID NO: 3036381 - DNA, 25 bp, Homo sapien
ttctcaaagtgcaggtgtagccgct

SEQ ID NO: 3036382 - DNA, 25 bp, Homo sapien
agcctggagagacgatgcggccggt

SEQ ID NO: 3036383 - DNA, 25 bp, Homo sapien
tgtcatcatcctctgccagggaaac

SEQ ID NO: 3036384 - DNA, 25 bp, Homo sapien
gatgcagacgggctcctttgaatcc

SEQ ID NO: 3036385 - DNA, 25 bp, Homo sapien
gacaggtgagatgcctggcgccctt

SEQ ID NO: 3036386 - DNA, 25 bp, Homo sapien
ggcgcccttcagctggtagccagtg

SEQ ID NO: 3036387 - DNA, 25 bp, Homo sapien
ccagtggcacaatggaagcgggcac

SEQ ID NO: 3036388 - DNA, 25 bp, Homo sapien
tggacgacggggaaagtggcagctc

SEQ ID NO: 3036389 - DNA, 25 bp, Homo sapien
ctggacgacggggaaagtggcagct

SEQ ID NO: 3036390 - DNA, 25 bp, Homo sapien
gacgacggggaaagtggcagctcag

SEQ ID NO: 3036391 - DNA, 25 bp, Homo sapien
ggacgacggggaaagtggcagctca

SEQ ID NO: 3036392 - DNA, 25 bp, Homo sapien
tctgtttctggagccaagtccagtg

SEQ ID NO: 3036393 - DNA, 25 bp, Homo sapien
ttctggagccaagtccagtgccagg

SEQ ID NO: 3036394 - DNA, 25 bp, Homo sapien
ggagccaagtccagtgccaggaatg

SEQ ID NO: 3036395 - DNA, 25 bp, Homo sapien
gtttctggagccaagtccagtgcca

SEQ ID NO: 3036396 - DNA, 25 bp, Homo sapien
tgcggatgacttggccccgcagcag

SEQ ID NO: 3036397 - DNA, 25 bp, Homo sapien
cttcccggaggctgatattctggac

SEQ ID NO: 3036398 - DNA, 25 bp, Homo sapien
tctggaacctcagggccgcttggtg

SEQ ID NO: 3036399 - DNA, 25 bp, Homo sapien
gtgccagggccagccggtggcggga

SEQ ID NO: 3036400 - DNA, 25 bp, Homo sapien
cgccttaagtggcactgaatgcagg

SEQ ID NO: 3036401 - DNA, 25 bp, Homo sapien
gatgccaggcagcatataattccgc

SEQ ID NO: 3036402 - DNA, 25 bp, Homo sapien
ctgtaattatcgagagatgccaggc

SEQ ID NO: 3036403 - DNA, 25 bp, Homo sapien
cacgtggaatctgtaattatcgaga

SEQ ID NO: 3036404 - DNA, 25 bp, Homo sapien
gatgtagaagaagcagtccaggcca

SEQ ID NO: 3036405 - DNA, 25 bp, Homo sapien
tagccagggtagacagagatgtaga

SEQ ID NO: 3036406 - DNA, 25 bp, Homo sapien
ccaggccaacatcagtgggggagct

SEQ ID NO: 3036407 - DNA, 25 bp, Homo sapien
tgatttccacgccatagccagggta

SEQ ID NO: 3036408 - DNA, 25 bp, Homo sapien
gatggtcccctggatcccgatccct

SEQ ID NO: 3036409 - DNA, 25 bp, Homo sapien
cctgcgccctgggacacaacctctg

SEQ ID NO: 3036410 - DNA, 25 bp, Homo sapien
ctggatcccgatccctgcgccctgg

SEQ ID NO: 3036411 - DNA, 25 bp, Homo sapien
cctgggacacaacctctgcaaccca

SEQ ID NO: 3036412 - DNA, 25 bp, Homo sapien
taggggagctgtgattcgaagcata

SEQ ID NO: 3036413 - DNA, 25 bp, Homo sapien
gggactctgactccggactccaggg

SEQ ID NO: 3036414 - DNA, 25 bp, Homo sapien
ctggtaaagacagggcggctgtcct

SEQ ID NO: 3036415 - DNA, 25 bp, Homo sapien
ctgagtgggtaccgcagccatggct

SEQ ID NO: 3036416 - DNA, 25 bp, Homo sapien
aattcctcaagcagcgggtggtggt

SEQ ID NO: 3036417 - DNA, 25 bp, Homo sapien
caaagtggacgcctcgttctggctg

SEQ ID NO: 3036418 - DNA, 25 bp, Homo sapien
ggctgttgtgacaaagtggacgcct

SEQ ID NO: 3036419 - DNA, 25 bp, Homo sapien
tcttgtaggaattcctcaagcagcg

SEQ ID NO: 3036420 - DNA, 25 bp, Homo sapien
acaggatgcactccgcagttgctca

SEQ ID NO: 3036421 - DNA, 25 bp, Homo sapien
gatgcactccgcagttgctcagtcc

SEQ ID NO: 3036422 - DNA, 25 bp, Homo sapien
agaacacaggatgcactccgcagtt

SEQ ID NO: 3036423 - DNA, 25 bp, Homo sapien
acacaggatgcactccgcagttgct

SEQ ID NO: 3036424 - DNA, 25 bp, Homo sapien
tctccgagtgggctgggtccgggaa

SEQ ID NO: 3036425 - DNA, 25 bp, Homo sapien
tctgggacgagttcaggcctgatcc

SEQ ID NO: 3036426 - DNA, 25 bp, Homo sapien
gaaccaaagttctgggacgagttca

SEQ ID NO: 3036427 - DNA, 25 bp, Homo sapien
aagaggtgccaggcatttcccaagc

SEQ ID NO: 3036428 - DNA, 25 bp, Homo sapien
tcatggcagcaccaactgtcagctt

SEQ ID NO: 3036429 - DNA, 25 bp, Homo sapien
tgctcccctcctttcgggtctggga

SEQ ID NO: 3036430 - DNA, 25 bp, Homo sapien
tgagctgtagtaggggcctgaagcc

SEQ ID NO: 3036431 - DNA, 25 bp, Homo sapien
gtggaaggcaatgagctctaatggt

SEQ ID NO: 3036432 - DNA, 25 bp, Homo sapien
acccagggtgaaggctcaagggtgt

SEQ ID NO: 3036433 - DNA, 25 bp, Homo sapien
tcaagggtgtggaaggcaatgagct

SEQ ID NO: 3036434 - DNA, 25 bp, Homo sapien
ggacagacccaaaccagctggcgct

SEQ ID NO: 3036435 - DNA, 25 bp, Homo sapien
cttggacagacccaaaccagctggc

SEQ ID NO: 3036436 - DNA, 25 bp, Homo sapien
ttcttggacagacccaaaccagctg

SEQ ID NO: 3036437 - DNA, 25 bp, Homo sapien
cttcttggacagacccaaaccagct

SEQ ID NO: 3036438 - DNA, 25 bp, Homo sapien
tggactcctgggttgtatgattcag

SEQ ID NO: 3036439 - DNA, 25 bp, Homo sapien
tccagagatgcctgacaaatcagcc

SEQ ID NO: 3036440 - DNA, 25 bp, Homo sapien
ggtgatggacagttctggctgttgg

SEQ ID NO: 3036441 - DNA, 25 bp, Homo sapien
tgcctcagcggtccagctctggact

SEQ ID NO: 3036442 - DNA, 25 bp, Homo sapien
gatttcctttgatcttcatgctgtt

SEQ ID NO: 3036443 - DNA, 25 bp, Homo sapien
cccgatttcctttgatcttcatgct

SEQ ID NO: 3036444 - DNA, 25 bp, Homo sapien
cgatttcctttgatcttcatgctgt

SEQ ID NO: 3036445 - DNA, 25 bp, Homo sapien
ccgatttcctttgatcttcatgctg

SEQ ID NO: 3036446 - DNA, 25 bp, Homo sapien
ctgccagagataggaagggttgtga

SEQ ID NO: 3036447 - DNA, 25 bp, Homo sapien
ggaagggttgtgatgaagggcaccc

SEQ ID NO: 3036448 - DNA, 25 bp, Homo sapien
cagagataggaagggttgtgatgaa

SEQ ID NO: 3036449 - DNA, 25 bp, Homo sapien
aagggttgtgatgaagggcacccat

SEQ ID NO: 3036450 - DNA, 25 bp, Homo sapien
cctggagacccggattgttgttgga

SEQ ID NO: 3036451 - DNA, 25 bp, Homo sapien
gcaggtttgtttgctccggagcccg

SEQ ID NO: 3036452 - DNA, 25 bp, Homo sapien
aatcggcaggtttgtggattgttgt

SEQ ID NO: 3036453 - DNA, 25 bp, Homo sapien
cggagcccgcagagaaatcccaaca

SEQ ID NO: 3036454 - DNA, 25 bp, Homo sapien
agaaaaaggcttctgcgtctccggg

SEQ ID NO: 3036455 - DNA, 25 bp, Homo sapien
cccagaacgtgagcacacggtttca

SEQ ID NO: 3036456 - DNA, 25 bp, Homo sapien
tgcaagtggagctagaggctcagaa

SEQ ID NO: 3036457 - DNA, 25 bp, Homo sapien
acggtttcaagttctgggcgctgcc

SEQ ID NO: 3036458 - DNA, 25 bp, Homo sapien
ggccgggcgcgaatggcgggagccg

SEQ ID NO: 3036459 - DNA, 25 bp, Homo sapien
gccgggcgcgaatggcgggagccgc

SEQ ID NO: 3036460 - DNA, 25 bp, Homo sapien
tgccgccggatgccggggtccctta

SEQ ID NO: 3036461 - DNA, 25 bp, Homo sapien
gcaggagcagcagggctaccgggcg

SEQ ID NO: 3036462 - DNA, 25 bp, Homo sapien
caggagcagcagggctaccgggcgc

SEQ ID NO: 3036463 - DNA, 25 bp, Homo sapien
tgctggttgcggccgcgccctgggc

SEQ ID NO: 3036464 - DNA, 25 bp, Homo sapien
gtgctggttgcggccgcgccctggg

SEQ ID NO: 3036465 - DNA, 25 bp, Homo sapien
gctggttgcggccgcgccctgggct

SEQ ID NO: 3036466 - DNA, 25 bp, Homo sapien
ggtgctggttgcggccgcgccctgg

SEQ ID NO: 3036467 - DNA, 25 bp, Homo sapien
gccgggtagagggagcggggccgca

SEQ ID NO: 3036468 - DNA, 25 bp, Homo sapien
cttgggcgcgggggcagagccgggt

SEQ ID NO: 3036469 - DNA, 25 bp, Homo sapien
ttggtggggcttgggcgcgggggca

SEQ ID NO: 3036470 - DNA, 25 bp, Homo sapien
gcagagccgggtccggccgggtaga

SEQ ID NO: 3036471 - DNA, 25 bp, Homo sapien
gaggagcggcttaccgtaaagtctc

SEQ ID NO: 3036472 - DNA, 25 bp, Homo sapien
ggcttaccgtaaagtctcatgcaaa

SEQ ID NO: 3036473 - DNA, 25 bp, Homo sapien
taccgtaaagtctcatgcaaaggcg

SEQ ID NO: 3036474 - DNA, 25 bp, Homo sapien
taaagtctcatgcaaaggcgcagag

SEQ ID NO: 3036475 - DNA, 25 bp, Homo sapien
gtgaggcccgcgtgcccttgtggca

SEQ ID NO: 3036476 - DNA, 25 bp, Homo sapien
ctgagggcgtcaagggtgacctggg

SEQ ID NO: 3036477 - DNA, 25 bp, Homo sapien
gggaagacatccgagagtgaggcag

SEQ ID NO: 3036478 - DNA, 25 bp, Homo sapien
acctgggaagacatccgagagtgag

SEQ ID NO: 3036479 - DNA, 25 bp, Homo sapien
gtagtatcctgggtccccacgtagc

SEQ ID NO: 3036480 - DNA, 25 bp, Homo sapien
gccagtggcactcgcatcctgggga

SEQ ID NO: 3036481 - DNA, 25 bp, Homo sapien
tagtatcctgggtccccacgtagcc

SEQ ID NO: 3036482 - DNA, 25 bp, Homo sapien
cactcgcatcctggggagacattct

SEQ ID NO: 3036483 - DNA, 25 bp, Homo sapien
tgactgctgtaaagagtcccaggca

SEQ ID NO: 3036484 - DNA, 25 bp, Homo sapien
gagtgttttggtcctcttgaccaga

SEQ ID NO: 3036485 - DNA, 25 bp, Homo sapien
tctccagaccctcttcttgtgggct

SEQ ID NO: 3036486 - DNA, 25 bp, Homo sapien
taggaagacgctgggatttctggac

SEQ ID NO: 3036487 - DNA, 25 bp, Homo sapien
ttcactgctgactccgaagccaggg

SEQ ID NO: 3036488 - DNA, 25 bp, Homo sapien
cagacaaagccagacatacatagag

SEQ ID NO: 3036489 - DNA, 25 bp, Homo sapien
tgacacttgctttctgcacgagagg

SEQ ID NO: 3036490 - DNA, 25 bp, Homo sapien
gagaagccagctttacttccccagt

SEQ ID NO: 3036491 - DNA, 25 bp, Homo sapien
acaatgttggctagattattttcac

SEQ ID NO: 3036492 - DNA, 25 bp, Homo sapien
gggataggacttaagacgtacaatg

SEQ ID NO: 3036493 - DNA, 25 bp, Homo sapien
agccgaggcctttgatcctccacag

SEQ ID NO: 3036494 - DNA, 25 bp, Homo sapien
aatgtttaatgccaccggctgggca

SEQ ID NO: 3036495 - DNA, 25 bp, Homo sapien
gcagcgggggttggcaatttggaag

SEQ ID NO: 3036496 - DNA, 25 bp, Homo sapien
gcaggcagcgggggttggcaatttg

SEQ ID NO: 3036497 - DNA, 25 bp, Homo sapien
aaccacatggtgcttgcaggcagcg

SEQ ID NO: 3036498 - DNA, 25 bp, Homo sapien
caggcgcaggaaccacatggtgctt

SEQ ID NO: 3036499 - DNA, 25 bp, Homo sapien
ggtaccaggttgatggccatgtgat

SEQ ID NO: 3036500 - DNA, 25 bp, Homo sapien
tggtaccaggttgatggccatgtga

SEQ ID NO: 3036501 - DNA, 25 bp, Homo sapien
taggatggagcaatcctttattttt

SEQ ID NO: 3036502 - DNA, 25 bp, Homo sapien
aggatggagcaatcctttattttta

SEQ ID NO: 3036503 - DNA, 25 bp, Homo sapien
cgaagcaaacactctacgaaatcat

SEQ ID NO: 3036504 - DNA, 25 bp, Homo sapien
tgccgaagcaaacactctacgaaat

SEQ ID NO: 3036505 - DNA, 25 bp, Homo sapien
gccgaagcaaacactctacgaaatc

SEQ ID NO: 3036506 - DNA, 25 bp, Homo sapien
aagcaaacactctacgaaatcatca

SEQ ID NO: 3036507 - DNA, 25 bp, Homo sapien
gcatggtgatccgatgctcatgtct

SEQ ID NO: 3036508 - DNA, 25 bp, Homo sapien
gtgatccgatgctcatgtctttgtg

SEQ ID NO: 3036509 - DNA, 25 bp, Homo sapien
caagaaaggcatggtgatccgatgc

SEQ ID NO: 3036510 - DNA, 25 bp, Homo sapien
gaaaggcatggtgatccgatgctca

SEQ ID NO: 3036511 - DNA, 25 bp, Homo sapien
tgtcagcctttgataaaccttgctg

SEQ ID NO: 3036512 - DNA, 25 bp, Homo sapien
accttgctgggccagcccagaacag

SEQ ID NO: 3036513 - DNA, 25 bp, Homo sapien
ccttgctgggccagcccagaacagg

SEQ ID NO: 3036514 - DNA, 25 bp, Homo sapien
gtgtctgcgaagtgtctggcttgtc

SEQ ID NO: 3036515 - DNA, 25 bp, Homo sapien
ccctggagcagtctttgttaaccaa

SEQ ID NO: 3036516 - DNA, 25 bp, Homo sapien
tcagacaagatcacagccgtaggca

SEQ ID NO: 3036517 - DNA, 25 bp, Homo sapien
gatgaaatgcctagagctcctccaa

SEQ ID NO: 3036518 - DNA, 25 bp, Homo sapien
agctgtgatccacggaaaatgagaa

SEQ ID NO: 3036519 - DNA, 25 bp, Homo sapien
agcgcacggtttccctcaggccaaa

SEQ ID NO: 3036520 - DNA, 25 bp, Homo sapien
tgctcataatggtcaaaaatctctc

SEQ ID NO: 3036521 - DNA, 25 bp, Homo sapien
tctccagcagcgcacggtttccctc

SEQ ID NO: 3036522 - DNA, 25 bp, Homo sapien
catctgcttaggtgtggtttaagcc

SEQ ID NO: 3036523 - DNA, 25 bp, Homo sapien
tgcctgtagccctagaaacttggag

SEQ ID NO: 3036524 - DNA, 25 bp, Homo sapien
aggagtttgagataggcctctgcaa

SEQ ID NO: 3036525 - DNA, 25 bp, Homo sapien
aaaggactcaaggaaatacacctga

SEQ ID NO: 3036526 - DNA, 25 bp, Homo sapien
ttgactaaatctgccccgaggaggg

SEQ ID NO: 3036527 - DNA, 25 bp, Homo sapien
tgtctcagatgaagggagtgtccct

SEQ ID NO: 3036528 - DNA, 25 bp, Homo sapien
ggctctggagaccaaagcagttgtt

SEQ ID NO: 3036529 - DNA, 25 bp, Homo sapien
tacaatcacagagtagcaaggacgt

SEQ ID NO: 3036530 - DNA, 25 bp, Homo sapien
gactgacttcagtcgcaaagcacac

SEQ ID NO: 3036531 - DNA, 25 bp, Homo sapien
tctagtcagatcatagatgtggcac

SEQ ID NO: 3036532 - DNA, 25 bp, Homo sapien
gaatctcccttatgtttatgaccca

SEQ ID NO: 3036533 - DNA, 25 bp, Homo sapien
tctgcacatataagtattccactgg

SEQ ID NO: 3036534 - DNA, 25 bp, Homo sapien
catcaactgtcagtccctcactagg

SEQ ID NO: 3036535 - DNA, 25 bp, Homo sapien
gagggcgtgggagattcttttggct

SEQ ID NO: 3036536 - DNA, 25 bp, Homo sapien
ggcatcaactgtcagtccctcacta

SEQ ID NO: 3036537 - DNA, 25 bp, Homo sapien
tcttgccagcaatactaccttgttt

SEQ ID NO: 3036538 - DNA, 25 bp, Homo sapien
tacaggtaaggtcaacagcagagcc

SEQ ID NO: 3036539 - DNA, 25 bp, Homo sapien
tttggtggccctaaaggctcctgga

SEQ ID NO: 3036540 - DNA, 25 bp, Homo sapien
tattcaggagtcagagcaatcccgg

SEQ ID NO: 3036541 - DNA, 25 bp, Homo sapien
tttcaagccctggtcaaaatagcag

SEQ ID NO: 3036542 - DNA, 25 bp, Homo sapien
cgtggtggtacacgtctgttaagtc

SEQ ID NO: 3036543 - DNA, 25 bp, Homo sapien
gttcgagacagatccacttcacact

SEQ ID NO: 3036544 - DNA, 25 bp, Homo sapien
tcttctctgttctatcgtggggcaa

SEQ ID NO: 3036545 - DNA, 25 bp, Homo sapien
gctgacattatcagagcctcggcac

SEQ ID NO: 3036546 - DNA, 25 bp, Homo sapien
acattgccctgtgggcccgagctag

SEQ ID NO: 3036547 - DNA, 25 bp, Homo sapien
ctcttagctgtcaatgaaggaacaa

SEQ ID NO: 3036548 - DNA, 25 bp, Homo sapien
gcagagacagcactcccaacctatt

SEQ ID NO: 3036549 - DNA, 25 bp, Homo sapien
gctagttctgccaagttttgatcaa

SEQ ID NO: 3036550 - DNA, 25 bp, Homo sapien
tcccaagtctggtggagttctcagg

SEQ ID NO: 3036551 - DNA, 25 bp, Homo sapien
tcatgtctaatgagcaccggccaaa

SEQ ID NO: 3036552 - DNA, 25 bp, Homo sapien
cagtgagtacaaaccaattgcagga

SEQ ID NO: 3036553 - DNA, 25 bp, Homo sapien
tgggacctccagaccacatggtgtt

SEQ ID NO: 3036554 - DNA, 25 bp, Homo sapien
gagaaaggactgctctctgaagggt

SEQ ID NO: 3036555 - DNA, 25 bp, Homo sapien
acataacacgctgagacaaagaggg

SEQ ID NO: 3036556 - DNA, 25 bp, Homo sapien
gaggcagtgcttggatcagccctga

SEQ ID NO: 3036557 - DNA, 25 bp, Homo sapien
cacacacttgtctgcgtaggcttgc

SEQ ID NO: 3036558 - DNA, 25 bp, Homo sapien
ggaaagtgcccctgacagaagaagg

SEQ ID NO: 3036559 - DNA, 25 bp, Homo sapien
tcttccacgtggagacatcagacac

SEQ ID NO: 3036560 - DNA, 25 bp, Homo sapien
cagaagaaggtcagggtgtttccca

SEQ ID NO: 3036561 - DNA, 25 bp, Homo sapien
ccatggacccagcaacctagagtgt

SEQ ID NO: 3036562 - DNA, 25 bp, Homo sapien
tggcctctgtgtcgctgtcactcag

SEQ ID NO: 3036563 - DNA, 25 bp, Homo sapien
gtgctcatcatctgaccgatcaggg

SEQ ID NO: 3036564 - DNA, 25 bp, Homo sapien
tatgcgttagtctccgtcagcttgg

SEQ ID NO: 3036565 - DNA, 25 bp, Homo sapien
gataactgtgggagtatcgcggtct

SEQ ID NO: 3036566 - DNA, 25 bp, Homo sapien
gagtctcggactcaagcgtgcataa

SEQ ID NO: 3036567 - DNA, 25 bp, Homo sapien
tctgaagcaggcagtccgtgaacca

SEQ ID NO: 3036568 - DNA, 25 bp, Homo sapien
gaggaggcgctttccctgtcaaata

SEQ ID NO: 3036569 - DNA, 25 bp, Homo sapien
gaatcgctggcttttgggtacaacc

SEQ ID NO: 3036570 - DNA, 25 bp, Homo sapien
caaatgaggtgctgctggcgagctc

SEQ ID NO: 3036571 - DNA, 25 bp, Homo sapien
gagtcttactttgataggccaaagg

SEQ ID NO: 3036572 - DNA, 25 bp, Homo sapien
ggaatcaggatagcacaaaacacat

SEQ ID NO: 3036573 - DNA, 25 bp, Homo sapien
ccgttaggctaaggagtgcctggct

SEQ ID NO: 3036574 - DNA, 25 bp, Homo sapien
atactgtttcatcaagacgctgggc

SEQ ID NO: 3036575 - DNA, 25 bp, Homo sapien
taaatgacagccgtgtttccatact

SEQ ID NO: 3036576 - DNA, 25 bp, Homo sapien
gacagccgtgtttccatactgtttc

SEQ ID NO: 3036577 - DNA, 25 bp, Homo sapien
ctgccggggaggtggtaaactccat

SEQ ID NO: 3036578 - DNA, 25 bp, Homo sapien
tatatggcgtcaggactactccagc

SEQ ID NO: 3036579 - DNA, 25 bp, Homo sapien
tgtgaataaccatgctcggctgact

SEQ ID NO: 3036580 - DNA, 25 bp, Homo sapien
tcaaagtcagcctaggtgtccagcc

SEQ ID NO: 3036581 - DNA, 25 bp, Homo sapien
gagattgcccttgcccgtagcttgg

SEQ ID NO: 3036582 - DNA, 25 bp, Homo sapien
gctctcgggccggtacaggtaccgc

SEQ ID NO: 3036583 - DNA, 25 bp, Homo sapien
gtccacctctttcttgcgcttcttt

SEQ ID NO: 3036584 - DNA, 25 bp, Homo sapien
tcgacggccggtgcgtctgcccagt

SEQ ID NO: 3036585 - DNA, 25 bp, Homo sapien
ggtaccgcatcatcaggctgtccac

SEQ ID NO: 3036586 - DNA, 25 bp, Homo sapien
ggacttcttgctcttccgagagcgc

SEQ ID NO: 3036587 - DNA, 25 bp, Homo sapien
gaggactcagactccgtctccgttc

SEQ ID NO: 3036588 - DNA, 25 bp, Homo sapien
cgagagcgccccttcttccgcctct

SEQ ID NO: 3036589 - DNA, 25 bp, Homo sapien
aggactcagactccgtctccgttct

SEQ ID NO: 3036590 - DNA, 25 bp, Homo sapien
agctcgctccggggggtccagttgg

SEQ ID NO: 3036591 - DNA, 25 bp, Homo sapien
agcggcggatgctggcagctcgctc

SEQ ID NO: 3036592 - DNA, 25 bp, Homo sapien
gatgctggcagctcgctccgggggg

SEQ ID NO: 3036593 - DNA, 25 bp, Homo sapien
ctggcagctcgctccggggggtcca

SEQ ID NO: 3036594 - DNA, 25 bp, Homo sapien
ggcttgtagctcaagacctcgttga

SEQ ID NO: 3036595 - DNA, 25 bp, Homo sapien
caggctgctccgctggaatggaaca

SEQ ID NO: 3036596 - DNA, 25 bp, Homo sapien
tgtcatcctcctcggagtcgggctc

SEQ ID NO: 3036597 - DNA, 25 bp, Homo sapien
tctgggtccaggtaggagtgacggc

SEQ ID NO: 3036598 - DNA, 25 bp, Homo sapien
aggctcatccactgccgaggcagag

SEQ ID NO: 3036599 - DNA, 25 bp, Homo sapien
tgggaggctcatccactgccgaggc

SEQ ID NO: 3036600 - DNA, 25 bp, Homo sapien
ggaggctcatccactgccgaggcag

SEQ ID NO: 3036601 - DNA, 25 bp, Homo sapien
gctgggaggctcatccactgccgag

SEQ ID NO: 3036602 - DNA, 25 bp, Homo sapien
gcccgacagcgagaaactcagggaa

SEQ ID NO: 3036603 - DNA, 25 bp, Homo sapien
cagggacaggcgagaatcagggctc

SEQ ID NO: 3036604 - DNA, 25 bp, Homo sapien
tggctgtactgcgagcaggcctcgc

SEQ ID NO: 3036605 - DNA, 25 bp, Homo sapien
tcgctcagggccatactggctccat

SEQ ID NO: 3036606 - DNA, 25 bp, Homo sapien
ggagccgcactcctccggctcctcg

SEQ ID NO: 3036607 - DNA, 25 bp, Homo sapien
ggacggagccgcactcctccggctc

SEQ ID NO: 3036608 - DNA, 25 bp, Homo sapien
cgagcggacggagccgcactcctcc

SEQ ID NO: 3036609 - DNA, 25 bp, Homo sapien
gcactcctccggctcctcggacttc

SEQ ID NO: 3036610 - DNA, 25 bp, Homo sapien
ccgcccgctcgctcagggaggtgaa

SEQ ID NO: 3036611 - DNA, 25 bp, Homo sapien
tgagccgcttccgatagctcaggga

SEQ ID NO: 3036612 - DNA, 25 bp, Homo sapien
gaggtgaagagcgaatccgcgtccc

SEQ ID NO: 3036613 - DNA, 25 bp, Homo sapien
ccgatggagtcctttagggtgagcc

SEQ ID NO: 3036614 - DNA, 25 bp, Homo sapien
caggacttgaccccgtcaacacggt

SEQ ID NO: 3036615 - DNA, 25 bp, Homo sapien
ccatcatcagaagctgccttggaag

SEQ ID NO: 3036616 - DNA, 25 bp, Homo sapien
agctccgagtccacatcagagtctc

SEQ ID NO: 3036617 - DNA, 25 bp, Homo sapien
tgttttttgacaaccaggacttgac

SEQ ID NO: 3036618 - DNA, 25 bp, Homo sapien
aaggtagacaaggcataggcacctg

SEQ ID NO: 3036619 - DNA, 25 bp, Homo sapien
aaaggtagacaaggcataggcacct

SEQ ID NO: 3036620 - DNA, 25 bp, Homo sapien
ctgcccacgaggggagcagatgggg

SEQ ID NO: 3036621 - DNA, 25 bp, Homo sapien
gggtgcagggggtgtcttgggcagg

SEQ ID NO: 3036622 - DNA, 25 bp, Homo sapien
cccacgaggggagcagatgggggtg

SEQ ID NO: 3036623 - DNA, 25 bp, Homo sapien
cacgaggggagcagatgggggtgca

SEQ ID NO: 3036624 - DNA, 25 bp, Homo sapien
tatacacctgtgcaaaaaacctccc

SEQ ID NO: 3036625 - DNA, 25 bp, Homo sapien
taaatctcccttaataccgtgctgt

SEQ ID NO: 3036626 - DNA, 25 bp, Homo sapien
gaaaggaggtgctgtatgcatcgca

SEQ ID NO: 3036627 - DNA, 25 bp, Homo sapien
gagcctgtaatttatcaccaccgtt

SEQ ID NO: 3036628 - DNA, 25 bp, Homo sapien
tcttttctgatactttgtcaccatg

SEQ ID NO: 3036629 - DNA, 25 bp, Homo sapien
ctgatactttgtcaccatgtcctgc

SEQ ID NO: 3036630 - DNA, 25 bp, Homo sapien
gatactttgtcaccatgtcctgcaa

SEQ ID NO: 3036631 - DNA, 25 bp, Homo sapien
ttttctgatactttgtcaccatgtc

SEQ ID NO: 3036632 - DNA, 25 bp, Homo sapien
tgccaactttaggtcagcctgcagg

SEQ ID NO: 3036633 - DNA, 25 bp, Homo sapien
tgaatgccaactttaggtcagcctg

SEQ ID NO: 3036634 - DNA, 25 bp, Homo sapien
aatgccaactttaggtcagcctgca

SEQ ID NO: 3036635 - DNA, 25 bp, Homo sapien
caactttaggtcagcctgcaggctc

SEQ ID NO: 3036636 - DNA, 25 bp, Homo sapien
cagcccagtttgcaggagggctagc

SEQ ID NO: 3036637 - DNA, 25 bp, Homo sapien
gcccagtttgcaggagggctagctt

SEQ ID NO: 3036638 - DNA, 25 bp, Homo sapien
ggcagcccagtttgcaggagggcta

SEQ ID NO: 3036639 - DNA, 25 bp, Homo sapien
cagtttgcaggagggctagcttctc

SEQ ID NO: 3036640 - DNA, 25 bp, Homo sapien
catgttttccttgagacggctagcc

SEQ ID NO: 3036641 - DNA, 25 bp, Homo sapien
agttcgtgcttcttgcggctcgcct

SEQ ID NO: 3036642 - DNA, 25 bp, Homo sapien
gctgcctctgtagccgcttgttctg

SEQ ID NO: 3036643 - DNA, 25 bp, Homo sapien
cggttctcggctgcaatgcgctgat

SEQ ID NO: 3036644 - DNA, 25 bp, Homo sapien
tgcctgctcaccagggacttgtcca

SEQ ID NO: 3036645 - DNA, 25 bp, Homo sapien
ttcacttgcgtcctttcaaactcca

SEQ ID NO: 3036646 - DNA, 25 bp, Homo sapien
tcctgcctgctcaccagggacttgt

SEQ ID NO: 3036647 - DNA, 25 bp, Homo sapien
gcctgctcaccagggacttgtccac

SEQ ID NO: 3036648 - DNA, 25 bp, Homo sapien
ctgagcttggagatcatttatctga

SEQ ID NO: 3036649 - DNA, 25 bp, Homo sapien
agcttggagatcatttatctgagcc

SEQ ID NO: 3036650 - DNA, 25 bp, Homo sapien
ggttgtgcgggggacccatgaggag

SEQ ID NO: 3036651 - DNA, 25 bp, Homo sapien
ctcccaaaacaagcggttgtgcggg

SEQ ID NO: 3036652 - DNA, 25 bp, Homo sapien
acggtgcagagtgtgacgggcactc

SEQ ID NO: 3036653 - DNA, 25 bp, Homo sapien
aggatggtgacggtgcagagtgtga

SEQ ID NO: 3036654 - DNA, 25 bp, Homo sapien
catcaattcgttcatgtcttcctga

SEQ ID NO: 3036655 - DNA, 25 bp, Homo sapien
tccagccggttctggatctcattct

SEQ ID NO: 3036656 - DNA, 25 bp, Homo sapien
ttctcacgctgaaggcggctcagct

SEQ ID NO: 3036657 - DNA, 25 bp, Homo sapien
tgcttcttcatcaattcgttcatgt

SEQ ID NO: 3036658 - DNA, 25 bp, Homo sapien
ggcttagactctcattttccctggg

SEQ ID NO: 3036659 - DNA, 25 bp, Homo sapien
ggaaggacccctcaagtctgcgaag

SEQ ID NO: 3036660 - DNA, 25 bp, Homo sapien
tgtgtgcagtacaggcagaccctgg

SEQ ID NO: 3036661 - DNA, 25 bp, Homo sapien
ccaggactagtgatgctcaaggagc

SEQ ID NO: 3036662 - DNA, 25 bp, Homo sapien
gcacaggtgaactctgactcctcca

SEQ ID NO: 3036663 - DNA, 25 bp, Homo sapien
ggctttggcgatgtcatcaatctgc

SEQ ID NO: 3036664 - DNA, 25 bp, Homo sapien
acctccattgctttccgtgctttca

SEQ ID NO: 3036665 - DNA, 25 bp, Homo sapien
tttccgtgctttcacggctgccgca

SEQ ID NO: 3036666 - DNA, 25 bp, Homo sapien
acccccgccccagggagagatgtca

SEQ ID NO: 3036667 - DNA, 25 bp, Homo sapien
ccccgccccagggagagatgtcagc

SEQ ID NO: 3036668 - DNA, 25 bp, Homo sapien
gccccagggagagatgtcagccatt

SEQ ID NO: 3036669 - DNA, 25 bp, Homo sapien
ccgccccagggagagatgtcagcca

SEQ ID NO: 3036670 - DNA, 25 bp, Homo sapien
tggtgcgcttcaggtccttccgcag

SEQ ID NO: 3036671 - DNA, 25 bp, Homo sapien
cgcttgctgggagcactgttcttca

SEQ ID NO: 3036672 - DNA, 25 bp, Homo sapien
ttgagctgggcaatctctcgcttgc

SEQ ID NO: 3036673 - DNA, 25 bp, Homo sapien
ggccttggtgcgcttcaggtccttc

SEQ ID NO: 3036674 - DNA, 25 bp, Homo sapien
ctgactcaaagtcccgccggttcac

SEQ ID NO: 3036675 - DNA, 25 bp, Homo sapien
cctcattatcagtgtccccataagg

SEQ ID NO: 3036676 - DNA, 25 bp, Homo sapien
gtcctcattatcagtgtccccataa

SEQ ID NO: 3036677 - DNA, 25 bp, Homo sapien
cattatcagtgtccccataaggatg

SEQ ID NO: 3036678 - DNA, 25 bp, Homo sapien
tcattatcagtgtccccataaggat

SEQ ID NO: 3036679 - DNA, 25 bp, Homo sapien
tctcgcagaaccttctgcttgtcct

SEQ ID NO: 3036680 - DNA, 25 bp, Homo sapien
gcttctctcgcagaaccttctgctt

SEQ ID NO: 3036681 - DNA, 25 bp, Homo sapien
agctcccgcttctctcgcagaacct

SEQ ID NO: 3036682 - DNA, 25 bp, Homo sapien
tcccgcttctctcgcagaaccttct

SEQ ID NO: 3036683 - DNA, 25 bp, Homo sapien
tccatctccttagaatgggtctgtc

SEQ ID NO: 3036684 - DNA, 25 bp, Homo sapien
ccttagaatgggtctgtctcatccg

SEQ ID NO: 3036685 - DNA, 25 bp, Homo sapien
gaatgggtctgtctcatccgctcca

SEQ ID NO: 3036686 - DNA, 25 bp, Homo sapien
tgggtctgtctcatccgctccatct

SEQ ID NO: 3036687 - DNA, 25 bp, Homo sapien
tccctaggctcaggggccgagaacg

SEQ ID NO: 3036688 - DNA, 25 bp, Homo sapien
ggccgagaacgtccaccagccagtt

SEQ ID NO: 3036689 - DNA, 25 bp, Homo sapien
gcagctgaactcccttactagaggt

SEQ ID NO: 3036690 - DNA, 25 bp, Homo sapien
ctgtgcatggctctccctaggctca

SEQ ID NO: 3036691 - DNA, 25 bp, Homo sapien
tctcccttggccaagccctcctgta

SEQ ID NO: 3036692 - DNA, 25 bp, Homo sapien
ctctcccttggccaagccctcctgt

SEQ ID NO: 3036693 - DNA, 25 bp, Homo sapien
ctcccttggccaagccctcctgtac

SEQ ID NO: 3036694 - DNA, 25 bp, Homo sapien
gacacaaccttctgggtgaaccctg

SEQ ID NO: 3036695 - DNA, 25 bp, Homo sapien
gccagagaagcctcatccttggact

SEQ ID NO: 3036696 - DNA, 25 bp, Homo sapien
tctgcctctagagacacaaccttct

SEQ ID NO: 3036697 - DNA, 25 bp, Homo sapien
tgggtgaaccctgcaatgtccatgt

SEQ ID NO: 3036698 - DNA, 25 bp, Homo sapien
tgggcctcctcatgcgcctgcgaga

SEQ ID NO: 3036699 - DNA, 25 bp, Homo sapien
tcatgcgcctgcgagagctcactgt

SEQ ID NO: 3036700 - DNA, 25 bp, Homo sapien
ggctgaaagcctcagcgaggagcat

SEQ ID NO: 3036701 - DNA, 25 bp, Homo sapien
cgcctgcgagagctcactgtcaaac

SEQ ID NO: 3036702 - DNA, 25 bp, Homo sapien
agggagtgtggcggctccatcagat

SEQ ID NO: 3036703 - DNA, 25 bp, Homo sapien
tgcgagggagtgtggcggctccatc

SEQ ID NO: 3036704 - DNA, 25 bp, Homo sapien
gcgagggagtgtggcggctccatca

SEQ ID NO: 3036705 - DNA, 25 bp, Homo sapien
gagtgtggcggctccatcagatggg

SEQ ID NO: 3036706 - DNA, 25 bp, Homo sapien
tcttctccagttcgtggttgcggac

SEQ ID NO: 3036707 - DNA, 25 bp, Homo sapien
tgactctcctcactatctgcctgca

SEQ ID NO: 3036708 - DNA, 25 bp, Homo sapien
gccgtcagtcgctggcacttcttct

SEQ ID NO: 3036709 - DNA, 25 bp, Homo sapien
ggtgcagcttggtgtcttgcagctc

SEQ ID NO: 3036710 - DNA, 25 bp, Homo sapien
gatagcttgctcctgattgcccctg

SEQ ID NO: 3036711 - DNA, 25 bp, Homo sapien
tgcaccaagaagctaacatgccagc

SEQ ID NO: 3036712 - DNA, 25 bp, Homo sapien
agagttcactggaccgacacaaggc

SEQ ID NO: 3036713 - DNA, 25 bp, Homo sapien
cccagggaactgaagaagctctaat

SEQ ID NO: 3036714 - DNA, 25 bp, Homo sapien
gctcatacttcagccgccactcgcc

SEQ ID NO: 3036715 - DNA, 25 bp, Homo sapien
ctggagccgtttcttggtgaagtcc

SEQ ID NO: 3036716 - DNA, 25 bp, Homo sapien
cgcacagcccgctcatacttcagcc

SEQ ID NO: 3036717 - DNA, 25 bp, Homo sapien
acctcccgcacagcccgctcatact

SEQ ID NO: 3036718 - DNA, 25 bp, Homo sapien
tgcttcttcagtgcatcgtactggg

SEQ ID NO: 3036719 - DNA, 25 bp, Homo sapien
tgcccggatgagacgggcctccatc

SEQ ID NO: 3036720 - DNA, 25 bp, Homo sapien
tcatcatccacttccccgttgatct

SEQ ID NO: 3036721 - DNA, 25 bp, Homo sapien
cgttgatctccgctgcccggatgag

SEQ ID NO: 3036722 - DNA, 25 bp, Homo sapien
tgggaggcggactctcctgtgttac

SEQ ID NO: 3036723 - DNA, 25 bp, Homo sapien
tctgtcagctccgatgtcagctctg

SEQ ID NO: 3036724 - DNA, 25 bp, Homo sapien
cctgtgttacgctcatctgtcagct

SEQ ID NO: 3036725 - DNA, 25 bp, Homo sapien
tgtcagctccgatgtcagctctgag

SEQ ID NO: 3036726 - DNA, 25 bp, Homo sapien
cttctccgccttctcgagcttgctc

SEQ ID NO: 3036727 - DNA, 25 bp, Homo sapien
cggtcactgttgagccgcagctcgt

SEQ ID NO: 3036728 - DNA, 25 bp, Homo sapien
cagccggtcactgttgagccgcagc

SEQ ID NO: 3036729 - DNA, 25 bp, Homo sapien
tccgccttctcgagcttgctccgca

SEQ ID NO: 3036730 - DNA, 25 bp, Homo sapien
gacttggccctctcaggctgtcaca

SEQ ID NO: 3036731 - DNA, 25 bp, Homo sapien
ccagagacttggccctctcaggctg

SEQ ID NO: 3036732 - DNA, 25 bp, Homo sapien
ttggccctctcaggctgtcacatac

SEQ ID NO: 3036733 - DNA, 25 bp, Homo sapien
gagacttggccctctcaggctgtca

SEQ ID NO: 3036734 - DNA, 25 bp, Homo sapien
gggcctcactgtggtaaaaagcttc

SEQ ID NO: 3036735 - DNA, 25 bp, Homo sapien
tctgacagctgtacttcgatgaggg

SEQ ID NO: 3036736 - DNA, 25 bp, Homo sapien
tctgtacacagcgaatggccaggtc

SEQ ID NO: 3036737 - DNA, 25 bp, Homo sapien
tcttgatgttcttctgtacacagcg

SEQ ID NO: 3036738 - DNA, 25 bp, Homo sapien
tcctccagccgtgccaaggtgcccg

SEQ ID NO: 3036739 - DNA, 25 bp, Homo sapien
tctcttcttgaagtgctggcgggcc

SEQ ID NO: 3036740 - DNA, 25 bp, Homo sapien
ctggtttgttcatcccgctgctcct

SEQ ID NO: 3036741 - DNA, 25 bp, Homo sapien
ctgctggtttgttcatcccgctgct

SEQ ID NO: 3036742 - DNA, 25 bp, Homo sapien
tcttctccagatccaagcactccag

SEQ ID NO: 3036743 - DNA, 25 bp, Homo sapien
atgaacctgtaggaagtcaagtcca

SEQ ID NO: 3036744 - DNA, 25 bp, Homo sapien
ggccgagtgactgcagagtgaacca

SEQ ID NO: 3036745 - DNA, 25 bp, Homo sapien
ctggcgcttcggtgggagttgggca

SEQ ID NO: 3036746 - DNA, 25 bp, Homo sapien
caaaggctgaagaccatgaacctgt

SEQ ID NO: 3036747 - DNA, 25 bp, Homo sapien
tacgcccgtgtttcttggtcaggtg

SEQ ID NO: 3036748 - DNA, 25 bp, Homo sapien
cggcggaactcggaaaacaccatgt

SEQ ID NO: 3036749 - DNA, 25 bp, Homo sapien
gcctttcatccaccacgatgtagtt

SEQ ID NO: 3036750 - DNA, 25 bp, Homo sapien
gaaaacaccatgtggtcagggtaac

SEQ ID NO: 3036751 - DNA, 25 bp, Homo sapien
agaaagatttagcacctcatttctc

SEQ ID NO: 3036752 - DNA, 25 bp, Homo sapien
ttcagaaagatttagcacctcattt

SEQ ID NO: 3036753 - DNA, 25 bp, Homo sapien
gctccgaaagggcactgggtttgct

SEQ ID NO: 3036754 - DNA, 25 bp, Homo sapien
atggctccgaaagggcactgggttt

SEQ ID NO: 3036755 - DNA, 25 bp, Homo sapien
tgggcagatggctccgaaagggcac

SEQ ID NO: 3036756 - DNA, 25 bp, Homo sapien
gcagatggctccgaaagggcactgg

SEQ ID NO: 3036757 - DNA, 25 bp, Homo sapien
acaaatgacaaggtgcagggtggag

SEQ ID NO: 3036758 - DNA, 25 bp, Homo sapien
gacaaatgacaaggtgcagggtgga

SEQ ID NO: 3036759 - DNA, 25 bp, Homo sapien
ctgtggacaaatgacaaggtgcagg

SEQ ID NO: 3036760 - DNA, 25 bp, Homo sapien
tggacaaatgacaaggtgcagggtg

SEQ ID NO: 3036761 - DNA, 25 bp, Homo sapien
acttcttgatggtgtcgatgagggc

SEQ ID NO: 3036762 - DNA, 25 bp, Homo sapien
cagtggtctcccgagggcaggtcca

SEQ ID NO: 3036763 - DNA, 25 bp, Homo sapien
gaagcagtgcacaaaatgcagcttt

SEQ ID NO: 3036764 - DNA, 25 bp, Homo sapien
cggtacatgcgcatggcatcgagca

SEQ ID NO: 3036765 - DNA, 25 bp, Homo sapien
ccatgcctgtggtaaaggttttccg

SEQ ID NO: 3036766 - DNA, 25 bp, Homo sapien
gtgacttctttttgacagccgccat

SEQ ID NO: 3036767 - DNA, 25 bp, Homo sapien
ggtaaaggttttccgcatgctggtg

SEQ ID NO: 3036768 - DNA, 25 bp, Homo sapien
tttgacagccgccatgcctgtggta

SEQ ID NO: 3036769 - DNA, 25 bp, Homo sapien
ctgcctgcgcggcccagaaacaggt

SEQ ID NO: 3036770 - DNA, 25 bp, Homo sapien
agccagagagcaccgtggcactgcc

SEQ ID NO: 3036771 - DNA, 25 bp, Homo sapien
tccaggcccgcgatggagccagaga

SEQ ID NO: 3036772 - DNA, 25 bp, Homo sapien
ccagaaacaggttgctgatgatttt

SEQ ID NO: 3036773 - DNA, 25 bp, Homo sapien
ttggtgtagttcagccagccagtca

SEQ ID NO: 3036774 - DNA, 25 bp, Homo sapien
tactctacccagttggtgccatggc

SEQ ID NO: 3036775 - DNA, 25 bp, Homo sapien
ttgtactctacccagttggtgccat

SEQ ID NO: 3036776 - DNA, 25 bp, Homo sapien
tctacccagttggtgccatggctgt

SEQ ID NO: 3036777 - DNA, 25 bp, Homo sapien
tcctcttccaatagccagagcaggc

SEQ ID NO: 3036778 - DNA, 25 bp, Homo sapien
aatagccagagcaggcccctcgcct

SEQ ID NO: 3036779 - DNA, 25 bp, Homo sapien
ctcctcttccaatagccagagcagg

SEQ ID NO: 3036780 - DNA, 25 bp, Homo sapien
cttccaatagccagagcaggcccct

SEQ ID NO: 3036781 - DNA, 25 bp, Homo sapien
agggactgatgggaggcctggtcca

SEQ ID NO: 3036782 - DNA, 25 bp, Homo sapien
cagggactgatgggaggcctggtcc

SEQ ID NO: 3036783 - DNA, 25 bp, Homo sapien
gggactgatgggaggcctggtccac

SEQ ID NO: 3036784 - DNA, 25 bp, Homo sapien
cgtcaaacgccagctcgatgttctc

SEQ ID NO: 3036785 - DNA, 25 bp, Homo sapien
gccacagagtcatccgtcgggggtt

SEQ ID NO: 3036786 - DNA, 25 bp, Homo sapien
caagtcgtcaaacgccagctcgatg

SEQ ID NO: 3036787 - DNA, 25 bp, Homo sapien
gggttccaagtcgtcaaacgccagc

SEQ ID NO: 3036788 - DNA, 25 bp, Homo sapien
aaagaaggccgagcggtagtgagca

SEQ ID NO: 3036789 - DNA, 25 bp, Homo sapien
tccttctgtgccgtgcaggagctcc

SEQ ID NO: 3036790 - DNA, 25 bp, Homo sapien
cacattgtggggaacagccttgtga

SEQ ID NO: 3036791 - DNA, 25 bp, Homo sapien
gagctccctccatcatcccaaatga

SEQ ID NO: 3036792 - DNA, 25 bp, Homo sapien
cagaaatggagagtaaggtgatgcc

SEQ ID NO: 3036793 - DNA, 25 bp, Homo sapien
gagagtaaactctccaccaagtaag

SEQ ID NO: 3036794 - DNA, 25 bp, Homo sapien
gagagcgcaggaggacagaaatgga

SEQ ID NO: 3036795 - DNA, 25 bp, Homo sapien
caagtaagaacgtagccaaagccag

SEQ ID NO: 3036796 - DNA, 25 bp, Homo sapien
aaggtgcgctcgtggaagagcctct

SEQ ID NO: 3036797 - DNA, 25 bp, Homo sapien
cagctcctcaaaggaggctccgcgg

SEQ ID NO: 3036798 - DNA, 25 bp, Homo sapien
cctctgcagccggtcttgggtgtag

SEQ ID NO: 3036799 - DNA, 25 bp, Homo sapien
tttccaactcctgcacgaaggtgcg

SEQ ID NO: 3036800 - DNA, 25 bp, Homo sapien
tattcaccagggagacgagaagggt

SEQ ID NO: 3036801 - DNA, 25 bp, Homo sapien
cactccagtgcactcagtttcgggc

SEQ ID NO: 3036802 - DNA, 25 bp, Homo sapien
tcaaggcactccagtgcactcagtt

SEQ ID NO: 3036803 - DNA, 25 bp, Homo sapien
tgaagagctcgctgtagaggccggc

SEQ ID NO: 3036804 - DNA, 25 bp, Homo sapien
cagggtgccacccttgtgctggtgc

SEQ ID NO: 3036805 - DNA, 25 bp, Homo sapien
agtaggtacgcagccttctgggccc

SEQ ID NO: 3036806 - DNA, 25 bp, Homo sapien
catggcgggcaaactgcttgcgccc

SEQ ID NO: 3036807 - DNA, 25 bp, Homo sapien
gggcccactcatggcgggcaaactg

SEQ ID NO: 3036808 - DNA, 25 bp, Homo sapien
accagcaggccttctgttcatcggg

SEQ ID NO: 3036809 - DNA, 25 bp, Homo sapien
gaatgaaccagcaggccttctgttc

SEQ ID NO: 3036810 - DNA, 25 bp, Homo sapien
tggcagccagaatgaaccagcaggc

SEQ ID NO: 3036811 - DNA, 25 bp, Homo sapien
tggtagatggcagccagaatgaacc

SEQ ID NO: 3036812 - DNA, 25 bp, Homo sapien
ccaaacacattgttctctgccaagt

SEQ ID NO: 3036813 - DNA, 25 bp, Homo sapien
aatcccaaacacattgttctctgcc

SEQ ID NO: 3036814 - DNA, 25 bp, Homo sapien
gtggcacaatcccaaacacattgtt

SEQ ID NO: 3036815 - DNA, 25 bp, Homo sapien
ctctgccaagtggttgaggtggagc

SEQ ID NO: 3036816 - DNA, 25 bp, Homo sapien
ccagcaggtagtagaagacgttgaa

SEQ ID NO: 3036817 - DNA, 25 bp, Homo sapien
gtagaagacgttgaatgtggcttca

SEQ ID NO: 3036818 - DNA, 25 bp, Homo sapien
aggccagcaggtagtagaagacgtt

SEQ ID NO: 3036819 - DNA, 25 bp, Homo sapien
tgggcgccgagccacacgcagcttc

SEQ ID NO: 3036820 - DNA, 25 bp, Homo sapien
gggtggcattgccattaatgatggt

SEQ ID NO: 3036821 - DNA, 25 bp, Homo sapien
aggccacctggccagcttggtcaaa

SEQ ID NO: 3036822 - DNA, 25 bp, Homo sapien
gccagcttggtcaaagtccagggag

SEQ ID NO: 3036823 - DNA, 25 bp, Homo sapien
tgggagaagcgggtggcattgccat

SEQ ID NO: 3036824 - DNA, 25 bp, Homo sapien
aaaacaccttgttcccgctgatgcc

SEQ ID NO: 3036825 - DNA, 25 bp, Homo sapien
gtggccaggtactgcaccagatgct

SEQ ID NO: 3036826 - DNA, 25 bp, Homo sapien
gatgattgactgatcctgacggctc

SEQ ID NO: 3036827 - DNA, 25 bp, Homo sapien
tgcggtctgggccactgcatagatg

SEQ ID NO: 3036828 - DNA, 25 bp, Homo sapien
ggctagcgccatagcgctggcgcaa

SEQ ID NO: 3036829 - DNA, 25 bp, Homo sapien
tgtgcagcaggctagcgccatagcg

SEQ ID NO: 3036830 - DNA, 25 bp, Homo sapien
gcgctggcgcaaggtgtgcaggacg

SEQ ID NO: 3036831 - DNA, 25 bp, Homo sapien
gccagcatacgtgtgcagcaggcta

SEQ ID NO: 3036832 - DNA, 25 bp, Homo sapien
gacggtcgcaggagggagcattagc

SEQ ID NO: 3036833 - DNA, 25 bp, Homo sapien
aggccagatcctccagacggtcgca

SEQ ID NO: 3036834 - DNA, 25 bp, Homo sapien
attgaggtacaccagtgaggccaga

SEQ ID NO: 3036835 - DNA, 25 bp, Homo sapien
ttgaggtacaccagtgaggccagat

SEQ ID NO: 3036836 - DNA, 25 bp, Homo sapien
gtggtccagcttcacacgcaccttc

SEQ ID NO: 3036837 - DNA, 25 bp, Homo sapien
ttcccctcaggcaagttgagctcct

SEQ ID NO: 3036838 - DNA, 25 bp, Homo sapien
ccaggatggccccatcgtggtccag

SEQ ID NO: 3036839 - DNA, 25 bp, Homo sapien
gcaagttgagctcctcagatttgag

SEQ ID NO: 3036840 - DNA, 25 bp, Homo sapien
agaagccgtccctatggaccagcca

SEQ ID NO: 3036841 - DNA, 25 bp, Homo sapien
cagtgagaagccgtccctatggacc

SEQ ID NO: 3036842 - DNA, 25 bp, Homo sapien
cttctccgtctcattccaggcctct

SEQ ID NO: 3036843 - DNA, 25 bp, Homo sapien
cacaccttctccgtctcattccagg

SEQ ID NO: 3036844 - DNA, 25 bp, Homo sapien
cagagaatgtctcacgttcaggcat

SEQ ID NO: 3036845 - DNA, 25 bp, Homo sapien
aacttgaagggcgacactcggtcta

SEQ ID NO: 3036846 - DNA, 25 bp, Homo sapien
ggctgagaaccacatgccacatggg

SEQ ID NO: 3036847 - DNA, 25 bp, Homo sapien
tgaaacacctagaactcaaccaggc

SEQ ID NO: 3036848 - DNA, 25 bp, Homo sapien
gtgggcatgagaggcggcctcagag

SEQ ID NO: 3036849 - DNA, 25 bp, Homo sapien
tgggcatgagaggcggcctcagagt

SEQ ID NO: 3036850 - DNA, 25 bp, Homo sapien
catgagaggcggcctcagagtccag

SEQ ID NO: 3036851 - DNA, 25 bp, Homo sapien
ggcatgagaggcggcctcagagtcc

SEQ ID NO: 3036852 - DNA, 25 bp, Homo sapien
aagctgtgaagatcctctccagccg

SEQ ID NO: 3036853 - DNA, 25 bp, Homo sapien
tgggcctcttccacgggggtcagct

SEQ ID NO: 3036854 - DNA, 25 bp, Homo sapien
ctgtgaagatcctctccagccgctg

SEQ ID NO: 3036855 - DNA, 25 bp, Homo sapien
gaagctgtgaagatcctctccagcc

SEQ ID NO: 3036856 - DNA, 25 bp, Homo sapien
ggagcggttagtgacacactcttgt

SEQ ID NO: 3036857 - DNA, 25 bp, Homo sapien
ggcaggagcggttagtgacacactc

SEQ ID NO: 3036858 - DNA, 25 bp, Homo sapien
caggagcggttagtgacacactctt

SEQ ID NO: 3036859 - DNA, 25 bp, Homo sapien
agcggttagtgacacactcttgtac

SEQ ID NO: 3036860 - DNA, 25 bp, Homo sapien
tgaggtctgacttcgggccggtgga

SEQ ID NO: 3036861 - DNA, 25 bp, Homo sapien
gtgaggtctgacttcgggccggtgg

SEQ ID NO: 3036862 - DNA, 25 bp, Homo sapien
cggcttgggactagaagctgccttt

SEQ ID NO: 3036863 - DNA, 25 bp, Homo sapien
atttgccacccgcttccgggacagg

SEQ ID NO: 3036864 - DNA, 25 bp, Homo sapien
tcccctcttgcttcgagtcgggtgc

SEQ ID NO: 3036865 - DNA, 25 bp, Homo sapien
ttcacttcaggcttaggcggagcag

SEQ ID NO: 3036866 - DNA, 25 bp, Homo sapien
tctctgggggtatcgggctggtggg

SEQ ID NO: 3036867 - DNA, 25 bp, Homo sapien
tgggggtatcgggctggtgggaggc

SEQ ID NO: 3036868 - DNA, 25 bp, Homo sapien
agatgggccactgccttcctttgag

SEQ ID NO: 3036869 - DNA, 25 bp, Homo sapien
tagatgggccactgccttcctttga

SEQ ID NO: 3036870 - DNA, 25 bp, Homo sapien
ctagatgggccactgccttcctttg

SEQ ID NO: 3036871 - DNA, 25 bp, Homo sapien
aggctttggcagagttttgtcctcc

SEQ ID NO: 3036872 - DNA, 25 bp, Homo sapien
agagccaggctttggcagagttttg

SEQ ID NO: 3036873 - DNA, 25 bp, Homo sapien
ctttggcagagttttgtcctcctct

SEQ ID NO: 3036874 - DNA, 25 bp, Homo sapien
cttcctccttgccaggagagccagg

SEQ ID NO: 3036875 - DNA, 25 bp, Homo sapien
aatccaactttccttttgctcccag

SEQ ID NO: 3036876 - DNA, 25 bp, Homo sapien
actttccttttgctcccagaaggcg

SEQ ID NO: 3036877 - DNA, 25 bp, Homo sapien
caactttccttttgctcccagaagg

SEQ ID NO: 3036878 - DNA, 25 bp, Homo sapien
ttccttttgctcccagaaggcgaac

SEQ ID NO: 3036879 - DNA, 25 bp, Homo sapien
catggcgctgaaggtaacctgtgcc

SEQ ID NO: 3036880 - DNA, 25 bp, Homo sapien
ggccatggcgctgaaggtaacctgt

SEQ ID NO: 3036881 - DNA, 25 bp, Homo sapien
ttgatgaaaaggccatggcgctgaa

SEQ ID NO: 3036882 - DNA, 25 bp, Homo sapien
cttgatgaaaaggccatggcgctga

SEQ ID NO: 3036883 - DNA, 25 bp, Homo sapien
gggaaggcacttcatacaggtctcc

SEQ ID NO: 3036884 - DNA, 25 bp, Homo sapien
caggggaaggcacttcatacaggtc

SEQ ID NO: 3036885 - DNA, 25 bp, Homo sapien
aaggcacttcatacaggtctcctca

SEQ ID NO: 3036886 - DNA, 25 bp, Homo sapien
gcacttcatacaggtctcctcattg

SEQ ID NO: 3036887 - DNA, 25 bp, Homo sapien
tgaggaccaagaggcagggcattct

SEQ ID NO: 3036888 - DNA, 25 bp, Homo sapien
cagtcccaacctagcaccaacttat

SEQ ID NO: 3036889 - DNA, 25 bp, Homo sapien
ttcccattcagaggcacagagggca

SEQ ID NO: 3036890 - DNA, 25 bp, Homo sapien
ggaggcttctccttctgaggaccaa

SEQ ID NO: 3036891 - DNA, 25 bp, Homo sapien
agccacatctggggaaatcacaaaa

SEQ ID NO: 3036892 - DNA, 25 bp, Homo sapien
aagaagctcggagaggagccccaag

SEQ ID NO: 3036893 - DNA, 25 bp, Homo sapien
tctccccacctacttcagccacatc

SEQ ID NO: 3036894 - DNA, 25 bp, Homo sapien
cctctccccacctacttcagccaca

SEQ ID NO: 3036895 - DNA, 25 bp, Homo sapien
gaattccagggtgaagaagtagtgt

SEQ ID NO: 3036896 - DNA, 25 bp, Homo sapien
tgaagaagtagtgtaagagaaggca

SEQ ID NO: 3036897 - DNA, 25 bp, Homo sapien
tccagggtgaagaagtagtgtaaga

SEQ ID NO: 3036898 - DNA, 25 bp, Homo sapien
cagggtgaagaagtagtgtaagaga

SEQ ID NO: 3036899 - DNA, 25 bp, Homo sapien
ggaaaggaagcgctgccccagttgt

SEQ ID NO: 3036900 - DNA, 25 bp, Homo sapien
gccaccatcccctgccttaccaggg

SEQ ID NO: 3036901 - DNA, 25 bp, Homo sapien
gtggtggttgaggtgtagaaattgc

SEQ ID NO: 3036902 - DNA, 25 bp, Homo sapien
aaaggaagcgctgccccagttgtgg

SEQ ID NO: 3036903 - DNA, 25 bp, Homo sapien
tcaaacatgaagttggttggaaggg

SEQ ID NO: 3036904 - DNA, 25 bp, Homo sapien
gctgcaggaattgctttcagctcat

SEQ ID NO: 3036905 - DNA, 25 bp, Homo sapien
tttggctgcaggaattgctttcagc

SEQ ID NO: 3036906 - DNA, 25 bp, Homo sapien
gttggaagggctagttttggctgca

SEQ ID NO: 3036907 - DNA, 25 bp, Homo sapien
caggctggtacccctaggagaaggc

SEQ ID NO: 3036908 - DNA, 25 bp, Homo sapien
tcaggctggtacccctaggagaagg

SEQ ID NO: 3036909 - DNA, 25 bp, Homo sapien
ggagggcaagggcatttggggtgag

SEQ ID NO: 3036910 - DNA, 25 bp, Homo sapien
gtcaggctggtacccctaggagaag

SEQ ID NO: 3036911 - DNA, 25 bp, Homo sapien
gaatagggatgtttgctggtcaccg

SEQ ID NO: 3036912 - DNA, 25 bp, Homo sapien
tggtcaccgattccaggaagacagg

SEQ ID NO: 3036913 - DNA, 25 bp, Homo sapien
gcttctcaggcagggggcccagttt

SEQ ID NO: 3036914 - DNA, 25 bp, Homo sapien
tgtgcccgtgtcctttagggaacat

SEQ ID NO: 3036915 - DNA, 25 bp, Homo sapien
catgggaagaacctgccgccctgtg

SEQ ID NO: 3036916 - DNA, 25 bp, Homo sapien
gctccatgggaagaacctgccgccc

SEQ ID NO: 3036917 - DNA, 25 bp, Homo sapien
tgtgtggaccctgcttgccccaggg

SEQ ID NO: 3036918 - DNA, 25 bp, Homo sapien
tgggaagaacctgccgccctgtgtg

SEQ ID NO: 3036919 - DNA, 25 bp, Homo sapien
ccttcagcaaacttaagagtaactg

SEQ ID NO: 3036920 - DNA, 25 bp, Homo sapien
agcaaacttaagagtaactgatcca

SEQ ID NO: 3036921 - DNA, 25 bp, Homo sapien
ttggccttcagcaaacttaagagta

SEQ ID NO: 3036922 - DNA, 25 bp, Homo sapien
cagcaaacttaagagtaactgatcc

SEQ ID NO: 3036923 - DNA, 25 bp, Homo sapien
tgtggacacagttgatggatggcct

SEQ ID NO: 3036924 - DNA, 25 bp, Homo sapien
aggcgggaagacttctcttggcgca

SEQ ID NO: 3036925 - DNA, 25 bp, Homo sapien
cttggcgcataactgggattagaac

SEQ ID NO: 3036926 - DNA, 25 bp, Homo sapien
ggctacagtcatcagggtatccctc

SEQ ID NO: 3036927 - DNA, 25 bp, Homo sapien
ctgcttgtggtatgagtccccacca

SEQ ID NO: 3036928 - DNA, 25 bp, Homo sapien
ctctgcttgtggtatgagtccccac

SEQ ID NO: 3036929 - DNA, 25 bp, Homo sapien
tgcttgtggtatgagtccccaccac

SEQ ID NO: 3036930 - DNA, 25 bp, Homo sapien
tctgcttgtggtatgagtccccacc

SEQ ID NO: 3036931 - DNA, 25 bp, Homo sapien
tccccagggatgggatagcagcaga

SEQ ID NO: 3036932 - DNA, 25 bp, Homo sapien
gggatgggatagcagcagatagttg

SEQ ID NO: 3036933 - DNA, 25 bp, Homo sapien
cccagggatgggatagcagcagata

SEQ ID NO: 3036934 - DNA, 25 bp, Homo sapien
agggcctccaaagctaaaccatcta

SEQ ID NO: 3036935 - DNA, 25 bp, Homo sapien
tatacatctcagatgttccatgacg

SEQ ID NO: 3036936 - DNA, 25 bp, Homo sapien
gatgttccatgacggccctaatttg

SEQ ID NO: 3036937 - DNA, 25 bp, Homo sapien
ccatgacggccctaatttgaaatca

SEQ ID NO: 3036938 - DNA, 25 bp, Homo sapien
tctcagatgttccatgacggcccta

SEQ ID NO: 3036939 - DNA, 25 bp, Homo sapien
aattactaaccaacagcagagctct

SEQ ID NO: 3036940 - DNA, 25 bp, Homo sapien
cagcagagctctctcaagggctcca

SEQ ID NO: 3036941 - DNA, 25 bp, Homo sapien
tgaagaagctgaatactttcacggt

SEQ ID NO: 3036942 - DNA, 25 bp, Homo sapien
ttcacggtaattactaaccaacagc

SEQ ID NO: 3036943 - DNA, 25 bp, Homo sapien
cattccccatccctgcttagcccag

SEQ ID NO: 3036944 - DNA, 25 bp, Homo sapien
catccctgcttagcccaggtgccca

SEQ ID NO: 3036945 - DNA, 25 bp, Homo sapien
tcaagcaggaggtgcccacattccc

SEQ ID NO: 3036946 - DNA, 25 bp, Homo sapien
cctgcttagcccaggtgcccaggga

SEQ ID NO: 3036947 - DNA, 25 bp, Homo sapien
gctgtacttaggtggcccgagtcca

SEQ ID NO: 3036948 - DNA, 25 bp, Homo sapien
cgatccagcatggttgtgcgccgca

SEQ ID NO: 3036949 - DNA, 25 bp, Homo sapien
caatgtcagtcaggtgcaggtcaga

SEQ ID NO: 3036950 - DNA, 25 bp, Homo sapien
ggttgaagaagccacgtcgcaggct

SEQ ID NO: 3036951 - DNA, 25 bp, Homo sapien
caggctccgaagctctgccgctgac

SEQ ID NO: 3036952 - DNA, 25 bp, Homo sapien
tccaggctccgaagctctgccgctg

SEQ ID NO: 3036953 - DNA, 25 bp, Homo sapien
ggctccgaagctctgccgctgacat

SEQ ID NO: 3036954 - DNA, 25 bp, Homo sapien
cctccaggctccgaagctctgccgc

SEQ ID NO: 3036955 - DNA, 25 bp, Homo sapien
tccttccgcccgccatctttgtcct

SEQ ID NO: 3036956 - DNA, 25 bp, Homo sapien
ccttccgcccgccatctttgtcctt

SEQ ID NO: 3036957 - DNA, 25 bp, Homo sapien
gaggattatgagtgcttagcacagg

SEQ ID NO: 3036958 - DNA, 25 bp, Homo sapien
cacccccagaggattatgagtgctt

SEQ ID NO: 3036959 - DNA, 25 bp, Homo sapien
ccccagaggattatgagtgcttagc

SEQ ID NO: 3036960 - DNA, 25 bp, Homo sapien
cagaggattatgagtgcttagcaca

SEQ ID NO: 3036961 - DNA, 25 bp, Homo sapien
tctgcccctcgccaagggttgtagc

SEQ ID NO: 3036962 - DNA, 25 bp, Homo sapien
cggccggaggggtagccagcacctg

SEQ ID NO: 3036963 - DNA, 25 bp, Homo sapien
tagcagcggccggaggggtagccag

SEQ ID NO: 3036964 - DNA, 25 bp, Homo sapien
cctgagcggccgtttcctccagccc

SEQ ID NO: 3036965 - DNA, 25 bp, Homo sapien
ctaattcaggccaccttggaaaatg

SEQ ID NO: 3036966 - DNA, 25 bp, Homo sapien
aggccgagccgaaagggagctccct

SEQ ID NO: 3036967 - DNA, 25 bp, Homo sapien
cgaagcccctctcgctgtgtctgag

SEQ ID NO: 3036968 - DNA, 25 bp, Homo sapien
cactgcctaggacaggcaccagggt

SEQ ID NO: 3036969 - DNA, 25 bp, Homo sapien
cactggaggctgtccgaaaagggtc

SEQ ID NO: 3036970 - DNA, 25 bp, Homo sapien
caactccatcgggttcaggaggaag

SEQ ID NO: 3036971 - DNA, 25 bp, Homo sapien
aggtagcacaactccatcgggttca

SEQ ID NO: 3036972 - DNA, 25 bp, Homo sapien
tagcacaactccatcgggttcagga

SEQ ID NO: 3036973 - DNA, 25 bp, Homo sapien
gccacagagcgtgcctggcaaggga

SEQ ID NO: 3036974 - DNA, 25 bp, Homo sapien
ctgcacatgaagttcaggaagattt

SEQ ID NO: 3036975 - DNA, 25 bp, Homo sapien
tgcacatgaagttcaggaagatttt

SEQ ID NO: 3036976 - DNA, 25 bp, Homo sapien
caggaagattttcttcctcatggct

SEQ ID NO: 3036977 - DNA, 25 bp, Homo sapien
gttcaggaagattttcttcctcatg

SEQ ID NO: 3036978 - DNA, 25 bp, Homo sapien
agccaggccgcagggtattgcagat

SEQ ID NO: 3036979 - DNA, 25 bp, Homo sapien
tattgcagatgaacttgcagtgctc

SEQ ID NO: 3036980 - DNA, 25 bp, Homo sapien
caacaaagaagatggagggtacggc

SEQ ID NO: 3036981 - DNA, 25 bp, Homo sapien
tgtaagaccaggacagtgagccata

SEQ ID NO: 3036982 - DNA, 25 bp, Homo sapien
ccaaccacggtggaatcgttctgca

SEQ ID NO: 3036983 - DNA, 25 bp, Homo sapien
cacggtggaatcgttctgcactcgg

SEQ ID NO: 3036984 - DNA, 25 bp, Homo sapien
ttgccaaccacggtggaatcgttct

SEQ ID NO: 3036985 - DNA, 25 bp, Homo sapien
ggtggaatcgttctgcactcgggtc

SEQ ID NO: 3036986 - DNA, 25 bp, Homo sapien
caccatctaggtatgatactgccaa

SEQ ID NO: 3036987 - DNA, 25 bp, Homo sapien
cctcaaagttatggctcttgcagca

SEQ ID NO: 3036988 - DNA, 25 bp, Homo sapien
tgtctgtctacgtgtacacccatgg

SEQ ID NO: 3036989 - DNA, 25 bp, Homo sapien
tctacgttagcctgttaagtaccag

SEQ ID NO: 3036990 - DNA, 25 bp, Homo sapien
tgacagagctagcacagctactcgg

SEQ ID NO: 3036991 - DNA, 25 bp, Homo sapien
gacatgatcctacagtctgacagag

SEQ ID NO: 3036992 - DNA, 25 bp, Homo sapien
tactcggagtaagcaacttgcggcc

SEQ ID NO: 3036993 - DNA, 25 bp, Homo sapien
taagtttaccctttgagacatcaga

SEQ ID NO: 3036994 - DNA, 25 bp, Homo sapien
taatcagtagtagcttcagtttccg

SEQ ID NO: 3036995 - DNA, 25 bp, Homo sapien
tacttcttcataaaggaagtctgca

SEQ ID NO: 3036996 - DNA, 25 bp, Homo sapien
tcagtttccgctgggcccctaatta

SEQ ID NO: 3036997 - DNA, 25 bp, Homo sapien
ccctaattagtcttcgaattcctct

SEQ ID NO: 3036998 - DNA, 25 bp, Homo sapien
tgggaatcctctttggcaaatcttt

SEQ ID NO: 3036999 - DNA, 25 bp, Homo sapien
gaatccttgggaatcctctttggca

SEQ ID NO: 3037000 - DNA, 25 bp, Homo sapien
gaaagaaatggtaacgagctgaatc

SEQ ID NO: 3037001 - DNA, 25 bp, Homo sapien
tggtaacgagctgaatccttgggaa

SEQ ID NO: 3037002 - DNA, 25 bp, Homo sapien
agtgtccacacccacgtcagtctgt

SEQ ID NO: 3037003 - DNA, 25 bp, Homo sapien
tgtccacacccacgtcagtctgtac

SEQ ID NO: 3037004 - DNA, 25 bp, Homo sapien
ttagtgtccacacccacgtcagtct

SEQ ID NO: 3037005 - DNA, 25 bp, Homo sapien
cttagtgtccacacccacgtcagtc

SEQ ID NO: 3037006 - DNA, 25 bp, Homo sapien
ttatatccatgtaatgatacatctt

SEQ ID NO: 3037007 - DNA, 25 bp, Homo sapien
ggggcaggggaagattgtgacagca

SEQ ID NO: 3037008 - DNA, 25 bp, Homo sapien
gggaagattgtgacagcaagtattt

SEQ ID NO: 3037009 - DNA, 25 bp, Homo sapien
tatatccatgtaatgatacatcttc

SEQ ID NO: 3037010 - DNA, 25 bp, Homo sapien
tgaatatccattcatatccctgggc

SEQ ID NO: 3037011 - DNA, 25 bp, Homo sapien
caatgaatatccattcatatccctg

SEQ ID NO: 3037012 - DNA, 25 bp, Homo sapien
tccctgggcattctgagaatctaac

SEQ ID NO: 3037013 - DNA, 25 bp, Homo sapien
atgaatatccattcatatccctggg

SEQ ID NO: 3037014 - DNA, 25 bp, Homo sapien
gactatatgatccaatcacaagttg

SEQ ID NO: 3037015 - DNA, 25 bp, Homo sapien
gaatctgaaggctgactatatgatc

SEQ ID NO: 3037016 - DNA, 25 bp, Homo sapien
ttccatttctggctctggcaaagat

SEQ ID NO: 3037017 - DNA, 25 bp, Homo sapien
catttctggctctggcaaagatctc

SEQ ID NO: 3037018 - DNA, 25 bp, Homo sapien
ctccggcgctgagtgcagccagcgg

SEQ ID NO: 3037019 - DNA, 25 bp, Homo sapien
tccggcgctgagtgcagccagcggc

SEQ ID NO: 3037020 - DNA, 25 bp, Homo sapien
tcctctaggaattctcccctgacta

SEQ ID NO: 3037021 - DNA, 25 bp, Homo sapien
tcactgctatgcaggatccctgtgc

SEQ ID NO: 3037022 - DNA, 25 bp, Homo sapien
gggtagatgatagaattcctccatc

SEQ ID NO: 3037023 - DNA, 25 bp, Homo sapien
agaggcgtactctccaagacttctg

SEQ ID NO: 3037024 - DNA, 25 bp, Homo sapien
atctgtgtggcggaagtgcaatact

SEQ ID NO: 3037025 - DNA, 25 bp, Homo sapien
tcccaactccatgctcagtgatgtc

SEQ ID NO: 3037026 - DNA, 25 bp, Homo sapien
tagcatgaacttggccatggtaaga

SEQ ID NO: 3037027 - DNA, 25 bp, Homo sapien
catggtaagagtatggaaatcagca

SEQ ID NO: 3037028 - DNA, 25 bp, Homo sapien
gagtccctcatgaccaatcacagaa

SEQ ID NO: 3037029 - DNA, 25 bp, Homo sapien
gccagacactgaagagtccataccg

SEQ ID NO: 3037030 - DNA, 25 bp, Homo sapien
ccaggtttcctgctaaaagtcaaga

SEQ ID NO: 3037031 - DNA, 25 bp, Homo sapien
catagactagaacactacatgcagt

SEQ ID NO: 3037032 - DNA, 25 bp, Homo sapien
cggaagaggaaccatagccatctaa

SEQ ID NO: 3037033 - DNA, 25 bp, Homo sapien
aaaatgatgcttgctacactcctgc

SEQ ID NO: 3037034 - DNA, 25 bp, Homo sapien
tagtacatacagattgcagcacttg

SEQ ID NO: 3037035 - DNA, 25 bp, Homo sapien
caaaacctgggtagtagtacatcta

SEQ ID NO: 3037036 - DNA, 25 bp, Homo sapien
ctctcctagttccactgatgagcta

SEQ ID NO: 3037037 - DNA, 25 bp, Homo sapien
tcctagttccactgatgagctagcc

SEQ ID NO: 3037038 - DNA, 25 bp, Homo sapien
ctagttccactgatgagctagccca

SEQ ID NO: 3037039 - DNA, 25 bp, Homo sapien
agttccactgatgagctagcccaga

SEQ ID NO: 3037040 - DNA, 25 bp, Homo sapien
aagtagtaaggacaaatcggtcact

SEQ ID NO: 3037041 - DNA, 25 bp, Homo sapien
actatgtaactttgagccaagtttc

SEQ ID NO: 3037042 - DNA, 25 bp, Homo sapien
tatgtaactttgagccaagtttcca

SEQ ID NO: 3037043 - DNA, 25 bp, Homo sapien
caaatcggtcacttttggtaatgac

SEQ ID NO: 3037044 - DNA, 25 bp, Homo sapien
caaaacatgtgcatagctttattca

SEQ ID NO: 3037045 - DNA, 25 bp, Homo sapien
agtcacattagggaaaattcagatc

SEQ ID NO: 3037046 - DNA, 25 bp, Homo sapien
caggcattactacatggcgtttcca

SEQ ID NO: 3037047 - DNA, 25 bp, Homo sapien
ggtaagaaccatcgactatctcagg

SEQ ID NO: 3037048 - DNA, 25 bp, Homo sapien
taaatctgattggttcagggcagca

SEQ ID NO: 3037049 - DNA, 25 bp, Homo sapien
tataaccagatagctttggcccaca

SEQ ID NO: 3037050 - DNA, 25 bp, Homo sapien
tggtctgaagagtacaacaactttg

SEQ ID NO: 3037051 - DNA, 25 bp, Homo sapien
gaaagctatgtaatttgccctcaag

SEQ ID NO: 3037052 - DNA, 25 bp, Homo sapien
tgaggacggccattccatagtttct

SEQ ID NO: 3037053 - DNA, 25 bp, Homo sapien
gcaatcccatcacatatgaggacgg

SEQ ID NO: 3037054 - DNA, 25 bp, Homo sapien
gagccttgtaggaatgactccgtcc

SEQ ID NO: 3037055 - DNA, 25 bp, Homo sapien
taagacctttcttgagcggcaaaac

SEQ ID NO: 3037056 - DNA, 25 bp, Homo sapien
ggctatcccctcctagaaagtagag

SEQ ID NO: 3037057 - DNA, 25 bp, Homo sapien
tgtgcctctggcaaacctaaagcag

SEQ ID NO: 3037058 - DNA, 25 bp, Homo sapien
caaggcaattgaacacacagcagaa

SEQ ID NO: 3037059 - DNA, 25 bp, Homo sapien
tggcttctctgaacactgaggcctg

SEQ ID NO: 3037060 - DNA, 25 bp, Homo sapien
ccctaaggcgacaagtggttacaca

SEQ ID NO: 3037061 - DNA, 25 bp, Homo sapien
tcctgcttgtacctaggcaattaag

SEQ ID NO: 3037062 - DNA, 25 bp, Homo sapien
tctgctttcaattgtacatgggcct

SEQ ID NO: 3037063 - DNA, 25 bp, Homo sapien
gaacaaggcagactaaatgcagggc

SEQ ID NO: 3037064 - DNA, 25 bp, Homo sapien
gaagcatcctagcttttggcaagca

SEQ ID NO: 3037065 - DNA, 25 bp, Homo sapien
tgaaactatctggaactggcctacc

SEQ ID NO: 3037066 - DNA, 25 bp, Homo sapien
tacatcaagtggaattggcaatcca

SEQ ID NO: 3037067 - DNA, 25 bp, Homo sapien
gatagttactctactctatgttgag

SEQ ID NO: 3037068 - DNA, 25 bp, Homo sapien
taaaatctaagcagggcagaaatcc

SEQ ID NO: 3037069 - DNA, 25 bp, Homo sapien
tactacagtcactcaaaactggaca

SEQ ID NO: 3037070 - DNA, 25 bp, Homo sapien
agacagggctaatgctcttctctgc

SEQ ID NO: 3037071 - DNA, 25 bp, Homo sapien
agcatgctatacacaagctgcagtg

SEQ ID NO: 3037072 - DNA, 25 bp, Homo sapien
atgataagacagggctaatgctctt

SEQ ID NO: 3037073 - DNA, 25 bp, Homo sapien
gcatgctatacacaagctgcagtgc

SEQ ID NO: 3037074 - DNA, 25 bp, Homo sapien
tatccagcattctcgcagggcttaa

SEQ ID NO: 3037075 - DNA, 25 bp, Homo sapien
tgaacgatggctctaatgctgcaga

SEQ ID NO: 3037076 - DNA, 25 bp, Homo sapien
ggagagcaagtctggagcacctaca

SEQ ID NO: 3037077 - DNA, 25 bp, Homo sapien
catttagtgttagtgacggagagca

SEQ ID NO: 3037078 - DNA, 25 bp, Homo sapien
tggactatccatggcttcattgtaa

SEQ ID NO: 3037079 - DNA, 25 bp, Homo sapien
catggcttcattgtaagtgattatc

SEQ ID NO: 3037080 - DNA, 25 bp, Homo sapien
tgatctggactatccatggcttcat

SEQ ID NO: 3037081 - DNA, 25 bp, Homo sapien
ctatccatggcttcattgtaagtga

SEQ ID NO: 3037082 - DNA, 25 bp, Homo sapien
cttgcttctgcaaattccaaataga

SEQ ID NO: 3037083 - DNA, 25 bp, Homo sapien
ttctgcaaattccaaatagattcca

SEQ ID NO: 3037084 - DNA, 25 bp, Homo sapien
gcttctgcaaattccaaatagattc

SEQ ID NO: 3037085 - DNA, 25 bp, Homo sapien
tctgcaaattccaaatagattccat

SEQ ID NO: 3037086 - DNA, 25 bp, Homo sapien
taagtgtcatgtagattattacctg

SEQ ID NO: 3037087 - DNA, 25 bp, Homo sapien
cagcccggctggctcttataattct

SEQ ID NO: 3037088 - DNA, 25 bp, Homo sapien
tcacaaattgcaaggacatgcaaga

SEQ ID NO: 3037089 - DNA, 25 bp, Homo sapien
gagcctggatcctgtaactcttttg

SEQ ID NO: 3037090 - DNA, 25 bp, Homo sapien
tatcctttaaggtcagaatgccaat

SEQ ID NO: 3037091 - DNA, 25 bp, Homo sapien
tgtctacaatgtgcttagtttggca

SEQ ID NO: 3037092 - DNA, 25 bp, Homo sapien
tatctggagattaacacaaactact

SEQ ID NO: 3037093 - DNA, 25 bp, Homo sapien
caaattatagcgacatacacagaga

SEQ ID NO: 3037094 - DNA, 25 bp, Homo sapien
aaactgtacacctagtccttgtcaa

SEQ ID NO: 3037095 - DNA, 25 bp, Homo sapien
actctgttgcacaaccttgagtgca

SEQ ID NO: 3037096 - DNA, 25 bp, Homo sapien
ggcttccagtctacccaaattggtg

SEQ ID NO: 3037097 - DNA, 25 bp, Homo sapien
caaattggtgccatattaatctacc

SEQ ID NO: 3037098 - DNA, 25 bp, Homo sapien
cacacaatgatcgccagtgcaaaat

SEQ ID NO: 3037099 - DNA, 25 bp, Homo sapien
tcacacaatgatcgccagtgcaaaa

SEQ ID NO: 3037100 - DNA, 25 bp, Homo sapien
acacaatgatcgccagtgcaaaata

SEQ ID NO: 3037101 - DNA, 25 bp, Homo sapien
gaggccagaggattttgactttcta

SEQ ID NO: 3037102 - DNA, 25 bp, Homo sapien
tatacaatagcagccctcaggtcaa

SEQ ID NO: 3037103 - DNA, 25 bp, Homo sapien
tcaggtcaaaagaaccccagctatc

SEQ ID NO: 3037104 - DNA, 25 bp, Homo sapien
caaagtgttcgtaggagaggccaga

SEQ ID NO: 3037105 - DNA, 25 bp, Homo sapien
gactagtccgtttctccagctcgta

SEQ ID NO: 3037106 - DNA, 25 bp, Homo sapien
tttcagcgctgacatagggacctgg

SEQ ID NO: 3037107 - DNA, 25 bp, Homo sapien
aacttgctggttgccattgaggacc

SEQ ID NO: 3037108 - DNA, 25 bp, Homo sapien
tttagaatgctacccagaacttgag

SEQ ID NO: 3037109 - DNA, 25 bp, Homo sapien
agaactatttactgtatgctagaca

SEQ ID NO: 3037110 - DNA, 25 bp, Homo sapien
tatgctatgagctgtagctttatat

SEQ ID NO: 3037111 - DNA, 25 bp, Homo sapien
tacactaatacctaacatttaagaa

SEQ ID NO: 3037112 - DNA, 25 bp, Homo sapien
ttaagaactatttactgtatgctag

SEQ ID NO: 3037113 - DNA, 25 bp, Homo sapien
gagagaagcctcatccgaggcaaga

SEQ ID NO: 3037114 - DNA, 25 bp, Homo sapien
ctttttaacacggagagaagcctca

SEQ ID NO: 3037115 - DNA, 25 bp, Homo sapien
gcaagatggtagtagtctaacctca

SEQ ID NO: 3037116 - DNA, 25 bp, Homo sapien
cctcatccgaggcaagatggtagta

SEQ ID NO: 3037117 - DNA, 25 bp, Homo sapien
agtgaaagcctcagaggcggagtcg

SEQ ID NO: 3037118 - DNA, 25 bp, Homo sapien
tgtggcagagaaactcgtgaccggg

SEQ ID NO: 3037119 - DNA, 25 bp, Homo sapien
aggcaccgcctctacccgaaatgaa

SEQ ID NO: 3037120 - DNA, 25 bp, Homo sapien
gagcgaacctggcaggagacgaggt

SEQ ID NO: 3037121 - DNA, 25 bp, Homo sapien
gtgatcccgggtcacccggctccgc

SEQ ID NO: 3037122 - DNA, 25 bp, Homo sapien
gcggccggtggtgatcccgggtcac

SEQ ID NO: 3037123 - DNA, 25 bp, Homo sapien
ctgcggccggtggtgatcccgggtc

SEQ ID NO: 3037124 - DNA, 25 bp, Homo sapien
gtggtgatcccgggtcacccggctc

SEQ ID NO: 3037125 - DNA, 25 bp, Homo sapien
tcggtgacaggaatcggcttccaac

SEQ ID NO: 3037126 - DNA, 25 bp, Homo sapien
ccggagtcggtgacaggaatcggct

SEQ ID NO: 3037127 - DNA, 25 bp, Homo sapien
tccgctcctcagtgggccggagtcg

SEQ ID NO: 3037128 - DNA, 25 bp, Homo sapien
atggcggacaggaagcggccccgcg

SEQ ID NO: 3037129 - DNA, 25 bp, Homo sapien
tggtggaaatgacccgtgagatgag

SEQ ID NO: 3037130 - DNA, 25 bp, Homo sapien
caagactgcggggtccggcgcccaa

SEQ ID NO: 3037131 - DNA, 25 bp, Homo sapien
gaggagccgcgggacaagactgcgg

SEQ ID NO: 3037132 - DNA, 25 bp, Homo sapien
aatgacccgtgagatgaggggtccc

SEQ ID NO: 3037133 - DNA, 25 bp, Homo sapien
tcagcccgagctctagaatgaaagg

SEQ ID NO: 3037134 - DNA, 25 bp, Homo sapien
tccgagtcgggattcgctaggcctt

SEQ ID NO: 3037135 - DNA, 25 bp, Homo sapien
ctgcaaaagggtctcgcgacaccat

SEQ ID NO: 3037136 - DNA, 25 bp, Homo sapien
caaattgaggtaactccagggacgc

SEQ ID NO: 3037137 - DNA, 25 bp, Homo sapien
cttcttcggcgtttcctggtgctgc

SEQ ID NO: 3037138 - DNA, 25 bp, Homo sapien
tctgctcatgtttcagcggctttgg

SEQ ID NO: 3037139 - DNA, 25 bp, Homo sapien
ctgctcatgtttcagcggctttggc

SEQ ID NO: 3037140 - DNA, 25 bp, Homo sapien
tgtggttgtagaaataataatggtg

SEQ ID NO: 3037141 - DNA, 25 bp, Homo sapien
tggttgtagaaataataatggtggt

SEQ ID NO: 3037142 - DNA, 25 bp, Homo sapien
gctgtggttgtagaaataataatgg

SEQ ID NO: 3037143 - DNA, 25 bp, Homo sapien
tggctgtggttgtagaaataataat

SEQ ID NO: 3037144 - DNA, 25 bp, Homo sapien
ctggctgaggctgcgggctgctgca

SEQ ID NO: 3037145 - DNA, 25 bp, Homo sapien
cgggctgctgcaccgtcaggatctg

SEQ ID NO: 3037146 - DNA, 25 bp, Homo sapien
tgaaagcggctgggactccctggct

SEQ ID NO: 3037147 - DNA, 25 bp, Homo sapien
ctgcgggctgctgcaccgtcaggat

SEQ ID NO: 3037148 - DNA, 25 bp, Homo sapien
cgtgtcgagggtagcagattccact

SEQ ID NO: 3037149 - DNA, 25 bp, Homo sapien
ggcaagcaggctcgtgtcgagggta

SEQ ID NO: 3037150 - DNA, 25 bp, Homo sapien
tccactggcgattccactggtgctg

SEQ ID NO: 3037151 - DNA, 25 bp, Homo sapien
ctcgtgtcgagggtagcagattcca

SEQ ID NO: 3037152 - DNA, 25 bp, Homo sapien
tgagggtacagcatcacttggattc

SEQ ID NO: 3037153 - DNA, 25 bp, Homo sapien
tgaggggtacagcatgagggtacag

SEQ ID NO: 3037154 - DNA, 25 bp, Homo sapien
ttcggaatttggcacaagccatgcc

SEQ ID NO: 3037155 - DNA, 25 bp, Homo sapien
gggtacagcatgagggtacagcatc

SEQ ID NO: 3037156 - DNA, 25 bp, Homo sapien
tgtgggccagagttacctttcccca

SEQ ID NO: 3037157 - DNA, 25 bp, Homo sapien
tgggccagagttacctttccccaga

SEQ ID NO: 3037158 - DNA, 25 bp, Homo sapien
gccagagttacctttccccagatta

SEQ ID NO: 3037159 - DNA, 25 bp, Homo sapien
ttttgtttgattgccgccaggagtc

SEQ ID NO: 3037160 - DNA, 25 bp, Homo sapien
tctggttttgtttgattgccgccag

SEQ ID NO: 3037161 - DNA, 25 bp, Homo sapien
ggttttgtttgattgccgccaggag

SEQ ID NO: 3037162 - DNA, 25 bp, Homo sapien
ttgtttgattgccgccaggagtcac

SEQ ID NO: 3037163 - DNA, 25 bp, Homo sapien
gtgctctctgttccggagaccctgc

SEQ ID NO: 3037164 - DNA, 25 bp, Homo sapien
tgctctctgttccggagaccctgct

SEQ ID NO: 3037165 - DNA, 25 bp, Homo sapien
tgtgctctctgttccggagaccctg

SEQ ID NO: 3037166 - DNA, 25 bp, Homo sapien
tcagttgttgtttggttttagccca

SEQ ID NO: 3037167 - DNA, 25 bp, Homo sapien
cagttgttgtttggttttagcccat

SEQ ID NO: 3037168 - DNA, 25 bp, Homo sapien
cattgcatagatttgagccaaaggg

SEQ ID NO: 3037169 - DNA, 25 bp, Homo sapien
tctagagtctgttgctgataatggt

SEQ ID NO: 3037170 - DNA, 25 bp, Homo sapien
aagtagatgctcacttaagatagag

SEQ ID NO: 3037171 - DNA, 25 bp, Homo sapien
tgaattcatggcaaggattagctct

SEQ ID NO: 3037172 - DNA, 25 bp, Homo sapien
tttgctgactccttacggctgccta

SEQ ID NO: 3037173 - DNA, 25 bp, Homo sapien
ggagtggttccaggagaaatgtaat

SEQ ID NO: 3037174 - DNA, 25 bp, Homo sapien
taggcactacactaggtttccagct

SEQ ID NO: 3037175 - DNA, 25 bp, Homo sapien
tgagggcagccgtgttagcctttgc

SEQ ID NO: 3037176 - DNA, 25 bp, Homo sapien
aggctggtgagagtttccagaagaa

SEQ ID NO: 3037177 - DNA, 25 bp, Homo sapien
gtttagaaatcaggctggtgagagt

SEQ ID NO: 3037178 - DNA, 25 bp, Homo sapien
aggctgtctgtagttagagaccgac

SEQ ID NO: 3037179 - DNA, 25 bp, Homo sapien
gggagtttagaaatcaggctggtga

SEQ ID NO: 3037180 - DNA, 25 bp, Homo sapien
tggtctttgctgaggattgtatgag

SEQ ID NO: 3037181 - DNA, 25 bp, Homo sapien
ggattgtatgagcagcaaaactttc

SEQ ID NO: 3037182 - DNA, 25 bp, Homo sapien
gctatgacgtgcagggcaaatcaaa

SEQ ID NO: 3037183 - DNA, 25 bp, Homo sapien
caaaactttctgagctatgacgtgc

SEQ ID NO: 3037184 - DNA, 25 bp, Homo sapien
ccccaatatagggattcttggtgaa

SEQ ID NO: 3037185 - DNA, 25 bp, Homo sapien
cttggtgaagagtgctggtttcctc

SEQ ID NO: 3037186 - DNA, 25 bp, Homo sapien
ttccccaatatagggattcttggtg

SEQ ID NO: 3037187 - DNA, 25 bp, Homo sapien
caatatagggattcttggtgaagag

SEQ ID NO: 3037188 - DNA, 25 bp, Homo sapien
aactttgggcttttcacaactggcg

SEQ ID NO: 3037189 - DNA, 25 bp, Homo sapien
tttgggcttttcacaactggcgtgt

SEQ ID NO: 3037190 - DNA, 25 bp, Homo sapien
gggcttttcacaactggcgtgttct

SEQ ID NO: 3037191 - DNA, 25 bp, Homo sapien
ctttgggcttttcacaactggcgtg

SEQ ID NO: 3037192 - DNA, 25 bp, Homo sapien
tgttggtggcggagggctgcgcgtg

SEQ ID NO: 3037193 - DNA, 25 bp, Homo sapien
gctgtgtgaggactagaggcggccg

SEQ ID NO: 3037194 - DNA, 25 bp, Homo sapien
gtgtgaggactagaggcggccgagg

SEQ ID NO: 3037195 - DNA, 25 bp, Homo sapien
ccgaggcggcgacggagacggctcc

SEQ ID NO: 3037196 - DNA, 25 bp, Homo sapien
gctcacgcctgtaatctcagcactt

SEQ ID NO: 3037197 - DNA, 25 bp, Homo sapien
caaggtgggcagaacacaaggtcag

SEQ ID NO: 3037198 - DNA, 25 bp, Homo sapien
agttaaaaaatggctgggtgccgtg

SEQ ID NO: 3037199 - DNA, 25 bp, Homo sapien
tgggaggccaaggtgggcagaacac

SEQ ID NO: 3037200 - DNA, 25 bp, Homo sapien
ggatcttgctgtgtcccccagggct

SEQ ID NO: 3037201 - DNA, 25 bp, Homo sapien
ggcgcaatctcagcacaccccaacg

SEQ ID NO: 3037202 - DNA, 25 bp, Homo sapien
cagcacaccccaacgtctgcctccg

SEQ ID NO: 3037203 - DNA, 25 bp, Homo sapien
gcaatctcagcacaccccaacgtct

SEQ ID NO: 3037204 - DNA, 25 bp, Homo sapien
cattgatttgtcgatggacatgtga

SEQ ID NO: 3037205 - DNA, 25 bp, Homo sapien
gatttgtcgatggacatgtgagcca

SEQ ID NO: 3037206 - DNA, 25 bp, Homo sapien
tttcccattgatttgtcgatggaca

SEQ ID NO: 3037207 - DNA, 25 bp, Homo sapien
tcgatggacatgtgagccattttat

SEQ ID NO: 3037208 - DNA, 25 bp, Homo sapien
tgagtgacacagtgagactccgttt

SEQ ID NO: 3037209 - DNA, 25 bp, Homo sapien
tctgagtgacacagtgagactccgt

SEQ ID NO: 3037210 - DNA, 25 bp, Homo sapien
agtgacacagtgagactccgtttca

SEQ ID NO: 3037211 - DNA, 25 bp, Homo sapien
cagtctgagtgacacagtgagactc

SEQ ID NO: 3037212 - DNA, 25 bp, Homo sapien
aagccttgccttccttgtatatctc

SEQ ID NO: 3037213 - DNA, 25 bp, Homo sapien
agccttgccttccttgtatatctcc

SEQ ID NO: 3037214 - DNA, 25 bp, Homo sapien
ttgccttccttgtatatctccttgg

SEQ ID NO: 3037215 - DNA, 25 bp, Homo sapien
ccactgtgctatcctctatttatcc

SEQ ID NO: 3037216 - DNA, 25 bp, Homo sapien
cgccactcggcttcctatagtgcta

SEQ ID NO: 3037217 - DNA, 25 bp, Homo sapien
gagttttctctaggcaaggctttta

SEQ ID NO: 3037218 - DNA, 25 bp, Homo sapien
tatattactttagtggaaacagtaa

SEQ ID NO: 3037219 - DNA, 25 bp, Homo sapien
tcagcagccaggctaatctctgtat

SEQ ID NO: 3037220 - DNA, 25 bp, Homo sapien
cttgctcagcagccaggctaatctc

SEQ ID NO: 3037221 - DNA, 25 bp, Homo sapien
cagcagccaggctaatctctgtatt

SEQ ID NO: 3037222 - DNA, 25 bp, Homo sapien
gctcagcagccaggctaatctctgt

SEQ ID NO: 3037223 - DNA, 25 bp, Homo sapien
tgatcttcttattccaattttagca

SEQ ID NO: 3037224 - DNA, 25 bp, Homo sapien
atgctgatcttcttattccaatttt

SEQ ID NO: 3037225 - DNA, 25 bp, Homo sapien
gctgatcttcttattccaattttag

SEQ ID NO: 3037226 - DNA, 25 bp, Homo sapien
ccatgctgatcttcttattccaatt

SEQ ID NO: 3037227 - DNA, 25 bp, Homo sapien
ccctgtcgcccaggctgcattgcag

SEQ ID NO: 3037228 - DNA, 25 bp, Homo sapien
tttttagatggaattttgccctgtc

SEQ ID NO: 3037229 - DNA, 25 bp, Homo sapien
tgtcgcccaggctgcattgcagtag

SEQ ID NO: 3037230 - DNA, 25 bp, Homo sapien
ttttagatggaattttgccctgtcg

SEQ ID NO: 3037231 - DNA, 25 bp, Homo sapien
atgggtggcccaccacaagcttggg

SEQ ID NO: 3037232 - DNA, 25 bp, Homo sapien
ccaatgcaaggggtacctcgaggta

SEQ ID NO: 3037233 - DNA, 25 bp, Homo sapien
cagtatgggagtccgcaatagcccc

SEQ ID NO: 3037234 - DNA, 25 bp, Homo sapien
atccaatgcaaggtggaccccagcc

SEQ ID NO: 3037235 - DNA, 25 bp, Homo sapien
tctgtgccagctagagagaagttgc

SEQ ID NO: 3037236 - DNA, 25 bp, Homo sapien
aagttgctgtcattaccagttgtgg

SEQ ID NO: 3037237 - DNA, 25 bp, Homo sapien
cagttgtggtcctagcatctaaccc

SEQ ID NO: 3037238 - DNA, 25 bp, Homo sapien
caaagtacgggtaattcaacctgca

SEQ ID NO: 3037239 - DNA, 25 bp, Homo sapien
tcctggtgtattgccagacagctct

SEQ ID NO: 3037240 - DNA, 25 bp, Homo sapien
tggctgtcctggtgtattgccagac

SEQ ID NO: 3037241 - DNA, 25 bp, Homo sapien
gctgtcctggtgtattgccagacag

SEQ ID NO: 3037242 - DNA, 25 bp, Homo sapien
tgtcctggtgtattgccagacagct

SEQ ID NO: 3037243 - DNA, 25 bp, Homo sapien
gcccgtagggttttcatagtggaca

SEQ ID NO: 3037244 - DNA, 25 bp, Homo sapien
cagtggaggcttatcaagggttgca

SEQ ID NO: 3037245 - DNA, 25 bp, Homo sapien
catttctgagtagaccattgagcga

SEQ ID NO: 3037246 - DNA, 25 bp, Homo sapien
ttttggaccaaacagacgctcacag

SEQ ID NO: 3037247 - DNA, 25 bp, Homo sapien
gtaagagtgtaccatctgataaaag

SEQ ID NO: 3037248 - DNA, 25 bp, Homo sapien
agacataaaccctcgtccgggtgcg

SEQ ID NO: 3037249 - DNA, 25 bp, Homo sapien
tactgaaccttaggcagtgtgctga

SEQ ID NO: 3037250 - DNA, 25 bp, Homo sapien
tgactattggataattactgaacct

SEQ ID NO: 3037251 - DNA, 25 bp, Homo sapien
tagagacttacttttgatgcatgag

SEQ ID NO: 3037252 - DNA, 25 bp, Homo sapien
tactgggagactgatttactattca

SEQ ID NO: 3037253 - DNA, 25 bp, Homo sapien
caaggtaagactagagggactagag

SEQ ID NO: 3037254 - DNA, 25 bp, Homo sapien
ccatactaaatactaaggcaaggta

SEQ ID NO: 3037255 - DNA, 25 bp, Homo sapien
tacaccaaggctgttgttcaccggc

SEQ ID NO: 3037256 - DNA, 25 bp, Homo sapien
tatgcagattttcacccttagggac

SEQ ID NO: 3037257 - DNA, 25 bp, Homo sapien
cattttgcagggcaactgggactac

SEQ ID NO: 3037258 - DNA, 25 bp, Homo sapien
ggcctgaagattactgaagacccac

SEQ ID NO: 3037259 - DNA, 25 bp, Homo sapien
gatcagaaaagggagcaaccaacca

SEQ ID NO: 3037260 - DNA, 25 bp, Homo sapien
agagcattcggtcaaagcagggcgc

SEQ ID NO: 3037261 - DNA, 25 bp, Homo sapien
tcagatcctgcatgagagcgcttcc

SEQ ID NO: 3037262 - DNA, 25 bp, Homo sapien
gaacttcgcattccttgagatggac

SEQ ID NO: 3037263 - DNA, 25 bp, Homo sapien
tcgttgcggtcccagtaggtatccc

SEQ ID NO: 3037264 - DNA, 25 bp, Homo sapien
ctcaaactctcgaagggaacggctc

SEQ ID NO: 3037265 - DNA, 25 bp, Homo sapien
caagatgacctcatggctccaggct

SEQ ID NO: 3037266 - DNA, 25 bp, Homo sapien
gaacggctcctgaacagtctgctgg

SEQ ID NO: 3037267 - DNA, 25 bp, Homo sapien
gcagctccgtcttttgaatagctca

SEQ ID NO: 3037268 - DNA, 25 bp, Homo sapien
aatttactgggtggattcctaaatg

SEQ ID NO: 3037269 - DNA, 25 bp, Homo sapien
cctgtcctggtaatgtcacatgagt

SEQ ID NO: 3037270 - DNA, 25 bp, Homo sapien
tgtgatgttgatcaggtatacctgg

SEQ ID NO: 3037271 - DNA, 25 bp, Homo sapien
cgcagcacgggcgagatgcaggcgg

SEQ ID NO: 3037272 - DNA, 25 bp, Homo sapien
agaaagccccgctcgtagggccagg

SEQ ID NO: 3037273 - DNA, 25 bp, Homo sapien
cgcctgtcacgtagctggaggagcc

SEQ ID NO: 3037274 - DNA, 25 bp, Homo sapien
aggagccgcactcgcccaggtagga

SEQ ID NO: 3037275 - DNA, 25 bp, Homo sapien
ggatgtatgtgaccgcctccttgag

SEQ ID NO: 3037276 - DNA, 25 bp, Homo sapien
tcggaagcggatgtatgtgaccgcc

SEQ ID NO: 3037277 - DNA, 25 bp, Homo sapien
cgccgggtgtcggaagcggatgtat

SEQ ID NO: 3037278 - DNA, 25 bp, Homo sapien
cgggtccccgaaaggctgcagccgg

SEQ ID NO: 3037279 - DNA, 25 bp, Homo sapien
aagatgaccgggtagtagccgcgct

SEQ ID NO: 3037280 - DNA, 25 bp, Homo sapien
tccagggcgagcaagcaaaggccga

SEQ ID NO: 3037281 - DNA, 25 bp, Homo sapien
gacggcttgcaaacaaggctgcacc

SEQ ID NO: 3037282 - DNA, 25 bp, Homo sapien
aaaggccgagcacgttgcgggtgag

SEQ ID NO: 3037283 - DNA, 25 bp, Homo sapien
gcggcggggccgtctactcggcgag

SEQ ID NO: 3037284 - DNA, 25 bp, Homo sapien
ggcggcggggccgtctactcggcga

SEQ ID NO: 3037285 - DNA, 25 bp, Homo sapien
cggcggggccgtctactcggcgagc

SEQ ID NO: 3037286 - DNA, 25 bp, Homo sapien
tcaaggaaatcctcagcccgggagt

SEQ ID NO: 3037287 - DNA, 25 bp, Homo sapien
ggtcacaccgacaaatctgaagcgg

SEQ ID NO: 3037288 - DNA, 25 bp, Homo sapien
caagctttgggataggcatctcgac

SEQ ID NO: 3037289 - DNA, 25 bp, Homo sapien
catgggagaccacggaaataacacg

SEQ ID NO: 3037290 - DNA, 25 bp, Homo sapien
catccatggagactatgtacaaagg

SEQ ID NO: 3037291 - DNA, 25 bp, Homo sapien
gtacatgacacgtcttgacagccca

SEQ ID NO: 3037292 - DNA, 25 bp, Homo sapien
catatggcattaaagggagagcagc

SEQ ID NO: 3037293 - DNA, 25 bp, Homo sapien
ttgcaggcccctgctcactaggagg

SEQ ID NO: 3037294 - DNA, 25 bp, Homo sapien
gtgcaggtgagggtgtggggagaga

SEQ ID NO: 3037295 - DNA, 25 bp, Homo sapien
gcaggtgagggtgtggggagagagg

SEQ ID NO: 3037296 - DNA, 25 bp, Homo sapien
tagggtgcaggtgagggtgtgggga

SEQ ID NO: 3037297 - DNA, 25 bp, Homo sapien
ctagggtgcaggtgagggtgtgggg

SEQ ID NO: 3037298 - DNA, 25 bp, Homo sapien
cttctctcgggtggtgatggtgacc

SEQ ID NO: 3037299 - DNA, 25 bp, Homo sapien
agccttggcgatgtcataggcgcac

SEQ ID NO: 3037300 - DNA, 25 bp, Homo sapien
gttgagcagccgcagtgagctccgc

SEQ ID NO: 3037301 - DNA, 25 bp, Homo sapien
tgtcataggcgcactggatcacctg

SEQ ID NO: 3037302 - DNA, 25 bp, Homo sapien
caggagtgaggctggaccttggact

SEQ ID NO: 3037303 - DNA, 25 bp, Homo sapien
gggcaggagtgaggctggaccttgg

SEQ ID NO: 3037304 - DNA, 25 bp, Homo sapien
gggggcaggagtgaggctggacctt

SEQ ID NO: 3037305 - DNA, 25 bp, Homo sapien
gagggggcaggagtgaggctggacc

SEQ ID NO: 3037306 - DNA, 25 bp, Homo sapien
gagggaggccatctcggtcacagcc

SEQ ID NO: 3037307 - DNA, 25 bp, Homo sapien
atctcggtcacagccaaatggatct

SEQ ID NO: 3037308 - DNA, 25 bp, Homo sapien
gaggccatctcggtcacagccaaat

SEQ ID NO: 3037309 - DNA, 25 bp, Homo sapien
gccatctcggtcacagccaaatgga

SEQ ID NO: 3037310 - DNA, 25 bp, Homo sapien
ggctgcccgcaacagttcctgaatg

SEQ ID NO: 3037311 - DNA, 25 bp, Homo sapien
ctgggaagcccaggatctaggtctc

SEQ ID NO: 3037312 - DNA, 25 bp, Homo sapien
cccaggatctaggtctccatccagg

SEQ ID NO: 3037313 - DNA, 25 bp, Homo sapien
ctgggctgcccgcaacagttcctga

SEQ ID NO: 3037314 - DNA, 25 bp, Homo sapien
cccgcctcggcatgtgagcaggctg

SEQ ID NO: 3037315 - DNA, 25 bp, Homo sapien
aaagatacatatagagaaagacacg

SEQ ID NO: 3037316 - DNA, 25 bp, Homo sapien
agaaagacacgttccagcctcggag

SEQ ID NO: 3037317 - DNA, 25 bp, Homo sapien
tatagagaaagacacgttccagcct

SEQ ID NO: 3037318 - DNA, 25 bp, Homo sapien
cagtgggtccccactttgcgtgttc

SEQ ID NO: 3037319 - DNA, 25 bp, Homo sapien
agtcactgtcggctccactgccgtg

SEQ ID NO: 3037320 - DNA, 25 bp, Homo sapien
actttgcgtgttctcatagtcactg

SEQ ID NO: 3037321 - DNA, 25 bp, Homo sapien
ctccactgccgtggcgggaaagctt

SEQ ID NO: 3037322 - DNA, 25 bp, Homo sapien
cctgggagcaggacagcagcgggga

SEQ ID NO: 3037323 - DNA, 25 bp, Homo sapien
tgtggcggcttccctcctgggagca

SEQ ID NO: 3037324 - DNA, 25 bp, Homo sapien
agtgaagggcacagctgaggcagac

SEQ ID NO: 3037325 - DNA, 25 bp, Homo sapien
ctgaggcagacacccctttccggat

SEQ ID NO: 3037326 - DNA, 25 bp, Homo sapien
ccagcagggacgtgcactgaataga

SEQ ID NO: 3037327 - DNA, 25 bp, Homo sapien
cagcagggacgtgcactgaatagat

SEQ ID NO: 3037328 - DNA, 25 bp, Homo sapien
gctgcagccgcgtagtgagctcgtc

SEQ ID NO: 3037329 - DNA, 25 bp, Homo sapien
catacatggaaaaggcctggcgatc

SEQ ID NO: 3037330 - DNA, 25 bp, Homo sapien
cctggcgatccctgcggtgtgtgct

SEQ ID NO: 3037331 - DNA, 25 bp, Homo sapien
ccccaaagggcttcagggcagagcc

SEQ ID NO: 3037332 - DNA, 25 bp, Homo sapien
tccggagctcgtcgctcaggctact

SEQ ID NO: 3037333 - DNA, 25 bp, Homo sapien
gctcgtcgctcaggctactgttgac

SEQ ID NO: 3037334 - DNA, 25 bp, Homo sapien
agcctccggagctcgtcgctcaggc

SEQ ID NO: 3037335 - DNA, 25 bp, Homo sapien
gagctcgtcgctcaggctactgttg

SEQ ID NO: 3037336 - DNA, 25 bp, Homo sapien
ccccgtcagacaagtccgaggagtc

SEQ ID NO: 3037337 - DNA, 25 bp, Homo sapien
tgctgcacctttgcctccgatgtag

SEQ ID NO: 3037338 - DNA, 25 bp, Homo sapien
cagacaagtccgaggagtccatgct

SEQ ID NO: 3037339 - DNA, 25 bp, Homo sapien
ttgcctccgatgtagccagggcctt

SEQ ID NO: 3037340 - DNA, 25 bp, Homo sapien
tgcagagagagacctaagctggtca

SEQ ID NO: 3037341 - DNA, 25 bp, Homo sapien
gagagagacctaagctggtcagcac

SEQ ID NO: 3037342 - DNA, 25 bp, Homo sapien
cagagagagacctaagctggtcagc

SEQ ID NO: 3037343 - DNA, 25 bp, Homo sapien
ctgcagagagagacctaagctggtc

SEQ ID NO: 3037344 - DNA, 25 bp, Homo sapien
ggtctgtgtcctcgtcagaggccac

SEQ ID NO: 3037345 - DNA, 25 bp, Homo sapien
ctctggctccgcagagacagctcga

SEQ ID NO: 3037346 - DNA, 25 bp, Homo sapien
tggtcgtcgaggtcactctggctcc

SEQ ID NO: 3037347 - DNA, 25 bp, Homo sapien
cagaggccacgctgtcgtagtcgtg

SEQ ID NO: 3037348 - DNA, 25 bp, Homo sapien
ttgccctgctgtctccgcttggcct

SEQ ID NO: 3037349 - DNA, 25 bp, Homo sapien
tgtggggctgctcaggctcttgccc

SEQ ID NO: 3037350 - DNA, 25 bp, Homo sapien
gccctgctgtctccgcttggcctca

SEQ ID NO: 3037351 - DNA, 25 bp, Homo sapien
gggctgctcaggctcttgccctgct

SEQ ID NO: 3037352 - DNA, 25 bp, Homo sapien
aatgtcgatgatcaaggtggcaaac

SEQ ID NO: 3037353 - DNA, 25 bp, Homo sapien
tgagaatgtcgatgatcaaggtggc

SEQ ID NO: 3037354 - DNA, 25 bp, Homo sapien
caaactctcgggcattaaagcgggc

SEQ ID NO: 3037355 - DNA, 25 bp, Homo sapien
taaagcgggccagcttttgtcgccc

SEQ ID NO: 3037356 - DNA, 25 bp, Homo sapien
tccgcgtggctgagtattccgggtt

SEQ ID NO: 3037357 - DNA, 25 bp, Homo sapien
cgtggctgagtattccgggttaaca

SEQ ID NO: 3037358 - DNA, 25 bp, Homo sapien
ctgattccgcgtggctgagtattcc

SEQ ID NO: 3037359 - DNA, 25 bp, Homo sapien
gattccgcgtggctgagtattccgg

SEQ ID NO: 3037360 - DNA, 25 bp, Homo sapien
tcattttctcttcgatccacctcgt

SEQ ID NO: 3037361 - DNA, 25 bp, Homo sapien
atacacgtccatggcgagttcctca

SEQ ID NO: 3037362 - DNA, 25 bp, Homo sapien
gcatcattttctcttcgatccacct

SEQ ID NO: 3037363 - DNA, 25 bp, Homo sapien
acctcgtcatacacgtccatggcga

SEQ ID NO: 3037364 - DNA, 25 bp, Homo sapien
agcagctttggccaattcggataag

SEQ ID NO: 3037365 - DNA, 25 bp, Homo sapien
ctttggccaattcggataagtcaag

SEQ ID NO: 3037366 - DNA, 25 bp, Homo sapien
gctttggccaattcggataagtcaa

SEQ ID NO: 3037367 - DNA, 25 bp, Homo sapien
cagctttggccaattcggataagtc

SEQ ID NO: 3037368 - DNA, 25 bp, Homo sapien
ctccccaacatgcagggatcccggg

SEQ ID NO: 3037369 - DNA, 25 bp, Homo sapien
caacatgcagggatcccggggagat

SEQ ID NO: 3037370 - DNA, 25 bp, Homo sapien
cagcaacctccccaacatgcaggga

SEQ ID NO: 3037371 - DNA, 25 bp, Homo sapien
accccagatgctgcacaccaaatgc

SEQ ID NO: 3037372 - DNA, 25 bp, Homo sapien
tctgagacatgcacttttgccgaga

SEQ ID NO: 3037373 - DNA, 25 bp, Homo sapien
ctctgagacatgcacttttgccgag

SEQ ID NO: 3037374 - DNA, 25 bp, Homo sapien
ctgagacatgcacttttgccgagat

SEQ ID NO: 3037375 - DNA, 25 bp, Homo sapien
gattttttggatacacctggctgca

SEQ ID NO: 3037376 - DNA, 25 bp, Homo sapien
cagtgacctgtttgtccaccaccag

SEQ ID NO: 3037377 - DNA, 25 bp, Homo sapien
gcagcacacgccttttcacatcagg

SEQ ID NO: 3037378 - DNA, 25 bp, Homo sapien
cagtgataacaggtgcatatggcac

SEQ ID NO: 3037379 - DNA, 25 bp, Homo sapien
ccaggagagataaccaaggctcaga

SEQ ID NO: 3037380 - DNA, 25 bp, Homo sapien
gatgacttcacacttctgtgcctgg

SEQ ID NO: 3037381 - DNA, 25 bp, Homo sapien
gaactctccgctctcgggatggtca

SEQ ID NO: 3037382 - DNA, 25 bp, Homo sapien
cagccagtaagcagcagagatgact

SEQ ID NO: 3037383 - DNA, 25 bp, Homo sapien
cagcattagggactgaggactaagc

SEQ ID NO: 3037384 - DNA, 25 bp, Homo sapien
atggagctgacattttttacctgcc

SEQ ID NO: 3037385 - DNA, 25 bp, Homo sapien
gggagcagggtcctaggcctctgaa

SEQ ID NO: 3037386 - DNA, 25 bp, Homo sapien
ctatgcgggccacatatggagctga

SEQ ID NO: 3037387 - DNA, 25 bp, Homo sapien
atctgtgggatgatgtaatgcccat

SEQ ID NO: 3037388 - DNA, 25 bp, Homo sapien
tgtgggatgatgtaatgcccattct

SEQ ID NO: 3037389 - DNA, 25 bp, Homo sapien
tctgtgggatgatgtaatgcccatt

SEQ ID NO: 3037390 - DNA, 25 bp, Homo sapien
tgggatgatgtaatgcccattcttg

SEQ ID NO: 3037391 - DNA, 25 bp, Homo sapien
tattggcactcaaccagcctttccg

SEQ ID NO: 3037392 - DNA, 25 bp, Homo sapien
ttgcgtccacagaggtagaaggcca

SEQ ID NO: 3037393 - DNA, 25 bp, Homo sapien
gcttgcgtccacagaggtagaaggc

SEQ ID NO: 3037394 - DNA, 25 bp, Homo sapien
cggtcagtgagctcatattggcact

SEQ ID NO: 3037395 - DNA, 25 bp, Homo sapien
ttgcctgtccgcacgctcgagtgta

SEQ ID NO: 3037396 - DNA, 25 bp, Homo sapien
cacgtgcagaggtgtggtgcccttc

SEQ ID NO: 3037397 - DNA, 25 bp, Homo sapien
tgggtgtgcggccattaacatcagg

SEQ ID NO: 3037398 - DNA, 25 bp, Homo sapien
gagagcaggcgcagacatgtctcca

SEQ ID NO: 3037399 - DNA, 25 bp, Homo sapien
ctgcccaaaccagactatgtcggga

SEQ ID NO: 3037400 - DNA, 25 bp, Homo sapien
accagactatgtcgggaggacagag

SEQ ID NO: 3037401 - DNA, 25 bp, Homo sapien
agaggcttcccgctaggggttaatg

SEQ ID NO: 3037402 - DNA, 25 bp, Homo sapien
tcccgctaggggttaatgccaatta

SEQ ID NO: 3037403 - DNA, 25 bp, Homo sapien
gcatctggtacttggccctgatgaa

SEQ ID NO: 3037404 - DNA, 25 bp, Homo sapien
agcatctggtacttggccctgatga

SEQ ID NO: 3037405 - DNA, 25 bp, Homo sapien
ctccatcatcgtcccggcagggaag

SEQ ID NO: 3037406 - DNA, 25 bp, Homo sapien
tggcggtgactccatcatcgtcccg

SEQ ID NO: 3037407 - DNA, 25 bp, Homo sapien
ggagagggtggtcaccttgccacct

SEQ ID NO: 3037408 - DNA, 25 bp, Homo sapien
agcatggtgggagagggtggtcacc

SEQ ID NO: 3037409 - DNA, 25 bp, Homo sapien
gagggtggtcaccttgccacctccc

SEQ ID NO: 3037410 - DNA, 25 bp, Homo sapien
tgggagagggtggtcaccttgccac

SEQ ID NO: 3037411 - DNA, 25 bp, Homo sapien
atggagttggccccgttgctggcaa

SEQ ID NO: 3037412 - DNA, 25 bp, Homo sapien
cgttgctggcaagcgtgtgcaccat

SEQ ID NO: 3037413 - DNA, 25 bp, Homo sapien
ggttggctttacgccggccgctctg

SEQ ID NO: 3037414 - DNA, 25 bp, Homo sapien
ttacgccggccgctctgcacttgtg

SEQ ID NO: 3037415 - DNA, 25 bp, Homo sapien
ggtgcacgctgcagcactcgtcaca

SEQ ID NO: 3037416 - DNA, 25 bp, Homo sapien
aggctccggtgcacgctgcagcact

SEQ ID NO: 3037417 - DNA, 25 bp, Homo sapien
gcttgacaatggagatgtggcgtcc

SEQ ID NO: 3037418 - DNA, 25 bp, Homo sapien
caatggagatgtggcgtcccaggct

SEQ ID NO: 3037419 - DNA, 25 bp, Homo sapien
gaagccggaaatgatgcagcccaaa

SEQ ID NO: 3037420 - DNA, 25 bp, Homo sapien
ggaaggctgactatatatccacggc

SEQ ID NO: 3037421 - DNA, 25 bp, Homo sapien
tctgtggtcctaccggagaagccag

SEQ ID NO: 3037422 - DNA, 25 bp, Homo sapien
gctttacccaaatagtgaggcaccc

SEQ ID NO: 3037423 - DNA, 25 bp, Homo sapien
tgcagtccatatgcggcccaggcag

SEQ ID NO: 3037424 - DNA, 25 bp, Homo sapien
ccacatcatgaaggcaggcgagagt

SEQ ID NO: 3037425 - DNA, 25 bp, Homo sapien
cttggaagccccctaaggtgatgga

SEQ ID NO: 3037426 - DNA, 25 bp, Homo sapien
tagactaagggaaaagcccacatca

SEQ ID NO: 3037427 - DNA, 25 bp, Homo sapien
tacacacatgtaaaagcccatcagg

SEQ ID NO: 3037428 - DNA, 25 bp, Homo sapien
aaatcagcctgtagcttgtcccgta

SEQ ID NO: 3037429 - DNA, 25 bp, Homo sapien
cactcaggtgcaggcattgacacac

SEQ ID NO: 3037430 - DNA, 25 bp, Homo sapien
aagaggagcccaacatttgtcccac

SEQ ID NO: 3037431 - DNA, 25 bp, Homo sapien
ggggcgctgcagtccgcacacacct

SEQ ID NO: 3037432 - DNA, 25 bp, Homo sapien
gctgcagtccgcacacacctccgct

SEQ ID NO: 3037433 - DNA, 25 bp, Homo sapien
agtccgcacacacctccgctcgcgg

SEQ ID NO: 3037434 - DNA, 25 bp, Homo sapien
ccgctcgcggcccctttcgggacat

SEQ ID NO: 3037435 - DNA, 25 bp, Homo sapien
cctcagcggcgacgcggccgcagcc

SEQ ID NO: 3037436 - DNA, 25 bp, Homo sapien
tagatgcccctcaaccgcgccagcc

SEQ ID NO: 3037437 - DNA, 25 bp, Homo sapien
ggctgcagccacgacactctgctga

SEQ ID NO: 3037438 - DNA, 25 bp, Homo sapien
tgctcccggccactcctagatgccc

SEQ ID NO: 3037439 - DNA, 25 bp, Homo sapien
atgcacaggcatgctcccggccact

SEQ ID NO: 3037440 - DNA, 25 bp, Homo sapien
tgggctcaagaaggcaccgtgcctg

SEQ ID NO: 3037441 - DNA, 25 bp, Homo sapien
tgtggaatcccttattcctgccttg

SEQ ID NO: 3037442 - DNA, 25 bp, Homo sapien
gaaacctgagagagtttgcaagctt

SEQ ID NO: 3037443 - DNA, 25 bp, Homo sapien
tgccttgttctgaggtgggctcaag

SEQ ID NO: 3037444 - DNA, 25 bp, Homo sapien
gcagttggagctattcgaactctgg

SEQ ID NO: 3037445 - DNA, 25 bp, Homo sapien
cccaggaggtagtatctagattctc

SEQ ID NO: 3037446 - DNA, 25 bp, Homo sapien
caggccttgcaattggcgcttgaga

SEQ ID NO: 3037447 - DNA, 25 bp, Homo sapien
gctcttttaaggtcaggcagttgga

SEQ ID NO: 3037448 - DNA, 25 bp, Homo sapien
ctgcgggcgcgcgtccctgcggcgg

SEQ ID NO: 3037449 - DNA, 25 bp, Homo sapien
gcgcgtccctgcggcggcgtccccg

SEQ ID NO: 3037450 - DNA, 25 bp, Homo sapien
tgcgggcgcgcgtccctgcggcggc

SEQ ID NO: 3037451 - DNA, 25 bp, Homo sapien
ggcgcgcgtccctgcggcggcgtcc

SEQ ID NO: 3037452 - DNA, 25 bp, Homo sapien
gacacctcccgagtgagggtgcgga

SEQ ID NO: 3037453 - DNA, 25 bp, Homo sapien
tccccaacggtgagcgctttctctt

SEQ ID NO: 3037454 - DNA, 25 bp, Homo sapien
gagagtccgccccagccagttgagc

SEQ ID NO: 3037455 - DNA, 25 bp, Homo sapien
tcggactcacctagatgagagtaga

SEQ ID NO: 3037456 - DNA, 25 bp, Homo sapien
caccgggtatggaattctaggtcaa

SEQ ID NO: 3037457 - DNA, 25 bp, Homo sapien
tctaggtcaataccagtcatactgg

SEQ ID NO: 3037458 - DNA, 25 bp, Homo sapien
attgtttcctggcttacatagtttc

SEQ ID NO: 3037459 - DNA, 25 bp, Homo sapien
ggcactcttcaatcctttgtacaga

SEQ ID NO: 3037460 - DNA, 25 bp, Homo sapien
aaatcgccacccgtttgaggtcaag

SEQ ID NO: 3037461 - DNA, 25 bp, Homo sapien
ggagaagcgctgtcattttccccag

SEQ ID NO: 3037462 - DNA, 25 bp, Homo sapien
taccgctcagggtgatggaatccag

SEQ ID NO: 3037463 - DNA, 25 bp, Homo sapien
gtttttctgagagaggcaacggcag

SEQ ID NO: 3037464 - DNA, 25 bp, Homo sapien
gagcgacgtgggtctcccctaagct

SEQ ID NO: 3037465 - DNA, 25 bp, Homo sapien
ctccgctggagcgacgtgggtctcc

SEQ ID NO: 3037466 - DNA, 25 bp, Homo sapien
tccaagagttctggtctcccgcgag

SEQ ID NO: 3037467 - DNA, 25 bp, Homo sapien
agtcccagacgaggctcgcagtcca

SEQ ID NO: 3037468 - DNA, 25 bp, Homo sapien
acccgctcgcggagggccttgatct

SEQ ID NO: 3037469 - DNA, 25 bp, Homo sapien
agcatgttctccagagccgtgatgc

SEQ ID NO: 3037470 - DNA, 25 bp, Homo sapien
agccgtgatgcgctgctcctgggcc

SEQ ID NO: 3037471 - DNA, 25 bp, Homo sapien
tccaccagctcgcacagcatgttct

SEQ ID NO: 3037472 - DNA, 25 bp, Homo sapien
cagagtgcagcagggccgatcttac

SEQ ID NO: 3037473 - DNA, 25 bp, Homo sapien
gggcggaggacagagaggccgtgtc

SEQ ID NO: 3037474 - DNA, 25 bp, Homo sapien
gccagagtgcagcagggccgatctt

SEQ ID NO: 3037475 - DNA, 25 bp, Homo sapien
gacagagaggccgtgtcgtataggg

SEQ ID NO: 3037476 - DNA, 25 bp, Homo sapien
gcacgtccaggatgttgcgcttcgt

SEQ ID NO: 3037477 - DNA, 25 bp, Homo sapien
tcagcgaaatgagcacgggttcggc

SEQ ID NO: 3037478 - DNA, 25 bp, Homo sapien
tcgtgacccggagctcgcggtgctt

SEQ ID NO: 3037479 - DNA, 25 bp, Homo sapien
gggcacatagccgtccctcagcgaa

SEQ ID NO: 3037480 - DNA, 25 bp, Homo sapien
tcgtccgcttctagggccggctccg

SEQ ID NO: 3037481 - DNA, 25 bp, Homo sapien
tccgggcctggcgtatccgggtaca

SEQ ID NO: 3037482 - DNA, 25 bp, Homo sapien
cgtccgcttctagggccggctccgg

SEQ ID NO: 3037483 - DNA, 25 bp, Homo sapien
ggcctggcgtatccgggtacagatc

SEQ ID NO: 3037484 - DNA, 25 bp, Homo sapien
ctttctttcgtgtagcttgtagaac

SEQ ID NO: 3037485 - DNA, 25 bp, Homo sapien
cactttctttcgtgtagcttgtaga

SEQ ID NO: 3037486 - DNA, 25 bp, Homo sapien
ggttcacactttctttcgtgtagct

SEQ ID NO: 3037487 - DNA, 25 bp, Homo sapien
cacactttctttcgtgtagcttgta

SEQ ID NO: 3037488 - DNA, 25 bp, Homo sapien
cacgaaaggcggctcgtcggtaatc

SEQ ID NO: 3037489 - DNA, 25 bp, Homo sapien
tctttgctgctgaacgtgttcaggt

SEQ ID NO: 3037490 - DNA, 25 bp, Homo sapien
ttttgggcatgaaacccatgccccg

SEQ ID NO: 3037491 - DNA, 25 bp, Homo sapien
aatctcaaagtaccgaatgctgctg

SEQ ID NO: 3037492 - DNA, 25 bp, Homo sapien
aaatcagtcggttcaggggcgcgcc

SEQ ID NO: 3037493 - DNA, 25 bp, Homo sapien
caaaatcagtcggttcaggggcgcg

SEQ ID NO: 3037494 - DNA, 25 bp, Homo sapien
ctgcaaaatcagtcggttcaggggc

SEQ ID NO: 3037495 - DNA, 25 bp, Homo sapien
gggcgcgcccggacaaggccctcca

SEQ ID NO: 3037496 - DNA, 25 bp, Homo sapien
ccatccagtgccctgttctccctgc

SEQ ID NO: 3037497 - DNA, 25 bp, Homo sapien
gttctccctgcccggccgtgagcac

SEQ ID NO: 3037498 - DNA, 25 bp, Homo sapien
ccctgttctccctgcccggccgtga

SEQ ID NO: 3037499 - DNA, 25 bp, Homo sapien
cctgttctccctgcccggccgtgag

SEQ ID NO: 3037500 - DNA, 25 bp, Homo sapien
tcgggatcgtaaaagggcaatagga

SEQ ID NO: 3037501 - DNA, 25 bp, Homo sapien
tgcttgtgtccatctcctgcagtgc

SEQ ID NO: 3037502 - DNA, 25 bp, Homo sapien
cgatgctggagtcgggatcgtaaaa

SEQ ID NO: 3037503 - DNA, 25 bp, Homo sapien
aataggaccccgttgcttgtgtcca

SEQ ID NO: 3037504 - DNA, 25 bp, Homo sapien
aaccctatgccccaaacctctagtg

SEQ ID NO: 3037505 - DNA, 25 bp, Homo sapien
tgcccgagcacaggaggcgtgacca

SEQ ID NO: 3037506 - DNA, 25 bp, Homo sapien
cagaagcccctttacgcttcctggc

SEQ ID NO: 3037507 - DNA, 25 bp, Homo sapien
cctctagtgaccagagttgcaggcc

SEQ ID NO: 3037508 - DNA, 25 bp, Homo sapien
ccgctgcgcgccgcatgcagtcaca

SEQ ID NO: 3037509 - DNA, 25 bp, Homo sapien
gcgcgccgcatgcagtcacagcaaa

SEQ ID NO: 3037510 - DNA, 25 bp, Homo sapien
gctgcgcgccgcatgcagtcacagc

SEQ ID NO: 3037511 - DNA, 25 bp, Homo sapien
tgcgcgccgcatgcagtcacagcaa

SEQ ID NO: 3037512 - DNA, 25 bp, Homo sapien
agcgcaggatccttcacgcgacgca

SEQ ID NO: 3037513 - DNA, 25 bp, Homo sapien
gtgggggcgccagcgcaggatcctt

SEQ ID NO: 3037514 - DNA, 25 bp, Homo sapien
gggcgccagcgcaggatccttcacg

SEQ ID NO: 3037515 - DNA, 25 bp, Homo sapien
caggatccttcacgcgacgcagcaa

SEQ ID NO: 3037516 - DNA, 25 bp, Homo sapien
tccaggtgggcatgccctgcgggtg

SEQ ID NO: 3037517 - DNA, 25 bp, Homo sapien
tgatgccagtccccgaggcacacac

SEQ ID NO: 3037518 - DNA, 25 bp, Homo sapien
gggtgggtgtgagaatggcaggcgc

SEQ ID NO: 3037519 - DNA, 25 bp, Homo sapien
aggggtgggtgtgagaatggcaggc

SEQ ID NO: 3037520 - DNA, 25 bp, Homo sapien
gaagacggcccgcatgggcctcatc

SEQ ID NO: 3037521 - DNA, 25 bp, Homo sapien
tcgctggctcatgcgggtgaagccc

SEQ ID NO: 3037522 - DNA, 25 bp, Homo sapien
ccagctctcgctggctcatgcgggt

SEQ ID NO: 3037523 - DNA, 25 bp, Homo sapien
aagatatggccctggcgcgtgaaga

SEQ ID NO: 3037524 - DNA, 25 bp, Homo sapien
ttgggcgccagccacagcccgggaa

SEQ ID NO: 3037525 - DNA, 25 bp, Homo sapien
cagcgaggcttttcccgaatgggag

SEQ ID NO: 3037526 - DNA, 25 bp, Homo sapien
gggatgagcaaccagcttgctgact

SEQ ID NO: 3037527 - DNA, 25 bp, Homo sapien
ctcaaaggccgatccctagagcagg

SEQ ID NO: 3037528 - DNA, 25 bp, Homo sapien
gagttgccgctcactcatcctgctg

SEQ ID NO: 3037529 - DNA, 25 bp, Homo sapien
cgcgagttgccgctcactcatcctg

SEQ ID NO: 3037530 - DNA, 25 bp, Homo sapien
cgggtcccagagcgcgagttgccgc

SEQ ID NO: 3037531 - DNA, 25 bp, Homo sapien
ttgccgctcactcatcctgctgaag

SEQ ID NO: 3037532 - DNA, 25 bp, Homo sapien
ctgcggtgaagacagcccgcagcgg

SEQ ID NO: 3037533 - DNA, 25 bp, Homo sapien
tgcggtgaagacagcccgcagcggg

SEQ ID NO: 3037534 - DNA, 25 bp, Homo sapien
ggcgccctcgtgaggccgggcttgc

SEQ ID NO: 3037535 - DNA, 25 bp, Homo sapien
ggcgggcgccctcgtgaggccgggc

SEQ ID NO: 3037536 - DNA, 25 bp, Homo sapien
cgcaccccaggttagacttgaggct

SEQ ID NO: 3037537 - DNA, 25 bp, Homo sapien
tccaggagctcaggtttcatgcagg

SEQ ID NO: 3037538 - DNA, 25 bp, Homo sapien
gccccagaccctggaagatgcgtct

SEQ ID NO: 3037539 - DNA, 25 bp, Homo sapien
catccggctgggataagcaacgcgc

SEQ ID NO: 3037540 - DNA, 25 bp, Homo sapien
aatggtgggtacaagggtgctgaca

SEQ ID NO: 3037541 - DNA, 25 bp, Homo sapien
ctctgataatggtgggtacaagggt

SEQ ID NO: 3037542 - DNA, 25 bp, Homo sapien
gatgcgacaggtgaaagccgggacc

SEQ ID NO: 3037543 - DNA, 25 bp, Homo sapien
tagtctctggagcagggatgcgaca

SEQ ID NO: 3037544 - DNA, 25 bp, Homo sapien
gcaggctaccgttgctgttccagca

SEQ ID NO: 3037545 - DNA, 25 bp, Homo sapien
gcacacactgtggatgacgtctggg

SEQ ID NO: 3037546 - DNA, 25 bp, Homo sapien
cagatgatgatcacattgtcaccac

SEQ ID NO: 3037547 - DNA, 25 bp, Homo sapien
tcaatgatgcgcaaggtcttgtcct

SEQ ID NO: 3037548 - DNA, 25 bp, Homo sapien
cctcaagtgtgatgataggttccgt

SEQ ID NO: 3037549 - DNA, 25 bp, Homo sapien
catgggggtatagtctggaatctgc

SEQ ID NO: 3037550 - DNA, 25 bp, Homo sapien
taggttccgtaatgttgcgcatggg

SEQ ID NO: 3037551 - DNA, 25 bp, Homo sapien
cttggagtggccctcaagtgtgatg

SEQ ID NO: 3037552 - DNA, 25 bp, Homo sapien
actggctctcttgagtggtaagggt

SEQ ID NO: 3037553 - DNA, 25 bp, Homo sapien
ggtaagggtcaaatacagggcaaga

SEQ ID NO: 3037554 - DNA, 25 bp, Homo sapien
tcttgagtggtaagggtcaaataca

SEQ ID NO: 3037555 - DNA, 25 bp, Homo sapien
tttttaaccctactggctctcttga

SEQ ID NO: 3037556 - DNA, 25 bp, Homo sapien
taacgttgtcattgtgtggacacca

SEQ ID NO: 3037557 - DNA, 25 bp, Homo sapien
ggtggtgtcgtctgaggcactggcg

SEQ ID NO: 3037558 - DNA, 25 bp, Homo sapien
agtgggtagttcttatccactcgcc

SEQ ID NO: 3037559 - DNA, 25 bp, Homo sapien
tgtgcccagtgaccagtgggtagtt

SEQ ID NO: 3037560 - DNA, 25 bp, Homo sapien
cgtaggcctggtcggcctttgctgc

SEQ ID NO: 3037561 - DNA, 25 bp, Homo sapien
tccagcctccacaataatggccagg

SEQ ID NO: 3037562 - DNA, 25 bp, Homo sapien
gaccttggacacacggatgtcctcg

SEQ ID NO: 3037563 - DNA, 25 bp, Homo sapien
aaacacatggcggaacttgctttgc

SEQ ID NO: 3037564 - DNA, 25 bp, Homo sapien
gagaggtaggatctcagtgcccaga

SEQ ID NO: 3037565 - DNA, 25 bp, Homo sapien
gaaatgcctttggtccttagtcctg

SEQ ID NO: 3037566 - DNA, 25 bp, Homo sapien
cagagaggtaggatctcagtgccca

SEQ ID NO: 3037567 - DNA, 25 bp, Homo sapien
agaaatgcctttggtccttagtcct

SEQ ID NO: 3037568 - DNA, 25 bp, Homo sapien
tttaatgtaagtggctaggatttgg

SEQ ID NO: 3037569 - DNA, 25 bp, Homo sapien
ggattgtggagcctaacagactgaa

SEQ ID NO: 3037570 - DNA, 25 bp, Homo sapien
aaatgctgtttaatgtaagtggcta

SEQ ID NO: 3037571 - DNA, 25 bp, Homo sapien
gaaagctttctggacgttggaatgt

SEQ ID NO: 3037572 - DNA, 25 bp, Homo sapien
cttcacggacgtggttgtagctccc

SEQ ID NO: 3037573 - DNA, 25 bp, Homo sapien
accgccagccttgatgagcatctct

SEQ ID NO: 3037574 - DNA, 25 bp, Homo sapien
atgagcatctcttcacggacgtggt

SEQ ID NO: 3037575 - DNA, 25 bp, Homo sapien
acgtggttgtagctcccagaggcac

SEQ ID NO: 3037576 - DNA, 25 bp, Homo sapien
ccaccacaggataccgaactcgcat

SEQ ID NO: 3037577 - DNA, 25 bp, Homo sapien
cagccaccacaggataccgaactcg

SEQ ID NO: 3037578 - DNA, 25 bp, Homo sapien
tcttggcttaaagccaggtatgggg

SEQ ID NO: 3037579 - DNA, 25 bp, Homo sapien
taaagccaggtatggggccaagact

SEQ ID NO: 3037580 - DNA, 25 bp, Homo sapien
tgtccaccaatctgagtcctttctg

SEQ ID NO: 3037581 - DNA, 25 bp, Homo sapien
ctctggaatagttcaggcagatggg

SEQ ID NO: 3037582 - DNA, 25 bp, Homo sapien
tgccaagggggaagttcctcctgtc

SEQ ID NO: 3037583 - DNA, 25 bp, Homo sapien
ctgagtcctttctgctactgttttc

SEQ ID NO: 3037584 - DNA, 25 bp, Homo sapien
tgtctgtagtatctgggacccgggt

SEQ ID NO: 3037585 - DNA, 25 bp, Homo sapien
aggcttcagggcgaaggagccacct

SEQ ID NO: 3037586 - DNA, 25 bp, Homo sapien
gaaggagccacctctccgggtgtct

SEQ ID NO: 3037587 - DNA, 25 bp, Homo sapien
cacgctgcgaatcctctgcggaagg

SEQ ID NO: 3037588 - DNA, 25 bp, Homo sapien
ctagagcccggcgccgctgcagccc

SEQ ID NO: 3037589 - DNA, 25 bp, Homo sapien
gagcccggcgccgctgcagccccag

SEQ ID NO: 3037590 - DNA, 25 bp, Homo sapien
agagcccggcgccgctgcagcccca

SEQ ID NO: 3037591 - DNA, 25 bp, Homo sapien
tagagcccggcgccgctgcagcccc

SEQ ID NO: 3037592 - DNA, 25 bp, Homo sapien
gcttccgccggcctcggagaaccat

SEQ ID NO: 3037593 - DNA, 25 bp, Homo sapien
ctgccatcaacctaagagggcgggg

SEQ ID NO: 3037594 - DNA, 25 bp, Homo sapien
ggcctcggagaaccatcgaaaataa

SEQ ID NO: 3037595 - DNA, 25 bp, Homo sapien
ctccagcggcgggaaagtcgagcga

SEQ ID NO: 3037596 - DNA, 25 bp, Homo sapien
gctgctgcgttaaggatctccacaa

SEQ ID NO: 3037597 - DNA, 25 bp, Homo sapien
tactgattgggaagcacttcagggc

SEQ ID NO: 3037598 - DNA, 25 bp, Homo sapien
tagctcttcatgacgtcaagggacc

SEQ ID NO: 3037599 - DNA, 25 bp, Homo sapien
taacgatacactctggaacaccgga

SEQ ID NO: 3037600 - DNA, 25 bp, Homo sapien
acctttagcccattcgatgcctcag

SEQ ID NO: 3037601 - DNA, 25 bp, Homo sapien
ctttagcccattcgatgcctcaggt

SEQ ID NO: 3037602 - DNA, 25 bp, Homo sapien
cctttagcccattcgatgcctcagg

SEQ ID NO: 3037603 - DNA, 25 bp, Homo sapien
gcaaaatgagaagcaggtggcagct

SEQ ID NO: 3037604 - DNA, 25 bp, Homo sapien
ccctgcatgcaccagaaacagtaaa

SEQ ID NO: 3037605 - DNA, 25 bp, Homo sapien
gaaaccatgccttttctcagagggc

SEQ ID NO: 3037606 - DNA, 25 bp, Homo sapien
tgataaacggtcttgccatccagat

SEQ ID NO: 3037607 - DNA, 25 bp, Homo sapien
gaaagtcacatgtgtaggctcagaa

SEQ ID NO: 3037608 - DNA, 25 bp, Homo sapien
ttctagaaagtcacatgtgtaggct

SEQ ID NO: 3037609 - DNA, 25 bp, Homo sapien
ttcttctagaaagtcacatgtgtag

SEQ ID NO: 3037610 - DNA, 25 bp, Homo sapien
agaaagtcacatgtgtaggctcaga

SEQ ID NO: 3037611 - DNA, 25 bp, Homo sapien
tcagtctcctaagggggtgagttct

SEQ ID NO: 3037612 - DNA, 25 bp, Homo sapien
gtgagttctgccgtgttgctgacgg

SEQ ID NO: 3037613 - DNA, 25 bp, Homo sapien
cacatggtattatagaaggggttgg

SEQ ID NO: 3037614 - DNA, 25 bp, Homo sapien
ttgctgacggggtgccacggccagc

SEQ ID NO: 3037615 - DNA, 25 bp, Homo sapien
gggagcaaatactgctgactagaac

SEQ ID NO: 3037616 - DNA, 25 bp, Homo sapien
agaactagtcaattcaagtcctgcc

SEQ ID NO: 3037617 - DNA, 25 bp, Homo sapien
gctctgcacaatacactctgttgtt

SEQ ID NO: 3037618 - DNA, 25 bp, Homo sapien
ctgttgttgtgagttgttctacaaa

SEQ ID NO: 3037619 - DNA, 25 bp, Homo sapien
caggctacaggcaatgggtccattt

SEQ ID NO: 3037620 - DNA, 25 bp, Homo sapien
cctggaaaaccactcgagactcgat

SEQ ID NO: 3037621 - DNA, 25 bp, Homo sapien
cctaatttggcgagagaagctgagc

SEQ ID NO: 3037622 - DNA, 25 bp, Homo sapien
tactagagctatgtgggagtcgaca

SEQ ID NO: 3037623 - DNA, 25 bp, Homo sapien
tagctgggagtccttatatggcacc

SEQ ID NO: 3037624 - DNA, 25 bp, Homo sapien
tgtcttcagggctactcaggatgga

SEQ ID NO: 3037625 - DNA, 25 bp, Homo sapien
cagactcctggtatggaatcacagt

SEQ ID NO: 3037626 - DNA, 25 bp, Homo sapien
tatgactgacaaaaggtgctgctgt

SEQ ID NO: 3037627 - DNA, 25 bp, Homo sapien
taggtctgccacagaagaatcattc

SEQ ID NO: 3037628 - DNA, 25 bp, Homo sapien
gcattttccgagtgagactgcatga

SEQ ID NO: 3037629 - DNA, 25 bp, Homo sapien
taagcgctcttcgaactccaaggtg

SEQ ID NO: 3037630 - DNA, 25 bp, Homo sapien
agtctttggctagttcaggctgggc

SEQ ID NO: 3037631 - DNA, 25 bp, Homo sapien
caagatggacgaggctatcacctga

SEQ ID NO: 3037632 - DNA, 25 bp, Homo sapien
ttttcctaagactatgagcctccag

SEQ ID NO: 3037633 - DNA, 25 bp, Homo sapien
tacaagcagggagaatgcactgtct

SEQ ID NO: 3037634 - DNA, 25 bp, Homo sapien
gggaatagcccttggacacctctta

SEQ ID NO: 3037635 - DNA, 25 bp, Homo sapien
tcattaggcggaaaactataaagac

SEQ ID NO: 3037636 - DNA, 25 bp, Homo sapien
gaagagaacttcattaggcggaaaa

SEQ ID NO: 3037637 - DNA, 25 bp, Homo sapien
ctttgaagagaacttcattaggcgg

SEQ ID NO: 3037638 - DNA, 25 bp, Homo sapien
gagaacttcattaggcggaaaacta

SEQ ID NO: 3037639 - DNA, 25 bp, Homo sapien
atctgtccagcatgaaattccctag

SEQ ID NO: 3037640 - DNA, 25 bp, Homo sapien
gggctacttctaccactgacagtcg

SEQ ID NO: 3037641 - DNA, 25 bp, Homo sapien
gcatcttgtgggaccatatgttcca

SEQ ID NO: 3037642 - DNA, 25 bp, Homo sapien
taggcagtaggtggacattcatgtc

SEQ ID NO: 3037643 - DNA, 25 bp, Homo sapien
gtttaatgatcccaagaatcctcca

SEQ ID NO: 3037644 - DNA, 25 bp, Homo sapien
tgcctgcagatcactaatcagtcag

SEQ ID NO: 3037645 - DNA, 25 bp, Homo sapien
cactaatcagtcaggagagaatgag

SEQ ID NO: 3037646 - DNA, 25 bp, Homo sapien
tcccaagaatcctccaaagtatgtt

SEQ ID NO: 3037647 - DNA, 25 bp, Homo sapien
atttcccttctgttggttcaagcaa

SEQ ID NO: 3037648 - DNA, 25 bp, Homo sapien
gcctcatcatgttttagtcggttac

SEQ ID NO: 3037649 - DNA, 25 bp, Homo sapien
tatttcccttctgttggttcaagca

SEQ ID NO: 3037650 - DNA, 25 bp, Homo sapien
tcatgttttagtcggttacactaaa

SEQ ID NO: 3037651 - DNA, 25 bp, Homo sapien
agccttgtgtaggggccatgccaat

SEQ ID NO: 3037652 - DNA, 25 bp, Homo sapien
ttgtcagccttgtgtaggggccatg

SEQ ID NO: 3037653 - DNA, 25 bp, Homo sapien
tcagccttgtgtaggggccatgcca

SEQ ID NO: 3037654 - DNA, 25 bp, Homo sapien
cttctctgtatagttccaattttag

SEQ ID NO: 3037655 - DNA, 25 bp, Homo sapien
tgtgtgatgtgcatcgcccaagatg

SEQ ID NO: 3037656 - DNA, 25 bp, Homo sapien
gcatcagctaactagacctcagtgt

SEQ ID NO: 3037657 - DNA, 25 bp, Homo sapien
tcaggctgcctatagttactttttg

SEQ ID NO: 3037658 - DNA, 25 bp, Homo sapien
aggttgcctactgccagctgaccaa

SEQ ID NO: 3037659 - DNA, 25 bp, Homo sapien
caccacaatataggaaattctagga

SEQ ID NO: 3037660 - DNA, 25 bp, Homo sapien
gccaaaagcagcctaagtgacatcc

SEQ ID NO: 3037661 - DNA, 25 bp, Homo sapien
aaataatcctaatctgagtctgctg

SEQ ID NO: 3037662 - DNA, 25 bp, Homo sapien
catccctagcactagatagtactta

SEQ ID NO: 3037663 - DNA, 25 bp, Homo sapien
tctgaaactccttcaacaactaagg

SEQ ID NO: 3037664 - DNA, 25 bp, Homo sapien
tgcagcaagagggtgaaccaggaat

SEQ ID NO: 3037665 - DNA, 25 bp, Homo sapien
tccatgaatcaagcctaggaagctg

SEQ ID NO: 3037666 - DNA, 25 bp, Homo sapien
aaaacccaacccaacagcttgcaga

SEQ ID NO: 3037667 - DNA, 25 bp, Homo sapien
aaacagctggttcttaccgatatag

SEQ ID NO: 3037668 - DNA, 25 bp, Homo sapien
gagaaactggtaatgtcaactgctg

SEQ ID NO: 3037669 - DNA, 25 bp, Homo sapien
cattcaagacctggtactgagtgga

SEQ ID NO: 3037670 - DNA, 25 bp, Homo sapien
ccaaagggataataacgtagtgcaa

SEQ ID NO: 3037671 - DNA, 25 bp, Homo sapien
gggcagagctatcccactggcagtg

SEQ ID NO: 3037672 - DNA, 25 bp, Homo sapien
tgttttgaaaactggattgatagag

SEQ ID NO: 3037673 - DNA, 25 bp, Homo sapien
catcttgctttagggaacttaaaag

SEQ ID NO: 3037674 - DNA, 25 bp, Homo sapien
ggccagcccatgcaaatcttaaatg

SEQ ID NO: 3037675 - DNA, 25 bp, Homo sapien
ttgcataggcaatcacggtggaggc

SEQ ID NO: 3037676 - DNA, 25 bp, Homo sapien
gtcataggctcggtccagattccag

SEQ ID NO: 3037677 - DNA, 25 bp, Homo sapien
gattccagccatattccttcattgc

SEQ ID NO: 3037678 - DNA, 25 bp, Homo sapien
ttgtctcatgaagcttgggttgggc

SEQ ID NO: 3037679 - DNA, 25 bp, Homo sapien
gcacaaggcatttagatccatgttt

SEQ ID NO: 3037680 - DNA, 25 bp, Homo sapien
tttgcagtgcacaaggcatttagat

SEQ ID NO: 3037681 - DNA, 25 bp, Homo sapien
gtgcacaaggcatttagatccatgt

SEQ ID NO: 3037682 - DNA, 25 bp, Homo sapien
tgcagtgcacaaggcatttagatcc

SEQ ID NO: 3037683 - DNA, 25 bp, Homo sapien
gagtgacattcaagatataccgtac

SEQ ID NO: 3037684 - DNA, 25 bp, Homo sapien
ctcaaagactcctgggaagaagtta

SEQ ID NO: 3037685 - DNA, 25 bp, Homo sapien
tccagtacgccaggagatccgttgc

SEQ ID NO: 3037686 - DNA, 25 bp, Homo sapien
gaagaagttatctatctctcgagtg

SEQ ID NO: 3037687 - DNA, 25 bp, Homo sapien
caggggtgccagctattgctttgtg

SEQ ID NO: 3037688 - DNA, 25 bp, Homo sapien
gaatcagtcagatgcaactcttaag

SEQ ID NO: 3037689 - DNA, 25 bp, Homo sapien
agattaaagttacccactgatacct

SEQ ID NO: 3037690 - DNA, 25 bp, Homo sapien
aaacagggacttctgttacacaggg

SEQ ID NO: 3037691 - DNA, 25 bp, Homo sapien
cggttctgtaagtcctctaagttgg

SEQ ID NO: 3037692 - DNA, 25 bp, Homo sapien
tctgtaagtcctctaagttggaggc

SEQ ID NO: 3037693 - DNA, 25 bp, Homo sapien
tgtaagtcctctaagttggaggcat

SEQ ID NO: 3037694 - DNA, 25 bp, Homo sapien
cctcggttctgtaagtcctctaagt

SEQ ID NO: 3037695 - DNA, 25 bp, Homo sapien
gacaaggttaaggagtattagcaaa

SEQ ID NO: 3037696 - DNA, 25 bp, Homo sapien
ctatggagccaaaaagacaaggtta

SEQ ID NO: 3037697 - DNA, 25 bp, Homo sapien
taccagtgccctttaagttgccagg

SEQ ID NO: 3037698 - DNA, 25 bp, Homo sapien
agcaaatcaaccaaacaatacttga

SEQ ID NO: 3037699 - DNA, 25 bp, Homo sapien
ggcattaatggaatttagcattaga

SEQ ID NO: 3037700 - DNA, 25 bp, Homo sapien
tctttcagaattagaggcattaatg

SEQ ID NO: 3037701 - DNA, 25 bp, Homo sapien
actctttcagaattagaggcattaa

SEQ ID NO: 3037702 - DNA, 25 bp, Homo sapien
atttagcattagaagacttaggttc

SEQ ID NO: 3037703 - DNA, 25 bp, Homo sapien
ttttagattgcagtctcgctctgtc

SEQ ID NO: 3037704 - DNA, 25 bp, Homo sapien
acttagttgggcaaaggcttccagc

SEQ ID NO: 3037705 - DNA, 25 bp, Homo sapien
tctgcaaagggtctctatcaacatc

SEQ ID NO: 3037706 - DNA, 25 bp, Homo sapien
tatgtgtccaatatacttgtttgcc

SEQ ID NO: 3037707 - DNA, 25 bp, Homo sapien
agccaaatcggacagcctccaggag

SEQ ID NO: 3037708 - DNA, 25 bp, Homo sapien
ttgaattcccgcaagttgcacacca

SEQ ID NO: 3037709 - DNA, 25 bp, Homo sapien
caggaacacatgctcaaatatctgt

SEQ ID NO: 3037710 - DNA, 25 bp, Homo sapien
tgtagggctatccatttgaccaagg

SEQ ID NO: 3037711 - DNA, 25 bp, Homo sapien
tttgaccaaggatcactatcatttc

SEQ ID NO: 3037712 - DNA, 25 bp, Homo sapien
attagcctttctgttcgttcacgtt

SEQ ID NO: 3037713 - DNA, 25 bp, Homo sapien
ctctttggatgtaatattctccaaa

SEQ ID NO: 3037714 - DNA, 25 bp, Homo sapien
ttctgttcgttcacgttcagtaggt

SEQ ID NO: 3037715 - DNA, 25 bp, Homo sapien
gcctttctgttcgttcacgttcagt

SEQ ID NO: 3037716 - DNA, 25 bp, Homo sapien
tctggcgacttcacaagccttgtgt

SEQ ID NO: 3037717 - DNA, 25 bp, Homo sapien
cacccaagtgagaaataggctgcct

SEQ ID NO: 3037718 - DNA, 25 bp, Homo sapien
tcgggccggtgggactgtacatctt

SEQ ID NO: 3037719 - DNA, 25 bp, Homo sapien
ggtagtagttatgcgctctggcgac

SEQ ID NO: 3037720 - DNA, 25 bp, Homo sapien
cactgacaaacattcttagagctaa

SEQ ID NO: 3037721 - DNA, 25 bp, Homo sapien
caaacttagagtaaatccatagaaa

SEQ ID NO: 3037722 - DNA, 25 bp, Homo sapien
gagttactaggacaaagatcatgca

SEQ ID NO: 3037723 - DNA, 25 bp, Homo sapien
gcaaaatgataaggcatattggcaa

SEQ ID NO: 3037724 - DNA, 25 bp, Homo sapien
tcattcttccaccaatagtacatca

SEQ ID NO: 3037725 - DNA, 25 bp, Homo sapien
caccaatagtacatcacagtgtttg

SEQ ID NO: 3037726 - DNA, 25 bp, Homo sapien
tccaccaatagtacatcacagtgtt

SEQ ID NO: 3037727 - DNA, 25 bp, Homo sapien
tcttccaccaatagtacatcacagt

SEQ ID NO: 3037728 - DNA, 25 bp, Homo sapien
tatacaatgtaaattaagaaaacaa

SEQ ID NO: 3037729 - DNA, 25 bp, Homo sapien
ctatacaatgtaaattaagaaaaca

SEQ ID NO: 3037730 - DNA, 25 bp, Homo sapien
atgtgaactctgttatccgtcgata

SEQ ID NO: 3037731 - DNA, 25 bp, Homo sapien
gatacaggtttgaatatgtgaactc

SEQ ID NO: 3037732 - DNA, 25 bp, Homo sapien
tgaactctgttatccgtcgatacac

SEQ ID NO: 3037733 - DNA, 25 bp, Homo sapien
tctgttatccgtcgatacactgaac

SEQ ID NO: 3037734 - DNA, 25 bp, Homo sapien
tcaccatccaaatgaattagcgtgt

SEQ ID NO: 3037735 - DNA, 25 bp, Homo sapien
tagcgtgtcgctccagagaggcaaa

SEQ ID NO: 3037736 - DNA, 25 bp, Homo sapien
gaggcaaaactaagcccatggtaca

SEQ ID NO: 3037737 - DNA, 25 bp, Homo sapien
tccaaatgaattagcgtgtcgctcc

SEQ ID NO: 3037738 - DNA, 25 bp, Homo sapien
atgagtttttgccatgttgactagg

SEQ ID NO: 3037739 - DNA, 25 bp, Homo sapien
gcctcagagtgatccacccgtctca

SEQ ID NO: 3037740 - DNA, 25 bp, Homo sapien
agatgagtttttgccatgttgacta

SEQ ID NO: 3037741 - DNA, 25 bp, Homo sapien
ctggtctcaaactcctggcctcaga

SEQ ID NO: 3037742 - DNA, 25 bp, Homo sapien
cagtgtcttgtctaccattagttga

SEQ ID NO: 3037743 - DNA, 25 bp, Homo sapien
gttcgattctggtaagtactttcca

SEQ ID NO: 3037744 - DNA, 25 bp, Homo sapien
tagttgaaaccactaccatatagcg

SEQ ID NO: 3037745 - DNA, 25 bp, Homo sapien
tcctaggacgatgctttcttcagtg

SEQ ID NO: 3037746 - DNA, 25 bp, Homo sapien
atgttgtcttctgggcggagtaaaa

SEQ ID NO: 3037747 - DNA, 25 bp, Homo sapien
ttctgggcggagtaaaatgaacatt

SEQ ID NO: 3037748 - DNA, 25 bp, Homo sapien
tcttctgggcggagtaaaatgaaca

SEQ ID NO: 3037749 - DNA, 25 bp, Homo sapien
tgtcttctgggcggagtaaaatgaa

SEQ ID NO: 3037750 - DNA, 25 bp, Homo sapien
taggtgttgtgcaccacaacgccta

SEQ ID NO: 3037751 - DNA, 25 bp, Homo sapien
gcacagaccactgcaccagggctga

SEQ ID NO: 3037752 - DNA, 25 bp, Homo sapien
cagggtagccaggactaactaccct

SEQ ID NO: 3037753 - DNA, 25 bp, Homo sapien
caggactaactaccctaggtgttgt

SEQ ID NO: 3037754 - DNA, 25 bp, Homo sapien
gcttgttccgtctgtggctgattct

SEQ ID NO: 3037755 - DNA, 25 bp, Homo sapien
tgttccgtctgtggctgattcttgg

SEQ ID NO: 3037756 - DNA, 25 bp, Homo sapien
ttccgtctgtggctgattcttggtg

SEQ ID NO: 3037757 - DNA, 25 bp, Homo sapien
tgcttgttccgtctgtggctgattc

SEQ ID NO: 3037758 - DNA, 25 bp, Homo sapien
gcacctttgacagttagaaagctct

SEQ ID NO: 3037759 - DNA, 25 bp, Homo sapien
aaaaagggcagcacctttgacagtt

SEQ ID NO: 3037760 - DNA, 25 bp, Homo sapien
tccccgtggtagaaaaagggcagca

SEQ ID NO: 3037761 - DNA, 25 bp, Homo sapien
agggcagcacctttgacagttagaa

SEQ ID NO: 3037762 - DNA, 25 bp, Homo sapien
cagttggaaattctccccgtggaat

SEQ ID NO: 3037763 - DNA, 25 bp, Homo sapien
gctggaatgtggcttacatctggca

SEQ ID NO: 3037764 - DNA, 25 bp, Homo sapien
aaatgtggttctagtggcgtccaac

SEQ ID NO: 3037765 - DNA, 25 bp, Homo sapien
ctggaaactctcccctgggaccata

SEQ ID NO: 3037766 - DNA, 25 bp, Homo sapien
tctgtgcagccaccttagcaaggct

SEQ ID NO: 3037767 - DNA, 25 bp, Homo sapien
ttggacttataccaagcagccttgc

SEQ ID NO: 3037768 - DNA, 25 bp, Homo sapien
tgctaagatccaagagaccagacct

SEQ ID NO: 3037769 - DNA, 25 bp, Homo sapien
tagttgggcctaattcaccatgtct

SEQ ID NO: 3037770 - DNA, 25 bp, Homo sapien
tgagggagactcctagacccctgat

SEQ ID NO: 3037771 - DNA, 25 bp, Homo sapien
tttggcctaagtgtcaaaccctgct

SEQ ID NO: 3037772 - DNA, 25 bp, Homo sapien
gggtccctctggaagtcacgagttc

SEQ ID NO: 3037773 - DNA, 25 bp, Homo sapien
caatgtgtctttgaggctaaggtca

SEQ ID NO: 3037774 - DNA, 25 bp, Homo sapien
tatttattacagttgaacccaggta

SEQ ID NO: 3037775 - DNA, 25 bp, Homo sapien
aacattgtagactccttcagttctg

SEQ ID NO: 3037776 - DNA, 25 bp, Homo sapien
tgctggttaacattgtagactcctt

SEQ ID NO: 3037777 - DNA, 25 bp, Homo sapien
cagttccggctgaaagtctaagttc

SEQ ID NO: 3037778 - DNA, 25 bp, Homo sapien
agatggcagttccggctgaaagtct

SEQ ID NO: 3037779 - DNA, 25 bp, Homo sapien
caggtaatcatctcacttcagcctt

SEQ ID NO: 3037780 - DNA, 25 bp, Homo sapien
gagtcagttttagcattttaggcag

SEQ ID NO: 3037781 - DNA, 25 bp, Homo sapien
aaaacatggaatagacaggtgacct

SEQ ID NO: 3037782 - DNA, 25 bp, Homo sapien
aactgaccaggattttctaatcaca

SEQ ID NO: 3037783 - DNA, 25 bp, Homo sapien
tatgtggtgagataatccagatttc

SEQ ID NO: 3037784 - DNA, 25 bp, Homo sapien
gagcatttcagcctataagcagaac

SEQ ID NO: 3037785 - DNA, 25 bp, Homo sapien
tatttaggcaaggtatgcacaccca

SEQ ID NO: 3037786 - DNA, 25 bp, Homo sapien
tagaaggaggcttcggctcatagca

SEQ ID NO: 3037787 - DNA, 25 bp, Homo sapien
gctcatagcagtgaggtcattacct

SEQ ID NO: 3037788 - DNA, 25 bp, Homo sapien
ggcctaatttctaagtgagagaaaa

SEQ ID NO: 3037789 - DNA, 25 bp, Homo sapien
tctggcctaatttctaagtgagaga

SEQ ID NO: 3037790 - DNA, 25 bp, Homo sapien
ttggctcattgcctcactgctacct

SEQ ID NO: 3037791 - DNA, 25 bp, Homo sapien
ttttgtattagtcggagatggtgat

SEQ ID NO: 3037792 - DNA, 25 bp, Homo sapien
caaggggcccgggtgtgtgatgttc

SEQ ID NO: 3037793 - DNA, 25 bp, Homo sapien
cccacaaggggcccgggtgtgtgat

SEQ ID NO: 3037794 - DNA, 25 bp, Homo sapien
atgctatccctccaccctcccgtga

SEQ ID NO: 3037795 - DNA, 25 bp, Homo sapien
ctccaccctcccgtgaccccacaag

SEQ ID NO: 3037796 - DNA, 25 bp, Homo sapien
taagtagcagagttcgaaccgaatc

SEQ ID NO: 3037797 - DNA, 25 bp, Homo sapien
acatcctagtcaggggtggacttgt

SEQ ID NO: 3037798 - DNA, 25 bp, Homo sapien
gaaccgaatccactatctatttaac

SEQ ID NO: 3037799 - DNA, 25 bp, Homo sapien
gtttggtgcttgaagggtcccagaa

SEQ ID NO: 3037800 - DNA, 25 bp, Homo sapien
tctccagtgaacaaaggcttgctat

SEQ ID NO: 3037801 - DNA, 25 bp, Homo sapien
gagaaggtgctgaactcatcctctg

SEQ ID NO: 3037802 - DNA, 25 bp, Homo sapien
ctatgtaaaacagatgagctgcggg

SEQ ID NO: 3037803 - DNA, 25 bp, Homo sapien
tccttaaagctggattgacctcgca

SEQ ID NO: 3037804 - DNA, 25 bp, Homo sapien
tgctacaggacctaagcaagtctgt

SEQ ID NO: 3037805 - DNA, 25 bp, Homo sapien
taggtgcctatggatactgtttaga

SEQ ID NO: 3037806 - DNA, 25 bp, Homo sapien
tactcatatagcctaaaagatggaa

SEQ ID NO: 3037807 - DNA, 25 bp, Homo sapien
aagaaagagcctttgagaaacatgc

SEQ ID NO: 3037808 - DNA, 25 bp, Homo sapien
gtcctttgtcctagcaatcccagaa

SEQ ID NO: 3037809 - DNA, 25 bp, Homo sapien
tagggacatgggcaaagattgaagc

SEQ ID NO: 3037810 - DNA, 25 bp, Homo sapien
tcccagaattgacccttaggatatg

SEQ ID NO: 3037811 - DNA, 25 bp, Homo sapien
caacaatcggattgaatatgaatca

SEQ ID NO: 3037812 - DNA, 25 bp, Homo sapien
aaaaaatcactcacccagggcaagt

SEQ ID NO: 3037813 - DNA, 25 bp, Homo sapien
ggttttcaccgtgttcaacaagatg

SEQ ID NO: 3037814 - DNA, 25 bp, Homo sapien
cactggcccggttgcttcactgata

SEQ ID NO: 3037815 - DNA, 25 bp, Homo sapien
cctgggtagttaggacgagaggtat

SEQ ID NO: 3037816 - DNA, 25 bp, Homo sapien
gaaaattccagtagcatgggcatag

SEQ ID NO: 3037817 - DNA, 25 bp, Homo sapien
catagtagactacgataactgggac

SEQ ID NO: 3037818 - DNA, 25 bp, Homo sapien
taactgggactgactatgggagagc

SEQ ID NO: 3037819 - DNA, 25 bp, Homo sapien
aaatgtactcaagcacttccaaggg

SEQ ID NO: 3037820 - DNA, 25 bp, Homo sapien
gagaatcctatcataaaggaatggg

SEQ ID NO: 3037821 - DNA, 25 bp, Homo sapien
tcagacgtccacacactcctgggtt

SEQ ID NO: 3037822 - DNA, 25 bp, Homo sapien
cagacgtccacacactcctgggttt

SEQ ID NO: 3037823 - DNA, 25 bp, Homo sapien
ggaaaaatagctatcagcacaccct

SEQ ID NO: 3037824 - DNA, 25 bp, Homo sapien
catttgggcttaatgtaacatggca

SEQ ID NO: 3037825 - DNA, 25 bp, Homo sapien
ggtcccggcgtgtattagggcataa

SEQ ID NO: 3037826 - DNA, 25 bp, Homo sapien
cctctgtgtcatgggaataaccctg

SEQ ID NO: 3037827 - DNA, 25 bp, Homo sapien
gacgtgatgctgatgtaataataat

SEQ ID NO: 3037828 - DNA, 25 bp, Homo sapien
gatgtaataataatatctaaagcta

SEQ ID NO: 3037829 - DNA, 25 bp, Homo sapien
tgtaataataatatctaaagctaag

SEQ ID NO: 3037830 - DNA, 25 bp, Homo sapien
aataataatatctaaagctaagcac

SEQ ID NO: 3037831 - DNA, 25 bp, Homo sapien
cactagcagatagtttaatgatttc

SEQ ID NO: 3037832 - DNA, 25 bp, Homo sapien
tttgctttggattacttgagtgtgt

SEQ ID NO: 3037833 - DNA, 25 bp, Homo sapien
aaagccactagcagatagtttaatg

SEQ ID NO: 3037834 - DNA, 25 bp, Homo sapien
ttctgttcttgtgttgcctgtgggg

SEQ ID NO: 3037835 - DNA, 25 bp, Homo sapien
tttaccatcatgctagtgtgccact

SEQ ID NO: 3037836 - DNA, 25 bp, Homo sapien
tgatggaaatgacagaatgtttacc

SEQ ID NO: 3037837 - DNA, 25 bp, Homo sapien
gctaccatatcgtatttaatcctca

SEQ ID NO: 3037838 - DNA, 25 bp, Homo sapien
taatttggctcatatcaaaagagca

SEQ ID NO: 3037839 - DNA, 25 bp, Homo sapien
agtttaattcgatttggtaggatag

SEQ ID NO: 3037840 - DNA, 25 bp, Homo sapien
gttgtgagattatctagaaatcacc

SEQ ID NO: 3037841 - DNA, 25 bp, Homo sapien
ctcaaacgagtttaattcgatttgg

SEQ ID NO: 3037842 - DNA, 25 bp, Homo sapien
caccatgaatcaacacacgggagaa

SEQ ID NO: 3037843 - DNA, 25 bp, Homo sapien
tattctctagacctttaataaggga

SEQ ID NO: 3037844 - DNA, 25 bp, Homo sapien
tgttgttggacattaaaaagttgac

SEQ ID NO: 3037845 - DNA, 25 bp, Homo sapien
tctctagacctttaataagggataa

SEQ ID NO: 3037846 - DNA, 25 bp, Homo sapien
tgctattctctagacctttaataag

SEQ ID NO: 3037847 - DNA, 25 bp, Homo sapien
gccacttggaatgagtgtcaacaca

SEQ ID NO: 3037848 - DNA, 25 bp, Homo sapien
taggaaaatcccagcaggtgactcc

SEQ ID NO: 3037849 - DNA, 25 bp, Homo sapien
taagtaaccttaaaccactgcattg

SEQ ID NO: 3037850 - DNA, 25 bp, Homo sapien
cagaaacagctaaaccacagtggaa

SEQ ID NO: 3037851 - DNA, 25 bp, Homo sapien
aactaccgaaatctagccttctgga

SEQ ID NO: 3037852 - DNA, 25 bp, Homo sapien
gcatttgcgctttggtgaatgaagg

SEQ ID NO: 3037853 - DNA, 25 bp, Homo sapien
caggcttgggctgtgagcacgtacc

SEQ ID NO: 3037854 - DNA, 25 bp, Homo sapien
tggaatcactccagactacaaccag

SEQ ID NO: 3037855 - DNA, 25 bp, Homo sapien
agctgtcactcggtcaccacaactt

SEQ ID NO: 3037856 - DNA, 25 bp, Homo sapien
aaacagctcagctgtcactcggtca

SEQ ID NO: 3037857 - DNA, 25 bp, Homo sapien
gcaggacccacagggactcccgctt

SEQ ID NO: 3037858 - DNA, 25 bp, Homo sapien
ttccgattctgtcgactacccttca

SEQ ID NO: 3037859 - DNA, 25 bp, Homo sapien
gttgatggcgttctgcgagatgacc

SEQ ID NO: 3037860 - DNA, 25 bp, Homo sapien
ccgcgttggcggagaagtaaggaat

SEQ ID NO: 3037861 - DNA, 25 bp, Homo sapien
cgttctgcgagatgaccgcgttggc

SEQ ID NO: 3037862 - DNA, 25 bp, Homo sapien
cgttggcggagaagtaaggaatcat

SEQ ID NO: 3037863 - DNA, 25 bp, Homo sapien
cctcttgcgggccaacgtgctcagg

SEQ ID NO: 3037864 - DNA, 25 bp, Homo sapien
tgcgggccaacgtgctcagggtcat

SEQ ID NO: 3037865 - DNA, 25 bp, Homo sapien
gcgccttcctcttgcgggccaacgt

SEQ ID NO: 3037866 - DNA, 25 bp, Homo sapien
aggtgcaagcgaggggcgccttcct

SEQ ID NO: 3037867 - DNA, 25 bp, Homo sapien
ggctcaaagtgcacaactccgcatc

SEQ ID NO: 3037868 - DNA, 25 bp, Homo sapien
gggccggctcaaagtgcacaactcc

SEQ ID NO: 3037869 - DNA, 25 bp, Homo sapien
tctgctccggcacgaggcgcaggct

SEQ ID NO: 3037870 - DNA, 25 bp, Homo sapien
aaagtgcacaactccgcatcctggc

SEQ ID NO: 3037871 - DNA, 25 bp, Homo sapien
tgagccagggctcccggcaagattt

SEQ ID NO: 3037872 - DNA, 25 bp, Homo sapien
agccagggctcccggcaagattttt

SEQ ID NO: 3037873 - DNA, 25 bp, Homo sapien
gagccagggctcccggcaagatttt

SEQ ID NO: 3037874 - DNA, 25 bp, Homo sapien
taaaattggaatctcttgaaggtgg

SEQ ID NO: 3037875 - DNA, 25 bp, Homo sapien
caggctgcaccttaataaaattgga

SEQ ID NO: 3037876 - DNA, 25 bp, Homo sapien
cagccttagctgcacataggaatta

SEQ ID NO: 3037877 - DNA, 25 bp, Homo sapien
gagacggcagagtagagatcatatc

SEQ ID NO: 3037878 - DNA, 25 bp, Homo sapien
atggcatggtaatcatctgtatctg

SEQ ID NO: 3037879 - DNA, 25 bp, Homo sapien
atggtaatcatctgtatctgtctga

SEQ ID NO: 3037880 - DNA, 25 bp, Homo sapien
tgatggcatggtaatcatctgtatc

SEQ ID NO: 3037881 - DNA, 25 bp, Homo sapien
tgtcttttataaataggttcctata

SEQ ID NO: 3037882 - DNA, 25 bp, Homo sapien
ctgaatgcttaaatctttttagaat

SEQ ID NO: 3037883 - DNA, 25 bp, Homo sapien
gcttgtatatgcaaacagcaatata

SEQ ID NO: 3037884 - DNA, 25 bp, Homo sapien
gctctttaagaagcatacatgcaca

SEQ ID NO: 3037885 - DNA, 25 bp, Homo sapien
tcatcatcttactcccagagatgat

SEQ ID NO: 3037886 - DNA, 25 bp, Homo sapien
gaatggaggctaaaagagccaagaa

SEQ ID NO: 3037887 - DNA, 25 bp, Homo sapien
ccacacctgtcgagacgaagtcttg

SEQ ID NO: 3037888 - DNA, 25 bp, Homo sapien
agttctcctggctcaacttccaagt

SEQ ID NO: 3037889 - DNA, 25 bp, Homo sapien
ggtgaatgaacctaatgtggcctaa

SEQ ID NO: 3037890 - DNA, 25 bp, Homo sapien
ccttgcccagcctaattagattatt

SEQ ID NO: 3037891 - DNA, 25 bp, Homo sapien
accttgcccagcctaattagattat

SEQ ID NO: 3037892 - DNA, 25 bp, Homo sapien
ggtaccaaccaatctacctgggcta

SEQ ID NO: 3037893 - DNA, 25 bp, Homo sapien
gggaagatccagtctcaatgtaagc

SEQ ID NO: 3037894 - DNA, 25 bp, Homo sapien
taattttaggtatcaatgtaactgg

SEQ ID NO: 3037895 - DNA, 25 bp, Homo sapien
ggtcttcttactcttacttaattgc

SEQ ID NO: 3037896 - DNA, 25 bp, Homo sapien
gagaattactctaaaggcttccctg

SEQ ID NO: 3037897 - DNA, 25 bp, Homo sapien
agtatcccggtgtctccagcttgca

SEQ ID NO: 3037898 - DNA, 25 bp, Homo sapien
gggactccaggatttactccagtga

SEQ ID NO: 3037899 - DNA, 25 bp, Homo sapien
gacttggactgagaaaccctaccag

SEQ ID NO: 3037900 - DNA, 25 bp, Homo sapien
gatcaacattgccaactgtggacaa

SEQ ID NO: 3037901 - DNA, 25 bp, Homo sapien
aaaaagttaatcatccggtcatgaa

SEQ ID NO: 3037902 - DNA, 25 bp, Homo sapien
taaaactgtaaggtgcaggatggca

SEQ ID NO: 3037903 - DNA, 25 bp, Homo sapien
tcctatactcgttgtgctctcactg

SEQ ID NO: 3037904 - DNA, 25 bp, Homo sapien
aattcatgcctattaattgccaggg

SEQ ID NO: 3037905 - DNA, 25 bp, Homo sapien
gattggaccttgaggatgaaaaatg

SEQ ID NO: 3037906 - DNA, 25 bp, Homo sapien
tttaacaattaggtaattcatgcct

SEQ ID NO: 3037907 - DNA, 25 bp, Homo sapien
taattgccagggcttggattggacc

SEQ ID NO: 3037908 - DNA, 25 bp, Homo sapien
gaaggttctattggtggtctcagca

SEQ ID NO: 3037909 - DNA, 25 bp, Homo sapien
tcatgagcagcttctagaatcaggc

SEQ ID NO: 3037910 - DNA, 25 bp, Homo sapien
tagactccttcagtagcagcttggc

SEQ ID NO: 3037911 - DNA, 25 bp, Homo sapien
caaaaagtgatagcccaaagcccag

SEQ ID NO: 3037912 - DNA, 25 bp, Homo sapien
cacggtgcccagcccaataactttt

SEQ ID NO: 3037913 - DNA, 25 bp, Homo sapien
ctcctgccttagcctatcgagtaac

SEQ ID NO: 3037914 - DNA, 25 bp, Homo sapien
caatggcgcagtctcagctcactgc

SEQ ID NO: 3037915 - DNA, 25 bp, Homo sapien
ctcactccattgcccgggctagagt

SEQ ID NO: 3037916 - DNA, 25 bp, Homo sapien
tattttcggactcagacttggactc

SEQ ID NO: 3037917 - DNA, 25 bp, Homo sapien
acttggactcagcaaatggtggact

SEQ ID NO: 3037918 - DNA, 25 bp, Homo sapien
caacgctttatgttgatagtggcca

SEQ ID NO: 3037919 - DNA, 25 bp, Homo sapien
ttaagcctttggacttggactggaa

SEQ ID NO: 3037920 - DNA, 25 bp, Homo sapien
gctaagagacacgagaaattaagcc

SEQ ID NO: 3037921 - DNA, 25 bp, Homo sapien
tacgatgcctctggtacacattcag

SEQ ID NO: 3037922 - DNA, 25 bp, Homo sapien
tagccctatgcaaaagaaggacact

SEQ ID NO: 3037923 - DNA, 25 bp, Homo sapien
aaagcttgaaattgactcagagagc

SEQ ID NO: 3037924 - DNA, 25 bp, Homo sapien
tcctttcctgggcaaccaagcctag

SEQ ID NO: 3037925 - DNA, 25 bp, Homo sapien
cctgggcaaccaagcctagctctgt

SEQ ID NO: 3037926 - DNA, 25 bp, Homo sapien
catctacctttacatcattctgcct

SEQ ID NO: 3037927 - DNA, 25 bp, Homo sapien
ctcatctacctttacatcattctgc

SEQ ID NO: 3037928 - DNA, 25 bp, Homo sapien
cccacgttgttgcataaaatagcag

SEQ ID NO: 3037929 - DNA, 25 bp, Homo sapien
tacaaatcttaagtgcgccatttaa

SEQ ID NO: 3037930 - DNA, 25 bp, Homo sapien
tatgtgtctacgtaattcaaactgc

SEQ ID NO: 3037931 - DNA, 25 bp, Homo sapien
tatcgctgaggattccatcacatga

SEQ ID NO: 3037932 - DNA, 25 bp, Homo sapien
cgtgcccagctcaatcttttatatt

SEQ ID NO: 3037933 - DNA, 25 bp, Homo sapien
ctctttaaagatatcaataggccat

SEQ ID NO: 3037934 - DNA, 25 bp, Homo sapien
aagatatcaataggccatatttttg

SEQ ID NO: 3037935 - DNA, 25 bp, Homo sapien
tcaataggccatatttttggcatat

SEQ ID NO: 3037936 - DNA, 25 bp, Homo sapien
gctgtcagccttgaacactgggcta

SEQ ID NO: 3037937 - DNA, 25 bp, Homo sapien
acaatgccctatgtgcagatggaac

SEQ ID NO: 3037938 - DNA, 25 bp, Homo sapien
tgttgtatcaacctagaaagcccct

SEQ ID NO: 3037939 - DNA, 25 bp, Homo sapien
cagatggaactcaataaagggtcga

SEQ ID NO: 3037940 - DNA, 25 bp, Homo sapien
gcatgcaatatggaaacttcacaag

SEQ ID NO: 3037941 - DNA, 25 bp, Homo sapien
ctgtcacatctgacaggcatgcaat

SEQ ID NO: 3037942 - DNA, 25 bp, Homo sapien
taagtcttacagtgttctgaacctg

SEQ ID NO: 3037943 - DNA, 25 bp, Homo sapien
ttagtaacaaaaagctccaggcctc

SEQ ID NO: 3037944 - DNA, 25 bp, Homo sapien
aattgttattacagcactacctggc

SEQ ID NO: 3037945 - DNA, 25 bp, Homo sapien
ccattttccccaactgacttgaaat

SEQ ID NO: 3037946 - DNA, 25 bp, Homo sapien
gtatatggttgaagatagagctatc

SEQ ID NO: 3037947 - DNA, 25 bp, Homo sapien
gaaattctaccttaatcatacacta

SEQ ID NO: 3037948 - DNA, 25 bp, Homo sapien
cctccccaaaactgaacagagctgg

SEQ ID NO: 3037949 - DNA, 25 bp, Homo sapien
gatgagtacacctgataggaagccc

SEQ ID NO: 3037950 - DNA, 25 bp, Homo sapien
gcccagcccgccaagggtattctta

SEQ ID NO: 3037951 - DNA, 25 bp, Homo sapien
tgtacagtcccaatagagagttagc

SEQ ID NO: 3037952 - DNA, 25 bp, Homo sapien
ctcaggctttgacccttgcactggg

SEQ ID NO: 3037953 - DNA, 25 bp, Homo sapien
tcctaacccacttgggcaccaatat

SEQ ID NO: 3037954 - DNA, 25 bp, Homo sapien
tacaggtacattttgggtacatatg

SEQ ID NO: 3037955 - DNA, 25 bp, Homo sapien
cagagatgtctttgaggagtttcat

SEQ ID NO: 3037956 - DNA, 25 bp, Homo sapien
cacaggaataaaatgcttggtttcc

SEQ ID NO: 3037957 - DNA, 25 bp, Homo sapien
ccaggaagttccaggtaatatgcat

SEQ ID NO: 3037958 - DNA, 25 bp, Homo sapien
tggcatatccctcagtatagctttt

SEQ ID NO: 3037959 - DNA, 25 bp, Homo sapien
cttctaaaacttggctaaacacatt

SEQ ID NO: 3037960 - DNA, 25 bp, Homo sapien
gcatctggccttttgctgactttat

SEQ ID NO: 3037961 - DNA, 25 bp, Homo sapien
cttagtttataaggctgcagcatct

SEQ ID NO: 3037962 - DNA, 25 bp, Homo sapien
ccccaagccaggttaggtccctgat

SEQ ID NO: 3037963 - DNA, 25 bp, Homo sapien
ttatggtttatcacatgcaccacca

SEQ ID NO: 3037964 - DNA, 25 bp, Homo sapien
gtgttcttaacccttgattcatatt

SEQ ID NO: 3037965 - DNA, 25 bp, Homo sapien
aataccaatacctgggccctactca

SEQ ID NO: 3037966 - DNA, 25 bp, Homo sapien
actataggagtacaccacccccttg

SEQ ID NO: 3037967 - DNA, 25 bp, Homo sapien
taacccttgattcatattagaataa

SEQ ID NO: 3037968 - DNA, 25 bp, Homo sapien
attggaatcagtaaagatttctgat

SEQ ID NO: 3037969 - DNA, 25 bp, Homo sapien
cattcacagcaaagtaatgctgctg

SEQ ID NO: 3037970 - DNA, 25 bp, Homo sapien
ctgattcttcacattcacagcaaag

SEQ ID NO: 3037971 - DNA, 25 bp, Homo sapien
aatgctgctgattcactgtcttcca

SEQ ID NO: 3037972 - DNA, 25 bp, Homo sapien
aaagttttccaccatgacaaaggag

SEQ ID NO: 3037973 - DNA, 25 bp, Homo sapien
tgtgtgcttggagagtaagtcccac

SEQ ID NO: 3037974 - DNA, 25 bp, Homo sapien
tcctgagtgtacaaaagcaactgag

SEQ ID NO: 3037975 - DNA, 25 bp, Homo sapien
taaagatggtagagcagacagacag

SEQ ID NO: 3037976 - DNA, 25 bp, Homo sapien
cggaggcttcagtaagcctagatcg

SEQ ID NO: 3037977 - DNA, 25 bp, Homo sapien
aggcttcagtaagcctagatcgtgc

SEQ ID NO: 3037978 - DNA, 25 bp, Homo sapien
gaggcttcagtaagcctagatcgtg

SEQ ID NO: 3037979 - DNA, 25 bp, Homo sapien
ggcggaggcttcagtaagcctagat

SEQ ID NO: 3037980 - DNA, 25 bp, Homo sapien
ttcatgaggtaacagcaggctggca

SEQ ID NO: 3037981 - DNA, 25 bp, Homo sapien
catatccagccctgtgtaggagttt

SEQ ID NO: 3037982 - DNA, 25 bp, Homo sapien
caggctggcaaaacaaggagatact

SEQ ID NO: 3037983 - DNA, 25 bp, Homo sapien
gatcagtcctgttaacttcatgagg

SEQ ID NO: 3037984 - DNA, 25 bp, Homo sapien
taaaattaagaactaccaggctgaa

SEQ ID NO: 3037985 - DNA, 25 bp, Homo sapien
gaaaagagcctatttcctcgcaagt

SEQ ID NO: 3037986 - DNA, 25 bp, Homo sapien
taagtgaaagcttgtaaacctcagg

SEQ ID NO: 3037987 - DNA, 25 bp, Homo sapien
caagtgcagaaagatcgctgttact

SEQ ID NO: 3037988 - DNA, 25 bp, Homo sapien
ttcccaccaggaaattcttggaaga

SEQ ID NO: 3037989 - DNA, 25 bp, Homo sapien
aattcttggaagaagccctgtcgaa

SEQ ID NO: 3037990 - DNA, 25 bp, Homo sapien
gaagccctgtcgaatattggtcatg

SEQ ID NO: 3037991 - DNA, 25 bp, Homo sapien
caccaggaaattcttggaagaagcc

SEQ ID NO: 3037992 - DNA, 25 bp, Homo sapien
tataataacgatatcctggagactg

SEQ ID NO: 3037993 - DNA, 25 bp, Homo sapien
tgtcaccattagtgtaaaagagaag

SEQ ID NO: 3037994 - DNA, 25 bp, Homo sapien
ccttgggtcccatcctagctttatg

SEQ ID NO: 3037995 - DNA, 25 bp, Homo sapien
ctttgggcccgcaattctatttcta

SEQ ID NO: 3037996 - DNA, 25 bp, Homo sapien
agtgaggatactgacaagtgtcaca

SEQ ID NO: 3037997 - DNA, 25 bp, Homo sapien
ggaatctttcatgagtaaactctaa

SEQ ID NO: 3037998 - DNA, 25 bp, Homo sapien
caaatttctactgaactaccatgcc

SEQ ID NO: 3037999 - DNA, 25 bp, Homo sapien
tgaagtctgcacaccccaaaggtca

SEQ ID NO: 3038000 - DNA, 25 bp, Homo sapien
tactgtccttaatacaacataggga

SEQ ID NO: 3038001 - DNA, 25 bp, Homo sapien
cattgtagaacactgaaatgagtta

SEQ ID NO: 3038002 - DNA, 25 bp, Homo sapien
gagattataaatgtttccaaacctg

SEQ ID NO: 3038003 - DNA, 25 bp, Homo sapien
aaagatgttcatgacctattagtcg

SEQ ID NO: 3038004 - DNA, 25 bp, Homo sapien
ggtggatattcctggtagtgtaaaa

SEQ ID NO: 3038005 - DNA, 25 bp, Homo sapien
gcagaggagctagcggtctcgtaac

SEQ ID NO: 3038006 - DNA, 25 bp, Homo sapien
atggagtacaagaggagggcttata

SEQ ID NO: 3038007 - DNA, 25 bp, Homo sapien
gcggtctcgtaacaaggtgctatgg

SEQ ID NO: 3038008 - DNA, 25 bp, Homo sapien
tttcaaaagattgggctggtcctga

SEQ ID NO: 3038009 - DNA, 25 bp, Homo sapien
gaaatctagagtgatccctgaccct

SEQ ID NO: 3038010 - DNA, 25 bp, Homo sapien
ggtgaatcccaaatgtacagatgct

SEQ ID NO: 3038011 - DNA, 25 bp, Homo sapien
tatcaactatttgccggtgaatccc

SEQ ID NO: 3038012 - DNA, 25 bp, Homo sapien
gctggtgaaagcaatgccacaaatt

SEQ ID NO: 3038013 - DNA, 25 bp, Homo sapien
ttatcaacatctccgaccaaagtgg

SEQ ID NO: 3038014 - DNA, 25 bp, Homo sapien
aactgagggaacagaccacctgaaa

SEQ ID NO: 3038015 - DNA, 25 bp, Homo sapien
gacatccatttgaggcttccagcca

SEQ ID NO: 3038016 - DNA, 25 bp, Homo sapien
ttattaatattaagccttgagccca

SEQ ID NO: 3038017 - DNA, 25 bp, Homo sapien
ctcagttcaggagtcttattaatat

SEQ ID NO: 3038018 - DNA, 25 bp, Homo sapien
caaagccaattagggctagacctgg

SEQ ID NO: 3038019 - DNA, 25 bp, Homo sapien
tgaacatattgaattctgaataaca

SEQ ID NO: 3038020 - DNA, 25 bp, Homo sapien
gtggatgcttgtaaagatgcatatt

SEQ ID NO: 3038021 - DNA, 25 bp, Homo sapien
ctgtggatgcttgtaaagatgcata

SEQ ID NO: 3038022 - DNA, 25 bp, Homo sapien
tgtggatgcttgtaaagatgcatat

SEQ ID NO: 3038023 - DNA, 25 bp, Homo sapien
tggatgcttgtaaagatgcatattc

SEQ ID NO: 3038024 - DNA, 25 bp, Homo sapien
tgaaaagattgaccagagccagagt

SEQ ID NO: 3038025 - DNA, 25 bp, Homo sapien
ccagagttaagtggtagcaaagcca

SEQ ID NO: 3038026 - DNA, 25 bp, Homo sapien
ttaagtgctaaagctggacaggacc

SEQ ID NO: 3038027 - DNA, 25 bp, Homo sapien
ccagatgaatggctctcctatcgag

SEQ ID NO: 3038028 - DNA, 25 bp, Homo sapien
caggtaatccatctgtaatgatagc

SEQ ID NO: 3038029 - DNA, 25 bp, Homo sapien
tgtgcccaaccctgacaaaacctta

SEQ ID NO: 3038030 - DNA, 25 bp, Homo sapien
ggtaatccatctgtaatgatagcac

SEQ ID NO: 3038031 - DNA, 25 bp, Homo sapien
gtaatccatctgtaatgatagcact

SEQ ID NO: 3038032 - DNA, 25 bp, Homo sapien
tataccacactcaatcctgatcgct

SEQ ID NO: 3038033 - DNA, 25 bp, Homo sapien
tctcaagctaggcagagaagtgtgc

SEQ ID NO: 3038034 - DNA, 25 bp, Homo sapien
tttacccattaattagaacgtgcat

SEQ ID NO: 3038035 - DNA, 25 bp, Homo sapien
ctttggtgaaacttagatggacatc

SEQ ID NO: 3038036 - DNA, 25 bp, Homo sapien
gtaagttatgaagagctattgtaca

SEQ ID NO: 3038037 - DNA, 25 bp, Homo sapien
ccctggatcaatataggtatcaatt

SEQ ID NO: 3038038 - DNA, 25 bp, Homo sapien
tagacaggaggagtaagttatgaag

SEQ ID NO: 3038039 - DNA, 25 bp, Homo sapien
ttgaaaattgtagccggtcacagtg

SEQ ID NO: 3038040 - DNA, 25 bp, Homo sapien
attcctatgatacttgtcttcagat

SEQ ID NO: 3038041 - DNA, 25 bp, Homo sapien
tccttacaatcactggaaatctgcc

SEQ ID NO: 3038042 - DNA, 25 bp, Homo sapien
ccagcaatgtgcactcactattttg

SEQ ID NO: 3038043 - DNA, 25 bp, Homo sapien
cactattttgcaaggcagtgcactc

SEQ ID NO: 3038044 - DNA, 25 bp, Homo sapien
agaaggcaaagacgggcccagcggg

SEQ ID NO: 3038045 - DNA, 25 bp, Homo sapien
gcccatttgccccactggtgcaata

SEQ ID NO: 3038046 - DNA, 25 bp, Homo sapien
cagttgctcgcattttcactcagtt

SEQ ID NO: 3038047 - DNA, 25 bp, Homo sapien
aagagaatggagtgtaaacgaatgg

SEQ ID NO: 3038048 - DNA, 25 bp, Homo sapien
gaggtaacgagccatacaaacacga

SEQ ID NO: 3038049 - DNA, 25 bp, Homo sapien
gcatctgaggtaacgagccatacaa

SEQ ID NO: 3038050 - DNA, 25 bp, Homo sapien
cataggcatctgaggtaacgagcca

SEQ ID NO: 3038051 - DNA, 25 bp, Homo sapien
tgctttattggcataggcatctgag

SEQ ID NO: 3038052 - DNA, 25 bp, Homo sapien
caagaatgatcacgagcaatgagtg

SEQ ID NO: 3038053 - DNA, 25 bp, Homo sapien
gcaccagatgcttcgggacctcata

SEQ ID NO: 3038054 - DNA, 25 bp, Homo sapien
gacactgatcactaagcagcaccag

SEQ ID NO: 3038055 - DNA, 25 bp, Homo sapien
tctgtaagacggaaataatttgaca

SEQ ID NO: 3038056 - DNA, 25 bp, Homo sapien
gcaaaaatcaacgtcttgtagttcc

SEQ ID NO: 3038057 - DNA, 25 bp, Homo sapien
atcaacgtcttgtagttcctgctgc

SEQ ID NO: 3038058 - DNA, 25 bp, Homo sapien
aaatcaacgtcttgtagttcctgct

SEQ ID NO: 3038059 - DNA, 25 bp, Homo sapien
ggcaaaaatcaacgtcttgtagttc

SEQ ID NO: 3038060 - DNA, 25 bp, Homo sapien
gtgtgggggggttcgcggcagccga

SEQ ID NO: 3038061 - DNA, 25 bp, Homo sapien
ggggggttcgcggcagccgagtgcc

SEQ ID NO: 3038062 - DNA, 25 bp, Homo sapien
gggttcgcggcagccgagtgccaag

SEQ ID NO: 3038063 - DNA, 25 bp, Homo sapien
tgtgggggggttcgcggcagccgag

SEQ ID NO: 3038064 - DNA, 25 bp, Homo sapien
accgctggaccgtgaccaaagccat

SEQ ID NO: 3038065 - DNA, 25 bp, Homo sapien
gtgaccgctggaccgtgaccaaagc

SEQ ID NO: 3038066 - DNA, 25 bp, Homo sapien
ctgggggtaggtgaccgctggaccg

SEQ ID NO: 3038067 - DNA, 25 bp, Homo sapien
gtaggtgaccgctggaccgtgacca

SEQ ID NO: 3038068 - DNA, 25 bp, Homo sapien
tgggttgttccgggcagggcattct

SEQ ID NO: 3038069 - DNA, 25 bp, Homo sapien
ttgttccgggcagggcattcttgtc

SEQ ID NO: 3038070 - DNA, 25 bp, Homo sapien
aggcgctgctgggttgttccgggca

SEQ ID NO: 3038071 - DNA, 25 bp, Homo sapien
ctaggcgctgctgggttgttccggg

SEQ ID NO: 3038072 - DNA, 25 bp, Homo sapien
cgggagggtgacggagccgggatgg

SEQ ID NO: 3038073 - DNA, 25 bp, Homo sapien
acgggagggtgacggagccgggatg

SEQ ID NO: 3038074 - DNA, 25 bp, Homo sapien
gagggtgacggagccgggatgggga

SEQ ID NO: 3038075 - DNA, 25 bp, Homo sapien
gggcgggcggttccgcagctgcggg

SEQ ID NO: 3038076 - DNA, 25 bp, Homo sapien
agactgtcgccgactgacgctccga

SEQ ID NO: 3038077 - DNA, 25 bp, Homo sapien
gggcacaatgagcgctcccagtgcg

SEQ ID NO: 3038078 - DNA, 25 bp, Homo sapien
ctgacgctccgaacgggcggcgggc

SEQ ID NO: 3038079 - DNA, 25 bp, Homo sapien
gaatttatctgagtgcatccaaacc

SEQ ID NO: 3038080 - DNA, 25 bp, Homo sapien
ttttaagacctaacctttgcctgca

SEQ ID NO: 3038081 - DNA, 25 bp, Homo sapien
tttgcctgcatatagaaagcaccta

SEQ ID NO: 3038082 - DNA, 25 bp, Homo sapien
tgcgcccggactaaactgggaactc

SEQ ID NO: 3038083 - DNA, 25 bp, Homo sapien
aaagccagtcaaggttagcagtggg

SEQ ID NO: 3038084 - DNA, 25 bp, Homo sapien
agttctgataaccccctaccatggg

SEQ ID NO: 3038085 - DNA, 25 bp, Homo sapien
tgataaccccctaccatgggaccaa

SEQ ID NO: 3038086 - DNA, 25 bp, Homo sapien
cagtcaaggttagcagtgggaggtt

SEQ ID NO: 3038087 - DNA, 25 bp, Homo sapien
gagccatccgagttaaaagagtggt

SEQ ID NO: 3038088 - DNA, 25 bp, Homo sapien
gaacaaagagccatccgagttaaaa

SEQ ID NO: 3038089 - DNA, 25 bp, Homo sapien
acaaagagccatccgagttaaaaga

SEQ ID NO: 3038090 - DNA, 25 bp, Homo sapien
aagagccatccgagttaaaagagtg

SEQ ID NO: 3038091 - DNA, 25 bp, Homo sapien
tgggagtcctcgattttaacatcgg

SEQ ID NO: 3038092 - DNA, 25 bp, Homo sapien
tatagtagttccacttcgtgagaga

SEQ ID NO: 3038093 - DNA, 25 bp, Homo sapien
agtggcctgctatgaaatacttggc

SEQ ID NO: 3038094 - DNA, 25 bp, Homo sapien
cctgtggagaaacgcatatagtagt

SEQ ID NO: 3038095 - DNA, 25 bp, Homo sapien
tatctccggtgttgctgatgccgct

SEQ ID NO: 3038096 - DNA, 25 bp, Homo sapien
cacactgcgaacaactggcctagaa

SEQ ID NO: 3038097 - DNA, 25 bp, Homo sapien
cagaggtcactggatccgattccca

SEQ ID NO: 3038098 - DNA, 25 bp, Homo sapien
aaagccgcgcgagagtttacgtgac

SEQ ID NO: 3038099 - DNA, 25 bp, Homo sapien
gagtgatccgggagttagggtcagg

SEQ ID NO: 3038100 - DNA, 25 bp, Homo sapien
cacgggagcaagatggcgattccgg

SEQ ID NO: 3038101 - DNA, 25 bp, Homo sapien
tcggccacgttcagcggacacggga

SEQ ID NO: 3038102 - DNA, 25 bp, Homo sapien
ggcaggcagtgagtgatccgggagt

SEQ ID NO: 3038103 - DNA, 25 bp, Homo sapien
catcttaaaggccaaaacgtgagaa

SEQ ID NO: 3038104 - DNA, 25 bp, Homo sapien
tttgatgcggcctcccgtgatctcc

SEQ ID NO: 3038105 - DNA, 25 bp, Homo sapien
cgtgatctccgcatcttaaaggcca

SEQ ID NO: 3038106 - DNA, 25 bp, Homo sapien
tacctttgatgtgtaatccttactt

SEQ ID NO: 3038107 - DNA, 25 bp, Homo sapien
ttttagactatatgcgagtgtcagg

SEQ ID NO: 3038108 - DNA, 25 bp, Homo sapien
tccttatgagcaatctaaaattacc

SEQ ID NO: 3038109 - DNA, 25 bp, Homo sapien
tagactatatgcgagtgtcagggaa

SEQ ID NO: 3038110 - DNA, 25 bp, Homo sapien
gaactataccgttttccttatgagc

SEQ ID NO: 3038111 - DNA, 25 bp, Homo sapien
gaaagaactgttatgcctatgcata

SEQ ID NO: 3038112 - DNA, 25 bp, Homo sapien
gattattttcgaactgcatccttca

SEQ ID NO: 3038113 - DNA, 25 bp, Homo sapien
tgtgcccggcaacataagattattt

SEQ ID NO: 3038114 - DNA, 25 bp, Homo sapien
tctttctggaagtacgacatctctt

SEQ ID NO: 3038115 - DNA, 25 bp, Homo sapien
ataggtactaaatgccttcctgaat

SEQ ID NO: 3038116 - DNA, 25 bp, Homo sapien
tcctgtggttcattaatatggttta

SEQ ID NO: 3038117 - DNA, 25 bp, Homo sapien
tcaggaaaagcctggttcagagtct

SEQ ID NO: 3038118 - DNA, 25 bp, Homo sapien
tctatgtctataagtgggaaaggct

SEQ ID NO: 3038119 - DNA, 25 bp, Homo sapien
gacatattgagactaatgcccttta

SEQ ID NO: 3038120 - DNA, 25 bp, Homo sapien
gaagacatgccatttcattcagggc

SEQ ID NO: 3038121 - DNA, 25 bp, Homo sapien
ttgggtacgaagtggtatttcaatg

SEQ ID NO: 3038122 - DNA, 25 bp, Homo sapien
tcatcctgttgggtacgaagtggta

SEQ ID NO: 3038123 - DNA, 25 bp, Homo sapien
attttagtcatcctgttgggtacga

SEQ ID NO: 3038124 - DNA, 25 bp, Homo sapien
ctgttgggtacgaagtggtatttca

SEQ ID NO: 3038125 - DNA, 25 bp, Homo sapien
ttctctgttcagtatgttagctatg

SEQ ID NO: 3038126 - DNA, 25 bp, Homo sapien
agtggcacgacctcaactctttgca

SEQ ID NO: 3038127 - DNA, 25 bp, Homo sapien
cttctcttacctgattgctttggcc

SEQ ID NO: 3038128 - DNA, 25 bp, Homo sapien
gcttttctctgttcagtatgttagc

SEQ ID NO: 3038129 - DNA, 25 bp, Homo sapien
tatgagaatcttgtcctgtgtatgg

SEQ ID NO: 3038130 - DNA, 25 bp, Homo sapien
taccaacatgatagatgataaaagt

SEQ ID NO: 3038131 - DNA, 25 bp, Homo sapien
tgcttgccagtataccttgccaggg

SEQ ID NO: 3038132 - DNA, 25 bp, Homo sapien
gctgaactgttgaaataagacttgt

SEQ ID NO: 3038133 - DNA, 25 bp, Homo sapien
ctaacgattttattagaaggcacca

SEQ ID NO: 3038134 - DNA, 25 bp, Homo sapien
ttttccttcgagataaagtgcctta

SEQ ID NO: 3038135 - DNA, 25 bp, Homo sapien
tttattagaaggcaccattggctga

SEQ ID NO: 3038136 - DNA, 25 bp, Homo sapien
tttccttcgagataaagtgccttat

SEQ ID NO: 3038137 - DNA, 25 bp, Homo sapien
gacagtgacttcgatgctaagagca

SEQ ID NO: 3038138 - DNA, 25 bp, Homo sapien
gaaagggattctcataggcacagag

SEQ ID NO: 3038139 - DNA, 25 bp, Homo sapien
gaggaaaacccagatgcagacagtg

SEQ ID NO: 3038140 - DNA, 25 bp, Homo sapien
gaatgacttcaagcaccacaggagt

SEQ ID NO: 3038141 - DNA, 25 bp, Homo sapien
caaaagagctcttctgttgcaaagg

SEQ ID NO: 3038142 - DNA, 25 bp, Homo sapien
cagagaaattagcttggtccccagg

SEQ ID NO: 3038143 - DNA, 25 bp, Homo sapien
gggtattatttcactctagcagagg

SEQ ID NO: 3038144 - DNA, 25 bp, Homo sapien
tacttgcattggtggtagagcagct

SEQ ID NO: 3038145 - DNA, 25 bp, Homo sapien
aaaccccatcatagtattgataaat

SEQ ID NO: 3038146 - DNA, 25 bp, Homo sapien
gcatactatgcggaacagacagaga

SEQ ID NO: 3038147 - DNA, 25 bp, Homo sapien
cccatcatagtattgataaataggg

SEQ ID NO: 3038148 - DNA, 25 bp, Homo sapien
aaataggggtcaaataaatgcatac

SEQ ID NO: 3038149 - DNA, 25 bp, Homo sapien
gggagaatccatatccgaatatctt

SEQ ID NO: 3038150 - DNA, 25 bp, Homo sapien
taccactgaacacgctggcatttag

SEQ ID NO: 3038151 - DNA, 25 bp, Homo sapien
ataccagacttggcaaaacgctaat

SEQ ID NO: 3038152 - DNA, 25 bp, Homo sapien
tttgaacaatgtctaagtatgtggg

SEQ ID NO: 3038153 - DNA, 25 bp, Homo sapien
taacccagtgctaaacgagaatccg

SEQ ID NO: 3038154 - DNA, 25 bp, Homo sapien
tgagagtcacgagacaccaaaggcc

SEQ ID NO: 3038155 - DNA, 25 bp, Homo sapien
gacagaacttaaaccagagggccag

SEQ ID NO: 3038156 - DNA, 25 bp, Homo sapien
tcttcaccgagcaaagcaacctgga

SEQ ID NO: 3038157 - DNA, 25 bp, Homo sapien
gccagatctgcctgtggaacactgt

SEQ ID NO: 3038158 - DNA, 25 bp, Homo sapien
tgcctgtggaacactgtcctgaatg

SEQ ID NO: 3038159 - DNA, 25 bp, Homo sapien
caatgaggtgcagcaaacgccagag

SEQ ID NO: 3038160 - DNA, 25 bp, Homo sapien
tgaggtgcagcaaacgccagaggct

SEQ ID NO: 3038161 - DNA, 25 bp, Homo sapien
gcagagcatgttgtagtgattgtac

SEQ ID NO: 3038162 - DNA, 25 bp, Homo sapien
ggcagagcatgttgtagtgattgta

SEQ ID NO: 3038163 - DNA, 25 bp, Homo sapien
gaaagtgtgtggctcaagtagtgtc

SEQ ID NO: 3038164 - DNA, 25 bp, Homo sapien
ggctcaagtagtgtcactggaaaag

SEQ ID NO: 3038165 - DNA, 25 bp, Homo sapien
tacacagactcacaagcttgcatgg

SEQ ID NO: 3038166 - DNA, 25 bp, Homo sapien
gatacaggagactttcacagacttg

SEQ ID NO: 3038167 - DNA, 25 bp, Homo sapien
cagcagcacatggattagaaggttc

SEQ ID NO: 3038168 - DNA, 25 bp, Homo sapien
tatggctagcgagatagcatccctg

SEQ ID NO: 3038169 - DNA, 25 bp, Homo sapien
gtctaccatgggaatatgtccaggg

SEQ ID NO: 3038170 - DNA, 25 bp, Homo sapien
ccaggggaatccatggaaataagtg

SEQ ID NO: 3038171 - DNA, 25 bp, Homo sapien
gtgtcacagtctaccatgggaatat

SEQ ID NO: 3038172 - DNA, 25 bp, Homo sapien
aaataagtggctggaggccttgagt

SEQ ID NO: 3038173 - DNA, 25 bp, Homo sapien
cttccatcatcaggcttagctggaa

SEQ ID NO: 3038174 - DNA, 25 bp, Homo sapien
gcccttccatcatcaggcttagctg

SEQ ID NO: 3038175 - DNA, 25 bp, Homo sapien
ccttccatcatcaggcttagctgga

SEQ ID NO: 3038176 - DNA, 25 bp, Homo sapien
aaggcccttccatcatcaggcttag

SEQ ID NO: 3038177 - DNA, 25 bp, Homo sapien
caggcgtgcctcatcagaactggag

SEQ ID NO: 3038178 - DNA, 25 bp, Homo sapien
gcgtgcctcatcagaactggaggag

SEQ ID NO: 3038179 - DNA, 25 bp, Homo sapien
ggcaggcgtgcctcatcagaactgg

SEQ ID NO: 3038180 - DNA, 25 bp, Homo sapien
agaaggcaggcgtgcctcatcagaa

SEQ ID NO: 3038181 - DNA, 25 bp, Homo sapien
ttacacagcattcaagcggatgtcc

SEQ ID NO: 3038182 - DNA, 25 bp, Homo sapien
cggatgtccccacaaggaatttctg

SEQ ID NO: 3038183 - DNA, 25 bp, Homo sapien
tcaagcggatgtccccacaaggaat

SEQ ID NO: 3038184 - DNA, 25 bp, Homo sapien
gcattcaagcggatgtccccacaag

SEQ ID NO: 3038185 - DNA, 25 bp, Homo sapien
acttgtcttaagtggagctatcacc

SEQ ID NO: 3038186 - DNA, 25 bp, Homo sapien
acaggtgcatggtacgatgctcaac

SEQ ID NO: 3038187 - DNA, 25 bp, Homo sapien
cagagagagaagagatcaccgaggt

SEQ ID NO: 3038188 - DNA, 25 bp, Homo sapien
caaggcccgcaatgaacgacgtcat

SEQ ID NO: 3038189 - DNA, 25 bp, Homo sapien
tgttggtgactgaccacccaggatg

SEQ ID NO: 3038190 - DNA, 25 bp, Homo sapien
caggcccacgtctgttttccgtgct

SEQ ID NO: 3038191 - DNA, 25 bp, Homo sapien
gtctgttttccgtgctttgccagca

SEQ ID NO: 3038192 - DNA, 25 bp, Homo sapien
tgccctgttggtgactgaccaccca

SEQ ID NO: 3038193 - DNA, 25 bp, Homo sapien
cagaccgtgggtgtgtatggtaccc

SEQ ID NO: 3038194 - DNA, 25 bp, Homo sapien
aaaatgacctaagccagtggatgac

SEQ ID NO: 3038195 - DNA, 25 bp, Homo sapien
cataaacgtgtactcattagggacc

SEQ ID NO: 3038196 - DNA, 25 bp, Homo sapien
tggatgactccaaccgcaagacttc

SEQ ID NO: 3038197 - DNA, 25 bp, Homo sapien
catggatcatcacaactgccaagac

SEQ ID NO: 3038198 - DNA, 25 bp, Homo sapien
gagagtgtgcgggaagcagcacggg

SEQ ID NO: 3038199 - DNA, 25 bp, Homo sapien
tgcgttcaatgactctgggtaggag

SEQ ID NO: 3038200 - DNA, 25 bp, Homo sapien
cagatgaccggaaggaatgcgttca

SEQ ID NO: 3038201 - DNA, 25 bp, Homo sapien
tgtccctggagtgatgatcaaccga

SEQ ID NO: 3038202 - DNA, 25 bp, Homo sapien
tgtggcgggctcatcagaaaactgc

SEQ ID NO: 3038203 - DNA, 25 bp, Homo sapien
gggatgcaaatgaaagatgaggttc

SEQ ID NO: 3038204 - DNA, 25 bp, Homo sapien
tcaaccgataagctatatatgtggg

SEQ ID NO: 3038205 - DNA, 25 bp, Homo sapien
tgtgaaatcccactcagtcattggg

SEQ ID NO: 3038206 - DNA, 25 bp, Homo sapien
caggaacctggtcaattgcaaacct

SEQ ID NO: 3038207 - DNA, 25 bp, Homo sapien
gatctggttaggagccatcccggct

SEQ ID NO: 3038208 - DNA, 25 bp, Homo sapien
ccagagccggctatgaagaaagatg

SEQ ID NO: 3038209 - DNA, 25 bp, Homo sapien
gtgaacgtagaagtggaagacagat

SEQ ID NO: 3038210 - DNA, 25 bp, Homo sapien
ctctctcaggcactagggcacttgg

SEQ ID NO: 3038211 - DNA, 25 bp, Homo sapien
ttgcctctctcaggcactagggcac

SEQ ID NO: 3038212 - DNA, 25 bp, Homo sapien
cccagagcaggggatctgttaagtg

SEQ ID NO: 3038213 - DNA, 25 bp, Homo sapien
tgggcaaagaaactcaatgactgtg

SEQ ID NO: 3038214 - DNA, 25 bp, Homo sapien
gcacgtgggttttcctgggcaaaga

SEQ ID NO: 3038215 - DNA, 25 bp, Homo sapien
ggaattatgagtagtgcgcccacat

SEQ ID NO: 3038216 - DNA, 25 bp, Homo sapien
gactgtgcatcaagagtgtacccag

SEQ ID NO: 3038217 - DNA, 25 bp, Homo sapien
tgcttggtgcaaacactggctttga

SEQ ID NO: 3038218 - DNA, 25 bp, Homo sapien
cttggtgcaaacactggctttgatt

SEQ ID NO: 3038219 - DNA, 25 bp, Homo sapien
cctgggaacatgtgctgcttggtgc

SEQ ID NO: 3038220 - DNA, 25 bp, Homo sapien
tgcaaacactggctttgattttgga

SEQ ID NO: 3038221 - DNA, 25 bp, Homo sapien
gaagccgagcatttccttcacgtcc

SEQ ID NO: 3038222 - DNA, 25 bp, Homo sapien
atcctccagaaccaccccgggctga

SEQ ID NO: 3038223 - DNA, 25 bp, Homo sapien
agaaacagagggctgatggccaccc

SEQ ID NO: 3038224 - DNA, 25 bp, Homo sapien
cagagggctgatggccacccagcag

SEQ ID NO: 3038225 - DNA, 25 bp, Homo sapien
gatcagcgcgacagtgagcactgcg

SEQ ID NO: 3038226 - DNA, 25 bp, Homo sapien
gacacagcgactgcttcgatcagcg

SEQ ID NO: 3038227 - DNA, 25 bp, Homo sapien
tagaaccaagacacagcgactgctt

SEQ ID NO: 3038228 - DNA, 25 bp, Homo sapien
agcactgcgggccccgtggcatact

SEQ ID NO: 3038229 - DNA, 25 bp, Homo sapien
atgaccacggcgagcacgaaccgct

SEQ ID NO: 3038230 - DNA, 25 bp, Homo sapien
cttggcccagacgtgtgggaactca

SEQ ID NO: 3038231 - DNA, 25 bp, Homo sapien
cagggatccaaagaagcaggtgatg

SEQ ID NO: 3038232 - DNA, 25 bp, Homo sapien
agcacgaaccgctcccggcgcttgg

SEQ ID NO: 3038233 - DNA, 25 bp, Homo sapien
ggagcaccagaagggagtagccaaa

SEQ ID NO: 3038234 - DNA, 25 bp, Homo sapien
tgtaccagagggtggtaaatgccga

SEQ ID NO: 3038235 - DNA, 25 bp, Homo sapien
cactttatcccattaatgactcgaa

SEQ ID NO: 3038236 - DNA, 25 bp, Homo sapien
ggtaaatgccgaggagtcagccggg

SEQ ID NO: 3038237 - DNA, 25 bp, Homo sapien
gcaaagaaagtggacgctggcatgt

SEQ ID NO: 3038238 - DNA, 25 bp, Homo sapien
tgtccaagcccagcgtgattaacat

SEQ ID NO: 3038239 - DNA, 25 bp, Homo sapien
ttctgcatacgtgatgaagaggagg

SEQ ID NO: 3038240 - DNA, 25 bp, Homo sapien
gttggctatcgcttctgcatacgtg

SEQ ID NO: 3038241 - DNA, 25 bp, Homo sapien
tcatctcagccatgtaaccgagcac

SEQ ID NO: 3038242 - DNA, 25 bp, Homo sapien
tgacaaatcccgaaacgaagctcgt

SEQ ID NO: 3038243 - DNA, 25 bp, Homo sapien
tcgtcatgcagttcaccacgctggt

SEQ ID NO: 3038244 - DNA, 25 bp, Homo sapien
ccatgtaaccgagcactgtgaagat

SEQ ID NO: 3038245 - DNA, 25 bp, Homo sapien
gaagatctgagcggctgcatctatc

SEQ ID NO: 3038246 - DNA, 25 bp, Homo sapien
tctgagcggctgcatctatccacac

SEQ ID NO: 3038247 - DNA, 25 bp, Homo sapien
tgttgtagctagcaaaagccagcag

SEQ ID NO: 3038248 - DNA, 25 bp, Homo sapien
gttgtagctagcaaaagccagcagg

SEQ ID NO: 3038249 - DNA, 25 bp, Homo sapien
tttctgccaattgggtttcaagtag

SEQ ID NO: 3038250 - DNA, 25 bp, Homo sapien
gccaattgggtttcaagtagaagag

SEQ ID NO: 3038251 - DNA, 25 bp, Homo sapien
ctgccaattgggtttcaagtagaag

SEQ ID NO: 3038252 - DNA, 25 bp, Homo sapien
tctgccaattgggtttcaagtagaa

SEQ ID NO: 3038253 - DNA, 25 bp, Homo sapien
gacagaaaggatgatataagggaag

SEQ ID NO: 3038254 - DNA, 25 bp, Homo sapien
tgccagaggtcttgacgcctttcca

SEQ ID NO: 3038255 - DNA, 25 bp, Homo sapien
gataacagtgaagatcagcatgatg

SEQ ID NO: 3038256 - DNA, 25 bp, Homo sapien
gaagatcagcatgatgcagagggcc

SEQ ID NO: 3038257 - DNA, 25 bp, Homo sapien
gagccccttagaccggtggatctgc

SEQ ID NO: 3038258 - DNA, 25 bp, Homo sapien
aggagatgaggtagtatagcgccca

SEQ ID NO: 3038259 - DNA, 25 bp, Homo sapien
gcagctggtccgtgaaggaggagat

SEQ ID NO: 3038260 - DNA, 25 bp, Homo sapien
ccatgatggtgttgtagtaggaagc

SEQ ID NO: 3038261 - DNA, 25 bp, Homo sapien
gcaatgatgcagatggcataaccaa

SEQ ID NO: 3038262 - DNA, 25 bp, Homo sapien
tccatgtaaaagagcgggattcccc

SEQ ID NO: 3038263 - DNA, 25 bp, Homo sapien
aaatgcatccatttcggtggtactg

SEQ ID NO: 3038264 - DNA, 25 bp, Homo sapien
tggtactgtcccagtgcgagctcca

SEQ ID NO: 3038265 - DNA, 25 bp, Homo sapien
aaaatcgggcagattttcctccata

SEQ ID NO: 3038266 - DNA, 25 bp, Homo sapien
caggtccaaaggatcagaagcatct

SEQ ID NO: 3038267 - DNA, 25 bp, Homo sapien
aggtccaaaggatcagaagcatctg

SEQ ID NO: 3038268 - DNA, 25 bp, Homo sapien
ccagcaggagtgaagggactcagca

SEQ ID NO: 3038269 - DNA, 25 bp, Homo sapien
agggctgacggccattccctcactt

SEQ ID NO: 3038270 - DNA, 25 bp, Homo sapien
gtggactcttcccagcagaacttgc

SEQ ID NO: 3038271 - DNA, 25 bp, Homo sapien
tcagcacagggctgacggccattcc

SEQ ID NO: 3038272 - DNA, 25 bp, Homo sapien
gatagagtgccgtgtgtcatctccc

SEQ ID NO: 3038273 - DNA, 25 bp, Homo sapien
tgatgaagctcagccactagggtgg

SEQ ID NO: 3038274 - DNA, 25 bp, Homo sapien
cttctgagaattcaagggcgtcgtc

SEQ ID NO: 3038275 - DNA, 25 bp, Homo sapien
caggacttggaactgctgagtaccc

SEQ ID NO: 3038276 - DNA, 25 bp, Homo sapien
cctgctggttagtaaatgacactga

SEQ ID NO: 3038277 - DNA, 25 bp, Homo sapien
tggatttgtggatcacctccgagct

SEQ ID NO: 3038278 - DNA, 25 bp, Homo sapien
gccaaggatcccaattgatctctgg

SEQ ID NO: 3038279 - DNA, 25 bp, Homo sapien
gagctctctatcgtcgggattgaca

SEQ ID NO: 3038280 - DNA, 25 bp, Homo sapien
ttgccagcaactcctgtggctaagc

SEQ ID NO: 3038281 - DNA, 25 bp, Homo sapien
tttccacttgccagcaactcctgtg

SEQ ID NO: 3038282 - DNA, 25 bp, Homo sapien
actcctgtggctaagccccttgtta

SEQ ID NO: 3038283 - DNA, 25 bp, Homo sapien
tcctgtggctaagccccttgttatt

SEQ ID NO: 3038284 - DNA, 25 bp, Homo sapien
gagggcaagcaaggtcgccttgcct

SEQ ID NO: 3038285 - DNA, 25 bp, Homo sapien
agagagggcaagcaaggtcgccttg

SEQ ID NO: 3038286 - DNA, 25 bp, Homo sapien
ggcaagcaaggtcgccttgcctcca

SEQ ID NO: 3038287 - DNA, 25 bp, Homo sapien
aagcaaggtcgccttgcctccagga

SEQ ID NO: 3038288 - DNA, 25 bp, Homo sapien
actgctgtgttcccgaagtgtgcag

SEQ ID NO: 3038289 - DNA, 25 bp, Homo sapien
ctgctgtgttcccgaagtgtgcagg

SEQ ID NO: 3038290 - DNA, 25 bp, Homo sapien
tgctgtgttcccgaagtgtgcaggg

SEQ ID NO: 3038291 - DNA, 25 bp, Homo sapien
gctgtgttcccgaagtgtgcagggt

SEQ ID NO: 3038292 - DNA, 25 bp, Homo sapien
atccccttggttcagggttgggatg

SEQ ID NO: 3038293 - DNA, 25 bp, Homo sapien
ctcgcgccctcgaggcacccggcgg

SEQ ID NO: 3038294 - DNA, 25 bp, Homo sapien
tggcctcgcgccctcgaggcacccg

SEQ ID NO: 3038295 - DNA, 25 bp, Homo sapien
gcgggctggcctcgcgccctcgagg

SEQ ID NO: 3038296 - DNA, 25 bp, Homo sapien
ggctggcctcgcgccctcgaggcac

SEQ ID NO: 3038297 - DNA, 25 bp, Homo sapien
cattcttgggctattagaggcacaa

SEQ ID NO: 3038298 - DNA, 25 bp, Homo sapien
gactcaagcagagatgtgcacaccc

SEQ ID NO: 3038299 - DNA, 25 bp, Homo sapien
cccctaatgattatgactgagacca

SEQ ID NO: 3038300 - DNA, 25 bp, Homo sapien
tttgcagctacgtcaggttccatgg

SEQ ID NO: 3038301 - DNA, 25 bp, Homo sapien
agctagcacctcttcagggacatgc

SEQ ID NO: 3038302 - DNA, 25 bp, Homo sapien
catactcagagaaccactcatctgt

SEQ ID NO: 3038303 - DNA, 25 bp, Homo sapien
tgtccaccaccacttcgtagacata

SEQ ID NO: 3038304 - DNA, 25 bp, Homo sapien
tcccatgctggcaggataatgggtt

SEQ ID NO: 3038305 - DNA, 25 bp, Homo sapien
cctacaacaaccaggcgggctgctg

SEQ ID NO: 3038306 - DNA, 25 bp, Homo sapien
cattcctttctatcacacactccta

SEQ ID NO: 3038307 - DNA, 25 bp, Homo sapien
acacactcctacaacaaccaggcgg

SEQ ID NO: 3038308 - DNA, 25 bp, Homo sapien
cagtgtcaatggctgttctccccca

SEQ ID NO: 3038309 - DNA, 25 bp, Homo sapien
ctggttctacaacatagcattttat

SEQ ID NO: 3038310 - DNA, 25 bp, Homo sapien
tccaaaatcacttgtggcagttggg

SEQ ID NO: 3038311 - DNA, 25 bp, Homo sapien
tgaatataccatctccaaaatcact

SEQ ID NO: 3038312 - DNA, 25 bp, Homo sapien
ttttgtgcctagctttgaatatacc

SEQ ID NO: 3038313 - DNA, 25 bp, Homo sapien
ctttgtggccatggtcttcacccca

SEQ ID NO: 3038314 - DNA, 25 bp, Homo sapien
gaattctccactctccattttgtga

SEQ ID NO: 3038315 - DNA, 25 bp, Homo sapien
ttttgtgaaagcaccatcctgatca

SEQ ID NO: 3038316 - DNA, 25 bp, Homo sapien
cactctccattttgtgaaagcacca

SEQ ID NO: 3038317 - DNA, 25 bp, Homo sapien
cgtgggtcataagtgactcaccaaa

SEQ ID NO: 3038318 - DNA, 25 bp, Homo sapien
caaaagtcagcctctccgctttatt

SEQ ID NO: 3038319 - DNA, 25 bp, Homo sapien
gagacaccaaacactaactcatggt

SEQ ID NO: 3038320 - DNA, 25 bp, Homo sapien
gcagtgaaggtcatggcgtgggtca

SEQ ID NO: 3038321 - DNA, 25 bp, Homo sapien
cgatcatggggaaaactggcttttg

SEQ ID NO: 3038322 - DNA, 25 bp, Homo sapien
atcatggggaaaactggcttttggt

SEQ ID NO: 3038323 - DNA, 25 bp, Homo sapien
gagtacgatcatggggaaaactggc

SEQ ID NO: 3038324 - DNA, 25 bp, Homo sapien
agggagtacgatcatggggaaaact

SEQ ID NO: 3038325 - DNA, 25 bp, Homo sapien
ggagtttctgctatgagtcctcaaa

SEQ ID NO: 3038326 - DNA, 25 bp, Homo sapien
caaagaaagagacgcgcccttaggt

SEQ ID NO: 3038327 - DNA, 25 bp, Homo sapien
gaatggtgaacagtcaaggaatcct

SEQ ID NO: 3038328 - DNA, 25 bp, Homo sapien
tctttggatgaacctcggcagagtc

SEQ ID NO: 3038329 - DNA, 25 bp, Homo sapien
actgaggcccagcttgctattgaag

SEQ ID NO: 3038330 - DNA, 25 bp, Homo sapien
tttccaacatcacagccaaaccaca

SEQ ID NO: 3038331 - DNA, 25 bp, Homo sapien
agattcatgtcactgaggcccagct

SEQ ID NO: 3038332 - DNA, 25 bp, Homo sapien
gaggcccagcttgctattgaagtgt

SEQ ID NO: 3038333 - DNA, 25 bp, Homo sapien
tgctggggcctagggtcattcacta

SEQ ID NO: 3038334 - DNA, 25 bp, Homo sapien
catctttgatggaggcagcaaccat

SEQ ID NO: 3038335 - DNA, 25 bp, Homo sapien
tccctccaaccatattgcttaagta

SEQ ID NO: 3038336 - DNA, 25 bp, Homo sapien
tcaatgggctggttgttgtatagag

SEQ ID NO: 3038337 - DNA, 25 bp, Homo sapien
tcaagaacacattaattagggcaca

SEQ ID NO: 3038338 - DNA, 25 bp, Homo sapien
tctgcctacaagctaagtactacag

SEQ ID NO: 3038339 - DNA, 25 bp, Homo sapien
taggttcatgtttccatcaagctca

SEQ ID NO: 3038340 - DNA, 25 bp, Homo sapien
caaggtggcaaaatacatgtgagag

SEQ ID NO: 3038341 - DNA, 25 bp, Homo sapien
cagtgcaaaagtgctctgaatccac

SEQ ID NO: 3038342 - DNA, 25 bp, Homo sapien
cctactaggcagatgaggaagacct

SEQ ID NO: 3038343 - DNA, 25 bp, Homo sapien
cttcaacaggagagttccccgaggg

SEQ ID NO: 3038344 - DNA, 25 bp, Homo sapien
gaatccacgataagaaatacccaac

SEQ ID NO: 3038345 - DNA, 25 bp, Homo sapien
tctttgtctcgatattcccaggtga

SEQ ID NO: 3038346 - DNA, 25 bp, Homo sapien
gtgaatgtctctggtggattaccca

SEQ ID NO: 3038347 - DNA, 25 bp, Homo sapien
cttccatattgaagagtggcttgac

SEQ ID NO: 3038348 - DNA, 25 bp, Homo sapien
gattacccaaacagatgcacaccac

SEQ ID NO: 3038349 - DNA, 25 bp, Homo sapien
gcttcacggctgttgattaagccat

SEQ ID NO: 3038350 - DNA, 25 bp, Homo sapien
gcaatagaggtaactacacatctcc

SEQ ID NO: 3038351 - DNA, 25 bp, Homo sapien
gcctgcgtctcacttctcagtaaga

SEQ ID NO: 3038352 - DNA, 25 bp, Homo sapien
tgtcatctcaacaagcagcctgcgt

SEQ ID NO: 3038353 - DNA, 25 bp, Homo sapien
caaaaggatgcttattatctacagc

SEQ ID NO: 3038354 - DNA, 25 bp, Homo sapien
gatgaggacatcaatcttagacaca

SEQ ID NO: 3038355 - DNA, 25 bp, Homo sapien
ttaccacgctctaccaatgatgagg

SEQ ID NO: 3038356 - DNA, 25 bp, Homo sapien
tctacagcaagtattatctgggccc

SEQ ID NO: 3038357 - DNA, 25 bp, Homo sapien
ctgtgtaccaggttccgcagtcgta

SEQ ID NO: 3038358 - DNA, 25 bp, Homo sapien
tgtgtggccgagatttctcctttgg

SEQ ID NO: 3038359 - DNA, 25 bp, Homo sapien
cgcagtcgtatacagaattctctca

SEQ ID NO: 3038360 - DNA, 25 bp, Homo sapien
tccatcatgacgtcctgtgtggccg

SEQ ID NO: 3038361 - DNA, 25 bp, Homo sapien
cagcctcatggattaggacagcaga

SEQ ID NO: 3038362 - DNA, 25 bp, Homo sapien
tgcctggctagcaaagcagcatccc

SEQ ID NO: 3038363 - DNA, 25 bp, Homo sapien
cacagtgctaaagaggatgttgctc

SEQ ID NO: 3038364 - DNA, 25 bp, Homo sapien
gcctttggataagaatccccagcgt

SEQ ID NO: 3038365 - DNA, 25 bp, Homo sapien
tgattcagaatatcattcatccttc

SEQ ID NO: 3038366 - DNA, 25 bp, Homo sapien
cttgtgattcagaatatcattcatc

SEQ ID NO: 3038367 - DNA, 25 bp, Homo sapien
gattcagaatatcattcatccttct

SEQ ID NO: 3038368 - DNA, 25 bp, Homo sapien
tgtgattcagaatatcattcatcct

SEQ ID NO: 3038369 - DNA, 25 bp, Homo sapien
gggaagcatttcttagggataacac

SEQ ID NO: 3038370 - DNA, 25 bp, Homo sapien
gaagcatttcttagggataacacca

SEQ ID NO: 3038371 - DNA, 25 bp, Homo sapien
gcatttcttagggataacaccatat

SEQ ID NO: 3038372 - DNA, 25 bp, Homo sapien
catttcttagggataacaccatatt

SEQ ID NO: 3038373 - DNA, 25 bp, Homo sapien
catttgcagggttcataagcaaaaa

SEQ ID NO: 3038374 - DNA, 25 bp, Homo sapien
tattaacaagcatatcccattggcc

SEQ ID NO: 3038375 - DNA, 25 bp, Homo sapien
tggccaccatcatttgcagggttca

SEQ ID NO: 3038376 - DNA, 25 bp, Homo sapien
caatattaacaagcatatcccattg

SEQ ID NO: 3038377 - DNA, 25 bp, Homo sapien
gggacttacgatgctgaaacaagca

SEQ ID NO: 3038378 - DNA, 25 bp, Homo sapien
cttttctgtatcaccccagtttggg

SEQ ID NO: 3038379 - DNA, 25 bp, Homo sapien
aacatgaaaccttcatgaatttgca

SEQ ID NO: 3038380 - DNA, 25 bp, Homo sapien
ccagtttggggacttacgatgctga

SEQ ID NO: 3038381 - DNA, 25 bp, Homo sapien
acaaaaagaatcttgccagatctgt

SEQ ID NO: 3038382 - DNA, 25 bp, Homo sapien
gaatcttgccagatctgtcccatac

SEQ ID NO: 3038383 - DNA, 25 bp, Homo sapien
aaaaagaatcttgccagatctgtcc

SEQ ID NO: 3038384 - DNA, 25 bp, Homo sapien
aaagaatcttgccagatctgtccca

SEQ ID NO: 3038385 - DNA, 25 bp, Homo sapien
gaagcctcataacattcagacaaga

SEQ ID NO: 3038386 - DNA, 25 bp, Homo sapien
gtaagattggctaaactcaaattct

SEQ ID NO: 3038387 - DNA, 25 bp, Homo sapien
acaggtaagattggctaaactcaaa

SEQ ID NO: 3038388 - DNA, 25 bp, Homo sapien
ggaagcctcataacattcagacaag

SEQ ID NO: 3038389 - DNA, 25 bp, Homo sapien
taaccgcatgtactaacaagccaca

SEQ ID NO: 3038390 - DNA, 25 bp, Homo sapien
tgttcttagacctgcctgtacctgt

SEQ ID NO: 3038391 - DNA, 25 bp, Homo sapien
caccaaaatgggacgctgtcaggaa

SEQ ID NO: 3038392 - DNA, 25 bp, Homo sapien
tacactcaaacgtatactcatggac

SEQ ID NO: 3038393 - DNA, 25 bp, Homo sapien
caggtcgtgggtggtcccgacattc

SEQ ID NO: 3038394 - DNA, 25 bp, Homo sapien
gacattctgggcaagtacgaactgg

SEQ ID NO: 3038395 - DNA, 25 bp, Homo sapien
tggcccgcttcagacagatgtccag

SEQ ID NO: 3038396 - DNA, 25 bp, Homo sapien
tcttctggttggtgattggcttgcc

SEQ ID NO: 3038397 - DNA, 25 bp, Homo sapien
attgcgctgcggctcgctgcctagg

SEQ ID NO: 3038398 - DNA, 25 bp, Homo sapien
tctcgcacccggagcgccggaaaaa

SEQ ID NO: 3038399 - DNA, 25 bp, Homo sapien
ggtccttgggcgagcgccgggattg

SEQ ID NO: 3038400 - DNA, 25 bp, Homo sapien
tcgcgttgctgagtcagcgccgtcg

SEQ ID NO: 3038401 - DNA, 25 bp, Homo sapien
tcacttctctgctgctacttttagt

SEQ ID NO: 3038402 - DNA, 25 bp, Homo sapien
cacttctctgctgctacttttagtc

SEQ ID NO: 3038403 - DNA, 25 bp, Homo sapien
tatatttcaagattatagtcttctt

SEQ ID NO: 3038404 - DNA, 25 bp, Homo sapien
tttcttttatgaaacgacagtgaag

SEQ ID NO: 3038405 - DNA, 25 bp, Homo sapien
gaaacgacagtgaaggtagataata

SEQ ID NO: 3038406 - DNA, 25 bp, Homo sapien
ttttatgaaacgacagtgaaggtag

SEQ ID NO: 3038407 - DNA, 25 bp, Homo sapien
tctctctgtattcgatggcatctca

SEQ ID NO: 3038408 - DNA, 25 bp, Homo sapien
tgtggaggtcctgatgcaaaactct

SEQ ID NO: 3038409 - DNA, 25 bp, Homo sapien
tgcaccaatttgtgagacccaagta

SEQ ID NO: 3038410 - DNA, 25 bp, Homo sapien
tgattaatgaaacaggagtgacagg

SEQ ID NO: 3038411 - DNA, 25 bp, Homo sapien
gctgtttcactgtgagggtctttat

SEQ ID NO: 3038412 - DNA, 25 bp, Homo sapien
tgtttcactgtgagggtctttatcc

SEQ ID NO: 3038413 - DNA, 25 bp, Homo sapien
gagggtctttatccttcatgcagag

SEQ ID NO: 3038414 - DNA, 25 bp, Homo sapien
cactgtgagggtctttatccttcat

SEQ ID NO: 3038415 - DNA, 25 bp, Homo sapien
taaatagctcagaatacttagatac

SEQ ID NO: 3038416 - DNA, 25 bp, Homo sapien
agcaatcagtccaaagcacaatgtc

SEQ ID NO: 3038417 - DNA, 25 bp, Homo sapien
cttctagcaatcagtccaaagcaca

SEQ ID NO: 3038418 - DNA, 25 bp, Homo sapien
ctagcaatcagtccaaagcacaatg

SEQ ID NO: 3038419 - DNA, 25 bp, Homo sapien
tcagaaagatcacaacacatgcagc

SEQ ID NO: 3038420 - DNA, 25 bp, Homo sapien
gattgaagtcaacgattttgcctgg

SEQ ID NO: 3038421 - DNA, 25 bp, Homo sapien
gcagaagtagattgaagtcaacgat

SEQ ID NO: 3038422 - DNA, 25 bp, Homo sapien
agagcagaagtagattgaagtcaac

SEQ ID NO: 3038423 - DNA, 25 bp, Homo sapien
gtagattgaagtcaacgattttgcc

SEQ ID NO: 3038424 - DNA, 25 bp, Homo sapien
agatatgggagtctcagcttgttgg

SEQ ID NO: 3038425 - DNA, 25 bp, Homo sapien
aacaagatatgggagtctcagcttg

SEQ ID NO: 3038426 - DNA, 25 bp, Homo sapien
agagcagaccatgtgtgaatgagca

SEQ ID NO: 3038427 - DNA, 25 bp, Homo sapien
ctcctggtgtgctagcatgagagca

SEQ ID NO: 3038428 - DNA, 25 bp, Homo sapien
caactgtaggttccgttgtcaggct

SEQ ID NO: 3038429 - DNA, 25 bp, Homo sapien
gacggcttttctctaaatcgaggag

SEQ ID NO: 3038430 - DNA, 25 bp, Homo sapien
tgaaaagactcacttgtctgttgga

SEQ ID NO: 3038431 - DNA, 25 bp, Homo sapien
caggcttctcgactttggtgattga

SEQ ID NO: 3038432 - DNA, 25 bp, Homo sapien
gacacagacagagctggaattgatt

SEQ ID NO: 3038433 - DNA, 25 bp, Homo sapien
gcctgcaggtaaagctgattccgtt

SEQ ID NO: 3038434 - DNA, 25 bp, Homo sapien
acattcagcaccaccgaaacggaca

SEQ ID NO: 3038435 - DNA, 25 bp, Homo sapien
ccgaaacggacacggactgatccct

SEQ ID NO: 3038436 - DNA, 25 bp, Homo sapien
atgcttgggagccaggtgtagtatc

SEQ ID NO: 3038437 - DNA, 25 bp, Homo sapien
gtgtagtatccaggatatagttctc

SEQ ID NO: 3038438 - DNA, 25 bp, Homo sapien
cagcacatatcagagatgcttggga

SEQ ID NO: 3038439 - DNA, 25 bp, Homo sapien
tctggtgtggttttgaacagcacat

SEQ ID NO: 3038440 - DNA, 25 bp, Homo sapien
tcccatttgcattatgacactgctc

SEQ ID NO: 3038441 - DNA, 25 bp, Homo sapien
ttcccatttgcattatgacactgct

SEQ ID NO: 3038442 - DNA, 25 bp, Homo sapien
ctttaatgagttaaactcagatcta

SEQ ID NO: 3038443 - DNA, 25 bp, Homo sapien
agctgacttccttggccaactgttc

SEQ ID NO: 3038444 - DNA, 25 bp, Homo sapien
ctctgagaagctgacttccttggcc

SEQ ID NO: 3038445 - DNA, 25 bp, Homo sapien
tcttgagctctgagaagctgacttc

SEQ ID NO: 3038446 - DNA, 25 bp, Homo sapien
gagaagctgacttccttggccaact

SEQ ID NO: 3038447 - DNA, 25 bp, Homo sapien
tggctccctcagaagaaggcgggtg

SEQ ID NO: 3038448 - DNA, 25 bp, Homo sapien
ggagtggccgtgtgacacagcagga

SEQ ID NO: 3038449 - DNA, 25 bp, Homo sapien
caggcagtccgggagtggccgtgtg

SEQ ID NO: 3038450 - DNA, 25 bp, Homo sapien
gcgggtgatgtcctccaggatcagt

SEQ ID NO: 3038451 - DNA, 25 bp, Homo sapien
ctgtagcatcctgttcactgctttc

SEQ ID NO: 3038452 - DNA, 25 bp, Homo sapien
aatttgccaaatctttagaagcagg

SEQ ID NO: 3038453 - DNA, 25 bp, Homo sapien
aaggtagtcacttgatctccaaaga

SEQ ID NO: 3038454 - DNA, 25 bp, Homo sapien
ggcaccagacgtgaaggagccccct

SEQ ID NO: 3038455 - DNA, 25 bp, Homo sapien
ccagtcaagtgaatcaatgggaata

SEQ ID NO: 3038456 - DNA, 25 bp, Homo sapien
aagtgaatcaatgggaatagggaag

SEQ ID NO: 3038457 - DNA, 25 bp, Homo sapien
gtcaagtgaatcaatgggaataggg

SEQ ID NO: 3038458 - DNA, 25 bp, Homo sapien
caagtgaatcaatgggaatagggaa

SEQ ID NO: 3038459 - DNA, 25 bp, Homo sapien
tcctacacttagagacaatacgtcc

SEQ ID NO: 3038460 - DNA, 25 bp, Homo sapien
gagacaatacgtcctccactagaag

SEQ ID NO: 3038461 - DNA, 25 bp, Homo sapien
tgcataacttttgtcctacacttag

SEQ ID NO: 3038462 - DNA, 25 bp, Homo sapien
cctggcaatgtttgcataacttttg

SEQ ID NO: 3038463 - DNA, 25 bp, Homo sapien
accccaaaacggcactgcatcatat

SEQ ID NO: 3038464 - DNA, 25 bp, Homo sapien
ccaaaacggcactgcatcatattga

SEQ ID NO: 3038465 - DNA, 25 bp, Homo sapien
gatccaccccaaaacggcactgcat

SEQ ID NO: 3038466 - DNA, 25 bp, Homo sapien
tctgatccaccccaaaacggcactg

SEQ ID NO: 3038467 - DNA, 25 bp, Homo sapien
gttgatctacttggcccgcgagctg

SEQ ID NO: 3038468 - DNA, 25 bp, Homo sapien
aacatgcatggcgacgagaccgtgt

SEQ ID NO: 3038469 - DNA, 25 bp, Homo sapien
tcgctaatccctgagggcgacgcgg

SEQ ID NO: 3038470 - DNA, 25 bp, Homo sapien
ccgtgtcgcgccaggtgttgatcta

SEQ ID NO: 3038471 - DNA, 25 bp, Homo sapien
catagaatatgagcgagaagagatc

SEQ ID NO: 3038472 - DNA, 25 bp, Homo sapien
ggaacaagtgagtgttgcctgcccc

SEQ ID NO: 3038473 - DNA, 25 bp, Homo sapien
tcatcgagtggatccgcaggaacaa

SEQ ID NO: 3038474 - DNA, 25 bp, Homo sapien
taaggataacctaggtcagctcaca

SEQ ID NO: 3038475 - DNA, 25 bp, Homo sapien
caagccatatgtacccaaaatgggt

SEQ ID NO: 3038476 - DNA, 25 bp, Homo sapien
gagctttattgagctcagaggagac

SEQ ID NO: 3038477 - DNA, 25 bp, Homo sapien
ttggcagtcacattataaagtgtct

SEQ ID NO: 3038478 - DNA, 25 bp, Homo sapien
atactttcgttactggatctttggg

SEQ ID NO: 3038479 - DNA, 25 bp, Homo sapien
ttgcacattaaagacctggttgagg

SEQ ID NO: 3038480 - DNA, 25 bp, Homo sapien
tatttgcttggagtcacgagttggc

SEQ ID NO: 3038481 - DNA, 25 bp, Homo sapien
tactttgtaacgtgataataggcct

SEQ ID NO: 3038482 - DNA, 25 bp, Homo sapien
ctgacctttaggagcagtgcagttg

SEQ ID NO: 3038483 - DNA, 25 bp, Homo sapien
gccaccttcttgataaaggcaagta

SEQ ID NO: 3038484 - DNA, 25 bp, Homo sapien
caggtctggtgtatagtaaacacac

SEQ ID NO: 3038485 - DNA, 25 bp, Homo sapien
ggtacttaataatgcttcggcatga

SEQ ID NO: 3038486 - DNA, 25 bp, Homo sapien
gcaagtacagttagaatcgtaggta

SEQ ID NO: 3038487 - DNA, 25 bp, Homo sapien
tcacccagtgactacttacaaaact

SEQ ID NO: 3038488 - DNA, 25 bp, Homo sapien
aatgccaccattagtgttgctgaga

SEQ ID NO: 3038489 - DNA, 25 bp, Homo sapien
tgttgctgagattaatcacccagtg

SEQ ID NO: 3038490 - DNA, 25 bp, Homo sapien
gagattactggcgtctcttggttcc

SEQ ID NO: 3038491 - DNA, 25 bp, Homo sapien
cctgagaccaaagccatcattgaaa

SEQ ID NO: 3038492 - DNA, 25 bp, Homo sapien
gttgccttagatggtggttccatgc

SEQ ID NO: 3038493 - DNA, 25 bp, Homo sapien
tgacaagccagtacagacaggtatg

SEQ ID NO: 3038494 - DNA, 25 bp, Homo sapien
ccatgctggtcacatatccttatga

SEQ ID NO: 3038495 - DNA, 25 bp, Homo sapien
ccagaaacattaaggcagggacagc

SEQ ID NO: 3038496 - DNA, 25 bp, Homo sapien
tagatcggaactggtagactacgct

SEQ ID NO: 3038497 - DNA, 25 bp, Homo sapien
cagggacagcagtcagaatcgacat

SEQ ID NO: 3038498 - DNA, 25 bp, Homo sapien
ggctttctacctgttccaaggctag

SEQ ID NO: 3038499 - DNA, 25 bp, Homo sapien
gaaatgtggaagagacctacttgca

SEQ ID NO: 3038500 - DNA, 25 bp, Homo sapien
tatcccaaagccttcaggtggaggg

SEQ ID NO: 3038501 - DNA, 25 bp, Homo sapien
tattattgaaatcgcttgaccggtc

SEQ ID NO: 3038502 - DNA, 25 bp, Homo sapien
ggtcttgttcacataggcctctggg

SEQ ID NO: 3038503 - DNA, 25 bp, Homo sapien
cctatccagttgaggaatgcttgca

SEQ ID NO: 3038504 - DNA, 25 bp, Homo sapien
ttcagtaagatgtgcccaagtcatt

SEQ ID NO: 3038505 - DNA, 25 bp, Homo sapien
ggtaatgttcaaagtgtctgcctgt

SEQ ID NO: 3038506 - DNA, 25 bp, Homo sapien
gaaagacccttcagttttgatgcat

SEQ ID NO: 3038507 - DNA, 25 bp, Homo sapien
taactaccttctatgctggccatgc

SEQ ID NO: 3038508 - DNA, 25 bp, Homo sapien
aatggcataacatgagtgtactaac

SEQ ID NO: 3038509 - DNA, 25 bp, Homo sapien
aagtgatactcccagttctagagca

SEQ ID NO: 3038510 - DNA, 25 bp, Homo sapien
taggttaccattttgaggcagttgg

SEQ ID NO: 3038511 - DNA, 25 bp, Homo sapien
cagagatcatacagagttgactcct

SEQ ID NO: 3038512 - DNA, 25 bp, Homo sapien
caaaagaggaaggattatacacagt

SEQ ID NO: 3038513 - DNA, 25 bp, Homo sapien
tatttagcagaacgtgaatggaaca

SEQ ID NO: 3038514 - DNA, 25 bp, Homo sapien
aatggaacacattggaaagagggcc

SEQ ID NO: 3038515 - DNA, 25 bp, Homo sapien
tccgtcggaggaagtatgaagagaa

SEQ ID NO: 3038516 - DNA, 25 bp, Homo sapien
cagaatgtctcttattgggtctcca

SEQ ID NO: 3038517 - DNA, 25 bp, Homo sapien
gggtctccatgacaactacaggttg

SEQ ID NO: 3038518 - DNA, 25 bp, Homo sapien
ggaacttgcattccggtccgtcgga

SEQ ID NO: 3038519 - DNA, 25 bp, Homo sapien
ttttctcaataacccattagataga

SEQ ID NO: 3038520 - DNA, 25 bp, Homo sapien
tgtattcttaccatggatattggac

SEQ ID NO: 3038521 - DNA, 25 bp, Homo sapien
ccatggatattggacctgtgctaaa

SEQ ID NO: 3038522 - DNA, 25 bp, Homo sapien
tggacctgtgctaaaagtactttgc

SEQ ID NO: 3038523 - DNA, 25 bp, Homo sapien
tatgagagcctcttaagcaatggca

SEQ ID NO: 3038524 - DNA, 25 bp, Homo sapien
caatggcatatcaggcagtgatgca

SEQ ID NO: 3038525 - DNA, 25 bp, Homo sapien
tactctgtgagaccttacctggcca

SEQ ID NO: 3038526 - DNA, 25 bp, Homo sapien
gctacaagactatcggctctctgct

SEQ ID NO: 3038527 - DNA, 25 bp, Homo sapien
ttttccccttgcagcattgctatgg

SEQ ID NO: 3038528 - DNA, 25 bp, Homo sapien
tcatttggaaaaagcgcagtggtaa

SEQ ID NO: 3038529 - DNA, 25 bp, Homo sapien
tatcagagaacagtggagtcatttg

SEQ ID NO: 3038530 - DNA, 25 bp, Homo sapien
ttttaaaggcatgatggttccaggc

SEQ ID NO: 3038531 - DNA, 25 bp, Homo sapien
actctcaggcagaactccccagtct

SEQ ID NO: 3038532 - DNA, 25 bp, Homo sapien
ctctcaggcagaactccccagtctc

SEQ ID NO: 3038533 - DNA, 25 bp, Homo sapien
tcaaactctcaggcagaactcccca

SEQ ID NO: 3038534 - DNA, 25 bp, Homo sapien
aaactctcaggcagaactccccagt

SEQ ID NO: 3038535 - DNA, 25 bp, Homo sapien
ttgagccgcagcgcgttcccggttt

SEQ ID NO: 3038536 - DNA, 25 bp, Homo sapien
cgttcccggtttgggcaactgcatc

SEQ ID NO: 3038537 - DNA, 25 bp, Homo sapien
aactgcatctgctaaagattccctt

SEQ ID NO: 3038538 - DNA, 25 bp, Homo sapien
aagactgggagatgtgtattggtta

SEQ ID NO: 3038539 - DNA, 25 bp, Homo sapien
ccaaagatcgttttcctgctgtaaa

SEQ ID NO: 3038540 - DNA, 25 bp, Homo sapien
tctatttttgtgattcctacgactt

SEQ ID NO: 3038541 - DNA, 25 bp, Homo sapien
tgtaaacagcctgatccagaggatc

SEQ ID NO: 3038542 - DNA, 25 bp, Homo sapien
cctacgacttttcgccagagaggct

SEQ ID NO: 3038543 - DNA, 25 bp, Homo sapien
ggactcttgacagccaccgctttca

SEQ ID NO: 3038544 - DNA, 25 bp, Homo sapien
tgcgttccattgatgggacatcttc

SEQ ID NO: 3038545 - DNA, 25 bp, Homo sapien
gctgtatgcgttccattgatgggac

SEQ ID NO: 3038546 - DNA, 25 bp, Homo sapien
tgttgctgctgtatgcgttccattg

SEQ ID NO: 3038547 - DNA, 25 bp, Homo sapien
cacatataaaaaggcattgagggct

SEQ ID NO: 3038548 - DNA, 25 bp, Homo sapien
taatgtgatctattcaagaagccac

SEQ ID NO: 3038549 - DNA, 25 bp, Homo sapien
gggctcactgtccagagaattgctt

SEQ ID NO: 3038550 - DNA, 25 bp, Homo sapien
tgtaaatgctccacaacgtatgggc

SEQ ID NO: 3038551 - DNA, 25 bp, Homo sapien
gattttaagccagccaccagaattc

SEQ ID NO: 3038552 - DNA, 25 bp, Homo sapien
gtgacagattttaagccagccacca

SEQ ID NO: 3038553 - DNA, 25 bp, Homo sapien
tttaagccagccaccagaattcttt

SEQ ID NO: 3038554 - DNA, 25 bp, Homo sapien
ccagaattcttttcgagttaaccat

SEQ ID NO: 3038555 - DNA, 25 bp, Homo sapien
tattggcttcagtccgagccacagg

SEQ ID NO: 3038556 - DNA, 25 bp, Homo sapien
gactaacacctggtttggtacagag

SEQ ID NO: 3038557 - DNA, 25 bp, Homo sapien
tattcaggcgaacttgctcatgggt

SEQ ID NO: 3038558 - DNA, 25 bp, Homo sapien
tacagcctggtttgtagacttccaa

SEQ ID NO: 3038559 - DNA, 25 bp, Homo sapien
ggtatttgcatccattcccaccctg

SEQ ID NO: 3038560 - DNA, 25 bp, Homo sapien
tgttaatgctagtcacagccaggag

SEQ ID NO: 3038561 - DNA, 25 bp, Homo sapien
ggaccagttaccagattcagaggct

SEQ ID NO: 3038562 - DNA, 25 bp, Homo sapien
caccctgttagctcttaagggagga

SEQ ID NO: 3038563 - DNA, 25 bp, Homo sapien
tcagtttaaccagcctccaagcggt

SEQ ID NO: 3038564 - DNA, 25 bp, Homo sapien
ccctgatagctaacgaggttgggca

SEQ ID NO: 3038565 - DNA, 25 bp, Homo sapien
tccaagcggttctgatgcatgccag

SEQ ID NO: 3038566 - DNA, 25 bp, Homo sapien
tgtagatagacaggtggaacccagc

SEQ ID NO: 3038567 - DNA, 25 bp, Homo sapien
cattgaggcttgctcccttaacgaa

SEQ ID NO: 3038568 - DNA, 25 bp, Homo sapien
cccaatgcctagagagtgcctggta

SEQ ID NO: 3038569 - DNA, 25 bp, Homo sapien
gaaattaccagcgatcatctctgac

SEQ ID NO: 3038570 - DNA, 25 bp, Homo sapien
cattaattctaaggcttgggtgtcc

SEQ ID NO: 3038571 - DNA, 25 bp, Homo sapien
tgtggttaggtgatggcaacctcca

SEQ ID NO: 3038572 - DNA, 25 bp, Homo sapien
gggatcaagagtgacccgacctcct

SEQ ID NO: 3038573 - DNA, 25 bp, Homo sapien
tgggaactgggatcaagagtgaccc

SEQ ID NO: 3038574 - DNA, 25 bp, Homo sapien
ggcaacctccagttttcactgggaa

SEQ ID NO: 3038575 - DNA, 25 bp, Homo sapien
tttgaggaagtagccaccactccca

SEQ ID NO: 3038576 - DNA, 25 bp, Homo sapien
ctccttttgaggaagtagccaccac

SEQ ID NO: 3038577 - DNA, 25 bp, Homo sapien
tagggggagtgcacaggagagcaga

SEQ ID NO: 3038578 - DNA, 25 bp, Homo sapien
cagggctccacaagtccctcggggg

SEQ ID NO: 3038579 - DNA, 25 bp, Homo sapien
gactgaagggccatggtagcccaag

SEQ ID NO: 3038580 - DNA, 25 bp, Homo sapien
catatccctggaatagcccatcatg

SEQ ID NO: 3038581 - DNA, 25 bp, Homo sapien
tgttccccgtaggaaactgagcatc

SEQ ID NO: 3038582 - DNA, 25 bp, Homo sapien
gtagaaccgagcactcaggagagac

SEQ ID NO: 3038583 - DNA, 25 bp, Homo sapien
accacctcgagtccaggatgggcag

SEQ ID NO: 3038584 - DNA, 25 bp, Homo sapien
gccccagtaaccttggccacgctgg

SEQ ID NO: 3038585 - DNA, 25 bp, Homo sapien
aagcaccacctcgagtccaggatgg

SEQ ID NO: 3038586 - DNA, 25 bp, Homo sapien
agcaccacctcgagtccaggatggg

SEQ ID NO: 3038587 - DNA, 25 bp, Homo sapien
gaagcgagtgtataagggcattccc

SEQ ID NO: 3038588 - DNA, 25 bp, Homo sapien
aaagatttccagaatcctcgggctc

SEQ ID NO: 3038589 - DNA, 25 bp, Homo sapien
ggcattcccatgaacgtccgggccg

SEQ ID NO: 3038590 - DNA, 25 bp, Homo sapien
tccgggccgaggtgtggtcagtcct

SEQ ID NO: 3038591 - DNA, 25 bp, Homo sapien
tcctttatctgcctgaggaggacac

SEQ ID NO: 3038592 - DNA, 25 bp, Homo sapien
cacggtgactctggctgttgcaggt

SEQ ID NO: 3038593 - DNA, 25 bp, Homo sapien
acacattctgggcactggtgcagct

SEQ ID NO: 3038594 - DNA, 25 bp, Homo sapien
tgagccacatcgctgccttgttcct

SEQ ID NO: 3038595 - DNA, 25 bp, Homo sapien
tcccacagagaagggctaagggcag

SEQ ID NO: 3038596 - DNA, 25 bp, Homo sapien
tgctcccacagagaagggctaaggg

SEQ ID NO: 3038597 - DNA, 25 bp, Homo sapien
gggccctgctcccacagagaagggc

SEQ ID NO: 3038598 - DNA, 25 bp, Homo sapien
gatgttgcggggagcctgggacact

SEQ ID NO: 3038599 - DNA, 25 bp, Homo sapien
ggcagtcaatactaggggagtgccc

SEQ ID NO: 3038600 - DNA, 25 bp, Homo sapien
gagtcaccttctggggcagtcaata

SEQ ID NO: 3038601 - DNA, 25 bp, Homo sapien
cagtcaatactaggggagtgcccag

SEQ ID NO: 3038602 - DNA, 25 bp, Homo sapien
ccttctggggcagtcaatactaggg

SEQ ID NO: 3038603 - DNA, 25 bp, Homo sapien
tatcaataccccaaccggagagggc

SEQ ID NO: 3038604 - DNA, 25 bp, Homo sapien
gaccaataagcctggcgagcacaga

SEQ ID NO: 3038605 - DNA, 25 bp, Homo sapien
gaccctggagggaaaactaatgctg

SEQ ID NO: 3038606 - DNA, 25 bp, Homo sapien
tcagagtcccaaagaagattcgcag

SEQ ID NO: 3038607 - DNA, 25 bp, Homo sapien
tcagccacgaagatgcttatgttct

SEQ ID NO: 3038608 - DNA, 25 bp, Homo sapien
gcttatgttctttcttgtactgagt

SEQ ID NO: 3038609 - DNA, 25 bp, Homo sapien
ttatgttctttcttgtactgagtca

SEQ ID NO: 3038610 - DNA, 25 bp, Homo sapien
atgttctttcttgtactgagtcagg

SEQ ID NO: 3038611 - DNA, 25 bp, Homo sapien
ctctgtctccgccaggttgccctcc

SEQ ID NO: 3038612 - DNA, 25 bp, Homo sapien
tctgtctccgccaggttgccctcca

SEQ ID NO: 3038613 - DNA, 25 bp, Homo sapien
tgcgccagagctccgaaatcttgct

SEQ ID NO: 3038614 - DNA, 25 bp, Homo sapien
gccagagctccgaaatcttgctctt

SEQ ID NO: 3038615 - DNA, 25 bp, Homo sapien
ggtgcgccagagctccgaaatcttg

SEQ ID NO: 3038616 - DNA, 25 bp, Homo sapien
tggtgcgccagagctccgaaatctt

SEQ ID NO: 3038617 - DNA, 25 bp, Homo sapien
tgaggagtgggcacctccaagacac

SEQ ID NO: 3038618 - DNA, 25 bp, Homo sapien
ctgtggtccacgcagcttgctgagg

SEQ ID NO: 3038619 - DNA, 25 bp, Homo sapien
agctccaggtctgttgatgcagcgt

SEQ ID NO: 3038620 - DNA, 25 bp, Homo sapien
tctgttgatgcagcgtgtgaccctg

SEQ ID NO: 3038621 - DNA, 25 bp, Homo sapien
gctgaagaaccaatccttggcatcc

SEQ ID NO: 3038622 - DNA, 25 bp, Homo sapien
cttgctgaagaaccaatccttggca

SEQ ID NO: 3038623 - DNA, 25 bp, Homo sapien
catccttgcggttcttctctgccat

SEQ ID NO: 3038624 - DNA, 25 bp, Homo sapien
atccttggcatccttgcggttcttc

SEQ ID NO: 3038625 - DNA, 25 bp, Homo sapien
catctccacattgatctcaccgccc

SEQ ID NO: 3038626 - DNA, 25 bp, Homo sapien
caggatgcggctcaggtccatgcct

SEQ ID NO: 3038627 - DNA, 25 bp, Homo sapien
aggtccatgcctggggcagcgtcca

SEQ ID NO: 3038628 - DNA, 25 bp, Homo sapien
tactcatgcatctcgttcaggatgc

SEQ ID NO: 3038629 - DNA, 25 bp, Homo sapien
atcccagtgcgcctgctctgctctg

SEQ ID NO: 3038630 - DNA, 25 bp, Homo sapien
tctgctctctcccatggcctcagcc

SEQ ID NO: 3038631 - DNA, 25 bp, Homo sapien
gctctctcccatggcctcagccatg

SEQ ID NO: 3038632 - DNA, 25 bp, Homo sapien
actcctcagcatctttgaccttctg

SEQ ID NO: 3038633 - DNA, 25 bp, Homo sapien
gcaggccattgatggcggcctccac

SEQ ID NO: 3038634 - DNA, 25 bp, Homo sapien
gcatctccaggtcggctctggccaa

SEQ ID NO: 3038635 - DNA, 25 bp, Homo sapien
aggtcggctctggccaaggtcagcc

SEQ ID NO: 3038636 - DNA, 25 bp, Homo sapien
aggtcagcccatccagcaccctgcg

SEQ ID NO: 3038637 - DNA, 25 bp, Homo sapien
caggctgctcggacctgcaggtcca

SEQ ID NO: 3038638 - DNA, 25 bp, Homo sapien
gtgggaatcagggacttcagcccag

SEQ ID NO: 3038639 - DNA, 25 bp, Homo sapien
gccgtgggaatcagggacttcagcc

SEQ ID NO: 3038640 - DNA, 25 bp, Homo sapien
tcagcccaggctgctcggacctgca

SEQ ID NO: 3038641 - DNA, 25 bp, Homo sapien
caggatgttggcattgttcaaggtg

SEQ ID NO: 3038642 - DNA, 25 bp, Homo sapien
gcattgtcaatctgtagcaggatgt

SEQ ID NO: 3038643 - DNA, 25 bp, Homo sapien
ttggtgcagaagtcagcagcagcca

SEQ ID NO: 3038644 - DNA, 25 bp, Homo sapien
gtagcaggatgttggcattgttcaa

SEQ ID NO: 3038645 - DNA, 25 bp, Homo sapien
gaatagctgctaccccggagggcac

SEQ ID NO: 3038646 - DNA, 25 bp, Homo sapien
aatagctgctaccccggagggcact

SEQ ID NO: 3038647 - DNA, 25 bp, Homo sapien
ggaatagctgctaccccggagggca

SEQ ID NO: 3038648 - DNA, 25 bp, Homo sapien
atagctgctaccccggagggcactg

SEQ ID NO: 3038649 - DNA, 25 bp, Homo sapien
gaggtgcgggatgagccactcccag

SEQ ID NO: 3038650 - DNA, 25 bp, Homo sapien
atggtggtggtcatggtggcggcgg

SEQ ID NO: 3038651 - DNA, 25 bp, Homo sapien
tggaggaggtgaactggtggatggt

SEQ ID NO: 3038652 - DNA, 25 bp, Homo sapien
gaggaggtgaactggtggatggtgg

SEQ ID NO: 3038653 - DNA, 25 bp, Homo sapien
tggtggtcatggtggcggcggcagg

SEQ ID NO: 3038654 - DNA, 25 bp, Homo sapien
aggcccgctgggtggaaggtggtca

SEQ ID NO: 3038655 - DNA, 25 bp, Homo sapien
caggcccgctgggtggaaggtggtc

SEQ ID NO: 3038656 - DNA, 25 bp, Homo sapien
ggcccgctgggtggaaggtggtcat

SEQ ID NO: 3038657 - DNA, 25 bp, Homo sapien
gaacttggagcaaagctttaatagc

SEQ ID NO: 3038658 - DNA, 25 bp, Homo sapien
ttgaacttggagcaaagctttaata

SEQ ID NO: 3038659 - DNA, 25 bp, Homo sapien
agcaaagctttaatagcaggcactg

SEQ ID NO: 3038660 - DNA, 25 bp, Homo sapien
caaagctttaatagcaggcactgga

SEQ ID NO: 3038661 - DNA, 25 bp, Homo sapien
acaggtcatgaaccggggcccagat

SEQ ID NO: 3038662 - DNA, 25 bp, Homo sapien
ggcccagatggacactcggggcatg

SEQ ID NO: 3038663 - DNA, 25 bp, Homo sapien
gctgatggctgtgccatggcccttg

SEQ ID NO: 3038664 - DNA, 25 bp, Homo sapien
gctgtgccatggcccttgaggtggg

SEQ ID NO: 3038665 - DNA, 25 bp, Homo sapien
gggagaggtggacctgctcacagaa

SEQ ID NO: 3038666 - DNA, 25 bp, Homo sapien
tgctcacagaaggagaccacctctc

SEQ ID NO: 3038667 - DNA, 25 bp, Homo sapien
tggggggagaggtggacctgctcac

SEQ ID NO: 3038668 - DNA, 25 bp, Homo sapien
cctgctcacagaaggagaccacctc

SEQ ID NO: 3038669 - DNA, 25 bp, Homo sapien
ggtgggctgcgaggccagggacaag

SEQ ID NO: 3038670 - DNA, 25 bp, Homo sapien
aatagacccaattaaagcaggagag

SEQ ID NO: 3038671 - DNA, 25 bp, Homo sapien
aacaaatagacccaattaaagcagg

SEQ ID NO: 3038672 - DNA, 25 bp, Homo sapien
gttagactatagatggacttcacca

SEQ ID NO: 3038673 - DNA, 25 bp, Homo sapien
tagactatagatggacttcaccatt

SEQ ID NO: 3038674 - DNA, 25 bp, Homo sapien
gcccgcaggttccacgccggcagct

SEQ ID NO: 3038675 - DNA, 25 bp, Homo sapien
tgcagcccgcaggttccacgccggc

SEQ ID NO: 3038676 - DNA, 25 bp, Homo sapien
agcccgcaggttccacgccggcagc

SEQ ID NO: 3038677 - DNA, 25 bp, Homo sapien
ccgcaggttccacgccggcagctcc

SEQ ID NO: 3038678 - DNA, 25 bp, Homo sapien
gacatccttctctacggctggccta

SEQ ID NO: 3038679 - DNA, 25 bp, Homo sapien
caagatacagcggttgagtacagcc

SEQ ID NO: 3038680 - DNA, 25 bp, Homo sapien
gagcagactctgtactacaacacag

SEQ ID NO: 3038681 - DNA, 25 bp, Homo sapien
aagtgttctgcacacgctccttggc

SEQ ID NO: 3038682 - DNA, 25 bp, Homo sapien
ttgcagcacattgcttgccttgaat

SEQ ID NO: 3038683 - DNA, 25 bp, Homo sapien
gcagcacattgcttgccttgaatgt

SEQ ID NO: 3038684 - DNA, 25 bp, Homo sapien
tgcagcacattgcttgccttgaatg

SEQ ID NO: 3038685 - DNA, 25 bp, Homo sapien
ttcacctactcctctatcctgcacc

SEQ ID NO: 3038686 - DNA, 25 bp, Homo sapien
ggatcccctgtgattgtagcccagg

SEQ ID NO: 3038687 - DNA, 25 bp, Homo sapien
tgcagcccgtgtctgcccttgaatg

SEQ ID NO: 3038688 - DNA, 25 bp, Homo sapien
gccatgcagctgtagccagcgagct

SEQ ID NO: 3038689 - DNA, 25 bp, Homo sapien
gctccctttttgtctggatcccctg

SEQ ID NO: 3038690 - DNA, 25 bp, Homo sapien
tgttgcgcaggctcgtaatcccagc

SEQ ID NO: 3038691 - DNA, 25 bp, Homo sapien
atcacgccacttgtattccagcttg

SEQ ID NO: 3038692 - DNA, 25 bp, Homo sapien
gccttgtgtggtcgtgtacacctgt

SEQ ID NO: 3038693 - DNA, 25 bp, Homo sapien
catttgtgttaggttaattccagga

SEQ ID NO: 3038694 - DNA, 25 bp, Homo sapien
tgatgtgcgtccaggaattggtctg

SEQ ID NO: 3038695 - DNA, 25 bp, Homo sapien
ttagcaaatagatctcaagagctgg

SEQ ID NO: 3038696 - DNA, 25 bp, Homo sapien
ggtgcccaacttctcagtccatctt

SEQ ID NO: 3038697 - DNA, 25 bp, Homo sapien
cctttggttatagtggagtcttctg

SEQ ID NO: 3038698 - DNA, 25 bp, Homo sapien
atcaaacttagcattatgagccacc

SEQ ID NO: 3038699 - DNA, 25 bp, Homo sapien
gatcaaacttagcattatgagccac

SEQ ID NO: 3038700 - DNA, 25 bp, Homo sapien
tcaaacttagcattatgagccacct

SEQ ID NO: 3038701 - DNA, 25 bp, Homo sapien
caaacttagcattatgagccacctg

SEQ ID NO: 3038702 - DNA, 25 bp, Homo sapien
aataatggaaccgttccatatgcat

SEQ ID NO: 3038703 - DNA, 25 bp, Homo sapien
ctcagtcagatttcaactccctcaa

SEQ ID NO: 3038704 - DNA, 25 bp, Homo sapien
cagatttcaactccctcaacttctg

SEQ ID NO: 3038705 - DNA, 25 bp, Homo sapien
aatggaaccgttccatatgcataaa

SEQ ID NO: 3038706 - DNA, 25 bp, Homo sapien
ttccattcttagtccatccaactct

SEQ ID NO: 3038707 - DNA, 25 bp, Homo sapien
tggctcttctattggaatggagggc

SEQ ID NO: 3038708 - DNA, 25 bp, Homo sapien
taaccagaaattgctacctggctct

SEQ ID NO: 3038709 - DNA, 25 bp, Homo sapien
ggagggcttttccattcttagtcca

SEQ ID NO: 3038710 - DNA, 25 bp, Homo sapien
caaactcatcttcgcaatatctgtg

SEQ ID NO: 3038711 - DNA, 25 bp, Homo sapien
tcaaaatacaatcctgtgtttgtgt

SEQ ID NO: 3038712 - DNA, 25 bp, Homo sapien
acgtcactttcccacttgacattct

SEQ ID NO: 3038713 - DNA, 25 bp, Homo sapien
caggaggtctctgtgaaataaaacc

SEQ ID NO: 3038714 - DNA, 25 bp, Homo sapien
tagtgatgacctaaagttcatggga

SEQ ID NO: 3038715 - DNA, 25 bp, Homo sapien
aataaaatgcgttaagtaccagcta

SEQ ID NO: 3038716 - DNA, 25 bp, Homo sapien
aaatgcgttaagtaccagctacatg

SEQ ID NO: 3038717 - DNA, 25 bp, Homo sapien
acctaaagttcatgggaccaggcac

SEQ ID NO: 3038718 - DNA, 25 bp, Homo sapien
ttgccataacaaccgaactcactcg

SEQ ID NO: 3038719 - DNA, 25 bp, Homo sapien
gcaatgaggcggaccagcaggttcc

SEQ ID NO: 3038720 - DNA, 25 bp, Homo sapien
gaaacttcaagatcaaccactggcc

SEQ ID NO: 3038721 - DNA, 25 bp, Homo sapien
tgagggagtaggaaagaaacttcaa

SEQ ID NO: 3038722 - DNA, 25 bp, Homo sapien
caaatgagcatggaccccatatctg

SEQ ID NO: 3038723 - DNA, 25 bp, Homo sapien
tggcaagccgcaaattgaattgtgg

SEQ ID NO: 3038724 - DNA, 25 bp, Homo sapien
acagggcaagcaaagtggcaagccg

SEQ ID NO: 3038725 - DNA, 25 bp, Homo sapien
acggaccctcaaacgcgtcaggaag

SEQ ID NO: 3038726 - DNA, 25 bp, Homo sapien
cgctccaacatctctcctggctgca

SEQ ID NO: 3038727 - DNA, 25 bp, Homo sapien
cccagatttacgtatgtataatttt

SEQ ID NO: 3038728 - DNA, 25 bp, Homo sapien
ctccccaaaccgctccaacatctct

SEQ ID NO: 3038729 - DNA, 25 bp, Homo sapien
tatcccagatttacgtatgtataat

SEQ ID NO: 3038730 - DNA, 25 bp, Homo sapien
gtgccaaaatgaggacggctcccct

SEQ ID NO: 3038731 - DNA, 25 bp, Homo sapien
cttttcatcccctcggggctgctgg

SEQ ID NO: 3038732 - DNA, 25 bp, Homo sapien
aatgaggacggctcccctcctaggc

SEQ ID NO: 3038733 - DNA, 25 bp, Homo sapien
cctcagaggcgctaatgaagcgcct

SEQ ID NO: 3038734 - DNA, 25 bp, Homo sapien
tccattcgcagtttgttgaatcctg

SEQ ID NO: 3038735 - DNA, 25 bp, Homo sapien
catggctagccagggtttattgttg

SEQ ID NO: 3038736 - DNA, 25 bp, Homo sapien
ctggataaggaacccgtggatatgg

SEQ ID NO: 3038737 - DNA, 25 bp, Homo sapien
tcccctaatgttttccattcgcagt

SEQ ID NO: 3038738 - DNA, 25 bp, Homo sapien
gatactgccggcttttttcttggta

SEQ ID NO: 3038739 - DNA, 25 bp, Homo sapien
tcacactattgcagcttggatactg

SEQ ID NO: 3038740 - DNA, 25 bp, Homo sapien
agagcctccatatgagtggtcgtct

SEQ ID NO: 3038741 - DNA, 25 bp, Homo sapien
cagcttggatactgccggctttttt

SEQ ID NO: 3038742 - DNA, 25 bp, Homo sapien
gggactggccagtgccgggactgga

SEQ ID NO: 3038743 - DNA, 25 bp, Homo sapien
gaagccttctttgtgccgggactgg

SEQ ID NO: 3038744 - DNA, 25 bp, Homo sapien
tacacaatgaatcctggccctgagg

SEQ ID NO: 3038745 - DNA, 25 bp, Homo sapien
gctgttttaccactcaattcattac

SEQ ID NO: 3038746 - DNA, 25 bp, Homo sapien
ggccgcagagcagcggggaaacggc

SEQ ID NO: 3038747 - DNA, 25 bp, Homo sapien
gcggccgcagagcagcggggaaacg

SEQ ID NO: 3038748 - DNA, 25 bp, Homo sapien
ctggcggccgcagagcagcggggaa

SEQ ID NO: 3038749 - DNA, 25 bp, Homo sapien
ccgcagagcagcggggaaacggccc

SEQ ID NO: 3038750 - DNA, 25 bp, Homo sapien
tcaagcctgtgtgcgtgaatcctcc

SEQ ID NO: 3038751 - DNA, 25 bp, Homo sapien
gctaggatacaggatcacaccacca

SEQ ID NO: 3038752 - DNA, 25 bp, Homo sapien
taggatacaggatcacaccaccaag

SEQ ID NO: 3038753 - DNA, 25 bp, Homo sapien
ggatacaggatcacaccaccaagcc

SEQ ID NO: 3038754 - DNA, 25 bp, Homo sapien
cagggctcattccatcacacattct

SEQ ID NO: 3038755 - DNA, 25 bp, Homo sapien
agagaaggctccctgccttgttccc

SEQ ID NO: 3038756 - DNA, 25 bp, Homo sapien
tcaaggcttggataggtccatcctc

SEQ ID NO: 3038757 - DNA, 25 bp, Homo sapien
ttctccatgacgaaggaagcgccca

SEQ ID NO: 3038758 - DNA, 25 bp, Homo sapien
acaggtaagggcatataaggtgcgt

SEQ ID NO: 3038759 - DNA, 25 bp, Homo sapien
catataaggtgcgtgctgtgtgttt

SEQ ID NO: 3038760 - DNA, 25 bp, Homo sapien
gaggcgtaaatggaaggaatgaata

SEQ ID NO: 3038761 - DNA, 25 bp, Homo sapien
cgtgctgtgtgtttgaggcgtaaat

SEQ ID NO: 3038762 - DNA, 25 bp, Homo sapien
tggcgttgcgctgacctgtccagga

SEQ ID NO: 3038763 - DNA, 25 bp, Homo sapien
tgggctctaggaaaacacgggctgg

SEQ ID NO: 3038764 - DNA, 25 bp, Homo sapien
gcatcctataccgagtgggctctag

SEQ ID NO: 3038765 - DNA, 25 bp, Homo sapien
gcagtgaaatgaacagcagggttgt

SEQ ID NO: 3038766 - DNA, 25 bp, Homo sapien
ggctggagagccgatcccagctggg

SEQ ID NO: 3038767 - DNA, 25 bp, Homo sapien
gcacgccgctcacaagtccaggaga

SEQ ID NO: 3038768 - DNA, 25 bp, Homo sapien
tggagagccgatcccagctgggacc

SEQ ID NO: 3038769 - DNA, 25 bp, Homo sapien
ttgtctcctgagcacgccgctcaca

SEQ ID NO: 3038770 - DNA, 25 bp, Homo sapien
gtcaaccacagatggatgggatctg

SEQ ID NO: 3038771 - DNA, 25 bp, Homo sapien
gattcaaggctggacagctctgcag

SEQ ID NO: 3038772 - DNA, 25 bp, Homo sapien
tcctccatacccagtgggtctgcag

SEQ ID NO: 3038773 - DNA, 25 bp, Homo sapien
aaactgggaaattgaggcgtagaga

SEQ ID NO: 3038774 - DNA, 25 bp, Homo sapien
tgcagccagcacgccgaatcccgtc

SEQ ID NO: 3038775 - DNA, 25 bp, Homo sapien
gaatcccgtcgtacccgagtccagc

SEQ ID NO: 3038776 - DNA, 25 bp, Homo sapien
cgaatcccgtcgtacccgagtccag

SEQ ID NO: 3038777 - DNA, 25 bp, Homo sapien
agcacgccgaatcccgtcgtacccg

SEQ ID NO: 3038778 - DNA, 25 bp, Homo sapien
ccaggaagatgagggcagcccaagt

SEQ ID NO: 3038779 - DNA, 25 bp, Homo sapien
caagtcgcctcagccactaagcatc

SEQ ID NO: 3038780 - DNA, 25 bp, Homo sapien
tgagggcagcccaagtcgcctcagc

SEQ ID NO: 3038781 - DNA, 25 bp, Homo sapien
tcagccactaagcatcccccttcca

SEQ ID NO: 3038782 - DNA, 25 bp, Homo sapien
gctcaagcgggttgcggcggccagt

SEQ ID NO: 3038783 - DNA, 25 bp, Homo sapien
cgaaaggaaggaaactccagcacgg

SEQ ID NO: 3038784 - DNA, 25 bp, Homo sapien
aacgcgggggtccagcacgtcgctt

SEQ ID NO: 3038785 - DNA, 25 bp, Homo sapien
actccgggccggattttgcgcgcgc

SEQ ID NO: 3038786 - DNA, 25 bp, Homo sapien
cctggcttccactagactcagagct

SEQ ID NO: 3038787 - DNA, 25 bp, Homo sapien
cagggcccccctcttccgcctggct

SEQ ID NO: 3038788 - DNA, 25 bp, Homo sapien
aggcagggcccccctcttccgcctg

SEQ ID NO: 3038789 - DNA, 25 bp, Homo sapien
cgcctggcttccactagactcagag

SEQ ID NO: 3038790 - DNA, 25 bp, Homo sapien
tgtagctggcgcccagggttgggga

SEQ ID NO: 3038791 - DNA, 25 bp, Homo sapien
gtagctggcgcccagggttggggag

SEQ ID NO: 3038792 - DNA, 25 bp, Homo sapien
ctgctcttgggggtgtagctggcgc

SEQ ID NO: 3038793 - DNA, 25 bp, Homo sapien
gtgtagctggcgcccagggttgggg

SEQ ID NO: 3038794 - DNA, 25 bp, Homo sapien
tcataagggtcccttgtgtgctggt

SEQ ID NO: 3038795 - DNA, 25 bp, Homo sapien
acgtgaccatcaggcacatccggtg

SEQ ID NO: 3038796 - DNA, 25 bp, Homo sapien
gatggtgatctagccaagggtgcat

SEQ ID NO: 3038797 - DNA, 25 bp, Homo sapien
catccggtgttcataagggtccctt

SEQ ID NO: 3038798 - DNA, 25 bp, Homo sapien
ccggatccaggctataacgtaggtg

SEQ ID NO: 3038799 - DNA, 25 bp, Homo sapien
taaaacggaatgaagcccggatcca

SEQ ID NO: 3038800 - DNA, 25 bp, Homo sapien
gatgcctcagtaaagctagggagaa

SEQ ID NO: 3038801 - DNA, 25 bp, Homo sapien
gaaaacatggtccacccatgcagtg

SEQ ID NO: 3038802 - DNA, 25 bp, Homo sapien
gaggagtcaaggctttcagctcctg

SEQ ID NO: 3038803 - DNA, 25 bp, Homo sapien
tcttgaactggatttaggggtgaga

SEQ ID NO: 3038804 - DNA, 25 bp, Homo sapien
gttctggctggagggcctggaagga

SEQ ID NO: 3038805 - DNA, 25 bp, Homo sapien
gaaagaggagtcaaggctttcagct

SEQ ID NO: 3038806 - DNA, 25 bp, Homo sapien
gaaaatggagcacgtccaggctgac

SEQ ID NO: 3038807 - DNA, 25 bp, Homo sapien
gctgaccacgagcttttcctccagg

SEQ ID NO: 3038808 - DNA, 25 bp, Homo sapien
caagattgacgcaagaggctcggga

SEQ ID NO: 3038809 - DNA, 25 bp, Homo sapien
gcagttgaactgagccgcagtcaca

SEQ ID NO: 3038810 - DNA, 25 bp, Homo sapien
aggtctgtctggtaggtgaaactga

SEQ ID NO: 3038811 - DNA, 25 bp, Homo sapien
ctgtttctaaggtctgtctggtagg

SEQ ID NO: 3038812 - DNA, 25 bp, Homo sapien
acattttcttgggtcaatttctgtt

SEQ ID NO: 3038813 - DNA, 25 bp, Homo sapien
tcaatttctgtttctaaggtctgtc

SEQ ID NO: 3038814 - DNA, 25 bp, Homo sapien
tgaaatcaataggatgaaggttttt

SEQ ID NO: 3038815 - DNA, 25 bp, Homo sapien
aatgaagtcttaaatcattagattt

SEQ ID NO: 3038816 - DNA, 25 bp, Homo sapien
ttttgaaatcaataggatgaaggtt

SEQ ID NO: 3038817 - DNA, 25 bp, Homo sapien
gaagtcttaaatcattagattttaa

SEQ ID NO: 3038818 - DNA, 25 bp, Homo sapien
ttttaagccatctgccagccaagaa

SEQ ID NO: 3038819 - DNA, 25 bp, Homo sapien
tgattttcttaattattgcccttta

SEQ ID NO: 3038820 - DNA, 25 bp, Homo sapien
aagccatctgccagccaagaaacaa

SEQ ID NO: 3038821 - DNA, 25 bp, Homo sapien
ctttggggaatttttaagccatctg

SEQ ID NO: 3038822 - DNA, 25 bp, Homo sapien
tatatttatttgagcgtatcaagtg

SEQ ID NO: 3038823 - DNA, 25 bp, Homo sapien
tatgaatgcaagttttttgtcctag

SEQ ID NO: 3038824 - DNA, 25 bp, Homo sapien
gcgtatcaagtgaacaagtttacat

SEQ ID NO: 3038825 - DNA, 25 bp, Homo sapien
tgtcctaggtgcaagattatattta

SEQ ID NO: 3038826 - DNA, 25 bp, Homo sapien
cttgaaggtgcctcatcagttgcca

SEQ ID NO: 3038827 - DNA, 25 bp, Homo sapien
tcttgaaggtgcctcatcagttgcc

SEQ ID NO: 3038828 - DNA, 25 bp, Homo sapien
ttgaaggtgcctcatcagttgccat

SEQ ID NO: 3038829 - DNA, 25 bp, Homo sapien
tgataacctcttttgccaactcgca

SEQ ID NO: 3038830 - DNA, 25 bp, Homo sapien
aagtcctgcttgtgaaagtttgcca

SEQ ID NO: 3038831 - DNA, 25 bp, Homo sapien
aattctgttaccctggaagtcctgc

SEQ ID NO: 3038832 - DNA, 25 bp, Homo sapien
tttcctggtcaaccgatcaaagcca

SEQ ID NO: 3038833 - DNA, 25 bp, Homo sapien
gtcccagtgctgatattcttccaag

SEQ ID NO: 3038834 - DNA, 25 bp, Homo sapien
gggtcccagtgctgatattcttcca

SEQ ID NO: 3038835 - DNA, 25 bp, Homo sapien
ggtcccagtgctgatattcttccaa

SEQ ID NO: 3038836 - DNA, 25 bp, Homo sapien
aatgcaaaattggaaacgtggtctg

SEQ ID NO: 3038837 - DNA, 25 bp, Homo sapien
tgattaaagcattcagtcctgtcct

SEQ ID NO: 3038838 - DNA, 25 bp, Homo sapien
agtgtaattcctacctcatttggga

SEQ ID NO: 3038839 - DNA, 25 bp, Homo sapien
tgaagttcagcagagaaacacgttg

SEQ ID NO: 3038840 - DNA, 25 bp, Homo sapien
atttttgagacggactctcgctgtg

SEQ ID NO: 3038841 - DNA, 25 bp, Homo sapien
tatttttgagacggactctcgctgt

SEQ ID NO: 3038842 - DNA, 25 bp, Homo sapien
tcacccaggctggagttcagtggca

SEQ ID NO: 3038843 - DNA, 25 bp, Homo sapien
tgatctcagctcactgcaacctctg

SEQ ID NO: 3038844 - DNA, 25 bp, Homo sapien
tgaggcgcattggacttcatcgatg

SEQ ID NO: 3038845 - DNA, 25 bp, Homo sapien
gggaaacaattagaatgaggcgcat

SEQ ID NO: 3038846 - DNA, 25 bp, Homo sapien
aattgttctattttaggcagcatgg

SEQ ID NO: 3038847 - DNA, 25 bp, Homo sapien
cactgtacctgacacatatgtttac

SEQ ID NO: 3038848 - DNA, 25 bp, Homo sapien
tgtgctgaacaatttgaaagtttgc

SEQ ID NO: 3038849 - DNA, 25 bp, Homo sapien
aactctcttgcatgtatctcctaag

SEQ ID NO: 3038850 - DNA, 25 bp, Homo sapien
tacccttcatctagattgtatctgt

SEQ ID NO: 3038851 - DNA, 25 bp, Homo sapien
cattttctggtataaccaccataca

SEQ ID NO: 3038852 - DNA, 25 bp, Homo sapien
tataaagaagagcattcgttctctg

SEQ ID NO: 3038853 - DNA, 25 bp, Homo sapien
cactccgttaagatgctgttcacaa

SEQ ID NO: 3038854 - DNA, 25 bp, Homo sapien
gaaaggtaatgttaggtttgatcac

SEQ ID NO: 3038855 - DNA, 25 bp, Homo sapien
tacgtactacatcacagacgaaagg

SEQ ID NO: 3038856 - DNA, 25 bp, Homo sapien
cacggaaggcatcatactttgagag

SEQ ID NO: 3038857 - DNA, 25 bp, Homo sapien
ggaaggcatcatactttgagagcca

SEQ ID NO: 3038858 - DNA, 25 bp, Homo sapien
ggccacacggaaggcatcatacttt

SEQ ID NO: 3038859 - DNA, 25 bp, Homo sapien
cacacggaaggcatcatactttgag

SEQ ID NO: 3038860 - DNA, 25 bp, Homo sapien
gaaggactatcacgcagttcttaaa

SEQ ID NO: 3038861 - DNA, 25 bp, Homo sapien
aaacaaagagatggccagcaaactt

SEQ ID NO: 3038862 - DNA, 25 bp, Homo sapien
tagggacgtgaggacacatatactc

SEQ ID NO: 3038863 - DNA, 25 bp, Homo sapien
ttagtactcaaaggcatgcaaatgc

SEQ ID NO: 3038864 - DNA, 25 bp, Homo sapien
ttattcatgagactataaggattat

SEQ ID NO: 3038865 - DNA, 25 bp, Homo sapien
atgtttttattcatgagactataag

SEQ ID NO: 3038866 - DNA, 25 bp, Homo sapien
ttcatgagactataaggattatata

SEQ ID NO: 3038867 - DNA, 25 bp, Homo sapien
tgtttttattcatgagactataagg

SEQ ID NO: 3038868 - DNA, 25 bp, Homo sapien
tgaacacacttttactacattctag

SEQ ID NO: 3038869 - DNA, 25 bp, Homo sapien
ggagtgctgtgtccaaactagtctc

SEQ ID NO: 3038870 - DNA, 25 bp, Homo sapien
tatttttacagcgaactacatttgc

SEQ ID NO: 3038871 - DNA, 25 bp, Homo sapien
tagtgattatacttgaacctgtatc

SEQ ID NO: 3038872 - DNA, 25 bp, Homo sapien
tcacaggcagattggatacacacgt

SEQ ID NO: 3038873 - DNA, 25 bp, Homo sapien
gcaattacaactacgctgggctgag

SEQ ID NO: 3038874 - DNA, 25 bp, Homo sapien
tatgaaatggctaacactgctgtgc

SEQ ID NO: 3038875 - DNA, 25 bp, Homo sapien
ggagagcacagtcaacacattcatg

SEQ ID NO: 3038876 - DNA, 25 bp, Homo sapien
cactaacactttccatccaggatag

SEQ ID NO: 3038877 - DNA, 25 bp, Homo sapien
gagcatccaaagtaaagagaaccac

SEQ ID NO: 3038878 - DNA, 25 bp, Homo sapien
gatcaagtaaccagtcaaaaaccac

SEQ ID NO: 3038879 - DNA, 25 bp, Homo sapien
accacttctctattatttgaactta

SEQ ID NO: 3038880 - DNA, 25 bp, Homo sapien
aagtaactgcgggtaactgatttgt

SEQ ID NO: 3038881 - DNA, 25 bp, Homo sapien
cagaagtaactgcgggtaactgatt

SEQ ID NO: 3038882 - DNA, 25 bp, Homo sapien
taactgcgggtaactgatttgtcat

SEQ ID NO: 3038883 - DNA, 25 bp, Homo sapien
gcgggtaactgatttgtcatttctt

SEQ ID NO: 3038884 - DNA, 25 bp, Homo sapien
gtctcacactgttacctggcatgat

SEQ ID NO: 3038885 - DNA, 25 bp, Homo sapien
ctcacactgttacctggcatgatct

SEQ ID NO: 3038886 - DNA, 25 bp, Homo sapien
gagtctcacactgttacctggcatg

SEQ ID NO: 3038887 - DNA, 25 bp, Homo sapien
acactgttacctggcatgatctcgg

SEQ ID NO: 3038888 - DNA, 25 bp, Homo sapien
ctcctatgctatctcttctgtctgg

SEQ ID NO: 3038889 - DNA, 25 bp, Homo sapien
acacagcttgatcccgctgcagaga

SEQ ID NO: 3038890 - DNA, 25 bp, Homo sapien
catttgtactaatgcacacagcttg

SEQ ID NO: 3038891 - DNA, 25 bp, Homo sapien
tgcacacactcctatgctatctctt

SEQ ID NO: 3038892 - DNA, 25 bp, Homo sapien
cagttctctgcttcagcgtcccaag

SEQ ID NO: 3038893 - DNA, 25 bp, Homo sapien
agttttctatttttaatagagatgg

SEQ ID NO: 3038894 - DNA, 25 bp, Homo sapien
aagcagttctctgcttcagcgtccc

SEQ ID NO: 3038895 - DNA, 25 bp, Homo sapien
caccatacccggctaagttttctat

SEQ ID NO: 3038896 - DNA, 25 bp, Homo sapien
tggcttcactgctgatgcctgaaat

SEQ ID NO: 3038897 - DNA, 25 bp, Homo sapien
tctggcttcactgctgatgcctgaa

SEQ ID NO: 3038898 - DNA, 25 bp, Homo sapien
tctctggcttcactgctgatgcctg

SEQ ID NO: 3038899 - DNA, 25 bp, Homo sapien
atctctggcttcactgctgatgcct

SEQ ID NO: 3038900 - DNA, 25 bp, Homo sapien
tcaggagagtcactaaccgaagtgc

SEQ ID NO: 3038901 - DNA, 25 bp, Homo sapien
ttgttctcaggagagtcactaaccg

SEQ ID NO: 3038902 - DNA, 25 bp, Homo sapien
aggagagtcactaaccgaagtgctt

SEQ ID NO: 3038903 - DNA, 25 bp, Homo sapien
ttctcaggagagtcactaaccgaag

SEQ ID NO: 3038904 - DNA, 25 bp, Homo sapien
tggagaggaatacagcaacactggc

SEQ ID NO: 3038905 - DNA, 25 bp, Homo sapien
tagtataatctgacaaccgctgaca

SEQ ID NO: 3038906 - DNA, 25 bp, Homo sapien
gaacttgggtcaagcattcacaata

SEQ ID NO: 3038907 - DNA, 25 bp, Homo sapien
gaggagagcttgttacactaaggtg

SEQ ID NO: 3038908 - DNA, 25 bp, Homo sapien
ctgaggcaggtgagatgttttaata

SEQ ID NO: 3038909 - DNA, 25 bp, Homo sapien
tgaggcaggtgagatgttttaatat

SEQ ID NO: 3038910 - DNA, 25 bp, Homo sapien
gaggcaggtgagatgttttaatatc

SEQ ID NO: 3038911 - DNA, 25 bp, Homo sapien
ccacagaaataagtcggagctctgg

SEQ ID NO: 3038912 - DNA, 25 bp, Homo sapien
gattcagaatcgttccgaagtgcta

SEQ ID NO: 3038913 - DNA, 25 bp, Homo sapien
tagagaacacccgatgattcagaat

SEQ ID NO: 3038914 - DNA, 25 bp, Homo sapien
gactgctcagactgtacccctcaaa

SEQ ID NO: 3038915 - DNA, 25 bp, Homo sapien
catgaggcaccaatgtggaatgacc

SEQ ID NO: 3038916 - DNA, 25 bp, Homo sapien
ctggagcctgtaatcttgggctgta

SEQ ID NO: 3038917 - DNA, 25 bp, Homo sapien
tgtcggccatctcctcgggcgcaga

SEQ ID NO: 3038918 - DNA, 25 bp, Homo sapien
ggcgcagactctgaactggtaatca

SEQ ID NO: 3038919 - DNA, 25 bp, Homo sapien
gaagtcccaattacttgggggctga

SEQ ID NO: 3038920 - DNA, 25 bp, Homo sapien
caaaacttagctggctgtggaagca

SEQ ID NO: 3038921 - DNA, 25 bp, Homo sapien
attgagactggagacatgattgtgc

SEQ ID NO: 3038922 - DNA, 25 bp, Homo sapien
ggctgtggaagcacatgcctgaagt

SEQ ID NO: 3038923 - DNA, 25 bp, Homo sapien
tggtctttcactatgttaagaattg

SEQ ID NO: 3038924 - DNA, 25 bp, Homo sapien
tatgttaagaattgagtcatccaac

SEQ ID NO: 3038925 - DNA, 25 bp, Homo sapien
ctttcactatgttaagaattgagtc

SEQ ID NO: 3038926 - DNA, 25 bp, Homo sapien
aagaattgagtcatccaactgagca

SEQ ID NO: 3038927 - DNA, 25 bp, Homo sapien
ctgtccaactgaatgtgcgaggcct

SEQ ID NO: 3038928 - DNA, 25 bp, Homo sapien
ctgaatgtgcgaggcctttttggta

SEQ ID NO: 3038929 - DNA, 25 bp, Homo sapien
aactgaatgtgcgaggcctttttgg

SEQ ID NO: 3038930 - DNA, 25 bp, Homo sapien
tccaactgaatgtgcgaggcctttt

SEQ ID NO: 3038931 - DNA, 25 bp, Homo sapien
tcatctttaccagccaccgccttta

SEQ ID NO: 3038932 - DNA, 25 bp, Homo sapien
agccctgcctcatctttaccagcca

SEQ ID NO: 3038933 - DNA, 25 bp, Homo sapien
cgcctttaccattcctacctggatt

SEQ ID NO: 3038934 - DNA, 25 bp, Homo sapien
ctgtgctcagcacgcctagctattt

SEQ ID NO: 3038935 - DNA, 25 bp, Homo sapien
catcccttgtctgtgatgcactttc

SEQ ID NO: 3038936 - DNA, 25 bp, Homo sapien
tcctctgcagtgttgactccgtgtt

SEQ ID NO: 3038937 - DNA, 25 bp, Homo sapien
ttctcggactaagtcctctgcagtg

SEQ ID NO: 3038938 - DNA, 25 bp, Homo sapien
aatggtctcctgttcaatggtgtcc

SEQ ID NO: 3038939 - DNA, 25 bp, Homo sapien
gacttgtaccctaggagcaatagaa

SEQ ID NO: 3038940 - DNA, 25 bp, Homo sapien
gagccagcatgcctactgcaccttt

SEQ ID NO: 3038941 - DNA, 25 bp, Homo sapien
acagttatgttacaactatctacag

SEQ ID NO: 3038942 - DNA, 25 bp, Homo sapien
gatgcacacttacagttatgttaca

SEQ ID NO: 3038943 - DNA, 25 bp, Homo sapien
gccggtagctctgcgctgcctccac

SEQ ID NO: 3038944 - DNA, 25 bp, Homo sapien
cccctcaagccggtgacccagctcc

SEQ ID NO: 3038945 - DNA, 25 bp, Homo sapien
agctcccgccggtagctctgcgctg

SEQ ID NO: 3038946 - DNA, 25 bp, Homo sapien
tgcctccacgttctcgcgggcctcc

SEQ ID NO: 3038947 - DNA, 25 bp, Homo sapien
aacctagcgcgggttcccgactgca

SEQ ID NO: 3038948 - DNA, 25 bp, Homo sapien
gcgcggccggcgaaacctagcgcgg

SEQ ID NO: 3038949 - DNA, 25 bp, Homo sapien
tgcaccgggcgcctccaagcggccc

SEQ ID NO: 3038950 - DNA, 25 bp, Homo sapien
tagcgcgggttcccgactgcaccgg

SEQ ID NO: 3038951 - DNA, 25 bp, Homo sapien
gatattcctttgctaaatcaaggca

SEQ ID NO: 3038952 - DNA, 25 bp, Homo sapien
tagttactcagcttgtcttctggta

SEQ ID NO: 3038953 - DNA, 25 bp, Homo sapien
tgttttatcaatctttccgttacag

SEQ ID NO: 3038954 - DNA, 25 bp, Homo sapien
ttggtgccctaatgctaagaaaccc

SEQ ID NO: 3038955 - DNA, 25 bp, Homo sapien
tagtagcgacgatagcaaagaagac

SEQ ID NO: 3038956 - DNA, 25 bp, Homo sapien
aagactgtacgacacctttggaaat

SEQ ID NO: 3038957 - DNA, 25 bp, Homo sapien
cattcaagatacaaaaagtcaacca

SEQ ID NO: 3038958 - DNA, 25 bp, Homo sapien
tcagtacctgttgacagcaacaaag

SEQ ID NO: 3038959 - DNA, 25 bp, Homo sapien
ccgtgtccagccaacagtttgaatt

SEQ ID NO: 3038960 - DNA, 25 bp, Homo sapien
accgtgtccagccaacagtttgaat

SEQ ID NO: 3038961 - DNA, 25 bp, Homo sapien
tacatagcacatttagatactttat

SEQ ID NO: 3038962 - DNA, 25 bp, Homo sapien
tcttttaaatacccatagagcttta

SEQ ID NO: 3038963 - DNA, 25 bp, Homo sapien
caaagaatgttagattacatagcac

SEQ ID NO: 3038964 - DNA, 25 bp, Homo sapien
atcctaattgtagtacacatttctt

SEQ ID NO: 3038965 - DNA, 25 bp, Homo sapien
gtgctgacatggtgccctaagtgga

SEQ ID NO: 3038966 - DNA, 25 bp, Homo sapien
ccaaagtatgctattgatttattca

SEQ ID NO: 3038967 - DNA, 25 bp, Homo sapien
gacatggtgccctaagtggaaaatt

SEQ ID NO: 3038968 - DNA, 25 bp, Homo sapien
tagctttatacaggatgaatatccc

SEQ ID NO: 3038969 - DNA, 25 bp, Homo sapien
cacccatcccgattattggttttat

SEQ ID NO: 3038970 - DNA, 25 bp, Homo sapien
tgcacccatcccgattattggtttt

SEQ ID NO: 3038971 - DNA, 25 bp, Homo sapien
cactgcacccatcccgattattggt

SEQ ID NO: 3038972 - DNA, 25 bp, Homo sapien
cccatcccgattattggttttatgc

SEQ ID NO: 3038973 - DNA, 25 bp, Homo sapien
ttcagcttataaaggagaacatgca

SEQ ID NO: 3038974 - DNA, 25 bp, Homo sapien
gtacccagtgtttaggttcagctta

SEQ ID NO: 3038975 - DNA, 25 bp, Homo sapien
tgagatttggacttcaattgaacct

SEQ ID NO: 3038976 - DNA, 25 bp, Homo sapien
caggccaatcccgatctcttgggtt

SEQ ID NO: 3038977 - DNA, 25 bp, Homo sapien
caatccaccatttttgggcacttag

SEQ ID NO: 3038978 - DNA, 25 bp, Homo sapien
atccaatccaccatttttgggcact

SEQ ID NO: 3038979 - DNA, 25 bp, Homo sapien
tggtgtatatatgtcctacaaattc

SEQ ID NO: 3038980 - DNA, 25 bp, Homo sapien
gtcctacaaattctttatccaatcc

SEQ ID NO: 3038981 - DNA, 25 bp, Homo sapien
tttggacagaaaagtatcaacctca

SEQ ID NO: 3038982 - DNA, 25 bp, Homo sapien
atacctactgtgacattgtaacaat

SEQ ID NO: 3038983 - DNA, 25 bp, Homo sapien
tcagactgccagtgaacttatagga

SEQ ID NO: 3038984 - DNA, 25 bp, Homo sapien
cataggttggtaaaatgtgtaagga

SEQ ID NO: 3038985 - DNA, 25 bp, Homo sapien
ttgttacacctttacacttagtaga

SEQ ID NO: 3038986 - DNA, 25 bp, Homo sapien
gtgtactgcctagaccccattaggg

SEQ ID NO: 3038987 - DNA, 25 bp, Homo sapien
tccttagaatggtactgtgagcagt

SEQ ID NO: 3038988 - DNA, 25 bp, Homo sapien
tgatggcgcccacttggattctgag

SEQ ID NO: 3038989 - DNA, 25 bp, Homo sapien
tcacatgagtccaaggattcgaggc

SEQ ID NO: 3038990 - DNA, 25 bp, Homo sapien
taccagtttctaagtgagtgtacta

SEQ ID NO: 3038991 - DNA, 25 bp, Homo sapien
catcagttgaatggccagtggcaga

SEQ ID NO: 3038992 - DNA, 25 bp, Homo sapien
tctaaggcatagctatattctgtga

SEQ ID NO: 3038993 - DNA, 25 bp, Homo sapien
tagttgattcacaagcactgtggag

SEQ ID NO: 3038994 - DNA, 25 bp, Homo sapien
ctggcctataaaatttcttaattgg

SEQ ID NO: 3038995 - DNA, 25 bp, Homo sapien
tgcacctggcctataaaatttctta

SEQ ID NO: 3038996 - DNA, 25 bp, Homo sapien
ctgggattaagcagtggcatgagcc

SEQ ID NO: 3038997 - DNA, 25 bp, Homo sapien
agtgctgggattaagcagtggcatg

SEQ ID NO: 3038998 - DNA, 25 bp, Homo sapien
caggtttctagtgcagtctcaactc

SEQ ID NO: 3038999 - DNA, 25 bp, Homo sapien
aaaacatggattgactttcccctca

SEQ ID NO: 3039000 - DNA, 25 bp, Homo sapien
ctcaggtttctagtgcagtctcaac

SEQ ID NO: 3039001 - DNA, 25 bp, Homo sapien
cctcaggtttctagtgcagtctcaa

SEQ ID NO: 3039002 - DNA, 25 bp, Homo sapien
tccagtgccagttctataccttgac

SEQ ID NO: 3039003 - DNA, 25 bp, Homo sapien
tatgatgggaggataaatccagtgc

SEQ ID NO: 3039004 - DNA, 25 bp, Homo sapien
gacattaccccagcaatagttgata

SEQ ID NO: 3039005 - DNA, 25 bp, Homo sapien
ccatctttgactagcaaggaactat

SEQ ID NO: 3039006 - DNA, 25 bp, Homo sapien
tatctgtctagttataggtggctgc

SEQ ID NO: 3039007 - DNA, 25 bp, Homo sapien
taaggaggtcaggaatacgtgtatc

SEQ ID NO: 3039008 - DNA, 25 bp, Homo sapien
tgagagctcatgataaagacttact

SEQ ID NO: 3039009 - DNA, 25 bp, Homo sapien
gattaatgtaattcacggctgctaa

SEQ ID NO: 3039010 - DNA, 25 bp, Homo sapien
tcatggaccctttctagtaagaatc

SEQ ID NO: 3039011 - DNA, 25 bp, Homo sapien
tgcccttacatgaataacttaatga

SEQ ID NO: 3039012 - DNA, 25 bp, Homo sapien
tcttacgatgatgaacaaggcactt

SEQ ID NO: 3039013 - DNA, 25 bp, Homo sapien
tactaggcttcaatgttcactaggt

SEQ ID NO: 3039014 - DNA, 25 bp, Homo sapien
ccgcatctggccctaaaattaattt

SEQ ID NO: 3039015 - DNA, 25 bp, Homo sapien
accagattttgaggactcagtgcaa

SEQ ID NO: 3039016 - DNA, 25 bp, Homo sapien
tgcaaaaaataggaatgtaacacat

SEQ ID NO: 3039017 - DNA, 25 bp, Homo sapien
caaaaaataggaatgtaacacatct

SEQ ID NO: 3039018 - DNA, 25 bp, Homo sapien
tctttgtgggaaaatctttgataaa

SEQ ID NO: 3039019 - DNA, 25 bp, Homo sapien
aagagtttgtatagggttgatattc

SEQ ID NO: 3039020 - DNA, 25 bp, Homo sapien
tttctaagagtttgtatagggttga

SEQ ID NO: 3039021 - DNA, 25 bp, Homo sapien
taagtattaaggttaagctgccctc

SEQ ID NO: 3039022 - DNA, 25 bp, Homo sapien
tatagtgagaccctgatctctacca

SEQ ID NO: 3039023 - DNA, 25 bp, Homo sapien
tgagaccctgatctctaccaaaaaa

SEQ ID NO: 3039024 - DNA, 25 bp, Homo sapien
aatatagtgagaccctgatctctac

SEQ ID NO: 3039025 - DNA, 25 bp, Homo sapien
tagtgagaccctgatctctaccaaa

SEQ ID NO: 3039026 - DNA, 25 bp, Homo sapien
agactttgtaaccttgttaactgca

SEQ ID NO: 3039027 - DNA, 25 bp, Homo sapien
tatttgaactcagcagttaaccaca

SEQ ID NO: 3039028 - DNA, 25 bp, Homo sapien
tgttgccagctacctacaaatgatt

SEQ ID NO: 3039029 - DNA, 25 bp, Homo sapien
gcagtttcatcctcaagaagagcat

SEQ ID NO: 3039030 - DNA, 25 bp, Homo sapien
ccctaatatggacacatttaatatt

SEQ ID NO: 3039031 - DNA, 25 bp, Homo sapien
tttcctccctaatatggacacattt

SEQ ID NO: 3039032 - DNA, 25 bp, Homo sapien
cctccctaatatggacacatttaat

SEQ ID NO: 3039033 - DNA, 25 bp, Homo sapien
tcctccctaatatggacacatttaa

SEQ ID NO: 3039034 - DNA, 25 bp, Homo sapien
tgtttaggtacacaatgacatatgt

SEQ ID NO: 3039035 - DNA, 25 bp, Homo sapien
tgtgtggcaacaggtctagagtgta

SEQ ID NO: 3039036 - DNA, 25 bp, Homo sapien
cctttttagacatgcatagtttgag

SEQ ID NO: 3039037 - DNA, 25 bp, Homo sapien
gaggtatctatatttccaaagtgga

SEQ ID NO: 3039038 - DNA, 25 bp, Homo sapien
caaacgatggtctgtcaagttaaaa

SEQ ID NO: 3039039 - DNA, 25 bp, Homo sapien
ggacctcaactaatgtagacagtgg

SEQ ID NO: 3039040 - DNA, 25 bp, Homo sapien
gagacttaggttcataaagaagata

SEQ ID NO: 3039041 - DNA, 25 bp, Homo sapien
ctttgacatcaaagagacttaggtt

SEQ ID NO: 3039042 - DNA, 25 bp, Homo sapien
aatcagcttttggaggcagtgtagc

SEQ ID NO: 3039043 - DNA, 25 bp, Homo sapien
cacacacaatcgtcctctaagagag

SEQ ID NO: 3039044 - DNA, 25 bp, Homo sapien
tctaagagaggacgattctataagc

SEQ ID NO: 3039045 - DNA, 25 bp, Homo sapien
ctagctattcaagagatagaggcag

SEQ ID NO: 3039046 - DNA, 25 bp, Homo sapien
cccatgttactgtttaacacattaa

SEQ ID NO: 3039047 - DNA, 25 bp, Homo sapien
tttaacacattaacctgagaggcac

SEQ ID NO: 3039048 - DNA, 25 bp, Homo sapien
tgttactgtttaacacattaacctg

SEQ ID NO: 3039049 - DNA, 25 bp, Homo sapien
actgtttaacacattaacctgagag

SEQ ID NO: 3039050 - DNA, 25 bp, Homo sapien
ccaataacatggatgttcacaacag

SEQ ID NO: 3039051 - DNA, 25 bp, Homo sapien
caacagttggtgttacgttagagct

SEQ ID NO: 3039052 - DNA, 25 bp, Homo sapien
tgatttggtcttggcttattgtgta

SEQ ID NO: 3039053 - DNA, 25 bp, Homo sapien
tatactttagcacgttaacctcaga

SEQ ID NO: 3039054 - DNA, 25 bp, Homo sapien
gagtcaaacactgctaattcataga

SEQ ID NO: 3039055 - DNA, 25 bp, Homo sapien
taatgaatcataaagctcttctact

SEQ ID NO: 3039056 - DNA, 25 bp, Homo sapien
gaactattttatctgatgggaagaa

SEQ ID NO: 3039057 - DNA, 25 bp, Homo sapien
aaacatctgtctgtagtgaactatt

SEQ ID NO: 3039058 - DNA, 25 bp, Homo sapien
tcttttccactagtccgggagtcac

SEQ ID NO: 3039059 - DNA, 25 bp, Homo sapien
ggatccgccttcagtatagaatcga

SEQ ID NO: 3039060 - DNA, 25 bp, Homo sapien
cgggagtcaccaatcatcagttcaa

SEQ ID NO: 3039061 - DNA, 25 bp, Homo sapien
tatttaataaggcatacagcatggc

SEQ ID NO: 3039062 - DNA, 25 bp, Homo sapien
taatcaaggtggtaattcctgacca

SEQ ID NO: 3039063 - DNA, 25 bp, Homo sapien
ggtcatggttatgtcacaacaacag

SEQ ID NO: 3039064 - DNA, 25 bp, Homo sapien
tgggaccagaagattaaactacaca

SEQ ID NO: 3039065 - DNA, 25 bp, Homo sapien
gataattcctgaccatttcgcaagg

SEQ ID NO: 3039066 - DNA, 25 bp, Homo sapien
gaatctggaggtgcaactgccttac

SEQ ID NO: 3039067 - DNA, 25 bp, Homo sapien
ctagcaggtaggaatctggaggtgc

SEQ ID NO: 3039068 - DNA, 25 bp, Homo sapien
aatagactgatgatgagtatattcc

SEQ ID NO: 3039069 - DNA, 25 bp, Homo sapien
ctcttctaaatagactgatgatgag

SEQ ID NO: 3039070 - DNA, 25 bp, Homo sapien
gactgatgatgagtatattcctctc

SEQ ID NO: 3039071 - DNA, 25 bp, Homo sapien
tctaaatagactgatgatgagtata

SEQ ID NO: 3039072 - DNA, 25 bp, Homo sapien
taaactccaacggtcactttgctgc

SEQ ID NO: 3039073 - DNA, 25 bp, Homo sapien
actccaacggtcactttgctgccag

SEQ ID NO: 3039074 - DNA, 25 bp, Homo sapien
gtccagcactgtcaacttacgatca

SEQ ID NO: 3039075 - DNA, 25 bp, Homo sapien
acttacgatcaaggtgagcccaggc

SEQ ID NO: 3039076 - DNA, 25 bp, Homo sapien
aaacgatagatatgatactattaac

SEQ ID NO: 3039077 - DNA, 25 bp, Homo sapien
ttcgagtaccaaaaacgatagatat

SEQ ID NO: 3039078 - DNA, 25 bp, Homo sapien
gagtaccaaaaacgatagatatgat

SEQ ID NO: 3039079 - DNA, 25 bp, Homo sapien
taccaaaaacgatagatatgatact

SEQ ID NO: 3039080 - DNA, 25 bp, Homo sapien
tctgggctgacgatgaagtacaatg

SEQ ID NO: 3039081 - DNA, 25 bp, Homo sapien
gactacacacaatacttcgtcggca

SEQ ID NO: 3039082 - DNA, 25 bp, Homo sapien
gctttactgtgcacaagcattactg

SEQ ID NO: 3039083 - DNA, 25 bp, Homo sapien
gatacagaggcaaataaacaggaac

SEQ ID NO: 3039084 - DNA, 25 bp, Homo sapien
tagttttggccatgaatctggatga

SEQ ID NO: 3039085 - DNA, 25 bp, Homo sapien
atagttttggccatgaatctggatg

SEQ ID NO: 3039086 - DNA, 25 bp, Homo sapien
tccagatcaattgcagcagttctac

SEQ ID NO: 3039087 - DNA, 25 bp, Homo sapien
atatgttccagatcaattgcagcag

SEQ ID NO: 3039088 - DNA, 25 bp, Homo sapien
agtcctctgaaactgtgtagtattc

SEQ ID NO: 3039089 - DNA, 25 bp, Homo sapien
gagtccatgagtggacttaacagaa

SEQ ID NO: 3039090 - DNA, 25 bp, Homo sapien
aatctgccagtcctctgaaactgtg

SEQ ID NO: 3039091 - DNA, 25 bp, Homo sapien
tcaaaagtacccatattcctcaaaa

SEQ ID NO: 3039092 - DNA, 25 bp, Homo sapien
ggacatgagttcctctaaagtttaa

SEQ ID NO: 3039093 - DNA, 25 bp, Homo sapien
tgttacacaggacatgagttcctct

SEQ ID NO: 3039094 - DNA, 25 bp, Homo sapien
ttatcaagcaatgttacacaggaca

SEQ ID NO: 3039095 - DNA, 25 bp, Homo sapien
caagcaatgttacacaggacatgag

SEQ ID NO: 3039096 - DNA, 25 bp, Homo sapien
ggtagtgatcatatacttgccaact

SEQ ID NO: 3039097 - DNA, 25 bp, Homo sapien
ggtatctccaacgacactcctctta

SEQ ID NO: 3039098 - DNA, 25 bp, Homo sapien
taacatcacccttagacacagcctg

SEQ ID NO: 3039099 - DNA, 25 bp, Homo sapien
taaattctgccggaaagactggtat

SEQ ID NO: 3039100 - DNA, 25 bp, Homo sapien
tctcaaatattaggcagtatagcag

SEQ ID NO: 3039101 - DNA, 25 bp, Homo sapien
tagagtaggttctcaaatattaggc

SEQ ID NO: 3039102 - DNA, 25 bp, Homo sapien
ggttctcaaatattaggcagtatag

SEQ ID NO: 3039103 - DNA, 25 bp, Homo sapien
cagtatagcagacatgaagaatata

SEQ ID NO: 3039104 - DNA, 25 bp, Homo sapien
gctgtattcaacacatgcaagatgg

SEQ ID NO: 3039105 - DNA, 25 bp, Homo sapien
tcttccacgaagcaatcggaaagct

SEQ ID NO: 3039106 - DNA, 25 bp, Homo sapien
tctaaattctgaaatggcccaaagt

SEQ ID NO: 3039107 - DNA, 25 bp, Homo sapien
tgctctacgatattgatggaccttc

SEQ ID NO: 3039108 - DNA, 25 bp, Homo sapien
gaagagcttgtcaagtgcattttcg

SEQ ID NO: 3039109 - DNA, 25 bp, Homo sapien
gaagagaagagcttgtcaagtgcat

SEQ ID NO: 3039110 - DNA, 25 bp, Homo sapien
gcttgtcaagtgcattttcgggctc

SEQ ID NO: 3039111 - DNA, 25 bp, Homo sapien
tgaagagaagagcttgtcaagtgca

SEQ ID NO: 3039112 - DNA, 25 bp, Homo sapien
tcgacggggtcagaaagcatctcca

SEQ ID NO: 3039113 - DNA, 25 bp, Homo sapien
ttatgtaaggcccagtacagggatg

SEQ ID NO: 3039114 - DNA, 25 bp, Homo sapien
ccagtacagggatgacctcgacggg

SEQ ID NO: 3039115 - DNA, 25 bp, Homo sapien
taggtgtagtggattttttccgaca

SEQ ID NO: 3039116 - DNA, 25 bp, Homo sapien
taagttggatgtcctacttcctttg

SEQ ID NO: 3039117 - DNA, 25 bp, Homo sapien
tagttgcaagcttgactagatcctt

SEQ ID NO: 3039118 - DNA, 25 bp, Homo sapien
gcaaaatataagttggatgtcctac

SEQ ID NO: 3039119 - DNA, 25 bp, Homo sapien
tcctttggggttagttgcaagcttg

SEQ ID NO: 3039120 - DNA, 25 bp, Homo sapien
acttttcaagacttctacatgacgt

SEQ ID NO: 3039121 - DNA, 25 bp, Homo sapien
cgtttttgcaagtatgagaaacacc

SEQ ID NO: 3039122 - DNA, 25 bp, Homo sapien
tctacatgacgtttttgcaagtatg

SEQ ID NO: 3039123 - DNA, 25 bp, Homo sapien
caagacttctacatgacgtttttgc

SEQ ID NO: 3039124 - DNA, 25 bp, Homo sapien
atgtgaaccatccgcccactctgag

SEQ ID NO: 3039125 - DNA, 25 bp, Homo sapien
tgggaagtcactctaacatcgcagc

SEQ ID NO: 3039126 - DNA, 25 bp, Homo sapien
aatgttccgaaaactgccccgtcag

SEQ ID NO: 3039127 - DNA, 25 bp, Homo sapien
tggccagaggtaagcaagcggctgt

SEQ ID NO: 3039128 - DNA, 25 bp, Homo sapien
cgccgtgaagaggacagacccgctc

SEQ ID NO: 3039129 - DNA, 25 bp, Homo sapien
tcccgccgtgaagaggacagacccg

SEQ ID NO: 3039130 - DNA, 25 bp, Homo sapien
ccgccgtgaagaggacagacccgct

SEQ ID NO: 3039131 - DNA, 25 bp, Homo sapien
ctcccgccgtgaagaggacagaccc

SEQ ID NO: 3039132 - DNA, 25 bp, Homo sapien
tgcactcggcggaaaggttgttgtc

SEQ ID NO: 3039133 - DNA, 25 bp, Homo sapien
cattgacttccggttcctgcgtgct

SEQ ID NO: 3039134 - DNA, 25 bp, Homo sapien
caaggcccgaggtgtgtcccgctga

SEQ ID NO: 3039135 - DNA, 25 bp, Homo sapien
ccaagttgaatcagtaggtccagtc

SEQ ID NO: 3039136 - DNA, 25 bp, Homo sapien
gtccctggctggcccgcagtcttct

SEQ ID NO: 3039137 - DNA, 25 bp, Homo sapien
cttccaggcgggcgcctgccgaggc

SEQ ID NO: 3039138 - DNA, 25 bp, Homo sapien
ctggctggcccgcagtcttcttcca

SEQ ID NO: 3039139 - DNA, 25 bp, Homo sapien
ctgtccccggatcccgagtccctgg

SEQ ID NO: 3039140 - DNA, 25 bp, Homo sapien
ctccaggaaggcgattccgaggcca

SEQ ID NO: 3039141 - DNA, 25 bp, Homo sapien
tagtgggtaaagtgcctccttcgtg

SEQ ID NO: 3039142 - DNA, 25 bp, Homo sapien
agccgctgggccgaatctccaggaa

SEQ ID NO: 3039143 - DNA, 25 bp, Homo sapien
gccagttttagtctgtagtgggtaa

SEQ ID NO: 3039144 - DNA, 25 bp, Homo sapien
aataaccttttcaccaggtagactg

SEQ ID NO: 3039145 - DNA, 25 bp, Homo sapien
taggggcagcgtagacaaggtcctc

SEQ ID NO: 3039146 - DNA, 25 bp, Homo sapien
cagggcaggcaagggattaggtaaa

SEQ ID NO: 3039147 - DNA, 25 bp, Homo sapien
gagagatgcgaagtgtttgaggagc

SEQ ID NO: 3039148 - DNA, 25 bp, Homo sapien
gggatgacgggaatcacacacagca

SEQ ID NO: 3039149 - DNA, 25 bp, Homo sapien
tccaagcgacaattccacaagctga

SEQ ID NO: 3039150 - DNA, 25 bp, Homo sapien
cacacagcattccaagcgacaattc

SEQ ID NO: 3039151 - DNA, 25 bp, Homo sapien
caccccagggatgacgggaatcaca

SEQ ID NO: 3039152 - DNA, 25 bp, Homo sapien
gaaatcgctggaaagccggactcac

SEQ ID NO: 3039153 - DNA, 25 bp, Homo sapien
tgcccaagggcatccgaggaaatcg

SEQ ID NO: 3039154 - DNA, 25 bp, Homo sapien
cattgtcaccccagagcggagattt

SEQ ID NO: 3039155 - DNA, 25 bp, Homo sapien
ttgacgcccctcaaccggcttagta

SEQ ID NO: 3039156 - DNA, 25 bp, Homo sapien
tgtgggggctaagcagcttctcttt

SEQ ID NO: 3039157 - DNA, 25 bp, Homo sapien
tatgctgatcctttttctcgtgaga

SEQ ID NO: 3039158 - DNA, 25 bp, Homo sapien
gctaaggtcacacccgctgggcagc

SEQ ID NO: 3039159 - DNA, 25 bp, Homo sapien
cagagggaaggctatttctagtggc

SEQ ID NO: 3039160 - DNA, 25 bp, Homo sapien
tactgatgcagggtaggtagtcaag

SEQ ID NO: 3039161 - DNA, 25 bp, Homo sapien
gtcaaggaagtaaccagggtctcag

SEQ ID NO: 3039162 - DNA, 25 bp, Homo sapien
ttcatacatacaacagtccccaggt

SEQ ID NO: 3039163 - DNA, 25 bp, Homo sapien
gcaatcatgctgaccattcagtcaa

SEQ ID NO: 3039164 - DNA, 25 bp, Homo sapien
ttcatccagcacacaaactcaagca

SEQ ID NO: 3039165 - DNA, 25 bp, Homo sapien
cagcacacaaactcaagcacctcat

SEQ ID NO: 3039166 - DNA, 25 bp, Homo sapien
agcacacaaactcaagcacctcatc

SEQ ID NO: 3039167 - DNA, 25 bp, Homo sapien
atccagcacacaaactcaagcacct

SEQ ID NO: 3039168 - DNA, 25 bp, Homo sapien
atttgtgggactgaagcgatggctt

SEQ ID NO: 3039169 - DNA, 25 bp, Homo sapien
tatttgtgggactgaagcgatggct

SEQ ID NO: 3039170 - DNA, 25 bp, Homo sapien
ggtaaggacacagcgcacaactctg

SEQ ID NO: 3039171 - DNA, 25 bp, Homo sapien
aatgaaatcagactccctgcgagcg

SEQ ID NO: 3039172 - DNA, 25 bp, Homo sapien
ttgaatgcgcgtcagaatcacctgg

SEQ ID NO: 3039173 - DNA, 25 bp, Homo sapien
aaaaagccaagggttcgctcactca

SEQ ID NO: 3039174 - DNA, 25 bp, Homo sapien
aaattccccatcttccgaaagcttg

SEQ ID NO: 3039175 - DNA, 25 bp, Homo sapien
aacttcttcccaatcgatcttcggt

SEQ ID NO: 3039176 - DNA, 25 bp, Homo sapien
tgaccctttcccatgtggctcgaac

SEQ ID NO: 3039177 - DNA, 25 bp, Homo sapien
tctcagtctaaaagtcgagttccgc

SEQ ID NO: 3039178 - DNA, 25 bp, Homo sapien
cctggtgtacatgggtcatcgggta

SEQ ID NO: 3039179 - DNA, 25 bp, Homo sapien
tgggtcatcgggtaccctctttcca

SEQ ID NO: 3039180 - DNA, 25 bp, Homo sapien
caacatcaaggtccctgcagatgac

SEQ ID NO: 3039181 - DNA, 25 bp, Homo sapien
gctcatcctgtaccccaacatcaag

SEQ ID NO: 3039182 - DNA, 25 bp, Homo sapien
caaggattcccgtacagtgactgtg

SEQ ID NO: 3039183 - DNA, 25 bp, Homo sapien
tgaaccttgaggagggaaagcttgc

SEQ ID NO: 3039184 - DNA, 25 bp, Homo sapien
tcagtggacaatcaggagaagcttc

SEQ ID NO: 3039185 - DNA, 25 bp, Homo sapien
ggacactaggaattgcagccactgg

SEQ ID NO: 3039186 - DNA, 25 bp, Homo sapien
gatcaatccctagtaaaagccctgg

SEQ ID NO: 3039187 - DNA, 25 bp, Homo sapien
ggttggtaatactctgtgcacacat

SEQ ID NO: 3039188 - DNA, 25 bp, Homo sapien
tcaagctgaggagactaagttagcc

SEQ ID NO: 3039189 - DNA, 25 bp, Homo sapien
gccatgtgggcagtgaagcatgcca

SEQ ID NO: 3039190 - DNA, 25 bp, Homo sapien
cagtcatgtgagcactaggctgtga

SEQ ID NO: 3039191 - DNA, 25 bp, Homo sapien
taggctgtgacctcgaatgccaaca

SEQ ID NO: 3039192 - DNA, 25 bp, Homo sapien
tctatagcctaatccacgtgagcaa

SEQ ID NO: 3039193 - DNA, 25 bp, Homo sapien
gaaaaagttattcgcctctgccgtg

SEQ ID NO: 3039194 - DNA, 25 bp, Homo sapien
tgtactgtaccactggtaactcaaa

SEQ ID NO: 3039195 - DNA, 25 bp, Homo sapien
tataacatactctaatagaagttac

SEQ ID NO: 3039196 - DNA, 25 bp, Homo sapien
tagaagttacatgaacgtagtctct

SEQ ID NO: 3039197 - DNA, 25 bp, Homo sapien
ttaataccagaacaattataacata

SEQ ID NO: 3039198 - DNA, 25 bp, Homo sapien
catttgccggtatttccgaatcatt

SEQ ID NO: 3039199 - DNA, 25 bp, Homo sapien
aatcatttttagcttgtcttctcct

SEQ ID NO: 3039200 - DNA, 25 bp, Homo sapien
cggtatttccgaatcatttttagct

SEQ ID NO: 3039201 - DNA, 25 bp, Homo sapien
atcatttttagcttgtcttctcctc

SEQ ID NO: 3039202 - DNA, 25 bp, Homo sapien
ccttctttctgttcaaggctgctga

SEQ ID NO: 3039203 - DNA, 25 bp, Homo sapien
ctttctgttcaaggctgctgattat

SEQ ID NO: 3039204 - DNA, 25 bp, Homo sapien
tctgttcaaggctgctgattattct

SEQ ID NO: 3039205 - DNA, 25 bp, Homo sapien
tctttctgttcaaggctgctgatta

SEQ ID NO: 3039206 - DNA, 25 bp, Homo sapien
tatatgtaacagataggaggtttct

SEQ ID NO: 3039207 - DNA, 25 bp, Homo sapien
tccatccctgctaatttcttcactg

SEQ ID NO: 3039208 - DNA, 25 bp, Homo sapien
gataggaggtttctttcttcagctg

SEQ ID NO: 3039209 - DNA, 25 bp, Homo sapien
cacattcttatatgtaacagatagg

SEQ ID NO: 3039210 - DNA, 25 bp, Homo sapien
agaagccgagagtcctgctccggcg

SEQ ID NO: 3039211 - DNA, 25 bp, Homo sapien
gaggagaagccgagagtcctgctcc

SEQ ID NO: 3039212 - DNA, 25 bp, Homo sapien
gcaaaatcccgggtccctcagacaa

SEQ ID NO: 3039213 - DNA, 25 bp, Homo sapien
tccctcagacaaaagggcgggtgga

SEQ ID NO: 3039214 - DNA, 25 bp, Homo sapien
attatatggttgttacactcggcca

SEQ ID NO: 3039215 - DNA, 25 bp, Homo sapien
ttatatggttgttacactcggccac

SEQ ID NO: 3039216 - DNA, 25 bp, Homo sapien
tatatggttgttacactcggccaca

SEQ ID NO: 3039217 - DNA, 25 bp, Homo sapien
tattatatggttgttacactcggcc

SEQ ID NO: 3039218 - DNA, 25 bp, Homo sapien
tgtaattaaattgcagcccagattt

SEQ ID NO: 3039219 - DNA, 25 bp, Homo sapien
tccaataactatgagggcggagtcc

SEQ ID NO: 3039220 - DNA, 25 bp, Homo sapien
tcctaagccagttcagtatcagaag

SEQ ID NO: 3039221 - DNA, 25 bp, Homo sapien
gcttgcaaagaccagcacctcctgg

SEQ ID NO: 3039222 - DNA, 25 bp, Homo sapien
catggttccccatgatggctccgca

SEQ ID NO: 3039223 - DNA, 25 bp, Homo sapien
gcactttggcatccacttgagggtc

SEQ ID NO: 3039224 - DNA, 25 bp, Homo sapien
ccactttccttaagcctttcacatt

SEQ ID NO: 3039225 - DNA, 25 bp, Homo sapien
cacttgagggtctttacacccactt

SEQ ID NO: 3039226 - DNA, 25 bp, Homo sapien
gcatccacttgagggtctttacacc

SEQ ID NO: 3039227 - DNA, 25 bp, Homo sapien
tcaaatgaatccttaggtaattcag

SEQ ID NO: 3039228 - DNA, 25 bp, Homo sapien
caggccttcaaatgaatccttaggt

SEQ ID NO: 3039229 - DNA, 25 bp, Homo sapien
actggagggatagcaggccttcaaa

SEQ ID NO: 3039230 - DNA, 25 bp, Homo sapien
tccttaggtaattcagtcaaataat

SEQ ID NO: 3039231 - DNA, 25 bp, Homo sapien
tctcggtccaactgtatgctttcca

SEQ ID NO: 3039232 - DNA, 25 bp, Homo sapien
ccatcaatgtatgaaatatagtttc

SEQ ID NO: 3039233 - DNA, 25 bp, Homo sapien
tccatacatttccatcaatgtatga

SEQ ID NO: 3039234 - DNA, 25 bp, Homo sapien
agtttctcggtccaactgtatgctt

SEQ ID NO: 3039235 - DNA, 25 bp, Homo sapien
caccaatgaatcctgcgaagattct

SEQ ID NO: 3039236 - DNA, 25 bp, Homo sapien
tcctctggtgcagtttcagactgca

SEQ ID NO: 3039237 - DNA, 25 bp, Homo sapien
gctgagaccaacacatgacagagtc

SEQ ID NO: 3039238 - DNA, 25 bp, Homo sapien
gattctaactttgtaggtggacctg

SEQ ID NO: 3039239 - DNA, 25 bp, Homo sapien
gtggcttcggtcaggtgtgaaagct

SEQ ID NO: 3039240 - DNA, 25 bp, Homo sapien
gaactgtggcttcggtcaggtgtga

SEQ ID NO: 3039241 - DNA, 25 bp, Homo sapien
ggcttcggtcaggtgtgaaagctga

SEQ ID NO: 3039242 - DNA, 25 bp, Homo sapien
cttcggtcaggtgtgaaagctgagc

SEQ ID NO: 3039243 - DNA, 25 bp, Homo sapien
tgtctgaaggtgaacacctcagggt

SEQ ID NO: 3039244 - DNA, 25 bp, Homo sapien
tctgaaggtgaacacctcagggtgt

SEQ ID NO: 3039245 - DNA, 25 bp, Homo sapien
ctgaaggtgaacacctcagggtgtt

SEQ ID NO: 3039246 - DNA, 25 bp, Homo sapien
cttgtctgaaggtgaacacctcagg

SEQ ID NO: 3039247 - DNA, 25 bp, Homo sapien
tagtcgtcagggctgtagaagattc

SEQ ID NO: 3039248 - DNA, 25 bp, Homo sapien
gtcgtcagggctgtagaagattcaa

SEQ ID NO: 3039249 - DNA, 25 bp, Homo sapien
tcgtcagggctgtagaagattcaac

SEQ ID NO: 3039250 - DNA, 25 bp, Homo sapien
tgtagtcgtcagggctgtagaagat

SEQ ID NO: 3039251 - DNA, 25 bp, Homo sapien
actggtctggatgtggaagtatcac

SEQ ID NO: 3039252 - DNA, 25 bp, Homo sapien
gagtgatggtaagctccagatccaa

SEQ ID NO: 3039253 - DNA, 25 bp, Homo sapien
gtgaatgctgagtctgaaactggtc

SEQ ID NO: 3039254 - DNA, 25 bp, Homo sapien
tgatggtaagctccagatccaaagg

SEQ ID NO: 3039255 - DNA, 25 bp, Homo sapien
tgttgtagagctttcttaggaggct

SEQ ID NO: 3039256 - DNA, 25 bp, Homo sapien
agctgaactgggaccatttgctgcc

SEQ ID NO: 3039257 - DNA, 25 bp, Homo sapien
cctctgtcgttgattctggaatgat

SEQ ID NO: 3039258 - DNA, 25 bp, Homo sapien
gatcctggcctagtgttgggactgt

SEQ ID NO: 3039259 - DNA, 25 bp, Homo sapien
gaacctcctgctgagttacagatgg

SEQ ID NO: 3039260 - DNA, 25 bp, Homo sapien
tcagagaaggttctgcctccacagg

SEQ ID NO: 3039261 - DNA, 25 bp, Homo sapien
gctgagttacagatggttctacctc

SEQ ID NO: 3039262 - DNA, 25 bp, Homo sapien
tggaacctcctgctgagttacagat

SEQ ID NO: 3039263 - DNA, 25 bp, Homo sapien
tctatcaccatagtggggtctgaag

SEQ ID NO: 3039264 - DNA, 25 bp, Homo sapien
tatcaccatagtggggtctgaagac

SEQ ID NO: 3039265 - DNA, 25 bp, Homo sapien
gggttctatcaccatagtggggtct

SEQ ID NO: 3039266 - DNA, 25 bp, Homo sapien
gttctatcaccatagtggggtctga

SEQ ID NO: 3039267 - DNA, 25 bp, Homo sapien
tggtgtctcccactgtggtggagga

SEQ ID NO: 3039268 - DNA, 25 bp, Homo sapien
agctggtgtctcccactgtggtgga

SEQ ID NO: 3039269 - DNA, 25 bp, Homo sapien
gctggtgtctcccactgtggtggag

SEQ ID NO: 3039270 - DNA, 25 bp, Homo sapien
tgagctggtgtctcccactgtggtg

SEQ ID NO: 3039271 - DNA, 25 bp, Homo sapien
ggaggaggttcataattttcaggtc

SEQ ID NO: 3039272 - DNA, 25 bp, Homo sapien
cacatctggaggtgaacctattgct

SEQ ID NO: 3039273 - DNA, 25 bp, Homo sapien
ggagaaggttctacccacatagtga

SEQ ID NO: 3039274 - DNA, 25 bp, Homo sapien
ggtaagctccctatctagatctaga

SEQ ID NO: 3039275 - DNA, 25 bp, Homo sapien
ttgaatttgtaaatgtccagcctct

SEQ ID NO: 3039276 - DNA, 25 bp, Homo sapien
gttgaatttgtaaatgtccagcctc

SEQ ID NO: 3039277 - DNA, 25 bp, Homo sapien
tgaatttgtaaatgtccagcctctt

SEQ ID NO: 3039278 - DNA, 25 bp, Homo sapien
gaaggtgaaactgggacttcatgat

SEQ ID NO: 3039279 - DNA, 25 bp, Homo sapien
cctgctgggttggagaagattcaac

SEQ ID NO: 3039280 - DNA, 25 bp, Homo sapien
ttcatgatgttctgggggctgagct

SEQ ID NO: 3039281 - DNA, 25 bp, Homo sapien
ctgaaggtgaaactgggacttcatg

SEQ ID NO: 3039282 - DNA, 25 bp, Homo sapien
gggcctcctcttggaatgcagatgg

SEQ ID NO: 3039283 - DNA, 25 bp, Homo sapien
ctcttggaatgcagatggttccatc

SEQ ID NO: 3039284 - DNA, 25 bp, Homo sapien
cctcctcttggaatgcagatggttc

SEQ ID NO: 3039285 - DNA, 25 bp, Homo sapien
tcctcttggaatgcagatggttcca

SEQ ID NO: 3039286 - DNA, 25 bp, Homo sapien
gggctctgaagtcatggtaacttcc

SEQ ID NO: 3039287 - DNA, 25 bp, Homo sapien
tgtctcatttttgggctctgaagtc

SEQ ID NO: 3039288 - DNA, 25 bp, Homo sapien
tcactgggggaaagttcaggctcca

SEQ ID NO: 3039289 - DNA, 25 bp, Homo sapien
gattctgtctcatttttgggctctg

SEQ ID NO: 3039290 - DNA, 25 bp, Homo sapien
ctgtaacgttgggaaagttgtaatg

SEQ ID NO: 3039291 - DNA, 25 bp, Homo sapien
tgtaacgttgggaaagttgtaatga

SEQ ID NO: 3039292 - DNA, 25 bp, Homo sapien
taacgttgggaaagttgtaatgagc

SEQ ID NO: 3039293 - DNA, 25 bp, Homo sapien
ctgtcacttcatgattcagtggagt

SEQ ID NO: 3039294 - DNA, 25 bp, Homo sapien
catgattcagtggagtttgagctag

SEQ ID NO: 3039295 - DNA, 25 bp, Homo sapien
ggagtttgagctagactctccatag

SEQ ID NO: 3039296 - DNA, 25 bp, Homo sapien
cctcctgctgggttgaaggttctac

SEQ ID NO: 3039297 - DNA, 25 bp, Homo sapien
ccatactcaaatattcatctgcaaa

SEQ ID NO: 3039298 - DNA, 25 bp, Homo sapien
gtccatactcaaatattcatctgca

SEQ ID NO: 3039299 - DNA, 25 bp, Homo sapien
tccatactcaaatattcatctgcaa

SEQ ID NO: 3039300 - DNA, 25 bp, Homo sapien
gtgtggaatcccgacaatcttagca

SEQ ID NO: 3039301 - DNA, 25 bp, Homo sapien
cgacaatcttagcaaggctccaacg

SEQ ID NO: 3039302 - DNA, 25 bp, Homo sapien
tcccgacaatcttagcaaggctcca

SEQ ID NO: 3039303 - DNA, 25 bp, Homo sapien
tggaatcccgacaatcttagcaagg

SEQ ID NO: 3039304 - DNA, 25 bp, Homo sapien
tctagatctgcagtttgaaacttac

SEQ ID NO: 3039305 - DNA, 25 bp, Homo sapien
cctgcagcccgatctagatctgcag

SEQ ID NO: 3039306 - DNA, 25 bp, Homo sapien
tgacctgcagcccgatctagatctg

SEQ ID NO: 3039307 - DNA, 25 bp, Homo sapien
tagcggaacaagtatttcatctgcc

SEQ ID NO: 3039308 - DNA, 25 bp, Homo sapien
ttctgatccctgtccagcagtggaa

SEQ ID NO: 3039309 - DNA, 25 bp, Homo sapien
ttttgaggcgaggaagctgaactag

SEQ ID NO: 3039310 - DNA, 25 bp, Homo sapien
tctggttctgatccctgtccagcag

SEQ ID NO: 3039311 - DNA, 25 bp, Homo sapien
gaagctgaactagggtctggttctg

SEQ ID NO: 3039312 - DNA, 25 bp, Homo sapien
tggagtccgcttgtcatttaaatcc

SEQ ID NO: 3039313 - DNA, 25 bp, Homo sapien
cacctgaatccgtatccaggaatgg

SEQ ID NO: 3039314 - DNA, 25 bp, Homo sapien
atttaaatcctgatgtgcagccaag

SEQ ID NO: 3039315 - DNA, 25 bp, Homo sapien
gagcctttcttgtggagtccgcttg

SEQ ID NO: 3039316 - DNA, 25 bp, Homo sapien
ctcaggtgaccccaggggttagagg

SEQ ID NO: 3039317 - DNA, 25 bp, Homo sapien
ggtccttgaccaacaccagatgtgg

SEQ ID NO: 3039318 - DNA, 25 bp, Homo sapien
tccttgaccaacaccagatgtggag

SEQ ID NO: 3039319 - DNA, 25 bp, Homo sapien
ccttgaccaacaccagatgtggagc

SEQ ID NO: 3039320 - DNA, 25 bp, Homo sapien
gtgccgtgcactgattgggagccat

SEQ ID NO: 3039321 - DNA, 25 bp, Homo sapien
tgctagtgccgtgcactgattggga

SEQ ID NO: 3039322 - DNA, 25 bp, Homo sapien
acacatgctagtgccgtgcactgat

SEQ ID NO: 3039323 - DNA, 25 bp, Homo sapien
tagtgccgtgcactgattgggagcc

SEQ ID NO: 3039324 - DNA, 25 bp, Homo sapien
gggtgggctgtgatactttgtagga

SEQ ID NO: 3039325 - DNA, 25 bp, Homo sapien
gcttggatttgaagacaccttctat

SEQ ID NO: 3039326 - DNA, 25 bp, Homo sapien
gaagacaccttctatgaaggaaagg

SEQ ID NO: 3039327 - DNA, 25 bp, Homo sapien
agcctggcttggatttgaagacacc

SEQ ID NO: 3039328 - DNA, 25 bp, Homo sapien
tcctccttccaatgcctgctgcctc

SEQ ID NO: 3039329 - DNA, 25 bp, Homo sapien
tgcctcacatgtagcctgtctttgt

SEQ ID NO: 3039330 - DNA, 25 bp, Homo sapien
tgctgcctcacatgtagcctgtctt

SEQ ID NO: 3039331 - DNA, 25 bp, Homo sapien
gcctcacatgtagcctgtctttgtt

SEQ ID NO: 3039332 - DNA, 25 bp, Homo sapien
ccatggaggcccgtatagtctaggt

SEQ ID NO: 3039333 - DNA, 25 bp, Homo sapien
tatagtctaggtgtcttacaggcat

SEQ ID NO: 3039334 - DNA, 25 bp, Homo sapien
ggtcatgttttgcacggagccatgg

SEQ ID NO: 3039335 - DNA, 25 bp, Homo sapien
gcttgtctttttgagcttggtcatg

SEQ ID NO: 3039336 - DNA, 25 bp, Homo sapien
gaatgcagtctggaatgcactacac

SEQ ID NO: 3039337 - DNA, 25 bp, Homo sapien
cagcgcatgagaatacgggctccgt

SEQ ID NO: 3039338 - DNA, 25 bp, Homo sapien
ggctccgtagtgagacaggcttcag

SEQ ID NO: 3039339 - DNA, 25 bp, Homo sapien
tgcactacacacagcgcatgagaat

SEQ ID NO: 3039340 - DNA, 25 bp, Homo sapien
tatgaaggactctgatggttgtcaa

SEQ ID NO: 3039341 - DNA, 25 bp, Homo sapien
gtcaacagagtgtcaagtgtaggac

SEQ ID NO: 3039342 - DNA, 25 bp, Homo sapien
cagagtgtcaagtgtaggactgaac

SEQ ID NO: 3039343 - DNA, 25 bp, Homo sapien
tgaaagagtatgaaggactctgatg

SEQ ID NO: 3039344 - DNA, 25 bp, Homo sapien
ctgaggatgggtatgggtcgtctgg

SEQ ID NO: 3039345 - DNA, 25 bp, Homo sapien
tatgggtcgtctgggtcagattatc

SEQ ID NO: 3039346 - DNA, 25 bp, Homo sapien
tgtgcttgctattcccttcagcaaa

SEQ ID NO: 3039347 - DNA, 25 bp, Homo sapien
ggtcagattatctttgtgcttgcta

SEQ ID NO: 3039348 - DNA, 25 bp, Homo sapien
ggctgtgtcagtagcttttgaactt

SEQ ID NO: 3039349 - DNA, 25 bp, Homo sapien
tgttagatttaacaagtagtggtta

SEQ ID NO: 3039350 - DNA, 25 bp, Homo sapien
gctgtgtcagtagcttttgaacttg

SEQ ID NO: 3039351 - DNA, 25 bp, Homo sapien
caagtagtggttaattaagaagctt

SEQ ID NO: 3039352 - DNA, 25 bp, Homo sapien
cgggctggagtgctggaatgcaatg

SEQ ID NO: 3039353 - DNA, 25 bp, Homo sapien
aatgcaatgacaccatcacagctca

SEQ ID NO: 3039354 - DNA, 25 bp, Homo sapien
ctgtagccttgacctcctgggctca

SEQ ID NO: 3039355 - DNA, 25 bp, Homo sapien
aagtaactggaaccacaggcacatg

SEQ ID NO: 3039356 - DNA, 25 bp, Homo sapien
cactccactgcacagagtcagacct

SEQ ID NO: 3039357 - DNA, 25 bp, Homo sapien
actgcactccactgcacagagtcag

SEQ ID NO: 3039358 - DNA, 25 bp, Homo sapien
ctccactgcacagagtcagaccttg

SEQ ID NO: 3039359 - DNA, 25 bp, Homo sapien
ccactgcacagagtcagaccttgtc

SEQ ID NO: 3039360 - DNA, 25 bp, Homo sapien
ccgcttcgacgagcaggtaaccggc

SEQ ID NO: 3039361 - DNA, 25 bp, Homo sapien
caggccgtggtcagccgcttcgacg

SEQ ID NO: 3039362 - DNA, 25 bp, Homo sapien
cgtggtcagccgcttcgacgagcag

SEQ ID NO: 3039363 - DNA, 25 bp, Homo sapien
cacaggccggtggaatgggtccagg

SEQ ID NO: 3039364 - DNA, 25 bp, Homo sapien
cttttaatgacctattggtgctgga

SEQ ID NO: 3039365 - DNA, 25 bp, Homo sapien
cttctgttaatttatccattgtgtg

SEQ ID NO: 3039366 - DNA, 25 bp, Homo sapien
tgctggaatcatggactctagtgat

SEQ ID NO: 3039367 - DNA, 25 bp, Homo sapien
catggactctagtgattcttgttct

SEQ ID NO: 3039368 - DNA, 25 bp, Homo sapien
ctggtgggtaagaaatgttgtttca

SEQ ID NO: 3039369 - DNA, 25 bp, Homo sapien
ttatgtatctggtgggtaagaaatg

SEQ ID NO: 3039370 - DNA, 25 bp, Homo sapien
cttgactaccaatgaggtttagttt

SEQ ID NO: 3039371 - DNA, 25 bp, Homo sapien
aaaaattatgtatctggtgggtaag

SEQ ID NO: 3039372 - DNA, 25 bp, Homo sapien
tatgctgacttgttggcatggttgc

SEQ ID NO: 3039373 - DNA, 25 bp, Homo sapien
gcatggttgctttgtagtgtcactg

SEQ ID NO: 3039374 - DNA, 25 bp, Homo sapien
ccccagggttgttgcttctttattg

SEQ ID NO: 3039375 - DNA, 25 bp, Homo sapien
gatatgtgtggatctaattgtgtca

SEQ ID NO: 3039376 - DNA, 25 bp, Homo sapien
tacaaggcgtttatatccagtctcc

SEQ ID NO: 3039377 - DNA, 25 bp, Homo sapien
tccatgtggatgttaagccccaagc

SEQ ID NO: 3039378 - DNA, 25 bp, Homo sapien
tcctgaattattagggtacaaggcg

SEQ ID NO: 3039379 - DNA, 25 bp, Homo sapien
tagttcatgttttatgcagggccca

SEQ ID NO: 3039380 - DNA, 25 bp, Homo sapien
ttgacctgagtgagacccttatctc

SEQ ID NO: 3039381 - DNA, 25 bp, Homo sapien
cagaagcagatactgagcctcaaat

SEQ ID NO: 3039382 - DNA, 25 bp, Homo sapien
caaacacaaactcttatcatgcaag

SEQ ID NO: 3039383 - DNA, 25 bp, Homo sapien
gagtgagacccttatctcctgtaga

SEQ ID NO: 3039384 - DNA, 25 bp, Homo sapien
caagaagtagcaaacgcactggact

SEQ ID NO: 3039385 - DNA, 25 bp, Homo sapien
gggcctgtcaagatattctttctaa

SEQ ID NO: 3039386 - DNA, 25 bp, Homo sapien
cttattggtgagacgtttgggtgcc

SEQ ID NO: 3039387 - DNA, 25 bp, Homo sapien
tagtgggcctacttggattttggag

SEQ ID NO: 3039388 - DNA, 25 bp, Homo sapien
tgtcaccctaacataagtactgttg

SEQ ID NO: 3039389 - DNA, 25 bp, Homo sapien
aaatgtgtaaacctcaagtttgcca

SEQ ID NO: 3039390 - DNA, 25 bp, Homo sapien
gaatgggtgtgctaagttacttggc

SEQ ID NO: 3039391 - DNA, 25 bp, Homo sapien
agcatgaagtcaccacacggaggaa

SEQ ID NO: 3039392 - DNA, 25 bp, Homo sapien
aaggccagtaactcttaaatttgct

SEQ ID NO: 3039393 - DNA, 25 bp, Homo sapien
tgcaccctccgcctctacctcctct

SEQ ID NO: 3039394 - DNA, 25 bp, Homo sapien
tgtaagcatgcttcattctttattc

SEQ ID NO: 3039395 - DNA, 25 bp, Homo sapien
taaatttgctcttttgaggctgttt

SEQ ID NO: 3039396 - DNA, 25 bp, Homo sapien
agttagcaacactgggccgggcacg

SEQ ID NO: 3039397 - DNA, 25 bp, Homo sapien
gaatagccaactgtgaacatgtgtc

SEQ ID NO: 3039398 - DNA, 25 bp, Homo sapien
gagttcatatcttggcctttaagcc

SEQ ID NO: 3039399 - DNA, 25 bp, Homo sapien
gattcccaaagtggatattctcgta

SEQ ID NO: 3039400 - DNA, 25 bp, Homo sapien
tctgcctggagggatagtagtccct

SEQ ID NO: 3039401 - DNA, 25 bp, Homo sapien
ggtggttagccagcgtttccctcag

SEQ ID NO: 3039402 - DNA, 25 bp, Homo sapien
cattcatgaggactgattgattcag

SEQ ID NO: 3039403 - DNA, 25 bp, Homo sapien
gtttcacgttataaagttgaccaca

SEQ ID NO: 3039404 - DNA, 25 bp, Homo sapien
tcagaacagcatcggtgcagtagga

SEQ ID NO: 3039405 - DNA, 25 bp, Homo sapien
caccccacctacataatttcttctc

SEQ ID NO: 3039406 - DNA, 25 bp, Homo sapien
acacaccccacctacataatttctt

SEQ ID NO: 3039407 - DNA, 25 bp, Homo sapien
acaccccacctacataatttcttct

SEQ ID NO: 3039408 - DNA, 25 bp, Homo sapien
cacaccccacctacataatttcttc

SEQ ID NO: 3039409 - DNA, 25 bp, Homo sapien
tcaggcttgacgcaggattggatac

SEQ ID NO: 3039410 - DNA, 25 bp, Homo sapien
gatgttgaagtttgtccccggaatg

SEQ ID NO: 3039411 - DNA, 25 bp, Homo sapien
gaagagcaggccaatcggtgatagc

SEQ ID NO: 3039412 - DNA, 25 bp, Homo sapien
gcttgtcccaggattggtgctacca

SEQ ID NO: 3039413 - DNA, 25 bp, Homo sapien
ggcaagcatatatccttaattgtgt

SEQ ID NO: 3039414 - DNA, 25 bp, Homo sapien
tgaacacttggatcacaaataggca

SEQ ID NO: 3039415 - DNA, 25 bp, Homo sapien
cctattttctattgagggctaccaa

SEQ ID NO: 3039416 - DNA, 25 bp, Homo sapien
caacatctgctgacacaagacctat

SEQ ID NO: 3039417 - DNA, 25 bp, Homo sapien
ttttgatatttttctttgaagagta

SEQ ID NO: 3039418 - DNA, 25 bp, Homo sapien
cttttgatatttttctttgaagagt

SEQ ID NO: 3039419 - DNA, 25 bp, Homo sapien
ggttaattgtatcatcacctagcca

SEQ ID NO: 3039420 - DNA, 25 bp, Homo sapien
taatcttgaccttttgagtactaca

SEQ ID NO: 3039421 - DNA, 25 bp, Homo sapien
gatattatgaatcggagtactgcag

SEQ ID NO: 3039422 - DNA, 25 bp, Homo sapien
cttggcaaccagagtagatattatg

SEQ ID NO: 3039423 - DNA, 25 bp, Homo sapien
cttccctcacgtattgattcttcca

SEQ ID NO: 3039424 - DNA, 25 bp, Homo sapien
attactttccgttgatctgtttttg

SEQ ID NO: 3039425 - DNA, 25 bp, Homo sapien
ccagaactgtcttccctcacgtatt

SEQ ID NO: 3039426 - DNA, 25 bp, Homo sapien
tactttccgttgatctgtttttgaa

SEQ ID NO: 3039427 - DNA, 25 bp, Homo sapien
tgttgtagcataaccattcatggga

SEQ ID NO: 3039428 - DNA, 25 bp, Homo sapien
ctaaagttggtatgactggaaagcc

SEQ ID NO: 3039429 - DNA, 25 bp, Homo sapien
catgggatggcagctacgattttac

SEQ ID NO: 3039430 - DNA, 25 bp, Homo sapien
tagccaagagttcctcagaagcagg

SEQ ID NO: 3039431 - DNA, 25 bp, Homo sapien
tgtacatcagggaggagtgctttca

SEQ ID NO: 3039432 - DNA, 25 bp, Homo sapien
cttaaatatagctcgaatcactggt

SEQ ID NO: 3039433 - DNA, 25 bp, Homo sapien
gcagcaagtaccaagacattgtgca

SEQ ID NO: 3039434 - DNA, 25 bp, Homo sapien
gagcatagaccttttattttccaga

SEQ ID NO: 3039435 - DNA, 25 bp, Homo sapien
gacatgttccacagagaccgaggta

SEQ ID NO: 3039436 - DNA, 25 bp, Homo sapien
cactcagagagttaatggtgtccac

SEQ ID NO: 3039437 - DNA, 25 bp, Homo sapien
tagagtggcaccaaacgttgtttcc

SEQ ID NO: 3039438 - DNA, 25 bp, Homo sapien
taatattctcttgcagtccagatgg

SEQ ID NO: 3039439 - DNA, 25 bp, Homo sapien
cagatacacccttcttttaatatgc

SEQ ID NO: 3039440 - DNA, 25 bp, Homo sapien
tatgcaaatacagtttaggcatctg

SEQ ID NO: 3039441 - DNA, 25 bp, Homo sapien
ctgcatgggtcagttagcattaggc

SEQ ID NO: 3039442 - DNA, 25 bp, Homo sapien
catgggtcagttagcattaggcaaa

SEQ ID NO: 3039443 - DNA, 25 bp, Homo sapien
tgaaaaatccagaccaacacagtac

SEQ ID NO: 3039444 - DNA, 25 bp, Homo sapien
tgatatgctttcttactcagatgag

SEQ ID NO: 3039445 - DNA, 25 bp, Homo sapien
gctatgtggtagagagagactctct

SEQ ID NO: 3039446 - DNA, 25 bp, Homo sapien
taatccttcaattgggctatgtggt

SEQ ID NO: 3039447 - DNA, 25 bp, Homo sapien
aatttatggcaagaggtgcacacgc

SEQ ID NO: 3039448 - DNA, 25 bp, Homo sapien
tgaagctctgcaaccacctgatcag

SEQ ID NO: 3039449 - DNA, 25 bp, Homo sapien
gtaccacataggaggactgcagagc

SEQ ID NO: 3039450 - DNA, 25 bp, Homo sapien
taccttatgcatgagagttggccct

SEQ ID NO: 3039451 - DNA, 25 bp, Homo sapien
tctgatttccagaatggcaagttta

SEQ ID NO: 3039452 - DNA, 25 bp, Homo sapien
taaattttgctccactcttcagtgg

SEQ ID NO: 3039453 - DNA, 25 bp, Homo sapien
gtattttcgttaccaagtggcacca

SEQ ID NO: 3039454 - DNA, 25 bp, Homo sapien
catgttatgtgtaaggaaagtctct

SEQ ID NO: 3039455 - DNA, 25 bp, Homo sapien
actatgagtggttctccaagactgg

SEQ ID NO: 3039456 - DNA, 25 bp, Homo sapien
gaatgccagtgctatgaataaatgc

SEQ ID NO: 3039457 - DNA, 25 bp, Homo sapien
taatggtcagtaaagatggcttgaa

SEQ ID NO: 3039458 - DNA, 25 bp, Homo sapien
ctgtgtccaaaaccctactggttct

SEQ ID NO: 3039459 - DNA, 25 bp, Homo sapien
caacccttcagttgatgttttaaca

SEQ ID NO: 3039460 - DNA, 25 bp, Homo sapien
tcctaacccaacccttcagttgatg

SEQ ID NO: 3039461 - DNA, 25 bp, Homo sapien
cctaacccaacccttcagttgatgt

SEQ ID NO: 3039462 - DNA, 25 bp, Homo sapien
ctaacccaacccttcagttgatgtt

SEQ ID NO: 3039463 - DNA, 25 bp, Homo sapien
cccattcccacaaacttggaatatt

SEQ ID NO: 3039464 - DNA, 25 bp, Homo sapien
ctcccattcccacaaacttggaata

SEQ ID NO: 3039465 - DNA, 25 bp, Homo sapien
acttgaagcatatacttagtctctt

SEQ ID NO: 3039466 - DNA, 25 bp, Homo sapien
tacttagtctcttattcctctccac

SEQ ID NO: 3039467 - DNA, 25 bp, Homo sapien
gcagatttcagatagttcctgaata

SEQ ID NO: 3039468 - DNA, 25 bp, Homo sapien
aaatcaaaattgactatcagttgcc

SEQ ID NO: 3039469 - DNA, 25 bp, Homo sapien
tcatttgaggatggaagatcagcta

SEQ ID NO: 3039470 - DNA, 25 bp, Homo sapien
catctatgcacataggctctgagca

SEQ ID NO: 3039471 - DNA, 25 bp, Homo sapien
ctgacactggatctcaaggttggaa

SEQ ID NO: 3039472 - DNA, 25 bp, Homo sapien
tttcataaaatctactggtggcagg

SEQ ID NO: 3039473 - DNA, 25 bp, Homo sapien
gaggaatagagaactcctgacactg

SEQ ID NO: 3039474 - DNA, 25 bp, Homo sapien
tccacagtcttgattgagacagtcc

SEQ ID NO: 3039475 - DNA, 25 bp, Homo sapien
gatgttatccatacaaatgtcaggg

SEQ ID NO: 3039476 - DNA, 25 bp, Homo sapien
tcagcaaatggagatctacctgccc

SEQ ID NO: 3039477 - DNA, 25 bp, Homo sapien
gaagtacaccaattagtatggcagc

SEQ ID NO: 3039478 - DNA, 25 bp, Homo sapien
ccaacatagaagtcagaagtacacc

SEQ ID NO: 3039479 - DNA, 25 bp, Homo sapien
tcgctgaattgtgttggttgaccca

SEQ ID NO: 3039480 - DNA, 25 bp, Homo sapien
tgtctggcagaggtgaacacggctt

SEQ ID NO: 3039481 - DNA, 25 bp, Homo sapien
taaatcctggtgtactcctaggtga

SEQ ID NO: 3039482 - DNA, 25 bp, Homo sapien
tggttgtccagcagaagtatgtgct

SEQ ID NO: 3039483 - DNA, 25 bp, Homo sapien
gttgtgttttgagaattagccaata

SEQ ID NO: 3039484 - DNA, 25 bp, Homo sapien
ctgttgtgttttgagaattagccaa

SEQ ID NO: 3039485 - DNA, 25 bp, Homo sapien
tgttgtgttttgagaattagccaat

SEQ ID NO: 3039486 - DNA, 25 bp, Homo sapien
ttgtgttttgagaattagccaatac

SEQ ID NO: 3039487 - DNA, 25 bp, Homo sapien
gtgaataaggtaggctgtgactgct

SEQ ID NO: 3039488 - DNA, 25 bp, Homo sapien
atgatgtgaataaggtaggctgtga

SEQ ID NO: 3039489 - DNA, 25 bp, Homo sapien
gatgtgaataaggtaggctgtgact

SEQ ID NO: 3039490 - DNA, 25 bp, Homo sapien
tgatgatgtgaataaggtaggctgt

SEQ ID NO: 3039491 - DNA, 25 bp, Homo sapien
ttgttcaggtgtccacaaaacaaaa

SEQ ID NO: 3039492 - DNA, 25 bp, Homo sapien
tgttcaggtgtccacaaaacaaaat

SEQ ID NO: 3039493 - DNA, 25 bp, Homo sapien
tacagcccaaacagatcagtcattt

SEQ ID NO: 3039494 - DNA, 25 bp, Homo sapien
ggcttgagttaaccagtccagattc

SEQ ID NO: 3039495 - DNA, 25 bp, Homo sapien
tctggctgcatatctgaatctgtcc

SEQ ID NO: 3039496 - DNA, 25 bp, Homo sapien
gaaacttcttatccagccaaatgca

SEQ ID NO: 3039497 - DNA, 25 bp, Homo sapien
taaattcttgttctaactggacatt

SEQ ID NO: 3039498 - DNA, 25 bp, Homo sapien
atgggtggttcaattcagatttaaa

SEQ ID NO: 3039499 - DNA, 25 bp, Homo sapien
aaggaaaatgggtggttcaattcag

SEQ ID NO: 3039500 - DNA, 25 bp, Homo sapien
aaatgggtggttcaattcagattta

SEQ ID NO: 3039501 - DNA, 25 bp, Homo sapien
ggaaaatgggtggttcaattcagat

SEQ ID NO: 3039502 - DNA, 25 bp, Homo sapien
ttggtgtggctataaatcttattta

SEQ ID NO: 3039503 - DNA, 25 bp, Homo sapien
tattgatctttacaatgtgttctct

SEQ ID NO: 3039504 - DNA, 25 bp, Homo sapien
tattggtgtggctataaatcttatt

SEQ ID NO: 3039505 - DNA, 25 bp, Homo sapien
tgtgttctctaaagtaataaagtga

SEQ ID NO: 3039506 - DNA, 25 bp, Homo sapien
tagataatcagaacaacactttggg

SEQ ID NO: 3039507 - DNA, 25 bp, Homo sapien
taaccactgttgctacatagggaat

SEQ ID NO: 3039508 - DNA, 25 bp, Homo sapien
cactttcttacgtgtgccatatgga

SEQ ID NO: 3039509 - DNA, 25 bp, Homo sapien
taattaagcaggcatacttctccct

SEQ ID NO: 3039510 - DNA, 25 bp, Homo sapien
tcactaggttgggtcctgtgagctg

SEQ ID NO: 3039511 - DNA, 25 bp, Homo sapien
tgtgagcactccagtagattgcatc

SEQ ID NO: 3039512 - DNA, 25 bp, Homo sapien
cactccagtagattgcatcactagg

SEQ ID NO: 3039513 - DNA, 25 bp, Homo sapien
gattgcatcactaggttgggtcctg

SEQ ID NO: 3039514 - DNA, 25 bp, Homo sapien
caagtgtctgattcagcgggccata

SEQ ID NO: 3039515 - DNA, 25 bp, Homo sapien
tgttgttttccgcacagacatcctt

SEQ ID NO: 3039516 - DNA, 25 bp, Homo sapien
catagaccgcttgccagaaaatcgc

SEQ ID NO: 3039517 - DNA, 25 bp, Homo sapien
gacgcttgcctacttgttttgatcg

SEQ ID NO: 3039518 - DNA, 25 bp, Homo sapien
cccacagacgggtatagtttgcttt

SEQ ID NO: 3039519 - DNA, 25 bp, Homo sapien
taatctacttcaggagttatagggt

SEQ ID NO: 3039520 - DNA, 25 bp, Homo sapien
gacgacagaaggtatataaagctcc

SEQ ID NO: 3039521 - DNA, 25 bp, Homo sapien
gaagaagtactgttagcccacagac

SEQ ID NO: 3039522 - DNA, 25 bp, Homo sapien
gaagcgtgctagacttctgctttga

SEQ ID NO: 3039523 - DNA, 25 bp, Homo sapien
tatgcctaatattcgctaccctgaa

SEQ ID NO: 3039524 - DNA, 25 bp, Homo sapien
tacaagtaaactacaagcttatgcc

SEQ ID NO: 3039525 - DNA, 25 bp, Homo sapien
tcattttaagtggactatcatggct

SEQ ID NO: 3039526 - DNA, 25 bp, Homo sapien
tggttgttatatgtcattggctgac

SEQ ID NO: 3039527 - DNA, 25 bp, Homo sapien
ctagctagtataggtagggcctgaa

SEQ ID NO: 3039528 - DNA, 25 bp, Homo sapien
caggcttttgaacatcaaggtttta

SEQ ID NO: 3039529 - DNA, 25 bp, Homo sapien
tataggtagggcctgaaagtctttg

SEQ ID NO: 3039530 - DNA, 25 bp, Homo sapien
aagtaaatctgcagtaaaaaaggat

SEQ ID NO: 3039531 - DNA, 25 bp, Homo sapien
ttataacgtgattttgataaaccac

SEQ ID NO: 3039532 - DNA, 25 bp, Homo sapien
tagacttggagaatatgagccttaa

SEQ ID NO: 3039533 - DNA, 25 bp, Homo sapien
cttacaaaatgcttggtcaaaatct

SEQ ID NO: 3039534 - DNA, 25 bp, Homo sapien
ggttccagaccatgtgatcacacgc

SEQ ID NO: 3039535 - DNA, 25 bp, Homo sapien
tttcctaggacattaggacaagccg

SEQ ID NO: 3039536 - DNA, 25 bp, Homo sapien
gatcacacgcctaatgatgtccgag

SEQ ID NO: 3039537 - DNA, 25 bp, Homo sapien
actggctccttgatggttttcctag

SEQ ID NO: 3039538 - DNA, 25 bp, Homo sapien
tattgatgacgtcactggtgaacca

SEQ ID NO: 3039539 - DNA, 25 bp, Homo sapien
ttggattcaccctcctagcggaagg

SEQ ID NO: 3039540 - DNA, 25 bp, Homo sapien
tgataaacccgaagcagttgctgcc

SEQ ID NO: 3039541 - DNA, 25 bp, Homo sapien
ggtgaaccattagtccagcaggagg

SEQ ID NO: 3039542 - DNA, 25 bp, Homo sapien
catttggaattactggactaattga

SEQ ID NO: 3039543 - DNA, 25 bp, Homo sapien
gtgctgctaactattgatgctgaca

SEQ ID NO: 3039544 - DNA, 25 bp, Homo sapien
catgggaagttaagtatttagctac

SEQ ID NO: 3039545 - DNA, 25 bp, Homo sapien
ctagctgtgcctggactgagtataa

SEQ ID NO: 3039546 - DNA, 25 bp, Homo sapien
tcttctgttcgcaaaactcgtatca

SEQ ID NO: 3039547 - DNA, 25 bp, Homo sapien
tcaatagtcttactttcgtcagtcc

SEQ ID NO: 3039548 - DNA, 25 bp, Homo sapien
tccttaagattctaacaatgtacgc

SEQ ID NO: 3039549 - DNA, 25 bp, Homo sapien
tgttcccctgtcaaagtataaatta

SEQ ID NO: 3039550 - DNA, 25 bp, Homo sapien
gaaagaaccatagaggtcaagcctc

SEQ ID NO: 3039551 - DNA, 25 bp, Homo sapien
tcttgaatactgctactactggcca

SEQ ID NO: 3039552 - DNA, 25 bp, Homo sapien
catcctacagagtaaagtgttagtc

SEQ ID NO: 3039553 - DNA, 25 bp, Homo sapien
ccataaagccacagacaaggtactt

SEQ ID NO: 3039554 - DNA, 25 bp, Homo sapien
tagtgctgtttcattagaggatttc

SEQ ID NO: 3039555 - DNA, 25 bp, Homo sapien
cagtgagcatattggtatctggatg

SEQ ID NO: 3039556 - DNA, 25 bp, Homo sapien
agatattaatccctctactcccagg

SEQ ID NO: 3039557 - DNA, 25 bp, Homo sapien
ggttccctttatatgttaagatata

SEQ ID NO: 3039558 - DNA, 25 bp, Homo sapien
gctctcctactccccgtgagaaaga

SEQ ID NO: 3039559 - DNA, 25 bp, Homo sapien
tactccccgtgagaaagatctttcc

SEQ ID NO: 3039560 - DNA, 25 bp, Homo sapien
agatgtatcgagctctgttttcttc

SEQ ID NO: 3039561 - DNA, 25 bp, Homo sapien
cattaaggccattttccttaaggat

SEQ ID NO: 3039562 - DNA, 25 bp, Homo sapien
tactggctgctagattggacagagc

SEQ ID NO: 3039563 - DNA, 25 bp, Homo sapien
tagccatcatgccagagggaaggag

SEQ ID NO: 3039564 - DNA, 25 bp, Homo sapien
tacatgtccatcacccgttatcagg

SEQ ID NO: 3039565 - DNA, 25 bp, Homo sapien
taactaatattggtgccagtccaga

SEQ ID NO: 3039566 - DNA, 25 bp, Homo sapien
atggctctgacagcacttccttcac

SEQ ID NO: 3039567 - DNA, 25 bp, Homo sapien
tatggctctgacagcacttccttca

SEQ ID NO: 3039568 - DNA, 25 bp, Homo sapien
ctatggctctgacagcacttccttc

SEQ ID NO: 3039569 - DNA, 25 bp, Homo sapien
cctaatcttggaatgatcccatcat

SEQ ID NO: 3039570 - DNA, 25 bp, Homo sapien
gcatccctgtgtgtgcatcacgaac

SEQ ID NO: 3039571 - DNA, 25 bp, Homo sapien
ctgcctcttaactctcggctcttga

SEQ ID NO: 3039572 - DNA, 25 bp, Homo sapien
aactctcggctcttgaccctgtgtc

SEQ ID NO: 3039573 - DNA, 25 bp, Homo sapien
tggacgaactaatatcggggtccca

SEQ ID NO: 3039574 - DNA, 25 bp, Homo sapien
gccagctgcttgtccttattctcca

SEQ ID NO: 3039575 - DNA, 25 bp, Homo sapien
ccagccagctgcttgtccttattct

SEQ ID NO: 3039576 - DNA, 25 bp, Homo sapien
cagctgcttgtccttattctccact

SEQ ID NO: 3039577 - DNA, 25 bp, Homo sapien
gctggctggatctccagcagccagt

SEQ ID NO: 3039578 - DNA, 25 bp, Homo sapien
tataacaacccatgacccaagacgg

SEQ ID NO: 3039579 - DNA, 25 bp, Homo sapien
gggccatagcttagggtcaccaatt

SEQ ID NO: 3039580 - DNA, 25 bp, Homo sapien
agagcagcccagaatccttataggt

SEQ ID NO: 3039581 - DNA, 25 bp, Homo sapien
gattccagctgtaaggacctctggc

SEQ ID NO: 3039582 - DNA, 25 bp, Homo sapien
gaagatcccagtctaaggctagcac

SEQ ID NO: 3039583 - DNA, 25 bp, Homo sapien
gcgcaaaacccggagaagattgcca

SEQ ID NO: 3039584 - DNA, 25 bp, Homo sapien
cccggagaagattgccagcttcctc

SEQ ID NO: 3039585 - DNA, 25 bp, Homo sapien
tgatgacacatgggcctgcagtggg

SEQ ID NO: 3039586 - DNA, 25 bp, Homo sapien
caggcactcataggtaatcctctgc

SEQ ID NO: 3039587 - DNA, 25 bp, Homo sapien
gcactcataggtaatcctctgcagg

SEQ ID NO: 3039588 - DNA, 25 bp, Homo sapien
tgccaggcactcataggtaatcctc

SEQ ID NO: 3039589 - DNA, 25 bp, Homo sapien
tctttgtctccagttggccgccccg

SEQ ID NO: 3039590 - DNA, 25 bp, Homo sapien
aaatcagggtgcacttaccaggtga

SEQ ID NO: 3039591 - DNA, 25 bp, Homo sapien
aacacagggtgttgtactggtacac

SEQ ID NO: 3039592 - DNA, 25 bp, Homo sapien
tatgacctgggatgggcctctgtac

SEQ ID NO: 3039593 - DNA, 25 bp, Homo sapien
tccagatgtgtaggaaaacttagcc

SEQ ID NO: 3039594 - DNA, 25 bp, Homo sapien
cctctgggcgtgtggcagtattaac

SEQ ID NO: 3039595 - DNA, 25 bp, Homo sapien
cagctcatgaggttcacgggtgtcc

SEQ ID NO: 3039596 - DNA, 25 bp, Homo sapien
aagaggtgcaacgactggctgtccc

SEQ ID NO: 3039597 - DNA, 25 bp, Homo sapien
tcagggaggttgagtcatccaccac

SEQ ID NO: 3039598 - DNA, 25 bp, Homo sapien
agaggcaccagctaggacccaatcc

SEQ ID NO: 3039599 - DNA, 25 bp, Homo sapien
aagggtccaaggtagggcagctcca

SEQ ID NO: 3039600 - DNA, 25 bp, Homo sapien
gctgaggcaagtgtattcttcctta

SEQ ID NO: 3039601 - DNA, 25 bp, Homo sapien
taacacaagggtccaaggtagggca

SEQ ID NO: 3039602 - DNA, 25 bp, Homo sapien
taagcttctcgtgggtgaactcctt

SEQ ID NO: 3039603 - DNA, 25 bp, Homo sapien
tggattttaagcttctcgtgggtga

SEQ ID NO: 3039604 - DNA, 25 bp, Homo sapien
tttaagcttctcgtgggtgaactcc

SEQ ID NO: 3039605 - DNA, 25 bp, Homo sapien
ttctcgtgggtgaactcctttctgc

SEQ ID NO: 3039606 - DNA, 25 bp, Homo sapien
ggaggcagccggccttggtactttc

SEQ ID NO: 3039607 - DNA, 25 bp, Homo sapien
tctgtgcgatgggtaacgtctgtgc

SEQ ID NO: 3039608 - DNA, 25 bp, Homo sapien
aacgtctgtgcgatgaacactgtac

SEQ ID NO: 3039609 - DNA, 25 bp, Homo sapien
ccaggaacacgccatgggccattga

SEQ ID NO: 3039610 - DNA, 25 bp, Homo sapien
agatacactggacggtgcttctccg

SEQ ID NO: 3039611 - DNA, 25 bp, Homo sapien
agggagataccagccacttgctggg

SEQ ID NO: 3039612 - DNA, 25 bp, Homo sapien
tgcttctccgggtacctgtgcccga

SEQ ID NO: 3039613 - DNA, 25 bp, Homo sapien
aatccaagcccctaagatacactgg

SEQ ID NO: 3039614 - DNA, 25 bp, Homo sapien
taattttgcctcctctcaaggctgg

SEQ ID NO: 3039615 - DNA, 25 bp, Homo sapien
tgaggaaatttgaccccgcgtggct

SEQ ID NO: 3039616 - DNA, 25 bp, Homo sapien
acaaaacaggtcttcactgggaggg

SEQ ID NO: 3039617 - DNA, 25 bp, Homo sapien
aaagagctcaggtttgagtcaaacg

SEQ ID NO: 3039618 - DNA, 25 bp, Homo sapien
cattttgggaacactcgatagtctc

SEQ ID NO: 3039619 - DNA, 25 bp, Homo sapien
gtctcctagctactgaaaactctgt

SEQ ID NO: 3039620 - DNA, 25 bp, Homo sapien
tggccaaatccaagcatcagttctc

SEQ ID NO: 3039621 - DNA, 25 bp, Homo sapien
ggaacttatccctcctctagaactg

SEQ ID NO: 3039622 - DNA, 25 bp, Homo sapien
actcaccctccgctgagagtgccat

SEQ ID NO: 3039623 - DNA, 25 bp, Homo sapien
gcagtgaatgtcagctttgccacct

SEQ ID NO: 3039624 - DNA, 25 bp, Homo sapien
gctgcactcaccctccgctgagagt

SEQ ID NO: 3039625 - DNA, 25 bp, Homo sapien
tcagggctgacgctcccaaggcagc

SEQ ID NO: 3039626 - DNA, 25 bp, Homo sapien
gaatgggccttctctgcacgggagc

SEQ ID NO: 3039627 - DNA, 25 bp, Homo sapien
cagaatgggccttctctgcacggga

SEQ ID NO: 3039628 - DNA, 25 bp, Homo sapien
agaatgggccttctctgcacgggag

SEQ ID NO: 3039629 - DNA, 25 bp, Homo sapien
gggctccagcaaacagtcccaaagc

SEQ ID NO: 3039630 - DNA, 25 bp, Homo sapien
gctccagcaaacagtcccaaagcca

SEQ ID NO: 3039631 - DNA, 25 bp, Homo sapien
tccagcaaacagtcccaaagccagt

SEQ ID NO: 3039632 - DNA, 25 bp, Homo sapien
tcagggctccagcaaacagtcccaa

SEQ ID NO: 3039633 - DNA, 25 bp, Homo sapien
gaactgcagcccctcaatacggatg

SEQ ID NO: 3039634 - DNA, 25 bp, Homo sapien
aagaactgcagcccctcaatacgga

SEQ ID NO: 3039635 - DNA, 25 bp, Homo sapien
aactgcagcccctcaatacggatgg

SEQ ID NO: 3039636 - DNA, 25 bp, Homo sapien
tcaagaactgcagcccctcaatacg

SEQ ID NO: 3039637 - DNA, 25 bp, Homo sapien
aattaaggtaactgaatgcccaggc

SEQ ID NO: 3039638 - DNA, 25 bp, Homo sapien
ggagggcagctccattaccgctctt

SEQ ID NO: 3039639 - DNA, 25 bp, Homo sapien
gtgatagaatctgccccgagcttgg

SEQ ID NO: 3039640 - DNA, 25 bp, Homo sapien
gaaaccggccttttgcaaaatagca

SEQ ID NO: 3039641 - DNA, 25 bp, Homo sapien
gattgatgctctgctacttgtggcc

SEQ ID NO: 3039642 - DNA, 25 bp, Homo sapien
gaagggtgattgatgctctgctact

SEQ ID NO: 3039643 - DNA, 25 bp, Homo sapien
caccatgggtatgcagatctggccc

SEQ ID NO: 3039644 - DNA, 25 bp, Homo sapien
cagatctggccctcattgatgcaaa

SEQ ID NO: 3039645 - DNA, 25 bp, Homo sapien
gcagtgccgcgtgatgagtgctccc

SEQ ID NO: 3039646 - DNA, 25 bp, Homo sapien
gtccccagaccttggctgagcaccg

SEQ ID NO: 3039647 - DNA, 25 bp, Homo sapien
taaagaaccactgtgcagtgccgcg

SEQ ID NO: 3039648 - DNA, 25 bp, Homo sapien
accgccctgggctcataaagaacca

SEQ ID NO: 3039649 - DNA, 25 bp, Homo sapien
agctgggccttacgcgctgagtcat

SEQ ID NO: 3039650 - DNA, 25 bp, Homo sapien
gggagagagtggctggttctgccct

SEQ ID NO: 3039651 - DNA, 25 bp, Homo sapien
tgggggtcggggccagccgcaggga

SEQ ID NO: 3039652 - DNA, 25 bp, Homo sapien
caagctgggccttacgcgctgagtc

SEQ ID NO: 3039653 - DNA, 25 bp, Homo sapien
ccttgacccatcagatatagatgag

SEQ ID NO: 3039654 - DNA, 25 bp, Homo sapien
gatatagatgagaagccacggctgg

SEQ ID NO: 3039655 - DNA, 25 bp, Homo sapien
ccacggctgggagggtgcgaagctg

SEQ ID NO: 3039656 - DNA, 25 bp, Homo sapien
agggtgcgaagctgacagcagagcc

SEQ ID NO: 3039657 - DNA, 25 bp, Homo sapien
tgggtggccagcactaggtctggcc

SEQ ID NO: 3039658 - DNA, 25 bp, Homo sapien
aagagcagcgcgggcgtcagaggcg

SEQ ID NO: 3039659 - DNA, 25 bp, Homo sapien
ctgggtggccagcactaggtctggc

SEQ ID NO: 3039660 - DNA, 25 bp, Homo sapien
gcgcgggcgtcagaggcgcctggac

SEQ ID NO: 3039661 - DNA, 25 bp, Homo sapien
ggaaatggcaggatgcatctccctg

SEQ ID NO: 3039662 - DNA, 25 bp, Homo sapien
ggcagcagccaagtcaacagcaggt

SEQ ID NO: 3039663 - DNA, 25 bp, Homo sapien
ccaagtcaacagcaggtagtggcca

SEQ ID NO: 3039664 - DNA, 25 bp, Homo sapien
atggcaggatgcatctccctgggct

SEQ ID NO: 3039665 - DNA, 25 bp, Homo sapien
gcatgtggcaaatcatagacacctg

SEQ ID NO: 3039666 - DNA, 25 bp, Homo sapien
tgccactgactgagacactgctgag

SEQ ID NO: 3039667 - DNA, 25 bp, Homo sapien
cagaggtgcatgtggcaaatcatag

SEQ ID NO: 3039668 - DNA, 25 bp, Homo sapien
gacacctgatgtgggctgccactga

SEQ ID NO: 3039669 - DNA, 25 bp, Homo sapien
tgctgcttcccaggcaattccggtt

SEQ ID NO: 3039670 - DNA, 25 bp, Homo sapien
gctgcttcccaggcaattccggttg

SEQ ID NO: 3039671 - DNA, 25 bp, Homo sapien
taccacccgttccatagagctcttg

SEQ ID NO: 3039672 - DNA, 25 bp, Homo sapien
tgataccacccgttccatagagctc

SEQ ID NO: 3039673 - DNA, 25 bp, Homo sapien
agctcttgagaaatgtcgctcaggc

SEQ ID NO: 3039674 - DNA, 25 bp, Homo sapien
cccgttccatagagctcttgagaaa

SEQ ID NO: 3039675 - DNA, 25 bp, Homo sapien
ctgagccatctcgttcggccgcgag

SEQ ID NO: 3039676 - DNA, 25 bp, Homo sapien
ccgcgagtagaagccgctgccaggt

SEQ ID NO: 3039677 - DNA, 25 bp, Homo sapien
cagttccaggaagtgcttttagtgg

SEQ ID NO: 3039678 - DNA, 25 bp, Homo sapien
ccgctgccaggtgcgcgggtggcgg

SEQ ID NO: 3039679 - DNA, 25 bp, Homo sapien
tgccctcctgcccttgcgggatcgg

SEQ ID NO: 3039680 - DNA, 25 bp, Homo sapien
tgcgggatcggcgtggtacccagcg

SEQ ID NO: 3039681 - DNA, 25 bp, Homo sapien
ctgagcgccgcgaagtttttctgta

SEQ ID NO: 3039682 - DNA, 25 bp, Homo sapien
ttctgtagctcttggcggctgcaca

SEQ ID NO: 3039683 - DNA, 25 bp, Homo sapien
ccgcttctctgtgcgggcgacaagt

SEQ ID NO: 3039684 - DNA, 25 bp, Homo sapien
aagtgtctccaaggtcctggcggcg

SEQ ID NO: 3039685 - DNA, 25 bp, Homo sapien
gagctgttggcacagccgcttctct

SEQ ID NO: 3039686 - DNA, 25 bp, Homo sapien
tggcggcgcagtctctggagagcgt

SEQ ID NO: 3039687 - DNA, 25 bp, Homo sapien
tggggaactgggttccgacacagcc

SEQ ID NO: 3039688 - DNA, 25 bp, Homo sapien
actgggttccgacacagccccgcac

SEQ ID NO: 3039689 - DNA, 25 bp, Homo sapien
ctgtggggaactgggttccgacaca

SEQ ID NO: 3039690 - DNA, 25 bp, Homo sapien
gaactgggttccgacacagccccgc

SEQ ID NO: 3039691 - DNA, 25 bp, Homo sapien
cctactcctcgcccatgcaaactct

SEQ ID NO: 3039692 - DNA, 25 bp, Homo sapien
tactcctcgcccatgcaaactctcc

SEQ ID NO: 3039693 - DNA, 25 bp, Homo sapien
ctactcctcgcccatgcaaactctc

SEQ ID NO: 3039694 - DNA, 25 bp, Homo sapien
tgactgaccgattttctcaaagcaa

SEQ ID NO: 3039695 - DNA, 25 bp, Homo sapien
cccgagggccatgccagttttcctt

SEQ ID NO: 3039696 - DNA, 25 bp, Homo sapien
aagcaatgtgagaggtctgggtcct

SEQ ID NO: 3039697 - DNA, 25 bp, Homo sapien
gtcctgtctctgcacttagcctcca

SEQ ID NO: 3039698 - DNA, 25 bp, Homo sapien
ttctgggacgctgaaaagcaatggg

SEQ ID NO: 3039699 - DNA, 25 bp, Homo sapien
caatggggcaggcacattccttaga

SEQ ID NO: 3039700 - DNA, 25 bp, Homo sapien
attggcttgggcttctgggacgctg

SEQ ID NO: 3039701 - DNA, 25 bp, Homo sapien
tgggcttctgggacgctgaaaagca

SEQ ID NO: 3039702 - DNA, 25 bp, Homo sapien
ctttctggctttcggggactgttga

SEQ ID NO: 3039703 - DNA, 25 bp, Homo sapien
ttacacacgggacacttccctgcct

SEQ ID NO: 3039704 - DNA, 25 bp, Homo sapien
tgttcccagggaacattacacacgg

SEQ ID NO: 3039705 - DNA, 25 bp, Homo sapien
agtctgaatactgggtctgctctgg

SEQ ID NO: 3039706 - DNA, 25 bp, Homo sapien
aaatagcaggtgagcagttcccaga

SEQ ID NO: 3039707 - DNA, 25 bp, Homo sapien
cagaaggcaggcatctccgaatgag

SEQ ID NO: 3039708 - DNA, 25 bp, Homo sapien
gagaggctcccaatgaaatagcagg

SEQ ID NO: 3039709 - DNA, 25 bp, Homo sapien
taggtatctggcagtccccgatctg

SEQ ID NO: 3039710 - DNA, 25 bp, Homo sapien
tggatgtcgtacgatctttgcccct

SEQ ID NO: 3039711 - DNA, 25 bp, Homo sapien
ccctgaatggtaccacagtctccct

SEQ ID NO: 3039712 - DNA, 25 bp, Homo sapien
accaggaggcgtttcaggacacgga

SEQ ID NO: 3039713 - DNA, 25 bp, Homo sapien
tccctcaccaggaggcgtttcagga

SEQ ID NO: 3039714 - DNA, 25 bp, Homo sapien
cagacaaccttggtggttacttctt

SEQ ID NO: 3039715 - DNA, 25 bp, Homo sapien
ttacttcttcactttttcgcatgac

SEQ ID NO: 3039716 - DNA, 25 bp, Homo sapien
ctcagaacccccctgagcacccaga

SEQ ID NO: 3039717 - DNA, 25 bp, Homo sapien
cctgagcacccagacaaccttggtg

SEQ ID NO: 3039718 - DNA, 25 bp, Homo sapien
gcaagcctgataccatggaaaggga

SEQ ID NO: 3039719 - DNA, 25 bp, Homo sapien
cccctgcgctgtgcaagcctgatac

SEQ ID NO: 3039720 - DNA, 25 bp, Homo sapien
gataccatggaaagggaacccacat

SEQ ID NO: 3039721 - DNA, 25 bp, Homo sapien
ggaacccacatttcaaatagctgct

SEQ ID NO: 3039722 - DNA, 25 bp, Homo sapien
gctcgggctctgcagatacagattc

SEQ ID NO: 3039723 - DNA, 25 bp, Homo sapien
tgctcgggctctgcagatacagatt

SEQ ID NO: 3039724 - DNA, 25 bp, Homo sapien
cttgctcgggctctgcagatacaga

SEQ ID NO: 3039725 - DNA, 25 bp, Homo sapien
ttgctcgggctctgcagatacagat

SEQ ID NO: 3039726 - DNA, 25 bp, Homo sapien
gggtgaagtgactagcatttgtgtg

SEQ ID NO: 3039727 - DNA, 25 bp, Homo sapien
gaagtgactagcatttgtgtggcag

SEQ ID NO: 3039728 - DNA, 25 bp, Homo sapien
ctggggtgaagtgactagcatttgt

SEQ ID NO: 3039729 - DNA, 25 bp, Homo sapien
gtgaagtgactagcatttgtgtggc

SEQ ID NO: 3039730 - DNA, 25 bp, Homo sapien
ttttcacatgtgtttccttttagca

SEQ ID NO: 3039731 - DNA, 25 bp, Homo sapien
gtaaagtcttcccacatgtagcctc

SEQ ID NO: 3039732 - DNA, 25 bp, Homo sapien
ccacatgtagcctctttgaagctcc

SEQ ID NO: 3039733 - DNA, 25 bp, Homo sapien
ggaggagggctctgcctgatggcct

SEQ ID NO: 3039734 - DNA, 25 bp, Homo sapien
tgcctgatggcctggatggcacaga

SEQ ID NO: 3039735 - DNA, 25 bp, Homo sapien
gctctgcctgatggcctggatggca

SEQ ID NO: 3039736 - DNA, 25 bp, Homo sapien
gagggctctgcctgatggcctggat

SEQ ID NO: 3039737 - DNA, 25 bp, Homo sapien
gtgctgtggtccctgcaagcttcag

SEQ ID NO: 3039738 - DNA, 25 bp, Homo sapien
gctgtggtccctgcaagcttcagct

SEQ ID NO: 3039739 - DNA, 25 bp, Homo sapien
tcagcgttgctaactgccattcctg

SEQ ID NO: 3039740 - DNA, 25 bp, Homo sapien
tctggtaccatcagcgttgctaact

SEQ ID NO: 3039741 - DNA, 25 bp, Homo sapien
tggctgtgggtaaacatcggtgctc

SEQ ID NO: 3039742 - DNA, 25 bp, Homo sapien
cttggccattggctgtgggtaaaca

SEQ ID NO: 3039743 - DNA, 25 bp, Homo sapien
cagaagggcgggtcacgtggagcct

SEQ ID NO: 3039744 - DNA, 25 bp, Homo sapien
gggtaaacatcggtgctctgctggc

SEQ ID NO: 3039745 - DNA, 25 bp, Homo sapien
gagttggatagtggcctctctctgg

SEQ ID NO: 3039746 - DNA, 25 bp, Homo sapien
gctttggaccgtgggtcagctccat

SEQ ID NO: 3039747 - DNA, 25 bp, Homo sapien
ggcatgctctccttgagttggatag

SEQ ID NO: 3039748 - DNA, 25 bp, Homo sapien
cctggctttggaccgtgggtcagct

SEQ ID NO: 3039749 - DNA, 25 bp, Homo sapien
ggcactcagatctgggacccagggc

SEQ ID NO: 3039750 - DNA, 25 bp, Homo sapien
aatgggcttactggggcactcagat

SEQ ID NO: 3039751 - DNA, 25 bp, Homo sapien
atgggcttactggggcactcagatc

SEQ ID NO: 3039752 - DNA, 25 bp, Homo sapien
gggcactcagatctgggacccaggg

SEQ ID NO: 3039753 - DNA, 25 bp, Homo sapien
ttcagttactgagcgctgctggtca

SEQ ID NO: 3039754 - DNA, 25 bp, Homo sapien
aaaccagctctagaccgctgtggag

SEQ ID NO: 3039755 - DNA, 25 bp, Homo sapien
gtggctccagggctaactgctgatt

SEQ ID NO: 3039756 - DNA, 25 bp, Homo sapien
tactgtctggcacggagaaactggt

SEQ ID NO: 3039757 - DNA, 25 bp, Homo sapien
ccttttacatttgtcttataactat

SEQ ID NO: 3039758 - DNA, 25 bp, Homo sapien
cttttacatttgtcttataactata

SEQ ID NO: 3039759 - DNA, 25 bp, Homo sapien
gagaaggtgggcgaaaaatccagac

SEQ ID NO: 3039760 - DNA, 25 bp, Homo sapien
ggcgaaaaatccagactgagcttgg

SEQ ID NO: 3039761 - DNA, 25 bp, Homo sapien
cttttgttatcagggtgagaaggtg

SEQ ID NO: 3039762 - DNA, 25 bp, Homo sapien
gttctcttttgttatcagggtgaga

SEQ ID NO: 3039763 - DNA, 25 bp, Homo sapien
gaaaccaagactgctcgtcgttctg

SEQ ID NO: 3039764 - DNA, 25 bp, Homo sapien
tgatctgatcatttgaaaccaagac

SEQ ID NO: 3039765 - DNA, 25 bp, Homo sapien
tcagccatccattgccgcttgatct

SEQ ID NO: 3039766 - DNA, 25 bp, Homo sapien
aagactgctcgtcgttctgttctca

SEQ ID NO: 3039767 - DNA, 25 bp, Homo sapien
gtagtaaccttactgtgcaatagaa

SEQ ID NO: 3039768 - DNA, 25 bp, Homo sapien
gggtcattagcaaaaccatcacttc

SEQ ID NO: 3039769 - DNA, 25 bp, Homo sapien
catatttagagagtacagtctgatg

SEQ ID NO: 3039770 - DNA, 25 bp, Homo sapien
caggacttagtcctcccatctgact

SEQ ID NO: 3039771 - DNA, 25 bp, Homo sapien
ttatcccacccttgccttggctggt

SEQ ID NO: 3039772 - DNA, 25 bp, Homo sapien
cctttatcccacccttgccttggct

SEQ ID NO: 3039773 - DNA, 25 bp, Homo sapien
cacccttgccttggctggtgcctgg

SEQ ID NO: 3039774 - DNA, 25 bp, Homo sapien
cccacccttgccttggctggtgcct

SEQ ID NO: 3039775 - DNA, 25 bp, Homo sapien
tgcagcaggagtccgttacagccaa

SEQ ID NO: 3039776 - DNA, 25 bp, Homo sapien
taagtacccagccttgcatctgcag

SEQ ID NO: 3039777 - DNA, 25 bp, Homo sapien
gattgcgtaccagtctctgcggcca

SEQ ID NO: 3039778 - DNA, 25 bp, Homo sapien
atctgcagagcaaggcctgacccag

SEQ ID NO: 3039779 - DNA, 25 bp, Homo sapien
tagtagactcagattttacatggcc

SEQ ID NO: 3039780 - DNA, 25 bp, Homo sapien
taccgagtagggattagcagtaact

SEQ ID NO: 3039781 - DNA, 25 bp, Homo sapien
tgctaaacctggcaaccctaccgag

SEQ ID NO: 3039782 - DNA, 25 bp, Homo sapien
tgagctgcccttgcgttcagttgga

SEQ ID NO: 3039783 - DNA, 25 bp, Homo sapien
agcagggatatcatgggaccgcagc

SEQ ID NO: 3039784 - DNA, 25 bp, Homo sapien
cagggatatcatgggaccgcagccg

SEQ ID NO: 3039785 - DNA, 25 bp, Homo sapien
taacctggggcattggccccagcag

SEQ ID NO: 3039786 - DNA, 25 bp, Homo sapien
ccagcagggatatcatgggaccgca

SEQ ID NO: 3039787 - DNA, 25 bp, Homo sapien
ccctcagaccttggttctgcagttg

SEQ ID NO: 3039788 - DNA, 25 bp, Homo sapien
agaccctcagaccttggttctgcag

SEQ ID NO: 3039789 - DNA, 25 bp, Homo sapien
ccagaccctcagaccttggttctgc

SEQ ID NO: 3039790 - DNA, 25 bp, Homo sapien
agttggggggctatgagcgtgggct

SEQ ID NO: 3039791 - DNA, 25 bp, Homo sapien
acagtctccaaagacaagtaccatg

SEQ ID NO: 3039792 - DNA, 25 bp, Homo sapien
gacaagtaccatggatttattccct

SEQ ID NO: 3039793 - DNA, 25 bp, Homo sapien
agacaagtaccatggatttattccc

SEQ ID NO: 3039794 - DNA, 25 bp, Homo sapien
cagcttcccctgaacaagagttgtg

SEQ ID NO: 3039795 - DNA, 25 bp, Homo sapien
cactcctttgagaatggcattaatg

SEQ ID NO: 3039796 - DNA, 25 bp, Homo sapien
aatgcatttatgagggtagtggccc

SEQ ID NO: 3039797 - DNA, 25 bp, Homo sapien
gaaatttattggctcgtgggactga

SEQ ID NO: 3039798 - DNA, 25 bp, Homo sapien
ggagcgagctgaacccgaggaaggt

SEQ ID NO: 3039799 - DNA, 25 bp, Homo sapien
ggccagcgagggaaggtcacctccc

SEQ ID NO: 3039800 - DNA, 25 bp, Homo sapien
aggtcgtgcttcgtgcagggccagc

SEQ ID NO: 3039801 - DNA, 25 bp, Homo sapien
cccgaggaaggtcgtgcttcgtgca

SEQ ID NO: 3039802 - DNA, 25 bp, Homo sapien
cggccaaacattgggttttctgaag

SEQ ID NO: 3039803 - DNA, 25 bp, Homo sapien
gcctgagagacaatgagaaactgtc

SEQ ID NO: 3039804 - DNA, 25 bp, Homo sapien
aaaagtgcaaggtacagaagaggtc

SEQ ID NO: 3039805 - DNA, 25 bp, Homo sapien
ttccaaaagtgaaggaccagaggca

SEQ ID NO: 3039806 - DNA, 25 bp, Homo sapien
ccagagggtcgagtttgcagtaagc

SEQ ID NO: 3039807 - DNA, 25 bp, Homo sapien
tctgcgcgggctggtaaatatttgg

SEQ ID NO: 3039808 - DNA, 25 bp, Homo sapien
cagtttttgtccagcaggatcggaa

SEQ ID NO: 3039809 - DNA, 25 bp, Homo sapien
gaggagttaattccgctgctgggcc

SEQ ID NO: 3039810 - DNA, 25 bp, Homo sapien
tttgttggtggccatccctgccgag

SEQ ID NO: 3039811 - DNA, 25 bp, Homo sapien
gatgccacgatgtaggtggcagtac

SEQ ID NO: 3039812 - DNA, 25 bp, Homo sapien
aatgatgtttagatgccacgatgta

SEQ ID NO: 3039813 - DNA, 25 bp, Homo sapien
tgatgtttagatgccacgatgtagg

SEQ ID NO: 3039814 - DNA, 25 bp, Homo sapien
agatgccacgatgtaggtggcagta

SEQ ID NO: 3039815 - DNA, 25 bp, Homo sapien
aactatatgcgtgtcgtcaggccca

SEQ ID NO: 3039816 - DNA, 25 bp, Homo sapien
cttaactatatgcgtgtcgtcaggc

SEQ ID NO: 3039817 - DNA, 25 bp, Homo sapien
actatatgcgtgtcgtcaggcccaa

SEQ ID NO: 3039818 - DNA, 25 bp, Homo sapien
taactatatgcgtgtcgtcaggccc

SEQ ID NO: 3039819 - DNA, 25 bp, Homo sapien
tcaaggggagtgctaaccttctctc

SEQ ID NO: 3039820 - DNA, 25 bp, Homo sapien
tgtcaaggggagtgctaaccttctc

SEQ ID NO: 3039821 - DNA, 25 bp, Homo sapien
cttgtcaaggggagtgctaaccttc

SEQ ID NO: 3039822 - DNA, 25 bp, Homo sapien
aaggggagtgctaaccttctctcct

SEQ ID NO: 3039823 - DNA, 25 bp, Homo sapien
tgcctcggtaccataggagcaggac

SEQ ID NO: 3039824 - DNA, 25 bp, Homo sapien
tctggtaggttcgaggactaactcc

SEQ ID NO: 3039825 - DNA, 25 bp, Homo sapien
tatacatgttggttgagaccggtgc

SEQ ID NO: 3039826 - DNA, 25 bp, Homo sapien
cgttagtaagatgggcacggtccct

SEQ ID NO: 3039827 - DNA, 25 bp, Homo sapien
tggagagtgttcaaggacagcaaga

SEQ ID NO: 3039828 - DNA, 25 bp, Homo sapien
gcaagaaaaatgagggactttcagg

SEQ ID NO: 3039829 - DNA, 25 bp, Homo sapien
gactcagtcataatgcccctaaaaa

SEQ ID NO: 3039830 - DNA, 25 bp, Homo sapien
tccttattgttcttgcagtgtgcat

SEQ ID NO: 3039831 - DNA, 25 bp, Homo sapien
ggtgccaggctcctttaaataacga

SEQ ID NO: 3039832 - DNA, 25 bp, Homo sapien
taacgagttctcgtgtgaacagtgg

SEQ ID NO: 3039833 - DNA, 25 bp, Homo sapien
aacaggtttatttgggtcgcagctc

SEQ ID NO: 3039834 - DNA, 25 bp, Homo sapien
ggcgccaggtcttaaactccctagc

SEQ ID NO: 3039835 - DNA, 25 bp, Homo sapien
catgaatatgcttggcacagggact

SEQ ID NO: 3039836 - DNA, 25 bp, Homo sapien
gagatccacagcagggattccagtg

SEQ ID NO: 3039837 - DNA, 25 bp, Homo sapien
taagattctttgaaagtcccagggc

SEQ ID NO: 3039838 - DNA, 25 bp, Homo sapien
gtgtgttcccgtggtaagagcttct

SEQ ID NO: 3039839 - DNA, 25 bp, Homo sapien
gaaaggcagccaacggtcttttgga

SEQ ID NO: 3039840 - DNA, 25 bp, Homo sapien
ccactggtgtaatgagactgagaag

SEQ ID NO: 3039841 - DNA, 25 bp, Homo sapien
caggaatttggggttttgtgagcca

SEQ ID NO: 3039842 - DNA, 25 bp, Homo sapien
tttgtgagccactgacggggagaaa

SEQ ID NO: 3039843 - DNA, 25 bp, Homo sapien
gaagcttgtgccttattaatttcta

SEQ ID NO: 3039844 - DNA, 25 bp, Homo sapien
tttctacacggccaccgagaggagg

SEQ ID NO: 3039845 - DNA, 25 bp, Homo sapien
accgagaggaggcaccctgttttct

SEQ ID NO: 3039846 - DNA, 25 bp, Homo sapien
ttattaatttctacacggccaccga

SEQ ID NO: 3039847 - DNA, 25 bp, Homo sapien
agaccttgtgtctgagcagatgtgc

SEQ ID NO: 3039848 - DNA, 25 bp, Homo sapien
cttcccaataagccttgcagtcaga

SEQ ID NO: 3039849 - DNA, 25 bp, Homo sapien
ccaataagccttgcagtcagacctt

SEQ ID NO: 3039850 - DNA, 25 bp, Homo sapien
tcagaccttgtgtctgagcagatgt

SEQ ID NO: 3039851 - DNA, 25 bp, Homo sapien
tgggttaggaaggtccctattgcca

SEQ ID NO: 3039852 - DNA, 25 bp, Homo sapien
aaagtgacctccagatgggttagga

SEQ ID NO: 3039853 - DNA, 25 bp, Homo sapien
ggccagggagcagctaatcctccat

SEQ ID NO: 3039854 - DNA, 25 bp, Homo sapien
catgccagctatccaggctccctgg

SEQ ID NO: 3039855 - DNA, 25 bp, Homo sapien
aaaagcctggactctgggccagctc

SEQ ID NO: 3039856 - DNA, 25 bp, Homo sapien
ctggggccaaaagcctggactctgg

SEQ ID NO: 3039857 - DNA, 25 bp, Homo sapien
ctctgggccagctctgtgtcccgca

SEQ ID NO: 3039858 - DNA, 25 bp, Homo sapien
gccaaaagcctggactctgggccag

SEQ ID NO: 3039859 - DNA, 25 bp, Homo sapien
cgtctagatcttgcaaaaacccggg

SEQ ID NO: 3039860 - DNA, 25 bp, Homo sapien
cagggtcacataagggatgacagct

SEQ ID NO: 3039861 - DNA, 25 bp, Homo sapien
acagctgctggtcagcgacaacacg

SEQ ID NO: 3039862 - DNA, 25 bp, Homo sapien
tggtcagcgacaacacgtctagatc

SEQ ID NO: 3039863 - DNA, 25 bp, Homo sapien
aaggcacactgctcataagagccag

SEQ ID NO: 3039864 - DNA, 25 bp, Homo sapien
tcattccttagcgtggatgctccct

SEQ ID NO: 3039865 - DNA, 25 bp, Homo sapien
agaggtgacctctccggcagcaaat

SEQ ID NO: 3039866 - DNA, 25 bp, Homo sapien
ggccgtgagagggactcattcctta

SEQ ID NO: 3039867 - DNA, 25 bp, Homo sapien
agcacacggaccaggcacggatgtg

SEQ ID NO: 3039868 - DNA, 25 bp, Homo sapien
gaccaggcacggatgtggccatcag

SEQ ID NO: 3039869 - DNA, 25 bp, Homo sapien
agcatctccagcagcgtcgctgagt

SEQ ID NO: 3039870 - DNA, 25 bp, Homo sapien
ggaagcttccagaactagaactaga

SEQ ID NO: 3039871 - DNA, 25 bp, Homo sapien
ggctaggttgtgagccctggtcggt

SEQ ID NO: 3039872 - DNA, 25 bp, Homo sapien
tggggctaggttgtgagccctggtc

SEQ ID NO: 3039873 - DNA, 25 bp, Homo sapien
acgtgatggggctaggttgtgagcc

SEQ ID NO: 3039874 - DNA, 25 bp, Homo sapien
tgtccccagggactgacgtgatggg

SEQ ID NO: 3039875 - DNA, 25 bp, Homo sapien
tctgcaacctcaatagcaagccccg

SEQ ID NO: 3039876 - DNA, 25 bp, Homo sapien
ctctgcaacctcaatagcaagcccc

SEQ ID NO: 3039877 - DNA, 25 bp, Homo sapien
aatagcaagccccggccagacactg

SEQ ID NO: 3039878 - DNA, 25 bp, Homo sapien
cggccagacactgccaatgggctga

SEQ ID NO: 3039879 - DNA, 25 bp, Homo sapien
caggccataaggatggccctatctt

SEQ ID NO: 3039880 - DNA, 25 bp, Homo sapien
tgctctcatctcatcaccgacacat

SEQ ID NO: 3039881 - DNA, 25 bp, Homo sapien
agaatagcctctgtttgagcagctg

SEQ ID NO: 3039882 - DNA, 25 bp, Homo sapien
tcatcaccgacacattcccctgaca

SEQ ID NO: 3039883 - DNA, 25 bp, Homo sapien
cctggtgggtccgggcatggacgtg

SEQ ID NO: 3039884 - DNA, 25 bp, Homo sapien
ggtccgggcatggacgtgagggtca

SEQ ID NO: 3039885 - DNA, 25 bp, Homo sapien
cgggcatggacgtgagggtcaacca

SEQ ID NO: 3039886 - DNA, 25 bp, Homo sapien
ggtgggtccgggcatggacgtgagg

SEQ ID NO: 3039887 - DNA, 25 bp, Homo sapien
cccatcaggtgtcccgcccccaggt

SEQ ID NO: 3039888 - DNA, 25 bp, Homo sapien
tcccgcccccaggtgcgacggccag

SEQ ID NO: 3039889 - DNA, 25 bp, Homo sapien
cccgcccccaggtgcgacggccagg

SEQ ID NO: 3039890 - DNA, 25 bp, Homo sapien
tcaagagcccatcaggtgtcccgcc

SEQ ID NO: 3039891 - DNA, 25 bp, Homo sapien
ggcagccaagcggacctgaatggct

SEQ ID NO: 3039892 - DNA, 25 bp, Homo sapien
gtgtaacggctagggccacgtcagc

SEQ ID NO: 3039893 - DNA, 25 bp, Homo sapien
gggtagtacgcgtcccactgtagcg

SEQ ID NO: 3039894 - DNA, 25 bp, Homo sapien
tcggtcaggacggaaggcatgtcct

SEQ ID NO: 3039895 - DNA, 25 bp, Homo sapien
gcacggaaccccgtagcgtcaggga

SEQ ID NO: 3039896 - DNA, 25 bp, Homo sapien
gaaccccgtagcgtcagggagccgc

SEQ ID NO: 3039897 - DNA, 25 bp, Homo sapien
aggtgcacggaaccccgtagcgtca

SEQ ID NO: 3039898 - DNA, 25 bp, Homo sapien
gcaggtgcacggaaccccgtagcgt

SEQ ID NO: 3039899 - DNA, 25 bp, Homo sapien
catgtgcgtactctctgctatctgg

SEQ ID NO: 3039900 - DNA, 25 bp, Homo sapien
tactctctgctatctggtaccagca

SEQ ID NO: 3039901 - DNA, 25 bp, Homo sapien
cccagcatgtgcgtactctctgcta

SEQ ID NO: 3039902 - DNA, 25 bp, Homo sapien
tgtgcgtactctctgctatctggta

SEQ ID NO: 3039903 - DNA, 25 bp, Homo sapien
ttgaaaatctgaaccttccaggaag

SEQ ID NO: 3039904 - DNA, 25 bp, Homo sapien
gcaagcctgggataaactgagccag

SEQ ID NO: 3039905 - DNA, 25 bp, Homo sapien
gccaccaaggtataggcgggcaagc

SEQ ID NO: 3039906 - DNA, 25 bp, Homo sapien
tgctaatcggtgcagacactggcca

SEQ ID NO: 3039907 - DNA, 25 bp, Homo sapien
gaaggcttacttgagcccgttgtca

SEQ ID NO: 3039908 - DNA, 25 bp, Homo sapien
tacttgagcccgttgtcagtgaaac

SEQ ID NO: 3039909 - DNA, 25 bp, Homo sapien
gagcccgttgtcagtgaaaccctgt

SEQ ID NO: 3039910 - DNA, 25 bp, Homo sapien
tctccctgaaggcttacttgagccc

SEQ ID NO: 3039911 - DNA, 25 bp, Homo sapien
cagcagctgagagacatctcgggga

SEQ ID NO: 3039912 - DNA, 25 bp, Homo sapien
agctgagagacatctcggggaagcc

SEQ ID NO: 3039913 - DNA, 25 bp, Homo sapien
agcagctgagagacatctcggggaa

SEQ ID NO: 3039914 - DNA, 25 bp, Homo sapien
cagctgagagacatctcggggaagc

SEQ ID NO: 3039915 - DNA, 25 bp, Homo sapien
gtaataattccttcttctatctctg

SEQ ID NO: 3039916 - DNA, 25 bp, Homo sapien
tatctctggtgggtacccaagttgg

SEQ ID NO: 3039917 - DNA, 25 bp, Homo sapien
ggtcaccatggagcctctaccaaag

SEQ ID NO: 3039918 - DNA, 25 bp, Homo sapien
ggagcctctaccaaagaagctgctt

SEQ ID NO: 3039919 - DNA, 25 bp, Homo sapien
gttcatccttcatagtcctgctgtc

SEQ ID NO: 3039920 - DNA, 25 bp, Homo sapien
tgttcatccttcatagtcctgctgt

SEQ ID NO: 3039921 - DNA, 25 bp, Homo sapien
tccctgagccgaacttgagctggtc

SEQ ID NO: 3039922 - DNA, 25 bp, Homo sapien
ctcagtgcgagatgggaccagtgct

SEQ ID NO: 3039923 - DNA, 25 bp, Homo sapien
tgtgcttgaacccaactcagtgcga

SEQ ID NO: 3039924 - DNA, 25 bp, Homo sapien
tgaaccgcaacacagtaggaagacc

SEQ ID NO: 3039925 - DNA, 25 bp, Homo sapien
tgttcttctagtgggagctgtcccc

SEQ ID NO: 3039926 - DNA, 25 bp, Homo sapien
ttgcacctggtaggccctcaatgga

SEQ ID NO: 3039927 - DNA, 25 bp, Homo sapien
cctcaatggaggcttacggtttatc

SEQ ID NO: 3039928 - DNA, 25 bp, Homo sapien
tcaggacagaaagacacgtaaacag

SEQ ID NO: 3039929 - DNA, 25 bp, Homo sapien
aaaagctgggcacccttgttgccat

SEQ ID NO: 3039930 - DNA, 25 bp, Homo sapien
atgaacttgctaccaccggcagtca

SEQ ID NO: 3039931 - DNA, 25 bp, Homo sapien
accaccaaaagctgggcacccttgt

SEQ ID NO: 3039932 - DNA, 25 bp, Homo sapien
tgaacttgctaccaccggcagtcac

SEQ ID NO: 3039933 - DNA, 25 bp, Homo sapien
tttcaaggaggagcccattaagaac

SEQ ID NO: 3039934 - DNA, 25 bp, Homo sapien
aaagagatcttgacgtggaggcccg

SEQ ID NO: 3039935 - DNA, 25 bp, Homo sapien
cactgtcaataaggaacactggtct

SEQ ID NO: 3039936 - DNA, 25 bp, Homo sapien
ctggtctgtgtaccccagactaggg

SEQ ID NO: 3039937 - DNA, 25 bp, Homo sapien
gcacagcacacccaaggtttaagct

SEQ ID NO: 3039938 - DNA, 25 bp, Homo sapien
ccaaggtttaagctcttgagaaatg

SEQ ID NO: 3039939 - DNA, 25 bp, Homo sapien
tcttggaataatagggtatcagtgg

SEQ ID NO: 3039940 - DNA, 25 bp, Homo sapien
tcttcagcatcgtcaaactgtcctg

SEQ ID NO: 3039941 - DNA, 25 bp, Homo sapien
tgcaggcagttttaaaagacagatt

SEQ ID NO: 3039942 - DNA, 25 bp, Homo sapien
aggcagttttaaaagacagattaag

SEQ ID NO: 3039943 - DNA, 25 bp, Homo sapien
ctgcaggcagttttaaaagacagat

SEQ ID NO: 3039944 - DNA, 25 bp, Homo sapien
gcaggcagttttaaaagacagatta

SEQ ID NO: 3039945 - DNA, 25 bp, Homo sapien
tgtaacagataccagcctaagctca

SEQ ID NO: 3039946 - DNA, 25 bp, Homo sapien
cctaagctcatagatgtggacccct

SEQ ID NO: 3039947 - DNA, 25 bp, Homo sapien
ctggtctgacaggtgtgtctgagaa

SEQ ID NO: 3039948 - DNA, 25 bp, Homo sapien
cagaaattggagacctgtaacagat

SEQ ID NO: 3039949 - DNA, 25 bp, Homo sapien
tatggattcccttgatctgctttca

SEQ ID NO: 3039950 - DNA, 25 bp, Homo sapien
catatggattcccttgatctgcttt

SEQ ID NO: 3039951 - DNA, 25 bp, Homo sapien
tctgctttcaactccgagtcccagt

SEQ ID NO: 3039952 - DNA, 25 bp, Homo sapien
gatctgctttcaactccgagtccca

SEQ ID NO: 3039953 - DNA, 25 bp, Homo sapien
ctcaccccgggcaggactgtcatta

SEQ ID NO: 3039954 - DNA, 25 bp, Homo sapien
caccccgggcaggactgtcattagg

SEQ ID NO: 3039955 - DNA, 25 bp, Homo sapien
tcacaataacggaggaaagactggg

SEQ ID NO: 3039956 - DNA, 25 bp, Homo sapien
gaaggtacattttcaaaaggcctca

SEQ ID NO: 3039957 - DNA, 25 bp, Homo sapien
tcacaatgggcagcacctagtgcct

SEQ ID NO: 3039958 - DNA, 25 bp, Homo sapien
taatggatttccgagcacatagtgc

SEQ ID NO: 3039959 - DNA, 25 bp, Homo sapien
ggttactgttcaactgggcagagaa

SEQ ID NO: 3039960 - DNA, 25 bp, Homo sapien
caagctgtttctctcggtagaagga

SEQ ID NO: 3039961 - DNA, 25 bp, Homo sapien
tctcggtagaaggatggatttgaac

SEQ ID NO: 3039962 - DNA, 25 bp, Homo sapien
ggatttgaacataagaaaagttcag

SEQ ID NO: 3039963 - DNA, 25 bp, Homo sapien
tggagtggtcagctgtagcaaagcc

SEQ ID NO: 3039964 - DNA, 25 bp, Homo sapien
tgactggagtggtcagctgtagcaa

SEQ ID NO: 3039965 - DNA, 25 bp, Homo sapien
tagtcgatccatagccttctcagtc

SEQ ID NO: 3039966 - DNA, 25 bp, Homo sapien
tctctctctcctgactggagtggtc

SEQ ID NO: 3039967 - DNA, 25 bp, Homo sapien
tggccgttttcagctcgagcgcgag

SEQ ID NO: 3039968 - DNA, 25 bp, Homo sapien
ggtcaccagcgtcacctcccattta

SEQ ID NO: 3039969 - DNA, 25 bp, Homo sapien
cagcgggcggacagccgtctctgct

SEQ ID NO: 3039970 - DNA, 25 bp, Homo sapien
tcccatttaccaaatccgcagcggc

SEQ ID NO: 3039971 - DNA, 25 bp, Homo sapien
tgggccccggcggcctgaaggtcca

SEQ ID NO: 3039972 - DNA, 25 bp, Homo sapien
gcgcctgggccccggcggcctgaag

SEQ ID NO: 3039973 - DNA, 25 bp, Homo sapien
cggcgggccccgagacggctccgcg

SEQ ID NO: 3039974 - DNA, 25 bp, Homo sapien
ggggcgccccccgcgcgctaggcag

SEQ ID NO: 3039975 - DNA, 25 bp, Homo sapien
ccgcccgaggatccgccgcagaagc

SEQ ID NO: 3039976 - DNA, 25 bp, Homo sapien
ggcccgcggctggtcgccctggacg

SEQ ID NO: 3039977 - DNA, 25 bp, Homo sapien
ggctgcccgcccgaggatccgccgc

SEQ ID NO: 3039978 - DNA, 25 bp, Homo sapien
tgacgcgccggcccggctgcccgcc

SEQ ID NO: 3039979 - DNA, 25 bp, Homo sapien
ccaaggctaactgcctctaggtcag

SEQ ID NO: 3039980 - DNA, 25 bp, Homo sapien
tatagtaaccatatacctactgagc

SEQ ID NO: 3039981 - DNA, 25 bp, Homo sapien
taggtcagcaatgtccaatagaacg

SEQ ID NO: 3039982 - DNA, 25 bp, Homo sapien
tcctacacaggagtcagtatcccca

SEQ ID NO: 3039983 - DNA, 25 bp, Homo sapien
cataactgcccaaatagtgttggca

SEQ ID NO: 3039984 - DNA, 25 bp, Homo sapien
ataaaggtaacatcacaaatcagca

SEQ ID NO: 3039985 - DNA, 25 bp, Homo sapien
tcgccacaaaaggtgcctataatcc

SEQ ID NO: 3039986 - DNA, 25 bp, Homo sapien
tgggcatcaaaaatcgccacaaaag

SEQ ID NO: 3039987 - DNA, 25 bp, Homo sapien
tgacaaagcaagaacttgtccaatt

SEQ ID NO: 3039988 - DNA, 25 bp, Homo sapien
taggtgacaaagcaagaacttgtcc

SEQ ID NO: 3039989 - DNA, 25 bp, Homo sapien
ggtgacaaagcaagaacttgtccaa

SEQ ID NO: 3039990 - DNA, 25 bp, Homo sapien
acaaagcaagaacttgtccaattta

SEQ ID NO: 3039991 - DNA, 25 bp, Homo sapien
cttctcccagtgacaggatgctttt

SEQ ID NO: 3039992 - DNA, 25 bp, Homo sapien
cagtaattccactgtcggatgtcaa

SEQ ID NO: 3039993 - DNA, 25 bp, Homo sapien
ccagggatgtgaacaaagattgaca

SEQ ID NO: 3039994 - DNA, 25 bp, Homo sapien
aatgacagtccaggccaggcttagt

SEQ ID NO: 3039995 - DNA, 25 bp, Homo sapien
aaaacccagtcgtatgctatccatg

SEQ ID NO: 3039996 - DNA, 25 bp, Homo sapien
caaactgagcagtgtcatgcaccta

SEQ ID NO: 3039997 - DNA, 25 bp, Homo sapien
gatcgggcctcaacattaaatcagc

SEQ ID NO: 3039998 - DNA, 25 bp, Homo sapien
gagatactcatgcttgacctgggat

SEQ ID NO: 3039999 - DNA, 25 bp, Homo sapien
tatttcacaaagctgactgtattct

SEQ ID NO: 3040000 - DNA, 25 bp, Homo sapien
gactcaatacaaatttgcccacggg

SEQ ID NO: 3040001 - DNA, 25 bp, Homo sapien
gtgtctcaaaaccagacagccatct

SEQ ID NO: 3040002 - DNA, 25 bp, Homo sapien
cacggggcttgcttgcaatactatt

SEQ ID NO: 3040003 - DNA, 25 bp, Homo sapien
tcataaatggccagtctgatgcata

SEQ ID NO: 3040004 - DNA, 25 bp, Homo sapien
tgcatagcatgtttagctacaaatg

SEQ ID NO: 3040005 - DNA, 25 bp, Homo sapien
taaatggccagtctgatgcatagca

SEQ ID NO: 3040006 - DNA, 25 bp, Homo sapien
tgtttagctacaaatgcctctgctg

SEQ ID NO: 3040007 - DNA, 25 bp, Homo sapien
tccacagttctcaggtctaccaagg

SEQ ID NO: 3040008 - DNA, 25 bp, Homo sapien
tctttcatataatccatccaaagat

SEQ ID NO: 3040009 - DNA, 25 bp, Homo sapien
acattttcatcgctcgccagtagat

SEQ ID NO: 3040010 - DNA, 25 bp, Homo sapien
cagtagatctgtccacagttctcag

SEQ ID NO: 3040011 - DNA, 25 bp, Homo sapien
ttatgttcgccatattgcaggattc

SEQ ID NO: 3040012 - DNA, 25 bp, Homo sapien
tattctcttatgttcgccatattgc

SEQ ID NO: 3040013 - DNA, 25 bp, Homo sapien
cataatattctcttatgttcgccat

SEQ ID NO: 3040014 - DNA, 25 bp, Homo sapien
tcttatgttcgccatattgcaggat

SEQ ID NO: 3040015 - DNA, 25 bp, Homo sapien
cctgggcgacagagagagactccgt

SEQ ID NO: 3040016 - DNA, 25 bp, Homo sapien
agcctgggcgacagagagagactcc

SEQ ID NO: 3040017 - DNA, 25 bp, Homo sapien
gtgagccaagagtccagcctgggcg

SEQ ID NO: 3040018 - DNA, 25 bp, Homo sapien
tgcagtgagccaagagtccagcctg

SEQ ID NO: 3040019 - DNA, 25 bp, Homo sapien
cttttcaaactgaatcattttcctg

SEQ ID NO: 3040020 - DNA, 25 bp, Homo sapien
tgaaaaagtcaactgaaaatggtcg

SEQ ID NO: 3040021 - DNA, 25 bp, Homo sapien
agtcaactgaaaatggtcggctctc

SEQ ID NO: 3040022 - DNA, 25 bp, Homo sapien
aaaagtcaactgaaaatggtcggct

SEQ ID NO: 3040023 - DNA, 25 bp, Homo sapien
ctagtaacaactatgaacgtctgtg

SEQ ID NO: 3040024 - DNA, 25 bp, Homo sapien
cagattactccctcagatgctatct

SEQ ID NO: 3040025 - DNA, 25 bp, Homo sapien
ttcaaataatctgggtatgagcggc

SEQ ID NO: 3040026 - DNA, 25 bp, Homo sapien
taatctgggtatgagcggctgagca

SEQ ID NO: 3040027 - DNA, 25 bp, Homo sapien
cacctatgacagctaagagagcttt

SEQ ID NO: 3040028 - DNA, 25 bp, Homo sapien
ggcctttttgtagccaccacttcga

SEQ ID NO: 3040029 - DNA, 25 bp, Homo sapien
gtagccaccacttcgataagcccaa

SEQ ID NO: 3040030 - DNA, 25 bp, Homo sapien
tcttcagggttactgagtcggcacc

SEQ ID NO: 3040031 - DNA, 25 bp, Homo sapien
tggcttttggcaccttcactccact

SEQ ID NO: 3040032 - DNA, 25 bp, Homo sapien
aggaaatccacaatggcagacaaac

SEQ ID NO: 3040033 - DNA, 25 bp, Homo sapien
actctgcccaggaaatccacaatgg

SEQ ID NO: 3040034 - DNA, 25 bp, Homo sapien
ccaggaaatccacaatggcagacaa

SEQ ID NO: 3040035 - DNA, 25 bp, Homo sapien
gacagtttagtcctatgctctgaaa

SEQ ID NO: 3040036 - DNA, 25 bp, Homo sapien
ctctgaaaactagttaaaaaggcag

SEQ ID NO: 3040037 - DNA, 25 bp, Homo sapien
aaggcaggttcctcctaagataatc

SEQ ID NO: 3040038 - DNA, 25 bp, Homo sapien
gagaacagcatataacaaaacatcg

SEQ ID NO: 3040039 - DNA, 25 bp, Homo sapien
tcaccactgaatagcaaatgccact

SEQ ID NO: 3040040 - DNA, 25 bp, Homo sapien
agttggctctcaatagacaagtaca

SEQ ID NO: 3040041 - DNA, 25 bp, Homo sapien
aaaggttgggcttatattcagcaag

SEQ ID NO: 3040042 - DNA, 25 bp, Homo sapien
gaatctggccatacaccgtggctca

SEQ ID NO: 3040043 - DNA, 25 bp, Homo sapien
tctttgactcgatcagcacctgcag

SEQ ID NO: 3040044 - DNA, 25 bp, Homo sapien
tcaggtgcacaaaggcttcttcaaa

SEQ ID NO: 3040045 - DNA, 25 bp, Homo sapien
tccctcaggaagttataacacagca

SEQ ID NO: 3040046 - DNA, 25 bp, Homo sapien
tcccagagtctctaaacaattcagt

SEQ ID NO: 3040047 - DNA, 25 bp, Homo sapien
caactgcttgtattggcattctgac

SEQ ID NO: 3040048 - DNA, 25 bp, Homo sapien
gccttcctgaatacagtcatggttc

SEQ ID NO: 3040049 - DNA, 25 bp, Homo sapien
cttgtattggcattctgacagaagc

SEQ ID NO: 3040050 - DNA, 25 bp, Homo sapien
agttcatgtgccttcctgaatacag

SEQ ID NO: 3040051 - DNA, 25 bp, Homo sapien
tttagaatgtcacgtcacccacaag

SEQ ID NO: 3040052 - DNA, 25 bp, Homo sapien
cgaacagagcccagttacacgagag

SEQ ID NO: 3040053 - DNA, 25 bp, Homo sapien
taacctggcggcaaaccagactcag

SEQ ID NO: 3040054 - DNA, 25 bp, Homo sapien
agatgcaatgggcagctgcaccgaa

SEQ ID NO: 3040055 - DNA, 25 bp, Homo sapien
agtaaatctttccaagcaaaaggtg

SEQ ID NO: 3040056 - DNA, 25 bp, Homo sapien
ggtgatgtaacacttccacatggcc

SEQ ID NO: 3040057 - DNA, 25 bp, Homo sapien
gcaaaaggtgatgtaacacttccac

SEQ ID NO: 3040058 - DNA, 25 bp, Homo sapien
aggaacccactatttgacttcttag

SEQ ID NO: 3040059 - DNA, 25 bp, Homo sapien
agtcagaaagattgtgttgatcaga

SEQ ID NO: 3040060 - DNA, 25 bp, Homo sapien
cttgtttcgttgtaggctgctcttc

SEQ ID NO: 3040061 - DNA, 25 bp, Homo sapien
taattctcgccttgccacataatcc

SEQ ID NO: 3040062 - DNA, 25 bp, Homo sapien
acctccactgctttggcttgtttcg

SEQ ID NO: 3040063 - DNA, 25 bp, Homo sapien
tctgtctgtgactcaatctctaatt

SEQ ID NO: 3040064 - DNA, 25 bp, Homo sapien
taaacatatgagtataactctcatt

SEQ ID NO: 3040065 - DNA, 25 bp, Homo sapien
taattgttaaaccatataatcagac

SEQ ID NO: 3040066 - DNA, 25 bp, Homo sapien
gaataaaattaccagccaggtgtaa

SEQ ID NO: 3040067 - DNA, 25 bp, Homo sapien
cgccatgttgccgaagcttacaaat

SEQ ID NO: 3040068 - DNA, 25 bp, Homo sapien
tgtgcaatcgaaagcagtgacacgt

SEQ ID NO: 3040069 - DNA, 25 bp, Homo sapien
ttggcaaagtcaaatagctgtgcaa

SEQ ID NO: 3040070 - DNA, 25 bp, Homo sapien
caaagtcaaatagctgtgcaatcga

SEQ ID NO: 3040071 - DNA, 25 bp, Homo sapien
agcagtgacacgtgaaattctgcac

SEQ ID NO: 3040072 - DNA, 25 bp, Homo sapien
tgtagatgatccatgccaactcgcc

SEQ ID NO: 3040073 - DNA, 25 bp, Homo sapien
tttttgtagatgatccatgccaact

SEQ ID NO: 3040074 - DNA, 25 bp, Homo sapien
tttgtagatgatccatgccaactcg

SEQ ID NO: 3040075 - DNA, 25 bp, Homo sapien
gtagatgatccatgccaactcgccc

SEQ ID NO: 3040076 - DNA, 25 bp, Homo sapien
atccatactggctttttcaaattct

SEQ ID NO: 3040077 - DNA, 25 bp, Homo sapien
cctcagtttttcagcatgcatcagc

SEQ ID NO: 3040078 - DNA, 25 bp, Homo sapien
agtttttcagcatgcatcagctcca

SEQ ID NO: 3040079 - DNA, 25 bp, Homo sapien
cacatccatactggctttttcaaat

SEQ ID NO: 3040080 - DNA, 25 bp, Homo sapien
gatgacagctcatttcggccatgaa

SEQ ID NO: 3040081 - DNA, 25 bp, Homo sapien
gattagaggtgcattccatcacact

SEQ ID NO: 3040082 - DNA, 25 bp, Homo sapien
gcaccatccataagggagtaagtcc

SEQ ID NO: 3040083 - DNA, 25 bp, Homo sapien
cttgctacgttgctgcctggcctga

SEQ ID NO: 3040084 - DNA, 25 bp, Homo sapien
actctggatgaaagcgcagtgcgcg

SEQ ID NO: 3040085 - DNA, 25 bp, Homo sapien
gccttgcgctttctgaagacaatcg

SEQ ID NO: 3040086 - DNA, 25 bp, Homo sapien
ctgaagacaatcgatcttccatttc

SEQ ID NO: 3040087 - DNA, 25 bp, Homo sapien
cgcagtgcgcgaagaaatagttgcc

SEQ ID NO: 3040088 - DNA, 25 bp, Homo sapien
ccttgctaagtcgagttttagtagc

SEQ ID NO: 3040089 - DNA, 25 bp, Homo sapien
ggcagagaataccttgctaagtcga

SEQ ID NO: 3040090 - DNA, 25 bp, Homo sapien
tgaatcgccaacatggcagagaata

SEQ ID NO: 3040091 - DNA, 25 bp, Homo sapien
tgttggaatgaatcgccaacatggc

SEQ ID NO: 3040092 - DNA, 25 bp, Homo sapien
ataggagagccaaagttgaacatcg

SEQ ID NO: 3040093 - DNA, 25 bp, Homo sapien
ttccattttgctgaggcacgctgga

SEQ ID NO: 3040094 - DNA, 25 bp, Homo sapien
tttccattttgctgaggcacgctgg

SEQ ID NO: 3040095 - DNA, 25 bp, Homo sapien
ttctctggatcagctccaaaagatt

SEQ ID NO: 3040096 - DNA, 25 bp, Homo sapien
tctctggatcagctccaaaagatta

SEQ ID NO: 3040097 - DNA, 25 bp, Homo sapien
ccaagtggacagacaatagataaac

SEQ ID NO: 3040098 - DNA, 25 bp, Homo sapien
cctgatacacactatgtctctgaca

SEQ ID NO: 3040099 - DNA, 25 bp, Homo sapien
gacaatctctgatctacaaacccag

SEQ ID NO: 3040100 - DNA, 25 bp, Homo sapien
cactggaaaattggtctgacataat

SEQ ID NO: 3040101 - DNA, 25 bp, Homo sapien
tatctaatgaacgtttctggaattc

SEQ ID NO: 3040102 - DNA, 25 bp, Homo sapien
gccaggactacagtcttagtggagt

SEQ ID NO: 3040103 - DNA, 25 bp, Homo sapien
atatctatctaatgaacgtttctgg

SEQ ID NO: 3040104 - DNA, 25 bp, Homo sapien
gagtaatgctactcccaatgctact

SEQ ID NO: 3040105 - DNA, 25 bp, Homo sapien
gattttgtactctagatcggaagcc

SEQ ID NO: 3040106 - DNA, 25 bp, Homo sapien
ttgtactctagatcggaagccttct

SEQ ID NO: 3040107 - DNA, 25 bp, Homo sapien
ctggattttgtactctagatcggaa

SEQ ID NO: 3040108 - DNA, 25 bp, Homo sapien
cttctctggattttgtactctagat

SEQ ID NO: 3040109 - DNA, 25 bp, Homo sapien
cctggctggtattaataaagacttc

SEQ ID NO: 3040110 - DNA, 25 bp, Homo sapien
cagcgcctggctggtattaataaag

SEQ ID NO: 3040111 - DNA, 25 bp, Homo sapien
ttttactccaagttcaggtcactta

SEQ ID NO: 3040112 - DNA, 25 bp, Homo sapien
aagacttcttttactccaagttcag

SEQ ID NO: 3040113 - DNA, 25 bp, Homo sapien
tagacggacggattaccttgcaacg

SEQ ID NO: 3040114 - DNA, 25 bp, Homo sapien
catcaccgaaaacgagaaatgggct

SEQ ID NO: 3040115 - DNA, 25 bp, Homo sapien
taagacccggctccatgaagggctg

SEQ ID NO: 3040116 - DNA, 25 bp, Homo sapien
gaaatgggcttccaccacgttagga

SEQ ID NO: 3040117 - DNA, 25 bp, Homo sapien
tccagctgttccaattccgggagcc

SEQ ID NO: 3040118 - DNA, 25 bp, Homo sapien
attccgggagccgatcttctatgcg

SEQ ID NO: 3040119 - DNA, 25 bp, Homo sapien
gccgatcttctatgcgttcctgaat

SEQ ID NO: 3040120 - DNA, 25 bp, Homo sapien
tgcgctccagctgttccaattccgg

SEQ ID NO: 3040121 - DNA, 25 bp, Homo sapien
gagcaggaagctcccggtttcaggt

SEQ ID NO: 3040122 - DNA, 25 bp, Homo sapien
gaacacgagcaggaagctcccggtt

SEQ ID NO: 3040123 - DNA, 25 bp, Homo sapien
aaccccgcgggtagcttctcaacag

SEQ ID NO: 3040124 - DNA, 25 bp, Homo sapien
ttctcaacagcgaacacgagcagga

SEQ ID NO: 3040125 - DNA, 25 bp, Homo sapien
cagcaagttatgacagactgtaatc

SEQ ID NO: 3040126 - DNA, 25 bp, Homo sapien
gacactaagaaaaggtacttgctaa

SEQ ID NO: 3040127 - DNA, 25 bp, Homo sapien
tctttaggtacaaggaagtcagcaa

SEQ ID NO: 3040128 - DNA, 25 bp, Homo sapien
ctcgactcccctggttcaaaggatt

SEQ ID NO: 3040129 - DNA, 25 bp, Homo sapien
ctcactgtattgtcaccatggtctt

SEQ ID NO: 3040130 - DNA, 25 bp, Homo sapien
agcacgcccagcgatcctcccttat

SEQ ID NO: 3040131 - DNA, 25 bp, Homo sapien
gcccagcgatcctcccttattttga

SEQ ID NO: 3040132 - DNA, 25 bp, Homo sapien
cagcgatcctcccttattttgaaat

SEQ ID NO: 3040133 - DNA, 25 bp, Homo sapien
ttcaaagacttgttcacagtctttc

SEQ ID NO: 3040134 - DNA, 25 bp, Homo sapien
catgagaagctcacccctatgagtc

SEQ ID NO: 3040135 - DNA, 25 bp, Homo sapien
agctcacccctatgagtccacatag

SEQ ID NO: 3040136 - DNA, 25 bp, Homo sapien
gagaagctcacccctatgagtccac

SEQ ID NO: 3040137 - DNA, 25 bp, Homo sapien
ctgagcgctcgcctcctgccggccg

SEQ ID NO: 3040138 - DNA, 25 bp, Homo sapien
gccagggtccgaggtgaccgtcgta

SEQ ID NO: 3040139 - DNA, 25 bp, Homo sapien
tcgccccagaccctttgtcagagag

SEQ ID NO: 3040140 - DNA, 25 bp, Homo sapien
ggtcggggagcgagagccagggtcc

SEQ ID NO: 3040141 - DNA, 25 bp, Homo sapien
gtcgcagggcgagggcccagatcgg

SEQ ID NO: 3040142 - DNA, 25 bp, Homo sapien
cccagatcggggctggaagccacag

SEQ ID NO: 3040143 - DNA, 25 bp, Homo sapien
agtcggagtcgcagggcgagggccc

SEQ ID NO: 3040144 - DNA, 25 bp, Homo sapien
ctgggacaggagtcggagtcgcagg

SEQ ID NO: 3040145 - DNA, 25 bp, Homo sapien
ctccgggcccgcagcggatggaagc

SEQ ID NO: 3040146 - DNA, 25 bp, Homo sapien
agcggccgggactccgggcccgcag

SEQ ID NO: 3040147 - DNA, 25 bp, Homo sapien
ccgggcccgcagcggatggaagcgg

SEQ ID NO: 3040148 - DNA, 25 bp, Homo sapien
gggcccgcagcggatggaagcgggc

SEQ ID NO: 3040149 - DNA, 25 bp, Homo sapien
ctgccgcggagaggacgaccgccac

SEQ ID NO: 3040150 - DNA, 25 bp, Homo sapien
acagggagggaatccggcgcaggtc

SEQ ID NO: 3040151 - DNA, 25 bp, Homo sapien
gaccgccaccggtgcaaccaggtcc

SEQ ID NO: 3040152 - DNA, 25 bp, Homo sapien
cgcagccggcctctggctttcgtgg

SEQ ID NO: 3040153 - DNA, 25 bp, Homo sapien
gcagttgaactgagccgcagtcaca

SEQ ID NO: 3040154 - DNA, 25 bp, Homo sapien
gaaaatggagcacgtccaggctgac

SEQ ID NO: 3040155 - DNA, 25 bp, Homo sapien
caagattgacgcaagaggctcggga

SEQ ID NO: 3040156 - DNA, 25 bp, Homo sapien
gctgaccacgagcttttcctccagg

SEQ ID NO: 3040157 - DNA, 25 bp, Homo sapien
cattttcttgcgtcaatttctgttt

SEQ ID NO: 3040158 - DNA, 25 bp, Homo sapien
atttctgtttctaagttctgtctgg

SEQ ID NO: 3040159 - DNA, 25 bp, Homo sapien
gtttctaagttctgtctggaaggtg

SEQ ID NO: 3040160 - DNA, 25 bp, Homo sapien
taagttctgtctggaaggtgaaact

SEQ ID NO: 3040161 - DNA, 25 bp, Homo sapien
ctgacgtcaggatccgcctgcctcg

SEQ ID NO: 3040162 - DNA, 25 bp, Homo sapien
gatctcctgacgtcaggatccgcct

SEQ ID NO: 3040163 - DNA, 25 bp, Homo sapien
taggcgcgtgccaccatgctcggct

SEQ ID NO: 3040164 - DNA, 25 bp, Homo sapien
cttagtagcttggactataggcgcg

SEQ ID NO: 3040165 - DNA, 25 bp, Homo sapien
ttgtccgcatgggtagagataattt

SEQ ID NO: 3040166 - DNA, 25 bp, Homo sapien
tctaagttccattttcccgtcatgt

SEQ ID NO: 3040167 - DNA, 25 bp, Homo sapien
gcaggatatgtttctgttgtccgca

SEQ ID NO: 3040168 - DNA, 25 bp, Homo sapien
catgtttattaatttgtcccattgc

SEQ ID NO: 3040169 - DNA, 25 bp, Homo sapien
ccagggagaccctataagatagaac

SEQ ID NO: 3040170 - DNA, 25 bp, Homo sapien
tgagaatattcgcagtgcacgcaca

SEQ ID NO: 3040171 - DNA, 25 bp, Homo sapien
ctgttatatctgttaatgcccaggg

SEQ ID NO: 3040172 - DNA, 25 bp, Homo sapien
tatatctgttaatgcccagggagac

SEQ ID NO: 3040173 - DNA, 25 bp, Homo sapien
cacaaaagtatctctcctccattta

SEQ ID NO: 3040174 - DNA, 25 bp, Homo sapien
taatatcttaaatcgtacacaaaag

SEQ ID NO: 3040175 - DNA, 25 bp, Homo sapien
tacacaaaagtatctctcctccatt

SEQ ID NO: 3040176 - DNA, 25 bp, Homo sapien
tccataacattagttagtagaagtt

SEQ ID NO: 3040177 - DNA, 25 bp, Homo sapien
gcacatgacatagatgaactaagtt

SEQ ID NO: 3040178 - DNA, 25 bp, Homo sapien
agatgcagggagcacatgacataga

SEQ ID NO: 3040179 - DNA, 25 bp, Homo sapien
gatgaactaagtttcttatatctta

SEQ ID NO: 3040180 - DNA, 25 bp, Homo sapien
gtgtcttacttcctgagaagatgca

SEQ ID NO: 3040181 - DNA, 25 bp, Homo sapien
taatagtactgcagtgtaatgggcc

SEQ ID NO: 3040182 - DNA, 25 bp, Homo sapien
taatgacctcagtttgtagacaaca

SEQ ID NO: 3040183 - DNA, 25 bp, Homo sapien
tcagagttggagcttaccctcacac

SEQ ID NO: 3040184 - DNA, 25 bp, Homo sapien
ctaggtgctagggacactaataaaa

SEQ ID NO: 3040185 - DNA, 25 bp, Homo sapien
gtcccagtgctgatattcttccaag

SEQ ID NO: 3040186 - DNA, 25 bp, Homo sapien
ggtcccagtgctgatattcttccaa

SEQ ID NO: 3040187 - DNA, 25 bp, Homo sapien
gggtcccagtgctgatattcttcca

SEQ ID NO: 3040188 - DNA, 25 bp, Homo sapien
ctctgtgcatttggtacaggatggc

SEQ ID NO: 3040189 - DNA, 25 bp, Homo sapien
tgtgcatttggtacaggatggcaag

SEQ ID NO: 3040190 - DNA, 25 bp, Homo sapien
catttggtacaggatggcaagaaac

SEQ ID NO: 3040191 - DNA, 25 bp, Homo sapien
tggcaagaaacacagacttattaaa

SEQ ID NO: 3040192 - DNA, 25 bp, Homo sapien
gtagagacagggttggccgagcgca

SEQ ID NO: 3040193 - DNA, 25 bp, Homo sapien
gagacagggttggccgagcgcagtg

SEQ ID NO: 3040194 - DNA, 25 bp, Homo sapien
cctctgccttgtgggttcagatgat

SEQ ID NO: 3040195 - DNA, 25 bp, Homo sapien
acctctgccttgtgggttcagatga

SEQ ID NO: 3040196 - DNA, 25 bp, Homo sapien
caggcgtgagtgacctcgcgtcact

SEQ ID NO: 3040197 - DNA, 25 bp, Homo sapien
ggtgtactctgaactgccgcaaact

SEQ ID NO: 3040198 - DNA, 25 bp, Homo sapien
gagatgacctgcattgcccttggtg

SEQ ID NO: 3040199 - DNA, 25 bp, Homo sapien
tactcaagcatcttaaactctgcca

SEQ ID NO: 3040200 - DNA, 25 bp, Homo sapien
tcccctgcaaacgaagaaataactg

SEQ ID NO: 3040201 - DNA, 25 bp, Homo sapien
aatgggacagcaaatggatttagtg

SEQ ID NO: 3040202 - DNA, 25 bp, Homo sapien
aaagctgttaccaagctccgtgaaa

SEQ ID NO: 3040203 - DNA, 25 bp, Homo sapien
gcataatgtcaatagataaagctgt

SEQ ID NO: 3040204 - DNA, 25 bp, Homo sapien
tcaaatatgttgaattgatctagaa

SEQ ID NO: 3040205 - DNA, 25 bp, Homo sapien
tgtcatcaaatatgttgaattgatc

SEQ ID NO: 3040206 - DNA, 25 bp, Homo sapien
tatttgtatcagggttctacttcac

SEQ ID NO: 3040207 - DNA, 25 bp, Homo sapien
ttgtatcagggttctacttcacttc

SEQ ID NO: 3040208 - DNA, 25 bp, Homo sapien
taattttagtgcattgctcacccgg

SEQ ID NO: 3040209 - DNA, 25 bp, Homo sapien
ggcacattaacaagcaccaataggt

SEQ ID NO: 3040210 - DNA, 25 bp, Homo sapien
tagatctcgagcgtttatctcgggc

SEQ ID NO: 3040211 - DNA, 25 bp, Homo sapien
tttattccaactccgagcactgtgg

SEQ ID NO: 3040212 - DNA, 25 bp, Homo sapien
ccatgtgtcggatttcttcatgcat

SEQ ID NO: 3040213 - DNA, 25 bp, Homo sapien
gaaaggatttgttactgccctgagc

SEQ ID NO: 3040214 - DNA, 25 bp, Homo sapien
actgccctgagccttatcggtcagg

SEQ ID NO: 3040215 - DNA, 25 bp, Homo sapien
tcggtcaggtcttcagttatgtcca

SEQ ID NO: 3040216 - DNA, 25 bp, Homo sapien
tctgcaagctggacctttgtgctgt

SEQ ID NO: 3040217 - DNA, 25 bp, Homo sapien
taattctgcaagctggacctttgtg

SEQ ID NO: 3040218 - DNA, 25 bp, Homo sapien
tggacctttgtgctgtagtaccaaa

SEQ ID NO: 3040219 - DNA, 25 bp, Homo sapien
caagctggacctttgtgctgtagta

SEQ ID NO: 3040220 - DNA, 25 bp, Homo sapien
gctcccctcgccgatacgcggtagt

SEQ ID NO: 3040221 - DNA, 25 bp, Homo sapien
tcccctcgccgatacgcggtagtag

SEQ ID NO: 3040222 - DNA, 25 bp, Homo sapien
cgggggctcccctcgccgatacgcg

SEQ ID NO: 3040223 - DNA, 25 bp, Homo sapien
gggctcccctcgccgatacgcggta

SEQ ID NO: 3040224 - DNA, 25 bp, Homo sapien
gggcggcgatgccgaggagacccag

SEQ ID NO: 3040225 - DNA, 25 bp, Homo sapien
cagagtggtgtatgatgactacgag

SEQ ID NO: 3040226 - DNA, 25 bp, Homo sapien
gctgtcaacagagtggtgtatgatg

SEQ ID NO: 3040227 - DNA, 25 bp, Homo sapien
cagcccggagggctgtcaacagagt

SEQ ID NO: 3040228 - DNA, 25 bp, Homo sapien
tacaacgtcaaagtattgcaaccat

SEQ ID NO: 3040229 - DNA, 25 bp, Homo sapien
caatgcatgtatgatacctttggcc

SEQ ID NO: 3040230 - DNA, 25 bp, Homo sapien
tcatatctgggctatgtttttgctg

SEQ ID NO: 3040231 - DNA, 25 bp, Homo sapien
gacatatatccacatacattgaaag

SEQ ID NO: 3040232 - DNA, 25 bp, Homo sapien
gcacctctgccctcggcgggtactt

SEQ ID NO: 3040233 - DNA, 25 bp, Homo sapien
tgcacctctgccctcggcgggtact

SEQ ID NO: 3040234 - DNA, 25 bp, Homo sapien
cacctctgccctcggcgggtacttt

SEQ ID NO: 3040235 - DNA, 25 bp, Homo sapien
cctctgccctcggcgggtacttttg

SEQ ID NO: 3040236 - DNA, 25 bp, Homo sapien
tatggacacactgtatcccggcagc

SEQ ID NO: 3040237 - DNA, 25 bp, Homo sapien
caattatccaaacctcagcgtcaga

SEQ ID NO: 3040238 - DNA, 25 bp, Homo sapien
tagctgaacgttggagccttcctga

SEQ ID NO: 3040239 - DNA, 25 bp, Homo sapien
ccttcctgagattgttgggattcca

SEQ ID NO: 3040240 - DNA, 25 bp, Homo sapien
gttttcctgccactttagagcaggt

SEQ ID NO: 3040241 - DNA, 25 bp, Homo sapien
gaattgtccgctgaatgttagctaa

SEQ ID NO: 3040242 - DNA, 25 bp, Homo sapien
taaaatgcgttaagtaccagctgca

SEQ ID NO: 3040243 - DNA, 25 bp, Homo sapien
tgacctaaagtacatgggaccaggc

SEQ ID NO: 3040244 - DNA, 25 bp, Homo sapien
gcttctgggagactagagaatgcct

SEQ ID NO: 3040245 - DNA, 25 bp, Homo sapien
ccctgaagtagctgcaaccctctta

SEQ ID NO: 3040246 - DNA, 25 bp, Homo sapien
tgtgaaccctcaggtaggagccacc

SEQ ID NO: 3040247 - DNA, 25 bp, Homo sapien
ggtatgatcatagcaatcccacaaa

SEQ ID NO: 3040248 - DNA, 25 bp, Homo sapien
tagacaaagattattgggaagcaga

SEQ ID NO: 3040249 - DNA, 25 bp, Homo sapien
tgaagaaatccaccgacacatggac

SEQ ID NO: 3040250 - DNA, 25 bp, Homo sapien
gcagaactctgcaaaattctggaag

SEQ ID NO: 3040251 - DNA, 25 bp, Homo sapien
gacataactgaagacctgaccgata

SEQ ID NO: 3040252 - DNA, 25 bp, Homo sapien
tcaaaataagtctgtaagaattctt

SEQ ID NO: 3040253 - DNA, 25 bp, Homo sapien
caaaataagtctgtaagaattctta

SEQ ID NO: 3040254 - DNA, 25 bp, Homo sapien
gcctatacttggtggaatgataccc

SEQ ID NO: 3040255 - DNA, 25 bp, Homo sapien
tgactggtgcctatacttggtggaa

SEQ ID NO: 3040256 - DNA, 25 bp, Homo sapien
ggtgcctatacttggtggaatgata

SEQ ID NO: 3040257 - DNA, 25 bp, Homo sapien
tttgctgactggtgcctatacttgg

SEQ ID NO: 3040258 - DNA, 25 bp, Homo sapien
cctgtgctggcaatggttgtagcag

SEQ ID NO: 3040259 - DNA, 25 bp, Homo sapien
gaacgtctgacctgtgctggcaatg

SEQ ID NO: 3040260 - DNA, 25 bp, Homo sapien
gattgcctgtaatttggaacgtctg

SEQ ID NO: 3040261 - DNA, 25 bp, Homo sapien
ctgccatagtgactggattgcctgt

SEQ ID NO: 3040262 - DNA, 25 bp, Homo sapien
tttgttggaatgctactgtagctgg

SEQ ID NO: 3040263 - DNA, 25 bp, Homo sapien
acacacatagcaaaggtttgatgaa

SEQ ID NO: 3040264 - DNA, 25 bp, Homo sapien
ctgaatctgactggccttgcttaac

SEQ ID NO: 3040265 - DNA, 25 bp, Homo sapien
tgctactgtagctggagatccaact

SEQ ID NO: 3040266 - DNA, 25 bp, Homo sapien
taactgagccacttatgggggccac

SEQ ID NO: 3040267 - DNA, 25 bp, Homo sapien
ttgtaactgagccacttatgggggc

SEQ ID NO: 3040268 - DNA, 25 bp, Homo sapien
tgtaactgagccacttatgggggcc

SEQ ID NO: 3040269 - DNA, 25 bp, Homo sapien
ctgagccacttatgggggccaccat

SEQ ID NO: 3040270 - DNA, 25 bp, Homo sapien
ctgttggttgaggaagtggtggaag

SEQ ID NO: 3040271 - DNA, 25 bp, Homo sapien
tggttgaggaagtggtggaagttgc

SEQ ID NO: 3040272 - DNA, 25 bp, Homo sapien
tgttggttgaggaagtggtggaagt

SEQ ID NO: 3040273 - DNA, 25 bp, Homo sapien
ttggttgaggaagtggtggaagttg

SEQ ID NO: 3040274 - DNA, 25 bp, Homo sapien
gaatttaatttcttgataaaggcca

SEQ ID NO: 3040275 - DNA, 25 bp, Homo sapien
ctgaatttaatttcttgataaaggc

SEQ ID NO: 3040276 - DNA, 25 bp, Homo sapien
tgaatttaatttcttgataaaggcc

SEQ ID NO: 3040277 - DNA, 25 bp, Homo sapien
aatttaatttcttgataaaggccat

SEQ ID NO: 3040278 - DNA, 25 bp, Homo sapien
tctctttaatactggaaatgggagt

SEQ ID NO: 3040279 - DNA, 25 bp, Homo sapien
ggcttcgagaccaaggtccctgggc

SEQ ID NO: 3040280 - DNA, 25 bp, Homo sapien
tactggaaatgggagtccttaggaa

SEQ ID NO: 3040281 - DNA, 25 bp, Homo sapien
ttcgagaccaaggtccctgggcagc

SEQ ID NO: 3040282 - DNA, 25 bp, Homo sapien
aacttgtcatcagtcatctctagaa

SEQ ID NO: 3040283 - DNA, 25 bp, Homo sapien
acttgtcatcagtcatctctagaaa

SEQ ID NO: 3040284 - DNA, 25 bp, Homo sapien
ttcagctgcaaaaatatgcactgtg

SEQ ID NO: 3040285 - DNA, 25 bp, Homo sapien
tgcgcgtagacatctcggatgcact

SEQ ID NO: 3040286 - DNA, 25 bp, Homo sapien
tattggctgcttgagatcctcttcg

SEQ ID NO: 3040287 - DNA, 25 bp, Homo sapien
tgagggacgcatcctgattgaagtt

SEQ ID NO: 3040288 - DNA, 25 bp, Homo sapien
cagtttgagtgcactgcagctcaga

SEQ ID NO: 3040289 - DNA, 25 bp, Homo sapien
tttgagtgcactgcagctcagaaca

SEQ ID NO: 3040290 - DNA, 25 bp, Homo sapien
ttgagtgcactgcagctcagaacac

SEQ ID NO: 3040291 - DNA, 25 bp, Homo sapien
ctgcagtttgagtgcactgcagctc

SEQ ID NO: 3040292 - DNA, 25 bp, Homo sapien
gaatgtccactggtggcttctctgt

SEQ ID NO: 3040293 - DNA, 25 bp, Homo sapien
tgcaggaatgtccactggtggcttc

SEQ ID NO: 3040294 - DNA, 25 bp, Homo sapien
cctcatgtgcaggaatgtccactgg

SEQ ID NO: 3040295 - DNA, 25 bp, Homo sapien
ctcatgtgcaggaatgtccactggt

SEQ ID NO: 3040296 - DNA, 25 bp, Homo sapien
cacatggcccgtgtggtgcccagaa

SEQ ID NO: 3040297 - DNA, 25 bp, Homo sapien
gtggtgcccagaaaggccaggaggg

SEQ ID NO: 3040298 - DNA, 25 bp, Homo sapien
tttcaagatgtgcaaccattgggga

SEQ ID NO: 3040299 - DNA, 25 bp, Homo sapien
gatgtgcaaccattggggattgtgt

SEQ ID NO: 3040300 - DNA, 25 bp, Homo sapien
aattctgtttcaataacagtcttct

SEQ ID NO: 3040301 - DNA, 25 bp, Homo sapien
acaattctatctcgccgcagtttga

SEQ ID NO: 3040302 - DNA, 25 bp, Homo sapien
accacaattctatctcgccgcagtt

SEQ ID NO: 3040303 - DNA, 25 bp, Homo sapien
ccgcagtttgactgccttgacttct

SEQ ID NO: 3040304 - DNA, 25 bp, Homo sapien
agcccgttgcggtgatggttacatg

SEQ ID NO: 3040305 - DNA, 25 bp, Homo sapien
cctggtcgaagccagcgtacagcag

SEQ ID NO: 3040306 - DNA, 25 bp, Homo sapien
cagcgtacagcagcccgttgcggtg

SEQ ID NO: 3040307 - DNA, 25 bp, Homo sapien
tgtggtcctggtcgaagccagcgta

SEQ ID NO: 3040308 - DNA, 25 bp, Homo sapien
catgccgctcactggggccggcgat

SEQ ID NO: 3040309 - DNA, 25 bp, Homo sapien
gccggcgatctggtcccctcgggcc

SEQ ID NO: 3040310 - DNA, 25 bp, Homo sapien
atctggtcccctcgggccagcgctg

SEQ ID NO: 3040311 - DNA, 25 bp, Homo sapien
actggggccggcgatctggtcccct

SEQ ID NO: 3040312 - DNA, 25 bp, Homo sapien
gccatggaacattatttatagtatg

SEQ ID NO: 3040313 - DNA, 25 bp, Homo sapien
tatagtatgaaaacactaagaaacc

SEQ ID NO: 3040314 - DNA, 25 bp, Homo sapien
tggccatggaacattatttatagta

SEQ ID NO: 3040315 - DNA, 25 bp, Homo sapien
gaaaccatcagtagctttataataa

SEQ ID NO: 3040316 - DNA, 25 bp, Homo sapien
cttttctatatactgcagaaatttt

SEQ ID NO: 3040317 - DNA, 25 bp, Homo sapien
gaaattactcatgaaactctaaaga

SEQ ID NO: 3040318 - DNA, 25 bp, Homo sapien
aaccacagcttggtgtatccacaga

SEQ ID NO: 3040319 - DNA, 25 bp, Homo sapien
tcttatttcagatgtcctccaaata

SEQ ID NO: 3040320 - DNA, 25 bp, Homo sapien
tatccacagagctgttttcaaataa

SEQ ID NO: 3040321 - DNA, 25 bp, Homo sapien
aatgtatgtaaaagtgggaccagta

SEQ ID NO: 3040322 - DNA, 25 bp, Homo sapien
ctgatgggaagtcaagtgctgctgt

SEQ ID NO: 3040323 - DNA, 25 bp, Homo sapien
gatgggaagtcaagtgctgctgttt

SEQ ID NO: 3040324 - DNA, 25 bp, Homo sapien
tgggaagtcaagtgctgctgttttg

SEQ ID NO: 3040325 - DNA, 25 bp, Homo sapien
tgatgggaagtcaagtgctgctgtt

SEQ ID NO: 3040326 - DNA, 25 bp, Homo sapien
cctgttgctcaactgcttgtgcctt

SEQ ID NO: 3040327 - DNA, 25 bp, Homo sapien
tggcctgttgctcaactgcttgtgc

SEQ ID NO: 3040328 - DNA, 25 bp, Homo sapien
cttggcctgttgctcaactgcttgt

SEQ ID NO: 3040329 - DNA, 25 bp, Homo sapien
gttgctcaactgcttgtgccttttc

SEQ ID NO: 3040330 - DNA, 25 bp, Homo sapien
caaggcccggagtccatgatggcag

SEQ ID NO: 3040331 - DNA, 25 bp, Homo sapien
acagaccacggtggccctccccaag

SEQ ID NO: 3040332 - DNA, 25 bp, Homo sapien
agttacatgctctgacccgccacag

SEQ ID NO: 3040333 - DNA, 25 bp, Homo sapien
ccacacgctgtgtgctctagttaca

SEQ ID NO: 3040334 - DNA, 25 bp, Homo sapien
aaggaaacaggtcccgaggcatgga

SEQ ID NO: 3040335 - DNA, 25 bp, Homo sapien
cagcacaactatcactgcagccagg

SEQ ID NO: 3040336 - DNA, 25 bp, Homo sapien
gaggacgtggcctgggattttccat

SEQ ID NO: 3040337 - DNA, 25 bp, Homo sapien
tgagcaagcctttagtgtggaagga

SEQ ID NO: 3040338 - DNA, 25 bp, Homo sapien
aaaccagttgatgcctataagaggg

SEQ ID NO: 3040339 - DNA, 25 bp, Homo sapien
cctataagaggggtttcctcagctc

SEQ ID NO: 3040340 - DNA, 25 bp, Homo sapien
tcctggaaaccagttgatgcctata

SEQ ID NO: 3040341 - DNA, 25 bp, Homo sapien
tggaaaccagttgatgcctataaga

SEQ ID NO: 3040342 - DNA, 25 bp, Homo sapien
gcatgacgcccgtgccggagcccac

SEQ ID NO: 3040343 - DNA, 25 bp, Homo sapien
ccagacgcgcggctccccttccttg

SEQ ID NO: 3040344 - DNA, 25 bp, Homo sapien
ccccagacgcgcggctccccttcct

SEQ ID NO: 3040345 - DNA, 25 bp, Homo sapien
gtcctccgcatgacgcccgtgccgg

SEQ ID NO: 3040346 - DNA, 25 bp, Homo sapien
gagcctttgccaaggagagattcag

SEQ ID NO: 3040347 - DNA, 25 bp, Homo sapien
tgtttcccggaagcctgttcacgct

SEQ ID NO: 3040348 - DNA, 25 bp, Homo sapien
tcttcaataaggcagcgggacggtt

SEQ ID NO: 3040349 - DNA, 25 bp, Homo sapien
gaaaaactggaagatggacttcttc

SEQ ID NO: 3040350 - DNA, 25 bp, Homo sapien
ctgaaagtcccagggccgtgagagt

SEQ ID NO: 3040351 - DNA, 25 bp, Homo sapien
gccgtgagagtcagccgggccgccg

SEQ ID NO: 3040352 - DNA, 25 bp, Homo sapien
gggccgccgaggcggtgccctccag

SEQ ID NO: 3040353 - DNA, 25 bp, Homo sapien
agtcccagggccgtgagagtcagcc

SEQ ID NO: 3040354 - DNA, 25 bp, Homo sapien
ctggtatcaaagcattggacttttc

SEQ ID NO: 3040355 - DNA, 25 bp, Homo sapien
tcaaagcattggacttttccactcc

SEQ ID NO: 3040356 - DNA, 25 bp, Homo sapien
aaagcattggacttttccactccac

SEQ ID NO: 3040357 - DNA, 25 bp, Homo sapien
tggacttttccactccaccagagtg

SEQ ID NO: 3040358 - DNA, 25 bp, Homo sapien
ctggcaggaaaaggaggaaggcatc

SEQ ID NO: 3040359 - DNA, 25 bp, Homo sapien
gattgagagctcttagggatctaga

SEQ ID NO: 3040360 - DNA, 25 bp, Homo sapien
ctggagaagccccaatgagtcaaca

SEQ ID NO: 3040361 - DNA, 25 bp, Homo sapien
gggatctagattcttcacaaagctg

SEQ ID NO: 3040362 - DNA, 25 bp, Homo sapien
cattgtcattaactggcaacgctga

SEQ ID NO: 3040363 - DNA, 25 bp, Homo sapien
taagcctgagtaaagaagagtgtcc

SEQ ID NO: 3040364 - DNA, 25 bp, Homo sapien
tgacggccctatccaataacgtggg

SEQ ID NO: 3040365 - DNA, 25 bp, Homo sapien
gagccgccgacatgaagaaagacgt

SEQ ID NO: 3040366 - DNA, 25 bp, Homo sapien
agagtgtccgaaaaccctgccataa

SEQ ID NO: 3040367 - DNA, 25 bp, Homo sapien
ctcatccctccgaagcttctctcct

SEQ ID NO: 3040368 - DNA, 25 bp, Homo sapien
ttcctcttcgaaccctgtccttctg

SEQ ID NO: 3040369 - DNA, 25 bp, Homo sapien
tctccaatttaccatgacactgggt

SEQ ID NO: 3040370 - DNA, 25 bp, Homo sapien
actgttggcgggtgaatgaagtaca

SEQ ID NO: 3040371 - DNA, 25 bp, Homo sapien
tgatgccttctccatattgctgtag

SEQ ID NO: 3040372 - DNA, 25 bp, Homo sapien
gaaaacagccaggttatcatctcac

SEQ ID NO: 3040373 - DNA, 25 bp, Homo sapien
tacagagaggatcattacagagaca

SEQ ID NO: 3040374 - DNA, 25 bp, Homo sapien
ctcccgagacatgggccacactgat

SEQ ID NO: 3040375 - DNA, 25 bp, Homo sapien
aattatgtagaaacgcactgcttgg

SEQ ID NO: 3040376 - DNA, 25 bp, Homo sapien
tcctgcctagctatatattacgttg

SEQ ID NO: 3040377 - DNA, 25 bp, Homo sapien
tgtcagaacttcctcaactcagact

SEQ ID NO: 3040378 - DNA, 25 bp, Homo sapien
cctgcaacaggtgtacattttgcat

SEQ ID NO: 3040379 - DNA, 25 bp, Homo sapien
ttctcactgtgatgacaatgtttag

SEQ ID NO: 3040380 - DNA, 25 bp, Homo sapien
tactgggtaccaggcattctgttaa

SEQ ID NO: 3040381 - DNA, 25 bp, Homo sapien
acaagtattggtctcaaatcagcac

SEQ ID NO: 3040382 - DNA, 25 bp, Homo sapien
aatagaaattactaccagatatgat

SEQ ID NO: 3040383 - DNA, 25 bp, Homo sapien
taaaaagtttcattgaatgtctaca

SEQ ID NO: 3040384 - DNA, 25 bp, Homo sapien
tcattgaatgtctacaaagaattaa

SEQ ID NO: 3040385 - DNA, 25 bp, Homo sapien
cctacacctgtgtcaaggagaactt

SEQ ID NO: 3040386 - DNA, 25 bp, Homo sapien
gggccttcagcacttctaagccaga

SEQ ID NO: 3040387 - DNA, 25 bp, Homo sapien
ccagacgtgttggttggctcctaca

SEQ ID NO: 3040388 - DNA, 25 bp, Homo sapien
gaaagctctaacaaactgcgaatga

SEQ ID NO: 3040389 - DNA, 25 bp, Homo sapien
ttacaaacaagcatctatcccagtg

SEQ ID NO: 3040390 - DNA, 25 bp, Homo sapien
tacaaacaagcatctatcccagtgt

SEQ ID NO: 3040391 - DNA, 25 bp, Homo sapien
tttacaaacaagcatctatcccagt

SEQ ID NO: 3040392 - DNA, 25 bp, Homo sapien
cacttcttcaggacaatcttgttcc

SEQ ID NO: 3040393 - DNA, 25 bp, Homo sapien
cttcaggacaatcttgttccaacgg

SEQ ID NO: 3040394 - DNA, 25 bp, Homo sapien
acttcttcaggacaatcttgttcca

SEQ ID NO: 3040395 - DNA, 25 bp, Homo sapien
ttcttcaggacaatcttgttccaac

SEQ ID NO: 3040396 - DNA, 25 bp, Homo sapien
aaggtccccgatggtatcatccgtg

SEQ ID NO: 3040397 - DNA, 25 bp, Homo sapien
gcaatcagcttcttaaggtccccga

SEQ ID NO: 3040398 - DNA, 25 bp, Homo sapien
cttaaggtccccgatggtatcatcc

SEQ ID NO: 3040399 - DNA, 25 bp, Homo sapien
cagcttcttaaggtccccgatggta

SEQ ID NO: 3040400 - DNA, 25 bp, Homo sapien
cccagacggtcgttgcaaacaacct

SEQ ID NO: 3040401 - DNA, 25 bp, Homo sapien
gacggtcgttgcaaacaacctcgat

SEQ ID NO: 3040402 - DNA, 25 bp, Homo sapien
ggtcgttgcaaacaacctcgatcat

SEQ ID NO: 3040403 - DNA, 25 bp, Homo sapien
ttccccagacggtcgttgcaaacaa

SEQ ID NO: 3040404 - DNA, 25 bp, Homo sapien
gagaaataccacgtcaagatgctaa

SEQ ID NO: 3040405 - DNA, 25 bp, Homo sapien
cccctaaggttgcaagtaattcatg

SEQ ID NO: 3040406 - DNA, 25 bp, Homo sapien
cagtatgagaatgacccatgcaggc

SEQ ID NO: 3040407 - DNA, 25 bp, Homo sapien
tcaggtttctctagtgcatctcagt

SEQ ID NO: 3040408 - DNA, 25 bp, Homo sapien
tgcacttcatgggcagggaagccat

SEQ ID NO: 3040409 - DNA, 25 bp, Homo sapien
gatgcacttcatgggcagggaagcc

SEQ ID NO: 3040410 - DNA, 25 bp, Homo sapien
atgcacttcatgggcagggaagcca

SEQ ID NO: 3040411 - DNA, 25 bp, Homo sapien
tgatgcacttcatgggcagggaagc

SEQ ID NO: 3040412 - DNA, 25 bp, Homo sapien
tgccttgccgcgacactgattgaaa

SEQ ID NO: 3040413 - DNA, 25 bp, Homo sapien
ctggccatgcaagccggcctggcga

SEQ ID NO: 3040414 - DNA, 25 bp, Homo sapien
gctgggagcggctttgctcctagaa

SEQ ID NO: 3040415 - DNA, 25 bp, Homo sapien
ccggccggagcagggaggcaaagag

SEQ ID NO: 3040416 - DNA, 25 bp, Homo sapien
tagaggcgcttggacatatttggac

SEQ ID NO: 3040417 - DNA, 25 bp, Homo sapien
cagcaggtgagactcattgcgccgg

SEQ ID NO: 3040418 - DNA, 25 bp, Homo sapien
gacgcctttatttagtaattgttga

SEQ ID NO: 3040419 - DNA, 25 bp, Homo sapien
agtgtttatgcagaggtgagttctc

SEQ ID NO: 3040420 - DNA, 25 bp, Homo sapien
tttgtagatgaggtagttgtggctc

SEQ ID NO: 3040421 - DNA, 25 bp, Homo sapien
gtttggatctgcctaatgatcccag

SEQ ID NO: 3040422 - DNA, 25 bp, Homo sapien
tcacagtaggatgctcccagcttcg

SEQ ID NO: 3040423 - DNA, 25 bp, Homo sapien
ctgccctgcgagaggaaggtagccc

SEQ ID NO: 3040424 - DNA, 25 bp, Homo sapien
tttgtggccatgtacaccgtcttcg

SEQ ID NO: 3040425 - DNA, 25 bp, Homo sapien
gaggctccaggaccagtcactgtgg

SEQ ID NO: 3040426 - DNA, 25 bp, Homo sapien
tacaccctgctggacttaaagctgc

SEQ ID NO: 3040427 - DNA, 25 bp, Homo sapien
ggagcgcctgcgaggtttcttctca

SEQ ID NO: 3040428 - DNA, 25 bp, Homo sapien
agccattggttattcaggaagtgac

SEQ ID NO: 3040429 - DNA, 25 bp, Homo sapien
gagagggtgaacagcagcggtggtg

SEQ ID NO: 3040430 - DNA, 25 bp, Homo sapien
cattggttattcaggaagtgacctg

SEQ ID NO: 3040431 - DNA, 25 bp, Homo sapien
ggagagggtgaacagcagcggtggt

SEQ ID NO: 3040432 - DNA, 25 bp, Homo sapien
tgtgtacagcacacaagtaatatac

SEQ ID NO: 3040433 - DNA, 25 bp, Homo sapien
tgtgtgtacagcacacaagtaatat

SEQ ID NO: 3040434 - DNA, 25 bp, Homo sapien
ctgtgtgtacagcacacaagtaata

SEQ ID NO: 3040435 - DNA, 25 bp, Homo sapien
gtgtgtacagcacacaagtaatata

SEQ ID NO: 3040436 - DNA, 25 bp, Homo sapien
taaaacgttgatgtgctaatgtagc

SEQ ID NO: 3040437 - DNA, 25 bp, Homo sapien
gagaatatgtaattacaccttgcct

SEQ ID NO: 3040438 - DNA, 25 bp, Homo sapien
gagctgtgtaatgtagtgagcctac

SEQ ID NO: 3040439 - DNA, 25 bp, Homo sapien
aataagactaccagaggccgggtgc

SEQ ID NO: 3040440 - DNA, 25 bp, Homo sapien
tgagggcactttcaattgattcaga

SEQ ID NO: 3040441 - DNA, 25 bp, Homo sapien
ttgtaaatggctagctgagggcact

SEQ ID NO: 3040442 - DNA, 25 bp, Homo sapien
gaatttattaaagagctatcccgag

SEQ ID NO: 3040443 - DNA, 25 bp, Homo sapien
tgtagctacataggcttccatggga

SEQ ID NO: 3040444 - DNA, 25 bp, Homo sapien
tacattatctatctaggactcagtg

SEQ ID NO: 3040445 - DNA, 25 bp, Homo sapien
aagttgctaaatactgcagcaaact

SEQ ID NO: 3040446 - DNA, 25 bp, Homo sapien
cctgaagcgtggaatttatggggcc

SEQ ID NO: 3040447 - DNA, 25 bp, Homo sapien
agaagctacagtccactgaaaagga

SEQ ID NO: 3040448 - DNA, 25 bp, Homo sapien
ggattgagtttcaaatcatcttaaa

SEQ ID NO: 3040449 - DNA, 25 bp, Homo sapien
caacttgatcatacaattatctcaa

SEQ ID NO: 3040450 - DNA, 25 bp, Homo sapien
cttaaatagcaatcctatgaacaat

SEQ ID NO: 3040451 - DNA, 25 bp, Homo sapien
gacttaaatatacaacttgatcata

SEQ ID NO: 3040452 - DNA, 25 bp, Homo sapien
tgaattcttcaaggacagctatcac

SEQ ID NO: 3040453 - DNA, 25 bp, Homo sapien
tcatgaattcttcaaggacagctat

SEQ ID NO: 3040454 - DNA, 25 bp, Homo sapien
agcttctttcatgaattcttcaagg

SEQ ID NO: 3040455 - DNA, 25 bp, Homo sapien
tcaaaaactttggtcaagagcttct

SEQ ID NO: 3040456 - DNA, 25 bp, Homo sapien
ggcttcaggcatttcttcatgttcc

SEQ ID NO: 3040457 - DNA, 25 bp, Homo sapien
cttcaggcatttcttcatgttccac

SEQ ID NO: 3040458 - DNA, 25 bp, Homo sapien
tttggcttcaggcatttcttcatgt

SEQ ID NO: 3040459 - DNA, 25 bp, Homo sapien
atttttggcttcaggcatttcttca

SEQ ID NO: 3040460 - DNA, 25 bp, Homo sapien
tgcctgtcggataaatctcttcaaa

SEQ ID NO: 3040461 - DNA, 25 bp, Homo sapien
gattcatttctgcctgtcggataaa

SEQ ID NO: 3040462 - DNA, 25 bp, Homo sapien
tctgcctgtcggataaatctcttca

SEQ ID NO: 3040463 - DNA, 25 bp, Homo sapien
catttctgcctgtcggataaatctc

SEQ ID NO: 3040464 - DNA, 25 bp, Homo sapien
tcaaaaaataactcctatccagctg

SEQ ID NO: 3040465 - DNA, 25 bp, Homo sapien
ttaaagttctccagtacttgtcgga

SEQ ID NO: 3040466 - DNA, 25 bp, Homo sapien
aaaaaagcttgcatccaatcctcac

SEQ ID NO: 3040467 - DNA, 25 bp, Homo sapien
tctccagtacttgtcggaaaagaaa

SEQ ID NO: 3040468 - DNA, 25 bp, Homo sapien
taaaaaagcttgcatccaatcctca

SEQ ID NO: 3040469 - DNA, 25 bp, Homo sapien
gagctgctgcaatcgatgaccacag

SEQ ID NO: 3040470 - DNA, 25 bp, Homo sapien
gctgcaatcgatgaccacagactta

SEQ ID NO: 3040471 - DNA, 25 bp, Homo sapien
gctgctgcaatcgatgaccacagac

SEQ ID NO: 3040472 - DNA, 25 bp, Homo sapien
tcatggccatgcacaaagaagtcat

SEQ ID NO: 3040473 - DNA, 25 bp, Homo sapien
ttcatgaataagtccttgaagactg

SEQ ID NO: 3040474 - DNA, 25 bp, Homo sapien
gaataagtccttgaagactggccac

SEQ ID NO: 3040475 - DNA, 25 bp, Homo sapien
gtccttgaagactggccacactcag

SEQ ID NO: 3040476 - DNA, 25 bp, Homo sapien
ggtgccttcatgaataagtccttga

SEQ ID NO: 3040477 - DNA, 25 bp, Homo sapien
atggaaggagcagtttacaaacaca

SEQ ID NO: 3040478 - DNA, 25 bp, Homo sapien
cttcaacaggagtgtaactcaaagc

SEQ ID NO: 3040479 - DNA, 25 bp, Homo sapien
ctgattctttaacttcaacaggagt

SEQ ID NO: 3040480 - DNA, 25 bp, Homo sapien
tttcatctgattctttaacttcaac

SEQ ID NO: 3040481 - DNA, 25 bp, Homo sapien
taacttcaacaggagtgtaactcaa

SEQ ID NO: 3040482 - DNA, 25 bp, Homo sapien
cctcaaaccagctgctcagatagga

SEQ ID NO: 3040483 - DNA, 25 bp, Homo sapien
ccagctgctcagataggattttatg

SEQ ID NO: 3040484 - DNA, 25 bp, Homo sapien
tcaaaccagctgctcagataggatt

SEQ ID NO: 3040485 - DNA, 25 bp, Homo sapien
gcatacaacatcctcaaaccagctg

SEQ ID NO: 3040486 - DNA, 25 bp, Homo sapien
ttgaatgtacttgtccaattcaagc

SEQ ID NO: 3040487 - DNA, 25 bp, Homo sapien
tcagcccttgaatgtacttgtccaa

SEQ ID NO: 3040488 - DNA, 25 bp, Homo sapien
tttcagcccttgaatgtacttgtcc

SEQ ID NO: 3040489 - DNA, 25 bp, Homo sapien
gcccttgaatgtacttgtccaattc

SEQ ID NO: 3040490 - DNA, 25 bp, Homo sapien
taaatacacgaggagtagaaaagct

SEQ ID NO: 3040491 - DNA, 25 bp, Homo sapien
ccacatgaaggtatgaaattcaact

SEQ ID NO: 3040492 - DNA, 25 bp, Homo sapien
caaatgcaaacaagccaaggcaaaa

SEQ ID NO: 3040493 - DNA, 25 bp, Homo sapien
ttggtagtaatattcttccacctgc

SEQ ID NO: 3040494 - DNA, 25 bp, Homo sapien
gctcaagtcctttttcagaccctcc

SEQ ID NO: 3040495 - DNA, 25 bp, Homo sapien
agctcaagtcctttttcagaccctc

SEQ ID NO: 3040496 - DNA, 25 bp, Homo sapien
ctcaagtcctttttcagaccctcct

SEQ ID NO: 3040497 - DNA, 25 bp, Homo sapien
tcaagtcctttttcagaccctccta

SEQ ID NO: 3040498 - DNA, 25 bp, Homo sapien
ggcagtaataacaaccaactcggta

SEQ ID NO: 3040499 - DNA, 25 bp, Homo sapien
tactgtttcaggaagcagtttttca

SEQ ID NO: 3040500 - DNA, 25 bp, Homo sapien
gttcagagtctatcgttactgtttc

SEQ ID NO: 3040501 - DNA, 25 bp, Homo sapien
ctatcgttactgtttcaggaagcag

SEQ ID NO: 3040502 - DNA, 25 bp, Homo sapien
ccttatccttgggaagtggcctcaa

SEQ ID NO: 3040503 - DNA, 25 bp, Homo sapien
ggtcatcttgatctggcaacaccat

SEQ ID NO: 3040504 - DNA, 25 bp, Homo sapien
tctcgttggtgtacttgcagcagca

SEQ ID NO: 3040505 - DNA, 25 bp, Homo sapien
aaaatgaatgtataccctggagggc

SEQ ID NO: 3040506 - DNA, 25 bp, Homo sapien
tctggctccacttcggatggtagat

SEQ ID NO: 3040507 - DNA, 25 bp, Homo sapien
gcccttcaaagactgcacctcttga

SEQ ID NO: 3040508 - DNA, 25 bp, Homo sapien
tttagctccacagatgcaacattac

SEQ ID NO: 3040509 - DNA, 25 bp, Homo sapien
cttgaaagacgcttagcaatgaaac

SEQ ID NO: 3040510 - DNA, 25 bp, Homo sapien
agtatgtggatttgtttgccccagc

SEQ ID NO: 3040511 - DNA, 25 bp, Homo sapien
gccttgaatgaaccagccaatgagg

SEQ ID NO: 3040512 - DNA, 25 bp, Homo sapien
gagtatccactgacatgtacaggcc

SEQ ID NO: 3040513 - DNA, 25 bp, Homo sapien
tgacggtttgactcagggaaagctc

SEQ ID NO: 3040514 - DNA, 25 bp, Homo sapien
actgtcccctcgttgctgtgccaat

SEQ ID NO: 3040515 - DNA, 25 bp, Homo sapien
ttccgtcctcactgtcccctcgttg

SEQ ID NO: 3040516 - DNA, 25 bp, Homo sapien
cctcactgtcccctcgttgctgtgc

SEQ ID NO: 3040517 - DNA, 25 bp, Homo sapien
tttgtgccacttgggcttccgtcct

SEQ ID NO: 3040518 - DNA, 25 bp, Homo sapien
gctgtaaagacagtagtggctgctg

SEQ ID NO: 3040519 - DNA, 25 bp, Homo sapien
tggacggcggctcgagtctccgctc

SEQ ID NO: 3040520 - DNA, 25 bp, Homo sapien
ctgcttccgcgatagctgtaaagac

SEQ ID NO: 3040521 - DNA, 25 bp, Homo sapien
gagcctccctcttcgctgctctcta

SEQ ID NO: 3040522 - DNA, 25 bp, Homo sapien
tgagcggccctgtgtctccgccaaa

SEQ ID NO: 3040523 - DNA, 25 bp, Homo sapien
tgctcccgtgcagccgtcggtatca

SEQ ID NO: 3040524 - DNA, 25 bp, Homo sapien
ccgtcggtatcagggctcgtccggc

SEQ ID NO: 3040525 - DNA, 25 bp, Homo sapien
ggcggcctctgagcggccctgtgtc

SEQ ID NO: 3040526 - DNA, 25 bp, Homo sapien
gctggtttccccgggttcgcaggca

SEQ ID NO: 3040527 - DNA, 25 bp, Homo sapien
ccccgggttcgcaggcaaggactgg

SEQ ID NO: 3040528 - DNA, 25 bp, Homo sapien
tccccgggttcgcaggcaaggactg

SEQ ID NO: 3040529 - DNA, 25 bp, Homo sapien
cccgggttcgcaggcaaggactggc

SEQ ID NO: 3040530 - DNA, 25 bp, Homo sapien
cagtaacattgtcagtttccttatc

SEQ ID NO: 3040531 - DNA, 25 bp, Homo sapien
ctctatctcccattcagtaacattg

SEQ ID NO: 3040532 - DNA, 25 bp, Homo sapien
attcagtaacattgtcagtttcctt

SEQ ID NO: 3040533 - DNA, 25 bp, Homo sapien
tctcccattcagtaacattgtcagt

SEQ ID NO: 3040534 - DNA, 25 bp, Homo sapien
ggcatttcagatcggcagtagtctc

SEQ ID NO: 3040535 - DNA, 25 bp, Homo sapien
gcggacaacacatgacagaggcatt

SEQ ID NO: 3040536 - DNA, 25 bp, Homo sapien
agaggattctgattgcggacaacac

SEQ ID NO: 3040537 - DNA, 25 bp, Homo sapien
gatcggcagtagtctcttgagatat

SEQ ID NO: 3040538 - DNA, 25 bp, Homo sapien
tcgcatgccccttagcgtacctggg

SEQ ID NO: 3040539 - DNA, 25 bp, Homo sapien
tttatttgtgatcggccctaactgc

SEQ ID NO: 3040540 - DNA, 25 bp, Homo sapien
tcctaccgcagtgcttgacgggagg

SEQ ID NO: 3040541 - DNA, 25 bp, Homo sapien
gcacagccagcgaaagcgaaaaact

SEQ ID NO: 3040542 - DNA, 25 bp, Homo sapien
ctgttttgtacgtaaaggcggcttg

SEQ ID NO: 3040543 - DNA, 25 bp, Homo sapien
ttcaggaagcgttctcacagggcgg

SEQ ID NO: 3040544 - DNA, 25 bp, Homo sapien
gaactagcttccgtgtctcacccag

SEQ ID NO: 3040545 - DNA, 25 bp, Homo sapien
cccagaggcgccttaatcttcagga

SEQ ID NO: 3040546 - DNA, 25 bp, Homo sapien
gatagttgatgtaaatggacacagg

SEQ ID NO: 3040547 - DNA, 25 bp, Homo sapien
gccaggcagttccatatacattatg

SEQ ID NO: 3040548 - DNA, 25 bp, Homo sapien
caaactatgaataattgccaggcag

SEQ ID NO: 3040549 - DNA, 25 bp, Homo sapien
ccctagcctgcgttttatgttggtg

SEQ ID NO: 3040550 - DNA, 25 bp, Homo sapien
tgatgagctacaatgccgcacttgt

SEQ ID NO: 3040551 - DNA, 25 bp, Homo sapien
tctagtacggaacagtgatgagcta

SEQ ID NO: 3040552 - DNA, 25 bp, Homo sapien
taatggcttttgacctaggcacact

SEQ ID NO: 3040553 - DNA, 25 bp, Homo sapien
tcttaagacggtagcaaatcatttg

SEQ ID NO: 3040554 - DNA, 25 bp, Homo sapien
catgcctttatgcttggtgagcctc

SEQ ID NO: 3040555 - DNA, 25 bp, Homo sapien
gagcctctgcattcgagtatttagc

SEQ ID NO: 3040556 - DNA, 25 bp, Homo sapien
aattcccggaaagttgttagccatg

SEQ ID NO: 3040557 - DNA, 25 bp, Homo sapien
catgcttcaagtttacaaataggtg

SEQ ID NO: 3040558 - DNA, 25 bp, Homo sapien
ttagagcctagtgccagacccattc

SEQ ID NO: 3040559 - DNA, 25 bp, Homo sapien
agagcctagtgccagacccattcat

SEQ ID NO: 3040560 - DNA, 25 bp, Homo sapien
gcctagtgccagacccattcatttc

SEQ ID NO: 3040561 - DNA, 25 bp, Homo sapien
tgtttagagcctagtgccagaccca

SEQ ID NO: 3040562 - DNA, 25 bp, Homo sapien
gctgttaatgggttattatatatta

SEQ ID NO: 3040563 - DNA, 25 bp, Homo sapien
gctgagaatctaaatgtgtctctgt

SEQ ID NO: 3040564 - DNA, 25 bp, Homo sapien
tgtctctgttgggatggttaacaga

SEQ ID NO: 3040565 - DNA, 25 bp, Homo sapien
ctgttgggatggttaacagatgaat

SEQ ID NO: 3040566 - DNA, 25 bp, Homo sapien
tttaagataaaaatggtgtgatagg

SEQ ID NO: 3040567 - DNA, 25 bp, Homo sapien
ataaaaatggtgtgataggccgggc

SEQ ID NO: 3040568 - DNA, 25 bp, Homo sapien
agataaaaatggtgtgataggccgg

SEQ ID NO: 3040569 - DNA, 25 bp, Homo sapien
taagataaaaatggtgtgataggcc

SEQ ID NO: 3040570 - DNA, 25 bp, Homo sapien
cagcaagtttggtgaaggcccctaa

SEQ ID NO: 3040571 - DNA, 25 bp, Homo sapien
cagcttcagtaaagcttgtgttcct

SEQ ID NO: 3040572 - DNA, 25 bp, Homo sapien
tattaatattcacgtttgactgtgg

SEQ ID NO: 3040573 - DNA, 25 bp, Homo sapien
tcttcttcctatagccctgccatag

SEQ ID NO: 3040574 - DNA, 25 bp, Homo sapien
taagctcttaggcaccctattatgg

SEQ ID NO: 3040575 - DNA, 25 bp, Homo sapien
cagttagtctcatgtattctcaggg

SEQ ID NO: 3040576 - DNA, 25 bp, Homo sapien
taggacttcagtttgcgcttcccaa

SEQ ID NO: 3040577 - DNA, 25 bp, Homo sapien
ttcttggcaaaataagcacttgatg

SEQ ID NO: 3040578 - DNA, 25 bp, Homo sapien
tacctgagtatgtgatgtggcaatg

SEQ ID NO: 3040579 - DNA, 25 bp, Homo sapien
tctgagaccacgtataccagtgaaa

SEQ ID NO: 3040580 - DNA, 25 bp, Homo sapien
tagcctcgctatatgtaacacatgg

SEQ ID NO: 3040581 - DNA, 25 bp, Homo sapien
gcagactagttgcttacagggtttc

SEQ ID NO: 3040582 - DNA, 25 bp, Homo sapien
ccctttttaaaactcgatgatggct

SEQ ID NO: 3040583 - DNA, 25 bp, Homo sapien
tattaacccaatacttgatttgcag

SEQ ID NO: 3040584 - DNA, 25 bp, Homo sapien
caataggcagctatcaaaaatggaa

SEQ ID NO: 3040585 - DNA, 25 bp, Homo sapien
tgcagggtagaaataagtggctgtt

SEQ ID NO: 3040586 - DNA, 25 bp, Homo sapien
tgtctgtcaggtcaatcttcggtct

SEQ ID NO: 3040587 - DNA, 25 bp, Homo sapien
taaggaggtcctgaacaaagcatga

SEQ ID NO: 3040588 - DNA, 25 bp, Homo sapien
taagatttgggagtctattccctgg

SEQ ID NO: 3040589 - DNA, 25 bp, Homo sapien
tgttcaattactacaccaggaaaga

SEQ ID NO: 3040590 - DNA, 25 bp, Homo sapien
gccatgtaattagaactcacaaggg

SEQ ID NO: 3040591 - DNA, 25 bp, Homo sapien
gccaagtctaccatttgaaaaatgg

SEQ ID NO: 3040592 - DNA, 25 bp, Homo sapien
tgcttctgcgttattaagagcctct

SEQ ID NO: 3040593 - DNA, 25 bp, Homo sapien
ttatttccatatctgaagcctgaag

SEQ ID NO: 3040594 - DNA, 25 bp, Homo sapien
cgcatccagccctgtaatacttttt

SEQ ID NO: 3040595 - DNA, 25 bp, Homo sapien
gcatccagccctgtaatactttttt

SEQ ID NO: 3040596 - DNA, 25 bp, Homo sapien
actcatgtacatgaatcaattttta

SEQ ID NO: 3040597 - DNA, 25 bp, Homo sapien
tatactgcggatttgtaattcagat

SEQ ID NO: 3040598 - DNA, 25 bp, Homo sapien
ttcatctttatactgcggatttgta

SEQ ID NO: 3040599 - DNA, 25 bp, Homo sapien
tctttttactgaagtgacatttttc

SEQ ID NO: 3040600 - DNA, 25 bp, Homo sapien
tatttagggatttttgtgttagcca

SEQ ID NO: 3040601 - DNA, 25 bp, Homo sapien
cattcatggatagaatgaatgtcta

SEQ ID NO: 3040602 - DNA, 25 bp, Homo sapien
tgtgttagccactctcctatctcat

SEQ ID NO: 3040603 - DNA, 25 bp, Homo sapien
tcatttctccaattgaagtaatgca

SEQ ID NO: 3040604 - DNA, 25 bp, Homo sapien
gagaccaggctatatttgtaagtgt

SEQ ID NO: 3040605 - DNA, 25 bp, Homo sapien
tgcataagatgagtaggatacaaag

SEQ ID NO: 3040606 - DNA, 25 bp, Homo sapien
tagttgaaaagccttggctgggcac

SEQ ID NO: 3040607 - DNA, 25 bp, Homo sapien
aaaggaaagccttatgtctcagagc

SEQ ID NO: 3040608 - DNA, 25 bp, Homo sapien
gtccccgatgtgtgatgttcccccg

SEQ ID NO: 3040609 - DNA, 25 bp, Homo sapien
cccgatgtgtgatgttcccccgctt

SEQ ID NO: 3040610 - DNA, 25 bp, Homo sapien
atgtgtgatgttcccccgcttcctg

SEQ ID NO: 3040611 - DNA, 25 bp, Homo sapien
ccgatgtgtgatgttcccccgcttc

SEQ ID NO: 3040612 - DNA, 25 bp, Homo sapien
tctcgggttaccacctggtagatgc

SEQ ID NO: 3040613 - DNA, 25 bp, Homo sapien
cctggtagatgcagaatggcctgtt

SEQ ID NO: 3040614 - DNA, 25 bp, Homo sapien
taccacctggtagatgcagaatggc

SEQ ID NO: 3040615 - DNA, 25 bp, Homo sapien
atgcagaatggcctgttctttttgc

SEQ ID NO: 3040616 - DNA, 25 bp, Homo sapien
ctggcattgaaccttgcctcagaga

SEQ ID NO: 3040617 - DNA, 25 bp, Homo sapien
acttgctttattgtctggttggttg

SEQ ID NO: 3040618 - DNA, 25 bp, Homo sapien
ggtctgagataagtccaattcccaa

SEQ ID NO: 3040619 - DNA, 25 bp, Homo sapien
tagagatcagtagctaccatgctgt

SEQ ID NO: 3040620 - DNA, 25 bp, Homo sapien
tccatctgtaactaatttccttatt

SEQ ID NO: 3040621 - DNA, 25 bp, Homo sapien
atttccatctgtaactaatttcctt

SEQ ID NO: 3040622 - DNA, 25 bp, Homo sapien
tgttcttcatacctattgtcttctc

SEQ ID NO: 3040623 - DNA, 25 bp, Homo sapien
taacagatgccatgttcttcatacc

SEQ ID NO: 3040624 - DNA, 25 bp, Homo sapien
aacactgggagaaacagcctctata

SEQ ID NO: 3040625 - DNA, 25 bp, Homo sapien
ggcaacactgggagaaacagcctct

SEQ ID NO: 3040626 - DNA, 25 bp, Homo sapien
ctgggagaaacagcctctataacaa

SEQ ID NO: 3040627 - DNA, 25 bp, Homo sapien
cactgggagaaacagcctctataac

SEQ ID NO: 3040628 - DNA, 25 bp, Homo sapien
ttaaagaacacagggcccagaagga

SEQ ID NO: 3040629 - DNA, 25 bp, Homo sapien
aagaacacagggcccagaaggagga

SEQ ID NO: 3040630 - DNA, 25 bp, Homo sapien
acacagggcccagaaggaggaaatt

SEQ ID NO: 3040631 - DNA, 25 bp, Homo sapien
cagggcccagaaggaggaaattgtt

SEQ ID NO: 3040632 - DNA, 25 bp, Homo sapien
tttttcaggctctacattctttggt

SEQ ID NO: 3040633 - DNA, 25 bp, Homo sapien
gacccccagaaagctgaaaactgct

SEQ ID NO: 3040634 - DNA, 25 bp, Homo sapien
tcttactgaactccaaaatgacccc

SEQ ID NO: 3040635 - DNA, 25 bp, Homo sapien
tgacccccagaaagctgaaaactgc

SEQ ID NO: 3040636 - DNA, 25 bp, Homo sapien
cagttcttactgaactccaaaatga

SEQ ID NO: 3040637 - DNA, 25 bp, Homo sapien
ccaggcaacaagaacaaacaccgtc

SEQ ID NO: 3040638 - DNA, 25 bp, Homo sapien
ctgttgggctgcgggcagtggctga

SEQ ID NO: 3040639 - DNA, 25 bp, Homo sapien
aggcaacaagaacaaacaccgtctc

SEQ ID NO: 3040640 - DNA, 25 bp, Homo sapien
gcccaggcaacaagaacaaacaccg

SEQ ID NO: 3040641 - DNA, 25 bp, Homo sapien
taaaaggagatagaggaatataaat

SEQ ID NO: 3040642 - DNA, 25 bp, Homo sapien
aactcaaacccctgtttcctcacat

SEQ ID NO: 3040643 - DNA, 25 bp, Homo sapien
ggaatataaatggcctaatccactt

SEQ ID NO: 3040644 - DNA, 25 bp, Homo sapien
taactcaaacccctgtttcctcaca

SEQ ID NO: 3040645 - DNA, 25 bp, Homo sapien
tctgcgggagtcaagcctggaaagc

SEQ ID NO: 3040646 - DNA, 25 bp, Homo sapien
aattctttggaacgggtcggctgca

SEQ ID NO: 3040647 - DNA, 25 bp, Homo sapien
ttgaaaggccttggcgaaaccagct

SEQ ID NO: 3040648 - DNA, 25 bp, Homo sapien
gaatggttaaatcgtggaagccgca

SEQ ID NO: 3040649 - DNA, 25 bp, Homo sapien
aagaggcagtgcaagtcaaagagca

SEQ ID NO: 3040650 - DNA, 25 bp, Homo sapien
aaacgatgaagaggcagtgcaagtc

SEQ ID NO: 3040651 - DNA, 25 bp, Homo sapien
attcaggaaaacgatgaagaggcag

SEQ ID NO: 3040652 - DNA, 25 bp, Homo sapien
tcaggaaaacgatgaagaggcagtg

SEQ ID NO: 3040653 - DNA, 25 bp, Homo sapien
aaatttaagataggatccctggcca

SEQ ID NO: 3040654 - DNA, 25 bp, Homo sapien
tacacaatgggaactctaaggaagt

SEQ ID NO: 3040655 - DNA, 25 bp, Homo sapien
tagtagtgttgagcatcatcagaca

SEQ ID NO: 3040656 - DNA, 25 bp, Homo sapien
cctccagtggcatgaattaagaaca

SEQ ID NO: 3040657 - DNA, 25 bp, Homo sapien
agttctgtgaggttctgacaaggaa

SEQ ID NO: 3040658 - DNA, 25 bp, Homo sapien
cagataatcccagtaagaataggag

SEQ ID NO: 3040659 - DNA, 25 bp, Homo sapien
tagtagactaaaacagatgatgaac

SEQ ID NO: 3040660 - DNA, 25 bp, Homo sapien
tgaagccaggagttatgtggaccag

SEQ ID NO: 3040661 - DNA, 25 bp, Homo sapien
acaatcgagattactcattaccttc

SEQ ID NO: 3040662 - DNA, 25 bp, Homo sapien
tttaggtagatgtctaagctgcctc

SEQ ID NO: 3040663 - DNA, 25 bp, Homo sapien
taggtagatgtctaagctgcctccc

SEQ ID NO: 3040664 - DNA, 25 bp, Homo sapien
ttaggtagatgtctaagctgcctcc

SEQ ID NO: 3040665 - DNA, 25 bp, Homo sapien
aggtagatgtctaagctgcctccca

SEQ ID NO: 3040666 - DNA, 25 bp, Homo sapien
gctttgtatcatgcatctccccaga

SEQ ID NO: 3040667 - DNA, 25 bp, Homo sapien
gccagcagactatctaggaagcagg

SEQ ID NO: 3040668 - DNA, 25 bp, Homo sapien
aactggttcctttggcaggctctga

SEQ ID NO: 3040669 - DNA, 25 bp, Homo sapien
caggctctgacagattaccgggcag

SEQ ID NO: 3040670 - DNA, 25 bp, Homo sapien
tccagccaataggtgtgccagtttt

SEQ ID NO: 3040671 - DNA, 25 bp, Homo sapien
tccagcagagtagccgaaggtcctg

SEQ ID NO: 3040672 - DNA, 25 bp, Homo sapien
gggtcctaatccacctgctgggcat

SEQ ID NO: 3040673 - DNA, 25 bp, Homo sapien
gaggccaggagctagtgtctaccac

SEQ ID NO: 3040674 - DNA, 25 bp, Homo sapien
tagtctagctctcatctggccaaag

SEQ ID NO: 3040675 - DNA, 25 bp, Homo sapien
tagtcgtcagtgttttaattgcccc

SEQ ID NO: 3040676 - DNA, 25 bp, Homo sapien
ggttcttgctaaccaacaccaggta

SEQ ID NO: 3040677 - DNA, 25 bp, Homo sapien
tctgacacgattacacagcgaggct

SEQ ID NO: 3040678 - DNA, 25 bp, Homo sapien
tttgggcagtagatcctctgagcct

SEQ ID NO: 3040679 - DNA, 25 bp, Homo sapien
tggagagtcctgacatgcagttgtg

SEQ ID NO: 3040680 - DNA, 25 bp, Homo sapien
gcttagtaagtcatagacgtgcagg

SEQ ID NO: 3040681 - DNA, 25 bp, Homo sapien
cagtgagcacatgtaagtttgggca

SEQ ID NO: 3040682 - DNA, 25 bp, Homo sapien
agatgatgccctctagacccgtgct

SEQ ID NO: 3040683 - DNA, 25 bp, Homo sapien
gacccgtgctgtccaatatgtagcc

SEQ ID NO: 3040684 - DNA, 25 bp, Homo sapien
tatgtagccgctagccatgtgcagc

SEQ ID NO: 3040685 - DNA, 25 bp, Homo sapien
ccctttgcgggtcttggtcagatga

SEQ ID NO: 3040686 - DNA, 25 bp, Homo sapien
ttctttgaccaaactgtgggtattg

SEQ ID NO: 3040687 - DNA, 25 bp, Homo sapien
tgttccaacagttaaacttgcaatg

SEQ ID NO: 3040688 - DNA, 25 bp, Homo sapien
tcagtttggctgtaatttaattccc

SEQ ID NO: 3040689 - DNA, 25 bp, Homo sapien
tatttgaaactgctaattacacacg

SEQ ID NO: 3040690 - DNA, 25 bp, Homo sapien
taatggttgactttatttaagcaaa

SEQ ID NO: 3040691 - DNA, 25 bp, Homo sapien
tatcctcccagataatggttgactt

SEQ ID NO: 3040692 - DNA, 25 bp, Homo sapien
ttctatcctcccagataatggttga

SEQ ID NO: 3040693 - DNA, 25 bp, Homo sapien
cctcccagataatggttgactttat

SEQ ID NO: 3040694 - DNA, 25 bp, Homo sapien
ttaatgctttattgctcttgatggc

SEQ ID NO: 3040695 - DNA, 25 bp, Homo sapien
agatttaatgctttattgctcttga

SEQ ID NO: 3040696 - DNA, 25 bp, Homo sapien
tttaatgctttattgctcttgatgg

SEQ ID NO: 3040697 - DNA, 25 bp, Homo sapien
gatttaatgctttattgctcttgat

SEQ ID NO: 3040698 - DNA, 25 bp, Homo sapien
gacacgtgaccgagatcatacccta

SEQ ID NO: 3040699 - DNA, 25 bp, Homo sapien
aactatgagtgttgctaatctgggc

SEQ ID NO: 3040700 - DNA, 25 bp, Homo sapien
gaagttccagttagatggttccact

SEQ ID NO: 3040701 - DNA, 25 bp, Homo sapien
cactagtgtctactggtaattggca

SEQ ID NO: 3040702 - DNA, 25 bp, Homo sapien
tgattagcaaccctgcaaacggtga

SEQ ID NO: 3040703 - DNA, 25 bp, Homo sapien
ttctctgagtaggaaacgcagcggg

SEQ ID NO: 3040704 - DNA, 25 bp, Homo sapien
agaaggcccctgaagcatacgtgct

SEQ ID NO: 3040705 - DNA, 25 bp, Homo sapien
cccaagtgtggtgacagcaggtatc

SEQ ID NO: 3040706 - DNA, 25 bp, Homo sapien
cctgggaaggatggactcactctgc

SEQ ID NO: 3040707 - DNA, 25 bp, Homo sapien
taagatgatccttggagcatgccac

SEQ ID NO: 3040708 - DNA, 25 bp, Homo sapien
tctttggcttattgaacagggaccg

SEQ ID NO: 3040709 - DNA, 25 bp, Homo sapien
ccacaggctgcgagttaagtaagat

SEQ ID NO: 3040710 - DNA, 25 bp, Homo sapien
gtttctagcgggcatgggttgggag

SEQ ID NO: 3040711 - DNA, 25 bp, Homo sapien
ccctcgcagcaggtttctagcgggc

SEQ ID NO: 3040712 - DNA, 25 bp, Homo sapien
tagcgggcatgggttgggaggcagc

SEQ ID NO: 3040713 - DNA, 25 bp, Homo sapien
tctagcgggcatgggttgggaggca

SEQ ID NO: 3040714 - DNA, 25 bp, Homo sapien
ggtgcacttcttcccgtgcaggctg

SEQ ID NO: 3040715 - DNA, 25 bp, Homo sapien
tggttgagccgcgtctccacggaga

SEQ ID NO: 3040716 - DNA, 25 bp, Homo sapien
gaagcccgagcgattcttggtgaag

SEQ ID NO: 3040717 - DNA, 25 bp, Homo sapien
tgacgttcacttgaaggtggcgctt

SEQ ID NO: 3040718 - DNA, 25 bp, Homo sapien
caccagacgggcagttagcaggcag

SEQ ID NO: 3040719 - DNA, 25 bp, Homo sapien
tgcaggaaccaaaaacaccagacgg

SEQ ID NO: 3040720 - DNA, 25 bp, Homo sapien
cagacgggcagttagcaggcagcat

SEQ ID NO: 3040721 - DNA, 25 bp, Homo sapien
ccaaaaacaccagacgggcagttag

SEQ ID NO: 3040722 - DNA, 25 bp, Homo sapien
tgcttcctccacaagtgccaggagg

SEQ ID NO: 3040723 - DNA, 25 bp, Homo sapien
ttggctccggcgcagcctgcttcct

SEQ ID NO: 3040724 - DNA, 25 bp, Homo sapien
agctcccggccaccattggctccgg

SEQ ID NO: 3040725 - DNA, 25 bp, Homo sapien
tcctccacaagtgccaggaggatgc

SEQ ID NO: 3040726 - DNA, 25 bp, Homo sapien
cgaggcaaggcgagtgtggcactag

SEQ ID NO: 3040727 - DNA, 25 bp, Homo sapien
gccgaggcaaggcgagtgtggcact

SEQ ID NO: 3040728 - DNA, 25 bp, Homo sapien
aggcaaggcgagtgtggcactagct

SEQ ID NO: 3040729 - DNA, 25 bp, Homo sapien
cctccaaccacagcctcggcaccat

SEQ ID NO: 3040730 - DNA, 25 bp, Homo sapien
ctcagcttgtgccttgtcagctctg

SEQ ID NO: 3040731 - DNA, 25 bp, Homo sapien
cagacaatcggggcatgctcctccg

SEQ ID NO: 3040732 - DNA, 25 bp, Homo sapien
gttcagacaatcggggcatgctcct

SEQ ID NO: 3040733 - DNA, 25 bp, Homo sapien
cctctcgtgttcagacaatcggggc

SEQ ID NO: 3040734 - DNA, 25 bp, Homo sapien
tctcgtgttcagacaatcggggcat

SEQ ID NO: 3040735 - DNA, 25 bp, Homo sapien
ctctgaagttcggctgagcactgcc

SEQ ID NO: 3040736 - DNA, 25 bp, Homo sapien
ttctgctctgaagttcggctgagca

SEQ ID NO: 3040737 - DNA, 25 bp, Homo sapien
tcttgcgtggagcatagcctctgca

SEQ ID NO: 3040738 - DNA, 25 bp, Homo sapien
tttgaacctcctgtaacgatgctga

SEQ ID NO: 3040739 - DNA, 25 bp, Homo sapien
gggcatagcgcctttcactccttgg

SEQ ID NO: 3040740 - DNA, 25 bp, Homo sapien
gaggtttggacattctgacccagcc

SEQ ID NO: 3040741 - DNA, 25 bp, Homo sapien
gaacaacattctagaagtgcctgtg

SEQ ID NO: 3040742 - DNA, 25 bp, Homo sapien
ttctttcgtcaacaaacattggcta

SEQ ID NO: 3040743 - DNA, 25 bp, Homo sapien
ttacaagaatgatttggaacaacat

SEQ ID NO: 3040744 - DNA, 25 bp, Homo sapien
ctgagcccccaagggtcacagagct

SEQ ID NO: 3040745 - DNA, 25 bp, Homo sapien
ccaggtgaccgtgaatgctaacagc

SEQ ID NO: 3040746 - DNA, 25 bp, Homo sapien
taagactggcacacactaagagggt

SEQ ID NO: 3040747 - DNA, 25 bp, Homo sapien
tacagactgcaatggaatcgtgacg

SEQ ID NO: 3040748 - DNA, 25 bp, Homo sapien
aatctgatgtttgacgccactgcca

SEQ ID NO: 3040749 - DNA, 25 bp, Homo sapien
gcaatgccatcgagctgcagaactc

SEQ ID NO: 3040750 - DNA, 25 bp, Homo sapien
ggaaattctgctttcggcctcgcaa

SEQ ID NO: 3040751 - DNA, 25 bp, Homo sapien
gaataacgacttcaactctcagagg

SEQ ID NO: 3040752 - DNA, 25 bp, Homo sapien
aactcggcggccgacaggttctctg

SEQ ID NO: 3040753 - DNA, 25 bp, Homo sapien
tcatgtgatgaaggcctgtaaattc

SEQ ID NO: 3040754 - DNA, 25 bp, Homo sapien
gaaggctcaaaaaacgcatattgtc

SEQ ID NO: 3040755 - DNA, 25 bp, Homo sapien
ctgtagaggcagacttcatgtgatg

SEQ ID NO: 3040756 - DNA, 25 bp, Homo sapien
tgtaaattcccgcataatcaggaac

SEQ ID NO: 3040757 - DNA, 25 bp, Homo sapien
cccagccaaggcatagttattcttg

SEQ ID NO: 3040758 - DNA, 25 bp, Homo sapien
gacaaggaggtagaataggtttcca

SEQ ID NO: 3040759 - DNA, 25 bp, Homo sapien
ttcaagagaatccttcttacagtag

SEQ ID NO: 3040760 - DNA, 25 bp, Homo sapien
ggaccatctggaactgtttttcatt

SEQ ID NO: 3040761 - DNA, 25 bp, Homo sapien
ctgcatgctggcgagaggactggtt

SEQ ID NO: 3040762 - DNA, 25 bp, Homo sapien
tggcagctaaccacagtaaggagga

SEQ ID NO: 3040763 - DNA, 25 bp, Homo sapien
gaggactggttgatggcagctaacc

SEQ ID NO: 3040764 - DNA, 25 bp, Homo sapien
catgctggcgagaggactggttgat

SEQ ID NO: 3040765 - DNA, 25 bp, Homo sapien
tttggagaactgatcctccctcact

SEQ ID NO: 3040766 - DNA, 25 bp, Homo sapien
gtcctcactccctttggagaactga

SEQ ID NO: 3040767 - DNA, 25 bp, Homo sapien
tctgtcctcactccctttggagaac

SEQ ID NO: 3040768 - DNA, 25 bp, Homo sapien
cactgcaactcaccattgagtataa

SEQ ID NO: 3040769 - DNA, 25 bp, Homo sapien
tagaacatgaacatctctttgggaa

SEQ ID NO: 3040770 - DNA, 25 bp, Homo sapien
ggaatcatcattagcctgccacaca

SEQ ID NO: 3040771 - DNA, 25 bp, Homo sapien
taaggatttattagtgccacgtagg

SEQ ID NO: 3040772 - DNA, 25 bp, Homo sapien
gccacgtagggctcacctgaataat

SEQ ID NO: 3040773 - DNA, 25 bp, Homo sapien
ggtacttgcgaatatactctgccta

SEQ ID NO: 3040774 - DNA, 25 bp, Homo sapien
aattttccacagctaatcacagagg

SEQ ID NO: 3040775 - DNA, 25 bp, Homo sapien
taggagtaataaaagtgggccacgc

SEQ ID NO: 3040776 - DNA, 25 bp, Homo sapien
ggtgttcactgtctcatgatctaac

SEQ ID NO: 3040777 - DNA, 25 bp, Homo sapien
gaggcagtgcatgctcagatcatac

SEQ ID NO: 3040778 - DNA, 25 bp, Homo sapien
taaccggctagacaagacttggcca

SEQ ID NO: 3040779 - DNA, 25 bp, Homo sapien
taaacattgagtggctggtagctga

SEQ ID NO: 3040780 - DNA, 25 bp, Homo sapien
gatgtaacagccagccttatgcaga

SEQ ID NO: 3040781 - DNA, 25 bp, Homo sapien
ttcagtggggaaaagcattcatgta

SEQ ID NO: 3040782 - DNA, 25 bp, Homo sapien
cagtggggaaaagcattcatgtaaa

SEQ ID NO: 3040783 - DNA, 25 bp, Homo sapien
gtggggaaaagcattcatgtaaagg

SEQ ID NO: 3040784 - DNA, 25 bp, Homo sapien
ctttcagtggggaaaagcattcatg

SEQ ID NO: 3040785 - DNA, 25 bp, Homo sapien
tagttcaggagtcggcaaacttcct

SEQ ID NO: 3040786 - DNA, 25 bp, Homo sapien
ttgggtcacttcagtctcaacctca

SEQ ID NO: 3040787 - DNA, 25 bp, Homo sapien
gggcttgagatgctctggtgctcta

SEQ ID NO: 3040788 - DNA, 25 bp, Homo sapien
aggatcttgggtcacttcagtctca

SEQ ID NO: 3040789 - DNA, 25 bp, Homo sapien
caagccatgtggtgtttacagggaa

SEQ ID NO: 3040790 - DNA, 25 bp, Homo sapien
tacgttaaacagtccatcacccttg

SEQ ID NO: 3040791 - DNA, 25 bp, Homo sapien
tggaagcccttccacatagctgcac

SEQ ID NO: 3040792 - DNA, 25 bp, Homo sapien
caagacataacaaagagctggaagc

SEQ ID NO: 3040793 - DNA, 25 bp, Homo sapien
caataatggtgagcggcagcttcct

SEQ ID NO: 3040794 - DNA, 25 bp, Homo sapien
tatgtgcacagaaggacacctacag

SEQ ID NO: 3040795 - DNA, 25 bp, Homo sapien
tagttcagtggtgctaacgaggcca

SEQ ID NO: 3040796 - DNA, 25 bp, Homo sapien
catcattgaggctgtgtccgggtag

SEQ ID NO: 3040797 - DNA, 25 bp, Homo sapien
tgccatatggcctagaaaaactgta

SEQ ID NO: 3040798 - DNA, 25 bp, Homo sapien
tagcagaggaccgagaattgggttt

SEQ ID NO: 3040799 - DNA, 25 bp, Homo sapien
ccctgggctgttccctgtatcaagc

SEQ ID NO: 3040800 - DNA, 25 bp, Homo sapien
tggtggggtcgcgttgataattcct

SEQ ID NO: 3040801 - DNA, 25 bp, Homo sapien
tccatgtaagtattgcttcagcagc

SEQ ID NO: 3040802 - DNA, 25 bp, Homo sapien
tatttggctcccaattatttaggaa

SEQ ID NO: 3040803 - DNA, 25 bp, Homo sapien
tactttggagtgtgttatttggctc

SEQ ID NO: 3040804 - DNA, 25 bp, Homo sapien
aaagctgagggcattgatttgagac

SEQ ID NO: 3040805 - DNA, 25 bp, Homo sapien
ttatatataggccacttgaaactgt

SEQ ID NO: 3040806 - DNA, 25 bp, Homo sapien
tgaacttcttggatctaagggttta

SEQ ID NO: 3040807 - DNA, 25 bp, Homo sapien
tttttgtgcctagggttcattgaac

SEQ ID NO: 3040808 - DNA, 25 bp, Homo sapien
caatttgaatgtgatatgccttagt

SEQ ID NO: 3040809 - DNA, 25 bp, Homo sapien
atttggagctgtcttttgataaact

SEQ ID NO: 3040810 - DNA, 25 bp, Homo sapien
tttggagctgtcttttgataaacta

SEQ ID NO: 3040811 - DNA, 25 bp, Homo sapien
ttggagctgtcttttgataaactat

SEQ ID NO: 3040812 - DNA, 25 bp, Homo sapien
caaagaagcctcagatgtggaaagt

SEQ ID NO: 3040813 - DNA, 25 bp, Homo sapien
aatcatctggttctgtaaggtcgct

SEQ ID NO: 3040814 - DNA, 25 bp, Homo sapien
taaatgacattctaggcctggtatc

SEQ ID NO: 3040815 - DNA, 25 bp, Homo sapien
ctaggctgcgcttgggttgttttca

SEQ ID NO: 3040816 - DNA, 25 bp, Homo sapien
tttgccttcatgcatagaagaggca

SEQ ID NO: 3040817 - DNA, 25 bp, Homo sapien
gggttccctatgctctacgctgttc

SEQ ID NO: 3040818 - DNA, 25 bp, Homo sapien
acctttgggaacgtgttgagccaca

SEQ ID NO: 3040819 - DNA, 25 bp, Homo sapien
tacgctgttctctcttactgaaccc

SEQ ID NO: 3040820 - DNA, 25 bp, Homo sapien
caagagagccactctgctatgtaca

SEQ ID NO: 3040821 - DNA, 25 bp, Homo sapien
tgtcaagggctgactcaataatcac

SEQ ID NO: 3040822 - DNA, 25 bp, Homo sapien
gcaagagagccactctgctatgtac

SEQ ID NO: 3040823 - DNA, 25 bp, Homo sapien
ctaagaaagttaacatgttgcccat

SEQ ID NO: 3040824 - DNA, 25 bp, Homo sapien
tattgaatataagatgccttctctg

SEQ ID NO: 3040825 - DNA, 25 bp, Homo sapien
ataacagtaaattctgcacactgag

SEQ ID NO: 3040826 - DNA, 25 bp, Homo sapien
taatcttgggcctgtttatgtagaa

SEQ ID NO: 3040827 - DNA, 25 bp, Homo sapien
gggtcgcaggaatgagccatgatac

SEQ ID NO: 3040828 - DNA, 25 bp, Homo sapien
taagtctgttgtcctacatgggtac

SEQ ID NO: 3040829 - DNA, 25 bp, Homo sapien
actatgttgcgcagaccttggtctg

SEQ ID NO: 3040830 - DNA, 25 bp, Homo sapien
tgatcaaagcccaccatagcagtta

SEQ ID NO: 3040831 - DNA, 25 bp, Homo sapien
tgtagtcttcatggacttgcaaacc

SEQ ID NO: 3040832 - DNA, 25 bp, Homo sapien
ttgcaaaccatcccaaatctgcctt

SEQ ID NO: 3040833 - DNA, 25 bp, Homo sapien
ccaaatctgccttctaatttgctta

SEQ ID NO: 3040834 - DNA, 25 bp, Homo sapien
tatggtcatagtggacacacaaact

SEQ ID NO: 3040835 - DNA, 25 bp, Homo sapien
tgtctttcgtatggaacactacaag

SEQ ID NO: 3040836 - DNA, 25 bp, Homo sapien
gaaatgattcaccagcactccaaca

SEQ ID NO: 3040837 - DNA, 25 bp, Homo sapien
aagttctccaattcgactctcatgg

SEQ ID NO: 3040838 - DNA, 25 bp, Homo sapien
tacaagttggtcctttccattggag

SEQ ID NO: 3040839 - DNA, 25 bp, Homo sapien
ctcctggctaccacaggtgctatca

SEQ ID NO: 3040840 - DNA, 25 bp, Homo sapien
tgggggatggcgcagtgccacacgg

SEQ ID NO: 3040841 - DNA, 25 bp, Homo sapien
acaggtgctatcagccaggcgggca

SEQ ID NO: 3040842 - DNA, 25 bp, Homo sapien
cagcatgaacaaggcaaccactggg

SEQ ID NO: 3040843 - DNA, 25 bp, Homo sapien
tgcatcttctcgtccttatttccct

SEQ ID NO: 3040844 - DNA, 25 bp, Homo sapien
ctgcatcttctcgtccttatttccc

SEQ ID NO: 3040845 - DNA, 25 bp, Homo sapien
gctgcatcttctcgtccttatttcc

SEQ ID NO: 3040846 - DNA, 25 bp, Homo sapien
gcatcttctcgtccttatttccctc

SEQ ID NO: 3040847 - DNA, 25 bp, Homo sapien
acactctgctaccacatccctgctt

SEQ ID NO: 3040848 - DNA, 25 bp, Homo sapien
gcacataaacaggtcttgaacccat

SEQ ID NO: 3040849 - DNA, 25 bp, Homo sapien
tgttgttctcgcacataaacaggtc

SEQ ID NO: 3040850 - DNA, 25 bp, Homo sapien
ccaaagcctgttgttctcgcacata

SEQ ID NO: 3040851 - DNA, 25 bp, Homo sapien
catcgaacttgctccctctgaaaag

SEQ ID NO: 3040852 - DNA, 25 bp, Homo sapien
tggaagttccccatcacatcgaact

SEQ ID NO: 3040853 - DNA, 25 bp, Homo sapien
gcccttctgaagttagttccaccca

SEQ ID NO: 3040854 - DNA, 25 bp, Homo sapien
caatgacaggtctagttggaagttc

SEQ ID NO: 3040855 - DNA, 25 bp, Homo sapien
tagtggtccatgagcaccaggttaa

SEQ ID NO: 3040856 - DNA, 25 bp, Homo sapien
ttagtggtccatgagcaccaggtta

SEQ ID NO: 3040857 - DNA, 25 bp, Homo sapien
gtggtccatgagcaccaggttaaga

SEQ ID NO: 3040858 - DNA, 25 bp, Homo sapien
ggtccatgagcaccaggttaagaat

SEQ ID NO: 3040859 - DNA, 25 bp, Homo sapien
tgtatagagggatagtcttcatcac

SEQ ID NO: 3040860 - DNA, 25 bp, Homo sapien
tccattttatacaggtgacggtcag

SEQ ID NO: 3040861 - DNA, 25 bp, Homo sapien
ccttgtactgtttagtgggatccat

SEQ ID NO: 3040862 - DNA, 25 bp, Homo sapien
gacggtcagtgacaaaaattgctct

SEQ ID NO: 3040863 - DNA, 25 bp, Homo sapien
gatttcatcaaccatgcctgtgtaa

SEQ ID NO: 3040864 - DNA, 25 bp, Homo sapien
tagtcttagtcccagattcccaaca

SEQ ID NO: 3040865 - DNA, 25 bp, Homo sapien
caagcctctatcacgttgagttgac

SEQ ID NO: 3040866 - DNA, 25 bp, Homo sapien
cagataactggtgactaggagctcc

SEQ ID NO: 3040867 - DNA, 25 bp, Homo sapien
aattcattagcaacagggacaaaag

SEQ ID NO: 3040868 - DNA, 25 bp, Homo sapien
gacaaaagtgcctgaggtctgaggt

SEQ ID NO: 3040869 - DNA, 25 bp, Homo sapien
catgtatttgtccttccgtttcaat

SEQ ID NO: 3040870 - DNA, 25 bp, Homo sapien
tacggacgtgacaggaaaagaggac

SEQ ID NO: 3040871 - DNA, 25 bp, Homo sapien
ctggagcccgaggtcagccctttga

SEQ ID NO: 3040872 - DNA, 25 bp, Homo sapien
ttgacccttcaacatttccacggct

SEQ ID NO: 3040873 - DNA, 25 bp, Homo sapien
tgaagcaagatagttgccctcccag

SEQ ID NO: 3040874 - DNA, 25 bp, Homo sapien
acatttccacggctgcaacctttgc

SEQ ID NO: 3040875 - DNA, 25 bp, Homo sapien
gcaggtctgaggccggaatgctctt

SEQ ID NO: 3040876 - DNA, 25 bp, Homo sapien
aggtctgaggccggaatgctcttga

SEQ ID NO: 3040877 - DNA, 25 bp, Homo sapien
caggtctgaggccggaatgctcttg

SEQ ID NO: 3040878 - DNA, 25 bp, Homo sapien
ggcaggtctgaggccggaatgctct

SEQ ID NO: 3040879 - DNA, 25 bp, Homo sapien
cagagatagtaggttgccaaagcaa

SEQ ID NO: 3040880 - DNA, 25 bp, Homo sapien
aggcaggccacatgttggtcagaga

SEQ ID NO: 3040881 - DNA, 25 bp, Homo sapien
tgcactctactcagtggaaggagaa

SEQ ID NO: 3040882 - DNA, 25 bp, Homo sapien
ccctcagagggatagatgagaatcc

SEQ ID NO: 3040883 - DNA, 25 bp, Homo sapien
cattgattataaggcctgggaaggc

SEQ ID NO: 3040884 - DNA, 25 bp, Homo sapien
tatgtgactacgtaaaaagcctgcc

SEQ ID NO: 3040885 - DNA, 25 bp, Homo sapien
cagaaccctggactagatggacaca

SEQ ID NO: 3040886 - DNA, 25 bp, Homo sapien
cgcacgtgtgcgtatacagaacaaa

SEQ ID NO: 3040887 - DNA, 25 bp, Homo sapien
ccagcgccattaaacaggactctct

SEQ ID NO: 3040888 - DNA, 25 bp, Homo sapien
gcaaatagctgagtcaatatcacgg

SEQ ID NO: 3040889 - DNA, 25 bp, Homo sapien
ccttgttattctaaggtgcagcaga

SEQ ID NO: 3040890 - DNA, 25 bp, Homo sapien
cataaatggatgcagcacacagcag

SEQ ID NO: 3040891 - DNA, 25 bp, Homo sapien
tattgaaaatcgtctgcagggcctc

SEQ ID NO: 3040892 - DNA, 25 bp, Homo sapien
ggttcttttgtaccgcatgcgggcc

SEQ ID NO: 3040893 - DNA, 25 bp, Homo sapien
tacgacttcactttgtagcgccggt

SEQ ID NO: 3040894 - DNA, 25 bp, Homo sapien
gtagtctcgcatggtcttgacgcca

SEQ ID NO: 3040895 - DNA, 25 bp, Homo sapien
catgtgcttgcagtgttctcccttt

SEQ ID NO: 3040896 - DNA, 25 bp, Homo sapien
tcctcatgcggactcctaaagtaca

SEQ ID NO: 3040897 - DNA, 25 bp, Homo sapien
gcacaatgcctcatttgactcagtt

SEQ ID NO: 3040898 - DNA, 25 bp, Homo sapien
tgcacgatacagatttgtttgcaca

SEQ ID NO: 3040899 - DNA, 25 bp, Homo sapien
agaaagggtccccgatgaaggtgtg

SEQ ID NO: 3040900 - DNA, 25 bp, Homo sapien
tccccgatgaaggtgtggggtattc

SEQ ID NO: 3040901 - DNA, 25 bp, Homo sapien
tgaaggtgtggggtattctaagccc

SEQ ID NO: 3040902 - DNA, 25 bp, Homo sapien
tgtggggtattctaagccctccctc

SEQ ID NO: 3040903 - DNA, 25 bp, Homo sapien
ctttatactgaatgtagcaccttca

SEQ ID NO: 3040904 - DNA, 25 bp, Homo sapien
tcaaaagtagtacgacttttcagaa

SEQ ID NO: 3040905 - DNA, 25 bp, Homo sapien
agcaccttcaaaagtagtacgactt

SEQ ID NO: 3040906 - DNA, 25 bp, Homo sapien
atactgaatgtagcaccttcaaaag

SEQ ID NO: 3040907 - DNA, 25 bp, Homo sapien
tttgaagaacatatcgattttttaa

SEQ ID NO: 3040908 - DNA, 25 bp, Homo sapien
ctttgaagaacatatcgatttttta

SEQ ID NO: 3040909 - DNA, 25 bp, Homo sapien
gagagacgctctgtgttttagagtt

SEQ ID NO: 3040910 - DNA, 25 bp, Homo sapien
gacgctctgtgttttagagtttcca

SEQ ID NO: 3040911 - DNA, 25 bp, Homo sapien
gaggagagacgctctgtgttttaga

SEQ ID NO: 3040912 - DNA, 25 bp, Homo sapien
gagacgctctgtgttttagagtttc

SEQ ID NO: 3040913 - DNA, 25 bp, Homo sapien
taatgcgtaaggaaacaactcttgg

SEQ ID NO: 3040914 - DNA, 25 bp, Homo sapien
tgaccagggaaaaggtgcacatcct

SEQ ID NO: 3040915 - DNA, 25 bp, Homo sapien
tacccaagctcataggccaaagatg

SEQ ID NO: 3040916 - DNA, 25 bp, Homo sapien
gacctagaaagcaataaacgctgtg

SEQ ID NO: 3040917 - DNA, 25 bp, Homo sapien
agctttaagttatcatcatctacag

SEQ ID NO: 3040918 - DNA, 25 bp, Homo sapien
ggacatcctctgaacacatcacctt

SEQ ID NO: 3040919 - DNA, 25 bp, Homo sapien
tcctctgaacacatcacctttgtga

SEQ ID NO: 3040920 - DNA, 25 bp, Homo sapien
tgaacacatcacctttgtgactagt

SEQ ID NO: 3040921 - DNA, 25 bp, Homo sapien
tgaggacatcctctgaacacatcac

SEQ ID NO: 3040922 - DNA, 25 bp, Homo sapien
tatctcataatacgctaaatcactg

SEQ ID NO: 3040923 - DNA, 25 bp, Homo sapien
catagtttactgatttcttagcacc

SEQ ID NO: 3040924 - DNA, 25 bp, Homo sapien
aaaactacagtcttctttcaggatt

SEQ ID NO: 3040925 - DNA, 25 bp, Homo sapien
aataacaaaatcagtgtggacagat

SEQ ID NO: 3040926 - DNA, 25 bp, Homo sapien
tgtgaaacctgtgtatacagcgggc

SEQ ID NO: 3040927 - DNA, 25 bp, Homo sapien
tatcaaatacacgactgagtactgt

SEQ ID NO: 3040928 - DNA, 25 bp, Homo sapien
cagcacagatttgaactacgtgggt

SEQ ID NO: 3040929 - DNA, 25 bp, Homo sapien
tacgtgggtccactcatacagattt

SEQ ID NO: 3040930 - DNA, 25 bp, Homo sapien
cctttatgcatttaagctgaaggaa

SEQ ID NO: 3040931 - DNA, 25 bp, Homo sapien
tttatgcatttaagctgaaggaaaa

SEQ ID NO: 3040932 - DNA, 25 bp, Homo sapien
aagactggttcagacatctctccaa

SEQ ID NO: 3040933 - DNA, 25 bp, Homo sapien
ataattttgaactggggcaaccaag

SEQ ID NO: 3040934 - DNA, 25 bp, Homo sapien
ttgtagaaagaggacaatccttatg

SEQ ID NO: 3040935 - DNA, 25 bp, Homo sapien
tttgtagaaagaggacaatccttat

SEQ ID NO: 3040936 - DNA, 25 bp, Homo sapien
caatgttcggggtgttcgaatgaaa

SEQ ID NO: 3040937 - DNA, 25 bp, Homo sapien
tcttcccataagctacatcatcctg

SEQ ID NO: 3040938 - DNA, 25 bp, Homo sapien
ttttggtcttcccataagctacatc

SEQ ID NO: 3040939 - DNA, 25 bp, Homo sapien
taagctacatcatcctgaaaaccac

SEQ ID NO: 3040940 - DNA, 25 bp, Homo sapien
ttgtctgaaggaaggtcatggttgg

SEQ ID NO: 3040941 - DNA, 25 bp, Homo sapien
catggttgggccaggtgaattcaga

SEQ ID NO: 3040942 - DNA, 25 bp, Homo sapien
aattagtttcttgacagcctctttg

SEQ ID NO: 3040943 - DNA, 25 bp, Homo sapien
tagtttcttgacagcctctttgtct

SEQ ID NO: 3040944 - DNA, 25 bp, Homo sapien
gctgcctttatcatatgtgcttcag

SEQ ID NO: 3040945 - DNA, 25 bp, Homo sapien
tatagaggatacaagtacattttaa

SEQ ID NO: 3040946 - DNA, 25 bp, Homo sapien
tgtgcatcactaccacatggtttta

SEQ ID NO: 3040947 - DNA, 25 bp, Homo sapien
taacatgctgcctttatcatatgtg

SEQ ID NO: 3040948 - DNA, 25 bp, Homo sapien
tgtctggcggaaggcaaatcctgcc

SEQ ID NO: 3040949 - DNA, 25 bp, Homo sapien
gaagaaacttctcgtatgtctggcg

SEQ ID NO: 3040950 - DNA, 25 bp, Homo sapien
aagatattctacttggtgccggcag

SEQ ID NO: 3040951 - DNA, 25 bp, Homo sapien
gcgttcatcatcaaatatctgtgga

SEQ ID NO: 3040952 - DNA, 25 bp, Homo sapien
tgatgcaacgaacgtaatatggttc

SEQ ID NO: 3040953 - DNA, 25 bp, Homo sapien
gtttgatgcaacgaacgtaatatgg

SEQ ID NO: 3040954 - DNA, 25 bp, Homo sapien
ttgatgcaacgaacgtaatatggtt

SEQ ID NO: 3040955 - DNA, 25 bp, Homo sapien
tttgatgcaacgaacgtaatatggt

SEQ ID NO: 3040956 - DNA, 25 bp, Homo sapien
tgttactgtgataactctaatctgt

SEQ ID NO: 3040957 - DNA, 25 bp, Homo sapien
cagagttgaacgttaaacaatattt

SEQ ID NO: 3040958 - DNA, 25 bp, Homo sapien
actcatcagagttgaacgttaaaca

SEQ ID NO: 3040959 - DNA, 25 bp, Homo sapien
tgaactaaggaccttaaacactgga

SEQ ID NO: 3040960 - DNA, 25 bp, Homo sapien
gaggtctttacatctgtgtttctaa

SEQ ID NO: 3040961 - DNA, 25 bp, Homo sapien
cataatgtctgcacagtaatagccc

SEQ ID NO: 3040962 - DNA, 25 bp, Homo sapien
gatgtccttggcaacgttgggaaaa

SEQ ID NO: 3040963 - DNA, 25 bp, Homo sapien
gatatattcaggttgccccattctt

SEQ ID NO: 3040964 - DNA, 25 bp, Homo sapien
aaaatagttgagatggctgagcatg

SEQ ID NO: 3040965 - DNA, 25 bp, Homo sapien
gatgcaaggttgtctactagagcaa

SEQ ID NO: 3040966 - DNA, 25 bp, Homo sapien
cagcagtcagaggtcgcttggtcac

SEQ ID NO: 3040967 - DNA, 25 bp, Homo sapien
gtaatgctcagtttgccttcaggcc

SEQ ID NO: 3040968 - DNA, 25 bp, Homo sapien
tcttaaacaaggtagcagcagtcag

SEQ ID NO: 3040969 - DNA, 25 bp, Homo sapien
atatttggagactattcctgtacta

SEQ ID NO: 3040970 - DNA, 25 bp, Homo sapien
tatttggagactattcctgtactac

SEQ ID NO: 3040971 - DNA, 25 bp, Homo sapien
atttggagactattcctgtactaca

SEQ ID NO: 3040972 - DNA, 25 bp, Homo sapien
gatggtactactggccaaataaggc

SEQ ID NO: 3040973 - DNA, 25 bp, Homo sapien
agttaacaaacatcacctcgtgcag

SEQ ID NO: 3040974 - DNA, 25 bp, Homo sapien
gagactggcaacacaccctgatggt

SEQ ID NO: 3040975 - DNA, 25 bp, Homo sapien
gagagcctgggctatattagttcac

SEQ ID NO: 3040976 - DNA, 25 bp, Homo sapien
tgaggactgctgagtatactggtag

SEQ ID NO: 3040977 - DNA, 25 bp, Homo sapien
ctgagtatactggtaggggatgctg

SEQ ID NO: 3040978 - DNA, 25 bp, Homo sapien
tgagtatactggtaggggatgctgg

SEQ ID NO: 3040979 - DNA, 25 bp, Homo sapien
gcctgaggactgctgagtatactgg

SEQ ID NO: 3040980 - DNA, 25 bp, Homo sapien
tgttatacataaggcgcttgaaatc

SEQ ID NO: 3040981 - DNA, 25 bp, Homo sapien
ttatacataaggcgcttgaaatctt

SEQ ID NO: 3040982 - DNA, 25 bp, Homo sapien
ctgttatacataaggcgcttgaaat

SEQ ID NO: 3040983 - DNA, 25 bp, Homo sapien
tacataaggcgcttgaaatcttgaa

SEQ ID NO: 3040984 - DNA, 25 bp, Homo sapien
actacatcgcctgcataatgtcgaa

SEQ ID NO: 3040985 - DNA, 25 bp, Homo sapien
tgtcgaattcgaaaatctcgatcaa

SEQ ID NO: 3040986 - DNA, 25 bp, Homo sapien
gcctgcataatgtcgaattcgaaaa

SEQ ID NO: 3040987 - DNA, 25 bp, Homo sapien
cgaaaatctcgatcaaactccagaa

SEQ ID NO: 3040988 - DNA, 25 bp, Homo sapien
gattgcaatgatccctttgtgctgt

SEQ ID NO: 3040989 - DNA, 25 bp, Homo sapien
gactttgccgacattcatgcaagca

SEQ ID NO: 3040990 - DNA, 25 bp, Homo sapien
gaaacatttcatcggtgactttgcc

SEQ ID NO: 3040991 - DNA, 25 bp, Homo sapien
tgctccacgaggtcaacaatgatct

SEQ ID NO: 3040992 - DNA, 25 bp, Homo sapien
taataaagtatgctaaacctaacag

SEQ ID NO: 3040993 - DNA, 25 bp, Homo sapien
gaagaaactagattctgaagcaaag

SEQ ID NO: 3040994 - DNA, 25 bp, Homo sapien
taagtccacgtggtagcagccataa

SEQ ID NO: 3040995 - DNA, 25 bp, Homo sapien
tgttctgggcatcaacaaggcagtc

SEQ ID NO: 3040996 - DNA, 25 bp, Homo sapien
cttgcttcagaaccagctgaataaa

SEQ ID NO: 3040997 - DNA, 25 bp, Homo sapien
ggatcccttcccgctggtattcctc

SEQ ID NO: 3040998 - DNA, 25 bp, Homo sapien
acaggcaacaaggttttaagtatct

SEQ ID NO: 3040999 - DNA, 25 bp, Homo sapien
cccatggattgtggtgtcatagttc

SEQ ID NO: 3041000 - DNA, 25 bp, Homo sapien
gatatccaagacaccaataacagtg

SEQ ID NO: 3041001 - DNA, 25 bp, Homo sapien
taacgatccaacaaaaaaggcgctc

SEQ ID NO: 3041002 - DNA, 25 bp, Homo sapien
tatcattgatgcgagtaacgatcca

SEQ ID NO: 3041003 - DNA, 25 bp, Homo sapien
tcaatgatgtcacggcctgtggcca

SEQ ID NO: 3041004 - DNA, 25 bp, Homo sapien
tgccattctcaataagaggcgtgtc

SEQ ID NO: 3041005 - DNA, 25 bp, Homo sapien
caaaggcgtctctgccgtagctggc

SEQ ID NO: 3041006 - DNA, 25 bp, Homo sapien
gaggcgtgtcaccatctactacaaa

SEQ ID NO: 3041007 - DNA, 25 bp, Homo sapien
tctcctcaggtttgaagccaatgac

SEQ ID NO: 3041008 - DNA, 25 bp, Homo sapien
gcaacaactctgaattcggcagcat

SEQ ID NO: 3041009 - DNA, 25 bp, Homo sapien
tatacactgtttggatctcctcagg

SEQ ID NO: 3041010 - DNA, 25 bp, Homo sapien
gactttcatggcatcagcaacaact

SEQ ID NO: 3041011 - DNA, 25 bp, Homo sapien
tagtcgataagacaatttgaaaaca

SEQ ID NO: 3041012 - DNA, 25 bp, Homo sapien
gtaacttagtcgataagacaatttg

SEQ ID NO: 3041013 - DNA, 25 bp, Homo sapien
gtcaaaagtaacttagtcgataaga

SEQ ID NO: 3041014 - DNA, 25 bp, Homo sapien
ttctgtggggactctacacgacttg

SEQ ID NO: 3041015 - DNA, 25 bp, Homo sapien
ctggagatgtagagagcgtagcatt

SEQ ID NO: 3041016 - DNA, 25 bp, Homo sapien
gatgtagagagcgtagcatttgttc

SEQ ID NO: 3041017 - DNA, 25 bp, Homo sapien
agagagcgtagcatttgttctgaac

SEQ ID NO: 3041018 - DNA, 25 bp, Homo sapien
agcgtagcatttgttctgaacctcc

SEQ ID NO: 3041019 - DNA, 25 bp, Homo sapien
aagaatgaaagcttctttctcctgg

SEQ ID NO: 3041020 - DNA, 25 bp, Homo sapien
ctgatagaaagaatgaaagcttctt

SEQ ID NO: 3041021 - DNA, 25 bp, Homo sapien
tgatagaaagaatgaaagcttcttt

SEQ ID NO: 3041022 - DNA, 25 bp, Homo sapien
agaaagaatgaaagcttctttctcc

SEQ ID NO: 3041023 - DNA, 25 bp, Homo sapien
ccaatagggtcacccttgaagtcaa

SEQ ID NO: 3041024 - DNA, 25 bp, Homo sapien
gtaagtagttattgatatgcccacc

SEQ ID NO: 3041025 - DNA, 25 bp, Homo sapien
tcattacggttggttttggcatttc

SEQ ID NO: 3041026 - DNA, 25 bp, Homo sapien
aacacagttggacttaagcaacata

SEQ ID NO: 3041027 - DNA, 25 bp, Homo sapien
gatggccgcaatatactgcataatg

SEQ ID NO: 3041028 - DNA, 25 bp, Homo sapien
tggcttccgttttaccagctccact

SEQ ID NO: 3041029 - DNA, 25 bp, Homo sapien
tgcataatgtacttactggcttccg

SEQ ID NO: 3041030 - DNA, 25 bp, Homo sapien
gggttggtgatggccgcaatatact

SEQ ID NO: 3041031 - DNA, 25 bp, Homo sapien
ttggaaatacaggggatcccctcca

SEQ ID NO: 3041032 - DNA, 25 bp, Homo sapien
tgactttggaaatacaggggatccc

SEQ ID NO: 3041033 - DNA, 25 bp, Homo sapien
tggaaatacaggggatcccctccaa

SEQ ID NO: 3041034 - DNA, 25 bp, Homo sapien
catagccttgtaagcagcatccgca

SEQ ID NO: 3041035 - DNA, 25 bp, Homo sapien
gaggcggtctctcatacagctcacg

SEQ ID NO: 3041036 - DNA, 25 bp, Homo sapien
tccaatgaacgtatagatgcgccct

SEQ ID NO: 3041037 - DNA, 25 bp, Homo sapien
tgtaagggttcacagaaacgacgac

SEQ ID NO: 3041038 - DNA, 25 bp, Homo sapien
tacagaagcaaaagaaaaggaagac

SEQ ID NO: 3041039 - DNA, 25 bp, Homo sapien
tgtacagaagcaaaagaaaaggaag

SEQ ID NO: 3041040 - DNA, 25 bp, Homo sapien
ctgtacagaagcaaaagaaaaggaa

SEQ ID NO: 3041041 - DNA, 25 bp, Homo sapien
cagaagcaaaagaaaaggaagacgt

SEQ ID NO: 3041042 - DNA, 25 bp, Homo sapien
ggtagacatctctctcacgtccaag

SEQ ID NO: 3041043 - DNA, 25 bp, Homo sapien
tgccctgacaggcaaaatgctggtt

SEQ ID NO: 3041044 - DNA, 25 bp, Homo sapien
cagctgagagatactggtagacatc

SEQ ID NO: 3041045 - DNA, 25 bp, Homo sapien
tccaagaactgaacaaagggtgtgc

SEQ ID NO: 3041046 - DNA, 25 bp, Homo sapien
taaatgactgacgttgtgacttcat

SEQ ID NO: 3041047 - DNA, 25 bp, Homo sapien
gttaggaccacaggtggtggattaa

SEQ ID NO: 3041048 - DNA, 25 bp, Homo sapien
gattaaatgactgacgttgtgactt

SEQ ID NO: 3041049 - DNA, 25 bp, Homo sapien
agttaggaccacaggtggtggatta

SEQ ID NO: 3041050 - DNA, 25 bp, Homo sapien
gagagtccgcctgaagacaagtact

SEQ ID NO: 3041051 - DNA, 25 bp, Homo sapien
cgttaactactaaggtctcatgcaa

SEQ ID NO: 3041052 - DNA, 25 bp, Homo sapien
caacttgcgccagcaagacagcaga

SEQ ID NO: 3041053 - DNA, 25 bp, Homo sapien
tactcctaaagactgagaaagaggc

SEQ ID NO: 3041054 - DNA, 25 bp, Homo sapien
cataaaacttagtacactgcatcac

SEQ ID NO: 3041055 - DNA, 25 bp, Homo sapien
gacgggtctctggacgacaggaaac

SEQ ID NO: 3041056 - DNA, 25 bp, Homo sapien
gacaggaaacctaaacagtatatcc

SEQ ID NO: 3041057 - DNA, 25 bp, Homo sapien
tcaggtacccagataggcagctttt

SEQ ID NO: 3041058 - DNA, 25 bp, Homo sapien
tcctcgtcagaagtctgtaacatcc

SEQ ID NO: 3041059 - DNA, 25 bp, Homo sapien
ggctttcctcgtcagaagtctgtaa

SEQ ID NO: 3041060 - DNA, 25 bp, Homo sapien
tggctttcctcgtcagaagtctgta

SEQ ID NO: 3041061 - DNA, 25 bp, Homo sapien
ctttcctcgtcagaagtctgtaaca

SEQ ID NO: 3041062 - DNA, 25 bp, Homo sapien
caactataattgtcaggtgagctaa

SEQ ID NO: 3041063 - DNA, 25 bp, Homo sapien
caactgctaatacttggacaggcct

SEQ ID NO: 3041064 - DNA, 25 bp, Homo sapien
gcagagtttctgtgctcagcaataa

SEQ ID NO: 3041065 - DNA, 25 bp, Homo sapien
atgatcaatgatctgcttctctaaa

SEQ ID NO: 3041066 - DNA, 25 bp, Homo sapien
catcttgagttgaggagagccagtc

SEQ ID NO: 3041067 - DNA, 25 bp, Homo sapien
tgttcatccctcaccaagccatgtg

SEQ ID NO: 3041068 - DNA, 25 bp, Homo sapien
ttttgaaagctgtcatatgcacgtg

SEQ ID NO: 3041069 - DNA, 25 bp, Homo sapien
tagtctaaggtaaagctgggaattc

SEQ ID NO: 3041070 - DNA, 25 bp, Homo sapien
caagagaaagaattagcagactgtt

SEQ ID NO: 3041071 - DNA, 25 bp, Homo sapien
tgaatttgtaagcacagaaaccata

SEQ ID NO: 3041072 - DNA, 25 bp, Homo sapien
catttgttggctgttaaaagaagag

SEQ ID NO: 3041073 - DNA, 25 bp, Homo sapien
gaagggcctccttaatcagagtagc

SEQ ID NO: 3041074 - DNA, 25 bp, Homo sapien
tcacctttgcagagcttaacaatat

SEQ ID NO: 3041075 - DNA, 25 bp, Homo sapien
tgccacacctgtatagaccacaagc

SEQ ID NO: 3041076 - DNA, 25 bp, Homo sapien
taagtgattaccgtctctgccacac

SEQ ID NO: 3041077 - DNA, 25 bp, Homo sapien
caagccccagtttctaggtacattt

SEQ ID NO: 3041078 - DNA, 25 bp, Homo sapien
ggtaacctagtagcaactaactgat

SEQ ID NO: 3041079 - DNA, 25 bp, Homo sapien
cagggaatgtccatactttcatcag

SEQ ID NO: 3041080 - DNA, 25 bp, Homo sapien
tgcaagaagggaggctatgctagct

SEQ ID NO: 3041081 - DNA, 25 bp, Homo sapien
gaaatcactggaccggaactgaagg

SEQ ID NO: 3041082 - DNA, 25 bp, Homo sapien
cttggttataagcagggaagttggc

SEQ ID NO: 3041083 - DNA, 25 bp, Homo sapien
tgcaagtgactgaacaatcaactga

SEQ ID NO: 3041084 - DNA, 25 bp, Homo sapien
gtttgatctgcaagtgactgaacaa

SEQ ID NO: 3041085 - DNA, 25 bp, Homo sapien
ataaggagtttgatctgcaagtgac

SEQ ID NO: 3041086 - DNA, 25 bp, Homo sapien
ttgatctgcaagtgactgaacaatc

SEQ ID NO: 3041087 - DNA, 25 bp, Homo sapien
cacatatagggcatagtttgctgaa

SEQ ID NO: 3041088 - DNA, 25 bp, Homo sapien
tattctgccttctatgacgatcagt

SEQ ID NO: 3041089 - DNA, 25 bp, Homo sapien
atttccatcacaccagagggttctc

SEQ ID NO: 3041090 - DNA, 25 bp, Homo sapien
tggacacatggatagtcctaacccc

SEQ ID NO: 3041091 - DNA, 25 bp, Homo sapien
ttggatcggtgatcacacccaagct

SEQ ID NO: 3041092 - DNA, 25 bp, Homo sapien
tactgcaatcatttcccaagatgta

SEQ ID NO: 3041093 - DNA, 25 bp, Homo sapien
tctcattcactaaggtattgtgctt

SEQ ID NO: 3041094 - DNA, 25 bp, Homo sapien
gctttttagagttcttctcattcac

SEQ ID NO: 3041095 - DNA, 25 bp, Homo sapien
ctgaatggtacgagcttctgaaata

SEQ ID NO: 3041096 - DNA, 25 bp, Homo sapien
tctgaatggtacgagcttctgaaat

SEQ ID NO: 3041097 - DNA, 25 bp, Homo sapien
ccagatttagctagtgggtactcac

SEQ ID NO: 3041098 - DNA, 25 bp, Homo sapien
tcccaggtcctcacaatggacagag

SEQ ID NO: 3041099 - DNA, 25 bp, Homo sapien
ggatataggtgcatacgcattcaca

SEQ ID NO: 3041100 - DNA, 25 bp, Homo sapien
tttgtgacaaccctggaattaccca

SEQ ID NO: 3041101 - DNA, 25 bp, Homo sapien
taattgtaactagtcccatgtgggc

SEQ ID NO: 3041102 - DNA, 25 bp, Homo sapien
gcctggaatacaaactgggatatct

SEQ ID NO: 3041103 - DNA, 25 bp, Homo sapien
tatcttcaggaatgaggctaggaca

SEQ ID NO: 3041104 - DNA, 25 bp, Homo sapien
gaaaataaaggcaatcccatgctgg

SEQ ID NO: 3041105 - DNA, 25 bp, Homo sapien
tgagcaaagttttcgtcaggtaccc

SEQ ID NO: 3041106 - DNA, 25 bp, Homo sapien
gacctgcctccccaagaatgaacta

SEQ ID NO: 3041107 - DNA, 25 bp, Homo sapien
tgagcaatggaagctggctagcagc

SEQ ID NO: 3041108 - DNA, 25 bp, Homo sapien
tctctacttcaacaagggtctgctg

SEQ ID NO: 3041109 - DNA, 25 bp, Homo sapien
ggtatctcttactcccaattaagct

SEQ ID NO: 3041110 - DNA, 25 bp, Homo sapien
aagaattgtctgtgctattcatttg

SEQ ID NO: 3041111 - DNA, 25 bp, Homo sapien
caattaagctatccctcaaagagta

SEQ ID NO: 3041112 - DNA, 25 bp, Homo sapien
gcactaagcacactgtaagaattca

SEQ ID NO: 3041113 - DNA, 25 bp, Homo sapien
tctattacctagcaatagtgcctag

SEQ ID NO: 3041114 - DNA, 25 bp, Homo sapien
ttacaaaccttcacggaggctgaga

SEQ ID NO: 3041115 - DNA, 25 bp, Homo sapien
tagttgctagctttaataccaggag

SEQ ID NO: 3041116 - DNA, 25 bp, Homo sapien
tatgaaaaacatatagggtctatag

SEQ ID NO: 3041117 - DNA, 25 bp, Homo sapien
tacagagtgaattgggaatagcaag

SEQ ID NO: 3041118 - DNA, 25 bp, Homo sapien
tgagaatgcatagggtgatagttac

SEQ ID NO: 3041119 - DNA, 25 bp, Homo sapien
tgcttcagccaccaccataggtatt

SEQ ID NO: 3041120 - DNA, 25 bp, Homo sapien
gaaattaaatagtgatacctggagg

SEQ ID NO: 3041121 - DNA, 25 bp, Homo sapien
tctcaataaccctaaaaggcgatca

SEQ ID NO: 3041122 - DNA, 25 bp, Homo sapien
tagggaagcctatggtaagagaagt

SEQ ID NO: 3041123 - DNA, 25 bp, Homo sapien
gaacttggtcatttacgtctcagag

SEQ ID NO: 3041124 - DNA, 25 bp, Homo sapien
gcactctctgctaggtaatctgaat

SEQ ID NO: 3041125 - DNA, 25 bp, Homo sapien
agccagtaattacattgcagttgaa

SEQ ID NO: 3041126 - DNA, 25 bp, Homo sapien
agttgaactgaaagaagcctgcttc

SEQ ID NO: 3041127 - DNA, 25 bp, Homo sapien
tgcagttgaactgaaagaagcctgc

SEQ ID NO: 3041128 - DNA, 25 bp, Homo sapien
gccagtaattacattgcagttgaac

SEQ ID NO: 3041129 - DNA, 25 bp, Homo sapien
gctgttaccctctgaccccattatg

SEQ ID NO: 3041130 - DNA, 25 bp, Homo sapien
ttataggccatgtcggtgaggctca

SEQ ID NO: 3041131 - DNA, 25 bp, Homo sapien
gaggctcatgaacaggtaatctacc

SEQ ID NO: 3041132 - DNA, 25 bp, Homo sapien
taaagttccccgacttagcagtggc

SEQ ID NO: 3041133 - DNA, 25 bp, Homo sapien
actcctagagatagtgtccattttg

SEQ ID NO: 3041134 - DNA, 25 bp, Homo sapien
cattaaatgaggtcactcctagaga

SEQ ID NO: 3041135 - DNA, 25 bp, Homo sapien
atcattaaatgaggtcactcctaga

SEQ ID NO: 3041136 - DNA, 25 bp, Homo sapien
gtcactcctagagatagtgtccatt

SEQ ID NO: 3041137 - DNA, 25 bp, Homo sapien
ctaatatggagatcactaaataaac

SEQ ID NO: 3041138 - DNA, 25 bp, Homo sapien
tagagctaatatggagatcactaaa

SEQ ID NO: 3041139 - DNA, 25 bp, Homo sapien
catttctagctatatcagattcaac

SEQ ID NO: 3041140 - DNA, 25 bp, Homo sapien
aacgaacagctctccacatagagct

SEQ ID NO: 3041141 - DNA, 25 bp, Homo sapien
taactagagccctgaaccaatggca

SEQ ID NO: 3041142 - DNA, 25 bp, Homo sapien
agggtgattcactccaaatggcagc

SEQ ID NO: 3041143 - DNA, 25 bp, Homo sapien
ttttccctggcaagcaagagacacc

SEQ ID NO: 3041144 - DNA, 25 bp, Homo sapien
aatagtctcggaaatctgtcacgga

SEQ ID NO: 3041145 - DNA, 25 bp, Homo sapien
taatgtagccctgttagactctatg

SEQ ID NO: 3041146 - DNA, 25 bp, Homo sapien
agctctggctaagcccatgtatttg

SEQ ID NO: 3041147 - DNA, 25 bp, Homo sapien
gccctgttagactctatgccttcaa

SEQ ID NO: 3041148 - DNA, 25 bp, Homo sapien
tgcaaaagctctggctaagcccatg

SEQ ID NO: 3041149 - DNA, 25 bp, Homo sapien
aggatgttaataacacaagagctcc

SEQ ID NO: 3041150 - DNA, 25 bp, Homo sapien
ggatgttaataacacaagagctcca

SEQ ID NO: 3041151 - DNA, 25 bp, Homo sapien
gtttatcttggcactggcaagtaca

SEQ ID NO: 3041152 - DNA, 25 bp, Homo sapien
gcaagtacagcagtctcttcgatgt

SEQ ID NO: 3041153 - DNA, 25 bp, Homo sapien
aaccaaaaccatgaacgtcttgtca

SEQ ID NO: 3041154 - DNA, 25 bp, Homo sapien
caaaaccatgaacgtcttgtcaaat

SEQ ID NO: 3041155 - DNA, 25 bp, Homo sapien
gaatgacaggatggaactacgccag

SEQ ID NO: 3041156 - DNA, 25 bp, Homo sapien
cagtgtcccggaacagacagctcag

SEQ ID NO: 3041157 - DNA, 25 bp, Homo sapien
gggccaccgcaactctcgttcaagt

SEQ ID NO: 3041158 - DNA, 25 bp, Homo sapien
gacagctcagggatcactccatagc

SEQ ID NO: 3041159 - DNA, 25 bp, Homo sapien
gaagtctgccttgccgaattccagg

SEQ ID NO: 3041160 - DNA, 25 bp, Homo sapien
aactcgggcatggagacggtgtcca

SEQ ID NO: 3041161 - DNA, 25 bp, Homo sapien
ggtgtccatcagcacgaagtctgcc

SEQ ID NO: 3041162 - DNA, 25 bp, Homo sapien
tggccatgaactcgggcatggagac

SEQ ID NO: 3041163 - DNA, 25 bp, Homo sapien
gggacgcacccgacagtttccgctc

SEQ ID NO: 3041164 - DNA, 25 bp, Homo sapien
agacggagacggcagcggctggtcc

SEQ ID NO: 3041165 - DNA, 25 bp, Homo sapien
gccgggacaccgagacggagacggc

SEQ ID NO: 3041166 - DNA, 25 bp, Homo sapien
tgggcccgcgatgagctcgggaggg

SEQ ID NO: 3041167 - DNA, 25 bp, Homo sapien
ttctgccgcccctctgaaaacatag

SEQ ID NO: 3041168 - DNA, 25 bp, Homo sapien
gaaaacatagaggtgagttgagaga

SEQ ID NO: 3041169 - DNA, 25 bp, Homo sapien
gccgcccctctgaaaacatagaggt

SEQ ID NO: 3041170 - DNA, 25 bp, Homo sapien
acatagaggtgagttgagagagttt

SEQ ID NO: 3041171 - DNA, 25 bp, Homo sapien
cccaaggctgattcaccctgaattc

SEQ ID NO: 3041172 - DNA, 25 bp, Homo sapien
gaaagtacctctgatagattgcttt

SEQ ID NO: 3041173 - DNA, 25 bp, Homo sapien
caactttcaacacctaagcaacaaa

SEQ ID NO: 3041174 - DNA, 25 bp, Homo sapien
gtacctctgatagattgctttccaa

SEQ ID NO: 3041175 - DNA, 25 bp, Homo sapien
tgcatagtaaagcaggagatccccg

SEQ ID NO: 3041176 - DNA, 25 bp, Homo sapien
tggcctctctcgatcggtcagaatg

SEQ ID NO: 3041177 - DNA, 25 bp, Homo sapien
tgagccaccgtctaagaaatcaaga

SEQ ID NO: 3041178 - DNA, 25 bp, Homo sapien
ggtgagtggcagtctaatactacag

SEQ ID NO: 3041179 - DNA, 25 bp, Homo sapien
gctgatgatgctcagtgtgtcttct

SEQ ID NO: 3041180 - DNA, 25 bp, Homo sapien
gcagcaagtactcagatgactttcc

SEQ ID NO: 3041181 - DNA, 25 bp, Homo sapien
tccagcagcaagtactcagatgact

SEQ ID NO: 3041182 - DNA, 25 bp, Homo sapien
tcagatgactttccttgtttgccct

SEQ ID NO: 3041183 - DNA, 25 bp, Homo sapien
cagctggagggctccagcttgccat

SEQ ID NO: 3041184 - DNA, 25 bp, Homo sapien
ctgctcctgccagtgcttgtggtgg

SEQ ID NO: 3041185 - DNA, 25 bp, Homo sapien
cagtgcttgtggtgggacttgagct

SEQ ID NO: 3041186 - DNA, 25 bp, Homo sapien
ctcctgccagtgcttgtggtgggac

SEQ ID NO: 3041187 - DNA, 25 bp, Homo sapien
agtgtcctgatagctgagagtatag

SEQ ID NO: 3041188 - DNA, 25 bp, Homo sapien
cagtgtcctgatagctgagagtata

SEQ ID NO: 3041189 - DNA, 25 bp, Homo sapien
cactctgagcactggcctgaagctt

SEQ ID NO: 3041190 - DNA, 25 bp, Homo sapien
aggcccctggcagctgaaggaggct

SEQ ID NO: 3041191 - DNA, 25 bp, Homo sapien
tgggtatggtggtttttctccactc

SEQ ID NO: 3041192 - DNA, 25 bp, Homo sapien
tctgtgtggtccatgccctcagctg

SEQ ID NO: 3041193 - DNA, 25 bp, Homo sapien
aactgggcctaaagtcatgtggtca

SEQ ID NO: 3041194 - DNA, 25 bp, Homo sapien
catagaagtgaagtgaactgggcct

SEQ ID NO: 3041195 - DNA, 25 bp, Homo sapien
tatttgcttagatgcctgacattca

SEQ ID NO: 3041196 - DNA, 25 bp, Homo sapien
gactgttagagtcgggaggcaccaa

SEQ ID NO: 3041197 - DNA, 25 bp, Homo sapien
tgtgctgagctttacctgagggaac

SEQ ID NO: 3041198 - DNA, 25 bp, Homo sapien
cattgggatcttatggaggccttca

SEQ ID NO: 3041199 - DNA, 25 bp, Homo sapien
tgagggaacacattacccaccagga

SEQ ID NO: 3041200 - DNA, 25 bp, Homo sapien
gcttctcactagcagcgttcatggt

SEQ ID NO: 3041201 - DNA, 25 bp, Homo sapien
gcaggttcgttcttggacagttcca

SEQ ID NO: 3041202 - DNA, 25 bp, Homo sapien
gaactgaatgtagcagagagtccca

SEQ ID NO: 3041203 - DNA, 25 bp, Homo sapien
aggtggcgccacaagaagtctgagc

SEQ ID NO: 3041204 - DNA, 25 bp, Homo sapien
cagtgtggacactggaaaccgcgtg

SEQ ID NO: 3041205 - DNA, 25 bp, Homo sapien
cagggtcgtctgcaggggcacgttc

SEQ ID NO: 3041206 - DNA, 25 bp, Homo sapien
gcaggggcacgttcacagtgtgact

SEQ ID NO: 3041207 - DNA, 25 bp, Homo sapien
aggggcacgttcacagtgtgactga

SEQ ID NO: 3041208 - DNA, 25 bp, Homo sapien
caggggcacgttcacagtgtgactg

SEQ ID NO: 3041209 - DNA, 25 bp, Homo sapien
gccaagcaggtctaatagcttctct

SEQ ID NO: 3041210 - DNA, 25 bp, Homo sapien
ggtctaatagcttctctttgatcag

SEQ ID NO: 3041211 - DNA, 25 bp, Homo sapien
agcaggtctaatagcttctctttga

SEQ ID NO: 3041212 - DNA, 25 bp, Homo sapien
acattctcatcgtggctcccttcgt

SEQ ID NO: 3041213 - DNA, 25 bp, Homo sapien
tggtgtgattcaattgccataactg

SEQ ID NO: 3041214 - DNA, 25 bp, Homo sapien
ggtgtgattcaattgccataactgt

SEQ ID NO: 3041215 - DNA, 25 bp, Homo sapien
ctggtgtgattcaattgccataact

SEQ ID NO: 3041216 - DNA, 25 bp, Homo sapien
gtgtgattcaattgccataactgtg

SEQ ID NO: 3041217 - DNA, 25 bp, Homo sapien
gagctctagtattgtaaggatacta

SEQ ID NO: 3041218 - DNA, 25 bp, Homo sapien
tgtaaggatactagcaccaatgaac

SEQ ID NO: 3041219 - DNA, 25 bp, Homo sapien
atcaaagagctctagtattgtaagg

SEQ ID NO: 3041220 - DNA, 25 bp, Homo sapien
tagtattgtaaggatactagcacca

SEQ ID NO: 3041221 - DNA, 25 bp, Homo sapien
aacttcatacgccttcttctgttca

SEQ ID NO: 3041222 - DNA, 25 bp, Homo sapien
tgttcaattgtctcataattgagag

SEQ ID NO: 3041223 - DNA, 25 bp, Homo sapien
agtaaggcagcaacttcatacgcct

SEQ ID NO: 3041224 - DNA, 25 bp, Homo sapien
aatatatccagaacaaggatgttct

SEQ ID NO: 3041225 - DNA, 25 bp, Homo sapien
gtgagacacatctcggcagtaaaag

SEQ ID NO: 3041226 - DNA, 25 bp, Homo sapien
gactggcatcccctacaattcctgt

SEQ ID NO: 3041227 - DNA, 25 bp, Homo sapien
taaaagtcgttactgcctgcagact

SEQ ID NO: 3041228 - DNA, 25 bp, Homo sapien
aatgtgcccacaattcctccagtgc

SEQ ID NO: 3041229 - DNA, 25 bp, Homo sapien
agggtgtcctgcagagacagtaatt

SEQ ID NO: 3041230 - DNA, 25 bp, Homo sapien
agctctttgttgtagcgggttaggt

SEQ ID NO: 3041231 - DNA, 25 bp, Homo sapien
cgggttaggttgcagggtgtcctgc

SEQ ID NO: 3041232 - DNA, 25 bp, Homo sapien
gcagagacagtaattgctgtccttt

SEQ ID NO: 3041233 - DNA, 25 bp, Homo sapien
cccaaacccagatgatttccatgat

SEQ ID NO: 3041234 - DNA, 25 bp, Homo sapien
tccccaaacccagatgatttccatg

SEQ ID NO: 3041235 - DNA, 25 bp, Homo sapien
tttccccaaacccagatgatttcca

SEQ ID NO: 3041236 - DNA, 25 bp, Homo sapien
caaacccagatgatttccatgatct

SEQ ID NO: 3041237 - DNA, 25 bp, Homo sapien
gctgctcaggggtacaaaaaggggc

SEQ ID NO: 3041238 - DNA, 25 bp, Homo sapien
gtgctgctcaggggtacaaaaaggg

SEQ ID NO: 3041239 - DNA, 25 bp, Homo sapien
tgctgctcaggggtacaaaaagggg

SEQ ID NO: 3041240 - DNA, 25 bp, Homo sapien
tctcacagtcaatcctacaggcggt

SEQ ID NO: 3041241 - DNA, 25 bp, Homo sapien
caggcggtgatgctgtaaacaggaa

SEQ ID NO: 3041242 - DNA, 25 bp, Homo sapien
ggaaaaaagtcgaggcccatctctg

SEQ ID NO: 3041243 - DNA, 25 bp, Homo sapien
ttttccacaatgtagcgggtctcac

SEQ ID NO: 3041244 - DNA, 25 bp, Homo sapien
ttctgttatgtcagtcactaggcct

SEQ ID NO: 3041245 - DNA, 25 bp, Homo sapien
tggctcttctgttatgtcagtcact

SEQ ID NO: 3041246 - DNA, 25 bp, Homo sapien
ctcttctgttatgtcagtcactagg

SEQ ID NO: 3041247 - DNA, 25 bp, Homo sapien
tctgttatgtcagtcactaggcctt

SEQ ID NO: 3041248 - DNA, 25 bp, Homo sapien
ggagggcaaatcagagcctgctttt

SEQ ID NO: 3041249 - DNA, 25 bp, Homo sapien
cataatgttcagtttgatgttttta

SEQ ID NO: 3041250 - DNA, 25 bp, Homo sapien
tggagggcaaatcagagcctgcttt

SEQ ID NO: 3041251 - DNA, 25 bp, Homo sapien
tttgagccataatgttcagtttgat

SEQ ID NO: 3041252 - DNA, 25 bp, Homo sapien
agttgcagtagtagctgatatagca

SEQ ID NO: 3041253 - DNA, 25 bp, Homo sapien
tgctggttggaagcgaagttgcagt

SEQ ID NO: 3041254 - DNA, 25 bp, Homo sapien
cagctgattgttgtgctggttggaa

SEQ ID NO: 3041255 - DNA, 25 bp, Homo sapien
gaagcgaagttgcagtagtagctga

SEQ ID NO: 3041256 - DNA, 25 bp, Homo sapien
gacaaaacgtattggcggcatccct

SEQ ID NO: 3041257 - DNA, 25 bp, Homo sapien
aaaacacacctctatgctggagacg

SEQ ID NO: 3041258 - DNA, 25 bp, Homo sapien
tcaactgagacgatgtaacctgctg

SEQ ID NO: 3041259 - DNA, 25 bp, Homo sapien
ttctttatacctgaacgtggccgct

SEQ ID NO: 3041260 - DNA, 25 bp, Homo sapien
acagctttgatcatgagttgcccaa

SEQ ID NO: 3041261 - DNA, 25 bp, Homo sapien
taaatacgtatctcacccttgttct

SEQ ID NO: 3041262 - DNA, 25 bp, Homo sapien
gacaggtgactggaatgagccttca

SEQ ID NO: 3041263 - DNA, 25 bp, Homo sapien
cctttgggtagctaaacagctttga

SEQ ID NO: 3041264 - DNA, 25 bp, Homo sapien
aattcttgacaactgccttagagcc

SEQ ID NO: 3041265 - DNA, 25 bp, Homo sapien
ctgggctgcagtaattcttgacaac

SEQ ID NO: 3041266 - DNA, 25 bp, Homo sapien
cagtaattcttgacaactgccttag

SEQ ID NO: 3041267 - DNA, 25 bp, Homo sapien
gtcattctccccgtcctttctctgg

SEQ ID NO: 3041268 - DNA, 25 bp, Homo sapien
ctgtcgatgcgagagggaagagcca

SEQ ID NO: 3041269 - DNA, 25 bp, Homo sapien
tgtcgatgcgagagggaagagccat

SEQ ID NO: 3041270 - DNA, 25 bp, Homo sapien
tcttcctaggctgactgcttttccc

SEQ ID NO: 3041271 - DNA, 25 bp, Homo sapien
cttcttcctaggctgactgcttttc

SEQ ID NO: 3041272 - DNA, 25 bp, Homo sapien
ttcccagctctccttgaatctagga

SEQ ID NO: 3041273 - DNA, 25 bp, Homo sapien
ttttcccagctctccttgaatctag

SEQ ID NO: 3041274 - DNA, 25 bp, Homo sapien
tatagattttggatattagcctttt

SEQ ID NO: 3041275 - DNA, 25 bp, Homo sapien
atagattttggatattagccttttg

SEQ ID NO: 3041276 - DNA, 25 bp, Homo sapien
ccaggcctggtaatttccacttcga

SEQ ID NO: 3041277 - DNA, 25 bp, Homo sapien
tggttgcaggtctgagtggtcctcc

SEQ ID NO: 3041278 - DNA, 25 bp, Homo sapien
tgctgtgtgcctttgctggttgcag

SEQ ID NO: 3041279 - DNA, 25 bp, Homo sapien
gatttgctgagctgaccttccttcc

SEQ ID NO: 3041280 - DNA, 25 bp, Homo sapien
aggagagagtgtgcgatgctgggag

SEQ ID NO: 3041281 - DNA, 25 bp, Homo sapien
aaggagagagtgtgcgatgctggga

SEQ ID NO: 3041282 - DNA, 25 bp, Homo sapien
gagagtgtgcgatgctgggaggagg

SEQ ID NO: 3041283 - DNA, 25 bp, Homo sapien
gagagagtgtgcgatgctgggagga

SEQ ID NO: 3041284 - DNA, 25 bp, Homo sapien
tacagcaacctggagtaccactagg

SEQ ID NO: 3041285 - DNA, 25 bp, Homo sapien
tgtccatgggactctaagcgaggag

SEQ ID NO: 3041286 - DNA, 25 bp, Homo sapien
tgaggtaggaaccagcattatcccc

SEQ ID NO: 3041287 - DNA, 25 bp, Homo sapien
gggatttgcactccggccatttaca

SEQ ID NO: 3041288 - DNA, 25 bp, Homo sapien
gatgcttccatatttatgcggctcc

SEQ ID NO: 3041289 - DNA, 25 bp, Homo sapien
tgcttccatatttatgcggctccat

SEQ ID NO: 3041290 - DNA, 25 bp, Homo sapien
atgcttccatatttatgcggctcca

SEQ ID NO: 3041291 - DNA, 25 bp, Homo sapien
tctctagtttcacagtaaagccctt

SEQ ID NO: 3041292 - DNA, 25 bp, Homo sapien
cgagtgggaattccatttctcctcc

SEQ ID NO: 3041293 - DNA, 25 bp, Homo sapien
cagtaaagcccttgaccgagtggga

SEQ ID NO: 3041294 - DNA, 25 bp, Homo sapien
gcccttgaccgagtgggaattccat

SEQ ID NO: 3041295 - DNA, 25 bp, Homo sapien
atgaaaggtggctcagactgactgt

SEQ ID NO: 3041296 - DNA, 25 bp, Homo sapien
aaagcccagctcttggatgaaaggt

SEQ ID NO: 3041297 - DNA, 25 bp, Homo sapien
tgaaaggtggctcagactgactgtg

SEQ ID NO: 3041298 - DNA, 25 bp, Homo sapien
cccagctcttggatgaaaggtggct

SEQ ID NO: 3041299 - DNA, 25 bp, Homo sapien
tctgcctcgaggcaccatgcggggc

SEQ ID NO: 3041300 - DNA, 25 bp, Homo sapien
ccttccctagccttgttctgagtag

SEQ ID NO: 3041301 - DNA, 25 bp, Homo sapien
tccctagccttgttctgagtagcct

SEQ ID NO: 3041302 - DNA, 25 bp, Homo sapien
agccttgttctgagtagcctctgcc

SEQ ID NO: 3041303 - DNA, 25 bp, Homo sapien
tagctgcatgtcactttggaaggcc

SEQ ID NO: 3041304 - DNA, 25 bp, Homo sapien
actgtcttgatggactctgttgccc

SEQ ID NO: 3041305 - DNA, 25 bp, Homo sapien
tctgtgctacgggtttgacttgcag

SEQ ID NO: 3041306 - DNA, 25 bp, Homo sapien
catctcacagtgcagcaagggcctt

SEQ ID NO: 3041307 - DNA, 25 bp, Homo sapien
gagcttcttacagttggatgtgcac

SEQ ID NO: 3041308 - DNA, 25 bp, Homo sapien
gatcctgttgcaacacagacttggg

SEQ ID NO: 3041309 - DNA, 25 bp, Homo sapien
tgtgcacacgaatctcctggaggat

SEQ ID NO: 3041310 - DNA, 25 bp, Homo sapien
tacactttagcaggactcccaagag

SEQ ID NO: 3041311 - DNA, 25 bp, Homo sapien
tctgacggtttcatgaaggggagtt

SEQ ID NO: 3041312 - DNA, 25 bp, Homo sapien
tgagatctgacggtttcatgaaggg

SEQ ID NO: 3041313 - DNA, 25 bp, Homo sapien
agatctgacggtttcatgaagggga

SEQ ID NO: 3041314 - DNA, 25 bp, Homo sapien
tgtgagtccattaaccttcttttta

SEQ ID NO: 3041315 - DNA, 25 bp, Homo sapien
ctgcgagagcccacctcccatcctt

SEQ ID NO: 3041316 - DNA, 25 bp, Homo sapien
gcttctctctcacccgcatgggact

SEQ ID NO: 3041317 - DNA, 25 bp, Homo sapien
ccttcaacagatgtgttggcttctc

SEQ ID NO: 3041318 - DNA, 25 bp, Homo sapien
tggcttctctctcacccgcatggga

SEQ ID NO: 3041319 - DNA, 25 bp, Homo sapien
gcaagaggcagcacattgctcaggg

SEQ ID NO: 3041320 - DNA, 25 bp, Homo sapien
cactggcctaggaaataagcagctt

SEQ ID NO: 3041321 - DNA, 25 bp, Homo sapien
ccactggcctaggaaataagcagct

SEQ ID NO: 3041322 - DNA, 25 bp, Homo sapien
tggcctaggaaataagcagctttga

SEQ ID NO: 3041323 - DNA, 25 bp, Homo sapien
caggtccctgaacccacatcctttg

SEQ ID NO: 3041324 - DNA, 25 bp, Homo sapien
aattgggtcgggatattcaggatga

SEQ ID NO: 3041325 - DNA, 25 bp, Homo sapien
tcttctaattgggtcgggatattca

SEQ ID NO: 3041326 - DNA, 25 bp, Homo sapien
ggcacaggcaaggtgccaggtccct

SEQ ID NO: 3041327 - DNA, 25 bp, Homo sapien
catgatctccagcccgttgcctgtc

SEQ ID NO: 3041328 - DNA, 25 bp, Homo sapien
gagttaaacatgtaacacttcccat

SEQ ID NO: 3041329 - DNA, 25 bp, Homo sapien
ccccttgaccgtggtgagcagaggt

SEQ ID NO: 3041330 - DNA, 25 bp, Homo sapien
tgccatcctcgcctgagttaaacat

SEQ ID NO: 3041331 - DNA, 25 bp, Homo sapien
accgctctcaggaaccagtggtttt

SEQ ID NO: 3041332 - DNA, 25 bp, Homo sapien
ccgctctcaggaaccagtggttttt

SEQ ID NO: 3041333 - DNA, 25 bp, Homo sapien
ctctcaggaaccagtggtttttcat

SEQ ID NO: 3041334 - DNA, 25 bp, Homo sapien
catcaccgctctcaggaaccagtgg

SEQ ID NO: 3041335 - DNA, 25 bp, Homo sapien
gctcctataggatgtgatttctggg

SEQ ID NO: 3041336 - DNA, 25 bp, Homo sapien
tctgatatctgagctcctataggat

SEQ ID NO: 3041337 - DNA, 25 bp, Homo sapien
tatctgagctcctataggatgtgat

SEQ ID NO: 3041338 - DNA, 25 bp, Homo sapien
ctgagctcctataggatgtgatttc

SEQ ID NO: 3041339 - DNA, 25 bp, Homo sapien
ccagatcccttctggaacgtttctt

SEQ ID NO: 3041340 - DNA, 25 bp, Homo sapien
agatcccttctggaacgtttcttgg

SEQ ID NO: 3041341 - DNA, 25 bp, Homo sapien
ttctggaacgtttcttgggcattct

SEQ ID NO: 3041342 - DNA, 25 bp, Homo sapien
cagatcccttctggaacgtttcttg

SEQ ID NO: 3041343 - DNA, 25 bp, Homo sapien
catgtctacattggtctccagtgag

SEQ ID NO: 3041344 - DNA, 25 bp, Homo sapien
gcaagctgggccaatatttctccat

SEQ ID NO: 3041345 - DNA, 25 bp, Homo sapien
caagagattcatgtcagtgggcgta

SEQ ID NO: 3041346 - DNA, 25 bp, Homo sapien
gatagacgggtagcaaagtaatggc

SEQ ID NO: 3041347 - DNA, 25 bp, Homo sapien
ctagaatttaagggcaatggtacat

SEQ ID NO: 3041348 - DNA, 25 bp, Homo sapien
tagaatttaagggcaatggtacatt

SEQ ID NO: 3041349 - DNA, 25 bp, Homo sapien
catttgaaggtgacttcaggaagac

SEQ ID NO: 3041350 - DNA, 25 bp, Homo sapien
ggtacatttgaaggtgacttcagga

SEQ ID NO: 3041351 - DNA, 25 bp, Homo sapien
aaaagctcaataagggcttagtgat

SEQ ID NO: 3041352 - DNA, 25 bp, Homo sapien
aaagctcaataagggcttagtgatg

SEQ ID NO: 3041353 - DNA, 25 bp, Homo sapien
cctctggagctcggagacctctgtg

SEQ ID NO: 3041354 - DNA, 25 bp, Homo sapien
ctctggagctcggagacctctgtgc

SEQ ID NO: 3041355 - DNA, 25 bp, Homo sapien
gcctctggagctcggagacctctgt

SEQ ID NO: 3041356 - DNA, 25 bp, Homo sapien
agctggctggtttgcaaagaacagc

SEQ ID NO: 3041357 - DNA, 25 bp, Homo sapien
tcatctgctcgaccttggctttcag

SEQ ID NO: 3041358 - DNA, 25 bp, Homo sapien
ctggtttgcaaagaacagccgaggc

SEQ ID NO: 3041359 - DNA, 25 bp, Homo sapien
gtgtcctcatctgctcgaccttggc

SEQ ID NO: 3041360 - DNA, 25 bp, Homo sapien
caacgggtcaaactgagtaattcta

SEQ ID NO: 3041361 - DNA, 25 bp, Homo sapien
taatgtcaatcaacgggtcaaactg

SEQ ID NO: 3041362 - DNA, 25 bp, Homo sapien
cactttcctgtgctaatgtcaatca

SEQ ID NO: 3041363 - DNA, 25 bp, Homo sapien
tgtgctaatgtcaatcaacgggtca

SEQ ID NO: 3041364 - DNA, 25 bp, Homo sapien
cttggccgtgtgttccaaacacagc

SEQ ID NO: 3041365 - DNA, 25 bp, Homo sapien
ccgtgtgttccaaacacagctgtag

SEQ ID NO: 3041366 - DNA, 25 bp, Homo sapien
gtgttccaaacacagctgtaggtaa

SEQ ID NO: 3041367 - DNA, 25 bp, Homo sapien
tggccgtgtgttccaaacacagctg

SEQ ID NO: 3041368 - DNA, 25 bp, Homo sapien
gcggcggcagcgtcttttctccaag

SEQ ID NO: 3041369 - DNA, 25 bp, Homo sapien
ggcggcggcagcgtcttttctccaa

SEQ ID NO: 3041370 - DNA, 25 bp, Homo sapien
ctaacattgatgattgaggcttctt

SEQ ID NO: 3041371 - DNA, 25 bp, Homo sapien
aacattgatgattgaggcttctttg

SEQ ID NO: 3041372 - DNA, 25 bp, Homo sapien
atcctaacattgatgattgaggctt

SEQ ID NO: 3041373 - DNA, 25 bp, Homo sapien
cattgatgattgaggcttctttggc

SEQ ID NO: 3041374 - DNA, 25 bp, Homo sapien
gagcagcggctagtgaaaaaacttg

SEQ ID NO: 3041375 - DNA, 25 bp, Homo sapien
tgtacaatgcctagcgcataggagg

SEQ ID NO: 3041376 - DNA, 25 bp, Homo sapien
ggtgggctctgaactaatccaataa

SEQ ID NO: 3041377 - DNA, 25 bp, Homo sapien
cctggagtattaactgctgggccct

SEQ ID NO: 3041378 - DNA, 25 bp, Homo sapien
gccttatacatcatcttaatgggca

SEQ ID NO: 3041379 - DNA, 25 bp, Homo sapien
acccctggccttatacatcatctta

SEQ ID NO: 3041380 - DNA, 25 bp, Homo sapien
tttaagctcacaatgggtcgtaaag

SEQ ID NO: 3041381 - DNA, 25 bp, Homo sapien
ttttcttatttaagctcacaatggg

SEQ ID NO: 3041382 - DNA, 25 bp, Homo sapien
tctggctcaaaataccagtagtgcc

SEQ ID NO: 3041383 - DNA, 25 bp, Homo sapien
gagctgtagttttaggagtgctccc

SEQ ID NO: 3041384 - DNA, 25 bp, Homo sapien
cacaatgtgtggatgggtattaccc

SEQ ID NO: 3041385 - DNA, 25 bp, Homo sapien
ccactaaaacagaaagcgaagagat

SEQ ID NO: 3041386 - DNA, 25 bp, Homo sapien
aacaccaacgatgcggatgggctcc

SEQ ID NO: 3041387 - DNA, 25 bp, Homo sapien
ccacagcgagcagcgagtagtcttt

SEQ ID NO: 3041388 - DNA, 25 bp, Homo sapien
tggccacatgagcaataatggagct

SEQ ID NO: 3041389 - DNA, 25 bp, Homo sapien
taatggagctaactccccacaggga

SEQ ID NO: 3041390 - DNA, 25 bp, Homo sapien
ttcattggcctctctctaccctggg

SEQ ID NO: 3041391 - DNA, 25 bp, Homo sapien
cttcattggcctctctctaccctgg

SEQ ID NO: 3041392 - DNA, 25 bp, Homo sapien
agagctcccggcatgccgcagggct

SEQ ID NO: 3041393 - DNA, 25 bp, Homo sapien
tatcttggcttggtgatatgacatc

SEQ ID NO: 3041394 - DNA, 25 bp, Homo sapien
cgtttcttggcatacggttcccatg

SEQ ID NO: 3041395 - DNA, 25 bp, Homo sapien
tggcttggtgatatgacatcatttc

SEQ ID NO: 3041396 - DNA, 25 bp, Homo sapien
caaatctgttactgaaggttaaagt

SEQ ID NO: 3041397 - DNA, 25 bp, Homo sapien
ctacaaatctgttactgaaggttaa

SEQ ID NO: 3041398 - DNA, 25 bp, Homo sapien
aatctgttactgaaggttaaagtca

SEQ ID NO: 3041399 - DNA, 25 bp, Homo sapien
tactacaaatctgttactgaaggtt

SEQ ID NO: 3041400 - DNA, 25 bp, Homo sapien
ggagtcctgatctgtttgcacaatt

SEQ ID NO: 3041401 - DNA, 25 bp, Homo sapien
taatttccaggataatggagtcctg

SEQ ID NO: 3041402 - DNA, 25 bp, Homo sapien
ggacctggtgctaacttaatttcca

SEQ ID NO: 3041403 - DNA, 25 bp, Homo sapien
ccattaccagctaatccagatggac

SEQ ID NO: 3041404 - DNA, 25 bp, Homo sapien
tgcctcttgagtacttgccctttcc

SEQ ID NO: 3041405 - DNA, 25 bp, Homo sapien
catcatgacacttgttatggctgag

SEQ ID NO: 3041406 - DNA, 25 bp, Homo sapien
ggctgtgctgaacgcctttaaacat

SEQ ID NO: 3041407 - DNA, 25 bp, Homo sapien
cagatgaggctctgcacgattgcgt

SEQ ID NO: 3041408 - DNA, 25 bp, Homo sapien
agtccggcttggtggtaggctggca

SEQ ID NO: 3041409 - DNA, 25 bp, Homo sapien
aaaagccgtggatatgtggccctgg

SEQ ID NO: 3041410 - DNA, 25 bp, Homo sapien
aggaaaagccgtggatatgtggccc

SEQ ID NO: 3041411 - DNA, 25 bp, Homo sapien
tccggcttggtggtaggctggcatg

SEQ ID NO: 3041412 - DNA, 25 bp, Homo sapien
ctgagaagtccatcatccgggcagg

SEQ ID NO: 3041413 - DNA, 25 bp, Homo sapien
cacagaatgagtgccatctagggct

SEQ ID NO: 3041414 - DNA, 25 bp, Homo sapien
gatgaagggttcactggcatgccaa

SEQ ID NO: 3041415 - DNA, 25 bp, Homo sapien
cccaagtggatgttagtgaggcaca

SEQ ID NO: 3041416 - DNA, 25 bp, Homo sapien
ttctaaggcagcgtactggaacacc

SEQ ID NO: 3041417 - DNA, 25 bp, Homo sapien
taaggcagcgtactggaacaccttc

SEQ ID NO: 3041418 - DNA, 25 bp, Homo sapien
ctggcaattctaaggcagcgtactg

SEQ ID NO: 3041419 - DNA, 25 bp, Homo sapien
caattctaaggcagcgtactggaac

SEQ ID NO: 3041420 - DNA, 25 bp, Homo sapien
agggaaaatgatggtctggtggttt

SEQ ID NO: 3041421 - DNA, 25 bp, Homo sapien
tctaatagcttcttgaagggaaaat

SEQ ID NO: 3041422 - DNA, 25 bp, Homo sapien
catctaatagcttcttgaagggaaa

SEQ ID NO: 3041423 - DNA, 25 bp, Homo sapien
atcatctaatagcttcttgaaggga

SEQ ID NO: 3041424 - DNA, 25 bp, Homo sapien
gctttttctcgagaggtcttaatga

SEQ ID NO: 3041425 - DNA, 25 bp, Homo sapien
aacggccacactatggatcgctgcc

SEQ ID NO: 3041426 - DNA, 25 bp, Homo sapien
ggaatacgaggtctttgctgtattg

SEQ ID NO: 3041427 - DNA, 25 bp, Homo sapien
gtattgcaaggcagaacgctttttc

SEQ ID NO: 3041428 - DNA, 25 bp, Homo sapien
gatgaaaggtggcaagtggggatgc

SEQ ID NO: 3041429 - DNA, 25 bp, Homo sapien
atgaaaggtggcaagtggggatgcc

SEQ ID NO: 3041430 - DNA, 25 bp, Homo sapien
ggatgaaaggtggcaagtggggatg

SEQ ID NO: 3041431 - DNA, 25 bp, Homo sapien
gggatgaaaggtggcaagtggggat

SEQ ID NO: 3041432 - DNA, 25 bp, Homo sapien
gcttgggccgaccaaacgctggcct

SEQ ID NO: 3041433 - DNA, 25 bp, Homo sapien
tgcagccccagtgcgtctgcatgta

SEQ ID NO: 3041434 - DNA, 25 bp, Homo sapien
tgagcttgggccgaccaaacgctgg

SEQ ID NO: 3041435 - DNA, 25 bp, Homo sapien
ccagtgcgtctgcatgtaaatgagc

SEQ ID NO: 3041436 - DNA, 25 bp, Homo sapien
tgactggccaaagtggccccaaaat

SEQ ID NO: 3041437 - DNA, 25 bp, Homo sapien
tgattgatgccttcgtgactggcca

SEQ ID NO: 3041438 - DNA, 25 bp, Homo sapien
tttggatatctgcagacctgagtgg

SEQ ID NO: 3041439 - DNA, 25 bp, Homo sapien
cctgatgttggtcattttggatatc

SEQ ID NO: 3041440 - DNA, 25 bp, Homo sapien
gccggaggcagcaagtacatcagat

SEQ ID NO: 3041441 - DNA, 25 bp, Homo sapien
ggtgccggaggcagcaagtacatca

SEQ ID NO: 3041442 - DNA, 25 bp, Homo sapien
gaggcagcaagtacatcagatatga

SEQ ID NO: 3041443 - DNA, 25 bp, Homo sapien
cagcaagtacatcagatatgattcc

SEQ ID NO: 3041444 - DNA, 25 bp, Homo sapien
gcatgccacagggacatgttgccaa

SEQ ID NO: 3041445 - DNA, 25 bp, Homo sapien
tgcctgctgcagaggttgaagtcag

SEQ ID NO: 3041446 - DNA, 25 bp, Homo sapien
taacaattgacccacacaactcatg

SEQ ID NO: 3041447 - DNA, 25 bp, Homo sapien
agactctgatgacctgggccacatg

SEQ ID NO: 3041448 - DNA, 25 bp, Homo sapien
aaccctggcgcaccactgctcagtt

SEQ ID NO: 3041449 - DNA, 25 bp, Homo sapien
aagggcccaaccctggcgcaccact

SEQ ID NO: 3041450 - DNA, 25 bp, Homo sapien
cagttccgctggatgctcaagactc

SEQ ID NO: 3041451 - DNA, 25 bp, Homo sapien
tgctcagttccgctggatgctcaag

SEQ ID NO: 3041452 - DNA, 25 bp, Homo sapien
tttgaagacataagctgcttcggat

SEQ ID NO: 3041453 - DNA, 25 bp, Homo sapien
tgcttcggatcgtaggcctgcttag

SEQ ID NO: 3041454 - DNA, 25 bp, Homo sapien
gagtttcctcacaagttctcctaga

SEQ ID NO: 3041455 - DNA, 25 bp, Homo sapien
caccaaactgtctacagcttcagtg

SEQ ID NO: 3041456 - DNA, 25 bp, Homo sapien
gaagtccgcacttaagagatctaca

SEQ ID NO: 3041457 - DNA, 25 bp, Homo sapien
tcacagacgggaccataaggagtag

SEQ ID NO: 3041458 - DNA, 25 bp, Homo sapien
gaggcgactcctcctacagttaagt

SEQ ID NO: 3041459 - DNA, 25 bp, Homo sapien
taagagccgtctattggttttccca

SEQ ID NO: 3041460 - DNA, 25 bp, Homo sapien
cgggttcgcgcggagggcaactcac

SEQ ID NO: 3041461 - DNA, 25 bp, Homo sapien
aagaatgggttctgccttggcatcg

SEQ ID NO: 3041462 - DNA, 25 bp, Homo sapien
gaagactcaggggacccaagaatgg

SEQ ID NO: 3041463 - DNA, 25 bp, Homo sapien
agtggtaacactgcaagaggcctgg

SEQ ID NO: 3041464 - DNA, 25 bp, Homo sapien
gctgattccctcgaagtggcgcgga

SEQ ID NO: 3041465 - DNA, 25 bp, Homo sapien
gcgcagcgggttgttgttgcacaca

SEQ ID NO: 3041466 - DNA, 25 bp, Homo sapien
agtttagcgcggctcagcgatggcc

SEQ ID NO: 3041467 - DNA, 25 bp, Homo sapien
ccagtggccggcatagtagaggtcc

SEQ ID NO: 3041468 - DNA, 25 bp, Homo sapien
ggtccttcaaggatgctagccgcag

SEQ ID NO: 3041469 - DNA, 25 bp, Homo sapien
agcttttacgctggtcctgggagaa

SEQ ID NO: 3041470 - DNA, 25 bp, Homo sapien
gagacctgcttaggcttccccaagt

SEQ ID NO: 3041471 - DNA, 25 bp, Homo sapien
tagccgcagggaagtgtcgcttctc

SEQ ID NO: 3041472 - DNA, 25 bp, Homo sapien
cctggagacgcggtgctgacgcgcc

SEQ ID NO: 3041473 - DNA, 25 bp, Homo sapien
tcctcgctgcattttaattcctggc

SEQ ID NO: 3041474 - DNA, 25 bp, Homo sapien
cgtgagcgccgtgcgctcctggaga

SEQ ID NO: 3041475 - DNA, 25 bp, Homo sapien
acaccgagcgggaagcctcttgctg

SEQ ID NO: 3041476 - DNA, 25 bp, Homo sapien
ctgcctgaagctaggggtgctctct

SEQ ID NO: 3041477 - DNA, 25 bp, Homo sapien
accccacgacaagcccttcctgtgt

SEQ ID NO: 3041478 - DNA, 25 bp, Homo sapien
aagctaggggtgctctctgatacct

SEQ ID NO: 3041479 - DNA, 25 bp, Homo sapien
cgtggctctgtgtcagtctgcctcc

SEQ ID NO: 3041480 - DNA, 25 bp, Homo sapien
gagacctggtttggtgcccttgacc

SEQ ID NO: 3041481 - DNA, 25 bp, Homo sapien
tctgcttgtagtgcgtctgccgtct

SEQ ID NO: 3041482 - DNA, 25 bp, Homo sapien
gatgcgaaactgtccccaatcaggt

SEQ ID NO: 3041483 - DNA, 25 bp, Homo sapien
gatctccatagcttgaagggcctga

SEQ ID NO: 3041484 - DNA, 25 bp, Homo sapien
cattgcagccagttgggttatgttg

SEQ ID NO: 3041485 - DNA, 25 bp, Homo sapien
gccagttgggttatgttgtcgatat

SEQ ID NO: 3041486 - DNA, 25 bp, Homo sapien
tgttgtcgatatttagtcattctat

SEQ ID NO: 3041487 - DNA, 25 bp, Homo sapien
tattcagaattggttacattgcagc

SEQ ID NO: 3041488 - DNA, 25 bp, Homo sapien
gtatcttctgctgttctctctttta

SEQ ID NO: 3041489 - DNA, 25 bp, Homo sapien
ttgtatcttctgctgttctctcttt

SEQ ID NO: 3041490 - DNA, 25 bp, Homo sapien
cttctgctgttctctcttttaatgt

SEQ ID NO: 3041491 - DNA, 25 bp, Homo sapien
tctgctgttctctcttttaatgttt

SEQ ID NO: 3041492 - DNA, 25 bp, Homo sapien
taaaggaattggttgttccatcatc

SEQ ID NO: 3041493 - DNA, 25 bp, Homo sapien
tttaaaggaattggttgttccatca

SEQ ID NO: 3041494 - DNA, 25 bp, Homo sapien
attggttgttccatcatctggtgtc

SEQ ID NO: 3041495 - DNA, 25 bp, Homo sapien
aaggaattggttgttccatcatctg

SEQ ID NO: 3041496 - DNA, 25 bp, Homo sapien
caattccttgttggctgagcatgca

SEQ ID NO: 3041497 - DNA, 25 bp, Homo sapien
gagcatgcatatttccaagaacttg

SEQ ID NO: 3041498 - DNA, 25 bp, Homo sapien
tcaggacacaattccttgttggctg

SEQ ID NO: 3041499 - DNA, 25 bp, Homo sapien
tcttgagatgcggattccagcaaaa

SEQ ID NO: 3041500 - DNA, 25 bp, Homo sapien
tctttctcttcgagggggcttgccc

SEQ ID NO: 3041501 - DNA, 25 bp, Homo sapien
cactgagcctgtcttaccatggaac

SEQ ID NO: 3041502 - DNA, 25 bp, Homo sapien
tctcgtctttaacaaagcctattct

SEQ ID NO: 3041503 - DNA, 25 bp, Homo sapien
tggaactgatttcgcctactgcaga

SEQ ID NO: 3041504 - DNA, 25 bp, Homo sapien
tgggaaggaccacagtggatccatg

SEQ ID NO: 3041505 - DNA, 25 bp, Homo sapien
ggatccatggctctgtgttccaccc

SEQ ID NO: 3041506 - DNA, 25 bp, Homo sapien
ggaccacagtggatccatggctctg

SEQ ID NO: 3041507 - DNA, 25 bp, Homo sapien
ctgtcagctgtctggatcctgggaa

SEQ ID NO: 3041508 - DNA, 25 bp, Homo sapien
gttttcatggccctgctctggtggt

SEQ ID NO: 3041509 - DNA, 25 bp, Homo sapien
aaaatccagccgaatgagagccttg

SEQ ID NO: 3041510 - DNA, 25 bp, Homo sapien
ggtggtttgccagaagagtcttccc

SEQ ID NO: 3041511 - DNA, 25 bp, Homo sapien
tgccttccgagtgacagtagcaaag

SEQ ID NO: 3041512 - DNA, 25 bp, Homo sapien
taccaccagggtcaccaagtggatg

SEQ ID NO: 3041513 - DNA, 25 bp, Homo sapien
tagccacatagtcatgaacgtgagg

SEQ ID NO: 3041514 - DNA, 25 bp, Homo sapien
gaacctacacttgtgagggcctgca

SEQ ID NO: 3041515 - DNA, 25 bp, Homo sapien
caagcagtggtaccacagctgagat

SEQ ID NO: 3041516 - DNA, 25 bp, Homo sapien
gatggctgctttgaaagtgggcttt

SEQ ID NO: 3041517 - DNA, 25 bp, Homo sapien
ctcagagttgcattctaagtgggca

SEQ ID NO: 3041518 - DNA, 25 bp, Homo sapien
ctaagtgggcaaggatggctgcttt

SEQ ID NO: 3041519 - DNA, 25 bp, Homo sapien
ggtaacactcagagttgcattctaa

SEQ ID NO: 3041520 - DNA, 25 bp, Homo sapien
gagatggattgagctgggagggagc

SEQ ID NO: 3041521 - DNA, 25 bp, Homo sapien
taggaagtagattcttcaggagatg

SEQ ID NO: 3041522 - DNA, 25 bp, Homo sapien
ttaggaagtagattcttcaggagat

SEQ ID NO: 3041523 - DNA, 25 bp, Homo sapien
tcctttcacccgtcttagctcagga

SEQ ID NO: 3041524 - DNA, 25 bp, Homo sapien
tgccctcctttcacccgtcttagct

SEQ ID NO: 3041525 - DNA, 25 bp, Homo sapien
ttcacccgtcttagctcaggatcct

SEQ ID NO: 3041526 - DNA, 25 bp, Homo sapien
tcttagctcaggatcctctcccatg

SEQ ID NO: 3041527 - DNA, 25 bp, Homo sapien
ttccacgcattgtctgcacctcagg

SEQ ID NO: 3041528 - DNA, 25 bp, Homo sapien
accgctggccattgggatctgggca

SEQ ID NO: 3041529 - DNA, 25 bp, Homo sapien
ctcccagtggtgaaacagctgtgat

SEQ ID NO: 3041530 - DNA, 25 bp, Homo sapien
ttggctgagggtagatgcccctcat

SEQ ID NO: 3041531 - DNA, 25 bp, Homo sapien
cattactattgctcattttgatctg

SEQ ID NO: 3041532 - DNA, 25 bp, Homo sapien
tgcgtaatgcagcaagttcattagt

SEQ ID NO: 3041533 - DNA, 25 bp, Homo sapien
taacaactttcattactattgctca

SEQ ID NO: 3041534 - DNA, 25 bp, Homo sapien
ggatttcattactaatggagacagc

SEQ ID NO: 3041535 - DNA, 25 bp, Homo sapien
tcatggagtagacccacaatgccat

SEQ ID NO: 3041536 - DNA, 25 bp, Homo sapien
tggagtagacccacaatgccatcct

SEQ ID NO: 3041537 - DNA, 25 bp, Homo sapien
gggttcatggagtagacccacaatg

SEQ ID NO: 3041538 - DNA, 25 bp, Homo sapien
ctgggggttcatggagtagacccac

SEQ ID NO: 3041539 - DNA, 25 bp, Homo sapien
ccttaatctcatcataagcatcctt

SEQ ID NO: 3041540 - DNA, 25 bp, Homo sapien
taatctcatcataagcatccttttc

SEQ ID NO: 3041541 - DNA, 25 bp, Homo sapien
tctcatcataagcatccttttccca

SEQ ID NO: 3041542 - DNA, 25 bp, Homo sapien
tcatcataagcatccttttcccagc

SEQ ID NO: 3041543 - DNA, 25 bp, Homo sapien
cttctgaagttctggtaaaggagag

SEQ ID NO: 3041544 - DNA, 25 bp, Homo sapien
tggttaggagaggagcgtttgcagc

SEQ ID NO: 3041545 - DNA, 25 bp, Homo sapien
agatcaaatagaatcgtggttagga

SEQ ID NO: 3041546 - DNA, 25 bp, Homo sapien
gcagcaggcagcagtatcttctgaa

SEQ ID NO: 3041547 - DNA, 25 bp, Homo sapien
tggcagatggtcagcctaggagcca

SEQ ID NO: 3041548 - DNA, 25 bp, Homo sapien
tcacaccattgaggatgtatggaaa

SEQ ID NO: 3041549 - DNA, 25 bp, Homo sapien
tggaaattggcagatggtcagccta

SEQ ID NO: 3041550 - DNA, 25 bp, Homo sapien
agttcacaccattgaggatgtatgg

SEQ ID NO: 3041551 - DNA, 25 bp, Homo sapien
gcaaaatgatgaggggccacagcac

SEQ ID NO: 3041552 - DNA, 25 bp, Homo sapien
ccatttccagcaacagtgggcaaaa

SEQ ID NO: 3041553 - DNA, 25 bp, Homo sapien
ataccatttccagcaacagtgggca

SEQ ID NO: 3041554 - DNA, 25 bp, Homo sapien
tccagcaacagtgggcaaaatgatg

SEQ ID NO: 3041555 - DNA, 25 bp, Homo sapien
gtggataaacataggcatagaggaa

SEQ ID NO: 3041556 - DNA, 25 bp, Homo sapien
ttgagtggataaacataggcataga

SEQ ID NO: 3041557 - DNA, 25 bp, Homo sapien
ggataaacataggcatagaggaagg

SEQ ID NO: 3041558 - DNA, 25 bp, Homo sapien
tggataaacataggcatagaggaag

SEQ ID NO: 3041559 - DNA, 25 bp, Homo sapien
cttcattgttcctaccacggcagcc

SEQ ID NO: 3041560 - DNA, 25 bp, Homo sapien
tcttcattgttcctaccacggcagc

SEQ ID NO: 3041561 - DNA, 25 bp, Homo sapien
ttcttcattgttcctaccacggcag

SEQ ID NO: 3041562 - DNA, 25 bp, Homo sapien
ctctttctcagttaccgctaggctc

SEQ ID NO: 3041563 - DNA, 25 bp, Homo sapien
cctctttctcagttaccgctaggct

SEQ ID NO: 3041564 - DNA, 25 bp, Homo sapien
tctttctcagttaccgctaggctca

SEQ ID NO: 3041565 - DNA, 25 bp, Homo sapien
ctttctcagttaccgctaggctcat

SEQ ID NO: 3041566 - DNA, 25 bp, Homo sapien
gtgcccactgaggccattgggaatc

SEQ ID NO: 3041567 - DNA, 25 bp, Homo sapien
ataaatggtccttttgtctgcacca

SEQ ID NO: 3041568 - DNA, 25 bp, Homo sapien
taaatggtccttttgtctgcaccac

SEQ ID NO: 3041569 - DNA, 25 bp, Homo sapien
tataaatggtccttttgtctgcacc

SEQ ID NO: 3041570 - DNA, 25 bp, Homo sapien
ctatttagaccctctctgcttgtgg

SEQ ID NO: 3041571 - DNA, 25 bp, Homo sapien
gatggagtaggagaccatgtctacc

SEQ ID NO: 3041572 - DNA, 25 bp, Homo sapien
gccaagtctgtgaagtaccatttcc

SEQ ID NO: 3041573 - DNA, 25 bp, Homo sapien
tacaccttttatgtggccaagtctg

SEQ ID NO: 3041574 - DNA, 25 bp, Homo sapien
aagatggagtaggagaccatgtcta

SEQ ID NO: 3041575 - DNA, 25 bp, Homo sapien
cttgaaggttatttttggtgctctt

SEQ ID NO: 3041576 - DNA, 25 bp, Homo sapien
ttggtgctcttctctgcttctttca

SEQ ID NO: 3041577 - DNA, 25 bp, Homo sapien
gaaggttatttttggtgctcttctc

SEQ ID NO: 3041578 - DNA, 25 bp, Homo sapien
tggtgctcttctctgcttctttcat

SEQ ID NO: 3041579 - DNA, 25 bp, Homo sapien
gatcttcacactcaatctccttaca

SEQ ID NO: 3041580 - DNA, 25 bp, Homo sapien
ttacactttgatattccccagggcc

SEQ ID NO: 3041581 - DNA, 25 bp, Homo sapien
ttctatcatgcaggcacattcttgg

SEQ ID NO: 3041582 - DNA, 25 bp, Homo sapien
tctggtcaattctatcatgcaggca

SEQ ID NO: 3041583 - DNA, 25 bp, Homo sapien
gtgatatggtggaaagatttgagat

SEQ ID NO: 3041584 - DNA, 25 bp, Homo sapien
tgtgatatggtggaaagatttgaga

SEQ ID NO: 3041585 - DNA, 25 bp, Homo sapien
tgatatggtggaaagatttgagatg

SEQ ID NO: 3041586 - DNA, 25 bp, Homo sapien
atatggtggaaagatttgagatggg

SEQ ID NO: 3041587 - DNA, 25 bp, Homo sapien
aaaatagctgaccaccttcaggctc

SEQ ID NO: 3041588 - DNA, 25 bp, Homo sapien
aatagctgaccaccttcaggctcat

SEQ ID NO: 3041589 - DNA, 25 bp, Homo sapien
aaatagctgaccaccttcaggctca

SEQ ID NO: 3041590 - DNA, 25 bp, Homo sapien
caaaatagctgaccaccttcaggct

SEQ ID NO: 3041591 - DNA, 25 bp, Homo sapien
ttcctgcggatctcttccccttggg

SEQ ID NO: 3041592 - DNA, 25 bp, Homo sapien
ttgccactgcccttggtaaagctat

SEQ ID NO: 3041593 - DNA, 25 bp, Homo sapien
cactgcccttggtaaagctatatat

SEQ ID NO: 3041594 - DNA, 25 bp, Homo sapien
tgcccttggtaaagctatatatcat

SEQ ID NO: 3041595 - DNA, 25 bp, Homo sapien
tccacgttggcttctggctggatgg

SEQ ID NO: 3041596 - DNA, 25 bp, Homo sapien
ctgtaataatgccagtgacatttat

SEQ ID NO: 3041597 - DNA, 25 bp, Homo sapien
tgtaataatgccagtgacatttatt

SEQ ID NO: 3041598 - DNA, 25 bp, Homo sapien
cactgtaataatgccagtgacattt

SEQ ID NO: 3041599 - DNA, 25 bp, Homo sapien
gtaataatgccagtgacatttattc

SEQ ID NO: 3041600 - DNA, 25 bp, Homo sapien
tatggagagtttaggcatctgattc

SEQ ID NO: 3041601 - DNA, 25 bp, Homo sapien
acctgctcgccaggtggtatggaga

SEQ ID NO: 3041602 - DNA, 25 bp, Homo sapien
ctcgccaggtggtatggagagttta

SEQ ID NO: 3041603 - DNA, 25 bp, Homo sapien
tttctataaagacctgctcgccagg

SEQ ID NO: 3041604 - DNA, 25 bp, Homo sapien
tgacacctacgggtagtgttttcat

SEQ ID NO: 3041605 - DNA, 25 bp, Homo sapien
ctagtgctgacacctacgggtagtg

SEQ ID NO: 3041606 - DNA, 25 bp, Homo sapien
tgatggttgacacctgactagtgct

SEQ ID NO: 3041607 - DNA, 25 bp, Homo sapien
cccagacataataaagatgatggtt

SEQ ID NO: 3041608 - DNA, 25 bp, Homo sapien
atggtgactgtagggcagggatggc

SEQ ID NO: 3041609 - DNA, 25 bp, Homo sapien
gccatggtgactgtagggcagggat

SEQ ID NO: 3041610 - DNA, 25 bp, Homo sapien
gcccagttctgatgcggccaacgcc

SEQ ID NO: 3041611 - DNA, 25 bp, Homo sapien
tgatgcggccaacgcccccgaagtc

SEQ ID NO: 3041612 - DNA, 25 bp, Homo sapien
aaatgcgaaggccataaagcgttcc

SEQ ID NO: 3041613 - DNA, 25 bp, Homo sapien
aagcattccctaggcagacagcggg

SEQ ID NO: 3041614 - DNA, 25 bp, Homo sapien
tttatgtctctcaaccccgctgggt

SEQ ID NO: 3041615 - DNA, 25 bp, Homo sapien
tcttggcccttgtgtaagaacgagg

SEQ ID NO: 3041616 - DNA, 25 bp, Homo sapien
aattaggttggcctgattccttgag

SEQ ID NO: 3041617 - DNA, 25 bp, Homo sapien
ctgcttcttgagaggcgttcgacct

SEQ ID NO: 3041618 - DNA, 25 bp, Homo sapien
agaggcgttcgaccttgcagaggcc

SEQ ID NO: 3041619 - DNA, 25 bp, Homo sapien
tgcccaggtctcttagaattaggtt

SEQ ID NO: 3041620 - DNA, 25 bp, Homo sapien
acttacagggccatgacatcttctc

SEQ ID NO: 3041621 - DNA, 25 bp, Homo sapien
gggaatcaccaatgtcttctttcag

SEQ ID NO: 3041622 - DNA, 25 bp, Homo sapien
caaaatttcagagttgtaggagacc

SEQ ID NO: 3041623 - DNA, 25 bp, Homo sapien
gccccatggattgcctggaatcaaa

SEQ ID NO: 3041624 - DNA, 25 bp, Homo sapien
ataaggataaaaagtctgccccatg

SEQ ID NO: 3041625 - DNA, 25 bp, Homo sapien
tcattcttagttgctatgtcctcta

SEQ ID NO: 3041626 - DNA, 25 bp, Homo sapien
cttagttgctatgtcctctatggaa

SEQ ID NO: 3041627 - DNA, 25 bp, Homo sapien
gcttgtaccttcgattgcagcatct

SEQ ID NO: 3041628 - DNA, 25 bp, Homo sapien
ctcaacacctgcttgtaccttcgat

SEQ ID NO: 3041629 - DNA, 25 bp, Homo sapien
cattgtgagcctccagtgacctctc

SEQ ID NO: 3041630 - DNA, 25 bp, Homo sapien
gccatagctgttgctattgtcattg

SEQ ID NO: 3041631 - DNA, 25 bp, Homo sapien
tttgttaggaccattgtgagcctcc

SEQ ID NO: 3041632 - DNA, 25 bp, Homo sapien
gttgtcctctttgttaggaccattg

SEQ ID NO: 3041633 - DNA, 25 bp, Homo sapien
ggcatatgtaactttggagatggct

SEQ ID NO: 3041634 - DNA, 25 bp, Homo sapien
ggggcatatgtaactttggagatgg

SEQ ID NO: 3041635 - DNA, 25 bp, Homo sapien
gggcatatgtaactttggagatggc

SEQ ID NO: 3041636 - DNA, 25 bp, Homo sapien
cggggcatatgtaactttggagatg

SEQ ID NO: 3041637 - DNA, 25 bp, Homo sapien
caaagtagttcacacatttcacaag

SEQ ID NO: 3041638 - DNA, 25 bp, Homo sapien
cagatggctgactcagtcttaactt

SEQ ID NO: 3041639 - DNA, 25 bp, Homo sapien
aactttggtgttcaccagctgcctg

SEQ ID NO: 3041640 - DNA, 25 bp, Homo sapien
gattttaggccaacccccatctcat

SEQ ID NO: 3041641 - DNA, 25 bp, Homo sapien
cagtcttaactttggtgttcaccag

SEQ ID NO: 3041642 - DNA, 25 bp, Homo sapien
cagagcaggtacggctctggggatg

SEQ ID NO: 3041643 - DNA, 25 bp, Homo sapien
ctggggatggctggatcaggtgcaa

SEQ ID NO: 3041644 - DNA, 25 bp, Homo sapien
tggggatggctggatcaggtgcaag

SEQ ID NO: 3041645 - DNA, 25 bp, Homo sapien
ggggatggctggatcaggtgcaagt

SEQ ID NO: 3041646 - DNA, 25 bp, Homo sapien
tcatgagtctttgaggatgcccaca

SEQ ID NO: 3041647 - DNA, 25 bp, Homo sapien
catgagtctttgaggatgcccacag

SEQ ID NO: 3041648 - DNA, 25 bp, Homo sapien
tgagtctttgaggatgcccacaggg

SEQ ID NO: 3041649 - DNA, 25 bp, Homo sapien
agtctttgaggatgcccacagggcc

SEQ ID NO: 3041650 - DNA, 25 bp, Homo sapien
tcaggttaatgtgcacaacggtggc

SEQ ID NO: 3041651 - DNA, 25 bp, Homo sapien
tccctttgaagctagacgagaactc

SEQ ID NO: 3041652 - DNA, 25 bp, Homo sapien
ggtccaaactgacagggcattccac

SEQ ID NO: 3041653 - DNA, 25 bp, Homo sapien
gcatggcaaacagttgtggagcaca

SEQ ID NO: 3041654 - DNA, 25 bp, Homo sapien
gaatccggcagtccctagaggactc

SEQ ID NO: 3041655 - DNA, 25 bp, Homo sapien
tccctagaggactccgaggcgatct

SEQ ID NO: 3041656 - DNA, 25 bp, Homo sapien
agcagaatccggcagtccctagagg

SEQ ID NO: 3041657 - DNA, 25 bp, Homo sapien
ccgaggcgatctttcgaaagctgtt

SEQ ID NO: 3041658 - DNA, 25 bp, Homo sapien
tgggttgggctgtaccaaggtcacc

SEQ ID NO: 3041659 - DNA, 25 bp, Homo sapien
gctgtggacattctgagccttggtt

SEQ ID NO: 3041660 - DNA, 25 bp, Homo sapien
gagccttggttccctcatctttcat

SEQ ID NO: 3041661 - DNA, 25 bp, Homo sapien
tgagccttggttccctcatctttca

SEQ ID NO: 3041662 - DNA, 25 bp, Homo sapien
ttctgagccttggttccctcatctt

SEQ ID NO: 3041663 - DNA, 25 bp, Homo sapien
caaggactggtgagggtcgggtctc

SEQ ID NO: 3041664 - DNA, 25 bp, Homo sapien
tgcctttcttctccaaggactggtg

SEQ ID NO: 3041665 - DNA, 25 bp, Homo sapien
gggtcgggtctccagggagtcatct

SEQ ID NO: 3041666 - DNA, 25 bp, Homo sapien
cagggagtcatctgagagagtgtta

SEQ ID NO: 3041667 - DNA, 25 bp, Homo sapien
tggagtgcatcaacccaatgcccat

SEQ ID NO: 3041668 - DNA, 25 bp, Homo sapien
gagtgcatcaacccaatgcccatga

SEQ ID NO: 3041669 - DNA, 25 bp, Homo sapien
actggagtgcatcaacccaatgccc

SEQ ID NO: 3041670 - DNA, 25 bp, Homo sapien
ggagtgcatcaacccaatgcccatg

SEQ ID NO: 3041671 - DNA, 25 bp, Homo sapien
aaaaggctcttgtgtgagccattcc

SEQ ID NO: 3041672 - DNA, 25 bp, Homo sapien
ccaaaaaggctcttgtgtgagccat

SEQ ID NO: 3041673 - DNA, 25 bp, Homo sapien
ggctcttgtgtgagccattccccac

SEQ ID NO: 3041674 - DNA, 25 bp, Homo sapien
aaaggctcttgtgtgagccattccc

SEQ ID NO: 3041675 - DNA, 25 bp, Homo sapien
gtcacgaatcgaaacatgtttaatc

SEQ ID NO: 3041676 - DNA, 25 bp, Homo sapien
gacaagtcacgaatcgaaacatgtt

SEQ ID NO: 3041677 - DNA, 25 bp, Homo sapien
tcgccaaaagacaagtcacgaatcg

SEQ ID NO: 3041678 - DNA, 25 bp, Homo sapien
tttgcatttcgccaaaagacaagtc

SEQ ID NO: 3041679 - DNA, 25 bp, Homo sapien
ctgggcacactgtagggcaccagct

SEQ ID NO: 3041680 - DNA, 25 bp, Homo sapien
tgctgtagcttgcagtagggaggtc

SEQ ID NO: 3041681 - DNA, 25 bp, Homo sapien
actctgctgggcacactgtagggca

SEQ ID NO: 3041682 - DNA, 25 bp, Homo sapien
ctgctgggcacactgtagggcacca

SEQ ID NO: 3041683 - DNA, 25 bp, Homo sapien
gttctgttagaactgtcgccactcg

SEQ ID NO: 3041684 - DNA, 25 bp, Homo sapien
agaactgtcgccactcgtctggatg

SEQ ID NO: 3041685 - DNA, 25 bp, Homo sapien
gccactcgtctggatgtgcattcgc

SEQ ID NO: 3041686 - DNA, 25 bp, Homo sapien
ccaacactgacagttctgttagaac

SEQ ID NO: 3041687 - DNA, 25 bp, Homo sapien
gagagcaagggtttgaatttgcccc

SEQ ID NO: 3041688 - DNA, 25 bp, Homo sapien
ggagagcaagggtttgaatttgccc

SEQ ID NO: 3041689 - DNA, 25 bp, Homo sapien
aggcagagcttgtcctcaagaagcc

SEQ ID NO: 3041690 - DNA, 25 bp, Homo sapien
tagagcccatgctcgcacttctgca

SEQ ID NO: 3041691 - DNA, 25 bp, Homo sapien
tctgcaccgtatggcaaggttgagt

SEQ ID NO: 3041692 - DNA, 25 bp, Homo sapien
aaggttgagtcaggcagagcttgtc

SEQ ID NO: 3041693 - DNA, 25 bp, Homo sapien
tcaagccaatcagacatcagagaaa

SEQ ID NO: 3041694 - DNA, 25 bp, Homo sapien
gacctagggatgtgaagagcaacag

SEQ ID NO: 3041695 - DNA, 25 bp, Homo sapien
gaggtgggcagtaaaacacatgctc

SEQ ID NO: 3041696 - DNA, 25 bp, Homo sapien
acatcatcccgctgtggtgtggcag

SEQ ID NO: 3041697 - DNA, 25 bp, Homo sapien
gcattgagtagcagttatgtgccag

SEQ ID NO: 3041698 - DNA, 25 bp, Homo sapien
cctggagactctgattgaataggcc

SEQ ID NO: 3041699 - DNA, 25 bp, Homo sapien
gacccatctcaagctcttgtgcaag

SEQ ID NO: 3041700 - DNA, 25 bp, Homo sapien
tgaataggcctaggacactggaatg

SEQ ID NO: 3041701 - DNA, 25 bp, Homo sapien
gtgctggactacaaaaggctttaca

SEQ ID NO: 3041702 - DNA, 25 bp, Homo sapien
tcctgcataaagtcacacgttagtg

SEQ ID NO: 3041703 - DNA, 25 bp, Homo sapien
cacttggcctggtaaagctgaaagg

SEQ ID NO: 3041704 - DNA, 25 bp, Homo sapien
tgatccaagttgcaatacagatggg

SEQ ID NO: 3041705 - DNA, 25 bp, Homo sapien
ttgtttctctaacaagcttattttc

SEQ ID NO: 3041706 - DNA, 25 bp, Homo sapien
tgactcttgttaggtgacaccaggc

SEQ ID NO: 3041707 - DNA, 25 bp, Homo sapien
gtgaaatgtaaaggggaagacctgc

SEQ ID NO: 3041708 - DNA, 25 bp, Homo sapien
gacctgccaattgtggcctttttgc

SEQ ID NO: 3041709 - DNA, 25 bp, Homo sapien
accaggcaacaggtctccacacgca

SEQ ID NO: 3041710 - DNA, 25 bp, Homo sapien
tcttcagggcagttgtttctacttg

SEQ ID NO: 3041711 - DNA, 25 bp, Homo sapien
ttcagggcagttgtttctacttgaa

SEQ ID NO: 3041712 - DNA, 25 bp, Homo sapien
tcagggcagttgtttctacttgaaa

SEQ ID NO: 3041713 - DNA, 25 bp, Homo sapien
cttcagggcagttgtttctacttga

SEQ ID NO: 3041714 - DNA, 25 bp, Homo sapien
tggttttccgcagccaagaaacagt

SEQ ID NO: 3041715 - DNA, 25 bp, Homo sapien
tattggtgccaagaagggctgcgtt

SEQ ID NO: 3041716 - DNA, 25 bp, Homo sapien
ggatagtccagggtactctccccat

SEQ ID NO: 3041717 - DNA, 25 bp, Homo sapien
gaacttgtgatgagattggacccac

SEQ ID NO: 3041718 - DNA, 25 bp, Homo sapien
ggcttcttggcaacactgaatttcc

SEQ ID NO: 3041719 - DNA, 25 bp, Homo sapien
gctcactaggcagccttctgaactg

SEQ ID NO: 3041720 - DNA, 25 bp, Homo sapien
tcttggcaacactgaatttcccttc

SEQ ID NO: 3041721 - DNA, 25 bp, Homo sapien
ttgaatctatgctcactaggcagcc

SEQ ID NO: 3041722 - DNA, 25 bp, Homo sapien
tcagggtctgcgtctgcctgcatct

SEQ ID NO: 3041723 - DNA, 25 bp, Homo sapien
tgagctcagggtctgcgtctgcctg

SEQ ID NO: 3041724 - DNA, 25 bp, Homo sapien
gcagagccaatgaggcctgagctca

SEQ ID NO: 3041725 - DNA, 25 bp, Homo sapien
ggcctgagctcagggtctgcgtctg

SEQ ID NO: 3041726 - DNA, 25 bp, Homo sapien
taccagggagttgtagcagagccct

SEQ ID NO: 3041727 - DNA, 25 bp, Homo sapien
tcatgaacggagtggcgtcagtacc

SEQ ID NO: 3041728 - DNA, 25 bp, Homo sapien
gtcagtaccagggagttgtagcaga

SEQ ID NO: 3041729 - DNA, 25 bp, Homo sapien
cagtaccagggagttgtagcagagc

SEQ ID NO: 3041730 - DNA, 25 bp, Homo sapien
gagataaggttttaaggcaggagga

SEQ ID NO: 3041731 - DNA, 25 bp, Homo sapien
ctagagataaggttttaaggcagga

SEQ ID NO: 3041732 - DNA, 25 bp, Homo sapien
tagagataaggttttaaggcaggag

SEQ ID NO: 3041733 - DNA, 25 bp, Homo sapien
agataaggttttaaggcaggaggag

SEQ ID NO: 3041734 - DNA, 25 bp, Homo sapien
agtaaccaggactataggaagatgc

SEQ ID NO: 3041735 - DNA, 25 bp, Homo sapien
ctgagtaaccaggactataggaaga

SEQ ID NO: 3041736 - DNA, 25 bp, Homo sapien
accaggactataggaagatgctgct

SEQ ID NO: 3041737 - DNA, 25 bp, Homo sapien
tgagtaaccaggactataggaagat

SEQ ID NO: 3041738 - DNA, 25 bp, Homo sapien
ttgcaaggcaacgttttaagtgact

SEQ ID NO: 3041739 - DNA, 25 bp, Homo sapien
taaaaggcagagtgggtatgatcct

SEQ ID NO: 3041740 - DNA, 25 bp, Homo sapien
cagactacttctctgtaaaaggcag

SEQ ID NO: 3041741 - DNA, 25 bp, Homo sapien
ttaaggcatgtactgactcagagat

SEQ ID NO: 3041742 - DNA, 25 bp, Homo sapien
gctttggcctgtgcacttggcagaa

SEQ ID NO: 3041743 - DNA, 25 bp, Homo sapien
gacaattgggaatgaggagcctaag

SEQ ID NO: 3041744 - DNA, 25 bp, Homo sapien
atagcatgcatcaataccctcaacc

SEQ ID NO: 3041745 - DNA, 25 bp, Homo sapien
caagaggtggttgactaattgagtt

SEQ ID NO: 3041746 - DNA, 25 bp, Homo sapien
tgttcatattgtctatccaccaaca

SEQ ID NO: 3041747 - DNA, 25 bp, Homo sapien
gagaaggaaacttcttcaagataag

SEQ ID NO: 3041748 - DNA, 25 bp, Homo sapien
gataaggtacatgtcactgttctgt

SEQ ID NO: 3041749 - DNA, 25 bp, Homo sapien
tattgtctatccaccaacaaatact

SEQ ID NO: 3041750 - DNA, 25 bp, Homo sapien
gagaagtatctggtgagtatcactg

SEQ ID NO: 3041751 - DNA, 25 bp, Homo sapien
cattgaaggggctaccaaaatcacc

SEQ ID NO: 3041752 - DNA, 25 bp, Homo sapien
gaaggggctaccaaaatcaccagaa

SEQ ID NO: 3041753 - DNA, 25 bp, Homo sapien
tcactgtggtagacattgaaggggc

SEQ ID NO: 3041754 - DNA, 25 bp, Homo sapien
tttctggccaggttgttccagttgt

SEQ ID NO: 3041755 - DNA, 25 bp, Homo sapien
aatggggcctgcatatagtccttgc

SEQ ID NO: 3041756 - DNA, 25 bp, Homo sapien
atagtccttgcttgagcatggccag

SEQ ID NO: 3041757 - DNA, 25 bp, Homo sapien
gagaaatggggcctgcatatagtcc

SEQ ID NO: 3041758 - DNA, 25 bp, Homo sapien
gcaccagtttcatgcacagatcctg

SEQ ID NO: 3041759 - DNA, 25 bp, Homo sapien
tggtcccaaccttagcaccagtttc

SEQ ID NO: 3041760 - DNA, 25 bp, Homo sapien
gtttcatgcacagatcctgagctgg

SEQ ID NO: 3041761 - DNA, 25 bp, Homo sapien
ctgtccccatctggaccgccctctc

SEQ ID NO: 3041762 - DNA, 25 bp, Homo sapien
cactctgaacgctttcattagcaaa

SEQ ID NO: 3041763 - DNA, 25 bp, Homo sapien
tcatttttccaagagtagactcagc

SEQ ID NO: 3041764 - DNA, 25 bp, Homo sapien
ccctctgagagtcggccctttcaaa

SEQ ID NO: 3041765 - DNA, 25 bp, Homo sapien
tttataaccttagcaccacttcttc

SEQ ID NO: 3041766 - DNA, 25 bp, Homo sapien
catcatccagcacccgtgtcagcac

SEQ ID NO: 3041767 - DNA, 25 bp, Homo sapien
cagcacccgtgtcagcacccttgct

SEQ ID NO: 3041768 - DNA, 25 bp, Homo sapien
atcatcatccagcacccgtgtcagc

SEQ ID NO: 3041769 - DNA, 25 bp, Homo sapien
atccagcacccgtgtcagcaccctt

SEQ ID NO: 3041770 - DNA, 25 bp, Homo sapien
cttggaccccagtgaacctcagttt

SEQ ID NO: 3041771 - DNA, 25 bp, Homo sapien
tccagggcgttcaaaagtatatttc

SEQ ID NO: 3041772 - DNA, 25 bp, Homo sapien
tctttgtgacttttccagggcgttc

SEQ ID NO: 3041773 - DNA, 25 bp, Homo sapien
aaagtatatttcctgtgcgctgcag

SEQ ID NO: 3041774 - DNA, 25 bp, Homo sapien
caggaacttggcagcgactctttac

SEQ ID NO: 3041775 - DNA, 25 bp, Homo sapien
cttggcagcgactctttacctgaga

SEQ ID NO: 3041776 - DNA, 25 bp, Homo sapien
cccagagcaccaaaggtacagctct

SEQ ID NO: 3041777 - DNA, 25 bp, Homo sapien
gcccttggcaggaacttggcagcga

SEQ ID NO: 3041778 - DNA, 25 bp, Homo sapien
ctgctaatgggtacttccaaagtac

SEQ ID NO: 3041779 - DNA, 25 bp, Homo sapien
ccttttaaacacttgctatctccca

SEQ ID NO: 3041780 - DNA, 25 bp, Homo sapien
gggcctatggtacaggagcacagta

SEQ ID NO: 3041781 - DNA, 25 bp, Homo sapien
ggctctcacagcgtgctcacaaaag

SEQ ID NO: 3041782 - DNA, 25 bp, Homo sapien
gaccaagacctatatgactccagag

SEQ ID NO: 3041783 - DNA, 25 bp, Homo sapien
gaatggtgctccctaaggttgggca

SEQ ID NO: 3041784 - DNA, 25 bp, Homo sapien
caacctagtgcagtgatcccagtgt

SEQ ID NO: 3041785 - DNA, 25 bp, Homo sapien
taaatcctagtccaagaggtaggct

SEQ ID NO: 3041786 - DNA, 25 bp, Homo sapien
ctatctggaaaccttttagtccttg

SEQ ID NO: 3041787 - DNA, 25 bp, Homo sapien
cattggtgcacaatatggaaagagc

SEQ ID NO: 3041788 - DNA, 25 bp, Homo sapien
ggaaagagctcaaatctatctggaa

SEQ ID NO: 3041789 - DNA, 25 bp, Homo sapien
gagaagtgatcttccatcttgtcac

SEQ ID NO: 3041790 - DNA, 25 bp, Homo sapien
tggggatacagctgatattgttgtg

SEQ ID NO: 3041791 - DNA, 25 bp, Homo sapien
ctaaaaagtgctgcaataagaaggt

SEQ ID NO: 3041792 - DNA, 25 bp, Homo sapien
gaaatactatggatggggatacagc

SEQ ID NO: 3041793 - DNA, 25 bp, Homo sapien
aaagtgctgcaataagaaggtctct

SEQ ID NO: 3041794 - DNA, 25 bp, Homo sapien
ccatctgttcacctgaaaaccccac

SEQ ID NO: 3041795 - DNA, 25 bp, Homo sapien
tccatctgttcacctgaaaacccca

SEQ ID NO: 3041796 - DNA, 25 bp, Homo sapien
taaccaatctgcttggatatggcat

SEQ ID NO: 3041797 - DNA, 25 bp, Homo sapien
aaaaccatttggtaaccaatctgct

SEQ ID NO: 3041798 - DNA, 25 bp, Homo sapien
accaatctgcttggatatggcatac

SEQ ID NO: 3041799 - DNA, 25 bp, Homo sapien
agaaaaccatttggtaaccaatctg

SEQ ID NO: 3041800 - DNA, 25 bp, Homo sapien
agttcaaagacctcattaacgctgg

SEQ ID NO: 3041801 - DNA, 25 bp, Homo sapien
gtcaggagccgccagcgggacatct

SEQ ID NO: 3041802 - DNA, 25 bp, Homo sapien
tcacctcccaggtactactgatagc

SEQ ID NO: 3041803 - DNA, 25 bp, Homo sapien
tgtgagcagtcaggagccgccagcg

SEQ ID NO: 3041804 - DNA, 25 bp, Homo sapien
ctgcttgagggcttctgctgtcaca

SEQ ID NO: 3041805 - DNA, 25 bp, Homo sapien
cacaggtagaagacacaggggttct

SEQ ID NO: 3041806 - DNA, 25 bp, Homo sapien
ctccttgggtaaatgcagcagtgtt

SEQ ID NO: 3041807 - DNA, 25 bp, Homo sapien
cacgaagaggcctggtttcagctgc

SEQ ID NO: 3041808 - DNA, 25 bp, Homo sapien
gatggacaatgagtggagaaggtcc

SEQ ID NO: 3041809 - DNA, 25 bp, Homo sapien
atggacaatgagtggagaaggtcct

SEQ ID NO: 3041810 - DNA, 25 bp, Homo sapien
ggatggacaatgagtggagaaggtc

SEQ ID NO: 3041811 - DNA, 25 bp, Homo sapien
tgggtggggtgaggttttgggctga

SEQ ID NO: 3041812 - DNA, 25 bp, Homo sapien
ggggtgaggttttgggctgagtcac

SEQ ID NO: 3041813 - DNA, 25 bp, Homo sapien
ctgggtggggtgaggttttgggctg

SEQ ID NO: 3041814 - DNA, 25 bp, Homo sapien
gtgaggttttgggctgagtcacact

SEQ ID NO: 3041815 - DNA, 25 bp, Homo sapien
gacttcctctttctatcaccgtcct

SEQ ID NO: 3041816 - DNA, 25 bp, Homo sapien
tttctatcaccgtcctactggcatc

SEQ ID NO: 3041817 - DNA, 25 bp, Homo sapien
tcctctttctatcaccgtcctactg

SEQ ID NO: 3041818 - DNA, 25 bp, Homo sapien
ctctttctatcaccgtcctactggc

SEQ ID NO: 3041819 - DNA, 25 bp, Homo sapien
tgcttctcaatagttcctgttccac

SEQ ID NO: 3041820 - DNA, 25 bp, Homo sapien
agtgcttctcaatagttcctgttcc

SEQ ID NO: 3041821 - DNA, 25 bp, Homo sapien
cctcctttgctggcctcatgccaat

SEQ ID NO: 3041822 - DNA, 25 bp, Homo sapien
ctttgctggcctcatgccaatctct

SEQ ID NO: 3041823 - DNA, 25 bp, Homo sapien
tcccctgaattcatgaatggacctc

SEQ ID NO: 3041824 - DNA, 25 bp, Homo sapien
cccctgaattcatgaatggacctct

SEQ ID NO: 3041825 - DNA, 25 bp, Homo sapien
ccctgaattcatgaatggacctcta

SEQ ID NO: 3041826 - DNA, 25 bp, Homo sapien
tactaacgtaagttgcaattccttg

SEQ ID NO: 3041827 - DNA, 25 bp, Homo sapien
ttcacacctgtccttaaaatcttcg

SEQ ID NO: 3041828 - DNA, 25 bp, Homo sapien
aatcagatgttcacacctgtcctta

SEQ ID NO: 3041829 - DNA, 25 bp, Homo sapien
cacctgtccttaaaatcttcgttag

SEQ ID NO: 3041830 - DNA, 25 bp, Homo sapien
ccttaaaatcttcgttagcgtccat

SEQ ID NO: 3041831 - DNA, 25 bp, Homo sapien
agccacatgacagggcgatgctgct

SEQ ID NO: 3041832 - DNA, 25 bp, Homo sapien
ttagccacatgacagggcgatgctg

SEQ ID NO: 3041833 - DNA, 25 bp, Homo sapien
gatgggggtagtgaagctgaaccgt

SEQ ID NO: 3041834 - DNA, 25 bp, Homo sapien
ggccagctgtcagcaccgagatggg

SEQ ID NO: 3041835 - DNA, 25 bp, Homo sapien
cctgtgcatgtctttgggcgtctct

SEQ ID NO: 3041836 - DNA, 25 bp, Homo sapien
tatcctgtgcatgtctttgggcgtc

SEQ ID NO: 3041837 - DNA, 25 bp, Homo sapien
tgtctttgggcgtctctttctcacc

SEQ ID NO: 3041838 - DNA, 25 bp, Homo sapien
gcattctatcctgtgcatgtctttg

SEQ ID NO: 3041839 - DNA, 25 bp, Homo sapien
tgagacacacagaccggctctagtt

SEQ ID NO: 3041840 - DNA, 25 bp, Homo sapien
tctaaaagagtgatgtgcgaggaca

SEQ ID NO: 3041841 - DNA, 25 bp, Homo sapien
catagataaggagtgctcagtgcct

SEQ ID NO: 3041842 - DNA, 25 bp, Homo sapien
cattcatcagaggatagagctaccc

SEQ ID NO: 3041843 - DNA, 25 bp, Homo sapien
agtgcggtggcataatctcgcctca

SEQ ID NO: 3041844 - DNA, 25 bp, Homo sapien
tgcggtggcataatctcgcctcact

SEQ ID NO: 3041845 - DNA, 25 bp, Homo sapien
gcggtggcataatctcgcctcactg

SEQ ID NO: 3041846 - DNA, 25 bp, Homo sapien
ggagtgcggtggcataatctcgcct

SEQ ID NO: 3041847 - DNA, 25 bp, Homo sapien
gtaaggcattatcctctcccgttgt

SEQ ID NO: 3041848 - DNA, 25 bp, Homo sapien
ttcctgtaacaagaggagctgtggg

SEQ ID NO: 3041849 - DNA, 25 bp, Homo sapien
tatcctctcccgttgtttctaacaa

SEQ ID NO: 3041850 - DNA, 25 bp, Homo sapien
acagcagtggtgcctgcgctcttgg

SEQ ID NO: 3041851 - DNA, 25 bp, Homo sapien
tgttttaataagagagaaagcggga

SEQ ID NO: 3041852 - DNA, 25 bp, Homo sapien
agtggaaccacggagcatgggctat

SEQ ID NO: 3041853 - DNA, 25 bp, Homo sapien
gagttggcaggcacacttctcatct

SEQ ID NO: 3041854 - DNA, 25 bp, Homo sapien
agaagatagcagaactctccagagg

SEQ ID NO: 3041855 - DNA, 25 bp, Homo sapien
tgcccattggcgacctttcgaaggt

SEQ ID NO: 3041856 - DNA, 25 bp, Homo sapien
catagtgtcctggtacggcagggac

SEQ ID NO: 3041857 - DNA, 25 bp, Homo sapien
tggtgttctaactcaatgtgctgga

SEQ ID NO: 3041858 - DNA, 25 bp, Homo sapien
atgtgctggacagttgtgcctcttc

SEQ ID NO: 3041859 - DNA, 25 bp, Homo sapien
caagtagccctggattgcatttgca

SEQ ID NO: 3041860 - DNA, 25 bp, Homo sapien
taattcaacgttcaccaagtagccc

SEQ ID NO: 3041861 - DNA, 25 bp, Homo sapien
taggtaattttctacagttaattca

SEQ ID NO: 3041862 - DNA, 25 bp, Homo sapien
tttctacagttaattcaacgttcac

SEQ ID NO: 3041863 - DNA, 25 bp, Homo sapien
agggatgaagctcctgcactgcagg

SEQ ID NO: 3041864 - DNA, 25 bp, Homo sapien
cctgagggatgaagctcctgcactg

SEQ ID NO: 3041865 - DNA, 25 bp, Homo sapien
tcgaagtgagcttggcagtggcccc

SEQ ID NO: 3041866 - DNA, 25 bp, Homo sapien
actgcaggggtgtgtcgaagtgagc

SEQ ID NO: 3041867 - DNA, 25 bp, Homo sapien
gcgggctgcacgcaccggtaatcag

SEQ ID NO: 3041868 - DNA, 25 bp, Homo sapien
cgggctgcacgcaccggtaatcaga

SEQ ID NO: 3041869 - DNA, 25 bp, Homo sapien
tgcgggctgcacgcaccggtaatca

SEQ ID NO: 3041870 - DNA, 25 bp, Homo sapien
cattctgcaaagacaaatcatctgg

SEQ ID NO: 3041871 - DNA, 25 bp, Homo sapien
gggatccaggctcccgcaggagcct

SEQ ID NO: 3041872 - DNA, 25 bp, Homo sapien
tcaatgctctgagcctcactcggca

SEQ ID NO: 3041873 - DNA, 25 bp, Homo sapien
ctcggcaccacagagctccagagag

SEQ ID NO: 3041874 - DNA, 25 bp, Homo sapien
tgaacaggtccatcacagttggtgg

SEQ ID NO: 3041875 - DNA, 25 bp, Homo sapien
acccagcagggataacaggggcaga

SEQ ID NO: 3041876 - DNA, 25 bp, Homo sapien
gataggcccttaacaggtggatcct

SEQ ID NO: 3041877 - DNA, 25 bp, Homo sapien
gggcagaagataggcccttaacagg

SEQ ID NO: 3041878 - DNA, 25 bp, Homo sapien
aggtgcctgcatcgtcctcacaggg

SEQ ID NO: 3041879 - DNA, 25 bp, Homo sapien
tggctgaagctgagctgcatagtaa

SEQ ID NO: 3041880 - DNA, 25 bp, Homo sapien
tgggtgctcctcaaacaaggtgcct

SEQ ID NO: 3041881 - DNA, 25 bp, Homo sapien
gctgcatagtaatgggtgctcctca

SEQ ID NO: 3041882 - DNA, 25 bp, Homo sapien
tctgaggacctcacggcagttcctt

SEQ ID NO: 3041883 - DNA, 25 bp, Homo sapien
aattcctcggttccagatgaggccg

SEQ ID NO: 3041884 - DNA, 25 bp, Homo sapien
cccagaatgcaagcccatgaacaag

SEQ ID NO: 3041885 - DNA, 25 bp, Homo sapien
tgaggccggcctttcattctgagga

SEQ ID NO: 3041886 - DNA, 25 bp, Homo sapien
atgggctgtggctgctgcttttccc

SEQ ID NO: 3041887 - DNA, 25 bp, Homo sapien
catgggctgtggctgctgcttttcc

SEQ ID NO: 3041888 - DNA, 25 bp, Homo sapien
ggctgtggctgctgcttttcccgca

SEQ ID NO: 3041889 - DNA, 25 bp, Homo sapien
tgggctgtggctgctgcttttcccg

SEQ ID NO: 3041890 - DNA, 25 bp, Homo sapien
tatgggttctgtgacaagatcgtcc

SEQ ID NO: 3041891 - DNA, 25 bp, Homo sapien
catctgagtcagatctgagtccagc

SEQ ID NO: 3041892 - DNA, 25 bp, Homo sapien
cctgaaggagacagattaacatctg

SEQ ID NO: 3041893 - DNA, 25 bp, Homo sapien
gacaagatcgtccattagtgggtcc

SEQ ID NO: 3041894 - DNA, 25 bp, Homo sapien
cttgttggtgcttcatcgaacaggc

SEQ ID NO: 3041895 - DNA, 25 bp, Homo sapien
ggtcccagtgggcatagcaaaagca

SEQ ID NO: 3041896 - DNA, 25 bp, Homo sapien
ttgacatcctgtgggcgcctgcaga

SEQ ID NO: 3041897 - DNA, 25 bp, Homo sapien
gataagaccgcacttctctcactgg

SEQ ID NO: 3041898 - DNA, 25 bp, Homo sapien
tcctgatttgatcatgagatctttg

SEQ ID NO: 3041899 - DNA, 25 bp, Homo sapien
ctttgaaagcaaagaccttcatctg

SEQ ID NO: 3041900 - DNA, 25 bp, Homo sapien
tggagaaaagatcatactcaactgt

SEQ ID NO: 3041901 - DNA, 25 bp, Homo sapien
gatttgatcatgagatctttgaaag

SEQ ID NO: 3041902 - DNA, 25 bp, Homo sapien
ccttttaggcaaaccatgcactggg

SEQ ID NO: 3041903 - DNA, 25 bp, Homo sapien
gtatagacatccagccagattgggc

SEQ ID NO: 3041904 - DNA, 25 bp, Homo sapien
ggtcactgtcgatagcattagcaac

SEQ ID NO: 3041905 - DNA, 25 bp, Homo sapien
gaagggtttcctgaagcatggtcac

SEQ ID NO: 3041906 - DNA, 25 bp, Homo sapien
tccacactcaaatgagtgtgtagtc

SEQ ID NO: 3041907 - DNA, 25 bp, Homo sapien
tcaaatgagtgtgtagtctggttgg

SEQ ID NO: 3041908 - DNA, 25 bp, Homo sapien
tagtctggttggtgtaggaaggcat

SEQ ID NO: 3041909 - DNA, 25 bp, Homo sapien
gagctccacactcaaatgagtgtgt

SEQ ID NO: 3041910 - DNA, 25 bp, Homo sapien
ttgtcagatgaaccaaagttggaat

SEQ ID NO: 3041911 - DNA, 25 bp, Homo sapien
gtcagatgaaccaaagttggaatga

SEQ ID NO: 3041912 - DNA, 25 bp, Homo sapien
tgaaccaaagttggaatgaaggaaa

SEQ ID NO: 3041913 - DNA, 25 bp, Homo sapien
aattgtcagatgaaccaaagttgga

SEQ ID NO: 3041914 - DNA, 25 bp, Homo sapien
ggaatgaacattgccacgtacttgc

SEQ ID NO: 3041915 - DNA, 25 bp, Homo sapien
gcaattgcaaacaggagaccagacg

SEQ ID NO: 3041916 - DNA, 25 bp, Homo sapien
gagaaagctgcatctgattggaatg

SEQ ID NO: 3041917 - DNA, 25 bp, Homo sapien
cactaactctagtgcctttaacggg

SEQ ID NO: 3041918 - DNA, 25 bp, Homo sapien
aaacccgctgctgaacgccatttgt

SEQ ID NO: 3041919 - DNA, 25 bp, Homo sapien
gattcgctatgttccaaacccgctg

SEQ ID NO: 3041920 - DNA, 25 bp, Homo sapien
acagtttgtggccttggagtcagtc

SEQ ID NO: 3041921 - DNA, 25 bp, Homo sapien
gacactggactagcccagtctgtat

SEQ ID NO: 3041922 - DNA, 25 bp, Homo sapien
caagcatcgtcgaatcaacgccttt

SEQ ID NO: 3041923 - DNA, 25 bp, Homo sapien
aagcatcgtcgaatcaacgcctttg

SEQ ID NO: 3041924 - DNA, 25 bp, Homo sapien
aatttatcctttcctgttgcttgat

SEQ ID NO: 3041925 - DNA, 25 bp, Homo sapien
tcctttcctgttgcttgataagatt

SEQ ID NO: 3041926 - DNA, 25 bp, Homo sapien
ctgtgaatttatcctttcctgttgc

SEQ ID NO: 3041927 - DNA, 25 bp, Homo sapien
ttatcctttcctgttgcttgataag

SEQ ID NO: 3041928 - DNA, 25 bp, Homo sapien
tcggacgtagtaaagtagcccagtc

SEQ ID NO: 3041929 - DNA, 25 bp, Homo sapien
gtgtcggacgtagtaaagtagccca

SEQ ID NO: 3041930 - DNA, 25 bp, Homo sapien
gacgtagtaaagtagcccagtctca

SEQ ID NO: 3041931 - DNA, 25 bp, Homo sapien
tgtcggacgtagtaaagtagcccag

SEQ ID NO: 3041932 - DNA, 25 bp, Homo sapien
atcaatctgccgtctcaaatcacag

SEQ ID NO: 3041933 - DNA, 25 bp, Homo sapien
ctgttcatcaatctgccgtctcaaa

SEQ ID NO: 3041934 - DNA, 25 bp, Homo sapien
gttcatcaatctgccgtctcaaatc

SEQ ID NO: 3041935 - DNA, 25 bp, Homo sapien
tgctcattgtcacacatctatttaa

SEQ ID NO: 3041936 - DNA, 25 bp, Homo sapien
tgtgttgccagatcccgtagatgag

SEQ ID NO: 3041937 - DNA, 25 bp, Homo sapien
tctagtgcagatattttttctattg

SEQ ID NO: 3041938 - DNA, 25 bp, Homo sapien
tttctattgtgaggtcggactgggt

SEQ ID NO: 3041939 - DNA, 25 bp, Homo sapien
ctgtctgtgctggatggagatctgt

SEQ ID NO: 3041940 - DNA, 25 bp, Homo sapien
tttgctagcatcactgacatgaggg

SEQ ID NO: 3041941 - DNA, 25 bp, Homo sapien
caagccgaggttttgctagcatcac

SEQ ID NO: 3041942 - DNA, 25 bp, Homo sapien
gaggttttgctagcatcactgacat

SEQ ID NO: 3041943 - DNA, 25 bp, Homo sapien
tcactgacatgagggttggcagagc

SEQ ID NO: 3041944 - DNA, 25 bp, Homo sapien
ttatgtcccctaggagtgcctttcc

SEQ ID NO: 3041945 - DNA, 25 bp, Homo sapien
tggaagactcactattaagtggtcc

SEQ ID NO: 3041946 - DNA, 25 bp, Homo sapien
cacaagctctggttggaagactcac

SEQ ID NO: 3041947 - DNA, 25 bp, Homo sapien
taacacctactccagtaaacctggc

SEQ ID NO: 3041948 - DNA, 25 bp, Homo sapien
ccgccgctgccgctccacgctcctc

SEQ ID NO: 3041949 - DNA, 25 bp, Homo sapien
cgccgctgccgctccacgctcctcc

SEQ ID NO: 3041950 - DNA, 25 bp, Homo sapien
gccgccgctgccgctccacgctcct

SEQ ID NO: 3041951 - DNA, 25 bp, Homo sapien
gacccggctgcggaccgctccgctc

SEQ ID NO: 3041952 - DNA, 25 bp, Homo sapien
cgctctccccctgggcaggcccggg

SEQ ID NO: 3041953 - DNA, 25 bp, Homo sapien
ccgacccggctgcggaccgctccgc

SEQ ID NO: 3041954 - DNA, 25 bp, Homo sapien
cccggctgcggaccgctccgctctc

SEQ ID NO: 3041955 - DNA, 25 bp, Homo sapien
gtgtttcctcgcgagatttgcacgg

SEQ ID NO: 3041956 - DNA, 25 bp, Homo sapien
tagtgaaaccgcgtgtttcctcgcg

SEQ ID NO: 3041957 - DNA, 25 bp, Homo sapien
gtaaacacactagtgaaaccgcgtg

SEQ ID NO: 3041958 - DNA, 25 bp, Homo sapien
tgatcggtgtaaacacactagtgaa

SEQ ID NO: 3041959 - DNA, 25 bp, Homo sapien
ggtggtatcctcttatcataatgca

SEQ ID NO: 3041960 - DNA, 25 bp, Homo sapien
taatagcctcgaactagaaacagta

SEQ ID NO: 3041961 - DNA, 25 bp, Homo sapien
cagcaacatggatgattgtcacaaa

SEQ ID NO: 3041962 - DNA, 25 bp, Homo sapien
gatgctggtgatgcggtattccctg

SEQ ID NO: 3041963 - DNA, 25 bp, Homo sapien
gtaacacatcgacaaagactagttt

SEQ ID NO: 3041964 - DNA, 25 bp, Homo sapien
tcataaagtaacacatcgacaaaga

SEQ ID NO: 3041965 - DNA, 25 bp, Homo sapien
aaagtaacacatcgacaaagactag

SEQ ID NO: 3041966 - DNA, 25 bp, Homo sapien
cataaagtaacacatcgacaaagac

SEQ ID NO: 3041967 - DNA, 25 bp, Homo sapien
ggaatcccaagctgataatctccag

SEQ ID NO: 3041968 - DNA, 25 bp, Homo sapien
cctctgtgttcatgttggaccttca

SEQ ID NO: 3041969 - DNA, 25 bp, Homo sapien
tgctccacggtggtaattactctct

SEQ ID NO: 3041970 - DNA, 25 bp, Homo sapien
tgtgagagcagagttgagtccccaa

SEQ ID NO: 3041971 - DNA, 25 bp, Homo sapien
tcagtctcatgatctttaaatttac

SEQ ID NO: 3041972 - DNA, 25 bp, Homo sapien
ccgatatttgctccaactgcatcct

SEQ ID NO: 3041973 - DNA, 25 bp, Homo sapien
tatttgctccaactgcatcctcagt

SEQ ID NO: 3041974 - DNA, 25 bp, Homo sapien
ccaactgcatcctcagtctcatgat

SEQ ID NO: 3041975 - DNA, 25 bp, Homo sapien
agaagggccaaagtggactgctttg

SEQ ID NO: 3041976 - DNA, 25 bp, Homo sapien
aacaacacacaatgtcttcagctcc

SEQ ID NO: 3041977 - DNA, 25 bp, Homo sapien
gctttgggtggttgggcatggagat

SEQ ID NO: 3041978 - DNA, 25 bp, Homo sapien
gtggttgggcatggagatgtgagtc

SEQ ID NO: 3041979 - DNA, 25 bp, Homo sapien
gcctaatgggtactcaagcaagcag

SEQ ID NO: 3041980 - DNA, 25 bp, Homo sapien
cagggctaggcaagtgtcagaagtc

SEQ ID NO: 3041981 - DNA, 25 bp, Homo sapien
tatttaatctccgtgactcagtgcc

SEQ ID NO: 3041982 - DNA, 25 bp, Homo sapien
gaatttgtacatgcttggcccatag

SEQ ID NO: 3041983 - DNA, 25 bp, Homo sapien
cttctagaaactcagaggaggttaa

SEQ ID NO: 3041984 - DNA, 25 bp, Homo sapien
ctcagaggaggttaaaccccatggt

SEQ ID NO: 3041985 - DNA, 25 bp, Homo sapien
aactcagaggaggttaaaccccatg

SEQ ID NO: 3041986 - DNA, 25 bp, Homo sapien
tctagaaactcagaggaggttaaac

SEQ ID NO: 3041987 - DNA, 25 bp, Homo sapien
tgggacacctgctcctacgaggaat

SEQ ID NO: 3041988 - DNA, 25 bp, Homo sapien
taagctgggtactctgactccaaga

SEQ ID NO: 3041989 - DNA, 25 bp, Homo sapien
tacaagatggcctcatcaggactgg

SEQ ID NO: 3041990 - DNA, 25 bp, Homo sapien
ccaagagaggtttagggacagcgcc

SEQ ID NO: 3041991 - DNA, 25 bp, Homo sapien
acctaggagaatgtttgcccacgtc

SEQ ID NO: 3041992 - DNA, 25 bp, Homo sapien
cctaggagaatgtttgcccacgtca

SEQ ID NO: 3041993 - DNA, 25 bp, Homo sapien
taggagaatgtttgcccacgtcata

SEQ ID NO: 3041994 - DNA, 25 bp, Homo sapien
aggagaatgtttgcccacgtcatac

SEQ ID NO: 3041995 - DNA, 25 bp, Homo sapien
gacgttttgtctggctaagctttgg

SEQ ID NO: 3041996 - DNA, 25 bp, Homo sapien
tccctttggtgtccgcggaggctgt

SEQ ID NO: 3041997 - DNA, 25 bp, Homo sapien
gtgaagccagcaacacgacgttttg

SEQ ID NO: 3041998 - DNA, 25 bp, Homo sapien
gctcttcctggaaacggttaccatg

SEQ ID NO: 3041999 - DNA, 25 bp, Homo sapien
tgtcagaattaatgaaagtcagaaa

SEQ ID NO: 3042000 - DNA, 25 bp, Homo sapien
gtcagaattaatgaaagtcagaaag

SEQ ID NO: 3042001 - DNA, 25 bp, Homo sapien
ctgtcagaattaatgaaagtcagaa

SEQ ID NO: 3042002 - DNA, 25 bp, Homo sapien
gtcagctggaaaaattagtccctgc

SEQ ID NO: 3042003 - DNA, 25 bp, Homo sapien
ccattcccagagtgaagactccctt

SEQ ID NO: 3042004 - DNA, 25 bp, Homo sapien
gctggaaaaattagtccctgctcat

SEQ ID NO: 3042005 - DNA, 25 bp, Homo sapien
cctgctcattgaagatcctcccatt

SEQ ID NO: 3042006 - DNA, 25 bp, Homo sapien
aaagtccaggccaacagactcttct

SEQ ID NO: 3042007 - DNA, 25 bp, Homo sapien
ttcatccacgaatacaaatcccagc

SEQ ID NO: 3042008 - DNA, 25 bp, Homo sapien
tcatgctgtatcttctacctaggat

SEQ ID NO: 3042009 - DNA, 25 bp, Homo sapien
tacctaggatgccctcatactttca

SEQ ID NO: 3042010 - DNA, 25 bp, Homo sapien
ctccagggcgatggtccagatcact

SEQ ID NO: 3042011 - DNA, 25 bp, Homo sapien
tccagggcgatggtccagatcactc

SEQ ID NO: 3042012 - DNA, 25 bp, Homo sapien
ccagggcgatggtccagatcactct

SEQ ID NO: 3042013 - DNA, 25 bp, Homo sapien
ctctttaccttcacaaagcttccaa

SEQ ID NO: 3042014 - DNA, 25 bp, Homo sapien
ctcatggagcaatcgcctggagcca

SEQ ID NO: 3042015 - DNA, 25 bp, Homo sapien
agagctcatggagcaatcgcctgga

SEQ ID NO: 3042016 - DNA, 25 bp, Homo sapien
tggagcaatcgcctggagccaccaa

SEQ ID NO: 3042017 - DNA, 25 bp, Homo sapien
agcaatcgcctggagccaccaaaag

SEQ ID NO: 3042018 - DNA, 25 bp, Homo sapien
gaagatcccattaaggttgatgcag

SEQ ID NO: 3042019 - DNA, 25 bp, Homo sapien
tgcactgcccgttagacacacagac

SEQ ID NO: 3042020 - DNA, 25 bp, Homo sapien
ggagactattgatcagagaaggaaa

SEQ ID NO: 3042021 - DNA, 25 bp, Homo sapien
ggttgatgcagtgcagtcaccatgc

SEQ ID NO: 3042022 - DNA, 25 bp, Homo sapien
tcttggccactatcagcagaatatg

SEQ ID NO: 3042023 - DNA, 25 bp, Homo sapien
cagcagaatatgcatctggtccctt

SEQ ID NO: 3042024 - DNA, 25 bp, Homo sapien
gatgtgggatggatttgtgattatt

SEQ ID NO: 3042025 - DNA, 25 bp, Homo sapien
cactatcagcagaatatgcatctgg

SEQ ID NO: 3042026 - DNA, 25 bp, Homo sapien
aggaaataaagcaagattatctgac

SEQ ID NO: 3042027 - DNA, 25 bp, Homo sapien
taggaaataaagcaagattatctga

SEQ ID NO: 3042028 - DNA, 25 bp, Homo sapien
ggaaataaagcaagattatctgacc

SEQ ID NO: 3042029 - DNA, 25 bp, Homo sapien
ggtctcttgtgagatgtccagactg

SEQ ID NO: 3042030 - DNA, 25 bp, Homo sapien
aacgggtgctctaaggttgtgctgt

SEQ ID NO: 3042031 - DNA, 25 bp, Homo sapien
caagtggccttgagcatggataaga

SEQ ID NO: 3042032 - DNA, 25 bp, Homo sapien
ttggctccaatccagggaacgggtg

SEQ ID NO: 3042033 - DNA, 25 bp, Homo sapien
taagatctggcacgttgaaggtagt

SEQ ID NO: 3042034 - DNA, 25 bp, Homo sapien
tctggcacgttgaaggtagtatggc

SEQ ID NO: 3042035 - DNA, 25 bp, Homo sapien
caagatcacgtaagatctggcacgt

SEQ ID NO: 3042036 - DNA, 25 bp, Homo sapien
gctttgcctccaagatcacgtaaga

SEQ ID NO: 3042037 - DNA, 25 bp, Homo sapien
gaagcaccactgacctacacaatag

SEQ ID NO: 3042038 - DNA, 25 bp, Homo sapien
ttcaaaacaactgggtgacattggt

SEQ ID NO: 3042039 - DNA, 25 bp, Homo sapien
taaaggctgcttcacgcaccgaagc

SEQ ID NO: 3042040 - DNA, 25 bp, Homo sapien
tttacagacaagaaggttgaggcac

SEQ ID NO: 3042041 - DNA, 25 bp, Homo sapien
ctggcttgaggagccttcgtagggc

SEQ ID NO: 3042042 - DNA, 25 bp, Homo sapien
catccgggcaagttagatatccatg

SEQ ID NO: 3042043 - DNA, 25 bp, Homo sapien
agtcacctttaaccaagtccatccg

SEQ ID NO: 3042044 - DNA, 25 bp, Homo sapien
cagagctggacagtcacctttaacc

SEQ ID NO: 3042045 - DNA, 25 bp, Homo sapien
aaccaagtccatccgggcaagttag

SEQ ID NO: 3042046 - DNA, 25 bp, Homo sapien
tagcaatgcgatattacctcacact

SEQ ID NO: 3042047 - DNA, 25 bp, Homo sapien
cacttgttagaatagttgttgtcaa

SEQ ID NO: 3042048 - DNA, 25 bp, Homo sapien
aaatatgcgatttgtaaaaagttag

SEQ ID NO: 3042049 - DNA, 25 bp, Homo sapien
tcaaagagattctgccctcccatgt

SEQ ID NO: 3042050 - DNA, 25 bp, Homo sapien
catgttagatgaccaagtcgaggcc

SEQ ID NO: 3042051 - DNA, 25 bp, Homo sapien
catccctgtgggttagtaagtcaaa

SEQ ID NO: 3042052 - DNA, 25 bp, Homo sapien
tagagaggacgcaagatacaaccag

SEQ ID NO: 3042053 - DNA, 25 bp, Homo sapien
cacattatccaacaccatgggcaga

SEQ ID NO: 3042054 - DNA, 25 bp, Homo sapien
tcagattgtcctagttgagggctaa

SEQ ID NO: 3042055 - DNA, 25 bp, Homo sapien
gagtgtacttgcatgagcatgaagc

SEQ ID NO: 3042056 - DNA, 25 bp, Homo sapien
tctgctagaatcatggctcattcac

SEQ ID NO: 3042057 - DNA, 25 bp, Homo sapien
gggacttttaccctccgcagacagc

SEQ ID NO: 3042058 - DNA, 25 bp, Homo sapien
catttccaagctgcacggtgcagtg

SEQ ID NO: 3042059 - DNA, 25 bp, Homo sapien
tgcagtggtgaagccgagcgttgcc

SEQ ID NO: 3042060 - DNA, 25 bp, Homo sapien
cagaggaacagctgagtgcatttcc

SEQ ID NO: 3042061 - DNA, 25 bp, Homo sapien
tggtgaagccgagcgttgccaggcg

SEQ ID NO: 3042062 - DNA, 25 bp, Homo sapien
ttagcatacactactgccgattttg

SEQ ID NO: 3042063 - DNA, 25 bp, Homo sapien
tacactactgccgattttgctgtgc

SEQ ID NO: 3042064 - DNA, 25 bp, Homo sapien
gcatacactactgccgattttgctg

SEQ ID NO: 3042065 - DNA, 25 bp, Homo sapien
actactgccgattttgctgtgctct

SEQ ID NO: 3042066 - DNA, 25 bp, Homo sapien
gaagtagtaggacaccctctcagag

SEQ ID NO: 3042067 - DNA, 25 bp, Homo sapien
tcagcggcccatacacgaagatgtg

SEQ ID NO: 3042068 - DNA, 25 bp, Homo sapien
tgagcctggagaaccggaagccatt

SEQ ID NO: 3042069 - DNA, 25 bp, Homo sapien
gccattcaggttacagagggtcaca

SEQ ID NO: 3042070 - DNA, 25 bp, Homo sapien
tttttccaggcgataaggagggctg

SEQ ID NO: 3042071 - DNA, 25 bp, Homo sapien
atttcagagaagagctcccagtcct

SEQ ID NO: 3042072 - DNA, 25 bp, Homo sapien
cgcgccagatgctgtgagtttatcc

SEQ ID NO: 3042073 - DNA, 25 bp, Homo sapien
gagagaacgcaaggcaagcatcgcg

SEQ ID NO: 3042074 - DNA, 25 bp, Homo sapien
tggactccgaatgccgtttctcgcc

SEQ ID NO: 3042075 - DNA, 25 bp, Homo sapien
gcgaggaccggtatctggagactgg

SEQ ID NO: 3042076 - DNA, 25 bp, Homo sapien
agctcagaccgggatccattctctc

SEQ ID NO: 3042077 - DNA, 25 bp, Homo sapien
gaattccaaatgccagcggccgctg

SEQ ID NO: 3042078 - DNA, 25 bp, Homo sapien
cacactcctcacactactctgcttc

SEQ ID NO: 3042079 - DNA, 25 bp, Homo sapien
taggccagtgtcaaacacactcctc

SEQ ID NO: 3042080 - DNA, 25 bp, Homo sapien
ctgttagtgtcaccatcccttcctg

SEQ ID NO: 3042081 - DNA, 25 bp, Homo sapien
tagtgtcaccatcccttcctgtagg

SEQ ID NO: 3042082 - DNA, 25 bp, Homo sapien
ttggctctgtcccatagaagtacca

SEQ ID NO: 3042083 - DNA, 25 bp, Homo sapien
atagaagtaccaggagtcttcccag

SEQ ID NO: 3042084 - DNA, 25 bp, Homo sapien
tgtcccatagaagtaccaggagtct

SEQ ID NO: 3042085 - DNA, 25 bp, Homo sapien
ggctctgtcccatagaagtaccagg

SEQ ID NO: 3042086 - DNA, 25 bp, Homo sapien
gatattgcaggatgaaccataggcc

SEQ ID NO: 3042087 - DNA, 25 bp, Homo sapien
tcttgggtacaatgtgcatgaggca

SEQ ID NO: 3042088 - DNA, 25 bp, Homo sapien
gacttggtctaactagtgcttctgc

SEQ ID NO: 3042089 - DNA, 25 bp, Homo sapien
tctgcacaaatgagcttccaacagt

SEQ ID NO: 3042090 - DNA, 25 bp, Homo sapien
tggttacaactggaagatccagact

SEQ ID NO: 3042091 - DNA, 25 bp, Homo sapien
ggaagatccagacttcaaaccatgg

SEQ ID NO: 3042092 - DNA, 25 bp, Homo sapien
caaaccatggtctgtttaattccaa

SEQ ID NO: 3042093 - DNA, 25 bp, Homo sapien
caatgccacctggttacaactggaa

SEQ ID NO: 3042094 - DNA, 25 bp, Homo sapien
agaactccctcttaaggataatagg

SEQ ID NO: 3042095 - DNA, 25 bp, Homo sapien
tgtaacaaaatggtgagtgcaaatg

SEQ ID NO: 3042096 - DNA, 25 bp, Homo sapien
tagtcgggcctaagcaagtcatggt

SEQ ID NO: 3042097 - DNA, 25 bp, Homo sapien
ctaaagagatgggatgagaaggtaa

SEQ ID NO: 3042098 - DNA, 25 bp, Homo sapien
taaatctgcgctatatccaggtgca

SEQ ID NO: 3042099 - DNA, 25 bp, Homo sapien
tgcattatttatccctcacacacag

SEQ ID NO: 3042100 - DNA, 25 bp, Homo sapien
tccaggtgcacttagaatgacatat

SEQ ID NO: 3042101 - DNA, 25 bp, Homo sapien
gaggagacagttatctaaatctgcg

SEQ ID NO: 3042102 - DNA, 25 bp, Homo sapien
tgcagttccggaaaagatggacccc

SEQ ID NO: 3042103 - DNA, 25 bp, Homo sapien
gcctgggatgagctatgtcactctg

SEQ ID NO: 3042104 - DNA, 25 bp, Homo sapien
cccttaggcgggtacttgccagttg

SEQ ID NO: 3042105 - DNA, 25 bp, Homo sapien
ttgccagttgggtgatgcgcctcca

SEQ ID NO: 3042106 - DNA, 25 bp, Homo sapien
atcatcaccgacatgcattgagctc

SEQ ID NO: 3042107 - DNA, 25 bp, Homo sapien
attttaactcagctgtactgatggc

SEQ ID NO: 3042108 - DNA, 25 bp, Homo sapien
tgatggcaaagcccaagctccttca

SEQ ID NO: 3042109 - DNA, 25 bp, Homo sapien
cattgagctctcagatgcatcatcc

SEQ ID NO: 3042110 - DNA, 25 bp, Homo sapien
tggaataatttcaatcaccacctgc

SEQ ID NO: 3042111 - DNA, 25 bp, Homo sapien
tggtctcttcacacggacgcgtatg

SEQ ID NO: 3042112 - DNA, 25 bp, Homo sapien
ggtctcttcacacggacgcgtatga

SEQ ID NO: 3042113 - DNA, 25 bp, Homo sapien
ggtggtctcttcacacggacgcgta

SEQ ID NO: 3042114 - DNA, 25 bp, Homo sapien
gtctcttcacacggacgcgtatgaa

SEQ ID NO: 3042115 - DNA, 25 bp, Homo sapien
agcctgagaaacatgtcaaggttct

SEQ ID NO: 3042116 - DNA, 25 bp, Homo sapien
cctgagaaacatgtcaaggttctat

SEQ ID NO: 3042117 - DNA, 25 bp, Homo sapien
gcctgagaaacatgtcaaggttcta

SEQ ID NO: 3042118 - DNA, 25 bp, Homo sapien
tgagaaacatgtcaaggttctatat

SEQ ID NO: 3042119 - DNA, 25 bp, Homo sapien
aggcacctgccaacaccacgcctgg

SEQ ID NO: 3042120 - DNA, 25 bp, Homo sapien
ttgaccttatgatccacctgcatcg

SEQ ID NO: 3042121 - DNA, 25 bp, Homo sapien
tcttgaccttatgatccacctgcat

SEQ ID NO: 3042122 - DNA, 25 bp, Homo sapien
gcacctgccaacaccacgcctggct

SEQ ID NO: 3042123 - DNA, 25 bp, Homo sapien
taattaggaagacaagcacaacaaa

SEQ ID NO: 3042124 - DNA, 25 bp, Homo sapien
tccaggccaacagtgatgtcctcac

SEQ ID NO: 3042125 - DNA, 25 bp, Homo sapien
taaccctttcccaacatgattacca

SEQ ID NO: 3042126 - DNA, 25 bp, Homo sapien
tcacactctgccaagagtctttctc

SEQ ID NO: 3042127 - DNA, 25 bp, Homo sapien
ctgcatgttgggcactgggtgctgc

SEQ ID NO: 3042128 - DNA, 25 bp, Homo sapien
tgggatccagctcctgcatgttggg

SEQ ID NO: 3042129 - DNA, 25 bp, Homo sapien
gggatccagctcctgcatgttgggc

SEQ ID NO: 3042130 - DNA, 25 bp, Homo sapien
ctctgggatccagctcctgcatgtt

SEQ ID NO: 3042131 - DNA, 25 bp, Homo sapien
gctgcaccaactgccctttcatcaa

SEQ ID NO: 3042132 - DNA, 25 bp, Homo sapien
tgctgcaccaactgccctttcatca

SEQ ID NO: 3042133 - DNA, 25 bp, Homo sapien
aactgccctttcatcaactcctctg

SEQ ID NO: 3042134 - DNA, 25 bp, Homo sapien
caccaactgccctttcatcaactcc

SEQ ID NO: 3042135 - DNA, 25 bp, Homo sapien
gaaatagccagcaaataggggctgt

SEQ ID NO: 3042136 - DNA, 25 bp, Homo sapien
aaatagccagcaaataggggctgtc

SEQ ID NO: 3042137 - DNA, 25 bp, Homo sapien
tgaaatagccagcaaataggggctg

SEQ ID NO: 3042138 - DNA, 25 bp, Homo sapien
ctgaggtcaatgtggtgctggtgct

SEQ ID NO: 3042139 - DNA, 25 bp, Homo sapien
gctgaggtcaatgtggtgctggtgc

SEQ ID NO: 3042140 - DNA, 25 bp, Homo sapien
gggctgaggtcaatgtggtgctggt

SEQ ID NO: 3042141 - DNA, 25 bp, Homo sapien
ggctgaggtcaatgtggtgctggtg

SEQ ID NO: 3042142 - DNA, 25 bp, Homo sapien
gaatctgcagctaacttattttccc

SEQ ID NO: 3042143 - DNA, 25 bp, Homo sapien
gaaccacagttctacccctgggatg

SEQ ID NO: 3042144 - DNA, 25 bp, Homo sapien
gcaaacccaaactccgaagacttga

SEQ ID NO: 3042145 - DNA, 25 bp, Homo sapien
ccaagcagaagtgggttcaggattc

SEQ ID NO: 3042146 - DNA, 25 bp, Homo sapien
ttcaaaatctgaagccatgagcctt

SEQ ID NO: 3042147 - DNA, 25 bp, Homo sapien
tgatcagttctagggaccaatggcc

SEQ ID NO: 3042148 - DNA, 25 bp, Homo sapien
gcttcaagaccaaacggggcaagga

SEQ ID NO: 3042149 - DNA, 25 bp, Homo sapien
catgagccttcatacatggactgag

SEQ ID NO: 3042150 - DNA, 25 bp, Homo sapien
acttgaatgtgaactgagaggccca

SEQ ID NO: 3042151 - DNA, 25 bp, Homo sapien
ttggaacttgcaacctctggtcacg

SEQ ID NO: 3042152 - DNA, 25 bp, Homo sapien
ggtcacgctgaacactttgcccttg

SEQ ID NO: 3042153 - DNA, 25 bp, Homo sapien
gagaatgtgcaggtcctaaacccca

SEQ ID NO: 3042154 - DNA, 25 bp, Homo sapien
gctgttctggaacaatggctccagt

SEQ ID NO: 3042155 - DNA, 25 bp, Homo sapien
caagtgattcagacttcatgtgcac

SEQ ID NO: 3042156 - DNA, 25 bp, Homo sapien
ctggctcgcaactcatccgtttcat

SEQ ID NO: 3042157 - DNA, 25 bp, Homo sapien
acactcctgccaaaagtaaacccat

SEQ ID NO: 3042158 - DNA, 25 bp, Homo sapien
gatcctctgtgacctagcaaaagca

SEQ ID NO: 3042159 - DNA, 25 bp, Homo sapien
aatggtgtagggctggtagtttcgg

SEQ ID NO: 3042160 - DNA, 25 bp, Homo sapien
taaagtgcaacaacatagcttatca

SEQ ID NO: 3042161 - DNA, 25 bp, Homo sapien
tagcttatcaagaccaagcagatcc

SEQ ID NO: 3042162 - DNA, 25 bp, Homo sapien
gtgtccaaggcgcaggcctctttgc

SEQ ID NO: 3042163 - DNA, 25 bp, Homo sapien
tttgacgggcagtgcctcagcattt

SEQ ID NO: 3042164 - DNA, 25 bp, Homo sapien
ttttctttttgacgggcagtgcctc

SEQ ID NO: 3042165 - DNA, 25 bp, Homo sapien
tgaacccatccaactgtgtccaagg

SEQ ID NO: 3042166 - DNA, 25 bp, Homo sapien
cactgggtgggcaacgcacaagccc

SEQ ID NO: 3042167 - DNA, 25 bp, Homo sapien
accactgggtgggcaacgcacaagc

SEQ ID NO: 3042168 - DNA, 25 bp, Homo sapien
gggcaacgcacaagccccgcctcct

SEQ ID NO: 3042169 - DNA, 25 bp, Homo sapien
ctgggtgggcaacgcacaagccccg

SEQ ID NO: 3042170 - DNA, 25 bp, Homo sapien
tgctcttgctaggccttgggctccc

SEQ ID NO: 3042171 - DNA, 25 bp, Homo sapien
gctcttgctaggccttgggctcccc

SEQ ID NO: 3042172 - DNA, 25 bp, Homo sapien
ctgctcttgctaggccttgggctcc

SEQ ID NO: 3042173 - DNA, 25 bp, Homo sapien
ctcttgctaggccttgggctcccct

SEQ ID NO: 3042174 - DNA, 25 bp, Homo sapien
cttgtaattccaggctggcggggtt

SEQ ID NO: 3042175 - DNA, 25 bp, Homo sapien
ctcttgtaattccaggctggcgggg

SEQ ID NO: 3042176 - DNA, 25 bp, Homo sapien
tgtaattccaggctggcggggttct

SEQ ID NO: 3042177 - DNA, 25 bp, Homo sapien
tcttgtaattccaggctggcggggt

SEQ ID NO: 3042178 - DNA, 25 bp, Homo sapien
gccctcaggggaatctcttgctccg

SEQ ID NO: 3042179 - DNA, 25 bp, Homo sapien
ctgtaacacaggattgccctcaggg

SEQ ID NO: 3042180 - DNA, 25 bp, Homo sapien
gatggagctggtatttctgtaacac

SEQ ID NO: 3042181 - DNA, 25 bp, Homo sapien
gccctcattggagcagatggagctg

SEQ ID NO: 3042182 - DNA, 25 bp, Homo sapien
cacatcccagctagcagcaagcaca

SEQ ID NO: 3042183 - DNA, 25 bp, Homo sapien
atcttccggccacatcccagctagc

SEQ ID NO: 3042184 - DNA, 25 bp, Homo sapien
gctgtccacatcttccggccacatc

SEQ ID NO: 3042185 - DNA, 25 bp, Homo sapien
ttccggccacatcccagctagcagc

SEQ ID NO: 3042186 - DNA, 25 bp, Homo sapien
gcctggtgaagctaagagctcacca

SEQ ID NO: 3042187 - DNA, 25 bp, Homo sapien
ggtgaagctaagagctcaccactgt

SEQ ID NO: 3042188 - DNA, 25 bp, Homo sapien
gagcctggtgaagctaagagctcac

SEQ ID NO: 3042189 - DNA, 25 bp, Homo sapien
tgatgagcctggtgaagctaagagc

SEQ ID NO: 3042190 - DNA, 25 bp, Homo sapien
cactgcactgatgtgcagcaactat

SEQ ID NO: 3042191 - DNA, 25 bp, Homo sapien
tttcatgctgcagcgtttaacactg

SEQ ID NO: 3042192 - DNA, 25 bp, Homo sapien
tgcactgatgtgcagcaactattag

SEQ ID NO: 3042193 - DNA, 25 bp, Homo sapien
agcgtttaacactgcactgatgtgc

SEQ ID NO: 3042194 - DNA, 25 bp, Homo sapien
tgaacatgcgatgggtcaaagccat

SEQ ID NO: 3042195 - DNA, 25 bp, Homo sapien
cgaaagactgcttgttccacattga

SEQ ID NO: 3042196 - DNA, 25 bp, Homo sapien
gccatgtaataagataggtctcctc

SEQ ID NO: 3042197 - DNA, 25 bp, Homo sapien
gaagtaggtccatgccaggtgaaca

SEQ ID NO: 3042198 - DNA, 25 bp, Homo sapien
atataattacctccttgtggataaa

SEQ ID NO: 3042199 - DNA, 25 bp, Homo sapien
tcaaactacgcaacctactacctgt

SEQ ID NO: 3042200 - DNA, 25 bp, Homo sapien
aaatccctgtcctcaaactacgcaa

SEQ ID NO: 3042201 - DNA, 25 bp, Homo sapien
cctaagaaaggtagcagcaggtcat

SEQ ID NO: 3042202 - DNA, 25 bp, Homo sapien
agcaagggtagagcgcagagcccat

SEQ ID NO: 3042203 - DNA, 25 bp, Homo sapien
ggagcaagggtagagcgcagagccc

SEQ ID NO: 3042204 - DNA, 25 bp, Homo sapien
cagggagcaagggtagagcgcagag

SEQ ID NO: 3042205 - DNA, 25 bp, Homo sapien
agggagcaagggtagagcgcagagc

SEQ ID NO: 3042206 - DNA, 25 bp, Homo sapien
cttgtgttatttccatcatcattac

SEQ ID NO: 3042207 - DNA, 25 bp, Homo sapien
tcagcttgtgttatttccatcatca

SEQ ID NO: 3042208 - DNA, 25 bp, Homo sapien
cagcttgtgttatttccatcatcat

SEQ ID NO: 3042209 - DNA, 25 bp, Homo sapien
gcttgtgttatttccatcatcatta

SEQ ID NO: 3042210 - DNA, 25 bp, Homo sapien
tgtactcagcttcttaatggcaagt

SEQ ID NO: 3042211 - DNA, 25 bp, Homo sapien
ctgtactcagcttcttaatggcaag

SEQ ID NO: 3042212 - DNA, 25 bp, Homo sapien
gtactcagcttcttaatggcaagta

SEQ ID NO: 3042213 - DNA, 25 bp, Homo sapien
ccaaaaggaaagctacggcatccgt

SEQ ID NO: 3042214 - DNA, 25 bp, Homo sapien
tactgctaatctgtgacaaacctgg

SEQ ID NO: 3042215 - DNA, 25 bp, Homo sapien
ggaactggcattgttacccctgctg

SEQ ID NO: 3042216 - DNA, 25 bp, Homo sapien
cagggctctgatagatgggttcaaa

SEQ ID NO: 3042217 - DNA, 25 bp, Homo sapien
cttggacccaaagttcagtgcaggt

SEQ ID NO: 3042218 - DNA, 25 bp, Homo sapien
ccaaagttcagtgcaggtgccttca

SEQ ID NO: 3042219 - DNA, 25 bp, Homo sapien
aagttcagtgcaggtgccttcacac

SEQ ID NO: 3042220 - DNA, 25 bp, Homo sapien
agattcccttggacccaaagttcag

SEQ ID NO: 3042221 - DNA, 25 bp, Homo sapien
tcacagaccccacataaccagaact

SEQ ID NO: 3042222 - DNA, 25 bp, Homo sapien
gacacacaccgtcactctggtcatg

SEQ ID NO: 3042223 - DNA, 25 bp, Homo sapien
ggagctgacacacaccgtcactctg

SEQ ID NO: 3042224 - DNA, 25 bp, Homo sapien
cagaactgcacatgcagtagggtga

SEQ ID NO: 3042225 - DNA, 25 bp, Homo sapien
acccctcgaattctacacaagtgag

SEQ ID NO: 3042226 - DNA, 25 bp, Homo sapien
tagcacctgagcctaagcccttcct

SEQ ID NO: 3042227 - DNA, 25 bp, Homo sapien
tacaccgcaggccacattccctctg

SEQ ID NO: 3042228 - DNA, 25 bp, Homo sapien
aagctgcaacccctcgaattctaca

SEQ ID NO: 3042229 - DNA, 25 bp, Homo sapien
tgtcccaaggtgggggaagaagtga

SEQ ID NO: 3042230 - DNA, 25 bp, Homo sapien
gtccaccagtaatgtaggaaggcca

SEQ ID NO: 3042231 - DNA, 25 bp, Homo sapien
ccgtccaccagtaatgtaggaaggc

SEQ ID NO: 3042232 - DNA, 25 bp, Homo sapien
caccgtccaccagtaatgtaggaag

SEQ ID NO: 3042233 - DNA, 25 bp, Homo sapien
ttgcaccgtccaccagtaatgtagg

SEQ ID NO: 3042234 - DNA, 25 bp, Homo sapien
ttttcccgtatctgagctgtctcag

SEQ ID NO: 3042235 - DNA, 25 bp, Homo sapien
ctcaggataccttgggaattcatca

SEQ ID NO: 3042236 - DNA, 25 bp, Homo sapien
tggctctcatcattgaccttcccag

SEQ ID NO: 3042237 - DNA, 25 bp, Homo sapien
cagccctagacatttggcagcctct

SEQ ID NO: 3042238 - DNA, 25 bp, Homo sapien
gaccgtcacaagaattgatgtacca

SEQ ID NO: 3042239 - DNA, 25 bp, Homo sapien
ctggcttggcctgctcagacgtcat

SEQ ID NO: 3042240 - DNA, 25 bp, Homo sapien
gatgtaccaacaattacagagattg

SEQ ID NO: 3042241 - DNA, 25 bp, Homo sapien
tgaattggtccagaaatagcagatg

SEQ ID NO: 3042242 - DNA, 25 bp, Homo sapien
tagtttatcgatgctctgtggtgtg

SEQ ID NO: 3042243 - DNA, 25 bp, Homo sapien
cagcagagacacactctatgcccaa

SEQ ID NO: 3042244 - DNA, 25 bp, Homo sapien
gataatcataaatccacaaactgca

SEQ ID NO: 3042245 - DNA, 25 bp, Homo sapien
taggcaccggatggatgagataatc

SEQ ID NO: 3042246 - DNA, 25 bp, Homo sapien
atgcgcatggcccagtcgtggagca

SEQ ID NO: 3042247 - DNA, 25 bp, Homo sapien
gccaaatgaggcctgaataattcat

SEQ ID NO: 3042248 - DNA, 25 bp, Homo sapien
gtgtcagcttgaatggagatgaaga

SEQ ID NO: 3042249 - DNA, 25 bp, Homo sapien
tcactctggatccaacaggacgtgg

SEQ ID NO: 3042250 - DNA, 25 bp, Homo sapien
gcagggaccagatggcggccagagc

SEQ ID NO: 3042251 - DNA, 25 bp, Homo sapien
tggcggccagagccaaaccaaacct

SEQ ID NO: 3042252 - DNA, 25 bp, Homo sapien
ggccagagccaaaccaaacctgcat

SEQ ID NO: 3042253 - DNA, 25 bp, Homo sapien
ggcggccagagccaaaccaaacctg

SEQ ID NO: 3042254 - DNA, 25 bp, Homo sapien
cctctaggtggcttgggcagctcaa

SEQ ID NO: 3042255 - DNA, 25 bp, Homo sapien
catcacctcagtttgcaaaggtggg

SEQ ID NO: 3042256 - DNA, 25 bp, Homo sapien
caagtgcttcaaagccgttgtgaca

SEQ ID NO: 3042257 - DNA, 25 bp, Homo sapien
cagcatcacctcagtttgcaaaggt

SEQ ID NO: 3042258 - DNA, 25 bp, Homo sapien
cacctcagtttgcaaaggtgggaac

SEQ ID NO: 3042259 - DNA, 25 bp, Homo sapien
ctgggctgtaagtcctatctctgct

SEQ ID NO: 3042260 - DNA, 25 bp, Homo sapien
gctgaggccccattcgggcttttgc

SEQ ID NO: 3042261 - DNA, 25 bp, Homo sapien
tgaggccccattcgggcttttgctt

SEQ ID NO: 3042262 - DNA, 25 bp, Homo sapien
taagtcctatctctgctgctgaggc

SEQ ID NO: 3042263 - DNA, 25 bp, Homo sapien
tctgtggagcaggtgagtctgcaga

SEQ ID NO: 3042264 - DNA, 25 bp, Homo sapien
tctgagcagtaaggaagtggcatgc

SEQ ID NO: 3042265 - DNA, 25 bp, Homo sapien
tctgctggaatagcctgagcaggct

SEQ ID NO: 3042266 - DNA, 25 bp, Homo sapien
tcatctcccatttagtctgtggagc

SEQ ID NO: 3042267 - DNA, 25 bp, Homo sapien
tcccagggcattgttcagagcagca

SEQ ID NO: 3042268 - DNA, 25 bp, Homo sapien
aggagttgaattgagcttccccaga

SEQ ID NO: 3042269 - DNA, 25 bp, Homo sapien
tctctgcgttcatcaatcccagggc

SEQ ID NO: 3042270 - DNA, 25 bp, Homo sapien
cattgttcagagcagcaggagttga

SEQ ID NO: 3042271 - DNA, 25 bp, Homo sapien
gcccacttccggcagaaaagcaggc

SEQ ID NO: 3042272 - DNA, 25 bp, Homo sapien
tccatcagagactcctgctcaaggg

SEQ ID NO: 3042273 - DNA, 25 bp, Homo sapien
tcagattcatcggaagggcccactt

SEQ ID NO: 3042274 - DNA, 25 bp, Homo sapien
aagcaggccggtatatctccatcag

SEQ ID NO: 3042275 - DNA, 25 bp, Homo sapien
gtggcaaccacaggagggtccaatt

SEQ ID NO: 3042276 - DNA, 25 bp, Homo sapien
aagtggcaaccacaggagggtccaa

SEQ ID NO: 3042277 - DNA, 25 bp, Homo sapien
ggcaaccacaggagggtccaattcc

SEQ ID NO: 3042278 - DNA, 25 bp, Homo sapien
caaccacaggagggtccaattccca

SEQ ID NO: 3042279 - DNA, 25 bp, Homo sapien
tctgctgcccatccaccactctgtc

SEQ ID NO: 3042280 - DNA, 25 bp, Homo sapien
ctctgctgcccatccaccactctgt

SEQ ID NO: 3042281 - DNA, 25 bp, Homo sapien
cttgctcgactctgctgcccatcca

SEQ ID NO: 3042282 - DNA, 25 bp, Homo sapien
gctgcccatccaccactctgtccat

SEQ ID NO: 3042283 - DNA, 25 bp, Homo sapien
ttcaatggcttctgctgacgtggca

SEQ ID NO: 3042284 - DNA, 25 bp, Homo sapien
tggcaaaccacgtttaaagtgacca

SEQ ID NO: 3042285 - DNA, 25 bp, Homo sapien
agtgaccacggccatagtcctgtcc

SEQ ID NO: 3042286 - DNA, 25 bp, Homo sapien
gcttctgctgacgtggcaaaccacg

SEQ ID NO: 3042287 - DNA, 25 bp, Homo sapien
cttgatatatgactgctgggcggcc

SEQ ID NO: 3042288 - DNA, 25 bp, Homo sapien
taactaggactaacaggtgagaccg

SEQ ID NO: 3042289 - DNA, 25 bp, Homo sapien
gctagcttaggaaatctcggaaccc

SEQ ID NO: 3042290 - DNA, 25 bp, Homo sapien
gagagtcagaggatcatcaggccca

SEQ ID NO: 3042291 - DNA, 25 bp, Homo sapien
cctacaatgcctgtgatgttggaga

SEQ ID NO: 3042292 - DNA, 25 bp, Homo sapien
gatgttggagatatgcaccatacta

SEQ ID NO: 3042293 - DNA, 25 bp, Homo sapien
ctcactgttgtacctacaatgcctg

SEQ ID NO: 3042294 - DNA, 25 bp, Homo sapien
gctggttttgtcctgctcactgttg

SEQ ID NO: 3042295 - DNA, 25 bp, Homo sapien
gaaaagggacatcagtgactgcggt

SEQ ID NO: 3042296 - DNA, 25 bp, Homo sapien
gcagcgaggctgattcccagccagt

SEQ ID NO: 3042297 - DNA, 25 bp, Homo sapien
ctgcggtggcgtctaccctggagaa

SEQ ID NO: 3042298 - DNA, 25 bp, Homo sapien
tacccgcgcctctggaagagcggct

SEQ ID NO: 3042299 - DNA, 25 bp, Homo sapien
gaatcgcgaggtcggcccttggccc

SEQ ID NO: 3042300 - DNA, 25 bp, Homo sapien
gggcgagcggaatcgcgaggtcggc

SEQ ID NO: 3042301 - DNA, 25 bp, Homo sapien
aggtcggcccttggcccgagtctca

SEQ ID NO: 3042302 - DNA, 25 bp, Homo sapien
cgagtctcattaaggagccgcgcgc

SEQ ID NO: 3042303 - DNA, 25 bp, Homo sapien
gctctgcctctcagcgctactcgcc

SEQ ID NO: 3042304 - DNA, 25 bp, Homo sapien
tcgcccacggtaagtgtcgcggcgc

SEQ ID NO: 3042305 - DNA, 25 bp, Homo sapien
gcgctactcgcccacggtaagtgtc

SEQ ID NO: 3042306 - DNA, 25 bp, Homo sapien
cgcggcgcggactgggggtgaggat

SEQ ID NO: 3042307 - DNA, 25 bp, Homo sapien
caggagatctcaatttgattcttgc

SEQ ID NO: 3042308 - DNA, 25 bp, Homo sapien
gaggatttcaggagatctcaatttg

SEQ ID NO: 3042309 - DNA, 25 bp, Homo sapien
ctcaatttgattcttgccacatccc

SEQ ID NO: 3042310 - DNA, 25 bp, Homo sapien
ggaggatttcaggagatctcaattt

SEQ ID NO: 3042311 - DNA, 25 bp, Homo sapien
cttcctcaaccttgtgacccctctc

SEQ ID NO: 3042312 - DNA, 25 bp, Homo sapien
tcaaccttgtgacccctctcattgt

SEQ ID NO: 3042313 - DNA, 25 bp, Homo sapien
ctcaaccttgtgacccctctcattg

SEQ ID NO: 3042314 - DNA, 25 bp, Homo sapien
tcctcaaccttgtgacccctctcat

SEQ ID NO: 3042315 - DNA, 25 bp, Homo sapien
ccagctgcagctgaccactcgtcca

SEQ ID NO: 3042316 - DNA, 25 bp, Homo sapien
ctgcagctgaccactcgtccaccat

SEQ ID NO: 3042317 - DNA, 25 bp, Homo sapien
agctgcagctgaccactcgtccacc

SEQ ID NO: 3042318 - DNA, 25 bp, Homo sapien
tcccagctgcagctgaccactcgtc

SEQ ID NO: 3042319 - DNA, 25 bp, Homo sapien
ctctaaacacccggcaagcaataac

SEQ ID NO: 3042320 - DNA, 25 bp, Homo sapien
aaagctctaaacacccggcaagcaa

SEQ ID NO: 3042321 - DNA, 25 bp, Homo sapien
aagctctaaacacccggcaagcaat

SEQ ID NO: 3042322 - DNA, 25 bp, Homo sapien
gctctaaacacccggcaagcaataa

SEQ ID NO: 3042323 - DNA, 25 bp, Homo sapien
aggcacattccggaaagaaggagcc

SEQ ID NO: 3042324 - DNA, 25 bp, Homo sapien
cgccagaggcccattaagttgatta

SEQ ID NO: 3042325 - DNA, 25 bp, Homo sapien
ttcctaggaccctgctccgccagag

SEQ ID NO: 3042326 - DNA, 25 bp, Homo sapien
gattaagaggcacattccggaaaga

SEQ ID NO: 3042327 - DNA, 25 bp, Homo sapien
gcttcttagacaaatgagcttggtg

SEQ ID NO: 3042328 - DNA, 25 bp, Homo sapien
tattggtgggacatagactcccttc

SEQ ID NO: 3042329 - DNA, 25 bp, Homo sapien
caagtctgtttactccttggcagaa

SEQ ID NO: 3042330 - DNA, 25 bp, Homo sapien
gccaggtctccaaagactaaattgc

SEQ ID NO: 3042331 - DNA, 25 bp, Homo sapien
ctcaattcttccttgggtagagcat

SEQ ID NO: 3042332 - DNA, 25 bp, Homo sapien
aactcaattcttccttgggtagagc

SEQ ID NO: 3042333 - DNA, 25 bp, Homo sapien
aattcttccttgggtagagcatcct

SEQ ID NO: 3042334 - DNA, 25 bp, Homo sapien
ctaactcaattcttccttgggtaga

SEQ ID NO: 3042335 - DNA, 25 bp, Homo sapien
ccacagagccggaaggaaatttcag

SEQ ID NO: 3042336 - DNA, 25 bp, Homo sapien
gaaatttcagatgaacggttcagac

SEQ ID NO: 3042337 - DNA, 25 bp, Homo sapien
gcacccagactgaaagcttctcctg

SEQ ID NO: 3042338 - DNA, 25 bp, Homo sapien
ttgaacctgagactgtggcacccag

SEQ ID NO: 3042339 - DNA, 25 bp, Homo sapien
cagtaagcagggttggagcacagag

SEQ ID NO: 3042340 - DNA, 25 bp, Homo sapien
ggagaagctgtgtctcgtggcacac

SEQ ID NO: 3042341 - DNA, 25 bp, Homo sapien
tctcgtggcacacatcatgccccct

SEQ ID NO: 3042342 - DNA, 25 bp, Homo sapien
agtaagcagggttggagcacagagc

SEQ ID NO: 3042343 - DNA, 25 bp, Homo sapien
catcgtatgcaactcaagccatctg

SEQ ID NO: 3042344 - DNA, 25 bp, Homo sapien
taaggggagagcttgaggtcagaga

SEQ ID NO: 3042345 - DNA, 25 bp, Homo sapien
ctggccatctgagaagtggaaggct

SEQ ID NO: 3042346 - DNA, 25 bp, Homo sapien
accctccaccatgaaataaggggag

SEQ ID NO: 3042347 - DNA, 25 bp, Homo sapien
ggaagaacataaacagtgtgtgcca

SEQ ID NO: 3042348 - DNA, 25 bp, Homo sapien
tgtctccagggataattaaaatctc

SEQ ID NO: 3042349 - DNA, 25 bp, Homo sapien
tcctgctgaacccagggtggtggcc

SEQ ID NO: 3042350 - DNA, 25 bp, Homo sapien
tagtgctacagtggtgtgccctgct

SEQ ID NO: 3042351 - DNA, 25 bp, Homo sapien
cctgcatgctgaatggcaacaagtt

SEQ ID NO: 3042352 - DNA, 25 bp, Homo sapien
cccgcctgcatgctgaatggcaaca

SEQ ID NO: 3042353 - DNA, 25 bp, Homo sapien
cgcctgcatgctgaatggcaacaag

SEQ ID NO: 3042354 - DNA, 25 bp, Homo sapien
tgcatgctgaatggcaacaagttaa

SEQ ID NO: 3042355 - DNA, 25 bp, Homo sapien
taatcaaagtctccaagcgcagcag

SEQ ID NO: 3042356 - DNA, 25 bp, Homo sapien
tgctgacccttaatcaaagtctcca

SEQ ID NO: 3042357 - DNA, 25 bp, Homo sapien
gacccttaatcaaagtctccaagcg

SEQ ID NO: 3042358 - DNA, 25 bp, Homo sapien
agcaggaagttcatctggtggcaag

SEQ ID NO: 3042359 - DNA, 25 bp, Homo sapien
actcatgcataagccacaggctgca

SEQ ID NO: 3042360 - DNA, 25 bp, Homo sapien
agcacaggggcgcaggtctgtacca

SEQ ID NO: 3042361 - DNA, 25 bp, Homo sapien
cctcagaaggcgcttcctggagcac

SEQ ID NO: 3042362 - DNA, 25 bp, Homo sapien
ttctgtcacactcatgcataagcca

SEQ ID NO: 3042363 - DNA, 25 bp, Homo sapien
aaaattggaacctcccgagagcacg

SEQ ID NO: 3042364 - DNA, 25 bp, Homo sapien
acgccccacgagaatcggtgcttcc

SEQ ID NO: 3042365 - DNA, 25 bp, Homo sapien
ccaagccttggcacagtccatctgg

SEQ ID NO: 3042366 - DNA, 25 bp, Homo sapien
gagcacggacttgggtcccaagcct

SEQ ID NO: 3042367 - DNA, 25 bp, Homo sapien
gaggtggaattatcgctaaactgct

SEQ ID NO: 3042368 - DNA, 25 bp, Homo sapien
cctgtccagcagatctctcattagc

SEQ ID NO: 3042369 - DNA, 25 bp, Homo sapien
tgagagaatccccagcatttaaatt

SEQ ID NO: 3042370 - DNA, 25 bp, Homo sapien
gaggaacatatgcaatgaggcatct

SEQ ID NO: 3042371 - DNA, 25 bp, Homo sapien
gtttctgtccagcattttcacctcc

SEQ ID NO: 3042372 - DNA, 25 bp, Homo sapien
tctgtccagcattttcacctcccat

SEQ ID NO: 3042373 - DNA, 25 bp, Homo sapien
ctggtttctgtccagcattttcacc

SEQ ID NO: 3042374 - DNA, 25 bp, Homo sapien
ggtttctgtccagcattttcacctc

SEQ ID NO: 3042375 - DNA, 25 bp, Homo sapien
taacgaggatctaattgccttcccc

SEQ ID NO: 3042376 - DNA, 25 bp, Homo sapien
cccaagtagttttcaagccataatt

SEQ ID NO: 3042377 - DNA, 25 bp, Homo sapien
gccataattaattgcacagtaacga

SEQ ID NO: 3042378 - DNA, 25 bp, Homo sapien
tggtgctgtcgaggaatttctccca

SEQ ID NO: 3042379 - DNA, 25 bp, Homo sapien
cccaacatcatagacaagccaatga

SEQ ID NO: 3042380 - DNA, 25 bp, Homo sapien
ccaacatcatagacaagccaatgaa

SEQ ID NO: 3042381 - DNA, 25 bp, Homo sapien
tgcactaggagacctgcaccacatg

SEQ ID NO: 3042382 - DNA, 25 bp, Homo sapien
tctctggaaggacaagaacaacttt

SEQ ID NO: 3042383 - DNA, 25 bp, Homo sapien
gaggtcctggcaaattgtactcgct

SEQ ID NO: 3042384 - DNA, 25 bp, Homo sapien
gattggccccgagaaacttgatgtg

SEQ ID NO: 3042385 - DNA, 25 bp, Homo sapien
tagcactatctttccgaggtcctgg

SEQ ID NO: 3042386 - DNA, 25 bp, Homo sapien
catcgttctcccagcccatctctga

SEQ ID NO: 3042387 - DNA, 25 bp, Homo sapien
atcgttctcccagcccatctctgac

SEQ ID NO: 3042388 - DNA, 25 bp, Homo sapien
tcatcgttctcccagcccatctctg

SEQ ID NO: 3042389 - DNA, 25 bp, Homo sapien
accccgagatgctgggcaaccaaca

SEQ ID NO: 3042390 - DNA, 25 bp, Homo sapien
agactgcttagattcagtctgtccc

SEQ ID NO: 3042391 - DNA, 25 bp, Homo sapien
aatccagactgcttagattcagtct

SEQ ID NO: 3042392 - DNA, 25 bp, Homo sapien
gaccccgagatgctgggcaaccaac

SEQ ID NO: 3042393 - DNA, 25 bp, Homo sapien
taggttgcccgaataaaatgtcagc

SEQ ID NO: 3042394 - DNA, 25 bp, Homo sapien
taaagacattccaaggcgtgagcgg

SEQ ID NO: 3042395 - DNA, 25 bp, Homo sapien
tggtgtctcccgaccactggcaaat

SEQ ID NO: 3042396 - DNA, 25 bp, Homo sapien
gccatcttactggagaaacaatgcc

SEQ ID NO: 3042397 - DNA, 25 bp, Homo sapien
tccctagcaaggtgggagaagaagc

SEQ ID NO: 3042398 - DNA, 25 bp, Homo sapien
aagaagctgagggtccaatcagtag

SEQ ID NO: 3042399 - DNA, 25 bp, Homo sapien
gctgagggtccaatcagtagctcca

SEQ ID NO: 3042400 - DNA, 25 bp, Homo sapien
aagggccatccctagcaaggtggga

SEQ ID NO: 3042401 - DNA, 25 bp, Homo sapien
gagtctttcagtcctaagtcacaga

SEQ ID NO: 3042402 - DNA, 25 bp, Homo sapien
tcacagaccccagcattgattatgg

SEQ ID NO: 3042403 - DNA, 25 bp, Homo sapien
gattatggagtctacagcagcacag

SEQ ID NO: 3042404 - DNA, 25 bp, Homo sapien
gcagcacagaattccagagtcacag

SEQ ID NO: 3042405 - DNA, 25 bp, Homo sapien
ctgtgataaacatagaagacaatgc

SEQ ID NO: 3042406 - DNA, 25 bp, Homo sapien
tgataaacatagaagacaatgcatt

SEQ ID NO: 3042407 - DNA, 25 bp, Homo sapien
ataaacatagaagacaatgcattgc

SEQ ID NO: 3042408 - DNA, 25 bp, Homo sapien
aatgcattgcctacaccctcaggcc

SEQ ID NO: 3042409 - DNA, 25 bp, Homo sapien
cagcagcatgcggaatcagggcaaa

SEQ ID NO: 3042410 - DNA, 25 bp, Homo sapien
cggaatcagggcaaacatcagtatc

SEQ ID NO: 3042411 - DNA, 25 bp, Homo sapien
aaacatcagtatcatcgtcgttcat

SEQ ID NO: 3042412 - DNA, 25 bp, Homo sapien
catgcggaatcagggcaaacatcag

SEQ ID NO: 3042413 - DNA, 25 bp, Homo sapien
gactccttctgacttctgtcggtct

SEQ ID NO: 3042414 - DNA, 25 bp, Homo sapien
gacttctgtcggtctgaccagtggg

SEQ ID NO: 3042415 - DNA, 25 bp, Homo sapien
tggaatgctcgagtggagaccagct

SEQ ID NO: 3042416 - DNA, 25 bp, Homo sapien
agaccagctgtgatggagggccggc

SEQ ID NO: 3042417 - DNA, 25 bp, Homo sapien
ggtcataataatgcatgcattcaaa

SEQ ID NO: 3042418 - DNA, 25 bp, Homo sapien
gcattcaaacacatcttcaggagga

SEQ ID NO: 3042419 - DNA, 25 bp, Homo sapien
ttggtcataataatgcatgcattca

SEQ ID NO: 3042420 - DNA, 25 bp, Homo sapien
gcatgcattcaaacacatcttcagg

SEQ ID NO: 3042421 - DNA, 25 bp, Homo sapien
ctgctccctctcccagctctgatcc

SEQ ID NO: 3042422 - DNA, 25 bp, Homo sapien
gctccctctcccagctctgatcctg

SEQ ID NO: 3042423 - DNA, 25 bp, Homo sapien
ccagctctgatcctggagtctctgt

SEQ ID NO: 3042424 - DNA, 25 bp, Homo sapien
ctctcccagctctgatcctggagtc

SEQ ID NO: 3042425 - DNA, 25 bp, Homo sapien
tagcacagcaggatgggtgcaggac

SEQ ID NO: 3042426 - DNA, 25 bp, Homo sapien
ctagcacagcaggatgggtgcagga

SEQ ID NO: 3042427 - DNA, 25 bp, Homo sapien
gctagcacagcaggatgggtgcagg

SEQ ID NO: 3042428 - DNA, 25 bp, Homo sapien
tggctagcacagcaggatgggtgca

SEQ ID NO: 3042429 - DNA, 25 bp, Homo sapien
cagttgtttttcccgctcactttca

SEQ ID NO: 3042430 - DNA, 25 bp, Homo sapien
ggcatttctctgtgtaaaccacaga

SEQ ID NO: 3042431 - DNA, 25 bp, Homo sapien
tgaattggcctcaaaggcacgacct

SEQ ID NO: 3042432 - DNA, 25 bp, Homo sapien
agagtagccttctggcttgtgtgca

SEQ ID NO: 3042433 - DNA, 25 bp, Homo sapien
gcacgacctcttgagtgtaaggaca

SEQ ID NO: 3042434 - DNA, 25 bp, Homo sapien
atgggccaggtcatgggacccagcc

SEQ ID NO: 3042435 - DNA, 25 bp, Homo sapien
tgctgaactgctgctccaatgtccc

SEQ ID NO: 3042436 - DNA, 25 bp, Homo sapien
ctgaccaggcaaaacaagttgctga

SEQ ID NO: 3042437 - DNA, 25 bp, Homo sapien
aaacaagttgctgaactgctgctcc

SEQ ID NO: 3042438 - DNA, 25 bp, Homo sapien
gaactgctgctccaatgtccctcct

SEQ ID NO: 3042439 - DNA, 25 bp, Homo sapien
ttcactccatacatatgattgagga

SEQ ID NO: 3042440 - DNA, 25 bp, Homo sapien
catatgattgaggatctatatgagg

SEQ ID NO: 3042441 - DNA, 25 bp, Homo sapien
tatgattgaggatctatatgaggct

SEQ ID NO: 3042442 - DNA, 25 bp, Homo sapien
ctcttcactccatacatatgattga

SEQ ID NO: 3042443 - DNA, 25 bp, Homo sapien
ggctgacaggttgcccaaaatccaa

SEQ ID NO: 3042444 - DNA, 25 bp, Homo sapien
atgccggccccgagaaaaatgaact

SEQ ID NO: 3042445 - DNA, 25 bp, Homo sapien
tctggttccaaaagctatactcctc

SEQ ID NO: 3042446 - DNA, 25 bp, Homo sapien
tcaacttcaggcagcccaatgcatg

SEQ ID NO: 3042447 - DNA, 25 bp, Homo sapien
gttctttataccttgatgaaatatt

SEQ ID NO: 3042448 - DNA, 25 bp, Homo sapien
tgttctttataccttgatgaaatat

SEQ ID NO: 3042449 - DNA, 25 bp, Homo sapien
tgtgttctttataccttgatgaaat

SEQ ID NO: 3042450 - DNA, 25 bp, Homo sapien
gtgttctttataccttgatgaaata

SEQ ID NO: 3042451 - DNA, 25 bp, Homo sapien
gcatttattgtgtagaaattcagaa

SEQ ID NO: 3042452 - DNA, 25 bp, Homo sapien
aggctacacaatagtagtcagatgt

SEQ ID NO: 3042453 - DNA, 25 bp, Homo sapien
aattcagaatggctcaggctacaca

SEQ ID NO: 3042454 - DNA, 25 bp, Homo sapien
actgcatttattgtgtagaaattca

SEQ ID NO: 3042455 - DNA, 25 bp, Homo sapien
cttctagaagggttgattttgaatt

SEQ ID NO: 3042456 - DNA, 25 bp, Homo sapien
catcttctagaagggttgattttga

SEQ ID NO: 3042457 - DNA, 25 bp, Homo sapien
tcatcttctagaagggttgattttg

SEQ ID NO: 3042458 - DNA, 25 bp, Homo sapien
tcttctagaagggttgattttgaat

SEQ ID NO: 3042459 - DNA, 25 bp, Homo sapien
catcccagctcgcataatttcatca

SEQ ID NO: 3042460 - DNA, 25 bp, Homo sapien
aagacatcccagctcgcataatttc

SEQ ID NO: 3042461 - DNA, 25 bp, Homo sapien
gacatcccagctcgcataatttcat

SEQ ID NO: 3042462 - DNA, 25 bp, Homo sapien
tcccagctcgcataatttcatcaac

SEQ ID NO: 3042463 - DNA, 25 bp, Homo sapien
acacaataattatcccaaactcctg

SEQ ID NO: 3042464 - DNA, 25 bp, Homo sapien
aataattatcccaaactcctgcatc

SEQ ID NO: 3042465 - DNA, 25 bp, Homo sapien
cctgcatctgctgctaccattggct

SEQ ID NO: 3042466 - DNA, 25 bp, Homo sapien
tgcatctgctgctaccattggctca

SEQ ID NO: 3042467 - DNA, 25 bp, Homo sapien
ttttgactcgacatgctcagcctga

SEQ ID NO: 3042468 - DNA, 25 bp, Homo sapien
cacaagttgttttgactcgacatgc

SEQ ID NO: 3042469 - DNA, 25 bp, Homo sapien
tacgcccacaagttgttttgactcg

SEQ ID NO: 3042470 - DNA, 25 bp, Homo sapien
ctgtattcaaatctacgcccacaag

SEQ ID NO: 3042471 - DNA, 25 bp, Homo sapien
tcataaccagcattctgagcaagaa

SEQ ID NO: 3042472 - DNA, 25 bp, Homo sapien
ctgtgggtcataaccagcattctga

SEQ ID NO: 3042473 - DNA, 25 bp, Homo sapien
cataaccagcattctgagcaagaac

SEQ ID NO: 3042474 - DNA, 25 bp, Homo sapien
tgggtcataaccagcattctgagca

SEQ ID NO: 3042475 - DNA, 25 bp, Homo sapien
tgtgtactggggttaccaatttctg

SEQ ID NO: 3042476 - DNA, 25 bp, Homo sapien
gcaggatcatactgactttgctgct

SEQ ID NO: 3042477 - DNA, 25 bp, Homo sapien
accaatttctgtcagcagcaggatc

SEQ ID NO: 3042478 - DNA, 25 bp, Homo sapien
aaaggtaccaccaatgtaatgtgta

SEQ ID NO: 3042479 - DNA, 25 bp, Homo sapien
aagcagttgttatttggccgaaagg

SEQ ID NO: 3042480 - DNA, 25 bp, Homo sapien
agcagttgttatttggccgaaaggg

SEQ ID NO: 3042481 - DNA, 25 bp, Homo sapien
agcttggactccaagacgagctctt

SEQ ID NO: 3042482 - DNA, 25 bp, Homo sapien
ttggactccaagacgagctcttcct

SEQ ID NO: 3042483 - DNA, 25 bp, Homo sapien
gactccaagacgagctcttcctttt

SEQ ID NO: 3042484 - DNA, 25 bp, Homo sapien
gccacttcaattgcaccagctccag

SEQ ID NO: 3042485 - DNA, 25 bp, Homo sapien
catttttgatagcacgaagtccatc

SEQ ID NO: 3042486 - DNA, 25 bp, Homo sapien
caatggcatttttgatagcacgaag

SEQ ID NO: 3042487 - DNA, 25 bp, Homo sapien
tgtgagagtatgcttatttggtcct

SEQ ID NO: 3042488 - DNA, 25 bp, Homo sapien
tgtgtgagagtatgcttatttggtc

SEQ ID NO: 3042489 - DNA, 25 bp, Homo sapien
gcatgtcccaagcaatctacagtga

SEQ ID NO: 3042490 - DNA, 25 bp, Homo sapien
ttcaaaagaattcacggccattcca

SEQ ID NO: 3042491 - DNA, 25 bp, Homo sapien
caagcaatctacagtgagatcttca

SEQ ID NO: 3042492 - DNA, 25 bp, Homo sapien
tgtatactcatacacaagaccagca

SEQ ID NO: 3042493 - DNA, 25 bp, Homo sapien
tccatgttttgcaagagaatctaag

SEQ ID NO: 3042494 - DNA, 25 bp, Homo sapien
gctactattccatgttttgcaagag

SEQ ID NO: 3042495 - DNA, 25 bp, Homo sapien
ctgcgaagagctactattccatgtt

SEQ ID NO: 3042496 - DNA, 25 bp, Homo sapien
gcaagagaatctaaggaaaatggat

SEQ ID NO: 3042497 - DNA, 25 bp, Homo sapien
tctttctcttctgcagtcttataaa

SEQ ID NO: 3042498 - DNA, 25 bp, Homo sapien
ttaatgacgacaaatcctttatttg

SEQ ID NO: 3042499 - DNA, 25 bp, Homo sapien
ctttgtccttcaggtctattatttt

SEQ ID NO: 3042500 - DNA, 25 bp, Homo sapien
tattttttgtactctatcttcaata

SEQ ID NO: 3042501 - DNA, 25 bp, Homo sapien
gacgggcaccatgatccaaaactaa

SEQ ID NO: 3042502 - DNA, 25 bp, Homo sapien
caaataaggataaatgcatcttcta

SEQ ID NO: 3042503 - DNA, 25 bp, Homo sapien
tcttcatatctggatgacgggcacc

SEQ ID NO: 3042504 - DNA, 25 bp, Homo sapien
catattccagtgaaacgttgcaaat

SEQ ID NO: 3042505 - DNA, 25 bp, Homo sapien
agaaccatccttaccagcatacaaa

SEQ ID NO: 3042506 - DNA, 25 bp, Homo sapien
agcatacaaacttgcagtaacaatt

SEQ ID NO: 3042507 - DNA, 25 bp, Homo sapien
tcctctctatgggtagcctctctac

SEQ ID NO: 3042508 - DNA, 25 bp, Homo sapien
tagtcccctatatcaattctcacct

SEQ ID NO: 3042509 - DNA, 25 bp, Homo sapien
gaagctagctagctggtacaacagc

SEQ ID NO: 3042510 - DNA, 25 bp, Homo sapien
aggaaggaagctagctagctggtac

SEQ ID NO: 3042511 - DNA, 25 bp, Homo sapien
gtacaaaagttcaatgcaccagaaa

SEQ ID NO: 3042512 - DNA, 25 bp, Homo sapien
tagctagctggtacaacagctttta

SEQ ID NO: 3042513 - DNA, 25 bp, Homo sapien
atagggtaacctggtcttctaacag

SEQ ID NO: 3042514 - DNA, 25 bp, Homo sapien
ggtcttctaacagccaaaacagaat

SEQ ID NO: 3042515 - DNA, 25 bp, Homo sapien
gaagagatcaatagggtaacctggt

SEQ ID NO: 3042516 - DNA, 25 bp, Homo sapien
gtatctgttcctaatttatgcttca

SEQ ID NO: 3042517 - DNA, 25 bp, Homo sapien
cagctattattctagggtgcaggcc

SEQ ID NO: 3042518 - DNA, 25 bp, Homo sapien
cttcagctattattctagggtgcag

SEQ ID NO: 3042519 - DNA, 25 bp, Homo sapien
gcatgaactttagtttgtaatgatg

SEQ ID NO: 3042520 - DNA, 25 bp, Homo sapien
tgatgttctagctacatctaagagg

SEQ ID NO: 3042521 - DNA, 25 bp, Homo sapien
taataactctccaataattagaaca

SEQ ID NO: 3042522 - DNA, 25 bp, Homo sapien
ctcagaaatgtacaggtcagcttgt

SEQ ID NO: 3042523 - DNA, 25 bp, Homo sapien
tcctgtgacgtcatcctgagctgtt

SEQ ID NO: 3042524 - DNA, 25 bp, Homo sapien
gaacatttgaagtagtaccatctcc

SEQ ID NO: 3042525 - DNA, 25 bp, Homo sapien
cattgccatctttggtgagtttgat

SEQ ID NO: 3042526 - DNA, 25 bp, Homo sapien
ccatctttggtgagtttgatgtcac

SEQ ID NO: 3042527 - DNA, 25 bp, Homo sapien
catctcatcgagcagcacattgcca

SEQ ID NO: 3042528 - DNA, 25 bp, Homo sapien
tctcatcgagcagcacattgccatc

SEQ ID NO: 3042529 - DNA, 25 bp, Homo sapien
gaacagaaaccgttatcttgatcat

SEQ ID NO: 3042530 - DNA, 25 bp, Homo sapien
cacatctccttaagaacagaaaccg

SEQ ID NO: 3042531 - DNA, 25 bp, Homo sapien
catctccttaagaacagaaaccgtt

SEQ ID NO: 3042532 - DNA, 25 bp, Homo sapien
aagaacagaaaccgttatcttgatc

SEQ ID NO: 3042533 - DNA, 25 bp, Homo sapien
cttgtctatagaaaagggtgcttaa

SEQ ID NO: 3042534 - DNA, 25 bp, Homo sapien
tgtctatagaaaagggtgcttaata

SEQ ID NO: 3042535 - DNA, 25 bp, Homo sapien
tcttgtctatagaaaagggtgctta

SEQ ID NO: 3042536 - DNA, 25 bp, Homo sapien
ttgtctatagaaaagggtgcttaat

SEQ ID NO: 3042537 - DNA, 25 bp, Homo sapien
cacagcttcactcccggggccctct

SEQ ID NO: 3042538 - DNA, 25 bp, Homo sapien
gcaccaggcgagaaatacccccaga

SEQ ID NO: 3042539 - DNA, 25 bp, Homo sapien
ctctactaggggaggcttttctcct

SEQ ID NO: 3042540 - DNA, 25 bp, Homo sapien
acctgcaccaggcgagaaatacccc

SEQ ID NO: 3042541 - DNA, 25 bp, Homo sapien
gcctgcctcagagggcgacaggaca

SEQ ID NO: 3042542 - DNA, 25 bp, Homo sapien
ctacgcggacgcctgcctcagaggg

SEQ ID NO: 3042543 - DNA, 25 bp, Homo sapien
caacgggcccctagccgcgtaatgg

SEQ ID NO: 3042544 - DNA, 25 bp, Homo sapien
gtaatggccgctccaaccgctgtct

SEQ ID NO: 3042545 - DNA, 25 bp, Homo sapien
ctcgggcggcgcatatattgacagc

SEQ ID NO: 3042546 - DNA, 25 bp, Homo sapien
tttcatggtgcctttaggacccaag

SEQ ID NO: 3042547 - DNA, 25 bp, Homo sapien
gagttgacggcctttatcgcagcca

SEQ ID NO: 3042548 - DNA, 25 bp, Homo sapien
ggacccaagttggtccgcagcacat

SEQ ID NO: 3042549 - DNA, 25 bp, Homo sapien
aaaaaagccttagtcgcgattctga

SEQ ID NO: 3042550 - DNA, 25 bp, Homo sapien
tctcttgagcctcggccaatcatcg

SEQ ID NO: 3042551 - DNA, 25 bp, Homo sapien
gagcaaaaacggcaatgcgacgcca

SEQ ID NO: 3042552 - DNA, 25 bp, Homo sapien
aatgcgacgccacgctctcttgagc

SEQ ID NO: 3042553 - DNA, 25 bp, Homo sapien
cacagggcaaggagcactcagtttc

SEQ ID NO: 3042554 - DNA, 25 bp, Homo sapien
aggagagaaaacaccgcggaagcgt

SEQ ID NO: 3042555 - DNA, 25 bp, Homo sapien
cattcagggtcaattgagaaagcag

SEQ ID NO: 3042556 - DNA, 25 bp, Homo sapien
tcttcacgggaggtaacaagtagtg

SEQ ID NO: 3042557 - DNA, 25 bp, Homo sapien
tatttccgaagccatagttgccgaa

SEQ ID NO: 3042558 - DNA, 25 bp, Homo sapien
gaggcaggtcaacactatttccgaa

SEQ ID NO: 3042559 - DNA, 25 bp, Homo sapien
tgagcagatagagtgttaccgacgg

SEQ ID NO: 3042560 - DNA, 25 bp, Homo sapien
gaaaagctacggaatcgccaggatg

SEQ ID NO: 3042561 - DNA, 25 bp, Homo sapien
taagtgaagaccctatgctaggcag

SEQ ID NO: 3042562 - DNA, 25 bp, Homo sapien
tcagacctctgtgtgagcggcggaa

SEQ ID NO: 3042563 - DNA, 25 bp, Homo sapien
gatggagcccttgtagcccttgaca

SEQ ID NO: 3042564 - DNA, 25 bp, Homo sapien
gaatttatacaatctgggctacagg

SEQ ID NO: 3042565 - DNA, 25 bp, Homo sapien
tgagttgaattgatcctcccgagta

SEQ ID NO: 3042566 - DNA, 25 bp, Homo sapien
gacagccagtctgaccagggaataa

SEQ ID NO: 3042567 - DNA, 25 bp, Homo sapien
tatgctcatagcagagaaagcccct

SEQ ID NO: 3042568 - DNA, 25 bp, Homo sapien
gcaaacctgaatggagcagtaccct

SEQ ID NO: 3042569 - DNA, 25 bp, Homo sapien
tagcggaacttgtattcagcctgac

SEQ ID NO: 3042570 - DNA, 25 bp, Homo sapien
tgtatttaaaggactgccctcggaa

SEQ ID NO: 3042571 - DNA, 25 bp, Homo sapien
ccttgcctgttcctttgtacttcca

SEQ ID NO: 3042572 - DNA, 25 bp, Homo sapien
taaaggctgggctatggcagctctg

SEQ ID NO: 3042573 - DNA, 25 bp, Homo sapien
tccataaatctgcagtatccaacca

SEQ ID NO: 3042574 - DNA, 25 bp, Homo sapien
ctgagaacagatccatacaacctgc

SEQ ID NO: 3042575 - DNA, 25 bp, Homo sapien
tatccaaccaaactagccacagaca

SEQ ID NO: 3042576 - DNA, 25 bp, Homo sapien
tgtagacaagtgctattcaatagaa

SEQ ID NO: 3042577 - DNA, 25 bp, Homo sapien
acagtgcaggtgtagacggagttca

SEQ ID NO: 3042578 - DNA, 25 bp, Homo sapien
gcaggctcatcaggacaccatatgg

SEQ ID NO: 3042579 - DNA, 25 bp, Homo sapien
tagagttgggaacgtcactcctggt

SEQ ID NO: 3042580 - DNA, 25 bp, Homo sapien
atgtccagaccctacccgggagaag

SEQ ID NO: 3042581 - DNA, 25 bp, Homo sapien
agcccaggacatttggtgtttttga

SEQ ID NO: 3042582 - DNA, 25 bp, Homo sapien
ctttcctgactctagcccaggacat

SEQ ID NO: 3042583 - DNA, 25 bp, Homo sapien
agccttgcttcagtattaggaataa

SEQ ID NO: 3042584 - DNA, 25 bp, Homo sapien
gaacaggtcagctccctagggcaat

SEQ ID NO: 3042585 - DNA, 25 bp, Homo sapien
tcatcactgggtgctgaacaggtca

SEQ ID NO: 3042586 - DNA, 25 bp, Homo sapien
gaggtttgtacaagcctgcgcacac

SEQ ID NO: 3042587 - DNA, 25 bp, Homo sapien
tctgaacctctacatgctgctggct

SEQ ID NO: 3042588 - DNA, 25 bp, Homo sapien
tgtcaggctcttttgtcagtcctat

SEQ ID NO: 3042589 - DNA, 25 bp, Homo sapien
taacatcctcgcaccagacaggaca

SEQ ID NO: 3042590 - DNA, 25 bp, Homo sapien
aagtgtggaaattatagcatgaacc

SEQ ID NO: 3042591 - DNA, 25 bp, Homo sapien
tcctatcaacctctaacatcctcgc

SEQ ID NO: 3042592 - DNA, 25 bp, Homo sapien
cattaaaaccaaggatccatgaggg

SEQ ID NO: 3042593 - DNA, 25 bp, Homo sapien
gcagcagcagggattatgcacgcac

SEQ ID NO: 3042594 - DNA, 25 bp, Homo sapien
gcatggtccttcctaaagagcctag

SEQ ID NO: 3042595 - DNA, 25 bp, Homo sapien
cctgtaaggcactgaagaaaccgat

SEQ ID NO: 3042596 - DNA, 25 bp, Homo sapien
gaacacagtcaatgggtgagtccat

SEQ ID NO: 3042597 - DNA, 25 bp, Homo sapien
tacaggttaccatgtggccacactc

SEQ ID NO: 3042598 - DNA, 25 bp, Homo sapien
gggacattcattcatgcgcttgcca

SEQ ID NO: 3042599 - DNA, 25 bp, Homo sapien
cacagctcggattacatactgccgg

SEQ ID NO: 3042600 - DNA, 25 bp, Homo sapien
gcatgaccagtatcctagtagagct

SEQ ID NO: 3042601 - DNA, 25 bp, Homo sapien
gacagtatcaactgctgagtgcaca

SEQ ID NO: 3042602 - DNA, 25 bp, Homo sapien
tgagtttgcctacttactcccagag

SEQ ID NO: 3042603 - DNA, 25 bp, Homo sapien
acaaagctgctaagtcgaggagcca

SEQ ID NO: 3042604 - DNA, 25 bp, Homo sapien
atacttccccctaggaggtaggctg

SEQ ID NO: 3042605 - DNA, 25 bp, Homo sapien
tcagtatgttgctctgtaggaacca

SEQ ID NO: 3042606 - DNA, 25 bp, Homo sapien
cagtatgttgctctgtaggaaccaa

SEQ ID NO: 3042607 - DNA, 25 bp, Homo sapien
tctgatccttgtatagccgggtcac

SEQ ID NO: 3042608 - DNA, 25 bp, Homo sapien
caaagctgtcctctgagtcaataga

SEQ ID NO: 3042609 - DNA, 25 bp, Homo sapien
gcccttcggcctgggacaaagctgt

SEQ ID NO: 3042610 - DNA, 25 bp, Homo sapien
tgacaaagttgcgagccaagatctc

SEQ ID NO: 3042611 - DNA, 25 bp, Homo sapien
tgggtctcatcctcagcaggtactc

SEQ ID NO: 3042612 - DNA, 25 bp, Homo sapien
ggtctcatcctcagcaggtactctg

SEQ ID NO: 3042613 - DNA, 25 bp, Homo sapien
ttgatcctgagacacatggccattg

SEQ ID NO: 3042614 - DNA, 25 bp, Homo sapien
gctctccaggtagacgggttcctct

SEQ ID NO: 3042615 - DNA, 25 bp, Homo sapien
gaacagaggtggcttgtgcagatga

SEQ ID NO: 3042616 - DNA, 25 bp, Homo sapien
ttcatgagctcctctcgctgaaagg

SEQ ID NO: 3042617 - DNA, 25 bp, Homo sapien
cacatttcggtagagatgtcatgga

SEQ ID NO: 3042618 - DNA, 25 bp, Homo sapien
gaggctgagatagtccctcaagtcc

SEQ ID NO: 3042619 - DNA, 25 bp, Homo sapien
ttttcttacagtccaagcaggtctg

SEQ ID NO: 3042620 - DNA, 25 bp, Homo sapien
gggcccattccctacttggctcgaa

SEQ ID NO: 3042621 - DNA, 25 bp, Homo sapien
tacttggctcgaacaggtcatgcaa

SEQ ID NO: 3042622 - DNA, 25 bp, Homo sapien
aatttttcttacagtccaagcaggt

SEQ ID NO: 3042623 - DNA, 25 bp, Homo sapien
ttagagcaaaagacacaggaaacca

SEQ ID NO: 3042624 - DNA, 25 bp, Homo sapien
tagagcaaaagacacaggaaaccat

SEQ ID NO: 3042625 - DNA, 25 bp, Homo sapien
cttagagcaaaagacacaggaaacc

SEQ ID NO: 3042626 - DNA, 25 bp, Homo sapien
agcacagtgacatccggctgagctc

SEQ ID NO: 3042627 - DNA, 25 bp, Homo sapien
tgagtgagcacagtgacatccggct

SEQ ID NO: 3042628 - DNA, 25 bp, Homo sapien
tgagctctgttctggccaagagcat

SEQ ID NO: 3042629 - DNA, 25 bp, Homo sapien
acaggctgagtgagcacagtgacat

SEQ ID NO: 3042630 - DNA, 25 bp, Homo sapien
cttcctggccgtgtttgcaaagtga

SEQ ID NO: 3042631 - DNA, 25 bp, Homo sapien
ctggccgtgtttgcaaagtgagccc

SEQ ID NO: 3042632 - DNA, 25 bp, Homo sapien
cctggccgtgtttgcaaagtgagcc

SEQ ID NO: 3042633 - DNA, 25 bp, Homo sapien
tcctggccgtgtttgcaaagtgagc

SEQ ID NO: 3042634 - DNA, 25 bp, Homo sapien
cagaaccagttgcagcaggttgccc

SEQ ID NO: 3042635 - DNA, 25 bp, Homo sapien
ggacttgcagcttggttccaagcct

SEQ ID NO: 3042636 - DNA, 25 bp, Homo sapien
accagttgcagcaggttgcccacat

SEQ ID NO: 3042637 - DNA, 25 bp, Homo sapien
aggacttgcagcttggttccaagcc

SEQ ID NO: 3042638 - DNA, 25 bp, Homo sapien
acaagtaatagactttctgtacttc

SEQ ID NO: 3042639 - DNA, 25 bp, Homo sapien
taagggctgtgttacctccctctaa

SEQ ID NO: 3042640 - DNA, 25 bp, Homo sapien
cctgctctacttacttaagggctgt

SEQ ID NO: 3042641 - DNA, 25 bp, Homo sapien
taagaaggcctcagtcctaagtcct

SEQ ID NO: 3042642 - DNA, 25 bp, Homo sapien
tcctcaaaaacagtgtctaactgct

SEQ ID NO: 3042643 - DNA, 25 bp, Homo sapien
gacagacttggcaatttagtcctca

SEQ ID NO: 3042644 - DNA, 25 bp, Homo sapien
aaattattggatcttcactcagggc

SEQ ID NO: 3042645 - DNA, 25 bp, Homo sapien
gaaaattattggatcttcactcagg

SEQ ID NO: 3042646 - DNA, 25 bp, Homo sapien
cggtgatacttgagatgagacctga

SEQ ID NO: 3042647 - DNA, 25 bp, Homo sapien
gacacagctgatttataccaacagc

SEQ ID NO: 3042648 - DNA, 25 bp, Homo sapien
tcataggcattactggctggaaagc

SEQ ID NO: 3042649 - DNA, 25 bp, Homo sapien
ggaggactcctcatgtcggtgatac

SEQ ID NO: 3042650 - DNA, 25 bp, Homo sapien
ctactaactggtctcatatgctggg

SEQ ID NO: 3042651 - DNA, 25 bp, Homo sapien
gaattttccagcaaacctgcctgag

SEQ ID NO: 3042652 - DNA, 25 bp, Homo sapien
taaaagtaagttagtctggcaagca

SEQ ID NO: 3042653 - DNA, 25 bp, Homo sapien
cctgaggtacccaccctgacttgta

SEQ ID NO: 3042654 - DNA, 25 bp, Homo sapien
gaacgtaagaggaacaacaacaggc

SEQ ID NO: 3042655 - DNA, 25 bp, Homo sapien
tactgtatctaatcaactggctaac

SEQ ID NO: 3042656 - DNA, 25 bp, Homo sapien
tcctgtacctctggagaacgtaaga

SEQ ID NO: 3042657 - DNA, 25 bp, Homo sapien
gaaagagcattctagcagtactgta

SEQ ID NO: 3042658 - DNA, 25 bp, Homo sapien
ctgcacaattatgattccgggatga

SEQ ID NO: 3042659 - DNA, 25 bp, Homo sapien
gcacaattatgattccgggatgatc

SEQ ID NO: 3042660 - DNA, 25 bp, Homo sapien
actgcacaattatgattccgggatg

SEQ ID NO: 3042661 - DNA, 25 bp, Homo sapien
cacaattatgattccgggatgatca

SEQ ID NO: 3042662 - DNA, 25 bp, Homo sapien
gctaatgagtttgttactccccaca

SEQ ID NO: 3042663 - DNA, 25 bp, Homo sapien
gatgcactgtaattgcttgcactgc

SEQ ID NO: 3042664 - DNA, 25 bp, Homo sapien
aaagaatgaacgtatgcctccggcc

SEQ ID NO: 3042665 - DNA, 25 bp, Homo sapien
caattccaccccattgctaatgagt

SEQ ID NO: 3042666 - DNA, 25 bp, Homo sapien
tgtaccctagaccttcaacaagtag

SEQ ID NO: 3042667 - DNA, 25 bp, Homo sapien
cagccaagctcaaatactagaagtc

SEQ ID NO: 3042668 - DNA, 25 bp, Homo sapien
cacaggcacacgagttacagcagac

SEQ ID NO: 3042669 - DNA, 25 bp, Homo sapien
taggtaacctttcatatctgctgcc

SEQ ID NO: 3042670 - DNA, 25 bp, Homo sapien
cactgactttgtagtaacaaggctt

SEQ ID NO: 3042671 - DNA, 25 bp, Homo sapien
gactttgtagtaacaaggcttgatg

SEQ ID NO: 3042672 - DNA, 25 bp, Homo sapien
ctgactttgtagtaacaaggcttga

SEQ ID NO: 3042673 - DNA, 25 bp, Homo sapien
gcactgactttgtagtaacaaggct

SEQ ID NO: 3042674 - DNA, 25 bp, Homo sapien
gggcagcaggttttcacaacttcca

SEQ ID NO: 3042675 - DNA, 25 bp, Homo sapien
cctggtttgatactccaccagggca

SEQ ID NO: 3042676 - DNA, 25 bp, Homo sapien
cagcctggtttgatactccaccagg

SEQ ID NO: 3042677 - DNA, 25 bp, Homo sapien
ggtttgatactccaccagggcagca

SEQ ID NO: 3042678 - DNA, 25 bp, Homo sapien
ctgagaggttggagtacgcacacca

SEQ ID NO: 3042679 - DNA, 25 bp, Homo sapien
gaggttggagtacgcacaccattaa

SEQ ID NO: 3042680 - DNA, 25 bp, Homo sapien
acaccattaatttcaatcaaggtct

SEQ ID NO: 3042681 - DNA, 25 bp, Homo sapien
ttggagtacgcacaccattaatttc

SEQ ID NO: 3042682 - DNA, 25 bp, Homo sapien
agtggccttgtaaaaggcaagaccg

SEQ ID NO: 3042683 - DNA, 25 bp, Homo sapien
ttgtaaaaggcaagaccgttagcac

SEQ ID NO: 3042684 - DNA, 25 bp, Homo sapien
cttgcctatcgagcaaaggcaccat

SEQ ID NO: 3042685 - DNA, 25 bp, Homo sapien
aagaccgttagcacttgcctatcga

SEQ ID NO: 3042686 - DNA, 25 bp, Homo sapien
catagtctgattaggtgaaggactc

SEQ ID NO: 3042687 - DNA, 25 bp, Homo sapien
ggtgacgactacctagagatatcat

SEQ ID NO: 3042688 - DNA, 25 bp, Homo sapien
tatgggaacaaactcactgataaga

SEQ ID NO: 3042689 - DNA, 25 bp, Homo sapien
caaaagtttggcgatgaaaagcagg

SEQ ID NO: 3042690 - DNA, 25 bp, Homo sapien
taagcaagattgcaacacagcaggg

SEQ ID NO: 3042691 - DNA, 25 bp, Homo sapien
ctgactcacgctgggcaaaatttgt

SEQ ID NO: 3042692 - DNA, 25 bp, Homo sapien
tgtacttcccaaacaactcagcctg

SEQ ID NO: 3042693 - DNA, 25 bp, Homo sapien
tcaaaacattgccacgacagaaagc

SEQ ID NO: 3042694 - DNA, 25 bp, Homo sapien
tagaatgactggctcatcaacagct

SEQ ID NO: 3042695 - DNA, 25 bp, Homo sapien
tgcttaaaatgtatgacagttcccc

SEQ ID NO: 3042696 - DNA, 25 bp, Homo sapien
gaaaatcaccttaacacttgctctg

SEQ ID NO: 3042697 - DNA, 25 bp, Homo sapien
ccctgacaggctagaattgacattg

SEQ ID NO: 3042698 - DNA, 25 bp, Homo sapien
tcagtagtacttaggaaaacactcc

SEQ ID NO: 3042699 - DNA, 25 bp, Homo sapien
taaaaggatacgactgcacagcttg

SEQ ID NO: 3042700 - DNA, 25 bp, Homo sapien
tcaacacgtgtttcatcttgaaggg

SEQ ID NO: 3042701 - DNA, 25 bp, Homo sapien
gagtagacaaatacccaaaggactg

SEQ ID NO: 3042702 - DNA, 25 bp, Homo sapien
tatttgcggtaagaagcctgtcaca

SEQ ID NO: 3042703 - DNA, 25 bp, Homo sapien
taaatcacattccacacaagtaggc

SEQ ID NO: 3042704 - DNA, 25 bp, Homo sapien
gactggcttacacatcaaaaacgtt

SEQ ID NO: 3042705 - DNA, 25 bp, Homo sapien
tctgggcttgaggtaaatattctgc

SEQ ID NO: 3042706 - DNA, 25 bp, Homo sapien
tattcagggaatgaccatcgacatt

SEQ ID NO: 3042707 - DNA, 25 bp, Homo sapien
gacaacatgctaccctgctgaacag

SEQ ID NO: 3042708 - DNA, 25 bp, Homo sapien
tccaaaagtgttaagcagtgcttgt

SEQ ID NO: 3042709 - DNA, 25 bp, Homo sapien
tgctgaacagtcatcaaggaggaaa

SEQ ID NO: 3042710 - DNA, 25 bp, Homo sapien
ccttcagaagtcgacctgtggcaaa

SEQ ID NO: 3042711 - DNA, 25 bp, Homo sapien
caccttcagaagtcgacctgtggca

SEQ ID NO: 3042712 - DNA, 25 bp, Homo sapien
tcgacctgtggcaaatgtggctatg

SEQ ID NO: 3042713 - DNA, 25 bp, Homo sapien
ttcagaagtcgacctgtggcaaatg

SEQ ID NO: 3042714 - DNA, 25 bp, Homo sapien
agttgtgcaaccatagttcattata

SEQ ID NO: 3042715 - DNA, 25 bp, Homo sapien
cagttgtgcaaccatagttcattat

SEQ ID NO: 3042716 - DNA, 25 bp, Homo sapien
atcccagcacttatcccaacacttt

SEQ ID NO: 3042717 - DNA, 25 bp, Homo sapien
tacattctaatatgctttcataata

SEQ ID NO: 3042718 - DNA, 25 bp, Homo sapien
gctgtatctttttagaggagaggac

SEQ ID NO: 3042719 - DNA, 25 bp, Homo sapien
gaaaaacgctgctgagagagcaaga

SEQ ID NO: 3042720 - DNA, 25 bp, Homo sapien
gaagaaattaccagaccaaggtcac

SEQ ID NO: 3042721 - DNA, 25 bp, Homo sapien
cagcacatggcggtagtagcagttg

SEQ ID NO: 3042722 - DNA, 25 bp, Homo sapien
cagggactgggcctgcatctatgat

SEQ ID NO: 3042723 - DNA, 25 bp, Homo sapien
ttagcctcgagttccagggactggg

SEQ ID NO: 3042724 - DNA, 25 bp, Homo sapien
gattggcaagtctaaaggaaggaca

SEQ ID NO: 3042725 - DNA, 25 bp, Homo sapien
gatgatgattggcaagtctaaagga

SEQ ID NO: 3042726 - DNA, 25 bp, Homo sapien
ctattattttcaataaaggcttcag

SEQ ID NO: 3042727 - DNA, 25 bp, Homo sapien
tcctctaagacggagatagggacgg

SEQ ID NO: 3042728 - DNA, 25 bp, Homo sapien
cctcctctaagacggagatagggac

SEQ ID NO: 3042729 - DNA, 25 bp, Homo sapien
agccgcctcctctaagacggagata

SEQ ID NO: 3042730 - DNA, 25 bp, Homo sapien
cgcctcctctaagacggagataggg

SEQ ID NO: 3042731 - DNA, 25 bp, Homo sapien
gccgccgcggacctgcctcagtttc

SEQ ID NO: 3042732 - DNA, 25 bp, Homo sapien
cgcggacctgcctcagtttcttctg

SEQ ID NO: 3042733 - DNA, 25 bp, Homo sapien
gcggacctgcctcagtttcttctga

SEQ ID NO: 3042734 - DNA, 25 bp, Homo sapien
gccgcggacctgcctcagtttcttc

SEQ ID NO: 3042735 - DNA, 25 bp, Homo sapien
tgctgcggccgccctcccggccggc

SEQ ID NO: 3042736 - DNA, 25 bp, Homo sapien
gctgcggccgccctcccggccggca

SEQ ID NO: 3042737 - DNA, 25 bp, Homo sapien
ctgctgcggccgccctcccggccgg

SEQ ID NO: 3042738 - DNA, 25 bp, Homo sapien
ctgcggccgccctcccggccggcac

SEQ ID NO: 3042739 - DNA, 25 bp, Homo sapien
cgcggacgcctcaggcagggaggct

SEQ ID NO: 3042740 - DNA, 25 bp, Homo sapien
cggactccgccgcggcggcgtctct

SEQ ID NO: 3042741 - DNA, 25 bp, Homo sapien
cacccgggggcggtcgcgacatcct

SEQ ID NO: 3042742 - DNA, 25 bp, Homo sapien
ggtcgcgacatcctcacgggcggcc

SEQ ID NO: 3042743 - DNA, 25 bp, Homo sapien
tcacaacccagcaaactgagtacta

SEQ ID NO: 3042744 - DNA, 25 bp, Homo sapien
tgtcttgaatacacggagctgcaat

SEQ ID NO: 3042745 - DNA, 25 bp, Homo sapien
ttttctttcaaccagcagtgtcttg

SEQ ID NO: 3042746 - DNA, 25 bp, Homo sapien
tattcccatgttatcaatgaggatc

SEQ ID NO: 3042747 - DNA, 25 bp, Homo sapien
caagcaaatcattggaatgctgcta

SEQ ID NO: 3042748 - DNA, 25 bp, Homo sapien
ggccctctggtccatattacaagca

SEQ ID NO: 3042749 - DNA, 25 bp, Homo sapien
gggtgcacttaatccactgattgga

SEQ ID NO: 3042750 - DNA, 25 bp, Homo sapien
gattcatgacatcctgtggaaatca

SEQ ID NO: 3042751 - DNA, 25 bp, Homo sapien
taccagtaggacagagacattacct

SEQ ID NO: 3042752 - DNA, 25 bp, Homo sapien
gaagaattaatagtgaccgaccacc

SEQ ID NO: 3042753 - DNA, 25 bp, Homo sapien
gcttggaagtcctagtgccctgatt

SEQ ID NO: 3042754 - DNA, 25 bp, Homo sapien
taactcggccagaaagggactagca

SEQ ID NO: 3042755 - DNA, 25 bp, Homo sapien
cattaaactaagtgcagagccctgc

SEQ ID NO: 3042756 - DNA, 25 bp, Homo sapien
ggatgtttcccaaagagaagggcca

SEQ ID NO: 3042757 - DNA, 25 bp, Homo sapien
gagtgcctatatcatgcctggaaaa

SEQ ID NO: 3042758 - DNA, 25 bp, Homo sapien
cattcctggagacagaactggctac

SEQ ID NO: 3042759 - DNA, 25 bp, Homo sapien
tcctgcctgtagatattgtcacgtc

SEQ ID NO: 3042760 - DNA, 25 bp, Homo sapien
cagaaggatgcaaaggctctacgcc

SEQ ID NO: 3042761 - DNA, 25 bp, Homo sapien
gagataataagtgtccctgccaggc

SEQ ID NO: 3042762 - DNA, 25 bp, Homo sapien
tgtcacgtctggattgatgctcaaa

SEQ ID NO: 3042763 - DNA, 25 bp, Homo sapien
tagcacatagtaggatctcaacatt

SEQ ID NO: 3042764 - DNA, 25 bp, Homo sapien
ttaattaaggccatcaagtgctagc

SEQ ID NO: 3042765 - DNA, 25 bp, Homo sapien
aataagtgtccctagtatttacact

SEQ ID NO: 3042766 - DNA, 25 bp, Homo sapien
aatgatacatggacctttgcctgag

SEQ ID NO: 3042767 - DNA, 25 bp, Homo sapien
gagcctgtaggcagacacgtgaaca

SEQ ID NO: 3042768 - DNA, 25 bp, Homo sapien
tacagggaagttactgtaagcatct

SEQ ID NO: 3042769 - DNA, 25 bp, Homo sapien
caagtgaataactaatacagggaag

SEQ ID NO: 3042770 - DNA, 25 bp, Homo sapien
aaaagtgacaaaaagtgggagcctg

SEQ ID NO: 3042771 - DNA, 25 bp, Homo sapien
aaagagtgcttgtgcccgattggtc

SEQ ID NO: 3042772 - DNA, 25 bp, Homo sapien
cccctggagtgctatattgagaaaa

SEQ ID NO: 3042773 - DNA, 25 bp, Homo sapien
tcactacataatgggaacagggcag

SEQ ID NO: 3042774 - DNA, 25 bp, Homo sapien
gaagatgcccaaatagtaccttgag

SEQ ID NO: 3042775 - DNA, 25 bp, Homo sapien
ctatccctgttgcattcatcacctc

SEQ ID NO: 3042776 - DNA, 25 bp, Homo sapien
cctgtcctgaatccaacaccctggt

SEQ ID NO: 3042777 - DNA, 25 bp, Homo sapien
ttctgagtgtaactcggaccctcct

SEQ ID NO: 3042778 - DNA, 25 bp, Homo sapien
actttctgagtgtaactcggaccct

SEQ ID NO: 3042779 - DNA, 25 bp, Homo sapien
tgtggccagtaaccaatcctgatca

SEQ ID NO: 3042780 - DNA, 25 bp, Homo sapien
tcctttaaaagatgtggccagtaac

SEQ ID NO: 3042781 - DNA, 25 bp, Homo sapien
ggctctctaaccaagaaagatgacc

SEQ ID NO: 3042782 - DNA, 25 bp, Homo sapien
taactgattaattacacaacaggct

SEQ ID NO: 3042783 - DNA, 25 bp, Homo sapien
gaacgtctgtagtcaccagtgccag

SEQ ID NO: 3042784 - DNA, 25 bp, Homo sapien
gattatccatccagtcgccagcatg

SEQ ID NO: 3042785 - DNA, 25 bp, Homo sapien
acagagctaaggaagagtgggcccc

SEQ ID NO: 3042786 - DNA, 25 bp, Homo sapien
tatatgcttacagagagtgaggcca

SEQ ID NO: 3042787 - DNA, 25 bp, Homo sapien
caatgtctaccatctcctggaaacc

SEQ ID NO: 3042788 - DNA, 25 bp, Homo sapien
gtctaccatctcctggaaacctgtt

SEQ ID NO: 3042789 - DNA, 25 bp, Homo sapien
atgtctaccatctcctggaaacctg

SEQ ID NO: 3042790 - DNA, 25 bp, Homo sapien
ccaatgtctaccatctcctggaaac

SEQ ID NO: 3042791 - DNA, 25 bp, Homo sapien
cacaaagctccaggagcgtccgagg

SEQ ID NO: 3042792 - DNA, 25 bp, Homo sapien
gaagatttggccagacacgccatgc

SEQ ID NO: 3042793 - DNA, 25 bp, Homo sapien
tgtctcgagttatgtggttggtcac

SEQ ID NO: 3042794 - DNA, 25 bp, Homo sapien
ccaggagaatccgagtgctgggcac

SEQ ID NO: 3042795 - DNA, 25 bp, Homo sapien
tgccatgccaaggtcccgggccagg

SEQ ID NO: 3042796 - DNA, 25 bp, Homo sapien
actgccatgccaaggtcccgggcca

SEQ ID NO: 3042797 - DNA, 25 bp, Homo sapien
cactgccatgccaaggtcccgggcc

SEQ ID NO: 3042798 - DNA, 25 bp, Homo sapien
ctgccatgccaaggtcccgggccag

SEQ ID NO: 3042799 - DNA, 25 bp, Homo sapien
gaagtggggaaaccaccgcagtgac

SEQ ID NO: 3042800 - DNA, 25 bp, Homo sapien
cccagaagtggggaaaccaccgcag

SEQ ID NO: 3042801 - DNA, 25 bp, Homo sapien
gaaaccaccgcagtgaccgagtcca

SEQ ID NO: 3042802 - DNA, 25 bp, Homo sapien
gtggggaaaccaccgcagtgaccga

SEQ ID NO: 3042803 - DNA, 25 bp, Homo sapien
agtctcagattcttaacccctagaa

SEQ ID NO: 3042804 - DNA, 25 bp, Homo sapien
cctagtctcagattcttaaccccta

SEQ ID NO: 3042805 - DNA, 25 bp, Homo sapien
tcctagtctcagattcttaacccct

SEQ ID NO: 3042806 - DNA, 25 bp, Homo sapien
tagtctcagattcttaacccctaga

SEQ ID NO: 3042807 - DNA, 25 bp, Homo sapien
tgatttaggtgctcgggaattccat

SEQ ID NO: 3042808 - DNA, 25 bp, Homo sapien
gaacatgtaaacaatgaggtatgtg

SEQ ID NO: 3042809 - DNA, 25 bp, Homo sapien
cagcagggaagatgaacatgtaaac

SEQ ID NO: 3042810 - DNA, 25 bp, Homo sapien
ccactcagggggctttactgttcag

SEQ ID NO: 3042811 - DNA, 25 bp, Homo sapien
cctgcccacagagatagcacctaga

SEQ ID NO: 3042812 - DNA, 25 bp, Homo sapien
cagtctgtagtaggacacctgccca

SEQ ID NO: 3042813 - DNA, 25 bp, Homo sapien
tagttggagtcaccagattgcacat

SEQ ID NO: 3042814 - DNA, 25 bp, Homo sapien
ctgggagtagcaagcatagttggag

SEQ ID NO: 3042815 - DNA, 25 bp, Homo sapien
caaatgcatgcaccacctggatcct

SEQ ID NO: 3042816 - DNA, 25 bp, Homo sapien
cctggatcctccggagagcttctgc

SEQ ID NO: 3042817 - DNA, 25 bp, Homo sapien
cacctggatcctccggagagcttct

SEQ ID NO: 3042818 - DNA, 25 bp, Homo sapien
acctggatcctccggagagcttctg

SEQ ID NO: 3042819 - DNA, 25 bp, Homo sapien
ggcgggaagctgtcagccctccatt

SEQ ID NO: 3042820 - DNA, 25 bp, Homo sapien
gggaagctgtcagccctccattgga

SEQ ID NO: 3042821 - DNA, 25 bp, Homo sapien
ggaggaggcgggaagctgtcagccc

SEQ ID NO: 3042822 - DNA, 25 bp, Homo sapien
gaggcgggaagctgtcagccctcca

SEQ ID NO: 3042823 - DNA, 25 bp, Homo sapien
gcaggccatgggccacatttgctgc

SEQ ID NO: 3042824 - DNA, 25 bp, Homo sapien
ctacatataggacgttttgctgcag

SEQ ID NO: 3042825 - DNA, 25 bp, Homo sapien
tataggacgttttgctgcaggccat

SEQ ID NO: 3042826 - DNA, 25 bp, Homo sapien
catataggacgttttgctgcaggcc

SEQ ID NO: 3042827 - DNA, 25 bp, Homo sapien
ctacctgggcctcctacaatttcag

SEQ ID NO: 3042828 - DNA, 25 bp, Homo sapien
tacctgggcctcctacaatttcagt

SEQ ID NO: 3042829 - DNA, 25 bp, Homo sapien
ctgagttttgccgctacctgggcct

SEQ ID NO: 3042830 - DNA, 25 bp, Homo sapien
gagttttgccgctacctgggcctcc

SEQ ID NO: 3042831 - DNA, 25 bp, Homo sapien
cgttcatcgaaagcattcagcgaaa

SEQ ID NO: 3042832 - DNA, 25 bp, Homo sapien
aagtgctgaccgcagtgcctcgttc

SEQ ID NO: 3042833 - DNA, 25 bp, Homo sapien
cacgatctccctgcggggacctgag

SEQ ID NO: 3042834 - DNA, 25 bp, Homo sapien
catctgttcctccatgcccaagtcc

SEQ ID NO: 3042835 - DNA, 25 bp, Homo sapien
caatgccagtggacaggatggcagt

SEQ ID NO: 3042836 - DNA, 25 bp, Homo sapien
ctgccaatgccagtggacaggatgg

SEQ ID NO: 3042837 - DNA, 25 bp, Homo sapien
tcagttcctcgtagagatcagcgcc

SEQ ID NO: 3042838 - DNA, 25 bp, Homo sapien
tcgtagagatcagcgccattcacgg

SEQ ID NO: 3042839 - DNA, 25 bp, Homo sapien
agcagcacccgcctcagggcaacca

SEQ ID NO: 3042840 - DNA, 25 bp, Homo sapien
cagcacccgcctcagggcaaccagg

SEQ ID NO: 3042841 - DNA, 25 bp, Homo sapien
gcacccgcctcagggcaaccagggc

SEQ ID NO: 3042842 - DNA, 25 bp, Homo sapien
gccagcagcacccgcctcagggcaa

SEQ ID NO: 3042843 - DNA, 25 bp, Homo sapien
ctgagctacctcttccaggtctgca

SEQ ID NO: 3042844 - DNA, 25 bp, Homo sapien
tctgagctacctcttccaggtctgc

SEQ ID NO: 3042845 - DNA, 25 bp, Homo sapien
ttctgagctacctcttccaggtctg

SEQ ID NO: 3042846 - DNA, 25 bp, Homo sapien
tgagctacctcttccaggtctgcag

SEQ ID NO: 3042847 - DNA, 25 bp, Homo sapien
atctcctcggtaaggccagggcaca

SEQ ID NO: 3042848 - DNA, 25 bp, Homo sapien
gctggatcatctcctcggtaaggcc

SEQ ID NO: 3042849 - DNA, 25 bp, Homo sapien
agggcacagtccgaccctgagcacg

SEQ ID NO: 3042850 - DNA, 25 bp, Homo sapien
ggccagggcacagtccgaccctgag

SEQ ID NO: 3042851 - DNA, 25 bp, Homo sapien
cccgcaggccggaacagccccaggg

SEQ ID NO: 3042852 - DNA, 25 bp, Homo sapien
ctgcacgtcacgtgggcattcgcgg

SEQ ID NO: 3042853 - DNA, 25 bp, Homo sapien
agccccagggggactgcacgtcacg

SEQ ID NO: 3042854 - DNA, 25 bp, Homo sapien
ggactgcacgtcacgtgggcattcg

SEQ ID NO: 3042855 - DNA, 25 bp, Homo sapien
gaggaggcggcaccaagggtagggc

SEQ ID NO: 3042856 - DNA, 25 bp, Homo sapien
gaggcggcaccaagggtagggctgg

SEQ ID NO: 3042857 - DNA, 25 bp, Homo sapien
ggcgcgctggctgccggaggagaaa

SEQ ID NO: 3042858 - DNA, 25 bp, Homo sapien
cctagagaggacacaggcgcgctgg

SEQ ID NO: 3042859 - DNA, 25 bp, Homo sapien
gccatcaccatggagtattagagct

SEQ ID NO: 3042860 - DNA, 25 bp, Homo sapien
ttccttggttttacccctctcatga

SEQ ID NO: 3042861 - DNA, 25 bp, Homo sapien
gttttacccctctcatgatgctgct

SEQ ID NO: 3042862 - DNA, 25 bp, Homo sapien
catcaccatggagtattagagctgg

SEQ ID NO: 3042863 - DNA, 25 bp, Homo sapien
tgcccaggagagtagtacatgcttc

SEQ ID NO: 3042864 - DNA, 25 bp, Homo sapien
catgggacgtcctgaccccagttgg

SEQ ID NO: 3042865 - DNA, 25 bp, Homo sapien
gccatggactgctatcagttggtgg

SEQ ID NO: 3042866 - DNA, 25 bp, Homo sapien
ggacccctggcgtataagaaatatg

SEQ ID NO: 3042867 - DNA, 25 bp, Homo sapien
tggagctaaagcctaacacgtgtta

SEQ ID NO: 3042868 - DNA, 25 bp, Homo sapien
gattttgggcactactgtcaagctg

SEQ ID NO: 3042869 - DNA, 25 bp, Homo sapien
gttgcccgaggcaaagaatcgtcca

SEQ ID NO: 3042870 - DNA, 25 bp, Homo sapien
caagcagccggtcagtttctaccag

SEQ ID NO: 3042871 - DNA, 25 bp, Homo sapien
gggcccactaggaatgcaaacgaat

SEQ ID NO: 3042872 - DNA, 25 bp, Homo sapien
gaggttgggaacacccctatgccca

SEQ ID NO: 3042873 - DNA, 25 bp, Homo sapien
aaaagatcgtgtccatcgggccgga

SEQ ID NO: 3042874 - DNA, 25 bp, Homo sapien
cacctgtttcctgcgtcaatggcta

SEQ ID NO: 3042875 - DNA, 25 bp, Homo sapien
cattccggtctatcgaggacagcag

SEQ ID NO: 3042876 - DNA, 25 bp, Homo sapien
tgcagtggacaacaatacagcccta

SEQ ID NO: 3042877 - DNA, 25 bp, Homo sapien
tacccagtgcgatggaggaactgca

SEQ ID NO: 3042878 - DNA, 25 bp, Homo sapien
taggtgacgcgcaaaacccaaaagc

SEQ ID NO: 3042879 - DNA, 25 bp, Homo sapien
caagacagtctgagcacctggacgg

SEQ ID NO: 3042880 - DNA, 25 bp, Homo sapien
acctggacggccctgcggaattcta

SEQ ID NO: 3042881 - DNA, 25 bp, Homo sapien
tctgagcacctggacggccctgcgg

SEQ ID NO: 3042882 - DNA, 25 bp, Homo sapien
ctggacggccctgcggaattctatg

SEQ ID NO: 3042883 - DNA, 25 bp, Homo sapien
ctggactccagtcaacagcatatac

SEQ ID NO: 3042884 - DNA, 25 bp, Homo sapien
atccggaggcatttgtccttcccac

SEQ ID NO: 3042885 - DNA, 25 bp, Homo sapien
acttgccactctctggccatctgga

SEQ ID NO: 3042886 - DNA, 25 bp, Homo sapien
atttgtccttcccaccacttgccac

SEQ ID NO: 3042887 - DNA, 25 bp, Homo sapien
cgtggccgcgtagggaagccaggta

SEQ ID NO: 3042888 - DNA, 25 bp, Homo sapien
gtacacggcagccacgtggccgcgt

SEQ ID NO: 3042889 - DNA, 25 bp, Homo sapien
cgactgtcagctgaccacgcaatct

SEQ ID NO: 3042890 - DNA, 25 bp, Homo sapien
ccgctgaccaggagccgactgtcag

SEQ ID NO: 3042891 - DNA, 25 bp, Homo sapien
ccgctgcactcgagccacttgaaca

SEQ ID NO: 3042892 - DNA, 25 bp, Homo sapien
cgctgcactcgagccacttgaacac

SEQ ID NO: 3042893 - DNA, 25 bp, Homo sapien
tgccgctgcactcgagccacttgaa

SEQ ID NO: 3042894 - DNA, 25 bp, Homo sapien
cgtgccgctgcactcgagccacttg

SEQ ID NO: 3042895 - DNA, 25 bp, Homo sapien
gcttgatggacttgtcaaaggaggc

SEQ ID NO: 3042896 - DNA, 25 bp, Homo sapien
actagccacgatgcgggagtcagga

SEQ ID NO: 3042897 - DNA, 25 bp, Homo sapien
taaggtgaagtcgtcggagccagac

SEQ ID NO: 3042898 - DNA, 25 bp, Homo sapien
tggtgtcctgtcatccgagtgagag

SEQ ID NO: 3042899 - DNA, 25 bp, Homo sapien
acgaggttgtatcggctcagagccc

SEQ ID NO: 3042900 - DNA, 25 bp, Homo sapien
cacgaggttgtatcggctcagagcc

SEQ ID NO: 3042901 - DNA, 25 bp, Homo sapien
ccgcacgaggttgtatcggctcaga

SEQ ID NO: 3042902 - DNA, 25 bp, Homo sapien
ggttgtatcggctcagagccctctc

SEQ ID NO: 3042903 - DNA, 25 bp, Homo sapien
atggtgttcacccagtggccgtggc

SEQ ID NO: 3042904 - DNA, 25 bp, Homo sapien
ggcatagtcagtgctgagggccatg

SEQ ID NO: 3042905 - DNA, 25 bp, Homo sapien
gccgtggccttgcagagtccggcac

SEQ ID NO: 3042906 - DNA, 25 bp, Homo sapien
gccttgcagagtccggcacagcaca

SEQ ID NO: 3042907 - DNA, 25 bp, Homo sapien
ctgctggccacatagcggcactcag

SEQ ID NO: 3042908 - DNA, 25 bp, Homo sapien
ccagactttgatggtgcggtcctgg

SEQ ID NO: 3042909 - DNA, 25 bp, Homo sapien
tgaggatgcgctcacagcggcctgc

SEQ ID NO: 3042910 - DNA, 25 bp, Homo sapien
gttgtgtcccagatccgcacactgc

SEQ ID NO: 3042911 - DNA, 25 bp, Homo sapien
cacttgctgtggccagcgagggtcc

SEQ ID NO: 3042912 - DNA, 25 bp, Homo sapien
tccacttgctgtggccagcgagggt

SEQ ID NO: 3042913 - DNA, 25 bp, Homo sapien
gatccacttgctgtggccagcgagg

SEQ ID NO: 3042914 - DNA, 25 bp, Homo sapien
ctgtgatccacttgctgtggccagc

SEQ ID NO: 3042915 - DNA, 25 bp, Homo sapien
tggagaccaggatatactaaggacc

SEQ ID NO: 3042916 - DNA, 25 bp, Homo sapien
catctggagaccaggatatactaag

SEQ ID NO: 3042917 - DNA, 25 bp, Homo sapien
tggccattcttgcagcctgaggcca

SEQ ID NO: 3042918 - DNA, 25 bp, Homo sapien
caggatatactaaggacccagtgtc

SEQ ID NO: 3042919 - DNA, 25 bp, Homo sapien
cagaagcgcacggtggtgtctccag

SEQ ID NO: 3042920 - DNA, 25 bp, Homo sapien
gaagcgcacggtggtgtctccagag

SEQ ID NO: 3042921 - DNA, 25 bp, Homo sapien
agaagcgcacggtggtgtctccaga

SEQ ID NO: 3042922 - DNA, 25 bp, Homo sapien
cctccatgagtctgcagctgtcctt

SEQ ID NO: 3042923 - DNA, 25 bp, Homo sapien
ctccatgagtctgcagctgtcctta

SEQ ID NO: 3042924 - DNA, 25 bp, Homo sapien
tccatgagtctgcagctgtccttac

SEQ ID NO: 3042925 - DNA, 25 bp, Homo sapien
cccctccatgagtctgcagctgtcc

SEQ ID NO: 3042926 - DNA, 25 bp, Homo sapien
ggactccaacgtcttccccagtgag

SEQ ID NO: 3042927 - DNA, 25 bp, Homo sapien
ctcagcatcgtggacaaagaaagcc

SEQ ID NO: 3042928 - DNA, 25 bp, Homo sapien
tagcctgtggctggtagatgatgtc

SEQ ID NO: 3042929 - DNA, 25 bp, Homo sapien
tcacagcccggactctgaagatagc

SEQ ID NO: 3042930 - DNA, 25 bp, Homo sapien
tagagactgttttcgccatattggc

SEQ ID NO: 3042931 - DNA, 25 bp, Homo sapien
tattggctaagctggtctcgaactc

SEQ ID NO: 3042932 - DNA, 25 bp, Homo sapien
ctcctgacctctagtgatctgccca

SEQ ID NO: 3042933 - DNA, 25 bp, Homo sapien
attttcagtagagactgttttcgcc

SEQ ID NO: 3042934 - DNA, 25 bp, Homo sapien
actagcaaccgctgcacatcgcgcg

SEQ ID NO: 3042935 - DNA, 25 bp, Homo sapien
ggccagtagcgcgttgcacacgagc

SEQ ID NO: 3042936 - DNA, 25 bp, Homo sapien
ctcatcctggaactgcactagcaac

SEQ ID NO: 3042937 - DNA, 25 bp, Homo sapien
cgttgcacacgagctgcagcctgtc

SEQ ID NO: 3042938 - DNA, 25 bp, Homo sapien
caagtggggcgggagtcagtctggt

SEQ ID NO: 3042939 - DNA, 25 bp, Homo sapien
ccagaagggccccacttcgcctctc

SEQ ID NO: 3042940 - DNA, 25 bp, Homo sapien
ggcgggagtcagtctggtcgcccgc

SEQ ID NO: 3042941 - DNA, 25 bp, Homo sapien
agtcagtctggtcgcccgcccagaa

SEQ ID NO: 3042942 - DNA, 25 bp, Homo sapien
cctgcgtccccacgtggaggagaaa

SEQ ID NO: 3042943 - DNA, 25 bp, Homo sapien
tgcgtccccacgtggaggagaaaga

SEQ ID NO: 3042944 - DNA, 25 bp, Homo sapien
ctgcgtccccacgtggaggagaaag

SEQ ID NO: 3042945 - DNA, 25 bp, Homo sapien
gcgtccccacgtggaggagaaagag

SEQ ID NO: 3042946 - DNA, 25 bp, Homo sapien
aagatggtggactcacacagctggc

SEQ ID NO: 3042947 - DNA, 25 bp, Homo sapien
tatctcacaccagaacagaaatttg

SEQ ID NO: 3042948 - DNA, 25 bp, Homo sapien
gctggcatgccacagtaagagagcc

SEQ ID NO: 3042949 - DNA, 25 bp, Homo sapien
tagcctcagaagacacatgtcatca

SEQ ID NO: 3042950 - DNA, 25 bp, Homo sapien
agcatcagaaggcatgtcacctctg

SEQ ID NO: 3042951 - DNA, 25 bp, Homo sapien
aagcatcagaaggcatgtcacctct

SEQ ID NO: 3042952 - DNA, 25 bp, Homo sapien
gcatcagaaggcatgtcacctctga

SEQ ID NO: 3042953 - DNA, 25 bp, Homo sapien
ctgattctaggacccagcctggact

SEQ ID NO: 3042954 - DNA, 25 bp, Homo sapien
tgtactcaggtgaggaaaatcactc

SEQ ID NO: 3042955 - DNA, 25 bp, Homo sapien
tgatgtcaatgtcacgtcaccaccc

SEQ ID NO: 3042956 - DNA, 25 bp, Homo sapien
gctgctggctctgtctttgccggaa

SEQ ID NO: 3042957 - DNA, 25 bp, Homo sapien
cacgcagtttaagtagcagggcaat

SEQ ID NO: 3042958 - DNA, 25 bp, Homo sapien
agaaagggggcccacgaagccagca

SEQ ID NO: 3042959 - DNA, 25 bp, Homo sapien
tagcagggcaatagggaggtggaag

SEQ ID NO: 3042960 - DNA, 25 bp, Homo sapien
cagtttaagtagcagggcaataggg

SEQ ID NO: 3042961 - DNA, 25 bp, Homo sapien
ctttctcctctcctcctggctcagg

SEQ ID NO: 3042962 - DNA, 25 bp, Homo sapien
ctcctctcctcctggctcagggagc

SEQ ID NO: 3042963 - DNA, 25 bp, Homo sapien
ttctcctctcctcctggctcaggga

SEQ ID NO: 3042964 - DNA, 25 bp, Homo sapien
ctttccttggactttctcctctcct

SEQ ID NO: 3042965 - DNA, 25 bp, Homo sapien
cataattggaggtctgtcaggtgca

SEQ ID NO: 3042966 - DNA, 25 bp, Homo sapien
tgtcaactgttccaatagtggtccc

SEQ ID NO: 3042967 - DNA, 25 bp, Homo sapien
gtcgggtagaagcttcctagaccaa

SEQ ID NO: 3042968 - DNA, 25 bp, Homo sapien
gctgtgtaagctctccataattgga

SEQ ID NO: 3042969 - DNA, 25 bp, Homo sapien
ggtcacatgagtaaatgcccatagg

SEQ ID NO: 3042970 - DNA, 25 bp, Homo sapien
tgtcccattgtaacaggcactatga

SEQ ID NO: 3042971 - DNA, 25 bp, Homo sapien
tgccatggcattgtaagattcttcc

SEQ ID NO: 3042972 - DNA, 25 bp, Homo sapien
tagtcccggtggctgtctgactaac

SEQ ID NO: 3042973 - DNA, 25 bp, Homo sapien
tcttcctctaccatatgtcagggga

SEQ ID NO: 3042974 - DNA, 25 bp, Homo sapien
taccatatgtcaggggaatttgggc

SEQ ID NO: 3042975 - DNA, 25 bp, Homo sapien
catatgtcaggggaatttgggcatt

SEQ ID NO: 3042976 - DNA, 25 bp, Homo sapien
catgttgctgagagttgggagtcaa

SEQ ID NO: 3042977 - DNA, 25 bp, Homo sapien
taatgacctgaaagccagtggaact

SEQ ID NO: 3042978 - DNA, 25 bp, Homo sapien
tctcttatgaccctctagaagcttg

SEQ ID NO: 3042979 - DNA, 25 bp, Homo sapien
aaagtgtgggagcaagttctacaga

SEQ ID NO: 3042980 - DNA, 25 bp, Homo sapien
cctggatactttggagaccaatggg

SEQ ID NO: 3042981 - DNA, 25 bp, Homo sapien
tgatgagggacataaacacatttac

SEQ ID NO: 3042982 - DNA, 25 bp, Homo sapien
gcttaagctgtgtggtgaatacaca

SEQ ID NO: 3042983 - DNA, 25 bp, Homo sapien
ccaggctccagaggtgatagtaggt

SEQ ID NO: 3042984 - DNA, 25 bp, Homo sapien
tcataaaattgtactggctatcagg

SEQ ID NO: 3042985 - DNA, 25 bp, Homo sapien
cgcaggctccatagacggcttttct

SEQ ID NO: 3042986 - DNA, 25 bp, Homo sapien
aagtgagtaagacttccagcgcccc

SEQ ID NO: 3042987 - DNA, 25 bp, Homo sapien
ttaaatgttcttgggtagcctcgcc

SEQ ID NO: 3042988 - DNA, 25 bp, Homo sapien
cttgcaaagggtcaggcctgatccc

SEQ ID NO: 3042989 - DNA, 25 bp, Homo sapien
tcgccagcgcccagtacaaatttag

SEQ ID NO: 3042990 - DNA, 25 bp, Homo sapien
tccgctgggagcacgggttcgaatc

SEQ ID NO: 3042991 - DNA, 25 bp, Homo sapien
caagtgctacttctatccgctggga

SEQ ID NO: 3042992 - DNA, 25 bp, Homo sapien
gctgaatattttaggagtccccaag

SEQ ID NO: 3042993 - DNA, 25 bp, Homo sapien
taacgatgcgattgggctgtacctc

SEQ ID NO: 3042994 - DNA, 25 bp, Homo sapien
gaactcagctgatataagcccggga

SEQ ID NO: 3042995 - DNA, 25 bp, Homo sapien
ccgggaggtgtcacggaactcagct

SEQ ID NO: 3042996 - DNA, 25 bp, Homo sapien
tagttgcaagagtgggcttccggct

SEQ ID NO: 3042997 - DNA, 25 bp, Homo sapien
cgatgtaagattcctcctttagggc

SEQ ID NO: 3042998 - DNA, 25 bp, Homo sapien
gtcacatacttttctaggtgctggg

SEQ ID NO: 3042999 - DNA, 25 bp, Homo sapien
taatccaaacatgtaagcacacact

SEQ ID NO: 3043000 - DNA, 25 bp, Homo sapien
tgacaaatacacagatagacaagga

SEQ ID NO: 3043001 - DNA, 25 bp, Homo sapien
acatgtgtacagttcttagggaaac

SEQ ID NO: 3043002 - DNA, 25 bp, Homo sapien
agttctagaaatacaggacccatga

SEQ ID NO: 3043003 - DNA, 25 bp, Homo sapien
tctagctaagcaagcaacatgtaca

SEQ ID NO: 3043004 - DNA, 25 bp, Homo sapien
tattctagtacaaaggcagcacatg

SEQ ID NO: 3043005 - DNA, 25 bp, Homo sapien
ccagaaagtgttgccctgaggctga

SEQ ID NO: 3043006 - DNA, 25 bp, Homo sapien
gaaaagcgcctctccatgaactaaa

SEQ ID NO: 3043007 - DNA, 25 bp, Homo sapien
cacggtaatacactgaggctggcac

SEQ ID NO: 3043008 - DNA, 25 bp, Homo sapien
ggtcacatgctgaaatcgccctcta

SEQ ID NO: 3043009 - DNA, 25 bp, Homo sapien
ctaccccagggttggttgtcagttg

SEQ ID NO: 3043010 - DNA, 25 bp, Homo sapien
ctactccctagacgccagtagcaaa

SEQ ID NO: 3043011 - DNA, 25 bp, Homo sapien
tagacgccagtagcaaatccaccac

SEQ ID NO: 3043012 - DNA, 25 bp, Homo sapien
gcatccttggccctactccctagac

SEQ ID NO: 3043013 - DNA, 25 bp, Homo sapien
gaatgcatatatctctttctctaga

SEQ ID NO: 3043014 - DNA, 25 bp, Homo sapien
gaacaatccggcagtagttaacaaa

SEQ ID NO: 3043015 - DNA, 25 bp, Homo sapien
gaaatacttctatacaggtgattga

SEQ ID NO: 3043016 - DNA, 25 bp, Homo sapien
ttattcctaagagcagaagactgca

SEQ ID NO: 3043017 - DNA, 25 bp, Homo sapien
tgggataaacccctcatgatcataa

SEQ ID NO: 3043018 - DNA, 25 bp, Homo sapien
tctgtaccacgtaataattttgatg

SEQ ID NO: 3043019 - DNA, 25 bp, Homo sapien
ttttctatcaatgaatatcctggga

SEQ ID NO: 3043020 - DNA, 25 bp, Homo sapien
taatagtgtttgactccagggaaga

SEQ ID NO: 3043021 - DNA, 25 bp, Homo sapien
tggtgatacaagcacccctgaggcc

SEQ ID NO: 3043022 - DNA, 25 bp, Homo sapien
gagactgtgctggatcatacctgca

SEQ ID NO: 3043023 - DNA, 25 bp, Homo sapien
atgatccaatcaccagcaaccaggc

SEQ ID NO: 3043024 - DNA, 25 bp, Homo sapien
gggtcttgcccaatgcccacaataa

SEQ ID NO: 3043025 - DNA, 25 bp, Homo sapien
tgctgtcggcgcaggacccgagact

SEQ ID NO: 3043026 - DNA, 25 bp, Homo sapien
aagacaattccccagggtaatgctg

SEQ ID NO: 3043027 - DNA, 25 bp, Homo sapien
gaatccaaagaccaagacaattccc

SEQ ID NO: 3043028 - DNA, 25 bp, Homo sapien
gtttctcgcatctccagaatccaaa

SEQ ID NO: 3043029 - DNA, 25 bp, Homo sapien
ctttagtgaagtaggtcccagatgt

SEQ ID NO: 3043030 - DNA, 25 bp, Homo sapien
attttataatggctgggtagatttt

SEQ ID NO: 3043031 - DNA, 25 bp, Homo sapien
cattttataatggctgggtagattt

SEQ ID NO: 3043032 - DNA, 25 bp, Homo sapien
cagtagtaagctaaaccttttgcca

SEQ ID NO: 3043033 - DNA, 25 bp, Homo sapien
ttcagtttaatgagacacaaactct

SEQ ID NO: 3043034 - DNA, 25 bp, Homo sapien
catagggaaacaaatatcagtaatc

SEQ ID NO: 3043035 - DNA, 25 bp, Homo sapien
gatacaaccagtcgaaattagactt

SEQ ID NO: 3043036 - DNA, 25 bp, Homo sapien
ggagagcctgcaatttcaagcccag

SEQ ID NO: 3043037 - DNA, 25 bp, Homo sapien
cccaaaatgcaagacacagatcggc

SEQ ID NO: 3043038 - DNA, 25 bp, Homo sapien
gacaccaaccttagcagatcagagc

SEQ ID NO: 3043039 - DNA, 25 bp, Homo sapien
gccattctgagaacaagctctggag

SEQ ID NO: 3043040 - DNA, 25 bp, Homo sapien
caccccacggaaaaatatacaggtg

SEQ ID NO: 3043041 - DNA, 25 bp, Homo sapien
cccacggaaaaatatacaggtgttg

SEQ ID NO: 3043042 - DNA, 25 bp, Homo sapien
tggccaccccacggaaaaatataca

SEQ ID NO: 3043043 - DNA, 25 bp, Homo sapien
cacggaaaaatatacaggtgttgtt

SEQ ID NO: 3043044 - DNA, 25 bp, Homo sapien
ttccaggcctgagaatcgccgaaca

SEQ ID NO: 3043045 - DNA, 25 bp, Homo sapien
tcctttccaggcctgagaatcgccg

SEQ ID NO: 3043046 - DNA, 25 bp, Homo sapien
ctttccaggcctgagaatcgccgaa

SEQ ID NO: 3043047 - DNA, 25 bp, Homo sapien
tatgctcctttccaggcctgagaat

SEQ ID NO: 3043048 - DNA, 25 bp, Homo sapien
tggctattggatctgcattgcgaac

SEQ ID NO: 3043049 - DNA, 25 bp, Homo sapien
acttcttttgcggtgctgacaagca

SEQ ID NO: 3043050 - DNA, 25 bp, Homo sapien
cacgtgtctgccacacaggtcatta

SEQ ID NO: 3043051 - DNA, 25 bp, Homo sapien
aggaaatacctcgaggcacccagtg

SEQ ID NO: 3043052 - DNA, 25 bp, Homo sapien
caatccaagtggctggtctgaaagt

SEQ ID NO: 3043053 - DNA, 25 bp, Homo sapien
ccactgcaatccaagtggctggtct

SEQ ID NO: 3043054 - DNA, 25 bp, Homo sapien
actgcaatccaagtggctggtctga

SEQ ID NO: 3043055 - DNA, 25 bp, Homo sapien
gaggccactgcaatccaagtggctg

SEQ ID NO: 3043056 - DNA, 25 bp, Homo sapien
ctttgctctccgagtgatgcttttt

SEQ ID NO: 3043057 - DNA, 25 bp, Homo sapien
cctttgctctccgagtgatgctttt

SEQ ID NO: 3043058 - DNA, 25 bp, Homo sapien
tttgctctccgagtgatgctttttg

SEQ ID NO: 3043059 - DNA, 25 bp, Homo sapien
ccatcttcagtacggaaattctgag

SEQ ID NO: 3043060 - DNA, 25 bp, Homo sapien
gtccccatcttcagtacggaaattc

SEQ ID NO: 3043061 - DNA, 25 bp, Homo sapien
ccccatcttcagtacggaaattctg

SEQ ID NO: 3043062 - DNA, 25 bp, Homo sapien
cagtccccatcttcagtacggaaat

SEQ ID NO: 3043063 - DNA, 25 bp, Homo sapien
tgacgatgtgttgaatgtgttcaaa

SEQ ID NO: 3043064 - DNA, 25 bp, Homo sapien
cttcgtcaatgacgatgtgttgaat

SEQ ID NO: 3043065 - DNA, 25 bp, Homo sapien
ctctgctcggcagatatttctatca

SEQ ID NO: 3043066 - DNA, 25 bp, Homo sapien
cgggtctctgctcggcagatatttc

SEQ ID NO: 3043067 - DNA, 25 bp, Homo sapien
aacaactctctgttcttgcggaggc

SEQ ID NO: 3043068 - DNA, 25 bp, Homo sapien
cttccctgagccaggtaagccgtgg

SEQ ID NO: 3043069 - DNA, 25 bp, Homo sapien
ctgcttcaaagtaaaggcggtgcga

SEQ ID NO: 3043070 - DNA, 25 bp, Homo sapien
ttaaaacctcacagccgagctggtc

SEQ ID NO: 3043071 - DNA, 25 bp, Homo sapien
gagaagatcaaaattccccgaaaga

SEQ ID NO: 3043072 - DNA, 25 bp, Homo sapien
tctggagtatatcgcaaatatcctg

SEQ ID NO: 3043073 - DNA, 25 bp, Homo sapien
cagagtgactctggagtatatcgca

SEQ ID NO: 3043074 - DNA, 25 bp, Homo sapien
tattaactcctctagtcctctgtgc

SEQ ID NO: 3043075 - DNA, 25 bp, Homo sapien
tctttaattgtataatggagcatgc

SEQ ID NO: 3043076 - DNA, 25 bp, Homo sapien
ttctttaattgtataatggagcatg

SEQ ID NO: 3043077 - DNA, 25 bp, Homo sapien
tttaattgtataatggagcatgctt

SEQ ID NO: 3043078 - DNA, 25 bp, Homo sapien
cttatcattgcataggtcttctttt

SEQ ID NO: 3043079 - DNA, 25 bp, Homo sapien
gagtagggactcagatatgtgtcct

SEQ ID NO: 3043080 - DNA, 25 bp, Homo sapien
gagaaaagtacatattgcaagccac

SEQ ID NO: 3043081 - DNA, 25 bp, Homo sapien
tggtgcagcatatgactagtttgac

SEQ ID NO: 3043082 - DNA, 25 bp, Homo sapien
accaccactcccgtggaaaatctgg

SEQ ID NO: 3043083 - DNA, 25 bp, Homo sapien
tggagttcctttttatgttccaggc

SEQ ID NO: 3043084 - DNA, 25 bp, Homo sapien
caggcctttcttggagtacactggt

SEQ ID NO: 3043085 - DNA, 25 bp, Homo sapien
ttttatgttccaggcctttcttgga

SEQ ID NO: 3043086 - DNA, 25 bp, Homo sapien
ctgaaaataaaagttgctggagttc

SEQ ID NO: 3043087 - DNA, 25 bp, Homo sapien
caaaatcttcagacaactgtagaag

SEQ ID NO: 3043088 - DNA, 25 bp, Homo sapien
ctgctaaggggaggcccactagata

SEQ ID NO: 3043089 - DNA, 25 bp, Homo sapien
tcaaaatcttcagacaactgtagaa

SEQ ID NO: 3043090 - DNA, 25 bp, Homo sapien
gaggcccactagatagactcagctg

SEQ ID NO: 3043091 - DNA, 25 bp, Homo sapien
cccatttctcggttgtcaggctgca

SEQ ID NO: 3043092 - DNA, 25 bp, Homo sapien
tcagcaggatccgagttagggagct

SEQ ID NO: 3043093 - DNA, 25 bp, Homo sapien
gagctcttggtatacacccttgtga

SEQ ID NO: 3043094 - DNA, 25 bp, Homo sapien
cagcaggatccgagtttgggtcagc

SEQ ID NO: 3043095 - DNA, 25 bp, Homo sapien
gtttaataaagcacatgcagcccgc

SEQ ID NO: 3043096 - DNA, 25 bp, Homo sapien
tctgggtaagatggttccacaacca

SEQ ID NO: 3043097 - DNA, 25 bp, Homo sapien
acgggatgctcaaccttcttggcca

SEQ ID NO: 3043098 - DNA, 25 bp, Homo sapien
gatctgaagactgaataagctctct

SEQ ID NO: 3043099 - DNA, 25 bp, Homo sapien
tgtaccaaatacatctcagaggtgg

SEQ ID NO: 3043100 - DNA, 25 bp, Homo sapien
gaaatctggactatgcattctaaga

SEQ ID NO: 3043101 - DNA, 25 bp, Homo sapien
gaaagggtaggattttatcacagaa

SEQ ID NO: 3043102 - DNA, 25 bp, Homo sapien
tggcagggatcgcattgataggaac

SEQ ID NO: 3043103 - DNA, 25 bp, Homo sapien
cgagacgagattgtggtgaaccaag

SEQ ID NO: 3043104 - DNA, 25 bp, Homo sapien
ccttcgagacgagattgtggtgaac

SEQ ID NO: 3043105 - DNA, 25 bp, Homo sapien
tgagccttcgagacgagattgtggt

SEQ ID NO: 3043106 - DNA, 25 bp, Homo sapien
aatcacctgagccttcgagacgaga

SEQ ID NO: 3043107 - DNA, 25 bp, Homo sapien
gtcagtttacaggataactttttca

SEQ ID NO: 3043108 - DNA, 25 bp, Homo sapien
ttctagtcagtttacaggataactt

SEQ ID NO: 3043109 - DNA, 25 bp, Homo sapien
ctagtcagtttacaggataactttt

SEQ ID NO: 3043110 - DNA, 25 bp, Homo sapien
tgattctagtcagtttacaggataa

SEQ ID NO: 3043111 - DNA, 25 bp, Homo sapien
caccaacacagtgaattagcaccac

SEQ ID NO: 3043112 - DNA, 25 bp, Homo sapien
tcccaccaacacagtgaattagcac

SEQ ID NO: 3043113 - DNA, 25 bp, Homo sapien
cagtgtagccagagttcccaccaac

SEQ ID NO: 3043114 - DNA, 25 bp, Homo sapien
gtagccagagttcccaccaacacag

SEQ ID NO: 3043115 - DNA, 25 bp, Homo sapien
gtcctgaaggctatgtatacagaaa

SEQ ID NO: 3043116 - DNA, 25 bp, Homo sapien
gcagtcctgaaggctatgtatacag

SEQ ID NO: 3043117 - DNA, 25 bp, Homo sapien
tcctgaaggctatgtatacagaaac

SEQ ID NO: 3043118 - DNA, 25 bp, Homo sapien
cagtcctgaaggctatgtatacaga

SEQ ID NO: 3043119 - DNA, 25 bp, Homo sapien
acgcggattcggctgggctagaccc

SEQ ID NO: 3043120 - DNA, 25 bp, Homo sapien
gtagaaacgcaactccggagtccca

SEQ ID NO: 3043121 - DNA, 25 bp, Homo sapien
ctggcactcgagttacagcccgacg

SEQ ID NO: 3043122 - DNA, 25 bp, Homo sapien
tgggctagaccctgaagcacgggta

SEQ ID NO: 3043123 - DNA, 25 bp, Homo sapien
gcccaggtcgagtccttatatacta

SEQ ID NO: 3043124 - DNA, 25 bp, Homo sapien
gtccttatatactagcgggttggcg

SEQ ID NO: 3043125 - DNA, 25 bp, Homo sapien
cctggaggcgcccaggtcgagtcct

SEQ ID NO: 3043126 - DNA, 25 bp, Homo sapien
ggtcgagtccttatatactagcggg

SEQ ID NO: 3043127 - DNA, 25 bp, Homo sapien
cttctgtgacagtagtagccttaat

SEQ ID NO: 3043128 - DNA, 25 bp, Homo sapien
aagactatgatcttctgtgacagta

SEQ ID NO: 3043129 - DNA, 25 bp, Homo sapien
caaagactatgatcttctgtgacag

SEQ ID NO: 3043130 - DNA, 25 bp, Homo sapien
tctgtgacagtagtagccttaattc

SEQ ID NO: 3043131 - DNA, 25 bp, Homo sapien
ttaaattcttcggctgcaaacttta

SEQ ID NO: 3043132 - DNA, 25 bp, Homo sapien
aaattcttcggctgcaaactttaag

SEQ ID NO: 3043133 - DNA, 25 bp, Homo sapien
gcagcaggagctttaaattcttcgg

SEQ ID NO: 3043134 - DNA, 25 bp, Homo sapien
cagcaggagctttaaattcttcggc

SEQ ID NO: 3043135 - DNA, 25 bp, Homo sapien
tactttcaggaaagtacaaagtaca

SEQ ID NO: 3043136 - DNA, 25 bp, Homo sapien
ctgtgaaaggtgtactttcaggaaa

SEQ ID NO: 3043137 - DNA, 25 bp, Homo sapien
tgaaaggtgtactttcaggaaagta

SEQ ID NO: 3043138 - DNA, 25 bp, Homo sapien
tgtactttcaggaaagtacaaagta

SEQ ID NO: 3043139 - DNA, 25 bp, Homo sapien
ggcagctgcgtgtccgatgtcagca

SEQ ID NO: 3043140 - DNA, 25 bp, Homo sapien
tgtccgatgtcagcatgatcttaaa

SEQ ID NO: 3043141 - DNA, 25 bp, Homo sapien
ttgtatggcagctgcgtgtccgatg

SEQ ID NO: 3043142 - DNA, 25 bp, Homo sapien
tgcgtgtccgatgtcagcatgatct

SEQ ID NO: 3043143 - DNA, 25 bp, Homo sapien
gcttctagaggctgactgcgtgcct

SEQ ID NO: 3043144 - DNA, 25 bp, Homo sapien
cttctcttggctctatcctgtgctt

SEQ ID NO: 3043145 - DNA, 25 bp, Homo sapien
ccagcagtgcacagcaccttctctt

SEQ ID NO: 3043146 - DNA, 25 bp, Homo sapien
caaggtgtcggctggcttgtattcc

SEQ ID NO: 3043147 - DNA, 25 bp, Homo sapien
aaagtgtccagctataattgtagag

SEQ ID NO: 3043148 - DNA, 25 bp, Homo sapien
tgtctacttgttctagcaggtattg

SEQ ID NO: 3043149 - DNA, 25 bp, Homo sapien
ttttgtgtcacatatttcgcaggtc

SEQ ID NO: 3043150 - DNA, 25 bp, Homo sapien
gcaggtattgatagaagggtgttaa

SEQ ID NO: 3043151 - DNA, 25 bp, Homo sapien
tgatgttccatgactccttcttttt

SEQ ID NO: 3043152 - DNA, 25 bp, Homo sapien
ttccatgactccttctttttgcatt

SEQ ID NO: 3043153 - DNA, 25 bp, Homo sapien
ccatgactccttctttttgcatttt

SEQ ID NO: 3043154 - DNA, 25 bp, Homo sapien
atgttccatgactccttctttttgc

SEQ ID NO: 3043155 - DNA, 25 bp, Homo sapien
taaaatcacgaactggtggtatagt

SEQ ID NO: 3043156 - DNA, 25 bp, Homo sapien
agggattttcatggtacttttctat

SEQ ID NO: 3043157 - DNA, 25 bp, Homo sapien
tttcatggtacttttctatacaatg

SEQ ID NO: 3043158 - DNA, 25 bp, Homo sapien
tctcctcccttaaaatcacgaactg

SEQ ID NO: 3043159 - DNA, 25 bp, Homo sapien
tacatggctcagataactcacaaaa

SEQ ID NO: 3043160 - DNA, 25 bp, Homo sapien
caaccctttgtactcatatgcatga

SEQ ID NO: 3043161 - DNA, 25 bp, Homo sapien
tcagtatctctcattacacacagtg

SEQ ID NO: 3043162 - DNA, 25 bp, Homo sapien
gatttcaacataccataaatgggct

SEQ ID NO: 3043163 - DNA, 25 bp, Homo sapien
gatagcactctaacttttactattt

SEQ ID NO: 3043164 - DNA, 25 bp, Homo sapien
aagatagcactctaacttttactat

SEQ ID NO: 3043165 - DNA, 25 bp, Homo sapien
cagaagatagcactctaacttttac

SEQ ID NO: 3043166 - DNA, 25 bp, Homo sapien
gaagatagcactctaacttttacta

SEQ ID NO: 3043167 - DNA, 25 bp, Homo sapien
gagccagtgaattttcattcgtttg

SEQ ID NO: 3043168 - DNA, 25 bp, Homo sapien
tgagccagtgaattttcattcgttt

SEQ ID NO: 3043169 - DNA, 25 bp, Homo sapien
agccagtgaattttcattcgtttgt

SEQ ID NO: 3043170 - DNA, 25 bp, Homo sapien
aattggctgtatccgaattacatac

SEQ ID NO: 3043171 - DNA, 25 bp, Homo sapien
tgtagaaagacatctattaattggc

SEQ ID NO: 3043172 - DNA, 25 bp, Homo sapien
ctaaatctggaaagagcataaagct

SEQ ID NO: 3043173 - DNA, 25 bp, Homo sapien
attttttcagaaggcgttgcttgct

SEQ ID NO: 3043174 - DNA, 25 bp, Homo sapien
accagtcttcactttgcgcttgtcc

SEQ ID NO: 3043175 - DNA, 25 bp, Homo sapien
cagtcttcactttgcgcttgtcctg

SEQ ID NO: 3043176 - DNA, 25 bp, Homo sapien
ctggtagaggaactgtccgcaacat

SEQ ID NO: 3043177 - DNA, 25 bp, Homo sapien
ggaactgtccgcaacattttgtctt

SEQ ID NO: 3043178 - DNA, 25 bp, Homo sapien
gcacaagtaggtagagatatgcaaa

SEQ ID NO: 3043179 - DNA, 25 bp, Homo sapien
tatgcacaagtaggtagagatatgc

SEQ ID NO: 3043180 - DNA, 25 bp, Homo sapien
ctgaattatgcacaagtaggtagag

SEQ ID NO: 3043181 - DNA, 25 bp, Homo sapien
gaattatgcacaagtaggtagagat

SEQ ID NO: 3043182 - DNA, 25 bp, Homo sapien
acggggtcgcgcctctttctgcgac

SEQ ID NO: 3043183 - DNA, 25 bp, Homo sapien
gctgctccttgtagtttggcgtctg

SEQ ID NO: 3043184 - DNA, 25 bp, Homo sapien
tgctccttgtagtttggcgtctgag

SEQ ID NO: 3043185 - DNA, 25 bp, Homo sapien
tcccgctgctccttgtagtttggcg

SEQ ID NO: 3043186 - DNA, 25 bp, Homo sapien
gatcgacttcctctggcattggaca

SEQ ID NO: 3043187 - DNA, 25 bp, Homo sapien
gactccaggagtgcaagtatgctct

SEQ ID NO: 3043188 - DNA, 25 bp, Homo sapien
taccccaggtttcttgcaatgatgc

SEQ ID NO: 3043189 - DNA, 25 bp, Homo sapien
gagtcccagtggagctccttcagtg

SEQ ID NO: 3043190 - DNA, 25 bp, Homo sapien
caaggataatcttttgtaagttata

SEQ ID NO: 3043191 - DNA, 25 bp, Homo sapien
tcatcaaggataatcttttgtaagt

SEQ ID NO: 3043192 - DNA, 25 bp, Homo sapien
gaaattctgagtttcatcaaggata

SEQ ID NO: 3043193 - DNA, 25 bp, Homo sapien
gagtttcatcaaggataatcttttg

SEQ ID NO: 3043194 - DNA, 25 bp, Homo sapien
tattcaggaactacagacagagtaa

SEQ ID NO: 3043195 - DNA, 25 bp, Homo sapien
tatccctcaaacaatatctgtgaag

SEQ ID NO: 3043196 - DNA, 25 bp, Homo sapien
tgaaaatagacaaaacccaattatc

SEQ ID NO: 3043197 - DNA, 25 bp, Homo sapien
gtaaataatactgtgcacagacgag

SEQ ID NO: 3043198 - DNA, 25 bp, Homo sapien
gaaagcaatctataccgattatctg

SEQ ID NO: 3043199 - DNA, 25 bp, Homo sapien
tcaggtgagccttcgacaagattta

SEQ ID NO: 3043200 - DNA, 25 bp, Homo sapien
tctgcaaaggaaaactggtctctca

SEQ ID NO: 3043201 - DNA, 25 bp, Homo sapien
tcttgtaaaatagtaggattcaggg

SEQ ID NO: 3043202 - DNA, 25 bp, Homo sapien
gggctcaagtagaagatctttgtca

SEQ ID NO: 3043203 - DNA, 25 bp, Homo sapien
taaccaccaatttttgccagcttct

SEQ ID NO: 3043204 - DNA, 25 bp, Homo sapien
tgacacacacttttttagtgtaacc

SEQ ID NO: 3043205 - DNA, 25 bp, Homo sapien
ttctggagtatacgttatccttcct

SEQ ID NO: 3043206 - DNA, 25 bp, Homo sapien
gttgtaagaacagttttctgcaaag

SEQ ID NO: 3043207 - DNA, 25 bp, Homo sapien
atgttgtaagaacagttttctgcaa

SEQ ID NO: 3043208 - DNA, 25 bp, Homo sapien
ttttctggagtatacgttatccttc

SEQ ID NO: 3043209 - DNA, 25 bp, Homo sapien
tctgccgttgccattccaaaagagg

SEQ ID NO: 3043210 - DNA, 25 bp, Homo sapien
agtgatgtctctgccgttgccattc

SEQ ID NO: 3043211 - DNA, 25 bp, Homo sapien
tggacagtgatgtctctgccgttgc

SEQ ID NO: 3043212 - DNA, 25 bp, Homo sapien
gatgtctctgccgttgccattccaa

SEQ ID NO: 3043213 - DNA, 25 bp, Homo sapien
ggagcaggtaatgacgtatttattt

SEQ ID NO: 3043214 - DNA, 25 bp, Homo sapien
tggggagcaggtaatgacgtattta

SEQ ID NO: 3043215 - DNA, 25 bp, Homo sapien
gtggggagcaggtaatgacgtattt

SEQ ID NO: 3043216 - DNA, 25 bp, Homo sapien
gggagcaggtaatgacgtatttatt

SEQ ID NO: 3043217 - DNA, 25 bp, Homo sapien
tgatggctagtgaaggaaagctgac

SEQ ID NO: 3043218 - DNA, 25 bp, Homo sapien
aaatgagacgtgatggctagtgaag

SEQ ID NO: 3043219 - DNA, 25 bp, Homo sapien
tggctagtgaaggaaagctgacttt

SEQ ID NO: 3043220 - DNA, 25 bp, Homo sapien
taaaatgagacgtgatggctagtga

SEQ ID NO: 3043221 - DNA, 25 bp, Homo sapien
cctggccgaggcagggaactattga

SEQ ID NO: 3043222 - DNA, 25 bp, Homo sapien
tcttgccccagatcccatagagaaa

SEQ ID NO: 3043223 - DNA, 25 bp, Homo sapien
aatttgaggactattgatcttgccc

SEQ ID NO: 3043224 - DNA, 25 bp, Homo sapien
gaactattgattgtatccaccaggg

SEQ ID NO: 3043225 - DNA, 25 bp, Homo sapien
gagctcaaggtggtaatccgcagac

SEQ ID NO: 3043226 - DNA, 25 bp, Homo sapien
cacacggttatctttcacatgccag

SEQ ID NO: 3043227 - DNA, 25 bp, Homo sapien
gcagaccagaggtgttcaagctcca

SEQ ID NO: 3043228 - DNA, 25 bp, Homo sapien
tcttgtatatcaacacagggcctct

SEQ ID NO: 3043229 - DNA, 25 bp, Homo sapien
tttcccagcagctatgcagtgtcca

SEQ ID NO: 3043230 - DNA, 25 bp, Homo sapien
ctatgcagtgtccaagcagaaattc

SEQ ID NO: 3043231 - DNA, 25 bp, Homo sapien
ttcccagcagctatgcagtgtccaa

SEQ ID NO: 3043232 - DNA, 25 bp, Homo sapien
cagctatgcagtgtccaagcagaaa

SEQ ID NO: 3043233 - DNA, 25 bp, Homo sapien
cagtgaaccaggctttagttataca

SEQ ID NO: 3043234 - DNA, 25 bp, Homo sapien
gatttcccgttaaggtctaatgaca

SEQ ID NO: 3043235 - DNA, 25 bp, Homo sapien
gcaaagtgggctaagtcattgtgcc

SEQ ID NO: 3043236 - DNA, 25 bp, Homo sapien
caacccctggagtgagtctatgttt

SEQ ID NO: 3043237 - DNA, 25 bp, Homo sapien
gctaagctagtttaaattcctacca

SEQ ID NO: 3043238 - DNA, 25 bp, Homo sapien
catatatctgttgtccattagaatg

SEQ ID NO: 3043239 - DNA, 25 bp, Homo sapien
gctttcattgcctgtccgccattgg

SEQ ID NO: 3043240 - DNA, 25 bp, Homo sapien
tttaacatgtgtgaggtgatttctc

SEQ ID NO: 3043241 - DNA, 25 bp, Homo sapien
tatagcttccaagtccaccattctg

SEQ ID NO: 3043242 - DNA, 25 bp, Homo sapien
gcaaaagttccacccgacctatagc

SEQ ID NO: 3043243 - DNA, 25 bp, Homo sapien
ccagcccatgcaggagcaaaagttc

SEQ ID NO: 3043244 - DNA, 25 bp, Homo sapien
gacctatagcttccaagtccaccat

SEQ ID NO: 3043245 - DNA, 25 bp, Homo sapien
gcacaccatccataggttacagtgt

SEQ ID NO: 3043246 - DNA, 25 bp, Homo sapien
tcagcacaccatccataggttacag

SEQ ID NO: 3043247 - DNA, 25 bp, Homo sapien
aggttacagtgtcctcatggtcgca

SEQ ID NO: 3043248 - DNA, 25 bp, Homo sapien
cctcatggtcgcatatttgtttcac

SEQ ID NO: 3043249 - DNA, 25 bp, Homo sapien
aatatgttaccagtgaagagtgtcc

SEQ ID NO: 3043250 - DNA, 25 bp, Homo sapien
tatgttaccagtgaagagtgtccag

SEQ ID NO: 3043251 - DNA, 25 bp, Homo sapien
atatgttaccagtgaagagtgtcca

SEQ ID NO: 3043252 - DNA, 25 bp, Homo sapien
atgttaccagtgaagagtgtccagg

SEQ ID NO: 3043253 - DNA, 25 bp, Homo sapien
cagaaagcgatcaatgggaggctga

SEQ ID NO: 3043254 - DNA, 25 bp, Homo sapien
taggagcccgagatcagtctgaatg

SEQ ID NO: 3043255 - DNA, 25 bp, Homo sapien
agcaggcccgaggatagcggctcaa

SEQ ID NO: 3043256 - DNA, 25 bp, Homo sapien
gttacttggtgtgcacacaatgtaa

SEQ ID NO: 3043257 - DNA, 25 bp, Homo sapien
gctccctagaagctggattcttcgc

SEQ ID NO: 3043258 - DNA, 25 bp, Homo sapien
cagctcgcggtgctccctagaagct

SEQ ID NO: 3043259 - DNA, 25 bp, Homo sapien
cgcggtgctccctagaagctggatt

SEQ ID NO: 3043260 - DNA, 25 bp, Homo sapien
tccctagaagctggattcttcgcag

SEQ ID NO: 3043261 - DNA, 25 bp, Homo sapien
gtgcgagcacaccccagatgccagc

SEQ ID NO: 3043262 - DNA, 25 bp, Homo sapien
tagggagctctcgtttctttttcac

SEQ ID NO: 3043263 - DNA, 25 bp, Homo sapien
gcccaggctacagtccgcgggctca

SEQ ID NO: 3043264 - DNA, 25 bp, Homo sapien
aacccacgaaaacagctctgagtga

SEQ ID NO: 3043265 - DNA, 25 bp, Homo sapien
cccacgaaaacagctctgagtgatc

SEQ ID NO: 3043266 - DNA, 25 bp, Homo sapien
aagtgtccgcactctttattatcga

SEQ ID NO: 3043267 - DNA, 25 bp, Homo sapien
ctggcgctccggaagtgtccgcact

SEQ ID NO: 3043268 - DNA, 25 bp, Homo sapien
tattatcgactctgcgcctttgggc

SEQ ID NO: 3043269 - DNA, 25 bp, Homo sapien
ccccagcgtggcctgcatttctatt

SEQ ID NO: 3043270 - DNA, 25 bp, Homo sapien
catgcccctaaaggggtgactcaac

SEQ ID NO: 3043271 - DNA, 25 bp, Homo sapien
agctgtactcgcattcccagagcag

SEQ ID NO: 3043272 - DNA, 25 bp, Homo sapien
tactcgcattcccagagcagcactg

SEQ ID NO: 3043273 - DNA, 25 bp, Homo sapien
tgctgcccccttgcttaaaagcacg

SEQ ID NO: 3043274 - DNA, 25 bp, Homo sapien
tgcttaaaagcacggttgcccccag

SEQ ID NO: 3043275 - DNA, 25 bp, Homo sapien
tctggcctgaaggatctttcctcct

SEQ ID NO: 3043276 - DNA, 25 bp, Homo sapien
cctcactgggcctgatgattgattt

SEQ ID NO: 3043277 - DNA, 25 bp, Homo sapien
tgtgaaccccttacacggctaaaga

SEQ ID NO: 3043278 - DNA, 25 bp, Homo sapien
tttgagtgataattgagtgacctgc

SEQ ID NO: 3043279 - DNA, 25 bp, Homo sapien
aaacaactgcttctcctatggcctg

SEQ ID NO: 3043280 - DNA, 25 bp, Homo sapien
gacaccagtcttagcagatcagatt

SEQ ID NO: 3043281 - DNA, 25 bp, Homo sapien
gaagtcgaagacataggtgccagca

SEQ ID NO: 3043282 - DNA, 25 bp, Homo sapien
gaactcgagaactccagccttggaa

SEQ ID NO: 3043283 - DNA, 25 bp, Homo sapien
taagatagctgggtcagctgtcctt

SEQ ID NO: 3043284 - DNA, 25 bp, Homo sapien
ggtaagatagctgggtcagctgtcc

SEQ ID NO: 3043285 - DNA, 25 bp, Homo sapien
attgggtaagatagctgggtcagct

SEQ ID NO: 3043286 - DNA, 25 bp, Homo sapien
gatagctgggtcagctgtccttgga

SEQ ID NO: 3043287 - DNA, 25 bp, Homo sapien
ttccaggcctgagaatcgccggaca

SEQ ID NO: 3043288 - DNA, 25 bp, Homo sapien
tcctttccaggcctgagaatcgccg

SEQ ID NO: 3043289 - DNA, 25 bp, Homo sapien
tatgctcctttccaggcctgagaat

SEQ ID NO: 3043290 - DNA, 25 bp, Homo sapien
ctttccaggcctgagaatcgccgga

SEQ ID NO: 3043291 - DNA, 25 bp, Homo sapien
gatactgctccacttctgtcacggt

SEQ ID NO: 3043292 - DNA, 25 bp, Homo sapien
gcaggtgtctgccacataggtcact

SEQ ID NO: 3043293 - DNA, 25 bp, Homo sapien
ctgagaattgccagatacccatggg

SEQ ID NO: 3043294 - DNA, 25 bp, Homo sapien
cccaagtgactggtctgaaagtagt

SEQ ID NO: 3043295 - DNA, 25 bp, Homo sapien
ggaaattctgagcttcgtcaatgac

SEQ ID NO: 3043296 - DNA, 25 bp, Homo sapien
ctctgctcggcagatatttctatca

SEQ ID NO: 3043297 - DNA, 25 bp, Homo sapien
tgacgatgtgttgaatgtgttcaaa

SEQ ID NO: 3043298 - DNA, 25 bp, Homo sapien
cgggtctctgctcggcagatatttc

SEQ ID NO: 3043299 - DNA, 25 bp, Homo sapien
aacaactctctgttcttgcggaggc

SEQ ID NO: 3043300 - DNA, 25 bp, Homo sapien
ctgcttcaaagtaaaggcggtgcga

SEQ ID NO: 3043301 - DNA, 25 bp, Homo sapien
cttccctgagccaggtaagccgtgg

SEQ ID NO: 3043302 - DNA, 25 bp, Homo sapien
ttaaaacctcacagccgagctggtc

SEQ ID NO: 3043303 - DNA, 25 bp, Homo sapien
gagggactctggagtacattccaaa

SEQ ID NO: 3043304 - DNA, 25 bp, Homo sapien
tcgcatttgcttgtgtattaactcc

SEQ ID NO: 3043305 - DNA, 25 bp, Homo sapien
tattaactcctttagtccttcatgc

SEQ ID NO: 3043306 - DNA, 25 bp, Homo sapien
ctgggagaaaggtcgcatttgcttg

SEQ ID NO: 3043307 - DNA, 25 bp, Homo sapien
ggaagaaaatagaaagatgttttca

SEQ ID NO: 3043308 - DNA, 25 bp, Homo sapien
gacaggaagaaaatagaaagatgtt

SEQ ID NO: 3043309 - DNA, 25 bp, Homo sapien
ctagacaggaagaaaatagaaagat

SEQ ID NO: 3043310 - DNA, 25 bp, Homo sapien
caggaagaaaatagaaagatgtttt

SEQ ID NO: 3043311 - DNA, 25 bp, Homo sapien
aactcatccccaagaggcttgtggc

SEQ ID NO: 3043312 - DNA, 25 bp, Homo sapien
tgaaactcatccccaagaggcttgt

SEQ ID NO: 3043313 - DNA, 25 bp, Homo sapien
gaaactcatccccaagaggcttgtg

SEQ ID NO: 3043314 - DNA, 25 bp, Homo sapien
ctcatccccaagaggcttgtggcat

SEQ ID NO: 3043315 - DNA, 25 bp, Homo sapien
caggacacaatctttcatggatttg

SEQ ID NO: 3043316 - DNA, 25 bp, Homo sapien
ccacgaaatgtattaaatgacttcc

SEQ ID NO: 3043317 - DNA, 25 bp, Homo sapien
gttttccacgaaatgtattaaatga

SEQ ID NO: 3043318 - DNA, 25 bp, Homo sapien
ctggatctgcaggacacaatctttc

SEQ ID NO: 3043319 - DNA, 25 bp, Homo sapien
gttccagacctttcttagaatacac

SEQ ID NO: 3043320 - DNA, 25 bp, Homo sapien
gaaataaatgttgttgtagatcagc

SEQ ID NO: 3043321 - DNA, 25 bp, Homo sapien
gctttgtgttccagacctttcttag

SEQ ID NO: 3043322 - DNA, 25 bp, Homo sapien
tgttgtagatcagctttgtgttcca

SEQ ID NO: 3043323 - DNA, 25 bp, Homo sapien
ctgtcagatagactcaactgagact

SEQ ID NO: 3043324 - DNA, 25 bp, Homo sapien
aaggactgtcagatagactcaactg

SEQ ID NO: 3043325 - DNA, 25 bp, Homo sapien
gactgtcagatagactcaactgaga

SEQ ID NO: 3043326 - DNA, 25 bp, Homo sapien
ggactgtcagatagactcaactgag

SEQ ID NO: 3043327 - DNA, 25 bp, Homo sapien
tcagttgtcaaggggcggatgtact

SEQ ID NO: 3043328 - DNA, 25 bp, Homo sapien
gtcaaggggcggatgtacttctccc

SEQ ID NO: 3043329 - DNA, 25 bp, Homo sapien
tggatctgcgtccatcattttctct

SEQ ID NO: 3043330 - DNA, 25 bp, Homo sapien
ctggatctgcgtccatcattttctc

SEQ ID NO: 3043331 - DNA, 25 bp, Homo sapien
gagaacaccacacaacagaatgcct

SEQ ID NO: 3043332 - DNA, 25 bp, Homo sapien
gattttggtgctgtactctacccga

SEQ ID NO: 3043333 - DNA, 25 bp, Homo sapien
tcactttaatcacacagagatagcc

SEQ ID NO: 3043334 - DNA, 25 bp, Homo sapien
ctctacccgaggttttgaagagcaa

SEQ ID NO: 3043335 - DNA, 25 bp, Homo sapien
tctttaaggaaaggatcaccactcc

SEQ ID NO: 3043336 - DNA, 25 bp, Homo sapien
cagaggtgccagatctacagtataa

SEQ ID NO: 3043337 - DNA, 25 bp, Homo sapien
aagaactaaggctgcaaatgcggga

SEQ ID NO: 3043338 - DNA, 25 bp, Homo sapien
tcataattttactaggtggagaccc

SEQ ID NO: 3043339 - DNA, 25 bp, Homo sapien
tttaataaagcacacgcggcccgta

SEQ ID NO: 3043340 - DNA, 25 bp, Homo sapien
cagagtcacttctccgacatcgatg

SEQ ID NO: 3043341 - DNA, 25 bp, Homo sapien
gaaagcctgcaaatatggatactga

SEQ ID NO: 3043342 - DNA, 25 bp, Homo sapien
tgtgggacgctcatccctgttggcc

SEQ ID NO: 3043343 - DNA, 25 bp, Homo sapien
atttgcctccatgttgaacttgcac

SEQ ID NO: 3043344 - DNA, 25 bp, Homo sapien
agtgatttgcctccatgttgaactt

SEQ ID NO: 3043345 - DNA, 25 bp, Homo sapien
ccagggagcagtgatttgcctccat

SEQ ID NO: 3043346 - DNA, 25 bp, Homo sapien
cagggagcagtgatttgcctccatg

SEQ ID NO: 3043347 - DNA, 25 bp, Homo sapien
gagtaggttccatttaggccaagac

SEQ ID NO: 3043348 - DNA, 25 bp, Homo sapien
taaaacgtgtctaatatgtgctggg

SEQ ID NO: 3043349 - DNA, 25 bp, Homo sapien
gaacgaatctggagaccatggttcc

SEQ ID NO: 3043350 - DNA, 25 bp, Homo sapien
taaaaaattgttacaggcctgcaat

SEQ ID NO: 3043351 - DNA, 25 bp, Homo sapien
cctgaagtacctgtaggcagaaaca

SEQ ID NO: 3043352 - DNA, 25 bp, Homo sapien
caggattctgtcttgcattccgaga

SEQ ID NO: 3043353 - DNA, 25 bp, Homo sapien
gcctaatttagacccttgcctagaa

SEQ ID NO: 3043354 - DNA, 25 bp, Homo sapien
gctttggttcacaggtgttcagcaa

SEQ ID NO: 3043355 - DNA, 25 bp, Homo sapien
aactgtattcaaatggcaaccccac

SEQ ID NO: 3043356 - DNA, 25 bp, Homo sapien
taaaggtattatagtcagtgctact

SEQ ID NO: 3043357 - DNA, 25 bp, Homo sapien
cacccatatcttttgcaggcagaaa

SEQ ID NO: 3043358 - DNA, 25 bp, Homo sapien
aaaagtcttagggagctctatccca

SEQ ID NO: 3043359 - DNA, 25 bp, Homo sapien
cagcacagtgaatgcccaccgcctg

SEQ ID NO: 3043360 - DNA, 25 bp, Homo sapien
ttaatgtaaccagacttcccaccag

SEQ ID NO: 3043361 - DNA, 25 bp, Homo sapien
caaaagcaactgattctgttgtatt

SEQ ID NO: 3043362 - DNA, 25 bp, Homo sapien
tgtatttacagaataactttgctag

SEQ ID NO: 3043363 - DNA, 25 bp, Homo sapien
tcaagctccaggacactccgcgttt

SEQ ID NO: 3043364 - DNA, 25 bp, Homo sapien
cctggaggcgccaaggtcaggttct

SEQ ID NO: 3043365 - DNA, 25 bp, Homo sapien
taaccaatggttggcgcctacctgg

SEQ ID NO: 3043366 - DNA, 25 bp, Homo sapien
aaggtcaggttcttataaccaatgg

SEQ ID NO: 3043367 - DNA, 25 bp, Homo sapien
gtgttccattctcatggagtcttat

SEQ ID NO: 3043368 - DNA, 25 bp, Homo sapien
tggtaacttccagcgcagtaaatcc

SEQ ID NO: 3043369 - DNA, 25 bp, Homo sapien
gttccattctcatggagtcttatat

SEQ ID NO: 3043370 - DNA, 25 bp, Homo sapien
tcaacttggtaacttccagcgcagt

SEQ ID NO: 3043371 - DNA, 25 bp, Homo sapien
ggatgtatagatttgtattgtttag

SEQ ID NO: 3043372 - DNA, 25 bp, Homo sapien
agtgggatgtatagatttgtattgt

SEQ ID NO: 3043373 - DNA, 25 bp, Homo sapien
ctatttccaaagtgggatgtataga

SEQ ID NO: 3043374 - DNA, 25 bp, Homo sapien
tatttccaaagtgggatgtatagat

SEQ ID NO: 3043375 - DNA, 25 bp, Homo sapien
caacaaggtcagaaacaagatcgca

SEQ ID NO: 3043376 - DNA, 25 bp, Homo sapien
aacaaggtcagaaacaagatcgcac

SEQ ID NO: 3043377 - DNA, 25 bp, Homo sapien
ccaacaaggtcagaaacaagatcgc

SEQ ID NO: 3043378 - DNA, 25 bp, Homo sapien
gaagaataaactgggccaatgccct

SEQ ID NO: 3043379 - DNA, 25 bp, Homo sapien
atcctaagtccactccgagcagctt

SEQ ID NO: 3043380 - DNA, 25 bp, Homo sapien
tccactccgagcagctttggaagaa

SEQ ID NO: 3043381 - DNA, 25 bp, Homo sapien
tgggccaatgcccttttttgttgta

SEQ ID NO: 3043382 - DNA, 25 bp, Homo sapien
tgttgttcctggacaccatcagcgg

SEQ ID NO: 3043383 - DNA, 25 bp, Homo sapien
attttttcctgcttgttcttgtctc

SEQ ID NO: 3043384 - DNA, 25 bp, Homo sapien
ctctgttgttcctggacaccatcag

SEQ ID NO: 3043385 - DNA, 25 bp, Homo sapien
gtctctgttgttcctggacaccatc

SEQ ID NO: 3043386 - DNA, 25 bp, Homo sapien
gagctctgtcagataaaataagcct

SEQ ID NO: 3043387 - DNA, 25 bp, Homo sapien
tacaatatgagctctgtcagataaa

SEQ ID NO: 3043388 - DNA, 25 bp, Homo sapien
caaatacaatatgagctctgtcaga

SEQ ID NO: 3043389 - DNA, 25 bp, Homo sapien
tatgagctctgtcagataaaataag

SEQ ID NO: 3043390 - DNA, 25 bp, Homo sapien
aatccaggtagatgaattaccacac

SEQ ID NO: 3043391 - DNA, 25 bp, Homo sapien
ctgcttcttcaaacaatccaggtag

SEQ ID NO: 3043392 - DNA, 25 bp, Homo sapien
aacaatccaggtagatgaattacca

SEQ ID NO: 3043393 - DNA, 25 bp, Homo sapien
ctctgcttcttcaaacaatccaggt

SEQ ID NO: 3043394 - DNA, 25 bp, Homo sapien
acaacaactgtatggccagcattat

SEQ ID NO: 3043395 - DNA, 25 bp, Homo sapien
caacaactgtatggccagcattatt

SEQ ID NO: 3043396 - DNA, 25 bp, Homo sapien
cacaacaactgtatggccagcatta

SEQ ID NO: 3043397 - DNA, 25 bp, Homo sapien
gcggcacatggggtcctgcgccagt

SEQ ID NO: 3043398 - DNA, 25 bp, Homo sapien
cggcacatggggtcctgcgccagta

SEQ ID NO: 3043399 - DNA, 25 bp, Homo sapien
tgcctccaggtagttcttggcgaac

SEQ ID NO: 3043400 - DNA, 25 bp, Homo sapien
caggtagttcttggcgaacgccgca

SEQ ID NO: 3043401 - DNA, 25 bp, Homo sapien
gaggatgcctccaggtagttcttgg

SEQ ID NO: 3043402 - DNA, 25 bp, Homo sapien
cagggaggatgcctccaggtagttc

SEQ ID NO: 3043403 - DNA, 25 bp, Homo sapien
agacgcggccggcgagaggtgagcg

SEQ ID NO: 3043404 - DNA, 25 bp, Homo sapien
cggcgagaggtgagcgaactgtatt

SEQ ID NO: 3043405 - DNA, 25 bp, Homo sapien
aaggagacgcggccggcgagaggtg

SEQ ID NO: 3043406 - DNA, 25 bp, Homo sapien
agaggtgagcgaactgtattgctct

SEQ ID NO: 3043407 - DNA, 25 bp, Homo sapien
ggtttgggggcgcatgtgaaggctc

SEQ ID NO: 3043408 - DNA, 25 bp, Homo sapien
ggcgcatgtgaaggctcattacaca

SEQ ID NO: 3043409 - DNA, 25 bp, Homo sapien
tgggggcgcatgtgaaggctcatta

SEQ ID NO: 3043410 - DNA, 25 bp, Homo sapien
ggggcgcatgtgaaggctcattaca

SEQ ID NO: 3043411 - DNA, 25 bp, Homo sapien
ttttatggctgtgtagtagcccatg

SEQ ID NO: 3043412 - DNA, 25 bp, Homo sapien
ttatggctgtgtagtagcccatggt

SEQ ID NO: 3043413 - DNA, 25 bp, Homo sapien
tatggctgtgtagtagcccatggtg

SEQ ID NO: 3043414 - DNA, 25 bp, Homo sapien
ggctgtgtagtagcccatggtgtat

SEQ ID NO: 3043415 - DNA, 25 bp, Homo sapien
gagatgaatttacccctgcaccaga

SEQ ID NO: 3043416 - DNA, 25 bp, Homo sapien
gacatggcgtcaccctaaacacaaa

SEQ ID NO: 3043417 - DNA, 25 bp, Homo sapien
tttatcatctggaggcaccaaccct

SEQ ID NO: 3043418 - DNA, 25 bp, Homo sapien
gacatcgatccagcttaccgtcaga

SEQ ID NO: 3043419 - DNA, 25 bp, Homo sapien
gccctggtgtgtgttaatcctttcc

SEQ ID NO: 3043420 - DNA, 25 bp, Homo sapien
acctattgacccatcctctgagttc

SEQ ID NO: 3043421 - DNA, 25 bp, Homo sapien
ggtgtgtgttaatcctttccctgtg

SEQ ID NO: 3043422 - DNA, 25 bp, Homo sapien
cctggtgtgtgttaatcctttccct

SEQ ID NO: 3043423 - DNA, 25 bp, Homo sapien
gattatcttagctatacaaggtctt

SEQ ID NO: 3043424 - DNA, 25 bp, Homo sapien
ttaggattatcttagctatacaagg

SEQ ID NO: 3043425 - DNA, 25 bp, Homo sapien
ggattatcttagctatacaaggtct

SEQ ID NO: 3043426 - DNA, 25 bp, Homo sapien
tgtttaggattatcttagctataca

SEQ ID NO: 3043427 - DNA, 25 bp, Homo sapien
tgatccatccaactcggcaagttct

SEQ ID NO: 3043428 - DNA, 25 bp, Homo sapien
catccaactcggcaagttctccatt

SEQ ID NO: 3043429 - DNA, 25 bp, Homo sapien
aagatattagagaactatgttttcc

SEQ ID NO: 3043430 - DNA, 25 bp, Homo sapien
aagaagatattagagaactatgttt

SEQ ID NO: 3043431 - DNA, 25 bp, Homo sapien
agtgagcccttattgacagagccca

SEQ ID NO: 3043432 - DNA, 25 bp, Homo sapien
gtgagcccttattgacagagcccat

SEQ ID NO: 3043433 - DNA, 25 bp, Homo sapien
atgttgtgagaacagatttctgcag

SEQ ID NO: 3043434 - DNA, 25 bp, Homo sapien
aggtttttggagcacaagttatctt

SEQ ID NO: 3043435 - DNA, 25 bp, Homo sapien
gttgtgagaacagatttctgcagaa

SEQ ID NO: 3043436 - DNA, 25 bp, Homo sapien
tgttgtgagaacagatttctgcaga

SEQ ID NO: 3043437 - DNA, 25 bp, Homo sapien
agaacttccaacttaagccatggat

SEQ ID NO: 3043438 - DNA, 25 bp, Homo sapien
ctgagaacttccaacttaagccatg

SEQ ID NO: 3043439 - DNA, 25 bp, Homo sapien
agactgagaacttccaacttaagcc

SEQ ID NO: 3043440 - DNA, 25 bp, Homo sapien
cttccaacttaagccatggatacaa

SEQ ID NO: 3043441 - DNA, 25 bp, Homo sapien
tggaaggtgatatctcagtggctga

SEQ ID NO: 3043442 - DNA, 25 bp, Homo sapien
ggaaggtgatatctcagtggctgaa

SEQ ID NO: 3043443 - DNA, 25 bp, Homo sapien
ctggaaggtgatatctcagtggctg

SEQ ID NO: 3043444 - DNA, 25 bp, Homo sapien
tacttagaactgatcctgcattccc

SEQ ID NO: 3043445 - DNA, 25 bp, Homo sapien
gaaacactctatacttggaaggaaa

SEQ ID NO: 3043446 - DNA, 25 bp, Homo sapien
cacgctcttaatttggcatgggaga

SEQ ID NO: 3043447 - DNA, 25 bp, Homo sapien
catattgtggttagattcctaggtc

SEQ ID NO: 3043448 - DNA, 25 bp, Homo sapien
ctcggtcaactgcttaactctgtta

SEQ ID NO: 3043449 - DNA, 25 bp, Homo sapien
tggttctgaatccaccatgaactgg

SEQ ID NO: 3043450 - DNA, 25 bp, Homo sapien
ctggttctgaatccaccatgaactg

SEQ ID NO: 3043451 - DNA, 25 bp, Homo sapien
tccattccttctcggtcaactgctt

SEQ ID NO: 3043452 - DNA, 25 bp, Homo sapien
ggaatcaggctttttagcaaacact

SEQ ID NO: 3043453 - DNA, 25 bp, Homo sapien
cactgcacagcagaagcgttccact

SEQ ID NO: 3043454 - DNA, 25 bp, Homo sapien
ccaggaatcaggctttttagcaaac

SEQ ID NO: 3043455 - DNA, 25 bp, Homo sapien
caggctttttagcaaacactgcaca

SEQ ID NO: 3043456 - DNA, 25 bp, Homo sapien
tgtacaaactggagctcaacgtggc

SEQ ID NO: 3043457 - DNA, 25 bp, Homo sapien
ggtcttaaatatgctctccctccag

SEQ ID NO: 3043458 - DNA, 25 bp, Homo sapien
gatgcacaggcagtttcccaatgga

SEQ ID NO: 3043459 - DNA, 25 bp, Homo sapien
tcaacgtggcaatctgcggaccaga

SEQ ID NO: 3043460 - DNA, 25 bp, Homo sapien
aagccatttccacgcagaaattctt

SEQ ID NO: 3043461 - DNA, 25 bp, Homo sapien
ctaagccatttccacgcagaaattc

SEQ ID NO: 3043462 - DNA, 25 bp, Homo sapien
taagccatttccacgcagaaattct

SEQ ID NO: 3043463 - DNA, 25 bp, Homo sapien
taaaatagagccgttagaataggag

SEQ ID NO: 3043464 - DNA, 25 bp, Homo sapien
ctgtaaaatagagccgttagaatag

SEQ ID NO: 3043465 - DNA, 25 bp, Homo sapien
agagccgttagaataggagttaagc

SEQ ID NO: 3043466 - DNA, 25 bp, Homo sapien
aatagagccgttagaataggagtta

SEQ ID NO: 3043467 - DNA, 25 bp, Homo sapien
aactgccagatagggtctaagaggg

SEQ ID NO: 3043468 - DNA, 25 bp, Homo sapien
aaaacagaccaactccttgtgccct

SEQ ID NO: 3043469 - DNA, 25 bp, Homo sapien
cagtggacaaggttttagtcatgca

SEQ ID NO: 3043470 - DNA, 25 bp, Homo sapien
caaattttgggcattgatcgcaagc

SEQ ID NO: 3043471 - DNA, 25 bp, Homo sapien
gcggcagtggccctctggcaaagtg

SEQ ID NO: 3043472 - DNA, 25 bp, Homo sapien
gcagtggccctctggcaaagtgaag

SEQ ID NO: 3043473 - DNA, 25 bp, Homo sapien
agcgctgggacgaggcggcagtggc

SEQ ID NO: 3043474 - DNA, 25 bp, Homo sapien
agccaccagcgctgggacgaggcgg

SEQ ID NO: 3043475 - DNA, 25 bp, Homo sapien
tgtttactttgaagcgatttttgca

SEQ ID NO: 3043476 - DNA, 25 bp, Homo sapien
gagagaacctctactgatcagagca

SEQ ID NO: 3043477 - DNA, 25 bp, Homo sapien
cagcagagggagagaacctctactg

SEQ ID NO: 3043478 - DNA, 25 bp, Homo sapien
cagagggagagaacctctactgatc

SEQ ID NO: 3043479 - DNA, 25 bp, Homo sapien
ccaggttgggtgacttagccccaag

SEQ ID NO: 3043480 - DNA, 25 bp, Homo sapien
gagaaccaggttgggtgacttagcc

SEQ ID NO: 3043481 - DNA, 25 bp, Homo sapien
caggttgggtgacttagccccaagg

SEQ ID NO: 3043482 - DNA, 25 bp, Homo sapien
aggagaaccaggttgggtgacttag

SEQ ID NO: 3043483 - DNA, 25 bp, Homo sapien
tataccacactcaaggagaccactt

SEQ ID NO: 3043484 - DNA, 25 bp, Homo sapien
tggagagacctctcgggagaaagac

SEQ ID NO: 3043485 - DNA, 25 bp, Homo sapien
ggagaaagacatccccgttgtgtga

SEQ ID NO: 3043486 - DNA, 25 bp, Homo sapien
taccacactcaaggagaccacttct

SEQ ID NO: 3043487 - DNA, 25 bp, Homo sapien
tgggaatatggcgtagtatctccgg

SEQ ID NO: 3043488 - DNA, 25 bp, Homo sapien
cccactgggaatatggcgtagtatc

SEQ ID NO: 3043489 - DNA, 25 bp, Homo sapien
atctcccactgggaatatggcgtag

SEQ ID NO: 3043490 - DNA, 25 bp, Homo sapien
gaatatggcgtagtatctccggtcc

SEQ ID NO: 3043491 - DNA, 25 bp, Homo sapien
agttggcggccaatctcacggtaca

SEQ ID NO: 3043492 - DNA, 25 bp, Homo sapien
ccagaagggcgtcattgagcagcta

SEQ ID NO: 3043493 - DNA, 25 bp, Homo sapien
aaatgagtgcgtaccgaggagatcc

SEQ ID NO: 3043494 - DNA, 25 bp, Homo sapien
agtgtcctgctacctcaaacgctgg

SEQ ID NO: 3043495 - DNA, 25 bp, Homo sapien
tgtggatccatgtaccccagggtgt

SEQ ID NO: 3043496 - DNA, 25 bp, Homo sapien
gaaattcaggtagctctgcctcatg

SEQ ID NO: 3043497 - DNA, 25 bp, Homo sapien
tagtcattgaaaagggcaggcgcag

SEQ ID NO: 3043498 - DNA, 25 bp, Homo sapien
tgttcctgcgaaagctgtgggccaa

SEQ ID NO: 3043499 - DNA, 25 bp, Homo sapien
gaaatggtgttcatacccagcaatt

SEQ ID NO: 3043500 - DNA, 25 bp, Homo sapien
atttgaaatggtgttcatacccagc

SEQ ID NO: 3043501 - DNA, 25 bp, Homo sapien
ggatacaatatttcagcagtatttg

SEQ ID NO: 3043502 - DNA, 25 bp, Homo sapien
ggtgttcatacccagcaattccgct

SEQ ID NO: 3043503 - DNA, 25 bp, Homo sapien
ttttcaggcattagaccaaagccaa

SEQ ID NO: 3043504 - DNA, 25 bp, Homo sapien
tgaaatgaagacgatatcactgcct

SEQ ID NO: 3043505 - DNA, 25 bp, Homo sapien
gacatagtgtttctaccctctccga

SEQ ID NO: 3043506 - DNA, 25 bp, Homo sapien
ggcccgttctttcccagctgagctg

SEQ ID NO: 3043507 - DNA, 25 bp, Homo sapien
catccgagcacagggagccgctcag

SEQ ID NO: 3043508 - DNA, 25 bp, Homo sapien
tctggacgcctattctttaagttgg

SEQ ID NO: 3043509 - DNA, 25 bp, Homo sapien
ccccagaacgctgagtgtggactgc

SEQ ID NO: 3043510 - DNA, 25 bp, Homo sapien
ccgaatactccagcggcgatggctc

SEQ ID NO: 3043511 - DNA, 25 bp, Homo sapien
ctgacccagccgcatgagtaactgg

SEQ ID NO: 3043512 - DNA, 25 bp, Homo sapien
gacccagccgcatgagtaactggga

SEQ ID NO: 3043513 - DNA, 25 bp, Homo sapien
tcttaaagagttagcatatttaaag

SEQ ID NO: 3043514 - DNA, 25 bp, Homo sapien
ccgccagtgtttcttaaagagttag

SEQ ID NO: 3043515 - DNA, 25 bp, Homo sapien
ttctgtgtgcctcacagtgaaacac

SEQ ID NO: 3043516 - DNA, 25 bp, Homo sapien
tcctaagccaggtaagccatggaca

SEQ ID NO: 3043517 - DNA, 25 bp, Homo sapien
aaacctcatagctgcacaggtcact

SEQ ID NO: 3043518 - DNA, 25 bp, Homo sapien
ttaaaacctcatagctgcacaggtc

SEQ ID NO: 3043519 - DNA, 25 bp, Homo sapien
ggtctttcctaagccaggtaagcca

SEQ ID NO: 3043520 - DNA, 25 bp, Homo sapien
agccgagcaagacaatcacgaggga

SEQ ID NO: 3043521 - DNA, 25 bp, Homo sapien
aagccgagcaagacaatcacgaggg

SEQ ID NO: 3043522 - DNA, 25 bp, Homo sapien
tgaagccgagcaagacaatcacgag

SEQ ID NO: 3043523 - DNA, 25 bp, Homo sapien
ctgaagccgagcaagacaatcacga

SEQ ID NO: 3043524 - DNA, 25 bp, Homo sapien
ctgcagcagggcttccaatgtgctg

SEQ ID NO: 3043525 - DNA, 25 bp, Homo sapien
tgcagcagggcttccaatgtgctgg

SEQ ID NO: 3043526 - DNA, 25 bp, Homo sapien
gcagggcttccaatgtgctgggtgc

SEQ ID NO: 3043527 - DNA, 25 bp, Homo sapien
cagcagggcttccaatgtgctgggt

SEQ ID NO: 3043528 - DNA, 25 bp, Homo sapien
gacgcagggtaatccatcggagaca

SEQ ID NO: 3043529 - DNA, 25 bp, Homo sapien
gtaatccatcggagacactgcagcc

SEQ ID NO: 3043530 - DNA, 25 bp, Homo sapien
agggtaatccatcggagacactgca

SEQ ID NO: 3043531 - DNA, 25 bp, Homo sapien
ctataggacgcagggtaatccatcg

SEQ ID NO: 3043532 - DNA, 25 bp, Homo sapien
tgcttcaaagtaagggcagtgcaag

SEQ ID NO: 3043533 - DNA, 25 bp, Homo sapien
aagtaagggcagtgcaagtgcagta

SEQ ID NO: 3043534 - DNA, 25 bp, Homo sapien
taagggcagtgcaagtgcagtagtc

SEQ ID NO: 3043535 - DNA, 25 bp, Homo sapien
tcaaagtaagggcagtgcaagtgca

SEQ ID NO: 3043536 - DNA, 25 bp, Homo sapien
caggagaaaggttgggtttgcttat

SEQ ID NO: 3043537 - DNA, 25 bp, Homo sapien
gattccagagtacatcgcaaatatc

SEQ ID NO: 3043538 - DNA, 25 bp, Homo sapien
tccagagtacatcgcaaatatcctg

SEQ ID NO: 3043539 - DNA, 25 bp, Homo sapien
cctctaatccttcattctgtgagga

SEQ ID NO: 3043540 - DNA, 25 bp, Homo sapien
ccaggagctctgatctacttaggag

SEQ ID NO: 3043541 - DNA, 25 bp, Homo sapien
cttgggagttaaaagattccacagg

SEQ ID NO: 3043542 - DNA, 25 bp, Homo sapien
tggctttcaaatctgagcgctctgc

SEQ ID NO: 3043543 - DNA, 25 bp, Homo sapien
cagtggtaatcctcaaaggctagaa

SEQ ID NO: 3043544 - DNA, 25 bp, Homo sapien
gaagtgccgaaacctaaatgcttgt

SEQ ID NO: 3043545 - DNA, 25 bp, Homo sapien
taggagcccctatagaaaattcaag

SEQ ID NO: 3043546 - DNA, 25 bp, Homo sapien
ggagggcatctttcacgtgggactt

SEQ ID NO: 3043547 - DNA, 25 bp, Homo sapien
tagggtgagcaaagagtacaactgc

SEQ ID NO: 3043548 - DNA, 25 bp, Homo sapien
tcctgggttctgtgactggcaactg

SEQ ID NO: 3043549 - DNA, 25 bp, Homo sapien
gaggtttgctttccagacctcctgg

SEQ ID NO: 3043550 - DNA, 25 bp, Homo sapien
gactggcaactgcacaagcagggca

SEQ ID NO: 3043551 - DNA, 25 bp, Homo sapien
ctttggccaaacagaggtttgcttt

SEQ ID NO: 3043552 - DNA, 25 bp, Homo sapien
caccagttcctaatcttacatttga

SEQ ID NO: 3043553 - DNA, 25 bp, Homo sapien
tagatccttaatttgacctgttgcc

SEQ ID NO: 3043554 - DNA, 25 bp, Homo sapien
gtccattattcttagtccccaccag

SEQ ID NO: 3043555 - DNA, 25 bp, Homo sapien
tccatttccgaagcttccatgataa

SEQ ID NO: 3043556 - DNA, 25 bp, Homo sapien
ttgcaaaaccgattgctgaacttca

SEQ ID NO: 3043557 - DNA, 25 bp, Homo sapien
aagtcaaatggtactaaggcttatg

SEQ ID NO: 3043558 - DNA, 25 bp, Homo sapien
ggaagaaacaccaggtaattagagc

SEQ ID NO: 3043559 - DNA, 25 bp, Homo sapien
aaaatatagcaattccttgtcccac

SEQ ID NO: 3043560 - DNA, 25 bp, Homo sapien
ccagcggcagagtataaggcatttc

SEQ ID NO: 3043561 - DNA, 25 bp, Homo sapien
gcaaaggccccttgtaggaagacta

SEQ ID NO: 3043562 - DNA, 25 bp, Homo sapien
ggaagactactttccaggccagcgg

SEQ ID NO: 3043563 - DNA, 25 bp, Homo sapien
tgaagagtacagaattggctcagcc

SEQ ID NO: 3043564 - DNA, 25 bp, Homo sapien
tgagtagtgcaagcctatagcgtcc

SEQ ID NO: 3043565 - DNA, 25 bp, Homo sapien
gccgggctaaacacaacctctgatg

SEQ ID NO: 3043566 - DNA, 25 bp, Homo sapien
gggaaggccattgacatctgcgtga

SEQ ID NO: 3043567 - DNA, 25 bp, Homo sapien
atgtgacttccccaaacaccggtgg

SEQ ID NO: 3043568 - DNA, 25 bp, Homo sapien
gatcaacttaactccctagcagcag

SEQ ID NO: 3043569 - DNA, 25 bp, Homo sapien
gaatagtctgcctaccctcaggaat

SEQ ID NO: 3043570 - DNA, 25 bp, Homo sapien
cagcacatcaggtgggtaactcttc

SEQ ID NO: 3043571 - DNA, 25 bp, Homo sapien
acaatcatgtcgtacctaagccccg

SEQ ID NO: 3043572 - DNA, 25 bp, Homo sapien
aatcctttagggagtcgctttcaca

SEQ ID NO: 3043573 - DNA, 25 bp, Homo sapien
tctggtcactcagaagagatctgga

SEQ ID NO: 3043574 - DNA, 25 bp, Homo sapien
tcagaaagcaactggctctgctcca

SEQ ID NO: 3043575 - DNA, 25 bp, Homo sapien
gctttcacaaacatagaggatctct

SEQ ID NO: 3043576 - DNA, 25 bp, Homo sapien
tatcacaatcccctgagaacaagga

SEQ ID NO: 3043577 - DNA, 25 bp, Homo sapien
tgtgtaaccaccaacagtttgcagt

SEQ ID NO: 3043578 - DNA, 25 bp, Homo sapien
tcgggcatattcaagtcctccaggc

SEQ ID NO: 3043579 - DNA, 25 bp, Homo sapien
catcagcaagcctgtaggacctggg

SEQ ID NO: 3043580 - DNA, 25 bp, Homo sapien
ttcaaatttcaggatcattatgtcg

SEQ ID NO: 3043581 - DNA, 25 bp, Homo sapien
taagtccttcatttgaccttcccta

SEQ ID NO: 3043582 - DNA, 25 bp, Homo sapien
tatgtcgctaagtccttcatttgac

SEQ ID NO: 3043583 - DNA, 25 bp, Homo sapien
tcaggatcattatgtcgctaagtcc

SEQ ID NO: 3043584 - DNA, 25 bp, Homo sapien
tggaaacaaatgtcgttgcagagcc

SEQ ID NO: 3043585 - DNA, 25 bp, Homo sapien
gggatatccgggactttttcgtgca

SEQ ID NO: 3043586 - DNA, 25 bp, Homo sapien
tgtcgttgcagagcctccttaaatt

SEQ ID NO: 3043587 - DNA, 25 bp, Homo sapien
aatttgtggacttttatgggatatc

SEQ ID NO: 3043588 - DNA, 25 bp, Homo sapien
caggcaagagttgtagtctgtgacc

SEQ ID NO: 3043589 - DNA, 25 bp, Homo sapien
tcaggcaagagttgtagtctgtgac

SEQ ID NO: 3043590 - DNA, 25 bp, Homo sapien
aatcaggcaagagttgtagtctgtg

SEQ ID NO: 3043591 - DNA, 25 bp, Homo sapien
gcaagagttgtagtctgtgaccaaa

SEQ ID NO: 3043592 - DNA, 25 bp, Homo sapien
cagaattgtctttcatgatccagga

SEQ ID NO: 3043593 - DNA, 25 bp, Homo sapien
tccagggcactgctagcactcaagt

SEQ ID NO: 3043594 - DNA, 25 bp, Homo sapien
gcaaacaccacgcaacagaagggct

SEQ ID NO: 3043595 - DNA, 25 bp, Homo sapien
gatacaaattggagcgcaagctgca

SEQ ID NO: 3043596 - DNA, 25 bp, Homo sapien
cagtatcagtcttgagactctccat

SEQ ID NO: 3043597 - DNA, 25 bp, Homo sapien
tcagtatcagtcttgagactctcca

SEQ ID NO: 3043598 - DNA, 25 bp, Homo sapien
ttcagtatcagtcttgagactctcc

SEQ ID NO: 3043599 - DNA, 25 bp, Homo sapien
ttattgtctcaactaacatcataaa

SEQ ID NO: 3043600 - DNA, 25 bp, Homo sapien
cattatacttttcttatggcatata

SEQ ID NO: 3043601 - DNA, 25 bp, Homo sapien
attgtctcaactaacatcataaatg

SEQ ID NO: 3043602 - DNA, 25 bp, Homo sapien
gtctcaactaacatcataaatgtct

SEQ ID NO: 3043603 - DNA, 25 bp, Homo sapien
gctatcagagaatgtgctttgaact

SEQ ID NO: 3043604 - DNA, 25 bp, Homo sapien
agagaatgtgctttgaactggtaaa

SEQ ID NO: 3043605 - DNA, 25 bp, Homo sapien
tcagagaatgtgctttgaactggta

SEQ ID NO: 3043606 - DNA, 25 bp, Homo sapien
tatcagagaatgtgctttgaactgg

SEQ ID NO: 3043607 - DNA, 25 bp, Homo sapien
cagtctaccaatccaatggcataaa

SEQ ID NO: 3043608 - DNA, 25 bp, Homo sapien
cctacataggcaacttaagtgtttc

SEQ ID NO: 3043609 - DNA, 25 bp, Homo sapien
tccaactactgaattggcaaaatgt

SEQ ID NO: 3043610 - DNA, 25 bp, Homo sapien
gcatgaggctgaattcttgttgtcg

SEQ ID NO: 3043611 - DNA, 25 bp, Homo sapien
gaagtgtcaactcaataccatgctg

SEQ ID NO: 3043612 - DNA, 25 bp, Homo sapien
tacagacaggcaggtaaatgctttc

SEQ ID NO: 3043613 - DNA, 25 bp, Homo sapien
cagcgcaatacttttgttgtgagga

SEQ ID NO: 3043614 - DNA, 25 bp, Homo sapien
gatccttctactttaagcagcttgg

SEQ ID NO: 3043615 - DNA, 25 bp, Homo sapien
tagacagggataaggcaacaccccc

SEQ ID NO: 3043616 - DNA, 25 bp, Homo sapien
cacacagcggtaacaaaacacatag

SEQ ID NO: 3043617 - DNA, 25 bp, Homo sapien
gcaagaagaatacacccacagaaag

SEQ ID NO: 3043618 - DNA, 25 bp, Homo sapien
cattcacccgggttttacgacacag

SEQ ID NO: 3043619 - DNA, 25 bp, Homo sapien
gctggccttagctggtttgtgctcc

SEQ ID NO: 3043620 - DNA, 25 bp, Homo sapien
tggttctagacagataatgttgctg

SEQ ID NO: 3043621 - DNA, 25 bp, Homo sapien
gagcagaagatctagcagagtaaag

SEQ ID NO: 3043622 - DNA, 25 bp, Homo sapien
tgtaaaatcgtttccagcgggaaga

SEQ ID NO: 3043623 - DNA, 25 bp, Homo sapien
ctggtcatcggccacagaagcagct

SEQ ID NO: 3043624 - DNA, 25 bp, Homo sapien
cctgtgctaccacctcaaagatgga

SEQ ID NO: 3043625 - DNA, 25 bp, Homo sapien
agctgtgaagtgagccccgtgctca

SEQ ID NO: 3043626 - DNA, 25 bp, Homo sapien
ccacatgctgaagagcgggtctcac

SEQ ID NO: 3043627 - DNA, 25 bp, Homo sapien
tttcccacaaactctctcgtgagca

SEQ ID NO: 3043628 - DNA, 25 bp, Homo sapien
ccacaaactctctcgtgagcatgaa

SEQ ID NO: 3043629 - DNA, 25 bp, Homo sapien
cccacaaactctctcgtgagcatga

SEQ ID NO: 3043630 - DNA, 25 bp, Homo sapien
tcccacaaactctctcgtgagcatg

SEQ ID NO: 3043631 - DNA, 25 bp, Homo sapien
ctttttcgggaggaagagtatcaga

SEQ ID NO: 3043632 - DNA, 25 bp, Homo sapien
ttttcgggaggaagagtatcagatg

SEQ ID NO: 3043633 - DNA, 25 bp, Homo sapien
gaagagtatcagatgggtgctcagt

SEQ ID NO: 3043634 - DNA, 25 bp, Homo sapien
aggaagagtatcagatgggtgctca

SEQ ID NO: 3043635 - DNA, 25 bp, Homo sapien
aaaggtaaactttctgcatgatatc

SEQ ID NO: 3043636 - DNA, 25 bp, Homo sapien
tctgcatgatatctgaaactcgaaa

SEQ ID NO: 3043637 - DNA, 25 bp, Homo sapien
ggtaaactttctgcatgatatctga

SEQ ID NO: 3043638 - DNA, 25 bp, Homo sapien
tgatatctgaaactcgaaactcaat

SEQ ID NO: 3043639 - DNA, 25 bp, Homo sapien
gaaggaacgcaatcctctggagctg

SEQ ID NO: 3043640 - DNA, 25 bp, Homo sapien
gactctgaggattcagtcgtgccac

SEQ ID NO: 3043641 - DNA, 25 bp, Homo sapien
tgttggctttgagtatccccgcccg

SEQ ID NO: 3043642 - DNA, 25 bp, Homo sapien
ttgtcaaatgctgcacgtcagggca

SEQ ID NO: 3043643 - DNA, 25 bp, Homo sapien
ttacttttcgtagctgggtctgcat

SEQ ID NO: 3043644 - DNA, 25 bp, Homo sapien
gaaacagaagagggcccttgtgggc

SEQ ID NO: 3043645 - DNA, 25 bp, Homo sapien
gcccttgtgggctggttttggctag

SEQ ID NO: 3043646 - DNA, 25 bp, Homo sapien
ccttgtgggctggttttggctagtt

SEQ ID NO: 3043647 - DNA, 25 bp, Homo sapien
tctctctgcgaggtctttttgacaa

SEQ ID NO: 3043648 - DNA, 25 bp, Homo sapien
tcgggcccgttgctgagccctgtgt

SEQ ID NO: 3043649 - DNA, 25 bp, Homo sapien
gcgcagacgtctggcgccgggagcc

SEQ ID NO: 3043650 - DNA, 25 bp, Homo sapien
gacaagctgtttggggcaccgcgca

SEQ ID NO: 3043651 - DNA, 25 bp, Homo sapien
ccgatgacgtcacgcggcgacgttc

SEQ ID NO: 3043652 - DNA, 25 bp, Homo sapien
cgatgacgtcacgcggcgacgttct

SEQ ID NO: 3043653 - DNA, 25 bp, Homo sapien
cccgatgacgtcacgcggcgacgtt

SEQ ID NO: 3043654 - DNA, 25 bp, Homo sapien
ttgctcattgatgggcgaacgtcgt

SEQ ID NO: 3043655 - DNA, 25 bp, Homo sapien
gctcggcgtcgttcactgagaggct

SEQ ID NO: 3043656 - DNA, 25 bp, Homo sapien
gaacgtcgtctctcgggtaacttga

SEQ ID NO: 3043657 - DNA, 25 bp, Homo sapien
gctgagacgtgtccagcaagccaaa

SEQ ID NO: 3043658 - DNA, 25 bp, Homo sapien
tctggtttgatctggtagaaaggta

SEQ ID NO: 3043659 - DNA, 25 bp, Homo sapien
aaaggtagtgtgagttcaaattcca

SEQ ID NO: 3043660 - DNA, 25 bp, Homo sapien
gtctggtttgatctggtagaaaggt

SEQ ID NO: 3043661 - DNA, 25 bp, Homo sapien
ggtagaaaggtagtgtgagttcaaa

SEQ ID NO: 3043662 - DNA, 25 bp, Homo sapien
ctgccaggcccggcggccatgtcgc

SEQ ID NO: 3043663 - DNA, 25 bp, Homo sapien
gggcgccgtcatcccgcgcctgcca

SEQ ID NO: 3043664 - DNA, 25 bp, Homo sapien
ctcgggcgccgtcatcccgcgcctg

SEQ ID NO: 3043665 - DNA, 25 bp, Homo sapien
agtcctcgggcgccgtcatcccgcg

SEQ ID NO: 3043666 - DNA, 25 bp, Homo sapien
ggtggcgagtacagcgcccgcagct

SEQ ID NO: 3043667 - DNA, 25 bp, Homo sapien
ggcgcacacccagagcgggctggtg

SEQ ID NO: 3043668 - DNA, 25 bp, Homo sapien
agctgcccggtgtagaagcccacgg

SEQ ID NO: 3043669 - DNA, 25 bp, Homo sapien
tcgccctcgagcaccagcttcacgt

SEQ ID NO: 3043670 - DNA, 25 bp, Homo sapien
tctcgtgcgcctttcggagaggagc

SEQ ID NO: 3043671 - DNA, 25 bp, Homo sapien
aaagctgtctcgtgcgcctttcgga

SEQ ID NO: 3043672 - DNA, 25 bp, Homo sapien
ggagaagaaagctgtctcgtgcgcc

SEQ ID NO: 3043673 - DNA, 25 bp, Homo sapien
cctttcggagaggagcctggcgcct

SEQ ID NO: 3043674 - DNA, 25 bp, Homo sapien
cacgaatggattatctaaggcaccc

SEQ ID NO: 3043675 - DNA, 25 bp, Homo sapien
ctattgtgtctgctgaaactgggca

SEQ ID NO: 3043676 - DNA, 25 bp, Homo sapien
cccaatgagagaaaccatgttagct

SEQ ID NO: 3043677 - DNA, 25 bp, Homo sapien
tgatctggaaattgagcctcgttac

SEQ ID NO: 3043678 - DNA, 25 bp, Homo sapien
gatcttggtctactctgggaatggg

SEQ ID NO: 3043679 - DNA, 25 bp, Homo sapien
ggaagatttggaaccatgctgctgc

SEQ ID NO: 3043680 - DNA, 25 bp, Homo sapien
caggcatggtgcagttgaggctcac

SEQ ID NO: 3043681 - DNA, 25 bp, Homo sapien
tataaacgtcgtagtcccatcttcc

SEQ ID NO: 3043682 - DNA, 25 bp, Homo sapien
tcagaactgtagcaaccctggaggt

SEQ ID NO: 3043683 - DNA, 25 bp, Homo sapien
taatataaaattggcccaggactgg

SEQ ID NO: 3043684 - DNA, 25 bp, Homo sapien
aacattggaccacaggtagctaggc

SEQ ID NO: 3043685 - DNA, 25 bp, Homo sapien
gacctcgagtaatctgcccacatgg

SEQ ID NO: 3043686 - DNA, 25 bp, Homo sapien
gggaccacgatgctccttgaataga

SEQ ID NO: 3043687 - DNA, 25 bp, Homo sapien
aaaactggtagacgcttccaagcgg

SEQ ID NO: 3043688 - DNA, 25 bp, Homo sapien
gttgtgcaagccaaaccagtcagtg

SEQ ID NO: 3043689 - DNA, 25 bp, Homo sapien
tagcgattcccacgtcagacagttg

SEQ ID NO: 3043690 - DNA, 25 bp, Homo sapien
tgtgattgctacttccagtttgaca

SEQ ID NO: 3043691 - DNA, 25 bp, Homo sapien
gtttgacatattcttcatgtcccat

SEQ ID NO: 3043692 - DNA, 25 bp, Homo sapien
tccagtttgacatattcttcatgtc

SEQ ID NO: 3043693 - DNA, 25 bp, Homo sapien
cagtttgacatattcttcatgtccc

SEQ ID NO: 3043694 - DNA, 25 bp, Homo sapien
cagtttagcaccacttacctagagg

SEQ ID NO: 3043695 - DNA, 25 bp, Homo sapien
tcagcaagagagtcagtggctttcc

SEQ ID NO: 3043696 - DNA, 25 bp, Homo sapien
taattatttcatgtagggtagggcc

SEQ ID NO: 3043697 - DNA, 25 bp, Homo sapien
gggcctggcatctgttttgaaaagc

SEQ ID NO: 3043698 - DNA, 25 bp, Homo sapien
taccagatgagttagaaaatactct

SEQ ID NO: 3043699 - DNA, 25 bp, Homo sapien
accagatgagttagaaaatactctt

SEQ ID NO: 3043700 - DNA, 25 bp, Homo sapien
tcagggtccatgactaagactggtc

SEQ ID NO: 3043701 - DNA, 25 bp, Homo sapien
tattgaggccagcagaataggtgca

SEQ ID NO: 3043702 - DNA, 25 bp, Homo sapien
ttacactgtttgatctgcgggcact

SEQ ID NO: 3043703 - DNA, 25 bp, Homo sapien
cagtgtttcccatatgcccctggag

SEQ ID NO: 3043704 - DNA, 25 bp, Homo sapien
gctggcatcatacaaagagcaggag

SEQ ID NO: 3043705 - DNA, 25 bp, Homo sapien
ggaaatgttgccctaagaatgcttc

SEQ ID NO: 3043706 - DNA, 25 bp, Homo sapien
gtctttgtaatgtcagctggcatca

SEQ ID NO: 3043707 - DNA, 25 bp, Homo sapien
ggagaagcaaacacccagaactctt

SEQ ID NO: 3043708 - DNA, 25 bp, Homo sapien
tcagttttgtaccgatttagaaata

SEQ ID NO: 3043709 - DNA, 25 bp, Homo sapien
ttgtaccgatttagaaataacaata

SEQ ID NO: 3043710 - DNA, 25 bp, Homo sapien
tcaccagagggagcggatgaaggat

SEQ ID NO: 3043711 - DNA, 25 bp, Homo sapien
caccagagggagcggatgaaggatg

SEQ ID NO: 3043712 - DNA, 25 bp, Homo sapien
aggatggcagcatctcacatgcccc

SEQ ID NO: 3043713 - DNA, 25 bp, Homo sapien
agagtaatgagatacaggatggtcc

SEQ ID NO: 3043714 - DNA, 25 bp, Homo sapien
ggagttatggaaacaggtgggcatg

SEQ ID NO: 3043715 - DNA, 25 bp, Homo sapien
tgcatttaataacttatgggagtta

SEQ ID NO: 3043716 - DNA, 25 bp, Homo sapien
ccaggagtgtggtgagccgttctag

SEQ ID NO: 3043717 - DNA, 25 bp, Homo sapien
ctgtgaatccagtgtatacatggcc

SEQ ID NO: 3043718 - DNA, 25 bp, Homo sapien
tatttgtcttctgacccactcctgc

SEQ ID NO: 3043719 - DNA, 25 bp, Homo sapien
gcccctttgctcagatgagcagatg

SEQ ID NO: 3043720 - DNA, 25 bp, Homo sapien
gagtgagagcagtgggttgcccctt

SEQ ID NO: 3043721 - DNA, 25 bp, Homo sapien
tgctctccaatggagcggctggctc

SEQ ID NO: 3043722 - DNA, 25 bp, Homo sapien
agtgaggttgcaggccctctggagg

SEQ ID NO: 3043723 - DNA, 25 bp, Homo sapien
aatggagcggctggctctttctcct

SEQ ID NO: 3043724 - DNA, 25 bp, Homo sapien
gtggaagtggagcttgattaagcca

SEQ ID NO: 3043725 - DNA, 25 bp, Homo sapien
caacagcctgtccttggggggctgc

SEQ ID NO: 3043726 - DNA, 25 bp, Homo sapien
cctggggattcgtgaaggctgcttc

SEQ ID NO: 3043727 - DNA, 25 bp, Homo sapien
cctgtggtctctccggggccgaatc

SEQ ID NO: 3043728 - DNA, 25 bp, Homo sapien
ccaggaagacataggccagtggcct

SEQ ID NO: 3043729 - DNA, 25 bp, Homo sapien
gcagacacagtagaagccgagcagt

SEQ ID NO: 3043730 - DNA, 25 bp, Homo sapien
cttcagcttgtagatggacgggacc

SEQ ID NO: 3043731 - DNA, 25 bp, Homo sapien
ccttgctcagacatgccttggcttt

SEQ ID NO: 3043732 - DNA, 25 bp, Homo sapien
cctcttgggcttccggagagttctc

SEQ ID NO: 3043733 - DNA, 25 bp, Homo sapien
ctggggatgtagaccccactgcgag

SEQ ID NO: 3043734 - DNA, 25 bp, Homo sapien
ggatgtagaccccactgcgagggat

SEQ ID NO: 3043735 - DNA, 25 bp, Homo sapien
gcctggggatgtagaccccactgcg

SEQ ID NO: 3043736 - DNA, 25 bp, Homo sapien
cagcctggggatgtagaccccactg

SEQ ID NO: 3043737 - DNA, 25 bp, Homo sapien
cactcctgacttctagcagcttcat

SEQ ID NO: 3043738 - DNA, 25 bp, Homo sapien
gacaggcactcctgacttctagcag

SEQ ID NO: 3043739 - DNA, 25 bp, Homo sapien
caggcactcctgacttctagcagct

SEQ ID NO: 3043740 - DNA, 25 bp, Homo sapien
ggcactcctgacttctagcagcttc

SEQ ID NO: 3043741 - DNA, 25 bp, Homo sapien
ttgttcccgcccaagggcagaggtg

SEQ ID NO: 3043742 - DNA, 25 bp, Homo sapien
ttgctccttgttcccgcccaagggc

SEQ ID NO: 3043743 - DNA, 25 bp, Homo sapien
caagggcagaggtgtgtaccgcccc

SEQ ID NO: 3043744 - DNA, 25 bp, Homo sapien
gcagaggtgtgtaccgcccctcctg

SEQ ID NO: 3043745 - DNA, 25 bp, Homo sapien
acagagcagtccccatgcgtggacc

SEQ ID NO: 3043746 - DNA, 25 bp, Homo sapien
gcccttagtgggatggggtctctcc

SEQ ID NO: 3043747 - DNA, 25 bp, Homo sapien
aggtccacagtgacggcccttagtg

SEQ ID NO: 3043748 - DNA, 25 bp, Homo sapien
gagcagtccccatgcgtggacccag

SEQ ID NO: 3043749 - DNA, 25 bp, Homo sapien
ttcctggtgttggggggcgagcagg

SEQ ID NO: 3043750 - DNA, 25 bp, Homo sapien
caggggttggagaacggacagactc

SEQ ID NO: 3043751 - DNA, 25 bp, Homo sapien
tggaagaacgcacccttggcctcat

SEQ ID NO: 3043752 - DNA, 25 bp, Homo sapien
cctgaactggaagaacgcacccttg

SEQ ID NO: 3043753 - DNA, 25 bp, Homo sapien
ccttggcctcatcccggagtggcag

SEQ ID NO: 3043754 - DNA, 25 bp, Homo sapien
ttgctgatatccctttggtggtggc

SEQ ID NO: 3043755 - DNA, 25 bp, Homo sapien
ctcaatggctcggagtctttgtggg

SEQ ID NO: 3043756 - DNA, 25 bp, Homo sapien
tctttcctgacgaggtacactgtgg

SEQ ID NO: 3043757 - DNA, 25 bp, Homo sapien
tggtggcctcaatggctcggagtct

SEQ ID NO: 3043758 - DNA, 25 bp, Homo sapien
tgtccccagctgtcggctgcctcca

SEQ ID NO: 3043759 - DNA, 25 bp, Homo sapien
ctgtcggctgcctccaagatgggat

SEQ ID NO: 3043760 - DNA, 25 bp, Homo sapien
agatgggatgagagacctctcctgg

SEQ ID NO: 3043761 - DNA, 25 bp, Homo sapien
ccagctgtcggctgcctccaagatg

SEQ ID NO: 3043762 - DNA, 25 bp, Homo sapien
cagccttcggtctgaagaggtatat

SEQ ID NO: 3043763 - DNA, 25 bp, Homo sapien
aatggtgccatctctctggaggccc

SEQ ID NO: 3043764 - DNA, 25 bp, Homo sapien
gaatggtgccatctctctggaggcc

SEQ ID NO: 3043765 - DNA, 25 bp, Homo sapien
gggcctcagccttcggtctgaagag

SEQ ID NO: 3043766 - DNA, 25 bp, Homo sapien
gtgggctctgtgagcggctgatggt

SEQ ID NO: 3043767 - DNA, 25 bp, Homo sapien
tgggctctgtgagcggctgatggtc

SEQ ID NO: 3043768 - DNA, 25 bp, Homo sapien
tggtgggctctgtgagcggctgatg

SEQ ID NO: 3043769 - DNA, 25 bp, Homo sapien
ggtgggctctgtgagcggctgatgg

SEQ ID NO: 3043770 - DNA, 25 bp, Homo sapien
cagggagagggccctcaggggactc

SEQ ID NO: 3043771 - DNA, 25 bp, Homo sapien
cacagggagagggccctcaggggac

SEQ ID NO: 3043772 - DNA, 25 bp, Homo sapien
cccacagggagagggccctcagggg

SEQ ID NO: 3043773 - DNA, 25 bp, Homo sapien
gggagagggccctcaggggactcac

SEQ ID NO: 3043774 - DNA, 25 bp, Homo sapien
cagcggcaggggtcatgtttgtcca

SEQ ID NO: 3043775 - DNA, 25 bp, Homo sapien
cgtaccatcacatggttccggagga

SEQ ID NO: 3043776 - DNA, 25 bp, Homo sapien
gggtcatgtttgtccaggtaatggc

SEQ ID NO: 3043777 - DNA, 25 bp, Homo sapien
tgtccaggtaatggcccagtgtgtc

SEQ ID NO: 3043778 - DNA, 25 bp, Homo sapien
gctgctggccgctcatgtgggtaca

SEQ ID NO: 3043779 - DNA, 25 bp, Homo sapien
gaggtgtcattgttccaagcctggg

SEQ ID NO: 3043780 - DNA, 25 bp, Homo sapien
tacagaccgtttctggtgaggcaca

SEQ ID NO: 3043781 - DNA, 25 bp, Homo sapien
gaacatgctctagattaggctacag

SEQ ID NO: 3043782 - DNA, 25 bp, Homo sapien
tgagggtgttggagtcacccacacg

SEQ ID NO: 3043783 - DNA, 25 bp, Homo sapien
gttggagtcacccacacggtacttc

SEQ ID NO: 3043784 - DNA, 25 bp, Homo sapien
gggtgttggagtcacccacacggta

SEQ ID NO: 3043785 - DNA, 25 bp, Homo sapien
atgagggtgttggagtcacccacac

SEQ ID NO: 3043786 - DNA, 25 bp, Homo sapien
ctttgaccatggagaactgcactgg

SEQ ID NO: 3043787 - DNA, 25 bp, Homo sapien
tctggtccaggttgcggaagtggca

SEQ ID NO: 3043788 - DNA, 25 bp, Homo sapien
ctggtccaggttgcggaagtggcag

SEQ ID NO: 3043789 - DNA, 25 bp, Homo sapien
ggtccaggttgcggaagtggcaggg

SEQ ID NO: 3043790 - DNA, 25 bp, Homo sapien
catctggtccaggttgcggaagtgg

SEQ ID NO: 3043791 - DNA, 25 bp, Homo sapien
gcgctggcggcgaggggtcgggcgg

SEQ ID NO: 3043792 - DNA, 25 bp, Homo sapien
ctggcgcctggggggcgctggcggc

SEQ ID NO: 3043793 - DNA, 25 bp, Homo sapien
gggcgctggcggcgaggggtcgggc

SEQ ID NO: 3043794 - DNA, 25 bp, Homo sapien
gcctggggggcgctggcggcgaggg

SEQ ID NO: 3043795 - DNA, 25 bp, Homo sapien
aagtcctccgtctcgaacatcagca

SEQ ID NO: 3043796 - DNA, 25 bp, Homo sapien
cctccagctgcacgagtgtgggcgc

SEQ ID NO: 3043797 - DNA, 25 bp, Homo sapien
cgcaacaccaaagcgccacgcccgg

SEQ ID NO: 3043798 - DNA, 25 bp, Homo sapien
aaacacagcaccacgttcttcacgt

SEQ ID NO: 3043799 - DNA, 25 bp, Homo sapien
tgtccagcccatagaggtcgcgaag

SEQ ID NO: 3043800 - DNA, 25 bp, Homo sapien
ccagggcagcgtcagtgacaacgtt

SEQ ID NO: 3043801 - DNA, 25 bp, Homo sapien
aaaggccggatactgcacacaggcg

SEQ ID NO: 3043802 - DNA, 25 bp, Homo sapien
tgctcactcgacttgaaaggccgga

SEQ ID NO: 3043803 - DNA, 25 bp, Homo sapien
ctagggtcctgggcttcctcctgcc

SEQ ID NO: 3043804 - DNA, 25 bp, Homo sapien
ttcctcctgcctcccgcaggctggg

SEQ ID NO: 3043805 - DNA, 25 bp, Homo sapien
gggcttcctcctgcctcccgcaggc

SEQ ID NO: 3043806 - DNA, 25 bp, Homo sapien
tcctgcctcccgcaggctgggacat

SEQ ID NO: 3043807 - DNA, 25 bp, Homo sapien
tggaccccagcagggcaggaggtgg

SEQ ID NO: 3043808 - DNA, 25 bp, Homo sapien
ggctggaccccagcagggcaggagg

SEQ ID NO: 3043809 - DNA, 25 bp, Homo sapien
ctggaccccagcagggcaggaggtg

SEQ ID NO: 3043810 - DNA, 25 bp, Homo sapien
gctggaccccagcagggcaggaggt

SEQ ID NO: 3043811 - DNA, 25 bp, Homo sapien
ggtctgagtgggtcccagttctccc

SEQ ID NO: 3043812 - DNA, 25 bp, Homo sapien
gttctcccggcagctctgttagcac

SEQ ID NO: 3043813 - DNA, 25 bp, Homo sapien
caggcacaggtctgagtgggtccca

SEQ ID NO: 3043814 - DNA, 25 bp, Homo sapien
gtgggtcccagttctcccggcagct

SEQ ID NO: 3043815 - DNA, 25 bp, Homo sapien
atccaaagtaggcaagtggctctgc

SEQ ID NO: 3043816 - DNA, 25 bp, Homo sapien
ttacatagtcaatgccgatctccca

SEQ ID NO: 3043817 - DNA, 25 bp, Homo sapien
caatgccgatctcccagaactttgt

SEQ ID NO: 3043818 - DNA, 25 bp, Homo sapien
tgcttctttaggccgttgttgttac

SEQ ID NO: 3043819 - DNA, 25 bp, Homo sapien
tagttgcatgaagccacaatgcctg

SEQ ID NO: 3043820 - DNA, 25 bp, Homo sapien
gccaatgagattcaaagagaagtct

SEQ ID NO: 3043821 - DNA, 25 bp, Homo sapien
gatcaaaggtaccaattacaactgg

SEQ ID NO: 3043822 - DNA, 25 bp, Homo sapien
caactggtctaggacaatcttgaca

SEQ ID NO: 3043823 - DNA, 25 bp, Homo sapien
gaggtctcccaagcagacgtctgag

SEQ ID NO: 3043824 - DNA, 25 bp, Homo sapien
cagaaaataatgcttgagcttgcca

SEQ ID NO: 3043825 - DNA, 25 bp, Homo sapien
gagcttgccaatagaatatagccca

SEQ ID NO: 3043826 - DNA, 25 bp, Homo sapien
gagttttcactcattaccgggatgg

SEQ ID NO: 3043827 - DNA, 25 bp, Homo sapien
acccagcctatgtggcgcactgcgt

SEQ ID NO: 3043828 - DNA, 25 bp, Homo sapien
tggatcacccggatctgggtaaggc

SEQ ID NO: 3043829 - DNA, 25 bp, Homo sapien
gtggcgcactgcgttctggatcacc

SEQ ID NO: 3043830 - DNA, 25 bp, Homo sapien
tgcgttctggatcacccggatctgg

SEQ ID NO: 3043831 - DNA, 25 bp, Homo sapien
agagcgcccccatccgtcaagaagg

SEQ ID NO: 3043832 - DNA, 25 bp, Homo sapien
gcccactgttggtgcttggttccca

SEQ ID NO: 3043833 - DNA, 25 bp, Homo sapien
tcaagaaggcccactgttggtgctt

SEQ ID NO: 3043834 - DNA, 25 bp, Homo sapien
ctcttcgacgcattccgcaggaccg

SEQ ID NO: 3043835 - DNA, 25 bp, Homo sapien
gaggcatcgcctagagaaaataacc

SEQ ID NO: 3043836 - DNA, 25 bp, Homo sapien
aatgaacgggcagggccaacaatgg

SEQ ID NO: 3043837 - DNA, 25 bp, Homo sapien
tttcagatccgctctggcccagtgg

SEQ ID NO: 3043838 - DNA, 25 bp, Homo sapien
gggcctctgactaaatatgacaccg

SEQ ID NO: 3043839 - DNA, 25 bp, Homo sapien
catgtggtggggacagacaaagaca

SEQ ID NO: 3043840 - DNA, 25 bp, Homo sapien
gaggatagaagtcctcggaggaaag

SEQ ID NO: 3043841 - DNA, 25 bp, Homo sapien
tgctgcccggtcttctgcagaggga

SEQ ID NO: 3043842 - DNA, 25 bp, Homo sapien
gaggaaagggccaagggatctggga

SEQ ID NO: 3043843 - DNA, 25 bp, Homo sapien
acagggcgctccccgagttggcatg

SEQ ID NO: 3043844 - DNA, 25 bp, Homo sapien
gaacagggcgctccccgagttggca

SEQ ID NO: 3043845 - DNA, 25 bp, Homo sapien
cagaacagggcgctccccgagttgg

SEQ ID NO: 3043846 - DNA, 25 bp, Homo sapien
agaacagggcgctccccgagttggc

SEQ ID NO: 3043847 - DNA, 25 bp, Homo sapien
cagtagcggtcatctcggaagaaga

SEQ ID NO: 3043848 - DNA, 25 bp, Homo sapien
tagtagcgggcacccttgaagagga

SEQ ID NO: 3043849 - DNA, 25 bp, Homo sapien
gggtagtagggctccacttgcagtc

SEQ ID NO: 3043850 - DNA, 25 bp, Homo sapien
atgatggagccatcgggcctcggca

SEQ ID NO: 3043851 - DNA, 25 bp, Homo sapien
gagcccacgatggttggtattcata

SEQ ID NO: 3043852 - DNA, 25 bp, Homo sapien
gcccacgatggttggtattcatatc

SEQ ID NO: 3043853 - DNA, 25 bp, Homo sapien
ggagcccacgatggttggtattcat

SEQ ID NO: 3043854 - DNA, 25 bp, Homo sapien
ccacgatggttggtattcatatcaa

SEQ ID NO: 3043855 - DNA, 25 bp, Homo sapien
acggggctctgagacgttgccatca

SEQ ID NO: 3043856 - DNA, 25 bp, Homo sapien
tccatcattcaatgacactgccgca

SEQ ID NO: 3043857 - DNA, 25 bp, Homo sapien
actgccgcagcctcaatgttggggg

SEQ ID NO: 3043858 - DNA, 25 bp, Homo sapien
ggctctgagacgttgccatcagctg

SEQ ID NO: 3043859 - DNA, 25 bp, Homo sapien
aaaatgtacagttgctgttgcctgt

SEQ ID NO: 3043860 - DNA, 25 bp, Homo sapien
aaaaatgtacagttgctgttgcctg

SEQ ID NO: 3043861 - DNA, 25 bp, Homo sapien
taaaaatgtacagttgctgttgcct

SEQ ID NO: 3043862 - DNA, 25 bp, Homo sapien
ccagtttcccaaatggacaagcata

SEQ ID NO: 3043863 - DNA, 25 bp, Homo sapien
caagcatagggtatggtgtgtacag

SEQ ID NO: 3043864 - DNA, 25 bp, Homo sapien
ttccaggaaagatgctgtcctggaa

SEQ ID NO: 3043865 - DNA, 25 bp, Homo sapien
agttgaggagtgaccatcagcttcc

SEQ ID NO: 3043866 - DNA, 25 bp, Homo sapien
ttgctacctgcagcgtgcttgtggc

SEQ ID NO: 3043867 - DNA, 25 bp, Homo sapien
tacctgcagcgtgcttgtggcttgg

SEQ ID NO: 3043868 - DNA, 25 bp, Homo sapien
tggggttgctacctgcagcgtgctt

SEQ ID NO: 3043869 - DNA, 25 bp, Homo sapien
ggttgctacctgcagcgtgcttgtg

SEQ ID NO: 3043870 - DNA, 25 bp, Homo sapien
tagggccctgcgtttcagggcgcct

SEQ ID NO: 3043871 - DNA, 25 bp, Homo sapien
tgtaggagtcccaggtctcaaagtc

SEQ ID NO: 3043872 - DNA, 25 bp, Homo sapien
tgcgtttcagggcgccttccttggg

SEQ ID NO: 3043873 - DNA, 25 bp, Homo sapien
gaagagtggcagtatttagggccct

SEQ ID NO: 3043874 - DNA, 25 bp, Homo sapien
ccagcacgtcgtcccagctgagcag

SEQ ID NO: 3043875 - DNA, 25 bp, Homo sapien
acggccagcacgtcgtcccagctga

SEQ ID NO: 3043876 - DNA, 25 bp, Homo sapien
ggccagcacgtcgtcccagctgagc

SEQ ID NO: 3043877 - DNA, 25 bp, Homo sapien
cagcacgtcgtcccagctgagcagc

SEQ ID NO: 3043878 - DNA, 25 bp, Homo sapien
gtgaggccaagcgtgtgaccgatct

SEQ ID NO: 3043879 - DNA, 25 bp, Homo sapien
gtgtgaccgatctcgtgcgccagca

SEQ ID NO: 3043880 - DNA, 25 bp, Homo sapien
cctcttgtagtagggcgccatgagc

SEQ ID NO: 3043881 - DNA, 25 bp, Homo sapien
tcttggtcgaagtgcgcttcgccgc

SEQ ID NO: 3043882 - DNA, 25 bp, Homo sapien
catcgttgtggtccccttggaagaa

SEQ ID NO: 3043883 - DNA, 25 bp, Homo sapien
aaaggcattgcccagcccatcgttg

SEQ ID NO: 3043884 - DNA, 25 bp, Homo sapien
ggaagaaggtgagccggatgtcagc

SEQ ID NO: 3043885 - DNA, 25 bp, Homo sapien
actccagcgctgagacgttgctcca

SEQ ID NO: 3043886 - DNA, 25 bp, Homo sapien
aaggcggcgcgcacggcgccccgaa

SEQ ID NO: 3043887 - DNA, 25 bp, Homo sapien
ctggaaggcggcgcgcacggcgccc

SEQ ID NO: 3043888 - DNA, 25 bp, Homo sapien
gaaggcggcgcgcacggcgccccga

SEQ ID NO: 3043889 - DNA, 25 bp, Homo sapien
tggaaggcggcgcgcacggcgcccc

SEQ ID NO: 3043890 - DNA, 25 bp, Homo sapien
ctccggagatgctcaggccagttca

SEQ ID NO: 3043891 - DNA, 25 bp, Homo sapien
tccggagatgctcaggccagttcac

SEQ ID NO: 3043892 - DNA, 25 bp, Homo sapien
gagaggtgctgcttgtaccatttgt

SEQ ID NO: 3043893 - DNA, 25 bp, Homo sapien
ggagaggtgctgcttgtaccatttg

SEQ ID NO: 3043894 - DNA, 25 bp, Homo sapien
agaggtgctgcttgtaccatttgtt

SEQ ID NO: 3043895 - DNA, 25 bp, Homo sapien
ggagaagcccccaatctgaagaagt

SEQ ID NO: 3043896 - DNA, 25 bp, Homo sapien
cctggacagtccccagtacagtggc

SEQ ID NO: 3043897 - DNA, 25 bp, Homo sapien
gggtcttattcttccccacagcctg

SEQ ID NO: 3043898 - DNA, 25 bp, Homo sapien
aagtctgtctgaacccttggtctag

SEQ ID NO: 3043899 - DNA, 25 bp, Homo sapien
tagccattggcttcaagacattggg

SEQ ID NO: 3043900 - DNA, 25 bp, Homo sapien
cattgggaaatcttggcctagccgg

SEQ ID NO: 3043901 - DNA, 25 bp, Homo sapien
tgttagcaacagtttatctgccctg

SEQ ID NO: 3043902 - DNA, 25 bp, Homo sapien
tactgacaaagtccagtcccaggct

SEQ ID NO: 3043903 - DNA, 25 bp, Homo sapien
cattttggtccggtgtctagcaaac

SEQ ID NO: 3043904 - DNA, 25 bp, Homo sapien
gcccaggccgcataactgttggtat

SEQ ID NO: 3043905 - DNA, 25 bp, Homo sapien
aacacgccgctgacaggtagctggg

SEQ ID NO: 3043906 - DNA, 25 bp, Homo sapien
ggtagctgggacacccactgaaacg

SEQ ID NO: 3043907 - DNA, 25 bp, Homo sapien
gagcttggcatcctagcacccctac

SEQ ID NO: 3043908 - DNA, 25 bp, Homo sapien
cctccctggggtgtagccagccagg

SEQ ID NO: 3043909 - DNA, 25 bp, Homo sapien
agggtgagtggtaagggtgagggca

SEQ ID NO: 3043910 - DNA, 25 bp, Homo sapien
gagggtgagtggtaagggtgagggc

SEQ ID NO: 3043911 - DNA, 25 bp, Homo sapien
ctgatggcatcgctgaatcgagtgg

SEQ ID NO: 3043912 - DNA, 25 bp, Homo sapien
tgatggcatcgctgaatcgagtgga

SEQ ID NO: 3043913 - DNA, 25 bp, Homo sapien
gggacctgttcattgaggtatccgt

SEQ ID NO: 3043914 - DNA, 25 bp, Homo sapien
ggtatccgtacttctctaggaatgc

SEQ ID NO: 3043915 - DNA, 25 bp, Homo sapien
gcgggagagaggaatatctgctttt

SEQ ID NO: 3043916 - DNA, 25 bp, Homo sapien
ctgcgggagagaggaatatctgctt

SEQ ID NO: 3043917 - DNA, 25 bp, Homo sapien
tgctttttccatagcatcctttccc

SEQ ID NO: 3043918 - DNA, 25 bp, Homo sapien
aatatctgctttttccatagcatcc

SEQ ID NO: 3043919 - DNA, 25 bp, Homo sapien
atcagggagttggctccggttctgg

SEQ ID NO: 3043920 - DNA, 25 bp, Homo sapien
cagggagttggctccggttctggaa

SEQ ID NO: 3043921 - DNA, 25 bp, Homo sapien
tcagggagttggctccggttctgga

SEQ ID NO: 3043922 - DNA, 25 bp, Homo sapien
ggagttggctccggttctggaactc

SEQ ID NO: 3043923 - DNA, 25 bp, Homo sapien
atacggtcttgctcgtcgccctggc

SEQ ID NO: 3043924 - DNA, 25 bp, Homo sapien
agatacggtcttgctcgtcgccctg

SEQ ID NO: 3043925 - DNA, 25 bp, Homo sapien
gatacggtcttgctcgtcgccctgg

SEQ ID NO: 3043926 - DNA, 25 bp, Homo sapien
attacagccatcatgagccattgtg

SEQ ID NO: 3043927 - DNA, 25 bp, Homo sapien
ccatcatgagccattgtggccagcc

SEQ ID NO: 3043928 - DNA, 25 bp, Homo sapien
gagccattgtggccagccctccttt

SEQ ID NO: 3043929 - DNA, 25 bp, Homo sapien
agccattgtggccagccctcctttc

SEQ ID NO: 3043930 - DNA, 25 bp, Homo sapien
cttctgggtttctgactcacaaaaa

SEQ ID NO: 3043931 - DNA, 25 bp, Homo sapien
gtcactgagctaagttcttgggaac

SEQ ID NO: 3043932 - DNA, 25 bp, Homo sapien
ctgagctaagttcttgggaacggct

SEQ ID NO: 3043933 - DNA, 25 bp, Homo sapien
tcttgggaacggcttccacacccag

SEQ ID NO: 3043934 - DNA, 25 bp, Homo sapien
tagttttcctaagttgcccactgaa

SEQ ID NO: 3043935 - DNA, 25 bp, Homo sapien
tgtgagcagctctagttttcctaag

SEQ ID NO: 3043936 - DNA, 25 bp, Homo sapien
tagtgctgtgagcagctctagtttt

SEQ ID NO: 3043937 - DNA, 25 bp, Homo sapien
gctctagttttcctaagttgcccac

SEQ ID NO: 3043938 - DNA, 25 bp, Homo sapien
tggcactgaagctcatgcaattaac

SEQ ID NO: 3043939 - DNA, 25 bp, Homo sapien
tacgtatgggtttgtctggcactga

SEQ ID NO: 3043940 - DNA, 25 bp, Homo sapien
tatagacatagacacatccccagtt

SEQ ID NO: 3043941 - DNA, 25 bp, Homo sapien
cataggcatatagagacacgtacac

SEQ ID NO: 3043942 - DNA, 25 bp, Homo sapien
tagactgaaagaaactcaatctgct

SEQ ID NO: 3043943 - DNA, 25 bp, Homo sapien
tctgctggatattaagtttcccaag

SEQ ID NO: 3043944 - DNA, 25 bp, Homo sapien
tatgttaaatagactgaaagaaact

SEQ ID NO: 3043945 - DNA, 25 bp, Homo sapien
tggatattaagtttcccaagcatac

SEQ ID NO: 3043946 - DNA, 25 bp, Homo sapien
gcagcagagatatgcctctgttccc

SEQ ID NO: 3043947 - DNA, 25 bp, Homo sapien
gggcagcagagatatgcctctgttc

SEQ ID NO: 3043948 - DNA, 25 bp, Homo sapien
cagcagagatatgcctctgttccct

SEQ ID NO: 3043949 - DNA, 25 bp, Homo sapien
cctctgttcccttgcgagggattgc

SEQ ID NO: 3043950 - DNA, 25 bp, Homo sapien
cttgatgttgtaagagtctcaattc

SEQ ID NO: 3043951 - DNA, 25 bp, Homo sapien
gggctgcaaagactctgtacttgat

SEQ ID NO: 3043952 - DNA, 25 bp, Homo sapien
gagagatgatcccttgttgaagcag

SEQ ID NO: 3043953 - DNA, 25 bp, Homo sapien
cacagagcaagagcccagtgctagg

SEQ ID NO: 3043954 - DNA, 25 bp, Homo sapien
ctctcaacgggcagtttgagggcag

SEQ ID NO: 3043955 - DNA, 25 bp, Homo sapien
agcattgggctcagtaattcagaac

SEQ ID NO: 3043956 - DNA, 25 bp, Homo sapien
tgagaagctctcaacgggcagtttg

SEQ ID NO: 3043957 - DNA, 25 bp, Homo sapien
ggaaagaagctcttagaggagcaag

SEQ ID NO: 3043958 - DNA, 25 bp, Homo sapien
gagaccctggccgtattcttgagaa

SEQ ID NO: 3043959 - DNA, 25 bp, Homo sapien
tccttaaaatagtggagaccctggc

SEQ ID NO: 3043960 - DNA, 25 bp, Homo sapien
gccgtattcttgagaagaagtaaga

SEQ ID NO: 3043961 - DNA, 25 bp, Homo sapien
tctccttaaaatagtggagaccctg

SEQ ID NO: 3043962 - DNA, 25 bp, Homo sapien
aaactgaggcttccacacggttcgg

SEQ ID NO: 3043963 - DNA, 25 bp, Homo sapien
tggcttgcccaagcaggtcagcggc

SEQ ID NO: 3043964 - DNA, 25 bp, Homo sapien
agggagctctctaaggttcaccttc

SEQ ID NO: 3043965 - DNA, 25 bp, Homo sapien
tagatgccttatattgatccccacc

SEQ ID NO: 3043966 - DNA, 25 bp, Homo sapien
taacgcagattgtctgctcacaggg

SEQ ID NO: 3043967 - DNA, 25 bp, Homo sapien
cagcccatcagtgcggatccgcgtg

SEQ ID NO: 3043968 - DNA, 25 bp, Homo sapien
gatccgcgtgcctgtgtggttccag

SEQ ID NO: 3043969 - DNA, 25 bp, Homo sapien
aaactgcccggctctttatgttcaa

SEQ ID NO: 3043970 - DNA, 25 bp, Homo sapien
cgctctccgccaggtacacacggcg

SEQ ID NO: 3043971 - DNA, 25 bp, Homo sapien
tctccgccaggtacacacggcgtac

SEQ ID NO: 3043972 - DNA, 25 bp, Homo sapien
ctctccgccaggtacacacggcgta

SEQ ID NO: 3043973 - DNA, 25 bp, Homo sapien
gctctccgccaggtacacacggcgt

SEQ ID NO: 3043974 - DNA, 25 bp, Homo sapien
tccaggtggccccacagtagcagct

SEQ ID NO: 3043975 - DNA, 25 bp, Homo sapien
gcctccttgcgcagctcctggcctc

SEQ ID NO: 3043976 - DNA, 25 bp, Homo sapien
agtagcagctgcagggcgcgcagca

SEQ ID NO: 3043977 - DNA, 25 bp, Homo sapien
gcaggaggccgacgcgcgcgaccat

SEQ ID NO: 3043978 - DNA, 25 bp, Homo sapien
gactgtcccggggtttcgccagtgc

SEQ ID NO: 3043979 - DNA, 25 bp, Homo sapien
agacgtcgtccagcccgggcagtgc

SEQ ID NO: 3043980 - DNA, 25 bp, Homo sapien
tagctgcgcgctctgggccgctcct

SEQ ID NO: 3043981 - DNA, 25 bp, Homo sapien
ccttcgccgggagccggccagacgt

SEQ ID NO: 3043982 - DNA, 25 bp, Homo sapien
caatatatcgttgggttaccaggct

SEQ ID NO: 3043983 - DNA, 25 bp, Homo sapien
ggctcagataccatgccttcccgga

SEQ ID NO: 3043984 - DNA, 25 bp, Homo sapien
caccttggccgtttactagctgtac

SEQ ID NO: 3043985 - DNA, 25 bp, Homo sapien
gtcaacttctgcacaacacctaggg

SEQ ID NO: 3043986 - DNA, 25 bp, Homo sapien
gcggcagcgacgagaaggtcctggc

SEQ ID NO: 3043987 - DNA, 25 bp, Homo sapien
cggcagcgacgagaaggtcctggcg

SEQ ID NO: 3043988 - DNA, 25 bp, Homo sapien
agcggcagcgacgagaaggtcctgg

SEQ ID NO: 3043989 - DNA, 25 bp, Homo sapien
cttggaacccgaggagacttgccgt

SEQ ID NO: 3043990 - DNA, 25 bp, Homo sapien
cgttattcactctgcagtaaccacc

SEQ ID NO: 3043991 - DNA, 25 bp, Homo sapien
ggcctcttgtcttttgaccctgtcc

SEQ ID NO: 3043992 - DNA, 25 bp, Homo sapien
gggagccgagattagagcatcagcc

SEQ ID NO: 3043993 - DNA, 25 bp, Homo sapien
agtgtcattcagtcgtgcaggctgg

SEQ ID NO: 3043994 - DNA, 25 bp, Homo sapien
gagaagtgtcattcagtcgtgcagg

SEQ ID NO: 3043995 - DNA, 25 bp, Homo sapien
agccttgaccgcccctggatcaggt

SEQ ID NO: 3043996 - DNA, 25 bp, Homo sapien
gaagtgtcattcagtcgtgcaggct

SEQ ID NO: 3043997 - DNA, 25 bp, Homo sapien
gtttagctataaattgatgtcctta

SEQ ID NO: 3043998 - DNA, 25 bp, Homo sapien
caactgtatattatggagaatgtgg

SEQ ID NO: 3043999 - DNA, 25 bp, Homo sapien
ttttggacctctgctttatccctga

SEQ ID NO: 3044000 - DNA, 25 bp, Homo sapien
aaggaaattttaatggagtgtggat

SEQ ID NO: 3044001 - DNA, 25 bp, Homo sapien
ggtacatgttaaacaccagtagaga

SEQ ID NO: 3044002 - DNA, 25 bp, Homo sapien
ttaaaagacgactctgggaaatcca

SEQ ID NO: 3044003 - DNA, 25 bp, Homo sapien
ttttctccatgctagtgttatcagg

SEQ ID NO: 3044004 - DNA, 25 bp, Homo sapien
gggcagaggctatttcttaatctcc

SEQ ID NO: 3044005 - DNA, 25 bp, Homo sapien
ttgaatttgaatatagatgccctgt

SEQ ID NO: 3044006 - DNA, 25 bp, Homo sapien
gtcttcatcaacactcccgtttgtg

SEQ ID NO: 3044007 - DNA, 25 bp, Homo sapien
cactcccgtttgtgttctcagtcaa

SEQ ID NO: 3044008 - DNA, 25 bp, Homo sapien
ttgcatttaagtaccagaataccca

SEQ ID NO: 3044009 - DNA, 25 bp, Homo sapien
cactttggagggcacagcgggtgga

SEQ ID NO: 3044010 - DNA, 25 bp, Homo sapien
agcactttggagggcacagcgggtg

SEQ ID NO: 3044011 - DNA, 25 bp, Homo sapien
gaatcagttgacctgggagttggtg

SEQ ID NO: 3044012 - DNA, 25 bp, Homo sapien
tccaagtgtgaaagagagataaatc

SEQ ID NO: 3044013 - DNA, 25 bp, Homo sapien
gaagattatagggactacaggaaac

SEQ ID NO: 3044014 - DNA, 25 bp, Homo sapien
gcctggctagaagaagaattcccgg

SEQ ID NO: 3044015 - DNA, 25 bp, Homo sapien
gatgggacattcttggacttacaga

SEQ ID NO: 3044016 - DNA, 25 bp, Homo sapien
agatttggaggctgggcgtggtagt

SEQ ID NO: 3044017 - DNA, 25 bp, Homo sapien
tggaggctgggcgtggtagtcatgc

SEQ ID NO: 3044018 - DNA, 25 bp, Homo sapien
tttggaggctgggcgtggtagtcat

SEQ ID NO: 3044019 - DNA, 25 bp, Homo sapien
gatttggaggctgggcgtggtagtc

SEQ ID NO: 3044020 - DNA, 25 bp, Homo sapien
ctgggggctgtgacgcgtacctgta

SEQ ID NO: 3044021 - DNA, 25 bp, Homo sapien
aagtatgcaactagctgggggctgt

SEQ ID NO: 3044022 - DNA, 25 bp, Homo sapien
actagctgggggctgtgacgcgtac

SEQ ID NO: 3044023 - DNA, 25 bp, Homo sapien
tatgcaactagctgggggctgtgac

SEQ ID NO: 3044024 - DNA, 25 bp, Homo sapien
ctgaaaacttagaggtgctactgtt

SEQ ID NO: 3044025 - DNA, 25 bp, Homo sapien
ggctcagcacattagagacttaagg

SEQ ID NO: 3044026 - DNA, 25 bp, Homo sapien
tgttttcctaagcactctacttgtg

SEQ ID NO: 3044027 - DNA, 25 bp, Homo sapien
tcttgtggaaatagatccttgggaa

SEQ ID NO: 3044028 - DNA, 25 bp, Homo sapien
tcctacgttggattggtagtctgct

SEQ ID NO: 3044029 - DNA, 25 bp, Homo sapien
caggagtattgatgggacagtttgc

SEQ ID NO: 3044030 - DNA, 25 bp, Homo sapien
caaagtattctatgtggatggcaat

SEQ ID NO: 3044031 - DNA, 25 bp, Homo sapien
tctgaattatcccttcatggactga

SEQ ID NO: 3044032 - DNA, 25 bp, Homo sapien
tatctggttgaataataagacgtcc

SEQ ID NO: 3044033 - DNA, 25 bp, Homo sapien
gatatttgtatctggttgaataata

SEQ ID NO: 3044034 - DNA, 25 bp, Homo sapien
tgtatctggttgaataataagacgt

SEQ ID NO: 3044035 - DNA, 25 bp, Homo sapien
tttgtatctggttgaataataagac

SEQ ID NO: 3044036 - DNA, 25 bp, Homo sapien
tattcacggaagataagtatagatt

SEQ ID NO: 3044037 - DNA, 25 bp, Homo sapien
gaagcatcttcagggagggagtcgg

SEQ ID NO: 3044038 - DNA, 25 bp, Homo sapien
tagagtgacacttgtttattcacgg

SEQ ID NO: 3044039 - DNA, 25 bp, Homo sapien
gataagtatagattgttttctcatg

SEQ ID NO: 3044040 - DNA, 25 bp, Homo sapien
cagcacggtgggaaagcaggcgttt

SEQ ID NO: 3044041 - DNA, 25 bp, Homo sapien
aatttcagcaaggacccggagctgt

SEQ ID NO: 3044042 - DNA, 25 bp, Homo sapien
tttcgtggtttcgagcagcacggtg

SEQ ID NO: 3044043 - DNA, 25 bp, Homo sapien
tgacctgtggcctatgttttcgtgg

SEQ ID NO: 3044044 - DNA, 25 bp, Homo sapien
ccagggatcaattgaggcacaaagg

SEQ ID NO: 3044045 - DNA, 25 bp, Homo sapien
tacagagagaaccttgtttttcagc

SEQ ID NO: 3044046 - DNA, 25 bp, Homo sapien
tctttctggaaccttgtgggctctg

SEQ ID NO: 3044047 - DNA, 25 bp, Homo sapien
tttcagcttgttttggatccaggga

SEQ ID NO: 3044048 - DNA, 25 bp, Homo sapien
ttgtggactgcggatccccaggaca

SEQ ID NO: 3044049 - DNA, 25 bp, Homo sapien
tgcatctagtaagtccaggagcaag

SEQ ID NO: 3044050 - DNA, 25 bp, Homo sapien
ggttttctgcatctagtaagtccag

SEQ ID NO: 3044051 - DNA, 25 bp, Homo sapien
caggagcaagtggaacacttgtgga

SEQ ID NO: 3044052 - DNA, 25 bp, Homo sapien
agagatgactgcttcctggcgtgca

SEQ ID NO: 3044053 - DNA, 25 bp, Homo sapien
gagatgactgcttcctggcgtgcag

SEQ ID NO: 3044054 - DNA, 25 bp, Homo sapien
tgactgcttcctggcgtgcagtggc

SEQ ID NO: 3044055 - DNA, 25 bp, Homo sapien
gatgactgcttcctggcgtgcagtg

SEQ ID NO: 3044056 - DNA, 25 bp, Homo sapien
catcatcgtaggcttcaacttgagc

SEQ ID NO: 3044057 - DNA, 25 bp, Homo sapien
cacagtttgagccacagcctgcctc

SEQ ID NO: 3044058 - DNA, 25 bp, Homo sapien
gttcatcatcgtaggcttcaacttg

SEQ ID NO: 3044059 - DNA, 25 bp, Homo sapien
tcatcgtaggcttcaacttgagctc

SEQ ID NO: 3044060 - DNA, 25 bp, Homo sapien
taaatgtgagttcctctagcccctg

SEQ ID NO: 3044061 - DNA, 25 bp, Homo sapien
caggttaaatgtgagttcctctagc

SEQ ID NO: 3044062 - DNA, 25 bp, Homo sapien
tgttccagcccaatggtcttgagca

SEQ ID NO: 3044063 - DNA, 25 bp, Homo sapien
gttcattatgcgtcttcctcctgag

SEQ ID NO: 3044064 - DNA, 25 bp, Homo sapien
atcaccttgaccagcatcctaagtg

SEQ ID NO: 3044065 - DNA, 25 bp, Homo sapien
agtgcacgtgcatcaccttgaccag

SEQ ID NO: 3044066 - DNA, 25 bp, Homo sapien
gtgcatcaccttgaccagcatccta

SEQ ID NO: 3044067 - DNA, 25 bp, Homo sapien
gcacgtgcatcaccttgaccagcat

SEQ ID NO: 3044068 - DNA, 25 bp, Homo sapien
gatgcttcactggacgacttcttga

SEQ ID NO: 3044069 - DNA, 25 bp, Homo sapien
gaactcttggaccatgttgctgcaa

SEQ ID NO: 3044070 - DNA, 25 bp, Homo sapien
gggtcttgagtccttggcacaggca

SEQ ID NO: 3044071 - DNA, 25 bp, Homo sapien
gtctgtagtacaggcaccagcttgc

SEQ ID NO: 3044072 - DNA, 25 bp, Homo sapien
ttgatatcctgaactttctgtagct

SEQ ID NO: 3044073 - DNA, 25 bp, Homo sapien
ctgcaagaggggctcggataagatg

SEQ ID NO: 3044074 - DNA, 25 bp, Homo sapien
gcaagaggggctcggataagatgga

SEQ ID NO: 3044075 - DNA, 25 bp, Homo sapien
tgttttgcttgacttctttgatatc

SEQ ID NO: 3044076 - DNA, 25 bp, Homo sapien
catagctcttgctagtatttgatag

SEQ ID NO: 3044077 - DNA, 25 bp, Homo sapien
gctcttgctagtatttgataggttc

SEQ ID NO: 3044078 - DNA, 25 bp, Homo sapien
ctacaatctgttcgttataaattta

SEQ ID NO: 3044079 - DNA, 25 bp, Homo sapien
tatttttctacaatctgttcgttat

SEQ ID NO: 3044080 - DNA, 25 bp, Homo sapien
ttccggaatgctttggtccacctaa

SEQ ID NO: 3044081 - DNA, 25 bp, Homo sapien
ctgctttccggaatgctttggtcca

SEQ ID NO: 3044082 - DNA, 25 bp, Homo sapien
tttccggaatgctttggtccaccta

SEQ ID NO: 3044083 - DNA, 25 bp, Homo sapien
cagctgctttccggaatgctttggt

SEQ ID NO: 3044084 - DNA, 25 bp, Homo sapien
ttaaagtttctatgacacttagatt

SEQ ID NO: 3044085 - DNA, 25 bp, Homo sapien
tttaaagtttctatgacacttagat

SEQ ID NO: 3044086 - DNA, 25 bp, Homo sapien
aagtttctatgacacttagatttac

SEQ ID NO: 3044087 - DNA, 25 bp, Homo sapien
gtttctatgacacttagatttacaa

SEQ ID NO: 3044088 - DNA, 25 bp, Homo sapien
gtcgttgcggacaaacatcatgtca

SEQ ID NO: 3044089 - DNA, 25 bp, Homo sapien
acatcatgtcatggctggggtagat

SEQ ID NO: 3044090 - DNA, 25 bp, Homo sapien
aaacatcatgtcatggctggggtag

SEQ ID NO: 3044091 - DNA, 25 bp, Homo sapien
gctggggtagatgggcctcgaagag

SEQ ID NO: 3044092 - DNA, 25 bp, Homo sapien
cagctttgcccccaattaaagactg

SEQ ID NO: 3044093 - DNA, 25 bp, Homo sapien
ttgcccccaattaaagactgtcctc

SEQ ID NO: 3044094 - DNA, 25 bp, Homo sapien
cttgtccagctttgcccccaattaa

SEQ ID NO: 3044095 - DNA, 25 bp, Homo sapien
ttgtccagctttgcccccaattaaa

SEQ ID NO: 3044096 - DNA, 25 bp, Homo sapien
aagtctccatcctttgaccctcatt

SEQ ID NO: 3044097 - DNA, 25 bp, Homo sapien
gagttaagagccattcgtagccccg

SEQ ID NO: 3044098 - DNA, 25 bp, Homo sapien
ccttcagctgtttgatgagagcccg

SEQ ID NO: 3044099 - DNA, 25 bp, Homo sapien
cggatcacatgcttattcaggcaac

SEQ ID NO: 3044100 - DNA, 25 bp, Homo sapien
tcggtaggcctcgtacttcactttc

SEQ ID NO: 3044101 - DNA, 25 bp, Homo sapien
aggcctcgtacttcactttctctgg

SEQ ID NO: 3044102 - DNA, 25 bp, Homo sapien
gatggccagggttcggtaggcctcg

SEQ ID NO: 3044103 - DNA, 25 bp, Homo sapien
aggatggccagggttcggtaggcct

SEQ ID NO: 3044104 - DNA, 25 bp, Homo sapien
catatgcggtgtttccagtaaaggc

SEQ ID NO: 3044105 - DNA, 25 bp, Homo sapien
tatcttgtagccacttggccctggg

SEQ ID NO: 3044106 - DNA, 25 bp, Homo sapien
tgtcttttcggttagaccagggaga

SEQ ID NO: 3044107 - DNA, 25 bp, Homo sapien
aaactgaagcctagaaagtgaccta

SEQ ID NO: 3044108 - DNA, 25 bp, Homo sapien
tctgtgcccacatgccacacatctc

SEQ ID NO: 3044109 - DNA, 25 bp, Homo sapien
cccggggagcctcgtctgtgcccac

SEQ ID NO: 3044110 - DNA, 25 bp, Homo sapien
tcgtctgtgcccacatgccacacat

SEQ ID NO: 3044111 - DNA, 25 bp, Homo sapien
ccccggggagcctcgtctgtgccca

SEQ ID NO: 3044112 - DNA, 25 bp, Homo sapien
gtagtgcctccatgacaaacttgtc

SEQ ID NO: 3044113 - DNA, 25 bp, Homo sapien
acaaacttgtcactgatgcgtaagc

SEQ ID NO: 3044114 - DNA, 25 bp, Homo sapien
cactgatgcgtaagcatcccagagc

SEQ ID NO: 3044115 - DNA, 25 bp, Homo sapien
cacctgctgtagtgcctccatgaca

SEQ ID NO: 3044116 - DNA, 25 bp, Homo sapien
tgtgctgcatagaactgctcatcct

SEQ ID NO: 3044117 - DNA, 25 bp, Homo sapien
gggtttgatgtacctctttgatgta

SEQ ID NO: 3044118 - DNA, 25 bp, Homo sapien
cttgctcattgggagatggaacatt

SEQ ID NO: 3044119 - DNA, 25 bp, Homo sapien
gctctaagggcctggatcgcatctc

SEQ ID NO: 3044120 - DNA, 25 bp, Homo sapien
agattttatagtcagcttgctcatt

SEQ ID NO: 3044121 - DNA, 25 bp, Homo sapien
gctgatcatacaggtcgtgccagtg

SEQ ID NO: 3044122 - DNA, 25 bp, Homo sapien
caggtcgtgccagtgcgtgtagatc

SEQ ID NO: 3044123 - DNA, 25 bp, Homo sapien
tggcttgctcggatgctgcctccag

SEQ ID NO: 3044124 - DNA, 25 bp, Homo sapien
cagtacgggactgagtttggcttgc

SEQ ID NO: 3044125 - DNA, 25 bp, Homo sapien
gggcagatgaacaggagccatggct

SEQ ID NO: 3044126 - DNA, 25 bp, Homo sapien
ggacaagggcagatgaacaggagcc

SEQ ID NO: 3044127 - DNA, 25 bp, Homo sapien
gacaagggcagatgaacaggagcca

SEQ ID NO: 3044128 - DNA, 25 bp, Homo sapien
caagggcagatgaacaggagccatg

SEQ ID NO: 3044129 - DNA, 25 bp, Homo sapien
tgtctggatattccagccatgggta

SEQ ID NO: 3044130 - DNA, 25 bp, Homo sapien
ctttggtcttgtctggatattccag

SEQ ID NO: 3044131 - DNA, 25 bp, Homo sapien
ccagccatgggtacaggaacattga

SEQ ID NO: 3044132 - DNA, 25 bp, Homo sapien
catgggtacaggaacattgacctgg

SEQ ID NO: 3044133 - DNA, 25 bp, Homo sapien
tgtcctctgtggtacgagaggtaca

SEQ ID NO: 3044134 - DNA, 25 bp, Homo sapien
tcctctgtggtacgagaggtacagg

SEQ ID NO: 3044135 - DNA, 25 bp, Homo sapien
acctgtcctctgtggtacgagaggt

SEQ ID NO: 3044136 - DNA, 25 bp, Homo sapien
tgtctggacttctggaggtagaagc

SEQ ID NO: 3044137 - DNA, 25 bp, Homo sapien
gcattgagaactttaatggtaagcc

SEQ ID NO: 3044138 - DNA, 25 bp, Homo sapien
ggttgcattgagaactttaatggta

SEQ ID NO: 3044139 - DNA, 25 bp, Homo sapien
atggttgcattgagaactttaatgg

SEQ ID NO: 3044140 - DNA, 25 bp, Homo sapien
ttgcattgagaactttaatggtaag

SEQ ID NO: 3044141 - DNA, 25 bp, Homo sapien
ggcaaagccagagctcagaacctag

SEQ ID NO: 3044142 - DNA, 25 bp, Homo sapien
ccttttgacaaagcagcgcctcaga

SEQ ID NO: 3044143 - DNA, 25 bp, Homo sapien
gaggcatgctgacttccttcctggt

SEQ ID NO: 3044144 - DNA, 25 bp, Homo sapien
gaagcttaagagtgcagtgttcctc

SEQ ID NO: 3044145 - DNA, 25 bp, Homo sapien
gagttgatgtactcccgaacccatt

SEQ ID NO: 3044146 - DNA, 25 bp, Homo sapien
catctccaaagagttgatgtactcc

SEQ ID NO: 3044147 - DNA, 25 bp, Homo sapien
ctagctcatctccaaagagttgatg

SEQ ID NO: 3044148 - DNA, 25 bp, Homo sapien
caaagagttgatgtactcccgaacc

SEQ ID NO: 3044149 - DNA, 25 bp, Homo sapien
tgggaaactgattctacctgtgcga

SEQ ID NO: 3044150 - DNA, 25 bp, Homo sapien
aaactgattctacctgtgcgagacc

SEQ ID NO: 3044151 - DNA, 25 bp, Homo sapien
tgattctacctgtgcgagaccttgg

SEQ ID NO: 3044152 - DNA, 25 bp, Homo sapien
ctacctgtgcgagaccttgggcctt

SEQ ID NO: 3044153 - DNA, 25 bp, Homo sapien
cacctgttatttttgtgtacgcaat

SEQ ID NO: 3044154 - DNA, 25 bp, Homo sapien
tgtacgcaataatgcatttagatga

SEQ ID NO: 3044155 - DNA, 25 bp, Homo sapien
tcatagctggagtcctaacaaagca

SEQ ID NO: 3044156 - DNA, 25 bp, Homo sapien
ttgaagggcctacactcaccaagtg

SEQ ID NO: 3044157 - DNA, 25 bp, Homo sapien
tatccacagggttatcttgctggca

SEQ ID NO: 3044158 - DNA, 25 bp, Homo sapien
cacctgctagggcttgcaaattcca

SEQ ID NO: 3044159 - DNA, 25 bp, Homo sapien
tgacactccgtgctttcctacatgg

SEQ ID NO: 3044160 - DNA, 25 bp, Homo sapien
tcacgtggataacaacagtagccgc

SEQ ID NO: 3044161 - DNA, 25 bp, Homo sapien
aaatactccttgatgtgggcacggg

SEQ ID NO: 3044162 - DNA, 25 bp, Homo sapien
ctgggttggagcacttgccactggt

SEQ ID NO: 3044163 - DNA, 25 bp, Homo sapien
gtagaaatactccttgatgtgggca

SEQ ID NO: 3044164 - DNA, 25 bp, Homo sapien
cagtgggcgggcaatgtaggcaaag

SEQ ID NO: 3044165 - DNA, 25 bp, Homo sapien
cagtagcaatgaggatgacagcgag

SEQ ID NO: 3044166 - DNA, 25 bp, Homo sapien
tgacagcgagggctgccgcggagac

SEQ ID NO: 3044167 - DNA, 25 bp, Homo sapien
ggcagatgcaggagcgcagagggca

SEQ ID NO: 3044168 - DNA, 25 bp, Homo sapien
cgagggctgccgcggagaccttcat

SEQ ID NO: 3044169 - DNA, 25 bp, Homo sapien
tgtgcgaggtccacgtgctgtcttg

SEQ ID NO: 3044170 - DNA, 25 bp, Homo sapien
tgcgaggtccacgtgctgtcttgat

SEQ ID NO: 3044171 - DNA, 25 bp, Homo sapien
gctgtgcgaggtccacgtgctgtct

SEQ ID NO: 3044172 - DNA, 25 bp, Homo sapien
gggagaggctgtgcgaggtccacgt

SEQ ID NO: 3044173 - DNA, 25 bp, Homo sapien
tgtccgggcatggttagtggcacac

SEQ ID NO: 3044174 - DNA, 25 bp, Homo sapien
aatttccagtattcggctgggcgcg

SEQ ID NO: 3044175 - DNA, 25 bp, Homo sapien
tatccatctcctcatacagttaccg

SEQ ID NO: 3044176 - DNA, 25 bp, Homo sapien
catcatatttacaacatgacgtttt

SEQ ID NO: 3044177 - DNA, 25 bp, Homo sapien
tcatgatctcgaggcctttggctgc

SEQ ID NO: 3044178 - DNA, 25 bp, Homo sapien
taaggagttcatagaccctgcaggc

SEQ ID NO: 3044179 - DNA, 25 bp, Homo sapien
gatccacagggcttgttcctatcag

SEQ ID NO: 3044180 - DNA, 25 bp, Homo sapien
caaagttagtgctccctatgcccag

SEQ ID NO: 3044181 - DNA, 25 bp, Homo sapien
tctgggatcccaagagaagcctgag

SEQ ID NO: 3044182 - DNA, 25 bp, Homo sapien
gcaatagggtgcaagccaagacctt

SEQ ID NO: 3044183 - DNA, 25 bp, Homo sapien
ccaagaccttgtagcaggctcaggg

SEQ ID NO: 3044184 - DNA, 25 bp, Homo sapien
aagactctacaacatcctggcctcg

SEQ ID NO: 3044185 - DNA, 25 bp, Homo sapien
ggagcctgtcacaagatatcttggg

SEQ ID NO: 3044186 - DNA, 25 bp, Homo sapien
tgtccttctcctgataccttggggt

SEQ ID NO: 3044187 - DNA, 25 bp, Homo sapien
gaacaaggcccgtggagaagcatca

SEQ ID NO: 3044188 - DNA, 25 bp, Homo sapien
tctcctgataccttggggtctgttt

SEQ ID NO: 3044189 - DNA, 25 bp, Homo sapien
gggttgaaatcagatagcgcatact

SEQ ID NO: 3044190 - DNA, 25 bp, Homo sapien
cctcatgaagtactcttcaagaact

SEQ ID NO: 3044191 - DNA, 25 bp, Homo sapien
ggaatgcagtagctgatcattgctt

SEQ ID NO: 3044192 - DNA, 25 bp, Homo sapien
tcttattgctggagcactgctgtcc

SEQ ID NO: 3044193 - DNA, 25 bp, Homo sapien
ctgtgagctgtcaggcaccgtgcta

SEQ ID NO: 3044194 - DNA, 25 bp, Homo sapien
gggctgagaatacctaactcctagg

SEQ ID NO: 3044195 - DNA, 25 bp, Homo sapien
gcttgtcctgggaagccccttggct

SEQ ID NO: 3044196 - DNA, 25 bp, Homo sapien
gatgttcatctcaccgagagttaga

SEQ ID NO: 3044197 - DNA, 25 bp, Homo sapien
aacacaaggcaagatctggaggagc

SEQ ID NO: 3044198 - DNA, 25 bp, Homo sapien
aaccacaggttgaggaatcagttcc

SEQ ID NO: 3044199 - DNA, 25 bp, Homo sapien
ggaaatagcctcagaaaccacaggt

SEQ ID NO: 3044200 - DNA, 25 bp, Homo sapien
cagcgcgtggatgagttctccttca

SEQ ID NO: 3044201 - DNA, 25 bp, Homo sapien
gtccctgatatgtcgtactgctgag

SEQ ID NO: 3044202 - DNA, 25 bp, Homo sapien
gatatgtcgtactgctgagactgta

SEQ ID NO: 3044203 - DNA, 25 bp, Homo sapien
aagttagcgtccctgatatgtcgta

SEQ ID NO: 3044204 - DNA, 25 bp, Homo sapien
tgtcgtactgctgagactgtatacc

SEQ ID NO: 3044205 - DNA, 25 bp, Homo sapien
tctctttactgttccatagaatgtg

SEQ ID NO: 3044206 - DNA, 25 bp, Homo sapien
tcagccatctgaatgggcacctcct

SEQ ID NO: 3044207 - DNA, 25 bp, Homo sapien
gggagtcagacacgccttgttacca

SEQ ID NO: 3044208 - DNA, 25 bp, Homo sapien
caaagtcttgcgtgacactggaacc

SEQ ID NO: 3044209 - DNA, 25 bp, Homo sapien
cacttcaagtgtccgtatgtcgatg

SEQ ID NO: 3044210 - DNA, 25 bp, Homo sapien
cttgcaatgttatgacacggtcagg

SEQ ID NO: 3044211 - DNA, 25 bp, Homo sapien
aaagttgaactacttctgaatacgg

SEQ ID NO: 3044212 - DNA, 25 bp, Homo sapien
cacggtcaggctggaaagtaaatca

SEQ ID NO: 3044213 - DNA, 25 bp, Homo sapien
tgaatacggaagacacatctagaga

SEQ ID NO: 3044214 - DNA, 25 bp, Homo sapien
gccctgtgttgagttaaaacttcca

SEQ ID NO: 3044215 - DNA, 25 bp, Homo sapien
tccacctgataggtgaactctggag

SEQ ID NO: 3044216 - DNA, 25 bp, Homo sapien
cctcatgacttacaggagaaactat

SEQ ID NO: 3044217 - DNA, 25 bp, Homo sapien
catgggctcttgatagatttggcgg

SEQ ID NO: 3044218 - DNA, 25 bp, Homo sapien
ttagtaggttctggagattcagctg

SEQ ID NO: 3044219 - DNA, 25 bp, Homo sapien
catctttagtaggttctggagattc

SEQ ID NO: 3044220 - DNA, 25 bp, Homo sapien
tctcatctttagtaggttctggaga

SEQ ID NO: 3044221 - DNA, 25 bp, Homo sapien
gggttctcatctttagtaggttctg

SEQ ID NO: 3044222 - DNA, 25 bp, Homo sapien
ggatgtcagaatgttccacatcatt

SEQ ID NO: 3044223 - DNA, 25 bp, Homo sapien
tggccaagggttgacagaaaacgac

SEQ ID NO: 3044224 - DNA, 25 bp, Homo sapien
gaagaataacttgctcagggtaacc

SEQ ID NO: 3044225 - DNA, 25 bp, Homo sapien
cataatccccagtttaaagacgagg

SEQ ID NO: 3044226 - DNA, 25 bp, Homo sapien
ggtttaactgtaatgctcggcaagg

SEQ ID NO: 3044227 - DNA, 25 bp, Homo sapien
tagttcagaaggtgaaatgtgtgac

SEQ ID NO: 3044228 - DNA, 25 bp, Homo sapien
agttcagaaggtgaaatgtgtgact

SEQ ID NO: 3044229 - DNA, 25 bp, Homo sapien
ctagttcagaaggtgaaatgtgtga

SEQ ID NO: 3044230 - DNA, 25 bp, Homo sapien
gaggtggatgtgtcatttcaggatg

SEQ ID NO: 3044231 - DNA, 25 bp, Homo sapien
tagaatgttcagtctctatggtgag

SEQ ID NO: 3044232 - DNA, 25 bp, Homo sapien
tggagctgtagtcttgtccaggcct

SEQ ID NO: 3044233 - DNA, 25 bp, Homo sapien
tggaactatggcaaatcccaggtct

SEQ ID NO: 3044234 - DNA, 25 bp, Homo sapien
aactccttaggtagctctggaggcc

SEQ ID NO: 3044235 - DNA, 25 bp, Homo sapien
ggcggttgagctacaaactccttag

SEQ ID NO: 3044236 - DNA, 25 bp, Homo sapien
tgataataatacacaggcggttgag

SEQ ID NO: 3044237 - DNA, 25 bp, Homo sapien
ggagttatggtaagtccaccaggtc

SEQ ID NO: 3044238 - DNA, 25 bp, Homo sapien
attgtcacctcataacgaggtggaa

SEQ ID NO: 3044239 - DNA, 25 bp, Homo sapien
tgagctacaacctccgtaggtggtt

SEQ ID NO: 3044240 - DNA, 25 bp, Homo sapien
cataacgaggtggaagttgagctac

SEQ ID NO: 3044241 - DNA, 25 bp, Homo sapien
gctacaacctccgtaggtggttctg

SEQ ID NO: 3044242 - DNA, 25 bp, Homo sapien
tggtaagtttcagatccaaagttta

SEQ ID NO: 3044243 - DNA, 25 bp, Homo sapien
gcagtaggttgtggagttgtggtaa

SEQ ID NO: 3044244 - DNA, 25 bp, Homo sapien
gagttgtggtaagtttcagatccaa

SEQ ID NO: 3044245 - DNA, 25 bp, Homo sapien
tgtggtaagtttcagatccaaagtt

SEQ ID NO: 3044246 - DNA, 25 bp, Homo sapien
ttttctcagggttgtcgaatgctca

SEQ ID NO: 3044247 - DNA, 25 bp, Homo sapien
ggtgacactggatactgagcctggt

SEQ ID NO: 3044248 - DNA, 25 bp, Homo sapien
gagttatagtaagccctaggtctaa

SEQ ID NO: 3044249 - DNA, 25 bp, Homo sapien
ccttgctgttgaaattatcatctca

SEQ ID NO: 3044250 - DNA, 25 bp, Homo sapien
gctggcttgaaagttctatattctt

SEQ ID NO: 3044251 - DNA, 25 bp, Homo sapien
ggcttgaaagttctatattcttggg

SEQ ID NO: 3044252 - DNA, 25 bp, Homo sapien
atctgctggcttgaaagttctatat

SEQ ID NO: 3044253 - DNA, 25 bp, Homo sapien
ctgctggcttgaaagttctatattc

SEQ ID NO: 3044254 - DNA, 25 bp, Homo sapien
tgagttagagagggttccacttcct

SEQ ID NO: 3044255 - DNA, 25 bp, Homo sapien
ttagagagggttccacttcctgagg

SEQ ID NO: 3044256 - DNA, 25 bp, Homo sapien
agttagagagggttccacttcctga

SEQ ID NO: 3044257 - DNA, 25 bp, Homo sapien
gagggttccacttcctgagggagct

SEQ ID NO: 3044258 - DNA, 25 bp, Homo sapien
aaagatgggctatctgctggactgg

SEQ ID NO: 3044259 - DNA, 25 bp, Homo sapien
tctaccacaatagagggctctgaag

SEQ ID NO: 3044260 - DNA, 25 bp, Homo sapien
gattgacctcttttgtggacttcag

SEQ ID NO: 3044261 - DNA, 25 bp, Homo sapien
taggactggagatagttcaaccttc

SEQ ID NO: 3044262 - DNA, 25 bp, Homo sapien
ctgaagattcactctcttcaggaga

SEQ ID NO: 3044263 - DNA, 25 bp, Homo sapien
cattcaatggacttacaatgtctga

SEQ ID NO: 3044264 - DNA, 25 bp, Homo sapien
ccaagttgtgggcttttgagcaagt

SEQ ID NO: 3044265 - DNA, 25 bp, Homo sapien
aatattgaagacagatcttcaggtg

SEQ ID NO: 3044266 - DNA, 25 bp, Homo sapien
tcaggggtagttaactgctgaatga

SEQ ID NO: 3044267 - DNA, 25 bp, Homo sapien
atgccattgtaggtgctaggctctg

SEQ ID NO: 3044268 - DNA, 25 bp, Homo sapien
tgctttgggctgatgtcaatacatg

SEQ ID NO: 3044269 - DNA, 25 bp, Homo sapien
tgggctgatgtcaatacatgacagc

SEQ ID NO: 3044270 - DNA, 25 bp, Homo sapien
tgatgtcaatacatgacagcgtctc

SEQ ID NO: 3044271 - DNA, 25 bp, Homo sapien
tgaaccaatgaatcctgagtaggtt

SEQ ID NO: 3044272 - DNA, 25 bp, Homo sapien
ctgaaccaatgaatcctgagtaggt

SEQ ID NO: 3044273 - DNA, 25 bp, Homo sapien
tggacgtgaagctgcagtcttgtcc

SEQ ID NO: 3044274 - DNA, 25 bp, Homo sapien
agaatgttcaatgtctgtatggggt

SEQ ID NO: 3044275 - DNA, 25 bp, Homo sapien
tagaatgttcaatgtctgtatgggg

SEQ ID NO: 3044276 - DNA, 25 bp, Homo sapien
cttagggtgctttggcagaggagct

SEQ ID NO: 3044277 - DNA, 25 bp, Homo sapien
ttagggtgctttggcagaggagctg

SEQ ID NO: 3044278 - DNA, 25 bp, Homo sapien
gggtgctttggcagaggagctgtag

SEQ ID NO: 3044279 - DNA, 25 bp, Homo sapien
tgctttggcagaggagctgtagtca

SEQ ID NO: 3044280 - DNA, 25 bp, Homo sapien
aatttcagatccaaaggttgcactg

SEQ ID NO: 3044281 - DNA, 25 bp, Homo sapien
ctctctgtagtaggttgttgattcg

SEQ ID NO: 3044282 - DNA, 25 bp, Homo sapien
gacactggccagtattgaatgcgga

SEQ ID NO: 3044283 - DNA, 25 bp, Homo sapien
ttgagttacaacctccataggtggc

SEQ ID NO: 3044284 - DNA, 25 bp, Homo sapien
taatgctggatactgagcttggtcc

SEQ ID NO: 3044285 - DNA, 25 bp, Homo sapien
gctggatactgagcttggtcctggc

SEQ ID NO: 3044286 - DNA, 25 bp, Homo sapien
aatgctggatactgagcttggtcct

SEQ ID NO: 3044287 - DNA, 25 bp, Homo sapien
tcataatgctggatactgagcttgg

SEQ ID NO: 3044288 - DNA, 25 bp, Homo sapien
ggaacctcctgatgagtcagagatg

SEQ ID NO: 3044289 - DNA, 25 bp, Homo sapien
tggagtctgagttggaacctcctga

SEQ ID NO: 3044290 - DNA, 25 bp, Homo sapien
gagtctgagttggaacctcctgatg

SEQ ID NO: 3044291 - DNA, 25 bp, Homo sapien
gagttggaacctcctgatgagtcag

SEQ ID NO: 3044292 - DNA, 25 bp, Homo sapien
tctgagctggtgactgagttgtggg

SEQ ID NO: 3044293 - DNA, 25 bp, Homo sapien
gagctggtgactgagttgtgggctc

SEQ ID NO: 3044294 - DNA, 25 bp, Homo sapien
tgagctggtgactgagttgtgggct

SEQ ID NO: 3044295 - DNA, 25 bp, Homo sapien
gtctgagctggtgactgagttgtgg

SEQ ID NO: 3044296 - DNA, 25 bp, Homo sapien
cttggagcctcagttaaatcctgtt

SEQ ID NO: 3044297 - DNA, 25 bp, Homo sapien
gagcctcagttaaatcctgttggtt

SEQ ID NO: 3044298 - DNA, 25 bp, Homo sapien
gctcactcgggggagattcatcctc

SEQ ID NO: 3044299 - DNA, 25 bp, Homo sapien
tgttcttgctcactcgggggagatt

SEQ ID NO: 3044300 - DNA, 25 bp, Homo sapien
tgtgagtcagcttatcattcagatc

SEQ ID NO: 3044301 - DNA, 25 bp, Homo sapien
cttgtgagtcagcttatcattcaga

SEQ ID NO: 3044302 - DNA, 25 bp, Homo sapien
gatcctggtgtgcaacagcgaactt

SEQ ID NO: 3044303 - DNA, 25 bp, Homo sapien
tggtgtgcaacagcgaacttctctg

SEQ ID NO: 3044304 - DNA, 25 bp, Homo sapien
taagttccgttcgagatccgctcct

SEQ ID NO: 3044305 - DNA, 25 bp, Homo sapien
gactccagcagcctatagtggtggg

SEQ ID NO: 3044306 - DNA, 25 bp, Homo sapien
gctcctcgtcaccagggcgatctta

SEQ ID NO: 3044307 - DNA, 25 bp, Homo sapien
aagttacatgacctcgccttgggat

SEQ ID NO: 3044308 - DNA, 25 bp, Homo sapien
ctccaagctgaaatccgagagatac

SEQ ID NO: 3044309 - DNA, 25 bp, Homo sapien
cttggccatactgcttccagggaga

SEQ ID NO: 3044310 - DNA, 25 bp, Homo sapien
ttcgcatctgacacctacgatgtct

SEQ ID NO: 3044311 - DNA, 25 bp, Homo sapien
gcatctgacacctacgatgtcttca

SEQ ID NO: 3044312 - DNA, 25 bp, Homo sapien
tcttcgcatctgacacctacgatgt

SEQ ID NO: 3044313 - DNA, 25 bp, Homo sapien
tcttcttcgcatctgacacctacga

SEQ ID NO: 3044314 - DNA, 25 bp, Homo sapien
gcagacacaggctcacataccctta

SEQ ID NO: 3044315 - DNA, 25 bp, Homo sapien
caatagggaatacaagcaataggga

SEQ ID NO: 3044316 - DNA, 25 bp, Homo sapien
tagacaatagaactaccttcaaggc

SEQ ID NO: 3044317 - DNA, 25 bp, Homo sapien
ttgggcacagcctataagattcgtg

SEQ ID NO: 3044318 - DNA, 25 bp, Homo sapien
ttatttgcttactgaaactgaagta

SEQ ID NO: 3044319 - DNA, 25 bp, Homo sapien
tcaaggatgatcaagacagtcttac

SEQ ID NO: 3044320 - DNA, 25 bp, Homo sapien
ccttctgaatagcaagcttctgggc

SEQ ID NO: 3044321 - DNA, 25 bp, Homo sapien
ttctgaatagcaagcttctgggctg

SEQ ID NO: 3044322 - DNA, 25 bp, Homo sapien
ctgaatagcaagcttctgggctgtc

SEQ ID NO: 3044323 - DNA, 25 bp, Homo sapien
tctgaatagcaagcttctgggctgt

SEQ ID NO: 3044324 - DNA, 25 bp, Homo sapien
aagcatgatggccatgaatactaaa

SEQ ID NO: 3044325 - DNA, 25 bp, Homo sapien
gagtaccctttctaggtatctatat

SEQ ID NO: 3044326 - DNA, 25 bp, Homo sapien
tactcaacatcagtatcaactgagt

SEQ ID NO: 3044327 - DNA, 25 bp, Homo sapien
gggagcctactccactccattagcc

SEQ ID NO: 3044328 - DNA, 25 bp, Homo sapien
tcctccactcccagtgaaaacagac

SEQ ID NO: 3044329 - DNA, 25 bp, Homo sapien
ctcctccactcccagtgaaaacaga

SEQ ID NO: 3044330 - DNA, 25 bp, Homo sapien
cctcctccactcccagtgaaaacag

SEQ ID NO: 3044331 - DNA, 25 bp, Homo sapien
aacttcaggctttgcttcggaagtg

SEQ ID NO: 3044332 - DNA, 25 bp, Homo sapien
agaacttcaggctttgcttcggaag

SEQ ID NO: 3044333 - DNA, 25 bp, Homo sapien
cttcaggctttgcttcggaagtggc

SEQ ID NO: 3044334 - DNA, 25 bp, Homo sapien
caggctttgcttcggaagtggcacc

SEQ ID NO: 3044335 - DNA, 25 bp, Homo sapien
gatgatccttttggaacacccattg

SEQ ID NO: 3044336 - DNA, 25 bp, Homo sapien
tggaacacccattgaaaccaaagta

SEQ ID NO: 3044337 - DNA, 25 bp, Homo sapien
cttgatgatccttttggaacaccca

SEQ ID NO: 3044338 - DNA, 25 bp, Homo sapien
tgaaaccaaagtagtaattcgccag

SEQ ID NO: 3044339 - DNA, 25 bp, Homo sapien
gcagcccttgcagaataaaacttaa

SEQ ID NO: 3044340 - DNA, 25 bp, Homo sapien
gggcagcccttgcagaataaaactt

SEQ ID NO: 3044341 - DNA, 25 bp, Homo sapien
gactgaatacagaaggccaaactga

SEQ ID NO: 3044342 - DNA, 25 bp, Homo sapien
ctgaatacagaaggccaaactgaga

SEQ ID NO: 3044343 - DNA, 25 bp, Homo sapien
tgtgggggtgggacaagtaaatgca

SEQ ID NO: 3044344 - DNA, 25 bp, Homo sapien
gtgggggtgggacaagtaaatgcat

SEQ ID NO: 3044345 - DNA, 25 bp, Homo sapien
ctgtgggggtgggacaagtaaatgc

SEQ ID NO: 3044346 - DNA, 25 bp, Homo sapien
cccagtcagcgggtgggcagctttc

SEQ ID NO: 3044347 - DNA, 25 bp, Homo sapien
ttataattaagagtccttcagcgga

SEQ ID NO: 3044348 - DNA, 25 bp, Homo sapien
caaacctctcttcgcgaaggatgcg

SEQ ID NO: 3044349 - DNA, 25 bp, Homo sapien
tctccgggactctaaaaatctgttg

SEQ ID NO: 3044350 - DNA, 25 bp, Homo sapien
cacactagcaaggttttgtcactct

SEQ ID NO: 3044351 - DNA, 25 bp, Homo sapien
tcagctcccacactagcaaggtttt

SEQ ID NO: 3044352 - DNA, 25 bp, Homo sapien
gagctcagctcccacactagcaagg

SEQ ID NO: 3044353 - DNA, 25 bp, Homo sapien
gctcccacactagcaaggttttgtc

SEQ ID NO: 3044354 - DNA, 25 bp, Homo sapien
acctgcgcggctaaccctcgcccca

SEQ ID NO: 3044355 - DNA, 25 bp, Homo sapien
ctgcgcggctaaccctcgccccagc

SEQ ID NO: 3044356 - DNA, 25 bp, Homo sapien
gcacctgcgcggctaaccctcgccc

SEQ ID NO: 3044357 - DNA, 25 bp, Homo sapien
ttcaccgcacctgcgcggctaaccc

SEQ ID NO: 3044358 - DNA, 25 bp, Homo sapien
gtttacaaataacagacaggaacca

SEQ ID NO: 3044359 - DNA, 25 bp, Homo sapien
ttggaatgactccacggtgcacccg

SEQ ID NO: 3044360 - DNA, 25 bp, Homo sapien
ggacaggagtcttggaatgactcca

SEQ ID NO: 3044361 - DNA, 25 bp, Homo sapien
gagtcttggaatgactccacggtgc

SEQ ID NO: 3044362 - DNA, 25 bp, Homo sapien
caggagtcttggaatgactccacgg

SEQ ID NO: 3044363 - DNA, 25 bp, Homo sapien
cagtagaagagtggccggcctgaac

SEQ ID NO: 3044364 - DNA, 25 bp, Homo sapien
ggttcttgcctcacactcagtaact

SEQ ID NO: 3044365 - DNA, 25 bp, Homo sapien
aaagacatggttcttgcctcacact

SEQ ID NO: 3044366 - DNA, 25 bp, Homo sapien
gacatggttcttgcctcacactcag

SEQ ID NO: 3044367 - DNA, 25 bp, Homo sapien
tcttgcctcacactcagtaactctt

SEQ ID NO: 3044368 - DNA, 25 bp, Homo sapien
tctggtgtttgcctgcttccctgga

SEQ ID NO: 3044369 - DNA, 25 bp, Homo sapien
actgtcccctctgacgaatcctgta

SEQ ID NO: 3044370 - DNA, 25 bp, Homo sapien
tggatcaacgtttccacattttaaa

SEQ ID NO: 3044371 - DNA, 25 bp, Homo sapien
atcctgtaaaactctctcatctctg

SEQ ID NO: 3044372 - DNA, 25 bp, Homo sapien
ctgtcacgtcctccttcgtggggct

SEQ ID NO: 3044373 - DNA, 25 bp, Homo sapien
tgtcacgtcctccttcgtggggctc

SEQ ID NO: 3044374 - DNA, 25 bp, Homo sapien
gacacaatcctttttgcgcagtgga

SEQ ID NO: 3044375 - DNA, 25 bp, Homo sapien
cctttttgcgcagtggatgcctgca

SEQ ID NO: 3044376 - DNA, 25 bp, Homo sapien
gatgcctgcaagaaggttgggattc

SEQ ID NO: 3044377 - DNA, 25 bp, Homo sapien
ccgtgctccggacacaatccttttt

SEQ ID NO: 3044378 - DNA, 25 bp, Homo sapien
cagtctacgtggcaaaggttttccg

SEQ ID NO: 3044379 - DNA, 25 bp, Homo sapien
gaagaggccatagtcaaagcttcca

SEQ ID NO: 3044380 - DNA, 25 bp, Homo sapien
tccgagtaactcttataatcgttgc

SEQ ID NO: 3044381 - DNA, 25 bp, Homo sapien
taatcgttgcaccagtagtggctgt

SEQ ID NO: 3044382 - DNA, 25 bp, Homo sapien
agtcacagcgactgatgaggctggc

SEQ ID NO: 3044383 - DNA, 25 bp, Homo sapien
gctgctgaccaaatagatgagtagc

SEQ ID NO: 3044384 - DNA, 25 bp, Homo sapien
aaatagatgagtagcgcctttgtca

SEQ ID NO: 3044385 - DNA, 25 bp, Homo sapien
cctgatttagggcaagaaagctgct

SEQ ID NO: 3044386 - DNA, 25 bp, Homo sapien
gggctgatggttcttagggtcttgc

SEQ ID NO: 3044387 - DNA, 25 bp, Homo sapien
tttctgctgatcttctctgagagcc

SEQ ID NO: 3044388 - DNA, 25 bp, Homo sapien
tctgctgatcttctctgagagcctg

SEQ ID NO: 3044389 - DNA, 25 bp, Homo sapien
agactttctgctgatcttctctgag

SEQ ID NO: 3044390 - DNA, 25 bp, Homo sapien
caacctggctgtttccaatctcttt

SEQ ID NO: 3044391 - DNA, 25 bp, Homo sapien
caggtttccttactcactcactgct

SEQ ID NO: 3044392 - DNA, 25 bp, Homo sapien
agccaggtttccttactcactcact

SEQ ID NO: 3044393 - DNA, 25 bp, Homo sapien
ctcactcactgctccaacctggctg

SEQ ID NO: 3044394 - DNA, 25 bp, Homo sapien
ttctgggaggatctgtagaacaagg

SEQ ID NO: 3044395 - DNA, 25 bp, Homo sapien
caaggctgtctacagtaggagcctc

SEQ ID NO: 3044396 - DNA, 25 bp, Homo sapien
gaggatctgtagaacaaggctgtct

SEQ ID NO: 3044397 - DNA, 25 bp, Homo sapien
tagaacaaggctgtctacagtagga

SEQ ID NO: 3044398 - DNA, 25 bp, Homo sapien
tgggcttgtgcccatcaagcactct

SEQ ID NO: 3044399 - DNA, 25 bp, Homo sapien
ggcttgtgcccatcaagcactcttc

SEQ ID NO: 3044400 - DNA, 25 bp, Homo sapien
cccattttactctctcgtggatgca

SEQ ID NO: 3044401 - DNA, 25 bp, Homo sapien
ctgggcttgtgcccatcaagcactc

SEQ ID NO: 3044402 - DNA, 25 bp, Homo sapien
ccctgagttaaaggctccatggccg

SEQ ID NO: 3044403 - DNA, 25 bp, Homo sapien
ttgatacaggccctgagttaaaggc

SEQ ID NO: 3044404 - DNA, 25 bp, Homo sapien
tacaggccctgagttaaaggctcca

SEQ ID NO: 3044405 - DNA, 25 bp, Homo sapien
gtggtgttgatacaggccctgagtt

SEQ ID NO: 3044406 - DNA, 25 bp, Homo sapien
tagcctcctgcgcatttccagagtt

SEQ ID NO: 3044407 - DNA, 25 bp, Homo sapien
gcatagcctcctgcgcatttccaga

SEQ ID NO: 3044408 - DNA, 25 bp, Homo sapien
ttcgcatagcctcctgcgcatttcc

SEQ ID NO: 3044409 - DNA, 25 bp, Homo sapien
agcctcctgcgcatttccagagttc

SEQ ID NO: 3044410 - DNA, 25 bp, Homo sapien
ggcagttttgcagaatccagcgttt

SEQ ID NO: 3044411 - DNA, 25 bp, Homo sapien
cagaatccagcgtttcccacaatca

SEQ ID NO: 3044412 - DNA, 25 bp, Homo sapien
atggtggcagttttgcagaatccag

SEQ ID NO: 3044413 - DNA, 25 bp, Homo sapien
tttgcagaatccagcgtttcccaca

SEQ ID NO: 3044414 - DNA, 25 bp, Homo sapien
cttcaaggagatatctggaggccta

SEQ ID NO: 3044415 - DNA, 25 bp, Homo sapien
ctggtacttcaaagagaagaggctt

SEQ ID NO: 3044416 - DNA, 25 bp, Homo sapien
gaagaggcttcaaggagatatctgg

SEQ ID NO: 3044417 - DNA, 25 bp, Homo sapien
ggaggcctatgaggtgcaaagcgaa

SEQ ID NO: 3044418 - DNA, 25 bp, Homo sapien
catgcttgggttttggactaagagt

SEQ ID NO: 3044419 - DNA, 25 bp, Homo sapien
agagtttacccctagccgtgtctca

SEQ ID NO: 3044420 - DNA, 25 bp, Homo sapien
gcttaacatgggaggtagagatttg

SEQ ID NO: 3044421 - DNA, 25 bp, Homo sapien
tccctgtcctgcaaagcttaacatg

SEQ ID NO: 3044422 - DNA, 25 bp, Homo sapien
gaggatctagcaaagtctctgcaaa

SEQ ID NO: 3044423 - DNA, 25 bp, Homo sapien
ccggacttcctatgaaaaagttgca

SEQ ID NO: 3044424 - DNA, 25 bp, Homo sapien
tattaagagtgcactggccggatgt

SEQ ID NO: 3044425 - DNA, 25 bp, Homo sapien
ctggaaggctggaaactggctaagt

SEQ ID NO: 3044426 - DNA, 25 bp, Homo sapien
ggtatttcctcctaagattgagaaa

SEQ ID NO: 3044427 - DNA, 25 bp, Homo sapien
ctctgcccacgtcccttaactttgg

SEQ ID NO: 3044428 - DNA, 25 bp, Homo sapien
tttggtatttcctcctaagattgag

SEQ ID NO: 3044429 - DNA, 25 bp, Homo sapien
actttggtatttcctcctaagattg

SEQ ID NO: 3044430 - DNA, 25 bp, Homo sapien
gactggctagtttcagcctaataag

SEQ ID NO: 3044431 - DNA, 25 bp, Homo sapien
cttctgtaaacaagggcttccacta

SEQ ID NO: 3044432 - DNA, 25 bp, Homo sapien
ttcataggtttacccctctcttctg

SEQ ID NO: 3044433 - DNA, 25 bp, Homo sapien
tgcttctctcaatgtgactggctag

SEQ ID NO: 3044434 - DNA, 25 bp, Homo sapien
tcactgggagttgaggagctggggt

SEQ ID NO: 3044435 - DNA, 25 bp, Homo sapien
cactgggagttgaggagctggggtt

SEQ ID NO: 3044436 - DNA, 25 bp, Homo sapien
ctgggagttgaggagctggggttga

SEQ ID NO: 3044437 - DNA, 25 bp, Homo sapien
tgggagttgaggagctggggttgac

SEQ ID NO: 3044438 - DNA, 25 bp, Homo sapien
tactcttggacccagtcgtcattgg

SEQ ID NO: 3044439 - DNA, 25 bp, Homo sapien
ggttgggatccttgatgtactcttg

SEQ ID NO: 3044440 - DNA, 25 bp, Homo sapien
gcagacttctcggttcctcttggtg

SEQ ID NO: 3044441 - DNA, 25 bp, Homo sapien
gcagcaaaggtaggttgggatcctt

SEQ ID NO: 3044442 - DNA, 25 bp, Homo sapien
gcaggtgacagttgagggcctttct

SEQ ID NO: 3044443 - DNA, 25 bp, Homo sapien
tctcataatacttcaggcagcaggt

SEQ ID NO: 3044444 - DNA, 25 bp, Homo sapien
gatggggtgttcacccactcaggaa

SEQ ID NO: 3044445 - DNA, 25 bp, Homo sapien
tgtatcccaccactagtctccttgg

SEQ ID NO: 3044446 - DNA, 25 bp, Homo sapien
ttggctggctgcgagaagccgaagt

SEQ ID NO: 3044447 - DNA, 25 bp, Homo sapien
cgagaagccgaagtaatgataagga

SEQ ID NO: 3044448 - DNA, 25 bp, Homo sapien
gccgaagtaatgataaggatgagga

SEQ ID NO: 3044449 - DNA, 25 bp, Homo sapien
ctgcgagaagccgaagtaatgataa

SEQ ID NO: 3044450 - DNA, 25 bp, Homo sapien
aatgaagatgttgtctgttgctggt

SEQ ID NO: 3044451 - DNA, 25 bp, Homo sapien
tctcagcgaggcagtacagcttcag

SEQ ID NO: 3044452 - DNA, 25 bp, Homo sapien
cctctcagcgaggcagtacagcttc

SEQ ID NO: 3044453 - DNA, 25 bp, Homo sapien
tgttgctggtggtccgcttgccaac

SEQ ID NO: 3044454 - DNA, 25 bp, Homo sapien
tctgcagagcgaggcttgatgccga

SEQ ID NO: 3044455 - DNA, 25 bp, Homo sapien
cctggtgtcctcagtgcatggccaa

SEQ ID NO: 3044456 - DNA, 25 bp, Homo sapien
tattttttgtaccaggctccagcaa

SEQ ID NO: 3044457 - DNA, 25 bp, Homo sapien
catggccaatgagtaaatcccgtag

SEQ ID NO: 3044458 - DNA, 25 bp, Homo sapien
tgagagttagcggtgggtggaggag

SEQ ID NO: 3044459 - DNA, 25 bp, Homo sapien
ggagggggccttggcatcttctctt

SEQ ID NO: 3044460 - DNA, 25 bp, Homo sapien
agggaagctccaagagggtgactgg

SEQ ID NO: 3044461 - DNA, 25 bp, Homo sapien
gtctttaattcaaagcagggaagct

SEQ ID NO: 3044462 - DNA, 25 bp, Homo sapien
ccacttgtcactggggttggtacag

SEQ ID NO: 3044463 - DNA, 25 bp, Homo sapien
tccttgatatagtcctggacccact

SEQ ID NO: 3044464 - DNA, 25 bp, Homo sapien
ggaatggccccttttggtgatgaag

SEQ ID NO: 3044465 - DNA, 25 bp, Homo sapien
ccttcatgtccttgatatagtcctg

SEQ ID NO: 3044466 - DNA, 25 bp, Homo sapien
tccataatccgctgacgcgggatct

SEQ ID NO: 3044467 - DNA, 25 bp, Homo sapien
ggtctcatagtaatccataatccgc

SEQ ID NO: 3044468 - DNA, 25 bp, Homo sapien
tcttgtaggtagtgtaggtgaagca

SEQ ID NO: 3044469 - DNA, 25 bp, Homo sapien
ccgctgacgcgggatcttgtaggta

SEQ ID NO: 3044470 - DNA, 25 bp, Homo sapien
cagagaaggctagggacttggccaa

SEQ ID NO: 3044471 - DNA, 25 bp, Homo sapien
catcggagagggcaagtcaaactgt

SEQ ID NO: 3044472 - DNA, 25 bp, Homo sapien
ttgaaccgacaacctgcagagagag

SEQ ID NO: 3044473 - DNA, 25 bp, Homo sapien
ggagacagcccctcagaacttggag

SEQ ID NO: 3044474 - DNA, 25 bp, Homo sapien
caccaactttagctgtattttaaca

SEQ ID NO: 3044475 - DNA, 25 bp, Homo sapien
ggtgggccactcttttgcttagcgg

SEQ ID NO: 3044476 - DNA, 25 bp, Homo sapien
caagcaatgctgcactcactgggca

SEQ ID NO: 3044477 - DNA, 25 bp, Homo sapien
taagcagaacctacagtcctaagtc

SEQ ID NO: 3044478 - DNA, 25 bp, Homo sapien
ggtcaaggctggaagatcccaactt

SEQ ID NO: 3044479 - DNA, 25 bp, Homo sapien
tcttggtccctagggcgatggtgat

SEQ ID NO: 3044480 - DNA, 25 bp, Homo sapien
tcagtcttggtccctagggcgatgg

SEQ ID NO: 3044481 - DNA, 25 bp, Homo sapien
gggaatggcagccacggagatcttc

SEQ ID NO: 3044482 - DNA, 25 bp, Homo sapien
gaatggcagccacggagatcttcat

SEQ ID NO: 3044483 - DNA, 25 bp, Homo sapien
gctgtgggaagctgttgtgggagga

SEQ ID NO: 3044484 - DNA, 25 bp, Homo sapien
gctgttgtgggaggagagctggcct

SEQ ID NO: 3044485 - DNA, 25 bp, Homo sapien
agctggcctggtgggagcttcagag

SEQ ID NO: 3044486 - DNA, 25 bp, Homo sapien
tgggaagctgttgtgggaggagagc

SEQ ID NO: 3044487 - DNA, 25 bp, Homo sapien
agagagaccagctccaatgccacat

SEQ ID NO: 3044488 - DNA, 25 bp, Homo sapien
gttggaaagctatacaaactgactc

SEQ ID NO: 3044489 - DNA, 25 bp, Homo sapien
ccgaggtagaatcctagagagacca

SEQ ID NO: 3044490 - DNA, 25 bp, Homo sapien
ctctggttgattaagcaaaaaggac

SEQ ID NO: 3044491 - DNA, 25 bp, Homo sapien
atttcctcttaaaactcaagcaaag

SEQ ID NO: 3044492 - DNA, 25 bp, Homo sapien
tatttcctcttaaaactcaagcaaa

SEQ ID NO: 3044493 - DNA, 25 bp, Homo sapien
ttatttcctcttaaaactcaagcaa

SEQ ID NO: 3044494 - DNA, 25 bp, Homo sapien
tttatttcctcttaaaactcaagca

SEQ ID NO: 3044495 - DNA, 25 bp, Homo sapien
gatgcattactttcattaccagaca

SEQ ID NO: 3044496 - DNA, 25 bp, Homo sapien
attactttcattaccagacacaaca

SEQ ID NO: 3044497 - DNA, 25 bp, Homo sapien
tattagatgcattactttcattacc

SEQ ID NO: 3044498 - DNA, 25 bp, Homo sapien
tactttcattaccagacacaacaat

SEQ ID NO: 3044499 - DNA, 25 bp, Homo sapien
aggtgttggaggtgggtggctggcc

SEQ ID NO: 3044500 - DNA, 25 bp, Homo sapien
ggaggtgttggaggtgggtggctgg

SEQ ID NO: 3044501 - DNA, 25 bp, Homo sapien
gctggcctcttttgtctctttatta

SEQ ID NO: 3044502 - DNA, 25 bp, Homo sapien
aggtgggtggctggcctcttttgtc

SEQ ID NO: 3044503 - DNA, 25 bp, Homo sapien
gcacagacttgccgccccttcttgg

SEQ ID NO: 3044504 - DNA, 25 bp, Homo sapien
ctgaactcccggaccactgggtttg

SEQ ID NO: 3044505 - DNA, 25 bp, Homo sapien
tggcacagacttgccgccccttctt

SEQ ID NO: 3044506 - DNA, 25 bp, Homo sapien
ctcgctgctcgtttcaaaataactt

SEQ ID NO: 3044507 - DNA, 25 bp, Homo sapien
tgctttgtgagatgtaggaggtgca

SEQ ID NO: 3044508 - DNA, 25 bp, Homo sapien
gatgctttgtgagatgtaggaggtg

SEQ ID NO: 3044509 - DNA, 25 bp, Homo sapien
ctttgtgagatgtaggaggtgcagc

SEQ ID NO: 3044510 - DNA, 25 bp, Homo sapien
tgttcagaactactggattttccag

SEQ ID NO: 3044511 - DNA, 25 bp, Homo sapien
aactactggattttccagtggaagc

SEQ ID NO: 3044512 - DNA, 25 bp, Homo sapien
gacatcattaactctgtctctgcat

SEQ ID NO: 3044513 - DNA, 25 bp, Homo sapien
cagtggaagctttgacatcattaac

SEQ ID NO: 3044514 - DNA, 25 bp, Homo sapien
gacagcaacaagcatgaggcaggag

SEQ ID NO: 3044515 - DNA, 25 bp, Homo sapien
cctgggatccaaggacagcaacaag

SEQ ID NO: 3044516 - DNA, 25 bp, Homo sapien
agagggcagccacggagaccttcat

SEQ ID NO: 3044517 - DNA, 25 bp, Homo sapien
catttatgaactgggcctgggatcc

SEQ ID NO: 3044518 - DNA, 25 bp, Homo sapien
tagttccaaccaggaggtgttagca

SEQ ID NO: 3044519 - DNA, 25 bp, Homo sapien
gaattatcccaatagctacaggcag

SEQ ID NO: 3044520 - DNA, 25 bp, Homo sapien
ggtgaatccatatcagtctgcagca

SEQ ID NO: 3044521 - DNA, 25 bp, Homo sapien
gcagagtgagagaccgagacaagat

SEQ ID NO: 3044522 - DNA, 25 bp, Homo sapien
tggtggctggcaacttgtgtccctt

SEQ ID NO: 3044523 - DNA, 25 bp, Homo sapien
tcaggaaggtagttgaggcaagaaa

SEQ ID NO: 3044524 - DNA, 25 bp, Homo sapien
cagaacacaagaataaatgcttctt

SEQ ID NO: 3044525 - DNA, 25 bp, Homo sapien
ttagatgaattgctctaaatccaga

SEQ ID NO: 3044526 - DNA, 25 bp, Homo sapien
gcacagaaacgtcgccccttcttgg

SEQ ID NO: 3044527 - DNA, 25 bp, Homo sapien
aacttgcttatcactggggttggca

SEQ ID NO: 3044528 - DNA, 25 bp, Homo sapien
ttgatccgtgtgtccagcttcagca

SEQ ID NO: 3044529 - DNA, 25 bp, Homo sapien
gcattctcacgcaaacctgaacttg

SEQ ID NO: 3044530 - DNA, 25 bp, Homo sapien
ccctgatggacaccagtctatcagg

SEQ ID NO: 3044531 - DNA, 25 bp, Homo sapien
ctgcaagatgctacagagtccttct

SEQ ID NO: 3044532 - DNA, 25 bp, Homo sapien
cctccctgcaagatgctacagagtc

SEQ ID NO: 3044533 - DNA, 25 bp, Homo sapien
tggacaccagtctatcaggtcctcc

SEQ ID NO: 3044534 - DNA, 25 bp, Homo sapien
cagtcagcactagtagcatggaatc

SEQ ID NO: 3044535 - DNA, 25 bp, Homo sapien
tcgctgttcgtttcaaagtaactct

SEQ ID NO: 3044536 - DNA, 25 bp, Homo sapien
ctcgctgttcgtttcaaagtaactc

SEQ ID NO: 3044537 - DNA, 25 bp, Homo sapien
gcagcagtcagcactagtagcatgg

SEQ ID NO: 3044538 - DNA, 25 bp, Homo sapien
tcatctgaggaccaatctttctcct

SEQ ID NO: 3044539 - DNA, 25 bp, Homo sapien
cagcatgagaaagggtcatctgagg

SEQ ID NO: 3044540 - DNA, 25 bp, Homo sapien
ctgcagcatgagaaagggtcatctg

SEQ ID NO: 3044541 - DNA, 25 bp, Homo sapien
gtcatctgaggaccaatctttctcc

SEQ ID NO: 3044542 - DNA, 25 bp, Homo sapien
tccagaagtactggattttccaatg

SEQ ID NO: 3044543 - DNA, 25 bp, Homo sapien
gtccagaagtactggattttccaat

SEQ ID NO: 3044544 - DNA, 25 bp, Homo sapien
ccagaagtactggattttccaatgg

SEQ ID NO: 3044545 - DNA, 25 bp, Homo sapien
atccaagggcagtaacaagcatgag

SEQ ID NO: 3044546 - DNA, 25 bp, Homo sapien
ttttgtgacccgggcctgggatcca

SEQ ID NO: 3044547 - DNA, 25 bp, Homo sapien
agagggcagccacggagaccttcat

SEQ ID NO: 3044548 - DNA, 25 bp, Homo sapien
cagtaacaagcatgaggcaggagag

SEQ ID NO: 3044549 - DNA, 25 bp, Homo sapien
gcttcctggcttctcgggatgccag

SEQ ID NO: 3044550 - DNA, 25 bp, Homo sapien
ccagtgtgcctacccttgggaagtc

SEQ ID NO: 3044551 - DNA, 25 bp, Homo sapien
taaagtctgcgctatgccatgcaat

SEQ ID NO: 3044552 - DNA, 25 bp, Homo sapien
tttcttgtgtaagactgggcccagg

SEQ ID NO: 3044553 - DNA, 25 bp, Homo sapien
gaaactgctctagggttgcacagag

SEQ ID NO: 3044554 - DNA, 25 bp, Homo sapien
gttggcatagacctttccagtctcc

SEQ ID NO: 3044555 - DNA, 25 bp, Homo sapien
accttgctggagttggcatagacct

SEQ ID NO: 3044556 - DNA, 25 bp, Homo sapien
tccagttgctgatgtattcctggac

SEQ ID NO: 3044557 - DNA, 25 bp, Homo sapien
gatgtattcctggacccacaccttg

SEQ ID NO: 3044558 - DNA, 25 bp, Homo sapien
gacttgtaggaaagagttggcagat

SEQ ID NO: 3044559 - DNA, 25 bp, Homo sapien
gggctccttggaattctaatctgtc

SEQ ID NO: 3044560 - DNA, 25 bp, Homo sapien
tggcagatgggtacagtcttgctct

SEQ ID NO: 3044561 - DNA, 25 bp, Homo sapien
gaaagttaaagttcagtgcatcact

SEQ ID NO: 3044562 - DNA, 25 bp, Homo sapien
atctgcagtcctctgattttgtgtg

SEQ ID NO: 3044563 - DNA, 25 bp, Homo sapien
cagtggcatgctgtacaactttgta

SEQ ID NO: 3044564 - DNA, 25 bp, Homo sapien
tacaggctgtaccatacagtgaagg

SEQ ID NO: 3044565 - DNA, 25 bp, Homo sapien
cagtgaaggtgtacggtagactaca

SEQ ID NO: 3044566 - DNA, 25 bp, Homo sapien
gcatatattatacagcggtggtccc

SEQ ID NO: 3044567 - DNA, 25 bp, Homo sapien
tttgggaccacgaggtgacaagctc

SEQ ID NO: 3044568 - DNA, 25 bp, Homo sapien
gaatgcacatatgccacaataggga

SEQ ID NO: 3044569 - DNA, 25 bp, Homo sapien
gagctgttaaacaaactcagggagg

SEQ ID NO: 3044570 - DNA, 25 bp, Homo sapien
ccctcgtatgcttgtggatgagaca

SEQ ID NO: 3044571 - DNA, 25 bp, Homo sapien
tgtttcactaatcggaatcacagac

SEQ ID NO: 3044572 - DNA, 25 bp, Homo sapien
tcactgtgacgactctgttgatttt

SEQ ID NO: 3044573 - DNA, 25 bp, Homo sapien
actgtgacgactctgttgattttgt

SEQ ID NO: 3044574 - DNA, 25 bp, Homo sapien
tttgtttcactaatcggaatcacag

SEQ ID NO: 3044575 - DNA, 25 bp, Homo sapien
gttgctgaaagccttggtaatgtta

SEQ ID NO: 3044576 - DNA, 25 bp, Homo sapien
agccttggtaatgttatctttgttc

SEQ ID NO: 3044577 - DNA, 25 bp, Homo sapien
gctgaaagccttggtaatgttatct

SEQ ID NO: 3044578 - DNA, 25 bp, Homo sapien
cttggtaatgttatctttgttctcc

SEQ ID NO: 3044579 - DNA, 25 bp, Homo sapien
attatttccccaggccgatcacagc

SEQ ID NO: 3044580 - DNA, 25 bp, Homo sapien
caggccgatcacagccctgaacaaa

SEQ ID NO: 3044581 - DNA, 25 bp, Homo sapien
ttattatttccccaggccgatcaca

SEQ ID NO: 3044582 - DNA, 25 bp, Homo sapien
ttaaaagagcatctttattatttcc

SEQ ID NO: 3044583 - DNA, 25 bp, Homo sapien
gacagccactcggttgtcaccagac

SEQ ID NO: 3044584 - DNA, 25 bp, Homo sapien
gaggtcacacgcatgttcccaaggc

SEQ ID NO: 3044585 - DNA, 25 bp, Homo sapien
gcatgttcccaaggctcaggctcct

SEQ ID NO: 3044586 - DNA, 25 bp, Homo sapien
aggtcgctgggcctcgaagcttctg

SEQ ID NO: 3044587 - DNA, 25 bp, Homo sapien
ctgccggcttcgcttggttaggaag

SEQ ID NO: 3044588 - DNA, 25 bp, Homo sapien
ggtcagcacagacctgccggcttcg

SEQ ID NO: 3044589 - DNA, 25 bp, Homo sapien
actcagctccaggtcgctgacatat

SEQ ID NO: 3044590 - DNA, 25 bp, Homo sapien
tccaggtcgctgacatatttctgga

SEQ ID NO: 3044591 - DNA, 25 bp, Homo sapien
ctggggaatccagcaggggaatcct

SEQ ID NO: 3044592 - DNA, 25 bp, Homo sapien
gctcagggcttgctcctctttcagg

SEQ ID NO: 3044593 - DNA, 25 bp, Homo sapien
cctgcctatctctgtctagagagct

SEQ ID NO: 3044594 - DNA, 25 bp, Homo sapien
caccatggccccaccattctgctct

SEQ ID NO: 3044595 - DNA, 25 bp, Homo sapien
ggtgagcaggaagactggcacttac

SEQ ID NO: 3044596 - DNA, 25 bp, Homo sapien
tccctacctccatagaggtgagcag

SEQ ID NO: 3044597 - DNA, 25 bp, Homo sapien
ctgaccctccctacctccatagagg

SEQ ID NO: 3044598 - DNA, 25 bp, Homo sapien
tccatagaggtgagcaggaagactg

SEQ ID NO: 3044599 - DNA, 25 bp, Homo sapien
cgtctcaaagtagtcagctatgaaa

SEQ ID NO: 3044600 - DNA, 25 bp, Homo sapien
gctcgtctcaaagtagtcagctatg

SEQ ID NO: 3044601 - DNA, 25 bp, Homo sapien
tggctgctcgtctcaaagtagtcag

SEQ ID NO: 3044602 - DNA, 25 bp, Homo sapien
agcactggctgctcgtctcaaagta

SEQ ID NO: 3044603 - DNA, 25 bp, Homo sapien
ggtgatacccacaacgaaactcaga

SEQ ID NO: 3044604 - DNA, 25 bp, Homo sapien
gatccccgagcagttgaggaaggca

SEQ ID NO: 3044605 - DNA, 25 bp, Homo sapien
cttcagggaattttgtctggttcaa

SEQ ID NO: 3044606 - DNA, 25 bp, Homo sapien
agatgtttggcagccctttaagaag

SEQ ID NO: 3044607 - DNA, 25 bp, Homo sapien
gcagagaactggttgcagagagcca

SEQ ID NO: 3044608 - DNA, 25 bp, Homo sapien
agagaactggttgcagagagccatg

SEQ ID NO: 3044609 - DNA, 25 bp, Homo sapien
tgatgcagagaactggttgcagaga

SEQ ID NO: 3044610 - DNA, 25 bp, Homo sapien
agccatggtgcagaggaggacagca

SEQ ID NO: 3044611 - DNA, 25 bp, Homo sapien
tctgagcaggtgacggaatgtgggc

SEQ ID NO: 3044612 - DNA, 25 bp, Homo sapien
gattctgagcaggtgacggaatgtg

SEQ ID NO: 3044613 - DNA, 25 bp, Homo sapien
ccgtgtccttctgaagtctgaaacc

SEQ ID NO: 3044614 - DNA, 25 bp, Homo sapien
ctgcccgtgtccttctgaagtctga

SEQ ID NO: 3044615 - DNA, 25 bp, Homo sapien
ccatttccatggtaagaagcgtggg

SEQ ID NO: 3044616 - DNA, 25 bp, Homo sapien
tctgcctttcacaagcaagagcagg

SEQ ID NO: 3044617 - DNA, 25 bp, Homo sapien
gccagctccgtagtcagagtgtgac

SEQ ID NO: 3044618 - DNA, 25 bp, Homo sapien
tcactgatgagctgctccaaccagc

SEQ ID NO: 3044619 - DNA, 25 bp, Homo sapien
aatgaccctatgttccagctcccct

SEQ ID NO: 3044620 - DNA, 25 bp, Homo sapien
tgaccctatgttccagctccccttg

SEQ ID NO: 3044621 - DNA, 25 bp, Homo sapien
tcctgaagaattctgcactctggat

SEQ ID NO: 3044622 - DNA, 25 bp, Homo sapien
tgaagaattctgcactctggataat

SEQ ID NO: 3044623 - DNA, 25 bp, Homo sapien
cctcatgggatagttatttctgtca

SEQ ID NO: 3044624 - DNA, 25 bp, Homo sapien
catggaactcttcgagggcagggat

SEQ ID NO: 3044625 - DNA, 25 bp, Homo sapien
gtcactgtcaatgccatcactagac

SEQ ID NO: 3044626 - DNA, 25 bp, Homo sapien
tcttcctctgacatgacacttagct

SEQ ID NO: 3044627 - DNA, 25 bp, Homo sapien
tgtatgacctggaactgaactgagc

SEQ ID NO: 3044628 - DNA, 25 bp, Homo sapien
ttctctgctgttgcaaatacatgga

SEQ ID NO: 3044629 - DNA, 25 bp, Homo sapien
tagtttagccaaaggataagtgtcc

SEQ ID NO: 3044630 - DNA, 25 bp, Homo sapien
caggagtacgtgtatgacctggaac

SEQ ID NO: 3044631 - DNA, 25 bp, Homo sapien
tttcagaagggccacgccaacttgg

SEQ ID NO: 3044632 - DNA, 25 bp, Homo sapien
tacattgactgaacgaaggaggcaa

SEQ ID NO: 3044633 - DNA, 25 bp, Homo sapien
gagcccacagaagaggtcaccaaaa

SEQ ID NO: 3044634 - DNA, 25 bp, Homo sapien
ggagagcgatgcatctgacccagta

SEQ ID NO: 3044635 - DNA, 25 bp, Homo sapien
actccctggagacctcgtatttgtg

SEQ ID NO: 3044636 - DNA, 25 bp, Homo sapien
ttcctttctggtgacattgagggta

SEQ ID NO: 3044637 - DNA, 25 bp, Homo sapien
tacaaattgttccaggtgtgtgcag

SEQ ID NO: 3044638 - DNA, 25 bp, Homo sapien
cctggagacctcgtatttgtgtata

SEQ ID NO: 3044639 - DNA, 25 bp, Homo sapien
gcttttatcaccatgaggatgaggt

SEQ ID NO: 3044640 - DNA, 25 bp, Homo sapien
ttggtggcttttatcaccatgagga

SEQ ID NO: 3044641 - DNA, 25 bp, Homo sapien
tggcttttatcaccatgaggatgag

SEQ ID NO: 3044642 - DNA, 25 bp, Homo sapien
ggtggcttttatcaccatgaggatg

SEQ ID NO: 3044643 - DNA, 25 bp, Homo sapien
cagacgctgcgacattattggaatg

SEQ ID NO: 3044644 - DNA, 25 bp, Homo sapien
tacagacgctgcgacattattggaa

SEQ ID NO: 3044645 - DNA, 25 bp, Homo sapien
caagcagcagtgtatgctacagata

SEQ ID NO: 3044646 - DNA, 25 bp, Homo sapien
gctatcaagcagcagtgtatgctac

SEQ ID NO: 3044647 - DNA, 25 bp, Homo sapien
ctgctgggaatattcccaaactctg

SEQ ID NO: 3044648 - DNA, 25 bp, Homo sapien
gctgggaatattcccaaactctgcc

SEQ ID NO: 3044649 - DNA, 25 bp, Homo sapien
agcactgctgggaatattcccaaac

SEQ ID NO: 3044650 - DNA, 25 bp, Homo sapien
cactgctgggaatattcccaaactc

SEQ ID NO: 3044651 - DNA, 25 bp, Homo sapien
ttattcttcggtcccatcctaacca

SEQ ID NO: 3044652 - DNA, 25 bp, Homo sapien
attcttcggtcccatcctaaccata

SEQ ID NO: 3044653 - DNA, 25 bp, Homo sapien
ttcggtcccatcctaaccatattca

SEQ ID NO: 3044654 - DNA, 25 bp, Homo sapien
tcttcggtcccatcctaaccatatt

SEQ ID NO: 3044655 - DNA, 25 bp, Homo sapien
ggtagccacatatcttatagcctga

SEQ ID NO: 3044656 - DNA, 25 bp, Homo sapien
tccaccagggaacatatggtagcca

SEQ ID NO: 3044657 - DNA, 25 bp, Homo sapien
tatggtagccacatatcttatagcc

SEQ ID NO: 3044658 - DNA, 25 bp, Homo sapien
gggaacatatggtagccacatatct

SEQ ID NO: 3044659 - DNA, 25 bp, Homo sapien
cagctttcccttgttgtagggatcc

SEQ ID NO: 3044660 - DNA, 25 bp, Homo sapien
cctagtctctttctgtgggaatcca

SEQ ID NO: 3044661 - DNA, 25 bp, Homo sapien
tacaaatggaccaaatgcctttgcc

SEQ ID NO: 3044662 - DNA, 25 bp, Homo sapien
gaatccagctttcccttgttgtagg

SEQ ID NO: 3044663 - DNA, 25 bp, Homo sapien
agggtcacatccgtctcccagaagc

SEQ ID NO: 3044664 - DNA, 25 bp, Homo sapien
ccaggtctaacagtcaggttcctcc

SEQ ID NO: 3044665 - DNA, 25 bp, Homo sapien
tccatcctggcattacactggcctg

SEQ ID NO: 3044666 - DNA, 25 bp, Homo sapien
ttcctcctccgtgcattaacaatgg

SEQ ID NO: 3044667 - DNA, 25 bp, Homo sapien
cagaattcagaacgatggtcgtggg

SEQ ID NO: 3044668 - DNA, 25 bp, Homo sapien
cgaagcttgcttgggttgttaagcc

SEQ ID NO: 3044669 - DNA, 25 bp, Homo sapien
tgcttgggttgttaagcctagggaa

SEQ ID NO: 3044670 - DNA, 25 bp, Homo sapien
gggaaattatccagccatgagccct

SEQ ID NO: 3044671 - DNA, 25 bp, Homo sapien
tgctgggtgcagcgaaagccgatct

SEQ ID NO: 3044672 - DNA, 25 bp, Homo sapien
ctgggtgcagcgaaagccgatctca

SEQ ID NO: 3044673 - DNA, 25 bp, Homo sapien
agtgctgggtgcagcgaaagccgat

SEQ ID NO: 3044674 - DNA, 25 bp, Homo sapien
tgggtgcagcgaaagccgatctcac

SEQ ID NO: 3044675 - DNA, 25 bp, Homo sapien
ggtgtggaagaacgaggtgcccgtg

SEQ ID NO: 3044676 - DNA, 25 bp, Homo sapien
tgtggaagaacgaggtgcccgtggc

SEQ ID NO: 3044677 - DNA, 25 bp, Homo sapien
tggaagaacgaggtgcccgtggcgg

SEQ ID NO: 3044678 - DNA, 25 bp, Homo sapien
ggcacaggcctggatgccgacgacc

SEQ ID NO: 3044679 - DNA, 25 bp, Homo sapien
agcatctccagtgagcccacgcagg

SEQ ID NO: 3044680 - DNA, 25 bp, Homo sapien
aaaacagacgcggtcagcatctcca

SEQ ID NO: 3044681 - DNA, 25 bp, Homo sapien
gaaaggaaaacagacgcggtcagca

SEQ ID NO: 3044682 - DNA, 25 bp, Homo sapien
ctgtcgtggcatggcgggtggctcc

SEQ ID NO: 3044683 - DNA, 25 bp, Homo sapien
cccacttctggctgaactcttggct

SEQ ID NO: 3044684 - DNA, 25 bp, Homo sapien
ggctccaggcttcttgtcctggcaa

SEQ ID NO: 3044685 - DNA, 25 bp, Homo sapien
ggccctctccctgaatgctctgtgg

SEQ ID NO: 3044686 - DNA, 25 bp, Homo sapien
ctctgtgggtcagggacacggattc

SEQ ID NO: 3044687 - DNA, 25 bp, Homo sapien
tagaggccctaagatgcttgagcac

SEQ ID NO: 3044688 - DNA, 25 bp, Homo sapien
cctctgggccagaacagcggatcat

SEQ ID NO: 3044689 - DNA, 25 bp, Homo sapien
ctccctctgggccagaacagcggat

SEQ ID NO: 3044690 - DNA, 25 bp, Homo sapien
ccagaacagcggatcatgaggacag

SEQ ID NO: 3044691 - DNA, 25 bp, Homo sapien
ctgggccagaacagcggatcatgag

SEQ ID NO: 3044692 - DNA, 25 bp, Homo sapien
gcgattcttgttatcggcatcaacg

SEQ ID NO: 3044693 - DNA, 25 bp, Homo sapien
cgattcttgttatcggcatcaacgc

SEQ ID NO: 3044694 - DNA, 25 bp, Homo sapien
ggcgattcttgttatcggcatcaac

SEQ ID NO: 3044695 - DNA, 25 bp, Homo sapien
gattcttgttatcggcatcaacgcc

SEQ ID NO: 3044696 - DNA, 25 bp, Homo sapien
gcctaacggggaacactgcccacat

SEQ ID NO: 3044697 - DNA, 25 bp, Homo sapien
agcctaacggggaacactgcccaca

SEQ ID NO: 3044698 - DNA, 25 bp, Homo sapien
ccatggtcttggattgtgacgtggc

SEQ ID NO: 3044699 - DNA, 25 bp, Homo sapien
tgccccatggtcttggattgtgacg

SEQ ID NO: 3044700 - DNA, 25 bp, Homo sapien
ccccatggtcttggattgtgacgtg

SEQ ID NO: 3044701 - DNA, 25 bp, Homo sapien
ctgatgccccatggtcttggattgt

SEQ ID NO: 3044702 - DNA, 25 bp, Homo sapien
cattcgtgggcaccgatggcagcag

SEQ ID NO: 3044703 - DNA, 25 bp, Homo sapien
tcggcccattcgtgggcaccgatgg

SEQ ID NO: 3044704 - DNA, 25 bp, Homo sapien
ttggtcggcccattcgtgggcaccg

SEQ ID NO: 3044705 - DNA, 25 bp, Homo sapien
gggcaccgatggcagcaggagcccg

SEQ ID NO: 3044706 - DNA, 25 bp, Homo sapien
caggaaaatagaggaggaacaaggc

SEQ ID NO: 3044707 - DNA, 25 bp, Homo sapien
cctcctcaggaaaatagaggaggaa

SEQ ID NO: 3044708 - DNA, 25 bp, Homo sapien
tgcatcctcctcaggaaaatagagg

SEQ ID NO: 3044709 - DNA, 25 bp, Homo sapien
tcctcaggaaaatagaggaggaaca

SEQ ID NO: 3044710 - DNA, 25 bp, Homo sapien
tatgccaggaggatgtggagtagtt

SEQ ID NO: 3044711 - DNA, 25 bp, Homo sapien
gggttatactcctcatatgccagga

SEQ ID NO: 3044712 - DNA, 25 bp, Homo sapien
cgggttatactcctcatatgccagg

SEQ ID NO: 3044713 - DNA, 25 bp, Homo sapien
gaggatgtggagtagttcccgctgc

SEQ ID NO: 3044714 - DNA, 25 bp, Homo sapien
cccggtcgatgcgctggatgtgctc

SEQ ID NO: 3044715 - DNA, 25 bp, Homo sapien
ccggtcgatgcgctggatgtgctca

SEQ ID NO: 3044716 - DNA, 25 bp, Homo sapien
tcccggtcgatgcgctggatgtgct

SEQ ID NO: 3044717 - DNA, 25 bp, Homo sapien
gtcccggtcgatgcgctggatgtgc

SEQ ID NO: 3044718 - DNA, 25 bp, Homo sapien
ttcccttgtacgctcgatctatgag

SEQ ID NO: 3044719 - DNA, 25 bp, Homo sapien
catgggcattcccttgtacgctcga

SEQ ID NO: 3044720 - DNA, 25 bp, Homo sapien
gactgaccacatcgggccccggatg

SEQ ID NO: 3044721 - DNA, 25 bp, Homo sapien
ggcattcccttgtacgctcgatcta

SEQ ID NO: 3044722 - DNA, 25 bp, Homo sapien
gctctttcggctgatctcccgccga

SEQ ID NO: 3044723 - DNA, 25 bp, Homo sapien
tgctctttcggctgatctcccgccg

SEQ ID NO: 3044724 - DNA, 25 bp, Homo sapien
tctttcggctgatctcccgccgaat

SEQ ID NO: 3044725 - DNA, 25 bp, Homo sapien
ctttcggctgatctcccgccgaatt

SEQ ID NO: 3044726 - DNA, 25 bp, Homo sapien
catgttggagttagcggagctgcca

SEQ ID NO: 3044727 - DNA, 25 bp, Homo sapien
ccagagccgcccgcggatgctgggt

SEQ ID NO: 3044728 - DNA, 25 bp, Homo sapien
agccgcccgcggatgctgggtcttg

SEQ ID NO: 3044729 - DNA, 25 bp, Homo sapien
ttcccagagccgcccgcggatgctg

SEQ ID NO: 3044730 - DNA, 25 bp, Homo sapien
agtcagaggaggcagctccgtctca

SEQ ID NO: 3044731 - DNA, 25 bp, Homo sapien
gcagtcagaggaggcagctccgtct

SEQ ID NO: 3044732 - DNA, 25 bp, Homo sapien
tcgcctcccgcgcagtcagaggagg

SEQ ID NO: 3044733 - DNA, 25 bp, Homo sapien
cttcgcctcccgcgcagtcagagga

SEQ ID NO: 3044734 - DNA, 25 bp, Homo sapien
agcctgggtgccgacccccagaaag

SEQ ID NO: 3044735 - DNA, 25 bp, Homo sapien
gaggaactgcacggggcctggagcg

SEQ ID NO: 3044736 - DNA, 25 bp, Homo sapien
gtgccgacccccagaaaggactggc

SEQ ID NO: 3044737 - DNA, 25 bp, Homo sapien
ggctctgtccctttccagctcaggg

SEQ ID NO: 3044738 - DNA, 25 bp, Homo sapien
caaatgatcgacgttgttgttgtag

SEQ ID NO: 3044739 - DNA, 25 bp, Homo sapien
ccccaaatgatcgacgttgttgttg

SEQ ID NO: 3044740 - DNA, 25 bp, Homo sapien
tgtacaatccccaaatgatcgacgt

SEQ ID NO: 3044741 - DNA, 25 bp, Homo sapien
aatccccaaatgatcgacgttgttg

SEQ ID NO: 3044742 - DNA, 25 bp, Homo sapien
cctctcgctcttgtgcccaccaact

SEQ ID NO: 3044743 - DNA, 25 bp, Homo sapien
taatgatgtcctctcgctcttgtgc

SEQ ID NO: 3044744 - DNA, 25 bp, Homo sapien
tcctctcgctcttgtgcccaccaac

SEQ ID NO: 3044745 - DNA, 25 bp, Homo sapien
atgatgtcctctcgctcttgtgccc

SEQ ID NO: 3044746 - DNA, 25 bp, Homo sapien
gccccagcaggttgaatggtttcca

SEQ ID NO: 3044747 - DNA, 25 bp, Homo sapien
ccccagcaggttgaatggtttccac

SEQ ID NO: 3044748 - DNA, 25 bp, Homo sapien
cggccccagcaggttgaatggtttc

SEQ ID NO: 3044749 - DNA, 25 bp, Homo sapien
ggccccagcaggttgaatggtttcc

SEQ ID NO: 3044750 - DNA, 25 bp, Homo sapien
actggggtcagcgaccagaggtctc

SEQ ID NO: 3044751 - DNA, 25 bp, Homo sapien
ctcagggcctcagcgatgcccagtt

SEQ ID NO: 3044752 - DNA, 25 bp, Homo sapien
gaccagaggtctctgtgcaatcggc

SEQ ID NO: 3044753 - DNA, 25 bp, Homo sapien
tcagcgaccagaggtctctgtgcaa

SEQ ID NO: 3044754 - DNA, 25 bp, Homo sapien
aactgctgtagaccactgacgcagg

SEQ ID NO: 3044755 - DNA, 25 bp, Homo sapien
tgtagaccactgacgcaggccagag

SEQ ID NO: 3044756 - DNA, 25 bp, Homo sapien
tgctgtagaccactgacgcaggcca

SEQ ID NO: 3044757 - DNA, 25 bp, Homo sapien
tgtgtaactgctgtagaccactgac

SEQ ID NO: 3044758 - DNA, 25 bp, Homo sapien
cgaggcccagggccagcatcagagc

SEQ ID NO: 3044759 - DNA, 25 bp, Homo sapien
ccagggccagcatcagagcatccat

SEQ ID NO: 3044760 - DNA, 25 bp, Homo sapien
ccccgaggcccagggccagcatcag

SEQ ID NO: 3044761 - DNA, 25 bp, Homo sapien
ggcccagggccagcatcagagcatc

SEQ ID NO: 3044762 - DNA, 25 bp, Homo sapien
gccagaggacgagccggacgccgaa

SEQ ID NO: 3044763 - DNA, 25 bp, Homo sapien
gacgccgaaggctacgagtggacga

SEQ ID NO: 3044764 - DNA, 25 bp, Homo sapien
actggctccggcttgatgatcccgg

SEQ ID NO: 3044765 - DNA, 25 bp, Homo sapien
tggctccggcttgatgatcccggct

SEQ ID NO: 3044766 - DNA, 25 bp, Homo sapien
taccattttgctagggggcttctgg

SEQ ID NO: 3044767 - DNA, 25 bp, Homo sapien
atctaccattttgctagggggcttc

SEQ ID NO: 3044768 - DNA, 25 bp, Homo sapien
agcagtgagtctcataattgccatc

SEQ ID NO: 3044769 - DNA, 25 bp, Homo sapien
gagtctcataattgccatctaccat

SEQ ID NO: 3044770 - DNA, 25 bp, Homo sapien
gaggtcacacgcatgttcccaaggc

SEQ ID NO: 3044771 - DNA, 25 bp, Homo sapien
gacagccactcggttgtcaccagac

SEQ ID NO: 3044772 - DNA, 25 bp, Homo sapien
gcatgttcccaaggctcaggctcct

SEQ ID NO: 3044773 - DNA, 25 bp, Homo sapien
aggtcgctgggcctcgaagcttctg

SEQ ID NO: 3044774 - DNA, 25 bp, Homo sapien
tcaggcactcagctccaggtcactg

SEQ ID NO: 3044775 - DNA, 25 bp, Homo sapien
aggcactcagctccaggtcactgac

SEQ ID NO: 3044776 - DNA, 25 bp, Homo sapien
caggcactcagctccaggtcactga

SEQ ID NO: 3044777 - DNA, 25 bp, Homo sapien
ctgccggcctctcttggttaggaag

SEQ ID NO: 3044778 - DNA, 25 bp, Homo sapien
gtatttctggacccactcctcactg

SEQ ID NO: 3044779 - DNA, 25 bp, Homo sapien
agacctgccggcctctcttggttag

SEQ ID NO: 3044780 - DNA, 25 bp, Homo sapien
ggtcagcacagacctgccggcctct

SEQ ID NO: 3044781 - DNA, 25 bp, Homo sapien
cgtctcaaagtagtcagctatgaaa

SEQ ID NO: 3044782 - DNA, 25 bp, Homo sapien
tggctgctcgtctcaaagtagtcag

SEQ ID NO: 3044783 - DNA, 25 bp, Homo sapien
agcactggctgctcgtctcaaagta

SEQ ID NO: 3044784 - DNA, 25 bp, Homo sapien
gctcgtctcaaagtagtcagctatg

SEQ ID NO: 3044785 - DNA, 25 bp, Homo sapien
tgcggagaaaggagagaataagccc

SEQ ID NO: 3044786 - DNA, 25 bp, Homo sapien
aggccaggcagcttctgatccctga

SEQ ID NO: 3044787 - DNA, 25 bp, Homo sapien
agcttctgatccctgagtggttgag

SEQ ID NO: 3044788 - DNA, 25 bp, Homo sapien
aggagagaataagcccgagtcacag

SEQ ID NO: 3044789 - DNA, 25 bp, Homo sapien
catggaattttgtcggttcaagaag

SEQ ID NO: 3044790 - DNA, 25 bp, Homo sapien
ttcatggaattttgtcggttcaaga

SEQ ID NO: 3044791 - DNA, 25 bp, Homo sapien
ctcttagctctcttcatggaatttt

SEQ ID NO: 3044792 - DNA, 25 bp, Homo sapien
tcttagctctcttcatggaattttg

SEQ ID NO: 3044793 - DNA, 25 bp, Homo sapien
gatacccacaacaacaacatggact

SEQ ID NO: 3044794 - DNA, 25 bp, Homo sapien
tacccacaacaacaacatggactca

SEQ ID NO: 3044795 - DNA, 25 bp, Homo sapien
gtgatacccacaacaacaacatgga

SEQ ID NO: 3044796 - DNA, 25 bp, Homo sapien
ggtgatacccacaacaacaacatgg

SEQ ID NO: 3044797 - DNA, 25 bp, Homo sapien
ggaggacggcaagggcagcagtgga

SEQ ID NO: 3044798 - DNA, 25 bp, Homo sapien
tgcagagaggacctggttgcagaga

SEQ ID NO: 3044799 - DNA, 25 bp, Homo sapien
ccatggtgcagaggaggacggcaag

SEQ ID NO: 3044800 - DNA, 25 bp, Homo sapien
cagagaggacctggttgcagagagc

SEQ ID NO: 3044801 - DNA, 25 bp, Homo sapien
aatgtgggctcgagtgtcagcagag

SEQ ID NO: 3044802 - DNA, 25 bp, Homo sapien
gtgggctcgagtgtcagcagagcca

SEQ ID NO: 3044803 - DNA, 25 bp, Homo sapien
tgtgggctcgagtgtcagcagagcc

SEQ ID NO: 3044804 - DNA, 25 bp, Homo sapien
ggaatgtgggctcgagtgtcagcag

SEQ ID NO: 3044805 - DNA, 25 bp, Homo sapien
tctccagtgcggagcattgctttcc

SEQ ID NO: 3044806 - DNA, 25 bp, Homo sapien
gtgcggagcattgctttccttccag

SEQ ID NO: 3044807 - DNA, 25 bp, Homo sapien
gtcctctgcggcgtctttgccttgc

SEQ ID NO: 3044808 - DNA, 25 bp, Homo sapien
tttgccttgcgctgctcagcttgcc

SEQ ID NO: 3044809 - DNA, 25 bp, Homo sapien
gccttctgctctctagcactctcag

SEQ ID NO: 3044810 - DNA, 25 bp, Homo sapien
tgtctctcctcgtgctagtagctgc

SEQ ID NO: 3044811 - DNA, 25 bp, Homo sapien
cgtgctagtagctgccttctgctct

SEQ ID NO: 3044812 - DNA, 25 bp, Homo sapien
gaagctctgcgtgactgtcctgtct

SEQ ID NO: 3044813 - DNA, 25 bp, Homo sapien
tgtatgacctggaactgaactgagc

SEQ ID NO: 3044814 - DNA, 25 bp, Homo sapien
cctgggtccaggagtacgtgtatga

SEQ ID NO: 3044815 - DNA, 25 bp, Homo sapien
tagtttagccaaaggataagtgtcc

SEQ ID NO: 3044816 - DNA, 25 bp, Homo sapien
caaaagaggcaagcaagtctgcgct

SEQ ID NO: 3044817 - DNA, 25 bp, Homo sapien
cataacctctttggtggaccttgat

SEQ ID NO: 3044818 - DNA, 25 bp, Homo sapien
taactcgtgtagaatcataacctct

SEQ ID NO: 3044819 - DNA, 25 bp, Homo sapien
tctttggtggaccttgatttttcca

SEQ ID NO: 3044820 - DNA, 25 bp, Homo sapien
ctagagaataactcgtgtagaatca

SEQ ID NO: 3044821 - DNA, 25 bp, Homo sapien
ttttcttatcgaagagcccatcctc

SEQ ID NO: 3044822 - DNA, 25 bp, Homo sapien
tcttatcgaagagcccatcctcata

SEQ ID NO: 3044823 - DNA, 25 bp, Homo sapien
gagctgcaaagcaagcaaactgaat

SEQ ID NO: 3044824 - DNA, 25 bp, Homo sapien
ctacatgagctgcaaagcaagcaaa

SEQ ID NO: 3044825 - DNA, 25 bp, Homo sapien
aaactgacttacatcctcttcagat

SEQ ID NO: 3044826 - DNA, 25 bp, Homo sapien
tcgacaggtgtctgacgtgtaaact

SEQ ID NO: 3044827 - DNA, 25 bp, Homo sapien
gtctgacgtgtaaacttggaatcaa

SEQ ID NO: 3044828 - DNA, 25 bp, Homo sapien
catctgggctgtcgacaggtgtctg

SEQ ID NO: 3044829 - DNA, 25 bp, Homo sapien
atttaatgagtaaacacttttatag

SEQ ID NO: 3044830 - DNA, 25 bp, Homo sapien
tatttaatgagtaaacacttttata

SEQ ID NO: 3044831 - DNA, 25 bp, Homo sapien
taggaagtgacaaggctagttgcac

SEQ ID NO: 3044832 - DNA, 25 bp, Homo sapien
gagatgtatattaggattatcccca

SEQ ID NO: 3044833 - DNA, 25 bp, Homo sapien
taatttgtaatataaccctgagatg

SEQ ID NO: 3044834 - DNA, 25 bp, Homo sapien
tcttttgaggcattactgctggaac

SEQ ID NO: 3044835 - DNA, 25 bp, Homo sapien
cctggcagttccggactcctgggaa

SEQ ID NO: 3044836 - DNA, 25 bp, Homo sapien
caagagtgttttcagtgacccggct

SEQ ID NO: 3044837 - DNA, 25 bp, Homo sapien
caccttggcctaggcctctatacag

SEQ ID NO: 3044838 - DNA, 25 bp, Homo sapien
ggcctctatacagcacagatcacag

SEQ ID NO: 3044839 - DNA, 25 bp, Homo sapien
agtgctgggtgcagcgaaagccgat

SEQ ID NO: 3044840 - DNA, 25 bp, Homo sapien
ctgggtgcagcgaaagccgatctca

SEQ ID NO: 3044841 - DNA, 25 bp, Homo sapien
tgctgggtgcagcgaaagccgatct

SEQ ID NO: 3044842 - DNA, 25 bp, Homo sapien
tgggtgcagcgaaagccgatctcac

SEQ ID NO: 3044843 - DNA, 25 bp, Homo sapien
tgggatatggcacggacccagcagc

SEQ ID NO: 3044844 - DNA, 25 bp, Homo sapien
cctgggatatggcacggacccagca

SEQ ID NO: 3044845 - DNA, 25 bp, Homo sapien
tcctgggatatggcacggacccagc

SEQ ID NO: 3044846 - DNA, 25 bp, Homo sapien
ggatatggcacggacccagcagctc

SEQ ID NO: 3044847 - DNA, 25 bp, Homo sapien
ggtgtggaagaacgaggtgcccgtg

SEQ ID NO: 3044848 - DNA, 25 bp, Homo sapien
tgtggaagaacgaggtgcccgtggc

SEQ ID NO: 3044849 - DNA, 25 bp, Homo sapien
ggcacaggcctggatgccgacgacc

SEQ ID NO: 3044850 - DNA, 25 bp, Homo sapien
tggaagaacgaggtgcccgtggcgg

SEQ ID NO: 3044851 - DNA, 25 bp, Homo sapien
ggctccaggcttcttgtcctggcaa

SEQ ID NO: 3044852 - DNA, 25 bp, Homo sapien
tgccctctccctgaatgctctgtgg

SEQ ID NO: 3044853 - DNA, 25 bp, Homo sapien
ctctgtgggtcagggacacggattc

SEQ ID NO: 3044854 - DNA, 25 bp, Homo sapien
tctgggcccggggtcccgcctgtgc

SEQ ID NO: 3044855 - DNA, 25 bp, Homo sapien
tagaggccctaagatgcttgagcac

SEQ ID NO: 3044856 - DNA, 25 bp, Homo sapien
cctctgggccagaacagcggatcat

SEQ ID NO: 3044857 - DNA, 25 bp, Homo sapien
ctccctctgggccagaacagcggat

SEQ ID NO: 3044858 - DNA, 25 bp, Homo sapien
ccagaacagcggatcatgaggacag

SEQ ID NO: 3044859 - DNA, 25 bp, Homo sapien
ctgggccagaacagcggatcatgag

SEQ ID NO: 3044860 - DNA, 25 bp, Homo sapien
cgattcttgttatcggcatcaacgc

SEQ ID NO: 3044861 - DNA, 25 bp, Homo sapien
gcgattcttgttatcggcatcaacg

SEQ ID NO: 3044862 - DNA, 25 bp, Homo sapien
gattcttgttatcggcatcaacgcc

SEQ ID NO: 3044863 - DNA, 25 bp, Homo sapien
ggcgattcttgttatcggcatcaac

SEQ ID NO: 3044864 - DNA, 25 bp, Homo sapien
ctgcgcacactggggcttcagtctc

SEQ ID NO: 3044865 - DNA, 25 bp, Homo sapien
gggacagcaggtgtgaaagaacctg

SEQ ID NO: 3044866 - DNA, 25 bp, Homo sapien
acagcaggtgtgaaagaacctggtc

SEQ ID NO: 3044867 - DNA, 25 bp, Homo sapien
tgcgcacactggggcttcagtctcc

SEQ ID NO: 3044868 - DNA, 25 bp, Homo sapien
cagtctgcccatgaggctgggcctg

SEQ ID NO: 3044869 - DNA, 25 bp, Homo sapien
ttccctgagccctctcaagtcgggt

SEQ ID NO: 3044870 - DNA, 25 bp, Homo sapien
gcactgcagggcaaggaaggtccct

SEQ ID NO: 3044871 - DNA, 25 bp, Homo sapien
tcatggggggcactcatttgagtgg

SEQ ID NO: 3044872 - DNA, 25 bp, Homo sapien
gcctaacggggaacactgcccacat

SEQ ID NO: 3044873 - DNA, 25 bp, Homo sapien
agcctaacggggaacactgcccaca

SEQ ID NO: 3044874 - DNA, 25 bp, Homo sapien
ccatggtcttggattgtgacgtggc

SEQ ID NO: 3044875 - DNA, 25 bp, Homo sapien
tgccccatggtcttggattgtgacg

SEQ ID NO: 3044876 - DNA, 25 bp, Homo sapien
ccccatggtcttggattgtgacgtg

SEQ ID NO: 3044877 - DNA, 25 bp, Homo sapien
ctgatgccccatggtcttggattgt

SEQ ID NO: 3044878 - DNA, 25 bp, Homo sapien
ttggtcggcccattcgtgggcaccg

SEQ ID NO: 3044879 - DNA, 25 bp, Homo sapien
cattcgtgggcaccgatggcagcag

SEQ ID NO: 3044880 - DNA, 25 bp, Homo sapien
tcggcccattcgtgggcaccgatgg

SEQ ID NO: 3044881 - DNA, 25 bp, Homo sapien
gggcaccgatggcagcaggagcccg

SEQ ID NO: 3044882 - DNA, 25 bp, Homo sapien
gaatgcatcctcctcaggaagatag

SEQ ID NO: 3044883 - DNA, 25 bp, Homo sapien
tagaggaggaacaaggcggcgatgt

SEQ ID NO: 3044884 - DNA, 25 bp, Homo sapien
catcctcctcaggaagatagaggag

SEQ ID NO: 3044885 - DNA, 25 bp, Homo sapien
tgcatcctcctcaggaagatagagg

SEQ ID NO: 3044886 - DNA, 25 bp, Homo sapien
tatgccaggaggatgtggagtagtt

SEQ ID NO: 3044887 - DNA, 25 bp, Homo sapien
gggttatactcctcatatgccagga

SEQ ID NO: 3044888 - DNA, 25 bp, Homo sapien
gaggatgtggagtagttcccgctgc

SEQ ID NO: 3044889 - DNA, 25 bp, Homo sapien
cgggttatactcctcatatgccagg

SEQ ID NO: 3044890 - DNA, 25 bp, Homo sapien
gtcccggtcgatgcgctggatgtgc

SEQ ID NO: 3044891 - DNA, 25 bp, Homo sapien
cccggtcgatgcgctggatgtgctc

SEQ ID NO: 3044892 - DNA, 25 bp, Homo sapien
ccggtcgatgcgctggatgtgctca

SEQ ID NO: 3044893 - DNA, 25 bp, Homo sapien
tcccggtcgatgcgctggatgtgct

SEQ ID NO: 3044894 - DNA, 25 bp, Homo sapien
gactgaccacatcgggccccggatg

SEQ ID NO: 3044895 - DNA, 25 bp, Homo sapien
catgggcattcccttgtacgctcga

SEQ ID NO: 3044896 - DNA, 25 bp, Homo sapien
ggcattcccttgtacgctcgatcta

SEQ ID NO: 3044897 - DNA, 25 bp, Homo sapien
ttcccttgtacgctcgatctatgag

SEQ ID NO: 3044898 - DNA, 25 bp, Homo sapien
tctttcggctgatctcccgccgaat

SEQ ID NO: 3044899 - DNA, 25 bp, Homo sapien
tgctctttcggctgatctcccgccg

SEQ ID NO: 3044900 - DNA, 25 bp, Homo sapien
gctctttcggctgatctcccgccga

SEQ ID NO: 3044901 - DNA, 25 bp, Homo sapien
ctttcggctgatctcccgccgaatt

SEQ ID NO: 3044902 - DNA, 25 bp, Homo sapien
catgttggagttagcggagctgcca

SEQ ID NO: 3044903 - DNA, 25 bp, Homo sapien
ccagagccgcccgcggatgctgggt

SEQ ID NO: 3044904 - DNA, 25 bp, Homo sapien
ttcccagagccgcccgcggatgctg

SEQ ID NO: 3044905 - DNA, 25 bp, Homo sapien
agccgcccgcggatgctgggtcttg

SEQ ID NO: 3044906 - DNA, 25 bp, Homo sapien
cttcgcctcccgcgcagtcagagga

SEQ ID NO: 3044907 - DNA, 25 bp, Homo sapien
gcagtcagaggaggcagctccgtct

SEQ ID NO: 3044908 - DNA, 25 bp, Homo sapien
tcgcctcccgcgcagtcagaggagg

SEQ ID NO: 3044909 - DNA, 25 bp, Homo sapien
agtcagaggaggcagctccgtctca

SEQ ID NO: 3044910 - DNA, 25 bp, Homo sapien
gtgccgacccccagaaaggactggc

SEQ ID NO: 3044911 - DNA, 25 bp, Homo sapien
agcctgggtgccgacccccagaaag

SEQ ID NO: 3044912 - DNA, 25 bp, Homo sapien
ggctctgtccctttccagctcaggg

SEQ ID NO: 3044913 - DNA, 25 bp, Homo sapien
gaggaactgcacggggcctggagcg

SEQ ID NO: 3044914 - DNA, 25 bp, Homo sapien
caaatgatcgacgttgttgttgtag

SEQ ID NO: 3044915 - DNA, 25 bp, Homo sapien
ccccaaatgatcgacgttgttgttg

SEQ ID NO: 3044916 - DNA, 25 bp, Homo sapien
tgtacaatccccaaatgatcgacgt

SEQ ID NO: 3044917 - DNA, 25 bp, Homo sapien
aatccccaaatgatcgacgttgttg

SEQ ID NO: 3044918 - DNA, 25 bp, Homo sapien
atgatgtcctctcgctcttgtgccc

SEQ ID NO: 3044919 - DNA, 25 bp, Homo sapien
taatgatgtcctctcgctcttgtgc

SEQ ID NO: 3044920 - DNA, 25 bp, Homo sapien
tcctctcgctcttgtgcccaccaac

SEQ ID NO: 3044921 - DNA, 25 bp, Homo sapien
cctctcgctcttgtgcccaccaact

SEQ ID NO: 3044922 - DNA, 25 bp, Homo sapien
tttccacctgccaagggtgaagggc

SEQ ID NO: 3044923 - DNA, 25 bp, Homo sapien
ggccccagcaggttgaatggtttcc

SEQ ID NO: 3044924 - DNA, 25 bp, Homo sapien
aatggtttccacctgccaagggtga

SEQ ID NO: 3044925 - DNA, 25 bp, Homo sapien
cggccccagcaggttgaatggtttc

SEQ ID NO: 3044926 - DNA, 25 bp, Homo sapien
taactgctgtagaccactgaggcag

SEQ ID NO: 3044927 - DNA, 25 bp, Homo sapien
tgtgtaactgctgtagaccactgag

SEQ ID NO: 3044928 - DNA, 25 bp, Homo sapien
cctgtgtgtaactgctgtagaccac

SEQ ID NO: 3044929 - DNA, 25 bp, Homo sapien
ctgctgtagaccactgaggcaggcc

SEQ ID NO: 3044930 - DNA, 25 bp, Homo sapien
actggctccggcttgatgatcccgg

SEQ ID NO: 3044931 - DNA, 25 bp, Homo sapien
gacgccgaaggctacgagtggacga

SEQ ID NO: 3044932 - DNA, 25 bp, Homo sapien
gccagaggacgagccggacgccgaa

SEQ ID NO: 3044933 - DNA, 25 bp, Homo sapien
tggctccggcttgatgatcccggct

SEQ ID NO: 3044934 - DNA, 25 bp, Homo sapien
atctaccattttgctagggggcttc

SEQ ID NO: 3044935 - DNA, 25 bp, Homo sapien
agcagtgagtctcataattgccatc

SEQ ID NO: 3044936 - DNA, 25 bp, Homo sapien
gagtctcataattgccatctaccat

SEQ ID NO: 3044937 - DNA, 25 bp, Homo sapien
taccattttgctagggggcttctgg

SEQ ID NO: 3044938 - DNA, 25 bp, Homo sapien
gacagccactcggttgtcaccagac

SEQ ID NO: 3044939 - DNA, 25 bp, Homo sapien
gaggtcacacgcatgttcccaaggc

SEQ ID NO: 3044940 - DNA, 25 bp, Homo sapien
gcatgttcccaaggctcaggctcct

SEQ ID NO: 3044941 - DNA, 25 bp, Homo sapien
aggtcgctgggcctcgaagcttctg

SEQ ID NO: 3044942 - DNA, 25 bp, Homo sapien
gtatttctggacccactcctcactg

SEQ ID NO: 3044943 - DNA, 25 bp, Homo sapien
cctgccggcctctcttggttaggag

SEQ ID NO: 3044944 - DNA, 25 bp, Homo sapien
ggtcagcacagacctgccggcctct

SEQ ID NO: 3044945 - DNA, 25 bp, Homo sapien
agacctgccggcctctcttggttag

SEQ ID NO: 3044946 - DNA, 25 bp, Homo sapien
gctcgtctcaaagtagtcagctatg

SEQ ID NO: 3044947 - DNA, 25 bp, Homo sapien
cgtctcaaagtagtcagctatgaaa

SEQ ID NO: 3044948 - DNA, 25 bp, Homo sapien
tggctgctcgtctcaaagtagtcag

SEQ ID NO: 3044949 - DNA, 25 bp, Homo sapien
agcactggctgctcgtctcaaagta

SEQ ID NO: 3044950 - DNA, 25 bp, Homo sapien
cacacctgcgtgtgtcccgtgagag

SEQ ID NO: 3044951 - DNA, 25 bp, Homo sapien
cccgtgagagcggagcccagcatgt

SEQ ID NO: 3044952 - DNA, 25 bp, Homo sapien
cacctgcgtgtgtcccgtgagagcg

SEQ ID NO: 3044953 - DNA, 25 bp, Homo sapien
ttgcattgtccttgcacacctgcgt

SEQ ID NO: 3044954 - DNA, 25 bp, Homo sapien
aggaacatgtgagtgtgcgttctgt

SEQ ID NO: 3044955 - DNA, 25 bp, Homo sapien
tgcaggaacatgtgagtgtgcgttc

SEQ ID NO: 3044956 - DNA, 25 bp, Homo sapien
gcaggaacatgtgagtgtgcgttct

SEQ ID NO: 3044957 - DNA, 25 bp, Homo sapien
gaacatgtgagtgtgcgttctgtgg

SEQ ID NO: 3044958 - DNA, 25 bp, Homo sapien
gacgccgaaggctacgagtggacga

SEQ ID NO: 3044959 - DNA, 25 bp, Homo sapien
actggctccggcttgatgatcccgg

SEQ ID NO: 3044960 - DNA, 25 bp, Homo sapien
gccagaggacgagccggacgccgaa

SEQ ID NO: 3044961 - DNA, 25 bp, Homo sapien
tggctccggcttgatgatcccggct

SEQ ID NO: 3044962 - DNA, 25 bp, Homo sapien
tcaaatgtgccaccggaagctgaag

SEQ ID NO: 3044963 - DNA, 25 bp, Homo sapien
ctgaaggtggggatgaccagtgccc

SEQ ID NO: 3044964 - DNA, 25 bp, Homo sapien
tccacttaggggtgtatccctcagg

SEQ ID NO: 3044965 - DNA, 25 bp, Homo sapien
cagtctggagtttccctagcatcaa

SEQ ID NO: 3044966 - DNA, 25 bp, Homo sapien
gtacgagagccgcaaagaatagcca

SEQ ID NO: 3044967 - DNA, 25 bp, Homo sapien
ggtcccttccgacaagcagtcaaga

SEQ ID NO: 3044968 - DNA, 25 bp, Homo sapien
cctgaatatgtgtcagccgctgtgt

SEQ ID NO: 3044969 - DNA, 25 bp, Homo sapien
cagtcaagaacgcatagaaatacat

SEQ ID NO: 3044970 - DNA, 25 bp, Homo sapien
aggtcgctgggcctcgaagcttctg

SEQ ID NO: 3044971 - DNA, 25 bp, Homo sapien
gaggtcacacgcatgttcccaaggc

SEQ ID NO: 3044972 - DNA, 25 bp, Homo sapien
gacagccactcggttgtcaccagac

SEQ ID NO: 3044973 - DNA, 25 bp, Homo sapien
gcatgttcccaaggctcaggctcct

SEQ ID NO: 3044974 - DNA, 25 bp, Homo sapien
ccaggtcactgacgtatttctggac

SEQ ID NO: 3044975 - DNA, 25 bp, Homo sapien
cctgccggcctctcttggttaggaa

SEQ ID NO: 3044976 - DNA, 25 bp, Homo sapien
ggtcagcacagacctgccggcctct

SEQ ID NO: 3044977 - DNA, 25 bp, Homo sapien
tcaggcactcagctccaggtcactg

SEQ ID NO: 3044978 - DNA, 25 bp, Homo sapien
cgtctcaaagtagtcagctatgaaa

SEQ ID NO: 3044979 - DNA, 25 bp, Homo sapien
gctcgtctcaaagtagtcagctatg

SEQ ID NO: 3044980 - DNA, 25 bp, Homo sapien
agcactggctgctcgtctcaaagta

SEQ ID NO: 3044981 - DNA, 25 bp, Homo sapien
tggctgctcgtctcaaagtagtcag

SEQ ID NO: 3044982 - DNA, 25 bp, Homo sapien
tacccacaacaacaacatggactca

SEQ ID NO: 3044983 - DNA, 25 bp, Homo sapien
gatacccacaacaacaacatggact

SEQ ID NO: 3044984 - DNA, 25 bp, Homo sapien
gtgatacccacaacaacaacatgga

SEQ ID NO: 3044985 - DNA, 25 bp, Homo sapien
ggtgatacccacaacaacaacatgg

SEQ ID NO: 3044986 - DNA, 25 bp, Homo sapien
ggaggacggcaagggcagcagtgga

SEQ ID NO: 3044987 - DNA, 25 bp, Homo sapien
ccatggtgcagaggaggacggcaag

SEQ ID NO: 3044988 - DNA, 25 bp, Homo sapien
tgcagagaggacctggttgcagaga

SEQ ID NO: 3044989 - DNA, 25 bp, Homo sapien
cagagaggacctggttgcagagagc

SEQ ID NO: 3044990 - DNA, 25 bp, Homo sapien
aatgtgggctcgagtgtcagcagag

SEQ ID NO: 3044991 - DNA, 25 bp, Homo sapien
gtgggctcgagtgtcagcagagcca

SEQ ID NO: 3044992 - DNA, 25 bp, Homo sapien
tgtgggctcgagtgtcagcagagcc

SEQ ID NO: 3044993 - DNA, 25 bp, Homo sapien
ggaatgtgggctcgagtgtcagcag

SEQ ID NO: 3044994 - DNA, 25 bp, Homo sapien
gtcctctgcggcgtctttgccttgc

SEQ ID NO: 3044995 - DNA, 25 bp, Homo sapien
tctccagtgcggagcattgctttcc

SEQ ID NO: 3044996 - DNA, 25 bp, Homo sapien
gtgcggagcattgctttccttccag

SEQ ID NO: 3044997 - DNA, 25 bp, Homo sapien
tttgccttgcgctgctcagcttgcc

SEQ ID NO: 3044998 - DNA, 25 bp, Homo sapien
cattgagcgccatcagtggaccact

SEQ ID NO: 3044999 - DNA, 25 bp, Homo sapien
gattagacacccctgctcaagatta

SEQ ID NO: 3045000 - DNA, 25 bp, Homo sapien
tatagggcacaaaagtcagtggcac

SEQ ID NO: 3045001 - DNA, 25 bp, Homo sapien
gcactgagctcagcagaagaaggca

SEQ ID NO: 3045002 - DNA, 25 bp, Homo sapien
gccttctgctctctagcactctcag

SEQ ID NO: 3045003 - DNA, 25 bp, Homo sapien
tgtctctcctcgtgctagtagctgc

SEQ ID NO: 3045004 - DNA, 25 bp, Homo sapien
gaagctctgcgtgactgtcctgtct

SEQ ID NO: 3045005 - DNA, 25 bp, Homo sapien
cgtgctagtagctgccttctgctct

SEQ ID NO: 3045006 - DNA, 25 bp, Homo sapien
tgtatgacctggaactgaactgagc

SEQ ID NO: 3045007 - DNA, 25 bp, Homo sapien
tagtttagccaaaggataagtgtcc

SEQ ID NO: 3045008 - DNA, 25 bp, Homo sapien
cctgggtccaggagtacgtgtatga

SEQ ID NO: 3045009 - DNA, 25 bp, Homo sapien
caaaagaggcaagcaagtctgcgct

SEQ ID NO: 3045010 - DNA, 25 bp, Homo sapien
ctagagaataactcgtgtagaatca

SEQ ID NO: 3045011 - DNA, 25 bp, Homo sapien
taactcgtgtagaatcataacctct

SEQ ID NO: 3045012 - DNA, 25 bp, Homo sapien
cataacctctttggtggaccttgat

SEQ ID NO: 3045013 - DNA, 25 bp, Homo sapien
tctttggtggaccttgatttttcca

SEQ ID NO: 3045014 - DNA, 25 bp, Homo sapien
ttttcttatcgaagagcccatcctc

SEQ ID NO: 3045015 - DNA, 25 bp, Homo sapien
tcttatcgaagagcccatcctcata

SEQ ID NO: 3045016 - DNA, 25 bp, Homo sapien
gagctgcaaagcaagcaaactgaat

SEQ ID NO: 3045017 - DNA, 25 bp, Homo sapien
ctacatgagctgcaaagcaagcaaa

SEQ ID NO: 3045018 - DNA, 25 bp, Homo sapien
gtctgacgtgtaaacttggaatcaa

SEQ ID NO: 3045019 - DNA, 25 bp, Homo sapien
aaactgacttacatcctcttcagat

SEQ ID NO: 3045020 - DNA, 25 bp, Homo sapien
tcgacaggtgtctgacgtgtaaact

SEQ ID NO: 3045021 - DNA, 25 bp, Homo sapien
catctgggctgtcgacaggtgtctg

SEQ ID NO: 3045022 - DNA, 25 bp, Homo sapien
atttaatgagtaaacacttttatag

SEQ ID NO: 3045023 - DNA, 25 bp, Homo sapien
tatttaatgagtaaacacttttata

SEQ ID NO: 3045024 - DNA, 25 bp, Homo sapien
taggaagtgacaaggctagttgcac

SEQ ID NO: 3045025 - DNA, 25 bp, Homo sapien
gagatgtatattaggattatcccca

SEQ ID NO: 3045026 - DNA, 25 bp, Homo sapien
taatttgtaatataaccctgagatg

SEQ ID NO: 3045027 - DNA, 25 bp, Homo sapien
tcttttgaggcattactgctggaac

SEQ ID NO: 3045028 - DNA, 25 bp, Homo sapien
gctgtcgacaggtgtctgacgtgta

SEQ ID NO: 3045029 - DNA, 25 bp, Homo sapien
caggtgtctgacgtgtaaacttgga

SEQ ID NO: 3045030 - DNA, 25 bp, Homo sapien
gtctgacgtgtaaacttggaatcaa

SEQ ID NO: 3045031 - DNA, 25 bp, Homo sapien
catctgggctgtcgacaggtgtctg

SEQ ID NO: 3045032 - DNA, 25 bp, Homo sapien
atttaatgagtaaacacttttatag

SEQ ID NO: 3045033 - DNA, 25 bp, Homo sapien
tatttaatgagtaaacacttttata

SEQ ID NO: 3045034 - DNA, 25 bp, Homo sapien
taggaagtgacaaggctagttgcac

SEQ ID NO: 3045035 - DNA, 25 bp, Homo sapien
tcttttgaggcattactgctggaac

SEQ ID NO: 3045036 - DNA, 25 bp, Homo sapien
gagatgtatattaggattatcccca

SEQ ID NO: 3045037 - DNA, 25 bp, Homo sapien
taatttgtaatataaccctgagatg

SEQ ID NO: 3045038 - DNA, 25 bp, Homo sapien
tccatcctggcattacactggcctg

SEQ ID NO: 3045039 - DNA, 25 bp, Homo sapien
agggtcacatccgtctcccagaagc

SEQ ID NO: 3045040 - DNA, 25 bp, Homo sapien
ttcctcctccgtgcattaacaatgg

SEQ ID NO: 3045041 - DNA, 25 bp, Homo sapien
ccaggtctaacagtcaggttcctcc

SEQ ID NO: 3045042 - DNA, 25 bp, Homo sapien
tgctgggtgcagcgaaagccgatct

SEQ ID NO: 3045043 - DNA, 25 bp, Homo sapien
ctgggtgcagcgaaagccgatctca

SEQ ID NO: 3045044 - DNA, 25 bp, Homo sapien
agtgctgggtgcagcgaaagccgat

SEQ ID NO: 3045045 - DNA, 25 bp, Homo sapien
tgggtgcagcgaaagccgatctcac

SEQ ID NO: 3045046 - DNA, 25 bp, Homo sapien
tggaagaacgaggtgcccgtggcgg

SEQ ID NO: 3045047 - DNA, 25 bp, Homo sapien
ggtgtggaagaacgaggtgcccgtg

SEQ ID NO: 3045048 - DNA, 25 bp, Homo sapien
tgtggaagaacgaggtgcccgtggc

SEQ ID NO: 3045049 - DNA, 25 bp, Homo sapien
ggcacaggcctggatgccgacgacc

SEQ ID NO: 3045050 - DNA, 25 bp, Homo sapien
tagaggccctaagatgcttgagcac

SEQ ID NO: 3045051 - DNA, 25 bp, Homo sapien
gcgattcttgttatcggcatcaacg

SEQ ID NO: 3045052 - DNA, 25 bp, Homo sapien
ggcgattcttgttatcggcatcaac

SEQ ID NO: 3045053 - DNA, 25 bp, Homo sapien
cgattcttgttatcggcatcaacgc

SEQ ID NO: 3045054 - DNA, 25 bp, Homo sapien
gattcttgttatcggcatcaacgcc

SEQ ID NO: 3045055 - DNA, 25 bp, Homo sapien
ttccctgagccctctcaagtcgggt

SEQ ID NO: 3045056 - DNA, 25 bp, Homo sapien
cagtctgcccatgaggctgggcctg

SEQ ID NO: 3045057 - DNA, 25 bp, Homo sapien
ccaggacgctgggtcagacaaggtc

SEQ ID NO: 3045058 - DNA, 25 bp, Homo sapien
gcactgcagggcaaggaaggtccct

SEQ ID NO: 3045059 - DNA, 25 bp, Homo sapien
gcctaacggggaacactgcccacat

SEQ ID NO: 3045060 - DNA, 25 bp, Homo sapien
agcctaacggggaacactgcccaca

SEQ ID NO: 3045061 - DNA, 25 bp, Homo sapien
tgatgccccatggtcttgggttgtg

SEQ ID NO: 3045062 - DNA, 25 bp, Homo sapien
tcttgggttgtgacgtggctaccac

SEQ ID NO: 3045063 - DNA, 25 bp, Homo sapien
acgtggctaccacatgctcctgttg

SEQ ID NO: 3045064 - DNA, 25 bp, Homo sapien
gacggtcccgccatttgggctgtga

SEQ ID NO: 3045065 - DNA, 25 bp, Homo sapien
tcaggccacgacagggtggccggaa

SEQ ID NO: 3045066 - DNA, 25 bp, Homo sapien
ccacgacagggtggccggaactggg

SEQ ID NO: 3045067 - DNA, 25 bp, Homo sapien
caggccacgacagggtggccggaac

SEQ ID NO: 3045068 - DNA, 25 bp, Homo sapien
ggccacgacagggtggccggaactg

SEQ ID NO: 3045069 - DNA, 25 bp, Homo sapien
ttggtcggcccattcgtgggcaccg

SEQ ID NO: 3045070 - DNA, 25 bp, Homo sapien
cattcgtgggcaccgatggcagcag

SEQ ID NO: 3045071 - DNA, 25 bp, Homo sapien
tcggcccattcgtgggcaccgatgg

SEQ ID NO: 3045072 - DNA, 25 bp, Homo sapien
cccattcgtgggcaccgatggcagc

SEQ ID NO: 3045073 - DNA, 25 bp, Homo sapien
catcctcctcaggaagatagaggag

SEQ ID NO: 3045074 - DNA, 25 bp, Homo sapien
gaatgcatcctcctcaggaagatag

SEQ ID NO: 3045075 - DNA, 25 bp, Homo sapien
tagaggaggaacaaggcggcgatgt

SEQ ID NO: 3045076 - DNA, 25 bp, Homo sapien
tgcatcctcctcaggaagatagagg

SEQ ID NO: 3045077 - DNA, 25 bp, Homo sapien
tatgccaggaggatgtggagtagtt

SEQ ID NO: 3045078 - DNA, 25 bp, Homo sapien
gggttatactcctcatatgccagga

SEQ ID NO: 3045079 - DNA, 25 bp, Homo sapien
cgggttatactcctcatatgccagg

SEQ ID NO: 3045080 - DNA, 25 bp, Homo sapien
gaggatgtggagtagttcccgctgc

SEQ ID NO: 3045081 - DNA, 25 bp, Homo sapien
cccggtcgatgcgctggatgtgctc

SEQ ID NO: 3045082 - DNA, 25 bp, Homo sapien
ccggtcgatgcgctggatgtgctca

SEQ ID NO: 3045083 - DNA, 25 bp, Homo sapien
tcccggtcgatgcgctggatgtgct

SEQ ID NO: 3045084 - DNA, 25 bp, Homo sapien
gtcccggtcgatgcgctggatgtgc

SEQ ID NO: 3045085 - DNA, 25 bp, Homo sapien
ttcccttgtacgctcgatctatgag

SEQ ID NO: 3045086 - DNA, 25 bp, Homo sapien
gactgaccacatcgggccccggatg

SEQ ID NO: 3045087 - DNA, 25 bp, Homo sapien
catgggcattcccttgtacgctcga

SEQ ID NO: 3045088 - DNA, 25 bp, Homo sapien
ggcattcccttgtacgctcgatcta

SEQ ID NO: 3045089 - DNA, 25 bp, Homo sapien
tgctctttcggctgatctcccgccg

SEQ ID NO: 3045090 - DNA, 25 bp, Homo sapien
gctctttcggctgatctcccgccga

SEQ ID NO: 3045091 - DNA, 25 bp, Homo sapien
tctttcggctgatctcccgccgaat

SEQ ID NO: 3045092 - DNA, 25 bp, Homo sapien
ctttcggctgatctcccgccgaatt

SEQ ID NO: 3045093 - DNA, 25 bp, Homo sapien
catgttggagttagcggagctgcca

SEQ ID NO: 3045094 - DNA, 25 bp, Homo sapien
ccagagccgcccgcggatgctgggt

SEQ ID NO: 3045095 - DNA, 25 bp, Homo sapien
agccgcccgcggatgctgggtcttg

SEQ ID NO: 3045096 - DNA, 25 bp, Homo sapien
ttcccagagccgcccgcggatgctg

SEQ ID NO: 3045097 - DNA, 25 bp, Homo sapien
gcagtcagaggaggcagctccgtct

SEQ ID NO: 3045098 - DNA, 25 bp, Homo sapien
agtcagaggaggcagctccgtctca

SEQ ID NO: 3045099 - DNA, 25 bp, Homo sapien
tcgcctcccgcgcagtcagaggagg

SEQ ID NO: 3045100 - DNA, 25 bp, Homo sapien
cttcgcctcccgcgcagtcagagga

SEQ ID NO: 3045101 - DNA, 25 bp, Homo sapien
caaatgatcgacgttgttgttgtag

SEQ ID NO: 3045102 - DNA, 25 bp, Homo sapien
ccccaaatgatcgacgttgttgttg

SEQ ID NO: 3045103 - DNA, 25 bp, Homo sapien
tgtacaatccccaaatgatcgacgt

SEQ ID NO: 3045104 - DNA, 25 bp, Homo sapien
aatccccaaatgatcgacgttgttg

SEQ ID NO: 3045105 - DNA, 25 bp, Homo sapien
taatgatgtcctctcgctcttgtgc

SEQ ID NO: 3045106 - DNA, 25 bp, Homo sapien
atgatgtcctctcgctcttgtgccc

SEQ ID NO: 3045107 - DNA, 25 bp, Homo sapien
cctctcgctcttgtgcccaccaact

SEQ ID NO: 3045108 - DNA, 25 bp, Homo sapien
tcctctcgctcttgtgcccaccaac

SEQ ID NO: 3045109 - DNA, 25 bp, Homo sapien
gccccagcaggttgaatggtttcca

SEQ ID NO: 3045110 - DNA, 25 bp, Homo sapien
ggccccagcaggttgaatggtttcc

SEQ ID NO: 3045111 - DNA, 25 bp, Homo sapien
ccccagcaggttgaatggtttccac

SEQ ID NO: 3045112 - DNA, 25 bp, Homo sapien
cggccccagcaggttgaatggtttc

SEQ ID NO: 3045113 - DNA, 25 bp, Homo sapien
gaccagaggtctctgtgcaatcggc

SEQ ID NO: 3045114 - DNA, 25 bp, Homo sapien
actggggtcagcgaccagaggtctc

SEQ ID NO: 3045115 - DNA, 25 bp, Homo sapien
ctcagggcctcagcgatgcccagtt

SEQ ID NO: 3045116 - DNA, 25 bp, Homo sapien
tcagcgaccagaggtctctgtgcaa

SEQ ID NO: 3045117 - DNA, 25 bp, Homo sapien
atgtcatcactgtgcagggagcatg

SEQ ID NO: 3045118 - DNA, 25 bp, Homo sapien
catcactgtgcagggagcatgctaa

SEQ ID NO: 3045119 - DNA, 25 bp, Homo sapien
tgcatgtcatcactgtgcagggagc

SEQ ID NO: 3045120 - DNA, 25 bp, Homo sapien
tcactgtgcagggagcatgctaatc

SEQ ID NO: 3045121 - DNA, 25 bp, Homo sapien
tagaactggaaaccgaacacaggtg

SEQ ID NO: 3045122 - DNA, 25 bp, Homo sapien
actgggtggtccatccccctcccag

SEQ ID NO: 3045123 - DNA, 25 bp, Homo sapien
aggtagaactggaaaccgaacacag

SEQ ID NO: 3045124 - DNA, 25 bp, Homo sapien
ttcctcctccgtgcattaacaatgg

SEQ ID NO: 3045125 - DNA, 25 bp, Homo sapien
ctgggtgcagcgaaagccgatctca

SEQ ID NO: 3045126 - DNA, 25 bp, Homo sapien
tgctgggtgcagcgaaagccgatct

SEQ ID NO: 3045127 - DNA, 25 bp, Homo sapien
agtgctgggtgcagcgaaagccgat

SEQ ID NO: 3045128 - DNA, 25 bp, Homo sapien
tgggtgcagcgaaagccgatctcac

SEQ ID NO: 3045129 - DNA, 25 bp, Homo sapien
tgggatatggcacggacccagcagc

SEQ ID NO: 3045130 - DNA, 25 bp, Homo sapien
tcctgggatatggcacggacccagc

SEQ ID NO: 3045131 - DNA, 25 bp, Homo sapien
cctgggatatggcacggacccagca

SEQ ID NO: 3045132 - DNA, 25 bp, Homo sapien
ggatatggcacggacccagcagctc

SEQ ID NO: 3045133 - DNA, 25 bp, Homo sapien
ggtgtggaagaacgaggtgcccgtg

SEQ ID NO: 3045134 - DNA, 25 bp, Homo sapien
ggcacaggcctggatgccgacgacc

SEQ ID NO: 3045135 - DNA, 25 bp, Homo sapien
tgtggaagaacgaggtgcccgtggc

SEQ ID NO: 3045136 - DNA, 25 bp, Homo sapien
tggaagaacgaggtgcccgtggcgg

SEQ ID NO: 3045137 - DNA, 25 bp, Homo sapien
agcatctccagtgagcccacgcagg

SEQ ID NO: 3045138 - DNA, 25 bp, Homo sapien
aaaacagacgcggtcagcatctcca

SEQ ID NO: 3045139 - DNA, 25 bp, Homo sapien
gaaaggaaaacagacgcggtcagca

SEQ ID NO: 3045140 - DNA, 25 bp, Homo sapien
ctgtcgtggcatggcgggtggctcc

SEQ ID NO: 3045141 - DNA, 25 bp, Homo sapien
ggctccaggcttcttgtcctggcaa

SEQ ID NO: 3045142 - DNA, 25 bp, Homo sapien
cccacttctggctgaactcttggct

SEQ ID NO: 3045143 - DNA, 25 bp, Homo sapien
ggccctctccctgaatgctctgtgg

SEQ ID NO: 3045144 - DNA, 25 bp, Homo sapien
ctctgtgggtcagggacacggattc

SEQ ID NO: 3045145 - DNA, 25 bp, Homo sapien
tagaggccctaagatgcttgagcac

SEQ ID NO: 3045146 - DNA, 25 bp, Homo sapien
ggcgattcttgttatcggcatcaac

SEQ ID NO: 3045147 - DNA, 25 bp, Homo sapien
cgattcttgttatcggcatcaacgc

SEQ ID NO: 3045148 - DNA, 25 bp, Homo sapien
gcgattcttgttatcggcatcaacg

SEQ ID NO: 3045149 - DNA, 25 bp, Homo sapien
gattcttgttatcggcatcaacgcc

SEQ ID NO: 3045150 - DNA, 25 bp, Homo sapien
cagtctgcccatgaggctgggcctg

SEQ ID NO: 3045151 - DNA, 25 bp, Homo sapien
ttccctgagccctctcaagtcgggt

SEQ ID NO: 3045152 - DNA, 25 bp, Homo sapien
ccaggacgctgggtcagacaaggtc

SEQ ID NO: 3045153 - DNA, 25 bp, Homo sapien
gcactgcagggcaaggaaggtccct

SEQ ID NO: 3045154 - DNA, 25 bp, Homo sapien
gcctaacggggaacactgcccacat

SEQ ID NO: 3045155 - DNA, 25 bp, Homo sapien
agcctaacggggaacactgcccaca

SEQ ID NO: 3045156 - DNA, 25 bp, Homo sapien
tgatgccccatggtcttgggttgtg

SEQ ID NO: 3045157 - DNA, 25 bp, Homo sapien
tcttgggttgtgacgtggctaccac

SEQ ID NO: 3045158 - DNA, 25 bp, Homo sapien
gacggtcccgccatttgggctgtga

SEQ ID NO: 3045159 - DNA, 25 bp, Homo sapien
acgtggctaccacatgctcctgttg

SEQ ID NO: 3045160 - DNA, 25 bp, Homo sapien
tcaggccacgacagggtggccggaa

SEQ ID NO: 3045161 - DNA, 25 bp, Homo sapien
caggccacgacagggtggccggaac

SEQ ID NO: 3045162 - DNA, 25 bp, Homo sapien
ggccacgacagggtggccggaactg

SEQ ID NO: 3045163 - DNA, 25 bp, Homo sapien
ccacgacagggtggccggaactggg

SEQ ID NO: 3045164 - DNA, 25 bp, Homo sapien
ttggtcggcccattcgtgggcaccg

SEQ ID NO: 3045165 - DNA, 25 bp, Homo sapien
cattcgtgggcaccgatggcagcag

SEQ ID NO: 3045166 - DNA, 25 bp, Homo sapien
tcggcccattcgtgggcaccgatgg

SEQ ID NO: 3045167 - DNA, 25 bp, Homo sapien
cccattcgtgggcaccgatggcagc

SEQ ID NO: 3045168 - DNA, 25 bp, Homo sapien
catcctcctcaggaagatagaggag

SEQ ID NO: 3045169 - DNA, 25 bp, Homo sapien
gaatgcatcctcctcaggaagatag

SEQ ID NO: 3045170 - DNA, 25 bp, Homo sapien
tagaggaggaacaaggcggcgatgt

SEQ ID NO: 3045171 - DNA, 25 bp, Homo sapien
tgcatcctcctcaggaagatagagg

SEQ ID NO: 3045172 - DNA, 25 bp, Homo sapien
tatgccaggaggatgtggagtagtt

SEQ ID NO: 3045173 - DNA, 25 bp, Homo sapien
gggttatactcctcatatgccagga

SEQ ID NO: 3045174 - DNA, 25 bp, Homo sapien
gaggatgtggagtagttcccgctgc

SEQ ID NO: 3045175 - DNA, 25 bp, Homo sapien
cgggttatactcctcatatgccagg

SEQ ID NO: 3045176 - DNA, 25 bp, Homo sapien
cccggtcgatgcgctggatgtgctc

SEQ ID NO: 3045177 - DNA, 25 bp, Homo sapien
ccggtcgatgcgctggatgtgctca

SEQ ID NO: 3045178 - DNA, 25 bp, Homo sapien
tcccggtcgatgcgctggatgtgct

SEQ ID NO: 3045179 - DNA, 25 bp, Homo sapien
gtcccggtcgatgcgctggatgtgc

SEQ ID NO: 3045180 - DNA, 25 bp, Homo sapien
ttcccttgtacgctcgatctatgag

SEQ ID NO: 3045181 - DNA, 25 bp, Homo sapien
gactgaccacatcgggccccggatg

SEQ ID NO: 3045182 - DNA, 25 bp, Homo sapien
catgggcattcccttgtacgctcga

SEQ ID NO: 3045183 - DNA, 25 bp, Homo sapien
ggcattcccttgtacgctcgatcta

SEQ ID NO: 3045184 - DNA, 25 bp, Homo sapien
tgctctttcggctgatctcccgccg

SEQ ID NO: 3045185 - DNA, 25 bp, Homo sapien
tctttcggctgatctcccgccgaat

SEQ ID NO: 3045186 - DNA, 25 bp, Homo sapien
ctttcggctgatctcccgccgaatt

SEQ ID NO: 3045187 - DNA, 25 bp, Homo sapien
gctctttcggctgatctcccgccga

SEQ ID NO: 3045188 - DNA, 25 bp, Homo sapien
catgttggagttagcggagctgcca

SEQ ID NO: 3045189 - DNA, 25 bp, Homo sapien
ccagagccgcccgcggatgctgggt

SEQ ID NO: 3045190 - DNA, 25 bp, Homo sapien
agccgcccgcggatgctgggtcttg

SEQ ID NO: 3045191 - DNA, 25 bp, Homo sapien
ttcccagagccgcccgcggatgctg

SEQ ID NO: 3045192 - DNA, 25 bp, Homo sapien
cttcgcctcccgcgcagtcagagga

SEQ ID NO: 3045193 - DNA, 25 bp, Homo sapien
gcagtcagaggaggcagctccgtct

SEQ ID NO: 3045194 - DNA, 25 bp, Homo sapien
tcgcctcccgcgcagtcagaggagg

SEQ ID NO: 3045195 - DNA, 25 bp, Homo sapien
agtcagaggaggcagctccgtctca

SEQ ID NO: 3045196 - DNA, 25 bp, Homo sapien
gaggaactgcacggggcctggagcg

SEQ ID NO: 3045197 - DNA, 25 bp, Homo sapien
gtgccgacccccagaaaggactggc

SEQ ID NO: 3045198 - DNA, 25 bp, Homo sapien
ggctctgtccctttccagctcaggg

SEQ ID NO: 3045199 - DNA, 25 bp, Homo sapien
agcctgggtgccgacccccagaaag

SEQ ID NO: 3045200 - DNA, 25 bp, Homo sapien
caaatgatcgacgttgttgttgtag

SEQ ID NO: 3045201 - DNA, 25 bp, Homo sapien
tgtacaatccccaaatgatcgacgt

SEQ ID NO: 3045202 - DNA, 25 bp, Homo sapien
aatccccaaatgatcgacgttgttg

SEQ ID NO: 3045203 - DNA, 25 bp, Homo sapien
ccccaaatgatcgacgttgttgttg

SEQ ID NO: 3045204 - DNA, 25 bp, Homo sapien
atgatgtcctctcgctcttgtgccc

SEQ ID NO: 3045205 - DNA, 25 bp, Homo sapien
taatgatgtcctctcgctcttgtgc

SEQ ID NO: 3045206 - DNA, 25 bp, Homo sapien
cctctcgctcttgtgcccaccaact

SEQ ID NO: 3045207 - DNA, 25 bp, Homo sapien
tcctctcgctcttgtgcccaccaac

SEQ ID NO: 3045208 - DNA, 25 bp, Homo sapien
ggccccagcaggttgaatggtttcc

SEQ ID NO: 3045209 - DNA, 25 bp, Homo sapien
aatggtttccacctgccaagggtga

SEQ ID NO: 3045210 - DNA, 25 bp, Homo sapien
cggccccagcaggttgaatggtttc

SEQ ID NO: 3045211 - DNA, 25 bp, Homo sapien
tttccacctgccaagggtgaagggc

SEQ ID NO: 3045212 - DNA, 25 bp, Homo sapien
tgtgtaactgctgtagaccactgac

SEQ ID NO: 3045213 - DNA, 25 bp, Homo sapien
aactgctgtagaccactgacgcagg

SEQ ID NO: 3045214 - DNA, 25 bp, Homo sapien
tgtagaccactgacgcaggccagag

SEQ ID NO: 3045215 - DNA, 25 bp, Homo sapien
tgctgtagaccactgacgcaggcca

SEQ ID NO: 3045216 - DNA, 25 bp, Homo sapien
tttggccgtagtccccaacatgcag

SEQ ID NO: 3045217 - DNA, 25 bp, Homo sapien
ttgtcactatcactaggactagagc

SEQ ID NO: 3045218 - DNA, 25 bp, Homo sapien
gctatggatctgagaggcggaataa

SEQ ID NO: 3045219 - DNA, 25 bp, Homo sapien
gccagggaatgtaggtaatcttccc

SEQ ID NO: 3045220 - DNA, 25 bp, Homo sapien
agtacagtggcgcagtctctgctta

SEQ ID NO: 3045221 - DNA, 25 bp, Homo sapien
acaggtgcctgctggctgatttttg

SEQ ID NO: 3045222 - DNA, 25 bp, Homo sapien
ttacaggtgcctgctggctgatttt

SEQ ID NO: 3045223 - DNA, 25 bp, Homo sapien
tgcaacctccgcttccagggttcag

SEQ ID NO: 3045224 - DNA, 25 bp, Homo sapien
ctgaccctgttacagcttctgaggt

SEQ ID NO: 3045225 - DNA, 25 bp, Homo sapien
cttctgaggtcagatgagatagggt

SEQ ID NO: 3045226 - DNA, 25 bp, Homo sapien
tgaccctgttacagcttctgaggtc

SEQ ID NO: 3045227 - DNA, 25 bp, Homo sapien
gaccctgttacagcttctgaggtca

SEQ ID NO: 3045228 - DNA, 25 bp, Homo sapien
ttacacttgaaatagctcttcactt

SEQ ID NO: 3045229 - DNA, 25 bp, Homo sapien
gcggaaatagtttgatatgctggtc

SEQ ID NO: 3045230 - DNA, 25 bp, Homo sapien
acacttgaaatagctcttcactttt

SEQ ID NO: 3045231 - DNA, 25 bp, Homo sapien
ttaggtcatgcaggcctttaccggc

SEQ ID NO: 3045232 - DNA, 25 bp, Homo sapien
gatgtggctcatgtttcaggcagac

SEQ ID NO: 3045233 - DNA, 25 bp, Homo sapien
gatggtcaacctcgatcagggagaa

SEQ ID NO: 3045234 - DNA, 25 bp, Homo sapien
aagcgtgtgcttgactcctggaacc

SEQ ID NO: 3045235 - DNA, 25 bp, Homo sapien
cagtgcttgatgtagcctggaaccc

SEQ ID NO: 3045236 - DNA, 25 bp, Homo sapien
ctgtgaaggtagtgaaatgtggccc

SEQ ID NO: 3045237 - DNA, 25 bp, Homo sapien
gatttggtaactaccagccctgaca

SEQ ID NO: 3045238 - DNA, 25 bp, Homo sapien
gcttatgtggaattgggatccccag

SEQ ID NO: 3045239 - DNA, 25 bp, Homo sapien
gaggtcacgtggatcagcctgtgtc

SEQ ID NO: 3045240 - DNA, 25 bp, Homo sapien
cagatgtcagcataccgcagtggag

SEQ ID NO: 3045241 - DNA, 25 bp, Homo sapien
cgcagtggagactttctgcagtgaa

SEQ ID NO: 3045242 - DNA, 25 bp, Homo sapien
ctgtaatgctgtagggtgaaggttc

SEQ ID NO: 3045243 - DNA, 25 bp, Homo sapien
agtgccagggcctaacaaccccaca

SEQ ID NO: 3045244 - DNA, 25 bp, Homo sapien
atgcagctttagcactagttcctgg

SEQ ID NO: 3045245 - DNA, 25 bp, Homo sapien
agatgcagctttagcactagttcct

SEQ ID NO: 3045246 - DNA, 25 bp, Homo sapien
cccacagagcagacgctaaaaatgc

SEQ ID NO: 3045247 - DNA, 25 bp, Homo sapien
tccctggatgcttatataaaaacag

SEQ ID NO: 3045248 - DNA, 25 bp, Homo sapien
tcccagtgcaacatactttcacctt

SEQ ID NO: 3045249 - DNA, 25 bp, Homo sapien
gcctggcttactggggtgactcaca

SEQ ID NO: 3045250 - DNA, 25 bp, Homo sapien
tttcctcggccactttaattctatg

SEQ ID NO: 3045251 - DNA, 25 bp, Homo sapien
catagccgtattggccaggaccagt

SEQ ID NO: 3045252 - DNA, 25 bp, Homo sapien
ggcaagcccagaccactaatttcct

SEQ ID NO: 3045253 - DNA, 25 bp, Homo sapien
aggcggattattgcctccaggagcc

SEQ ID NO: 3045254 - DNA, 25 bp, Homo sapien
tctgaaagctgcctacacccatagc

SEQ ID NO: 3045255 - DNA, 25 bp, Homo sapien
tgcagcggcgaggtgctcagggaac

SEQ ID NO: 3045256 - DNA, 25 bp, Homo sapien
ctgcagcggcgaggtgctcagggaa

SEQ ID NO: 3045257 - DNA, 25 bp, Homo sapien
ctctttagcagcaaggcaggccatt

SEQ ID NO: 3045258 - DNA, 25 bp, Homo sapien
ctttagcagcaaggcaggccattct

SEQ ID NO: 3045259 - DNA, 25 bp, Homo sapien
aatatccctttatagctttagattt

SEQ ID NO: 3045260 - DNA, 25 bp, Homo sapien
cctttatagctttagatttatctag

SEQ ID NO: 3045261 - DNA, 25 bp, Homo sapien
tccctttatagctttagatttatct

SEQ ID NO: 3045262 - DNA, 25 bp, Homo sapien
tttatagctttagatttatctagcc

SEQ ID NO: 3045263 - DNA, 25 bp, Homo sapien
tcccagagtttggtatattcccaga

SEQ ID NO: 3045264 - DNA, 25 bp, Homo sapien
ggtaggtgttactgtgcccactgca

SEQ ID NO: 3045265 - DNA, 25 bp, Homo sapien
caggcaactgtgcttaggccttaca

SEQ ID NO: 3045266 - DNA, 25 bp, Homo sapien
cagtcttctaaagtgtacatcccag

SEQ ID NO: 3045267 - DNA, 25 bp, Homo sapien
ctgccatgcacgcttgatgactgtg

SEQ ID NO: 3045268 - DNA, 25 bp, Homo sapien
ctccacttctgccatgcacgcttga

SEQ ID NO: 3045269 - DNA, 25 bp, Homo sapien
cttctgccatgcacgcttgatgact

SEQ ID NO: 3045270 - DNA, 25 bp, Homo sapien
catgcacgcttgatgactgtggcag

SEQ ID NO: 3045271 - DNA, 25 bp, Homo sapien
aaggggccattagagctgtcagtga

SEQ ID NO: 3045272 - DNA, 25 bp, Homo sapien
aggggccattagagctgtcagtgac

SEQ ID NO: 3045273 - DNA, 25 bp, Homo sapien
caccttaaaaggagggcatcgccct

SEQ ID NO: 3045274 - DNA, 25 bp, Homo sapien
tgcccggctggtatgaaattcctgg

SEQ ID NO: 3045275 - DNA, 25 bp, Homo sapien
aaagttggcctaaacagctgtcagg

SEQ ID NO: 3045276 - DNA, 25 bp, Homo sapien
gactcgacgagctatgtttcaaagg

SEQ ID NO: 3045277 - DNA, 25 bp, Homo sapien
accctggatgcagcgggcacactgc

SEQ ID NO: 3045278 - DNA, 25 bp, Homo sapien
cctgctctcggtgccggtgtcgcct

SEQ ID NO: 3045279 - DNA, 25 bp, Homo sapien
ctgcctggatgagcatgacggcccg

SEQ ID NO: 3045280 - DNA, 25 bp, Homo sapien
ggatgagcatgacggcccgccactg

SEQ ID NO: 3045281 - DNA, 25 bp, Homo sapien
agagtcagtcatgaacaccttggtc

SEQ ID NO: 3045282 - DNA, 25 bp, Homo sapien
tagagtcagtcatgaacaccttggt

SEQ ID NO: 3045283 - DNA, 25 bp, Homo sapien
atagagtcagtcatgaacaccttgg

SEQ ID NO: 3045284 - DNA, 25 bp, Homo sapien
catagagtcagtcatgaacaccttg

SEQ ID NO: 3045285 - DNA, 25 bp, Homo sapien
ggcttcctcgctgtgtggacaccat

SEQ ID NO: 3045286 - DNA, 25 bp, Homo sapien
ggctggcatggcctcagccgagtca

SEQ ID NO: 3045287 - DNA, 25 bp, Homo sapien
ctgcctgagttaggaccggcagagt

SEQ ID NO: 3045288 - DNA, 25 bp, Homo sapien
gtcaccagttatggctgctgcctga

SEQ ID NO: 3045289 - DNA, 25 bp, Homo sapien
tccctcagggtgctagctgttccgt

SEQ ID NO: 3045290 - DNA, 25 bp, Homo sapien
tggtcatctctacatgcctctgtgg

SEQ ID NO: 3045291 - DNA, 25 bp, Homo sapien
tggagccttggaatacccacttgcg

SEQ ID NO: 3045292 - DNA, 25 bp, Homo sapien
tcctgagggccaaatagggcagcta

SEQ ID NO: 3045293 - DNA, 25 bp, Homo sapien
ggctctgaccaccttagatgcccag

SEQ ID NO: 3045294 - DNA, 25 bp, Homo sapien
tctgaccaccttagatgcccagtgc

SEQ ID NO: 3045295 - DNA, 25 bp, Homo sapien
tgagggctctgaccaccttagatgc

SEQ ID NO: 3045296 - DNA, 25 bp, Homo sapien
tgaccaccttagatgcccagtgcct

SEQ ID NO: 3045297 - DNA, 25 bp, Homo sapien
ttctacaaagtttcggtgagagacc

SEQ ID NO: 3045298 - DNA, 25 bp, Homo sapien
tagtaacttgtatcgttctacaaag

SEQ ID NO: 3045299 - DNA, 25 bp, Homo sapien
ggatgaagccttcttagtaacttgt

SEQ ID NO: 3045300 - DNA, 25 bp, Homo sapien
cctttggcaggatatgggctgtcgg

SEQ ID NO: 3045301 - DNA, 25 bp, Homo sapien
tgatatggatggtctccacgaggcc

SEQ ID NO: 3045302 - DNA, 25 bp, Homo sapien
tatggatggtctccacgaggccaca

SEQ ID NO: 3045303 - DNA, 25 bp, Homo sapien
gtctccacgaggccacaggcctcca

SEQ ID NO: 3045304 - DNA, 25 bp, Homo sapien
tctccacgaggccacaggcctccag

SEQ ID NO: 3045305 - DNA, 25 bp, Homo sapien
aatctcccactagaaagggtcctgg

SEQ ID NO: 3045306 - DNA, 25 bp, Homo sapien
tcttcttagaccctggccagtgcca

SEQ ID NO: 3045307 - DNA, 25 bp, Homo sapien
gctgtgagaaatcgagggaccttga

SEQ ID NO: 3045308 - DNA, 25 bp, Homo sapien
tgaagcaagtgatgtcctggctccg

SEQ ID NO: 3045309 - DNA, 25 bp, Homo sapien
gactttcagctaatcacgagacacc

SEQ ID NO: 3045310 - DNA, 25 bp, Homo sapien
gatgcactggaacttgcctccctgg

SEQ ID NO: 3045311 - DNA, 25 bp, Homo sapien
ccacagcaagggagatgggtcctct

SEQ ID NO: 3045312 - DNA, 25 bp, Homo sapien
tggccggagagaccacttctgtgca

SEQ ID NO: 3045313 - DNA, 25 bp, Homo sapien
gggcgtggtgctgtgtaggacctgc

SEQ ID NO: 3045314 - DNA, 25 bp, Homo sapien
tgctgtgtaggacctgcagaagctg

SEQ ID NO: 3045315 - DNA, 25 bp, Homo sapien
cgtggtgctgtgtaggacctgcaga

SEQ ID NO: 3045316 - DNA, 25 bp, Homo sapien
tggtgctgtgtaggacctgcagaag

SEQ ID NO: 3045317 - DNA, 25 bp, Homo sapien
acttggacaccacggtcaacacagg

SEQ ID NO: 3045318 - DNA, 25 bp, Homo sapien
cttgaacttggacaccacggtcaac

SEQ ID NO: 3045319 - DNA, 25 bp, Homo sapien
tgaacttggacaccacggtcaacac

SEQ ID NO: 3045320 - DNA, 25 bp, Homo sapien
gaacttggacaccacggtcaacaca

SEQ ID NO: 3045321 - DNA, 25 bp, Homo sapien
cctgagtccaagagaaggtccattg

SEQ ID NO: 3045322 - DNA, 25 bp, Homo sapien
caagccgcagatgacggggcttcca

SEQ ID NO: 3045323 - DNA, 25 bp, Homo sapien
gacctggagacccagtctaacatgg

SEQ ID NO: 3045324 - DNA, 25 bp, Homo sapien
tccattggacaaccagagacctgga

SEQ ID NO: 3045325 - DNA, 25 bp, Homo sapien
aggcctgctgtgtggtaccgcacag

SEQ ID NO: 3045326 - DNA, 25 bp, Homo sapien
tgccagggcagtctcaatgcgtgtc

SEQ ID NO: 3045327 - DNA, 25 bp, Homo sapien
taatgcaccacaatgaagctgggct

SEQ ID NO: 3045328 - DNA, 25 bp, Homo sapien
cccggctgagcttattgtggcccag

SEQ ID NO: 3045329 - DNA, 25 bp, Homo sapien
tccaggccctcaactgcgtattcct

SEQ ID NO: 3045330 - DNA, 25 bp, Homo sapien
cctggtagttgatgaatgaccactc

SEQ ID NO: 3045331 - DNA, 25 bp, Homo sapien
tagttgatgaatgaccactccaggc

SEQ ID NO: 3045332 - DNA, 25 bp, Homo sapien
ccaaacagggctggttgtcctggta

SEQ ID NO: 3045333 - DNA, 25 bp, Homo sapien
gtcctgacgggccatccacggctgg

SEQ ID NO: 3045334 - DNA, 25 bp, Homo sapien
ggccatccacggctggcctcggtac

SEQ ID NO: 3045335 - DNA, 25 bp, Homo sapien
ctgatgtcctgacgggccatccacg

SEQ ID NO: 3045336 - DNA, 25 bp, Homo sapien
gtggtctgatgtcctgacgggccat

SEQ ID NO: 3045337 - DNA, 25 bp, Homo sapien
gatccaaaagaaggacctgcctcct

SEQ ID NO: 3045338 - DNA, 25 bp, Homo sapien
ggcttctaatcagaacctggactgg

SEQ ID NO: 3045339 - DNA, 25 bp, Homo sapien
gattgaggatccaaaagaaggacct

SEQ ID NO: 3045340 - DNA, 25 bp, Homo sapien
gaaggaacaaaaggcttctaatcag

SEQ ID NO: 3045341 - DNA, 25 bp, Homo sapien
gcccttaggtagtgagccacaaaat

SEQ ID NO: 3045342 - DNA, 25 bp, Homo sapien
gggcccttaggtagtgagccacaaa

SEQ ID NO: 3045343 - DNA, 25 bp, Homo sapien
ccttaggtagtgagccacaaaatgc

SEQ ID NO: 3045344 - DNA, 25 bp, Homo sapien
ttaggtagtgagccacaaaatgctg

SEQ ID NO: 3045345 - DNA, 25 bp, Homo sapien
ggcgtagttgatgcacaactgttcc

SEQ ID NO: 3045346 - DNA, 25 bp, Homo sapien
gatgcacaactgttccagactgttg

SEQ ID NO: 3045347 - DNA, 25 bp, Homo sapien
acaactgttccagactgttgtcagg

SEQ ID NO: 3045348 - DNA, 25 bp, Homo sapien
cagactgttgtcaggaaatgattca

SEQ ID NO: 3045349 - DNA, 25 bp, Homo sapien
gagctcagagcaagcaggaaaccca

SEQ ID NO: 3045350 - DNA, 25 bp, Homo sapien
ttcggagggcattagtctcactagc

SEQ ID NO: 3045351 - DNA, 25 bp, Homo sapien
gagatctcgctctatgctggcaggc

SEQ ID NO: 3045352 - DNA, 25 bp, Homo sapien
cctcctatgaggaaaccaggtccca

SEQ ID NO: 3045353 - DNA, 25 bp, Homo sapien
ctatgaaagtggtccacgagtcggt

SEQ ID NO: 3045354 - DNA, 25 bp, Homo sapien
tggtccacgagtcggtgtctgcaca

SEQ ID NO: 3045355 - DNA, 25 bp, Homo sapien
cgagtcggtgtctgcacagatgctg

SEQ ID NO: 3045356 - DNA, 25 bp, Homo sapien
gaaagtggtccacgagtcggtgtct

SEQ ID NO: 3045357 - DNA, 25 bp, Homo sapien
tgcaaaactctaccggtggagccca

SEQ ID NO: 3045358 - DNA, 25 bp, Homo sapien
tgatgtagttctgcacaagtgggcc

SEQ ID NO: 3045359 - DNA, 25 bp, Homo sapien
gaatcagtcgagctcagtcacatgg

SEQ ID NO: 3045360 - DNA, 25 bp, Homo sapien
aagatgagactaccacacaagacgc

SEQ ID NO: 3045361 - DNA, 25 bp, Homo sapien
gccctgatggttctaatctgcacca

SEQ ID NO: 3045362 - DNA, 25 bp, Homo sapien
tcagtttggccaggcagtctctacg

SEQ ID NO: 3045363 - DNA, 25 bp, Homo sapien
ctacgggtgtcacactcggctcggg

SEQ ID NO: 3045364 - DNA, 25 bp, Homo sapien
ggcgcagggcttccggaacacctgc

SEQ ID NO: 3045365 - DNA, 25 bp, Homo sapien
ggggcaaatcctctttaggcaaatc

SEQ ID NO: 3045366 - DNA, 25 bp, Homo sapien
ctgggaggggcaaatcctctttagg

SEQ ID NO: 3045367 - DNA, 25 bp, Homo sapien
ggaggggcaaatcctctttaggcaa

SEQ ID NO: 3045368 - DNA, 25 bp, Homo sapien
gggcaaatcctctttaggcaaatca

SEQ ID NO: 3045369 - DNA, 25 bp, Homo sapien
ccctatggtgggtggcataagcaag

SEQ ID NO: 3045370 - DNA, 25 bp, Homo sapien
cacccaaccccagcaatgctggcta

SEQ ID NO: 3045371 - DNA, 25 bp, Homo sapien
gccaggccctatggtgggtggcata

SEQ ID NO: 3045372 - DNA, 25 bp, Homo sapien
gtggcataagcaagggcatcagatt

SEQ ID NO: 3045373 - DNA, 25 bp, Homo sapien
ctgacagggcctgccccatcctaca

SEQ ID NO: 3045374 - DNA, 25 bp, Homo sapien
tgacagggcctgccccatcctacac

SEQ ID NO: 3045375 - DNA, 25 bp, Homo sapien
tcctgacagggcctgccccatccta

SEQ ID NO: 3045376 - DNA, 25 bp, Homo sapien
cttcctgacagggcctgccccatcc

SEQ ID NO: 3045377 - DNA, 25 bp, Homo sapien
tggcatcatccatcggctggcaggg

SEQ ID NO: 3045378 - DNA, 25 bp, Homo sapien
ccaaggtgcagcagtccagctagga

SEQ ID NO: 3045379 - DNA, 25 bp, Homo sapien
tgggcttcatcctcggaggcagcaa

SEQ ID NO: 3045380 - DNA, 25 bp, Homo sapien
gaggcagcaaactggatattgccaa

SEQ ID NO: 3045381 - DNA, 25 bp, Homo sapien
taaggtatgtgctacgccactgcct

SEQ ID NO: 3045382 - DNA, 25 bp, Homo sapien
gaagggccgttctgctgagtacaat

SEQ ID NO: 3045383 - DNA, 25 bp, Homo sapien
tatacaagttacatgcatcgcctca

SEQ ID NO: 3045384 - DNA, 25 bp, Homo sapien
ccttggtctgtgtccgatgggtgcc

SEQ ID NO: 3045385 - DNA, 25 bp, Homo sapien
caggccatcctatctatcccctcct

SEQ ID NO: 3045386 - DNA, 25 bp, Homo sapien
ctggcagtgtctgagcagcccccat

SEQ ID NO: 3045387 - DNA, 25 bp, Homo sapien
tcgactgccaggccatcctatctat

SEQ ID NO: 3045388 - DNA, 25 bp, Homo sapien
tgcattgctacctccctgaagtggc

SEQ ID NO: 3045389 - DNA, 25 bp, Homo sapien
aaagctctatgcaaagggctgcccg

SEQ ID NO: 3045390 - DNA, 25 bp, Homo sapien
tctccagactcagcagaacagaggt

SEQ ID NO: 3045391 - DNA, 25 bp, Homo sapien
tactagacaagcaaggcggtagcac

SEQ ID NO: 3045392 - DNA, 25 bp, Homo sapien
tgactgattccttggaggtagccca

SEQ ID NO: 3045393 - DNA, 25 bp, Homo sapien
tctctggtcacctcaaaacaatcct

SEQ ID NO: 3045394 - DNA, 25 bp, Homo sapien
ctgggtaggggtgtcaatgcccaaa

SEQ ID NO: 3045395 - DNA, 25 bp, Homo sapien
ggcctctctggtcacctcaaaacaa

SEQ ID NO: 3045396 - DNA, 25 bp, Homo sapien
gggtgtcaatgcccaaatggagcat

SEQ ID NO: 3045397 - DNA, 25 bp, Homo sapien
tgggtcagcgcaaggtgctggatgg

SEQ ID NO: 3045398 - DNA, 25 bp, Homo sapien
tgggtgggtgatgctgggtcagcgc

SEQ ID NO: 3045399 - DNA, 25 bp, Homo sapien
tgaaaaagaatccaagttcggggca

SEQ ID NO: 3045400 - DNA, 25 bp, Homo sapien
tgatgctgggtcagcgcaaggtgct

SEQ ID NO: 3045401 - DNA, 25 bp, Homo sapien
cctcaggaaggtgccactggagcct

SEQ ID NO: 3045402 - DNA, 25 bp, Homo sapien
cttctaagctcctctctgggttggg

SEQ ID NO: 3045403 - DNA, 25 bp, Homo sapien
cgtcctcactggctcctttgcaaat

SEQ ID NO: 3045404 - DNA, 25 bp, Homo sapien
taagctcctctctgggttgggcagc

SEQ ID NO: 3045405 - DNA, 25 bp, Homo sapien
taggtctggactgcggctccagtca

SEQ ID NO: 3045406 - DNA, 25 bp, Homo sapien
ccactcgagttttctctaggaggta

SEQ ID NO: 3045407 - DNA, 25 bp, Homo sapien
agttttctctaggaggtaggtctgg

SEQ ID NO: 3045408 - DNA, 25 bp, Homo sapien
cctggcaggccactcgagttttctc

SEQ ID NO: 3045409 - DNA, 25 bp, Homo sapien
gagctggatgaacttcccaaagcga

SEQ ID NO: 3045410 - DNA, 25 bp, Homo sapien
ttattcctcagtgtacacgcattcc

SEQ ID NO: 3045411 - DNA, 25 bp, Homo sapien
cccaaagcgactgctgttgttattc

SEQ ID NO: 3045412 - DNA, 25 bp, Homo sapien
gctgttgttattcctcagtgtacac

SEQ ID NO: 3045413 - DNA, 25 bp, Homo sapien
cacagcatagaacttcattaggcag

SEQ ID NO: 3045414 - DNA, 25 bp, Homo sapien
tcttgtggctctcccaagatgcagg

SEQ ID NO: 3045415 - DNA, 25 bp, Homo sapien
caaaagcttccatgacagggttgga

SEQ ID NO: 3045416 - DNA, 25 bp, Homo sapien
ggagttcaggatcctctgttctatc

SEQ ID NO: 3045417 - DNA, 25 bp, Homo sapien
ggacatagaaatacactgtctttac

SEQ ID NO: 3045418 - DNA, 25 bp, Homo sapien
gtatcctatcacctcactaaacgct

SEQ ID NO: 3045419 - DNA, 25 bp, Homo sapien
tcttaatcagctgaagtgaggtata

SEQ ID NO: 3045420 - DNA, 25 bp, Homo sapien
aattgtttgtggctaggacatagaa

SEQ ID NO: 3045421 - DNA, 25 bp, Homo sapien
cattcctgatactggtgatttacat

SEQ ID NO: 3045422 - DNA, 25 bp, Homo sapien
aagatctatattgatgtctactcct

SEQ ID NO: 3045423 - DNA, 25 bp, Homo sapien
aatttcttggcataaagttattcaa

SEQ ID NO: 3045424 - DNA, 25 bp, Homo sapien
catctaaattgtataatttcttggc

SEQ ID NO: 3045425 - DNA, 25 bp, Homo sapien
aatgtctcatcttatccttagcaac

SEQ ID NO: 3045426 - DNA, 25 bp, Homo sapien
tagatatgggttttccccacatttc

SEQ ID NO: 3045427 - DNA, 25 bp, Homo sapien
tctaatgtaaccacttcagctttcc

SEQ ID NO: 3045428 - DNA, 25 bp, Homo sapien
gaaactgtaattaggtacacacctg

SEQ ID NO: 3045429 - DNA, 25 bp, Homo sapien
tggagacaccaataagctcacggga

SEQ ID NO: 3045430 - DNA, 25 bp, Homo sapien
caccaacagttaagttcactaatgc

SEQ ID NO: 3045431 - DNA, 25 bp, Homo sapien
tctagtctgttgatatgcccaaaga

SEQ ID NO: 3045432 - DNA, 25 bp, Homo sapien
ccacctatctgctgaaagactggag

SEQ ID NO: 3045433 - DNA, 25 bp, Homo sapien
caaagtacccagcataataagtgaa

SEQ ID NO: 3045434 - DNA, 25 bp, Homo sapien
tcaccattatggactggctctctca

SEQ ID NO: 3045435 - DNA, 25 bp, Homo sapien
tatgaaaataaaacctcggccaggc

SEQ ID NO: 3045436 - DNA, 25 bp, Homo sapien
gaagaaaggctataccacaacacag

SEQ ID NO: 3045437 - DNA, 25 bp, Homo sapien
tctccactgacaacaatagactggt

SEQ ID NO: 3045438 - DNA, 25 bp, Homo sapien
ggctcttgacattcctgtaggtctg

SEQ ID NO: 3045439 - DNA, 25 bp, Homo sapien
tagactggttgactggttcaatcag

SEQ ID NO: 3045440 - DNA, 25 bp, Homo sapien
gactggttcaatcaggctcttgaca

SEQ ID NO: 3045441 - DNA, 25 bp, Homo sapien
cttgaaggggttcaaggctaccagg

SEQ ID NO: 3045442 - DNA, 25 bp, Homo sapien
gcatggtactctctcattagctcgg

SEQ ID NO: 3045443 - DNA, 25 bp, Homo sapien
ggtgcagccagcattggtgtagaat

SEQ ID NO: 3045444 - DNA, 25 bp, Homo sapien
ctctcattagctcgggcgagtagag

SEQ ID NO: 3045445 - DNA, 25 bp, Homo sapien
atgtaccgggcctgcaggcacctca

SEQ ID NO: 3045446 - DNA, 25 bp, Homo sapien
ctgccatgtaccgggcctgcaggca

SEQ ID NO: 3045447 - DNA, 25 bp, Homo sapien
taccgggcctgcaggcacctcagga

SEQ ID NO: 3045448 - DNA, 25 bp, Homo sapien
tgccatgtaccgggcctgcaggcac

SEQ ID NO: 3045449 - DNA, 25 bp, Homo sapien
cagaccccggattgtggccattgac

SEQ ID NO: 3045450 - DNA, 25 bp, Homo sapien
gtctctagtgtcacaggattcaccc

SEQ ID NO: 3045451 - DNA, 25 bp, Homo sapien
tccagtttgtacagcaggacctccc

SEQ ID NO: 3045452 - DNA, 25 bp, Homo sapien
ttcaccctggtgaggtcatccagtt

SEQ ID NO: 3045453 - DNA, 25 bp, Homo sapien
tctgagagaggtagccccatgtctt

SEQ ID NO: 3045454 - DNA, 25 bp, Homo sapien
ctgagagaggtagccccatgtcttc

SEQ ID NO: 3045455 - DNA, 25 bp, Homo sapien
gagagaggtagccccatgtcttcat

SEQ ID NO: 3045456 - DNA, 25 bp, Homo sapien
cttctgagagaggtagccccatgtc

SEQ ID NO: 3045457 - DNA, 25 bp, Homo sapien
caggcacgcgtaaaagtggcttttg

SEQ ID NO: 3045458 - DNA, 25 bp, Homo sapien
tacaggcacgcgtaaaagtggcttt

SEQ ID NO: 3045459 - DNA, 25 bp, Homo sapien
actacaggcacgcgtaaaagtggct

SEQ ID NO: 3045460 - DNA, 25 bp, Homo sapien
cacgcgtaaaagtggcttttgtatt

SEQ ID NO: 3045461 - DNA, 25 bp, Homo sapien
gagaccagccttgtctacagagtga

SEQ ID NO: 3045462 - DNA, 25 bp, Homo sapien
tactatccacctagtcatgggacca

SEQ ID NO: 3045463 - DNA, 25 bp, Homo sapien
ggtacaaggagtactatccacctag

SEQ ID NO: 3045464 - DNA, 25 bp, Homo sapien
ccacctagtcatgggaccatgggct

SEQ ID NO: 3045465 - DNA, 25 bp, Homo sapien
gttgcaggaggtacaaggagtacta

SEQ ID NO: 3045466 - DNA, 25 bp, Homo sapien
gatccatttgggagcgctaatcagg

SEQ ID NO: 3045467 - DNA, 25 bp, Homo sapien
cactacgactaagggttgatgatcc

SEQ ID NO: 3045468 - DNA, 25 bp, Homo sapien
ctaatcaggtgaacggtccagtgtc

SEQ ID NO: 3045469 - DNA, 25 bp, Homo sapien
gtccagtgtcaacttcaagaaggtg

SEQ ID NO: 3045470 - DNA, 25 bp, Homo sapien
caaatgttattacgatgcagcatca

SEQ ID NO: 3045471 - DNA, 25 bp, Homo sapien
tcggtttcgcggttaccagccaaga

SEQ ID NO: 3045472 - DNA, 25 bp, Homo sapien
tcctgctccagtcggtttcgcggtt

SEQ ID NO: 3045473 - DNA, 25 bp, Homo sapien
tcctagctggagtcaagtgagatta

SEQ ID NO: 3045474 - DNA, 25 bp, Homo sapien
agtaaatggaacaccgaatcaaggc

SEQ ID NO: 3045475 - DNA, 25 bp, Homo sapien
tggaacaccgaatcaaggcaagtgg

SEQ ID NO: 3045476 - DNA, 25 bp, Homo sapien
gtaaatggaacaccgaatcaaggca

SEQ ID NO: 3045477 - DNA, 25 bp, Homo sapien
aaatggaacaccgaatcaaggcaag

SEQ ID NO: 3045478 - DNA, 25 bp, Homo sapien
cagatataggttcgggttgacactc

SEQ ID NO: 3045479 - DNA, 25 bp, Homo sapien
aagggcttcagatataggttcgggt

SEQ ID NO: 3045480 - DNA, 25 bp, Homo sapien
cccttccgcgtctgaagggcttcag

SEQ ID NO: 3045481 - DNA, 25 bp, Homo sapien
agccccttccgcgtctgaagggctt

SEQ ID NO: 3045482 - DNA, 25 bp, Homo sapien
ggcccgagccgccgtgcttcaggcc

SEQ ID NO: 3045483 - DNA, 25 bp, Homo sapien
cccgagccgccgtgcttcaggcccc

SEQ ID NO: 3045484 - DNA, 25 bp, Homo sapien
acggcccgagccgccgtgcttcagg

SEQ ID NO: 3045485 - DNA, 25 bp, Homo sapien
cacggcccgagccgccgtgcttcag

SEQ ID NO: 3045486 - DNA, 25 bp, Homo sapien
ggaggggcaagagcgtgcagtgagg

SEQ ID NO: 3045487 - DNA, 25 bp, Homo sapien
aggaggggcaagagcgtgcagtgag

SEQ ID NO: 3045488 - DNA, 25 bp, Homo sapien
gcaagagcgtgcagtgaggaaagga

SEQ ID NO: 3045489 - DNA, 25 bp, Homo sapien
agagcgtgcagtgaggaaaggaacc

SEQ ID NO: 3045490 - DNA, 25 bp, Homo sapien
tggtccggcttgctggcttcaacta

SEQ ID NO: 3045491 - DNA, 25 bp, Homo sapien
caactacggtgagatgttttgcgac

SEQ ID NO: 3045492 - DNA, 25 bp, Homo sapien
tgctggcttcaactacggtgagatg

SEQ ID NO: 3045493 - DNA, 25 bp, Homo sapien
gggcgcgcacgtggcttggccggga

SEQ ID NO: 3045494 - DNA, 25 bp, Homo sapien
taaagcggcagcttcccacgttctg

SEQ ID NO: 3045495 - DNA, 25 bp, Homo sapien
gacatgacaggagtgggtagcccac

SEQ ID NO: 3045496 - DNA, 25 bp, Homo sapien
cgccggcaccatttggagtacgtga

SEQ ID NO: 3045497 - DNA, 25 bp, Homo sapien
ggcggacaccattaccctgataggg

SEQ ID NO: 3045498 - DNA, 25 bp, Homo sapien
tcccagaagatttgccaaaactgag

SEQ ID NO: 3045499 - DNA, 25 bp, Homo sapien
tttcccagaagatttgccaaaactg

SEQ ID NO: 3045500 - DNA, 25 bp, Homo sapien
cagtgcgtttactgctattgctatt

SEQ ID NO: 3045501 - DNA, 25 bp, Homo sapien
ccagaagatttgccaaaactgagct

SEQ ID NO: 3045502 - DNA, 25 bp, Homo sapien
ggcacacgggttggtctattaaatg

SEQ ID NO: 3045503 - DNA, 25 bp, Homo sapien
gcgaaggaataatctctaccctggg

SEQ ID NO: 3045504 - DNA, 25 bp, Homo sapien
ggtctattaaatgccaaccgcgaag

SEQ ID NO: 3045505 - DNA, 25 bp, Homo sapien
cactgatggtagtggcacacgggtt

SEQ ID NO: 3045506 - DNA, 25 bp, Homo sapien
gcagtactggtggttatggctaaaa

SEQ ID NO: 3045507 - DNA, 25 bp, Homo sapien
aataagtgcctactctaaaaccagg

SEQ ID NO: 3045508 - DNA, 25 bp, Homo sapien
tatttcgtcaattagaggtttgctc

SEQ ID NO: 3045509 - DNA, 25 bp, Homo sapien
atttatagcacccaggctacctcct

SEQ ID NO: 3045510 - DNA, 25 bp, Homo sapien
ttcattgaattcctatttgtccaaa

SEQ ID NO: 3045511 - DNA, 25 bp, Homo sapien
ctagcaaatccacctttttcgcctt

SEQ ID NO: 3045512 - DNA, 25 bp, Homo sapien
tatttgtccaaagatactaagtatg

SEQ ID NO: 3045513 - DNA, 25 bp, Homo sapien
cgcctttaagaatacgttttcattg

SEQ ID NO: 3045514 - DNA, 25 bp, Homo sapien
acctggcgtgtgttcagtagtcaaa

SEQ ID NO: 3045515 - DNA, 25 bp, Homo sapien
ttcacagatttaaatccccagggtg

SEQ ID NO: 3045516 - DNA, 25 bp, Homo sapien
cccttctttgttagtacctggcgtg

SEQ ID NO: 3045517 - DNA, 25 bp, Homo sapien
tagcacctatataatgagcttgtca

SEQ ID NO: 3045518 - DNA, 25 bp, Homo sapien
tatatgaacatcatacatacgtatt

SEQ ID NO: 3045519 - DNA, 25 bp, Homo sapien
gtattagattcaagctaatactcac

SEQ ID NO: 3045520 - DNA, 25 bp, Homo sapien
aattttggctatgtatatgaacatc

SEQ ID NO: 3045521 - DNA, 25 bp, Homo sapien
tacataaaacgcaagattctctaaa

SEQ ID NO: 3045522 - DNA, 25 bp, Homo sapien
tatttgccgggtaatgacaccttcg

SEQ ID NO: 3045523 - DNA, 25 bp, Homo sapien
tttttaaaggtatcacagctccagg

SEQ ID NO: 3045524 - DNA, 25 bp, Homo sapien
tacttcgcccaagggagtacctgct

SEQ ID NO: 3045525 - DNA, 25 bp, Homo sapien
cacggtggcgagaggaactgtcttc

SEQ ID NO: 3045526 - DNA, 25 bp, Homo sapien
tgtaacgacaaccacaagctatcag

SEQ ID NO: 3045527 - DNA, 25 bp, Homo sapien
aagcgaattcagtggcgtcaagggc

SEQ ID NO: 3045528 - DNA, 25 bp, Homo sapien
gacgggcttgactcgctgaaagaat

SEQ ID NO: 3045529 - DNA, 25 bp, Homo sapien
taccagtcctagttcgggtctagcg

SEQ ID NO: 3045530 - DNA, 25 bp, Homo sapien
cggccagggcggccccgcaccctct

SEQ ID NO: 3045531 - DNA, 25 bp, Homo sapien
gcgggacggccagggcggccccgca

SEQ ID NO: 3045532 - DNA, 25 bp, Homo sapien
ggccagggcggccccgcaccctctg

SEQ ID NO: 3045533 - DNA, 25 bp, Homo sapien
tcgcgagaggacgtgggtcccgccc

SEQ ID NO: 3045534 - DNA, 25 bp, Homo sapien
cagccccagtctcgcgagaggacgt

SEQ ID NO: 3045535 - DNA, 25 bp, Homo sapien
gcgcaaatttctccagcggggtccc

SEQ ID NO: 3045536 - DNA, 25 bp, Homo sapien
ggcgcaaatttctccagcggggtcc

SEQ ID NO: 3045537 - DNA, 25 bp, Homo sapien
gcagattcccctctacatagacgac

SEQ ID NO: 3045538 - DNA, 25 bp, Homo sapien
agattcccctctacatagacgacac

SEQ ID NO: 3045539 - DNA, 25 bp, Homo sapien
aggcagattcccctctacatagacg

SEQ ID NO: 3045540 - DNA, 25 bp, Homo sapien
ggaggcagattcccctctacataga

SEQ ID NO: 3045541 - DNA, 25 bp, Homo sapien
cagttgctctcttgataactacaga

SEQ ID NO: 3045542 - DNA, 25 bp, Homo sapien
ggagcagtagcagtgtcagttcaga

SEQ ID NO: 3045543 - DNA, 25 bp, Homo sapien
tcagattatctcagtgtcactaagc

SEQ ID NO: 3045544 - DNA, 25 bp, Homo sapien
tactatactacggtgaagggagcag

SEQ ID NO: 3045545 - DNA, 25 bp, Homo sapien
tcttgtataaaaaccctgtgttgta

SEQ ID NO: 3045546 - DNA, 25 bp, Homo sapien
tataaaaaccctgtgttgtagccac

SEQ ID NO: 3045547 - DNA, 25 bp, Homo sapien
tgtataaaaaccctgtgttgtagcc

SEQ ID NO: 3045548 - DNA, 25 bp, Homo sapien
cttgtataaaaaccctgtgttgtag

SEQ ID NO: 3045549 - DNA, 25 bp, Homo sapien
tagttacccagggcggcagtgtagc

SEQ ID NO: 3045550 - DNA, 25 bp, Homo sapien
cagagccgtggtggcctgtcggctt

SEQ ID NO: 3045551 - DNA, 25 bp, Homo sapien
gccgtggtggcctgtcggcttgcaa

SEQ ID NO: 3045552 - DNA, 25 bp, Homo sapien
gcatcaaaggtgtccttggtatagt

SEQ ID NO: 3045553 - DNA, 25 bp, Homo sapien
gtagtccacgatggcaacaaacatc

SEQ ID NO: 3045554 - DNA, 25 bp, Homo sapien
ccacgatggcaacaaacatcttgaa

SEQ ID NO: 3045555 - DNA, 25 bp, Homo sapien
gtccacgatggcaacaaacatcttg

SEQ ID NO: 3045556 - DNA, 25 bp, Homo sapien
agtccacgatggcaacaaacatctt

SEQ ID NO: 3045557 - DNA, 25 bp, Homo sapien
tccacggaagccactgcatttcccc

SEQ ID NO: 3045558 - DNA, 25 bp, Homo sapien
atcccaggcgatccccaccaccggc

SEQ ID NO: 3045559 - DNA, 25 bp, Homo sapien
gcatttccccatcccaggcgatccc

SEQ ID NO: 3045560 - DNA, 25 bp, Homo sapien
gaaacctccacggaagccactgcat

SEQ ID NO: 3045561 - DNA, 25 bp, Homo sapien
gttatctctttacctgactttaatg

SEQ ID NO: 3045562 - DNA, 25 bp, Homo sapien
gggcatttttactatgcttttccag

SEQ ID NO: 3045563 - DNA, 25 bp, Homo sapien
agacaatgttgagtagttatctctt

SEQ ID NO: 3045564 - DNA, 25 bp, Homo sapien
aaaaattaaggtactcaatgagctt

SEQ ID NO: 3045565 - DNA, 25 bp, Homo sapien
gattccggaaaaggtgccaagagct

SEQ ID NO: 3045566 - DNA, 25 bp, Homo sapien
tgtttcaccgtgacaagaccaaaga

SEQ ID NO: 3045567 - DNA, 25 bp, Homo sapien
tacagatccaggtaatcgagagacc

SEQ ID NO: 3045568 - DNA, 25 bp, Homo sapien
caaagatacacatcctgaaagctgt

SEQ ID NO: 3045569 - DNA, 25 bp, Homo sapien
tgagccaccacctgtataagtttaa

SEQ ID NO: 3045570 - DNA, 25 bp, Homo sapien
tgctaggctcataggcttctaggag

SEQ ID NO: 3045571 - DNA, 25 bp, Homo sapien
gactaactggagatacgtctggcta

SEQ ID NO: 3045572 - DNA, 25 bp, Homo sapien
gagatgactgtttcaagataggact

SEQ ID NO: 3045573 - DNA, 25 bp, Homo sapien
tctttagttgcgtggctgcgcaggc

SEQ ID NO: 3045574 - DNA, 25 bp, Homo sapien
tcctgtgagacttactaaagcaact

SEQ ID NO: 3045575 - DNA, 25 bp, Homo sapien
gactactgcgccttctctttcgaaa

SEQ ID NO: 3045576 - DNA, 25 bp, Homo sapien
gtctttcaatgaaacactcacgatg

SEQ ID NO: 3045577 - DNA, 25 bp, Homo sapien
aggcagtgaacagagctagaggtcc

SEQ ID NO: 3045578 - DNA, 25 bp, Homo sapien
gcagtgaacagagctagaggtccct

SEQ ID NO: 3045579 - DNA, 25 bp, Homo sapien
tgaacagagctagaggtccctcctc

SEQ ID NO: 3045580 - DNA, 25 bp, Homo sapien
tccccaggcagtgaacagagctaga

SEQ ID NO: 3045581 - DNA, 25 bp, Homo sapien
tggccttccggggatgtggggctct

SEQ ID NO: 3045582 - DNA, 25 bp, Homo sapien
gccttccggggatgtggggctctaa

SEQ ID NO: 3045583 - DNA, 25 bp, Homo sapien
ccttccggggatgtggggctctaag

SEQ ID NO: 3045584 - DNA, 25 bp, Homo sapien
ttccggggatgtggggctctaagag

SEQ ID NO: 3045585 - DNA, 25 bp, Homo sapien
ctcggagacatgtctggtggcgatc

SEQ ID NO: 3045586 - DNA, 25 bp, Homo sapien
gttccctttgcctcggctgctcgga

SEQ ID NO: 3045587 - DNA, 25 bp, Homo sapien
cggaaacttcgcgtgacacaaactc

SEQ ID NO: 3045588 - DNA, 25 bp, Homo sapien
agcgagccgcccttctgggccgctc

SEQ ID NO: 3045589 - DNA, 25 bp, Homo sapien
tggtgcagacacatacttctccact

SEQ ID NO: 3045590 - DNA, 25 bp, Homo sapien
ggtgcagacacatacttctccactt

SEQ ID NO: 3045591 - DNA, 25 bp, Homo sapien
tgcagacacatacttctccacttcc

SEQ ID NO: 3045592 - DNA, 25 bp, Homo sapien
aatggtgcagacacatacttctcca

SEQ ID NO: 3045593 - DNA, 25 bp, Homo sapien
cccctgtgtcccctaatgtctggta

SEQ ID NO: 3045594 - DNA, 25 bp, Homo sapien
ccctaatgtctggtagtcttggccc

SEQ ID NO: 3045595 - DNA, 25 bp, Homo sapien
cagacacggatacctgggtttccgt

SEQ ID NO: 3045596 - DNA, 25 bp, Homo sapien
tgctgtagctaccctgccacctggg

SEQ ID NO: 3045597 - DNA, 25 bp, Homo sapien
ggttcttctccctcttctaacttca

SEQ ID NO: 3045598 - DNA, 25 bp, Homo sapien
ccgacttcaggttcttctccctctt

SEQ ID NO: 3045599 - DNA, 25 bp, Homo sapien
ttctccctcttctaacttcagttct

SEQ ID NO: 3045600 - DNA, 25 bp, Homo sapien
ttcttctccctcttctaacttcagt

SEQ ID NO: 3045601 - DNA, 25 bp, Homo sapien
ctcccccagctcctcatcactggtt

SEQ ID NO: 3045602 - DNA, 25 bp, Homo sapien
tctcccccagctcctcatcactggt

SEQ ID NO: 3045603 - DNA, 25 bp, Homo sapien
ctctcccccagctcctcatcactgg

SEQ ID NO: 3045604 - DNA, 25 bp, Homo sapien
tacaaggacagaggcggcaccagct

SEQ ID NO: 3045605 - DNA, 25 bp, Homo sapien
ttaagtggcccttatttatcaccat

SEQ ID NO: 3045606 - DNA, 25 bp, Homo sapien
tccccaaagtcagagtggtcgtctc

SEQ ID NO: 3045607 - DNA, 25 bp, Homo sapien
tggtcgtctcgtattttaagtggcc

SEQ ID NO: 3045608 - DNA, 25 bp, Homo sapien
taagctatttttcatgctatctcct

SEQ ID NO: 3045609 - DNA, 25 bp, Homo sapien
tgctatctcctgtaatatcctctaa

SEQ ID NO: 3045610 - DNA, 25 bp, Homo sapien
ccaatgcgtttcaaatcacctcggg

SEQ ID NO: 3045611 - DNA, 25 bp, Homo sapien
tcctctaatccaatgcgtttcaaat

SEQ ID NO: 3045612 - DNA, 25 bp, Homo sapien
acagaagcctccagcggccttggga

SEQ ID NO: 3045613 - DNA, 25 bp, Homo sapien
cagaagcctccagcggccttgggac

SEQ ID NO: 3045614 - DNA, 25 bp, Homo sapien
agcggccttgggactctctttcctc

SEQ ID NO: 3045615 - DNA, 25 bp, Homo sapien
ctccagcggccttgggactctcttt

SEQ ID NO: 3045616 - DNA, 25 bp, Homo sapien
gcgggagagaggtcatccttcatgg

SEQ ID NO: 3045617 - DNA, 25 bp, Homo sapien
tccttcatggcctgaagaccagagg

SEQ ID NO: 3045618 - DNA, 25 bp, Homo sapien
tgtctggggcgggagagaggtcatc

SEQ ID NO: 3045619 - DNA, 25 bp, Homo sapien
agagaggtcatccttcatggcctga

SEQ ID NO: 3045620 - DNA, 25 bp, Homo sapien
acttctgaaatgagcggcccgttgc

SEQ ID NO: 3045621 - DNA, 25 bp, Homo sapien
tgataatgtggcatgacacttctga

SEQ ID NO: 3045622 - DNA, 25 bp, Homo sapien
gcagagcgaagttgtcaggcggcga

SEQ ID NO: 3045623 - DNA, 25 bp, Homo sapien
aggttgtctttcaatccactgatga

SEQ ID NO: 3045624 - DNA, 25 bp, Homo sapien
taaagggtcagatatcgagtgtggg

SEQ ID NO: 3045625 - DNA, 25 bp, Homo sapien
agatatcgagtgtgggcagtgccct

SEQ ID NO: 3045626 - DNA, 25 bp, Homo sapien
aatctgggactctggtgcagggcgc

SEQ ID NO: 3045627 - DNA, 25 bp, Homo sapien
cagggcgccgtggaggcaggagtat

SEQ ID NO: 3045628 - DNA, 25 bp, Homo sapien
gagttgctcctgtgcatgttacagc

SEQ ID NO: 3045629 - DNA, 25 bp, Homo sapien
ctgtgcatgttacagcatcaggatc

SEQ ID NO: 3045630 - DNA, 25 bp, Homo sapien
agggaggtcccagtccactccctgg

SEQ ID NO: 3045631 - DNA, 25 bp, Homo sapien
gagggtgtgagatcccaagatcaga

SEQ ID NO: 3045632 - DNA, 25 bp, Homo sapien
tgaggtcttgatcatcagggactct

SEQ ID NO: 3045633 - DNA, 25 bp, Homo sapien
tgcctttgggtcctactctctgttt

SEQ ID NO: 3045634 - DNA, 25 bp, Homo sapien
catgggacacgatgcctttgggtcc

SEQ ID NO: 3045635 - DNA, 25 bp, Homo sapien
ggtgtagtcaccctgggagagtcct

SEQ ID NO: 3045636 - DNA, 25 bp, Homo sapien
aggtcagtgaactgccaggcttcag

SEQ ID NO: 3045637 - DNA, 25 bp, Homo sapien
caggcttcagccttagaaggaatca

SEQ ID NO: 3045638 - DNA, 25 bp, Homo sapien
gaactgccaggcttcagccttagaa

SEQ ID NO: 3045639 - DNA, 25 bp, Homo sapien
tcagtgaactgccaggcttcagcct

SEQ ID NO: 3045640 - DNA, 25 bp, Homo sapien
gagatgtcagggacgtcagtggcac

SEQ ID NO: 3045641 - DNA, 25 bp, Homo sapien
tctgggagatgtcagggacgtcagt

SEQ ID NO: 3045642 - DNA, 25 bp, Homo sapien
gggtctgggagatgtcagggacgtc

SEQ ID NO: 3045643 - DNA, 25 bp, Homo sapien
gacccaaggggacttcagtatctct

SEQ ID NO: 3045644 - DNA, 25 bp, Homo sapien
tgctgcgtggccgtataatccacga

SEQ ID NO: 3045645 - DNA, 25 bp, Homo sapien
cactgtgcctgctgcgtggccgtat

SEQ ID NO: 3045646 - DNA, 25 bp, Homo sapien
tttgcggttgttcccagtcttggca

SEQ ID NO: 3045647 - DNA, 25 bp, Homo sapien
aagggcagggccacgtcatatttgc

SEQ ID NO: 3045648 - DNA, 25 bp, Homo sapien
ggcagatgggatccttcacacagca

SEQ ID NO: 3045649 - DNA, 25 bp, Homo sapien
tacagggagcggcagatgggatcct

SEQ ID NO: 3045650 - DNA, 25 bp, Homo sapien
ggagcggcagatgggatccttcaca

SEQ ID NO: 3045651 - DNA, 25 bp, Homo sapien
ctacagggagcggcagatgggatcc

SEQ ID NO: 3045652 - DNA, 25 bp, Homo sapien
gctcaagcccatcagagtgacagat

SEQ ID NO: 3045653 - DNA, 25 bp, Homo sapien
ccccgggttgggctggcatccagcc

SEQ ID NO: 3045654 - DNA, 25 bp, Homo sapien
gtgccaagctggaccggtccggcca

SEQ ID NO: 3045655 - DNA, 25 bp, Homo sapien
acggtcagcggccttttcgcaggcg

SEQ ID NO: 3045656 - DNA, 25 bp, Homo sapien
gcgtctctgcgagtatctgtctccc

SEQ ID NO: 3045657 - DNA, 25 bp, Homo sapien
atgcgtccgctgctcctcatagagg

SEQ ID NO: 3045658 - DNA, 25 bp, Homo sapien
ttcgcgactttctcgcacagcggct

SEQ ID NO: 3045659 - DNA, 25 bp, Homo sapien
tcgggagagtgtgttcgcgactttc

SEQ ID NO: 3045660 - DNA, 25 bp, Homo sapien
gccaagagaggggacacttcctcca

SEQ ID NO: 3045661 - DNA, 25 bp, Homo sapien
tgccaagagaggggacacttcctcc

SEQ ID NO: 3045662 - DNA, 25 bp, Homo sapien
ctgccaagagaggggacacttcctc

SEQ ID NO: 3045663 - DNA, 25 bp, Homo sapien
gaagccctcccagacttagacggaa

SEQ ID NO: 3045664 - DNA, 25 bp, Homo sapien
gaagatcctcttagaaggcacctgg

SEQ ID NO: 3045665 - DNA, 25 bp, Homo sapien
tgccagtggcacaaggactcagcat

SEQ ID NO: 3045666 - DNA, 25 bp, Homo sapien
tctagggaaaggacgagaactccga

SEQ ID NO: 3045667 - DNA, 25 bp, Homo sapien
caagtcttatctgctcatcgtggcg

SEQ ID NO: 3045668 - DNA, 25 bp, Homo sapien
ctgagtgaagtttgtctgggcccgg

SEQ ID NO: 3045669 - DNA, 25 bp, Homo sapien
gagacctcttggtaattcagattga

SEQ ID NO: 3045670 - DNA, 25 bp, Homo sapien
tgaatcttatttgtccaccatcaag

SEQ ID NO: 3045671 - DNA, 25 bp, Homo sapien
agctgcccaagggttctgtcctttc

SEQ ID NO: 3045672 - DNA, 25 bp, Homo sapien
ccccatctgactgccgattgaaaag

SEQ ID NO: 3045673 - DNA, 25 bp, Homo sapien
cctcaaccccatctgactgccgatt

SEQ ID NO: 3045674 - DNA, 25 bp, Homo sapien
tcaaccccatctgactgccgattga

SEQ ID NO: 3045675 - DNA, 25 bp, Homo sapien
aaccccatctgactgccgattgaaa

SEQ ID NO: 3045676 - DNA, 25 bp, Homo sapien
taagagagaaatacggcgctgcctg

SEQ ID NO: 3045677 - DNA, 25 bp, Homo sapien
cattgtacagcaacagaagagacgc

SEQ ID NO: 3045678 - DNA, 25 bp, Homo sapien
gatttcggctatgtaaacaccgagg

SEQ ID NO: 3045679 - DNA, 25 bp, Homo sapien
catttaataggagtagccacacctc

SEQ ID NO: 3045680 - DNA, 25 bp, Homo sapien
acgccgggcgcgctgtgcacagtct

SEQ ID NO: 3045681 - DNA, 25 bp, Homo sapien
acagtctccggaggccgccagtgcg

SEQ ID NO: 3045682 - DNA, 25 bp, Homo sapien
gggcaggcccggtgcgtggtgcacg

SEQ ID NO: 3045683 - DNA, 25 bp, Homo sapien
gtgggccctgcacttaacatccggg

SEQ ID NO: 3045684 - DNA, 25 bp, Homo sapien
ctgtggacgcgaggccagctcgtag

SEQ ID NO: 3045685 - DNA, 25 bp, Homo sapien
cagctcgtagggggctgggcggtca

SEQ ID NO: 3045686 - DNA, 25 bp, Homo sapien
cctgcggggctgtggacgcgaggcc

SEQ ID NO: 3045687 - DNA, 25 bp, Homo sapien
cccagcgcgcatgcgctcgccgcag

SEQ ID NO: 3045688 - DNA, 25 bp, Homo sapien
ctgcctgaatgtctctgcatgtggc

SEQ ID NO: 3045689 - DNA, 25 bp, Homo sapien
tccttgtctatgtccgtttcaggtt

SEQ ID NO: 3045690 - DNA, 25 bp, Homo sapien
gatctgcctgaatgtctctgcatgt

SEQ ID NO: 3045691 - DNA, 25 bp, Homo sapien
tgtccgtttcaggtttgttgatctg

SEQ ID NO: 3045692 - DNA, 25 bp, Homo sapien
tgatagacttattgtgcggactgca

SEQ ID NO: 3045693 - DNA, 25 bp, Homo sapien
tgttgcctctgagcgttattgtcag

SEQ ID NO: 3045694 - DNA, 25 bp, Homo sapien
taaggactatctctgcctccgcaga

SEQ ID NO: 3045695 - DNA, 25 bp, Homo sapien
gaggtaactgcgtgtctgtagactg

SEQ ID NO: 3045696 - DNA, 25 bp, Homo sapien
aaggcggcggcatgagtgcgggcag

SEQ ID NO: 3045697 - DNA, 25 bp, Homo sapien
gggcatacattatgccagcaaaagc

SEQ ID NO: 3045698 - DNA, 25 bp, Homo sapien
aaagcaaaaggcggcggcatgagtg

SEQ ID NO: 3045699 - DNA, 25 bp, Homo sapien
agcacggggcatacattatgccagc

SEQ ID NO: 3045700 - DNA, 25 bp, Homo sapien
tgcccgcagtgtggtcggctgcagg

SEQ ID NO: 3045701 - DNA, 25 bp, Homo sapien
gggagcgcttggatggtgcccgcag

SEQ ID NO: 3045702 - DNA, 25 bp, Homo sapien
ggatgaatggccgaggggagcgctt

SEQ ID NO: 3045703 - DNA, 25 bp, Homo sapien
gatggtgcccgcagtgtggtcggct

SEQ ID NO: 3045704 - DNA, 25 bp, Homo sapien
gcaagagaaggctgctctaaagcta

SEQ ID NO: 3045705 - DNA, 25 bp, Homo sapien
aggagcagaaccaagacgttcagat

SEQ ID NO: 3045706 - DNA, 25 bp, Homo sapien
gctctaaagctaccttactcccagg

SEQ ID NO: 3045707 - DNA, 25 bp, Homo sapien
gagcagaaccaagacgttcagatcc

SEQ ID NO: 3045708 - DNA, 25 bp, Homo sapien
actgcagaaggatgatacctggtgc

SEQ ID NO: 3045709 - DNA, 25 bp, Homo sapien
gagcgtcctgctgtttctaaatctc

SEQ ID NO: 3045710 - DNA, 25 bp, Homo sapien
gggagcgtcctgctgtttctaaatc

SEQ ID NO: 3045711 - DNA, 25 bp, Homo sapien
aaggatgatacctggtgcatggtcg

SEQ ID NO: 3045712 - DNA, 25 bp, Homo sapien
gagccagaccacaaatacatccatc

SEQ ID NO: 3045713 - DNA, 25 bp, Homo sapien
tgggtgattaatcgtcactgtgact

SEQ ID NO: 3045714 - DNA, 25 bp, Homo sapien
catttcaccttcaaagggccaggag

SEQ ID NO: 3045715 - DNA, 25 bp, Homo sapien
tgccctccatgtcattgggtgatta

SEQ ID NO: 3045716 - DNA, 25 bp, Homo sapien
tgtcctttctgctgagcctgcaaaa

SEQ ID NO: 3045717 - DNA, 25 bp, Homo sapien
actttttagactcagctgctttcca

SEQ ID NO: 3045718 - DNA, 25 bp, Homo sapien
tgctttccacctcagaaccccaatc

SEQ ID NO: 3045719 - DNA, 25 bp, Homo sapien
tctttccatatagcctaacttttta

SEQ ID NO: 3045720 - DNA, 25 bp, Homo sapien
cggctccggtgagatgacgtattct

SEQ ID NO: 3045721 - DNA, 25 bp, Homo sapien
gatgacgtattctggaaaggtctct

SEQ ID NO: 3045722 - DNA, 25 bp, Homo sapien
gacatttacggctccggtgagatga

SEQ ID NO: 3045723 - DNA, 25 bp, Homo sapien
aaatttgacatttacggctccggtg

SEQ ID NO: 3045724 - DNA, 25 bp, Homo sapien
gagctcctcatagtggatggtaact

SEQ ID NO: 3045725 - DNA, 25 bp, Homo sapien
accattccatgtcccagcattgagc

SEQ ID NO: 3045726 - DNA, 25 bp, Homo sapien
gctcctcatagtggatggtaactgt

SEQ ID NO: 3045727 - DNA, 25 bp, Homo sapien
ttgagctcctcatagtggatggtaa

SEQ ID NO: 3045728 - DNA, 25 bp, Homo sapien
tagcagcaatgtaaaatcttcaggc

SEQ ID NO: 3045729 - DNA, 25 bp, Homo sapien
catgaaacacgtgatattagcagca

SEQ ID NO: 3045730 - DNA, 25 bp, Homo sapien
gaattttggtacatctactctatgc

SEQ ID NO: 3045731 - DNA, 25 bp, Homo sapien
tagtaacagttccatgtgtgattgg

SEQ ID NO: 3045732 - DNA, 25 bp, Homo sapien
aaggtgcggttactggctcgctggt

SEQ ID NO: 3045733 - DNA, 25 bp, Homo sapien
aggtgcggttactggctcgctggtg

SEQ ID NO: 3045734 - DNA, 25 bp, Homo sapien
gaaggtgcggttactggctcgctgg

SEQ ID NO: 3045735 - DNA, 25 bp, Homo sapien
tgctggagaaatggcgcccgcctgc

SEQ ID NO: 3045736 - DNA, 25 bp, Homo sapien
ctgctggagaaatggcgcccgcctg

SEQ ID NO: 3045737 - DNA, 25 bp, Homo sapien
gcgcccgcctgcccttccagatctg

SEQ ID NO: 3045738 - DNA, 25 bp, Homo sapien
aggcccccatgcccatggagggcat

SEQ ID NO: 3045739 - DNA, 25 bp, Homo sapien
tggtgccacccccgtgggtgtccag

SEQ ID NO: 3045740 - DNA, 25 bp, Homo sapien
ctggtgccacccccgtgggtgtcca

SEQ ID NO: 3045741 - DNA, 25 bp, Homo sapien
tccaggcccccatgcccatggaggg

SEQ ID NO: 3045742 - DNA, 25 bp, Homo sapien
tagggcgtgtgagtccggagagttc

SEQ ID NO: 3045743 - DNA, 25 bp, Homo sapien
cgtgtgagtccggagagttctgaca

SEQ ID NO: 3045744 - DNA, 25 bp, Homo sapien
tgagtccggagagttctgacagcgc

SEQ ID NO: 3045745 - DNA, 25 bp, Homo sapien
caaagatagggcgtgtgagtccgga

SEQ ID NO: 3045746 - DNA, 25 bp, Homo sapien
ctctcaccccagactgtgaacgccc

SEQ ID NO: 3045747 - DNA, 25 bp, Homo sapien
tgtgaacgccccgaacttagggcca

SEQ ID NO: 3045748 - DNA, 25 bp, Homo sapien
tcaccccagactgtgaacgccccga

SEQ ID NO: 3045749 - DNA, 25 bp, Homo sapien
ccagactgtgaacgccccgaactta

SEQ ID NO: 3045750 - DNA, 25 bp, Homo sapien
ccccccgcctaaccaggacaggcag

SEQ ID NO: 3045751 - DNA, 25 bp, Homo sapien
cccgcctaaccaggacaggcagctt

SEQ ID NO: 3045752 - DNA, 25 bp, Homo sapien
cgcctaaccaggacaggcagcttca

SEQ ID NO: 3045753 - DNA, 25 bp, Homo sapien
gcctaaccaggacaggcagcttcat

SEQ ID NO: 3045754 - DNA, 25 bp, Homo sapien
cagagtttccgtagaggaaggccca

SEQ ID NO: 3045755 - DNA, 25 bp, Homo sapien
gtgacttcagagtttccgtagagga

SEQ ID NO: 3045756 - DNA, 25 bp, Homo sapien
aggcccaagccggagccttgttgcc

SEQ ID NO: 3045757 - DNA, 25 bp, Homo sapien
aggaaggcccaagccggagccttgt

SEQ ID NO: 3045758 - DNA, 25 bp, Homo sapien
ggttcaaagtccaagctatgctcca

SEQ ID NO: 3045759 - DNA, 25 bp, Homo sapien
tagggactgtaattgcctcagagag

SEQ ID NO: 3045760 - DNA, 25 bp, Homo sapien
tgattaagggccacatgagtggtag

SEQ ID NO: 3045761 - DNA, 25 bp, Homo sapien
gctgactggccaaggactgtatctc

SEQ ID NO: 3045762 - DNA, 25 bp, Homo sapien
tatgtatgaggtgcagcttatttga

SEQ ID NO: 3045763 - DNA, 25 bp, Homo sapien
tatttgatccagtgggagtgctaac

SEQ ID NO: 3045764 - DNA, 25 bp, Homo sapien
ggagtgctaaccatccccttcattt

SEQ ID NO: 3045765 - DNA, 25 bp, Homo sapien
tgaggttcagaaggtcacgatacaa

SEQ ID NO: 3045766 - DNA, 25 bp, Homo sapien
ggaggtcatctggagcaaaggtctc

SEQ ID NO: 3045767 - DNA, 25 bp, Homo sapien
ccagaacctttagtgccagtagtaa

SEQ ID NO: 3045768 - DNA, 25 bp, Homo sapien
gactataaaaaacaccatcggagaa

SEQ ID NO: 3045769 - DNA, 25 bp, Homo sapien
cagctcgacgagtgatgtcctccag

SEQ ID NO: 3045770 - DNA, 25 bp, Homo sapien
gaaatttaactgctcccgatcacac

SEQ ID NO: 3045771 - DNA, 25 bp, Homo sapien
gggttcggccacatcatcctttact

SEQ ID NO: 3045772 - DNA, 25 bp, Homo sapien
ttgtctgtgcatttaaggtccttcc

SEQ ID NO: 3045773 - DNA, 25 bp, Homo sapien
tgtctgtgcatttaaggtccttcca

SEQ ID NO: 3045774 - DNA, 25 bp, Homo sapien
ggccacatcatcctttactgctgtg

SEQ ID NO: 3045775 - DNA, 25 bp, Homo sapien
cctgcacggtctcagttctggagca

SEQ ID NO: 3045776 - DNA, 25 bp, Homo sapien
acggtctcagttctggagcagccct

SEQ ID NO: 3045777 - DNA, 25 bp, Homo sapien
ctggcacagcctgcacggtctcagt

SEQ ID NO: 3045778 - DNA, 25 bp, Homo sapien
ggcacagcctgcacggtctcagttc

SEQ ID NO: 3045779 - DNA, 25 bp, Homo sapien
cggtctcagttctagagcagcccca

SEQ ID NO: 3045780 - DNA, 25 bp, Homo sapien
tcagttctagagcagccccagggga

SEQ ID NO: 3045781 - DNA, 25 bp, Homo sapien
tggcacagccagcacggtctcagtt

SEQ ID NO: 3045782 - DNA, 25 bp, Homo sapien
ccagcacggtctcagttctagagca

SEQ ID NO: 3045783 - DNA, 25 bp, Homo sapien
acccagctcttaaccattactctgt

SEQ ID NO: 3045784 - DNA, 25 bp, Homo sapien
ccctccagaacccagctcttaacca

SEQ ID NO: 3045785 - DNA, 25 bp, Homo sapien
cacaatcacatcttgctccctccag

SEQ ID NO: 3045786 - DNA, 25 bp, Homo sapien
gacacacaatcacatcttgctccct

SEQ ID NO: 3045787 - DNA, 25 bp, Homo sapien
tggactgaagacaccgcactgggtg

SEQ ID NO: 3045788 - DNA, 25 bp, Homo sapien
gaaatacccgctgtggactaagccc

SEQ ID NO: 3045789 - DNA, 25 bp, Homo sapien
gaatgagagcccctgacttgaatgg

SEQ ID NO: 3045790 - DNA, 25 bp, Homo sapien
ccagctatgatgtgtgaaatacccg

SEQ ID NO: 3045791 - DNA, 25 bp, Homo sapien
tagatgcaaagtggaggttcaattc

SEQ ID NO: 3045792 - DNA, 25 bp, Homo sapien
gcatcaggaggaggcgactttgaac

SEQ ID NO: 3045793 - DNA, 25 bp, Homo sapien
acattctcctcaaggctggtctgaa

SEQ ID NO: 3045794 - DNA, 25 bp, Homo sapien
ggacaagtatagatggctacaccac

SEQ ID NO: 3045795 - DNA, 25 bp, Homo sapien
agtctcggctgtagcccccgttggg

SEQ ID NO: 3045796 - DNA, 25 bp, Homo sapien
gagtctcggctgtagcccccgttgg

SEQ ID NO: 3045797 - DNA, 25 bp, Homo sapien
tggagtctcggctgtagcccccgtt

SEQ ID NO: 3045798 - DNA, 25 bp, Homo sapien
ctggagtctcggctgtagcccccgt

SEQ ID NO: 3045799 - DNA, 25 bp, Homo sapien
tgtaaagatcatacacgtattttcc

SEQ ID NO: 3045800 - DNA, 25 bp, Homo sapien
attgtaaagatcatacacgtatttt

SEQ ID NO: 3045801 - DNA, 25 bp, Homo sapien
gtaaagatcatacacgtattttcct

SEQ ID NO: 3045802 - DNA, 25 bp, Homo sapien
aaagatcatacacgtattttccttt

SEQ ID NO: 3045803 - DNA, 25 bp, Homo sapien
tccaagacaggatgacagggactgt

SEQ ID NO: 3045804 - DNA, 25 bp, Homo sapien
tggcgaaggctgctccagggagcag

SEQ ID NO: 3045805 - DNA, 25 bp, Homo sapien
cctccctggcgaaggctgctccagg

SEQ ID NO: 3045806 - DNA, 25 bp, Homo sapien
cagcaggcagcccatctggtgcagg

SEQ ID NO: 3045807 - DNA, 25 bp, Homo sapien
agcaggcagcccatctggtgcagga

SEQ ID NO: 3045808 - DNA, 25 bp, Homo sapien
gggagggggctgctccccacaggcc

SEQ ID NO: 3045809 - DNA, 25 bp, Homo sapien
ctgcagagaggtgggcagtggggag

SEQ ID NO: 3045810 - DNA, 25 bp, Homo sapien
gggctgctccccacaggccagccat

SEQ ID NO: 3045811 - DNA, 25 bp, Homo sapien
gagggggctgctccccacaggccag

SEQ ID NO: 3045812 - DNA, 25 bp, Homo sapien
caaaagtggcgatagctccttctgg

SEQ ID NO: 3045813 - DNA, 25 bp, Homo sapien
tcgggatttaggaggcttagcaacc

SEQ ID NO: 3045814 - DNA, 25 bp, Homo sapien
ggtgaaaacgtactcgccaggcaaa

SEQ ID NO: 3045815 - DNA, 25 bp, Homo sapien
gacatacaggcgtttgggcaggacc

SEQ ID NO: 3045816 - DNA, 25 bp, Homo sapien
ttgattacggtatatgactctctgt

SEQ ID NO: 3045817 - DNA, 25 bp, Homo sapien
tattatttgaatcacgtcctgtctc

SEQ ID NO: 3045818 - DNA, 25 bp, Homo sapien
tcttaatttaaacgagagactcaca

SEQ ID NO: 3045819 - DNA, 25 bp, Homo sapien
ctctctgttagaaggccattatttt

SEQ ID NO: 3045820 - DNA, 25 bp, Homo sapien
ctggacagaagagccgccaccatgg

SEQ ID NO: 3045821 - DNA, 25 bp, Homo sapien
cacgctgggacaactttcctaaaga

SEQ ID NO: 3045822 - DNA, 25 bp, Homo sapien
aaaactcatccaaaactctgcaggc

SEQ ID NO: 3045823 - DNA, 25 bp, Homo sapien
catggccacgctgggacaactttcc

SEQ ID NO: 3045824 - DNA, 25 bp, Homo sapien
gactcctatatacctctctgacatg

SEQ ID NO: 3045825 - DNA, 25 bp, Homo sapien
tgcctagatccacacagctaactgg

SEQ ID NO: 3045826 - DNA, 25 bp, Homo sapien
gatcagagaagctaatcaggcatcc

SEQ ID NO: 3045827 - DNA, 25 bp, Homo sapien
gccccaggcccgttctttacagatg

SEQ ID NO: 3045828 - DNA, 25 bp, Homo sapien
gcagcacttggcaaacacacataca

SEQ ID NO: 3045829 - DNA, 25 bp, Homo sapien
gatactgtgccaactgagatgctac

SEQ ID NO: 3045830 - DNA, 25 bp, Homo sapien
tagaattaaataacccatgcaaggc

SEQ ID NO: 3045831 - DNA, 25 bp, Homo sapien
caaggccctggtagcatttcttaca

SEQ ID NO: 3045832 - DNA, 25 bp, Homo sapien
tgaacatgagcaagatggtaggacc

SEQ ID NO: 3045833 - DNA, 25 bp, Homo sapien
gaagctgggctcttcatctacacga

SEQ ID NO: 3045834 - DNA, 25 bp, Homo sapien
gaaactatatccttcctggagccta

SEQ ID NO: 3045835 - DNA, 25 bp, Homo sapien
ggagcctaaatgagaacaaccttgc

SEQ ID NO: 3045836 - DNA, 25 bp, Homo sapien
gcttcattttggcacggcagtacca

SEQ ID NO: 3045837 - DNA, 25 bp, Homo sapien
gaggccaagtccaatttaaacagca

SEQ ID NO: 3045838 - DNA, 25 bp, Homo sapien
tatggagaccccttaggactgtaaa

SEQ ID NO: 3045839 - DNA, 25 bp, Homo sapien
cctcttcaaggacgggcagggctat

SEQ ID NO: 3045840 - DNA, 25 bp, Homo sapien
atcttcgcaccgctggagtcaggaa

SEQ ID NO: 3045841 - DNA, 25 bp, Homo sapien
aatgtcagcaccagaaagtattgta

SEQ ID NO: 3045842 - DNA, 25 bp, Homo sapien
agctgaatgtcagcaccagaaagta

SEQ ID NO: 3045843 - DNA, 25 bp, Homo sapien
ttcgcaccgctggagtcaggaagtg

SEQ ID NO: 3045844 - DNA, 25 bp, Homo sapien
acatttggattcaaagtgagaacgg

SEQ ID NO: 3045845 - DNA, 25 bp, Homo sapien
gagtggcacccatcatcactgtgcg

SEQ ID NO: 3045846 - DNA, 25 bp, Homo sapien
tcactgtgcgtgcaaccccaacaaa

SEQ ID NO: 3045847 - DNA, 25 bp, Homo sapien
aaagtgagaacggtgagtggcaccc

SEQ ID NO: 3045848 - DNA, 25 bp, Homo sapien
gccgaatcccctcatgttacagatg

SEQ ID NO: 3045849 - DNA, 25 bp, Homo sapien
ggctaaacgtcttccctaatggcca

SEQ ID NO: 3045850 - DNA, 25 bp, Homo sapien
cagggacagtgtagccaagtctcca

SEQ ID NO: 3045851 - DNA, 25 bp, Homo sapien
gctccttgtctaggaatcctgtgct

SEQ ID NO: 3045852 - DNA, 25 bp, Homo sapien
taaacaagtagatattaatccaaaa

SEQ ID NO: 3045853 - DNA, 25 bp, Homo sapien
gtttttgcgccacagtagatattaa

SEQ ID NO: 3045854 - DNA, 25 bp, Homo sapien
aacaagtagatattaatccaaaaat

SEQ ID NO: 3045855 - DNA, 25 bp, Homo sapien
attaaacaagtagatattaatccaa

SEQ ID NO: 3045856 - DNA, 25 bp, Homo sapien
ctgggctgggtggtttatagatctc

SEQ ID NO: 3045857 - DNA, 25 bp, Homo sapien
caccagcccctctgactcattttgc

SEQ ID NO: 3045858 - DNA, 25 bp, Homo sapien
cacaggggtgagagttgacattcac

SEQ ID NO: 3045859 - DNA, 25 bp, Homo sapien
aatgtacaaatgttcccaagggaca

SEQ ID NO: 3045860 - DNA, 25 bp, Homo sapien
tctctcttgcctggtggcaactgcg

SEQ ID NO: 3045861 - DNA, 25 bp, Homo sapien
cccatgctcacacagagagaccaga

SEQ ID NO: 3045862 - DNA, 25 bp, Homo sapien
gactgcttctcagcccgttcaaaac

SEQ ID NO: 3045863 - DNA, 25 bp, Homo sapien
tctctcaacccaagtctgaggaagg

SEQ ID NO: 3045864 - DNA, 25 bp, Homo sapien
agttagtactgcctgaaagaagagg

SEQ ID NO: 3045865 - DNA, 25 bp, Homo sapien
ggactgcgggacaccgcccaggtcc

SEQ ID NO: 3045866 - DNA, 25 bp, Homo sapien
gcccaggtccttggaagagttagta

SEQ ID NO: 3045867 - DNA, 25 bp, Homo sapien
aagagttagtactgcctgaaagaag

SEQ ID NO: 3045868 - DNA, 25 bp, Homo sapien
caatctcagtcccaaaggtcgttag

SEQ ID NO: 3045869 - DNA, 25 bp, Homo sapien
tagaagggcttcagtgtgtgtaacc

SEQ ID NO: 3045870 - DNA, 25 bp, Homo sapien
ttaatgctgcccaaaacctggaggg

SEQ ID NO: 3045871 - DNA, 25 bp, Homo sapien
ttaattactgtgaggcacgagcccc

SEQ ID NO: 3045872 - DNA, 25 bp, Homo sapien
gagaccttggcgctcagatccgagc

SEQ ID NO: 3045873 - DNA, 25 bp, Homo sapien
tgacctagggatctcggacaagcct

SEQ ID NO: 3045874 - DNA, 25 bp, Homo sapien
cttgcttataaaacatggccaggcg

SEQ ID NO: 3045875 - DNA, 25 bp, Homo sapien
gggagaccgtgatacaagctgtgaa

SEQ ID NO: 3045876 - DNA, 25 bp, Homo sapien
ccctcctccgggatgggtgtagcag

SEQ ID NO: 3045877 - DNA, 25 bp, Homo sapien
tggcctctgggaccggcagagtcca

SEQ ID NO: 3045878 - DNA, 25 bp, Homo sapien
ggtgctccgggctggctatttcctc

SEQ ID NO: 3045879 - DNA, 25 bp, Homo sapien
tgtagcagggtgtgtactccgcatg

SEQ ID NO: 3045880 - DNA, 25 bp, Homo sapien
tggaaccgaagagagaggagggaaa

SEQ ID NO: 3045881 - DNA, 25 bp, Homo sapien
ctggaaccgaagagagaggagggaa

SEQ ID NO: 3045882 - DNA, 25 bp, Homo sapien
gaaccgaagagagaggagggaaatg

SEQ ID NO: 3045883 - DNA, 25 bp, Homo sapien
aaccgaagagagaggagggaaatgg

SEQ ID NO: 3045884 - DNA, 25 bp, Homo sapien
agagtgactgggcaggctctgtcca

SEQ ID NO: 3045885 - DNA, 25 bp, Homo sapien
tagcagccgagagtgactgggcagg

SEQ ID NO: 3045886 - DNA, 25 bp, Homo sapien
catgggccgagcgtcattctggaac

SEQ ID NO: 3045887 - DNA, 25 bp, Homo sapien
tcatcctcgggatcaatagcagccg

SEQ ID NO: 3045888 - DNA, 25 bp, Homo sapien
aaggttggtgctcttcgctgaacgg

SEQ ID NO: 3045889 - DNA, 25 bp, Homo sapien
tgcagacaataaatgtggccgggaa

SEQ ID NO: 3045890 - DNA, 25 bp, Homo sapien
aaacgcttgcgtagttgaggatgca

SEQ ID NO: 3045891 - DNA, 25 bp, Homo sapien
gctgaacggaactggcttaaatgca

SEQ ID NO: 3045892 - DNA, 25 bp, Homo sapien
ctaggtccagctgtcgtccggtagg

SEQ ID NO: 3045893 - DNA, 25 bp, Homo sapien
acactccaccgtgacccctctgctt

SEQ ID NO: 3045894 - DNA, 25 bp, Homo sapien
gaagggccgacagctaggtccagct

SEQ ID NO: 3045895 - DNA, 25 bp, Homo sapien
tgtcgtccggtaggtcccactgacc

SEQ ID NO: 3045896 - DNA, 25 bp, Homo sapien
ccactatagattccagaaaggggcg

SEQ ID NO: 3045897 - DNA, 25 bp, Homo sapien
gcgctggcggcgagaaccgggacag

SEQ ID NO: 3045898 - DNA, 25 bp, Homo sapien
gggcggttgggtcgagggcgctggc

SEQ ID NO: 3045899 - DNA, 25 bp, Homo sapien
gggactggggccactatagattcca

SEQ ID NO: 3045900 - DNA, 25 bp, Homo sapien
ctagatcgcagaaccgccttctcca

SEQ ID NO: 3045901 - DNA, 25 bp, Homo sapien
gcgaagccgagtccgagcccgcgga

SEQ ID NO: 3045902 - DNA, 25 bp, Homo sapien
cgggtccgcaggaggagcgcgaagc

SEQ ID NO: 3045903 - DNA, 25 bp, Homo sapien
ggagcccgccccctagatcgcagaa

SEQ ID NO: 3045904 - DNA, 25 bp, Homo sapien
cctctgccctgccccgcgtcggggt

SEQ ID NO: 3045905 - DNA, 25 bp, Homo sapien
atgtgtatgtgcaagaaggtgtgga

SEQ ID NO: 3045906 - DNA, 25 bp, Homo sapien
gtatgtgcaagaaggtgtggagaag

SEQ ID NO: 3045907 - DNA, 25 bp, Homo sapien
tgtatgtgcaagaaggtgtggagaa

SEQ ID NO: 3045908 - DNA, 25 bp, Homo sapien
tgtgtatgtgcaagaaggtgtggag

SEQ ID NO: 3045909 - DNA, 25 bp, Homo sapien
cactgcgggtctccgcggcttcggt

SEQ ID NO: 3045910 - DNA, 25 bp, Homo sapien
gcagaacgccaacgagtcgcactgc

SEQ ID NO: 3045911 - DNA, 25 bp, Homo sapien
gccaacgagtcgcactgcgggtctc

SEQ ID NO: 3045912 - DNA, 25 bp, Homo sapien
gtcagggcagaacgccaacgagtcg

SEQ ID NO: 3045913 - DNA, 25 bp, Homo sapien
ggccgcgggtgccgccgccactgat

SEQ ID NO: 3045914 - DNA, 25 bp, Homo sapien
gggccgcgggtgccgccgccactga

SEQ ID NO: 3045915 - DNA, 25 bp, Homo sapien
gcgccgagccgttccagccgccggc

SEQ ID NO: 3045916 - DNA, 25 bp, Homo sapien
ggccagcaacaagccgcggcccggg

SEQ ID NO: 3045917 - DNA, 25 bp, Homo sapien
cagggactgagggacgcgcccgggg

SEQ ID NO: 3045918 - DNA, 25 bp, Homo sapien
gcgacagcggcggtccgcgccgagc

SEQ ID NO: 3045919 - DNA, 25 bp, Homo sapien
cagatgcactttgacttctgacagc

SEQ ID NO: 3045920 - DNA, 25 bp, Homo sapien
gcgatgccggcagtttaggatccaa

SEQ ID NO: 3045921 - DNA, 25 bp, Homo sapien
ataccccgacaaaagcagatgcact

SEQ ID NO: 3045922 - DNA, 25 bp, Homo sapien
ggtgagaagccagcccgtagtgcct

SEQ ID NO: 3045923 - DNA, 25 bp, Homo sapien
gggcgagctcatccccaatggtccc

SEQ ID NO: 3045924 - DNA, 25 bp, Homo sapien
ttcttccgcagtccgcgccggatgc

SEQ ID NO: 3045925 - DNA, 25 bp, Homo sapien
aggagcggaggatgaagcagctgag

SEQ ID NO: 3045926 - DNA, 25 bp, Homo sapien
gatgcggccgctggtggaccgcctg

SEQ ID NO: 3045927 - DNA, 25 bp, Homo sapien
gcttcgttggaagcgggtggcagcg

SEQ ID NO: 3045928 - DNA, 25 bp, Homo sapien
gaggacccaattcacggccctgaat

SEQ ID NO: 3045929 - DNA, 25 bp, Homo sapien
ggcacgcctcgctctctgtaagcca

SEQ ID NO: 3045930 - DNA, 25 bp, Homo sapien
cttctacggaggtgggtgcgcgccg

SEQ ID NO: 3045931 - DNA, 25 bp, Homo sapien
taacaacgtggttgtggcgcagtct

SEQ ID NO: 3045932 - DNA, 25 bp, Homo sapien
gctgcattttcctatcaaggctgct

SEQ ID NO: 3045933 - DNA, 25 bp, Homo sapien
taagaagcgttttcgagttgggcac

SEQ ID NO: 3045934 - DNA, 25 bp, Homo sapien
aaatgaactgcgctcactgggaagc

SEQ ID NO: 3045935 - DNA, 25 bp, Homo sapien
tgctctggcgagggagctgaagctc

SEQ ID NO: 3045936 - DNA, 25 bp, Homo sapien
gctctggcgagggagctgaagctca

SEQ ID NO: 3045937 - DNA, 25 bp, Homo sapien
ctctggcgagggagctgaagctcac

SEQ ID NO: 3045938 - DNA, 25 bp, Homo sapien
tctccgggctggctgccgctggtaa

SEQ ID NO: 3045939 - DNA, 25 bp, Homo sapien
ctggtaagctgctctaggtgaggca

SEQ ID NO: 3045940 - DNA, 25 bp, Homo sapien
gctggctgccgctggtaagctgctc

SEQ ID NO: 3045941 - DNA, 25 bp, Homo sapien
ccacccaacttctccgggctggctg

SEQ ID NO: 3045942 - DNA, 25 bp, Homo sapien
ctgtggagagccaggataggcattg

SEQ ID NO: 3045943 - DNA, 25 bp, Homo sapien
agccaggataggcattgccagggct

SEQ ID NO: 3045944 - DNA, 25 bp, Homo sapien
tggagagccaggataggcattgcca

SEQ ID NO: 3045945 - DNA, 25 bp, Homo sapien
gagagccaggataggcattgccagg

SEQ ID NO: 3045946 - DNA, 25 bp, Homo sapien
cctctccctgttcctctcatctgct

SEQ ID NO: 3045947 - DNA, 25 bp, Homo sapien
ccctgttcctctcatctgctctcat

SEQ ID NO: 3045948 - DNA, 25 bp, Homo sapien
ctccctgttcctctcatctgctctc

SEQ ID NO: 3045949 - DNA, 25 bp, Homo sapien
ccttattctcctctccctgttcctc

SEQ ID NO: 3045950 - DNA, 25 bp, Homo sapien
tcttccttctctttacctcaaaggc

SEQ ID NO: 3045951 - DNA, 25 bp, Homo sapien
acctcaaaggccaggtttctaagca

SEQ ID NO: 3045952 - DNA, 25 bp, Homo sapien
tacctcaaaggccaggtttctaagc

SEQ ID NO: 3045953 - DNA, 25 bp, Homo sapien
cttctctttacctcaaaggccaggt

SEQ ID NO: 3045954 - DNA, 25 bp, Homo sapien
tcagacaggttctccttcccctctg

SEQ ID NO: 3045955 - DNA, 25 bp, Homo sapien
cctctgcagccctggttgtcttcat

SEQ ID NO: 3045956 - DNA, 25 bp, Homo sapien
cctcagacaggttctccttcccctc

SEQ ID NO: 3045957 - DNA, 25 bp, Homo sapien
ttcccctctgcagccctggttgtct

SEQ ID NO: 3045958 - DNA, 25 bp, Homo sapien
ttctggttgatgatttactgcaaaa

SEQ ID NO: 3045959 - DNA, 25 bp, Homo sapien
ggttctggttgatgatttactgcaa

SEQ ID NO: 3045960 - DNA, 25 bp, Homo sapien
aggttctggttgatgatttactgca

SEQ ID NO: 3045961 - DNA, 25 bp, Homo sapien
ccaggttctggttgatgatttactg

SEQ ID NO: 3045962 - DNA, 25 bp, Homo sapien
gcaagtttctcagttgtaagggcaa

SEQ ID NO: 3045963 - DNA, 25 bp, Homo sapien
cacacaattggtgagaggcaaagcc

SEQ ID NO: 3045964 - DNA, 25 bp, Homo sapien
tgtgcctcacaaacgttgctcttgg

SEQ ID NO: 3045965 - DNA, 25 bp, Homo sapien
gtttggcatgttcccgcaggatctg

SEQ ID NO: 3045966 - DNA, 25 bp, Homo sapien
agcctgcctcttgaattccaagcag

SEQ ID NO: 3045967 - DNA, 25 bp, Homo sapien
cagtggaatcggtgttttttaagat

SEQ ID NO: 3045968 - DNA, 25 bp, Homo sapien
ttgattaaagttgaagacagtggaa

SEQ ID NO: 3045969 - DNA, 25 bp, Homo sapien
gaaatgaaaaatgccggccatacag

SEQ ID NO: 3045970 - DNA, 25 bp, Homo sapien
aaatgcaaatcgaaagcacaatgcg

SEQ ID NO: 3045971 - DNA, 25 bp, Homo sapien
tgcaaatcgaaagcacaatgcgata

SEQ ID NO: 3045972 - DNA, 25 bp, Homo sapien
aatgcaaatcgaaagcacaatgcga

SEQ ID NO: 3045973 - DNA, 25 bp, Homo sapien
aaatcgaaagcacaatgcgatacca

SEQ ID NO: 3045974 - DNA, 25 bp, Homo sapien
catgtctgaccaacaagaactcttt

SEQ ID NO: 3045975 - DNA, 25 bp, Homo sapien
tgtctgaccaacaagaactctttta

SEQ ID NO: 3045976 - DNA, 25 bp, Homo sapien
gaccaacaagaactcttttagtaga

SEQ ID NO: 3045977 - DNA, 25 bp, Homo sapien
tctgaccaacaagaactcttttagt

SEQ ID NO: 3045978 - DNA, 25 bp, Homo sapien
tcaggtgggtagcaccacacgtttg

SEQ ID NO: 3045979 - DNA, 25 bp, Homo sapien
caggtgggtagcaccacacgtttga

SEQ ID NO: 3045980 - DNA, 25 bp, Homo sapien
tgggtagcaccacacgtttgacccc

SEQ ID NO: 3045981 - DNA, 25 bp, Homo sapien
ggtgggtagcaccacacgtttgacc

SEQ ID NO: 3045982 - DNA, 25 bp, Homo sapien
gccagtcaaggccatcgatgacttg

SEQ ID NO: 3045983 - DNA, 25 bp, Homo sapien
tgttcattctgctcatagcctgcag

SEQ ID NO: 3045984 - DNA, 25 bp, Homo sapien
cttatcgcctatttcaccccatgtg

SEQ ID NO: 3045985 - DNA, 25 bp, Homo sapien
catcgatgacttgttgccttgctac

SEQ ID NO: 3045986 - DNA, 25 bp, Homo sapien
gggagcagaacactttataaacatt

SEQ ID NO: 3045987 - DNA, 25 bp, Homo sapien
cattaattctttgaccccctgggca

SEQ ID NO: 3045988 - DNA, 25 bp, Homo sapien
ctggggagcagaacactttataaac

SEQ ID NO: 3045989 - DNA, 25 bp, Homo sapien
ggagcagaacactttataaacatta

SEQ ID NO: 3045990 - DNA, 25 bp, Homo sapien
tggtaaataagactgaaggcctttc

SEQ ID NO: 3045991 - DNA, 25 bp, Homo sapien
gaaacatcagcccagaagggaaatt

SEQ ID NO: 3045992 - DNA, 25 bp, Homo sapien
gccatgggccccagggtgtttggag

SEQ ID NO: 3045993 - DNA, 25 bp, Homo sapien
agccatgggccccagggtgtttgga

SEQ ID NO: 3045994 - DNA, 25 bp, Homo sapien
tgaggaaacatcagcccagaaggga

SEQ ID NO: 3045995 - DNA, 25 bp, Homo sapien
tgcagcagcactcgtggctgccgac

SEQ ID NO: 3045996 - DNA, 25 bp, Homo sapien
tctcttgtatggaatgtgaaatgct

SEQ ID NO: 3045997 - DNA, 25 bp, Homo sapien
ggttgggccttttgtctcttgtatg

SEQ ID NO: 3045998 - DNA, 25 bp, Homo sapien
aagacgagcaattgttcttcaatgc

SEQ ID NO: 3045999 - DNA, 25 bp, Homo sapien
tgtgcgttttgattggtacccgatt

SEQ ID NO: 3046000 - DNA, 25 bp, Homo sapien
tagttacttcttgtgcgttttgatt

SEQ ID NO: 3046001 - DNA, 25 bp, Homo sapien
cttcttgtgcgttttgattggtacc

SEQ ID NO: 3046002 - DNA, 25 bp, Homo sapien
gttacttcttgtgcgttttgattgg

SEQ ID NO: 3046003 - DNA, 25 bp, Homo sapien
gctgggggaagtgattcacgtctaa

SEQ ID NO: 3046004 - DNA, 25 bp, Homo sapien
gggggaagtgattcacgtctaagca

SEQ ID NO: 3046005 - DNA, 25 bp, Homo sapien
tgggggaagtgattcacgtctaagc

SEQ ID NO: 3046006 - DNA, 25 bp, Homo sapien
ggggaagtgattcacgtctaagcag

SEQ ID NO: 3046007 - DNA, 25 bp, Homo sapien
agtttcagctagtgtcggattggac

SEQ ID NO: 3046008 - DNA, 25 bp, Homo sapien
ggaaacgagtcgtgtactgccacct

SEQ ID NO: 3046009 - DNA, 25 bp, Homo sapien
taatttatgggctccgctgactggt

SEQ ID NO: 3046010 - DNA, 25 bp, Homo sapien
caccttgtggcagattcgggcggct

SEQ ID NO: 3046011 - DNA, 25 bp, Homo sapien
taaaccatagaccttaaagatctca

SEQ ID NO: 3046012 - DNA, 25 bp, Homo sapien
cataaaccatagaccttaaagatct

SEQ ID NO: 3046013 - DNA, 25 bp, Homo sapien
ataaaccatagaccttaaagatctc

SEQ ID NO: 3046014 - DNA, 25 bp, Homo sapien
tcataaaccatagaccttaaagatc

SEQ ID NO: 3046015 - DNA, 25 bp, Homo sapien
tacggcaaggcggtgagctggtcac

SEQ ID NO: 3046016 - DNA, 25 bp, Homo sapien
cagtacggcaaggcggtgagctggt

SEQ ID NO: 3046017 - DNA, 25 bp, Homo sapien
ggcaaggcggtgagctggtcacgct

SEQ ID NO: 3046018 - DNA, 25 bp, Homo sapien
caaggcggtgagctggtcacgctga

SEQ ID NO: 3046019 - DNA, 25 bp, Homo sapien
cagcctcaagggagggtgatagccc

SEQ ID NO: 3046020 - DNA, 25 bp, Homo sapien
gtgatagcccgggtgctcaaggccc

SEQ ID NO: 3046021 - DNA, 25 bp, Homo sapien
tgctcaaggccccttacatcctggg

SEQ ID NO: 3046022 - DNA, 25 bp, Homo sapien
tccaaggtgaaagcgcagcctcaag

SEQ ID NO: 3046023 - DNA, 25 bp, Homo sapien
gttgtagcacactacacttggtttt

SEQ ID NO: 3046024 - DNA, 25 bp, Homo sapien
tagcacactacacttggttttaaga

SEQ ID NO: 3046025 - DNA, 25 bp, Homo sapien
ccagtttgactcttgtgtcctttaa

SEQ ID NO: 3046026 - DNA, 25 bp, Homo sapien
taaagttgtagcacactacacttgg

SEQ ID NO: 3046027 - DNA, 25 bp, Homo sapien
agggctttgttcccgggagtgctcg

SEQ ID NO: 3046028 - DNA, 25 bp, Homo sapien
cagggctttgttcccgggagtgctc

SEQ ID NO: 3046029 - DNA, 25 bp, Homo sapien
gctttgttcccgggagtgctcgggc

SEQ ID NO: 3046030 - DNA, 25 bp, Homo sapien
tcaaccaggctggttcttccaaagt

SEQ ID NO: 3046031 - DNA, 25 bp, Homo sapien
ccaggctggttcttccaaagtcgtc

SEQ ID NO: 3046032 - DNA, 25 bp, Homo sapien
ggctggttcttccaaagtcgtccat

SEQ ID NO: 3046033 - DNA, 25 bp, Homo sapien
caaccaggctggttcttccaaagtc

SEQ ID NO: 3046034 - DNA, 25 bp, Homo sapien
taagacctacagtaaggagctctgg

SEQ ID NO: 3046035 - DNA, 25 bp, Homo sapien
ggtgcaggacttcataccacttgta

SEQ ID NO: 3046036 - DNA, 25 bp, Homo sapien
gataatatggcggtctccgtccaag

SEQ ID NO: 3046037 - DNA, 25 bp, Homo sapien
taaagagtgcatctgaagctcctgc

SEQ ID NO: 3046038 - DNA, 25 bp, Homo sapien
ttctgaaggtgctgaacacctgtac

SEQ ID NO: 3046039 - DNA, 25 bp, Homo sapien
tgaatccaattcttactaggtaagc

SEQ ID NO: 3046040 - DNA, 25 bp, Homo sapien
taagcaaatagccagcaatggtcaa

SEQ ID NO: 3046041 - DNA, 25 bp, Homo sapien
ttttcctggactgagaattgtcccc

SEQ ID NO: 3046042 - DNA, 25 bp, Homo sapien
cagccaatctatccgcacagattcc

SEQ ID NO: 3046043 - DNA, 25 bp, Homo sapien
tgggggctgtccgctccatacccag

SEQ ID NO: 3046044 - DNA, 25 bp, Homo sapien
tccatacccagccatacagtgccca

SEQ ID NO: 3046045 - DNA, 25 bp, Homo sapien
aacccagaaccattgaaaagtccag

SEQ ID NO: 3046046 - DNA, 25 bp, Homo sapien
cagggttaaggctcagaactgtggc

SEQ ID NO: 3046047 - DNA, 25 bp, Homo sapien
cagttagctgcactaaaggaaccgg

SEQ ID NO: 3046048 - DNA, 25 bp, Homo sapien
tgcgacagctagtccagcagtgacg

SEQ ID NO: 3046049 - DNA, 25 bp, Homo sapien
taaacaatggacttgaggcttcctc

SEQ ID NO: 3046050 - DNA, 25 bp, Homo sapien
gttagtaagacctcatggtacatgt

SEQ ID NO: 3046051 - DNA, 25 bp, Homo sapien
tcatggtacatgtttgtacctttca

SEQ ID NO: 3046052 - DNA, 25 bp, Homo sapien
acatgtttgtacctttcattgcctt

SEQ ID NO: 3046053 - DNA, 25 bp, Homo sapien
tttggttagtaagacctcatggtac

SEQ ID NO: 3046054 - DNA, 25 bp, Homo sapien
ggagtggaggactaggcctggccag

SEQ ID NO: 3046055 - DNA, 25 bp, Homo sapien
tgggctggagggggattctgtgatc

SEQ ID NO: 3046056 - DNA, 25 bp, Homo sapien
cagggagtggaggactaggcctggc

SEQ ID NO: 3046057 - DNA, 25 bp, Homo sapien
ctggccagggtaataaatactgaat

SEQ ID NO: 3046058 - DNA, 25 bp, Homo sapien
gttgtaaaaggcagctctagccctt

SEQ ID NO: 3046059 - DNA, 25 bp, Homo sapien
tgcataacctgaaacgagaggaagt

SEQ ID NO: 3046060 - DNA, 25 bp, Homo sapien
tggttacagttgtaaaaggcagctc

SEQ ID NO: 3046061 - DNA, 25 bp, Homo sapien
tgtgccttctcattacagtggttac

SEQ ID NO: 3046062 - DNA, 25 bp, Homo sapien
tctgctcgctgagtgggtgatatgt

SEQ ID NO: 3046063 - DNA, 25 bp, Homo sapien
cattgtggagaggatccgtatgact

SEQ ID NO: 3046064 - DNA, 25 bp, Homo sapien
gctgcgtcatatggatgatggaatc

SEQ ID NO: 3046065 - DNA, 25 bp, Homo sapien
atgatggaatccatggcaacctctg

SEQ ID NO: 3046066 - DNA, 25 bp, Homo sapien
cgccagatccttattattgtcccaa

SEQ ID NO: 3046067 - DNA, 25 bp, Homo sapien
tattaccgagtgaacaccatcctcc

SEQ ID NO: 3046068 - DNA, 25 bp, Homo sapien
tgcggatttgcttgaggacgtagtc

SEQ ID NO: 3046069 - DNA, 25 bp, Homo sapien
gaggacgtagtctctgctgatgcat

SEQ ID NO: 3046070 - DNA, 25 bp, Homo sapien
taacctgacaggtttgagagaacca

SEQ ID NO: 3046071 - DNA, 25 bp, Homo sapien
gaagtctcctgaaatagagcccact

SEQ ID NO: 3046072 - DNA, 25 bp, Homo sapien
ggatcaagacgtccataaccctgaa

SEQ ID NO: 3046073 - DNA, 25 bp, Homo sapien
tataagtctctagcctcagtgaggc

SEQ ID NO: 3046074 - DNA, 25 bp, Homo sapien
tcagccgccagtagaagaaggtacg

SEQ ID NO: 3046075 - DNA, 25 bp, Homo sapien
tgaatctggccatcagtcagctcag

SEQ ID NO: 3046076 - DNA, 25 bp, Homo sapien
aaaccagcgccttaacatggcttga

SEQ ID NO: 3046077 - DNA, 25 bp, Homo sapien
cagctcagggttggcattgtggatt

SEQ ID NO: 3046078 - DNA, 25 bp, Homo sapien
gcaagtcagcaaactgcacggctac

SEQ ID NO: 3046079 - DNA, 25 bp, Homo sapien
ctgcatccggcctggtgtgtcgtgc

SEQ ID NO: 3046080 - DNA, 25 bp, Homo sapien
tgcacggctacctgatggtaaatgg

SEQ ID NO: 3046081 - DNA, 25 bp, Homo sapien
tgtgtcgtgcaagtcagcaaactgc

SEQ ID NO: 3046082 - DNA, 25 bp, Homo sapien
aacatgcccgtcacactctgtaatg

SEQ ID NO: 3046083 - DNA, 25 bp, Homo sapien
ataaacatgcccgtcacactctgta

SEQ ID NO: 3046084 - DNA, 25 bp, Homo sapien
catgcccgtcacactctgtaatgac

SEQ ID NO: 3046085 - DNA, 25 bp, Homo sapien
cccgtcacactctgtaatgaccagg

SEQ ID NO: 3046086 - DNA, 25 bp, Homo sapien
aagcccacatgccctcttttccctg

SEQ ID NO: 3046087 - DNA, 25 bp, Homo sapien
tccctgtggcagtcacaagtgtgaa

SEQ ID NO: 3046088 - DNA, 25 bp, Homo sapien
cctgtggcagtcacaagtgtgaagg

SEQ ID NO: 3046089 - DNA, 25 bp, Homo sapien
gaagcccacatgccctcttttccct

SEQ ID NO: 3046090 - DNA, 25 bp, Homo sapien
cacaatgctccatatctgcacctgg

SEQ ID NO: 3046091 - DNA, 25 bp, Homo sapien
ctgccaccacaatgctccatatctg

SEQ ID NO: 3046092 - DNA, 25 bp, Homo sapien
ccttgaccctgaaggcatggtgggt

SEQ ID NO: 3046093 - DNA, 25 bp, Homo sapien
ccatatctgcacctggggcaacctt

SEQ ID NO: 3046094 - DNA, 25 bp, Homo sapien
gttttcaccagatcctttctgcgga

SEQ ID NO: 3046095 - DNA, 25 bp, Homo sapien
cacccgacgcatggttttcaccaga

SEQ ID NO: 3046096 - DNA, 25 bp, Homo sapien
agccaagtggatgtagactgggtcc

SEQ ID NO: 3046097 - DNA, 25 bp, Homo sapien
cctttctgcggaatttgatttctac

SEQ ID NO: 3046098 - DNA, 25 bp, Homo sapien
tcagcatacatctccatgtgccggg

SEQ ID NO: 3046099 - DNA, 25 bp, Homo sapien
ttgatggaggagtcaatcaccaccc

SEQ ID NO: 3046100 - DNA, 25 bp, Homo sapien
gaatgtaaaccagcacaggctggca

SEQ ID NO: 3046101 - DNA, 25 bp, Homo sapien
aaacttcagcacttggtcgtacata

SEQ ID NO: 3046102 - DNA, 25 bp, Homo sapien
tggcaaagaccatcagaggcagccc

SEQ ID NO: 3046103 - DNA, 25 bp, Homo sapien
accagagaagcctctccagttggca

SEQ ID NO: 3046104 - DNA, 25 bp, Homo sapien
ctgatatgtcttaaacgcagaatct

SEQ ID NO: 3046105 - DNA, 25 bp, Homo sapien
gaggcagcccttcccggttgaagtc

SEQ ID NO: 3046106 - DNA, 25 bp, Homo sapien
tcagctgggatacttagttctactg

SEQ ID NO: 3046107 - DNA, 25 bp, Homo sapien
gttcgggtttctacagcaacaactc

SEQ ID NO: 3046108 - DNA, 25 bp, Homo sapien
gaatccaggtttgctggatcagctg

SEQ ID NO: 3046109 - DNA, 25 bp, Homo sapien
agcaacaactcccacaggtattcct

SEQ ID NO: 3046110 - DNA, 25 bp, Homo sapien
ctggctctaccaaccaccacagtct

SEQ ID NO: 3046111 - DNA, 25 bp, Homo sapien
tctctgagaaagatccatagtcaaa

SEQ ID NO: 3046112 - DNA, 25 bp, Homo sapien
cccagggctgcataatctctgagaa

SEQ ID NO: 3046113 - DNA, 25 bp, Homo sapien
gatccatagtcaaaaaagccactca

SEQ ID NO: 3046114 - DNA, 25 bp, Homo sapien
agggcacatgcagcgtgggtgctca

SEQ ID NO: 3046115 - DNA, 25 bp, Homo sapien
taccaatatcataagaagggcacat

SEQ ID NO: 3046116 - DNA, 25 bp, Homo sapien
aatatcataagaagggcacatgcag

SEQ ID NO: 3046117 - DNA, 25 bp, Homo sapien
agtaccaataccattaccaatatca

SEQ ID NO: 3046118 - DNA, 25 bp, Homo sapien
tagcatccatcgaggatcgtatggg

SEQ ID NO: 3046119 - DNA, 25 bp, Homo sapien
ggtctttgtgggaacaaactcgatg

SEQ ID NO: 3046120 - DNA, 25 bp, Homo sapien
gattctgtctataggatcctttgag

SEQ ID NO: 3046121 - DNA, 25 bp, Homo sapien
ctgctagcatccatcgaggatcgta

SEQ ID NO: 3046122 - DNA, 25 bp, Homo sapien
tgtgcataatctggatgccccccag

SEQ ID NO: 3046123 - DNA, 25 bp, Homo sapien
gaggtgtacacttcccgcccgagga

SEQ ID NO: 3046124 - DNA, 25 bp, Homo sapien
ccccagctggttattggaggtgtac

SEQ ID NO: 3046125 - DNA, 25 bp, Homo sapien
gggtcaccccattgttgtgcataat

SEQ ID NO: 3046126 - DNA, 25 bp, Homo sapien
gaacaagcctttacaggcagcccca

SEQ ID NO: 3046127 - DNA, 25 bp, Homo sapien
catttaacttcagctaggaagggca

SEQ ID NO: 3046128 - DNA, 25 bp, Homo sapien
tcagtgtgacccaattggccttgat

SEQ ID NO: 3046129 - DNA, 25 bp, Homo sapien
ccttgataaggaagcgcagagaaca

SEQ ID NO: 3046130 - DNA, 25 bp, Homo sapien
aggccacgctctgatctggctctgg

SEQ ID NO: 3046131 - DNA, 25 bp, Homo sapien
gccacgctctgatctggctctggtt

SEQ ID NO: 3046132 - DNA, 25 bp, Homo sapien
ggccacgctctgatctggctctggt

SEQ ID NO: 3046133 - DNA, 25 bp, Homo sapien
atggcccacaactggtccttctggg

SEQ ID NO: 3046134 - DNA, 25 bp, Homo sapien
ggcccacaactggtccttctgggac

SEQ ID NO: 3046135 - DNA, 25 bp, Homo sapien
tggcccacaactggtccttctggga

SEQ ID NO: 3046136 - DNA, 25 bp, Homo sapien
gcccacaactggtccttctgggaca

SEQ ID NO: 3046137 - DNA, 25 bp, Homo sapien
caatctaggtcaggagccaagtact

SEQ ID NO: 3046138 - DNA, 25 bp, Homo sapien
ggagccaagtactccttgttgccca

SEQ ID NO: 3046139 - DNA, 25 bp, Homo sapien
ctccagttcatcttcaatgaccaca

SEQ ID NO: 3046140 - DNA, 25 bp, Homo sapien
cctccagttcatcttcaatgaccac

SEQ ID NO: 3046141 - DNA, 25 bp, Homo sapien
tccagttcatcttcaatgaccacat

SEQ ID NO: 3046142 - DNA, 25 bp, Homo sapien
ggtttaccacagctgacaggcaatg

SEQ ID NO: 3046143 - DNA, 25 bp, Homo sapien
tttggagatcaagataaacacgtac

SEQ ID NO: 3046144 - DNA, 25 bp, Homo sapien
tgaaaacagcctaatataccgcctg

SEQ ID NO: 3046145 - DNA, 25 bp, Homo sapien
tatctagagacactgcagacagctc

SEQ ID NO: 3046146 - DNA, 25 bp, Homo sapien
cttgtcaggatatttgtcagcacag

SEQ ID NO: 3046147 - DNA, 25 bp, Homo sapien
gaatgagtgcagtatttacttgtca

SEQ ID NO: 3046148 - DNA, 25 bp, Homo sapien
tgactgaagtggcagagcattgtga

SEQ ID NO: 3046149 - DNA, 25 bp, Homo sapien
tgaaatcactatgtaatactgaatg

SEQ ID NO: 3046150 - DNA, 25 bp, Homo sapien
ttttttcacactccatcccagcttc

SEQ ID NO: 3046151 - DNA, 25 bp, Homo sapien
attttttcacactccatcccagctt

SEQ ID NO: 3046152 - DNA, 25 bp, Homo sapien
tcattttttcacactccatcccagc

SEQ ID NO: 3046153 - DNA, 25 bp, Homo sapien
cattttttcacactccatcccagct

SEQ ID NO: 3046154 - DNA, 25 bp, Homo sapien
gttattggagatggttgctgactgc

SEQ ID NO: 3046155 - DNA, 25 bp, Homo sapien
caacaaattcatgatacactattgc

SEQ ID NO: 3046156 - DNA, 25 bp, Homo sapien
gtagggagctgcaaagctgacagcc

SEQ ID NO: 3046157 - DNA, 25 bp, Homo sapien
caccactgtgattcacaacaaattc

SEQ ID NO: 3046158 - DNA, 25 bp, Homo sapien
atgtaaaaactctgtgttgtagcca

SEQ ID NO: 3046159 - DNA, 25 bp, Homo sapien
tttcttatgtaaaaactctgtgttg

SEQ ID NO: 3046160 - DNA, 25 bp, Homo sapien
tcttatgtaaaaactctgtgttgta

SEQ ID NO: 3046161 - DNA, 25 bp, Homo sapien
ttatgtaaaaactctgtgttgtagc

SEQ ID NO: 3046162 - DNA, 25 bp, Homo sapien
gacaggaagacttgatgaatacagt

SEQ ID NO: 3046163 - DNA, 25 bp, Homo sapien
cagcacagagccacagccacctgtc

SEQ ID NO: 3046164 - DNA, 25 bp, Homo sapien
agcacagagccacagccacctgtca

SEQ ID NO: 3046165 - DNA, 25 bp, Homo sapien
gcacagagccacagccacctgtcac

SEQ ID NO: 3046166 - DNA, 25 bp, Homo sapien
cttgcaaggaatggtgtgggccttc

SEQ ID NO: 3046167 - DNA, 25 bp, Homo sapien
tgctggcaagcacgcgtctgcttct

SEQ ID NO: 3046168 - DNA, 25 bp, Homo sapien
acctgatgtgctggcaagcacgcgt

SEQ ID NO: 3046169 - DNA, 25 bp, Homo sapien
caaggaatggtgtgggccttcttct

SEQ ID NO: 3046170 - DNA, 25 bp, Homo sapien
tgtgtggcgattccaccctgcaaga

SEQ ID NO: 3046171 - DNA, 25 bp, Homo sapien
ggtacttgctgtagggtctcccaaa

SEQ ID NO: 3046172 - DNA, 25 bp, Homo sapien
gattgttggcaggtcactaaggcag

SEQ ID NO: 3046173 - DNA, 25 bp, Homo sapien
caatgccccaaatagagtctcagag

SEQ ID NO: 3046174 - DNA, 25 bp, Homo sapien
gcaccaataagaacctgcttaaaat

SEQ ID NO: 3046175 - DNA, 25 bp, Homo sapien
tgtgcaccaataagaacctgcttaa

SEQ ID NO: 3046176 - DNA, 25 bp, Homo sapien
gaacctgcttaaaatttttatgcca

SEQ ID NO: 3046177 - DNA, 25 bp, Homo sapien
atgtgctgtgcaccaataagaacct

SEQ ID NO: 3046178 - DNA, 25 bp, Homo sapien
tttcttgctttttcggccttggcaa

SEQ ID NO: 3046179 - DNA, 25 bp, Homo sapien
tgggcgatactcagaatacaacagg

SEQ ID NO: 3046180 - DNA, 25 bp, Homo sapien
ttgctttttcggccttggcaactcc

SEQ ID NO: 3046181 - DNA, 25 bp, Homo sapien
gggcgatactcagaatacaacagga

SEQ ID NO: 3046182 - DNA, 25 bp, Homo sapien
aaaaaatgcgtatgacaacatcttg

SEQ ID NO: 3046183 - DNA, 25 bp, Homo sapien
aaaatgcgtatgacaacatcttgcc

SEQ ID NO: 3046184 - DNA, 25 bp, Homo sapien
aaaaatgcgtatgacaacatcttgc

SEQ ID NO: 3046185 - DNA, 25 bp, Homo sapien
ctgtctggctctcgcttgccccggc

SEQ ID NO: 3046186 - DNA, 25 bp, Homo sapien
cctgtctggctctcgcttgccccgg

SEQ ID NO: 3046187 - DNA, 25 bp, Homo sapien
tgtctggctctcgcttgccccggcg

SEQ ID NO: 3046188 - DNA, 25 bp, Homo sapien
gcctgtctggctctcgcttgccccg

SEQ ID NO: 3046189 - DNA, 25 bp, Homo sapien
gttatgtgaaagttacaatgctgcc

SEQ ID NO: 3046190 - DNA, 25 bp, Homo sapien
ctgtctctatcgtaacctctttaag

SEQ ID NO: 3046191 - DNA, 25 bp, Homo sapien
cacagtgagagctaagtaatctctc

SEQ ID NO: 3046192 - DNA, 25 bp, Homo sapien
tcgtaacctctttaagttatgtgaa

SEQ ID NO: 3046193 - DNA, 25 bp, Homo sapien
taagggtgcatcttaacagttcccc

SEQ ID NO: 3046194 - DNA, 25 bp, Homo sapien
tagtaggctccagtacacatcagtg

SEQ ID NO: 3046195 - DNA, 25 bp, Homo sapien
cacagtcagttaatgtccacaggac

SEQ ID NO: 3046196 - DNA, 25 bp, Homo sapien
gaaaagtcacatatcatctcccggt

SEQ ID NO: 3046197 - DNA, 25 bp, Homo sapien
gcaacatcatgtgtatgccaagatg

SEQ ID NO: 3046198 - DNA, 25 bp, Homo sapien
taaaaacaggctaatgacaggcaac

SEQ ID NO: 3046199 - DNA, 25 bp, Homo sapien
gccataaaagccaggcgcacacatg

SEQ ID NO: 3046200 - DNA, 25 bp, Homo sapien
tctatgcaaataacaacctcgtggt

SEQ ID NO: 3046201 - DNA, 25 bp, Homo sapien
gttgagggctccagctcctgttaga

SEQ ID NO: 3046202 - DNA, 25 bp, Homo sapien
tgtcccagccggacaaggtaagccc

SEQ ID NO: 3046203 - DNA, 25 bp, Homo sapien
gagggctccagctcctgttagaatt

SEQ ID NO: 3046204 - DNA, 25 bp, Homo sapien
aattctcaacctggatggttctctg

SEQ ID NO: 3046205 - DNA, 25 bp, Homo sapien
gatggtaatgatctcattataggcc

SEQ ID NO: 3046206 - DNA, 25 bp, Homo sapien
tcttctttcccaataatatctgtta

SEQ ID NO: 3046207 - DNA, 25 bp, Homo sapien
gcaatcattccagaacctcgaaggt

SEQ ID NO: 3046208 - DNA, 25 bp, Homo sapien
gccaatgaggattctccagcaatca

SEQ ID NO: 3046209 - DNA, 25 bp, Homo sapien
gacagagttgagagcactgactctc

SEQ ID NO: 3046210 - DNA, 25 bp, Homo sapien
taatcttgaggagtcagatataaat

SEQ ID NO: 3046211 - DNA, 25 bp, Homo sapien
tcttccacgtgttcacaatggacag

SEQ ID NO: 3046212 - DNA, 25 bp, Homo sapien
ctctcttataatcttgaggagtcag

SEQ ID NO: 3046213 - DNA, 25 bp, Homo sapien
gcaagtacaaatgcactgaggcatg

SEQ ID NO: 3046214 - DNA, 25 bp, Homo sapien
cattctaggtagaaggagcagcaag

SEQ ID NO: 3046215 - DNA, 25 bp, Homo sapien
catttgagtaaagacctaaaggagc

SEQ ID NO: 3046216 - DNA, 25 bp, Homo sapien
taaaggagctgaggctatgagacat

SEQ ID NO: 3046217 - DNA, 25 bp, Homo sapien
cataagtggtgatttttgaacttaa

SEQ ID NO: 3046218 - DNA, 25 bp, Homo sapien
ttaccataagtggtgatttttgaac

SEQ ID NO: 3046219 - DNA, 25 bp, Homo sapien
accataagtggtgatttttgaactt

SEQ ID NO: 3046220 - DNA, 25 bp, Homo sapien
ttttaccataagtggtgatttttga

SEQ ID NO: 3046221 - DNA, 25 bp, Homo sapien
caccttgaagtagtatatgctctta

SEQ ID NO: 3046222 - DNA, 25 bp, Homo sapien
gcataaccatatagcaccttgaagt

SEQ ID NO: 3046223 - DNA, 25 bp, Homo sapien
tctccacacatgtagcataaccata

SEQ ID NO: 3046224 - DNA, 25 bp, Homo sapien
agtagtatatgctcttagtgtgtac

SEQ ID NO: 3046225 - DNA, 25 bp, Homo sapien
taacaatgatatctcggccttctgg

SEQ ID NO: 3046226 - DNA, 25 bp, Homo sapien
cactgttggctgatacatagatgcg

SEQ ID NO: 3046227 - DNA, 25 bp, Homo sapien
tagatgcgtggaataccttctgccc

SEQ ID NO: 3046228 - DNA, 25 bp, Homo sapien
tcttgaggcccaaaggacccaattc

SEQ ID NO: 3046229 - DNA, 25 bp, Homo sapien
agctggcggtcaaacagttccatga

SEQ ID NO: 3046230 - DNA, 25 bp, Homo sapien
agcaagtgctgccagctggcggtca

SEQ ID NO: 3046231 - DNA, 25 bp, Homo sapien
aacagttccatgactccgagatcaa

SEQ ID NO: 3046232 - DNA, 25 bp, Homo sapien
tgactccgagatcaagttcccactg

SEQ ID NO: 3046233 - DNA, 25 bp, Homo sapien
gttagcataagccatacttcaccac

SEQ ID NO: 3046234 - DNA, 25 bp, Homo sapien
gcataagccatacttcaccaccaag

SEQ ID NO: 3046235 - DNA, 25 bp, Homo sapien
tacttcaccaccaagagtcccaaca

SEQ ID NO: 3046236 - DNA, 25 bp, Homo sapien
ccatacttcaccaccaagagtccca

SEQ ID NO: 3046237 - DNA, 25 bp, Homo sapien
ggcatccctggaaagccacatgcat

SEQ ID NO: 3046238 - DNA, 25 bp, Homo sapien
gagctggccatcaagaagggccatt

SEQ ID NO: 3046239 - DNA, 25 bp, Homo sapien
ttaacagatgtaaatagcggcatcc

SEQ ID NO: 3046240 - DNA, 25 bp, Homo sapien
gtcctgcctaatggagccccagcca

SEQ ID NO: 3046241 - DNA, 25 bp, Homo sapien
aatgtctctacctcagaagtaactg

SEQ ID NO: 3046242 - DNA, 25 bp, Homo sapien
tagtgtacgtttgagcatttccata

SEQ ID NO: 3046243 - DNA, 25 bp, Homo sapien
agaacagtgcctatcagctaaatac

SEQ ID NO: 3046244 - DNA, 25 bp, Homo sapien
catgttaagtcctaggatagtgcct

SEQ ID NO: 3046245 - DNA, 25 bp, Homo sapien
agaagtgggaccattattttcctgt

SEQ ID NO: 3046246 - DNA, 25 bp, Homo sapien
tttataccaagaattccagtctctg

SEQ ID NO: 3046247 - DNA, 25 bp, Homo sapien
cctggaagcctgttcatgtggacca

SEQ ID NO: 3046248 - DNA, 25 bp, Homo sapien
ctcctggaagcctgttcatgtggac

SEQ ID NO: 3046249 - DNA, 25 bp, Homo sapien
aaatgcttgagtggacatagactcc

SEQ ID NO: 3046250 - DNA, 25 bp, Homo sapien
tggaagaaatgcttgagtggacata

SEQ ID NO: 3046251 - DNA, 25 bp, Homo sapien
tggacatagactcccagagtttgat

SEQ ID NO: 3046252 - DNA, 25 bp, Homo sapien
cagtaccagttcagtgtaagtcagc

SEQ ID NO: 3046253 - DNA, 25 bp, Homo sapien
tgttgtccctaaggattgtgcctgg

SEQ ID NO: 3046254 - DNA, 25 bp, Homo sapien
tggaacctctttgattgcagcaggt

SEQ ID NO: 3046255 - DNA, 25 bp, Homo sapien
tgattaacattccatgcagtggtcc

SEQ ID NO: 3046256 - DNA, 25 bp, Homo sapien
gccgaaacatctctgggatatcata

SEQ ID NO: 3046257 - DNA, 25 bp, Homo sapien
catccctacccattgaaagctttga

SEQ ID NO: 3046258 - DNA, 25 bp, Homo sapien
taatactaaaccctgattgaaggca

SEQ ID NO: 3046259 - DNA, 25 bp, Homo sapien
cattagctagcatgagggaaatctc

SEQ ID NO: 3046260 - DNA, 25 bp, Homo sapien
tatgcaggaccctaggtaaaaagcg

SEQ ID NO: 3046261 - DNA, 25 bp, Homo sapien
ctgatgatggtagtgctcatgccac

SEQ ID NO: 3046262 - DNA, 25 bp, Homo sapien
tagattgctgaaataacccacgagc

SEQ ID NO: 3046263 - DNA, 25 bp, Homo sapien
ttatggtgaaaacggaaaggacgca

SEQ ID NO: 3046264 - DNA, 25 bp, Homo sapien
aattgcagaataacctctggagtca

SEQ ID NO: 3046265 - DNA, 25 bp, Homo sapien
ttatctgtaggaccaaatcaaaact

SEQ ID NO: 3046266 - DNA, 25 bp, Homo sapien
gaccaaatcaaaactctgaggagcc

SEQ ID NO: 3046267 - DNA, 25 bp, Homo sapien
tgaggagcctgtttgagtattgtac

SEQ ID NO: 3046268 - DNA, 25 bp, Homo sapien
tctgaggagcctgtttgagtattgt

SEQ ID NO: 3046269 - DNA, 25 bp, Homo sapien
cgcattaccatgctccgcacggatt

SEQ ID NO: 3046270 - DNA, 25 bp, Homo sapien
tagccagactcgtttgtcaggaaga

SEQ ID NO: 3046271 - DNA, 25 bp, Homo sapien
gaggacgcgcaatttccacaggcga

SEQ ID NO: 3046272 - DNA, 25 bp, Homo sapien
ccagttggcgtcaggcgaatgttga

SEQ ID NO: 3046273 - DNA, 25 bp, Homo sapien
atggcttccaggagtagccgctccc

SEQ ID NO: 3046274 - DNA, 25 bp, Homo sapien
tgatgggtccatgataaccgtgggc

SEQ ID NO: 3046275 - DNA, 25 bp, Homo sapien
gatgtggttacagtcagtgcggaca

SEQ ID NO: 3046276 - DNA, 25 bp, Homo sapien
aaagcaacttccaactcatccatgg

SEQ ID NO: 3046277 - DNA, 25 bp, Homo sapien
gattgcacgaacaaagaacctgtag

SEQ ID NO: 3046278 - DNA, 25 bp, Homo sapien
ttggctgccccgagatacaggtgca

SEQ ID NO: 3046279 - DNA, 25 bp, Homo sapien
ggtcaaaatttctcatccggttcag

SEQ ID NO: 3046280 - DNA, 25 bp, Homo sapien
caggctccagatgacgatagatacg

SEQ ID NO: 3046281 - DNA, 25 bp, Homo sapien
cttatcccttgctcggaatgtaaaa

SEQ ID NO: 3046282 - DNA, 25 bp, Homo sapien
atcccttgctcggaatgtaaaaaat

SEQ ID NO: 3046283 - DNA, 25 bp, Homo sapien
ttatcccttgctcggaatgtaaaaa

SEQ ID NO: 3046284 - DNA, 25 bp, Homo sapien
tatcccttgctcggaatgtaaaaaa

SEQ ID NO: 3046285 - DNA, 25 bp, Homo sapien
aataatctccatgcagtgtcaacgg

SEQ ID NO: 3046286 - DNA, 25 bp, Homo sapien
caactgtggctaaactacgaagtat

SEQ ID NO: 3046287 - DNA, 25 bp, Homo sapien
tggttatggaaacagagtcaactcc

SEQ ID NO: 3046288 - DNA, 25 bp, Homo sapien
ccttaacactggtgaagactgctgt

SEQ ID NO: 3046289 - DNA, 25 bp, Homo sapien
tccgatccacctcatagttgacctg

SEQ ID NO: 3046290 - DNA, 25 bp, Homo sapien
aaatctccgatccacctcatagttg

SEQ ID NO: 3046291 - DNA, 25 bp, Homo sapien
gatccacctcatagttgacctgctt

SEQ ID NO: 3046292 - DNA, 25 bp, Homo sapien
atgaaatctccgatccacctcatag

SEQ ID NO: 3046293 - DNA, 25 bp, Homo sapien
gtaaggcgccggatcccatggtcaa

SEQ ID NO: 3046294 - DNA, 25 bp, Homo sapien
caaccaggaaagtaaggcgccggat

SEQ ID NO: 3046295 - DNA, 25 bp, Homo sapien
ttttgtgcaaccaggaaagtaaggc

SEQ ID NO: 3046296 - DNA, 25 bp, Homo sapien
cggatcccatggtcaaccagggtag

SEQ ID NO: 3046297 - DNA, 25 bp, Homo sapien
taatgcaggtctcacagcaagtcca

SEQ ID NO: 3046298 - DNA, 25 bp, Homo sapien
tattacccagcgattaggcatcagc

SEQ ID NO: 3046299 - DNA, 25 bp, Homo sapien
tatgcttagagtgtcagcacagtct

SEQ ID NO: 3046300 - DNA, 25 bp, Homo sapien
gacatgctgggactagaagattatt

SEQ ID NO: 3046301 - DNA, 25 bp, Homo sapien
aacatagctgccagcctgtcatcct

SEQ ID NO: 3046302 - DNA, 25 bp, Homo sapien
gtcttgatagccacattgagaatgt

SEQ ID NO: 3046303 - DNA, 25 bp, Homo sapien
tctgaacatagctgccagcctgtca

SEQ ID NO: 3046304 - DNA, 25 bp, Homo sapien
attctctgaacatagctgccagcct

SEQ ID NO: 3046305 - DNA, 25 bp, Homo sapien
tgtaactcaagaacacaagtcaaag

SEQ ID NO: 3046306 - DNA, 25 bp, Homo sapien
aacacaagtcaaagaaattatgagg

SEQ ID NO: 3046307 - DNA, 25 bp, Homo sapien
ctgtaactcaagaacacaagtcaaa

SEQ ID NO: 3046308 - DNA, 25 bp, Homo sapien
aagaacacaagtcaaagaaattatg

SEQ ID NO: 3046309 - DNA, 25 bp, Homo sapien
gacgtgtgacctgcctcagggaatg

SEQ ID NO: 3046310 - DNA, 25 bp, Homo sapien
tcataaagagacgtgtgacctgcct

SEQ ID NO: 3046311 - DNA, 25 bp, Homo sapien
tcctcatcataaagagacgtgtgac

SEQ ID NO: 3046312 - DNA, 25 bp, Homo sapien
cttatcctcatcataaagagacgtg

SEQ ID NO: 3046313 - DNA, 25 bp, Homo sapien
tgaccaggcccatactacaagtaga

SEQ ID NO: 3046314 - DNA, 25 bp, Homo sapien
gctcatggctattcgggagaccttt

SEQ ID NO: 3046315 - DNA, 25 bp, Homo sapien
cattttgcagaaagatgagacccca

SEQ ID NO: 3046316 - DNA, 25 bp, Homo sapien
tctccaacggcatatacagcaaggg

SEQ ID NO: 3046317 - DNA, 25 bp, Homo sapien
catcgctgacactagctacatgggt

SEQ ID NO: 3046318 - DNA, 25 bp, Homo sapien
tgagttgtccaacagtacatcgctg

SEQ ID NO: 3046319 - DNA, 25 bp, Homo sapien
tccgaaaagagaccattccgcccat

SEQ ID NO: 3046320 - DNA, 25 bp, Homo sapien
cccatccgctgacaaggtggagtga

SEQ ID NO: 3046321 - DNA, 25 bp, Homo sapien
taaatggtaattcaatcacgttcat

SEQ ID NO: 3046322 - DNA, 25 bp, Homo sapien
cgttcattagacaaggagggtagga

SEQ ID NO: 3046323 - DNA, 25 bp, Homo sapien
ttcaatcacgttcattagacaagga

SEQ ID NO: 3046324 - DNA, 25 bp, Homo sapien
ggtaattcaatcacgttcattagac

SEQ ID NO: 3046325 - DNA, 25 bp, Homo sapien
taagcaagccaagtgagttgtaact

SEQ ID NO: 3046326 - DNA, 25 bp, Homo sapien
tgctggattcatgttaaccctttct

SEQ ID NO: 3046327 - DNA, 25 bp, Homo sapien
tagggtcaggttgcagagcagattt

SEQ ID NO: 3046328 - DNA, 25 bp, Homo sapien
gggttaaaaaccatcctgcatcttc

SEQ ID NO: 3046329 - DNA, 25 bp, Homo sapien
cgagtgatgactatggaaaaggtac

SEQ ID NO: 3046330 - DNA, 25 bp, Homo sapien
caacgtggacttgatatctgggtac

SEQ ID NO: 3046331 - DNA, 25 bp, Homo sapien
tctttgtaggatgggagtgctgctc

SEQ ID NO: 3046332 - DNA, 25 bp, Homo sapien
catcaagcaagtcttacacatggtg

SEQ ID NO: 3046333 - DNA, 25 bp, Homo sapien
tgctatgcttgtgaaccagggtggc

SEQ ID NO: 3046334 - DNA, 25 bp, Homo sapien
tctggatctgcactcctctaaaagg

SEQ ID NO: 3046335 - DNA, 25 bp, Homo sapien
gaaccccatgggaaatatcgactat

SEQ ID NO: 3046336 - DNA, 25 bp, Homo sapien
tccacgtgtagctgattatctgcaa

SEQ ID NO: 3046337 - DNA, 25 bp, Homo sapien
catcctatacaagggctatatggtc

SEQ ID NO: 3046338 - DNA, 25 bp, Homo sapien
tgtggcatatcgcacactactgtga

SEQ ID NO: 3046339 - DNA, 25 bp, Homo sapien
taagggaagagattgtatacgagtc

SEQ ID NO: 3046340 - DNA, 25 bp, Homo sapien
tactgtgatacaccagaaagctaga

SEQ ID NO: 3046341 - DNA, 25 bp, Homo sapien
tgacaaccaagggagacttcaggga

SEQ ID NO: 3046342 - DNA, 25 bp, Homo sapien
gattcatactcttgacatagaaagg

SEQ ID NO: 3046343 - DNA, 25 bp, Homo sapien
caagtctgatctttatctacaggca

SEQ ID NO: 3046344 - DNA, 25 bp, Homo sapien
tgtaaccacattgaactaaccaaga

SEQ ID NO: 3046345 - DNA, 25 bp, Homo sapien
tatgtgtgccatgagtacttcgccg

SEQ ID NO: 3046346 - DNA, 25 bp, Homo sapien
gaagactgagtgctgtgcctatgtg

SEQ ID NO: 3046347 - DNA, 25 bp, Homo sapien
aaatgtaccgagagatgcttgctaa

SEQ ID NO: 3046348 - DNA, 25 bp, Homo sapien
tacttcgccgctcactgaaggacaa

SEQ ID NO: 3046349 - DNA, 25 bp, Homo sapien
gtggaattcctagattttcattgcc

SEQ ID NO: 3046350 - DNA, 25 bp, Homo sapien
tctggtgtctataactaaggttccc

SEQ ID NO: 3046351 - DNA, 25 bp, Homo sapien
gatgaacctatgtgtgggtggaatt

SEQ ID NO: 3046352 - DNA, 25 bp, Homo sapien
tgtctccagaaagggtttctattgc

SEQ ID NO: 3046353 - DNA, 25 bp, Homo sapien
ggcggtgttgtacgctgttaagttc

SEQ ID NO: 3046354 - DNA, 25 bp, Homo sapien
caatataagcccttcgaacatacac

SEQ ID NO: 3046355 - DNA, 25 bp, Homo sapien
cgctgttaagttcataggcaatata

SEQ ID NO: 3046356 - DNA, 25 bp, Homo sapien
tgtccttaagctggcggtgttgtac

SEQ ID NO: 3046357 - DNA, 25 bp, Homo sapien
gaagtttggtaggacatcaaaaata

SEQ ID NO: 3046358 - DNA, 25 bp, Homo sapien
gagctgccatcctcactacttggtt

SEQ ID NO: 3046359 - DNA, 25 bp, Homo sapien
cactacttggttgctgtgatagaag

SEQ ID NO: 3046360 - DNA, 25 bp, Homo sapien
tagaagaagtttggtaggacatcaa

SEQ ID NO: 3046361 - DNA, 25 bp, Homo sapien
ttctcaatgcaaaattgatgtccat

SEQ ID NO: 3046362 - DNA, 25 bp, Homo sapien
gatgtccatacatgtcaatagctga

SEQ ID NO: 3046363 - DNA, 25 bp, Homo sapien
tacatgtcaatagctgataggaaga

SEQ ID NO: 3046364 - DNA, 25 bp, Homo sapien
gcaaaattgatgtccatacatgtca

SEQ ID NO: 3046365 - DNA, 25 bp, Homo sapien
cgaagctcatatgatggcaaatggg

SEQ ID NO: 3046366 - DNA, 25 bp, Homo sapien
tcatatgatggcaaatgggaggcaa

SEQ ID NO: 3046367 - DNA, 25 bp, Homo sapien
atggcaaatgggaggcaataagaac

SEQ ID NO: 3046368 - DNA, 25 bp, Homo sapien
ttggttatggcgaagctcatatgat

SEQ ID NO: 3046369 - DNA, 25 bp, Homo sapien
gctgctggtcctagggactgcatga

SEQ ID NO: 3046370 - DNA, 25 bp, Homo sapien
tagggactgcatgactagctgttaa

SEQ ID NO: 3046371 - DNA, 25 bp, Homo sapien
ttaattgggaatcaggtctggcagg

SEQ ID NO: 3046372 - DNA, 25 bp, Homo sapien
catgactagctgttaattgggaatc

SEQ ID NO: 3046373 - DNA, 25 bp, Homo sapien
tggtcttactgagttgagttagctc

SEQ ID NO: 3046374 - DNA, 25 bp, Homo sapien
gttagctctgtgagaatattcagca

SEQ ID NO: 3046375 - DNA, 25 bp, Homo sapien
tcgaagtgctactttggcattggtg

SEQ ID NO: 3046376 - DNA, 25 bp, Homo sapien
catcagtgagagtagggtcccggcc

SEQ ID NO: 3046377 - DNA, 25 bp, Homo sapien
aagaaaattgaaggcctgagctccg

SEQ ID NO: 3046378 - DNA, 25 bp, Homo sapien
ccccgcgtaattacacacttgagtg

SEQ ID NO: 3046379 - DNA, 25 bp, Homo sapien
ctgtcctgactggcaaaagcagaaa

SEQ ID NO: 3046380 - DNA, 25 bp, Homo sapien
agcagaaagcaaagcctcaaaccag

SEQ ID NO: 3046381 - DNA, 25 bp, Homo sapien
tacaagttctgaaaaatggtactca

SEQ ID NO: 3046382 - DNA, 25 bp, Homo sapien
acaagttctgaaaaatggtactcac

SEQ ID NO: 3046383 - DNA, 25 bp, Homo sapien
ttacaagttctgaaaaatggtactc

SEQ ID NO: 3046384 - DNA, 25 bp, Homo sapien
cttgagcgtgagagaagatgtagtt

SEQ ID NO: 3046385 - DNA, 25 bp, Homo sapien
tctcttctcggagggcgaatacaca

SEQ ID NO: 3046386 - DNA, 25 bp, Homo sapien
gaagatgtagttcagtacagtgttc

SEQ ID NO: 3046387 - DNA, 25 bp, Homo sapien
gaagattcttcttggtgacttgagc

SEQ ID NO: 3046388 - DNA, 25 bp, Homo sapien
tatatgcctctaattacaaatggga

SEQ ID NO: 3046389 - DNA, 25 bp, Homo sapien
tgaacagtgctgtcacaaatactcc

SEQ ID NO: 3046390 - DNA, 25 bp, Homo sapien
ggcttttcagactccttatgacgta

SEQ ID NO: 3046391 - DNA, 25 bp, Homo sapien
tcctgaggttataacgatattctcc

SEQ ID NO: 3046392 - DNA, 25 bp, Homo sapien
gctctactgtaaacaaatactgttg

SEQ ID NO: 3046393 - DNA, 25 bp, Homo sapien
agccactacatctagcctgctattt

SEQ ID NO: 3046394 - DNA, 25 bp, Homo sapien
taccataatgcatgatgtatcctgc

SEQ ID NO: 3046395 - DNA, 25 bp, Homo sapien
ggctttctaaagagacaccctatca

SEQ ID NO: 3046396 - DNA, 25 bp, Homo sapien
gccttcatgtggcctcggatgccac

SEQ ID NO: 3046397 - DNA, 25 bp, Homo sapien
tctggaattgtgtctctactcgcag

SEQ ID NO: 3046398 - DNA, 25 bp, Homo sapien
tgtctctactcgcaggtactgccgg

SEQ ID NO: 3046399 - DNA, 25 bp, Homo sapien
gaattgtgtctctactcgcaggtac

SEQ ID NO: 3046400 - DNA, 25 bp, Homo sapien
tctccactgaaaaacctgacaatcc

SEQ ID NO: 3046401 - DNA, 25 bp, Homo sapien
ctaggcaaatagaaagtctccactg

SEQ ID NO: 3046402 - DNA, 25 bp, Homo sapien
ggcaaatagaaagtctccactgaaa

SEQ ID NO: 3046403 - DNA, 25 bp, Homo sapien
cactgaaaaacctgacaatccaaca

SEQ ID NO: 3046404 - DNA, 25 bp, Homo sapien
agaagacttcccgttcagatttccg

SEQ ID NO: 3046405 - DNA, 25 bp, Homo sapien
tagctgcatggctatctaggatgtt

SEQ ID NO: 3046406 - DNA, 25 bp, Homo sapien
cagatttccggttcaatgtagctgc

SEQ ID NO: 3046407 - DNA, 25 bp, Homo sapien
tctgtaccagctgaacaatgctctg

SEQ ID NO: 3046408 - DNA, 25 bp, Homo sapien
gactgatgtgatgttgctagcatac

SEQ ID NO: 3046409 - DNA, 25 bp, Homo sapien
gaatgcggccagacacactggtcat

SEQ ID NO: 3046410 - DNA, 25 bp, Homo sapien
taatatcttgcaattctaggagagg

SEQ ID NO: 3046411 - DNA, 25 bp, Homo sapien
tgagggttttcatcaatcgctctac

SEQ ID NO: 3046412 - DNA, 25 bp, Homo sapien
tctgagtgccgtgctctggatccgt

SEQ ID NO: 3046413 - DNA, 25 bp, Homo sapien
gaaaggatctggaaggcagtatcca

SEQ ID NO: 3046414 - DNA, 25 bp, Homo sapien
tacattgaccagattatccaggaca

SEQ ID NO: 3046415 - DNA, 25 bp, Homo sapien
tggaacactcgatggagtttctcgc

SEQ ID NO: 3046416 - DNA, 25 bp, Homo sapien
tttggctagtacacagccagggtca

SEQ ID NO: 3046417 - DNA, 25 bp, Homo sapien
tccacagctgttaaggtcattacca

SEQ ID NO: 3046418 - DNA, 25 bp, Homo sapien
ttgacgtaatggatacagccagact

SEQ ID NO: 3046419 - DNA, 25 bp, Homo sapien
gctccaggtcgcttgacgtaatgga

SEQ ID NO: 3046420 - DNA, 25 bp, Homo sapien
tcaatctcagcatagcactggccgg

SEQ ID NO: 3046421 - DNA, 25 bp, Homo sapien
cgcatcaccgatgggtcattttcct

SEQ ID NO: 3046422 - DNA, 25 bp, Homo sapien
tttattgccaattgtgatgcgatat

SEQ ID NO: 3046423 - DNA, 25 bp, Homo sapien
cccagcagaaggtgagcgcatcacc

SEQ ID NO: 3046424 - DNA, 25 bp, Homo sapien
acaggatgaccagcaaatggacctc

SEQ ID NO: 3046425 - DNA, 25 bp, Homo sapien
caagagctagtagctaataagagaa

SEQ ID NO: 3046426 - DNA, 25 bp, Homo sapien
taacaggatgaccagcaaatggacc

SEQ ID NO: 3046427 - DNA, 25 bp, Homo sapien
gcctgggaaaatcccaagagctagt

SEQ ID NO: 3046428 - DNA, 25 bp, Homo sapien
tatacgtagtataactgctgccatc

SEQ ID NO: 3046429 - DNA, 25 bp, Homo sapien
taggacaagagcagtccaccgtcac

SEQ ID NO: 3046430 - DNA, 25 bp, Homo sapien
tcatgatcaccacataggagttggg

SEQ ID NO: 3046431 - DNA, 25 bp, Homo sapien
cgtcactcagccgatgtacatctac

SEQ ID NO: 3046432 - DNA, 25 bp, Homo sapien
gtacatacttgactccctcatagat

SEQ ID NO: 3046433 - DNA, 25 bp, Homo sapien
gactccctcatagataagttcaaca

SEQ ID NO: 3046434 - DNA, 25 bp, Homo sapien
gataagttcaacatctactgtattc

SEQ ID NO: 3046435 - DNA, 25 bp, Homo sapien
cttaagtacatacttgactccctca

SEQ ID NO: 3046436 - DNA, 25 bp, Homo sapien
aaggaagttagagacgctattccgc

SEQ ID NO: 3046437 - DNA, 25 bp, Homo sapien
caggctcacatctgccacgtggagg

SEQ ID NO: 3046438 - DNA, 25 bp, Homo sapien
gacgctattccgcaggctcacatct

SEQ ID NO: 3046439 - DNA, 25 bp, Homo sapien
cacacaacccccaacatggtgtcag

SEQ ID NO: 3046440 - DNA, 25 bp, Homo sapien
agtcaccccgaatagacagctcctt

SEQ ID NO: 3046441 - DNA, 25 bp, Homo sapien
cagtctctaacaatttgatcaggta

SEQ ID NO: 3046442 - DNA, 25 bp, Homo sapien
caactgtagttcgaaagtcaccccg

SEQ ID NO: 3046443 - DNA, 25 bp, Homo sapien
tccagccagccagtatcaattctgt

SEQ ID NO: 3046444 - DNA, 25 bp, Homo sapien
atttagctcctgaactgttcctgag

SEQ ID NO: 3046445 - DNA, 25 bp, Homo sapien
caaacattcttattgctgcggaaat

SEQ ID NO: 3046446 - DNA, 25 bp, Homo sapien
tctccccaagaaaagcagtgaccaa

SEQ ID NO: 3046447 - DNA, 25 bp, Homo sapien
tattgctgcggaaatttagctcctg

SEQ ID NO: 3046448 - DNA, 25 bp, Homo sapien
ccccttggacaaggaacgtgtgcag

SEQ ID NO: 3046449 - DNA, 25 bp, Homo sapien
gagcagcaataacatggccccttgg

SEQ ID NO: 3046450 - DNA, 25 bp, Homo sapien
tttcactagtgatccgagcagcaat

SEQ ID NO: 3046451 - DNA, 25 bp, Homo sapien
atcaatgggagaatcaccccaggga

SEQ ID NO: 3046452 - DNA, 25 bp, Homo sapien
tcctaatgcaacagacaccagttcc

SEQ ID NO: 3046453 - DNA, 25 bp, Homo sapien
caactctaagttgcttgaaatacaa

SEQ ID NO: 3046454 - DNA, 25 bp, Homo sapien
caatatatcactacagataagtagt

SEQ ID NO: 3046455 - DNA, 25 bp, Homo sapien
tctccatcacgtaataagaatgaaa

SEQ ID NO: 3046456 - DNA, 25 bp, Homo sapien
gacttttctaggctctgcaacccag

SEQ ID NO: 3046457 - DNA, 25 bp, Homo sapien
gaaatgaccattaggtgtgactcag

SEQ ID NO: 3046458 - DNA, 25 bp, Homo sapien
tgtctgtactacatcaggaaaacca

SEQ ID NO: 3046459 - DNA, 25 bp, Homo sapien
cacatgcataacacatacagggtga

SEQ ID NO: 3046460 - DNA, 25 bp, Homo sapien
tctgtacaagggtgctctacctgca

SEQ ID NO: 3046461 - DNA, 25 bp, Homo sapien
acctgcagccgaggattcaattcca

SEQ ID NO: 3046462 - DNA, 25 bp, Homo sapien
gcagggagattgacatcagccacca

SEQ ID NO: 3046463 - DNA, 25 bp, Homo sapien
tggctgtacaggtattccacagtcc

SEQ ID NO: 3046464 - DNA, 25 bp, Homo sapien
ttcattggaacatagtcatgatagt

SEQ ID NO: 3046465 - DNA, 25 bp, Homo sapien
tttccttcttattcattggaacata

SEQ ID NO: 3046466 - DNA, 25 bp, Homo sapien
tcttattcattggaacatagtcatg

SEQ ID NO: 3046467 - DNA, 25 bp, Homo sapien
tggaacatagtcatgatagtataag

SEQ ID NO: 3046468 - DNA, 25 bp, Homo sapien
ggtccgctaagatctgcacctccag

SEQ ID NO: 3046469 - DNA, 25 bp, Homo sapien
gatagcattgccatattggtccgct

SEQ ID NO: 3046470 - DNA, 25 bp, Homo sapien
gcctgcgttgtacagagcaatcacg

SEQ ID NO: 3046471 - DNA, 25 bp, Homo sapien
caataatcttctgatgcctgcgttg

SEQ ID NO: 3046472 - DNA, 25 bp, Homo sapien
gaagagattagggaagtcatctgca

SEQ ID NO: 3046473 - DNA, 25 bp, Homo sapien
attactggatatccaacttcctcag

SEQ ID NO: 3046474 - DNA, 25 bp, Homo sapien
tgaggccttgatcattactggatat

SEQ ID NO: 3046475 - DNA, 25 bp, Homo sapien
ctgtctgaagagattagggaagtca

SEQ ID NO: 3046476 - DNA, 25 bp, Homo sapien
tcatatagctcctggggaacattta

SEQ ID NO: 3046477 - DNA, 25 bp, Homo sapien
ttttcctgccagtccacacgaagac

SEQ ID NO: 3046478 - DNA, 25 bp, Homo sapien
tcattttcctgccagtccacacgaa

SEQ ID NO: 3046479 - DNA, 25 bp, Homo sapien
aacctttttcatatagctcctgggg

SEQ ID NO: 3046480 - DNA, 25 bp, Homo sapien
tgccgctccagggaagagttgggat

SEQ ID NO: 3046481 - DNA, 25 bp, Homo sapien
actgccgctccagggaagagttggg

SEQ ID NO: 3046482 - DNA, 25 bp, Homo sapien
ccgctccagggaagagttgggatac

SEQ ID NO: 3046483 - DNA, 25 bp, Homo sapien
cactgccgctccagggaagagttgg

SEQ ID NO: 3046484 - DNA, 25 bp, Homo sapien
cctaaagcccacatggcctggcttg

SEQ ID NO: 3046485 - DNA, 25 bp, Homo sapien
gaagatgcaatcttatcccctaaag

SEQ ID NO: 3046486 - DNA, 25 bp, Homo sapien
tgagccactatggaagatgcaatct

SEQ ID NO: 3046487 - DNA, 25 bp, Homo sapien
tgcagtttgagccactatggaagat

SEQ ID NO: 3046488 - DNA, 25 bp, Homo sapien
gattctcagaagcatgaccccagcc

SEQ ID NO: 3046489 - DNA, 25 bp, Homo sapien
attctcagaagcatgaccccagcca

SEQ ID NO: 3046490 - DNA, 25 bp, Homo sapien
actggcacatagtgatctgccatct

SEQ ID NO: 3046491 - DNA, 25 bp, Homo sapien
ctgggatccttttagcaatatcaag

SEQ ID NO: 3046492 - DNA, 25 bp, Homo sapien
gttgttgtttggtcctccaggcact

SEQ ID NO: 3046493 - DNA, 25 bp, Homo sapien
ttgtactgggatccttttagcaata

SEQ ID NO: 3046494 - DNA, 25 bp, Homo sapien
gctttctcttaagcctgcccccaag

SEQ ID NO: 3046495 - DNA, 25 bp, Homo sapien
gctggatttacgggcaccagcacca

SEQ ID NO: 3046496 - DNA, 25 bp, Homo sapien
ccacactcagcctaagaaagctttc

SEQ ID NO: 3046497 - DNA, 25 bp, Homo sapien
gtagctggatttacgggcaccagca

SEQ ID NO: 3046498 - DNA, 25 bp, Homo sapien
gaatctaattgcacgttcatttcga

SEQ ID NO: 3046499 - DNA, 25 bp, Homo sapien
tggctttaaggtcttcaggtgtgac

SEQ ID NO: 3046500 - DNA, 25 bp, Homo sapien
cataagaccacctacggatagaccg

SEQ ID NO: 3046501 - DNA, 25 bp, Homo sapien
caggtgtgaccatgacaacgaatct

SEQ ID NO: 3046502 - DNA, 25 bp, Homo sapien
ccccaaagcgagtaacaaattctgc

SEQ ID NO: 3046503 - DNA, 25 bp, Homo sapien
cacagtgaaatctcgttgagaatct

SEQ ID NO: 3046504 - DNA, 25 bp, Homo sapien
caatcactttatttcccccaaagcg

SEQ ID NO: 3046505 - DNA, 25 bp, Homo sapien
cctgctttactaggtgcaagccaga

SEQ ID NO: 3046506 - DNA, 25 bp, Homo sapien
ctctaggcacctccacttcatatcc

SEQ ID NO: 3046507 - DNA, 25 bp, Homo sapien
cattatcttcaaccctctaggcacc

SEQ ID NO: 3046508 - DNA, 25 bp, Homo sapien
cttgaaaatcagcaactgtaagtat

SEQ ID NO: 3046509 - DNA, 25 bp, Homo sapien
taagtatggcacaatcaaacatttc

SEQ ID NO: 3046510 - DNA, 25 bp, Homo sapien
tatagacgcacacaaacgaagattc

SEQ ID NO: 3046511 - DNA, 25 bp, Homo sapien
cagtggaggctgtacaagttcttgg

SEQ ID NO: 3046512 - DNA, 25 bp, Homo sapien
gagagactgagattcccctgtatgg

SEQ ID NO: 3046513 - DNA, 25 bp, Homo sapien
caagctgtgccacacgtagggatca

SEQ ID NO: 3046514 - DNA, 25 bp, Homo sapien
tgggctaaagggcgagactccattt

SEQ ID NO: 3046515 - DNA, 25 bp, Homo sapien
gggctaaagggcgagactccatttc

SEQ ID NO: 3046516 - DNA, 25 bp, Homo sapien
cctgggtttgctcgatcaagcaatt

SEQ ID NO: 3046517 - DNA, 25 bp, Homo sapien
gggtttgctcgatcaagcaattctc

SEQ ID NO: 3046518 - DNA, 25 bp, Homo sapien
tgggtttgctcgatcaagcaattct

SEQ ID NO: 3046519 - DNA, 25 bp, Homo sapien
ctgggtttgctcgatcaagcaattc

SEQ ID NO: 3046520 - DNA, 25 bp, Homo sapien
tctcagggcttagctgtcagtacct

SEQ ID NO: 3046521 - DNA, 25 bp, Homo sapien
gtaaatctgatacatctgaggttcc

SEQ ID NO: 3046522 - DNA, 25 bp, Homo sapien
catgggctcagggatcttttattca

SEQ ID NO: 3046523 - DNA, 25 bp, Homo sapien
tacccaaatgtggtagcctaacact

SEQ ID NO: 3046524 - DNA, 25 bp, Homo sapien
tgaagcatgtaatatctcatttcct

SEQ ID NO: 3046525 - DNA, 25 bp, Homo sapien
ggccttgtaaacacaagccgcagtt

SEQ ID NO: 3046526 - DNA, 25 bp, Homo sapien
tttcggccttgtaaacacaagccgc

SEQ ID NO: 3046527 - DNA, 25 bp, Homo sapien
agatttcggccttgtaaacacaagc

SEQ ID NO: 3046528 - DNA, 25 bp, Homo sapien
ttgtaaacacaagccgcagttcctc

SEQ ID NO: 3046529 - DNA, 25 bp, Homo sapien
ccaggaggacaagagatactgtgcc

SEQ ID NO: 3046530 - DNA, 25 bp, Homo sapien
taactagaaagtagatcttagcagc

SEQ ID NO: 3046531 - DNA, 25 bp, Homo sapien
gcagctctcctttagttgcagcaaa

SEQ ID NO: 3046532 - DNA, 25 bp, Homo sapien
tagtctttttgtctaattgttccca

SEQ ID NO: 3046533 - DNA, 25 bp, Homo sapien
attttcaacaacagtcactttcttc

SEQ ID NO: 3046534 - DNA, 25 bp, Homo sapien
ggttttatgcaccaaagcttgagaa

SEQ ID NO: 3046535 - DNA, 25 bp, Homo sapien
taggaatggagctggtacaaaacgg

SEQ ID NO: 3046536 - DNA, 25 bp, Homo sapien
taccaattatcagactgcacggtgg

SEQ ID NO: 3046537 - DNA, 25 bp, Homo sapien
taagcacgtagaaaggaaacacgcc

SEQ ID NO: 3046538 - DNA, 25 bp, Homo sapien
aaatttatctatgcttaccacttgg

SEQ ID NO: 3046539 - DNA, 25 bp, Homo sapien
taccacttggtcgaatttatggaaa

SEQ ID NO: 3046540 - DNA, 25 bp, Homo sapien
tacttacctattctactattcacgg

SEQ ID NO: 3046541 - DNA, 25 bp, Homo sapien
gttgtgatacagcagtagtttgttc

SEQ ID NO: 3046542 - DNA, 25 bp, Homo sapien
tccccatatttctattgtgttgaat

SEQ ID NO: 3046543 - DNA, 25 bp, Homo sapien
ccatatttctattgtgttgaatgtc

SEQ ID NO: 3046544 - DNA, 25 bp, Homo sapien
ccccatatttctattgtgttgaatg

SEQ ID NO: 3046545 - DNA, 25 bp, Homo sapien
tttccccatatttctattgtgttga

SEQ ID NO: 3046546 - DNA, 25 bp, Homo sapien
tcagtctttatacctctaccattta

SEQ ID NO: 3046547 - DNA, 25 bp, Homo sapien
tgtgactgttcccaatcagtcttta

SEQ ID NO: 3046548 - DNA, 25 bp, Homo sapien
gactgttcccaatcagtctttatac

SEQ ID NO: 3046549 - DNA, 25 bp, Homo sapien
cttttgtgactgttcccaatcagtc

SEQ ID NO: 3046550 - DNA, 25 bp, Homo sapien
tgcgcccgaccactctactatatat

SEQ ID NO: 3046551 - DNA, 25 bp, Homo sapien
tgcttcttggctcaggattcatacc

SEQ ID NO: 3046552 - DNA, 25 bp, Homo sapien
cttgtgcaagtagatttccatttgt

SEQ ID NO: 3046553 - DNA, 25 bp, Homo sapien
ccgaccactctactatatattcttg

SEQ ID NO: 3046554 - DNA, 25 bp, Homo sapien
acaggtacatgtccccatgcccggg

SEQ ID NO: 3046555 - DNA, 25 bp, Homo sapien
gtacatgtccccatgcccgggtaag

SEQ ID NO: 3046556 - DNA, 25 bp, Homo sapien
aggtacatgtccccatgcccgggta

SEQ ID NO: 3046557 - DNA, 25 bp, Homo sapien
acatgtccccatgcccgggtaagtt

SEQ ID NO: 3046558 - DNA, 25 bp, Homo sapien
cggcctcttcttttgcaccaaccat

SEQ ID NO: 3046559 - DNA, 25 bp, Homo sapien
tcatttggtttcagatgacctccag

SEQ ID NO: 3046560 - DNA, 25 bp, Homo sapien
cagatgtcataacagaggtctttca

SEQ ID NO: 3046561 - DNA, 25 bp, Homo sapien
tcatctccatcgcaggaaaagtcta

SEQ ID NO: 3046562 - DNA, 25 bp, Homo sapien
catggtcacacacctaattagtggc

SEQ ID NO: 3046563 - DNA, 25 bp, Homo sapien
aactttgtctgaactagttatataa

SEQ ID NO: 3046564 - DNA, 25 bp, Homo sapien
taatgctttgttcactaactccata

SEQ ID NO: 3046565 - DNA, 25 bp, Homo sapien
gataatgctttgttcactaactcca

SEQ ID NO: 3046566 - DNA, 25 bp, Homo sapien
agagataatgctttgttcactaact

SEQ ID NO: 3046567 - DNA, 25 bp, Homo sapien
taaaggtgccaagatagtaacagca

SEQ ID NO: 3046568 - DNA, 25 bp, Homo sapien
tatcaaatgaatcgaaatctctggg

SEQ ID NO: 3046569 - DNA, 25 bp, Homo sapien
caaggctccccgaggtgattctgat

SEQ ID NO: 3046570 - DNA, 25 bp, Homo sapien
gggtacacctataatctgaatgctg

SEQ ID NO: 3046571 - DNA, 25 bp, Homo sapien
tgatccagaccttttaatccaagaa

SEQ ID NO: 3046572 - DNA, 25 bp, Homo sapien
cagagagtgtatctgagccaacaga

SEQ ID NO: 3046573 - DNA, 25 bp, Homo sapien
tgaatcgagagtgctggttcagctc

SEQ ID NO: 3046574 - DNA, 25 bp, Homo sapien
gacacagaacctattatgaatcgag

SEQ ID NO: 3046575 - DNA, 25 bp, Homo sapien
taggctagagatccccaaatcagag

SEQ ID NO: 3046576 - DNA, 25 bp, Homo sapien
attcctccaaaatgagctcttacag

SEQ ID NO: 3046577 - DNA, 25 bp, Homo sapien
tattcctccaaaatgagctcttaca

SEQ ID NO: 3046578 - DNA, 25 bp, Homo sapien
tgtctgagtagatatccacttccag

SEQ ID NO: 3046579 - DNA, 25 bp, Homo sapien
gtctgagtagatatccacttccaga

SEQ ID NO: 3046580 - DNA, 25 bp, Homo sapien
cctagaggatccttcttcggagaat

SEQ ID NO: 3046581 - DNA, 25 bp, Homo sapien
gatccttcttcggagaatctgacca

SEQ ID NO: 3046582 - DNA, 25 bp, Homo sapien
gaggatccttcttcggagaatctga

SEQ ID NO: 3046583 - DNA, 25 bp, Homo sapien
atccttcttcggagaatctgaccag

SEQ ID NO: 3046584 - DNA, 25 bp, Homo sapien
ttaatatcaccttcaaatagtccat

SEQ ID NO: 3046585 - DNA, 25 bp, Homo sapien
gtttaatatcaccttcaaatagtcc

SEQ ID NO: 3046586 - DNA, 25 bp, Homo sapien
tgtttaatatcaccttcaaatagtc

SEQ ID NO: 3046587 - DNA, 25 bp, Homo sapien
ctgtttaatatcaccttcaaatagt

SEQ ID NO: 3046588 - DNA, 25 bp, Homo sapien
tcgggcgatggctgacaggcgtgca

SEQ ID NO: 3046589 - DNA, 25 bp, Homo sapien
actgctgggcgggaggagacgccgg

SEQ ID NO: 3046590 - DNA, 25 bp, Homo sapien
ctcagggtggcaacgtgtgcggtcg

SEQ ID NO: 3046591 - DNA, 25 bp, Homo sapien
attccggagcccctgcgtggaggaa

SEQ ID NO: 3046592 - DNA, 25 bp, Homo sapien
gaagttccacgccagagagtaaaaa

SEQ ID NO: 3046593 - DNA, 25 bp, Homo sapien
gaataggatagaaatacatgcccag

SEQ ID NO: 3046594 - DNA, 25 bp, Homo sapien
aatttaatgaagcatgcagcgcacc

SEQ ID NO: 3046595 - DNA, 25 bp, Homo sapien
catgcccaggtaagaagttcttggc

SEQ ID NO: 3046596 - DNA, 25 bp, Homo sapien
gaaggaacttcataccataaggtca

SEQ ID NO: 3046597 - DNA, 25 bp, Homo sapien
gcctccagtgggatatatagctgct

SEQ ID NO: 3046598 - DNA, 25 bp, Homo sapien
gaaagtcagtgccttgcccacaact

SEQ ID NO: 3046599 - DNA, 25 bp, Homo sapien
gatgcctgcttatccgtcttcacgt

SEQ ID NO: 3046600 - DNA, 25 bp, Homo sapien
ctttagacttccctagtgtctccat

SEQ ID NO: 3046601 - DNA, 25 bp, Homo sapien
cttctctttagacttccctagtgtc

SEQ ID NO: 3046602 - DNA, 25 bp, Homo sapien
tctctttagacttccctagtgtctc

SEQ ID NO: 3046603 - DNA, 25 bp, Homo sapien
ctctttagacttccctagtgtctcc

SEQ ID NO: 3046604 - DNA, 25 bp, Homo sapien
tgggtgttgtggcaggcacctataa

SEQ ID NO: 3046605 - DNA, 25 bp, Homo sapien
gagaatccgttgaatccgggaggcg

SEQ ID NO: 3046606 - DNA, 25 bp, Homo sapien
caagatcatgccattgcactccagc

SEQ ID NO: 3046607 - DNA, 25 bp, Homo sapien
tcccagctactcaggaggctgaggc

SEQ ID NO: 3046608 - DNA, 25 bp, Homo sapien
tggcacagagcttgttagatagtag

SEQ ID NO: 3046609 - DNA, 25 bp, Homo sapien
tgtaaccaacatgttaagcttctgg

SEQ ID NO: 3046610 - DNA, 25 bp, Homo sapien
gattaaatgatgtaaccaacatgtt

SEQ ID NO: 3046611 - DNA, 25 bp, Homo sapien
tagtaggcacacagaaaatattact

SEQ ID NO: 3046612 - DNA, 25 bp, Homo sapien
cacacaattccactccaggctgggt

SEQ ID NO: 3046613 - DNA, 25 bp, Homo sapien
ggaggcttcagtgagtcttgatcac

SEQ ID NO: 3046614 - DNA, 25 bp, Homo sapien
gcttcagtgagtcttgatcacacaa

SEQ ID NO: 3046615 - DNA, 25 bp, Homo sapien
tcagtgagtcttgatcacacaattc

SEQ ID NO: 3046616 - DNA, 25 bp, Homo sapien
gataacttgtggtgacttgtccaaa

SEQ ID NO: 3046617 - DNA, 25 bp, Homo sapien
tattttactattaccatcttacaga

SEQ ID NO: 3046618 - DNA, 25 bp, Homo sapien
gacttataaacatgtaagttatcac

SEQ ID NO: 3046619 - DNA, 25 bp, Homo sapien
aaaaacacagataacttgtggtgac

SEQ ID NO: 3046620 - DNA, 25 bp, Homo sapien
tggcctctgaggtaaagaactatca

SEQ ID NO: 3046621 - DNA, 25 bp, Homo sapien
caattctggagacgagtgaggttat

SEQ ID NO: 3046622 - DNA, 25 bp, Homo sapien
acactgtctgaattggattaggtca

SEQ ID NO: 3046623 - DNA, 25 bp, Homo sapien
tacagtgcctggtactatggccact

SEQ ID NO: 3046624 - DNA, 25 bp, Homo sapien
aaattctgtaagattccaatttggg

SEQ ID NO: 3046625 - DNA, 25 bp, Homo sapien
tattagtaataatgagatgcacatt

SEQ ID NO: 3046626 - DNA, 25 bp, Homo sapien
tgagatgcacattagggccaggtga

SEQ ID NO: 3046627 - DNA, 25 bp, Homo sapien
tgggttacatcctagtttctaccag

SEQ ID NO: 3046628 - DNA, 25 bp, Homo sapien
tagagctccatgtgtacccgagatt

SEQ ID NO: 3046629 - DNA, 25 bp, Homo sapien
tcttgtgagccagaagaacttcagg

SEQ ID NO: 3046630 - DNA, 25 bp, Homo sapien
gcgagcagtgtaagaatcagcccta

SEQ ID NO: 3046631 - DNA, 25 bp, Homo sapien
tgtcagagcaaaatggtaggaaccc

SEQ ID NO: 3046632 - DNA, 25 bp, Homo sapien
tgcagtgtagcaacaggtgcacctt

SEQ ID NO: 3046633 - DNA, 25 bp, Homo sapien
ttggaccgtaattgaggaactttca

SEQ ID NO: 3046634 - DNA, 25 bp, Homo sapien
ccagtggctgaaattgctaactgca

SEQ ID NO: 3046635 - DNA, 25 bp, Homo sapien
cactggactcttgtgaatttgcacc

SEQ ID NO: 3046636 - DNA, 25 bp, Homo sapien
ctctctctttttcaggttgattcat

SEQ ID NO: 3046637 - DNA, 25 bp, Homo sapien
ctaagtcacccagtttagtctcgaa

SEQ ID NO: 3046638 - DNA, 25 bp, Homo sapien
tcaatggcagccaggttaccaaccc

SEQ ID NO: 3046639 - DNA, 25 bp, Homo sapien
ctacgtttgattctaaccacagcag

SEQ ID NO: 3046640 - DNA, 25 bp, Homo sapien
accaggccagaaactctacgtttga

SEQ ID NO: 3046641 - DNA, 25 bp, Homo sapien
tgccctttctccatgccaaacaaat

SEQ ID NO: 3046642 - DNA, 25 bp, Homo sapien
tccaaaccttaccagatgatacatg

SEQ ID NO: 3046643 - DNA, 25 bp, Homo sapien
ccttttacagcaaagctactccttt

SEQ ID NO: 3046644 - DNA, 25 bp, Homo sapien
gctctcaacccttcgtcatattctg

SEQ ID NO: 3046645 - DNA, 25 bp, Homo sapien
aaatgagaccgtatgtgtaacctgc

SEQ ID NO: 3046646 - DNA, 25 bp, Homo sapien
tgaaagggttcacacaggtataaag

SEQ ID NO: 3046647 - DNA, 25 bp, Homo sapien
caataagtactcgacaaatggtagc

SEQ ID NO: 3046648 - DNA, 25 bp, Homo sapien
caggtgcctacctcacaagttttaa

SEQ ID NO: 3046649 - DNA, 25 bp, Homo sapien
ctagccctcaagattgacatcagag

SEQ ID NO: 3046650 - DNA, 25 bp, Homo sapien
cctcaagattgacatcagagtagac

SEQ ID NO: 3046651 - DNA, 25 bp, Homo sapien
attgacatcagagtagaccaccaca

SEQ ID NO: 3046652 - DNA, 25 bp, Homo sapien
ttgacatcagagtagaccaccacat

SEQ ID NO: 3046653 - DNA, 25 bp, Homo sapien
tcttcaccccttaaaatcagtctgg

SEQ ID NO: 3046654 - DNA, 25 bp, Homo sapien
tactggtcggatcaaaagtcaggca

SEQ ID NO: 3046655 - DNA, 25 bp, Homo sapien
gaagacaatttcgacgttccagaag

SEQ ID NO: 3046656 - DNA, 25 bp, Homo sapien
tcagtctggttcatccacgagcagc

SEQ ID NO: 3046657 - DNA, 25 bp, Homo sapien
agtcgcgggctgcgggccccggcgg

SEQ ID NO: 3046658 - DNA, 25 bp, Homo sapien
cggcgggggaggagtcgcgggctgc

SEQ ID NO: 3046659 - DNA, 25 bp, Homo sapien
ctgcgggccccggcggcgggcttga

SEQ ID NO: 3046660 - DNA, 25 bp, Homo sapien
ccggcggcgggcttgacgcggcagg

SEQ ID NO: 3046661 - DNA, 25 bp, Homo sapien
actgcgtccagccttgacatctgta

SEQ ID NO: 3046662 - DNA, 25 bp, Homo sapien
ctgcgtccagccttgacatctgtat

SEQ ID NO: 3046663 - DNA, 25 bp, Homo sapien
gagtcaggatcgacccagcatggtg

SEQ ID NO: 3046664 - DNA, 25 bp, Homo sapien
cttggacagctaatgatatcacgga

SEQ ID NO: 3046665 - DNA, 25 bp, Homo sapien
ccttgggccctgtttcagtagcaga

SEQ ID NO: 3046666 - DNA, 25 bp, Homo sapien
aagatatacttagctcatccttggg

SEQ ID NO: 3046667 - DNA, 25 bp, Homo sapien
gctttcaagattgtactgtatcagg

SEQ ID NO: 3046668 - DNA, 25 bp, Homo sapien
gctaaagcagcatgggataatataa

SEQ ID NO: 3046669 - DNA, 25 bp, Homo sapien
gaataaatgaatacgcctgtgttcc

SEQ ID NO: 3046670 - DNA, 25 bp, Homo sapien
tctggttcttattgtacatctaggg

SEQ ID NO: 3046671 - DNA, 25 bp, Homo sapien
tgccattcatagacaccagctttaa

SEQ ID NO: 3046672 - DNA, 25 bp, Homo sapien
gtatttgttcagtcttccgtgtcag

SEQ ID NO: 3046673 - DNA, 25 bp, Homo sapien
ttgaaggtagtatgcagactgccat

SEQ ID NO: 3046674 - DNA, 25 bp, Homo sapien
gtgtcagtctcgtcaatcccagtga

SEQ ID NO: 3046675 - DNA, 25 bp, Homo sapien
gatgagctcctcctatgtgttgggt

SEQ ID NO: 3046676 - DNA, 25 bp, Homo sapien
gtgtttccagtacttctcagggttg

SEQ ID NO: 3046677 - DNA, 25 bp, Homo sapien
acaattagtagagcagaggtccagc

SEQ ID NO: 3046678 - DNA, 25 bp, Homo sapien
gaaagttttctctcctaggcttgga

SEQ ID NO: 3046679 - DNA, 25 bp, Homo sapien
agagtttgctcttgtcctccaggct

SEQ ID NO: 3046680 - DNA, 25 bp, Homo sapien
gctcactacaacctctgcctcccag

SEQ ID NO: 3046681 - DNA, 25 bp, Homo sapien
tggagtgtgatggcaagatctcagc

SEQ ID NO: 3046682 - DNA, 25 bp, Homo sapien
tcagctcactacaacctctgcctcc

SEQ ID NO: 3046683 - DNA, 25 bp, Homo sapien
cagtctgcctgtctaatctgcagta

SEQ ID NO: 3046684 - DNA, 25 bp, Homo sapien
ggcaccggatataacatgtctctgt

SEQ ID NO: 3046685 - DNA, 25 bp, Homo sapien
gtctaatctgcagtagtcttttgag

SEQ ID NO: 3046686 - DNA, 25 bp, Homo sapien
tggctttgtactttgcagtctgcct

SEQ ID NO: 3046687 - DNA, 25 bp, Homo sapien
acttaaggtgttggatgcctgcccc

SEQ ID NO: 3046688 - DNA, 25 bp, Homo sapien
ggtaagtagccccaccacatgtaaa

SEQ ID NO: 3046689 - DNA, 25 bp, Homo sapien
aagcagctttatatatgggactcac

SEQ ID NO: 3046690 - DNA, 25 bp, Homo sapien
gatggagatgatgcaacaaacctca

SEQ ID NO: 3046691 - DNA, 25 bp, Homo sapien
cgcgagccacctcgccccaccaaaa

SEQ ID NO: 3046692 - DNA, 25 bp, Homo sapien
ttaagatttacagagcaggctgggc

SEQ ID NO: 3046693 - DNA, 25 bp, Homo sapien
aggcgcgagccacctcgccccacca

SEQ ID NO: 3046694 - DNA, 25 bp, Homo sapien
aaattaagatttacagagcaggctg

SEQ ID NO: 3046695 - DNA, 25 bp, Homo sapien
ccttgaggaagtcgctttgcctccc

SEQ ID NO: 3046696 - DNA, 25 bp, Homo sapien
agagccttgaggaagtcgctttgcc

SEQ ID NO: 3046697 - DNA, 25 bp, Homo sapien
ttgaggaagtcgctttgcctcccac

SEQ ID NO: 3046698 - DNA, 25 bp, Homo sapien
tttgcctcccacgtgtctcccttca

SEQ ID NO: 3046699 - DNA, 25 bp, Homo sapien
gtgggtgtgggctccgagactcgga

SEQ ID NO: 3046700 - DNA, 25 bp, Homo sapien
tcaaatgcccgtgtcccgcctgcgc

SEQ ID NO: 3046701 - DNA, 25 bp, Homo sapien
tgcgctccggagaacccctgccctg

SEQ ID NO: 3046702 - DNA, 25 bp, Homo sapien
cctgcctcggggactcgggaggtgg

SEQ ID NO: 3046703 - DNA, 25 bp, Homo sapien
aactgccgcgctactgattttccct

SEQ ID NO: 3046704 - DNA, 25 bp, Homo sapien
gtacctgttccagcaagcgtcagcc

SEQ ID NO: 3046705 - DNA, 25 bp, Homo sapien
gatgcgcacggaggttgcatgttca

SEQ ID NO: 3046706 - DNA, 25 bp, Homo sapien
tgcatgttcacctccgggtctcggg

SEQ ID NO: 3046707 - DNA, 25 bp, Homo sapien
gatttgctttctcgcctttaatcct

SEQ ID NO: 3046708 - DNA, 25 bp, Homo sapien
atcccgaaagcaccccagcagagcg

SEQ ID NO: 3046709 - DNA, 25 bp, Homo sapien
cggatttgctttctcgcctttaatc

SEQ ID NO: 3046710 - DNA, 25 bp, Homo sapien
ttaatcctctccaatcccgaaagca

SEQ ID NO: 3046711 - DNA, 25 bp, Homo sapien
aacttgactttcagcgatgccaagt

SEQ ID NO: 3046712 - DNA, 25 bp, Homo sapien
tctggtgcatggatagaagcaactt

SEQ ID NO: 3046713 - DNA, 25 bp, Homo sapien
tgaggccgcctactctcgctggcat

SEQ ID NO: 3046714 - DNA, 25 bp, Homo sapien
gatgccaagtgtccaacttgagtct

SEQ ID NO: 3046715 - DNA, 25 bp, Homo sapien
gggcacgtcccattctgttcttgca

SEQ ID NO: 3046716 - DNA, 25 bp, Homo sapien
ggcacgtcccattctgttcttgcac

SEQ ID NO: 3046717 - DNA, 25 bp, Homo sapien
ctgggcacgtcccattctgttcttg

SEQ ID NO: 3046718 - DNA, 25 bp, Homo sapien
acgtcccattctgttcttgcaccaa

SEQ ID NO: 3046719 - DNA, 25 bp, Homo sapien
catggctatcgttacagctacttgg

SEQ ID NO: 3046720 - DNA, 25 bp, Homo sapien
tcaaaaggacatagaggcctggtgt

SEQ ID NO: 3046721 - DNA, 25 bp, Homo sapien
gctcatggctatcgttacagctact

SEQ ID NO: 3046722 - DNA, 25 bp, Homo sapien
caaaaggacatagaggcctggtgtg

SEQ ID NO: 3046723 - DNA, 25 bp, Homo sapien
aaactcttatttgtcacgccgcggg

SEQ ID NO: 3046724 - DNA, 25 bp, Homo sapien
gctaacggtgcatggaagagactcg

SEQ ID NO: 3046725 - DNA, 25 bp, Homo sapien
caaacctgaggtcgtagtgaaagtc

SEQ ID NO: 3046726 - DNA, 25 bp, Homo sapien
tgttgtgtcctcatagcccaccgag

SEQ ID NO: 3046727 - DNA, 25 bp, Homo sapien
ggcgtcttcatgagctccagaggtc

SEQ ID NO: 3046728 - DNA, 25 bp, Homo sapien
gcaagtgtgactgctggcgtcttca

SEQ ID NO: 3046729 - DNA, 25 bp, Homo sapien
agcacgctaccaaggactctcatgg

SEQ ID NO: 3046730 - DNA, 25 bp, Homo sapien
tcttgccgccaacgatgcaagtgtg

SEQ ID NO: 3046731 - DNA, 25 bp, Homo sapien
attttaaaggtgaagctttataatg

SEQ ID NO: 3046732 - DNA, 25 bp, Homo sapien
acaaggggtgatttcagaacagacc

SEQ ID NO: 3046733 - DNA, 25 bp, Homo sapien
aacaaggggtgatttcagaacagac

SEQ ID NO: 3046734 - DNA, 25 bp, Homo sapien
caacgcatttcgctaagggccacag

SEQ ID NO: 3046735 - DNA, 25 bp, Homo sapien
catagtcgacacacatcttgccctg

SEQ ID NO: 3046736 - DNA, 25 bp, Homo sapien
atacaggcgcgaattccacatcacg

SEQ ID NO: 3046737 - DNA, 25 bp, Homo sapien
tggaatggtctacagcaggctacaa

SEQ ID NO: 3046738 - DNA, 25 bp, Homo sapien
taaagaaaagcagcgcaaccgtgtc

SEQ ID NO: 3046739 - DNA, 25 bp, Homo sapien
tgtagtggtccccagtacagggcca

SEQ ID NO: 3046740 - DNA, 25 bp, Homo sapien
taaaatgttgatactgggccactgt

SEQ ID NO: 3046741 - DNA, 25 bp, Homo sapien
gagtgactaagcctaccatccttgg

SEQ ID NO: 3046742 - DNA, 25 bp, Homo sapien
tcgggagcgagtgagaaaagccttt

SEQ ID NO: 3046743 - DNA, 25 bp, Homo sapien
caattcagagagacgtgtgccctag

SEQ ID NO: 3046744 - DNA, 25 bp, Homo sapien
ccagagacggtatcatcgggagcga

SEQ ID NO: 3046745 - DNA, 25 bp, Homo sapien
gatactttacactaggccgagagct

SEQ ID NO: 3046746 - DNA, 25 bp, Homo sapien
gagcaagcttctggtgccacgtgca

SEQ ID NO: 3046747 - DNA, 25 bp, Homo sapien
gccgtggtccgtatttcagaaaatc

SEQ ID NO: 3046748 - DNA, 25 bp, Homo sapien
ggtgttcttcatatcgattcaggga

SEQ ID NO: 3046749 - DNA, 25 bp, Homo sapien
tccttagatcaagaaagccgtggtc

SEQ ID NO: 3046750 - DNA, 25 bp, Homo sapien
taggccagcttgaaactgtctgttt

SEQ ID NO: 3046751 - DNA, 25 bp, Homo sapien
ggttcgacacagttgatccagaagt

SEQ ID NO: 3046752 - DNA, 25 bp, Homo sapien
ccaggaggctttggttcgacacagt

SEQ ID NO: 3046753 - DNA, 25 bp, Homo sapien
cacagctggcgtgatactggtgccc

SEQ ID NO: 3046754 - DNA, 25 bp, Homo sapien
caaataagacagaagtggacccaca

SEQ ID NO: 3046755 - DNA, 25 bp, Homo sapien
taaggccggcatctgactacagcat

SEQ ID NO: 3046756 - DNA, 25 bp, Homo sapien
ttacactcctgtagctgaccacaag

SEQ ID NO: 3046757 - DNA, 25 bp, Homo sapien
caagggctgtggatagctttcatcc

SEQ ID NO: 3046758 - DNA, 25 bp, Homo sapien
tttttaggatgttcttctgcaggct

SEQ ID NO: 3046759 - DNA, 25 bp, Homo sapien
tttaggatgttcttctgcaggcttc

SEQ ID NO: 3046760 - DNA, 25 bp, Homo sapien
ttttttaggatgttcttctgcaggc

SEQ ID NO: 3046761 - DNA, 25 bp, Homo sapien
taggatgttcttctgcaggcttctc

SEQ ID NO: 3046762 - DNA, 25 bp, Homo sapien
tgaaataacgttgaaaccacaggtc

SEQ ID NO: 3046763 - DNA, 25 bp, Homo sapien
ggccagatgaggttgtccagagtca

SEQ ID NO: 3046764 - DNA, 25 bp, Homo sapien
tccagagtcatgttagggaagccct

SEQ ID NO: 3046765 - DNA, 25 bp, Homo sapien
ggtcacaaactctgcagtaaagtgg

SEQ ID NO: 3046766 - DNA, 25 bp, Homo sapien
cgtaacatacaggaggaaaaatcca

SEQ ID NO: 3046767 - DNA, 25 bp, Homo sapien
gtccacattcaagaggcacactcca

SEQ ID NO: 3046768 - DNA, 25 bp, Homo sapien
catttttaatcccaggccgtaacat

SEQ ID NO: 3046769 - DNA, 25 bp, Homo sapien
ggctcctcgagtccacattcaagag

SEQ ID NO: 3046770 - DNA, 25 bp, Homo sapien
gaaatgggcacgtgaaagagctgac

SEQ ID NO: 3046771 - DNA, 25 bp, Homo sapien
taccgatggtcagaatgaaggcagc

SEQ ID NO: 3046772 - DNA, 25 bp, Homo sapien
gacaggcccaggttcgtattactga

SEQ ID NO: 3046773 - DNA, 25 bp, Homo sapien
taataagacacgtgagagaaggacc

SEQ ID NO: 3046774 - DNA, 25 bp, Homo sapien
cacactagtgcgacagaatggaatc

SEQ ID NO: 3046775 - DNA, 25 bp, Homo sapien
cacaggcgctgcacaatgtttgcta

SEQ ID NO: 3046776 - DNA, 25 bp, Homo sapien
tagcagtagccttgtgagctccaag

SEQ ID NO: 3046777 - DNA, 25 bp, Homo sapien
tctaatgcaggaggtgagatcatca

SEQ ID NO: 3046778 - DNA, 25 bp, Homo sapien
tctatatatctcagatggacataaa

SEQ ID NO: 3046779 - DNA, 25 bp, Homo sapien
tcaaatgtggaagacgctggtgcta

SEQ ID NO: 3046780 - DNA, 25 bp, Homo sapien
tatctcagatggacataaaacatgc

SEQ ID NO: 3046781 - DNA, 25 bp, Homo sapien
tgctaacgcttgttctgcagtcagt

SEQ ID NO: 3046782 - DNA, 25 bp, Homo sapien
caaattcacaagcttggcaagtacg

SEQ ID NO: 3046783 - DNA, 25 bp, Homo sapien
tgtagcaagcttgtagccacaggag

SEQ ID NO: 3046784 - DNA, 25 bp, Homo sapien
gcaagtacgcctggtctctgtgata

SEQ ID NO: 3046785 - DNA, 25 bp, Homo sapien
gaaactggcttgcacttcacctggt

SEQ ID NO: 3046786 - DNA, 25 bp, Homo sapien
gctcatggtaaggagagagatgctt

SEQ ID NO: 3046787 - DNA, 25 bp, Homo sapien
gagagatgctttgtaatcacagtca

SEQ ID NO: 3046788 - DNA, 25 bp, Homo sapien
aaggagagagatgctttgtaatcac

SEQ ID NO: 3046789 - DNA, 25 bp, Homo sapien
ctttgtaatcacagtcatcttttcc

SEQ ID NO: 3046790 - DNA, 25 bp, Homo sapien
gaagagtccaatccgtttatacaca

SEQ ID NO: 3046791 - DNA, 25 bp, Homo sapien
aatggtcaaatggtcagaagagtcc

SEQ ID NO: 3046792 - DNA, 25 bp, Homo sapien
taaggtcaataaccatattccaagg

SEQ ID NO: 3046793 - DNA, 25 bp, Homo sapien
cattcagatgggtcgcagagttcca

SEQ ID NO: 3046794 - DNA, 25 bp, Homo sapien
gctccacacgcttggttaccctgta

SEQ ID NO: 3046795 - DNA, 25 bp, Homo sapien
tactttatcgatgtccttcagcaac

SEQ ID NO: 3046796 - DNA, 25 bp, Homo sapien
tgtggcgagtgacatgaagccgatt

SEQ ID NO: 3046797 - DNA, 25 bp, Homo sapien
gaagccgattaggttattccatact

SEQ ID NO: 3046798 - DNA, 25 bp, Homo sapien
tacaacagtgcttggagaatggcag

SEQ ID NO: 3046799 - DNA, 25 bp, Homo sapien
gacatgaccccgatctctctaagtg

SEQ ID NO: 3046800 - DNA, 25 bp, Homo sapien
gggaccaatccacttctcaatgctg

SEQ ID NO: 3046801 - DNA, 25 bp, Homo sapien
tgagtgccaactacgtgcaagacac

SEQ ID NO: 3046802 - DNA, 25 bp, Homo sapien
tattccatgccttgagctgactgaa

SEQ ID NO: 3046803 - DNA, 25 bp, Homo sapien
taaatattccatgccttgagctgac

SEQ ID NO: 3046804 - DNA, 25 bp, Homo sapien
gccttgagctgactgaattacttct

SEQ ID NO: 3046805 - DNA, 25 bp, Homo sapien
gactgaattacttctgtgcaaacag

SEQ ID NO: 3046806 - DNA, 25 bp, Homo sapien
gaaacaatcctccatttctctggaa

SEQ ID NO: 3046807 - DNA, 25 bp, Homo sapien
tacataactgagaaaagtcattgca

SEQ ID NO: 3046808 - DNA, 25 bp, Homo sapien
agaaatgaaatcacatcaccttaca

SEQ ID NO: 3046809 - DNA, 25 bp, Homo sapien
gccaagacaggttctttagcttaaa

SEQ ID NO: 3046810 - DNA, 25 bp, Homo sapien
cccaggcatctctgccattcatatg

SEQ ID NO: 3046811 - DNA, 25 bp, Homo sapien
aggcatctctgccattcatatgcat

SEQ ID NO: 3046812 - DNA, 25 bp, Homo sapien
cattcatatgcatatctctcatttt

SEQ ID NO: 3046813 - DNA, 25 bp, Homo sapien
gcactccccaggcatctctgccatt

SEQ ID NO: 3046814 - DNA, 25 bp, Homo sapien
gcagggcgggcttctcattcagagt

SEQ ID NO: 3046815 - DNA, 25 bp, Homo sapien
tcattcagagtattggaacggtctc

SEQ ID NO: 3046816 - DNA, 25 bp, Homo sapien
cctctcccgtcaggtctttgtactt

SEQ ID NO: 3046817 - DNA, 25 bp, Homo sapien
tacttgtctcggatgacgggcaggg

SEQ ID NO: 3046818 - DNA, 25 bp, Homo sapien
cggcttatttctttatcaccaaggc

SEQ ID NO: 3046819 - DNA, 25 bp, Homo sapien
gagaaggagaagaacggcttatttc

SEQ ID NO: 3046820 - DNA, 25 bp, Homo sapien
gaacggcttatttctttatcaccaa

SEQ ID NO: 3046821 - DNA, 25 bp, Homo sapien
gagaagaacggcttatttctttatc

SEQ ID NO: 3046822 - DNA, 25 bp, Homo sapien
gagaatgacccacctacagggagtg

SEQ ID NO: 3046823 - DNA, 25 bp, Homo sapien
gctaatgtgcctacaagtggctcga

SEQ ID NO: 3046824 - DNA, 25 bp, Homo sapien
gaacaacttaagtaggtccgctgag

SEQ ID NO: 3046825 - DNA, 25 bp, Homo sapien
tatgcaggctagatgcagatccccg

SEQ ID NO: 3046826 - DNA, 25 bp, Homo sapien
ttcttgagaggcaccactggacgct

SEQ ID NO: 3046827 - DNA, 25 bp, Homo sapien
tccgttcagccgtaggcaggtcctg

SEQ ID NO: 3046828 - DNA, 25 bp, Homo sapien
aaggttgccagctcacttttgatca

SEQ ID NO: 3046829 - DNA, 25 bp, Homo sapien
gaatcgtgtctttaaaactggcaag

SEQ ID NO: 3046830 - DNA, 25 bp, Homo sapien
agagagatgtcatggtgatgttttc

SEQ ID NO: 3046831 - DNA, 25 bp, Homo sapien
ggagagagatgtcatggtgatgttt

SEQ ID NO: 3046832 - DNA, 25 bp, Homo sapien
agagatgtcatggtgatgttttcag

SEQ ID NO: 3046833 - DNA, 25 bp, Homo sapien
gagagatgtcatggtgatgttttca

SEQ ID NO: 3046834 - DNA, 25 bp, Homo sapien
tgctactgtagcttccaaaagcagc

SEQ ID NO: 3046835 - DNA, 25 bp, Homo sapien
catagcttgtaagtgtgctcactgc

SEQ ID NO: 3046836 - DNA, 25 bp, Homo sapien
attgctactgtagcttccaaaagca

SEQ ID NO: 3046837 - DNA, 25 bp, Homo sapien
atagcttgtaagtgtgctcactgca

SEQ ID NO: 3046838 - DNA, 25 bp, Homo sapien
ggcaaaatgccctaaactctgtaga

SEQ ID NO: 3046839 - DNA, 25 bp, Homo sapien
actctgtagaagcaaaatgcctagc

SEQ ID NO: 3046840 - DNA, 25 bp, Homo sapien
aaacccacattagccttgagttggc

SEQ ID NO: 3046841 - DNA, 25 bp, Homo sapien
gaccccacaattagaggcaagcaat

SEQ ID NO: 3046842 - DNA, 25 bp, Homo sapien
aaaaccagccgagactgaatttggc

SEQ ID NO: 3046843 - DNA, 25 bp, Homo sapien
tacttggaaggactgtgttatgacc

SEQ ID NO: 3046844 - DNA, 25 bp, Homo sapien
tggaaagacctgagttcaaccttgc

SEQ ID NO: 3046845 - DNA, 25 bp, Homo sapien
tgtctgctcagcataggtgccacca

SEQ ID NO: 3046846 - DNA, 25 bp, Homo sapien
taaagctgttaagtatatgcccagg

SEQ ID NO: 3046847 - DNA, 25 bp, Homo sapien
tgctgcaaaactcctaggctgtgct

SEQ ID NO: 3046848 - DNA, 25 bp, Homo sapien
gaatgttggctgctactacaggaca

SEQ ID NO: 3046849 - DNA, 25 bp, Homo sapien
tcagggatgtcctattacaaaggcc

SEQ ID NO: 3046850 - DNA, 25 bp, Homo sapien
gcttctaaacaggattaaggtccgc

SEQ ID NO: 3046851 - DNA, 25 bp, Homo sapien
tatatgcagcaaggcctcaaagggt

SEQ ID NO: 3046852 - DNA, 25 bp, Homo sapien
caagagttaaaagagacagtatccc

SEQ ID NO: 3046853 - DNA, 25 bp, Homo sapien
taaggtccgcagatagcaatctacc

SEQ ID NO: 3046854 - DNA, 25 bp, Homo sapien
gcagcagtcgagttttgtccaccct

SEQ ID NO: 3046855 - DNA, 25 bp, Homo sapien
gaggatgctggccactaactgttgg

SEQ ID NO: 3046856 - DNA, 25 bp, Homo sapien
gacatcgtacttggtagacgcagca

SEQ ID NO: 3046857 - DNA, 25 bp, Homo sapien
tagtccagacccttccagagaaagt

SEQ ID NO: 3046858 - DNA, 25 bp, Homo sapien
ctgtcatagtagcagcagaacctgt

SEQ ID NO: 3046859 - DNA, 25 bp, Homo sapien
tatctaggtctgctaagttcagagg

SEQ ID NO: 3046860 - DNA, 25 bp, Homo sapien
gacaatggtttctcgctgctgcaat

SEQ ID NO: 3046861 - DNA, 25 bp, Homo sapien
caggtgctagaccagaatattcccc

SEQ ID NO: 3046862 - DNA, 25 bp, Homo sapien
tggaaataatttatccttttgagga

SEQ ID NO: 3046863 - DNA, 25 bp, Homo sapien
taatttatccttttgaggactcaaa

SEQ ID NO: 3046864 - DNA, 25 bp, Homo sapien
aataatttatccttttgaggactca

SEQ ID NO: 3046865 - DNA, 25 bp, Homo sapien
aatggaaataatttatccttttgag

SEQ ID NO: 3046866 - DNA, 25 bp, Homo sapien
gtttattctctgctgtctgttcaag

SEQ ID NO: 3046867 - DNA, 25 bp, Homo sapien
aggtttattctctgctgtctgttca

SEQ ID NO: 3046868 - DNA, 25 bp, Homo sapien
tttattctctgctgtctgttcaagt

SEQ ID NO: 3046869 - DNA, 25 bp, Homo sapien
ggtttattctctgctgtctgttcaa

SEQ ID NO: 3046870 - DNA, 25 bp, Homo sapien
ggacagaagctcagttaaggttagg

SEQ ID NO: 3046871 - DNA, 25 bp, Homo sapien
aggaagtgaggcagattggtttaac

SEQ ID NO: 3046872 - DNA, 25 bp, Homo sapien
actattaacatgtggtatacaggca

SEQ ID NO: 3046873 - DNA, 25 bp, Homo sapien
tacatatttagcacagaagaccacc

SEQ ID NO: 3046874 - DNA, 25 bp, Homo sapien
gctgcaattcctttaaacacagcat

SEQ ID NO: 3046875 - DNA, 25 bp, Homo sapien
agtattttcagaggacttgtcagct

SEQ ID NO: 3046876 - DNA, 25 bp, Homo sapien
cattgaaggcaatgctttagttcca

SEQ ID NO: 3046877 - DNA, 25 bp, Homo sapien
tggaacagtattttcagaggacttg

SEQ ID NO: 3046878 - DNA, 25 bp, Homo sapien
tataggaacacgaagtcatcactgc

SEQ ID NO: 3046879 - DNA, 25 bp, Homo sapien
agggaaacagtcaggtaaaccagca

SEQ ID NO: 3046880 - DNA, 25 bp, Homo sapien
cagacattcatcaggtactacagca

SEQ ID NO: 3046881 - DNA, 25 bp, Homo sapien
tcagatacttacagcctagaaaggg

SEQ ID NO: 3046882 - DNA, 25 bp, Homo sapien
ctgtttccatgctgggagttacttg

SEQ ID NO: 3046883 - DNA, 25 bp, Homo sapien
gctgggagttacttgtttttgaaga

SEQ ID NO: 3046884 - DNA, 25 bp, Homo sapien
aatcactgaatgagtcatcaaggga

SEQ ID NO: 3046885 - DNA, 25 bp, Homo sapien
gagtcatcaagggatcctgacttag

SEQ ID NO: 3046886 - DNA, 25 bp, Homo sapien
tggagcccgcaggacctgaaggtat

SEQ ID NO: 3046887 - DNA, 25 bp, Homo sapien
gcagggtaggttggtatgaaaccac

SEQ ID NO: 3046888 - DNA, 25 bp, Homo sapien
tccacccactggtccaacaaggtta

SEQ ID NO: 3046889 - DNA, 25 bp, Homo sapien
taatgcccatgactggctgtccaag

SEQ ID NO: 3046890 - DNA, 25 bp, Homo sapien
cggtgtaggcagagtcatagaaaag

SEQ ID NO: 3046891 - DNA, 25 bp, Homo sapien
ctgctgggaactggtttaaagcatc

SEQ ID NO: 3046892 - DNA, 25 bp, Homo sapien
tttaaagcatcaggactcattgcag

SEQ ID NO: 3046893 - DNA, 25 bp, Homo sapien
cacttaaagttggaataggagctgc

SEQ ID NO: 3046894 - DNA, 25 bp, Homo sapien
tgtaagtttgccaggtgtagttcga

SEQ ID NO: 3046895 - DNA, 25 bp, Homo sapien
ggcagtatctattccagttggagtc

SEQ ID NO: 3046896 - DNA, 25 bp, Homo sapien
tgtgttaccgctatcatggctagaa

SEQ ID NO: 3046897 - DNA, 25 bp, Homo sapien
agctaaggcccatatctgtccaaga

SEQ ID NO: 3046898 - DNA, 25 bp, Homo sapien
actctcattgtaaatccaaggaggc

SEQ ID NO: 3046899 - DNA, 25 bp, Homo sapien
aactctcattgtaaatccaaggagg

SEQ ID NO: 3046900 - DNA, 25 bp, Homo sapien
tctcattgtaaatccaaggaggcat

SEQ ID NO: 3046901 - DNA, 25 bp, Homo sapien
ctctcattgtaaatccaaggaggca

SEQ ID NO: 3046902 - DNA, 25 bp, Homo sapien
agcaggatcctgtgagggaaatact

SEQ ID NO: 3046903 - DNA, 25 bp, Homo sapien
gatcctgtgagggaaatactcccac

SEQ ID NO: 3046904 - DNA, 25 bp, Homo sapien
caggatcctgtgagggaaatactcc

SEQ ID NO: 3046905 - DNA, 25 bp, Homo sapien
tcctgtgagggaaatactcccacac

SEQ ID NO: 3046906 - DNA, 25 bp, Homo sapien
ttaatgtatatagtggtccatggag

SEQ ID NO: 3046907 - DNA, 25 bp, Homo sapien
tacagcaaccccgttactggccatt

SEQ ID NO: 3046908 - DNA, 25 bp, Homo sapien
ggccattaaactgggatacttctta

SEQ ID NO: 3046909 - DNA, 25 bp, Homo sapien
gcccagatgtacttatatcacaaga

SEQ ID NO: 3046910 - DNA, 25 bp, Homo sapien
tatcacaagatactaggaacttctc

SEQ ID NO: 3046911 - DNA, 25 bp, Homo sapien
tctgtgtatgcaactggccaagtgg

SEQ ID NO: 3046912 - DNA, 25 bp, Homo sapien
ccagggacgccatgtaaggcaaaag

SEQ ID NO: 3046913 - DNA, 25 bp, Homo sapien
ctgggacgtggaagaaggcccacat

SEQ ID NO: 3046914 - DNA, 25 bp, Homo sapien
cactggactctgacttggagggaga

SEQ ID NO: 3046915 - DNA, 25 bp, Homo sapien
aatgcaataaaacctggatgcactg

SEQ ID NO: 3046916 - DNA, 25 bp, Homo sapien
aaatggagaccctgcatacttcttt

SEQ ID NO: 3046917 - DNA, 25 bp, Homo sapien
ctattgtcacaataagcagtctttt

SEQ ID NO: 3046918 - DNA, 25 bp, Homo sapien
taaagtctattgtcacaataagcag

SEQ ID NO: 3046919 - DNA, 25 bp, Homo sapien
tcttgactagcttattcaccttata

SEQ ID NO: 3046920 - DNA, 25 bp, Homo sapien
gtgactgagattatagggacgtgcc

SEQ ID NO: 3046921 - DNA, 25 bp, Homo sapien
tcctttctaatctcagcctgattgc

SEQ ID NO: 3046922 - DNA, 25 bp, Homo sapien
ttcctaacctccagcctaggtctag

SEQ ID NO: 3046923 - DNA, 25 bp, Homo sapien
gactcatttcaactgctaaatgttc

SEQ ID NO: 3046924 - DNA, 25 bp, Homo sapien
ctgctctaaaacagggacgtttctt

SEQ ID NO: 3046925 - DNA, 25 bp, Homo sapien
ttatgcaaatacaagactcatttca

SEQ ID NO: 3046926 - DNA, 25 bp, Homo sapien
cctgctctaaaacagggacgtttct

SEQ ID NO: 3046927 - DNA, 25 bp, Homo sapien
tccaaatctgtacttagcttgaagg

SEQ ID NO: 3046928 - DNA, 25 bp, Homo sapien
ggactacataaatcaccttcccaga

SEQ ID NO: 3046929 - DNA, 25 bp, Homo sapien
cttgaaggaagagttctacattgac

SEQ ID NO: 3046930 - DNA, 25 bp, Homo sapien
cacacacatataatggcgaggtaaa

SEQ ID NO: 3046931 - DNA, 25 bp, Homo sapien
ctggagtagggtgcatttttgcatc

SEQ ID NO: 3046932 - DNA, 25 bp, Homo sapien
atttttgcatctctggaaaacccat

SEQ ID NO: 3046933 - DNA, 25 bp, Homo sapien
gggtgcgatgctggagtagggtgca

SEQ ID NO: 3046934 - DNA, 25 bp, Homo sapien
cgatgctggagtagggtgcattttt

SEQ ID NO: 3046935 - DNA, 25 bp, Homo sapien
tgctcttcaaactggcgtctttttc

SEQ ID NO: 3046936 - DNA, 25 bp, Homo sapien
gggtttcacactgctcaaaagtctg

SEQ ID NO: 3046937 - DNA, 25 bp, Homo sapien
cactgctcaaaagtctgagcttttg

SEQ ID NO: 3046938 - DNA, 25 bp, Homo sapien
gctcttcaaactggcgtctttttct

SEQ ID NO: 3046939 - DNA, 25 bp, Homo sapien
tgtgggcctggaggacgcatgccca

SEQ ID NO: 3046940 - DNA, 25 bp, Homo sapien
catgtctggagtgtactgtgggcct

SEQ ID NO: 3046941 - DNA, 25 bp, Homo sapien
gtgcttgtcctaggtaaggcattcc

SEQ ID NO: 3046942 - DNA, 25 bp, Homo sapien
tgcttctgcatgtctggagtgtact

SEQ ID NO: 3046943 - DNA, 25 bp, Homo sapien
ttcccataatgccttgcatattagg

SEQ ID NO: 3046944 - DNA, 25 bp, Homo sapien
gagagctgtaattcattcccataat

SEQ ID NO: 3046945 - DNA, 25 bp, Homo sapien
gacagagaccataggaaatccttgt

SEQ ID NO: 3046946 - DNA, 25 bp, Homo sapien
ccttgcatattaggctgcatgacag

SEQ ID NO: 3046947 - DNA, 25 bp, Homo sapien
gctaactgctataagcgaggtccaa

SEQ ID NO: 3046948 - DNA, 25 bp, Homo sapien
gaattgcccaacatcagtacactga

SEQ ID NO: 3046949 - DNA, 25 bp, Homo sapien
tgctactgcagacggaaacttgttg

SEQ ID NO: 3046950 - DNA, 25 bp, Homo sapien
taaaagacttgtagatgggacctgg

SEQ ID NO: 3046951 - DNA, 25 bp, Homo sapien
cagaaccagctcctggccgcagcgc

SEQ ID NO: 3046952 - DNA, 25 bp, Homo sapien
gccaccttatcagcagctgtcagct

SEQ ID NO: 3046953 - DNA, 25 bp, Homo sapien
agctgtcagctgaacacagccactt

SEQ ID NO: 3046954 - DNA, 25 bp, Homo sapien
agccacttccgggtcaaacaccagg

SEQ ID NO: 3046955 - DNA, 25 bp, Homo sapien
tcgccgccgccaccttatcagcagc

SEQ ID NO: 3046956 - DNA, 25 bp, Homo sapien
gaagggccctttgatagtctcgcag

SEQ ID NO: 3046957 - DNA, 25 bp, Homo sapien
tctttctctggaactcggtagcttc

SEQ ID NO: 3046958 - DNA, 25 bp, Homo sapien
gcaggcaagtgcaaaacagtggttt

SEQ ID NO: 3046959 - DNA, 25 bp, Homo sapien
tgttggcacctatcacagacgctga

SEQ ID NO: 3046960 - DNA, 25 bp, Homo sapien
caaaccactggtcaggaactgtaca

SEQ ID NO: 3046961 - DNA, 25 bp, Homo sapien
caggattcaactcaggatgtcggcc

SEQ ID NO: 3046962 - DNA, 25 bp, Homo sapien
cagacagcagatacaatggtgggat

SEQ ID NO: 3046963 - DNA, 25 bp, Homo sapien
gatcctgaccttttgtatgcctagc

SEQ ID NO: 3046964 - DNA, 25 bp, Homo sapien
tgtgtttattttcaagacagtcttg

SEQ ID NO: 3046965 - DNA, 25 bp, Homo sapien
tacataatatatataatgtgtgtgt

SEQ ID NO: 3046966 - DNA, 25 bp, Homo sapien
tattttcaagacagtcttgccctgt

SEQ ID NO: 3046967 - DNA, 25 bp, Homo sapien
gtgtgtgtttattttcaagacagtc

SEQ ID NO: 3046968 - DNA, 25 bp, Homo sapien
taggcaccagtcttacgtatatgaa

SEQ ID NO: 3046969 - DNA, 25 bp, Homo sapien
cagtgctaggtactcacaattggag

SEQ ID NO: 3046970 - DNA, 25 bp, Homo sapien
tgaggcaccatcaacctaaggaaag

SEQ ID NO: 3046971 - DNA, 25 bp, Homo sapien
gcaaatgggttgcaccagtatacct

SEQ ID NO: 3046972 - DNA, 25 bp, Homo sapien
accagtcccatgtacttgtagttga

SEQ ID NO: 3046973 - DNA, 25 bp, Homo sapien
ttaggatcatttatcaccagtccca

SEQ ID NO: 3046974 - DNA, 25 bp, Homo sapien
tacaggtgactgtaagacttcaagt

SEQ ID NO: 3046975 - DNA, 25 bp, Homo sapien
taacattcatgctgggatcataaaa

SEQ ID NO: 3046976 - DNA, 25 bp, Homo sapien
tgctgttctgaccagtgaccttttt

SEQ ID NO: 3046977 - DNA, 25 bp, Homo sapien
ttaacttttgtcttcaagagctact

SEQ ID NO: 3046978 - DNA, 25 bp, Homo sapien
ttgctgttctgaccagtgacctttt

SEQ ID NO: 3046979 - DNA, 25 bp, Homo sapien
cttgctgttctgaccagtgaccttt

SEQ ID NO: 3046980 - DNA, 25 bp, Homo sapien
tcacctaagtgaggcagaaccatca

SEQ ID NO: 3046981 - DNA, 25 bp, Homo sapien
cacaaagatgcattagacatggtct

SEQ ID NO: 3046982 - DNA, 25 bp, Homo sapien
aatcacaatcacctaagtgaggcag

SEQ ID NO: 3046983 - DNA, 25 bp, Homo sapien
caaataatgaggcactaggaacaca

SEQ ID NO: 3046984 - DNA, 25 bp, Homo sapien
acaaggttcgctaccaatccactgg

SEQ ID NO: 3046985 - DNA, 25 bp, Homo sapien
gaccaaagtggccaagcataacaag

SEQ ID NO: 3046986 - DNA, 25 bp, Homo sapien
gctgctcagtgcctgaaaggactgc

SEQ ID NO: 3046987 - DNA, 25 bp, Homo sapien
caacagttctgatgtgacccactcc

SEQ ID NO: 3046988 - DNA, 25 bp, Homo sapien
cttggtaaatgcctactggttgatg

SEQ ID NO: 3046989 - DNA, 25 bp, Homo sapien
tctgtcatgtacacgaatcttcttt

SEQ ID NO: 3046990 - DNA, 25 bp, Homo sapien
gtaccttgcagaacaacttggtaaa

SEQ ID NO: 3046991 - DNA, 25 bp, Homo sapien
gaaccgacttttattcctcatagac

SEQ ID NO: 3046992 - DNA, 25 bp, Homo sapien
ggatgatgaagcagtagaatggctt

SEQ ID NO: 3046993 - DNA, 25 bp, Homo sapien
ggtgggcagtataattcgaatttat

SEQ ID NO: 3046994 - DNA, 25 bp, Homo sapien
gatcatcaacatattggtacagaaa

SEQ ID NO: 3046995 - DNA, 25 bp, Homo sapien
tataacgttttataacagactgtag

SEQ ID NO: 3046996 - DNA, 25 bp, Homo sapien
tttggagttgtactaatgctctccc

SEQ ID NO: 3046997 - DNA, 25 bp, Homo sapien
tggagttgtactaatgctctccctt

SEQ ID NO: 3046998 - DNA, 25 bp, Homo sapien
aacattttggagttgtactaatgct

SEQ ID NO: 3046999 - DNA, 25 bp, Homo sapien
cattttggagttgtactaatgctct

SEQ ID NO: 3047000 - DNA, 25 bp, Homo sapien
aattaagtgcaacttcaattagaag

SEQ ID NO: 3047001 - DNA, 25 bp, Homo sapien
attaagtgcaacttcaattagaaga

SEQ ID NO: 3047002 - DNA, 25 bp, Homo sapien
ttaagtgcaacttcaattagaagag

SEQ ID NO: 3047003 - DNA, 25 bp, Homo sapien
taagtgcaacttcaattagaagagt

SEQ ID NO: 3047004 - DNA, 25 bp, Homo sapien
cttttatgtattctggtacaggaca

SEQ ID NO: 3047005 - DNA, 25 bp, Homo sapien
ttatgtattctggtacaggacaccc

SEQ ID NO: 3047006 - DNA, 25 bp, Homo sapien
tgtattctggtacaggacacccagc

SEQ ID NO: 3047007 - DNA, 25 bp, Homo sapien
tattctggtacaggacacccagcct

SEQ ID NO: 3047008 - DNA, 25 bp, Homo sapien
taatggcttatcatcctcagtgaaa

SEQ ID NO: 3047009 - DNA, 25 bp, Homo sapien
tatcatcctcagtgaaaaatgtaat

SEQ ID NO: 3047010 - DNA, 25 bp, Homo sapien
tcccttattccctgctcttccagtt

SEQ ID NO: 3047011 - DNA, 25 bp, Homo sapien
ggcttatcatcctcagtgaaaaatg

SEQ ID NO: 3047012 - DNA, 25 bp, Homo sapien
tgagcatatgtgcagggaatagcag

SEQ ID NO: 3047013 - DNA, 25 bp, Homo sapien
tagcaggggtcctaagacagatcag

SEQ ID NO: 3047014 - DNA, 25 bp, Homo sapien
ctaagaagtgagcatatgtgcaggg

SEQ ID NO: 3047015 - DNA, 25 bp, Homo sapien
ggaatagcaggggtcctaagacaga

SEQ ID NO: 3047016 - DNA, 25 bp, Homo sapien
tgctagcaaggctgtacaaatcaga

SEQ ID NO: 3047017 - DNA, 25 bp, Homo sapien
cactgagctagttggaaagtcatag

SEQ ID NO: 3047018 - DNA, 25 bp, Homo sapien
ggatatattccactgagctagttgg

SEQ ID NO: 3047019 - DNA, 25 bp, Homo sapien
taaaatcaatccctcttgctagcaa

SEQ ID NO: 3047020 - DNA, 25 bp, Homo sapien
ggtacttcataaatttaatgtcaat

SEQ ID NO: 3047021 - DNA, 25 bp, Homo sapien
tctgcatgaataacatccacattaa

SEQ ID NO: 3047022 - DNA, 25 bp, Homo sapien
ccacattaataccttcatatatgag

SEQ ID NO: 3047023 - DNA, 25 bp, Homo sapien
ccttcatatatgagctcatgaaaaa

SEQ ID NO: 3047024 - DNA, 25 bp, Homo sapien
tctctctgcatgaataacatccaca

SEQ ID NO: 3047025 - DNA, 25 bp, Homo sapien
caaaaacaagaacaggtggattgaa

SEQ ID NO: 3047026 - DNA, 25 bp, Homo sapien
ccggtctcagatccaacaaagagaa

SEQ ID NO: 3047027 - DNA, 25 bp, Homo sapien
catggccagaagttttccggtctca

SEQ ID NO: 3047028 - DNA, 25 bp, Homo sapien
tctctcatggccagaagttttccgg

SEQ ID NO: 3047029 - DNA, 25 bp, Homo sapien
gaagttttccggtctcagatccaac

SEQ ID NO: 3047030 - DNA, 25 bp, Homo sapien
gaaaatggaagccagctggtctctg

SEQ ID NO: 3047031 - DNA, 25 bp, Homo sapien
gttgcactgaacatagctcttcgga

SEQ ID NO: 3047032 - DNA, 25 bp, Homo sapien
gattcgtctactacaagccactcaa

SEQ ID NO: 3047033 - DNA, 25 bp, Homo sapien
acattgtccaggttgagtttgcacc

SEQ ID NO: 3047034 - DNA, 25 bp, Homo sapien
tagattagtcgatttggagtagtca

SEQ ID NO: 3047035 - DNA, 25 bp, Homo sapien
cgatttggagtagtcacaagaatat

SEQ ID NO: 3047036 - DNA, 25 bp, Homo sapien
cttgctaggtcgattccggggggat

SEQ ID NO: 3047037 - DNA, 25 bp, Homo sapien
taataaatagattagtcgatttgga

SEQ ID NO: 3047038 - DNA, 25 bp, Homo sapien
ttagatgatttaggtccaaatttct

SEQ ID NO: 3047039 - DNA, 25 bp, Homo sapien
ggcaagttctcgtgttggtgatata

SEQ ID NO: 3047040 - DNA, 25 bp, Homo sapien
ggaatgctaaaagctaatgtttttc

SEQ ID NO: 3047041 - DNA, 25 bp, Homo sapien
tttatttgcgggttgtttcagctgc

SEQ ID NO: 3047042 - DNA, 25 bp, Homo sapien
ggagcagaagccagaagttcccgac

SEQ ID NO: 3047043 - DNA, 25 bp, Homo sapien
gaactgaaggccatctcggttacat

SEQ ID NO: 3047044 - DNA, 25 bp, Homo sapien
caagacaacttttatggaggcacag

SEQ ID NO: 3047045 - DNA, 25 bp, Homo sapien
tagaaatcagaatagcagttgcctc

SEQ ID NO: 3047046 - DNA, 25 bp, Homo sapien
gtatttctggagtagttcctgggca

SEQ ID NO: 3047047 - DNA, 25 bp, Homo sapien
tggaaacctgcatctagaatgttct

SEQ ID NO: 3047048 - DNA, 25 bp, Homo sapien
gaagatcggttccttggacgtgaat

SEQ ID NO: 3047049 - DNA, 25 bp, Homo sapien
ctggtcaagttgctgaaatgtagca

SEQ ID NO: 3047050 - DNA, 25 bp, Homo sapien
tggattggcgtaggcatttggaaac

SEQ ID NO: 3047051 - DNA, 25 bp, Homo sapien
tcaatctttgcttctacagatgaca

SEQ ID NO: 3047052 - DNA, 25 bp, Homo sapien
tgtcttcaatctttgcttctacaga

SEQ ID NO: 3047053 - DNA, 25 bp, Homo sapien
ttttgtcttcaatctttgcttctac

SEQ ID NO: 3047054 - DNA, 25 bp, Homo sapien
cggaagttagtttactttctctctg

SEQ ID NO: 3047055 - DNA, 25 bp, Homo sapien
atagtagcaccttcttcttgggaag

SEQ ID NO: 3047056 - DNA, 25 bp, Homo sapien
tatagtagcaccttcttcttgggaa

SEQ ID NO: 3047057 - DNA, 25 bp, Homo sapien
aatggatgtacagttcatcattcac

SEQ ID NO: 3047058 - DNA, 25 bp, Homo sapien
tttattactaggtagtattccattg

SEQ ID NO: 3047059 - DNA, 25 bp, Homo sapien
attccattgtaatggatgtacagtt

SEQ ID NO: 3047060 - DNA, 25 bp, Homo sapien
tgtaatggatgtacagttcatcatt

SEQ ID NO: 3047061 - DNA, 25 bp, Homo sapien
tccaagtggaatagctgggtaatat

SEQ ID NO: 3047062 - DNA, 25 bp, Homo sapien
gtttctgtacatccttgcccatact

SEQ ID NO: 3047063 - DNA, 25 bp, Homo sapien
tattccaagtggaatagctgggtaa

SEQ ID NO: 3047064 - DNA, 25 bp, Homo sapien
caagtggaatagctgggtaatatgg

SEQ ID NO: 3047065 - DNA, 25 bp, Homo sapien
ttaatttgcctgatggctactgatg

SEQ ID NO: 3047066 - DNA, 25 bp, Homo sapien
ttagtttcgataagtccaatatatc

SEQ ID NO: 3047067 - DNA, 25 bp, Homo sapien
tgttgttgtgctaaggaactttgac

SEQ ID NO: 3047068 - DNA, 25 bp, Homo sapien
tctttagtgagtagatacaagtcct

SEQ ID NO: 3047069 - DNA, 25 bp, Homo sapien
ggtcaggagatcgagaccatactgg

SEQ ID NO: 3047070 - DNA, 25 bp, Homo sapien
tggctaacatggtgaaaccctgtct

SEQ ID NO: 3047071 - DNA, 25 bp, Homo sapien
actggctaacatggtgaaaccctgt

SEQ ID NO: 3047072 - DNA, 25 bp, Homo sapien
ggagcccaaggtgggtgaatcacga

SEQ ID NO: 3047073 - DNA, 25 bp, Homo sapien
tgtagccataagcctgtattatttt

SEQ ID NO: 3047074 - DNA, 25 bp, Homo sapien
gacttgtagccataagcctgtatta

SEQ ID NO: 3047075 - DNA, 25 bp, Homo sapien
cttgtagccataagcctgtattatt

SEQ ID NO: 3047076 - DNA, 25 bp, Homo sapien
acttgtagccataagcctgtattat

SEQ ID NO: 3047077 - DNA, 25 bp, Homo sapien
tccctcttcctttcagttaggctct

SEQ ID NO: 3047078 - DNA, 25 bp, Homo sapien
gatgtgtttgtgatgctccacacac

SEQ ID NO: 3047079 - DNA, 25 bp, Homo sapien
cctcttcctttcagttaggctctct

SEQ ID NO: 3047080 - DNA, 25 bp, Homo sapien
tctgatgtgtttgtgatgctccaca

SEQ ID NO: 3047081 - DNA, 25 bp, Homo sapien
acctccgaagaatcaaagtcatatt

SEQ ID NO: 3047082 - DNA, 25 bp, Homo sapien
cacctccgaagaatcaaagtcatat

SEQ ID NO: 3047083 - DNA, 25 bp, Homo sapien
gcacctccgaagaatcaaagtcata

SEQ ID NO: 3047084 - DNA, 25 bp, Homo sapien
aagaagaaacacatgtcacacgcat

SEQ ID NO: 3047085 - DNA, 25 bp, Homo sapien
aagaaacacatgtcacacgcatata

SEQ ID NO: 3047086 - DNA, 25 bp, Homo sapien
gaaacacatgtcacacgcatataca

SEQ ID NO: 3047087 - DNA, 25 bp, Homo sapien
gaagaaacacatgtcacacgcatat

SEQ ID NO: 3047088 - DNA, 25 bp, Homo sapien
cgccgagccggcgaaagagatcgtg

SEQ ID NO: 3047089 - DNA, 25 bp, Homo sapien
aagcgtctcgtgtcgaatttggccc

SEQ ID NO: 3047090 - DNA, 25 bp, Homo sapien
cggcgaaagagatcgtggacgtcca

SEQ ID NO: 3047091 - DNA, 25 bp, Homo sapien
ctggaatcgagctgcgtctgccgag

SEQ ID NO: 3047092 - DNA, 25 bp, Homo sapien
cagaaagcgccacagttctacggcg

SEQ ID NO: 3047093 - DNA, 25 bp, Homo sapien
cccagaaagcgccacagttctacgg

SEQ ID NO: 3047094 - DNA, 25 bp, Homo sapien
ctttacccagaaagcgccacagttc

SEQ ID NO: 3047095 - DNA, 25 bp, Homo sapien
aagcgccacagttctacggcgcctg

SEQ ID NO: 3047096 - DNA, 25 bp, Homo sapien
cagctgactcattaaaggaccattt

SEQ ID NO: 3047097 - DNA, 25 bp, Homo sapien
ccagctgactcattaaaggaccatt

SEQ ID NO: 3047098 - DNA, 25 bp, Homo sapien
tccagctgactcattaaaggaccat

SEQ ID NO: 3047099 - DNA, 25 bp, Homo sapien
tgtccagctgactcattaaaggacc

SEQ ID NO: 3047100 - DNA, 25 bp, Homo sapien
tcagcctatgggctcatcagaggaa

SEQ ID NO: 3047101 - DNA, 25 bp, Homo sapien
ctacccgaatgcctgagcatgtttc

SEQ ID NO: 3047102 - DNA, 25 bp, Homo sapien
acccgaatgcctgagcatgtttctt

SEQ ID NO: 3047103 - DNA, 25 bp, Homo sapien
tacccgaatgcctgagcatgtttct

SEQ ID NO: 3047104 - DNA, 25 bp, Homo sapien
aaatcaatagacatcctccacccca

SEQ ID NO: 3047105 - DNA, 25 bp, Homo sapien
ctggttgtgacccagtccctcttac

SEQ ID NO: 3047106 - DNA, 25 bp, Homo sapien
ggttgtgacccagtccctcttactc

SEQ ID NO: 3047107 - DNA, 25 bp, Homo sapien
tggttgtgacccagtccctcttact

SEQ ID NO: 3047108 - DNA, 25 bp, Homo sapien
tccctcttactccctgaggagttcc

SEQ ID NO: 3047109 - DNA, 25 bp, Homo sapien
cattggtcttggtacattccagagt

SEQ ID NO: 3047110 - DNA, 25 bp, Homo sapien
gaggtgataacttgccaactaacag

SEQ ID NO: 3047111 - DNA, 25 bp, Homo sapien
tgtatcctcctctcaacaatgggaa

SEQ ID NO: 3047112 - DNA, 25 bp, Homo sapien
caactaacagcatgtggagcctttt

SEQ ID NO: 3047113 - DNA, 25 bp, Homo sapien
tggtcacacactccttcagtcagac

SEQ ID NO: 3047114 - DNA, 25 bp, Homo sapien
ctgttctggatttggcctatgctgc

SEQ ID NO: 3047115 - DNA, 25 bp, Homo sapien
gatttggcctatgctgccctggtca

SEQ ID NO: 3047116 - DNA, 25 bp, Homo sapien
tgccctggtcacacactccttcagt

SEQ ID NO: 3047117 - DNA, 25 bp, Homo sapien
tggcaactgacaatcctgacaaagg

SEQ ID NO: 3047118 - DNA, 25 bp, Homo sapien
gattgttcctaagaaacttggcatg

SEQ ID NO: 3047119 - DNA, 25 bp, Homo sapien
cgtgcccggccctattggattgttc

SEQ ID NO: 3047120 - DNA, 25 bp, Homo sapien
tgcccttaaaggaaaattcagctga

SEQ ID NO: 3047121 - DNA, 25 bp, Homo sapien
cactcaaaatgacgctgccacattg

SEQ ID NO: 3047122 - DNA, 25 bp, Homo sapien
cacattgtgtaaccaggaacgtggg

SEQ ID NO: 3047123 - DNA, 25 bp, Homo sapien
ctgctaattctattgagagtgagga

SEQ ID NO: 3047124 - DNA, 25 bp, Homo sapien
aggcctccaggagagtcattgaaaa

SEQ ID NO: 3047125 - DNA, 25 bp, Homo sapien
ttcctgccttgtaaactgctgccca

SEQ ID NO: 3047126 - DNA, 25 bp, Homo sapien
ggtgtttcttatgaatggttgtgcc

SEQ ID NO: 3047127 - DNA, 25 bp, Homo sapien
tgtgcccagtgaagcaatttcctgc

SEQ ID NO: 3047128 - DNA, 25 bp, Homo sapien
tgccaggatcccgggtctccttttc

SEQ ID NO: 3047129 - DNA, 25 bp, Homo sapien
gaatcttgggcaagaggtgacgtcc

SEQ ID NO: 3047130 - DNA, 25 bp, Homo sapien
agaggtgacgtccacaagagcccat

SEQ ID NO: 3047131 - DNA, 25 bp, Homo sapien
atttgtggtaaagtccctgctggtg

SEQ ID NO: 3047132 - DNA, 25 bp, Homo sapien
tggactatttgtattccttagcatc

SEQ ID NO: 3047133 - DNA, 25 bp, Homo sapien
aagaaaagggtgctagctcctgctc

SEQ ID NO: 3047134 - DNA, 25 bp, Homo sapien
gaggctaaacaatttacccgcagag

SEQ ID NO: 3047135 - DNA, 25 bp, Homo sapien
gactctatgactttacccctgtgag

SEQ ID NO: 3047136 - DNA, 25 bp, Homo sapien
gattccctctgagcgacttgtggag

SEQ ID NO: 3047137 - DNA, 25 bp, Homo sapien
tggcccacaggaagctggcatgtta

SEQ ID NO: 3047138 - DNA, 25 bp, Homo sapien
tagtcagtccaaggtatgctgtccc

SEQ ID NO: 3047139 - DNA, 25 bp, Homo sapien
ggatcacaacatagacagtacggct

SEQ ID NO: 3047140 - DNA, 25 bp, Homo sapien
tcttagggagtgcacggctgagctc

SEQ ID NO: 3047141 - DNA, 25 bp, Homo sapien
acaggagtccttgacatcgtgggag

SEQ ID NO: 3047142 - DNA, 25 bp, Homo sapien
ggagtccttgacatcgtgggagagg

SEQ ID NO: 3047143 - DNA, 25 bp, Homo sapien
gtccttgacatcgtgggagaggcat

SEQ ID NO: 3047144 - DNA, 25 bp, Homo sapien
caggagtccttgacatcgtgggaga

SEQ ID NO: 3047145 - DNA, 25 bp, Homo sapien
gaaactgggcttcgggctgcgcctc

SEQ ID NO: 3047146 - DNA, 25 bp, Homo sapien
cgggctgcgcctcctgagagtggat

SEQ ID NO: 3047147 - DNA, 25 bp, Homo sapien
agaagggaaactgggcttcgggctg

SEQ ID NO: 3047148 - DNA, 25 bp, Homo sapien
gctgcgcctcctgagagtggattgt

SEQ ID NO: 3047149 - DNA, 25 bp, Homo sapien
aggtaagcagggacctctcgcaggt

SEQ ID NO: 3047150 - DNA, 25 bp, Homo sapien
gacctctcgcaggtgccggtcaggt

SEQ ID NO: 3047151 - DNA, 25 bp, Homo sapien
agcaggacgtccgtcaggtaagcag

SEQ ID NO: 3047152 - DNA, 25 bp, Homo sapien
cttgttgttgcgcacgaagtaagtg

SEQ ID NO: 3047153 - DNA, 25 bp, Homo sapien
caacttgttggaagaacgtttcctg

SEQ ID NO: 3047154 - DNA, 25 bp, Homo sapien
tgttggaagaacgtttcctgagtgg

SEQ ID NO: 3047155 - DNA, 25 bp, Homo sapien
gtggaatatggcaagtgaacttatt

SEQ ID NO: 3047156 - DNA, 25 bp, Homo sapien
ctgagtggaatatggcaagtgaact

SEQ ID NO: 3047157 - DNA, 25 bp, Homo sapien
tcatcctcatcatcgcagaaatgag

SEQ ID NO: 3047158 - DNA, 25 bp, Homo sapien
gagtctattgccagactcctgaaat

SEQ ID NO: 3047159 - DNA, 25 bp, Homo sapien
tcatcgcagaaatgagtctattgcc

SEQ ID NO: 3047160 - DNA, 25 bp, Homo sapien
tgagtgtaataatcatcctcatcat

SEQ ID NO: 3047161 - DNA, 25 bp, Homo sapien
gacttgtttcaacaagcaaccatca

SEQ ID NO: 3047162 - DNA, 25 bp, Homo sapien
gtttcaacaagcaaccatcaaagtc

SEQ ID NO: 3047163 - DNA, 25 bp, Homo sapien
tcagacgacttgtttcaacaagcaa

SEQ ID NO: 3047164 - DNA, 25 bp, Homo sapien
gacgacttgtttcaacaagcaacca

SEQ ID NO: 3047165 - DNA, 25 bp, Homo sapien
ccattgcagatggaaaccgggaggt

SEQ ID NO: 3047166 - DNA, 25 bp, Homo sapien
tatctgtgaccaccattgcagatgg

SEQ ID NO: 3047167 - DNA, 25 bp, Homo sapien
cttgaagacatgttggtgagtgtac

SEQ ID NO: 3047168 - DNA, 25 bp, Homo sapien
ctgatgctgctggtatctgtgacca

SEQ ID NO: 3047169 - DNA, 25 bp, Homo sapien
cacagctgccatgaagggctgctgg

SEQ ID NO: 3047170 - DNA, 25 bp, Homo sapien
caggctgccggccacactgttgatg

SEQ ID NO: 3047171 - DNA, 25 bp, Homo sapien
cactgttgatgacagggacactctg

SEQ ID NO: 3047172 - DNA, 25 bp, Homo sapien
acactctgtgcttgggaggtgttga

SEQ ID NO: 3047173 - DNA, 25 bp, Homo sapien
tgcaattgccatgactccagagagg

SEQ ID NO: 3047174 - DNA, 25 bp, Homo sapien
gcaattgccatgactccagagaggg

SEQ ID NO: 3047175 - DNA, 25 bp, Homo sapien
gatattcgtcaaggtgctgactggg

SEQ ID NO: 3047176 - DNA, 25 bp, Homo sapien
gggagaggctgtggatattcgtcaa

SEQ ID NO: 3047177 - DNA, 25 bp, Homo sapien
ctgtggatattcgtcaaggtgctga

SEQ ID NO: 3047178 - DNA, 25 bp, Homo sapien
agaggctgtggatattcgtcaaggt

SEQ ID NO: 3047179 - DNA, 25 bp, Homo sapien
caagacttgcacatactggttccct

SEQ ID NO: 3047180 - DNA, 25 bp, Homo sapien
caaggcacgtcctactgaaagtcag

SEQ ID NO: 3047181 - DNA, 25 bp, Homo sapien
gaacagggctgacccaaagaacaac

SEQ ID NO: 3047182 - DNA, 25 bp, Homo sapien
tgaaagtcagcatgcagagattgtc

SEQ ID NO: 3047183 - DNA, 25 bp, Homo sapien
aacgttgaggtgtgcagtcttggtc

SEQ ID NO: 3047184 - DNA, 25 bp, Homo sapien
caaaaagcgtgtccacaggctgcat

SEQ ID NO: 3047185 - DNA, 25 bp, Homo sapien
gaagtcaagacctcttccgtaaggc

SEQ ID NO: 3047186 - DNA, 25 bp, Homo sapien
agagctcagtaggaaaccccaagga

SEQ ID NO: 3047187 - DNA, 25 bp, Homo sapien
gatcttcgctgtcatggtgtcccat

SEQ ID NO: 3047188 - DNA, 25 bp, Homo sapien
gatcataagtagtcgagtaacctgc

SEQ ID NO: 3047189 - DNA, 25 bp, Homo sapien
tcaaatgttatcacgctcatgcccc

SEQ ID NO: 3047190 - DNA, 25 bp, Homo sapien
taccatttgtgctgtgatcttcgct

SEQ ID NO: 3047191 - DNA, 25 bp, Homo sapien
ctgtaaaaccgactggctggtcacc

SEQ ID NO: 3047192 - DNA, 25 bp, Homo sapien
tgttgccatggtgactgattgttga

SEQ ID NO: 3047193 - DNA, 25 bp, Homo sapien
gggagacttgctgtaaaaccgactg

SEQ ID NO: 3047194 - DNA, 25 bp, Homo sapien
tggtcaccatggcgctgttgccatg

SEQ ID NO: 3047195 - DNA, 25 bp, Homo sapien
ccacacacaggcagatgtggatgtt

SEQ ID NO: 3047196 - DNA, 25 bp, Homo sapien
ggcagatgtggatgtttagtaaacc

SEQ ID NO: 3047197 - DNA, 25 bp, Homo sapien
gtggatgtttagtaaaccactggag

SEQ ID NO: 3047198 - DNA, 25 bp, Homo sapien
gctgggggtcccatttggctgcctt

SEQ ID NO: 3047199 - DNA, 25 bp, Homo sapien
ccccattgttggctctatgaaccac

SEQ ID NO: 3047200 - DNA, 25 bp, Homo sapien
tgaaccacagcaattgtgtccagca

SEQ ID NO: 3047201 - DNA, 25 bp, Homo sapien
acagcaattgtgtccagcagcaaaa

SEQ ID NO: 3047202 - DNA, 25 bp, Homo sapien
ccattgttggctctatgaaccacag

SEQ ID NO: 3047203 - DNA, 25 bp, Homo sapien
cctggctgtagggttgtagacaatg

SEQ ID NO: 3047204 - DNA, 25 bp, Homo sapien
tttacaggtagggatgcaaaccctc

SEQ ID NO: 3047205 - DNA, 25 bp, Homo sapien
cacggtgagattgaagtttacaggt

SEQ ID NO: 3047206 - DNA, 25 bp, Homo sapien
tagacaatgaagaagaacggccgct

SEQ ID NO: 3047207 - DNA, 25 bp, Homo sapien
tcttaaatgctccttcgcctgaagt

SEQ ID NO: 3047208 - DNA, 25 bp, Homo sapien
cgcctgaagtttgggggccattaag

SEQ ID NO: 3047209 - DNA, 25 bp, Homo sapien
ttaagcttcccagatgcagcctcca

SEQ ID NO: 3047210 - DNA, 25 bp, Homo sapien
ttctccttcttaaatgctccttcgc

SEQ ID NO: 3047211 - DNA, 25 bp, Homo sapien
cacccctctacctggcaggttccca

SEQ ID NO: 3047212 - DNA, 25 bp, Homo sapien
ttagaattcctctcgttgagtcact

SEQ ID NO: 3047213 - DNA, 25 bp, Homo sapien
cgttgagtcactaccttgccactgg

SEQ ID NO: 3047214 - DNA, 25 bp, Homo sapien
ctggacactttggagatttcctcgt

SEQ ID NO: 3047215 - DNA, 25 bp, Homo sapien
tggacactttggagatttcctcgtg

SEQ ID NO: 3047216 - DNA, 25 bp, Homo sapien
tgctcaatggcttcagaatgggctg

SEQ ID NO: 3047217 - DNA, 25 bp, Homo sapien
tccagacctgctcaatggcttcaga

SEQ ID NO: 3047218 - DNA, 25 bp, Homo sapien
gagcctataaccagggacagctcct

SEQ ID NO: 3047219 - DNA, 25 bp, Homo sapien
gaatgggctgtcatggagcctataa

SEQ ID NO: 3047220 - DNA, 25 bp, Homo sapien
tgcagcctgctacagtaacttcagg

SEQ ID NO: 3047221 - DNA, 25 bp, Homo sapien
aagagcaaacaaagggtgcccctgt

SEQ ID NO: 3047222 - DNA, 25 bp, Homo sapien
acttcaggcccccaagaagagcaaa

SEQ ID NO: 3047223 - DNA, 25 bp, Homo sapien
ggataaaggccttccaggctgaaga

SEQ ID NO: 3047224 - DNA, 25 bp, Homo sapien
gaagttactctgcaatcaggccagt

SEQ ID NO: 3047225 - DNA, 25 bp, Homo sapien
gagatcacaggtcccaacacaatgg

SEQ ID NO: 3047226 - DNA, 25 bp, Homo sapien
ggtaagcattcaacacatcgtagtg

SEQ ID NO: 3047227 - DNA, 25 bp, Homo sapien
tgccatgcggctctacagacagaag

SEQ ID NO: 3047228 - DNA, 25 bp, Homo sapien
ggcagtgaggcccaacctttgctta

SEQ ID NO: 3047229 - DNA, 25 bp, Homo sapien
gataagatccgtggcaagaaccagg

SEQ ID NO: 3047230 - DNA, 25 bp, Homo sapien
agagcggccctaggatcatctcaaa

SEQ ID NO: 3047231 - DNA, 25 bp, Homo sapien
tattctggcaatgagagagcggccc

SEQ ID NO: 3047232 - DNA, 25 bp, Homo sapien
gttggagctataggcgtccatggcc

SEQ ID NO: 3047233 - DNA, 25 bp, Homo sapien
tcaggctgtgagtctggttggagct

SEQ ID NO: 3047234 - DNA, 25 bp, Homo sapien
tccttcctgcggtttgcaaaccagt

SEQ ID NO: 3047235 - DNA, 25 bp, Homo sapien
ctccttcctgcggtttgcaaaccag

SEQ ID NO: 3047236 - DNA, 25 bp, Homo sapien
ctcagtgaccaagttggagcccagg

SEQ ID NO: 3047237 - DNA, 25 bp, Homo sapien
gacacccctcgctgcaaacattctg

SEQ ID NO: 3047238 - DNA, 25 bp, Homo sapien
tcagtgaccaagttggagcccaggc

SEQ ID NO: 3047239 - DNA, 25 bp, Homo sapien
tggagggggacacccctcgctgcaa

SEQ ID NO: 3047240 - DNA, 25 bp, Homo sapien
ctgttgcattcctccactaaggcct

SEQ ID NO: 3047241 - DNA, 25 bp, Homo sapien
cgtaggcctggtacaagatttgctg

SEQ ID NO: 3047242 - DNA, 25 bp, Homo sapien
ggttcttttgccgatcgtaggcctg

SEQ ID NO: 3047243 - DNA, 25 bp, Homo sapien
cctggtacaagatttgctgggacgc

SEQ ID NO: 3047244 - DNA, 25 bp, Homo sapien
tggctctgttgactgaactctggaa

SEQ ID NO: 3047245 - DNA, 25 bp, Homo sapien
gtcatatttccagaactctggactg

SEQ ID NO: 3047246 - DNA, 25 bp, Homo sapien
tgatcctgactgcttttgtctgtca

SEQ ID NO: 3047247 - DNA, 25 bp, Homo sapien
gaactctggactgtctggttgaatt

SEQ ID NO: 3047248 - DNA, 25 bp, Homo sapien
tgttgctgcatgtaacccttgatca

SEQ ID NO: 3047249 - DNA, 25 bp, Homo sapien
tgcgactggttcaggccggtgacat

SEQ ID NO: 3047250 - DNA, 25 bp, Homo sapien
cggcacgcttctgggtcttcatagg

SEQ ID NO: 3047251 - DNA, 25 bp, Homo sapien
tcgttgctttctgacgtaccaggtg

SEQ ID NO: 3047252 - DNA, 25 bp, Homo sapien
tttagcagccctccaagggtcctca

SEQ ID NO: 3047253 - DNA, 25 bp, Homo sapien
tactttcaacggctacgaacaagac

SEQ ID NO: 3047254 - DNA, 25 bp, Homo sapien
tattaaactcgtgagaacacaggct

SEQ ID NO: 3047255 - DNA, 25 bp, Homo sapien
ggaaacagtgaattagcccaacaat

SEQ ID NO: 3047256 - DNA, 25 bp, Homo sapien
cgaacaagacgcctcgaaccttagg

SEQ ID NO: 3047257 - DNA, 25 bp, Homo sapien
ttcagtcgcgtgggcaaacctcccg

SEQ ID NO: 3047258 - DNA, 25 bp, Homo sapien
aaaagcccttgggtctcggacgctg

SEQ ID NO: 3047259 - DNA, 25 bp, Homo sapien
aagcccttgggtctcggacgctggc

SEQ ID NO: 3047260 - DNA, 25 bp, Homo sapien
gcccttgggtctcggacgctggcct

SEQ ID NO: 3047261 - DNA, 25 bp, Homo sapien
tcgtcgccggacaagcggcccttgg

SEQ ID NO: 3047262 - DNA, 25 bp, Homo sapien
tcctcggtgttgagcgcctgcagct

SEQ ID NO: 3047263 - DNA, 25 bp, Homo sapien
gaggtgtgtcatagtcgtcgccgtc

SEQ ID NO: 3047264 - DNA, 25 bp, Homo sapien
ggagcgacgtgagcttggacaccat

SEQ ID NO: 3047265 - DNA, 25 bp, Homo sapien
acttctaacttgccatgatcgccac

SEQ ID NO: 3047266 - DNA, 25 bp, Homo sapien
aacttctaacttgccatgatcgcca

SEQ ID NO: 3047267 - DNA, 25 bp, Homo sapien
gggtgggtgcgagagaggagggtgg

SEQ ID NO: 3047268 - DNA, 25 bp, Homo sapien
tactcagcaacactctggagggaag

SEQ ID NO: 3047269 - DNA, 25 bp, Homo sapien
taatgctccagtgccgttggacacg

SEQ ID NO: 3047270 - DNA, 25 bp, Homo sapien
tgcaagcatcatgaaaccgagagag

SEQ ID NO: 3047271 - DNA, 25 bp, Homo sapien
gaaaaaggcctaccagtgactctct

SEQ ID NO: 3047272 - DNA, 25 bp, Homo sapien
caacccccacattgccaatgttcat

SEQ ID NO: 3047273 - DNA, 25 bp, Homo sapien
gttccgcttgatgtagaatacccag

SEQ ID NO: 3047274 - DNA, 25 bp, Homo sapien
tctgattagaacgagccggagcctc

SEQ ID NO: 3047275 - DNA, 25 bp, Homo sapien
taatgcatcagcacagaggaaagcc

SEQ ID NO: 3047276 - DNA, 25 bp, Homo sapien
tgtttctctgagaacaggttccgct

SEQ ID NO: 3047277 - DNA, 25 bp, Homo sapien
ccacagggagcacgggaacttcaca

SEQ ID NO: 3047278 - DNA, 25 bp, Homo sapien
caggatccccagtttcaaaggcttt

SEQ ID NO: 3047279 - DNA, 25 bp, Homo sapien
gctttgagccacagggagcacggga

SEQ ID NO: 3047280 - DNA, 25 bp, Homo sapien
aaggctttgagccacagggagcacg

SEQ ID NO: 3047281 - DNA, 25 bp, Homo sapien
tagaatagaagcaccgtcgaggaca

SEQ ID NO: 3047282 - DNA, 25 bp, Homo sapien
tagaagcaccgtcgaggacagtgaa

SEQ ID NO: 3047283 - DNA, 25 bp, Homo sapien
agcaccgtcgaggacagtgaaggtc

SEQ ID NO: 3047284 - DNA, 25 bp, Homo sapien
ctagaatagaagcaccgtcgaggac

SEQ ID NO: 3047285 - DNA, 25 bp, Homo sapien
aaagagacaggatcataatctcctt

SEQ ID NO: 3047286 - DNA, 25 bp, Homo sapien
caaagagacaggatcataatctcct

SEQ ID NO: 3047287 - DNA, 25 bp, Homo sapien
gcaaagagacaggatcataatctcc

SEQ ID NO: 3047288 - DNA, 25 bp, Homo sapien
aagagacaggatcataatctccttg

SEQ ID NO: 3047289 - DNA, 25 bp, Homo sapien
cacagttatccgaggagttatcttt

SEQ ID NO: 3047290 - DNA, 25 bp, Homo sapien
aaaagcacagttatccgaggagtta

SEQ ID NO: 3047291 - DNA, 25 bp, Homo sapien
tactcgcctttctagaaaagcacag

SEQ ID NO: 3047292 - DNA, 25 bp, Homo sapien
gcaggtgctgctagataaaactcaa

SEQ ID NO: 3047293 - DNA, 25 bp, Homo sapien
tgcttcagggttggattcggaggct

SEQ ID NO: 3047294 - DNA, 25 bp, Homo sapien
tcgtgggctgctgcgagagctcagc

SEQ ID NO: 3047295 - DNA, 25 bp, Homo sapien
gctccttgcatgggtgggtccctgg

SEQ ID NO: 3047296 - DNA, 25 bp, Homo sapien
agctcagccgggctgcagacacttg

SEQ ID NO: 3047297 - DNA, 25 bp, Homo sapien
cataggctgcgtgagtgtcctcatg

SEQ ID NO: 3047298 - DNA, 25 bp, Homo sapien
ttgagatgatggacttacaaagctg

SEQ ID NO: 3047299 - DNA, 25 bp, Homo sapien
cagtcacgatgttggttgggctaca

SEQ ID NO: 3047300 - DNA, 25 bp, Homo sapien
tcaggtttgcaatgagtggtctctc

SEQ ID NO: 3047301 - DNA, 25 bp, Homo sapien
ttcaaatactttctttccgatgaaa

SEQ ID NO: 3047302 - DNA, 25 bp, Homo sapien
tgggactgattcagagaagactaga

SEQ ID NO: 3047303 - DNA, 25 bp, Homo sapien
caaatgtccacagtgactgcaagtc

SEQ ID NO: 3047304 - DNA, 25 bp, Homo sapien
gagaagactagattcaaacaatgtc

SEQ ID NO: 3047305 - DNA, 25 bp, Homo sapien
gtcacatgtcttcacacgatgccat

SEQ ID NO: 3047306 - DNA, 25 bp, Homo sapien
gagacaagccatgattttatccagt

SEQ ID NO: 3047307 - DNA, 25 bp, Homo sapien
tggtcctcatacatggatctcttat

SEQ ID NO: 3047308 - DNA, 25 bp, Homo sapien
tctatctccataaacatgccttcaa

SEQ ID NO: 3047309 - DNA, 25 bp, Homo sapien
caacctctttccctcaaagagacaa

SEQ ID NO: 3047310 - DNA, 25 bp, Homo sapien
gttggatcaaaatgagaatgagttg

SEQ ID NO: 3047311 - DNA, 25 bp, Homo sapien
tacatggtacggtagacgttattcc

SEQ ID NO: 3047312 - DNA, 25 bp, Homo sapien
ggcagttggatcaaaatgagaatga

SEQ ID NO: 3047313 - DNA, 25 bp, Homo sapien
tattccattcagtcatggcagttgg

SEQ ID NO: 3047314 - DNA, 25 bp, Homo sapien
tcagtccccaacagataagatggta

SEQ ID NO: 3047315 - DNA, 25 bp, Homo sapien
aaagaaaccctatgaccgtgagcag

SEQ ID NO: 3047316 - DNA, 25 bp, Homo sapien
catcacttctgtctaattctgggac

SEQ ID NO: 3047317 - DNA, 25 bp, Homo sapien
tatggacactgtaatgaaccttctg

SEQ ID NO: 3047318 - DNA, 25 bp, Homo sapien
tatttatcaaagaagtccatggcaa

SEQ ID NO: 3047319 - DNA, 25 bp, Homo sapien
ttatcaaagaagtccatggcaatac

SEQ ID NO: 3047320 - DNA, 25 bp, Homo sapien
tatcaaagaagtccatggcaatact

SEQ ID NO: 3047321 - DNA, 25 bp, Homo sapien
gtgacatcctcttttaggtgccata

SEQ ID NO: 3047322 - DNA, 25 bp, Homo sapien
atttttccatgtctgacgtcggaaa

SEQ ID NO: 3047323 - DNA, 25 bp, Homo sapien
tgtctgacgtcggaaaaagcacttt

SEQ ID NO: 3047324 - DNA, 25 bp, Homo sapien
aagcactttcagttgtgaggataag

SEQ ID NO: 3047325 - DNA, 25 bp, Homo sapien
catcagtttcagctgactcatcctt

SEQ ID NO: 3047326 - DNA, 25 bp, Homo sapien
tttccatcagtttcagctgactcat

SEQ ID NO: 3047327 - DNA, 25 bp, Homo sapien
cagtttcagctgactcatcctttcc

SEQ ID NO: 3047328 - DNA, 25 bp, Homo sapien
taatttccatcagtttcagctgact

SEQ ID NO: 3047329 - DNA, 25 bp, Homo sapien
tctgtcagtaacacagttcccgagg

SEQ ID NO: 3047330 - DNA, 25 bp, Homo sapien
cagggcctctttccttccgttgtct

SEQ ID NO: 3047331 - DNA, 25 bp, Homo sapien
taactctaagatcatcctgttttcc

SEQ ID NO: 3047332 - DNA, 25 bp, Homo sapien
ctgttttccataggcctgagctcca

SEQ ID NO: 3047333 - DNA, 25 bp, Homo sapien
tacgctcagcgaccatttcacacaa

SEQ ID NO: 3047334 - DNA, 25 bp, Homo sapien
gagcttggactctgaactggcactg

SEQ ID NO: 3047335 - DNA, 25 bp, Homo sapien
gtgtaattgtgcctagctgtcccca

SEQ ID NO: 3047336 - DNA, 25 bp, Homo sapien
tggcactgacattctctacgctcag

SEQ ID NO: 3047337 - DNA, 25 bp, Homo sapien
ttctgtcttatctggggaggcattc

SEQ ID NO: 3047338 - DNA, 25 bp, Homo sapien
tttctgtcttatctggggaggcatt

SEQ ID NO: 3047339 - DNA, 25 bp, Homo sapien
tctgtcttatctggggaggcattca

SEQ ID NO: 3047340 - DNA, 25 bp, Homo sapien
gagcaactgcatgcccagtgtcacc

SEQ ID NO: 3047341 - DNA, 25 bp, Homo sapien
gaggtggctcctaagctgttaagta

SEQ ID NO: 3047342 - DNA, 25 bp, Homo sapien
tctgtgcatgagctaacccattcca

SEQ ID NO: 3047343 - DNA, 25 bp, Homo sapien
taagtaggctaagaaatgctctgtg

SEQ ID NO: 3047344 - DNA, 25 bp, Homo sapien
tggaaggctacagtgcctgctaatg

SEQ ID NO: 3047345 - DNA, 25 bp, Homo sapien
tggggatccctctccacttggtcac

SEQ ID NO: 3047346 - DNA, 25 bp, Homo sapien
gctaatggggatccctctccacttg

SEQ ID NO: 3047347 - DNA, 25 bp, Homo sapien
gaaggctacagtgcctgctaatggg

SEQ ID NO: 3047348 - DNA, 25 bp, Homo sapien
aaatctctaggctcagatggtaact

SEQ ID NO: 3047349 - DNA, 25 bp, Homo sapien
gctcagatggtaactgccctcctct

SEQ ID NO: 3047350 - DNA, 25 bp, Homo sapien
tctctaggctcagatggtaactgcc

SEQ ID NO: 3047351 - DNA, 25 bp, Homo sapien
taggctcagatggtaactgccctcc

SEQ ID NO: 3047352 - DNA, 25 bp, Homo sapien
tcagcccctcaagtgtgtgatggaa

SEQ ID NO: 3047353 - DNA, 25 bp, Homo sapien
tgtacagctatagagtccagtgtgc

SEQ ID NO: 3047354 - DNA, 25 bp, Homo sapien
gcagagccaaggagttgtacagcta

SEQ ID NO: 3047355 - DNA, 25 bp, Homo sapien
tgagaggtcttgctagctgccagcc

SEQ ID NO: 3047356 - DNA, 25 bp, Homo sapien
tcaacatcggtagtgggactcacag

SEQ ID NO: 3047357 - DNA, 25 bp, Homo sapien
caccccttcaacatcggtagtggga

SEQ ID NO: 3047358 - DNA, 25 bp, Homo sapien
tgtccaccccttcaacatcggtagt

SEQ ID NO: 3047359 - DNA, 25 bp, Homo sapien
ccttcaacatcggtagtgggactca

SEQ ID NO: 3047360 - DNA, 25 bp, Homo sapien
tccagagtctgagtagtttgccaag

SEQ ID NO: 3047361 - DNA, 25 bp, Homo sapien
catcttacaggtgaaacaggtttcc

SEQ ID NO: 3047362 - DNA, 25 bp, Homo sapien
gaaaccatccgtgtcactttgggct

SEQ ID NO: 3047363 - DNA, 25 bp, Homo sapien
caaggtgggtttgattgtcatcccc

SEQ ID NO: 3047364 - DNA, 25 bp, Homo sapien
tggggaacttcattcagaggagact

SEQ ID NO: 3047365 - DNA, 25 bp, Homo sapien
tttggggaacttcattcagaggaga

SEQ ID NO: 3047366 - DNA, 25 bp, Homo sapien
ggggaacttcattcagaggagactt

SEQ ID NO: 3047367 - DNA, 25 bp, Homo sapien
gggaacttcattcagaggagacttg

SEQ ID NO: 3047368 - DNA, 25 bp, Homo sapien
gaaccgttctagaccccatgcagat

SEQ ID NO: 3047369 - DNA, 25 bp, Homo sapien
cacggaagtgatcaatggcaaagct

SEQ ID NO: 3047370 - DNA, 25 bp, Homo sapien
aaagctgcaagaggctgtaagcccc

SEQ ID NO: 3047371 - DNA, 25 bp, Homo sapien
tgggacaagaactccgaactccagg

SEQ ID NO: 3047372 - DNA, 25 bp, Homo sapien
ttcctctagtccatcagcccacaaa

SEQ ID NO: 3047373 - DNA, 25 bp, Homo sapien
gctctgcctttgaccgtcaacaggc

SEQ ID NO: 3047374 - DNA, 25 bp, Homo sapien
tcaacaggcatctttcctctagtcc

SEQ ID NO: 3047375 - DNA, 25 bp, Homo sapien
cctttgaccgtcaacaggcatcttt

SEQ ID NO: 3047376 - DNA, 25 bp, Homo sapien
tggcgagtgcgaggaaccgcaccct

SEQ ID NO: 3047377 - DNA, 25 bp, Homo sapien
gcgagtgcgaggaaccgcaccctag

SEQ ID NO: 3047378 - DNA, 25 bp, Homo sapien
gagtgcgaggaaccgcaccctagcc

SEQ ID NO: 3047379 - DNA, 25 bp, Homo sapien
accctagcccgcctgactgtccagc

SEQ ID NO: 3047380 - DNA, 25 bp, Homo sapien
gactgtcgtcctaacagattttgag

SEQ ID NO: 3047381 - DNA, 25 bp, Homo sapien
tattgcgactgcattgccttggcga

SEQ ID NO: 3047382 - DNA, 25 bp, Homo sapien
tgtgattgcaatggaaacggcatat

SEQ ID NO: 3047383 - DNA, 25 bp, Homo sapien
tcataatgacgtataatccaaagta

SEQ ID NO: 3047384 - DNA, 25 bp, Homo sapien
aagttctacatgtagctggtgcagt

SEQ ID NO: 3047385 - DNA, 25 bp, Homo sapien
caactggaacttagggtatggtctt

SEQ ID NO: 3047386 - DNA, 25 bp, Homo sapien
tctcatacacggtgaaagccagtct

SEQ ID NO: 3047387 - DNA, 25 bp, Homo sapien
gaagcacgatgcaaactgaggcctc

SEQ ID NO: 3047388 - DNA, 25 bp, Homo sapien
tgtgcaagagcctcggttcagctcc

SEQ ID NO: 3047389 - DNA, 25 bp, Homo sapien
tcaaagccatgtgtctagagcgtca

SEQ ID NO: 3047390 - DNA, 25 bp, Homo sapien
gcgtcagttctgatgatgttgggtc

SEQ ID NO: 3047391 - DNA, 25 bp, Homo sapien
gtgcgtgtgcaagagcctcggttca

SEQ ID NO: 3047392 - DNA, 25 bp, Homo sapien
ttatcctgactgctaagctactggg

SEQ ID NO: 3047393 - DNA, 25 bp, Homo sapien
caagacggaacactcaaatggctat

SEQ ID NO: 3047394 - DNA, 25 bp, Homo sapien
taagagcctaggaattactacgcag

SEQ ID NO: 3047395 - DNA, 25 bp, Homo sapien
tacaaagcagcttcaactaagagcc

SEQ ID NO: 3047396 - DNA, 25 bp, Homo sapien
agcttgtgttcttccccacatctta

SEQ ID NO: 3047397 - DNA, 25 bp, Homo sapien
cacactgacagcttgtgttcttccc

SEQ ID NO: 3047398 - DNA, 25 bp, Homo sapien
actgacagcttgtgttcttccccac

SEQ ID NO: 3047399 - DNA, 25 bp, Homo sapien
tgacagcttgtgttcttccccacat

SEQ ID NO: 3047400 - DNA, 25 bp, Homo sapien
agggtcagggaaattcagaatttca

SEQ ID NO: 3047401 - DNA, 25 bp, Homo sapien
atgggatgcattggtgaaagttctc

SEQ ID NO: 3047402 - DNA, 25 bp, Homo sapien
gtcagggaaattcagaatttcacag

SEQ ID NO: 3047403 - DNA, 25 bp, Homo sapien
aatgggatgcattggtgaaagttct

SEQ ID NO: 3047404 - DNA, 25 bp, Homo sapien
ctagcagctttgtaagccaccaagc

SEQ ID NO: 3047405 - DNA, 25 bp, Homo sapien
tcatgattctaaaaaggccaacttt

SEQ ID NO: 3047406 - DNA, 25 bp, Homo sapien
acctacatagaagaaagtcatgatt

SEQ ID NO: 3047407 - DNA, 25 bp, Homo sapien
catagaagaaagtcatgattctaaa

SEQ ID NO: 3047408 - DNA, 25 bp, Homo sapien
gtcatgattctaaaaaggccaactt

SEQ ID NO: 3047409 - DNA, 25 bp, Homo sapien
agtgcatccagaacatcgccgcaga

SEQ ID NO: 3047410 - DNA, 25 bp, Homo sapien
gtccagtgcatccagaacatcgccg

SEQ ID NO: 3047411 - DNA, 25 bp, Homo sapien
cagtgcatccagaacatcgccgcag

SEQ ID NO: 3047412 - DNA, 25 bp, Homo sapien
gcatccagaacatcgccgcagatta

SEQ ID NO: 3047413 - DNA, 25 bp, Homo sapien
ttgccttaccagaatgtaatctgct

SEQ ID NO: 3047414 - DNA, 25 bp, Homo sapien
gccatgccagtgggcctagagaaca

SEQ ID NO: 3047415 - DNA, 25 bp, Homo sapien
tcctcttgccttaccagaatgtaat

SEQ ID NO: 3047416 - DNA, 25 bp, Homo sapien
gtaatctgctcataacttaagaagc

SEQ ID NO: 3047417 - DNA, 25 bp, Homo sapien
cacctggaggtttcttactcttagg

SEQ ID NO: 3047418 - DNA, 25 bp, Homo sapien
ccagcacctggaggtttcttactct

SEQ ID NO: 3047419 - DNA, 25 bp, Homo sapien
cttttctaagatacctcctccctct

SEQ ID NO: 3047420 - DNA, 25 bp, Homo sapien
taacagccactcatgtgttccttcc

SEQ ID NO: 3047421 - DNA, 25 bp, Homo sapien
cttattacaatgatcatgtggaaca

SEQ ID NO: 3047422 - DNA, 25 bp, Homo sapien
tacctccggaatatacagagcacac

SEQ ID NO: 3047423 - DNA, 25 bp, Homo sapien
acctccggaatatacagagcacaca

SEQ ID NO: 3047424 - DNA, 25 bp, Homo sapien
ttttaaagctccatccttatgggga

SEQ ID NO: 3047425 - DNA, 25 bp, Homo sapien
tttaaagctccatccttatggggac

SEQ ID NO: 3047426 - DNA, 25 bp, Homo sapien
caacacaggaatggggcaaggtttt

SEQ ID NO: 3047427 - DNA, 25 bp, Homo sapien
caaaaaagtcctctcaacacaggaa

SEQ ID NO: 3047428 - DNA, 25 bp, Homo sapien
aacaaaaaagtcctctcaacacagg

SEQ ID NO: 3047429 - DNA, 25 bp, Homo sapien
aaaagtcctctcaacacaggaatgg

SEQ ID NO: 3047430 - DNA, 25 bp, Homo sapien
tatggtcagctaggatgaccgcagt

SEQ ID NO: 3047431 - DNA, 25 bp, Homo sapien
atggtcagctaggatgaccgcagtc

SEQ ID NO: 3047432 - DNA, 25 bp, Homo sapien
gcaaatggggatagagacacgtgtc

SEQ ID NO: 3047433 - DNA, 25 bp, Homo sapien
ggatagagacacgtgtccgatggat

SEQ ID NO: 3047434 - DNA, 25 bp, Homo sapien
ggccttctcaggacaaatattccat

SEQ ID NO: 3047435 - DNA, 25 bp, Homo sapien
ccgatggatgtattggccttctcag

SEQ ID NO: 3047436 - DNA, 25 bp, Homo sapien
gacacgagcaaactccggcgagaaa

SEQ ID NO: 3047437 - DNA, 25 bp, Homo sapien
tccggcgagaaagggcaacggtcaa

SEQ ID NO: 3047438 - DNA, 25 bp, Homo sapien
gcaaactccggcgagaaagggcaac

SEQ ID NO: 3047439 - DNA, 25 bp, Homo sapien
cgagaaagggcaacggtcaaagatt

SEQ ID NO: 3047440 - DNA, 25 bp, Homo sapien
agactttattgcacgcgtagttagg

SEQ ID NO: 3047441 - DNA, 25 bp, Homo sapien
tattgcacgcgtagttaggtgatgg

SEQ ID NO: 3047442 - DNA, 25 bp, Homo sapien
aagactttattgcacgcgtagttag

SEQ ID NO: 3047443 - DNA, 25 bp, Homo sapien
gcacgcgtagttaggtgatggcgac

SEQ ID NO: 3047444 - DNA, 25 bp, Homo sapien
acagctggctcgagtggtgcccacg

SEQ ID NO: 3047445 - DNA, 25 bp, Homo sapien
tcccagcatcctcaaaatgaggggt

SEQ ID NO: 3047446 - DNA, 25 bp, Homo sapien
tgccgtgctctcctgagtgggcgcc

SEQ ID NO: 3047447 - DNA, 25 bp, Homo sapien
gcaggtcacagctggctcgagtggt

SEQ ID NO: 3047448 - DNA, 25 bp, Homo sapien
gaggacgtggccagggctccaaaag

SEQ ID NO: 3047449 - DNA, 25 bp, Homo sapien
ctggggaggacgtggccagggctcc

SEQ ID NO: 3047450 - DNA, 25 bp, Homo sapien
gacgtggccagggctccaaaaggcc

SEQ ID NO: 3047451 - DNA, 25 bp, Homo sapien
tggggaggacgtggccagggctcca

SEQ ID NO: 3047452 - DNA, 25 bp, Homo sapien
accctcctcttgaggaagcagccac

SEQ ID NO: 3047453 - DNA, 25 bp, Homo sapien
gcagatccaccctcctcttgaggaa

SEQ ID NO: 3047454 - DNA, 25 bp, Homo sapien
aggagagcagatccaccctcctctt

SEQ ID NO: 3047455 - DNA, 25 bp, Homo sapien
gggcaggagagcagatccaccctcc

SEQ ID NO: 3047456 - DNA, 25 bp, Homo sapien
tgcacaaacacattgcaggcaggca

SEQ ID NO: 3047457 - DNA, 25 bp, Homo sapien
gcacaaacacattgcaggcaggcat

SEQ ID NO: 3047458 - DNA, 25 bp, Homo sapien
gtgcacaaacacattgcaggcaggc

SEQ ID NO: 3047459 - DNA, 25 bp, Homo sapien
aagccccagtgtgcgcagctcgagc

SEQ ID NO: 3047460 - DNA, 25 bp, Homo sapien
actgaagccccagtgtgcgcagctc

SEQ ID NO: 3047461 - DNA, 25 bp, Homo sapien
agactgaagccccagtgtgcgcagc

SEQ ID NO: 3047462 - DNA, 25 bp, Homo sapien
caggcgaccctcatggggaaggtca

SEQ ID NO: 3047463 - DNA, 25 bp, Homo sapien
gagtgtggtgagcacttccctgtcc

SEQ ID NO: 3047464 - DNA, 25 bp, Homo sapien
gctgtgaccattcccaggtaactcc

SEQ ID NO: 3047465 - DNA, 25 bp, Homo sapien
cacatgacccagatgaaagtcgaga

SEQ ID NO: 3047466 - DNA, 25 bp, Homo sapien
acgaagacgtccaggtgtggcccgt

SEQ ID NO: 3047467 - DNA, 25 bp, Homo sapien
acactgtgctcaagcatcttagggc

SEQ ID NO: 3047468 - DNA, 25 bp, Homo sapien
cactgtgctcaagcatcttagggcc

SEQ ID NO: 3047469 - DNA, 25 bp, Homo sapien
ctgtgctcaagcatcttagggcctc

SEQ ID NO: 3047470 - DNA, 25 bp, Homo sapien
tgtgctcaagcatcttagggcctct

SEQ ID NO: 3047471 - DNA, 25 bp, Homo sapien
tcctcttcaccttttcttcctcctc

SEQ ID NO: 3047472 - DNA, 25 bp, Homo sapien
ctgggccttcctcttcaccttttct

SEQ ID NO: 3047473 - DNA, 25 bp, Homo sapien
tcttcaccttttcttcctcctcttc

SEQ ID NO: 3047474 - DNA, 25 bp, Homo sapien
tcaccttttcttcctcctcttcctc

SEQ ID NO: 3047475 - DNA, 25 bp, Homo sapien
gttctgactgggggccgtatcccag

SEQ ID NO: 3047476 - DNA, 25 bp, Homo sapien
gactgggggccgtatcccaggccca

SEQ ID NO: 3047477 - DNA, 25 bp, Homo sapien
tgactgggggccgtatcccaggccc

SEQ ID NO: 3047478 - DNA, 25 bp, Homo sapien
tctgactgggggccgtatcccaggc

SEQ ID NO: 3047479 - DNA, 25 bp, Homo sapien
tggagatgctgaccgcgtctgtttt

SEQ ID NO: 3047480 - DNA, 25 bp, Homo sapien
gatgctgaccgcgtctgttttcctt

SEQ ID NO: 3047481 - DNA, 25 bp, Homo sapien
ccgagcaagggtcgtcggcatccag

SEQ ID NO: 3047482 - DNA, 25 bp, Homo sapien
caaacccgagcaagggtcgtcggca

SEQ ID NO: 3047483 - DNA, 25 bp, Homo sapien
cgttcttccacaccctgtcctggtg

SEQ ID NO: 3047484 - DNA, 25 bp, Homo sapien
ctcgttcttccacaccctgtcctgg

SEQ ID NO: 3047485 - DNA, 25 bp, Homo sapien
gcacctcgttcttccacaccctgtc

SEQ ID NO: 3047486 - DNA, 25 bp, Homo sapien
agcttccccgccacgggcacctcgt

SEQ ID NO: 3047487 - DNA, 25 bp, Homo sapien
aggagtccggaactgccaggagagt

SEQ ID NO: 3047488 - DNA, 25 bp, Homo sapien
caggagagtggtggcaggtccccca

SEQ ID NO: 3047489 - DNA, 25 bp, Homo sapien
cccaggagtccggaactgccaggag

SEQ ID NO: 3047490 - DNA, 25 bp, Homo sapien
ggttcccaggagtccggaactgcca

SEQ ID NO: 3047491 - DNA, 25 bp, Homo sapien
caggttctctgcgtgtagaagtata

SEQ ID NO: 3047492 - DNA, 25 bp, Homo sapien
ccagcacattcaggaacggagacta

SEQ ID NO: 3047493 - DNA, 25 bp, Homo sapien
gtgtagaagtataggctgagcttcc

SEQ ID NO: 3047494 - DNA, 25 bp, Homo sapien
ctgggtgccgtccaggttctctgcg

SEQ ID NO: 3047495 - DNA, 25 bp, Homo sapien
gacagggggatgacctgaggtctgg

SEQ ID NO: 3047496 - DNA, 25 bp, Homo sapien
acagggggatgacctgaggtctgga

SEQ ID NO: 3047497 - DNA, 25 bp, Homo sapien
agacagggggatgacctgaggtctg

SEQ ID NO: 3047498 - DNA, 25 bp, Homo sapien
cagacagggggatgacctgaggtct

SEQ ID NO: 3047499 - DNA, 25 bp, Homo sapien
cacatatctgagtcagtgccacctg

SEQ ID NO: 3047500 - DNA, 25 bp, Homo sapien
agtgccacctggacactacccttgg

SEQ ID NO: 3047501 - DNA, 25 bp, Homo sapien
tggacactacccttggagcatcctg

SEQ ID NO: 3047502 - DNA, 25 bp, Homo sapien
gggaagcccccacatatctgagtca

SEQ ID NO: 3047503 - DNA, 25 bp, Homo sapien
cccagatcccaacatggccacaggc

SEQ ID NO: 3047504 - DNA, 25 bp, Homo sapien
gcctggaattgcctctgtgatgcct

SEQ ID NO: 3047505 - DNA, 25 bp, Homo sapien
cacttggctgccttcgtggctggaa

SEQ ID NO: 3047506 - DNA, 25 bp, Homo sapien
gggatgcagagtggaaagttcacca

SEQ ID NO: 3047507 - DNA, 25 bp, Homo sapien
tgcctggtcacactggaggtgtaga

SEQ ID NO: 3047508 - DNA, 25 bp, Homo sapien
gcctgaagtggtgcaggtgcctggt

SEQ ID NO: 3047509 - DNA, 25 bp, Homo sapien
caggtgcctggtcacactggaggtg

SEQ ID NO: 3047510 - DNA, 25 bp, Homo sapien
ctgaagtggtgcaggtgcctggtca

SEQ ID NO: 3047511 - DNA, 25 bp, Homo sapien
ttgcctcggacatgaaacatctcac

SEQ ID NO: 3047512 - DNA, 25 bp, Homo sapien
gtttgcctcggacatgaaacatctc

SEQ ID NO: 3047513 - DNA, 25 bp, Homo sapien
ctgtttgcctcggacatgaaacatc

SEQ ID NO: 3047514 - DNA, 25 bp, Homo sapien
tttgcctcggacatgaaacatctca

SEQ ID NO: 3047515 - DNA, 25 bp, Homo sapien
agcagactggggttaatggtcagca

SEQ ID NO: 3047516 - DNA, 25 bp, Homo sapien
cagactggggttaatggtcagcagc

SEQ ID NO: 3047517 - DNA, 25 bp, Homo sapien
gtggagcagactggggttaatggtc

SEQ ID NO: 3047518 - DNA, 25 bp, Homo sapien
gagcagactggggttaatggtcagc

SEQ ID NO: 3047519 - DNA, 25 bp, Homo sapien
taccatgggccaaacactgagccgt

SEQ ID NO: 3047520 - DNA, 25 bp, Homo sapien
ttaggcccttaccatgggccaaaca

SEQ ID NO: 3047521 - DNA, 25 bp, Homo sapien
caccactggggctatccctttttag

SEQ ID NO: 3047522 - DNA, 25 bp, Homo sapien
ccgtgtgcttcgtgtaacttctaag

SEQ ID NO: 3047523 - DNA, 25 bp, Homo sapien
tgccagcaaagactcgaagaggtgc

SEQ ID NO: 3047524 - DNA, 25 bp, Homo sapien
ggtgccagcaaagactcgaagaggt

SEQ ID NO: 3047525 - DNA, 25 bp, Homo sapien
gggtgccagcaaagactcgaagagg

SEQ ID NO: 3047526 - DNA, 25 bp, Homo sapien
ccagcaaagactcgaagaggtgcct

SEQ ID NO: 3047527 - DNA, 25 bp, Homo sapien
agtagctattgctactattatgaat

SEQ ID NO: 3047528 - DNA, 25 bp, Homo sapien
gtagctattgctactattatgaatg

SEQ ID NO: 3047529 - DNA, 25 bp, Homo sapien
gactggttttgccaagtcgcccagg

SEQ ID NO: 3047530 - DNA, 25 bp, Homo sapien
tagagactggttttgccaagtcgcc

SEQ ID NO: 3047531 - DNA, 25 bp, Homo sapien
ggcaatgtacatcccagagcgtgca

SEQ ID NO: 3047532 - DNA, 25 bp, Homo sapien
aaagccagtgttggccgttccccag

SEQ ID NO: 3047533 - DNA, 25 bp, Homo sapien
gttgcaacagaaacctatggcctgc

SEQ ID NO: 3047534 - DNA, 25 bp, Homo sapien
gctaggaaacctgtggaccaacata

SEQ ID NO: 3047535 - DNA, 25 bp, Homo sapien
ccacagtccccgtcttctcttcact

SEQ ID NO: 3047536 - DNA, 25 bp, Homo sapien
agtccccgtcttctcttcactgatg

SEQ ID NO: 3047537 - DNA, 25 bp, Homo sapien
ccttccacagtccccgtcttctctt

SEQ ID NO: 3047538 - DNA, 25 bp, Homo sapien
acagtccccgtcttctcttcactga

SEQ ID NO: 3047539 - DNA, 25 bp, Homo sapien
tgcctggctgtgcaactagccttgt

SEQ ID NO: 3047540 - DNA, 25 bp, Homo sapien
tctgaaattcccataacgtttaggc

SEQ ID NO: 3047541 - DNA, 25 bp, Homo sapien
tgtcacttcctagatatgtggcaag

SEQ ID NO: 3047542 - DNA, 25 bp, Homo sapien
gcagtaatgcctcaaaagaaccagg

SEQ ID NO: 3047543 - DNA, 25 bp, Homo sapien
cagtacatccagaacgtcgccacag

SEQ ID NO: 3047544 - DNA, 25 bp, Homo sapien
tgccagttgtagctgctggaatgag

SEQ ID NO: 3047545 - DNA, 25 bp, Homo sapien
tacatccagaacgtcgccacagatt

SEQ ID NO: 3047546 - DNA, 25 bp, Homo sapien
ccttggacttgccagttgtagctgc

SEQ ID NO: 3047547 - DNA, 25 bp, Homo sapien
ggtctgtatgtagtttggttactat

SEQ ID NO: 3047548 - DNA, 25 bp, Homo sapien
gtttggttactatgtctcttaggtc

SEQ ID NO: 3047549 - DNA, 25 bp, Homo sapien
tgtttgtaaggatttaatcaaggtc

SEQ ID NO: 3047550 - DNA, 25 bp, Homo sapien
tctcctgtttgtaaggatttaatca

SEQ ID NO: 3047551 - DNA, 25 bp, Homo sapien
cattggcatatcagttatcagttgg

SEQ ID NO: 3047552 - DNA, 25 bp, Homo sapien
attttttcatactaacacattggca

SEQ ID NO: 3047553 - DNA, 25 bp, Homo sapien
tcagttatcagttggataaaagttt

SEQ ID NO: 3047554 - DNA, 25 bp, Homo sapien
cacacctggtaagaatgttgggaaa

SEQ ID NO: 3047555 - DNA, 25 bp, Homo sapien
ttcctcctccgtgcattaacaatgg

SEQ ID NO: 3047556 - DNA, 25 bp, Homo sapien
tccatcctggcattacactggcctg

SEQ ID NO: 3047557 - DNA, 25 bp, Homo sapien
agggtcacatccgtctcccagaagc

SEQ ID NO: 3047558 - DNA, 25 bp, Homo sapien
ccaggtctaacagtcaggttcctcc

SEQ ID NO: 3047559 - DNA, 25 bp, Homo sapien
tgctgggtgcagcgaaagccgatct

SEQ ID NO: 3047560 - DNA, 25 bp, Homo sapien
ctgggtgcagcgaaagccgatctca

SEQ ID NO: 3047561 - DNA, 25 bp, Homo sapien
tgggtgcagcgaaagccgatctcac

SEQ ID NO: 3047562 - DNA, 25 bp, Homo sapien
agtgctgggtgcagcgaaagccgat

SEQ ID NO: 3047563 - DNA, 25 bp, Homo sapien
tgggatatggcacggacccagcagc

SEQ ID NO: 3047564 - DNA, 25 bp, Homo sapien
cctgggatatggcacggacccagca

SEQ ID NO: 3047565 - DNA, 25 bp, Homo sapien
tcctgggatatggcacggacccagc

SEQ ID NO: 3047566 - DNA, 25 bp, Homo sapien
ggatatggcacggacccagcagctc

SEQ ID NO: 3047567 - DNA, 25 bp, Homo sapien
ggtgtggaagaacgaggtgcccgtg

SEQ ID NO: 3047568 - DNA, 25 bp, Homo sapien
tgtggaagaacgaggtgcccgtggc

SEQ ID NO: 3047569 - DNA, 25 bp, Homo sapien
tggaagaacgaggtgcccgtggcgg

SEQ ID NO: 3047570 - DNA, 25 bp, Homo sapien
ggcacaggcctggatgccgacgacc

SEQ ID NO: 3047571 - DNA, 25 bp, Homo sapien
ggctccaggcttcttgtcctggcaa

SEQ ID NO: 3047572 - DNA, 25 bp, Homo sapien
tgccctctccctgaatgctctgtgg

SEQ ID NO: 3047573 - DNA, 25 bp, Homo sapien
ctctgtgggtcagggacacggattc

SEQ ID NO: 3047574 - DNA, 25 bp, Homo sapien
cccacttctggctgaactcttggct

SEQ ID NO: 3047575 - DNA, 25 bp, Homo sapien
tagaggccctaagatgcttgagcac

SEQ ID NO: 3047576 - DNA, 25 bp, Homo sapien
gcgattcttgttatcggcatcaacg

SEQ ID NO: 3047577 - DNA, 25 bp, Homo sapien
ggcgattcttgttatcggcatcaac

SEQ ID NO: 3047578 - DNA, 25 bp, Homo sapien
cgattcttgttatcggcatcaacgc

SEQ ID NO: 3047579 - DNA, 25 bp, Homo sapien
gattcttgttatcggcatcaacgcc

SEQ ID NO: 3047580 - DNA, 25 bp, Homo sapien
ttccctgagccctctcaagtcgggt

SEQ ID NO: 3047581 - DNA, 25 bp, Homo sapien
cagtctgcccatgaggctgggcctg

SEQ ID NO: 3047582 - DNA, 25 bp, Homo sapien
ccaggacgctgggtcagacaaggtc

SEQ ID NO: 3047583 - DNA, 25 bp, Homo sapien
gcactgcagggcaaggaaggtccct

SEQ ID NO: 3047584 - DNA, 25 bp, Homo sapien
gcctaacggggaacactgcccacat

SEQ ID NO: 3047585 - DNA, 25 bp, Homo sapien
agcctaacggggaacactgcccaca

SEQ ID NO: 3047586 - DNA, 25 bp, Homo sapien
tcttgggttgtgacgtggctaccac

SEQ ID NO: 3047587 - DNA, 25 bp, Homo sapien
acgtggctaccacatgctcctgttg

SEQ ID NO: 3047588 - DNA, 25 bp, Homo sapien
gacggtcccgccatttgggctgtga

SEQ ID NO: 3047589 - DNA, 25 bp, Homo sapien
tgatgccccatggtcttgggttgtg

SEQ ID NO: 3047590 - DNA, 25 bp, Homo sapien
caggccacgacagggtggccggaac

SEQ ID NO: 3047591 - DNA, 25 bp, Homo sapien
tcaggccacgacagggtggccggaa

SEQ ID NO: 3047592 - DNA, 25 bp, Homo sapien
ggccacgacagggtggccggaactg

SEQ ID NO: 3047593 - DNA, 25 bp, Homo sapien
ccacgacagggtggccggaactggg

SEQ ID NO: 3047594 - DNA, 25 bp, Homo sapien
ttggtcggcccattcgtgggcaccg

SEQ ID NO: 3047595 - DNA, 25 bp, Homo sapien
cattcgtgggcaccgatggcagcag

SEQ ID NO: 3047596 - DNA, 25 bp, Homo sapien
tcggcccattcgtgggcaccgatgg

SEQ ID NO: 3047597 - DNA, 25 bp, Homo sapien
gggcaccgatggcagcaggagcccg

SEQ ID NO: 3047598 - DNA, 25 bp, Homo sapien
catcctcctcaggaagatagaggag

SEQ ID NO: 3047599 - DNA, 25 bp, Homo sapien
gaatgcatcctcctcaggaagatag

SEQ ID NO: 3047600 - DNA, 25 bp, Homo sapien
tgcatcctcctcaggaagatagagg

SEQ ID NO: 3047601 - DNA, 25 bp, Homo sapien
tagaggaggaacaaggcggcgatgt

SEQ ID NO: 3047602 - DNA, 25 bp, Homo sapien
cgggttgtactcctcatatgccagg

SEQ ID NO: 3047603 - DNA, 25 bp, Homo sapien
caggaggatgtggagtagttcccgc

SEQ ID NO: 3047604 - DNA, 25 bp, Homo sapien
gaggatgtggagtagttcccgctgc

SEQ ID NO: 3047605 - DNA, 25 bp, Homo sapien
ggttgtactcctcatatgccaggag

SEQ ID NO: 3047606 - DNA, 25 bp, Homo sapien
cccggtcgatgcgctggatgtgctc

SEQ ID NO: 3047607 - DNA, 25 bp, Homo sapien
ccggtcgatgcgctggatgtgctca

SEQ ID NO: 3047608 - DNA, 25 bp, Homo sapien
tcccggtcgatgcgctggatgtgct

SEQ ID NO: 3047609 - DNA, 25 bp, Homo sapien
gtcccggtcgatgcgctggatgtgc

SEQ ID NO: 3047610 - DNA, 25 bp, Homo sapien
gactgaccacatcgggccccggatg

SEQ ID NO: 3047611 - DNA, 25 bp, Homo sapien
ttcccttgtacgctcgatctatgag

SEQ ID NO: 3047612 - DNA, 25 bp, Homo sapien
catgggcattcccttgtacgctcga

SEQ ID NO: 3047613 - DNA, 25 bp, Homo sapien
ggcattcccttgtacgctcgatcta

SEQ ID NO: 3047614 - DNA, 25 bp, Homo sapien
ccttcccaggactgaaagagtggat

SEQ ID NO: 3047615 - DNA, 25 bp, Homo sapien
gattccctccctgcaaggtgacgct

SEQ ID NO: 3047616 - DNA, 25 bp, Homo sapien
tgacgcttgcacgaataggcaggaa

SEQ ID NO: 3047617 - DNA, 25 bp, Homo sapien
gagtcgaaactctgatctgaacctt

SEQ ID NO: 3047618 - DNA, 25 bp, Homo sapien
tgctctttcggctgatctcccgccg

SEQ ID NO: 3047619 - DNA, 25 bp, Homo sapien
ctttcggctgatctcccgccgaatt

SEQ ID NO: 3047620 - DNA, 25 bp, Homo sapien
tctttcggctgatctcccgccgaat

SEQ ID NO: 3047621 - DNA, 25 bp, Homo sapien
gctctttcggctgatctcccgccga

SEQ ID NO: 3047622 - DNA, 25 bp, Homo sapien
catgttggagttagcggagctgcca

SEQ ID NO: 3047623 - DNA, 25 bp, Homo sapien
ccagagccgcccgcggatgctgggt

SEQ ID NO: 3047624 - DNA, 25 bp, Homo sapien
ttcccagagccgcccgcggatgctg

SEQ ID NO: 3047625 - DNA, 25 bp, Homo sapien
agccgcccgcggatgctgggtcttg

SEQ ID NO: 3047626 - DNA, 25 bp, Homo sapien
agcccctccacgcatcaggctctta

SEQ ID NO: 3047627 - DNA, 25 bp, Homo sapien
agtgacagcgtgttgccctcacccg

SEQ ID NO: 3047628 - DNA, 25 bp, Homo sapien
cccagtccctacgtccctggaccag

SEQ ID NO: 3047629 - DNA, 25 bp, Homo sapien
caaagtgaacagcaacctggggtca

SEQ ID NO: 3047630 - DNA, 25 bp, Homo sapien
cttcgcctcccgcgcagtcagagga

SEQ ID NO: 3047631 - DNA, 25 bp, Homo sapien
gcagtcagaggaggcagctccgtct

SEQ ID NO: 3047632 - DNA, 25 bp, Homo sapien
agtcagaggaggcagctccgtctca

SEQ ID NO: 3047633 - DNA, 25 bp, Homo sapien
tcgcctcccgcgcagtcagaggagg

SEQ ID NO: 3047634 - DNA, 25 bp, Homo sapien
ctgagaaaggttagccctgagatgg

SEQ ID NO: 3047635 - DNA, 25 bp, Homo sapien
ctgcccgtcctggactcgaggtggt

SEQ ID NO: 3047636 - DNA, 25 bp, Homo sapien
tggactcgaggtggtgctttctgct

SEQ ID NO: 3047637 - DNA, 25 bp, Homo sapien
cagggtgggcgaccgggccctgaca

SEQ ID NO: 3047638 - DNA, 25 bp, Homo sapien
caaatgatcgacgttgttgttgtag

SEQ ID NO: 3047639 - DNA, 25 bp, Homo sapien
ccccaaatgatcgacgttgttgttg

SEQ ID NO: 3047640 - DNA, 25 bp, Homo sapien
tgtacaatccccaaatgatcgacgt

SEQ ID NO: 3047641 - DNA, 25 bp, Homo sapien
aatccccaaatgatcgacgttgttg

SEQ ID NO: 3047642 - DNA, 25 bp, Homo sapien
taatgatgtcctctcgctcttgtgc

SEQ ID NO: 3047643 - DNA, 25 bp, Homo sapien
atgatgtcctctcgctcttgtgccc

SEQ ID NO: 3047644 - DNA, 25 bp, Homo sapien
tcctctcgctcttgtgcccaccaac

SEQ ID NO: 3047645 - DNA, 25 bp, Homo sapien
cctctcgctcttgtgcccaccaact

SEQ ID NO: 3047646 - DNA, 25 bp, Homo sapien
gaccagaggtctctgtgcaatcggc

SEQ ID NO: 3047647 - DNA, 25 bp, Homo sapien
actggggtcagcgaccagaggtctc

SEQ ID NO: 3047648 - DNA, 25 bp, Homo sapien
ctcagggcctcagcgatgcccagtt

SEQ ID NO: 3047649 - DNA, 25 bp, Homo sapien
gtgaagggcccatgatgggctattc

SEQ ID NO: 3047650 - DNA, 25 bp, Homo sapien
cagtatgagaatagtgggtcagttt

SEQ ID NO: 3047651 - DNA, 25 bp, Homo sapien
gtatgagaatagtgggtcagttttc

SEQ ID NO: 3047652 - DNA, 25 bp, Homo sapien
tatgagaatagtgggtcagttttct

SEQ ID NO: 3047653 - DNA, 25 bp, Homo sapien
accagtatgagaatagtgggtcagt

SEQ ID NO: 3047654 - DNA, 25 bp, Homo sapien
tattgtacggactttgtatcaccta

SEQ ID NO: 3047655 - DNA, 25 bp, Homo sapien
tcctggttctagatacaactgatac

SEQ ID NO: 3047656 - DNA, 25 bp, Homo sapien
taaaaaatcaattgctgtgtgagag

SEQ ID NO: 3047657 - DNA, 25 bp, Homo sapien
tgaagaagccttagtagccagataa

SEQ ID NO: 3047658 - DNA, 25 bp, Homo sapien
agcagctacaactggcaagtccaag

SEQ ID NO: 3047659 - DNA, 25 bp, Homo sapien
taatctgtggcgacgttctggatgt

SEQ ID NO: 3047660 - DNA, 25 bp, Homo sapien
ctgtggcgacgttctggatgtactg

SEQ ID NO: 3047661 - DNA, 25 bp, Homo sapien
cagcagctacaactggcaagtccaa

SEQ ID NO: 3047662 - DNA, 25 bp, Homo sapien
atttaatgagtaaacacttttatag

SEQ ID NO: 3047663 - DNA, 25 bp, Homo sapien
tatttaatgagtaaacacttttata

SEQ ID NO: 3047664 - DNA, 25 bp, Homo sapien
taggaagtgacaaggctagttgcac

SEQ ID NO: 3047665 - DNA, 25 bp, Homo sapien
gagatgtatattaggattatcccca

SEQ ID NO: 3047666 - DNA, 25 bp, Homo sapien
taatttgtaatataaccctgagatg

SEQ ID NO: 3047667 - DNA, 25 bp, Homo sapien
tcttttgaggcattactgctggaac

SEQ ID NO: 3047668 - DNA, 25 bp, Homo sapien
tagaactggaaaccgaacacaggtg

SEQ ID NO: 3047669 - DNA, 25 bp, Homo sapien
actgggtggtccatccccctcccag

SEQ ID NO: 3047670 - DNA, 25 bp, Homo sapien
aggtagaactggaaaccgaacacag

SEQ ID NO: 3047671 - DNA, 25 bp, Homo sapien
gcttggaaactaagcatatgctcca

SEQ ID NO: 3047672 - DNA, 25 bp, Homo sapien
tccagcttggaaactaagcatatgc

SEQ ID NO: 3047673 - DNA, 25 bp, Homo sapien
tggaaactaagcatatgctccactt

SEQ ID NO: 3047674 - DNA, 25 bp, Homo sapien
aactaagcatatgctccacttcctc

SEQ ID NO: 3047675 - DNA, 25 bp, Homo sapien
agggtcacatccgtctcccagaagc

SEQ ID NO: 3047676 - DNA, 25 bp, Homo sapien
tccatcctggcattacactggcctg

SEQ ID NO: 3047677 - DNA, 25 bp, Homo sapien
ccagaagccgtgcaaccctggaaaa

SEQ ID NO: 3047678 - DNA, 25 bp, Homo sapien
ccaggtctaacagtcaggttcctcc

SEQ ID NO: 3047679 - DNA, 25 bp, Homo sapien
tgctgggtgcagcgaaagccgatct

SEQ ID NO: 3047680 - DNA, 25 bp, Homo sapien
ctgggtgcagcgaaagccgatctca

SEQ ID NO: 3047681 - DNA, 25 bp, Homo sapien
tgggtgcagcgaaagccgatctcac

SEQ ID NO: 3047682 - DNA, 25 bp, Homo sapien
agtgctgggtgcagcgaaagccgat

SEQ ID NO: 3047683 - DNA, 25 bp, Homo sapien
ggtgtggaagaacgaggtgcccgtg

SEQ ID NO: 3047684 - DNA, 25 bp, Homo sapien
tgtggaagaacgaggtgcccgtggc

SEQ ID NO: 3047685 - DNA, 25 bp, Homo sapien
tggaagaacgaggtgcccgtggcgg

SEQ ID NO: 3047686 - DNA, 25 bp, Homo sapien
ggcacaggcctggatgccgacgacc

SEQ ID NO: 3047687 - DNA, 25 bp, Homo sapien
tagaggccctaagatgcttgagcac

SEQ ID NO: 3047688 - DNA, 25 bp, Homo sapien
gcgattcttgttatcggcatcaacg

SEQ ID NO: 3047689 - DNA, 25 bp, Homo sapien
ggcgattcttgttatcggcatcaac

SEQ ID NO: 3047690 - DNA, 25 bp, Homo sapien
gattcttgttatcggcatcaacgcc

SEQ ID NO: 3047691 - DNA, 25 bp, Homo sapien
cgattcttgttatcggcatcaacgc

SEQ ID NO: 3047692 - DNA, 25 bp, Homo sapien
gcctaacggggaacactgcccacat

SEQ ID NO: 3047693 - DNA, 25 bp, Homo sapien
agcctaacggggaacactgcccaca

SEQ ID NO: 3047694 - DNA, 25 bp, Homo sapien
tcttgggttgtgacgtggctaccac

SEQ ID NO: 3047695 - DNA, 25 bp, Homo sapien
acgtggctaccacatgctcctgttg

SEQ ID NO: 3047696 - DNA, 25 bp, Homo sapien
gacggtcccgccatttgggctgtga

SEQ ID NO: 3047697 - DNA, 25 bp, Homo sapien
tgatgccccatggtcttgggttgtg

SEQ ID NO: 3047698 - DNA, 25 bp, Homo sapien
tcaggccacgacagggtggccggaa

SEQ ID NO: 3047699 - DNA, 25 bp, Homo sapien
ggccacgacagggtggccggaactg

SEQ ID NO: 3047700 - DNA, 25 bp, Homo sapien
caggccacgacagggtggccggaac

SEQ ID NO: 3047701 - DNA, 25 bp, Homo sapien
ccacgacagggtggccggaactggg

SEQ ID NO: 3047702 - DNA, 25 bp, Homo sapien
ttggtcggcccattcgtgggcaccg

SEQ ID NO: 3047703 - DNA, 25 bp, Homo sapien
ccattcgtgggcaccgatggcagca

SEQ ID NO: 3047704 - DNA, 25 bp, Homo sapien
cgtgggcaccgatggcagcaggggc

SEQ ID NO: 3047705 - DNA, 25 bp, Homo sapien
ggcaccgatggcagcaggggcccgg

SEQ ID NO: 3047706 - DNA, 25 bp, Homo sapien
catcctcctcaggaagatagaggag

SEQ ID NO: 3047707 - DNA, 25 bp, Homo sapien
gaatgcatcctcctcaggaagatag

SEQ ID NO: 3047708 - DNA, 25 bp, Homo sapien
tagaggaggaacaaggcggcgatgt

SEQ ID NO: 3047709 - DNA, 25 bp, Homo sapien
tgcatcctcctcaggaagatagagg

SEQ ID NO: 3047710 - DNA, 25 bp, Homo sapien
cgggttgtactcctcatatgccagg

SEQ ID NO: 3047711 - DNA, 25 bp, Homo sapien
caggaggatgtggagtagttcccgc

SEQ ID NO: 3047712 - DNA, 25 bp, Homo sapien
gaggatgtggagtagttcccgctgc

SEQ ID NO: 3047713 - DNA, 25 bp, Homo sapien
ggttgtactcctcatatgccaggag

SEQ ID NO: 3047714 - DNA, 25 bp, Homo sapien
cccggtcgatgcgctggatgtgctc

SEQ ID NO: 3047715 - DNA, 25 bp, Homo sapien
ccggtcgatgcgctggatgtgctca

SEQ ID NO: 3047716 - DNA, 25 bp, Homo sapien
tcccggtcgatgcgctggatgtgct

SEQ ID NO: 3047717 - DNA, 25 bp, Homo sapien
gtcccggtcgatgcgctggatgtgc

SEQ ID NO: 3047718 - DNA, 25 bp, Homo sapien
ttcccttgtacgctcgatctatgag

SEQ ID NO: 3047719 - DNA, 25 bp, Homo sapien
gactgaccacatcgggccccggatg

SEQ ID NO: 3047720 - DNA, 25 bp, Homo sapien
catgggcattcccttgtacgctcga

SEQ ID NO: 3047721 - DNA, 25 bp, Homo sapien
ggcattcccttgtacgctcgatcta

SEQ ID NO: 3047722 - DNA, 25 bp, Homo sapien
gctctttcggctgatctcccgccga

SEQ ID NO: 3047723 - DNA, 25 bp, Homo sapien
ctttcggctgatctcccgccgaatt

SEQ ID NO: 3047724 - DNA, 25 bp, Homo sapien
tctttcggctgatctcccgccgaat

SEQ ID NO: 3047725 - DNA, 25 bp, Homo sapien
tgctctttcggctgatctcccgccg

SEQ ID NO: 3047726 - DNA, 25 bp, Homo sapien
ccagagccgcccgcggatgctgggt

SEQ ID NO: 3047727 - DNA, 25 bp, Homo sapien
ttcccagagccgcccgcggatgctg

SEQ ID NO: 3047728 - DNA, 25 bp, Homo sapien
agccgcccgcggatgctgggtcttg

SEQ ID NO: 3047729 - DNA, 25 bp, Homo sapien
catgttggagttagcggagctgcca

SEQ ID NO: 3047730 - DNA, 25 bp, Homo sapien
agcccctccacgcatcaggctctta

SEQ ID NO: 3047731 - DNA, 25 bp, Homo sapien
agtgacagcgtgttgccctcacccg

SEQ ID NO: 3047732 - DNA, 25 bp, Homo sapien
caaagtgaacagcaacctggggtca

SEQ ID NO: 3047733 - DNA, 25 bp, Homo sapien
cccagtccctacgtccctggaccag

SEQ ID NO: 3047734 - DNA, 25 bp, Homo sapien
gcagtcagaggaggcagctccgtct

SEQ ID NO: 3047735 - DNA, 25 bp, Homo sapien
tcgcctcccgcgcagtcagaggagg

SEQ ID NO: 3047736 - DNA, 25 bp, Homo sapien
agtcagaggaggcagctccgtctca

SEQ ID NO: 3047737 - DNA, 25 bp, Homo sapien
cttcgcctcccgcgcagtcagagga

SEQ ID NO: 3047738 - DNA, 25 bp, Homo sapien
ctgcccgtcctggactcgaggtggt

SEQ ID NO: 3047739 - DNA, 25 bp, Homo sapien
ctgagaaaggttagccctgagatgg

SEQ ID NO: 3047740 - DNA, 25 bp, Homo sapien
cagggtgggcgaccgggccctgaca

SEQ ID NO: 3047741 - DNA, 25 bp, Homo sapien
tggactcgaggtggtgctttctgct

SEQ ID NO: 3047742 - DNA, 25 bp, Homo sapien
caaatgatcgacgttgttgttgtag

SEQ ID NO: 3047743 - DNA, 25 bp, Homo sapien
aatccccaaatgatcgacgttgttg

SEQ ID NO: 3047744 - DNA, 25 bp, Homo sapien
tgtacaatccccaaatgatcgacgt

SEQ ID NO: 3047745 - DNA, 25 bp, Homo sapien
ccccaaatgatcgacgttgttgttg

SEQ ID NO: 3047746 - DNA, 25 bp, Homo sapien
cctctcgctcttgtgcccaccaact

SEQ ID NO: 3047747 - DNA, 25 bp, Homo sapien
taatgatgtcctctcgctcttgtgc

SEQ ID NO: 3047748 - DNA, 25 bp, Homo sapien
atgatgtcctctcgctcttgtgccc

SEQ ID NO: 3047749 - DNA, 25 bp, Homo sapien
tcctctcgctcttgtgcccaccaac

SEQ ID NO: 3047750 - DNA, 25 bp, Homo sapien
tttccacctgccaagggtgaagggc

SEQ ID NO: 3047751 - DNA, 25 bp, Homo sapien
ggccccagcaggttgaatggtttcc

SEQ ID NO: 3047752 - DNA, 25 bp, Homo sapien
cggccccagcaggttgaatggtttc

SEQ ID NO: 3047753 - DNA, 25 bp, Homo sapien
aatggtttccacctgccaagggtga

SEQ ID NO: 3047754 - DNA, 25 bp, Homo sapien
gtattttaagatttcatgtcaaagc

SEQ ID NO: 3047755 - DNA, 25 bp, Homo sapien
gcgcccggccaccatttatggggta

SEQ ID NO: 3047756 - DNA, 25 bp, Homo sapien
tttaagatttcatgtcaaagctcca

SEQ ID NO: 3047757 - DNA, 25 bp, Homo sapien
tggggtattttaagatttcatgtca

SEQ ID NO: 3047758 - DNA, 25 bp, Homo sapien
tcactgtgcagggagcatgctaatc

SEQ ID NO: 3047759 - DNA, 25 bp, Homo sapien
atgtcatcactgtgcagggagcatg

SEQ ID NO: 3047760 - DNA, 25 bp, Homo sapien
tgcatgtcatcactgtgcagggagc

SEQ ID NO: 3047761 - DNA, 25 bp, Homo sapien
catcactgtgcagggagcatgctaa

SEQ ID NO: 3047762 - DNA, 25 bp, Homo sapien
aggtagaactggaaaccgaacacag

SEQ ID NO: 3047763 - DNA, 25 bp, Homo sapien
tagaactggaaaccgaacacaggtg

SEQ ID NO: 3047764 - DNA, 25 bp, Homo sapien
actgggtggtccatccccctcccag

SEQ ID NO: 3047765 - DNA, 25 bp, Homo sapien
caagagtgttttcagtgacccggct

SEQ ID NO: 3047766 - DNA, 25 bp, Homo sapien
cctggcagttccggactcctgggaa

SEQ ID NO: 3047767 - DNA, 25 bp, Homo sapien
caccttggcctaggcctctatacag

SEQ ID NO: 3047768 - DNA, 25 bp, Homo sapien
ggcctctatacagcacagatcacag

SEQ ID NO: 3047769 - DNA, 25 bp, Homo sapien
ttcctcctccgtgcattaacaatgg

SEQ ID NO: 3047770 - DNA, 25 bp, Homo sapien
cgaagcttgcttgggttgttaagcc

SEQ ID NO: 3047771 - DNA, 25 bp, Homo sapien
gggaaattatccagccatgagccct

SEQ ID NO: 3047772 - DNA, 25 bp, Homo sapien
tgcttgggttgttaagcctagggaa

SEQ ID NO: 3047773 - DNA, 25 bp, Homo sapien
cagaattcagaacgatggtcgtggg

SEQ ID NO: 3047774 - DNA, 25 bp, Homo sapien
agtgctgggtgcagcgaaagccgat

SEQ ID NO: 3047775 - DNA, 25 bp, Homo sapien
ctgggtgcagcgaaagccgatctca

SEQ ID NO: 3047776 - DNA, 25 bp, Homo sapien
tgctgggtgcagcgaaagccgatct

SEQ ID NO: 3047777 - DNA, 25 bp, Homo sapien
tgggtgcagcgaaagccgatctcac

SEQ ID NO: 3047778 - DNA, 25 bp, Homo sapien
tgggatatggcacggacccagcagc

SEQ ID NO: 3047779 - DNA, 25 bp, Homo sapien
cctgggatatggcacggacccagca

SEQ ID NO: 3047780 - DNA, 25 bp, Homo sapien
tcctgggatatggcacggacccagc

SEQ ID NO: 3047781 - DNA, 25 bp, Homo sapien
ggatatggcacggacccagcagctc

SEQ ID NO: 3047782 - DNA, 25 bp, Homo sapien
ggtgtggaagaacgaggtgcccgtg

SEQ ID NO: 3047783 - DNA, 25 bp, Homo sapien
tgtggaagaacgaggtgcccgtggc

SEQ ID NO: 3047784 - DNA, 25 bp, Homo sapien
ggcacaggcctggatgccgacgacc

SEQ ID NO: 3047785 - DNA, 25 bp, Homo sapien
tggaagaacgaggtgcccgtggcgg

SEQ ID NO: 3047786 - DNA, 25 bp, Homo sapien
aaaacagacgcggtcagcatctcca

SEQ ID NO: 3047787 - DNA, 25 bp, Homo sapien
gaaaggaaaacagacgcggtcagca

SEQ ID NO: 3047788 - DNA, 25 bp, Homo sapien
ctgtcgtggcatggcgggtggctcc

SEQ ID NO: 3047789 - DNA, 25 bp, Homo sapien
agcatctccagtgagcccacgcagg

SEQ ID NO: 3047790 - DNA, 25 bp, Homo sapien
tagaggccctaagatgcttgagcac

SEQ ID NO: 3047791 - DNA, 25 bp, Homo sapien
cgattcttgttatcggcatcaacgc

SEQ ID NO: 3047792 - DNA, 25 bp, Homo sapien
ggcgattcttgttatcggcatcaac

SEQ ID NO: 3047793 - DNA, 25 bp, Homo sapien
gcgattcttgttatcggcatcaacg

SEQ ID NO: 3047794 - DNA, 25 bp, Homo sapien
gattcttgttatcggcatcaacgcc

SEQ ID NO: 3047795 - DNA, 25 bp, Homo sapien
cagtctgcccatgaggctgggcctg

SEQ ID NO: 3047796 - DNA, 25 bp, Homo sapien
gcactgcagggcaaggaaggtccct

SEQ ID NO: 3047797 - DNA, 25 bp, Homo sapien
ttccctgagccctctcaagtcgggt

SEQ ID NO: 3047798 - DNA, 25 bp, Homo sapien
ccaggacgctgggtcagacaaggtc

SEQ ID NO: 3047799 - DNA, 25 bp, Homo sapien
gcctaacggggaacactgcccacat

SEQ ID NO: 3047800 - DNA, 25 bp, Homo sapien
agcctaacggggaacactgcccaca

SEQ ID NO: 3047801 - DNA, 25 bp, Homo sapien
tgatgccccatggtcttgggttgtg

SEQ ID NO: 3047802 - DNA, 25 bp, Homo sapien
tcttgggttgtgacgtggctaccac

SEQ ID NO: 3047803 - DNA, 25 bp, Homo sapien
acgtggctaccacatgctcctgttg

SEQ ID NO: 3047804 - DNA, 25 bp, Homo sapien
gacggtcccgccatttgggctgtga

SEQ ID NO: 3047805 - DNA, 25 bp, Homo sapien
tcaggccacgacagggtggccggaa

SEQ ID NO: 3047806 - DNA, 25 bp, Homo sapien
caggccacgacagggtggccggaac

SEQ ID NO: 3047807 - DNA, 25 bp, Homo sapien
ccacgacagggtggccggaactggg

SEQ ID NO: 3047808 - DNA, 25 bp, Homo sapien
ggccacgacagggtggccggaactg

SEQ ID NO: 3047809 - DNA, 25 bp, Homo sapien
ctgggcttggtcggcccgttcgtgg

SEQ ID NO: 3047810 - DNA, 25 bp, Homo sapien
ccgttcgtgggcaccgatggcagca

SEQ ID NO: 3047811 - DNA, 25 bp, Homo sapien
tggtcggcccgttcgtgggcaccga

SEQ ID NO: 3047812 - DNA, 25 bp, Homo sapien
tcggcccgttcgtgggcaccgatgg

SEQ ID NO: 3047813 - DNA, 25 bp, Homo sapien
gaatgcatcctcctcaggaagatag

SEQ ID NO: 3047814 - DNA, 25 bp, Homo sapien
tagaggaggaacaaggcggcgatgt

SEQ ID NO: 3047815 - DNA, 25 bp, Homo sapien
tgcatcctcctcaggaagatagagg

SEQ ID NO: 3047816 - DNA, 25 bp, Homo sapien
catcctcctcaggaagatagaggag

SEQ ID NO: 3047817 - DNA, 25 bp, Homo sapien
gcagaggtgactggagaggcttcct

SEQ ID NO: 3047818 - DNA, 25 bp, Homo sapien
agaggcttcctctgaaggagaggct

SEQ ID NO: 3047819 - DNA, 25 bp, Homo sapien
tgactggagaggcttcctctgaagg

SEQ ID NO: 3047820 - DNA, 25 bp, Homo sapien
ctggagaggcttcctctgaaggaga

SEQ ID NO: 3047821 - DNA, 25 bp, Homo sapien
ggttgtactcctcatatgccaggag

SEQ ID NO: 3047822 - DNA, 25 bp, Homo sapien
caggaggatgtggagtagttcccgc

SEQ ID NO: 3047823 - DNA, 25 bp, Homo sapien
gaggatgtggagtagttcccgctgc

SEQ ID NO: 3047824 - DNA, 25 bp, Homo sapien
cgggttgtactcctcatatgccagg

SEQ ID NO: 3047825 - DNA, 25 bp, Homo sapien
cccggtcgatgcgctggatgtgctc

SEQ ID NO: 3047826 - DNA, 25 bp, Homo sapien
ccggtcgatgcgctggatgtgctca

SEQ ID NO: 3047827 - DNA, 25 bp, Homo sapien
tcccggtcgatgcgctggatgtgct

SEQ ID NO: 3047828 - DNA, 25 bp, Homo sapien
gtcccggtcgatgcgctggatgtgc

SEQ ID NO: 3047829 - DNA, 25 bp, Homo sapien
ttcccttgtacgctcgatctatgag

SEQ ID NO: 3047830 - DNA, 25 bp, Homo sapien
catgggcattcccttgtacgctcga

SEQ ID NO: 3047831 - DNA, 25 bp, Homo sapien
tcaacttcatttcctcagtgttcag

SEQ ID NO: 3047832 - DNA, 25 bp, Homo sapien
catttcctcagtgttcaggaggact

SEQ ID NO: 3047833 - DNA, 25 bp, Homo sapien
gattccctccctgcaaggtgacgct

SEQ ID NO: 3047834 - DNA, 25 bp, Homo sapien
ccttcccaggactgaaagagtggat

SEQ ID NO: 3047835 - DNA, 25 bp, Homo sapien
tgacgcttgcacgaataggcaggaa

SEQ ID NO: 3047836 - DNA, 25 bp, Homo sapien
gagtcgaaactctgatctgaacctt

SEQ ID NO: 3047837 - DNA, 25 bp, Homo sapien
tctcccagtctcccagcatatccac

SEQ ID NO: 3047838 - DNA, 25 bp, Homo sapien
gtatttctcccagtctcccagcata

SEQ ID NO: 3047839 - DNA, 25 bp, Homo sapien
ccagtctcccagcatatccacccac

SEQ ID NO: 3047840 - DNA, 25 bp, Homo sapien
tcccagtctcccagcatatccaccc

SEQ ID NO: 3047841 - DNA, 25 bp, Homo sapien
tgctctttcggctgatctcccgccg

SEQ ID NO: 3047842 - DNA, 25 bp, Homo sapien
gctctttcggctgatctcccgccga

SEQ ID NO: 3047843 - DNA, 25 bp, Homo sapien
tctttcggctgatctcccgccgaat

SEQ ID NO: 3047844 - DNA, 25 bp, Homo sapien
ctttcggctgatctcccgccgaatt

SEQ ID NO: 3047845 - DNA, 25 bp, Homo sapien
catgttggagttagcggagctgcca

SEQ ID NO: 3047846 - DNA, 25 bp, Homo sapien
ccagagccgcccgcggatgctgggt

SEQ ID NO: 3047847 - DNA, 25 bp, Homo sapien
ttcccagagccgcccgcggatgctg

SEQ ID NO: 3047848 - DNA, 25 bp, Homo sapien
agccgcccgcggatgctgggtcttg

SEQ ID NO: 3047849 - DNA, 25 bp, Homo sapien
taggtcccagcctctaggtggggtc

SEQ ID NO: 3047850 - DNA, 25 bp, Homo sapien
cgggatgtaccatcctcaggccaca

SEQ ID NO: 3047851 - DNA, 25 bp, Homo sapien
gctggctttgggaccccgggatgta

SEQ ID NO: 3047852 - DNA, 25 bp, Homo sapien
cagacacaccagtcttaggtcccag

SEQ ID NO: 3047853 - DNA, 25 bp, Homo sapien
gcagtcagaggaggcagctccgtct

SEQ ID NO: 3047854 - DNA, 25 bp, Homo sapien
tcgcctcccgcgcagtcagaggagg

SEQ ID NO: 3047855 - DNA, 25 bp, Homo sapien
agtcagaggaggcagctccgtctca

SEQ ID NO: 3047856 - DNA, 25 bp, Homo sapien
cttcgcctcccgcgcagtcagagga

SEQ ID NO: 3047857 - DNA, 25 bp, Homo sapien
ctccccagggatcctctgtctctcc

SEQ ID NO: 3047858 - DNA, 25 bp, Homo sapien
tgggctcctcttacccggccccaga

SEQ ID NO: 3047859 - DNA, 25 bp, Homo sapien
aagtggcacggctcgtcagctccct

SEQ ID NO: 3047860 - DNA, 25 bp, Homo sapien
caccctgcgtttcagaagtggcacg

SEQ ID NO: 3047861 - DNA, 25 bp, Homo sapien
tcttgtgctcacttgccgacagaac

SEQ ID NO: 3047862 - DNA, 25 bp, Homo sapien
ttgtgctcacttgccgacagaactg

SEQ ID NO: 3047863 - DNA, 25 bp, Homo sapien
tgccccgctcctcttgtgctcactt

SEQ ID NO: 3047864 - DNA, 25 bp, Homo sapien
tcctcttgtgctcacttgccgacag

SEQ ID NO: 3047865 - DNA, 25 bp, Homo sapien
caaatgatcgacgttgttgttgtag

SEQ ID NO: 3047866 - DNA, 25 bp, Homo sapien
aatccccaaatgatcgacgttgttg

SEQ ID NO: 3047867 - DNA, 25 bp, Homo sapien
ccccaaatgatcgacgttgttgttg

SEQ ID NO: 3047868 - DNA, 25 bp, Homo sapien
tgtacaatccccaaatgatcgacgt

SEQ ID NO: 3047869 - DNA, 25 bp, Homo sapien
tcctctcgctcttgtgcccaccaac

SEQ ID NO: 3047870 - DNA, 25 bp, Homo sapien
taatgatgtcctctcgctcttgtgc

SEQ ID NO: 3047871 - DNA, 25 bp, Homo sapien
cctctcgctcttgtgcccaccaact

SEQ ID NO: 3047872 - DNA, 25 bp, Homo sapien
atgatgtcctctcgctcttgtgccc

SEQ ID NO: 3047873 - DNA, 25 bp, Homo sapien
ctgtgagacagaattgtctaaaggt

SEQ ID NO: 3047874 - DNA, 25 bp, Homo sapien
gtgagacagaattgtctaaaggtca

SEQ ID NO: 3047875 - DNA, 25 bp, Homo sapien
tgtgagacagaattgtctaaaggtc

SEQ ID NO: 3047876 - DNA, 25 bp, Homo sapien
ctggagtctcaagtcccaagcaggg

SEQ ID NO: 3047877 - DNA, 25 bp, Homo sapien
ctgaaccgctctcgccgggctccca

SEQ ID NO: 3047878 - DNA, 25 bp, Homo sapien
ggagaacacctgaaccgctctcgcc

SEQ ID NO: 3047879 - DNA, 25 bp, Homo sapien
acacctgaaccgctctcgccgggct

SEQ ID NO: 3047880 - DNA, 25 bp, Homo sapien
tgccatgaaatggggacacaccggc

SEQ ID NO: 3047881 - DNA, 25 bp, Homo sapien
tgaaatggggacacaccggccccag

SEQ ID NO: 3047882 - DNA, 25 bp, Homo sapien
ccatgaaatggggacacaccggccc

SEQ ID NO: 3047883 - DNA, 25 bp, Homo sapien
catgaaatggggacacaccggcccc

SEQ ID NO: 3047884 - DNA, 25 bp, Homo sapien
ggctaccgtggctcttcagtctgaa

SEQ ID NO: 3047885 - DNA, 25 bp, Homo sapien
attctgagccgtcccaacaggagga

SEQ ID NO: 3047886 - DNA, 25 bp, Homo sapien
ggttctactccgctcatcactttgg

SEQ ID NO: 3047887 - DNA, 25 bp, Homo sapien
gaagccactttaggaataacgcctg

SEQ ID NO: 3047888 - DNA, 25 bp, Homo sapien
gggtcatgcctctcagggagaaaac

SEQ ID NO: 3047889 - DNA, 25 bp, Homo sapien
agagctgctcacagataccactgcc

SEQ ID NO: 3047890 - DNA, 25 bp, Homo sapien
gaaaacctttgagtccacagagctg

SEQ ID NO: 3047891 - DNA, 25 bp, Homo sapien
tctgatgaatcagctggcctgggtc

SEQ ID NO: 3047892 - DNA, 25 bp, Homo sapien
catggctgctccctaacctcagccc

SEQ ID NO: 3047893 - DNA, 25 bp, Homo sapien
gtgtatgtgggtaaacacatctgtg

SEQ ID NO: 3047894 - DNA, 25 bp, Homo sapien
ctattacctaatggtctttttagtg

SEQ ID NO: 3047895 - DNA, 25 bp, Homo sapien
gtgggtaaacacatctgtgcacgtg

SEQ ID NO: 3047896 - DNA, 25 bp, Homo sapien
ctgggtatttctctccatgaccctt

SEQ ID NO: 3047897 - DNA, 25 bp, Homo sapien
tatttctctccatgacccttggata

SEQ ID NO: 3047898 - DNA, 25 bp, Homo sapien
aactgggtatttctctccatgaccc

SEQ ID NO: 3047899 - DNA, 25 bp, Homo sapien
ggtatttctctccatgacccttgga

SEQ ID NO: 3047900 - DNA, 25 bp, Homo sapien
tctgtccttccacacagggcctagg

SEQ ID NO: 3047901 - DNA, 25 bp, Homo sapien
gggctcactcttctagacatgttat

SEQ ID NO: 3047902 - DNA, 25 bp, Homo sapien
catgttatctaaaacctggttcatc

SEQ ID NO: 3047903 - DNA, 25 bp, Homo sapien
cagaaagagcttgggataaaaagaa

SEQ ID NO: 3047904 - DNA, 25 bp, Homo sapien
ggtgccacgattgctcactgtaacc

SEQ ID NO: 3047905 - DNA, 25 bp, Homo sapien
agtggtgccacgattgctcactgta

SEQ ID NO: 3047906 - DNA, 25 bp, Homo sapien
agtgcagtggtgccacgattgctca

SEQ ID NO: 3047907 - DNA, 25 bp, Homo sapien
gctcaagtgacccttcccacttcag

SEQ ID NO: 3047908 - DNA, 25 bp, Homo sapien
tctccatttctatctcaagctatta

SEQ ID NO: 3047909 - DNA, 25 bp, Homo sapien
cctggatagagtgacaatactttct

SEQ ID NO: 3047910 - DNA, 25 bp, Homo sapien
gaccttgagttaagtattcagaaca

SEQ ID NO: 3047911 - DNA, 25 bp, Homo sapien
aataaaatgtcccagcctggataga

SEQ ID NO: 3047912 - DNA, 25 bp, Homo sapien
tggaacttggttaaatacatgttca

SEQ ID NO: 3047913 - DNA, 25 bp, Homo sapien
tgcggcagcattcttttgttggaac

SEQ ID NO: 3047914 - DNA, 25 bp, Homo sapien
ttgttggaacttggttaaatacatg

SEQ ID NO: 3047915 - DNA, 25 bp, Homo sapien
ctgcggcagcattcttttgttggaa

SEQ ID NO: 3047916 - DNA, 25 bp, Homo sapien
tatatgatatagcatcaaatatctc

SEQ ID NO: 3047917 - DNA, 25 bp, Homo sapien
cagatgcacctttgctatatgatat

SEQ ID NO: 3047918 - DNA, 25 bp, Homo sapien
gcagcattcggatgacagatgcacc

SEQ ID NO: 3047919 - DNA, 25 bp, Homo sapien
aacctcagatggatggcccacactg

SEQ ID NO: 3047920 - DNA, 25 bp, Homo sapien
gtgattcagggttatgacaggaagc

SEQ ID NO: 3047921 - DNA, 25 bp, Homo sapien
tgtgattcagggttatgacaggaag

SEQ ID NO: 3047922 - DNA, 25 bp, Homo sapien
tatctaaggcgtcaagctcctgggc

SEQ ID NO: 3047923 - DNA, 25 bp, Homo sapien
ctcctgggcacgggtgtaatcagca

SEQ ID NO: 3047924 - DNA, 25 bp, Homo sapien
agcagtggtctacacacagatattc

SEQ ID NO: 3047925 - DNA, 25 bp, Homo sapien
ctctgggaagcagtggtctacacac

SEQ ID NO: 3047926 - DNA, 25 bp, Homo sapien
gaaaactatcagagccaaataaaga

SEQ ID NO: 3047927 - DNA, 25 bp, Homo sapien
gataaatataggcaaatagaggtgg

SEQ ID NO: 3047928 - DNA, 25 bp, Homo sapien
caaagaatatgagtgacagataaaa

SEQ ID NO: 3047929 - DNA, 25 bp, Homo sapien
gaaaaccactcactaatgagttgaa

SEQ ID NO: 3047930 - DNA, 25 bp, Homo sapien
ggaagatgaagctgcactgacccat

SEQ ID NO: 3047931 - DNA, 25 bp, Homo sapien
gatgaagctgcactgacccatgatt

SEQ ID NO: 3047932 - DNA, 25 bp, Homo sapien
aagctgcactgacccatgattgtgc

SEQ ID NO: 3047933 - DNA, 25 bp, Homo sapien
aggattacataagcccaggaagatg

SEQ ID NO: 3047934 - DNA, 25 bp, Homo sapien
agcccagaggtcaagactgtaatga

SEQ ID NO: 3047935 - DNA, 25 bp, Homo sapien
cccagaggtcaagactgtaatgaac

SEQ ID NO: 3047936 - DNA, 25 bp, Homo sapien
gcccagaggtcaagactgtaatgaa

SEQ ID NO: 3047937 - DNA, 25 bp, Homo sapien
gagtttcgcaacattggtcagggtg

SEQ ID NO: 3047938 - DNA, 25 bp, Homo sapien
tgaataaagactgtccatatgccct

SEQ ID NO: 3047939 - DNA, 25 bp, Homo sapien
catatgcccttgttcaatgcagaga

SEQ ID NO: 3047940 - DNA, 25 bp, Homo sapien
gtgctcccaagctctaacacagttg

SEQ ID NO: 3047941 - DNA, 25 bp, Homo sapien
tggatcaataagcaatgcagtctcc

SEQ ID NO: 3047942 - DNA, 25 bp, Homo sapien
ttttggatcaataagcaatgcagtc

SEQ ID NO: 3047943 - DNA, 25 bp, Homo sapien
gaagaacaggaattttttggatcaa

SEQ ID NO: 3047944 - DNA, 25 bp, Homo sapien
ttttttggatcaataagcaatgcag

SEQ ID NO: 3047945 - DNA, 25 bp, Homo sapien
tagaatagctgcctgaaattttggg

SEQ ID NO: 3047946 - DNA, 25 bp, Homo sapien
tctaagggattagcgattactgtgc

SEQ ID NO: 3047947 - DNA, 25 bp, Homo sapien
tgagccggccgttcaacacttagct

SEQ ID NO: 3047948 - DNA, 25 bp, Homo sapien
tagctgtgaaactactggcaggaaa

SEQ ID NO: 3047949 - DNA, 25 bp, Homo sapien
taagtaacaaggtcccagttctcca

SEQ ID NO: 3047950 - DNA, 25 bp, Homo sapien
ctataagtaacaaggtcccagttct

SEQ ID NO: 3047951 - DNA, 25 bp, Homo sapien
taacaaggtcccagttctccatggc

SEQ ID NO: 3047952 - DNA, 25 bp, Homo sapien
acaaggtcccagttctccatggcac

SEQ ID NO: 3047953 - DNA, 25 bp, Homo sapien
aattcagcaataaaatgaaatttac

SEQ ID NO: 3047954 - DNA, 25 bp, Homo sapien
caaagtctgcaatagcaatgagatc

SEQ ID NO: 3047955 - DNA, 25 bp, Homo sapien
gagatcaattttaggtagaggataa

SEQ ID NO: 3047956 - DNA, 25 bp, Homo sapien
taaaaaggcaaggttttagcagcaa

SEQ ID NO: 3047957 - DNA, 25 bp, Homo sapien
gataaggaacattgaagtagtcctt

SEQ ID NO: 3047958 - DNA, 25 bp, Homo sapien
caacccattccctagagaaattcca

SEQ ID NO: 3047959 - DNA, 25 bp, Homo sapien
taaaccaagtagcacaactttcaga

SEQ ID NO: 3047960 - DNA, 25 bp, Homo sapien
cctggagttatggactgctggaaca

SEQ ID NO: 3047961 - DNA, 25 bp, Homo sapien
gaaacaccaaggttggcatttccta

SEQ ID NO: 3047962 - DNA, 25 bp, Homo sapien
taacaggtgtgcgggcaaacttcac

SEQ ID NO: 3047963 - DNA, 25 bp, Homo sapien
taaattttcatcatcagggtatggt

SEQ ID NO: 3047964 - DNA, 25 bp, Homo sapien
tacaaagtcatattcacccacaaca

SEQ ID NO: 3047965 - DNA, 25 bp, Homo sapien
gcgggcaaacttcacttccactaaa

SEQ ID NO: 3047966 - DNA, 25 bp, Homo sapien
catgtttgataaagctactctgtct

SEQ ID NO: 3047967 - DNA, 25 bp, Homo sapien
tttaggaacaaccaatgagatatca

SEQ ID NO: 3047968 - DNA, 25 bp, Homo sapien
gctactctgtctttaggaacaacca

SEQ ID NO: 3047969 - DNA, 25 bp, Homo sapien
ccaatgagatatcaaaagttgcttt

SEQ ID NO: 3047970 - DNA, 25 bp, Homo sapien
tcatcctggcctacgtaggacagca

SEQ ID NO: 3047971 - DNA, 25 bp, Homo sapien
tgtgaatacaatcatggccaagggc

SEQ ID NO: 3047972 - DNA, 25 bp, Homo sapien
taaatcttatctatacggaggccag

SEQ ID NO: 3047973 - DNA, 25 bp, Homo sapien
tctaacagggagaataacgcgggct

SEQ ID NO: 3047974 - DNA, 25 bp, Homo sapien
gttacagcagcatagcgcacctctc

SEQ ID NO: 3047975 - DNA, 25 bp, Homo sapien
cagcatagcgcacctctccagaagg

SEQ ID NO: 3047976 - DNA, 25 bp, Homo sapien
gcagcatagcgcacctctccagaag

SEQ ID NO: 3047977 - DNA, 25 bp, Homo sapien
agcagcatagcgcacctctccagaa

SEQ ID NO: 3047978 - DNA, 25 bp, Homo sapien
tgtcattcagctctccaacaaaatc

SEQ ID NO: 3047979 - DNA, 25 bp, Homo sapien
ttgtcattcagctctccaacaaaat

SEQ ID NO: 3047980 - DNA, 25 bp, Homo sapien
ccacttccaaaaagtggcatactaa

SEQ ID NO: 3047981 - DNA, 25 bp, Homo sapien
atctccaaggccatcaaaccataac

SEQ ID NO: 3047982 - DNA, 25 bp, Homo sapien
gatattgacagtgaccacttccaaa

SEQ ID NO: 3047983 - DNA, 25 bp, Homo sapien
accataacaagatattgacagtgac

SEQ ID NO: 3047984 - DNA, 25 bp, Homo sapien
cagtttaaaatacgtaagctccagg

SEQ ID NO: 3047985 - DNA, 25 bp, Homo sapien
gacttctaaatgtcttgcttacaca

SEQ ID NO: 3047986 - DNA, 25 bp, Homo sapien
cctgcccctagaagcaatcaatttc

SEQ ID NO: 3047987 - DNA, 25 bp, Homo sapien
gagccacgaccacggcctatttctt

SEQ ID NO: 3047988 - DNA, 25 bp, Homo sapien
aaggctcctgctctatcagttcaag

SEQ ID NO: 3047989 - DNA, 25 bp, Homo sapien
tttttaagctagtctctctcaatgg

SEQ ID NO: 3047990 - DNA, 25 bp, Homo sapien
caatggtgtacctttgcaaactgaa

SEQ ID NO: 3047991 - DNA, 25 bp, Homo sapien
tcagttcaaggaaatgttcctgtct

SEQ ID NO: 3047992 - DNA, 25 bp, Homo sapien
tgtctgttaaatgctaccccagtga

SEQ ID NO: 3047993 - DNA, 25 bp, Homo sapien
tgtgagtagacatcaagtataccac

SEQ ID NO: 3047994 - DNA, 25 bp, Homo sapien
gaaacttttcgcaaatgtctgttaa

SEQ ID NO: 3047995 - DNA, 25 bp, Homo sapien
ctttgggcttggtcatgctacttgc

SEQ ID NO: 3047996 - DNA, 25 bp, Homo sapien
agattttacaaaagctatgtctctt

SEQ ID NO: 3047997 - DNA, 25 bp, Homo sapien
gattttacaaaagctatgtctctta

SEQ ID NO: 3047998 - DNA, 25 bp, Homo sapien
ttgcagagtactagggaaagacaag

SEQ ID NO: 3047999 - DNA, 25 bp, Homo sapien
ggaaagacaaggtgactttttcatc

SEQ ID NO: 3048000 - DNA, 25 bp, Homo sapien
tgcagagtactagggaaagacaagg

SEQ ID NO: 3048001 - DNA, 25 bp, Homo sapien
gaaagacaaggtgactttttcatct

SEQ ID NO: 3048002 - DNA, 25 bp, Homo sapien
tgcagaagataccaccagctgagca

SEQ ID NO: 3048003 - DNA, 25 bp, Homo sapien
tctggccaaccagcttcaagtcagt

SEQ ID NO: 3048004 - DNA, 25 bp, Homo sapien
ttcagacactagttgtaaggccagg

SEQ ID NO: 3048005 - DNA, 25 bp, Homo sapien
ggacaaagtaggacctaatgctaac

SEQ ID NO: 3048006 - DNA, 25 bp, Homo sapien
tctatctaggtagcacagtgagact

SEQ ID NO: 3048007 - DNA, 25 bp, Homo sapien
aaagctcccctagatactagcaaac

SEQ ID NO: 3048008 - DNA, 25 bp, Homo sapien
gctgaggctataggccccagggaca

SEQ ID NO: 3048009 - DNA, 25 bp, Homo sapien
tgatatcctaccaggaaagatgaac

SEQ ID NO: 3048010 - DNA, 25 bp, Homo sapien
tatgattgatgagttataaacacca

SEQ ID NO: 3048011 - DNA, 25 bp, Homo sapien
atgattgatgagttataaacaccac

SEQ ID NO: 3048012 - DNA, 25 bp, Homo sapien
actggctatgattgatgagttataa

SEQ ID NO: 3048013 - DNA, 25 bp, Homo sapien
atctgtaactggctatgattgatga

SEQ ID NO: 3048014 - DNA, 25 bp, Homo sapien
aaaacagcagtcactaaagcaatcc

SEQ ID NO: 3048015 - DNA, 25 bp, Homo sapien
gcaatccatatcaccttaaggctat

SEQ ID NO: 3048016 - DNA, 25 bp, Homo sapien
taaaactattctacgctcatatact

SEQ ID NO: 3048017 - DNA, 25 bp, Homo sapien
gcaataagccaactaaattcctaaa

SEQ ID NO: 3048018 - DNA, 25 bp, Homo sapien
taaaagtggcactcattcaagtcca

SEQ ID NO: 3048019 - DNA, 25 bp, Homo sapien
tccagcagtttgatctaatttacaa

SEQ ID NO: 3048020 - DNA, 25 bp, Homo sapien
tatgttcaactgctactactttgac

SEQ ID NO: 3048021 - DNA, 25 bp, Homo sapien
ttaagtacttcttcggaacagtatg

SEQ ID NO: 3048022 - DNA, 25 bp, Homo sapien
caatctgattagtcgcctgcctcac

SEQ ID NO: 3048023 - DNA, 25 bp, Homo sapien
gaagctgtaataatatcaatatcag

SEQ ID NO: 3048024 - DNA, 25 bp, Homo sapien
ttcatcacaatctgattagtcgcct

SEQ ID NO: 3048025 - DNA, 25 bp, Homo sapien
ccttctggtgcatatgaagctgtaa

SEQ ID NO: 3048026 - DNA, 25 bp, Homo sapien
gacttcgctaaaacctagactgaga

SEQ ID NO: 3048027 - DNA, 25 bp, Homo sapien
cacttacatctaaccaatgagccaa

SEQ ID NO: 3048028 - DNA, 25 bp, Homo sapien
ctgagaatttatgcatcaatggtac

SEQ ID NO: 3048029 - DNA, 25 bp, Homo sapien
cgtaagacttgaactaatatcacag

SEQ ID NO: 3048030 - DNA, 25 bp, Homo sapien
tacatagtatcataaatgcctattg

SEQ ID NO: 3048031 - DNA, 25 bp, Homo sapien
atagtatcataaatgcctattgtgc

SEQ ID NO: 3048032 - DNA, 25 bp, Homo sapien
ctattgtgcaggatgtttgtcgggc

SEQ ID NO: 3048033 - DNA, 25 bp, Homo sapien
ttgtcgggcatctatactgatggtc

SEQ ID NO: 3048034 - DNA, 25 bp, Homo sapien
agcaagtcgggcttgaggcaaaggc

SEQ ID NO: 3048035 - DNA, 25 bp, Homo sapien
tccagcttgccctcgaaggtgaagt

SEQ ID NO: 3048036 - DNA, 25 bp, Homo sapien
caggcagccgctcgaagggcctctt

SEQ ID NO: 3048037 - DNA, 25 bp, Homo sapien
caagtcgggcttgaggcaaaggctg

SEQ ID NO: 3048038 - DNA, 25 bp, Homo sapien
ggaggaggcggagggccgaggaaga

SEQ ID NO: 3048039 - DNA, 25 bp, Homo sapien
ggaagagcaggcggcgagcgaggga

SEQ ID NO: 3048040 - DNA, 25 bp, Homo sapien
aggcggagggccgaggaagagcagg

SEQ ID NO: 3048041 - DNA, 25 bp, Homo sapien
agagcaggcggcgagcgagggaggg

SEQ ID NO: 3048042 - DNA, 25 bp, Homo sapien
cggaggagagcgaccgggggagcct

SEQ ID NO: 3048043 - DNA, 25 bp, Homo sapien
ccgagcgcgggcgaccgccggagga

SEQ ID NO: 3048044 - DNA, 25 bp, Homo sapien
cagccggagcgctaggggctgggaa

SEQ ID NO: 3048045 - DNA, 25 bp, Homo sapien
gagagacccagccggagcgctaggg

SEQ ID NO: 3048046 - DNA, 25 bp, Homo sapien
cttgactcttccgtaacttaaaatg

SEQ ID NO: 3048047 - DNA, 25 bp, Homo sapien
atgatgccatgaggtcccagccttg

SEQ ID NO: 3048048 - DNA, 25 bp, Homo sapien
tccttgacaagaagaattgacatca

SEQ ID NO: 3048049 - DNA, 25 bp, Homo sapien
tgcttcttaaatccttgacaagaag

SEQ ID NO: 3048050 - DNA, 25 bp, Homo sapien
ttgacatcagaatagtcctcaccca

SEQ ID NO: 3048051 - DNA, 25 bp, Homo sapien
tcctcacccaatgtgctatccaagg

SEQ ID NO: 3048052 - DNA, 25 bp, Homo sapien
tgctaaatatagtaaccctaccagt

SEQ ID NO: 3048053 - DNA, 25 bp, Homo sapien
tcaaatgcaattgggcatgctgtat

SEQ ID NO: 3048054 - DNA, 25 bp, Homo sapien
ccactgagcctggtccgaaattcaa

SEQ ID NO: 3048055 - DNA, 25 bp, Homo sapien
ggtccgaaattcaaatgcaattggg

SEQ ID NO: 3048056 - DNA, 25 bp, Homo sapien
agatggcacattccaccccagaagt

SEQ ID NO: 3048057 - DNA, 25 bp, Homo sapien
gcagcagctgtaacgtgtctgctga

SEQ ID NO: 3048058 - DNA, 25 bp, Homo sapien
gtgtctgctgacacgcaagccctgg

SEQ ID NO: 3048059 - DNA, 25 bp, Homo sapien
ttcccaaacttctgctcagtttcag

SEQ ID NO: 3048060 - DNA, 25 bp, Homo sapien
ccagagaaatcaggatgggaaaagg

SEQ ID NO: 3048061 - DNA, 25 bp, Homo sapien
gagaaatcaggatgggaaaagggca

SEQ ID NO: 3048062 - DNA, 25 bp, Homo sapien
aaatcaggatgggaaaagggcagaa

SEQ ID NO: 3048063 - DNA, 25 bp, Homo sapien
ctccagagaaatcaggatgggaaaa

SEQ ID NO: 3048064 - DNA, 25 bp, Homo sapien
caccacgccctgcaacattaaatat

SEQ ID NO: 3048065 - DNA, 25 bp, Homo sapien
gtgactgacgctgtctttcactccc

SEQ ID NO: 3048066 - DNA, 25 bp, Homo sapien
ctttttcaccctatctgatccctga

SEQ ID NO: 3048067 - DNA, 25 bp, Homo sapien
gaccttgtgccagaatagctgcctt

SEQ ID NO: 3048068 - DNA, 25 bp, Homo sapien
tccacctgcaagtgttgggaccttg

SEQ ID NO: 3048069 - DNA, 25 bp, Homo sapien
tttttcatatactgactcactgatg

SEQ ID NO: 3048070 - DNA, 25 bp, Homo sapien
ctgggcatggaccagccttcagatg

SEQ ID NO: 3048071 - DNA, 25 bp, Homo sapien
tgagcctacttgtgagcgatgtgac

SEQ ID NO: 3048072 - DNA, 25 bp, Homo sapien
gaatcagcatttgcattttatggaa

SEQ ID NO: 3048073 - DNA, 25 bp, Homo sapien
actgctccaaaagcccagaataagg

SEQ ID NO: 3048074 - DNA, 25 bp, Homo sapien
gctccaaaagcccagaataagggcc

SEQ ID NO: 3048075 - DNA, 25 bp, Homo sapien
ctgctccaaaagcccagaataaggg

SEQ ID NO: 3048076 - DNA, 25 bp, Homo sapien
ttactgctccaaaagcccagaataa

SEQ ID NO: 3048077 - DNA, 25 bp, Homo sapien
tactgcttaagcaagtgtagcctga

SEQ ID NO: 3048078 - DNA, 25 bp, Homo sapien
tgccaatcttgggacttctttgtat

SEQ ID NO: 3048079 - DNA, 25 bp, Homo sapien
ggtattatcatctaatcccagcaat

SEQ ID NO: 3048080 - DNA, 25 bp, Homo sapien
ctgttgtactgttagagggcgtgac

SEQ ID NO: 3048081 - DNA, 25 bp, Homo sapien
gagagagctccctaagaaagaaggc

SEQ ID NO: 3048082 - DNA, 25 bp, Homo sapien
aaagagagagctccctaagaaagaa

SEQ ID NO: 3048083 - DNA, 25 bp, Homo sapien
ctgacgagagaagggagccaagaaa

SEQ ID NO: 3048084 - DNA, 25 bp, Homo sapien
gctccctaagaaagaaggctttgtc

SEQ ID NO: 3048085 - DNA, 25 bp, Homo sapien
gagattccccttgactccagttgcc

SEQ ID NO: 3048086 - DNA, 25 bp, Homo sapien
tggctgtgtacaggactgcctttct

SEQ ID NO: 3048087 - DNA, 25 bp, Homo sapien
tcttgcatcagaaccagagattccc

SEQ ID NO: 3048088 - DNA, 25 bp, Homo sapien
ggcctcttgttactgagcaagtgat

SEQ ID NO: 3048089 - DNA, 25 bp, Homo sapien
gcaagaggcacacaaggatgtctgg

SEQ ID NO: 3048090 - DNA, 25 bp, Homo sapien
ccagtgagacgagctctggagactg

SEQ ID NO: 3048091 - DNA, 25 bp, Homo sapien
aaactagcaagaggcacacaaggat

SEQ ID NO: 3048092 - DNA, 25 bp, Homo sapien
atgagccagtgagacgagctctgga

SEQ ID NO: 3048093 - DNA, 25 bp, Homo sapien
caagcagggcaggtatgagaagcaa

SEQ ID NO: 3048094 - DNA, 25 bp, Homo sapien
aaaatgctccatcgtagacttcaga

SEQ ID NO: 3048095 - DNA, 25 bp, Homo sapien
cgtccttagaagtagagtgtccagt

SEQ ID NO: 3048096 - DNA, 25 bp, Homo sapien
tgtttgacctcacctaataaggctg

SEQ ID NO: 3048097 - DNA, 25 bp, Homo sapien
agttaaggacgaagactgagactca

SEQ ID NO: 3048098 - DNA, 25 bp, Homo sapien
tcccaatcccaaggatagacagtgg

SEQ ID NO: 3048099 - DNA, 25 bp, Homo sapien
gctggtccttggctcaagccctgaa

SEQ ID NO: 3048100 - DNA, 25 bp, Homo sapien
tctagagtgaaagtactggctggcc

SEQ ID NO: 3048101 - DNA, 25 bp, Homo sapien
gaacccagcttttggtccatcagca

SEQ ID NO: 3048102 - DNA, 25 bp, Homo sapien
gacagacggattgtagctcatggct

SEQ ID NO: 3048103 - DNA, 25 bp, Homo sapien
tgaactggcacaccttttggctctg

SEQ ID NO: 3048104 - DNA, 25 bp, Homo sapien
cagtggtctcccatggacagacgga

SEQ ID NO: 3048105 - DNA, 25 bp, Homo sapien
cattgcataggaattggctaccagc

SEQ ID NO: 3048106 - DNA, 25 bp, Homo sapien
tccaaagggcaaatgtcggcagctt

SEQ ID NO: 3048107 - DNA, 25 bp, Homo sapien
ggagatttcctaatggcctcagctc

SEQ ID NO: 3048108 - DNA, 25 bp, Homo sapien
tgtggacacacctgcgttgctctgc

SEQ ID NO: 3048109 - DNA, 25 bp, Homo sapien
ggaaatctgtactctcccatggaca

SEQ ID NO: 3048110 - DNA, 25 bp, Homo sapien
agacacacttcagcaatgccactgc

SEQ ID NO: 3048111 - DNA, 25 bp, Homo sapien
cccggaaatctgtactctcccatgg

SEQ ID NO: 3048112 - DNA, 25 bp, Homo sapien
ggccccggaaatctgtactctccca

SEQ ID NO: 3048113 - DNA, 25 bp, Homo sapien
tcttgggctggtttcccatcctcgc

SEQ ID NO: 3048114 - DNA, 25 bp, Homo sapien
ggctggtttcccatcctcgcctcct

SEQ ID NO: 3048115 - DNA, 25 bp, Homo sapien
tctgattctgccagggtcctgagga

SEQ ID NO: 3048116 - DNA, 25 bp, Homo sapien
gatgtcaggggtatgagcttctggg

SEQ ID NO: 3048117 - DNA, 25 bp, Homo sapien
actgtcccccgcctcagatttgtct

SEQ ID NO: 3048118 - DNA, 25 bp, Homo sapien
ccagggacacggctctgccttggtg

SEQ ID NO: 3048119 - DNA, 25 bp, Homo sapien
ctcgatcggcactctcccagggaca

SEQ ID NO: 3048120 - DNA, 25 bp, Homo sapien
tcggcactctcccagggacacactg

SEQ ID NO: 3048121 - DNA, 25 bp, Homo sapien
ctcctcgatcggcactctcccaggg

SEQ ID NO: 3048122 - DNA, 25 bp, Homo sapien
gatcggcactctcccagggacacac

SEQ ID NO: 3048123 - DNA, 25 bp, Homo sapien
ctctggctttttccgcatcatggga

SEQ ID NO: 3048124 - DNA, 25 bp, Homo sapien
tctctggctttttccgcatcatggg

SEQ ID NO: 3048125 - DNA, 25 bp, Homo sapien
tggctttttccgcatcatgggaacc

SEQ ID NO: 3048126 - DNA, 25 bp, Homo sapien
tttttccgcatcatgggaaccacat

SEQ ID NO: 3048127 - DNA, 25 bp, Homo sapien
tggctgacgcgtttctgattcagtg

SEQ ID NO: 3048128 - DNA, 25 bp, Homo sapien
cactgtctggctgacgcgtttctga

SEQ ID NO: 3048129 - DNA, 25 bp, Homo sapien
agatttcggccttgttgccactgtc

SEQ ID NO: 3048130 - DNA, 25 bp, Homo sapien
tcttgtcttagtgccctcgactctg

SEQ ID NO: 3048131 - DNA, 25 bp, Homo sapien
cccaggggcatacctctgccaccct

SEQ ID NO: 3048132 - DNA, 25 bp, Homo sapien
ccaggggcatacctctgccaccctg

SEQ ID NO: 3048133 - DNA, 25 bp, Homo sapien
ctcccaggggcatacctctgccacc

SEQ ID NO: 3048134 - DNA, 25 bp, Homo sapien
tcccaggggcatacctctgccaccc

SEQ ID NO: 3048135 - DNA, 25 bp, Homo sapien
gtccctggaaacttgcctcagcatg

SEQ ID NO: 3048136 - DNA, 25 bp, Homo sapien
aggctgcgcatggaaccctgctgaa

SEQ ID NO: 3048137 - DNA, 25 bp, Homo sapien
taagagcggcctgcttactcaccgc

SEQ ID NO: 3048138 - DNA, 25 bp, Homo sapien
ggtgatgtgcatcctctgcgtccat

SEQ ID NO: 3048139 - DNA, 25 bp, Homo sapien
gatcttgggcctgtcttcgtccaca

SEQ ID NO: 3048140 - DNA, 25 bp, Homo sapien
gcagatgtaggtgagtaagttgggg

SEQ ID NO: 3048141 - DNA, 25 bp, Homo sapien
ggtgggagatagcatccttggctct

SEQ ID NO: 3048142 - DNA, 25 bp, Homo sapien
ctggggttggagctagagctggcag

SEQ ID NO: 3048143 - DNA, 25 bp, Homo sapien
aggtgggagatagcatccttggctc

SEQ ID NO: 3048144 - DNA, 25 bp, Homo sapien
tggggttggagctagagctggcagc

SEQ ID NO: 3048145 - DNA, 25 bp, Homo sapien
gaaacctggtgcctgatgggtggat

SEQ ID NO: 3048146 - DNA, 25 bp, Homo sapien
cagaggtgtgagagctgtccacgct

SEQ ID NO: 3048147 - DNA, 25 bp, Homo sapien
gggtggatgaggcagccttctccta

SEQ ID NO: 3048148 - DNA, 25 bp, Homo sapien
aggtgtgagagctgtccacgctgct

SEQ ID NO: 3048149 - DNA, 25 bp, Homo sapien
cactgagcgacttctgcagagaggc

SEQ ID NO: 3048150 - DNA, 25 bp, Homo sapien
tccctgcgctggtcataggtgctgc

SEQ ID NO: 3048151 - DNA, 25 bp, Homo sapien
gttttgtggacctctagctgggcat

SEQ ID NO: 3048152 - DNA, 25 bp, Homo sapien
caggtacctcatgaaggagcggccc

SEQ ID NO: 3048153 - DNA, 25 bp, Homo sapien
aggaggcagggagggtggcacatac

SEQ ID NO: 3048154 - DNA, 25 bp, Homo sapien
aaaggaggcagggagggtggcacat

SEQ ID NO: 3048155 - DNA, 25 bp, Homo sapien
tgaaaggaggcagggagggtggcac

SEQ ID NO: 3048156 - DNA, 25 bp, Homo sapien
ctagcattgaaaggaggcagggagg

SEQ ID NO: 3048157 - DNA, 25 bp, Homo sapien
ctgccaaggtaggagcctgagtgct

SEQ ID NO: 3048158 - DNA, 25 bp, Homo sapien
gtcctcacacacctcatccaccatc

SEQ ID NO: 3048159 - DNA, 25 bp, Homo sapien
catccaccatctcctcccggggagg

SEQ ID NO: 3048160 - DNA, 25 bp, Homo sapien
ctgctgccaaggtaggagcctgagt

SEQ ID NO: 3048161 - DNA, 25 bp, Homo sapien
aggagggtccagtccgggtgcagag

SEQ ID NO: 3048162 - DNA, 25 bp, Homo sapien
aggaggagggtccagtccgggtgca

SEQ ID NO: 3048163 - DNA, 25 bp, Homo sapien
gaggagggtccagtccgggtgcaga

SEQ ID NO: 3048164 - DNA, 25 bp, Homo sapien
gagggtccagtccgggtgcagagag

SEQ ID NO: 3048165 - DNA, 25 bp, Homo sapien
aagcagtagctcattgtgcagggcg

SEQ ID NO: 3048166 - DNA, 25 bp, Homo sapien
catgtagcgtggctcatggaaggcc

SEQ ID NO: 3048167 - DNA, 25 bp, Homo sapien
cacagcccgtgtggcgtagcagagg

SEQ ID NO: 3048168 - DNA, 25 bp, Homo sapien
atggaaggccgagagcacagcccgt

SEQ ID NO: 3048169 - DNA, 25 bp, Homo sapien
cgctgggccgttcgagacagaaaca

SEQ ID NO: 3048170 - DNA, 25 bp, Homo sapien
tgacagaggtagaaatggcggccac

SEQ ID NO: 3048171 - DNA, 25 bp, Homo sapien
agtgtggcctcggatcaccagaggt

SEQ ID NO: 3048172 - DNA, 25 bp, Homo sapien
tagtcccagcggtcgtggtgacaga

SEQ ID NO: 3048173 - DNA, 25 bp, Homo sapien
gggtggatcacgaagagggtgccag

SEQ ID NO: 3048174 - DNA, 25 bp, Homo sapien
tgctacccccccacaaagtaacatg

SEQ ID NO: 3048175 - DNA, 25 bp, Homo sapien
ccatcctttttgtgatttgctgcct

SEQ ID NO: 3048176 - DNA, 25 bp, Homo sapien
atcacgaagagggtgccagcgccct

SEQ ID NO: 3048177 - DNA, 25 bp, Homo sapien
tggtgccgtagacgatggcaaaacc

SEQ ID NO: 3048178 - DNA, 25 bp, Homo sapien
gatgcagcggaatacactgggcttg

SEQ ID NO: 3048179 - DNA, 25 bp, Homo sapien
gcagccgcacccagcgaagagcgat

SEQ ID NO: 3048180 - DNA, 25 bp, Homo sapien
taaagcttgagtatgatggtgccgt

SEQ ID NO: 3048181 - DNA, 25 bp, Homo sapien
cagcaggaatccaaaaaggacagtt

SEQ ID NO: 3048182 - DNA, 25 bp, Homo sapien
gcaggaatccaaaaaggacagtttc

SEQ ID NO: 3048183 - DNA, 25 bp, Homo sapien
agcagcaggaatccaaaaaggacag

SEQ ID NO: 3048184 - DNA, 25 bp, Homo sapien
gtaaagcagcaggaatccaaaaagg

SEQ ID NO: 3048185 - DNA, 25 bp, Homo sapien
ggtcttaggtagtctcaggcctcca

SEQ ID NO: 3048186 - DNA, 25 bp, Homo sapien
ggagaaatcacttgcatcatgctac

SEQ ID NO: 3048187 - DNA, 25 bp, Homo sapien
aagcaggtccaaggcggagaaatca

SEQ ID NO: 3048188 - DNA, 25 bp, Homo sapien
catgctacacagtgagttagattta

SEQ ID NO: 3048189 - DNA, 25 bp, Homo sapien
tgtgtaggaggtgtggggccttcct

SEQ ID NO: 3048190 - DNA, 25 bp, Homo sapien
gtaggaggtgtggggccttccttgc

SEQ ID NO: 3048191 - DNA, 25 bp, Homo sapien
tgtaggaggtgtggggccttccttg

SEQ ID NO: 3048192 - DNA, 25 bp, Homo sapien
atgtgtgtaggaggtgtggggcctt

SEQ ID NO: 3048193 - DNA, 25 bp, Homo sapien
cttgttccggcggcagcggtaggag

SEQ ID NO: 3048194 - DNA, 25 bp, Homo sapien
tgttccggcggcagcggtaggagac

SEQ ID NO: 3048195 - DNA, 25 bp, Homo sapien
ttgttccggcggcagcggtaggaga

SEQ ID NO: 3048196 - DNA, 25 bp, Homo sapien
accaggcacggtgtggcatccatgc

SEQ ID NO: 3048197 - DNA, 25 bp, Homo sapien
tgccttctgggaacccgaattgccc

SEQ ID NO: 3048198 - DNA, 25 bp, Homo sapien
gaattgcccggtagtctggaagtca

SEQ ID NO: 3048199 - DNA, 25 bp, Homo sapien
ggcacggtgtggcatccatgcagct

SEQ ID NO: 3048200 - DNA, 25 bp, Homo sapien
gaggggcttgccccgtagaatccag

SEQ ID NO: 3048201 - DNA, 25 bp, Homo sapien
cagaggtagcggccaagaacaaagc

SEQ ID NO: 3048202 - DNA, 25 bp, Homo sapien
cgtagaatccaggtcggcagcggca

SEQ ID NO: 3048203 - DNA, 25 bp, Homo sapien
agaacaaagccctgactctccaggg

SEQ ID NO: 3048204 - DNA, 25 bp, Homo sapien
cagggaccatctggctttcgcacag

SEQ ID NO: 3048205 - DNA, 25 bp, Homo sapien
gagccaggcagggaatatgaacaaa

SEQ ID NO: 3048206 - DNA, 25 bp, Homo sapien
tcctattgatgtttgcccggcaggg

SEQ ID NO: 3048207 - DNA, 25 bp, Homo sapien
taatgccaggctaatgccaggctgg

SEQ ID NO: 3048208 - DNA, 25 bp, Homo sapien
ggctgtaggtgacctgactttttaa

SEQ ID NO: 3048209 - DNA, 25 bp, Homo sapien
gccaatcactaggaactcccctgaa

SEQ ID NO: 3048210 - DNA, 25 bp, Homo sapien
ggcaggctgtaggtgacctgacttt

SEQ ID NO: 3048211 - DNA, 25 bp, Homo sapien
aaagcctggtatctcacctctgcca

SEQ ID NO: 3048212 - DNA, 25 bp, Homo sapien
gagggaggcaggactctagtagcgc

SEQ ID NO: 3048213 - DNA, 25 bp, Homo sapien
caggactctagtagcgccccccatc

SEQ ID NO: 3048214 - DNA, 25 bp, Homo sapien
aggactctagtagcgccccccatcc

SEQ ID NO: 3048215 - DNA, 25 bp, Homo sapien
ggaggcaggactctagtagcgcccc

SEQ ID NO: 3048216 - DNA, 25 bp, Homo sapien
tgtgtgttagagtaccagcctgggc

SEQ ID NO: 3048217 - DNA, 25 bp, Homo sapien
ggagatctacgtccatctgcacctg

SEQ ID NO: 3048218 - DNA, 25 bp, Homo sapien
gcacactgattgatgtccacactct

SEQ ID NO: 3048219 - DNA, 25 bp, Homo sapien
tgggccacttgcacactgattgatg

SEQ ID NO: 3048220 - DNA, 25 bp, Homo sapien
ggtcaacactcgcttcttcagggca

SEQ ID NO: 3048221 - DNA, 25 bp, Homo sapien
gaggctccctaggtcattggtcaac

SEQ ID NO: 3048222 - DNA, 25 bp, Homo sapien
tgtgatcagccatccaggtcggagc

SEQ ID NO: 3048223 - DNA, 25 bp, Homo sapien
cacggatgtcgttggcttgcagcag

SEQ ID NO: 3048224 - DNA, 25 bp, Homo sapien
cacataggagggggcatgaccgctc

SEQ ID NO: 3048225 - DNA, 25 bp, Homo sapien
taggagggggcatgaccgctcccct

SEQ ID NO: 3048226 - DNA, 25 bp, Homo sapien
gggcatgaccgctcccctggtgccc

SEQ ID NO: 3048227 - DNA, 25 bp, Homo sapien
ccccacataggagggggcatgaccg

SEQ ID NO: 3048228 - DNA, 25 bp, Homo sapien
ccttggggcagctctcaggaccctg

SEQ ID NO: 3048229 - DNA, 25 bp, Homo sapien
tggggtccaggctcaggagagccca

SEQ ID NO: 3048230 - DNA, 25 bp, Homo sapien
cttggggcagctctcaggaccctgg

SEQ ID NO: 3048231 - DNA, 25 bp, Homo sapien
ccctggggtccaggctcaggagagc

SEQ ID NO: 3048232 - DNA, 25 bp, Homo sapien
ccactctaccgaatgggatggcctg

SEQ ID NO: 3048233 - DNA, 25 bp, Homo sapien
cccaggaagtgaaaagcaaggaccg

SEQ ID NO: 3048234 - DNA, 25 bp, Homo sapien
gggaaaagagaccaacgccagccaa

SEQ ID NO: 3048235 - DNA, 25 bp, Homo sapien
aacagacagctcaccgccaataggg

SEQ ID NO: 3048236 - DNA, 25 bp, Homo sapien
ccgggaccctcggaactgctgtgtc

SEQ ID NO: 3048237 - DNA, 25 bp, Homo sapien
cgccgcagctgatggtgttccgcaa

SEQ ID NO: 3048238 - DNA, 25 bp, Homo sapien
tgttccgcaacgtgggtcggccgcc

SEQ ID NO: 3048239 - DNA, 25 bp, Homo sapien
agactaacagctgctcggaagagga

SEQ ID NO: 3048240 - DNA, 25 bp, Homo sapien
tgatcatcagaaccctcaagtatgg

SEQ ID NO: 3048241 - DNA, 25 bp, Homo sapien
gaaggcctccgcaagatgtgtgcat

SEQ ID NO: 3048242 - DNA, 25 bp, Homo sapien
cagcagtcctaaagttcatgtccag

SEQ ID NO: 3048243 - DNA, 25 bp, Homo sapien
gagccacttttatgagcggagaaac

SEQ ID NO: 3048244 - DNA, 25 bp, Homo sapien
caatcagttgtgtctatagaatgtc

SEQ ID NO: 3048245 - DNA, 25 bp, Homo sapien
tcagttgtgtctatagaatgtcttt

SEQ ID NO: 3048246 - DNA, 25 bp, Homo sapien
cagttgtgtctatagaatgtctttt

SEQ ID NO: 3048247 - DNA, 25 bp, Homo sapien
ttccaatcagttgtgtctatagaat

SEQ ID NO: 3048248 - DNA, 25 bp, Homo sapien
gacagctcgtcaggatagatcacat

SEQ ID NO: 3048249 - DNA, 25 bp, Homo sapien
cagctgctctatccagtgtcccgat

SEQ ID NO: 3048250 - DNA, 25 bp, Homo sapien
tgcagattccggatacgacagctcg

SEQ ID NO: 3048251 - DNA, 25 bp, Homo sapien
ttcttgaaggactgccaccaactcc

SEQ ID NO: 3048252 - DNA, 25 bp, Homo sapien
gacggccattcagctggtgccaaag

SEQ ID NO: 3048253 - DNA, 25 bp, Homo sapien
ggtgccaaaggcagagttagagtct

SEQ ID NO: 3048254 - DNA, 25 bp, Homo sapien
ttgtgcccgttggattgaaagtggt

SEQ ID NO: 3048255 - DNA, 25 bp, Homo sapien
cgaagggtgagcaggtccaaagaag

SEQ ID NO: 3048256 - DNA, 25 bp, Homo sapien
tgccagatgccgatttgagagctgc

SEQ ID NO: 3048257 - DNA, 25 bp, Homo sapien
agtctgccagatgccgatttgagag

SEQ ID NO: 3048258 - DNA, 25 bp, Homo sapien
ccagatgccgatttgagagctgcct

SEQ ID NO: 3048259 - DNA, 25 bp, Homo sapien
tggaaagtctgccagatgccgattt

SEQ ID NO: 3048260 - DNA, 25 bp, Homo sapien
tggccgcagcctagtcctttctctg

SEQ ID NO: 3048261 - DNA, 25 bp, Homo sapien
tctcctcctggggagtgtcgtgttg

SEQ ID NO: 3048262 - DNA, 25 bp, Homo sapien
cagccctggccgcagcctagtcctt

SEQ ID NO: 3048263 - DNA, 25 bp, Homo sapien
cctcctggggagtgtcgtgttgaac

SEQ ID NO: 3048264 - DNA, 25 bp, Homo sapien
cctcctctgcaacaccaagaggcct

SEQ ID NO: 3048265 - DNA, 25 bp, Homo sapien
tctgcaacaccaagaggcctggagg

SEQ ID NO: 3048266 - DNA, 25 bp, Homo sapien
ctctgcaacaccaagaggcctggag

SEQ ID NO: 3048267 - DNA, 25 bp, Homo sapien
tcctctgcaacaccaagaggcctgg

SEQ ID NO: 3048268 - DNA, 25 bp, Homo sapien
tggaaaccccatgtacaattcccag

SEQ ID NO: 3048269 - DNA, 25 bp, Homo sapien
taaagggacgttagtagctgctgca

SEQ ID NO: 3048270 - DNA, 25 bp, Homo sapien
catgtttgactctcgtaaagggacg

SEQ ID NO: 3048271 - DNA, 25 bp, Homo sapien
gatgtccctgtagattagttccaga

SEQ ID NO: 3048272 - DNA, 25 bp, Homo sapien
ggtggagggagagcgagaagccttt

SEQ ID NO: 3048273 - DNA, 25 bp, Homo sapien
gccctggtgtgtgggacacgacccc

SEQ ID NO: 3048274 - DNA, 25 bp, Homo sapien
cctccaggtggagggagagcgagaa

SEQ ID NO: 3048275 - DNA, 25 bp, Homo sapien
tgttctcctggctccggggcagagt

SEQ ID NO: 3048276 - DNA, 25 bp, Homo sapien
ctccctgttccccagggagccctgg

SEQ ID NO: 3048277 - DNA, 25 bp, Homo sapien
ccgtggctcttagctccctttctac

SEQ ID NO: 3048278 - DNA, 25 bp, Homo sapien
tggctcttagctccctttctacctt

SEQ ID NO: 3048279 - DNA, 25 bp, Homo sapien
tctccctgttccccagggagccctg

SEQ ID NO: 3048280 - DNA, 25 bp, Homo sapien
tggaaggaagtagactggggggcag

SEQ ID NO: 3048281 - DNA, 25 bp, Homo sapien
ctaccgaggtggaaggaagtagact

SEQ ID NO: 3048282 - DNA, 25 bp, Homo sapien
ggatgagcaccaggctggaaaccgc

SEQ ID NO: 3048283 - DNA, 25 bp, Homo sapien
tgagcaccaggctggaaaccgccat

SEQ ID NO: 3048284 - DNA, 25 bp, Homo sapien
cattgttgctgaaggttctggtccc

SEQ ID NO: 3048285 - DNA, 25 bp, Homo sapien
gcaacattgttgctgaaggttctgg

SEQ ID NO: 3048286 - DNA, 25 bp, Homo sapien
ctgaggcaacattgttgctgaaggt

SEQ ID NO: 3048287 - DNA, 25 bp, Homo sapien
gaagagaagcactgggggatccagc

SEQ ID NO: 3048288 - DNA, 25 bp, Homo sapien
agagcgaaggtgtctttttgccatc

SEQ ID NO: 3048289 - DNA, 25 bp, Homo sapien
ttggtcttcaccagagtgggcggcc

SEQ ID NO: 3048290 - DNA, 25 bp, Homo sapien
tctccagtagtatctgggggttcag

SEQ ID NO: 3048291 - DNA, 25 bp, Homo sapien
gcccacacattatgttctccagtag

SEQ ID NO: 3048292 - DNA, 25 bp, Homo sapien
gtccagaggttttctgcgtaggccc

SEQ ID NO: 3048293 - DNA, 25 bp, Homo sapien
cagctgcttggcagattaccagagc

SEQ ID NO: 3048294 - DNA, 25 bp, Homo sapien
gttttctgcgtaggccccagctgct

SEQ ID NO: 3048295 - DNA, 25 bp, Homo sapien
ttggcagattaccagagctctttgg

SEQ ID NO: 3048296 - DNA, 25 bp, Homo sapien
tttccccaaaagtgtgagagcttgg

SEQ ID NO: 3048297 - DNA, 25 bp, Homo sapien
atcgggtgtggacgccagactcaga

SEQ ID NO: 3048298 - DNA, 25 bp, Homo sapien
tctgtgctcctgtatcaacagctgc

SEQ ID NO: 3048299 - DNA, 25 bp, Homo sapien
gagagcttggaaagaatcgggtgtg

SEQ ID NO: 3048300 - DNA, 25 bp, Homo sapien
agctaccgagcccagtcggaacttt

SEQ ID NO: 3048301 - DNA, 25 bp, Homo sapien
gggtgaccagaaggaacctccaagc

SEQ ID NO: 3048302 - DNA, 25 bp, Homo sapien
aggctgcacagcgtcagtgggattt

SEQ ID NO: 3048303 - DNA, 25 bp, Homo sapien
cagaaggaacctccaagcctgggaa

SEQ ID NO: 3048304 - DNA, 25 bp, Homo sapien
ggattttggccacgggtgaccagaa

SEQ ID NO: 3048305 - DNA, 25 bp, Homo sapien
ctcccctaggctgaggtgtagtggc

SEQ ID NO: 3048306 - DNA, 25 bp, Homo sapien
gccatcacgtttggccaattttgca

SEQ ID NO: 3048307 - DNA, 25 bp, Homo sapien
gatattccactatcaccgtaagtgg

SEQ ID NO: 3048308 - DNA, 25 bp, Homo sapien
caaaatatataatacggccgggtgc

SEQ ID NO: 3048309 - DNA, 25 bp, Homo sapien
ccagctactcgggaggctgaggcag

SEQ ID NO: 3048310 - DNA, 25 bp, Homo sapien
ggcgtggtggcacgtgcctgtaatc

SEQ ID NO: 3048311 - DNA, 25 bp, Homo sapien
gagaatcacttgaacacaggaggtg

SEQ ID NO: 3048312 - DNA, 25 bp, Homo sapien
catctccactgaaaatacaaaattt

SEQ ID NO: 3048313 - DNA, 25 bp, Homo sapien
tctccctggctggagagcaatctct

SEQ ID NO: 3048314 - DNA, 25 bp, Homo sapien
tggctggagagcaatctctgctcat

SEQ ID NO: 3048315 - DNA, 25 bp, Homo sapien
tccctggctggagagcaatctctgc

SEQ ID NO: 3048316 - DNA, 25 bp, Homo sapien
cctggctggagagcaatctctgctc

SEQ ID NO: 3048317 - DNA, 25 bp, Homo sapien
tagggtgtcaaatgagaacaagtga

SEQ ID NO: 3048318 - DNA, 25 bp, Homo sapien
ggaagactggatgccctccctttgg

SEQ ID NO: 3048319 - DNA, 25 bp, Homo sapien
aagacaatgatctcttggaaggagg

SEQ ID NO: 3048320 - DNA, 25 bp, Homo sapien
aatctctggttatctgattcttagg

SEQ ID NO: 3048321 - DNA, 25 bp, Homo sapien
aagctacataacctttgaggcccca

SEQ ID NO: 3048322 - DNA, 25 bp, Homo sapien
tggtttgtgttggaggaatctgtta

SEQ ID NO: 3048323 - DNA, 25 bp, Homo sapien
actgtgtgcactctccccctgaagt

SEQ ID NO: 3048324 - DNA, 25 bp, Homo sapien
caggcctggaggatcatttattcaa

SEQ ID NO: 3048325 - DNA, 25 bp, Homo sapien
tggacattgtatatggttgatcctt

SEQ ID NO: 3048326 - DNA, 25 bp, Homo sapien
aatggacattgtatatggttgatcc

SEQ ID NO: 3048327 - DNA, 25 bp, Homo sapien
acattgtatatggttgatcctttcc

SEQ ID NO: 3048328 - DNA, 25 bp, Homo sapien
gacattgtatatggttgatcctttc

SEQ ID NO: 3048329 - DNA, 25 bp, Homo sapien
tgtcccagaaccctcagcggttttg

SEQ ID NO: 3048330 - DNA, 25 bp, Homo sapien
gaaaacccatgttgcgtctccacct

SEQ ID NO: 3048331 - DNA, 25 bp, Homo sapien
tccgcagaggtggattcttgatctg

SEQ ID NO: 3048332 - DNA, 25 bp, Homo sapien
tgaacacagaaaacccatgttgcgt

SEQ ID NO: 3048333 - DNA, 25 bp, Homo sapien
gggacatcttgatggtggttccagc

SEQ ID NO: 3048334 - DNA, 25 bp, Homo sapien
agacatctggttgccctccgcctgg

SEQ ID NO: 3048335 - DNA, 25 bp, Homo sapien
acatggctggggacatcttgatggt

SEQ ID NO: 3048336 - DNA, 25 bp, Homo sapien
aagacatctggttgccctccgcctg

SEQ ID NO: 3048337 - DNA, 25 bp, Homo sapien
gaatccttagttttctagcgatgga

SEQ ID NO: 3048338 - DNA, 25 bp, Homo sapien
tgccaatggagatggcgcgtcctgc

SEQ ID NO: 3048339 - DNA, 25 bp, Homo sapien
gagtggtcccaacaccgaatcctta

SEQ ID NO: 3048340 - DNA, 25 bp, Homo sapien
tttggagagtatgacggagtcacag

SEQ ID NO: 3048341 - DNA, 25 bp, Homo sapien
cccgcaggttcttgctggggacagt

SEQ ID NO: 3048342 - DNA, 25 bp, Homo sapien
agctgcatctgcttggtgctccctt

SEQ ID NO: 3048343 - DNA, 25 bp, Homo sapien
ggacagtggatggtggaatgggagg

SEQ ID NO: 3048344 - DNA, 25 bp, Homo sapien
tggtgctcccttctggtagctgcct

SEQ ID NO: 3048345 - DNA, 25 bp, Homo sapien
ccgtgtggcgcgtggagcgcgcggg

SEQ ID NO: 3048346 - DNA, 25 bp, Homo sapien
gaggcgcggagccaatccagccgtc

SEQ ID NO: 3048347 - DNA, 25 bp, Homo sapien
gcgccgtcggcgtggactgcagcgc

SEQ ID NO: 3048348 - DNA, 25 bp, Homo sapien
agctggtgggcagcgccgtgtggcg

SEQ ID NO: 3048349 - DNA, 25 bp, Homo sapien
tgtctcgtgacttgtgtgtgctgca

SEQ ID NO: 3048350 - DNA, 25 bp, Homo sapien
tagagttagcagcacttaggagcag

SEQ ID NO: 3048351 - DNA, 25 bp, Homo sapien
tgttatggcctcttgtatggcgccc

SEQ ID NO: 3048352 - DNA, 25 bp, Homo sapien
aatgcgatttgtgcccaccctaggg

SEQ ID NO: 3048353 - DNA, 25 bp, Homo sapien
ctcccaggaccggttggaggaggtg

SEQ ID NO: 3048354 - DNA, 25 bp, Homo sapien
ccaggatgctttgagccagctgggc

SEQ ID NO: 3048355 - DNA, 25 bp, Homo sapien
gctggcaccgagctcgctcagatga

SEQ ID NO: 3048356 - DNA, 25 bp, Homo sapien
tcagatgactacttgagccgggcca

SEQ ID NO: 3048357 - DNA, 25 bp, Homo sapien
caatgttatcctaccccaagggctg

SEQ ID NO: 3048358 - DNA, 25 bp, Homo sapien
cagactttgagttcctatccggcca

SEQ ID NO: 3048359 - DNA, 25 bp, Homo sapien
tctgatctgtacgatgggaacaatg

SEQ ID NO: 3048360 - DNA, 25 bp, Homo sapien
tatccggccacatatcaagcacgtg

SEQ ID NO: 3048361 - DNA, 25 bp, Homo sapien
gaagatgtctccttagagggtcctg

SEQ ID NO: 3048362 - DNA, 25 bp, Homo sapien
cgctcctgttgagcagagagaacgc

SEQ ID NO: 3048363 - DNA, 25 bp, Homo sapien
ggcgtcatggttccaagtgcacaga

SEQ ID NO: 3048364 - DNA, 25 bp, Homo sapien
agtgcacagactgccgtgatgccgg

SEQ ID NO: 3048365 - DNA, 25 bp, Homo sapien
tcttgaactgccttagaggaccatg

SEQ ID NO: 3048366 - DNA, 25 bp, Homo sapien
acccgggcgcttcctgtagacgctg

SEQ ID NO: 3048367 - DNA, 25 bp, Homo sapien
tagtgtggattcctcttgagagccg

SEQ ID NO: 3048368 - DNA, 25 bp, Homo sapien
atcccaggcggaaagaacagcacgt

SEQ ID NO: 3048369 - DNA, 25 bp, Homo sapien
tgcccctagctgaaggggccgctct

SEQ ID NO: 3048370 - DNA, 25 bp, Homo sapien
gttggaggagttccagtctggtgcg

SEQ ID NO: 3048371 - DNA, 25 bp, Homo sapien
agtctggtgcgggagacacagctcc

SEQ ID NO: 3048372 - DNA, 25 bp, Homo sapien
cccctagctgaaggggccgctctgg

SEQ ID NO: 3048373 - DNA, 25 bp, Homo sapien
ccagtgagcccggtctgatggagga

SEQ ID NO: 3048374 - DNA, 25 bp, Homo sapien
taataggggacatgtaggaatcatc

SEQ ID NO: 3048375 - DNA, 25 bp, Homo sapien
gaatcatcctcaagagcgcccggct

SEQ ID NO: 3048376 - DNA, 25 bp, Homo sapien
tgagggagacggtccctgccccagt

SEQ ID NO: 3048377 - DNA, 25 bp, Homo sapien
gatgtccatcatactcctagggcct

SEQ ID NO: 3048378 - DNA, 25 bp, Homo sapien
catggactgcacctgatatttggca

SEQ ID NO: 3048379 - DNA, 25 bp, Homo sapien
gatctcatgtttcagaattccctgg

SEQ ID NO: 3048380 - DNA, 25 bp, Homo sapien
tgcccttagccatcggtaaatgagg

SEQ ID NO: 3048381 - DNA, 25 bp, Homo sapien
taccgagtgcccaaggtaagctgag

SEQ ID NO: 3048382 - DNA, 25 bp, Homo sapien
tgaaggcttgatccctgtacaaggc

SEQ ID NO: 3048383 - DNA, 25 bp, Homo sapien
tctgctgtagtagaaggacctggcc

SEQ ID NO: 3048384 - DNA, 25 bp, Homo sapien
tagttcagccaagtccaaggtacgt

SEQ ID NO: 3048385 - DNA, 25 bp, Homo sapien
cctgtctcccacacagggttcgtgg

SEQ ID NO: 3048386 - DNA, 25 bp, Homo sapien
cggccgtcaaccgcaagcgcaagaa

SEQ ID NO: 3048387 - DNA, 25 bp, Homo sapien
ccgggagatgctggcgatctccttc

SEQ ID NO: 3048388 - DNA, 25 bp, Homo sapien
agaaggagccgtacgcccgggagat

SEQ ID NO: 3048389 - DNA, 25 bp, Homo sapien
tggggggcgcctgacacgccggccg

SEQ ID NO: 3048390 - DNA, 25 bp, Homo sapien
tccttcagctcgcaccacctcatgc

SEQ ID NO: 3048391 - DNA, 25 bp, Homo sapien
catgccctgcgacactctggcgcgc

SEQ ID NO: 3048392 - DNA, 25 bp, Homo sapien
gggcgcctgacacgccggccgtcct

SEQ ID NO: 3048393 - DNA, 25 bp, Homo sapien
gcctggagtccaccaaggcgcgggc

SEQ ID NO: 3048394 - DNA, 25 bp, Homo sapien
gcgcacagtgacaacaaggactccg

SEQ ID NO: 3048395 - DNA, 25 bp, Homo sapien
ggcgcagcaggcagtgtctctagtt

SEQ ID NO: 3048396 - DNA, 25 bp, Homo sapien
tgacctcaacttcaacgagtggaag

SEQ ID NO: 3048397 - DNA, 25 bp, Homo sapien
taggaggagggatagtcaacacccc

SEQ ID NO: 3048398 - DNA, 25 bp, Homo sapien
tgcctttggtgcacacaggatcctg

SEQ ID NO: 3048399 - DNA, 25 bp, Homo sapien
tctaagcgctttaaccacgggcagc

SEQ ID NO: 3048400 - DNA, 25 bp, Homo sapien
aatagacttccaatcaccaggccag

SEQ ID NO: 3048401 - DNA, 25 bp, Homo sapien
ttaaagccccaaacacttggctaga

SEQ ID NO: 3048402 - DNA, 25 bp, Homo sapien
taaagccccaaacacttggctagaa

SEQ ID NO: 3048403 - DNA, 25 bp, Homo sapien
tattaaagccccaaacacttggcta

SEQ ID NO: 3048404 - DNA, 25 bp, Homo sapien
attaaagccccaaacacttggctag

SEQ ID NO: 3048405 - DNA, 25 bp, Homo sapien
ttcaactcaggacaatgacggtggg

SEQ ID NO: 3048406 - DNA, 25 bp, Homo sapien
cacattccagtcacagggctgaggg

SEQ ID NO: 3048407 - DNA, 25 bp, Homo sapien
ggatgcctcccagcccataaatgtg

SEQ ID NO: 3048408 - DNA, 25 bp, Homo sapien
gaaagatgcaaatcccactgggctt

SEQ ID NO: 3048409 - DNA, 25 bp, Homo sapien
gaggaagtcacagtcttgtcggagc

SEQ ID NO: 3048410 - DNA, 25 bp, Homo sapien
tgtgctccaagtgggaatcctgcgg

SEQ ID NO: 3048411 - DNA, 25 bp, Homo sapien
tcctccaggaaggtatcgagaaacg

SEQ ID NO: 3048412 - DNA, 25 bp, Homo sapien
gggaccttcagacatctcaccaggg

SEQ ID NO: 3048413 - DNA, 25 bp, Homo sapien
gacaggcggggcagcggggtgaggg

SEQ ID NO: 3048414 - DNA, 25 bp, Homo sapien
gaggggagaaatggcaggagtgagg

SEQ ID NO: 3048415 - DNA, 25 bp, Homo sapien
aagagaggggagaaatggcaggagt

SEQ ID NO: 3048416 - DNA, 25 bp, Homo sapien
ggtggggtggagatgaaggaagaga

SEQ ID NO: 3048417 - DNA, 25 bp, Homo sapien
cagggatagaggttctggaagccga

SEQ ID NO: 3048418 - DNA, 25 bp, Homo sapien
gcttttctgagactgggctcgaggt

SEQ ID NO: 3048419 - DNA, 25 bp, Homo sapien
caaaggaagtcaatacagggataga

SEQ ID NO: 3048420 - DNA, 25 bp, Homo sapien
tcgacccgctcatctctttagatgg

SEQ ID NO: 3048421 - DNA, 25 bp, Homo sapien
caaggaaattaactgcaaaaggaag

SEQ ID NO: 3048422 - DNA, 25 bp, Homo sapien
gaagtgaaacattagctgggacagg

SEQ ID NO: 3048423 - DNA, 25 bp, Homo sapien
agagagaagcagagcgaccagagaa

SEQ ID NO: 3048424 - DNA, 25 bp, Homo sapien
gagggcaggcccatagttactgaga

SEQ ID NO: 3048425 - DNA, 25 bp, Homo sapien
tctgctcatccattactcaagggag

SEQ ID NO: 3048426 - DNA, 25 bp, Homo sapien
cctgggcctggagacaaactcatcc

SEQ ID NO: 3048427 - DNA, 25 bp, Homo sapien
tcatccaacgggaaccagaggctct

SEQ ID NO: 3048428 - DNA, 25 bp, Homo sapien
gccacagggtcgtcagattcacgca

SEQ ID NO: 3048429 - DNA, 25 bp, Homo sapien
tactggagcactggaagtgagacag

SEQ ID NO: 3048430 - DNA, 25 bp, Homo sapien
ggtgggcgacccttcctgagggaga

SEQ ID NO: 3048431 - DNA, 25 bp, Homo sapien
caagaaagaagccatgtttataaga

SEQ ID NO: 3048432 - DNA, 25 bp, Homo sapien
gaagccatgtttataagaaaggcta

SEQ ID NO: 3048433 - DNA, 25 bp, Homo sapien
gggggagcattatgtctggacacac

SEQ ID NO: 3048434 - DNA, 25 bp, Homo sapien
agcattatgtctggacacacgcatt

SEQ ID NO: 3048435 - DNA, 25 bp, Homo sapien
ggagcattatgtctggacacacgca

SEQ ID NO: 3048436 - DNA, 25 bp, Homo sapien
tcgggggagcattatgtctggacac

SEQ ID NO: 3048437 - DNA, 25 bp, Homo sapien
cacccacaggtgaggtatgtccact

SEQ ID NO: 3048438 - DNA, 25 bp, Homo sapien
tggccccagcgaaagctctgtcagt

SEQ ID NO: 3048439 - DNA, 25 bp, Homo sapien
cacttgctagccgtgtggccttgga

SEQ ID NO: 3048440 - DNA, 25 bp, Homo sapien
ggtctctcacaacatctgggtccag

SEQ ID NO: 3048441 - DNA, 25 bp, Homo sapien
gagggccaaagtgcctcgccctgtc

SEQ ID NO: 3048442 - DNA, 25 bp, Homo sapien
aagagattgcggcatccctgcaatt

SEQ ID NO: 3048443 - DNA, 25 bp, Homo sapien
ctgagggccaaagtgcctcgccctg

SEQ ID NO: 3048444 - DNA, 25 bp, Homo sapien
tgctgcacccctacccttcctgagg

SEQ ID NO: 3048445 - DNA, 25 bp, Homo sapien
gctaggggtggcctaagagctaaga

SEQ ID NO: 3048446 - DNA, 25 bp, Homo sapien
ccttggctaggggtggcctaagagc

SEQ ID NO: 3048447 - DNA, 25 bp, Homo sapien
ttggctaggggtggcctaagagcta

SEQ ID NO: 3048448 - DNA, 25 bp, Homo sapien
tctcccttggctaggggtggcctaa

SEQ ID NO: 3048449 - DNA, 25 bp, Homo sapien
gagagaaacagagtggcaggaagca

SEQ ID NO: 3048450 - DNA, 25 bp, Homo sapien
gcggagagagaaacagagtggcagg

SEQ ID NO: 3048451 - DNA, 25 bp, Homo sapien
gagagggaagcggagagagaaacag

SEQ ID NO: 3048452 - DNA, 25 bp, Homo sapien
ggagagagaaacagagtggcaggaa

SEQ ID NO: 3048453 - DNA, 25 bp, Homo sapien
ggcctgagaagggacccaggcgttg

SEQ ID NO: 3048454 - DNA, 25 bp, Homo sapien
cctgagaagggacccaggcgttggg

SEQ ID NO: 3048455 - DNA, 25 bp, Homo sapien
caggcctgagaagggacccaggcgt

SEQ ID NO: 3048456 - DNA, 25 bp, Homo sapien
agaagggacccaggcgttggggctg

SEQ ID NO: 3048457 - DNA, 25 bp, Homo sapien
ggttgagaactcatgtgctaatcta

SEQ ID NO: 3048458 - DNA, 25 bp, Homo sapien
tgtgtctgagtgagggaactcctga

SEQ ID NO: 3048459 - DNA, 25 bp, Homo sapien
taatctagatccaaagctccgggat

SEQ ID NO: 3048460 - DNA, 25 bp, Homo sapien
ctctgtgtctgagtgagggaactcc

SEQ ID NO: 3048461 - DNA, 25 bp, Homo sapien
ttgggaaagctggtcacgggagcag

SEQ ID NO: 3048462 - DNA, 25 bp, Homo sapien
gcaggggcccggcatgcagcagagt

SEQ ID NO: 3048463 - DNA, 25 bp, Homo sapien
gcccggcatgcagcagagtgggcct

SEQ ID NO: 3048464 - DNA, 25 bp, Homo sapien
gggaaagctggtcacgggagcaggg

SEQ ID NO: 3048465 - DNA, 25 bp, Homo sapien
tgtactcggccctctgcttgccatg

SEQ ID NO: 3048466 - DNA, 25 bp, Homo sapien
agtcaccaccttcatgggtggtaca

SEQ ID NO: 3048467 - DNA, 25 bp, Homo sapien
ttcatgggtggtacactgcctccgc

SEQ ID NO: 3048468 - DNA, 25 bp, Homo sapien
tgggccgccttcagccgagaggccc

SEQ ID NO: 3048469 - DNA, 25 bp, Homo sapien
aggaggatgaaaagcgggcagccac

SEQ ID NO: 3048470 - DNA, 25 bp, Homo sapien
cagaggaggatgaaaagcgggcagc

SEQ ID NO: 3048471 - DNA, 25 bp, Homo sapien
ggccctggttcttgccaaggctggg

SEQ ID NO: 3048472 - DNA, 25 bp, Homo sapien
ttgttggtttacagatacagagcag

SEQ ID NO: 3048473 - DNA, 25 bp, Homo sapien
gtaggtgtcagcagtagaggtctct

SEQ ID NO: 3048474 - DNA, 25 bp, Homo sapien
gggtcccagttcctcaagtctggcc

SEQ ID NO: 3048475 - DNA, 25 bp, Homo sapien
tgatccttgggacgcagaaggccct

SEQ ID NO: 3048476 - DNA, 25 bp, Homo sapien
ctgatgctccctactgcaggtttgg

SEQ ID NO: 3048477 - DNA, 25 bp, Homo sapien
cagggcaggcacacatttactttac

SEQ ID NO: 3048478 - DNA, 25 bp, Homo sapien
tgagcgtgcccatctgtgcaatgac

SEQ ID NO: 3048479 - DNA, 25 bp, Homo sapien
ggtcctgacagaggctacccagtaa

SEQ ID NO: 3048480 - DNA, 25 bp, Homo sapien
tgcaatgactcgacaccaaggtggg

SEQ ID NO: 3048481 - DNA, 25 bp, Homo sapien
acgctcgcccggctccgttgcccga

SEQ ID NO: 3048482 - DNA, 25 bp, Homo sapien
agggcaacctcacgctcgcccggct

SEQ ID NO: 3048483 - DNA, 25 bp, Homo sapien
aaggcagagagggcaacctcacgct

SEQ ID NO: 3048484 - DNA, 25 bp, Homo sapien
gctcgcccggctccgttgcccgatg

SEQ ID NO: 3048485 - DNA, 25 bp, Homo sapien
gaggcgccccttccatacagctcat

SEQ ID NO: 3048486 - DNA, 25 bp, Homo sapien
gggcaaaaggccttgtccactgggc

SEQ ID NO: 3048487 - DNA, 25 bp, Homo sapien
tgggctcccagagccggaaaggggc

SEQ ID NO: 3048488 - DNA, 25 bp, Homo sapien
gccaaagtgccaagggcatggccag

SEQ ID NO: 3048489 - DNA, 25 bp, Homo sapien
cgtgtagggcctggggctgagcccc

SEQ ID NO: 3048490 - DNA, 25 bp, Homo sapien
ccgtgtagggcctggggctgagccc

SEQ ID NO: 3048491 - DNA, 25 bp, Homo sapien
gagggaagacactgagcttctctca

SEQ ID NO: 3048492 - DNA, 25 bp, Homo sapien
ctggggggacagcaaggtggggatc

SEQ ID NO: 3048493 - DNA, 25 bp, Homo sapien
aagacactgagcttctctcaaacac

SEQ ID NO: 3048494 - DNA, 25 bp, Homo sapien
ggacagcaaggtggggatcagctgg

SEQ ID NO: 3048495 - DNA, 25 bp, Homo sapien
ctctgcgatgatgcgatcctcgtca

SEQ ID NO: 3048496 - DNA, 25 bp, Homo sapien
ctctagctctgcgatgatgcgatcc

SEQ ID NO: 3048497 - DNA, 25 bp, Homo sapien
gatgatgcgatcctcgtcatcctcg

SEQ ID NO: 3048498 - DNA, 25 bp, Homo sapien
tagctctgcgatgatgcgatcctcg

SEQ ID NO: 3048499 - DNA, 25 bp, Homo sapien
gcttctcgtctgctacttctgctgc

SEQ ID NO: 3048500 - DNA, 25 bp, Homo sapien
tgctgctacacccctgccagggtgt

SEQ ID NO: 3048501 - DNA, 25 bp, Homo sapien
ccatcgcccatgtaccccagcttct

SEQ ID NO: 3048502 - DNA, 25 bp, Homo sapien
cttctgctgctacacccctgccagg

SEQ ID NO: 3048503 - DNA, 25 bp, Homo sapien
cctctccggtacgtgtggtggtcag

SEQ ID NO: 3048504 - DNA, 25 bp, Homo sapien
cggtatcggggcacggtcaactcat

SEQ ID NO: 3048505 - DNA, 25 bp, Homo sapien
tgaccaccacctctccggtacgtgt

SEQ ID NO: 3048506 - DNA, 25 bp, Homo sapien
gagggcttctctgtgcggtatcggg

SEQ ID NO: 3048507 - DNA, 25 bp, Homo sapien
cttggcactgtactgggtcagggct

SEQ ID NO: 3048508 - DNA, 25 bp, Homo sapien
gttgatgtccttggcactgtactgg

SEQ ID NO: 3048509 - DNA, 25 bp, Homo sapien
gctccgttcggggggctgccttctg

SEQ ID NO: 3048510 - DNA, 25 bp, Homo sapien
tgccttctggccgtggggggccttg

SEQ ID NO: 3048511 - DNA, 25 bp, Homo sapien
tgtcaccctcattatgcttcttagg

SEQ ID NO: 3048512 - DNA, 25 bp, Homo sapien
gtagctttataatacgctttctgtc

SEQ ID NO: 3048513 - DNA, 25 bp, Homo sapien
cctcattatgcttcttaggcttcca

SEQ ID NO: 3048514 - DNA, 25 bp, Homo sapien
ttctgtctaggagggctaatgtcac

SEQ ID NO: 3048515 - DNA, 25 bp, Homo sapien
aggatggtcgtaagaatgtgtgaac

SEQ ID NO: 3048516 - DNA, 25 bp, Homo sapien
ccccactctaggaaggatggtcgta

SEQ ID NO: 3048517 - DNA, 25 bp, Homo sapien
cactctaggaaggatggtcgtaaga

SEQ ID NO: 3048518 - DNA, 25 bp, Homo sapien
ctaggaaggatggtcgtaagaatgt

SEQ ID NO: 3048519 - DNA, 25 bp, Homo sapien
tttgtccacgcttctcttgccagga

SEQ ID NO: 3048520 - DNA, 25 bp, Homo sapien
accttcttgggggactgactcagga

SEQ ID NO: 3048521 - DNA, 25 bp, Homo sapien
agctggcccgctcagctcatgcagg

SEQ ID NO: 3048522 - DNA, 25 bp, Homo sapien
gggtggcatttcgaagtccacgctc

SEQ ID NO: 3048523 - DNA, 25 bp, Homo sapien
tgggccagcgtgtccgtgaccccgc

SEQ ID NO: 3048524 - DNA, 25 bp, Homo sapien
ttcaggaacttcaccgcctccacct

SEQ ID NO: 3048525 - DNA, 25 bp, Homo sapien
gtgaccccgcggcagcgcttgagga

SEQ ID NO: 3048526 - DNA, 25 bp, Homo sapien
agcgcttgaggagcccatccaggcg

SEQ ID NO: 3048527 - DNA, 25 bp, Homo sapien
tggatcttctccaccgatttctcca

SEQ ID NO: 3048528 - DNA, 25 bp, Homo sapien
ctggatcttctccaccgatttctcc

SEQ ID NO: 3048529 - DNA, 25 bp, Homo sapien
ggcaccagccggtggttgtgggaca

SEQ ID NO: 3048530 - DNA, 25 bp, Homo sapien
gcaccagccggtggttgtgggacac

SEQ ID NO: 3048531 - DNA, 25 bp, Homo sapien
agagagaccctttcagcccttttgg

SEQ ID NO: 3048532 - DNA, 25 bp, Homo sapien
gagagaccctttcagcccttttggc

SEQ ID NO: 3048533 - DNA, 25 bp, Homo sapien
cttccaccagggtgcgctgccgctg

SEQ ID NO: 3048534 - DNA, 25 bp, Homo sapien
taagctcctcgtcgttgagatagcg

SEQ ID NO: 3048535 - DNA, 25 bp, Homo sapien
gtcgttgagatagcgcagccgttcc

SEQ ID NO: 3048536 - DNA, 25 bp, Homo sapien
ttgagctgctgggtaataagctcct

SEQ ID NO: 3048537 - DNA, 25 bp, Homo sapien
agcgcgcgcaccgactcctggttct

SEQ ID NO: 3048538 - DNA, 25 bp, Homo sapien
tcagctctgcctccgtgcgcttcag

SEQ ID NO: 3048539 - DNA, 25 bp, Homo sapien
cgcgcaccgactcctggttctgtag

SEQ ID NO: 3048540 - DNA, 25 bp, Homo sapien
gtgcgcttcagcagcgcgcgcaccg

SEQ ID NO: 3048541 - DNA, 25 bp, Homo sapien
catttgatagagcttctatggctgg

SEQ ID NO: 3048542 - DNA, 25 bp, Homo sapien
tgatcgatccaaccctgttccaagc

SEQ ID NO: 3048543 - DNA, 25 bp, Homo sapien
gatcttacccgttgcccagatggca

SEQ ID NO: 3048544 - DNA, 25 bp, Homo sapien
tgaaggactcaagcgctggcatttg

SEQ ID NO: 3048545 - DNA, 25 bp, Homo sapien
gaactgccccgagggatactgacga

SEQ ID NO: 3048546 - DNA, 25 bp, Homo sapien
gaagggctctcgctgactcagggaa

SEQ ID NO: 3048547 - DNA, 25 bp, Homo sapien
agcggactcggcgatgccaagctcc

SEQ ID NO: 3048548 - DNA, 25 bp, Homo sapien
gccaagctcctgacaggtgggacca

SEQ ID NO: 3048549 - DNA, 25 bp, Homo sapien
tgcatctgcagccggctaacggcgg

SEQ ID NO: 3048550 - DNA, 25 bp, Homo sapien
atctgcagccggctaacggcggtag

SEQ ID NO: 3048551 - DNA, 25 bp, Homo sapien
gctggagctggccgcgcaagtcact

SEQ ID NO: 3048552 - DNA, 25 bp, Homo sapien
gcgcaagtcactggcgctgttctgc

SEQ ID NO: 3048553 - DNA, 25 bp, Homo sapien
acaccggggtggccccgctgctccg

SEQ ID NO: 3048554 - DNA, 25 bp, Homo sapien
gggtgctgctggccgagggcggggg

SEQ ID NO: 3048555 - DNA, 25 bp, Homo sapien
cggacaccggggtggccccgctgct

SEQ ID NO: 3048556 - DNA, 25 bp, Homo sapien
gcgggggtgctgctggccgagggcg

SEQ ID NO: 3048557 - DNA, 25 bp, Homo sapien
tgctgagggggtggctgctccattg

SEQ ID NO: 3048558 - DNA, 25 bp, Homo sapien
ctgagggggtggctgctccattgga

SEQ ID NO: 3048559 - DNA, 25 bp, Homo sapien
gagggggtggctgctccattggagc

SEQ ID NO: 3048560 - DNA, 25 bp, Homo sapien
gtgctgagggggtggctgctccatt

SEQ ID NO: 3048561 - DNA, 25 bp, Homo sapien
tcagagcctcgcagtaaggcgctct

SEQ ID NO: 3048562 - DNA, 25 bp, Homo sapien
gcctcgcagtaaggcgctctgcacc

SEQ ID NO: 3048563 - DNA, 25 bp, Homo sapien
gagcctcgcagtaaggcgctctgca

SEQ ID NO: 3048564 - DNA, 25 bp, Homo sapien
agagcctcgcagtaaggcgctctgc

SEQ ID NO: 3048565 - DNA, 25 bp, Homo sapien
cttggctggcactggcggcccgaac

SEQ ID NO: 3048566 - DNA, 25 bp, Homo sapien
tctcggcaaagacggacgaggagcc

SEQ ID NO: 3048567 - DNA, 25 bp, Homo sapien
tccttgcggaaggactggcgcactg

SEQ ID NO: 3048568 - DNA, 25 bp, Homo sapien
tggcgcactggcgagccgcggctgg

SEQ ID NO: 3048569 - DNA, 25 bp, Homo sapien
gcggaagccgtagccgtcgccgtac

SEQ ID NO: 3048570 - DNA, 25 bp, Homo sapien
tcctccagatcggactgcagcgcgg

SEQ ID NO: 3048571 - DNA, 25 bp, Homo sapien
gccgccttgtacagggagtcctcca

SEQ ID NO: 3048572 - DNA, 25 bp, Homo sapien
gccgagtaggtgctgagcgagcgca

SEQ ID NO: 3048573 - DNA, 25 bp, Homo sapien
agcatagaggccctcgcctttcacc

SEQ ID NO: 3048574 - DNA, 25 bp, Homo sapien
gcagcagcccgtaggggtcagcata

SEQ ID NO: 3048575 - DNA, 25 bp, Homo sapien
aggctcagacggccctcgtgcagca

SEQ ID NO: 3048576 - DNA, 25 bp, Homo sapien
gccaggtcctcgtccggcttcacgt

SEQ ID NO: 3048577 - DNA, 25 bp, Homo sapien
ccagcctctcggccgcgtggtgcac

SEQ ID NO: 3048578 - DNA, 25 bp, Homo sapien
cctctcggccgcgtggtgcaccggg

SEQ ID NO: 3048579 - DNA, 25 bp, Homo sapien
tcccagcctctcggccgcgtggtgc

SEQ ID NO: 3048580 - DNA, 25 bp, Homo sapien
agcctctcggccgcgtggtgcaccg

SEQ ID NO: 3048581 - DNA, 25 bp, Homo sapien
gaacgcgacggcgaaccggactgca

SEQ ID NO: 3048582 - DNA, 25 bp, Homo sapien
cccggcgtacgataggcgcgaacgc

SEQ ID NO: 3048583 - DNA, 25 bp, Homo sapien
gtgacaggttgttgaggcgccgcgt

SEQ ID NO: 3048584 - DNA, 25 bp, Homo sapien
aggactcccgcgatgcgtacaccat

SEQ ID NO: 3048585 - DNA, 25 bp, Homo sapien
gataatactgcggtcctggatgtcc

SEQ ID NO: 3048586 - DNA, 25 bp, Homo sapien
tctgtagatcttgataatactgcgg

SEQ ID NO: 3048587 - DNA, 25 bp, Homo sapien
agatcttgataatactgcggtcctg

SEQ ID NO: 3048588 - DNA, 25 bp, Homo sapien
cctttctgtagatcttgataatact

SEQ ID NO: 3048589 - DNA, 25 bp, Homo sapien
aacatgtgcgcgatgagtgcgtgca

SEQ ID NO: 3048590 - DNA, 25 bp, Homo sapien
cccatggtgagcttctgcgggaaca

SEQ ID NO: 3048591 - DNA, 25 bp, Homo sapien
tcgtagaagacgttgcgagcctcgt

SEQ ID NO: 3048592 - DNA, 25 bp, Homo sapien
gcggtattgggcgacttaagcatgc

SEQ ID NO: 3048593 - DNA, 25 bp, Homo sapien
gaaggagacgccgccctcgctgtca

SEQ ID NO: 3048594 - DNA, 25 bp, Homo sapien
ctgcgaaggagacgccgccctcgct

SEQ ID NO: 3048595 - DNA, 25 bp, Homo sapien
ggagacgccgccctcgctgtcactg

SEQ ID NO: 3048596 - DNA, 25 bp, Homo sapien
agacgccgccctcgctgtcactgct

SEQ ID NO: 3048597 - DNA, 25 bp, Homo sapien
gcagggtctgaggctagacgccgcc

SEQ ID NO: 3048598 - DNA, 25 bp, Homo sapien
agggtctgaggctagacgccgcccc

SEQ ID NO: 3048599 - DNA, 25 bp, Homo sapien
acgccgcccccgagtgcagatgcac

SEQ ID NO: 3048600 - DNA, 25 bp, Homo sapien
gcccccgagtgcagatgcacccagg

SEQ ID NO: 3048601 - DNA, 25 bp, Homo sapien
ggactccaggcagttgaaggaactt

SEQ ID NO: 3048602 - DNA, 25 bp, Homo sapien
ggcagagcaggtggggcggaaactg

SEQ ID NO: 3048603 - DNA, 25 bp, Homo sapien
atgctgagggcgagagagagatgga

SEQ ID NO: 3048604 - DNA, 25 bp, Homo sapien
ggcacccactggactccaggcagtt

SEQ ID NO: 3048605 - DNA, 25 bp, Homo sapien
acagctttgccgcctggtctgccag

SEQ ID NO: 3048606 - DNA, 25 bp, Homo sapien
ctggccgagcgggagagaggcaggc

SEQ ID NO: 3048607 - DNA, 25 bp, Homo sapien
caggctctgtcggaagcggttcatc

SEQ ID NO: 3048608 - DNA, 25 bp, Homo sapien
cgactcggcggaggcgtaggacagc

SEQ ID NO: 3048609 - DNA, 25 bp, Homo sapien
ccgggcagggtgagaggaaccaagg

SEQ ID NO: 3048610 - DNA, 25 bp, Homo sapien
tggtcatggggttgcctggcaacta

SEQ ID NO: 3048611 - DNA, 25 bp, Homo sapien
cagccagcaacgatgaagagtaggg

SEQ ID NO: 3048612 - DNA, 25 bp, Homo sapien
tcagtggttgccaggctagtgcgga

SEQ ID NO: 3048613 - DNA, 25 bp, Homo sapien
gcagcacgaggcagccagcaacgat

SEQ ID NO: 3048614 - DNA, 25 bp, Homo sapien
cagcaggggtggcccaaactcctac

SEQ ID NO: 3048615 - DNA, 25 bp, Homo sapien
gtgcagatgcgcaccccggtgcaaa

SEQ ID NO: 3048616 - DNA, 25 bp, Homo sapien
accgcccataccagaaggtgtccgt

SEQ ID NO: 3048617 - DNA, 25 bp, Homo sapien
gaaggtgtccgtgcagatgcgcacc

SEQ ID NO: 3048618 - DNA, 25 bp, Homo sapien
aggcgaacccagactctcccaaagc

SEQ ID NO: 3048619 - DNA, 25 bp, Homo sapien
ccagtgtcaacacatcagactcagg

SEQ ID NO: 3048620 - DNA, 25 bp, Homo sapien
gatgactgaggcccacctcgtggtc

SEQ ID NO: 3048621 - DNA, 25 bp, Homo sapien
caggtaccttgttcggatgactgag

SEQ ID NO: 3048622 - DNA, 25 bp, Homo sapien
catcagactcaggtaccttgttcgg

SEQ ID NO: 3048623 - DNA, 25 bp, Homo sapien
cggagggggcggagtcgccatggag

SEQ ID NO: 3048624 - DNA, 25 bp, Homo sapien
gcatacggggtccacggtccagccg

SEQ ID NO: 3048625 - DNA, 25 bp, Homo sapien
tgaggaggcatacggggtccacggt

SEQ ID NO: 3048626 - DNA, 25 bp, Homo sapien
gggagctgaggaggcatacggggtc

SEQ ID NO: 3048627 - DNA, 25 bp, Homo sapien
tgcgaagcgggggacaccccattag

SEQ ID NO: 3048628 - DNA, 25 bp, Homo sapien
gtgtgtgcgaagcgggggacacccc

SEQ ID NO: 3048629 - DNA, 25 bp, Homo sapien
acaccccattaggggaagcgggcag

SEQ ID NO: 3048630 - DNA, 25 bp, Homo sapien
ccattaggggaagcgggcaggagcc

SEQ ID NO: 3048631 - DNA, 25 bp, Homo sapien
gcgtgctgtgggtacttgctcttca

SEQ ID NO: 3048632 - DNA, 25 bp, Homo sapien
ttgcggtcggcgtccgccttctgga

SEQ ID NO: 3048633 - DNA, 25 bp, Homo sapien
ccatgaaggcatcacgcttgcggtc

SEQ ID NO: 3048634 - DNA, 25 bp, Homo sapien
ttctggagcccgctgagcgcctcca

SEQ ID NO: 3048635 - DNA, 25 bp, Homo sapien
tgggccgcgatcaccgtgtgccgcc

SEQ ID NO: 3048636 - DNA, 25 bp, Homo sapien
gggccgcgatcaccgtgtgccgccg

SEQ ID NO: 3048637 - DNA, 25 bp, Homo sapien
ctgggccgcgatcaccgtgtgccgc

SEQ ID NO: 3048638 - DNA, 25 bp, Homo sapien
tcccgcgggtactccgcatcgtccg

SEQ ID NO: 3048639 - DNA, 25 bp, Homo sapien
gtactcccgcgggtactccgcatcg

SEQ ID NO: 3048640 - DNA, 25 bp, Homo sapien
cacgttggagaagcgccggcccccg

SEQ ID NO: 3048641 - DNA, 25 bp, Homo sapien
cggtactcccgcgggtactccgcat

SEQ ID NO: 3048642 - DNA, 25 bp, Homo sapien
aggggcacggctgggtcacggcgcg

SEQ ID NO: 3048643 - DNA, 25 bp, Homo sapien
gtgagaggggcacggctgggtcacg

SEQ ID NO: 3048644 - DNA, 25 bp, Homo sapien
agaggggcacggctgggtcacggcg

SEQ ID NO: 3048645 - DNA, 25 bp, Homo sapien
gggcacggctgggtcacggcgcgcc

SEQ ID NO: 3048646 - DNA, 25 bp, Homo sapien
gggccctggctgctactggtggagc

SEQ ID NO: 3048647 - DNA, 25 bp, Homo sapien
tgggccctggctgctactggtggag

SEQ ID NO: 3048648 - DNA, 25 bp, Homo sapien
cagagttgtatcagacccaggactg

SEQ ID NO: 3048649 - DNA, 25 bp, Homo sapien
acccactgtcagagttgtatcagac

SEQ ID NO: 3048650 - DNA, 25 bp, Homo sapien
cactgtcagagttgtatcagaccca

SEQ ID NO: 3048651 - DNA, 25 bp, Homo sapien
tgtcagagttgtatcagacccagga

SEQ ID NO: 3048652 - DNA, 25 bp, Homo sapien
agccttgccaagatgcccttgatat

SEQ ID NO: 3048653 - DNA, 25 bp, Homo sapien
aagtactcatcaacgggctcatcaa

SEQ ID NO: 3048654 - DNA, 25 bp, Homo sapien
cttgatatcctcctcagagacacca

SEQ ID NO: 3048655 - DNA, 25 bp, Homo sapien
catcaatattgggcaggagacccag

SEQ ID NO: 3048656 - DNA, 25 bp, Homo sapien
ccttagatgccacgcagacagggag

SEQ ID NO: 3048657 - DNA, 25 bp, Homo sapien
taaagcgccaggtggatgcatctcc

SEQ ID NO: 3048658 - DNA, 25 bp, Homo sapien
gacagggagaatgtcatgccagtcc

SEQ ID NO: 3048659 - DNA, 25 bp, Homo sapien
tccacgcagctcatgcagggcatct

SEQ ID NO: 3048660 - DNA, 25 bp, Homo sapien
tgtaggtgctcagcgcctccaccag

SEQ ID NO: 3048661 - DNA, 25 bp, Homo sapien
ctgtaggtgctcagcgcctccacca

SEQ ID NO: 3048662 - DNA, 25 bp, Homo sapien
tctgtaggtgctcagcgcctccacc

SEQ ID NO: 3048663 - DNA, 25 bp, Homo sapien
ggctgcagcacggactcctcaggag

SEQ ID NO: 3048664 - DNA, 25 bp, Homo sapien
gtgaattctccatggcgctgggcca

SEQ ID NO: 3048665 - DNA, 25 bp, Homo sapien
agtgtgaattctccatggcgctggg

SEQ ID NO: 3048666 - DNA, 25 bp, Homo sapien
gctgcagcacggactcctcaggagg

SEQ ID NO: 3048667 - DNA, 25 bp, Homo sapien
ccagagtcaacagtgaggggctgac

SEQ ID NO: 3048668 - DNA, 25 bp, Homo sapien
accagagtcaacagtgaggggctga

SEQ ID NO: 3048669 - DNA, 25 bp, Homo sapien
caaggagggaaagggctccaatctc

SEQ ID NO: 3048670 - DNA, 25 bp, Homo sapien
gagggaaagggctccaatctcaagt

SEQ ID NO: 3048671 - DNA, 25 bp, Homo sapien
ggagggaaagggctccaatctcaag

SEQ ID NO: 3048672 - DNA, 25 bp, Homo sapien
gagggaggggagcagtgtcgttgct

SEQ ID NO: 3048673 - DNA, 25 bp, Homo sapien
tcctgtcttcagagactcttctcat

SEQ ID NO: 3048674 - DNA, 25 bp, Homo sapien
ggcccagtcctccttggtggcattt

SEQ ID NO: 3048675 - DNA, 25 bp, Homo sapien
cttgatctctcttgctgcatttcct

SEQ ID NO: 3048676 - DNA, 25 bp, Homo sapien
ttgttcctgtcttcagagactcttc

SEQ ID NO: 3048677 - DNA, 25 bp, Homo sapien
cgcctctgcacctggagatggtctg

SEQ ID NO: 3048678 - DNA, 25 bp, Homo sapien
ggagatggtctggtgggtgtgaggg

SEQ ID NO: 3048679 - DNA, 25 bp, Homo sapien
agtgcaagggcagcatagcacctgg

SEQ ID NO: 3048680 - DNA, 25 bp, Homo sapien
tgaggggcagtgcaagggcagcata

SEQ ID NO: 3048681 - DNA, 25 bp, Homo sapien
ctcaaacccgctgacggccagattt

SEQ ID NO: 3048682 - DNA, 25 bp, Homo sapien
cgctgacggccagatttttattatc

SEQ ID NO: 3048683 - DNA, 25 bp, Homo sapien
gggaagcgagtacagccctcaaacc

SEQ ID NO: 3048684 - DNA, 25 bp, Homo sapien
tttattatctttgctcgaatgggcc

SEQ ID NO: 3048685 - DNA, 25 bp, Homo sapien
gaagggggatttgtgcctccatccc

SEQ ID NO: 3048686 - DNA, 25 bp, Homo sapien
ccagccttgagggtcatcacagaga

SEQ ID NO: 3048687 - DNA, 25 bp, Homo sapien
gcctcttccagatagagctccaggg

SEQ ID NO: 3048688 - DNA, 25 bp, Homo sapien
cacagagaaccagccatcgtggaaa

SEQ ID NO: 3048689 - DNA, 25 bp, Homo sapien
gaagccagggcaaagcctttgcact

SEQ ID NO: 3048690 - DNA, 25 bp, Homo sapien
cctcttgtccccaaggcagggtggc

SEQ ID NO: 3048691 - DNA, 25 bp, Homo sapien
tcttgtccccaaggcagggtggcag

SEQ ID NO: 3048692 - DNA, 25 bp, Homo sapien
tttgcacttgctgccagtggtgcct

SEQ ID NO: 3048693 - DNA, 25 bp, Homo sapien
tcctccctgggagagcgggctctgc

SEQ ID NO: 3048694 - DNA, 25 bp, Homo sapien
cagggtccctcggtccagcctcctc

SEQ ID NO: 3048695 - DNA, 25 bp, Homo sapien
tgggagagcgggctctgccctccgc

SEQ ID NO: 3048696 - DNA, 25 bp, Homo sapien
tccctgggagagcgggctctgccct

SEQ ID NO: 3048697 - DNA, 25 bp, Homo sapien
ggccagggcaaagcgccggaggcac

SEQ ID NO: 3048698 - DNA, 25 bp, Homo sapien
caggccagggcaaagcgccggaggc

SEQ ID NO: 3048699 - DNA, 25 bp, Homo sapien
agggcaaagcgccggaggcactgcc

SEQ ID NO: 3048700 - DNA, 25 bp, Homo sapien
ccagggcaaagcgccggaggcactg

SEQ ID NO: 3048701 - DNA, 25 bp, Homo sapien
ccctgacagctgagctgcggaggca

SEQ ID NO: 3048702 - DNA, 25 bp, Homo sapien
cgggccctgacagctgagctgcgga

SEQ ID NO: 3048703 - DNA, 25 bp, Homo sapien
gccgggccctgacagctgagctgcg

SEQ ID NO: 3048704 - DNA, 25 bp, Homo sapien
agctgcggaggcacccggcctgtcc

SEQ ID NO: 3048705 - DNA, 25 bp, Homo sapien
gcgtgtgggtgagcgcgcgcgcggg

SEQ ID NO: 3048706 - DNA, 25 bp, Homo sapien
cgcgggcgtgtcaccgagtgtgcga

SEQ ID NO: 3048707 - DNA, 25 bp, Homo sapien
gccggcggccgggcgtgtgggtgag

SEQ ID NO: 3048708 - DNA, 25 bp, Homo sapien
cgcgcgcgggcgtgtcaccgagtgt

SEQ ID NO: 3048709 - DNA, 25 bp, Homo sapien
cccgaaaggcgttcgcaaaccactg

SEQ ID NO: 3048710 - DNA, 25 bp, Homo sapien
ccgaaaggcgttcgcaaaccactga

SEQ ID NO: 3048711 - DNA, 25 bp, Homo sapien
cgaaaggcgttcgcaaaccactgac

SEQ ID NO: 3048712 - DNA, 25 bp, Homo sapien
cagagggcaccctcttataaaatgc

SEQ ID NO: 3048713 - DNA, 25 bp, Homo sapien
tgcagggtttggtggtgtcggcggt

SEQ ID NO: 3048714 - DNA, 25 bp, Homo sapien
caggagggcatccctttacataggg

SEQ ID NO: 3048715 - DNA, 25 bp, Homo sapien
aaaatgcctgtacttcggtgcaggg

SEQ ID NO: 3048716 - DNA, 25 bp, Homo sapien
ggaagtgcattccagcctagtagac

SEQ ID NO: 3048717 - DNA, 25 bp, Homo sapien
aatcaaaaaatacttcatgggagag

SEQ ID NO: 3048718 - DNA, 25 bp, Homo sapien
tataaagcgaagtaatgggaaccaa

SEQ ID NO: 3048719 - DNA, 25 bp, Homo sapien
cacagagggctccaaatgacaggcc

SEQ ID NO: 3048720 - DNA, 25 bp, Homo sapien
cattaaaggctccagcggtgcttgg

SEQ ID NO: 3048721 - DNA, 25 bp, Homo sapien
gaagcttaaggtacctcagcccagg

SEQ ID NO: 3048722 - DNA, 25 bp, Homo sapien
tccataaatcggtggaggccctcga

SEQ ID NO: 3048723 - DNA, 25 bp, Homo sapien
gggaaatctttctcaccggccagac

SEQ ID NO: 3048724 - DNA, 25 bp, Homo sapien
ctccctggaggcgaagcgaggatgc

SEQ ID NO: 3048725 - DNA, 25 bp, Homo sapien
cgaggatgccggctttaggtctccg

SEQ ID NO: 3048726 - DNA, 25 bp, Homo sapien
ggtcagctttcatccatgttgatcc

SEQ ID NO: 3048727 - DNA, 25 bp, Homo sapien
tgccggctttaggtctccgtcttcc

SEQ ID NO: 3048728 - DNA, 25 bp, Homo sapien
caaactcggagtgtccaaggcgaag

SEQ ID NO: 3048729 - DNA, 25 bp, Homo sapien
agacgatcgaaatgttcctggcgga

SEQ ID NO: 3048730 - DNA, 25 bp, Homo sapien
cgaagctggtcgtagattcccgagg

SEQ ID NO: 3048731 - DNA, 25 bp, Homo sapien
accaaagtttcgaccggcggatcag

SEQ ID NO: 3048732 - DNA, 25 bp, Homo sapien
ccggcactgccaggcggggcgcagg

SEQ ID NO: 3048733 - DNA, 25 bp, Homo sapien
gacgccggcactgccaggcggggcg

SEQ ID NO: 3048734 - DNA, 25 bp, Homo sapien
ggagcagggcgaccctcgcggggac

SEQ ID NO: 3048735 - DNA, 25 bp, Homo sapien
agcagggcgaccctcgcggggacgc

SEQ ID NO: 3048736 - DNA, 25 bp, Homo sapien
cccggagaccgcgttatagagaact

SEQ ID NO: 3048737 - DNA, 25 bp, Homo sapien
tcctgggatttcgtcgtcgcaaagc

SEQ ID NO: 3048738 - DNA, 25 bp, Homo sapien
aagccactcgttttttcccgagcag

SEQ ID NO: 3048739 - DNA, 25 bp, Homo sapien
gacggttcatatctgccctcttggg

SEQ ID NO: 3048740 - DNA, 25 bp, Homo sapien
tctgaagccttaggagactccagct

SEQ ID NO: 3048741 - DNA, 25 bp, Homo sapien
ccggcaaatgcccaggacaggtggt

SEQ ID NO: 3048742 - DNA, 25 bp, Homo sapien
gaaaggggacactggacagccacaa

SEQ ID NO: 3048743 - DNA, 25 bp, Homo sapien
cacaacttccggcaaatgcccagga

SEQ ID NO: 3048744 - DNA, 25 bp, Homo sapien
acagccacaacttccggcaaatgcc

SEQ ID NO: 3048745 - DNA, 25 bp, Homo sapien
cctccgagtcataccctttaatggg

SEQ ID NO: 3048746 - DNA, 25 bp, Homo sapien
tcttgcacagggtgtctgacttagg

SEQ ID NO: 3048747 - DNA, 25 bp, Homo sapien
tgacttaggaaacaaactgtacacc

SEQ ID NO: 3048748 - DNA, 25 bp, Homo sapien
ctaagccacccaggcctactagata

SEQ ID NO: 3048749 - DNA, 25 bp, Homo sapien
ggtgaagtcactcgccgaaagtcgc

SEQ ID NO: 3048750 - DNA, 25 bp, Homo sapien
cgttcgatgttcactacagcccctg

SEQ ID NO: 3048751 - DNA, 25 bp, Homo sapien
acagagggacaagccggatttcgga

SEQ ID NO: 3048752 - DNA, 25 bp, Homo sapien
gcacgagcagggattgagcacctac

SEQ ID NO: 3048753 - DNA, 25 bp, Homo sapien
tcctgctcttgctcgttttttgcgg

SEQ ID NO: 3048754 - DNA, 25 bp, Homo sapien
tgctcgttttttgcggatcgacaca

SEQ ID NO: 3048755 - DNA, 25 bp, Homo sapien
aacttgaaccacttgttggctggtt

SEQ ID NO: 3048756 - DNA, 25 bp, Homo sapien
gctcttgctcgttttttgcggatcg

SEQ ID NO: 3048757 - DNA, 25 bp, Homo sapien
ctcaggaaaataaatgttggaagct

SEQ ID NO: 3048758 - DNA, 25 bp, Homo sapien
ggaaaataaatgttggaagcttgag

SEQ ID NO: 3048759 - DNA, 25 bp, Homo sapien
agtgggcgctcaggaaaataaatgt

SEQ ID NO: 3048760 - DNA, 25 bp, Homo sapien
aaaataaatgttggaagcttgagat

SEQ ID NO: 3048761 - DNA, 25 bp, Homo sapien
cgcagggtgacctgagacaaaggct

SEQ ID NO: 3048762 - DNA, 25 bp, Homo sapien
ggcgcagggtgacctgagacaaagg

SEQ ID NO: 3048763 - DNA, 25 bp, Homo sapien
cagggtgacctgagacaaaggcttc

SEQ ID NO: 3048764 - DNA, 25 bp, Homo sapien
ctggcgcagggtgacctgagacaaa

SEQ ID NO: 3048765 - DNA, 25 bp, Homo sapien
caaatttgaccaaggaaccggagcg

SEQ ID NO: 3048766 - DNA, 25 bp, Homo sapien
agatgtagcctcttcgtcccggcag

SEQ ID NO: 3048767 - DNA, 25 bp, Homo sapien
gccgggattccggtcatcgcaataa

SEQ ID NO: 3048768 - DNA, 25 bp, Homo sapien
atcgcaataatctggctctcggccc

SEQ ID NO: 3048769 - DNA, 25 bp, Homo sapien
caaagaccaggtcaaggacaagttc

SEQ ID NO: 3048770 - DNA, 25 bp, Homo sapien
ccaggcccttgatgttccggttgaa

SEQ ID NO: 3048771 - DNA, 25 bp, Homo sapien
attcatctcccttccggatgaaagg

SEQ ID NO: 3048772 - DNA, 25 bp, Homo sapien
gtaaatccctgacgccaaagaccag

SEQ ID NO: 3048773 - DNA, 25 bp, Homo sapien
tctgtgaacccgacaggaagctccc

SEQ ID NO: 3048774 - DNA, 25 bp, Homo sapien
ccagcgactggcaacgagcgtttaa

SEQ ID NO: 3048775 - DNA, 25 bp, Homo sapien
tgtctgcgtgtgagagcgtctaccc

SEQ ID NO: 3048776 - DNA, 25 bp, Homo sapien
gaatccacccagagacgaagacttg

SEQ ID NO: 3048777 - DNA, 25 bp, Homo sapien
ctcgcttccggataatgggaggagc

SEQ ID NO: 3048778 - DNA, 25 bp, Homo sapien
ggaagagctaaggataggagagagg

SEQ ID NO: 3048779 - DNA, 25 bp, Homo sapien
gtcatcccccctcgcttccggataa

SEQ ID NO: 3048780 - DNA, 25 bp, Homo sapien
aatccgccggggaagagctaaggat

SEQ ID NO: 3048781 - DNA, 25 bp, Homo sapien
tgcccgctcaatggaacgcaagttc

SEQ ID NO: 3048782 - DNA, 25 bp, Homo sapien
tcggtgctgatcaagacaggtgtgc

SEQ ID NO: 3048783 - DNA, 25 bp, Homo sapien
aaggtagctggcacacgctgttcgg

SEQ ID NO: 3048784 - DNA, 25 bp, Homo sapien
tccctagtgagcaagacagacaaag

SEQ ID NO: 3048785 - DNA, 25 bp, Homo sapien
cgacttagagcccacgctccttcaa

SEQ ID NO: 3048786 - DNA, 25 bp, Homo sapien
caaaaacatggcggtgaagggcaga

SEQ ID NO: 3048787 - DNA, 25 bp, Homo sapien
cataccttgctctgcccgacttaga

SEQ ID NO: 3048788 - DNA, 25 bp, Homo sapien
agggcagaacccatcaggctcatac

SEQ ID NO: 3048789 - DNA, 25 bp, Homo sapien
gtgccccgccctttgtttgcactat

SEQ ID NO: 3048790 - DNA, 25 bp, Homo sapien
actattggacttaggagtgccgagg

SEQ ID NO: 3048791 - DNA, 25 bp, Homo sapien
tgtttgcactattggacttaggagt

SEQ ID NO: 3048792 - DNA, 25 bp, Homo sapien
tggagctgcccgtctcagtgtgtga

SEQ ID NO: 3048793 - DNA, 25 bp, Homo sapien
ggcaatttcttaggcacttgcaagg

SEQ ID NO: 3048794 - DNA, 25 bp, Homo sapien
taagatgttagggagctgataatgg

SEQ ID NO: 3048795 - DNA, 25 bp, Homo sapien
ttttggcaacgacagaaacgtagtg

SEQ ID NO: 3048796 - DNA, 25 bp, Homo sapien
tattaagctgtgtaactccctgccc

SEQ ID NO: 3048797 - DNA, 25 bp, Homo sapien
aaggctggcccacttagagcgaaac

SEQ ID NO: 3048798 - DNA, 25 bp, Homo sapien
taagtctaccccgaggttgccatgt

SEQ ID NO: 3048799 - DNA, 25 bp, Homo sapien
gccatgttgaagagtgagaggtcca

SEQ ID NO: 3048800 - DNA, 25 bp, Homo sapien
ccagactggactactgtggcggtta

SEQ ID NO: 3048801 - DNA, 25 bp, Homo sapien
ggaggagcagaataccaacgcaggg

SEQ ID NO: 3048802 - DNA, 25 bp, Homo sapien
tggctgtaacgatctcaccgtctcc

SEQ ID NO: 3048803 - DNA, 25 bp, Homo sapien
ggatggctgtaacgatctcaccgtc

SEQ ID NO: 3048804 - DNA, 25 bp, Homo sapien
aataccaacgcagggggatggctgt

SEQ ID NO: 3048805 - DNA, 25 bp, Homo sapien
tactgagttctagggaggtgctcac

SEQ ID NO: 3048806 - DNA, 25 bp, Homo sapien
cagctccgagaaagggtaacctcca

SEQ ID NO: 3048807 - DNA, 25 bp, Homo sapien
cctggaattgtgcataacccggatc

SEQ ID NO: 3048808 - DNA, 25 bp, Homo sapien
tgagagtgtgtctagctcccgacca

SEQ ID NO: 3048809 - DNA, 25 bp, Homo sapien
atttcctggcggtcttccatccaag

SEQ ID NO: 3048810 - DNA, 25 bp, Homo sapien
gtatttcctggcggtcttccatcca

SEQ ID NO: 3048811 - DNA, 25 bp, Homo sapien
cacctggtatttcctggcggtcttc

SEQ ID NO: 3048812 - DNA, 25 bp, Homo sapien
ctggtatttcctggcggtcttccat

SEQ ID NO: 3048813 - DNA, 25 bp, Homo sapien
cacaggacaaggtgcaaacacagac

SEQ ID NO: 3048814 - DNA, 25 bp, Homo sapien
aggaaatctcggtgggcagcgacct

SEQ ID NO: 3048815 - DNA, 25 bp, Homo sapien
cacctacgctatgatggaatctcga

SEQ ID NO: 3048816 - DNA, 25 bp, Homo sapien
tctgtccctaaggaggtggtccgct

SEQ ID NO: 3048817 - DNA, 25 bp, Homo sapien
gctcctcagaaccagggataaactg

SEQ ID NO: 3048818 - DNA, 25 bp, Homo sapien
caagataaatgatgcaaaggccaca

SEQ ID NO: 3048819 - DNA, 25 bp, Homo sapien
gactcctatatgcagccagttggaa

SEQ ID NO: 3048820 - DNA, 25 bp, Homo sapien
caccagtcctgctagtgagggttcc

SEQ ID NO: 3048821 - DNA, 25 bp, Homo sapien
ggtgcagagctttattgagactcca

SEQ ID NO: 3048822 - DNA, 25 bp, Homo sapien
cacacacataaagtttgtttcctgt

SEQ ID NO: 3048823 - DNA, 25 bp, Homo sapien
tgcagagctttattgagactccagt

SEQ ID NO: 3048824 - DNA, 25 bp, Homo sapien
aggatggtgcagagctttattgaga

SEQ ID NO: 3048825 - DNA, 25 bp, Homo sapien
agctggggaaagtagaagaggtgga

SEQ ID NO: 3048826 - DNA, 25 bp, Homo sapien
gctggggaaagtagaagaggtggaa

SEQ ID NO: 3048827 - DNA, 25 bp, Homo sapien
agagctggggaaagtagaagaggtg

SEQ ID NO: 3048828 - DNA, 25 bp, Homo sapien
gagctggggaaagtagaagaggtgg

SEQ ID NO: 3048829 - DNA, 25 bp, Homo sapien
gctacccccgttggcagctgtggtg

SEQ ID NO: 3048830 - DNA, 25 bp, Homo sapien
cagttcaagctacccccgttggcag

SEQ ID NO: 3048831 - DNA, 25 bp, Homo sapien
tgcaggcagttcaagctacccccgt

SEQ ID NO: 3048832 - DNA, 25 bp, Homo sapien
caagctacccccgttggcagctgtg

SEQ ID NO: 3048833 - DNA, 25 bp, Homo sapien
gggagccttgtcgctgactgactca

SEQ ID NO: 3048834 - DNA, 25 bp, Homo sapien
gctgggagccttgtcgctgactgac

SEQ ID NO: 3048835 - DNA, 25 bp, Homo sapien
tgggagccttgtcgctgactgactc

SEQ ID NO: 3048836 - DNA, 25 bp, Homo sapien
ctgggagccttgtcgctgactgact

SEQ ID NO: 3048837 - DNA, 25 bp, Homo sapien
tagggtgagccgcttgcaggctggc

SEQ ID NO: 3048838 - DNA, 25 bp, Homo sapien
tggctggacacggtacttgaggggg

SEQ ID NO: 3048839 - DNA, 25 bp, Homo sapien
tcggacgccccgctggtgttggtgc

SEQ ID NO: 3048840 - DNA, 25 bp, Homo sapien
tggctagggtgagccgcttgcaggc

SEQ ID NO: 3048841 - DNA, 25 bp, Homo sapien
gtggctcgtcctcgtacagaacctc

SEQ ID NO: 3048842 - DNA, 25 bp, Homo sapien
tagatgtaggcgatgtccatgaggg

SEQ ID NO: 3048843 - DNA, 25 bp, Homo sapien
ggtgtagtattccttcagtggctcg

SEQ ID NO: 3048844 - DNA, 25 bp, Homo sapien
ccatgagggtgtagtattccttcag

SEQ ID NO: 3048845 - DNA, 25 bp, Homo sapien
catgacggtcatggctgctgggcat

SEQ ID NO: 3048846 - DNA, 25 bp, Homo sapien
catcttgttgcggagaaacttggca

SEQ ID NO: 3048847 - DNA, 25 bp, Homo sapien
gtacttgctgggcacatccatcttg

SEQ ID NO: 3048848 - DNA, 25 bp, Homo sapien
tgctgggcatcgcaggaagcgcacc

SEQ ID NO: 3048849 - DNA, 25 bp, Homo sapien
ccatccccattctccagggggccct

SEQ ID NO: 3048850 - DNA, 25 bp, Homo sapien
tctctttgtccccatccccattctc

SEQ ID NO: 3048851 - DNA, 25 bp, Homo sapien
tgtccccatccccattctccagggg

SEQ ID NO: 3048852 - DNA, 25 bp, Homo sapien
tttctctttgtccccatccccattc

SEQ ID NO: 3048853 - DNA, 25 bp, Homo sapien
cagaaggggccagcctgggccagac

SEQ ID NO: 3048854 - DNA, 25 bp, Homo sapien
ccagaaggggccagcctgggccaga

SEQ ID NO: 3048855 - DNA, 25 bp, Homo sapien
tcgtagaattcgatggagaggctga

SEQ ID NO: 3048856 - DNA, 25 bp, Homo sapien
ctggcaccttcgtagaattcgatgg

SEQ ID NO: 3048857 - DNA, 25 bp, Homo sapien
aagacctcgccgcggtcctcattgg

SEQ ID NO: 3048858 - DNA, 25 bp, Homo sapien
caccttcgtagaattcgatggagag

SEQ ID NO: 3048859 - DNA, 25 bp, Homo sapien
ctccgtcagggggtacgctgcatag

SEQ ID NO: 3048860 - DNA, 25 bp, Homo sapien
cagggggtacgctgcatagaaatcc

SEQ ID NO: 3048861 - DNA, 25 bp, Homo sapien
ctgcatagaaatcccgccgccgttt

SEQ ID NO: 3048862 - DNA, 25 bp, Homo sapien
gtacgctgcatagaaatcccgccgc

SEQ ID NO: 3048863 - DNA, 25 bp, Homo sapien
agcccagggaccaatttgtagacaa

SEQ ID NO: 3048864 - DNA, 25 bp, Homo sapien
gcccagggaccaatttgtagacaat

SEQ ID NO: 3048865 - DNA, 25 bp, Homo sapien
aagcccagggaccaatttgtagaca

SEQ ID NO: 3048866 - DNA, 25 bp, Homo sapien
ggtagcgcacgatgcaggttttgca

SEQ ID NO: 3048867 - DNA, 25 bp, Homo sapien
catggggcagtatttgttggtctcc

SEQ ID NO: 3048868 - DNA, 25 bp, Homo sapien
tatggacctgcacgtcacacatggg

SEQ ID NO: 3048869 - DNA, 25 bp, Homo sapien
agcagcggccgggttttatggacct

SEQ ID NO: 3048870 - DNA, 25 bp, Homo sapien
cactccacgatagtggtggcgtcga

SEQ ID NO: 3048871 - DNA, 25 bp, Homo sapien
gattttgatccgtgtagtccgatgc

SEQ ID NO: 3048872 - DNA, 25 bp, Homo sapien
ggaatgcaggcactccacgatagtg

SEQ ID NO: 3048873 - DNA, 25 bp, Homo sapien
gtggcgtcgatgaagtaccccccgc

SEQ ID NO: 3048874 - DNA, 25 bp, Homo sapien
tgctgactgaatgaaacgctgctcc

SEQ ID NO: 3048875 - DNA, 25 bp, Homo sapien
tgcttttaagaagaaccccacagcc

SEQ ID NO: 3048876 - DNA, 25 bp, Homo sapien
gtcacttccccgagcatttctgaga

SEQ ID NO: 3048877 - DNA, 25 bp, Homo sapien
tttctagacacgaggcccaaggtgg

SEQ ID NO: 3048878 - DNA, 25 bp, Homo sapien
ccctgggtctggctattgctaatgt

SEQ ID NO: 3048879 - DNA, 25 bp, Homo sapien
gacccttaggcagcccacattctgg

SEQ ID NO: 3048880 - DNA, 25 bp, Homo sapien
caggtgctttaacaggtcagtccca

SEQ ID NO: 3048881 - DNA, 25 bp, Homo sapien
gccagcaggtgccaagagcaatgta

SEQ ID NO: 3048882 - DNA, 25 bp, Homo sapien
gcttttaacatcctggcacctggcc

SEQ ID NO: 3048883 - DNA, 25 bp, Homo sapien
tggcgggaaaaccactcagtgggcc

SEQ ID NO: 3048884 - DNA, 25 bp, Homo sapien
caaagcagtggcagtcctgtgacaa

SEQ ID NO: 3048885 - DNA, 25 bp, Homo sapien
agtctggcccaaacatgaccatcag

SEQ ID NO: 3048886 - DNA, 25 bp, Homo sapien
tccacccagggtaaattataacata

SEQ ID NO: 3048887 - DNA, 25 bp, Homo sapien
acataagtcttccagcaacaaaagc

SEQ ID NO: 3048888 - DNA, 25 bp, Homo sapien
ttcagcttccaaagtccgctctggg

SEQ ID NO: 3048889 - DNA, 25 bp, Homo sapien
gacctgcacaaagctgtaccctctt

SEQ ID NO: 3048890 - DNA, 25 bp, Homo sapien
caagacttcaacttgaaccctacct

SEQ ID NO: 3048891 - DNA, 25 bp, Homo sapien
tcaacttgaaccctacctagctaca

SEQ ID NO: 3048892 - DNA, 25 bp, Homo sapien
tagctacacatggtctggatcctgg

SEQ ID NO: 3048893 - DNA, 25 bp, Homo sapien
tgaaccctacctagctacacatggt

SEQ ID NO: 3048894 - DNA, 25 bp, Homo sapien
cttccctagagccaaactttctgcg

SEQ ID NO: 3048895 - DNA, 25 bp, Homo sapien
tagagccaaactttctgcggggccc

SEQ ID NO: 3048896 - DNA, 25 bp, Homo sapien
cctagagccaaactttctgcggggc

SEQ ID NO: 3048897 - DNA, 25 bp, Homo sapien
tccctagagccaaactttctgcggg

SEQ ID NO: 3048898 - DNA, 25 bp, Homo sapien
tcgagggagacgccaaatcgttaag

SEQ ID NO: 3048899 - DNA, 25 bp, Homo sapien
gagggagacgccaaatcgttaagac

SEQ ID NO: 3048900 - DNA, 25 bp, Homo sapien
agggagacgccaaatcgttaagacg

SEQ ID NO: 3048901 - DNA, 25 bp, Homo sapien
tggtcgagggagacgccaaatcgtt

SEQ ID NO: 3048902 - DNA, 25 bp, Homo sapien
aaagaaaggcggacggggcaagctg

SEQ ID NO: 3048903 - DNA, 25 bp, Homo sapien
ggcaagctgggctagggactgacgg

SEQ ID NO: 3048904 - DNA, 25 bp, Homo sapien
ccatcggggcttgcgaagaacggcc

SEQ ID NO: 3048905 - DNA, 25 bp, Homo sapien
gggtgcgaaggcaggatcggctcag

SEQ ID NO: 3048906 - DNA, 25 bp, Homo sapien
ggggccgcagccgtgtcgctcgccc

SEQ ID NO: 3048907 - DNA, 25 bp, Homo sapien
gtgtcgctcgcccgggcggcgggag

SEQ ID NO: 3048908 - DNA, 25 bp, Homo sapien
ggggggccgcagccgtgtcgctcgc

SEQ ID NO: 3048909 - DNA, 25 bp, Homo sapien
gaggggggccgcagccgtgtcgctc

SEQ ID NO: 3048910 - DNA, 25 bp, Homo sapien
ctgaaaggtggctcgtggtcctcca

SEQ ID NO: 3048911 - DNA, 25 bp, Homo sapien
tccaagtgacactcccttaaaatta

SEQ ID NO: 3048912 - DNA, 25 bp, Homo sapien
aaaattaataactgcatctgggagg

SEQ ID NO: 3048913 - DNA, 25 bp, Homo sapien
ttcagccaggcgtccgagcgatttt

SEQ ID NO: 3048914 - DNA, 25 bp, Homo sapien
ccacactggactaggaaacgaggcg

SEQ ID NO: 3048915 - DNA, 25 bp, Homo sapien
ataatccggccgaaggcgagcggcc

SEQ ID NO: 3048916 - DNA, 25 bp, Homo sapien
tgattcccgcatttttcgctcgcgc

SEQ ID NO: 3048917 - DNA, 25 bp, Homo sapien
gggtctgggacacaataatccggcc

SEQ ID NO: 3048918 - DNA, 25 bp, Homo sapien
tactgcgttactggacgcccgtggg

SEQ ID NO: 3048919 - DNA, 25 bp, Homo sapien
gaggcttggaaacgccgggagtagc

SEQ ID NO: 3048920 - DNA, 25 bp, Homo sapien
ggcctcatgaggatggtcgattccc

SEQ ID NO: 3048921 - DNA, 25 bp, Homo sapien
gggaagcgaatcgatactgcgttac

SEQ ID NO: 3048922 - DNA, 25 bp, Homo sapien
tccttccagagggagtggtccgaga

SEQ ID NO: 3048923 - DNA, 25 bp, Homo sapien
gagagctcgattatccatccggcca

SEQ ID NO: 3048924 - DNA, 25 bp, Homo sapien
gccattaagcgcactgacggtggga

SEQ ID NO: 3048925 - DNA, 25 bp, Homo sapien
atttattagggatggcggccgcgtc

SEQ ID NO: 3048926 - DNA, 25 bp, Homo sapien
ctgccggggaagacgcgcatccact

SEQ ID NO: 3048927 - DNA, 25 bp, Homo sapien
tgtgtcgccggcatcctgcactctg

SEQ ID NO: 3048928 - DNA, 25 bp, Homo sapien
ttcccaggcaaatgtgtcgccggca

SEQ ID NO: 3048929 - DNA, 25 bp, Homo sapien
gagaggcgagtagttcaccggcccc

SEQ ID NO: 3048930 - DNA, 25 bp, Homo sapien
tctgcggcccatgaatcctggaggg

SEQ ID NO: 3048931 - DNA, 25 bp, Homo sapien
tttgcgtcctggatgactagtctcc

SEQ ID NO: 3048932 - DNA, 25 bp, Homo sapien
gagtgtgctaagaccctattaccca

SEQ ID NO: 3048933 - DNA, 25 bp, Homo sapien
ttaagcgccagacaggagagaaccg

SEQ ID NO: 3048934 - DNA, 25 bp, Homo sapien
tactagccgacatagaaagcacctg

SEQ ID NO: 3048935 - DNA, 25 bp, Homo sapien
cctttgagccgaatctgcagagacc

SEQ ID NO: 3048936 - DNA, 25 bp, Homo sapien
tctggtgtgagctcccgctaagggt

SEQ ID NO: 3048937 - DNA, 25 bp, Homo sapien
tgcgctaggaactgggaactcaagg

SEQ ID NO: 3048938 - DNA, 25 bp, Homo sapien
cgcgctaaccgattgcgccacagag

SEQ ID NO: 3048939 - DNA, 25 bp, Homo sapien
tttcggttaacagccgaacgcgcta

SEQ ID NO: 3048940 - DNA, 25 bp, Homo sapien
gaacgcgctaaccgattgcgccaca

SEQ ID NO: 3048941 - DNA, 25 bp, Homo sapien
gcgtccctgggtgggctcgaaccac

SEQ ID NO: 3048942 - DNA, 25 bp, Homo sapien
tatggagaagtcacacacttggtgg

SEQ ID NO: 3048943 - DNA, 25 bp, Homo sapien
taaagcagacgttagacaagcacag

SEQ ID NO: 3048944 - DNA, 25 bp, Homo sapien
ggagattcatcgtaacatgcatgca

SEQ ID NO: 3048945 - DNA, 25 bp, Homo sapien
tgggatgtgccgagcagtactgccc

SEQ ID NO: 3048946 - DNA, 25 bp, Homo sapien
tgtttaaacgcactgtcccttctag

SEQ ID NO: 3048947 - DNA, 25 bp, Homo sapien
actggctactgcaaaaagtcctggg

SEQ ID NO: 3048948 - DNA, 25 bp, Homo sapien
cataagtggcacattctagaggagg

SEQ ID NO: 3048949 - DNA, 25 bp, Homo sapien
cactgacccctgcagatggctggta

SEQ ID NO: 3048950 - DNA, 25 bp, Homo sapien
catagcacttggttctggaaggacc

SEQ ID NO: 3048951 - DNA, 25 bp, Homo sapien
tcatcccggagcttaacgaggtgtc

SEQ ID NO: 3048952 - DNA, 25 bp, Homo sapien
tcatctagaggtcagtggagtctcc

SEQ ID NO: 3048953 - DNA, 25 bp, Homo sapien
taaagtctctttcggtgtcacaggc

SEQ ID NO: 3048954 - DNA, 25 bp, Homo sapien
ggatgttggacataaactcgttgaa

SEQ ID NO: 3048955 - DNA, 25 bp, Homo sapien
ctcgttgaagcgtttggagtactgc

SEQ ID NO: 3048956 - DNA, 25 bp, Homo sapien
cagggttcacagtcgagatctcggc

SEQ ID NO: 3048957 - DNA, 25 bp, Homo sapien
ttcacagtcgagatctcggcccctg

SEQ ID NO: 3048958 - DNA, 25 bp, Homo sapien
ggagccagggtattcagaagcctct

SEQ ID NO: 3048959 - DNA, 25 bp, Homo sapien
caggcctgcaccgaagtagaagaaa

SEQ ID NO: 3048960 - DNA, 25 bp, Homo sapien
tggcaacgcggctctggatctctgt

SEQ ID NO: 3048961 - DNA, 25 bp, Homo sapien
tgtgatttataaccccaggcctgca

SEQ ID NO: 3048962 - DNA, 25 bp, Homo sapien
tgatggccatgaaatacacctcctt

SEQ ID NO: 3048963 - DNA, 25 bp, Homo sapien
tggcgtgaggatatcaatgatggcc

SEQ ID NO: 3048964 - DNA, 25 bp, Homo sapien
tttcttctttgtatcgtatggcgtg

SEQ ID NO: 3048965 - DNA, 25 bp, Homo sapien
tctttgtatcgtatggcgtgaggat

SEQ ID NO: 3048966 - DNA, 25 bp, Homo sapien
gtccagatgcccctagaaggatcta

SEQ ID NO: 3048967 - DNA, 25 bp, Homo sapien
gaaccactcttcagtcagccaggac

SEQ ID NO: 3048968 - DNA, 25 bp, Homo sapien
tagaaggatctaaacaatgagctga

SEQ ID NO: 3048969 - DNA, 25 bp, Homo sapien
actcttcagtcagccaggacaagca

SEQ ID NO: 3048970 - DNA, 25 bp, Homo sapien
tcatggcatagacgtcaacagaggg

SEQ ID NO: 3048971 - DNA, 25 bp, Homo sapien
caacagaggggtcgaattccccagg

SEQ ID NO: 3048972 - DNA, 25 bp, Homo sapien
ttttcatggcatagacgtcaacaga

SEQ ID NO: 3048973 - DNA, 25 bp, Homo sapien
tcaacagaggggtcgaattccccag

SEQ ID NO: 3048974 - DNA, 25 bp, Homo sapien
ctgtccggaggtgtgccataggagc

SEQ ID NO: 3048975 - DNA, 25 bp, Homo sapien
ccggaggtgtgccataggagcagag

SEQ ID NO: 3048976 - DNA, 25 bp, Homo sapien
gtgccataggagcagagtaggttgc

SEQ ID NO: 3048977 - DNA, 25 bp, Homo sapien
ggtgtgccataggagcagagtaggt

SEQ ID NO: 3048978 - DNA, 25 bp, Homo sapien
tgctctgcccggtccacgtcgtgga

SEQ ID NO: 3048979 - DNA, 25 bp, Homo sapien
cctgctctgcccggtccacgtcgtg

SEQ ID NO: 3048980 - DNA, 25 bp, Homo sapien
ctgctctgcccggtccacgtcgtgg

SEQ ID NO: 3048981 - DNA, 25 bp, Homo sapien
gtccatgatcttcagctgtgccaag

SEQ ID NO: 3048982 - DNA, 25 bp, Homo sapien
cagcaggctgtagtccatgatcttc

SEQ ID NO: 3048983 - DNA, 25 bp, Homo sapien
ccatgatcttcagctgtgccaagaa

SEQ ID NO: 3048984 - DNA, 25 bp, Homo sapien
tagtccatgatcttcagctgtgcca

SEQ ID NO: 3048985 - DNA, 25 bp, Homo sapien
gagtttcattcataacatgttgccc

SEQ ID NO: 3048986 - DNA, 25 bp, Homo sapien
ccaagctggagggtcaccgcaacct

SEQ ID NO: 3048987 - DNA, 25 bp, Homo sapien
tggagtttcattcataacatgttgc

SEQ ID NO: 3048988 - DNA, 25 bp, Homo sapien
ggagtttcattcataacatgttgcc

SEQ ID NO: 3048989 - DNA, 25 bp, Homo sapien
ttttgtccatactcctggaaagtac

SEQ ID NO: 3048990 - DNA, 25 bp, Homo sapien
catactcctggaaagtactgaattc

SEQ ID NO: 3048991 - DNA, 25 bp, Homo sapien
tgtccatactcctggaaagtactga

SEQ ID NO: 3048992 - DNA, 25 bp, Homo sapien
cctggaaagtactgaattccattct

SEQ ID NO: 3048993 - DNA, 25 bp, Homo sapien
aggtacagaaggagccttgcaggtg

SEQ ID NO: 3048994 - DNA, 25 bp, Homo sapien
taggtacagaaggagccttgcaggt

SEQ ID NO: 3048995 - DNA, 25 bp, Homo sapien
ctaggtacagaaggagccttgcagg

SEQ ID NO: 3048996 - DNA, 25 bp, Homo sapien
tgcagcttctgcccttcattgagga

SEQ ID NO: 3048997 - DNA, 25 bp, Homo sapien
gcagcttctgcccttcattgaggaa

SEQ ID NO: 3048998 - DNA, 25 bp, Homo sapien
tcgcttctctggcaaccgtagaacc

SEQ ID NO: 3048999 - DNA, 25 bp, Homo sapien
ttgtcgctcgcttctctggcaaccg

SEQ ID NO: 3049000 - DNA, 25 bp, Homo sapien
ttctccttgtcgctcgcttctctgg

SEQ ID NO: 3049001 - DNA, 25 bp, Homo sapien
gctcgcttctctggcaaccgtagaa

SEQ ID NO: 3049002 - DNA, 25 bp, Homo sapien
gctgaacacgttcctggtaaccacc

SEQ ID NO: 3049003 - DNA, 25 bp, Homo sapien
tgaggtcatacttgcgatgcacagt

SEQ ID NO: 3049004 - DNA, 25 bp, Homo sapien
cacagtgagccgatggctgaacacg

SEQ ID NO: 3049005 - DNA, 25 bp, Homo sapien
accatccacggtcaggcggtacatg

SEQ ID NO: 3049006 - DNA, 25 bp, Homo sapien
gtcttgatgacaaagcgccggtcgt

SEQ ID NO: 3049007 - DNA, 25 bp, Homo sapien
gcgccggtcgtaggtggtgaggaaa

SEQ ID NO: 3049008 - DNA, 25 bp, Homo sapien
caccgaccctggctgtcactgttga

SEQ ID NO: 3049009 - DNA, 25 bp, Homo sapien
atctccgccacgtcctcgctggaca

SEQ ID NO: 3049010 - DNA, 25 bp, Homo sapien
cctgcttgtctatgcaaggctggga

SEQ ID NO: 3049011 - DNA, 25 bp, Homo sapien
caagggacctctgggaagcaacggt

SEQ ID NO: 3049012 - DNA, 25 bp, Homo sapien
ggatatgttcaccaagcagatgcca

SEQ ID NO: 3049013 - DNA, 25 bp, Homo sapien
tgtccctggatctaccctaatgctg

SEQ ID NO: 3049014 - DNA, 25 bp, Homo sapien
atactccttaaacttaaagcggctg

SEQ ID NO: 3049015 - DNA, 25 bp, Homo sapien
ctcccgaaggtttcggaacaccatg

SEQ ID NO: 3049016 - DNA, 25 bp, Homo sapien
tgacaggaacaggaacattgctcag

SEQ ID NO: 3049017 - DNA, 25 bp, Homo sapien
gaagagatgattgtccaccttgatc

SEQ ID NO: 3049018 - DNA, 25 bp, Homo sapien
gaagtcatctggcattagcatgaca

SEQ ID NO: 3049019 - DNA, 25 bp, Homo sapien
ttattgaagagatgattgtccacct

SEQ ID NO: 3049020 - DNA, 25 bp, Homo sapien
aatgatcaatagataaatgtctccc

SEQ ID NO: 3049021 - DNA, 25 bp, Homo sapien
tttctaagcaaagagcatcctacta

SEQ ID NO: 3049022 - DNA, 25 bp, Homo sapien
tactagcatatatggcagatactca

SEQ ID NO: 3049023 - DNA, 25 bp, Homo sapien
cacgctcggctttaattatatttct

SEQ ID NO: 3049024 - DNA, 25 bp, Homo sapien
caaacaaacaaaatcacaatgagat

SEQ ID NO: 3049025 - DNA, 25 bp, Homo sapien
aaacaaaatcacaatgagatacgaa

SEQ ID NO: 3049026 - DNA, 25 bp, Homo sapien
aacaaacaaaatcacaatgagatac

SEQ ID NO: 3049027 - DNA, 25 bp, Homo sapien
caaacaaaatcacaatgagatacga

SEQ ID NO: 3049028 - DNA, 25 bp, Homo sapien
tgttcattatgtccagaggcacgga

SEQ ID NO: 3049029 - DNA, 25 bp, Homo sapien
gaaatgttgtcagatgacccctggg

SEQ ID NO: 3049030 - DNA, 25 bp, Homo sapien
catgcataggcgtataacccagagc

SEQ ID NO: 3049031 - DNA, 25 bp, Homo sapien
ttgttggcccgaagcagctcctaga

SEQ ID NO: 3049032 - DNA, 25 bp, Homo sapien
aacccagggtggagttctacattca

SEQ ID NO: 3049033 - DNA, 25 bp, Homo sapien
gaagtgtctggttcaaggaagcctg

SEQ ID NO: 3049034 - DNA, 25 bp, Homo sapien
aagagaggactatttgggcagacca

SEQ ID NO: 3049035 - DNA, 25 bp, Homo sapien
gctacttgacagagctggcagccgg

SEQ ID NO: 3049036 - DNA, 25 bp, Homo sapien
gaagcagggatgaaagcgactccac

SEQ ID NO: 3049037 - DNA, 25 bp, Homo sapien
tttgcgctccatgggctgccccaag

SEQ ID NO: 3049038 - DNA, 25 bp, Homo sapien
gggatgaaagcgactccactgcact

SEQ ID NO: 3049039 - DNA, 25 bp, Homo sapien
cttgcctttgcgctccatgggctgc

SEQ ID NO: 3049040 - DNA, 25 bp, Homo sapien
gcgacggcagaccacagagacacca

SEQ ID NO: 3049041 - DNA, 25 bp, Homo sapien
agagacaccaggcctcgcgtggcgt

SEQ ID NO: 3049042 - DNA, 25 bp, Homo sapien
agacaccaggcctcgcgtggcgtgc

SEQ ID NO: 3049043 - DNA, 25 bp, Homo sapien
ggtggcgacggcagaccacagagac

SEQ ID NO: 3049044 - DNA, 25 bp, Homo sapien
gggtggcaggcgtcaccggcagggc

SEQ ID NO: 3049045 - DNA, 25 bp, Homo sapien
ggtggggtgggcgtgcaagtggctt

SEQ ID NO: 3049046 - DNA, 25 bp, Homo sapien
ccgaaaggcgtgcaagggtggggtg

SEQ ID NO: 3049047 - DNA, 25 bp, Homo sapien
tgggcgtgcaagtggcttggcgagg

SEQ ID NO: 3049048 - DNA, 25 bp, Homo sapien
ctgcagggggcgtgggagcgcgcgg

SEQ ID NO: 3049049 - DNA, 25 bp, Homo sapien
tgcagggggcgtgggagcgcgcggg

SEQ ID NO: 3049050 - DNA, 25 bp, Homo sapien
agggctgcagggggcgtgggagcgc

SEQ ID NO: 3049051 - DNA, 25 bp, Homo sapien
ggctgcagggggcgtgggagcgcgc

SEQ ID NO: 3049052 - DNA, 25 bp, Homo sapien
tagcttcactttctggcacacgaaa

SEQ ID NO: 3049053 - DNA, 25 bp, Homo sapien
gaatagcttcactttctggcacacg

SEQ ID NO: 3049054 - DNA, 25 bp, Homo sapien
aggacgctgaggatcggctcgctgg

SEQ ID NO: 3049055 - DNA, 25 bp, Homo sapien
aggatcggctcgctggcccggaata

SEQ ID NO: 3049056 - DNA, 25 bp, Homo sapien
gcggcggagacagcgcacaagccag

SEQ ID NO: 3049057 - DNA, 25 bp, Homo sapien
agcgcacaagccagcggcctcaggc

SEQ ID NO: 3049058 - DNA, 25 bp, Homo sapien
gagacagcgcacaagccagcggcct

SEQ ID NO: 3049059 - DNA, 25 bp, Homo sapien
gacagcgcacaagccagcggcctca

SEQ ID NO: 3049060 - DNA, 25 bp, Homo sapien
tcaccgcgccatggtcgcgcccgtc

SEQ ID NO: 3049061 - DNA, 25 bp, Homo sapien
gcctggcctccgaacgcctcggggc

SEQ ID NO: 3049062 - DNA, 25 bp, Homo sapien
ggcctgacagaaacccgcctggcct

SEQ ID NO: 3049063 - DNA, 25 bp, Homo sapien
ggctgggcaggcgtcgctgtggacc

SEQ ID NO: 3049064 - DNA, 25 bp, Homo sapien
gatcgggtttcaagcattacagtgc

SEQ ID NO: 3049065 - DNA, 25 bp, Homo sapien
tcactggtcaaatgagggcttctgg

SEQ ID NO: 3049066 - DNA, 25 bp, Homo sapien
tactacacggtaagaagtgaagccg

SEQ ID NO: 3049067 - DNA, 25 bp, Homo sapien
tcaagagggcctaggagttcactgg

SEQ ID NO: 3049068 - DNA, 25 bp, Homo sapien
tgataaacatcacaaccccagggaa

SEQ ID NO: 3049069 - DNA, 25 bp, Homo sapien
gagaaaaacgagctggcctgcctta

SEQ ID NO: 3049070 - DNA, 25 bp, Homo sapien
cagtgcccacccgttaaagagtcaa

SEQ ID NO: 3049071 - DNA, 25 bp, Homo sapien
tcaggactcaatgaagcagggtcac

SEQ ID NO: 3049072 - DNA, 25 bp, Homo sapien
ctccagggaggaagtagatgcactc

SEQ ID NO: 3049073 - DNA, 25 bp, Homo sapien
tagatattccgcttcacccgatcct

SEQ ID NO: 3049074 - DNA, 25 bp, Homo sapien
ttctccagagctaccgaagttctct

SEQ ID NO: 3049075 - DNA, 25 bp, Homo sapien
ctctgtaaagagtagatattccgct

SEQ ID NO: 3049076 - DNA, 25 bp, Homo sapien
tgaacttcccatcccgggagtccag

SEQ ID NO: 3049077 - DNA, 25 bp, Homo sapien
tcttgaggatgttcagtctctcctc

SEQ ID NO: 3049078 - DNA, 25 bp, Homo sapien
tcatctcttgccgttttcgctctaa

SEQ ID NO: 3049079 - DNA, 25 bp, Homo sapien
tcctcatccttagcatgcctcttga

SEQ ID NO: 3049080 - DNA, 25 bp, Homo sapien
ctcgtcctttcaatgtcctcacatg

SEQ ID NO: 3049081 - DNA, 25 bp, Homo sapien
tcgtcctttcaatgtcctcacatgg

SEQ ID NO: 3049082 - DNA, 25 bp, Homo sapien
tatccgggagcatgtcgcctttggt

SEQ ID NO: 3049083 - DNA, 25 bp, Homo sapien
tagtttggcctgtctctctcctgtt

SEQ ID NO: 3049084 - DNA, 25 bp, Homo sapien
taggtgatgggctcctagtttggcc

SEQ ID NO: 3049085 - DNA, 25 bp, Homo sapien
tctcctgttcaccttagagttgtgc

SEQ ID NO: 3049086 - DNA, 25 bp, Homo sapien
tttgctgggtcttggggaccgtgac

SEQ ID NO: 3049087 - DNA, 25 bp, Homo sapien
gtttgctgggtcttggggaccgtga

SEQ ID NO: 3049088 - DNA, 25 bp, Homo sapien
agtttgctgggtcttggggaccgtg

SEQ ID NO: 3049089 - DNA, 25 bp, Homo sapien
tgaagaccctggttacggtcagagt

SEQ ID NO: 3049090 - DNA, 25 bp, Homo sapien
ctgcccagggatcgagacctcctgt

SEQ ID NO: 3049091 - DNA, 25 bp, Homo sapien
tggatctggaatggttcttcatccc

SEQ ID NO: 3049092 - DNA, 25 bp, Homo sapien
cttctggatctggaatggttcttca

SEQ ID NO: 3049093 - DNA, 25 bp, Homo sapien
gacaaaacaggggaggaatttgcca

SEQ ID NO: 3049094 - DNA, 25 bp, Homo sapien
aaaacaggggaggaatttgccatct

SEQ ID NO: 3049095 - DNA, 25 bp, Homo sapien
acaggggaggaatttgccatcttct

SEQ ID NO: 3049096 - DNA, 25 bp, Homo sapien
tggacaaaacaggggaggaatttgc

SEQ ID NO: 3049097 - DNA, 25 bp, Homo sapien
ttgcctccaatgtgacctttccgcc

SEQ ID NO: 3049098 - DNA, 25 bp, Homo sapien
tgctgaactatgcttcttgcctcca

SEQ ID NO: 3049099 - DNA, 25 bp, Homo sapien
tatataggtccaatttaaatatctt

SEQ ID NO: 3049100 - DNA, 25 bp, Homo sapien
tgacctttccgcctcccagcagtta

SEQ ID NO: 3049101 - DNA, 25 bp, Homo sapien
agggaggccagtcgccacatgctca

SEQ ID NO: 3049102 - DNA, 25 bp, Homo sapien
catgttcaagtgttcatcactgaat

SEQ ID NO: 3049103 - DNA, 25 bp, Homo sapien
ggaactctagcattagatggcaagc

SEQ ID NO: 3049104 - DNA, 25 bp, Homo sapien
tgagcaagtgaatcaacgagaaggg

SEQ ID NO: 3049105 - DNA, 25 bp, Homo sapien
cgagcttctgtgcttatgtttcttg

SEQ ID NO: 3049106 - DNA, 25 bp, Homo sapien
ctgcactgtgctcatcctcgctgct

SEQ ID NO: 3049107 - DNA, 25 bp, Homo sapien
tgctggaacgatcactactcgagct

SEQ ID NO: 3049108 - DNA, 25 bp, Homo sapien
cctcgctgctggaacgatcactact

SEQ ID NO: 3049109 - DNA, 25 bp, Homo sapien
ctggattatttaatacctctcgttt

SEQ ID NO: 3049110 - DNA, 25 bp, Homo sapien
atatttgtcaatggggcgccccagc

SEQ ID NO: 3049111 - DNA, 25 bp, Homo sapien
caggaccctggtacatccagtccaa

SEQ ID NO: 3049112 - DNA, 25 bp, Homo sapien
tgctggccatgtcaagaagggaatt

SEQ ID NO: 3049113 - DNA, 25 bp, Homo sapien
gcaggtactcgtcacggttcaccat

SEQ ID NO: 3049114 - DNA, 25 bp, Homo sapien
cctttacagagtctttatattatgc

SEQ ID NO: 3049115 - DNA, 25 bp, Homo sapien
caacatggggtgtggatcttggctc

SEQ ID NO: 3049116 - DNA, 25 bp, Homo sapien
gagcttctcgagtctcctttacaga

SEQ ID NO: 3049117 - DNA, 25 bp, Homo sapien
gaaaaccagtgttcctcaacatggg

SEQ ID NO: 3049118 - DNA, 25 bp, Homo sapien
gcagctcccgctgaagctcctcaat

SEQ ID NO: 3049119 - DNA, 25 bp, Homo sapien
caacatcctccgcatagcgctgcat

SEQ ID NO: 3049120 - DNA, 25 bp, Homo sapien
ctcaatcttcttccgctcagcctca

SEQ ID NO: 3049121 - DNA, 25 bp, Homo sapien
agggtctgcgggtgccagctcttct

SEQ ID NO: 3049122 - DNA, 25 bp, Homo sapien
gcgtgtgagggcaagatgtcttcaa

SEQ ID NO: 3049123 - DNA, 25 bp, Homo sapien
ccttccatacccaaggcaggcgtgt

SEQ ID NO: 3049124 - DNA, 25 bp, Homo sapien
ccatacccaaggcaggcgtgtgagg

SEQ ID NO: 3049125 - DNA, 25 bp, Homo sapien
gtgagggcaagatgtcttcaacaat

SEQ ID NO: 3049126 - DNA, 25 bp, Homo sapien
tacctcgcgggatctagtcccagga

SEQ ID NO: 3049127 - DNA, 25 bp, Homo sapien
ggagacgattcctcactacgcggat

SEQ ID NO: 3049128 - DNA, 25 bp, Homo sapien
gtttcaccaccgctctagaggtcac

SEQ ID NO: 3049129 - DNA, 25 bp, Homo sapien
cccaggagccgtcaactgccagttt

SEQ ID NO: 3049130 - DNA, 25 bp, Homo sapien
agattttgcaaaggtccgggctccg

SEQ ID NO: 3049131 - DNA, 25 bp, Homo sapien
tcgcggaacgatgacgtacagggct

SEQ ID NO: 3049132 - DNA, 25 bp, Homo sapien
acagggctcggtcgcgctttgtgac

SEQ ID NO: 3049133 - DNA, 25 bp, Homo sapien
ttcgggtcgccacgttgcctgatgt

SEQ ID NO: 3049134 - DNA, 25 bp, Homo sapien
tgctctatccctgagccctaccccc

SEQ ID NO: 3049135 - DNA, 25 bp, Homo sapien
atgctctatccctgagccctacccc

SEQ ID NO: 3049136 - DNA, 25 bp, Homo sapien
tcaggtcgatggctatgaagggaaa

SEQ ID NO: 3049137 - DNA, 25 bp, Homo sapien
caggtcgatggctatgaagggaaaa

SEQ ID NO: 3049138 - DNA, 25 bp, Homo sapien
ggtcgatggctatgaagggaaaaga

SEQ ID NO: 3049139 - DNA, 25 bp, Homo sapien
cgatggctatgaagggaaaagatgc

SEQ ID NO: 3049140 - DNA, 25 bp, Homo sapien
ggctggagtgttcctgcggtagcca

SEQ ID NO: 3049141 - DNA, 25 bp, Homo sapien
gagggctggagtgttcctgcggtag

SEQ ID NO: 3049142 - DNA, 25 bp, Homo sapien
agggctggagtgttcctgcggtagc

SEQ ID NO: 3049143 - DNA, 25 bp, Homo sapien
gggctggagtgttcctgcggtagcc

SEQ ID NO: 3049144 - DNA, 25 bp, Homo sapien
tcagcattgtagtggtcatgcccag

SEQ ID NO: 3049145 - DNA, 25 bp, Homo sapien
acccatcgatcggtttcagatcagc

SEQ ID NO: 3049146 - DNA, 25 bp, Homo sapien
gatcggtttcagatcagcattgtag

SEQ ID NO: 3049147 - DNA, 25 bp, Homo sapien
cattgtagtggtcatgcccagtcac

SEQ ID NO: 3049148 - DNA, 25 bp, Homo sapien
aggcgtagtcacttgcattccccat

SEQ ID NO: 3049149 - DNA, 25 bp, Homo sapien
ccaggcgtagtcacttgcattcccc

SEQ ID NO: 3049150 - DNA, 25 bp, Homo sapien
caggcgtagtcacttgcattcccca

SEQ ID NO: 3049151 - DNA, 25 bp, Homo sapien
accaggcgtagtcacttgcattccc

SEQ ID NO: 3049152 - DNA, 25 bp, Homo sapien
ctgggctgaaaagccaagggctggt

SEQ ID NO: 3049153 - DNA, 25 bp, Homo sapien
gtgaggttgaggggcagaaggcttc

SEQ ID NO: 3049154 - DNA, 25 bp, Homo sapien
gggctgaaaagccaagggctggtga

SEQ ID NO: 3049155 - DNA, 25 bp, Homo sapien
ctggtgaggttgaggggcagaaggc

SEQ ID NO: 3049156 - DNA, 25 bp, Homo sapien
caccaggaataattgcaggaaaact

SEQ ID NO: 3049157 - DNA, 25 bp, Homo sapien
ttgaggtatctttgtccttgcccga

SEQ ID NO: 3049158 - DNA, 25 bp, Homo sapien
ttgtccttgcccgaagatgtggatg

SEQ ID NO: 3049159 - DNA, 25 bp, Homo sapien
gcccgaagatgtggatgtagtctac

SEQ ID NO: 3049160 - DNA, 25 bp, Homo sapien
gtggatgtagtctactatccagcca

SEQ ID NO: 3049161 - DNA, 25 bp, Homo sapien
cgttgtagggcggaatcgccgacca

SEQ ID NO: 3049162 - DNA, 25 bp, Homo sapien
gaaccacgtgactctggaagtagct

SEQ ID NO: 3049163 - DNA, 25 bp, Homo sapien
agcctttctccagtcgcaggcgaca

SEQ ID NO: 3049164 - DNA, 25 bp, Homo sapien
cgtggtagtcctgctgcgcgttgta

SEQ ID NO: 3049165 - DNA, 25 bp, Homo sapien
caaccaccgtagcctcggagggcct

SEQ ID NO: 3049166 - DNA, 25 bp, Homo sapien
gacacccctgcgcattcttacgtga

SEQ ID NO: 3049167 - DNA, 25 bp, Homo sapien
ttacgtgatgtcaacgacccctgcg

SEQ ID NO: 3049168 - DNA, 25 bp, Homo sapien
tgaggaccctagatggggacacccc

SEQ ID NO: 3049169 - DNA, 25 bp, Homo sapien
acccctgcgacacaaaccctattgt

SEQ ID NO: 3049170 - DNA, 25 bp, Homo sapien
agcttcagtggtgttactgcactcc

SEQ ID NO: 3049171 - DNA, 25 bp, Homo sapien
aagaataaaatgtgaggtgggatgc

SEQ ID NO: 3049172 - DNA, 25 bp, Homo sapien
aataaaatgtgaggtgggatgcagt

SEQ ID NO: 3049173 - DNA, 25 bp, Homo sapien
acagtgagcttcagtggtgttactg

SEQ ID NO: 3049174 - DNA, 25 bp, Homo sapien
tgggtataccttgacatctcctggg

SEQ ID NO: 3049175 - DNA, 25 bp, Homo sapien
tcatggaagacactaagggtagtcc

SEQ ID NO: 3049176 - DNA, 25 bp, Homo sapien
catttttccaaaacgctgggtgtca

SEQ ID NO: 3049177 - DNA, 25 bp, Homo sapien
ccaccgtacccaggcgagatttaat

SEQ ID NO: 3049178 - DNA, 25 bp, Homo sapien
gccagcattggatgcaatccggggc

SEQ ID NO: 3049179 - DNA, 25 bp, Homo sapien
agcattggatgcaatccggggccac

SEQ ID NO: 3049180 - DNA, 25 bp, Homo sapien
gctgccagcattggatgcaatccgg

SEQ ID NO: 3049181 - DNA, 25 bp, Homo sapien
ctgccagcattggatgcaatccggg

SEQ ID NO: 3049182 - DNA, 25 bp, Homo sapien
gacctaaggaacaagctggactgat

SEQ ID NO: 3049183 - DNA, 25 bp, Homo sapien
gacatcgtcaaacacagaagatcct

SEQ ID NO: 3049184 - DNA, 25 bp, Homo sapien
tgtacttctagacaatccacccaac

SEQ ID NO: 3049185 - DNA, 25 bp, Homo sapien
gggacagattaagacatcgtcaaac

SEQ ID NO: 3049186 - DNA, 25 bp, Homo sapien
tttcatctcgcctttattgttcact

SEQ ID NO: 3049187 - DNA, 25 bp, Homo sapien
ctttcatctcgcctttattgttcac

SEQ ID NO: 3049188 - DNA, 25 bp, Homo sapien
taaatcaagggatggccaggaactc

SEQ ID NO: 3049189 - DNA, 25 bp, Homo sapien
taacctgtcaagtcgcagtgccacc

SEQ ID NO: 3049190 - DNA, 25 bp, Homo sapien
gacagaatgtacactcagcgtttga

SEQ ID NO: 3049191 - DNA, 25 bp, Homo sapien
aaaatctactggacagcatcgtggg

SEQ ID NO: 3049192 - DNA, 25 bp, Homo sapien
gggaagtctgttcagccgtcccttg

SEQ ID NO: 3049193 - DNA, 25 bp, Homo sapien
caccagcagcgggaagtctgttcag

SEQ ID NO: 3049194 - DNA, 25 bp, Homo sapien
cacggagatgatatacaggtttttg

SEQ ID NO: 3049195 - DNA, 25 bp, Homo sapien
tcccttgatccccttcacggagatg

SEQ ID NO: 3049196 - DNA, 25 bp, Homo sapien
tgtcacaccaccgattgaagcaaac

SEQ ID NO: 3049197 - DNA, 25 bp, Homo sapien
gaagcaaacaacacatgttgccact

SEQ ID NO: 3049198 - DNA, 25 bp, Homo sapien
ccaaaagcgatgttttcactctccc

SEQ ID NO: 3049199 - DNA, 25 bp, Homo sapien
ttgacggctcaataggtcattagcc

SEQ ID NO: 3049200 - DNA, 25 bp, Homo sapien
agtatagcaacgtgcaaagacctca

SEQ ID NO: 3049201 - DNA, 25 bp, Homo sapien
gtatagcaacgtgcaaagacctcac

SEQ ID NO: 3049202 - DNA, 25 bp, Homo sapien
cagcacaattgattacagctcctac

SEQ ID NO: 3049203 - DNA, 25 bp, Homo sapien
tccggaatttcgcaccagaggaccc

SEQ ID NO: 3049204 - DNA, 25 bp, Homo sapien
caaggaaatccggaatttcgcacca

SEQ ID NO: 3049205 - DNA, 25 bp, Homo sapien
attgattacagctcctaccggaaga

SEQ ID NO: 3049206 - DNA, 25 bp, Homo sapien
caatctagacatggttcggagttcc

SEQ ID NO: 3049207 - DNA, 25 bp, Homo sapien
catgtgccacccgattctcacggaa

SEQ ID NO: 3049208 - DNA, 25 bp, Homo sapien
ggattttacttatgccgtccccatg

SEQ ID NO: 3049209 - DNA, 25 bp, Homo sapien
tacgctatagattagctcgctcgga

SEQ ID NO: 3049210 - DNA, 25 bp, Homo sapien
tattaacactctgacatcgaaatta

SEQ ID NO: 3049211 - DNA, 25 bp, Homo sapien
aaacctagacgactcaacccttgct

SEQ ID NO: 3049212 - DNA, 25 bp, Homo sapien
taacactctgacatcgaaattaaga

SEQ ID NO: 3049213 - DNA, 25 bp, Homo sapien
gaaattaagaaacctagacgactca

SEQ ID NO: 3049214 - DNA, 25 bp, Homo sapien
gcaaggcataaaaccgcagaggtcg

SEQ ID NO: 3049215 - DNA, 25 bp, Homo sapien
gcgatctcgcggtatccagactaca

SEQ ID NO: 3049216 - DNA, 25 bp, Homo sapien
cacgacagatggtggaggatcctcc

SEQ ID NO: 3049217 - DNA, 25 bp, Homo sapien
tacgatagccctattcgcggagcga

SEQ ID NO: 3049218 - DNA, 25 bp, Homo sapien
aaaggaagtcgattcaaaggacact

SEQ ID NO: 3049219 - DNA, 25 bp, Homo sapien
gacactgggatatgaactttaacgc

SEQ ID NO: 3049220 - DNA, 25 bp, Homo sapien
tgggatatgaactttaacgccccgc

SEQ ID NO: 3049221 - DNA, 25 bp, Homo sapien
tcgattcaaaggacactgggatatg

SEQ ID NO: 3049222 - DNA, 25 bp, Homo sapien
gacgtcgcttttagccctctctgcg

SEQ ID NO: 3049223 - DNA, 25 bp, Homo sapien
agttgaggtagaagcgcaagagata

SEQ ID NO: 3049224 - DNA, 25 bp, Homo sapien
tgggcgctgccttattacgtaataa

SEQ ID NO: 3049225 - DNA, 25 bp, Homo sapien
ggcctcttccgcctctgggcgctgc

SEQ ID NO: 3049226 - DNA, 25 bp, Homo sapien
tcgccctcgccgaggaaccagtcgc

SEQ ID NO: 3049227 - DNA, 25 bp, Homo sapien
aaccagtcgctcaggaagccgcgca

SEQ ID NO: 3049228 - DNA, 25 bp, Homo sapien
cctcgccgaggaaccagtcgctcag

SEQ ID NO: 3049229 - DNA, 25 bp, Homo sapien
gaggaaccagtcgctcaggaagccg

SEQ ID NO: 3049230 - DNA, 25 bp, Homo sapien
aacgagccgcatcgtaaaatccctg

SEQ ID NO: 3049231 - DNA, 25 bp, Homo sapien
tggcaattcacgaattcgagtcact

SEQ ID NO: 3049232 - DNA, 25 bp, Homo sapien
ttcacgaattcgagtcactctaacg

SEQ ID NO: 3049233 - DNA, 25 bp, Homo sapien
gccgcatcgtaaaatccctggagaa

SEQ ID NO: 3049234 - DNA, 25 bp, Homo sapien
ttgaaccggggacttcttgatctgc

SEQ ID NO: 3049235 - DNA, 25 bp, Homo sapien
tcaaatgctctacccctgagctata

SEQ ID NO: 3049236 - DNA, 25 bp, Homo sapien
cttcttgatctgcagtcaaatgctc

SEQ ID NO: 3049237 - DNA, 25 bp, Homo sapien
gatttgaaccggggacttcttgatc

SEQ ID NO: 3049238 - DNA, 25 bp, Homo sapien
cacccctgggttctattgattctcc

SEQ ID NO: 3049239 - DNA, 25 bp, Homo sapien
tcccacccctgggttctattgattc

SEQ ID NO: 3049240 - DNA, 25 bp, Homo sapien
cctcccacccctgggttctattgat

SEQ ID NO: 3049241 - DNA, 25 bp, Homo sapien
ccacccctgggttctattgattctc

SEQ ID NO: 3049242 - DNA, 25 bp, Homo sapien
atgaaaaacagatggttaacaaggg

SEQ ID NO: 3049243 - DNA, 25 bp, Homo sapien
aaatgtgagtcaagaatgaaaaaca

SEQ ID NO: 3049244 - DNA, 25 bp, Homo sapien
agaatgaaaaacagatggttaacaa

SEQ ID NO: 3049245 - DNA, 25 bp, Homo sapien
aaaatgtgagtcaagaatgaaaaac

SEQ ID NO: 3049246 - DNA, 25 bp, Homo sapien
atctgcagtcaaatgctctaccact

SEQ ID NO: 3049247 - DNA, 25 bp, Homo sapien
tgatctgcagtcaaatgctctacca

SEQ ID NO: 3049248 - DNA, 25 bp, Homo sapien
gaaccagggacctcttgatctgcag

SEQ ID NO: 3049249 - DNA, 25 bp, Homo sapien
ccggatttgaaccagggacctcttg

SEQ ID NO: 3049250 - DNA, 25 bp, Homo sapien
cactgtgagtagtggtgtaacagaa

SEQ ID NO: 3049251 - DNA, 25 bp, Homo sapien
attgttgcagctgctacactgtgag

SEQ ID NO: 3049252 - DNA, 25 bp, Homo sapien
aggcggctccttgggtgctaagcat

SEQ ID NO: 3049253 - DNA, 25 bp, Homo sapien
ggtcaagctgaacgcagacggtgcc

SEQ ID NO: 3049254 - DNA, 25 bp, Homo sapien
tgaactgtctggataaggtgagccc

SEQ ID NO: 3049255 - DNA, 25 bp, Homo sapien
ttatccccgcgatcccaggagaatg

SEQ ID NO: 3049256 - DNA, 25 bp, Homo sapien
gcttttctcggaaccatgaacccca

SEQ ID NO: 3049257 - DNA, 25 bp, Homo sapien
cccggtgcggcaagatcgtgtatcc

SEQ ID NO: 3049258 - DNA, 25 bp, Homo sapien
gctggtggctgacaagctgtccctg

SEQ ID NO: 3049259 - DNA, 25 bp, Homo sapien
agagatccaagcctggaacgggcga

SEQ ID NO: 3049260 - DNA, 25 bp, Homo sapien
cgggttcgctatcctgttcttctga

SEQ ID NO: 3049261 - DNA, 25 bp, Homo sapien
ctctgtgtagaaagggcgctgggct

SEQ ID NO: 3049262 - DNA, 25 bp, Homo sapien
tcgtgcccgacctgtatcatatacc

SEQ ID NO: 3049263 - DNA, 25 bp, Homo sapien
aatggccgagcttggaaacgagttg

SEQ ID NO: 3049264 - DNA, 25 bp, Homo sapien
gctttgttttgcacccaacctgcca

SEQ ID NO: 3049265 - DNA, 25 bp, Homo sapien
aaagttcagagggataggcagctcc

SEQ ID NO: 3049266 - DNA, 25 bp, Homo sapien
acacacaaaccacatggctcagagc

SEQ ID NO: 3049267 - DNA, 25 bp, Homo sapien
gcaccagcttcaattcctggcgtga

SEQ ID NO: 3049268 - DNA, 25 bp, Homo sapien
acccaccagtccctgaagtaattgg

SEQ ID NO: 3049269 - DNA, 25 bp, Homo sapien
aagggctgagttctagtcctgcacc

SEQ ID NO: 3049270 - DNA, 25 bp, Homo sapien
ccagttatttctaaaggtcaggcca

SEQ ID NO: 3049271 - DNA, 25 bp, Homo sapien
cagtaggccctactttgacaggtgg

SEQ ID NO: 3049272 - DNA, 25 bp, Homo sapien
ggtaagggcccagatcctagcttct

SEQ ID NO: 3049273 - DNA, 25 bp, Homo sapien
tggttgcaaggaacatgccaagtgc

SEQ ID NO: 3049274 - DNA, 25 bp, Homo sapien
taaaacctgcgacagcttgtgattc

SEQ ID NO: 3049275 - DNA, 25 bp, Homo sapien
gtcttcagcacattccacggcatcg

SEQ ID NO: 3049276 - DNA, 25 bp, Homo sapien
aacgtgcagcagatcgacgacggct

SEQ ID NO: 3049277 - DNA, 25 bp, Homo sapien
caactacgtggaggccatctgaacc

SEQ ID NO: 3049278 - DNA, 25 bp, Homo sapien
tggcaggcttcccccttgatcgact

SEQ ID NO: 3049279 - DNA, 25 bp, Homo sapien
caggcttcccccttgatcgacttct

SEQ ID NO: 3049280 - DNA, 25 bp, Homo sapien
tctggcaggcttcccccttgatcga

SEQ ID NO: 3049281 - DNA, 25 bp, Homo sapien
ctctggcaggcttcccccttgatcg

SEQ ID NO: 3049282 - DNA, 25 bp, Homo sapien
tggaatgggagacctgttggcctgt

SEQ ID NO: 3049283 - DNA, 25 bp, Homo sapien
ggaatgggagacctgttggcctgtg

SEQ ID NO: 3049284 - DNA, 25 bp, Homo sapien
ctggaatgggagacctgttggcctg

SEQ ID NO: 3049285 - DNA, 25 bp, Homo sapien
tcttgatctcaaagcacaatgtgga

SEQ ID NO: 3049286 - DNA, 25 bp, Homo sapien
gatgtttgccccgaatgagaggttg

SEQ ID NO: 3049287 - DNA, 25 bp, Homo sapien
cctaggtggaggcaagtggaatatc

SEQ ID NO: 3049288 - DNA, 25 bp, Homo sapien
ggtggcgctggtgcattctgtttcc

SEQ ID NO: 3049289 - DNA, 25 bp, Homo sapien
cctcgtgggcttgtgctcgggatca

SEQ ID NO: 3049290 - DNA, 25 bp, Homo sapien
tcaaacctttctggcctgttatgat

SEQ ID NO: 3049291 - DNA, 25 bp, Homo sapien
aaccacaagtgaatctttctcctgg

SEQ ID NO: 3049292 - DNA, 25 bp, Homo sapien
gtgtgaagccgccagttcatctttt

SEQ ID NO: 3049293 - DNA, 25 bp, Homo sapien
tgctggtggagctgcagcatccttc

SEQ ID NO: 3049294 - DNA, 25 bp, Homo sapien
agctgcagcatccttcagtctcagg

SEQ ID NO: 3049295 - DNA, 25 bp, Homo sapien
ctgtggagtgaaggggagccatttc

SEQ ID NO: 3049296 - DNA, 25 bp, Homo sapien
catttctctccaccgactgcaacct

SEQ ID NO: 3049297 - DNA, 25 bp, Homo sapien
gatgttctttgccatcataggcctg

SEQ ID NO: 3049298 - DNA, 25 bp, Homo sapien
ctacattatctatctgctctagtgg

SEQ ID NO: 3049299 - DNA, 25 bp, Homo sapien
tggtcggcctaggaatccacaatgc

SEQ ID NO: 3049300 - DNA, 25 bp, Homo sapien
tccacaatgctggatattttcatcc

SEQ ID NO: 3049301 - DNA, 25 bp, Homo sapien
atggagatgaatggccgagtgccct

SEQ ID NO: 3049302 - DNA, 25 bp, Homo sapien
gatgaatggccgagtgccctgcttg

SEQ ID NO: 3049303 - DNA, 25 bp, Homo sapien
tgcttgctgacgcaccggtggattt

SEQ ID NO: 3049304 - DNA, 25 bp, Homo sapien
gacgcaccggtggatttttgcttct

SEQ ID NO: 3049305 - DNA, 25 bp, Homo sapien
aatgaaagtgttaggccaaggtcgc

SEQ ID NO: 3049306 - DNA, 25 bp, Homo sapien
tactgcatcgtggtatgtagcaaaa

SEQ ID NO: 3049307 - DNA, 25 bp, Homo sapien
taggtaatctgacatacatggatgc

SEQ ID NO: 3049308 - DNA, 25 bp, Homo sapien
gaaatgatcttcagtggagtccttg

SEQ ID NO: 3049309 - DNA, 25 bp, Homo sapien
cagttacctgctagtggaagtgcta

SEQ ID NO: 3049310 - DNA, 25 bp, Homo sapien
caatgcagctatctttcaggtcacc

SEQ ID NO: 3049311 - DNA, 25 bp, Homo sapien
taacctggagaagactgttcaatgc

SEQ ID NO: 3049312 - DNA, 25 bp, Homo sapien
tcataattggcatgagcaggagtcc

SEQ ID NO: 3049313 - DNA, 25 bp, Homo sapien
tggtcccagattcttgaacagctaa

SEQ ID NO: 3049314 - DNA, 25 bp, Homo sapien
cagtgacgttctctaaaggcaaggc

SEQ ID NO: 3049315 - DNA, 25 bp, Homo sapien
gcatacatacaggttggctggtccc

SEQ ID NO: 3049316 - DNA, 25 bp, Homo sapien
tatgccaagaaggtagtaaaaactg

SEQ ID NO: 3049317 - DNA, 25 bp, Homo sapien
tagcctgagcatgtacaagatggaa

SEQ ID NO: 3049318 - DNA, 25 bp, Homo sapien
tccttatggaagttagcctgagcat

SEQ ID NO: 3049319 - DNA, 25 bp, Homo sapien
acaagatggaacaaattcaaaaagc

SEQ ID NO: 3049320 - DNA, 25 bp, Homo sapien
catggtcaaatacaggacctcctta

SEQ ID NO: 3049321 - DNA, 25 bp, Homo sapien
ctggagtgctaaagactttgcagac

SEQ ID NO: 3049322 - DNA, 25 bp, Homo sapien
ccattataacacatgcaaatgcatt

SEQ ID NO: 3049323 - DNA, 25 bp, Homo sapien
caatccatgcagtacagttctttct

SEQ ID NO: 3049324 - DNA, 25 bp, Homo sapien
attttaactgtccaatccatgcagt

SEQ ID NO: 3049325 - DNA, 25 bp, Homo sapien
tgatttagacatataaagcgctata

SEQ ID NO: 3049326 - DNA, 25 bp, Homo sapien
ctgatttagacatataaagcgctat

SEQ ID NO: 3049327 - DNA, 25 bp, Homo sapien
gatttagacatataaagcgctataa

SEQ ID NO: 3049328 - DNA, 25 bp, Homo sapien
tttccacttagcattaggagacgtg

SEQ ID NO: 3049329 - DNA, 25 bp, Homo sapien
cacagctttactagccatgaaactg

SEQ ID NO: 3049330 - DNA, 25 bp, Homo sapien
gccagttcaatggtgcgtccattca

SEQ ID NO: 3049331 - DNA, 25 bp, Homo sapien
aaagccaaaaagactacgagccttg

SEQ ID NO: 3049332 - DNA, 25 bp, Homo sapien
tgtccactctttagtgctagcgtca

SEQ ID NO: 3049333 - DNA, 25 bp, Homo sapien
gatagttcatctacaagactgataa

SEQ ID NO: 3049334 - DNA, 25 bp, Homo sapien
atatagtaacttaatggcatcagcc

SEQ ID NO: 3049335 - DNA, 25 bp, Homo sapien
agactgataacatcatctgctgtcc

SEQ ID NO: 3049336 - DNA, 25 bp, Homo sapien
cgatgtgtccaatgatcaaggagga

SEQ ID NO: 3049337 - DNA, 25 bp, Homo sapien
aaagcagaatcacttcgatgtgtcc

SEQ ID NO: 3049338 - DNA, 25 bp, Homo sapien
aatattcgcgtcaaccaaaaagcag

SEQ ID NO: 3049339 - DNA, 25 bp, Homo sapien
caaggaggacattcctacagaagag

SEQ ID NO: 3049340 - DNA, 25 bp, Homo sapien
cctcagtctagtgggctcaagctat

SEQ ID NO: 3049341 - DNA, 25 bp, Homo sapien
tgtatctaccagctggcttaaggaa

SEQ ID NO: 3049342 - DNA, 25 bp, Homo sapien
gccccactgtcttattcgatattta

SEQ ID NO: 3049343 - DNA, 25 bp, Homo sapien
tatcatcaatacagttgaagccctc

SEQ ID NO: 3049344 - DNA, 25 bp, Homo sapien
cagccatttgtatcttgcggcagag

SEQ ID NO: 3049345 - DNA, 25 bp, Homo sapien
gagattagtcagttcgcataagaaa

SEQ ID NO: 3049346 - DNA, 25 bp, Homo sapien
gcgatggcactcaagttcatcccaa

SEQ ID NO: 3049347 - DNA, 25 bp, Homo sapien
taagaaattataaacgcgatggcac

SEQ ID NO: 3049348 - DNA, 25 bp, Homo sapien
gaatcctgaacttcgacaatgtgag

SEQ ID NO: 3049349 - DNA, 25 bp, Homo sapien
tgtgaggcaagtaactaaaaccctg

SEQ ID NO: 3049350 - DNA, 25 bp, Homo sapien
ggtttaaatggtactgaatcctgaa

SEQ ID NO: 3049351 - DNA, 25 bp, Homo sapien
gctggaatgcaacggagataacttt

SEQ ID NO: 3049352 - DNA, 25 bp, Homo sapien
ttcaatgtgacaattctgagcattt

SEQ ID NO: 3049353 - DNA, 25 bp, Homo sapien
gacctcccctagttgtcatttatga

SEQ ID NO: 3049354 - DNA, 25 bp, Homo sapien
taagactagagtagaacccctttga

SEQ ID NO: 3049355 - DNA, 25 bp, Homo sapien
acaattctgagcatttatttatgac

SEQ ID NO: 3049356 - DNA, 25 bp, Homo sapien
tcctaaacactgcataggagctgca

SEQ ID NO: 3049357 - DNA, 25 bp, Homo sapien
taatcctaaacactgcataggagct

SEQ ID NO: 3049358 - DNA, 25 bp, Homo sapien
gttaatcctaaacactgcataggag

SEQ ID NO: 3049359 - DNA, 25 bp, Homo sapien
cctaaacactgcataggagctgcac

SEQ ID NO: 3049360 - DNA, 25 bp, Homo sapien
ttctgtgagtatcttgtgaatgtat

SEQ ID NO: 3049361 - DNA, 25 bp, Homo sapien
gtgggtagcagcaatgtgcatcttt

SEQ ID NO: 3049362 - DNA, 25 bp, Homo sapien
ggtgggtagcagcaatgtgcatctt

SEQ ID NO: 3049363 - DNA, 25 bp, Homo sapien
tcatgtccacaaaggaatatgtttt

SEQ ID NO: 3049364 - DNA, 25 bp, Homo sapien
tccacaaaggaatatgttttaagag

SEQ ID NO: 3049365 - DNA, 25 bp, Homo sapien
tcttgaaattaacctcatgtccaca

SEQ ID NO: 3049366 - DNA, 25 bp, Homo sapien
aatatctcttgaaattaacctcatg

SEQ ID NO: 3049367 - DNA, 25 bp, Homo sapien
agtcctgtagtaaaagtcttttgct

SEQ ID NO: 3049368 - DNA, 25 bp, Homo sapien
ggcagctcaaggttatgaaagtcct

SEQ ID NO: 3049369 - DNA, 25 bp, Homo sapien
tcctgatgaggttgagatataatta

SEQ ID NO: 3049370 - DNA, 25 bp, Homo sapien
taattaataatgtgttggctgactg

SEQ ID NO: 3049371 - DNA, 25 bp, Homo sapien
tctggaatatttccaatggtaaggc

SEQ ID NO: 3049372 - DNA, 25 bp, Homo sapien
cgattactacgtctaagtttctggt

SEQ ID NO: 3049373 - DNA, 25 bp, Homo sapien
taacagctggtttgacgattactac

SEQ ID NO: 3049374 - DNA, 25 bp, Homo sapien
gaaagcctgagccaagggtcttgga

SEQ ID NO: 3049375 - DNA, 25 bp, Homo sapien
ggcagctgcccccaaacatctccaa

SEQ ID NO: 3049376 - DNA, 25 bp, Homo sapien
ccccaccccatctgtcgggcagctg

SEQ ID NO: 3049377 - DNA, 25 bp, Homo sapien
tcttgtaagggccccaccccatctg

SEQ ID NO: 3049378 - DNA, 25 bp, Homo sapien
caccccatctgtcgggcagctgccc

SEQ ID NO: 3049379 - DNA, 25 bp, Homo sapien
tgtatagccttcgaagaactgagag

SEQ ID NO: 3049380 - DNA, 25 bp, Homo sapien
aatgtatagccttcgaagaactgag

SEQ ID NO: 3049381 - DNA, 25 bp, Homo sapien
gtatagccttcgaagaactgagaga

SEQ ID NO: 3049382 - DNA, 25 bp, Homo sapien
atagccttcgaagaactgagagatc

SEQ ID NO: 3049383 - DNA, 25 bp, Homo sapien
gacttcaagtgcatcccaccatgct

SEQ ID NO: 3049384 - DNA, 25 bp, Homo sapien
acttcaagtgcatcccaccatgctc

SEQ ID NO: 3049385 - DNA, 25 bp, Homo sapien
cttcaagtgcatcccaccatgctca

SEQ ID NO: 3049386 - DNA, 25 bp, Homo sapien
ttcaagtgcatcccaccatgctcag

SEQ ID NO: 3049387 - DNA, 25 bp, Homo sapien
ttcctgaagtcttgacccatgtctc

SEQ ID NO: 3049388 - DNA, 25 bp, Homo sapien
ctgaagtcttgacccatgtctctga

SEQ ID NO: 3049389 - DNA, 25 bp, Homo sapien
tcactggtaacataaccagcgtaaa

SEQ ID NO: 3049390 - DNA, 25 bp, Homo sapien
cataaccagcgtaaacataattcaa

SEQ ID NO: 3049391 - DNA, 25 bp, Homo sapien
tcccttcaaacaggatcccaaatct

SEQ ID NO: 3049392 - DNA, 25 bp, Homo sapien
ttcccttcaaacaggatcccaaatc

SEQ ID NO: 3049393 - DNA, 25 bp, Homo sapien
ccttcaaacaggatcccaaatcttt

SEQ ID NO: 3049394 - DNA, 25 bp, Homo sapien
cccttcaaacaggatcccaaatctt

SEQ ID NO: 3049395 - DNA, 25 bp, Homo sapien
ctctgaatgagggaagcacagccca

SEQ ID NO: 3049396 - DNA, 25 bp, Homo sapien
aatgtggctgcgcatagcaagctca

SEQ ID NO: 3049397 - DNA, 25 bp, Homo sapien
tagcacacgttttcccactgggagc

SEQ ID NO: 3049398 - DNA, 25 bp, Homo sapien
gagaaagttccagatgcctcggcct

SEQ ID NO: 3049399 - DNA, 25 bp, Homo sapien
gtagctgggatacaggcaagcgtca

SEQ ID NO: 3049400 - DNA, 25 bp, Homo sapien
agctgggatacaggcaagcgtcacc

SEQ ID NO: 3049401 - DNA, 25 bp, Homo sapien
tgggatacaggcaagcgtcaccaca

SEQ ID NO: 3049402 - DNA, 25 bp, Homo sapien
ctgggatacaggcaagcgtcaccac

SEQ ID NO: 3049403 - DNA, 25 bp, Homo sapien
tgcttgctgcgtcatagccaatacg

SEQ ID NO: 3049404 - DNA, 25 bp, Homo sapien
gcagccccaatcttgactttagtta

SEQ ID NO: 3049405 - DNA, 25 bp, Homo sapien
accagcttgtgagtctagggaacct

SEQ ID NO: 3049406 - DNA, 25 bp, Homo sapien
cagggcatctggctatctggctatc

SEQ ID NO: 3049407 - DNA, 25 bp, Homo sapien
tgcaggaataggtaaaggcccctta

SEQ ID NO: 3049408 - DNA, 25 bp, Homo sapien
gagaacccttgcatcaaaacaggat

SEQ ID NO: 3049409 - DNA, 25 bp, Homo sapien
cccagagttagttttgcaaacggca

SEQ ID NO: 3049410 - DNA, 25 bp, Homo sapien
tgtcatgtgacaatagccaaacctc

SEQ ID NO: 3049411 - DNA, 25 bp, Homo sapien
cagggtggctgcgaaacttcatggc

SEQ ID NO: 3049412 - DNA, 25 bp, Homo sapien
agggctccacctccgcataggtgga

SEQ ID NO: 3049413 - DNA, 25 bp, Homo sapien
tgcgaaacttcatggctggccagtg

SEQ ID NO: 3049414 - DNA, 25 bp, Homo sapien
cataggtggaatggtcagggtggct

SEQ ID NO: 3049415 - DNA, 25 bp, Homo sapien
cattgatgtaaattccagccaggat

SEQ ID NO: 3049416 - DNA, 25 bp, Homo sapien
aagaagagcgcagcattggatgtgg

SEQ ID NO: 3049417 - DNA, 25 bp, Homo sapien
tggccattgatgtaaattccagcca

SEQ ID NO: 3049418 - DNA, 25 bp, Homo sapien
agccaggatgatggccgccacgagg

SEQ ID NO: 3049419 - DNA, 25 bp, Homo sapien
ctgtggagagatcattagggcagac

SEQ ID NO: 3049420 - DNA, 25 bp, Homo sapien
tggagagatcattagggcagacagg

SEQ ID NO: 3049421 - DNA, 25 bp, Homo sapien
gagagatcattagggcagacagggg

SEQ ID NO: 3049422 - DNA, 25 bp, Homo sapien
tgtggagagatcattagggcagaca

SEQ ID NO: 3049423 - DNA, 25 bp, Homo sapien
tcagagatgaaagccgacagagcct

SEQ ID NO: 3049424 - DNA, 25 bp, Homo sapien
gtcttgggttctaacaaagtctcag

SEQ ID NO: 3049425 - DNA, 25 bp, Homo sapien
gacagagcctttgggtccacttatc

SEQ ID NO: 3049426 - DNA, 25 bp, Homo sapien
cctgggttgaaatctatgctctgcc

SEQ ID NO: 3049427 - DNA, 25 bp, Homo sapien
tatgatggcaaatgaccatagtttt

SEQ ID NO: 3049428 - DNA, 25 bp, Homo sapien
cactcccagattgtgacctcttgca

SEQ ID NO: 3049429 - DNA, 25 bp, Homo sapien
aaattagatgatccatgtcaagcac

SEQ ID NO: 3049430 - DNA, 25 bp, Homo sapien
gtcttattcaactctgtgtcctcag

SEQ ID NO: 3049431 - DNA, 25 bp, Homo sapien
cctgcatagggattcaacttggtgt

SEQ ID NO: 3049432 - DNA, 25 bp, Homo sapien
tcctcctgcatagggattcaacttg

SEQ ID NO: 3049433 - DNA, 25 bp, Homo sapien
cgtctcctcctgcatagggattcaa

SEQ ID NO: 3049434 - DNA, 25 bp, Homo sapien
gcatagggattcaacttggtgtcat

SEQ ID NO: 3049435 - DNA, 25 bp, Homo sapien
ggctccatgtaatgcacattggctc

SEQ ID NO: 3049436 - DNA, 25 bp, Homo sapien
tggggctccatgtaatgcacattgg

SEQ ID NO: 3049437 - DNA, 25 bp, Homo sapien
cttgctggggctccatgtaatgcac

SEQ ID NO: 3049438 - DNA, 25 bp, Homo sapien
gctggggctccatgtaatgcacatt

SEQ ID NO: 3049439 - DNA, 25 bp, Homo sapien
atcctggaagtcctcgcacatcctg

SEQ ID NO: 3049440 - DNA, 25 bp, Homo sapien
cttctgtggtgaggctgtcgatgaa

SEQ ID NO: 3049441 - DNA, 25 bp, Homo sapien
ctgagtcgtggtcctcatcctggaa

SEQ ID NO: 3049442 - DNA, 25 bp, Homo sapien
catcataggggctgaaggaagtgtc

SEQ ID NO: 3049443 - DNA, 25 bp, Homo sapien
ctcctggcgatagcggtcaaagcca

SEQ ID NO: 3049444 - DNA, 25 bp, Homo sapien
acagccatagtccatccactcctgg

SEQ ID NO: 3049445 - DNA, 25 bp, Homo sapien
atagcggtcaaagccactggagcat

SEQ ID NO: 3049446 - DNA, 25 bp, Homo sapien
tccactcctggcgatagcggtcaaa

SEQ ID NO: 3049447 - DNA, 25 bp, Homo sapien
gacactgctgagaatccaggcaatt

SEQ ID NO: 3049448 - DNA, 25 bp, Homo sapien
ttgactctgagctgccgtgacactg

SEQ ID NO: 3049449 - DNA, 25 bp, Homo sapien
gatgggattgacaaagaagccttcc

SEQ ID NO: 3049450 - DNA, 25 bp, Homo sapien
cagctctctgctgatagtgagaaga

SEQ ID NO: 3049451 - DNA, 25 bp, Homo sapien
gtgttttcatcctggttgttgaggg

SEQ ID NO: 3049452 - DNA, 25 bp, Homo sapien
gttttcatcctggttgttgagggac

SEQ ID NO: 3049453 - DNA, 25 bp, Homo sapien
tgttttcatcctggttgttgaggga

SEQ ID NO: 3049454 - DNA, 25 bp, Homo sapien
caggcgtcacagctcctatgctgca

SEQ ID NO: 3049455 - DNA, 25 bp, Homo sapien
tgcaggcgtcacagctcctatgctg

SEQ ID NO: 3049456 - DNA, 25 bp, Homo sapien
acatgcaggcgtcacagctcctatg

SEQ ID NO: 3049457 - DNA, 25 bp, Homo sapien
ggacatgcaggcgtcacagctccta

SEQ ID NO: 3049458 - DNA, 25 bp, Homo sapien
tgatgttcggtccatggggagaaaa

SEQ ID NO: 3049459 - DNA, 25 bp, Homo sapien
ccactcctgatgttcggtccatggg

SEQ ID NO: 3049460 - DNA, 25 bp, Homo sapien
cccactcctgatgttcggtccatgg

SEQ ID NO: 3049461 - DNA, 25 bp, Homo sapien
tgttcggtccatggggagaaaacag

SEQ ID NO: 3049462 - DNA, 25 bp, Homo sapien
gagcggcaagtagctgtcacaaagc

SEQ ID NO: 3049463 - DNA, 25 bp, Homo sapien
tgaaccagatgacctctgagcggca

SEQ ID NO: 3049464 - DNA, 25 bp, Homo sapien
gtcacaaagcccgtatatttgattg

SEQ ID NO: 3049465 - DNA, 25 bp, Homo sapien
aaagcccgtatatttgattgcaaag

SEQ ID NO: 3049466 - DNA, 25 bp, Homo sapien
cagtcctcgaggaaccctggttctc

SEQ ID NO: 3049467 - DNA, 25 bp, Homo sapien
gggtccagctctatgcggtgatatt

SEQ ID NO: 3049468 - DNA, 25 bp, Homo sapien
tcaaagatgctccttcgccgagatt

SEQ ID NO: 3049469 - DNA, 25 bp, Homo sapien
ggccgacatgctggtgaccttgctg

SEQ ID NO: 3049470 - DNA, 25 bp, Homo sapien
aactccacggccgacatgctggtga

SEQ ID NO: 3049471 - DNA, 25 bp, Homo sapien
ggacagtctgacaggtcagcctgct

SEQ ID NO: 3049472 - DNA, 25 bp, Homo sapien
agagggcatcgaggcctcttcccgg

SEQ ID NO: 3049473 - DNA, 25 bp, Homo sapien
tgtcaggagcatatcacaggcagag

SEQ ID NO: 3049474 - DNA, 25 bp, Homo sapien
gcctgttgtcaggagcatatcacag

SEQ ID NO: 3049475 - DNA, 25 bp, Homo sapien
acgacttgctggataacctcaggca

SEQ ID NO: 3049476 - DNA, 25 bp, Homo sapien
tctgatacttctctctaggccacga

SEQ ID NO: 3049477 - DNA, 25 bp, Homo sapien
gctggaactgtacatgaaaggcttc

SEQ ID NO: 3049478 - DNA, 25 bp, Homo sapien
taaaatgacaatctgaggtgctctg

SEQ ID NO: 3049479 - DNA, 25 bp, Homo sapien
ctggactcaagtctgcctcggaaag

SEQ ID NO: 3049480 - DNA, 25 bp, Homo sapien
agatgctttgcagactctgctgaaa

SEQ ID NO: 3049481 - DNA, 25 bp, Homo sapien
gatgctttgcagactctgctgaaaa

SEQ ID NO: 3049482 - DNA, 25 bp, Homo sapien
ctgcaaacagatgctgctaattgca

SEQ ID NO: 3049483 - DNA, 25 bp, Homo sapien
gctgctaattgcacatgacttttct

SEQ ID NO: 3049484 - DNA, 25 bp, Homo sapien
ggacaataagttctatgttaagagt

SEQ ID NO: 3049485 - DNA, 25 bp, Homo sapien
gtatcagcatttgttctcgccacca

SEQ ID NO: 3049486 - DNA, 25 bp, Homo sapien
gacaataagttctatgttaagagta

SEQ ID NO: 3049487 - DNA, 25 bp, Homo sapien
gaggacaataagttctatgttaaga

SEQ ID NO: 3049488 - DNA, 25 bp, Homo sapien
gtggacagcccttagcatgttcagg

SEQ ID NO: 3049489 - DNA, 25 bp, Homo sapien
gcgtggttgactgcacccagctgtg

SEQ ID NO: 3049490 - DNA, 25 bp, Homo sapien
ttggaaatgcgcctgcgtggttgac

SEQ ID NO: 3049491 - DNA, 25 bp, Homo sapien
gcggtgagcggagggagggtttgga

SEQ ID NO: 3049492 - DNA, 25 bp, Homo sapien
cagagagtgatgtgatcggatctga

SEQ ID NO: 3049493 - DNA, 25 bp, Homo sapien
caaggagtcagagagtgatgtgatc

SEQ ID NO: 3049494 - DNA, 25 bp, Homo sapien
tgatcggatctgatggtgacaagga

SEQ ID NO: 3049495 - DNA, 25 bp, Homo sapien
tgatgtgatcggatctgatggtgac

SEQ ID NO: 3049496 - DNA, 25 bp, Homo sapien
cacaggcgtttaccaaccagtcaga

SEQ ID NO: 3049497 - DNA, 25 bp, Homo sapien
caggtgatacggagatgatttaaca

SEQ ID NO: 3049498 - DNA, 25 bp, Homo sapien
agcccaggctgtaatacttgataga

SEQ ID NO: 3049499 - DNA, 25 bp, Homo sapien
tacttgatagaggactgggagcgca

SEQ ID NO: 3049500 - DNA, 25 bp, Homo sapien
ggatggattgagaatcatgaaggca

SEQ ID NO: 3049501 - DNA, 25 bp, Homo sapien
cgataggccggttttgacaggatgc

SEQ ID NO: 3049502 - DNA, 25 bp, Homo sapien
gaggagctgatttccgggacagaca

SEQ ID NO: 3049503 - DNA, 25 bp, Homo sapien
tcatgaaggcatccgataggccggt

SEQ ID NO: 3049504 - DNA, 25 bp, Homo sapien
aacgtggtcccactgaaccacaaag

SEQ ID NO: 3049505 - DNA, 25 bp, Homo sapien
tctttataggcaaagacaatgcggc

SEQ ID NO: 3049506 - DNA, 25 bp, Homo sapien
cggccgtcatggtgcagagctgcct

SEQ ID NO: 3049507 - DNA, 25 bp, Homo sapien
ttggagataaacgtggtcccactga

SEQ ID NO: 3049508 - DNA, 25 bp, Homo sapien
tagccagggttgaagttggccatca

SEQ ID NO: 3049509 - DNA, 25 bp, Homo sapien
aactgtggagttgtcggagtagcca

SEQ ID NO: 3049510 - DNA, 25 bp, Homo sapien
tgagtagctgtgagcatccgatgga

SEQ ID NO: 3049511 - DNA, 25 bp, Homo sapien
gatcacgtcccccatgaagatgaag

SEQ ID NO: 3049512 - DNA, 25 bp, Homo sapien
agttgctatggtgatctgccgcaga

SEQ ID NO: 3049513 - DNA, 25 bp, Homo sapien
ctatggtgatctgccgcagaggatg

SEQ ID NO: 3049514 - DNA, 25 bp, Homo sapien
ggatgcccgtagaaagggaaatcaa

SEQ ID NO: 3049515 - DNA, 25 bp, Homo sapien
gatgcccgtagaaagggaaatcaaa

SEQ ID NO: 3049516 - DNA, 25 bp, Homo sapien
gtgttggagagtattgtgtggatct

SEQ ID NO: 3049517 - DNA, 25 bp, Homo sapien
ggagagtattgtgtggatcttcact

SEQ ID NO: 3049518 - DNA, 25 bp, Homo sapien
gtattgtgtggatcttcacttggct

SEQ ID NO: 3049519 - DNA, 25 bp, Homo sapien
gcctcggccacatctacccacagtt

SEQ ID NO: 3049520 - DNA, 25 bp, Homo sapien
gacgggacacataatagctgtggtt

SEQ ID NO: 3049521 - DNA, 25 bp, Homo sapien
gacacataatagctgtggttgtcct

SEQ ID NO: 3049522 - DNA, 25 bp, Homo sapien
catagagacgggacacataatagct

SEQ ID NO: 3049523 - DNA, 25 bp, Homo sapien
tagagacgggacacataatagctgt

SEQ ID NO: 3049524 - DNA, 25 bp, Homo sapien
ggcaggctgggggacgatgagcgga

SEQ ID NO: 3049525 - DNA, 25 bp, Homo sapien
gataagcgacacaatctggagacct

SEQ ID NO: 3049526 - DNA, 25 bp, Homo sapien
gggggacgatgagcggaagaagcat

SEQ ID NO: 3049527 - DNA, 25 bp, Homo sapien
ggctgggggacgatgagcggaagaa

SEQ ID NO: 3049528 - DNA, 25 bp, Homo sapien
ggttaaactctcaatcagaaggacc

SEQ ID NO: 3049529 - DNA, 25 bp, Homo sapien
ttggttaaactctcaatcagaagga

SEQ ID NO: 3049530 - DNA, 25 bp, Homo sapien
tggttaaactctcaatcagaaggac

SEQ ID NO: 3049531 - DNA, 25 bp, Homo sapien
tggacatagccaaacctcaggttga

SEQ ID NO: 3049532 - DNA, 25 bp, Homo sapien
acaaagagctctgcctcgctgaggg

SEQ ID NO: 3049533 - DNA, 25 bp, Homo sapien
gaaatgcaggaagtatgtcccctgg

SEQ ID NO: 3049534 - DNA, 25 bp, Homo sapien
tgtcccctggtataaccctgcaagg

SEQ ID NO: 3049535 - DNA, 25 bp, Homo sapien
gacattccacatttcccacgagctc

SEQ ID NO: 3049536 - DNA, 25 bp, Homo sapien
gactccgacattccacatttcccac

SEQ ID NO: 3049537 - DNA, 25 bp, Homo sapien
ccagtgctgccggtcccttcccaca

SEQ ID NO: 3049538 - DNA, 25 bp, Homo sapien
acatttcccacgagctcccaggcac

SEQ ID NO: 3049539 - DNA, 25 bp, Homo sapien
tgaaaaccttctttcgggagctgcc

SEQ ID NO: 3049540 - DNA, 25 bp, Homo sapien
tcccaaggccctgcgttctgaaaac

SEQ ID NO: 3049541 - DNA, 25 bp, Homo sapien
gcctgctatggtgatgtacaagcca

SEQ ID NO: 3049542 - DNA, 25 bp, Homo sapien
gttgtagaaaccaggcaggtcttgc

SEQ ID NO: 3049543 - DNA, 25 bp, Homo sapien
ttaatcaggggcctctcctactctg

SEQ ID NO: 3049544 - DNA, 25 bp, Homo sapien
tcctactctgtccttccactccacc

SEQ ID NO: 3049545 - DNA, 25 bp, Homo sapien
gggcctctcctactctgtccttcca

SEQ ID NO: 3049546 - DNA, 25 bp, Homo sapien
tcaggggcctctcctactctgtcct

SEQ ID NO: 3049547 - DNA, 25 bp, Homo sapien
gtcatgggagagtccagtttcagga

SEQ ID NO: 3049548 - DNA, 25 bp, Homo sapien
aatccatttgatgtctctgggtcca

SEQ ID NO: 3049549 - DNA, 25 bp, Homo sapien
tttcttccctaagtcatgggagagt

SEQ ID NO: 3049550 - DNA, 25 bp, Homo sapien
tacaatccatttgatgtctctgggt

SEQ ID NO: 3049551 - DNA, 25 bp, Homo sapien
accctggtcctgttatctggcagcg

SEQ ID NO: 3049552 - DNA, 25 bp, Homo sapien
ggctctctcgggctctccggttcca

SEQ ID NO: 3049553 - DNA, 25 bp, Homo sapien
ggtccctttggcagcccatccagag

SEQ ID NO: 3049554 - DNA, 25 bp, Homo sapien
tgttatctggcagcgtgtccatggc

SEQ ID NO: 3049555 - DNA, 25 bp, Homo sapien
tctccctggtagatttgagttcccc

SEQ ID NO: 3049556 - DNA, 25 bp, Homo sapien
tagatttgagttcccccaggattct

SEQ ID NO: 3049557 - DNA, 25 bp, Homo sapien
gactatgtgcctatctccctggtag

SEQ ID NO: 3049558 - DNA, 25 bp, Homo sapien
ctacgtgtgcgactatgtgcctatc

SEQ ID NO: 3049559 - DNA, 25 bp, Homo sapien
catcactgcagaattgaggacgcag

SEQ ID NO: 3049560 - DNA, 25 bp, Homo sapien
cagaattgaggacgcagtgcatagg

SEQ ID NO: 3049561 - DNA, 25 bp, Homo sapien
aattgaggacgcagtgcatagggta

SEQ ID NO: 3049562 - DNA, 25 bp, Homo sapien
actgcagaattgaggacgcagtgca

SEQ ID NO: 3049563 - DNA, 25 bp, Homo sapien
ctctggcaggtagggacccactgag

SEQ ID NO: 3049564 - DNA, 25 bp, Homo sapien
ggcaggtagggacccactgaggacc

SEQ ID NO: 3049565 - DNA, 25 bp, Homo sapien
gtagggacccactgaggaccctcac

SEQ ID NO: 3049566 - DNA, 25 bp, Homo sapien
cctctggcaggtagggacccactga

SEQ ID NO: 3049567 - DNA, 25 bp, Homo sapien
ctcaacagcgcctccctcaccccac

SEQ ID NO: 3049568 - DNA, 25 bp, Homo sapien
ccaggagccagagctcgcctcgcat

SEQ ID NO: 3049569 - DNA, 25 bp, Homo sapien
gctcagcgcccgggcagcctccctg

SEQ ID NO: 3049570 - DNA, 25 bp, Homo sapien
agcaccaggagccagagctcgcctc

SEQ ID NO: 3049571 - DNA, 25 bp, Homo sapien
accagcaccaggagccagagctcgc

SEQ ID NO: 3049572 - DNA, 25 bp, Homo sapien
cccccggcctgcttgctgccccggt

SEQ ID NO: 3049573 - DNA, 25 bp, Homo sapien
ccccggcctgcttgctgccccggtc

SEQ ID NO: 3049574 - DNA, 25 bp, Homo sapien
gtgcccggacctgcccccggcctgc

SEQ ID NO: 3049575 - DNA, 25 bp, Homo sapien
ctgcccccggcctgcttgctgcccc

SEQ ID NO: 3049576 - DNA, 25 bp, Homo sapien
ggagcggcgagagcgcgagcggagc

SEQ ID NO: 3049577 - DNA, 25 bp, Homo sapien
gagccggcaggagcggcgagagcgc

SEQ ID NO: 3049578 - DNA, 25 bp, Homo sapien
cgggcgagccggcaggagcggcgag

SEQ ID NO: 3049579 - DNA, 25 bp, Homo sapien
caggagcggcgagagcgcgagcgga

SEQ ID NO: 3049580 - DNA, 25 bp, Homo sapien
tcctccgttccgccgggaaagctgc

SEQ ID NO: 3049581 - DNA, 25 bp, Homo sapien
cctccgttccgccgggaaagctgca

SEQ ID NO: 3049582 - DNA, 25 bp, Homo sapien
ctcctccgttccgccgggaaagctg

SEQ ID NO: 3049583 - DNA, 25 bp, Homo sapien
ttcttccaggacagaataaaaatac

SEQ ID NO: 3049584 - DNA, 25 bp, Homo sapien
tttcttccaggacagaataaaaata

SEQ ID NO: 3049585 - DNA, 25 bp, Homo sapien
tattttttcttccaggacagaataa

SEQ ID NO: 3049586 - DNA, 25 bp, Homo sapien
ttattttttcttccaggacagaata

SEQ ID NO: 3049587 - DNA, 25 bp, Homo sapien
tttaatagacggcaaggaatcaggt

SEQ ID NO: 3049588 - DNA, 25 bp, Homo sapien
tcaggacacgaagatgcctcttccc

SEQ ID NO: 3049589 - DNA, 25 bp, Homo sapien
tgtaggatatttaatagacggcaag

SEQ ID NO: 3049590 - DNA, 25 bp, Homo sapien
ggcaaggaatcaggtcaggacacga

SEQ ID NO: 3049591 - DNA, 25 bp, Homo sapien
tctaatctcttagaacgccggttcc

SEQ ID NO: 3049592 - DNA, 25 bp, Homo sapien
ctagggactagaaaaccgcggagag

SEQ ID NO: 3049593 - DNA, 25 bp, Homo sapien
cgctgagcgccattggagaaatttt

SEQ ID NO: 3049594 - DNA, 25 bp, Homo sapien
gacggattccgtggcactgaggtta

SEQ ID NO: 3049595 - DNA, 25 bp, Homo sapien
aaggcaaggccggtctgtaaattct

SEQ ID NO: 3049596 - DNA, 25 bp, Homo sapien
tcctcgaggtcaaggtgagaagtct

SEQ ID NO: 3049597 - DNA, 25 bp, Homo sapien
gaatcagataggcagctacctccag

SEQ ID NO: 3049598 - DNA, 25 bp, Homo sapien
caacttggcggactctcaaacagaa

SEQ ID NO: 3049599 - DNA, 25 bp, Homo sapien
atctgcagtcaaatgctctaccact

SEQ ID NO: 3049600 - DNA, 25 bp, Homo sapien
tgaaccggggacctcttgatctgca

SEQ ID NO: 3049601 - DNA, 25 bp, Homo sapien
tgatctgcagtcaaatgctctacca

SEQ ID NO: 3049602 - DNA, 25 bp, Homo sapien
gatttgaaccggggacctcttgatc

SEQ ID NO: 3049603 - DNA, 25 bp, Homo sapien
ttccaagggtcagcccggagctcct

SEQ ID NO: 3049604 - DNA, 25 bp, Homo sapien
gccctcactcgcattgcattctacc

SEQ ID NO: 3049605 - DNA, 25 bp, Homo sapien
gagctcctcgccctcactcgcattg

SEQ ID NO: 3049606 - DNA, 25 bp, Homo sapien
cgtgttccaagggtcagcccggagc

SEQ ID NO: 3049607 - DNA, 25 bp, Homo sapien
atctgcagtcaaatgctctaccact

SEQ ID NO: 3049608 - DNA, 25 bp, Homo sapien
tgatctgcagtcaaatgctctacca

SEQ ID NO: 3049609 - DNA, 25 bp, Homo sapien
tgaaccggggacctcttgatctgca

SEQ ID NO: 3049610 - DNA, 25 bp, Homo sapien
gatttgaaccggggacctcttgatc

SEQ ID NO: 3049611 - DNA, 25 bp, Homo sapien
tcagttagcagcggcctgagattcc

SEQ ID NO: 3049612 - DNA, 25 bp, Homo sapien
cagttagcagcggcctgagattcca

SEQ ID NO: 3049613 - DNA, 25 bp, Homo sapien
agttagcagcggcctgagattccat

SEQ ID NO: 3049614 - DNA, 25 bp, Homo sapien
ccaggccctagagatccaggtaggg

SEQ ID NO: 3049615 - DNA, 25 bp, Homo sapien
aaatgggagatctccaccatcctca

SEQ ID NO: 3049616 - DNA, 25 bp, Homo sapien
tggtctttgatggtgctgagagtaa

SEQ ID NO: 3049617 - DNA, 25 bp, Homo sapien
gcacagcagccttgtatatgccacg

SEQ ID NO: 3049618 - DNA, 25 bp, Homo sapien
tcaggactgaagcatcctgtagagc

SEQ ID NO: 3049619 - DNA, 25 bp, Homo sapien
cgtgctgtcaatcacaaggatgata

SEQ ID NO: 3049620 - DNA, 25 bp, Homo sapien
gcattttatatagctcctcccgagt

SEQ ID NO: 3049621 - DNA, 25 bp, Homo sapien
gagtggtcagcagccgatcccggtc

SEQ ID NO: 3049622 - DNA, 25 bp, Homo sapien
tatatagctcctcccgagtggtcag

SEQ ID NO: 3049623 - DNA, 25 bp, Homo sapien
tcagtgttggagtagtatgtgttcc

SEQ ID NO: 3049624 - DNA, 25 bp, Homo sapien
tcggcagaatgatctcctccacgtt

SEQ ID NO: 3049625 - DNA, 25 bp, Homo sapien
tgttccagataaagctcagagcctc

SEQ ID NO: 3049626 - DNA, 25 bp, Homo sapien
ccacatgaagaagtgggtcttcggc

SEQ ID NO: 3049627 - DNA, 25 bp, Homo sapien
ccggtagagaatggtggtctttcct

SEQ ID NO: 3049628 - DNA, 25 bp, Homo sapien
ggtagagaatggtggtctttccttc

SEQ ID NO: 3049629 - DNA, 25 bp, Homo sapien
tagagaatggtggtctttccttcat

SEQ ID NO: 3049630 - DNA, 25 bp, Homo sapien
gagaatggtggtctttccttcattg

SEQ ID NO: 3049631 - DNA, 25 bp, Homo sapien
ccagaagagggcgagatcaaagcgc

SEQ ID NO: 3049632 - DNA, 25 bp, Homo sapien
gagggcgagatcaaagcgctcgctt

SEQ ID NO: 3049633 - DNA, 25 bp, Homo sapien
caaagcgctcgcttggatgccctgt

SEQ ID NO: 3049634 - DNA, 25 bp, Homo sapien
ggcgagatcaaagcgctcgcttgga

SEQ ID NO: 3049635 - DNA, 25 bp, Homo sapien
ttaacttggcgatcagctgtcccat

SEQ ID NO: 3049636 - DNA, 25 bp, Homo sapien
cattaacttggcgatcagctgtccc

SEQ ID NO: 3049637 - DNA, 25 bp, Homo sapien
gctcattaacttggcgatcagctgt

SEQ ID NO: 3049638 - DNA, 25 bp, Homo sapien
agatgctcattaacttggcgatcag

SEQ ID NO: 3049639 - DNA, 25 bp, Homo sapien
taatcagtaagtggaagctgcaccc

SEQ ID NO: 3049640 - DNA, 25 bp, Homo sapien
ggctttcaccgaccagacgatgctg

SEQ ID NO: 3049641 - DNA, 25 bp, Homo sapien
gaagtgcaccttttctctaggaggg

SEQ ID NO: 3049642 - DNA, 25 bp, Homo sapien
taaaatgaggcggaccagagtgttc

SEQ ID NO: 3049643 - DNA, 25 bp, Homo sapien
cagctcattcttgttgcgccccaaa

SEQ ID NO: 3049644 - DNA, 25 bp, Homo sapien
tccgtgtaggcagagtttcggctgc

SEQ ID NO: 3049645 - DNA, 25 bp, Homo sapien
catcaaaagtgtcttggcgggacag

SEQ ID NO: 3049646 - DNA, 25 bp, Homo sapien
tcagcgaatgtagacgcctcgtccc

SEQ ID NO: 3049647 - DNA, 25 bp, Homo sapien
aggcctcatatccagcgggcagcag

SEQ ID NO: 3049648 - DNA, 25 bp, Homo sapien
tcctagtcccttgtcttaaaagcgc

SEQ ID NO: 3049649 - DNA, 25 bp, Homo sapien
agcagatgcgctcctatggcaccag

SEQ ID NO: 3049650 - DNA, 25 bp, Homo sapien
tcttcctcgcatgtccttcctagtc

SEQ ID NO: 3049651 - DNA, 25 bp, Homo sapien
cactccagttccgaccccagagcag

SEQ ID NO: 3049652 - DNA, 25 bp, Homo sapien
ctgcactccagttccgaccccagag

SEQ ID NO: 3049653 - DNA, 25 bp, Homo sapien
gcactccagttccgaccccagagca

SEQ ID NO: 3049654 - DNA, 25 bp, Homo sapien
tgcactccagttccgaccccagagc

SEQ ID NO: 3049655 - DNA, 25 bp, Homo sapien
tcctgagcgaggtgagcacctgtac

SEQ ID NO: 3049656 - DNA, 25 bp, Homo sapien
cccagaagccgaggtttctcctgag

SEQ ID NO: 3049657 - DNA, 25 bp, Homo sapien
tacatggcatgttcctgctcctggg

SEQ ID NO: 3049658 - DNA, 25 bp, Homo sapien
aggtttctcctgagcgaggtgagca

SEQ ID NO: 3049659 - DNA, 25 bp, Homo sapien
aagtactccgccagatgctcgcagg

SEQ ID NO: 3049660 - DNA, 25 bp, Homo sapien
ccatggtgcggttcagcagcggatt

SEQ ID NO: 3049661 - DNA, 25 bp, Homo sapien
ggtgtgtggccttccaataggcttc

SEQ ID NO: 3049662 - DNA, 25 bp, Homo sapien
tgctcgcaggcatcctccaattggt

SEQ ID NO: 3049663 - DNA, 25 bp, Homo sapien
gacattgaggtgtttggactgagac

SEQ ID NO: 3049664 - DNA, 25 bp, Homo sapien
cgaggccgctatttggacattgagg

SEQ ID NO: 3049665 - DNA, 25 bp, Homo sapien
tcgggacttgatgagcctttgaagt

SEQ ID NO: 3049666 - DNA, 25 bp, Homo sapien
tgtgccagcttttccgaggccgcta

SEQ ID NO: 3049667 - DNA, 25 bp, Homo sapien
catggagagccagtgtcaagaccct

SEQ ID NO: 3049668 - DNA, 25 bp, Homo sapien
tcctggttggatcagcatggagagc

SEQ ID NO: 3049669 - DNA, 25 bp, Homo sapien
aatgctccataactctcagccctgg

SEQ ID NO: 3049670 - DNA, 25 bp, Homo sapien
ggactcaggcaatgcacccagtcag

SEQ ID NO: 3049671 - DNA, 25 bp, Homo sapien
gggccagctcgaagattcgctcgat

SEQ ID NO: 3049672 - DNA, 25 bp, Homo sapien
gattcgctcgatttcactctgcacc

SEQ ID NO: 3049673 - DNA, 25 bp, Homo sapien
accaactgaagggtccgggccagct

SEQ ID NO: 3049674 - DNA, 25 bp, Homo sapien
tgattgatggtgtcagcatccagag

SEQ ID NO: 3049675 - DNA, 25 bp, Homo sapien
tgttgagaactgagcgcttagccag

SEQ ID NO: 3049676 - DNA, 25 bp, Homo sapien
tgccgtcacacgagtgatggagatc

SEQ ID NO: 3049677 - DNA, 25 bp, Homo sapien
agcgtgtgttggagcgctcaatgat

SEQ ID NO: 3049678 - DNA, 25 bp, Homo sapien
cagggaaatatctgccgtcacacga

SEQ ID NO: 3049679 - DNA, 25 bp, Homo sapien
accgatgcttcaagaagtcaaataa

SEQ ID NO: 3049680 - DNA, 25 bp, Homo sapien
ctgccatcaaaccgatgcttcaaga

SEQ ID NO: 3049681 - DNA, 25 bp, Homo sapien
caaaccgatgcttcaagaagtcaaa

SEQ ID NO: 3049682 - DNA, 25 bp, Homo sapien
catcaaaccgatgcttcaagaagtc

SEQ ID NO: 3049683 - DNA, 25 bp, Homo sapien
ctggacaggcctttacggcgggcgg

SEQ ID NO: 3049684 - DNA, 25 bp, Homo sapien
gtctttctgtggattgggccccctg

SEQ ID NO: 3049685 - DNA, 25 bp, Homo sapien
tctgaaagtctgtagccctcctggg

SEQ ID NO: 3049686 - DNA, 25 bp, Homo sapien
taagtggcatctctgggagggctct

SEQ ID NO: 3049687 - DNA, 25 bp, Homo sapien
tcgtagcccttgagcgacggtccca

SEQ ID NO: 3049688 - DNA, 25 bp, Homo sapien
cttgagcgacggtcccaccaggatg

SEQ ID NO: 3049689 - DNA, 25 bp, Homo sapien
caccacgtcataggggggcacatgc

SEQ ID NO: 3049690 - DNA, 25 bp, Homo sapien
cctcatggaaggcaccacgtcatag

SEQ ID NO: 3049691 - DNA, 25 bp, Homo sapien
cttgcaagaacacagcgagaattac

SEQ ID NO: 3049692 - DNA, 25 bp, Homo sapien
ctcttgcaagaacacagcgagaatt

SEQ ID NO: 3049693 - DNA, 25 bp, Homo sapien
tcttgcaagaacacagcgagaatta

SEQ ID NO: 3049694 - DNA, 25 bp, Homo sapien
cttaaagaaggggatgcgtttgcca

SEQ ID NO: 3049695 - DNA, 25 bp, Homo sapien
tctagggggtctagttcaaaggcta

SEQ ID NO: 3049696 - DNA, 25 bp, Homo sapien
tggtgacactgctaacactagtctt

SEQ ID NO: 3049697 - DNA, 25 bp, Homo sapien
aaggctaagttagtcatttcattac

SEQ ID NO: 3049698 - DNA, 25 bp, Homo sapien
gtggggcggcgggtgccagtcacca

SEQ ID NO: 3049699 - DNA, 25 bp, Homo sapien
tctcccagactggaactggagttat

SEQ ID NO: 3049700 - DNA, 25 bp, Homo sapien
cagtcaccacatctcccagactgga

SEQ ID NO: 3049701 - DNA, 25 bp, Homo sapien
ggaactggagttatcgcctgatttg

SEQ ID NO: 3049702 - DNA, 25 bp, Homo sapien
gcggttctggcgcagcttctgttcc

SEQ ID NO: 3049703 - DNA, 25 bp, Homo sapien
ggagccgaggcggttctggcgcagc

SEQ ID NO: 3049704 - DNA, 25 bp, Homo sapien
tgcagcaggcgaaggctgtccagtt

SEQ ID NO: 3049705 - DNA, 25 bp, Homo sapien
ctgtccagtttgacggggctgggaa

SEQ ID NO: 3049706 - DNA, 25 bp, Homo sapien
tgtgcaggaagtctttgggctcgaa

SEQ ID NO: 3049707 - DNA, 25 bp, Homo sapien
cccctggagacggattgtagccaac

SEQ ID NO: 3049708 - DNA, 25 bp, Homo sapien
tgtagccaacatttgtccgcacagc

SEQ ID NO: 3049709 - DNA, 25 bp, Homo sapien
catttgtccgcacagcaaatgccac

SEQ ID NO: 3049710 - DNA, 25 bp, Homo sapien
ggaggatggcaactagagggcaaac

SEQ ID NO: 3049711 - DNA, 25 bp, Homo sapien
gggaggatggcaactagagggcaaa

SEQ ID NO: 3049712 - DNA, 25 bp, Homo sapien
aggaggcacacaggggaggatggca

SEQ ID NO: 3049713 - DNA, 25 bp, Homo sapien
cacacaggggaggatggcaactaga

SEQ ID NO: 3049714 - DNA, 25 bp, Homo sapien
gatacatcagagtctgatggacggc

SEQ ID NO: 3049715 - DNA, 25 bp, Homo sapien
gagctgcgctaatgcctggcgctct

SEQ ID NO: 3049716 - DNA, 25 bp, Homo sapien
catcagagtctgatggacggctggt

SEQ ID NO: 3049717 - DNA, 25 bp, Homo sapien
ggccttctcgagctgcgctaatgcc

SEQ ID NO: 3049718 - DNA, 25 bp, Homo sapien
caagggactcctttagggatgcaca

SEQ ID NO: 3049719 - DNA, 25 bp, Homo sapien
taagacacatgttgcccgtacagac

SEQ ID NO: 3049720 - DNA, 25 bp, Homo sapien
gaggtccagtggcatccattccagg

SEQ ID NO: 3049721 - DNA, 25 bp, Homo sapien
tacagacctggtagtgggaatgcac

SEQ ID NO: 3049722 - DNA, 25 bp, Homo sapien
caccaccacggtccggctgggcgcc

SEQ ID NO: 3049723 - DNA, 25 bp, Homo sapien
tccatcccggcaccctcagtgcctg

SEQ ID NO: 3049724 - DNA, 25 bp, Homo sapien
cacggtccggctgggcgcctccatc

SEQ ID NO: 3049725 - DNA, 25 bp, Homo sapien
ggctgggcgcctccatcccggcacc

SEQ ID NO: 3049726 - DNA, 25 bp, Homo sapien
caaacactgaaggagccaaggtcct

SEQ ID NO: 3049727 - DNA, 25 bp, Homo sapien
aaagcacagcgtcattcttcccagc

SEQ ID NO: 3049728 - DNA, 25 bp, Homo sapien
ttttctgccaagaggggcaataaaa

SEQ ID NO: 3049729 - DNA, 25 bp, Homo sapien
gactccctgggttggcaaacactga

SEQ ID NO: 3049730 - DNA, 25 bp, Homo sapien
gatgtggtatccgaggacgtgctcc

SEQ ID NO: 3049731 - DNA, 25 bp, Homo sapien
tgaccgtttgaatcgccctttcctc

SEQ ID NO: 3049732 - DNA, 25 bp, Homo sapien
gtatccgaggacgtgctcccatctg

SEQ ID NO: 3049733 - DNA, 25 bp, Homo sapien
tgctcccatctgaccgtttgaatcg

SEQ ID NO: 3049734 - DNA, 25 bp, Homo sapien
aagacctccatggggatctcctggg

SEQ ID NO: 3049735 - DNA, 25 bp, Homo sapien
ggctggggtcgaagacctccatggg

SEQ ID NO: 3049736 - DNA, 25 bp, Homo sapien
gcgggctggggtcgaagacctccat

SEQ ID NO: 3049737 - DNA, 25 bp, Homo sapien
cgggctggggtcgaagacctccatg

SEQ ID NO: 3049738 - DNA, 25 bp, Homo sapien
agccgggctccctcagcgcatggga

SEQ ID NO: 3049739 - DNA, 25 bp, Homo sapien
gccgtgggagccgaaagcagcgcgg

SEQ ID NO: 3049740 - DNA, 25 bp, Homo sapien
tccctcagcgcatgggagaggccgt

SEQ ID NO: 3049741 - DNA, 25 bp, Homo sapien
agccgaaagcagcgcggcgcagcca

SEQ ID NO: 3049742 - DNA, 25 bp, Homo sapien
tgcaagacccgcagtggcgtaaaaa

SEQ ID NO: 3049743 - DNA, 25 bp, Homo sapien
gccgcagtacagttgtgagccaaat

SEQ ID NO: 3049744 - DNA, 25 bp, Homo sapien
tctgaggtgtgttcgatcgcggatc

SEQ ID NO: 3049745 - DNA, 25 bp, Homo sapien
aatgagactgagactagttcccgcc

SEQ ID NO: 3049746 - DNA, 25 bp, Homo sapien
cggcatcgagcccgggaatggaccg

SEQ ID NO: 3049747 - DNA, 25 bp, Homo sapien
cggtccattcccgggctcgatgccg

SEQ ID NO: 3049748 - DNA, 25 bp, Homo sapien
cgggaatggaccgtcacaggcttgc

SEQ ID NO: 3049749 - DNA, 25 bp, Homo sapien
atcgagcccgggaatggaccgtcac

SEQ ID NO: 3049750 - DNA, 25 bp, Homo sapien
caggcttgcggatgatcagcccatc

SEQ ID NO: 3049751 - DNA, 25 bp, Homo sapien
accgtcacaggcttgcggatgatca

SEQ ID NO: 3049752 - DNA, 25 bp, Homo sapien
cgagcccgggaatggaccgtcacag

SEQ ID NO: 3049753 - DNA, 25 bp, Homo sapien
tgtttttccggcatcgagcccggga

SEQ ID NO: 3049754 - DNA, 25 bp, Homo sapien
gcaagcctgtgacggtccattcccg

SEQ ID NO: 3049755 - DNA, 25 bp, Homo sapien
gtgacggtccattcccgggctcgat

SEQ ID NO: 3049756 - DNA, 25 bp, Homo sapien
tgatcatccgcaagcctgtgacggt

SEQ ID NO: 3049757 - DNA, 25 bp, Homo sapien
gatgggctgatcatccgcaagcctg

SEQ ID NO: 3049758 - DNA, 25 bp, Homo sapien
ctgtgacggtccattcccgggctcg

SEQ ID NO: 3049759 - DNA, 25 bp, Homo sapien
tcccgggctcgatgccggaaaaaca

SEQ ID NO: 3049760 - DNA, 25 bp, Homo sapien
gcagccggcgcaaaatcctcattct

SEQ ID NO: 3049761 - DNA, 25 bp, Homo sapien
atgtggcgatcgatcttcttagatt

SEQ ID NO: 3049762 - DNA, 25 bp, Homo sapien
ttcgggcattggctgtacccttccg

SEQ ID NO: 3049763 - DNA, 25 bp, Homo sapien
cgatcgatcttcttagattcacggt

SEQ ID NO: 3049764 - DNA, 25 bp, Homo sapien
atcttctgagcagccggcgcaaaat

SEQ ID NO: 3049765 - DNA, 25 bp, Homo sapien
tcctcatccatgtgaccttctctgg

SEQ ID NO: 3049766 - DNA, 25 bp, Homo sapien
ccagagaaggtcacatggatgagga

SEQ ID NO: 3049767 - DNA, 25 bp, Homo sapien
accgtgaatctaagaagatcgatcg

SEQ ID NO: 3049768 - DNA, 25 bp, Homo sapien
cggaagggtacagccaatgcccgaa

SEQ ID NO: 3049769 - DNA, 25 bp, Homo sapien
aggagaatgaggattttgcgccggc

SEQ ID NO: 3049770 - DNA, 25 bp, Homo sapien
aatctaagaagatcgatcgccacat

SEQ ID NO: 3049771 - DNA, 25 bp, Homo sapien
gaatgaggattttgcgccggctgct

SEQ ID NO: 3049772 - DNA, 25 bp, Homo sapien
caccttcaggtacaggctgtgatac

SEQ ID NO: 3049773 - DNA, 25 bp, Homo sapien
tgtgttccatgagaatccgcttgtt

SEQ ID NO: 3049774 - DNA, 25 bp, Homo sapien
tgtggatgtgttccatgagaatccg

SEQ ID NO: 3049775 - DNA, 25 bp, Homo sapien
tccgcttgtttttgaacacattccc

SEQ ID NO: 3049776 - DNA, 25 bp, Homo sapien
gccaggagcttcttgcgggccttgt

SEQ ID NO: 3049777 - DNA, 25 bp, Homo sapien
cgggccttgtctgccttcagcttgt

SEQ ID NO: 3049778 - DNA, 25 bp, Homo sapien
gggaatgtgttcaaaaacaagcgga

SEQ ID NO: 3049779 - DNA, 25 bp, Homo sapien
aacaagcggattctcatggaacaca

SEQ ID NO: 3049780 - DNA, 25 bp, Homo sapien
gtatcacagcctgtacctgaaggtg

SEQ ID NO: 3049781 - DNA, 25 bp, Homo sapien
acaagctgaaggcagacaaggcccg

SEQ ID NO: 3049782 - DNA, 25 bp, Homo sapien
agacaaggcccgcaagaagctcctg

SEQ ID NO: 3049783 - DNA, 25 bp, Homo sapien
ggattctcatggaacacatccacaa

SEQ ID NO: 3049784 - DNA, 25 bp, Homo sapien
ctatgtaatcacagaggccagtatg

SEQ ID NO: 3049785 - DNA, 25 bp, Homo sapien
tgtacagacaaagtgggaggtttta

SEQ ID NO: 3049786 - DNA, 25 bp, Homo sapien
gataaagtcttgatgatctcctcct

SEQ ID NO: 3049787 - DNA, 25 bp, Homo sapien
gaggcgctcttcacggcgcttgcgt

SEQ ID NO: 3049788 - DNA, 25 bp, Homo sapien
acggcgcttgcgtgcttccttggtc

SEQ ID NO: 3049789 - DNA, 25 bp, Homo sapien
gaggccagtatgtacagacaaagtg

SEQ ID NO: 3049790 - DNA, 25 bp, Homo sapien
tgtctgtacatactggcctctgtga

SEQ ID NO: 3049791 - DNA, 25 bp, Homo sapien
gaccaaggaagcacgcaagcgccgt

SEQ ID NO: 3049792 - DNA, 25 bp, Homo sapien
acgcaagcgccgtgaagagcgcctc

SEQ ID NO: 3049793 - DNA, 25 bp, Homo sapien
taaaacctcccactttgtctgtaca

SEQ ID NO: 3049794 - DNA, 25 bp, Homo sapien
aaggaagcacgcaagcgccgtgaag

SEQ ID NO: 3049795 - DNA, 25 bp, Homo sapien
gatcatcaagactttatccaaggag

SEQ ID NO: 3049796 - DNA, 25 bp, Homo sapien
tgtggcttgagaccccgctttgtgg

SEQ ID NO: 3049797 - DNA, 25 bp, Homo sapien
caatcaagggcataagaggaggatc

SEQ ID NO: 3049798 - DNA, 25 bp, Homo sapien
ttcaagtaacgggagagattcctgc

SEQ ID NO: 3049799 - DNA, 25 bp, Homo sapien
ctttgaccaagcacgggccaggatt

SEQ ID NO: 3049800 - DNA, 25 bp, Homo sapien
tgccactgctgacgcggatgaagcc

SEQ ID NO: 3049801 - DNA, 25 bp, Homo sapien
tcagatctcagtcagggcgtcgact

SEQ ID NO: 3049802 - DNA, 25 bp, Homo sapien
gcttcttgccactgctgacgcggat

SEQ ID NO: 3049803 - DNA, 25 bp, Homo sapien
tcagggcgtcgactggcaccaggcc

SEQ ID NO: 3049804 - DNA, 25 bp, Homo sapien
ttgttcccggagaagggttggcagc

SEQ ID NO: 3049805 - DNA, 25 bp, Homo sapien
gaggctcatgtaaccctgttccttg

SEQ ID NO: 3049806 - DNA, 25 bp, Homo sapien
tggcctcacccgttgcacaaaatta

SEQ ID NO: 3049807 - DNA, 25 bp, Homo sapien
agcagcgccaaacattctcgcctgg

SEQ ID NO: 3049808 - DNA, 25 bp, Homo sapien
actcagcaccaatgccatcatcctc

SEQ ID NO: 3049809 - DNA, 25 bp, Homo sapien
atctagggctctccggattccagcc

SEQ ID NO: 3049810 - DNA, 25 bp, Homo sapien
caggaatagcataaggtgagcagag

SEQ ID NO: 3049811 - DNA, 25 bp, Homo sapien
ccagatctagggctctccggattcc

SEQ ID NO: 3049812 - DNA, 25 bp, Homo sapien
cagtgtccctccactccccaccctg

SEQ ID NO: 3049813 - DNA, 25 bp, Homo sapien
tccactccccaccctgccaagtcac

SEQ ID NO: 3049814 - DNA, 25 bp, Homo sapien
tccctccactccccaccctgccaag

SEQ ID NO: 3049815 - DNA, 25 bp, Homo sapien
cctccactccccaccctgccaagtc

SEQ ID NO: 3049816 - DNA, 25 bp, Homo sapien
catccaccagcatgatccgatctcc

SEQ ID NO: 3049817 - DNA, 25 bp, Homo sapien
accagtcctcgttagagtcatccac

SEQ ID NO: 3049818 - DNA, 25 bp, Homo sapien
caccagcatgatccgatctccaggc

SEQ ID NO: 3049819 - DNA, 25 bp, Homo sapien
cttccaccagtcctcgttagagtca

SEQ ID NO: 3049820 - DNA, 25 bp, Homo sapien
tgcagagccagatcattgttctcct

SEQ ID NO: 3049821 - DNA, 25 bp, Homo sapien
acgtaggagtacatgggccccacat

SEQ ID NO: 3049822 - DNA, 25 bp, Homo sapien
cttgtagagtgcaacgtaggagtac

SEQ ID NO: 3049823 - DNA, 25 bp, Homo sapien
gggcagaaacttgtagagtgcaacg

SEQ ID NO: 3049824 - DNA, 25 bp, Homo sapien
gctgtccaggactcttctcctctgg

SEQ ID NO: 3049825 - DNA, 25 bp, Homo sapien
gcccctcctcagagctgcggatgct

SEQ ID NO: 3049826 - DNA, 25 bp, Homo sapien
ccccatcctcggtcagctcatcccg

SEQ ID NO: 3049827 - DNA, 25 bp, Homo sapien
catcctcggtcagctcatcccgctc

SEQ ID NO: 3049828 - DNA, 25 bp, Homo sapien
ctcctcagagctgcggatgctgcct

SEQ ID NO: 3049829 - DNA, 25 bp, Homo sapien
tgccatagcgcagggtctcgtagac

SEQ ID NO: 3049830 - DNA, 25 bp, Homo sapien
aactggagcggttcatcagtgccag

SEQ ID NO: 3049831 - DNA, 25 bp, Homo sapien
tccttgtcggggactcagaggtgct

SEQ ID NO: 3049832 - DNA, 25 bp, Homo sapien
gctgctgaaactggagcggttcatc

SEQ ID NO: 3049833 - DNA, 25 bp, Homo sapien
ggtcagggatgttgatttctcatcc

SEQ ID NO: 3049834 - DNA, 25 bp, Homo sapien
acaatgggagcagggactgcggcca

SEQ ID NO: 3049835 - DNA, 25 bp, Homo sapien
gggatgttgatttctcatcccacca

SEQ ID NO: 3049836 - DNA, 25 bp, Homo sapien
gttcaagcaattgagagacggggtt

SEQ ID NO: 3049837 - DNA, 25 bp, Homo sapien
cttgtggcacagactggtggcggct

SEQ ID NO: 3049838 - DNA, 25 bp, Homo sapien
gcacagactggtggcggctcatgca

SEQ ID NO: 3049839 - DNA, 25 bp, Homo sapien
actggtggcggctcatgcaccagga

SEQ ID NO: 3049840 - DNA, 25 bp, Homo sapien
tgcttgtggcacagactggtggcgg

SEQ ID NO: 3049841 - DNA, 25 bp, Homo sapien
ggaggtcatggcctatggagaactt

SEQ ID NO: 3049842 - DNA, 25 bp, Homo sapien
catggcctatggagaacttggtcct

SEQ ID NO: 3049843 - DNA, 25 bp, Homo sapien
ggtcatggcctatggagaacttggt

SEQ ID NO: 3049844 - DNA, 25 bp, Homo sapien
gagagggcagagaggttttgaggag

SEQ ID NO: 3049845 - DNA, 25 bp, Homo sapien
caccagaggtggacgctgactttgc

SEQ ID NO: 3049846 - DNA, 25 bp, Homo sapien
tgctggtgggagatctcctcagagc

SEQ ID NO: 3049847 - DNA, 25 bp, Homo sapien
gagatctcctcagagcaccagaggt

SEQ ID NO: 3049848 - DNA, 25 bp, Homo sapien
gactttgcacatcttacatcgcaag

SEQ ID NO: 3049849 - DNA, 25 bp, Homo sapien
tccaagctcttacttcggaggatgg

SEQ ID NO: 3049850 - DNA, 25 bp, Homo sapien
gagcccgagcgaaggaagaagttct

SEQ ID NO: 3049851 - DNA, 25 bp, Homo sapien
gctagctcgcttgaagacatgttcc

SEQ ID NO: 3049852 - DNA, 25 bp, Homo sapien
gtggcacagctcacaagggctagct

SEQ ID NO: 3049853 - DNA, 25 bp, Homo sapien
gccaggacttgaaccagcggcttcg

SEQ ID NO: 3049854 - DNA, 25 bp, Homo sapien
gaacattggaattgagctagcactt

SEQ ID NO: 3049855 - DNA, 25 bp, Homo sapien
cacatcccgtctcaagagttggtca

SEQ ID NO: 3049856 - DNA, 25 bp, Homo sapien
tcattaatcctgatgctgcccttgg

SEQ ID NO: 3049857 - DNA, 25 bp, Homo sapien
ggtgggcggcacccaactgtactct

SEQ ID NO: 3049858 - DNA, 25 bp, Homo sapien
tgggcggcacccaactgtactcttc

SEQ ID NO: 3049859 - DNA, 25 bp, Homo sapien
gggcggcacccaactgtactcttcc

SEQ ID NO: 3049860 - DNA, 25 bp, Homo sapien
cctcacactgagcttggtgggcggc

SEQ ID NO: 3049861 - DNA, 25 bp, Homo sapien
cccgccttccagcactcccacatag

SEQ ID NO: 3049862 - DNA, 25 bp, Homo sapien
tcctgcccgccttccagcactccca

SEQ ID NO: 3049863 - DNA, 25 bp, Homo sapien
tggagtactgaggcagcactacccc

SEQ ID NO: 3049864 - DNA, 25 bp, Homo sapien
agtactgaggcagcactaccccaca

SEQ ID NO: 3049865 - DNA, 25 bp, Homo sapien
aattacgatgacttctctttttgct

SEQ ID NO: 3049866 - DNA, 25 bp, Homo sapien
ttacgatgacttctctttttgcttc

SEQ ID NO: 3049867 - DNA, 25 bp, Homo sapien
ttaattacgatgacttctctttttg

SEQ ID NO: 3049868 - DNA, 25 bp, Homo sapien
cgatgacttctctttttgcttctac

SEQ ID NO: 3049869 - DNA, 25 bp, Homo sapien
tggtctggagccacaaccgcaggcc

SEQ ID NO: 3049870 - DNA, 25 bp, Homo sapien
ccctcgcggactccgcagctgcgca

SEQ ID NO: 3049871 - DNA, 25 bp, Homo sapien
tctggtcccgctcccgtggtggggc

SEQ ID NO: 3049872 - DNA, 25 bp, Homo sapien
cgtcctcgcccgtgaccgacggccg

SEQ ID NO: 3049873 - DNA, 25 bp, Homo sapien
ctggagggcggagacggtccctggg

SEQ ID NO: 3049874 - DNA, 25 bp, Homo sapien
gtgggtggccgcgtcatccggttcg

SEQ ID NO: 3049875 - DNA, 25 bp, Homo sapien
gcgtcatccggttcgttctccttct

SEQ ID NO: 3049876 - DNA, 25 bp, Homo sapien
tggccgcgtcatccggttcgttctc

SEQ ID NO: 3049877 - DNA, 25 bp, Homo sapien
ggagctgtccgtgtccagccggctc

SEQ ID NO: 3049878 - DNA, 25 bp, Homo sapien
cgaggaccgagggtctgcagaggat

SEQ ID NO: 3049879 - DNA, 25 bp, Homo sapien
tctccgggactctgaagccgttctc

SEQ ID NO: 3049880 - DNA, 25 bp, Homo sapien
gtgccgagatccgacggcaggccca

SEQ ID NO: 3049881 - DNA, 25 bp, Homo sapien
cccctagtgtccagcattcgttaaa

SEQ ID NO: 3049882 - DNA, 25 bp, Homo sapien
tctccagaacataggaaattcaggt

SEQ ID NO: 3049883 - DNA, 25 bp, Homo sapien
tgtggctcaggagacctctaggcaa

SEQ ID NO: 3049884 - DNA, 25 bp, Homo sapien
ctctaggcaagggaacgaggttcct

SEQ ID NO: 3049885 - DNA, 25 bp, Homo sapien
catcttcattctcctcagtgaccag

SEQ ID NO: 3049886 - DNA, 25 bp, Homo sapien
cagtgaccagataaagggcagccat

SEQ ID NO: 3049887 - DNA, 25 bp, Homo sapien
ggccatcccagccaatcagatccat

SEQ ID NO: 3049888 - DNA, 25 bp, Homo sapien
tcccagccaatcagatccatcacct

SEQ ID NO: 3049889 - DNA, 25 bp, Homo sapien
atgccagctttgtgtcaaggggaga

SEQ ID NO: 3049890 - DNA, 25 bp, Homo sapien
gagagggatttgtatagctaaaaga

SEQ ID NO: 3049891 - DNA, 25 bp, Homo sapien
gggatgtgtcccaattaactagcaa

SEQ ID NO: 3049892 - DNA, 25 bp, Homo sapien
gatgtgtcccaattaactagcaaac

SEQ ID NO: 3049893 - DNA, 25 bp, Homo sapien
tgcaatggtgcaatcaatctgggct

SEQ ID NO: 3049894 - DNA, 25 bp, Homo sapien
tgcccagaggtagagtgcaatggtg

SEQ ID NO: 3049895 - DNA, 25 bp, Homo sapien
agagtgcaatggtgcaatcaatctg

SEQ ID NO: 3049896 - DNA, 25 bp, Homo sapien
agtgcaatggtgcaatcaatctggg

SEQ ID NO: 3049897 - DNA, 25 bp, Homo sapien
aaccaaaaaacatagctgggcctgg

SEQ ID NO: 3049898 - DNA, 25 bp, Homo sapien
aaatggtataggtttgacctcaggc

SEQ ID NO: 3049899 - DNA, 25 bp, Homo sapien
tagtcaaggtaagggcaatgaatgc

SEQ ID NO: 3049900 - DNA, 25 bp, Homo sapien
tgttatccccatcttaccaatggag

SEQ ID NO: 3049901 - DNA, 25 bp, Homo sapien
tcaggcaatctgactttcgagcttg

SEQ ID NO: 3049902 - DNA, 25 bp, Homo sapien
gacagatgctgtacctgaggcaaag

SEQ ID NO: 3049903 - DNA, 25 bp, Homo sapien
tgcaaaattaagaaggccgctctcc

SEQ ID NO: 3049904 - DNA, 25 bp, Homo sapien
taagtcaccccgtaggcaactgtgt

SEQ ID NO: 3049905 - DNA, 25 bp, Homo sapien
cacttggagagctaatggaacctgg

SEQ ID NO: 3049906 - DNA, 25 bp, Homo sapien
gactcaacctctataaactgaactt

SEQ ID NO: 3049907 - DNA, 25 bp, Homo sapien
taaaacagaaaggactattgatagg

SEQ ID NO: 3049908 - DNA, 25 bp, Homo sapien
ttgttcatggttctttgtaaaacag

SEQ ID NO: 3049909 - DNA, 25 bp, Homo sapien
ggctgaggaagcactgagactcaac

SEQ ID NO: 3049910 - DNA, 25 bp, Homo sapien
tatggtactttcaggcaggtagaat

SEQ ID NO: 3049911 - DNA, 25 bp, Homo sapien
gaagctgcagaagcccatcatgcaa

SEQ ID NO: 3049912 - DNA, 25 bp, Homo sapien
tcccaagtgagaaggcaaggttagt

SEQ ID NO: 3049913 - DNA, 25 bp, Homo sapien
caaaatgtcaagttagggcactcgg

SEQ ID NO: 3049914 - DNA, 25 bp, Homo sapien
agatcaccagagcaagtccccatgg

SEQ ID NO: 3049915 - DNA, 25 bp, Homo sapien
gcattatgttcagatgtcaggctcc

SEQ ID NO: 3049916 - DNA, 25 bp, Homo sapien
cccacctgtaggtttacggcagtag

SEQ ID NO: 3049917 - DNA, 25 bp, Homo sapien
cgtgccgggccataacaatgcattt

SEQ ID NO: 3049918 - DNA, 25 bp, Homo sapien
tgagtcctggacactaaattcctcc

SEQ ID NO: 3049919 - DNA, 25 bp, Homo sapien
cagaagtctgaacagggccgggcat

SEQ ID NO: 3049920 - DNA, 25 bp, Homo sapien
tagtgcccaggctaagcagagacac

SEQ ID NO: 3049921 - DNA, 25 bp, Homo sapien
ggattgcacattaatgtctcaaagg

SEQ ID NO: 3049922 - DNA, 25 bp, Homo sapien
tggcaaagattcaggcagggtcccc

SEQ ID NO: 3049923 - DNA, 25 bp, Homo sapien
aagattcaggcagggtcccctaatg

SEQ ID NO: 3049924 - DNA, 25 bp, Homo sapien
gttggcaaagattcaggcagggtcc

SEQ ID NO: 3049925 - DNA, 25 bp, Homo sapien
gagtttccttgcaggttggcaaaga

SEQ ID NO: 3049926 - DNA, 25 bp, Homo sapien
ttatgggcacctcaacaggaatggt

SEQ ID NO: 3049927 - DNA, 25 bp, Homo sapien
ggtttgctggaatgcccctccctat

SEQ ID NO: 3049928 - DNA, 25 bp, Homo sapien
atgcttttcttgaccccggaggaca

SEQ ID NO: 3049929 - DNA, 25 bp, Homo sapien
tactcagttcgccaaggttgaccac

SEQ ID NO: 3049930 - DNA, 25 bp, Homo sapien
tggagtgacaggtgcgaagtaggcg

SEQ ID NO: 3049931 - DNA, 25 bp, Homo sapien
taggcgtggactttaatattgggta

SEQ ID NO: 3049932 - DNA, 25 bp, Homo sapien
atgcagcatctgcagaagcgctgtc

SEQ ID NO: 3049933 - DNA, 25 bp, Homo sapien
gggtggagtgacaggtgcgaagtag

SEQ ID NO: 3049934 - DNA, 25 bp, Homo sapien
gccctagacattattagacagactc

SEQ ID NO: 3049935 - DNA, 25 bp, Homo sapien
ctgctaacactagagttggagagtt

SEQ ID NO: 3049936 - DNA, 25 bp, Homo sapien
ctgggaatgttattaagccctagac

SEQ ID NO: 3049937 - DNA, 25 bp, Homo sapien
tggagccagagggaaaaactatctg

SEQ ID NO: 3049938 - DNA, 25 bp, Homo sapien
agcccgtgtgatttgctggcagtca

SEQ ID NO: 3049939 - DNA, 25 bp, Homo sapien
tatgacagctcttcaagtgctccag

SEQ ID NO: 3049940 - DNA, 25 bp, Homo sapien
catagagttctatccgctcaaggct

SEQ ID NO: 3049941 - DNA, 25 bp, Homo sapien
tgagtctcttgattccagcccgtgt

SEQ ID NO: 3049942 - DNA, 25 bp, Homo sapien
cgaggacagtgtatagaaagttgga

SEQ ID NO: 3049943 - DNA, 25 bp, Homo sapien
gacagtgtatagaaagttggattaa

SEQ ID NO: 3049944 - DNA, 25 bp, Homo sapien
gaagtcgaggacagtgtatagaaag

SEQ ID NO: 3049945 - DNA, 25 bp, Homo sapien
caatacttgaagtcgaggacagtgt

SEQ ID NO: 3049946 - DNA, 25 bp, Homo sapien
attataggcatgtgctaccacgtcc

SEQ ID NO: 3049947 - DNA, 25 bp, Homo sapien
tgggattacaggctagtttgttgtt

SEQ ID NO: 3049948 - DNA, 25 bp, Homo sapien
ttataggcatgtgctaccacgtcca

SEQ ID NO: 3049949 - DNA, 25 bp, Homo sapien
gccaggcagatctcaaactcccgac

SEQ ID NO: 3049950 - DNA, 25 bp, Homo sapien
ttccaggtccatcttttcaagttca

SEQ ID NO: 3049951 - DNA, 25 bp, Homo sapien
ctgaacacactcttccaggtccatc

SEQ ID NO: 3049952 - DNA, 25 bp, Homo sapien
actcttccaggtccatcttttcaag

SEQ ID NO: 3049953 - DNA, 25 bp, Homo sapien
tgaacacactcttccaggtccatct

SEQ ID NO: 3049954 - DNA, 25 bp, Homo sapien
gctagagtggtaaagcccacatctg

SEQ ID NO: 3049955 - DNA, 25 bp, Homo sapien
ttgagaacatcttgccacttccaat

SEQ ID NO: 3049956 - DNA, 25 bp, Homo sapien
agtggtaaagcccacatctgttaat

SEQ ID NO: 3049957 - DNA, 25 bp, Homo sapien
cacatctgttaattgagaacatctt

SEQ ID NO: 3049958 - DNA, 25 bp, Homo sapien
gtaggtgggcatctaaaagggacta

SEQ ID NO: 3049959 - DNA, 25 bp, Homo sapien
tacatgaaatcaaatgaggtacaaa

SEQ ID NO: 3049960 - DNA, 25 bp, Homo sapien
ccttggttcacaccaattacatgaa

SEQ ID NO: 3049961 - DNA, 25 bp, Homo sapien
gattgttaccccttggttcacacca

SEQ ID NO: 3049962 - DNA, 25 bp, Homo sapien
taaaatttcaaagcgtctgcagtgc

SEQ ID NO: 3049963 - DNA, 25 bp, Homo sapien
atttcaaagcgtctgcagtgcctac

SEQ ID NO: 3049964 - DNA, 25 bp, Homo sapien
cttaaaatttcaaagcgtctgcagt

SEQ ID NO: 3049965 - DNA, 25 bp, Homo sapien
aatttcaaagcgtctgcagtgccta

SEQ ID NO: 3049966 - DNA, 25 bp, Homo sapien
caaagttccaaggaagaaatatggg

SEQ ID NO: 3049967 - DNA, 25 bp, Homo sapien
ttccaaggaagaaatatgggtgaag

SEQ ID NO: 3049968 - DNA, 25 bp, Homo sapien
agttccaaggaagaaatatgggtga

SEQ ID NO: 3049969 - DNA, 25 bp, Homo sapien
ccaaggaagaaatatgggtgaagga

SEQ ID NO: 3049970 - DNA, 25 bp, Homo sapien
gacctagagcattcaggatggcatc

SEQ ID NO: 3049971 - DNA, 25 bp, Homo sapien
ccctctgcatatagtaatgagacct

SEQ ID NO: 3049972 - DNA, 25 bp, Homo sapien
taagccgtgggcagttctgacctag

SEQ ID NO: 3049973 - DNA, 25 bp, Homo sapien
gattgtaacttatggcaccctctgc

SEQ ID NO: 3049974 - DNA, 25 bp, Homo sapien
aagagcaaaaaaatccatagatatt

SEQ ID NO: 3049975 - DNA, 25 bp, Homo sapien
taaaacagaagagttgtgagaaggg

SEQ ID NO: 3049976 - DNA, 25 bp, Homo sapien
cagaagagttgtgagaagggatgtt

SEQ ID NO: 3049977 - DNA, 25 bp, Homo sapien
aagagttgtgagaagggatgtttac

SEQ ID NO: 3049978 - DNA, 25 bp, Homo sapien
aaacagaagagttgtgagaagggat

SEQ ID NO: 3049979 - DNA, 25 bp, Homo sapien
gtcaccagttcagggcagtgtgcac

SEQ ID NO: 3049980 - DNA, 25 bp, Homo sapien
gtgcacctatgtacttgagagcttc

SEQ ID NO: 3049981 - DNA, 25 bp, Homo sapien
cagttcagggcagtgtgcacctatg

SEQ ID NO: 3049982 - DNA, 25 bp, Homo sapien
gtctgcaagttcaaagtcaccagtt

SEQ ID NO: 3049983 - DNA, 25 bp, Homo sapien
cttggttacttggtcacaccaggaa

SEQ ID NO: 3049984 - DNA, 25 bp, Homo sapien
acaccaggaaatgttcaactgctcc

SEQ ID NO: 3049985 - DNA, 25 bp, Homo sapien
cactagtgcttgaatgccatccttg

SEQ ID NO: 3049986 - DNA, 25 bp, Homo sapien
tcaactgctccaacagtggacatcc

SEQ ID NO: 3049987 - DNA, 25 bp, Homo sapien
gatatcttatgtccgatctctgcct

SEQ ID NO: 3049988 - DNA, 25 bp, Homo sapien
gggatattcaactcacagtaccaaa

SEQ ID NO: 3049989 - DNA, 25 bp, Homo sapien
aagtagcacccagctgcattttgga

SEQ ID NO: 3049990 - DNA, 25 bp, Homo sapien
ctagagtaccgcttttgtaggctga

SEQ ID NO: 3049991 - DNA, 25 bp, Homo sapien
tttattagcctacacagcaaaccgt

SEQ ID NO: 3049992 - DNA, 25 bp, Homo sapien
gcaaaccgtcttaggtacatgtgtt

SEQ ID NO: 3049993 - DNA, 25 bp, Homo sapien
tattcacaaagaaggtctaaaagga

SEQ ID NO: 3049994 - DNA, 25 bp, Homo sapien
taaaaggagccacattttagattat

SEQ ID NO: 3049995 - DNA, 25 bp, Homo sapien
catgtttgttattgatgtacaggaa

SEQ ID NO: 3049996 - DNA, 25 bp, Homo sapien
gaacttgctaaggctagtacatgta

SEQ ID NO: 3049997 - DNA, 25 bp, Homo sapien
cagagcttttagagacatgtttgtt

SEQ ID NO: 3049998 - DNA, 25 bp, Homo sapien
ctcagagcttttagagacatgtttg

SEQ ID NO: 3049999 - DNA, 25 bp, Homo sapien
tgaatacagctatcttagtgtgtat

SEQ ID NO: 3050000 - DNA, 25 bp, Homo sapien
tgctagatcctatggcaaggttatg

SEQ ID NO: 3050001 - DNA, 25 bp, Homo sapien
catgagggacccagtttttccaaat

SEQ ID NO: 3050002 - DNA, 25 bp, Homo sapien
ctgtttcccaaattggccgtaccat

SEQ ID NO: 3050003 - DNA, 25 bp, Homo sapien
ccaccaaggtgtaatctttctggag

SEQ ID NO: 3050004 - DNA, 25 bp, Homo sapien
tctttattgaatgtcccaggtgttc

SEQ ID NO: 3050005 - DNA, 25 bp, Homo sapien
taatagagcaggtctattttagccc

SEQ ID NO: 3050006 - DNA, 25 bp, Homo sapien
tctggagtctttattgaatgtccca

SEQ ID NO: 3050007 - DNA, 25 bp, Homo sapien
aagttaatgcactcatatgagagac

SEQ ID NO: 3050008 - DNA, 25 bp, Homo sapien
ggtgatgggctcattacacgttttt

SEQ ID NO: 3050009 - DNA, 25 bp, Homo sapien
actggtaacagttaaagctgggtga

SEQ ID NO: 3050010 - DNA, 25 bp, Homo sapien
cgtttttgtctacttctgtatatgt

SEQ ID NO: 3050011 - DNA, 25 bp, Homo sapien
gattcagtacttcaatgttcctgca

SEQ ID NO: 3050012 - DNA, 25 bp, Homo sapien
acacccatttagattcagtacttca

SEQ ID NO: 3050013 - DNA, 25 bp, Homo sapien
gacatccacgaagacttaactttcg

SEQ ID NO: 3050014 - DNA, 25 bp, Homo sapien
tccaagacatccacgaagacttaac

SEQ ID NO: 3050015 - DNA, 25 bp, Homo sapien
tcccactccaagacatccacgaaga

SEQ ID NO: 3050016 - DNA, 25 bp, Homo sapien
aagcccccacatcgttttgaaatat

SEQ ID NO: 3050017 - DNA, 25 bp, Homo sapien
tcaaataggtcaattcgctgccagt

SEQ ID NO: 3050018 - DNA, 25 bp, Homo sapien
tggaaatcaaataggtcaattcgct

SEQ ID NO: 3050019 - DNA, 25 bp, Homo sapien
aggtcaattcgctgccagttactgc

SEQ ID NO: 3050020 - DNA, 25 bp, Homo sapien
tatccctctggaaatcaaataggtc

SEQ ID NO: 3050021 - DNA, 25 bp, Homo sapien
gaagcaaacttatccatcgagacta

SEQ ID NO: 3050022 - DNA, 25 bp, Homo sapien
tgtgtgcctgcatcaacatgtgact

SEQ ID NO: 3050023 - DNA, 25 bp, Homo sapien
gagactatctggtatgtgttacgca

SEQ ID NO: 3050024 - DNA, 25 bp, Homo sapien
gctccgattctgcattaactgtgaa

SEQ ID NO: 3050025 - DNA, 25 bp, Homo sapien
agcacagcggcacagggtaacaaca

SEQ ID NO: 3050026 - DNA, 25 bp, Homo sapien
gcacagcggcacagggtaacaacat

SEQ ID NO: 3050027 - DNA, 25 bp, Homo sapien
cctcttggggtcacgtgattcgcct

SEQ ID NO: 3050028 - DNA, 25 bp, Homo sapien
cagcctcttggggtcacgtgattcg

SEQ ID NO: 3050029 - DNA, 25 bp, Homo sapien
tagttcttagatataggtctttgca

SEQ ID NO: 3050030 - DNA, 25 bp, Homo sapien
taggtctttgcaagaccatttattg

SEQ ID NO: 3050031 - DNA, 25 bp, Homo sapien
gataataaattaaataagctgggag

SEQ ID NO: 3050032 - DNA, 25 bp, Homo sapien
aaactgataataaattaaataagct

SEQ ID NO: 3050033 - DNA, 25 bp, Homo sapien
aactgataataaattaaataagctg

SEQ ID NO: 3050034 - DNA, 25 bp, Homo sapien
ataataaattaaataagctgggagg

SEQ ID NO: 3050035 - DNA, 25 bp, Homo sapien
gcattccagtagacgaaatagtggg

SEQ ID NO: 3050036 - DNA, 25 bp, Homo sapien
taccacctgctatctacgggcactg

SEQ ID NO: 3050037 - DNA, 25 bp, Homo sapien
tagaagggtggtcaaggaaagcctc

SEQ ID NO: 3050038 - DNA, 25 bp, Homo sapien
gcccagagaccaattatagtgaata

SEQ ID NO: 3050039 - DNA, 25 bp, Homo sapien
ttagttttgagtgcatcaagcagca

SEQ ID NO: 3050040 - DNA, 25 bp, Homo sapien
tatgcacgtatatgtagccccagct

SEQ ID NO: 3050041 - DNA, 25 bp, Homo sapien
caaaaccccgtgtcacaatattagt

SEQ ID NO: 3050042 - DNA, 25 bp, Homo sapien
tttgctcagtaacaaaacttttggc

SEQ ID NO: 3050043 - DNA, 25 bp, Homo sapien
caccctgatggttctccttaataaa

SEQ ID NO: 3050044 - DNA, 25 bp, Homo sapien
cttgagacaaatttgctaccaccct

SEQ ID NO: 3050045 - DNA, 25 bp, Homo sapien
aatattgattatccaactccactcc

SEQ ID NO: 3050046 - DNA, 25 bp, Homo sapien
caagtcttacctgggttctctatta

SEQ ID NO: 3050047 - DNA, 25 bp, Homo sapien
tagtcagatgtgtgcagacttagga

SEQ ID NO: 3050048 - DNA, 25 bp, Homo sapien
cattgagttagcttttcacttggat

SEQ ID NO: 3050049 - DNA, 25 bp, Homo sapien
gacttaggagtaccattaaacacac

SEQ ID NO: 3050050 - DNA, 25 bp, Homo sapien
cacttggatttgaacgttttagagc

SEQ ID NO: 3050051 - DNA, 25 bp, Homo sapien
aaagtgcataattcggtgatttttt

SEQ ID NO: 3050052 - DNA, 25 bp, Homo sapien
aagtgcataattcggtgattttttt

SEQ ID NO: 3050053 - DNA, 25 bp, Homo sapien
ctgatagtgccctgtccagaatgtc

SEQ ID NO: 3050054 - DNA, 25 bp, Homo sapien
taacagaggcataaaagataagtgg

SEQ ID NO: 3050055 - DNA, 25 bp, Homo sapien
taagtggtatatactgacctcacag

SEQ ID NO: 3050056 - DNA, 25 bp, Homo sapien
tcacagcacggtttaccaacttctg

SEQ ID NO: 3050057 - DNA, 25 bp, Homo sapien
taaactagatattattggaggtgtc

SEQ ID NO: 3050058 - DNA, 25 bp, Homo sapien
ggacagaatgaaccctaaggtaata

SEQ ID NO: 3050059 - DNA, 25 bp, Homo sapien
gtttttaatctatccagccacctat

SEQ ID NO: 3050060 - DNA, 25 bp, Homo sapien
tcttcacagtgatatgggtaaatca

SEQ ID NO: 3050061 - DNA, 25 bp, Homo sapien
tgtcatcccacatagagaaactctc

SEQ ID NO: 3050062 - DNA, 25 bp, Homo sapien
cagcaagtgtatgacagaatccagg

SEQ ID NO: 3050063 - DNA, 25 bp, Homo sapien
gccctgcactgtaatggtttgaata

SEQ ID NO: 3050064 - DNA, 25 bp, Homo sapien
tgtccctcataaagaacatcggttg

SEQ ID NO: 3050065 - DNA, 25 bp, Homo sapien
taacagtccttattctgaaaccgca

SEQ ID NO: 3050066 - DNA, 25 bp, Homo sapien
tgttataactaaaagggcacagtgc

SEQ ID NO: 3050067 - DNA, 25 bp, Homo sapien
cgtcatcctcagaaggaatctttga

SEQ ID NO: 3050068 - DNA, 25 bp, Homo sapien
acaattatgacccaacaccagaaga

SEQ ID NO: 3050069 - DNA, 25 bp, Homo sapien
cacttaggtgaactggcttggtatc

SEQ ID NO: 3050070 - DNA, 25 bp, Homo sapien
cagtagggccagttaccagagtcaa

SEQ ID NO: 3050071 - DNA, 25 bp, Homo sapien
tcaagtgagctactgtaggccgggt

SEQ ID NO: 3050072 - DNA, 25 bp, Homo sapien
tgttatacccctgtctgatcatgag

SEQ ID NO: 3050073 - DNA, 25 bp, Homo sapien
acagcttcatcactatttgagaaca

SEQ ID NO: 3050074 - DNA, 25 bp, Homo sapien
attacagcttcatcactatttgaga

SEQ ID NO: 3050075 - DNA, 25 bp, Homo sapien
ttgattacagcttcatcactatttg

SEQ ID NO: 3050076 - DNA, 25 bp, Homo sapien
agttttttattgattacagcttcat

SEQ ID NO: 3050077 - DNA, 25 bp, Homo sapien
tggagtccttgcccacccctatgtt

SEQ ID NO: 3050078 - DNA, 25 bp, Homo sapien
gagtccttgcccacccctatgttct

SEQ ID NO: 3050079 - DNA, 25 bp, Homo sapien
agtcatggagtccttgcccacccct

SEQ ID NO: 3050080 - DNA, 25 bp, Homo sapien
tcatggagtccttgcccacccctat

SEQ ID NO: 3050081 - DNA, 25 bp, Homo sapien
tagctattcgggcatcccttagcct

SEQ ID NO: 3050082 - DNA, 25 bp, Homo sapien
tcagctcaaggagaggcagtattct

SEQ ID NO: 3050083 - DNA, 25 bp, Homo sapien
gggcggatctttctttactcagtct

SEQ ID NO: 3050084 - DNA, 25 bp, Homo sapien
agagaaaatgaatgtctcagctcaa

SEQ ID NO: 3050085 - DNA, 25 bp, Homo sapien
taagcgtccgtgtgaatatttagta

SEQ ID NO: 3050086 - DNA, 25 bp, Homo sapien
caggacaagcagacaataggactat

SEQ ID NO: 3050087 - DNA, 25 bp, Homo sapien
ttagatactactcagtgtcaggaca

SEQ ID NO: 3050088 - DNA, 25 bp, Homo sapien
ggagcgatcatagtacaccctcaag

SEQ ID NO: 3050089 - DNA, 25 bp, Homo sapien
tcattgtagaattcctattagtcaa

SEQ ID NO: 3050090 - DNA, 25 bp, Homo sapien
gcgcccagcctatcagtcctttcaa

SEQ ID NO: 3050091 - DNA, 25 bp, Homo sapien
caaacattggacctcctggtttatc

SEQ ID NO: 3050092 - DNA, 25 bp, Homo sapien
ttttcaatctggtaaatattttgga

SEQ ID NO: 3050093 - DNA, 25 bp, Homo sapien
tcagaccgagggtgttggctcacgc

SEQ ID NO: 3050094 - DNA, 25 bp, Homo sapien
gaacctgtcttatagaacagctgta

SEQ ID NO: 3050095 - DNA, 25 bp, Homo sapien
aacattggcaaccttatattagccc

SEQ ID NO: 3050096 - DNA, 25 bp, Homo sapien
aaagagttttgtcagaccgagggtg

SEQ ID NO: 3050097 - DNA, 25 bp, Homo sapien
tgtggcttcacatcgtctatataga

SEQ ID NO: 3050098 - DNA, 25 bp, Homo sapien
tgctcagctcaaggcataacctcca

SEQ ID NO: 3050099 - DNA, 25 bp, Homo sapien
aaactttctctaaacacactcctgg

SEQ ID NO: 3050100 - DNA, 25 bp, Homo sapien
tatttgactggcaaatcatggaaga

SEQ ID NO: 3050101 - DNA, 25 bp, Homo sapien
tgtctagaaattctgcaaggatgag

SEQ ID NO: 3050102 - DNA, 25 bp, Homo sapien
gagacctcttcagaaatccgaatat

SEQ ID NO: 3050103 - DNA, 25 bp, Homo sapien
agaaatccgaatattttctaggtag

SEQ ID NO: 3050104 - DNA, 25 bp, Homo sapien
tttctaggtaggcatgttcttttat

SEQ ID NO: 3050105 - DNA, 25 bp, Homo sapien
tatttgctacaaaccacaaatccct

SEQ ID NO: 3050106 - DNA, 25 bp, Homo sapien
taaatcgtttatttgctacaaacca

SEQ ID NO: 3050107 - DNA, 25 bp, Homo sapien
ttgctacaaaccacaaatcccttct

SEQ ID NO: 3050108 - DNA, 25 bp, Homo sapien
tttatttgctacaaaccacaaatcc

SEQ ID NO: 3050109 - DNA, 25 bp, Homo sapien
gcacagatgcataggattctagaaa

SEQ ID NO: 3050110 - DNA, 25 bp, Homo sapien
tatctccctcgctttacagaagagg

SEQ ID NO: 3050111 - DNA, 25 bp, Homo sapien
agggaaatcaccaagctagaaaagt

SEQ ID NO: 3050112 - DNA, 25 bp, Homo sapien
taacggtgtattctgagactgagcc

SEQ ID NO: 3050113 - DNA, 25 bp, Homo sapien
gctcttggtcactccgttcacgtcc

SEQ ID NO: 3050114 - DNA, 25 bp, Homo sapien
gtcactccgttcacgtccctcctca

SEQ ID NO: 3050115 - DNA, 25 bp, Homo sapien
tggtcactccgttcacgtccctcct

SEQ ID NO: 3050116 - DNA, 25 bp, Homo sapien
cttggtcactccgttcacgtccctc

SEQ ID NO: 3050117 - DNA, 25 bp, Homo sapien
cgtgggacgggaacaagagacctct

SEQ ID NO: 3050118 - DNA, 25 bp, Homo sapien
tgcggcgagcggagtgcacagaccg

SEQ ID NO: 3050119 - DNA, 25 bp, Homo sapien
gacgggaacaagagacctctcggct

SEQ ID NO: 3050120 - DNA, 25 bp, Homo sapien
agacctctcggctccggctaggcct

SEQ ID NO: 3050121 - DNA, 25 bp, Homo sapien
cggcggccgcaacgactgctcgtcg

SEQ ID NO: 3050122 - DNA, 25 bp, Homo sapien
gccggcggccgcaacgactgctcgt

SEQ ID NO: 3050123 - DNA, 25 bp, Homo sapien
ccggcggccgcaacgactgctcgtc

SEQ ID NO: 3050124 - DNA, 25 bp, Homo sapien
gcgccggcggccgcaacgactgctc

SEQ ID NO: 3050125 - DNA, 25 bp, Homo sapien
cccacctgccagcaacgccgctgct

SEQ ID NO: 3050126 - DNA, 25 bp, Homo sapien
acctgccagcaacgccgctgctcat

SEQ ID NO: 3050127 - DNA, 25 bp, Homo sapien
agcaacgccgctgctcattggacag

SEQ ID NO: 3050128 - DNA, 25 bp, Homo sapien
tgccagcaacgccgctgctcattgg

SEQ ID NO: 3050129 - DNA, 25 bp, Homo sapien
tgtcgccttgaacccaaagtgcagc

SEQ ID NO: 3050130 - DNA, 25 bp, Homo sapien
agcaggcggtccctgctcggagcca

SEQ ID NO: 3050131 - DNA, 25 bp, Homo sapien
gcaggcggtccctgctcggagccat

SEQ ID NO: 3050132 - DNA, 25 bp, Homo sapien
cgccttgaacccaaagtgcagcagg

SEQ ID NO: 3050133 - DNA, 25 bp, Homo sapien
ttgcgctgagcaacaggccaagtgc

SEQ ID NO: 3050134 - DNA, 25 bp, Homo sapien
gggccggacgcttgtctccctgtgc

SEQ ID NO: 3050135 - DNA, 25 bp, Homo sapien
ccgccccagtgcattacattacggg

SEQ ID NO: 3050136 - DNA, 25 bp, Homo sapien
cgcttgtctccctgtgcatggctcg

SEQ ID NO: 3050137 - DNA, 25 bp, Homo sapien
gtatgactcactggctccctgaaag

SEQ ID NO: 3050138 - DNA, 25 bp, Homo sapien
tacataagacaccagcagcagaaga

SEQ ID NO: 3050139 - DNA, 25 bp, Homo sapien
gaatgagtacacctagacaggaggg

SEQ ID NO: 3050140 - DNA, 25 bp, Homo sapien
tacatcagagcaggttatgaccaag

SEQ ID NO: 3050141 - DNA, 25 bp, Homo sapien
aagcaagttcagatgctgggtcagt

SEQ ID NO: 3050142 - DNA, 25 bp, Homo sapien
gggtgagcccatcgacaattcaggg

SEQ ID NO: 3050143 - DNA, 25 bp, Homo sapien
tgggggtgagcccatcgacaattca

SEQ ID NO: 3050144 - DNA, 25 bp, Homo sapien
ttaagcaagttcagatgctgggtca

SEQ ID NO: 3050145 - DNA, 25 bp, Homo sapien
agatcctaactcgggattctttgat

SEQ ID NO: 3050146 - DNA, 25 bp, Homo sapien
cagatcctaactcgggattctttga

SEQ ID NO: 3050147 - DNA, 25 bp, Homo sapien
tccagatcctaactcgggattcttt

SEQ ID NO: 3050148 - DNA, 25 bp, Homo sapien
catccagatcctaactcgggattct

SEQ ID NO: 3050149 - DNA, 25 bp, Homo sapien
tgtcaatatcaaagtaaggccgcag

SEQ ID NO: 3050150 - DNA, 25 bp, Homo sapien
tggtaaccagaatcaaaccctgtgg

SEQ ID NO: 3050151 - DNA, 25 bp, Homo sapien
tttaactctaaaggcgggctctgac

SEQ ID NO: 3050152 - DNA, 25 bp, Homo sapien
tgactccaacctgcagaaaaagctg

SEQ ID NO: 3050153 - DNA, 25 bp, Homo sapien
ttacttgtcatagacaaggactggt

SEQ ID NO: 3050154 - DNA, 25 bp, Homo sapien
tcagggccacatccataagatcatc

SEQ ID NO: 3050155 - DNA, 25 bp, Homo sapien
tgcagataagattgtgttacttgtc

SEQ ID NO: 3050156 - DNA, 25 bp, Homo sapien
ctgggctgagccttgagggtctgtc

SEQ ID NO: 3050157 - DNA, 25 bp, Homo sapien
gagatgggtgatttggaccaactct

SEQ ID NO: 3050158 - DNA, 25 bp, Homo sapien
ctggcttgatgctatgagatttttt

SEQ ID NO: 3050159 - DNA, 25 bp, Homo sapien
ctctggcttgatgctatgagatttt

SEQ ID NO: 3050160 - DNA, 25 bp, Homo sapien
tctggcttgatgctatgagattttt

SEQ ID NO: 3050161 - DNA, 25 bp, Homo sapien
cttgtctcggtctttgtcccggtct

SEQ ID NO: 3050162 - DNA, 25 bp, Homo sapien
cggtctcggtccctatctttgtctt

SEQ ID NO: 3050163 - DNA, 25 bp, Homo sapien
ccggtctcggtccctatctttgtct

SEQ ID NO: 3050164 - DNA, 25 bp, Homo sapien
tgtctcggtctttgtcccggtctcg

SEQ ID NO: 3050165 - DNA, 25 bp, Homo sapien
aagatttctctgctatggaggagcc

SEQ ID NO: 3050166 - DNA, 25 bp, Homo sapien
gctgtattctggaagtggtcggata

SEQ ID NO: 3050167 - DNA, 25 bp, Homo sapien
tctgagctgggactattctgataag

SEQ ID NO: 3050168 - DNA, 25 bp, Homo sapien
gaagtggtcggataccatcgtctga

SEQ ID NO: 3050169 - DNA, 25 bp, Homo sapien
gaagaatccactgaactcccggagg

SEQ ID NO: 3050170 - DNA, 25 bp, Homo sapien
ttttctgggacaacgagcctgagga

SEQ ID NO: 3050171 - DNA, 25 bp, Homo sapien
ttgccggccatcgaagagacaggtg

SEQ ID NO: 3050172 - DNA, 25 bp, Homo sapien
tctgagatcttcctgcactgcctgg

SEQ ID NO: 3050173 - DNA, 25 bp, Homo sapien
tagccctcatcgtcacagggatgga

SEQ ID NO: 3050174 - DNA, 25 bp, Homo sapien
ttcaactgtctctgcaatgagggac

SEQ ID NO: 3050175 - DNA, 25 bp, Homo sapien
caccatgtcttcaactgtctctgca

SEQ ID NO: 3050176 - DNA, 25 bp, Homo sapien
ttgaatggtttcagctttcctccga

SEQ ID NO: 3050177 - DNA, 25 bp, Homo sapien
tcaagcaattctctgcctcagcctc

SEQ ID NO: 3050178 - DNA, 25 bp, Homo sapien
tgatcttggcttaccgcaacttccg

SEQ ID NO: 3050179 - DNA, 25 bp, Homo sapien
cctcccaggttcaagcaattctctg

SEQ ID NO: 3050180 - DNA, 25 bp, Homo sapien
acacccagccagcaaatttttcttt

SEQ ID NO: 3050181 - DNA, 25 bp, Homo sapien
tagagtttacagctcacatgtgttg

SEQ ID NO: 3050182 - DNA, 25 bp, Homo sapien
gacagccctttgtagagtttacagc

SEQ ID NO: 3050183 - DNA, 25 bp, Homo sapien
cagtgcatccgacagccctttgtag

SEQ ID NO: 3050184 - DNA, 25 bp, Homo sapien
gttgagtcctgcacatccattacca

SEQ ID NO: 3050185 - DNA, 25 bp, Homo sapien
tgaaaagatacgctgaaacgagact

SEQ ID NO: 3050186 - DNA, 25 bp, Homo sapien
accagggagtcattcacagggtgct

SEQ ID NO: 3050187 - DNA, 25 bp, Homo sapien
cacacaccagggagtcattcacagg

SEQ ID NO: 3050188 - DNA, 25 bp, Homo sapien
ggtgctgaaaagatacgctgaaacg

SEQ ID NO: 3050189 - DNA, 25 bp, Homo sapien
gagaggacacacttcaaattggaga

SEQ ID NO: 3050190 - DNA, 25 bp, Homo sapien
agggttccctgtagacttcggccat

SEQ ID NO: 3050191 - DNA, 25 bp, Homo sapien
gatttaggataagaggaactcggcc

SEQ ID NO: 3050192 - DNA, 25 bp, Homo sapien
cttgttgaggaaatagcagtgctgc

SEQ ID NO: 3050193 - DNA, 25 bp, Homo sapien
tccaatgagggtgttataggccact

SEQ ID NO: 3050194 - DNA, 25 bp, Homo sapien
aactgagtgatcagttcatacaggg

SEQ ID NO: 3050195 - DNA, 25 bp, Homo sapien
catacaggggtgcataagttggttg

SEQ ID NO: 3050196 - DNA, 25 bp, Homo sapien
tctcatgttgtgattcaaaggtatg

SEQ ID NO: 3050197 - DNA, 25 bp, Homo sapien
tcctttgatagctcaaactgagtga

SEQ ID NO: 3050198 - DNA, 25 bp, Homo sapien
tgctctagatactgggattggctgg

SEQ ID NO: 3050199 - DNA, 25 bp, Homo sapien
ggcaggaagatcaacactgttggca

SEQ ID NO: 3050200 - DNA, 25 bp, Homo sapien
gaacaaatgctctagatactgggat

SEQ ID NO: 3050201 - DNA, 25 bp, Homo sapien
ttctgaacaaatgctctagatactg

SEQ ID NO: 3050202 - DNA, 25 bp, Homo sapien
tgtacacagcagatgttccttcaat

SEQ ID NO: 3050203 - DNA, 25 bp, Homo sapien
catttattgtcaactggatgtgacc

SEQ ID NO: 3050204 - DNA, 25 bp, Homo sapien
gatgtgaccccataattaatggtgc

SEQ ID NO: 3050205 - DNA, 25 bp, Homo sapien
caattgggagtttgtacacagcaga

SEQ ID NO: 3050206 - DNA, 25 bp, Homo sapien
gaaattaaaggcaagctgggcaccg

SEQ ID NO: 3050207 - DNA, 25 bp, Homo sapien
caaactcattagagaatagcaaacc

SEQ ID NO: 3050208 - DNA, 25 bp, Homo sapien
tgcaaatggtaaggtcaacaaactc

SEQ ID NO: 3050209 - DNA, 25 bp, Homo sapien
aggtgttgtgtgtataaggtgcaaa

SEQ ID NO: 3050210 - DNA, 25 bp, Homo sapien
catgcaaaatgatgggagatgcagt

SEQ ID NO: 3050211 - DNA, 25 bp, Homo sapien
gagacatagtacttcaggttcatta

SEQ ID NO: 3050212 - DNA, 25 bp, Homo sapien
catccagtaggtcagaaggagagac

SEQ ID NO: 3050213 - DNA, 25 bp, Homo sapien
cattattctcatgcaaaatgatggg

SEQ ID NO: 3050214 - DNA, 25 bp, Homo sapien
caagggaccagcattagttgctttc

SEQ ID NO: 3050215 - DNA, 25 bp, Homo sapien
tatccaagggaccagcattagttgc

SEQ ID NO: 3050216 - DNA, 25 bp, Homo sapien
gtgtgagatagccaacacttccatg

SEQ ID NO: 3050217 - DNA, 25 bp, Homo sapien
agaatcttatccaagggaccagcat

SEQ ID NO: 3050218 - DNA, 25 bp, Homo sapien
ctgtaagacaagtgatctatgtttg

SEQ ID NO: 3050219 - DNA, 25 bp, Homo sapien
gattggagagccaagtacattttag

SEQ ID NO: 3050220 - DNA, 25 bp, Homo sapien
ggattggagagccaagtacatttta

SEQ ID NO: 3050221 - DNA, 25 bp, Homo sapien
aggattggagagccaagtacatttt

SEQ ID NO: 3050222 - DNA, 25 bp, Homo sapien
attggagagccaagtacattttagt

SEQ ID NO: 3050223 - DNA, 25 bp, Homo sapien
atacagacacaaacagtgacataga

SEQ ID NO: 3050224 - DNA, 25 bp, Homo sapien
gaaaaatatgaccaagcggggtggc

SEQ ID NO: 3050225 - DNA, 25 bp, Homo sapien
catagaaggcctaaagagcaagtct

SEQ ID NO: 3050226 - DNA, 25 bp, Homo sapien
gaagaacatgagttaatagttgaaa

SEQ ID NO: 3050227 - DNA, 25 bp, Homo sapien
acagattaacaaggcccttaaggtg

SEQ ID NO: 3050228 - DNA, 25 bp, Homo sapien
tgtcccctggaaggttatacagatt

SEQ ID NO: 3050229 - DNA, 25 bp, Homo sapien
gttatacagattaacaaggccctta

SEQ ID NO: 3050230 - DNA, 25 bp, Homo sapien
taacaaggcccttaaggtgcttaga

SEQ ID NO: 3050231 - DNA, 25 bp, Homo sapien
cttagctgctgtacaagctccggac

SEQ ID NO: 3050232 - DNA, 25 bp, Homo sapien
ttagctgctgtacaagctccggaca

SEQ ID NO: 3050233 - DNA, 25 bp, Homo sapien
gctgctgtacaagctccggacagct

SEQ ID NO: 3050234 - DNA, 25 bp, Homo sapien
tagctgctgtacaagctccggacag

SEQ ID NO: 3050235 - DNA, 25 bp, Homo sapien
tgtcctgcaggatctaactgcactt

SEQ ID NO: 3050236 - DNA, 25 bp, Homo sapien
ggtgagccacttttacatcacaaag

SEQ ID NO: 3050237 - DNA, 25 bp, Homo sapien
gatgtaacattcagtgccactggca

SEQ ID NO: 3050238 - DNA, 25 bp, Homo sapien
tgcacttccacatagaacatatctg

SEQ ID NO: 3050239 - DNA, 25 bp, Homo sapien
tgtcttgctatggactccaaacgat

SEQ ID NO: 3050240 - DNA, 25 bp, Homo sapien
gctatggactccaaacgatcagtca

SEQ ID NO: 3050241 - DNA, 25 bp, Homo sapien
ccaaacgatcagtcattgctggtaa

SEQ ID NO: 3050242 - DNA, 25 bp, Homo sapien
gactccaaacgatcagtcattgctg

SEQ ID NO: 3050243 - DNA, 25 bp, Homo sapien
aatgtctccaaacagctgaccaaat

SEQ ID NO: 3050244 - DNA, 25 bp, Homo sapien
atgttgatgccctccagaactcatc

SEQ ID NO: 3050245 - DNA, 25 bp, Homo sapien
tttgagagccttctgcaatgtctcc

SEQ ID NO: 3050246 - DNA, 25 bp, Homo sapien
ccaaacagctgaccaaatgttgatg

SEQ ID NO: 3050247 - DNA, 25 bp, Homo sapien
gacgcacaagcttaatggtttcact

SEQ ID NO: 3050248 - DNA, 25 bp, Homo sapien
ttttggttaaattttgcatggagcc

SEQ ID NO: 3050249 - DNA, 25 bp, Homo sapien
caagcttaatggtttcactccaggg

SEQ ID NO: 3050250 - DNA, 25 bp, Homo sapien
aaattttgcatggagccgttccagg

SEQ ID NO: 3050251 - DNA, 25 bp, Homo sapien
cagaactatgcccaaaatgctaagg

SEQ ID NO: 3050252 - DNA, 25 bp, Homo sapien
caaggactctaatctgcaaagctca

SEQ ID NO: 3050253 - DNA, 25 bp, Homo sapien
gcatcttagccggagtgtggaactt

SEQ ID NO: 3050254 - DNA, 25 bp, Homo sapien
caacactttttgagcgactattacg

SEQ ID NO: 3050255 - DNA, 25 bp, Homo sapien
cccatcgccctaaagtcgaagctct

SEQ ID NO: 3050256 - DNA, 25 bp, Homo sapien
ttgagagtccccatcgccctaaagt

SEQ ID NO: 3050257 - DNA, 25 bp, Homo sapien
agttgagagtccccatcgccctaaa

SEQ ID NO: 3050258 - DNA, 25 bp, Homo sapien
gagagtccccatcgccctaaagtcg

SEQ ID NO: 3050259 - DNA, 25 bp, Homo sapien
cctcggtttccccctgagctttcat

SEQ ID NO: 3050260 - DNA, 25 bp, Homo sapien
gaggagaagctagatccgccacaaa

SEQ ID NO: 3050261 - DNA, 25 bp, Homo sapien
gttggctcgggatcccgggacgcag

SEQ ID NO: 3050262 - DNA, 25 bp, Homo sapien
tagatccgccacaaaaggataagcc

SEQ ID NO: 3050263 - DNA, 25 bp, Homo sapien
tccgccacaaaaggataagcccttc

SEQ ID NO: 3050264 - DNA, 25 bp, Homo sapien
aagtccccggcggcaagaagagaag

SEQ ID NO: 3050265 - DNA, 25 bp, Homo sapien
agaagagaagggtgctcgaggccgc

SEQ ID NO: 3050266 - DNA, 25 bp, Homo sapien
caaaattcgcgagataaaccgtggt

SEQ ID NO: 3050267 - DNA, 25 bp, Homo sapien
tcttcccgggaaggatcaatctgaa

SEQ ID NO: 3050268 - DNA, 25 bp, Homo sapien
tctgtattgttacggttttagtgta

SEQ ID NO: 3050269 - DNA, 25 bp, Homo sapien
gataatcttttctgtattgttacgg

SEQ ID NO: 3050270 - DNA, 25 bp, Homo sapien
tcacgaatttgtgtcatctttgtgc

SEQ ID NO: 3050271 - DNA, 25 bp, Homo sapien
catgataatcttttctgtattgtta

SEQ ID NO: 3050272 - DNA, 25 bp, Homo sapien
ggattacgaacttgggccaccgcac

SEQ ID NO: 3050273 - DNA, 25 bp, Homo sapien
tagctaggactagacaccactcctg

SEQ ID NO: 3050274 - DNA, 25 bp, Homo sapien
ccgcacccagcgaatgtcattttgg

SEQ ID NO: 3050275 - DNA, 25 bp, Homo sapien
ttttgggtcttctctatgttaccag

SEQ ID NO: 3050276 - DNA, 25 bp, Homo sapien
tgagagtatctggaaaggtgtaacc

SEQ ID NO: 3050277 - DNA, 25 bp, Homo sapien
tggatcttgcatgccccactgagga

SEQ ID NO: 3050278 - DNA, 25 bp, Homo sapien
cacataatggccaagagatgaagct

SEQ ID NO: 3050279 - DNA, 25 bp, Homo sapien
taaacaggtcagtatttctagagca

SEQ ID NO: 3050280 - DNA, 25 bp, Homo sapien
gagtggcctggctgatttgaataaa

SEQ ID NO: 3050281 - DNA, 25 bp, Homo sapien
tttggaaaaaatcgttgagatgccc

SEQ ID NO: 3050282 - DNA, 25 bp, Homo sapien
cataaagcaggttgtagaacgtggc

SEQ ID NO: 3050283 - DNA, 25 bp, Homo sapien
tttgacaaaagatacgcccttctcc

SEQ ID NO: 3050284 - DNA, 25 bp, Homo sapien
tactgacatgctattggtaaatcgc

SEQ ID NO: 3050285 - DNA, 25 bp, Homo sapien
ttaaagaacgtgagcctgggatact

SEQ ID NO: 3050286 - DNA, 25 bp, Homo sapien
tcccctgttaatgagatatagctag

SEQ ID NO: 3050287 - DNA, 25 bp, Homo sapien
cagtgtgtccagttagatttactag

SEQ ID NO: 3050288 - DNA, 25 bp, Homo sapien
gattctgttcatgagtgggaggcaa

SEQ ID NO: 3050289 - DNA, 25 bp, Homo sapien
gcagggcagttagcacaaatttgca

SEQ ID NO: 3050290 - DNA, 25 bp, Homo sapien
aatctatacgtttaaagcagggcag

SEQ ID NO: 3050291 - DNA, 25 bp, Homo sapien
ggcaaaactggtttgaccgtgatca

SEQ ID NO: 3050292 - DNA, 25 bp, Homo sapien
catgttattacatgcagagtcagca

SEQ ID NO: 3050293 - DNA, 25 bp, Homo sapien
taagaggctgtttagacccaaagga

SEQ ID NO: 3050294 - DNA, 25 bp, Homo sapien
atttcccgatgcgttgccaatccag

SEQ ID NO: 3050295 - DNA, 25 bp, Homo sapien
caaaagagttgagcttcatgtaccc

SEQ ID NO: 3050296 - DNA, 25 bp, Homo sapien
ggtcttcccgaatgagcccattagc

SEQ ID NO: 3050297 - DNA, 25 bp, Homo sapien
catttattaattgggctgggactgg

SEQ ID NO: 3050298 - DNA, 25 bp, Homo sapien
cccagagccataaagtgggagcccc

SEQ ID NO: 3050299 - DNA, 25 bp, Homo sapien
cgggagcccttagcttctgattgca

SEQ ID NO: 3050300 - DNA, 25 bp, Homo sapien
tttttgagatggagtcttgctctgt

SEQ ID NO: 3050301 - DNA, 25 bp, Homo sapien
cacccagactgcagttcagtggcac

SEQ ID NO: 3050302 - DNA, 25 bp, Homo sapien
acccagactgcagttcagtggcacg

SEQ ID NO: 3050303 - DNA, 25 bp, Homo sapien
ctcatgatccgcgcacctcggcctc

SEQ ID NO: 3050304 - DNA, 25 bp, Homo sapien
cttacacagggaccatgccaatctt

SEQ ID NO: 3050305 - DNA, 25 bp, Homo sapien
atcttctctgtatcattccaatttt

SEQ ID NO: 3050306 - DNA, 25 bp, Homo sapien
catccttacacagggaccatgccaa

SEQ ID NO: 3050307 - DNA, 25 bp, Homo sapien
tccttacacagggaccatgccaatc

SEQ ID NO: 3050308 - DNA, 25 bp, Homo sapien
tccttggaagacgaatgcattttca

SEQ ID NO: 3050309 - DNA, 25 bp, Homo sapien
cttgatgaacattgcggtaataacc

SEQ ID NO: 3050310 - DNA, 25 bp, Homo sapien
catgactaatggctagagcatgtaa

SEQ ID NO: 3050311 - DNA, 25 bp, Homo sapien
tattaatgtcttctcggctcagctt

SEQ ID NO: 3050312 - DNA, 25 bp, Homo sapien
gcctgggccactcttgacttccagg

SEQ ID NO: 3050313 - DNA, 25 bp, Homo sapien
ccaaaacagagacaacatacaggcg

SEQ ID NO: 3050314 - DNA, 25 bp, Homo sapien
cagagacaacatacaggcgtatgca

SEQ ID NO: 3050315 - DNA, 25 bp, Homo sapien
gggccactcttgacttccaggttgg

SEQ ID NO: 3050316 - DNA, 25 bp, Homo sapien
gacggtggacttgaggtcgaggagg

SEQ ID NO: 3050317 - DNA, 25 bp, Homo sapien
tccattttccggttcttgatgacgg

SEQ ID NO: 3050318 - DNA, 25 bp, Homo sapien
tatatctccattttccggttcttga

SEQ ID NO: 3050319 - DNA, 25 bp, Homo sapien
cggttcttgatgacggtggacttga

SEQ ID NO: 3050320 - DNA, 25 bp, Homo sapien
taaaggcggagtttgctaaggcctg

SEQ ID NO: 3050321 - DNA, 25 bp, Homo sapien
gagtctatgatagtgtgtgtcccaa

SEQ ID NO: 3050322 - DNA, 25 bp, Homo sapien
caatcctgagggttgtaaaggcgga

SEQ ID NO: 3050323 - DNA, 25 bp, Homo sapien
gggttacagagaagccataagcaaa

SEQ ID NO: 3050324 - DNA, 25 bp, Homo sapien
ctgcttgatcctgaaaatgtctggg

SEQ ID NO: 3050325 - DNA, 25 bp, Homo sapien
ccaggtgattggagcagaggaacac

SEQ ID NO: 3050326 - DNA, 25 bp, Homo sapien
attggagcagaggaacacagaatcc

SEQ ID NO: 3050327 - DNA, 25 bp, Homo sapien
ggctgcttgatcctgaaaatgtctg

SEQ ID NO: 3050328 - DNA, 25 bp, Homo sapien
agtccttgtgtccttatcaaaggca

SEQ ID NO: 3050329 - DNA, 25 bp, Homo sapien
ttatcaaaggcaacatctgtcccct

SEQ ID NO: 3050330 - DNA, 25 bp, Homo sapien
aggcttcaggccaagtccttgtgtc

SEQ ID NO: 3050331 - DNA, 25 bp, Homo sapien
gcaggacaactcaaggcttcaggcc

SEQ ID NO: 3050332 - DNA, 25 bp, Homo sapien
catgcgttgttttattgctggcaaa

SEQ ID NO: 3050333 - DNA, 25 bp, Homo sapien
ctgccaagcggccttcttttattca

SEQ ID NO: 3050334 - DNA, 25 bp, Homo sapien
tattcatgcgttgttttattgctgg

SEQ ID NO: 3050335 - DNA, 25 bp, Homo sapien
gcggccttcttttattcatgcgttg

SEQ ID NO: 3050336 - DNA, 25 bp, Homo sapien
cagtaacacacatggtgacatccac

SEQ ID NO: 3050337 - DNA, 25 bp, Homo sapien
agcagccctcagaatctggatgtgc

SEQ ID NO: 3050338 - DNA, 25 bp, Homo sapien
ctggatgtgctgtccccattggagg

SEQ ID NO: 3050339 - DNA, 25 bp, Homo sapien
cccattggagggtccacagtaacac

SEQ ID NO: 3050340 - DNA, 25 bp, Homo sapien
gacagaactaggatttgaaaccaga

SEQ ID NO: 3050341 - DNA, 25 bp, Homo sapien
tcagggagattgagtcacgtgccca

SEQ ID NO: 3050342 - DNA, 25 bp, Homo sapien
tgcccaatgtcacgtagctggtaaa

SEQ ID NO: 3050343 - DNA, 25 bp, Homo sapien
taatgcctgtattctatagacgagg

SEQ ID NO: 3050344 - DNA, 25 bp, Homo sapien
caggctgcggcttcattatcctgat

SEQ ID NO: 3050345 - DNA, 25 bp, Homo sapien
cgtctggcggacttggcaccggccc

SEQ ID NO: 3050346 - DNA, 25 bp, Homo sapien
cgcagtgcgtggcaggctgcggctt

SEQ ID NO: 3050347 - DNA, 25 bp, Homo sapien
gcggcttcattatcctgattgattc

SEQ ID NO: 3050348 - DNA, 25 bp, Homo sapien
cagtgtctatctcagggcctgtttc

SEQ ID NO: 3050349 - DNA, 25 bp, Homo sapien
tgtaaattcattattcttgcaaccc

SEQ ID NO: 3050350 - DNA, 25 bp, Homo sapien
tctggcaacttcagtgtctatctca

SEQ ID NO: 3050351 - DNA, 25 bp, Homo sapien
attcttgcaacccacattgactggg

SEQ ID NO: 3050352 - DNA, 25 bp, Homo sapien
tgccaggcaagtcgcaggtgagccc

SEQ ID NO: 3050353 - DNA, 25 bp, Homo sapien
tctgccaggcaagtcgcaggtgagc

SEQ ID NO: 3050354 - DNA, 25 bp, Homo sapien
catctgccaggcaagtcgcaggtga

SEQ ID NO: 3050355 - DNA, 25 bp, Homo sapien
caggcaagtcgcaggtgagccccca

SEQ ID NO: 3050356 - DNA, 25 bp, Homo sapien
aaaacataattaggaggctgccagc

SEQ ID NO: 3050357 - DNA, 25 bp, Homo sapien
aacataattaggaggctgccagcag

SEQ ID NO: 3050358 - DNA, 25 bp, Homo sapien
aaagatttatagtcaagtaaaacat

SEQ ID NO: 3050359 - DNA, 25 bp, Homo sapien
atgaaaagatttatagtcaagtaaa

SEQ ID NO: 3050360 - DNA, 25 bp, Homo sapien
tactatgctagaagcgttggctaca

SEQ ID NO: 3050361 - DNA, 25 bp, Homo sapien
tctcattgggaaataacctacccag

SEQ ID NO: 3050362 - DNA, 25 bp, Homo sapien
caaatagccagttaggaatgggatg

SEQ ID NO: 3050363 - DNA, 25 bp, Homo sapien
aatagtgaccacttaatgaaaactc

SEQ ID NO: 3050364 - DNA, 25 bp, Homo sapien
gtgccggctggcacacatgccacat

SEQ ID NO: 3050365 - DNA, 25 bp, Homo sapien
cacgcaatgcacttcgggtgtccga

SEQ ID NO: 3050366 - DNA, 25 bp, Homo sapien
taaaatcgcaaaacgcggagactgg

SEQ ID NO: 3050367 - DNA, 25 bp, Homo sapien
taaaaaacagcatgacgcacaacgg

SEQ ID NO: 3050368 - DNA, 25 bp, Homo sapien
gacgggagtttcatcttcgctacaa

SEQ ID NO: 3050369 - DNA, 25 bp, Homo sapien
ccccggtcgtggtgaaggtgcatat

SEQ ID NO: 3050370 - DNA, 25 bp, Homo sapien
tatgaaaaaacgcattgagctcctc

SEQ ID NO: 3050371 - DNA, 25 bp, Homo sapien
tagtggtagcttttctcgtggtcgg

SEQ ID NO: 3050372 - DNA, 25 bp, Homo sapien
acaagagattctccgagtggacgcc

SEQ ID NO: 3050373 - DNA, 25 bp, Homo sapien
agacagccggccaccagattggtgg

SEQ ID NO: 3050374 - DNA, 25 bp, Homo sapien
aagttgcgagagttgagctgcagac

SEQ ID NO: 3050375 - DNA, 25 bp, Homo sapien
atacagcgtctcgtaggcggcgcag

SEQ ID NO: 3050376 - DNA, 25 bp, Homo sapien
ccttgctccgtgaggaagttgcgag

SEQ ID NO: 3050377 - DNA, 25 bp, Homo sapien
tccgagagcgcccagatatagttct

SEQ ID NO: 3050378 - DNA, 25 bp, Homo sapien
ttctgccgccgaagcttggagcgct

SEQ ID NO: 3050379 - DNA, 25 bp, Homo sapien
taggacactaggtctggccgcttgc

SEQ ID NO: 3050380 - DNA, 25 bp, Homo sapien
caagcgcgccttggtcatcttgcgc

SEQ ID NO: 3050381 - DNA, 25 bp, Homo sapien
tctccccccagctcgccttcctcct

SEQ ID NO: 3050382 - DNA, 25 bp, Homo sapien
cccccagctcgccttcctccttgac

SEQ ID NO: 3050383 - DNA, 25 bp, Homo sapien
cctctccccccagctcgccttcctc

SEQ ID NO: 3050384 - DNA, 25 bp, Homo sapien
tccccccagctcgccttcctccttg

SEQ ID NO: 3050385 - DNA, 25 bp, Homo sapien
tccgtcccctcttctccacggagag

SEQ ID NO: 3050386 - DNA, 25 bp, Homo sapien
gccgtcgccccagctggcgaacttg

SEQ ID NO: 3050387 - DNA, 25 bp, Homo sapien
gtggcggcgcgtcgcccttgtcgct

SEQ ID NO: 3050388 - DNA, 25 bp, Homo sapien
ttgtcgctcctcggctcgtcgtctt

SEQ ID NO: 3050389 - DNA, 25 bp, Homo sapien
caatttgcaacttggctgcgcgccg

SEQ ID NO: 3050390 - DNA, 25 bp, Homo sapien
tgaaagcccgttctctcctggcggt

SEQ ID NO: 3050391 - DNA, 25 bp, Homo sapien
caggaaggaggtatttgaggaccct

SEQ ID NO: 3050392 - DNA, 25 bp, Homo sapien
ggtggcaggctttttgggacaacca

SEQ ID NO: 3050393 - DNA, 25 bp, Homo sapien
taaatagagacacacatcaggaggc

SEQ ID NO: 3050394 - DNA, 25 bp, Homo sapien
tcacagcctggtgtagacagaccct

SEQ ID NO: 3050395 - DNA, 25 bp, Homo sapien
tggccaattctatgctccctcaggg

SEQ ID NO: 3050396 - DNA, 25 bp, Homo sapien
ggcccgagccccataggtagatgtt

SEQ ID NO: 3050397 - DNA, 25 bp, Homo sapien
ggtctgcaaggcgaatcccatctct

SEQ ID NO: 3050398 - DNA, 25 bp, Homo sapien
tcctgggtctgcaaggcgaatccca

SEQ ID NO: 3050399 - DNA, 25 bp, Homo sapien
ctgcaaggcgaatcccatctctggc

SEQ ID NO: 3050400 - DNA, 25 bp, Homo sapien
ctgggtctgcaaggcgaatcccatc

SEQ ID NO: 3050401 - DNA, 25 bp, Homo sapien
agggcaggaatttggagatccttga

SEQ ID NO: 3050402 - DNA, 25 bp, Homo sapien
gcaggaatttggagatccttgaggg

SEQ ID NO: 3050403 - DNA, 25 bp, Homo sapien
caggaatttggagatccttgaggga

SEQ ID NO: 3050404 - DNA, 25 bp, Homo sapien
ggaagggcaggaatttggagatcct

SEQ ID NO: 3050405 - DNA, 25 bp, Homo sapien
ttctcttcaacttcctccgcctgct

SEQ ID NO: 3050406 - DNA, 25 bp, Homo sapien
aggattctcttcaacttcctccgcc

SEQ ID NO: 3050407 - DNA, 25 bp, Homo sapien
gattctcttcaacttcctccgcctg

SEQ ID NO: 3050408 - DNA, 25 bp, Homo sapien
cgccaggattctcttcaacttcctc

SEQ ID NO: 3050409 - DNA, 25 bp, Homo sapien
tttcagcaggctcagaaccccctcc

SEQ ID NO: 3050410 - DNA, 25 bp, Homo sapien
tcagcaggctcagaaccccctcctt

SEQ ID NO: 3050411 - DNA, 25 bp, Homo sapien
ctttcagcaggctcagaaccccctc

SEQ ID NO: 3050412 - DNA, 25 bp, Homo sapien
agcaggctcagaaccccctccttct

SEQ ID NO: 3050413 - DNA, 25 bp, Homo sapien
cccacgacattcttgccctgcatgg

SEQ ID NO: 3050414 - DNA, 25 bp, Homo sapien
cagcggtggggatcgccgttgaccc

SEQ ID NO: 3050415 - DNA, 25 bp, Homo sapien
ggcagcggtggggatcgccgttgac

SEQ ID NO: 3050416 - DNA, 25 bp, Homo sapien
gcagcggtggggatcgccgttgacc

SEQ ID NO: 3050417 - DNA, 25 bp, Homo sapien
gggcagcggtggggatcgccgttga

SEQ ID NO: 3050418 - DNA, 25 bp, Homo sapien
tgggtgaatgggagcaagttggaga

SEQ ID NO: 3050419 - DNA, 25 bp, Homo sapien
cagtttctgggtgaatgggagcaag

SEQ ID NO: 3050420 - DNA, 25 bp, Homo sapien
gtttctgggtgaatgggagcaagtt

SEQ ID NO: 3050421 - DNA, 25 bp, Homo sapien
ttctgggtgaatgggagcaagttgg

SEQ ID NO: 3050422 - DNA, 25 bp, Homo sapien
ccaggtgccggggactgaggctacc

SEQ ID NO: 3050423 - DNA, 25 bp, Homo sapien
agggaatggaagcagccgactggac

SEQ ID NO: 3050424 - DNA, 25 bp, Homo sapien
ttggagtgtgtgtaaggctggtgga

SEQ ID NO: 3050425 - DNA, 25 bp, Homo sapien
cagctggcattcttcgggggcagcc

SEQ ID NO: 3050426 - DNA, 25 bp, Homo sapien
gagggcacatatactgctgtactcg

SEQ ID NO: 3050427 - DNA, 25 bp, Homo sapien
tgtactcgtttgtgccaccagaggg

SEQ ID NO: 3050428 - DNA, 25 bp, Homo sapien
cttccgagaactgtccaaaccggcg

SEQ ID NO: 3050429 - DNA, 25 bp, Homo sapien
gcacatcgatctctactgcttccga

SEQ ID NO: 3050430 - DNA, 25 bp, Homo sapien
agaggagcccactgcagtgcgtgca

SEQ ID NO: 3050431 - DNA, 25 bp, Homo sapien
tgcaagcgatcttccacgcgtccat

SEQ ID NO: 3050432 - DNA, 25 bp, Homo sapien
gcccactgcagtgcgtgcaagcgat

SEQ ID NO: 3050433 - DNA, 25 bp, Homo sapien
gcagtgcgtgcaagcgatcttccac

SEQ ID NO: 3050434 - DNA, 25 bp, Homo sapien
ccccatagcaaaaaatgagtgctgg

SEQ ID NO: 3050435 - DNA, 25 bp, Homo sapien
gctctgccccggaggtgacatttga

SEQ ID NO: 3050436 - DNA, 25 bp, Homo sapien
aatgatcagcagagtagaggcagcg

SEQ ID NO: 3050437 - DNA, 25 bp, Homo sapien
cgccagagttctccccaaaggaagg

SEQ ID NO: 3050438 - DNA, 25 bp, Homo sapien
tggtgttgggagtagccttggcctg

SEQ ID NO: 3050439 - DNA, 25 bp, Homo sapien
tccccatcgcctgtttccagagctg

SEQ ID NO: 3050440 - DNA, 25 bp, Homo sapien
agcccagcttttccgtagcactgtg

SEQ ID NO: 3050441 - DNA, 25 bp, Homo sapien
cactgtggagatgaacctgtcatgg

SEQ ID NO: 3050442 - DNA, 25 bp, Homo sapien
agcagagccagcttcttcagagcca

SEQ ID NO: 3050443 - DNA, 25 bp, Homo sapien
gttcaactgagcagatgactggtca

SEQ ID NO: 3050444 - DNA, 25 bp, Homo sapien
tgggcgaatctacctctctcagctt

SEQ ID NO: 3050445 - DNA, 25 bp, Homo sapien
gcaagtttaaagtctctagtccagg

SEQ ID NO: 3050446 - DNA, 25 bp, Homo sapien
acaaaaggtactggtgagggcaaga

SEQ ID NO: 3050447 - DNA, 25 bp, Homo sapien
tggaacgctctaggcagaagaagct

SEQ ID NO: 3050448 - DNA, 25 bp, Homo sapien
gaggagtggccctgatccaggaaaa

SEQ ID NO: 3050449 - DNA, 25 bp, Homo sapien
gctttgtagtttgcccagagttggg

SEQ ID NO: 3050450 - DNA, 25 bp, Homo sapien
cagtatcaaaagaagctagcgcagg

SEQ ID NO: 3050451 - DNA, 25 bp, Homo sapien
gaatcgccgtgaaccttggctggcc

SEQ ID NO: 3050452 - DNA, 25 bp, Homo sapien
cctggaacagtaagaccctctggga

SEQ ID NO: 3050453 - DNA, 25 bp, Homo sapien
ttggctggccaaagaacaagcatcc

SEQ ID NO: 3050454 - DNA, 25 bp, Homo sapien
tcagtccagcttgaacttgtcctct

SEQ ID NO: 3050455 - DNA, 25 bp, Homo sapien
aggtacaggctgtcatcttccagaa

SEQ ID NO: 3050456 - DNA, 25 bp, Homo sapien
tctgattccttcagcaggtacaggc

SEQ ID NO: 3050457 - DNA, 25 bp, Homo sapien
ttcagcaggtacaggctgtcatctt

SEQ ID NO: 3050458 - DNA, 25 bp, Homo sapien
cacgcacttgcgcacgtgaggcagc

SEQ ID NO: 3050459 - DNA, 25 bp, Homo sapien
gatgtgccagatggcatgggcatcc

SEQ ID NO: 3050460 - DNA, 25 bp, Homo sapien
ccagaagagcggtgggaagtcaagc

SEQ ID NO: 3050461 - DNA, 25 bp, Homo sapien
gaagtcaagcagctcgagcagggac

SEQ ID NO: 3050462 - DNA, 25 bp, Homo sapien
aggagagcccggaaggcactgacca

SEQ ID NO: 3050463 - DNA, 25 bp, Homo sapien
ctcaggtaggagacgtgcacggtca

SEQ ID NO: 3050464 - DNA, 25 bp, Homo sapien
gccatagtcgaagcggatgaggctc

SEQ ID NO: 3050465 - DNA, 25 bp, Homo sapien
gttggccaccaggttgtagccatag

SEQ ID NO: 3050466 - DNA, 25 bp, Homo sapien
tccccccaacattggtgcatggccc

SEQ ID NO: 3050467 - DNA, 25 bp, Homo sapien
cccagggttcgattttgcccctgca

SEQ ID NO: 3050468 - DNA, 25 bp, Homo sapien
tgccccaccgtccagggttgctcag

SEQ ID NO: 3050469 - DNA, 25 bp, Homo sapien
gggagactagtgaagaaggccccca

SEQ ID NO: 3050470 - DNA, 25 bp, Homo sapien
cagcacaggtagattgagtgtagga

SEQ ID NO: 3050471 - DNA, 25 bp, Homo sapien
caggtagattgagtgtaggatgaca

SEQ ID NO: 3050472 - DNA, 25 bp, Homo sapien
ctgacgcagcacaggtagattgagt

SEQ ID NO: 3050473 - DNA, 25 bp, Homo sapien
gtaggatgacagtggaggcacagaa

SEQ ID NO: 3050474 - DNA, 25 bp, Homo sapien
ggaccagaaccatgcattgagggac

SEQ ID NO: 3050475 - DNA, 25 bp, Homo sapien
accagaaccatgcattgagggacac

SEQ ID NO: 3050476 - DNA, 25 bp, Homo sapien
tggaccagaaccatgcattgaggga

SEQ ID NO: 3050477 - DNA, 25 bp, Homo sapien
gaccagaaccatgcattgagggaca

SEQ ID NO: 3050478 - DNA, 25 bp, Homo sapien
tagccaagctccctagttactcaat

SEQ ID NO: 3050479 - DNA, 25 bp, Homo sapien
ctgggaaccagttccggtatagcca

SEQ ID NO: 3050480 - DNA, 25 bp, Homo sapien
gaaccagttccggtatagccaagct

SEQ ID NO: 3050481 - DNA, 25 bp, Homo sapien
tactcaattgctaagacaacagccc

SEQ ID NO: 3050482 - DNA, 25 bp, Homo sapien
aatgcaagccctacagccagactgc

SEQ ID NO: 3050483 - DNA, 25 bp, Homo sapien
atttgggaggtagtggtatcattaa

SEQ ID NO: 3050484 - DNA, 25 bp, Homo sapien
gaggtagtggtatcattaagaatgc

SEQ ID NO: 3050485 - DNA, 25 bp, Homo sapien
tcattaagaatgcaagccctacagc

SEQ ID NO: 3050486 - DNA, 25 bp, Homo sapien
aagagtgtccagtcttcacaatgag

SEQ ID NO: 3050487 - DNA, 25 bp, Homo sapien
acgaggtctgcggaatgcctggcac

SEQ ID NO: 3050488 - DNA, 25 bp, Homo sapien
gaacggagacacctcagctatagga

SEQ ID NO: 3050489 - DNA, 25 bp, Homo sapien
actgaggcctaagaggatgtctgcc

SEQ ID NO: 3050490 - DNA, 25 bp, Homo sapien
ctggccaggccattgagaaacgagg

SEQ ID NO: 3050491 - DNA, 25 bp, Homo sapien
gtgcggtagcggcagagcatcacca

SEQ ID NO: 3050492 - DNA, 25 bp, Homo sapien
ggaggaggctggcacgaaggtgcgg

SEQ ID NO: 3050493 - DNA, 25 bp, Homo sapien
agaaacgaggccacggccgatgccg

SEQ ID NO: 3050494 - DNA, 25 bp, Homo sapien
ggaggtagagcccaacggtgaccca

SEQ ID NO: 3050495 - DNA, 25 bp, Homo sapien
tacttacagtcgtcccgacaggtcc

SEQ ID NO: 3050496 - DNA, 25 bp, Homo sapien
tacactcatacttacagtcgtcccg

SEQ ID NO: 3050497 - DNA, 25 bp, Homo sapien
caacggtgacccacatacactcata

SEQ ID NO: 3050498 - DNA, 25 bp, Homo sapien
tctgccacctaaagtgcggggattg

SEQ ID NO: 3050499 - DNA, 25 bp, Homo sapien
gcctgcctctgccacctaaagtgcg

SEQ ID NO: 3050500 - DNA, 25 bp, Homo sapien
tgccacctaaagtgcggggattgca

SEQ ID NO: 3050501 - DNA, 25 bp, Homo sapien
ctgcctctgccacctaaagtgcggg

SEQ ID NO: 3050502 - DNA, 25 bp, Homo sapien
ggaagtgattcagagcgcccccaga

SEQ ID NO: 3050503 - DNA, 25 bp, Homo sapien
gagcagttctgctcttcgcactgca

SEQ ID NO: 3050504 - DNA, 25 bp, Homo sapien
ttggctggcgggagcggaagtgatt

SEQ ID NO: 3050505 - DNA, 25 bp, Homo sapien
ctgctagactcatgtagattggctg

SEQ ID NO: 3050506 - DNA, 25 bp, Homo sapien
ccctgggagccgctcgccagcgccg

SEQ ID NO: 3050507 - DNA, 25 bp, Homo sapien
ctgggagccgctcgccagcgccgct

SEQ ID NO: 3050508 - DNA, 25 bp, Homo sapien
gctagcaggaccaaccgcgccgcca

SEQ ID NO: 3050509 - DNA, 25 bp, Homo sapien
cagctagcaggaccaaccgcgccgc

SEQ ID NO: 3050510 - DNA, 25 bp, Homo sapien
tccctggctcgccgccgggggagga

SEQ ID NO: 3050511 - DNA, 25 bp, Homo sapien
tctccctggctcgccgccgggggag

SEQ ID NO: 3050512 - DNA, 25 bp, Homo sapien
ctccctggctcgccgccgggggagg

SEQ ID NO: 3050513 - DNA, 25 bp, Homo sapien
ttctccctggctcgccgccggggga

SEQ ID NO: 3050514 - DNA, 25 bp, Homo sapien
ggcattgtctgccagtccgggtttc

SEQ ID NO: 3050515 - DNA, 25 bp, Homo sapien
agagggagggacctacagttacctg

SEQ ID NO: 3050516 - DNA, 25 bp, Homo sapien
ggaatgataacacctgcctcctctg

SEQ ID NO: 3050517 - DNA, 25 bp, Homo sapien
gtaatgggtgaagccaaatctgcca

SEQ ID NO: 3050518 - DNA, 25 bp, Homo sapien
caaaagcgacccattcagagactgt

SEQ ID NO: 3050519 - DNA, 25 bp, Homo sapien
ttttggaaaacagctaggcaccggc

SEQ ID NO: 3050520 - DNA, 25 bp, Homo sapien
tgagagccctttgacgaccagatca

SEQ ID NO: 3050521 - DNA, 25 bp, Homo sapien
tattaccgaggcgaagagtggactg

SEQ ID NO: 3050522 - DNA, 25 bp, Homo sapien
ctggctcttcggatggcctcaatga

SEQ ID NO: 3050523 - DNA, 25 bp, Homo sapien
caggatgacgcagggaggacggctg

SEQ ID NO: 3050524 - DNA, 25 bp, Homo sapien
cacaggatgacgcagggaggacggc

SEQ ID NO: 3050525 - DNA, 25 bp, Homo sapien
cattactggctcttcggatggcctc

SEQ ID NO: 3050526 - DNA, 25 bp, Homo sapien
agaggtcctcccaacgctgtaaata

SEQ ID NO: 3050527 - DNA, 25 bp, Homo sapien
gaggtcctcccaacgctgtaaatac

SEQ ID NO: 3050528 - DNA, 25 bp, Homo sapien
acaggatgatgcactgttggggtag

SEQ ID NO: 3050529 - DNA, 25 bp, Homo sapien
ggaatgacaggatgatgcactgttg

SEQ ID NO: 3050530 - DNA, 25 bp, Homo sapien
accagctgtccatttatctctatct

SEQ ID NO: 3050531 - DNA, 25 bp, Homo sapien
tctcatagggaaagcccccattctc

SEQ ID NO: 3050532 - DNA, 25 bp, Homo sapien
tctccagcttggagaacaccagctg

SEQ ID NO: 3050533 - DNA, 25 bp, Homo sapien
atctttctcatagggaaagccccca

SEQ ID NO: 3050534 - DNA, 25 bp, Homo sapien
ctggtaagaaatcaacagataaatg

SEQ ID NO: 3050535 - DNA, 25 bp, Homo sapien
taagaaatcaacagataaatggtac

SEQ ID NO: 3050536 - DNA, 25 bp, Homo sapien
ggtaagaaatcaacagataaatggt

SEQ ID NO: 3050537 - DNA, 25 bp, Homo sapien
aagaaatcaacagataaatggtaca

SEQ ID NO: 3050538 - DNA, 25 bp, Homo sapien
caatgtcagaactagaaagcgggag

SEQ ID NO: 3050539 - DNA, 25 bp, Homo sapien
tatggaagggaactcatgttggccg

SEQ ID NO: 3050540 - DNA, 25 bp, Homo sapien
tgacccagcaggtgttctgcgagcc

SEQ ID NO: 3050541 - DNA, 25 bp, Homo sapien
gcagtctaataggtttttccccaca

SEQ ID NO: 3050542 - DNA, 25 bp, Homo sapien
ggtcgcctcgaagccgcagggttca

SEQ ID NO: 3050543 - DNA, 25 bp, Homo sapien
gatgcccggatactgctccttcaca

SEQ ID NO: 3050544 - DNA, 25 bp, Homo sapien
cagctccaggtaggtcgcctcgaag

SEQ ID NO: 3050545 - DNA, 25 bp, Homo sapien
cccgaggcgcgactcgatctcgatg

SEQ ID NO: 3050546 - DNA, 25 bp, Homo sapien
ctggggagtcaagagatggggctgg

SEQ ID NO: 3050547 - DNA, 25 bp, Homo sapien
ggagtcaagagatggggctgggctg

SEQ ID NO: 3050548 - DNA, 25 bp, Homo sapien
gatggggctgggctggggattcggg

SEQ ID NO: 3050549 - DNA, 25 bp, Homo sapien
ggggagtcaagagatggggctgggc

SEQ ID NO: 3050550 - DNA, 25 bp, Homo sapien
ggaccagggtgcgggtcctccagcc

SEQ ID NO: 3050551 - DNA, 25 bp, Homo sapien
cgggagggggcgctacggacgtctg

SEQ ID NO: 3050552 - DNA, 25 bp, Homo sapien
ctgcccggctcgacctcctcgggag

SEQ ID NO: 3050553 - DNA, 25 bp, Homo sapien
actccaccacgatgcggaccccact

SEQ ID NO: 3050554 - DNA, 25 bp, Homo sapien
gctacggacgtctgccccggctccc

SEQ ID NO: 3050555 - DNA, 25 bp, Homo sapien
tccctggcccggtctcccggagtgc

SEQ ID NO: 3050556 - DNA, 25 bp, Homo sapien
tcgggcccctgcttccgggtgtgac

SEQ ID NO: 3050557 - DNA, 25 bp, Homo sapien
ggtgtgacgcgaaccgcgggcacgt

SEQ ID NO: 3050558 - DNA, 25 bp, Homo sapien
actcccggtgtccgctggacttcat

SEQ ID NO: 3050559 - DNA, 25 bp, Homo sapien
aacacgcgggcacgccgagatccgg

SEQ ID NO: 3050560 - DNA, 25 bp, Homo sapien
gcgctgggctgtgacccgggcagtt

SEQ ID NO: 3050561 - DNA, 25 bp, Homo sapien
tcctgctcgggctgtgataggacag

SEQ ID NO: 3050562 - DNA, 25 bp, Homo sapien
ggggtgtcacgcgacccacgctttc

SEQ ID NO: 3050563 - DNA, 25 bp, Homo sapien
tacagggttccagcaagggttagca

SEQ ID NO: 3050564 - DNA, 25 bp, Homo sapien
tagctcacgctggttccaagggtca

SEQ ID NO: 3050565 - DNA, 25 bp, Homo sapien
tacatgagtcactggcggtgggatc

SEQ ID NO: 3050566 - DNA, 25 bp, Homo sapien
tctgagtccatggtcctaaagggtc

SEQ ID NO: 3050567 - DNA, 25 bp, Homo sapien
tcaggaacagctcacagtgggtcat

SEQ ID NO: 3050568 - DNA, 25 bp, Homo sapien
gccgattttgagtatgggcctaaca

SEQ ID NO: 3050569 - DNA, 25 bp, Homo sapien
cctaggagatcaaaatctgaggtca

SEQ ID NO: 3050570 - DNA, 25 bp, Homo sapien
tgttcctcacgaaacaaagccgaaa

SEQ ID NO: 3050571 - DNA, 25 bp, Homo sapien
gaccctggtcctctaaaatatacat

SEQ ID NO: 3050572 - DNA, 25 bp, Homo sapien
aaaacacctggagcactggttctgt

SEQ ID NO: 3050573 - DNA, 25 bp, Homo sapien
aaaaacacctggagcactggttctg

SEQ ID NO: 3050574 - DNA, 25 bp, Homo sapien
aaacacctggagcactggttctgtt

SEQ ID NO: 3050575 - DNA, 25 bp, Homo sapien
tggaaagcccgcctgataagaggct

SEQ ID NO: 3050576 - DNA, 25 bp, Homo sapien
cctcctgggtgtatggtggaaagcc

SEQ ID NO: 3050577 - DNA, 25 bp, Homo sapien
tatctgtgtgatggtaaccactgca

SEQ ID NO: 3050578 - DNA, 25 bp, Homo sapien
gggtatgtacagaaggcagcgttta

SEQ ID NO: 3050579 - DNA, 25 bp, Homo sapien
ccaacaggatgtgcgatatttcaag

SEQ ID NO: 3050580 - DNA, 25 bp, Homo sapien
tagctgaagtctcaaacatgttggg

SEQ ID NO: 3050581 - DNA, 25 bp, Homo sapien
cactaatctggtggaaaggcttcct

SEQ ID NO: 3050582 - DNA, 25 bp, Homo sapien
ttttcctgagacagacgccatgcca

SEQ ID NO: 3050583 - DNA, 25 bp, Homo sapien
aacactaatctaccaggaatttggg

SEQ ID NO: 3050584 - DNA, 25 bp, Homo sapien
taaataggctccatgaagttgtccc

SEQ ID NO: 3050585 - DNA, 25 bp, Homo sapien
cagcacatagacgagttgagttgga

SEQ ID NO: 3050586 - DNA, 25 bp, Homo sapien
gttggagccgaatgcataagcccct

SEQ ID NO: 3050587 - DNA, 25 bp, Homo sapien
tttgtgacctcctattccagtgcta

SEQ ID NO: 3050588 - DNA, 25 bp, Homo sapien
tggtgtgcacttgttgtcccagtac

SEQ ID NO: 3050589 - DNA, 25 bp, Homo sapien
gcactcctcctgatagtatgtacat

SEQ ID NO: 3050590 - DNA, 25 bp, Homo sapien
tttaccatgataacagcactcctcc

SEQ ID NO: 3050591 - DNA, 25 bp, Homo sapien
gaccaaaggaaagcgatgtcatcat

SEQ ID NO: 3050592 - DNA, 25 bp, Homo sapien
gattagatcttaacccttcagcctg

SEQ ID NO: 3050593 - DNA, 25 bp, Homo sapien
ccacgtgtggttgatatatctcaga

SEQ ID NO: 3050594 - DNA, 25 bp, Homo sapien
gagagcaatctgttaggcgaggtca

SEQ ID NO: 3050595 - DNA, 25 bp, Homo sapien
gcttggtccatcatgcgggtctgta

SEQ ID NO: 3050596 - DNA, 25 bp, Homo sapien
catgttacactcgaaagggtcacgg

SEQ ID NO: 3050597 - DNA, 25 bp, Homo sapien
gcttcggcgccaagatagctgatgg

SEQ ID NO: 3050598 - DNA, 25 bp, Homo sapien
tcagaagtggcatcccattgcgggc

SEQ ID NO: 3050599 - DNA, 25 bp, Homo sapien
gcaaggattaaagggaatgactcac

SEQ ID NO: 3050600 - DNA, 25 bp, Homo sapien
taccctcacagttcaagaggtcagg

SEQ ID NO: 3050601 - DNA, 25 bp, Homo sapien
tagcagcgggctgacctgatggtct

SEQ ID NO: 3050602 - DNA, 25 bp, Homo sapien
tcccctaaaggacagtatgtgcaaa

SEQ ID NO: 3050603 - DNA, 25 bp, Homo sapien
tctgtccagtacgagagctctttca

SEQ ID NO: 3050604 - DNA, 25 bp, Homo sapien
ccacattgcttgctaatctgtccag

SEQ ID NO: 3050605 - DNA, 25 bp, Homo sapien
tgaggcattgagctttttcgttttg

SEQ ID NO: 3050606 - DNA, 25 bp, Homo sapien
ttgatgtgtcttgcctccgcacttg

SEQ ID NO: 3050607 - DNA, 25 bp, Homo sapien
ctgttataactgctcagattcttgc

SEQ ID NO: 3050608 - DNA, 25 bp, Homo sapien
tgttataactgctcagattcttgcc

SEQ ID NO: 3050609 - DNA, 25 bp, Homo sapien
taactgctcagattcttgcctgggg

SEQ ID NO: 3050610 - DNA, 25 bp, Homo sapien
ctgctcagattcttgcctggggtac

SEQ ID NO: 3050611 - DNA, 25 bp, Homo sapien
tgccgagatgggaaagctcgaccca

SEQ ID NO: 3050612 - DNA, 25 bp, Homo sapien
cagggcacattcaaatcttgcagtc

SEQ ID NO: 3050613 - DNA, 25 bp, Homo sapien
tgtggtcagtgaagccgacaccagg

SEQ ID NO: 3050614 - DNA, 25 bp, Homo sapien
cttgcagtcttatgccgagatggga

SEQ ID NO: 3050615 - DNA, 25 bp, Homo sapien
tattaaataaacagcctggacgtgg

SEQ ID NO: 3050616 - DNA, 25 bp, Homo sapien
agtaccttcattagcaagaggaagt

SEQ ID NO: 3050617 - DNA, 25 bp, Homo sapien
cctggacgtggttggttgcaaaaag

SEQ ID NO: 3050618 - DNA, 25 bp, Homo sapien
gatagatagatggagatctaacccc

SEQ ID NO: 3050619 - DNA, 25 bp, Homo sapien
cctctcagttcctatctttcatatt

SEQ ID NO: 3050620 - DNA, 25 bp, Homo sapien
ccctaagcaacacttctgccttgaa

SEQ ID NO: 3050621 - DNA, 25 bp, Homo sapien
tttccctaagcaacacttctgcctt

SEQ ID NO: 3050622 - DNA, 25 bp, Homo sapien
ttctctgtgctctgtattatctgtt

SEQ ID NO: 3050623 - DNA, 25 bp, Homo sapien
ccgtccttgagcgagtactgcctga

SEQ ID NO: 3050624 - DNA, 25 bp, Homo sapien
ttccgtccttgagcgagtactgcct

SEQ ID NO: 3050625 - DNA, 25 bp, Homo sapien
ctacattccgtccttgagcgagtac

SEQ ID NO: 3050626 - DNA, 25 bp, Homo sapien
cattccgtccttgagcgagtactgc

SEQ ID NO: 3050627 - DNA, 25 bp, Homo sapien
cacaaaaaagtttcaggctgttcca

SEQ ID NO: 3050628 - DNA, 25 bp, Homo sapien
tgtcaaacactaaatcccatgaggg

SEQ ID NO: 3050629 - DNA, 25 bp, Homo sapien
gacagctgaagagatgtgacacaaa

SEQ ID NO: 3050630 - DNA, 25 bp, Homo sapien
caaaatgagggcagtttaggtagtc

SEQ ID NO: 3050631 - DNA, 25 bp, Homo sapien
catatgagtagacaaggatataaat

SEQ ID NO: 3050632 - DNA, 25 bp, Homo sapien
tcatatgagtagacaaggatataaa

SEQ ID NO: 3050633 - DNA, 25 bp, Homo sapien
atatgagtagacaaggatataaatt

SEQ ID NO: 3050634 - DNA, 25 bp, Homo sapien
tatgagtagacaaggatataaattg

SEQ ID NO: 3050635 - DNA, 25 bp, Homo sapien
ctctgaagaaatgtacggcagcgct

SEQ ID NO: 3050636 - DNA, 25 bp, Homo sapien
aacttctctgcttgtaactccttcc

SEQ ID NO: 3050637 - DNA, 25 bp, Homo sapien
tgaagaaatgtacggcagcgctcct

SEQ ID NO: 3050638 - DNA, 25 bp, Homo sapien
aaatgtacggcagcgctccttgtgc

SEQ ID NO: 3050639 - DNA, 25 bp, Homo sapien
cctgtgtgcagtttaatgtggcgga

SEQ ID NO: 3050640 - DNA, 25 bp, Homo sapien
gccccgtgagcgcatctcttctttg

SEQ ID NO: 3050641 - DNA, 25 bp, Homo sapien
catagttgcagaggtgacacttaaa

SEQ ID NO: 3050642 - DNA, 25 bp, Homo sapien
aatgtgtcctaagatgccccgtgag

SEQ ID NO: 3050643 - DNA, 25 bp, Homo sapien
cactgattacactggaatgggcgtt

SEQ ID NO: 3050644 - DNA, 25 bp, Homo sapien
acactgattacactggaatgggcgt

SEQ ID NO: 3050645 - DNA, 25 bp, Homo sapien
actgattacactggaatgggcgttc

SEQ ID NO: 3050646 - DNA, 25 bp, Homo sapien
gcaggataatccacacacatcgcag

SEQ ID NO: 3050647 - DNA, 25 bp, Homo sapien
cactggttggcctgctactatcgaa

SEQ ID NO: 3050648 - DNA, 25 bp, Homo sapien
tactatcgaatgagacaacatgtct

SEQ ID NO: 3050649 - DNA, 25 bp, Homo sapien
tcccatgggttctgactttaaaaca

SEQ ID NO: 3050650 - DNA, 25 bp, Homo sapien
tcaaccattggtccttagaaatcaa

SEQ ID NO: 3050651 - DNA, 25 bp, Homo sapien
ggctcaagtgagttggctgaccaag

SEQ ID NO: 3050652 - DNA, 25 bp, Homo sapien
caagttagggagaactaaactcaag

SEQ ID NO: 3050653 - DNA, 25 bp, Homo sapien
catgaggaatcacaaatcaatggag

SEQ ID NO: 3050654 - DNA, 25 bp, Homo sapien
gttgctggtttgcctttggagtctt

SEQ ID NO: 3050655 - DNA, 25 bp, Homo sapien
tgctggtttgcctttggagtcttac

SEQ ID NO: 3050656 - DNA, 25 bp, Homo sapien
ttgctggtttgcctttggagtctta

SEQ ID NO: 3050657 - DNA, 25 bp, Homo sapien
cagttttagatgaatgacctggatg

SEQ ID NO: 3050658 - DNA, 25 bp, Homo sapien
aaggcttgtactccagagcagacat

SEQ ID NO: 3050659 - DNA, 25 bp, Homo sapien
gatggttatcacatgaaaggcttgt

SEQ ID NO: 3050660 - DNA, 25 bp, Homo sapien
cctggggtgatggttatcacatgaa

SEQ ID NO: 3050661 - DNA, 25 bp, Homo sapien
gggtgatggttatcacatgaaaggc

SEQ ID NO: 3050662 - DNA, 25 bp, Homo sapien
agctccagaacaaatggcttgtgta

SEQ ID NO: 3050663 - DNA, 25 bp, Homo sapien
tgtaaatagagatagtggatgatgg

SEQ ID NO: 3050664 - DNA, 25 bp, Homo sapien
cagaacaaatggcttgtgtaaatag

SEQ ID NO: 3050665 - DNA, 25 bp, Homo sapien
agcagctccagaacaaatggcttgt

SEQ ID NO: 3050666 - DNA, 25 bp, Homo sapien
tagtcattcaaaaccgctgcacttt

SEQ ID NO: 3050667 - DNA, 25 bp, Homo sapien
gtagtcattcaaaaccgctgcactt

SEQ ID NO: 3050668 - DNA, 25 bp, Homo sapien
cagactgctcctgagtgcttttcag

SEQ ID NO: 3050669 - DNA, 25 bp, Homo sapien
ttcagttccgcatttgtttgtatat

SEQ ID NO: 3050670 - DNA, 25 bp, Homo sapien
tgagtgcttttcagttccgcatttg

SEQ ID NO: 3050671 - DNA, 25 bp, Homo sapien
tgcgggcacagactgctcctgagtg

SEQ ID NO: 3050672 - DNA, 25 bp, Homo sapien
aagcaggcacagccaaaggagctgg

SEQ ID NO: 3050673 - DNA, 25 bp, Homo sapien
cagggcttgtaaggcccctgtaggc

SEQ ID NO: 3050674 - DNA, 25 bp, Homo sapien
agggcttgtaaggcccctgtaggct

SEQ ID NO: 3050675 - DNA, 25 bp, Homo sapien
ggtcttcatatggatactcatgctc

SEQ ID NO: 3050676 - DNA, 25 bp, Homo sapien
tcatatggatactcatgctctgcat

SEQ ID NO: 3050677 - DNA, 25 bp, Homo sapien
ctgagtagcccctggtggtcttcat

SEQ ID NO: 3050678 - DNA, 25 bp, Homo sapien
tgagtagcccctggtggtcttcata

SEQ ID NO: 3050679 - DNA, 25 bp, Homo sapien
acttgagcagctgacgcgccacgtc

SEQ ID NO: 3050680 - DNA, 25 bp, Homo sapien
gacgcgccacgtcctgcttggccca

SEQ ID NO: 3050681 - DNA, 25 bp, Homo sapien
ggtacttgagcagctgacgcgccac

SEQ ID NO: 3050682 - DNA, 25 bp, Homo sapien
ttgagcagctgacgcgccacgtcct

SEQ ID NO: 3050683 - DNA, 25 bp, Homo sapien
ctggcattggcatccttaatggacc

SEQ ID NO: 3050684 - DNA, 25 bp, Homo sapien
tggcattggcatccttaatggaccg

SEQ ID NO: 3050685 - DNA, 25 bp, Homo sapien
ttatcttggagatctccgtctttgt

SEQ ID NO: 3050686 - DNA, 25 bp, Homo sapien
tatcttggagatctccgtctttgta

SEQ ID NO: 3050687 - DNA, 25 bp, Homo sapien
atcttggagatctccgtctttgtac

SEQ ID NO: 3050688 - DNA, 25 bp, Homo sapien
tcatcctgtgcttcccaggcagggt

SEQ ID NO: 3050689 - DNA, 25 bp, Homo sapien
ctgtgcttcccaggcagggtctgca

SEQ ID NO: 3050690 - DNA, 25 bp, Homo sapien
gcaggtcatcctgtgcttcccaggc

SEQ ID NO: 3050691 - DNA, 25 bp, Homo sapien
tcctgtgcttcccaggcagggtctg

SEQ ID NO: 3050692 - DNA, 25 bp, Homo sapien
agcagctgttatgcgtggacagccc

SEQ ID NO: 3050693 - DNA, 25 bp, Homo sapien
cagctgttatgcgtggacagcccca

SEQ ID NO: 3050694 - DNA, 25 bp, Homo sapien
gagcagctgttatgcgtggacagcc

SEQ ID NO: 3050695 - DNA, 25 bp, Homo sapien
gctgttatgcgtggacagccccaca

SEQ ID NO: 3050696 - DNA, 25 bp, Homo sapien
gccatccaggtaagactccatccag

SEQ ID NO: 3050697 - DNA, 25 bp, Homo sapien
gcttgccatccaggtaagactccat

SEQ ID NO: 3050698 - DNA, 25 bp, Homo sapien
taagcttgccatccaggtaagactc

SEQ ID NO: 3050699 - DNA, 25 bp, Homo sapien
ttgtaagcttgccatccaggtaaga

SEQ ID NO: 3050700 - DNA, 25 bp, Homo sapien
ctattcatgtatgcctcatccacat

SEQ ID NO: 3050701 - DNA, 25 bp, Homo sapien
tgccacggaggtttgttgatgtagc

SEQ ID NO: 3050702 - DNA, 25 bp, Homo sapien
gctgccacggaggtttgttgatgta

SEQ ID NO: 3050703 - DNA, 25 bp, Homo sapien
ccagctgccacggaggtttgttgat

SEQ ID NO: 3050704 - DNA, 25 bp, Homo sapien
cagctgccacggaggtttgttgatg

SEQ ID NO: 3050705 - DNA, 25 bp, Homo sapien
caggaaccgcgatgaagggggcaaa

SEQ ID NO: 3050706 - DNA, 25 bp, Homo sapien
tgtgatgcctcctataaccaccagc

SEQ ID NO: 3050707 - DNA, 25 bp, Homo sapien
gctgcttcaggaaccgcgatgaagg

SEQ ID NO: 3050708 - DNA, 25 bp, Homo sapien
gctgtgatgcctcctataaccacca

SEQ ID NO: 3050709 - DNA, 25 bp, Homo sapien
cattagaggttagcaacaaagcata

SEQ ID NO: 3050710 - DNA, 25 bp, Homo sapien
tttaaaatggtctataatcaggtca

SEQ ID NO: 3050711 - DNA, 25 bp, Homo sapien
tcttatccgtggaaaggttggttca

SEQ ID NO: 3050712 - DNA, 25 bp, Homo sapien
ggttcaataggaggtactattccat

SEQ ID NO: 3050713 - DNA, 25 bp, Homo sapien
tcccagtaggaagtataagcactaa

SEQ ID NO: 3050714 - DNA, 25 bp, Homo sapien
gaatcctgtattgagtttgccagct

SEQ ID NO: 3050715 - DNA, 25 bp, Homo sapien
gctgccagaaagctatctctgaatg

SEQ ID NO: 3050716 - DNA, 25 bp, Homo sapien
tttcatgtgctgtaaaacgaaaggg

SEQ ID NO: 3050717 - DNA, 25 bp, Homo sapien
taatgaggaaactgtagaccgtggg

SEQ ID NO: 3050718 - DNA, 25 bp, Homo sapien
gcattaaagtgagagtaatccctcc

SEQ ID NO: 3050719 - DNA, 25 bp, Homo sapien
gtcagttacccttaagttgtagaca

SEQ ID NO: 3050720 - DNA, 25 bp, Homo sapien
tataactgtaaaatagctggagcca

SEQ ID NO: 3050721 - DNA, 25 bp, Homo sapien
gaaactctttctactgcttgcacag

SEQ ID NO: 3050722 - DNA, 25 bp, Homo sapien
ttccaagggaactgcaaatgccaac

SEQ ID NO: 3050723 - DNA, 25 bp, Homo sapien
cctctgcagatgtagggtagacccc

SEQ ID NO: 3050724 - DNA, 25 bp, Homo sapien
gaaccgacgcgctttgtcctctgaa

SEQ ID NO: 3050725 - DNA, 25 bp, Homo sapien
gctgtggctactcggcctctccacg

SEQ ID NO: 3050726 - DNA, 25 bp, Homo sapien
gccgctgtggctactcggcctctcc

SEQ ID NO: 3050727 - DNA, 25 bp, Homo sapien
cgctgtggctactcggcctctccac

SEQ ID NO: 3050728 - DNA, 25 bp, Homo sapien
ctgtggctactcggcctctccacgt

SEQ ID NO: 3050729 - DNA, 25 bp, Homo sapien
ccactctttaagtgtgggtgcacaa

SEQ ID NO: 3050730 - DNA, 25 bp, Homo sapien
caatactgagtatttcggactcccg

SEQ ID NO: 3050731 - DNA, 25 bp, Homo sapien
gacagtggaacgtgttagtactctg

SEQ ID NO: 3050732 - DNA, 25 bp, Homo sapien
gggtgcacaaagtgacttccttccg

SEQ ID NO: 3050733 - DNA, 25 bp, Homo sapien
aaattgctagtgtggtaaattacat

SEQ ID NO: 3050734 - DNA, 25 bp, Homo sapien
ttcttcttaaattgctagtgtggta

SEQ ID NO: 3050735 - DNA, 25 bp, Homo sapien
cttaaattgctagtgtggtaaatta

SEQ ID NO: 3050736 - DNA, 25 bp, Homo sapien
cttcttaaattgctagtgtggtaaa

SEQ ID NO: 3050737 - DNA, 25 bp, Homo sapien
gatacatcaaagaatggttggctgc

SEQ ID NO: 3050738 - DNA, 25 bp, Homo sapien
aatcagaagtccatgtatgaaatcc

SEQ ID NO: 3050739 - DNA, 25 bp, Homo sapien
taacatggagcgaatgggatacatc

SEQ ID NO: 3050740 - DNA, 25 bp, Homo sapien
ttttaaagaggtcccactggtgaca

SEQ ID NO: 3050741 - DNA, 25 bp, Homo sapien
cacagagaattcgtgcctcagggtc

SEQ ID NO: 3050742 - DNA, 25 bp, Homo sapien
ccatgtcaggaggactgctggccag

SEQ ID NO: 3050743 - DNA, 25 bp, Homo sapien
ggatagagacaacaacatacagcgc

SEQ ID NO: 3050744 - DNA, 25 bp, Homo sapien
cagggtcatagtccatgtcaggagg

SEQ ID NO: 3050745 - DNA, 25 bp, Homo sapien
gcatggatgtgagccggcagaaaac

SEQ ID NO: 3050746 - DNA, 25 bp, Homo sapien
ttccactatgaccatggccctcagc

SEQ ID NO: 3050747 - DNA, 25 bp, Homo sapien
ctatggaataagaaggggctgtacc

SEQ ID NO: 3050748 - DNA, 25 bp, Homo sapien
cagaaaactatggaataagaagggg

SEQ ID NO: 3050749 - DNA, 25 bp, Homo sapien
ccacaaactgctgctcttcagacag

SEQ ID NO: 3050750 - DNA, 25 bp, Homo sapien
agggcctcagccacaaactgctgct

SEQ ID NO: 3050751 - DNA, 25 bp, Homo sapien
ctggtccttcaacagaggaagggtc

SEQ ID NO: 3050752 - DNA, 25 bp, Homo sapien
tggtccttcaacagaggaagggtcc

SEQ ID NO: 3050753 - DNA, 25 bp, Homo sapien
gaggaaccagcccctcaatgcctgg

SEQ ID NO: 3050754 - DNA, 25 bp, Homo sapien
aggaaccagcccctcaatgcctggc

SEQ ID NO: 3050755 - DNA, 25 bp, Homo sapien
gagtcacagacgaggaaccagcccc

SEQ ID NO: 3050756 - DNA, 25 bp, Homo sapien
agtccagaatggcttttgcacgcgc

SEQ ID NO: 3050757 - DNA, 25 bp, Homo sapien
tccccggaaatcaggacctcagata

SEQ ID NO: 3050758 - DNA, 25 bp, Homo sapien
ttaaaaaggctgcttaggagaggct

SEQ ID NO: 3050759 - DNA, 25 bp, Homo sapien
gggtcctccatgtgtagctccccgg

SEQ ID NO: 3050760 - DNA, 25 bp, Homo sapien
ccgaggcacttagcgagggagttta

SEQ ID NO: 3050761 - DNA, 25 bp, Homo sapien
aatatcctccttgccgaggcactta

SEQ ID NO: 3050762 - DNA, 25 bp, Homo sapien
tgctctagatcctgccgaatatcct

SEQ ID NO: 3050763 - DNA, 25 bp, Homo sapien
cgagggagtttagcacatcttttct

SEQ ID NO: 3050764 - DNA, 25 bp, Homo sapien
ttctggaatcctccgaacccaaaga

SEQ ID NO: 3050765 - DNA, 25 bp, Homo sapien
tctggaatcctccgaacccaaagac

SEQ ID NO: 3050766 - DNA, 25 bp, Homo sapien
ctggaatcctccgaacccaaagact

SEQ ID NO: 3050767 - DNA, 25 bp, Homo sapien
tgcagcctccagactaaagttgaaa

SEQ ID NO: 3050768 - DNA, 25 bp, Homo sapien
tgaaacctgctaggcagtgcctccc

SEQ ID NO: 3050769 - DNA, 25 bp, Homo sapien
gcagcagtcttgagccacatggact

SEQ ID NO: 3050770 - DNA, 25 bp, Homo sapien
agtttctggagacgggactcagtcg

SEQ ID NO: 3050771 - DNA, 25 bp, Homo sapien
taaacaggatgaagcaccatccttc

SEQ ID NO: 3050772 - DNA, 25 bp, Homo sapien
ctaaacaggatgaagcaccatcctt

SEQ ID NO: 3050773 - DNA, 25 bp, Homo sapien
aaacaggatgaagcaccatccttct

SEQ ID NO: 3050774 - DNA, 25 bp, Homo sapien
cactcagtcgctccgcaaatttggg

SEQ ID NO: 3050775 - DNA, 25 bp, Homo sapien
ctcaaaaacaggcagtcataggact

SEQ ID NO: 3050776 - DNA, 25 bp, Homo sapien
caaacttaacttggcgtggtggagg

SEQ ID NO: 3050777 - DNA, 25 bp, Homo sapien
caccagcgtgtgtcaatgggaaagc

SEQ ID NO: 3050778 - DNA, 25 bp, Homo sapien
gggtgcgtcttaccacatcctcgga

SEQ ID NO: 3050779 - DNA, 25 bp, Homo sapien
tctgaaatgacgaacgggaagccca

SEQ ID NO: 3050780 - DNA, 25 bp, Homo sapien
tgcaatccagactcttcaacaggct

SEQ ID NO: 3050781 - DNA, 25 bp, Homo sapien
tggaaaccctagtccgatgtgcaat

SEQ ID NO: 3050782 - DNA, 25 bp, Homo sapien
aggattttgttttgcccctgaaatg

SEQ ID NO: 3050783 - DNA, 25 bp, Homo sapien
tttgttttgcccctgaaatgaatat

SEQ ID NO: 3050784 - DNA, 25 bp, Homo sapien
ttttgttttgcccctgaaatgaata

SEQ ID NO: 3050785 - DNA, 25 bp, Homo sapien
gattttgttttgcccctgaaatgaa

SEQ ID NO: 3050786 - DNA, 25 bp, Homo sapien
ctgttctccatctgcctttgcttac

SEQ ID NO: 3050787 - DNA, 25 bp, Homo sapien
ttagggccccccatcctgttctcca

SEQ ID NO: 3050788 - DNA, 25 bp, Homo sapien
catcctgttctccatctgcctttgc

SEQ ID NO: 3050789 - DNA, 25 bp, Homo sapien
tcctgttctccatctgcctttgctt

SEQ ID NO: 3050790 - DNA, 25 bp, Homo sapien
acaagctgctttactcgatagctca

SEQ ID NO: 3050791 - DNA, 25 bp, Homo sapien
gctgctttactcgatagctcaggac

SEQ ID NO: 3050792 - DNA, 25 bp, Homo sapien
gctttactcgatagctcaggacccg

SEQ ID NO: 3050793 - DNA, 25 bp, Homo sapien
tactcgatagctcaggacccgattt

SEQ ID NO: 3050794 - DNA, 25 bp, Homo sapien
aggaagagtctaaggctggcatcgc

SEQ ID NO: 3050795 - DNA, 25 bp, Homo sapien
ggaagagtctaaggctggcatcgcc

SEQ ID NO: 3050796 - DNA, 25 bp, Homo sapien
aaggaagagtctaaggctggcatcg

SEQ ID NO: 3050797 - DNA, 25 bp, Homo sapien
ctcctttaccgtctccagagtttct

SEQ ID NO: 3050798 - DNA, 25 bp, Homo sapien
acaggttttctctcgtattaattga

SEQ ID NO: 3050799 - DNA, 25 bp, Homo sapien
tatattgccggtcgcttttcagggt

SEQ ID NO: 3050800 - DNA, 25 bp, Homo sapien
tgatcggaatgaaaagggtagttcc

SEQ ID NO: 3050801 - DNA, 25 bp, Homo sapien
gtcagtgtaagtccaaagagagtgc

SEQ ID NO: 3050802 - DNA, 25 bp, Homo sapien
ttcccgtgacactgagataggcatc

SEQ ID NO: 3050803 - DNA, 25 bp, Homo sapien
tatgatggtaggcagaattacgtcc

SEQ ID NO: 3050804 - DNA, 25 bp, Homo sapien
gataggcatctgtgaagcccaagac

SEQ ID NO: 3050805 - DNA, 25 bp, Homo sapien
tcgagaccagatctctctccaaaaa

SEQ ID NO: 3050806 - DNA, 25 bp, Homo sapien
gagaccagatctctctccaaaaaac

SEQ ID NO: 3050807 - DNA, 25 bp, Homo sapien
gttcgagaccagatctctctccaaa

SEQ ID NO: 3050808 - DNA, 25 bp, Homo sapien
agttcgagaccagatctctctccaa

SEQ ID NO: 3050809 - DNA, 25 bp, Homo sapien
tttgtccaagtcagaggaattaacc

SEQ ID NO: 3050810 - DNA, 25 bp, Homo sapien
tcctggaagtagagagcgagaggct

SEQ ID NO: 3050811 - DNA, 25 bp, Homo sapien
aagagccggtctgccacccttgaat

SEQ ID NO: 3050812 - DNA, 25 bp, Homo sapien
gaagaggaaggcgtgcttgcgtaaa

SEQ ID NO: 3050813 - DNA, 25 bp, Homo sapien
ttttcaagggtagccagatactgct

SEQ ID NO: 3050814 - DNA, 25 bp, Homo sapien
tactgctgggatatccggttctccg

SEQ ID NO: 3050815 - DNA, 25 bp, Homo sapien
ggtaatctcactatcaactctcccg

SEQ ID NO: 3050816 - DNA, 25 bp, Homo sapien
cccgttgagtctacattatccagaa

SEQ ID NO: 3050817 - DNA, 25 bp, Homo sapien
ccttgcttgcttaacgaaactctgc

SEQ ID NO: 3050818 - DNA, 25 bp, Homo sapien
ggtctgagctatgagcgccttgcta

SEQ ID NO: 3050819 - DNA, 25 bp, Homo sapien
taatctgggtactgctcttggtcac

SEQ ID NO: 3050820 - DNA, 25 bp, Homo sapien
ggtccaccacctccaagtaatctgg

SEQ ID NO: 3050821 - DNA, 25 bp, Homo sapien
cttgtccaaaggttacgcagctgat

SEQ ID NO: 3050822 - DNA, 25 bp, Homo sapien
caggctttgaaaccaggtgcttcca

SEQ ID NO: 3050823 - DNA, 25 bp, Homo sapien
tcttaaccagtaagcaaactgccct

SEQ ID NO: 3050824 - DNA, 25 bp, Homo sapien
aacagtcctctagagttgacacagg

SEQ ID NO: 3050825 - DNA, 25 bp, Homo sapien
caccagatggaagcagcggaatcta

SEQ ID NO: 3050826 - DNA, 25 bp, Homo sapien
cggaatctatcagcatcaacaaggc

SEQ ID NO: 3050827 - DNA, 25 bp, Homo sapien
gcctgttgtgtagtgccggcatcca

SEQ ID NO: 3050828 - DNA, 25 bp, Homo sapien
tcaacaaggcttctaacggcaatca

SEQ ID NO: 3050829 - DNA, 25 bp, Homo sapien
tccacatttggcagcctgaggtgtc

SEQ ID NO: 3050830 - DNA, 25 bp, Homo sapien
tagccccaacgttgatgaacagagg

SEQ ID NO: 3050831 - DNA, 25 bp, Homo sapien
tataaagcccgtttcgtggactctc

SEQ ID NO: 3050832 - DNA, 25 bp, Homo sapien
tacttctagaacgtgaggcagccat

SEQ ID NO: 3050833 - DNA, 25 bp, Homo sapien
tatgagtaggtatcaagtgccagca

SEQ ID NO: 3050834 - DNA, 25 bp, Homo sapien
gacatgaggaccataacccagcaga

SEQ ID NO: 3050835 - DNA, 25 bp, Homo sapien
tgggccagacaatggtgcacaccgt

SEQ ID NO: 3050836 - DNA, 25 bp, Homo sapien
tctcagagataaccaccccggtgag

SEQ ID NO: 3050837 - DNA, 25 bp, Homo sapien
gaggcattatctttacacaacagtg

SEQ ID NO: 3050838 - DNA, 25 bp, Homo sapien
cagatcgttgttgatgttctccagc

SEQ ID NO: 3050839 - DNA, 25 bp, Homo sapien
ggcactgtgctaatgctcacaacag

SEQ ID NO: 3050840 - DNA, 25 bp, Homo sapien
gactatactcttgcaggctggtgaa

SEQ ID NO: 3050841 - DNA, 25 bp, Homo sapien
ggaaggactgagcaccacttgggac

SEQ ID NO: 3050842 - DNA, 25 bp, Homo sapien
tgaaaagtcccctccactgaaaggc

SEQ ID NO: 3050843 - DNA, 25 bp, Homo sapien
caaggcgcaagacctgtcggagaac

SEQ ID NO: 3050844 - DNA, 25 bp, Homo sapien
gcctctcctgggaatagcagctgat

SEQ ID NO: 3050845 - DNA, 25 bp, Homo sapien
ccttttatttgcgtttctcagaata

SEQ ID NO: 3050846 - DNA, 25 bp, Homo sapien
ccagtgacctctcccgttcccttgg

SEQ ID NO: 3050847 - DNA, 25 bp, Homo sapien
taacactgcccctagtccaactggg

SEQ ID NO: 3050848 - DNA, 25 bp, Homo sapien
caaaattaacactgcccctagtcca

SEQ ID NO: 3050849 - DNA, 25 bp, Homo sapien
aaagttccctatgatacacggggtg

SEQ ID NO: 3050850 - DNA, 25 bp, Homo sapien
gatcctacaggactctcaccacaga

SEQ ID NO: 3050851 - DNA, 25 bp, Homo sapien
ggtggcctcacaacgccacatgtgg

SEQ ID NO: 3050852 - DNA, 25 bp, Homo sapien
ctgagacagtgcctacaggccacgt

SEQ ID NO: 3050853 - DNA, 25 bp, Homo sapien
gacagtgcctacaggccacgtcttg

SEQ ID NO: 3050854 - DNA, 25 bp, Homo sapien
tacccaacagccaacccaggagtta

SEQ ID NO: 3050855 - DNA, 25 bp, Homo sapien
gtcagggccaagttggacctgtgct

SEQ ID NO: 3050856 - DNA, 25 bp, Homo sapien
tgtgcttacaatgactcacgggcct

SEQ ID NO: 3050857 - DNA, 25 bp, Homo sapien
aacccaggagttaaacccacagcag

SEQ ID NO: 3050858 - DNA, 25 bp, Homo sapien
acccacggtgggttgcagagaagct

SEQ ID NO: 3050859 - DNA, 25 bp, Homo sapien
gtgaaacaatccagaagccgtaccg

SEQ ID NO: 3050860 - DNA, 25 bp, Homo sapien
ttagacagctccctacccagaaagg

SEQ ID NO: 3050861 - DNA, 25 bp, Homo sapien
tgcgtggcatcgaaaaaacctagga

SEQ ID NO: 3050862 - DNA, 25 bp, Homo sapien
tacaagctactccaagttggctact

SEQ ID NO: 3050863 - DNA, 25 bp, Homo sapien
gaaattaggccagaggctcaacccc

SEQ ID NO: 3050864 - DNA, 25 bp, Homo sapien
ctgtcttcagtgttgcagcacatgc

SEQ ID NO: 3050865 - DNA, 25 bp, Homo sapien
ccactacaagctactccaagttggc

SEQ ID NO: 3050866 - DNA, 25 bp, Homo sapien
tcccctgccaccctgggcaggggaa

SEQ ID NO: 3050867 - DNA, 25 bp, Homo sapien
tacccctcccctgccaccctgggca

SEQ ID NO: 3050868 - DNA, 25 bp, Homo sapien
ccctgccaccctgggcaggggaagg

SEQ ID NO: 3050869 - DNA, 25 bp, Homo sapien
ccctcccctgccaccctgggcaggg

SEQ ID NO: 3050870 - DNA, 25 bp, Homo sapien
gacacggtgttgagcacaaaatgga

SEQ ID NO: 3050871 - DNA, 25 bp, Homo sapien
gataagcacgctcatcagggacacg

SEQ ID NO: 3050872 - DNA, 25 bp, Homo sapien
aaaaatccggactccgtggagctgg

SEQ ID NO: 3050873 - DNA, 25 bp, Homo sapien
caaaatggatctggtcgtacttagt

SEQ ID NO: 3050874 - DNA, 25 bp, Homo sapien
aagggtgtccccttcaccgtgtgca

SEQ ID NO: 3050875 - DNA, 25 bp, Homo sapien
gatggtcaagaacttccgagaggcc

SEQ ID NO: 3050876 - DNA, 25 bp, Homo sapien
ccataatccatctgctcccagtggg

SEQ ID NO: 3050877 - DNA, 25 bp, Homo sapien
gaggccgtgaactggaccccataat

SEQ ID NO: 3050878 - DNA, 25 bp, Homo sapien
ttggtgagggtccagacgacaggga

SEQ ID NO: 3050879 - DNA, 25 bp, Homo sapien
gggtccagacgacagggacactcac

SEQ ID NO: 3050880 - DNA, 25 bp, Homo sapien
tgagggtccagacgacagggacact

SEQ ID NO: 3050881 - DNA, 25 bp, Homo sapien
ggtgagggtccagacgacagggaca

SEQ ID NO: 3050882 - DNA, 25 bp, Homo sapien
ggagagccagatgccacggctgttc

SEQ ID NO: 3050883 - DNA, 25 bp, Homo sapien
ggctgttcatcacccgcgtgttggg

SEQ ID NO: 3050884 - DNA, 25 bp, Homo sapien
ggatgctcagcagcacgatgtggag

SEQ ID NO: 3050885 - DNA, 25 bp, Homo sapien
accgatggccagcacgtaggagagc

SEQ ID NO: 3050886 - DNA, 25 bp, Homo sapien
gcagttccactcttttgattctgaa

SEQ ID NO: 3050887 - DNA, 25 bp, Homo sapien
ggcagttccactcttttgattctga

SEQ ID NO: 3050888 - DNA, 25 bp, Homo sapien
gttccactcttttgattctgaagca

SEQ ID NO: 3050889 - DNA, 25 bp, Homo sapien
ccaggcagttccactcttttgattc

SEQ ID NO: 3050890 - DNA, 25 bp, Homo sapien
tttttcaattctggatctccccaaa

SEQ ID NO: 3050891 - DNA, 25 bp, Homo sapien
tctgattttttcaattctggatctc

SEQ ID NO: 3050892 - DNA, 25 bp, Homo sapien
cctctgattttttcaattctggatc

SEQ ID NO: 3050893 - DNA, 25 bp, Homo sapien
gattttttcaattctggatctcccc

SEQ ID NO: 3050894 - DNA, 25 bp, Homo sapien
tgtatattagcaccatgccttcccc

SEQ ID NO: 3050895 - DNA, 25 bp, Homo sapien
gtggccgcaacccacagtgagcaga

SEQ ID NO: 3050896 - DNA, 25 bp, Homo sapien
gatctgccccttatccagagtttgg

SEQ ID NO: 3050897 - DNA, 25 bp, Homo sapien
caccaacggtaggagtcctgcagca

SEQ ID NO: 3050898 - DNA, 25 bp, Homo sapien
ctaaagaccgtaaggtcatcaccat

SEQ ID NO: 3050899 - DNA, 25 bp, Homo sapien
ctatctgagatagggtcctgcttgc

SEQ ID NO: 3050900 - DNA, 25 bp, Homo sapien
ctccctatctgagatagggtcctgc

SEQ ID NO: 3050901 - DNA, 25 bp, Homo sapien
gcttgctaaagaccgtaaggtcatc

SEQ ID NO: 3050902 - DNA, 25 bp, Homo sapien
gaagcctaaacactaggtgccctga

SEQ ID NO: 3050903 - DNA, 25 bp, Homo sapien
ttcagttactctagcagcccctggg

SEQ ID NO: 3050904 - DNA, 25 bp, Homo sapien
tgggacagctgctacgcaaaagcct

SEQ ID NO: 3050905 - DNA, 25 bp, Homo sapien
gctggcagaggtcgactaggtctac

SEQ ID NO: 3050906 - DNA, 25 bp, Homo sapien
ctccagcagctgtaacaacccgcgg

SEQ ID NO: 3050907 - DNA, 25 bp, Homo sapien
cgtgtggggccgaagatcaacggcc

SEQ ID NO: 3050908 - DNA, 25 bp, Homo sapien
cagctgtaacaacccgcggctgcag

SEQ ID NO: 3050909 - DNA, 25 bp, Homo sapien
tgtggggccgaagatcaacggcccg

SEQ ID NO: 3050910 - DNA, 25 bp, Homo sapien
gggtgggggataccccaggcatgtg

SEQ ID NO: 3050911 - DNA, 25 bp, Homo sapien
ggaaagaataccacctctccactcc

SEQ ID NO: 3050912 - DNA, 25 bp, Homo sapien
gaataccacctctccactcctactc

SEQ ID NO: 3050913 - DNA, 25 bp, Homo sapien
gggggataccccaggcatgtggtgg

SEQ ID NO: 3050914 - DNA, 25 bp, Homo sapien
gagtagaagcactcagacttttaaa

SEQ ID NO: 3050915 - DNA, 25 bp, Homo sapien
ggaaaatattatgtcaatcttagga

SEQ ID NO: 3050916 - DNA, 25 bp, Homo sapien
tatgagccgtttcagcaaaactgag

SEQ ID NO: 3050917 - DNA, 25 bp, Homo sapien
tcttaggaatgatatgtcttttggt

SEQ ID NO: 3050918 - DNA, 25 bp, Homo sapien
ttaagcgctcgaaagaaagccccac

SEQ ID NO: 3050919 - DNA, 25 bp, Homo sapien
ttgactcggccatcggcctgccggg

SEQ ID NO: 3050920 - DNA, 25 bp, Homo sapien
ccataaaggctcctccccgctcctt

SEQ ID NO: 3050921 - DNA, 25 bp, Homo sapien
tttcccctttgttgactcggccatc

SEQ ID NO: 3050922 - DNA, 25 bp, Homo sapien
acgtgccgcgatcgcgggtgacagc

SEQ ID NO: 3050923 - DNA, 25 bp, Homo sapien
ggccgggaacgtgccgcgatcgcgg

SEQ ID NO: 3050924 - DNA, 25 bp, Homo sapien
ccaggccgggaacgtgccgcgatcg

SEQ ID NO: 3050925 - DNA, 25 bp, Homo sapien
ggaacgtgccgcgatcgcgggtgac

SEQ ID NO: 3050926 - DNA, 25 bp, Homo sapien
gatgaacagcaagcgctacaaagag

SEQ ID NO: 3050927 - DNA, 25 bp, Homo sapien
gacacagaggctgatttacagttcc

SEQ ID NO: 3050928 - DNA, 25 bp, Homo sapien
gggaaaagctgcgtcgacacccctc

SEQ ID NO: 3050929 - DNA, 25 bp, Homo sapien
tcgtggtcatcttcatgatgaacag

SEQ ID NO: 3050930 - DNA, 25 bp, Homo sapien
gggccctagaccttgtagccgcaaa

SEQ ID NO: 3050931 - DNA, 25 bp, Homo sapien
agaagatcagtactcagaaccgccg

SEQ ID NO: 3050932 - DNA, 25 bp, Homo sapien
aagtgttactattatcacgcccggg

SEQ ID NO: 3050933 - DNA, 25 bp, Homo sapien
tatgagttcctggacaagctggatg

SEQ ID NO: 3050934 - DNA, 25 bp, Homo sapien
caacaacaatgagtgggccaggtac

SEQ ID NO: 3050935 - DNA, 25 bp, Homo sapien
tacagcttgtacgaccaggctgaga

SEQ ID NO: 3050936 - DNA, 25 bp, Homo sapien
tccggacagctacgcttcggcatga

SEQ ID NO: 3050937 - DNA, 25 bp, Homo sapien
gcggaattacctacactacagcttg

SEQ ID NO: 3050938 - DNA, 25 bp, Homo sapien
ctggagtactcagaggcccggagaa

SEQ ID NO: 3050939 - DNA, 25 bp, Homo sapien
ttcgcaaggcccctcagcacacagc

SEQ ID NO: 3050940 - DNA, 25 bp, Homo sapien
gcgaatcaaagccatccagctggag

SEQ ID NO: 3050941 - DNA, 25 bp, Homo sapien
aacgatgaccaacgcccttcgcaag

SEQ ID NO: 3050942 - DNA, 25 bp, Homo sapien
ttgcaggtgcgagctgccatgtctg

SEQ ID NO: 3050943 - DNA, 25 bp, Homo sapien
gcacctctggcagtggatattcaga

SEQ ID NO: 3050944 - DNA, 25 bp, Homo sapien
tgtcaatgaagcagacactacctgc

SEQ ID NO: 3050945 - DNA, 25 bp, Homo sapien
tagaatattcctgattccccagcgc

SEQ ID NO: 3050946 - DNA, 25 bp, Homo sapien
tagagatgaggaactaaggacccag

SEQ ID NO: 3050947 - DNA, 25 bp, Homo sapien
tctacagcgtgtcccaaagagatcc

SEQ ID NO: 3050948 - DNA, 25 bp, Homo sapien
tgccttactaagcagagctccagct

SEQ ID NO: 3050949 - DNA, 25 bp, Homo sapien
cactgctgtagggtatcataacggt

SEQ ID NO: 3050950 - DNA, 25 bp, Homo sapien
gattccctggttcttgcccacataa

SEQ ID NO: 3050951 - DNA, 25 bp, Homo sapien
tcagccttggttgtaagtgaccgga

SEQ ID NO: 3050952 - DNA, 25 bp, Homo sapien
agagagctgaggtcattcgccatga

SEQ ID NO: 3050953 - DNA, 25 bp, Homo sapien
tgaccggagagagtttatcaccctc

SEQ ID NO: 3050954 - DNA, 25 bp, Homo sapien
cagtttcggacacaagcccaggagt

SEQ ID NO: 3050955 - DNA, 25 bp, Homo sapien
cccatccacaatatggcagctttgt

SEQ ID NO: 3050956 - DNA, 25 bp, Homo sapien
gtgagaccaagcactcaccagtttc

SEQ ID NO: 3050957 - DNA, 25 bp, Homo sapien
aggtccccatccacaatatggcagc

SEQ ID NO: 3050958 - DNA, 25 bp, Homo sapien
ttggaatcgactccaaggtcccttc

SEQ ID NO: 3050959 - DNA, 25 bp, Homo sapien
ttaacgctgcatggttctaagatga

SEQ ID NO: 3050960 - DNA, 25 bp, Homo sapien
cagggaagtcacgtgtcccaatccc

SEQ ID NO: 3050961 - DNA, 25 bp, Homo sapien
tgtccacttcaaggtgaatgaccag

SEQ ID NO: 3050962 - DNA, 25 bp, Homo sapien
cgcacacaggggtgaccactgggct

SEQ ID NO: 3050963 - DNA, 25 bp, Homo sapien
tcctcagaggtaagactactcctgg

SEQ ID NO: 3050964 - DNA, 25 bp, Homo sapien
ggtagatttccctcacatattacaa

SEQ ID NO: 3050965 - DNA, 25 bp, Homo sapien
tatttatacatgaacgaaggtagat

SEQ ID NO: 3050966 - DNA, 25 bp, Homo sapien
aaccgggagacatcctggaggtcag

SEQ ID NO: 3050967 - DNA, 25 bp, Homo sapien
gcggatgtgaggcacgatgcctcat

SEQ ID NO: 3050968 - DNA, 25 bp, Homo sapien
gctcttgcaccatgtggagcggatg

SEQ ID NO: 3050969 - DNA, 25 bp, Homo sapien
actggaagccgctagaggctcttgc

SEQ ID NO: 3050970 - DNA, 25 bp, Homo sapien
ggctggacatggctgacaccttcac

SEQ ID NO: 3050971 - DNA, 25 bp, Homo sapien
gaggtccgtgatggccagaaccacc

SEQ ID NO: 3050972 - DNA, 25 bp, Homo sapien
gctgaggtccgtgatggccagaacc

SEQ ID NO: 3050973 - DNA, 25 bp, Homo sapien
ggcaggctgaggtccgtgatggcca

SEQ ID NO: 3050974 - DNA, 25 bp, Homo sapien
ggacagacagatgctgcttgcggga

SEQ ID NO: 3050975 - DNA, 25 bp, Homo sapien
acggacagacagatgctgcttgcgg

SEQ ID NO: 3050976 - DNA, 25 bp, Homo sapien
acagacagatgctgcttgcgggacg

SEQ ID NO: 3050977 - DNA, 25 bp, Homo sapien
gacagacagatgctgcttgcgggac

SEQ ID NO: 3050978 - DNA, 25 bp, Homo sapien
tgaagggcatgaactgcaggacgct

SEQ ID NO: 3050979 - DNA, 25 bp, Homo sapien
catgaaccactgcacgaactgggtg

SEQ ID NO: 3050980 - DNA, 25 bp, Homo sapien
ccagcggtgcgagaccccaggatgg

SEQ ID NO: 3050981 - DNA, 25 bp, Homo sapien
atgaactgcaggacgctgccacggc

SEQ ID NO: 3050982 - DNA, 25 bp, Homo sapien
tccatgagagtgggtgaggtcacac

SEQ ID NO: 3050983 - DNA, 25 bp, Homo sapien
ccatgagagtgggtgaggtcacact

SEQ ID NO: 3050984 - DNA, 25 bp, Homo sapien
catgagagtgggtgaggtcacactc

SEQ ID NO: 3050985 - DNA, 25 bp, Homo sapien
ttccatgagagtgggtgaggtcaca

SEQ ID NO: 3050986 - DNA, 25 bp, Homo sapien
agagggtcccgcatgttgaccgtgt

SEQ ID NO: 3050987 - DNA, 25 bp, Homo sapien
cccgcatgttgaccgtgtggagctg

SEQ ID NO: 3050988 - DNA, 25 bp, Homo sapien
ggactcggttcagagggtcccgcat

SEQ ID NO: 3050989 - DNA, 25 bp, Homo sapien
ccaggactcggttcagagggtcccg

SEQ ID NO: 3050990 - DNA, 25 bp, Homo sapien
cgaccttcacccatcggaggtaact

SEQ ID NO: 3050991 - DNA, 25 bp, Homo sapien
cagatggagcgctgggaaacagcct

SEQ ID NO: 3050992 - DNA, 25 bp, Homo sapien
cgagtgcaaaagtggtgctccccgg

SEQ ID NO: 3050993 - DNA, 25 bp, Homo sapien
aggtaactggtacatggagagccca

SEQ ID NO: 3050994 - DNA, 25 bp, Homo sapien
gccttggcaactagcgagacctcat

SEQ ID NO: 3050995 - DNA, 25 bp, Homo sapien
ccttggcaactagcgagacctcatc

SEQ ID NO: 3050996 - DNA, 25 bp, Homo sapien
caacagagcaaaaccgtgtctcaga

SEQ ID NO: 3050997 - DNA, 25 bp, Homo sapien
tgggtgtggtgccaacgcctgtagt

SEQ ID NO: 3050998 - DNA, 25 bp, Homo sapien
aaccgtgtctcagaaaaacaggctg

SEQ ID NO: 3050999 - DNA, 25 bp, Homo sapien
gcaaaaccgtgtctcagaaaaacag

SEQ ID NO: 3051000 - DNA, 25 bp, Homo sapien
gatcaagtgtatagttggtccccta

SEQ ID NO: 3051001 - DNA, 25 bp, Homo sapien
cagtcgctagctaaaggtcacagca

SEQ ID NO: 3051002 - DNA, 25 bp, Homo sapien
gcacttgtagctggcaaacctagca

SEQ ID NO: 3051003 - DNA, 25 bp, Homo sapien
gggccgatcttggtacttcctaagc

SEQ ID NO: 3051004 - DNA, 25 bp, Homo sapien
tggcagcatcggggagtgaattccc

SEQ ID NO: 3051005 - DNA, 25 bp, Homo sapien
ctctgaccagctgcaaagatgcctg

SEQ ID NO: 3051006 - DNA, 25 bp, Homo sapien
gcagcatcggggagtgaattcccag

SEQ ID NO: 3051007 - DNA, 25 bp, Homo sapien
cagagtggcagcatcggggagtgaa

SEQ ID NO: 3051008 - DNA, 25 bp, Homo sapien
ttcgaaggctgcacatcgtccaggg

SEQ ID NO: 3051009 - DNA, 25 bp, Homo sapien
tcctcattagagctcagcagtcgca

SEQ ID NO: 3051010 - DNA, 25 bp, Homo sapien
gctcgaaaggatgttggcatcgtcc

SEQ ID NO: 3051011 - DNA, 25 bp, Homo sapien
tcagcagtcgcatcaacttcgaagg

SEQ ID NO: 3051012 - DNA, 25 bp, Homo sapien
caagtgaagccggcgagggcagctg

SEQ ID NO: 3051013 - DNA, 25 bp, Homo sapien
cggtgaacaagtgaagccggcgagg

SEQ ID NO: 3051014 - DNA, 25 bp, Homo sapien
aagtgaagccggcgagggcagctgg

SEQ ID NO: 3051015 - DNA, 25 bp, Homo sapien
tgaacaagtgaagccggcgagggca

SEQ ID NO: 3051016 - DNA, 25 bp, Homo sapien
aactgagggcacaccacacggccag

SEQ ID NO: 3051017 - DNA, 25 bp, Homo sapien
aggagtaggaactgagggcacacca

SEQ ID NO: 3051018 - DNA, 25 bp, Homo sapien
tcttctggcgggtggacgcctgtcc

SEQ ID NO: 3051019 - DNA, 25 bp, Homo sapien
aatgtcttcgcggtgtctcttcttc

SEQ ID NO: 3051020 - DNA, 25 bp, Homo sapien
gaggctgtgccacttggaggagtca

SEQ ID NO: 3051021 - DNA, 25 bp, Homo sapien
tgagcaggccaggtaggatgtggcc

SEQ ID NO: 3051022 - DNA, 25 bp, Homo sapien
cccggggggtccatgaggctgtgcc

SEQ ID NO: 3051023 - DNA, 25 bp, Homo sapien
gtgagcaggccaggtaggatgtggc

SEQ ID NO: 3051024 - DNA, 25 bp, Homo sapien
gcgtgtgctccttccgcgtctcctt

SEQ ID NO: 3051025 - DNA, 25 bp, Homo sapien
gcagcgtgtgctccttccgcgtctc

SEQ ID NO: 3051026 - DNA, 25 bp, Homo sapien
agcgtgtgctccttccgcgtctcct

SEQ ID NO: 3051027 - DNA, 25 bp, Homo sapien
ccgcagcgtgtgctccttccgcgtc

SEQ ID NO: 3051028 - DNA, 25 bp, Homo sapien
caggttccagtagggcattgtgtcc

SEQ ID NO: 3051029 - DNA, 25 bp, Homo sapien
gaaacttgatctgcgtggctgtctg

SEQ ID NO: 3051030 - DNA, 25 bp, Homo sapien
gcacacatgcgctccaggatcgagt

SEQ ID NO: 3051031 - DNA, 25 bp, Homo sapien
gcacctctttgatgggccgcttggg

SEQ ID NO: 3051032 - DNA, 25 bp, Homo sapien
gagggaacacccatgccagactttc

SEQ ID NO: 3051033 - DNA, 25 bp, Homo sapien
gagaggagggaacacccatgccaga

SEQ ID NO: 3051034 - DNA, 25 bp, Homo sapien
gaggagggaacacccatgccagact

SEQ ID NO: 3051035 - DNA, 25 bp, Homo sapien
ggggagggccgagagaacctgaggc

SEQ ID NO: 3051036 - DNA, 25 bp, Homo sapien
ctggtagctgggcagatagaagtgt

SEQ ID NO: 3051037 - DNA, 25 bp, Homo sapien
aatcacttccccctaggctgagtgc

SEQ ID NO: 3051038 - DNA, 25 bp, Homo sapien
aagtaaactgttccttccaggagag

SEQ ID NO: 3051039 - DNA, 25 bp, Homo sapien
ggtagctgggcagatagaagtgtat

SEQ ID NO: 3051040 - DNA, 25 bp, Homo sapien
gaactcaacgtaactggtcaccagg

SEQ ID NO: 3051041 - DNA, 25 bp, Homo sapien
gaacttgagtctctgcgggcagacc

SEQ ID NO: 3051042 - DNA, 25 bp, Homo sapien
catataaacgcttctgccacagaga

SEQ ID NO: 3051043 - DNA, 25 bp, Homo sapien
tacagacaggttcctagctcctaga

SEQ ID NO: 3051044 - DNA, 25 bp, Homo sapien
ctctcattgtagaactgcagggtgt

SEQ ID NO: 3051045 - DNA, 25 bp, Homo sapien
tgttctcactaaacagtggccctgc

SEQ ID NO: 3051046 - DNA, 25 bp, Homo sapien
gccctgccagctggcggatcatctg

SEQ ID NO: 3051047 - DNA, 25 bp, Homo sapien
taccttccctttgatgttatcagtg

SEQ ID NO: 3051048 - DNA, 25 bp, Homo sapien
ctaggggagacggaaaggtgatggg

SEQ ID NO: 3051049 - DNA, 25 bp, Homo sapien
tgaggatttccaagatggcggctga

SEQ ID NO: 3051050 - DNA, 25 bp, Homo sapien
ctggatggactcgaaggccaggacc

SEQ ID NO: 3051051 - DNA, 25 bp, Homo sapien
cggctgagatgctgagacaggcctc

SEQ ID NO: 3051052 - DNA, 25 bp, Homo sapien
cccattctcccaggcattgaggatt

SEQ ID NO: 3051053 - DNA, 25 bp, Homo sapien
tcagcacaggggagcaaggaacggg

SEQ ID NO: 3051054 - DNA, 25 bp, Homo sapien
caaggaacgggctcagggagcgggt

SEQ ID NO: 3051055 - DNA, 25 bp, Homo sapien
gggagcaaggaacgggctcagggag

SEQ ID NO: 3051056 - DNA, 25 bp, Homo sapien
acgggctcagggagcgggtcttgac

SEQ ID NO: 3051057 - DNA, 25 bp, Homo sapien
tggagtgggcgcccgggccactgac

SEQ ID NO: 3051058 - DNA, 25 bp, Homo sapien
caccgccacccttggagtgggcgcc

SEQ ID NO: 3051059 - DNA, 25 bp, Homo sapien
tgcccccaccgccacccttggagtg

SEQ ID NO: 3051060 - DNA, 25 bp, Homo sapien
ttggagtgggcgcccgggccactga

SEQ ID NO: 3051061 - DNA, 25 bp, Homo sapien
tggtcagggttcaggatcttgccct

SEQ ID NO: 3051062 - DNA, 25 bp, Homo sapien
agaagggcacctcagctcctgtgcg

SEQ ID NO: 3051063 - DNA, 25 bp, Homo sapien
gcatccaggtctcgaagaagggcac

SEQ ID NO: 3051064 - DNA, 25 bp, Homo sapien
cctgtgcgcgactcggacagaatca

SEQ ID NO: 3051065 - DNA, 25 bp, Homo sapien
ggctgcactgtttcccgccaggctg

SEQ ID NO: 3051066 - DNA, 25 bp, Homo sapien
ctgcactgtttcccgccaggctgct

SEQ ID NO: 3051067 - DNA, 25 bp, Homo sapien
gctgcactgtttcccgccaggctgc

SEQ ID NO: 3051068 - DNA, 25 bp, Homo sapien
cccacagaactaactggctgagagg

SEQ ID NO: 3051069 - DNA, 25 bp, Homo sapien
gaggcccacagaactaactggctga

SEQ ID NO: 3051070 - DNA, 25 bp, Homo sapien
tgaggcccacagaactaactggctg

SEQ ID NO: 3051071 - DNA, 25 bp, Homo sapien
ggcccacagaactaactggctgaga

SEQ ID NO: 3051072 - DNA, 25 bp, Homo sapien
ccgtcccggtcgctcccctctctca

SEQ ID NO: 3051073 - DNA, 25 bp, Homo sapien
cgtcccggtcgctcccctctctcac

SEQ ID NO: 3051074 - DNA, 25 bp, Homo sapien
catgaggaaggagatgtcaaacagc

SEQ ID NO: 3051075 - DNA, 25 bp, Homo sapien
ctctgaaccataggtctgggccaca

SEQ ID NO: 3051076 - DNA, 25 bp, Homo sapien
tgaaccataggtctgggccacatgg

SEQ ID NO: 3051077 - DNA, 25 bp, Homo sapien
tgtcaaacagcagggcccggacgga

SEQ ID NO: 3051078 - DNA, 25 bp, Homo sapien
tttcttcgctgccataggttgtgaa

SEQ ID NO: 3051079 - DNA, 25 bp, Homo sapien
tgctttcttcgctgccataggttgt

SEQ ID NO: 3051080 - DNA, 25 bp, Homo sapien
tcttcgctgccataggttgtgaatt

SEQ ID NO: 3051081 - DNA, 25 bp, Homo sapien
ttcgctgccataggttgtgaattca

SEQ ID NO: 3051082 - DNA, 25 bp, Homo sapien
cacttaggtcgtgagaacaggccct

SEQ ID NO: 3051083 - DNA, 25 bp, Homo sapien
ttccagggcaatcaaaaaaggcaac

SEQ ID NO: 3051084 - DNA, 25 bp, Homo sapien
gcaacagaatttgagagccccttat

SEQ ID NO: 3051085 - DNA, 25 bp, Homo sapien
taactgggcatacttggaattcctc

SEQ ID NO: 3051086 - DNA, 25 bp, Homo sapien
ggatttcagctttccagtggcggcg

SEQ ID NO: 3051087 - DNA, 25 bp, Homo sapien
gactcttcccggacagcatgtggcc

SEQ ID NO: 3051088 - DNA, 25 bp, Homo sapien
gaatttccgggcgaaggatttcagc

SEQ ID NO: 3051089 - DNA, 25 bp, Homo sapien
cagtccctccggtgacttagagtgg

SEQ ID NO: 3051090 - DNA, 25 bp, Homo sapien
atttctgctggggtgcgtgctctcg

SEQ ID NO: 3051091 - DNA, 25 bp, Homo sapien
tggcattctctcccgatttctgctg

SEQ ID NO: 3051092 - DNA, 25 bp, Homo sapien
gggtgcgtgctctcggtccgctttg

SEQ ID NO: 3051093 - DNA, 25 bp, Homo sapien
ccggaggatcagctggatgttgggc

SEQ ID NO: 3051094 - DNA, 25 bp, Homo sapien
tagccataaggttgttgacgctggc

SEQ ID NO: 3051095 - DNA, 25 bp, Homo sapien
cattcttggagcaggaagtttgtac

SEQ ID NO: 3051096 - DNA, 25 bp, Homo sapien
cgcttagccataaggttgttgacgc

SEQ ID NO: 3051097 - DNA, 25 bp, Homo sapien
ccacattcttggagcaggaagtttg

SEQ ID NO: 3051098 - DNA, 25 bp, Homo sapien
agcgctggtcagctttgtccaacaa

SEQ ID NO: 3051099 - DNA, 25 bp, Homo sapien
gagcttcagcaggaactcaaaagca

SEQ ID NO: 3051100 - DNA, 25 bp, Homo sapien
gctggtcagctttgtccaacaaggg

SEQ ID NO: 3051101 - DNA, 25 bp, Homo sapien
tcagcaggaactcaaaagcacagtt

SEQ ID NO: 3051102 - DNA, 25 bp, Homo sapien
tccatgagagtacttcttcaacttc

SEQ ID NO: 3051103 - DNA, 25 bp, Homo sapien
cttgtctccatgagagtacttcttc

SEQ ID NO: 3051104 - DNA, 25 bp, Homo sapien
gtctccatgagagtacttcttcaac

SEQ ID NO: 3051105 - DNA, 25 bp, Homo sapien
tcaacttcaccaaaacctgtggaat

SEQ ID NO: 3051106 - DNA, 25 bp, Homo sapien
ccgtaccctcgggagactcaatgag

SEQ ID NO: 3051107 - DNA, 25 bp, Homo sapien
agctgtccacttgagctcctccgta

SEQ ID NO: 3051108 - DNA, 25 bp, Homo sapien
aggaaagtgaaagctgtccacttga

SEQ ID NO: 3051109 - DNA, 25 bp, Homo sapien
gggagactcaatgagccccacgaag

SEQ ID NO: 3051110 - DNA, 25 bp, Homo sapien
gggaagccggtcttgtgcatctgct

SEQ ID NO: 3051111 - DNA, 25 bp, Homo sapien
ctcgagcaggatcacggcgtggaca

SEQ ID NO: 3051112 - DNA, 25 bp, Homo sapien
agggactgcgtctcgcctgtcaggt

SEQ ID NO: 3051113 - DNA, 25 bp, Homo sapien
tctgctccgcatgcacagacagcat

SEQ ID NO: 3051114 - DNA, 25 bp, Homo sapien
gagaatgctcgatggcagtccaaga

SEQ ID NO: 3051115 - DNA, 25 bp, Homo sapien
actgctcggcctgactccggagctg

SEQ ID NO: 3051116 - DNA, 25 bp, Homo sapien
tccaagtttcaagagagaatgctcg

SEQ ID NO: 3051117 - DNA, 25 bp, Homo sapien
gttgctgagattggccaggatctct

SEQ ID NO: 3051118 - DNA, 25 bp, Homo sapien
gaactcctcgattttggcactccct

SEQ ID NO: 3051119 - DNA, 25 bp, Homo sapien
ggccctgaactcctcgattttggca

SEQ ID NO: 3051120 - DNA, 25 bp, Homo sapien
tccggcacacgaaaccacacaggaa

SEQ ID NO: 3051121 - DNA, 25 bp, Homo sapien
ttggcactccctccggcacacgaaa

SEQ ID NO: 3051122 - DNA, 25 bp, Homo sapien
aacatttatcaagggcccaaggtag

SEQ ID NO: 3051123 - DNA, 25 bp, Homo sapien
aacaagagacctgtaggtggtccca

SEQ ID NO: 3051124 - DNA, 25 bp, Homo sapien
aaaacaagctctccaaccaggtcct

SEQ ID NO: 3051125 - DNA, 25 bp, Homo sapien
ggtcctgaagcctcgagagtagccc

SEQ ID NO: 3051126 - DNA, 25 bp, Homo sapien
ttggttgattggctcgggtgccacc

SEQ ID NO: 3051127 - DNA, 25 bp, Homo sapien
tggttgattggctcgggtgccaccc

SEQ ID NO: 3051128 - DNA, 25 bp, Homo sapien
gttggttgattggctcgggtgccac

SEQ ID NO: 3051129 - DNA, 25 bp, Homo sapien
tgttggttgattggctcgggtgcca

SEQ ID NO: 3051130 - DNA, 25 bp, Homo sapien
tcggcacagtccgatgcattcctct

SEQ ID NO: 3051131 - DNA, 25 bp, Homo sapien
ttctccaggcgctgaaggcacatgg

SEQ ID NO: 3051132 - DNA, 25 bp, Homo sapien
tggagggcgctaagaagggctcggc

SEQ ID NO: 3051133 - DNA, 25 bp, Homo sapien
cctcctctagtttggcgatgtgcag

SEQ ID NO: 3051134 - DNA, 25 bp, Homo sapien
caaaacatgtccatgatgtccagca

SEQ ID NO: 3051135 - DNA, 25 bp, Homo sapien
acatgtccatgatgtccagcaatgc

SEQ ID NO: 3051136 - DNA, 25 bp, Homo sapien
aaaacatgtccatgatgtccagcaa

SEQ ID NO: 3051137 - DNA, 25 bp, Homo sapien
cacaaaacatgtccatgatgtccag

SEQ ID NO: 3051138 - DNA, 25 bp, Homo sapien
ggacacacaggtcccgagaaaagtc

SEQ ID NO: 3051139 - DNA, 25 bp, Homo sapien
ctggacacacaggtcccgagaaaag

SEQ ID NO: 3051140 - DNA, 25 bp, Homo sapien
cacacaggtcccgagaaaagtcatc

SEQ ID NO: 3051141 - DNA, 25 bp, Homo sapien
cacaggtcccgagaaaagtcatcaa

SEQ ID NO: 3051142 - DNA, 25 bp, Homo sapien
tcccatggaagtccagcaatgccag

SEQ ID NO: 3051143 - DNA, 25 bp, Homo sapien
gtgctgcctatccagcctcacgggt

SEQ ID NO: 3051144 - DNA, 25 bp, Homo sapien
agctcctgagtgtctatggtcatac

SEQ ID NO: 3051145 - DNA, 25 bp, Homo sapien
tgtcatccccaatctagctcctgag

SEQ ID NO: 3051146 - DNA, 25 bp, Homo sapien
gctgtgaggacagaagagtaggaca

SEQ ID NO: 3051147 - DNA, 25 bp, Homo sapien
tgaggacagaagagtaggacaccat

SEQ ID NO: 3051148 - DNA, 25 bp, Homo sapien
ttactgatggctgtgaggacagaag

SEQ ID NO: 3051149 - DNA, 25 bp, Homo sapien
cttactgatggctgtgaggacagaa

SEQ ID NO: 3051150 - DNA, 25 bp, Homo sapien
tagacaactagtctcccacagttga

SEQ ID NO: 3051151 - DNA, 25 bp, Homo sapien
tcttcaacccaagcaaggagaggca

SEQ ID NO: 3051152 - DNA, 25 bp, Homo sapien
tgcaaatggtatcagcataagccca

SEQ ID NO: 3051153 - DNA, 25 bp, Homo sapien
gttcctgcctctgtcagacttactg

SEQ ID NO: 3051154 - DNA, 25 bp, Homo sapien
agagatagggtctatgttgtctagg

SEQ ID NO: 3051155 - DNA, 25 bp, Homo sapien
agagacagagtttcgccatgttggc

SEQ ID NO: 3051156 - DNA, 25 bp, Homo sapien
cacatccagcttatttttgtattag

SEQ ID NO: 3051157 - DNA, 25 bp, Homo sapien
ctcctacctcggcctcaaaaagtgc

SEQ ID NO: 3051158 - DNA, 25 bp, Homo sapien
attgggggatggtccaatcatggcc

SEQ ID NO: 3051159 - DNA, 25 bp, Homo sapien
ttgggggatggtccaatcatggcct

SEQ ID NO: 3051160 - DNA, 25 bp, Homo sapien
gatggtccaatcatggcctgctcta

SEQ ID NO: 3051161 - DNA, 25 bp, Homo sapien
ggggatggtccaatcatggcctgct

SEQ ID NO: 3051162 - DNA, 25 bp, Homo sapien
aaatggcttgcttcaggttgaccac

SEQ ID NO: 3051163 - DNA, 25 bp, Homo sapien
ttggtagtcactccagcgctccttc

SEQ ID NO: 3051164 - DNA, 25 bp, Homo sapien
ccaggtggctcctttaggaaagaat

SEQ ID NO: 3051165 - DNA, 25 bp, Homo sapien
tttcttcatgttgattgcccattgg

SEQ ID NO: 3051166 - DNA, 25 bp, Homo sapien
tgagcaggtggcagcggtggcggcc

SEQ ID NO: 3051167 - DNA, 25 bp, Homo sapien
gagcaggtggcagcggtggcggcca

SEQ ID NO: 3051168 - DNA, 25 bp, Homo sapien
ctgagcaggtggcagcggtggcggc

SEQ ID NO: 3051169 - DNA, 25 bp, Homo sapien
agcaggtggcagcggtggcggccag

SEQ ID NO: 3051170 - DNA, 25 bp, Homo sapien
aaaggagaagatgcgggaagattta

SEQ ID NO: 3051171 - DNA, 25 bp, Homo sapien
taagcgagacagaggaatttgaaag

SEQ ID NO: 3051172 - DNA, 25 bp, Homo sapien
tgcgggaagatttaagcgagacaga

SEQ ID NO: 3051173 - DNA, 25 bp, Homo sapien
gatttaagcgagacagaggaatttg

SEQ ID NO: 3051174 - DNA, 25 bp, Homo sapien
taaacagggcatcaaggagttaagg

SEQ ID NO: 3051175 - DNA, 25 bp, Homo sapien
gcagtcctggttgcctaattacgcc

SEQ ID NO: 3051176 - DNA, 25 bp, Homo sapien
cactaagaaagtatcggccgagcgc

SEQ ID NO: 3051177 - DNA, 25 bp, Homo sapien
ttagctctaaaagcgtcccttggcc

SEQ ID NO: 3051178 - DNA, 25 bp, Homo sapien
cattttggcacttgtcaagaagctc

SEQ ID NO: 3051179 - DNA, 25 bp, Homo sapien
tgtcaagaagctcactttctattgg

SEQ ID NO: 3051180 - DNA, 25 bp, Homo sapien
ggtggtaggcatcgccattttggca

SEQ ID NO: 3051181 - DNA, 25 bp, Homo sapien
aatccagttctaggtggtaggcatc

SEQ ID NO: 3051182 - DNA, 25 bp, Homo sapien
ggagtaacaaacgccaaccaataga

SEQ ID NO: 3051183 - DNA, 25 bp, Homo sapien
ggaacgccccgctgtcttctgggaa

SEQ ID NO: 3051184 - DNA, 25 bp, Homo sapien
gccaaccaatagaaatgcagcaagg

SEQ ID NO: 3051185 - DNA, 25 bp, Homo sapien
aaatgcagcaaggaacgccccgctg

SEQ ID NO: 3051186 - DNA, 25 bp, Homo sapien
tctcaacagggacaggggccgaact

SEQ ID NO: 3051187 - DNA, 25 bp, Homo sapien
acagggacaggggccgaactcccat

SEQ ID NO: 3051188 - DNA, 25 bp, Homo sapien
ctcaacagggacaggggccgaactc

SEQ ID NO: 3051189 - DNA, 25 bp, Homo sapien
tcaacagggacaggggccgaactcc

SEQ ID NO: 3051190 - DNA, 25 bp, Homo sapien
tgctaattgcaaaaacgcggttgtt

SEQ ID NO: 3051191 - DNA, 25 bp, Homo sapien
tgtacttggtggtgcctagatgatt

SEQ ID NO: 3051192 - DNA, 25 bp, Homo sapien
ggctgtctggttgcaacactgctaa

SEQ ID NO: 3051193 - DNA, 25 bp, Homo sapien
tgcctagatgattaggagagttgct

SEQ ID NO: 3051194 - DNA, 25 bp, Homo sapien
tttccctccccttgcaacgtgtctc

SEQ ID NO: 3051195 - DNA, 25 bp, Homo sapien
ctccccttgcaacgtgtctctggtg

SEQ ID NO: 3051196 - DNA, 25 bp, Homo sapien
tccccttgcaacgtgtctctggtgc

SEQ ID NO: 3051197 - DNA, 25 bp, Homo sapien
ccctccccttgcaacgtgtctctgg

SEQ ID NO: 3051198 - DNA, 25 bp, Homo sapien
tcctggactctttactgtggagctc

SEQ ID NO: 3051199 - DNA, 25 bp, Homo sapien
gttctgtaggcaacaaaacccttgc

SEQ ID NO: 3051200 - DNA, 25 bp, Homo sapien
atttggctgtatgaaaaagtgttcc

SEQ ID NO: 3051201 - DNA, 25 bp, Homo sapien
tgctcccaagaatattaaatttggc

SEQ ID NO: 3051202 - DNA, 25 bp, Homo sapien
tcagctggctgctcaggacttcctg

SEQ ID NO: 3051203 - DNA, 25 bp, Homo sapien
ggctcagctggctgctcaggacttc

SEQ ID NO: 3051204 - DNA, 25 bp, Homo sapien
ggctgctcaggacttcctgcacttc

SEQ ID NO: 3051205 - DNA, 25 bp, Homo sapien
agctggctgctcaggacttcctgca

SEQ ID NO: 3051206 - DNA, 25 bp, Homo sapien
cgcagctgtggccagcaagttttag

SEQ ID NO: 3051207 - DNA, 25 bp, Homo sapien
cagctgtggccagcaagttttaggg

SEQ ID NO: 3051208 - DNA, 25 bp, Homo sapien
tgccgcagctgtggccagcaagttt

SEQ ID NO: 3051209 - DNA, 25 bp, Homo sapien
agctgtggccagcaagttttagggg

SEQ ID NO: 3051210 - DNA, 25 bp, Homo sapien
agatgatggtgatgatcatgacggc

SEQ ID NO: 3051211 - DNA, 25 bp, Homo sapien
tgatggtgatgatcatgacggccat

SEQ ID NO: 3051212 - DNA, 25 bp, Homo sapien
tcacagctaagaacagagatgatgg

SEQ ID NO: 3051213 - DNA, 25 bp, Homo sapien
cagctaagaacagagatgatggtga

SEQ ID NO: 3051214 - DNA, 25 bp, Homo sapien
gtgataactgctacactatagaatc

SEQ ID NO: 3051215 - DNA, 25 bp, Homo sapien
gttccaccgcggctcaaacctagga

SEQ ID NO: 3051216 - DNA, 25 bp, Homo sapien
caaacctaggaccttctgcatgtaa

SEQ ID NO: 3051217 - DNA, 25 bp, Homo sapien
gatgtgataactgctacactataga

SEQ ID NO: 3051218 - DNA, 25 bp, Homo sapien
tctccatgccggacggagacaaggt

SEQ ID NO: 3051219 - DNA, 25 bp, Homo sapien
tctttctctctagcccgatgacatt

SEQ ID NO: 3051220 - DNA, 25 bp, Homo sapien
gctactactgttactaccgttgtta

SEQ ID NO: 3051221 - DNA, 25 bp, Homo sapien
tattatttagctgccccatgcctca

SEQ ID NO: 3051222 - DNA, 25 bp, Homo sapien
gggtgctgcatggagatcatgtccc

SEQ ID NO: 3051223 - DNA, 25 bp, Homo sapien
gctgtcaagcgggagcagctcaaga

SEQ ID NO: 3051224 - DNA, 25 bp, Homo sapien
tgtccgctacgaccctgagagcgac

SEQ ID NO: 3051225 - DNA, 25 bp, Homo sapien
tctccgacgccatctttgaactggg

SEQ ID NO: 3051226 - DNA, 25 bp, Homo sapien
tcaggaggcgtacctgctggcgttc

SEQ ID NO: 3051227 - DNA, 25 bp, Homo sapien
ggtgactgacctccgcatgatcggg

SEQ ID NO: 3051228 - DNA, 25 bp, Homo sapien
gctggcgttcgagcactacgtcaac

SEQ ID NO: 3051229 - DNA, 25 bp, Homo sapien
aagtctaaagcctcaggcggccaga

SEQ ID NO: 3051230 - DNA, 25 bp, Homo sapien
tcagggctgcatgtcggcagggatg

SEQ ID NO: 3051231 - DNA, 25 bp, Homo sapien
gatggatgggtggacacagatgccc

SEQ ID NO: 3051232 - DNA, 25 bp, Homo sapien
catgtcggcagggatggatgggtgg

SEQ ID NO: 3051233 - DNA, 25 bp, Homo sapien
gatgcccccggaagccatggggatt

SEQ ID NO: 3051234 - DNA, 25 bp, Homo sapien
tatgctgcccgtcagggcactgtcc

SEQ ID NO: 3051235 - DNA, 25 bp, Homo sapien
tattactccagtcccatgggtaggc

SEQ ID NO: 3051236 - DNA, 25 bp, Homo sapien
tgcacacacggacatgggaaggcaa

SEQ ID NO: 3051237 - DNA, 25 bp, Homo sapien
tccccaatcgttcaggtgttccaac

SEQ ID NO: 3051238 - DNA, 25 bp, Homo sapien
tcctgggggccattggtgctaatga

SEQ ID NO: 3051239 - DNA, 25 bp, Homo sapien
gccttgatgtgggtgctcagcatgc

SEQ ID NO: 3051240 - DNA, 25 bp, Homo sapien
ctgctctagagcggcagctgtccca

SEQ ID NO: 3051241 - DNA, 25 bp, Homo sapien
cagcaggtgcagtatcggtgggagg

SEQ ID NO: 3051242 - DNA, 25 bp, Homo sapien
ttttatggtaattgttgctcgtcta

SEQ ID NO: 3051243 - DNA, 25 bp, Homo sapien
caccccacaaactgaccagatggag

SEQ ID NO: 3051244 - DNA, 25 bp, Homo sapien
ccagctcagctgtgaactattggat

SEQ ID NO: 3051245 - DNA, 25 bp, Homo sapien
gaagtgcagagttcgattctgtaca

SEQ ID NO: 3051246 - DNA, 25 bp, Homo sapien
gcggaattctccatgcccgagcggt

SEQ ID NO: 3051247 - DNA, 25 bp, Homo sapien
atgttgttcagggtccgcaggtccg

SEQ ID NO: 3051248 - DNA, 25 bp, Homo sapien
cagcttggtgaagcgggaagtctcc

SEQ ID NO: 3051249 - DNA, 25 bp, Homo sapien
aagggccggttcttcagcaccagag

SEQ ID NO: 3051250 - DNA, 25 bp, Homo sapien
ggaggtctgcgaggacctggcaggc

SEQ ID NO: 3051251 - DNA, 25 bp, Homo sapien
agtgaggcggactccccgagctcct

SEQ ID NO: 3051252 - DNA, 25 bp, Homo sapien
gacgacagcagtgaggcggactccc

SEQ ID NO: 3051253 - DNA, 25 bp, Homo sapien
cgagctcctctgaggaggaaccgga

SEQ ID NO: 3051254 - DNA, 25 bp, Homo sapien
gctttttgctgtgtagttccctctg

SEQ ID NO: 3051255 - DNA, 25 bp, Homo sapien
gagtgccataccttctcccaggcct

SEQ ID NO: 3051256 - DNA, 25 bp, Homo sapien
tgctttttgctgtgtagttccctct

SEQ ID NO: 3051257 - DNA, 25 bp, Homo sapien
gttgaattgaactgcgtctgcctcc

SEQ ID NO: 3051258 - DNA, 25 bp, Homo sapien
ggcatgagtctgtttcccaagctag

SEQ ID NO: 3051259 - DNA, 25 bp, Homo sapien
tcttacttgtcctttgaggccccaa

SEQ ID NO: 3051260 - DNA, 25 bp, Homo sapien
cccaagctagactgtgtctgaatca

SEQ ID NO: 3051261 - DNA, 25 bp, Homo sapien
tcctcctcggtaagcgccagggagt

SEQ ID NO: 3051262 - DNA, 25 bp, Homo sapien
gaagtcgaacatggcactgagcagg

SEQ ID NO: 3051263 - DNA, 25 bp, Homo sapien
tgaacaacgaagcaaagcgcaccat

SEQ ID NO: 3051264 - DNA, 25 bp, Homo sapien
cactgtctggtccttcacgttgaac

SEQ ID NO: 3051265 - DNA, 25 bp, Homo sapien
aaatcgcccctgtagtttgccagag

SEQ ID NO: 3051266 - DNA, 25 bp, Homo sapien
gggcaaggcattcaccaaagttaat

SEQ ID NO: 3051267 - DNA, 25 bp, Homo sapien
tccaataagcctgaatctgagtgtc

SEQ ID NO: 3051268 - DNA, 25 bp, Homo sapien
caaaagcaggaagcgtctgggtgca

SEQ ID NO: 3051269 - DNA, 25 bp, Homo sapien
acagcgggcgtgaagctcatggaga

SEQ ID NO: 3051270 - DNA, 25 bp, Homo sapien
catgcgggtacatgttcataggaca

SEQ ID NO: 3051271 - DNA, 25 bp, Homo sapien
aaaggtcacggaagcccgggatgtg

SEQ ID NO: 3051272 - DNA, 25 bp, Homo sapien
ttcgcccactgcgtccatgcgggta

SEQ ID NO: 3051273 - DNA, 25 bp, Homo sapien
taggtgaagatctctcgatgggccc

SEQ ID NO: 3051274 - DNA, 25 bp, Homo sapien
gcctcgttatgacgctgggcagcca

SEQ ID NO: 3051275 - DNA, 25 bp, Homo sapien
tagacggtgcccgttgctgttggac

SEQ ID NO: 3051276 - DNA, 25 bp, Homo sapien
gcgcagaccatttagggcctcgtta

SEQ ID NO: 3051277 - DNA, 25 bp, Homo sapien
cgattgatgcggacgatggagcaat

SEQ ID NO: 3051278 - DNA, 25 bp, Homo sapien
cgacattgctggcagcggttgcgat

SEQ ID NO: 3051279 - DNA, 25 bp, Homo sapien
tctgctggatgctccgacggaaaaa

SEQ ID NO: 3051280 - DNA, 25 bp, Homo sapien
cacagagagacacttcttgaagcga

SEQ ID NO: 3051281 - DNA, 25 bp, Homo sapien
ggcaacgtccccacacactttacac

SEQ ID NO: 3051282 - DNA, 25 bp, Homo sapien
gtggaagcccgaggcaacgtcccca

SEQ ID NO: 3051283 - DNA, 25 bp, Homo sapien
tttacacagtaacaccatgccattc

SEQ ID NO: 3051284 - DNA, 25 bp, Homo sapien
cgcaggcgtgcacaccgtagtggaa

SEQ ID NO: 3051285 - DNA, 25 bp, Homo sapien
ctcttgctgggggacactcggctgc

SEQ ID NO: 3051286 - DNA, 25 bp, Homo sapien
ggtgctcttgctgggggacactcgg

SEQ ID NO: 3051287 - DNA, 25 bp, Homo sapien
tcttgctgggggacactcggctgct

SEQ ID NO: 3051288 - DNA, 25 bp, Homo sapien
tgctcttgctgggggacactcggct

SEQ ID NO: 3051289 - DNA, 25 bp, Homo sapien
ggatgacgacgaggaagatgaggaa

SEQ ID NO: 3051290 - DNA, 25 bp, Homo sapien
gccacttgtagactcccaggggggc

SEQ ID NO: 3051291 - DNA, 25 bp, Homo sapien
caggggggctcccattatagaagga

SEQ ID NO: 3051292 - DNA, 25 bp, Homo sapien
ttgtagactcccaggggggctccca

SEQ ID NO: 3051293 - DNA, 25 bp, Homo sapien
aagtaggtgggacagccttgggtca

SEQ ID NO: 3051294 - DNA, 25 bp, Homo sapien
tggaagctgccattggagttgtcac

SEQ ID NO: 3051295 - DNA, 25 bp, Homo sapien
tgtcactatagagggattcagggct

SEQ ID NO: 3051296 - DNA, 25 bp, Homo sapien
tcccaaaggagcgagccgggtcttg

SEQ ID NO: 3051297 - DNA, 25 bp, Homo sapien
tggagccaatgtaggtgatgacgcc

SEQ ID NO: 3051298 - DNA, 25 bp, Homo sapien
gagccaatgtaggtgatgacgccac

SEQ ID NO: 3051299 - DNA, 25 bp, Homo sapien
ctggagccaatgtaggtgatgacgc

SEQ ID NO: 3051300 - DNA, 25 bp, Homo sapien
ggagccaatgtaggtgatgacgcca

SEQ ID NO: 3051301 - DNA, 25 bp, Homo sapien
ggagtctatccctgtgtccaaaaag

SEQ ID NO: 3051302 - DNA, 25 bp, Homo sapien
ggaagtacaaactgtccagcctggg

SEQ ID NO: 3051303 - DNA, 25 bp, Homo sapien
aaaggacttcgaggtgcgagttgca

SEQ ID NO: 3051304 - DNA, 25 bp, Homo sapien
gaagggaaggaatctgcccagcctg

SEQ ID NO: 3051305 - DNA, 25 bp, Homo sapien
agatgggggtaagacaatgctcgca

SEQ ID NO: 3051306 - DNA, 25 bp, Homo sapien
tgggggtaagacaatgctcgcagaa

SEQ ID NO: 3051307 - DNA, 25 bp, Homo sapien
gatgggggtaagacaatgctcgcag

SEQ ID NO: 3051308 - DNA, 25 bp, Homo sapien
atgggggtaagacaatgctcgcaga

SEQ ID NO: 3051309 - DNA, 25 bp, Homo sapien
cacgtgtgcctctcgcacgtggctc

SEQ ID NO: 3051310 - DNA, 25 bp, Homo sapien
tgctccacgtgtgcctctcgcacgt

SEQ ID NO: 3051311 - DNA, 25 bp, Homo sapien
gtccctgctccacgtgtgcctctcg

SEQ ID NO: 3051312 - DNA, 25 bp, Homo sapien
tgtgcctctcgcacgtggctcccca

SEQ ID NO: 3051313 - DNA, 25 bp, Homo sapien
atcgagagcagtcgccccgcctcct

SEQ ID NO: 3051314 - DNA, 25 bp, Homo sapien
cgagagcagtcgccccgcctcctac

SEQ ID NO: 3051315 - DNA, 25 bp, Homo sapien
caatcgagagcagtcgccccgcctc

SEQ ID NO: 3051316 - DNA, 25 bp, Homo sapien
tcaatcgagagcagtcgccccgcct

SEQ ID NO: 3051317 - DNA, 25 bp, Homo sapien
gctggaccccgaacgatagcagggc

SEQ ID NO: 3051318 - DNA, 25 bp, Homo sapien
ccccggccaccaggtcgtgggctgg

SEQ ID NO: 3051319 - DNA, 25 bp, Homo sapien
gaccccgaacgatagcagggccagg

SEQ ID NO: 3051320 - DNA, 25 bp, Homo sapien
gtcgtgggctggaccccgaacgata

SEQ ID NO: 3051321 - DNA, 25 bp, Homo sapien
tgttgttggagtccagggtcgtcat

SEQ ID NO: 3051322 - DNA, 25 bp, Homo sapien
ttgttgttggagtccagggtcgtca

SEQ ID NO: 3051323 - DNA, 25 bp, Homo sapien
gttgttgttggagtccagggtcgtc

SEQ ID NO: 3051324 - DNA, 25 bp, Homo sapien
gtgttgttgttggagtccagggtcg

SEQ ID NO: 3051325 - DNA, 25 bp, Homo sapien
cccctgggcactggctaagggcggg

SEQ ID NO: 3051326 - DNA, 25 bp, Homo sapien
caaactggaccttgactcaaactag

SEQ ID NO: 3051327 - DNA, 25 bp, Homo sapien
agaggttgcgatcgccgctgttgcc

SEQ ID NO: 3051328 - DNA, 25 bp, Homo sapien
ctgagagcggtcattcaaactggac

SEQ ID NO: 3051329 - DNA, 25 bp, Homo sapien
tgcagaagggttggacgttgaggca

SEQ ID NO: 3051330 - DNA, 25 bp, Homo sapien
cctgcagcaaggtcttggggtggcc

SEQ ID NO: 3051331 - DNA, 25 bp, Homo sapien
agggttggacgttgaggcaacggag

SEQ ID NO: 3051332 - DNA, 25 bp, Homo sapien
caaggtcttggggtggccggactgc

SEQ ID NO: 3051333 - DNA, 25 bp, Homo sapien
aagaggcgagacgtgtgccctgcta

SEQ ID NO: 3051334 - DNA, 25 bp, Homo sapien
tgcaaccaggaagtaagtaggtgat

SEQ ID NO: 3051335 - DNA, 25 bp, Homo sapien
tagcaaggagggtcgggtctctgca

SEQ ID NO: 3051336 - DNA, 25 bp, Homo sapien
tggcgaatctggagctcccggtgca

SEQ ID NO: 3051337 - DNA, 25 bp, Homo sapien
cggcactggagcaggtaccatgtga

SEQ ID NO: 3051338 - DNA, 25 bp, Homo sapien
aatctcagccgccttttgcccgagc

SEQ ID NO: 3051339 - DNA, 25 bp, Homo sapien
agggagcgcctcgtgccccagtgac

SEQ ID NO: 3051340 - DNA, 25 bp, Homo sapien
gttccctcggcagtaatatttcact

SEQ ID NO: 3051341 - DNA, 25 bp, Homo sapien
ttttccaacagccggcacgttgagc

SEQ ID NO: 3051342 - DNA, 25 bp, Homo sapien
agccggcacgttgagctcttgcgcg

SEQ ID NO: 3051343 - DNA, 25 bp, Homo sapien
acagccggcacgttgagctcttgcg

SEQ ID NO: 3051344 - DNA, 25 bp, Homo sapien
tccaacagccggcacgttgagctct

SEQ ID NO: 3051345 - DNA, 25 bp, Homo sapien
caagactgtcgggatttgtagtcca

SEQ ID NO: 3051346 - DNA, 25 bp, Homo sapien
aagtgggcggactgcgtgcctttcc

SEQ ID NO: 3051347 - DNA, 25 bp, Homo sapien
tgtagtccaccgacaaagtgggcgg

SEQ ID NO: 3051348 - DNA, 25 bp, Homo sapien
tgcgcaacgacaagactgtcgggat

SEQ ID NO: 3051349 - DNA, 25 bp, Homo sapien
tccagttgactttggggtgagtcat

SEQ ID NO: 3051350 - DNA, 25 bp, Homo sapien
tttgtctctaaaaggccagctatct

SEQ ID NO: 3051351 - DNA, 25 bp, Homo sapien
ggcaacaccctgtgcaaattctggg

SEQ ID NO: 3051352 - DNA, 25 bp, Homo sapien
ccatgtgcctgggagagactcactc

SEQ ID NO: 3051353 - DNA, 25 bp, Homo sapien
gaaaccattgcccagagtagaaacc

SEQ ID NO: 3051354 - DNA, 25 bp, Homo sapien
gaggcatggattgtccttggcagtg

SEQ ID NO: 3051355 - DNA, 25 bp, Homo sapien
agtggagactaagccccagatgacc

SEQ ID NO: 3051356 - DNA, 25 bp, Homo sapien
ctggcatccagtacatgctctgcta

SEQ ID NO: 3051357 - DNA, 25 bp, Homo sapien
tacatgctctgctaaggcctcctgt

SEQ ID NO: 3051358 - DNA, 25 bp, Homo sapien
ctgtccttgttctaaccctggaggg

SEQ ID NO: 3051359 - DNA, 25 bp, Homo sapien
cctgaactgtccttgttctaaccct

SEQ ID NO: 3051360 - DNA, 25 bp, Homo sapien
gaccactgttgcagaacctttgctt

SEQ ID NO: 3051361 - DNA, 25 bp, Homo sapien
ctcacagaccactgttgcagaacct

SEQ ID NO: 3051362 - DNA, 25 bp, Homo sapien
gcggaacgcgctgaaagttttggcg

SEQ ID NO: 3051363 - DNA, 25 bp, Homo sapien
tgccagctgaaagcgagctccagga

SEQ ID NO: 3051364 - DNA, 25 bp, Homo sapien
gggcacttttgttcagtcgttagct

SEQ ID NO: 3051365 - DNA, 25 bp, Homo sapien
tgttcagtcgttagctggtgccagc

SEQ ID NO: 3051366 - DNA, 25 bp, Homo sapien
aggagagcagcacactagcatcctg

SEQ ID NO: 3051367 - DNA, 25 bp, Homo sapien
agcacactagcatcctgctcgcgga

SEQ ID NO: 3051368 - DNA, 25 bp, Homo sapien
cgcggaagcctggaacgcaggacat

SEQ ID NO: 3051369 - DNA, 25 bp, Homo sapien
atcctgctcgcggaagcctggaacg

SEQ ID NO: 3051370 - DNA, 25 bp, Homo sapien
cagacaccttatccattaaggccac

SEQ ID NO: 3051371 - DNA, 25 bp, Homo sapien
agacaccttatccattaaggccaca

SEQ ID NO: 3051372 - DNA, 25 bp, Homo sapien
gcctcccgaagatgctaggagtcgt

SEQ ID NO: 3051373 - DNA, 25 bp, Homo sapien
gacttgttggctcaattgcttggac

SEQ ID NO: 3051374 - DNA, 25 bp, Homo sapien
gagaggttttcacatcaggccagag

SEQ ID NO: 3051375 - DNA, 25 bp, Homo sapien
gagagataggaagaagcgctcaaca

SEQ ID NO: 3051376 - DNA, 25 bp, Homo sapien
cgcatgcgtcctccggttggcggcg

SEQ ID NO: 3051377 - DNA, 25 bp, Homo sapien
ctccccgcgcatgcgtcctccggtt

SEQ ID NO: 3051378 - DNA, 25 bp, Homo sapien
tctcggctcccggtgcactcccgcc

SEQ ID NO: 3051379 - DNA, 25 bp, Homo sapien
cgcgcatgcgtcctccggttggcgg

SEQ ID NO: 3051380 - DNA, 25 bp, Homo sapien
ccctcctccgcctcggtgcccggcg

SEQ ID NO: 3051381 - DNA, 25 bp, Homo sapien
tcctccgcctcggtgcccggcgctg

SEQ ID NO: 3051382 - DNA, 25 bp, Homo sapien
ctcctccgcctcggtgcccggcgct

SEQ ID NO: 3051383 - DNA, 25 bp, Homo sapien
cctcctccgcctcggtgcccggcgc

SEQ ID NO: 3051384 - DNA, 25 bp, Homo sapien
agtatcaggcggtgctgcccattca

SEQ ID NO: 3051385 - DNA, 25 bp, Homo sapien
caatcctgagcagcgactggactac

SEQ ID NO: 3051386 - DNA, 25 bp, Homo sapien
gcaattggacctcatcgaacagcag

SEQ ID NO: 3051387 - DNA, 25 bp, Homo sapien
cattcagacgggctctctcgtggcg

SEQ ID NO: 3051388 - DNA, 25 bp, Homo sapien
cattacgggaatcctctccaaagaa

SEQ ID NO: 3051389 - DNA, 25 bp, Homo sapien
gaagatttgccgtacctttccacca

SEQ ID NO: 3051390 - DNA, 25 bp, Homo sapien
tatttgtgtcgttggcaccagcctc

SEQ ID NO: 3051391 - DNA, 25 bp, Homo sapien
gaaaagccccggtcttcagtggaca

SEQ ID NO: 3051392 - DNA, 25 bp, Homo sapien
tagaactatactttgccatgcacga

SEQ ID NO: 3051393 - DNA, 25 bp, Homo sapien
tagtggtggcggtcaagctaacaag

SEQ ID NO: 3051394 - DNA, 25 bp, Homo sapien
tgagtaagttaacagccagagacag

SEQ ID NO: 3051395 - DNA, 25 bp, Homo sapien
tgcctgcttacaacactgggagatg

SEQ ID NO: 3051396 - DNA, 25 bp, Homo sapien
cagccccttgaggagcctgagttgt

SEQ ID NO: 3051397 - DNA, 25 bp, Homo sapien
tatctcaagaggaaggctcaatggc

SEQ ID NO: 3051398 - DNA, 25 bp, Homo sapien
gaagcaacttcccatccgggattgg

SEQ ID NO: 3051399 - DNA, 25 bp, Homo sapien
tatccttggccatcaactgttgcag

SEQ ID NO: 3051400 - DNA, 25 bp, Homo sapien
gctccagggtacaacttgctctgaa

SEQ ID NO: 3051401 - DNA, 25 bp, Homo sapien
ttctcccatagttgaaagtttgatg

SEQ ID NO: 3051402 - DNA, 25 bp, Homo sapien
tgtattactaatacgctcccgtttg

SEQ ID NO: 3051403 - DNA, 25 bp, Homo sapien
tggagcagatatagcttctagacat

SEQ ID NO: 3051404 - DNA, 25 bp, Homo sapien
gatggcatgccaaaacctgtataaa

SEQ ID NO: 3051405 - DNA, 25 bp, Homo sapien
ggaaatgggctctcaagctaaagct

SEQ ID NO: 3051406 - DNA, 25 bp, Homo sapien
gacaagtgaagcgatgaagcaagcc

SEQ ID NO: 3051407 - DNA, 25 bp, Homo sapien
cattgggcttcatccttttagcaga

SEQ ID NO: 3051408 - DNA, 25 bp, Homo sapien
gcacgaagagagaatgggataccat

SEQ ID NO: 3051409 - DNA, 25 bp, Homo sapien
tggctggcccatcagtggagcacga

SEQ ID NO: 3051410 - DNA, 25 bp, Homo sapien
ggctctctataagggaacctgctgt

SEQ ID NO: 3051411 - DNA, 25 bp, Homo sapien
aatatcaggatagcactcccaggcc

SEQ ID NO: 3051412 - DNA, 25 bp, Homo sapien
catgggatacaacactgtgaattca

SEQ ID NO: 3051413 - DNA, 25 bp, Homo sapien
actttgttgagaaggaggttggaca

SEQ ID NO: 3051414 - DNA, 25 bp, Homo sapien
gacagtagattagcaaagttccaag

SEQ ID NO: 3051415 - DNA, 25 bp, Homo sapien
aatccacgaggtgctatctggccag

SEQ ID NO: 3051416 - DNA, 25 bp, Homo sapien
ggccgcaaacgtgccgcaggcctag

SEQ ID NO: 3051417 - DNA, 25 bp, Homo sapien
gatagacgtaatccgggtcggccgc

SEQ ID NO: 3051418 - DNA, 25 bp, Homo sapien
gggtcggccgcaaacgtgccgcagg

SEQ ID NO: 3051419 - DNA, 25 bp, Homo sapien
atcaccgatagacgtaatccgggtc

SEQ ID NO: 3051420 - DNA, 25 bp, Homo sapien
gtagcacgccgggactagctatcca

SEQ ID NO: 3051421 - DNA, 25 bp, Homo sapien
tggtggccgttctccgtaagatggc

SEQ ID NO: 3051422 - DNA, 25 bp, Homo sapien
cttcgcaagacaccgaggacgagga

SEQ ID NO: 3051423 - DNA, 25 bp, Homo sapien
cgcggtgcgtaagtacctcgccggt

SEQ ID NO: 3051424 - DNA, 25 bp, Homo sapien
ccatgcctgaccaagtatacagtac

SEQ ID NO: 3051425 - DNA, 25 bp, Homo sapien
gaggcaaagaatcgctgtattgccc

SEQ ID NO: 3051426 - DNA, 25 bp, Homo sapien
gaccaagtatacagtacgctattat

SEQ ID NO: 3051427 - DNA, 25 bp, Homo sapien
tagaggcaaagaatcgctgtattgc

SEQ ID NO: 3051428 - DNA, 25 bp, Homo sapien
ggtatcgtatagtaagtctcccttc

SEQ ID NO: 3051429 - DNA, 25 bp, Homo sapien
gattaagctcctcttatatgttagg

SEQ ID NO: 3051430 - DNA, 25 bp, Homo sapien
tgggcccattagaggctgccgctgt

SEQ ID NO: 3051431 - DNA, 25 bp, Homo sapien
gagagagagattatcaaggaagatt

SEQ ID NO: 3051432 - DNA, 25 bp, Homo sapien
tgatgacatcaaacctcgaagaatc

SEQ ID NO: 3051433 - DNA, 25 bp, Homo sapien
tgacatcaaacctcgaagaatccgg

SEQ ID NO: 3051434 - DNA, 25 bp, Homo sapien
catcaaacctcgaagaatccggaaa

SEQ ID NO: 3051435 - DNA, 25 bp, Homo sapien
gacatcaaacctcgaagaatccgga

SEQ ID NO: 3051436 - DNA, 25 bp, Homo sapien
caaactggaacggtgagcggctaaa

SEQ ID NO: 3051437 - DNA, 25 bp, Homo sapien
taacaggaatgctgcaggtaccggc

SEQ ID NO: 3051438 - DNA, 25 bp, Homo sapien
gctaaacaagtctcatcgccaccag

SEQ ID NO: 3051439 - DNA, 25 bp, Homo sapien
tcctccacaaagagatccaaactgg

SEQ ID NO: 3051440 - DNA, 25 bp, Homo sapien
cgcacccagcgttcagtttctttaa

SEQ ID NO: 3051441 - DNA, 25 bp, Homo sapien
tccaccacgttgacataatcaagta

SEQ ID NO: 3051442 - DNA, 25 bp, Homo sapien
tgtagtgtcgctactgaactcagcc

SEQ ID NO: 3051443 - DNA, 25 bp, Homo sapien
tgtcagctgatggtaggaattagag

SEQ ID NO: 3051444 - DNA, 25 bp, Homo sapien
tgtgtattcacatagtcctcagggc

SEQ ID NO: 3051445 - DNA, 25 bp, Homo sapien
cagagggtcccattgtgcagaaaag

SEQ ID NO: 3051446 - DNA, 25 bp, Homo sapien
taactctaaccctgtggaagcatgg

SEQ ID NO: 3051447 - DNA, 25 bp, Homo sapien
taatggagaatgtatcagccagcct

SEQ ID NO: 3051448 - DNA, 25 bp, Homo sapien
tatgctcttgtgagccagtgtgaac

SEQ ID NO: 3051449 - DNA, 25 bp, Homo sapien
ggtcggttatattgtccaccccaga

SEQ ID NO: 3051450 - DNA, 25 bp, Homo sapien
acaacccttagggaggcctcagctt

SEQ ID NO: 3051451 - DNA, 25 bp, Homo sapien
tgtgctgacactagagagatctttc

SEQ ID NO: 3051452 - DNA, 25 bp, Homo sapien
gtttgtcttcctatcaatccagttc

SEQ ID NO: 3051453 - DNA, 25 bp, Homo sapien
tgtttgtcttcctatcaatccagtt

SEQ ID NO: 3051454 - DNA, 25 bp, Homo sapien
aaagaaagtatatagtgaataccct

SEQ ID NO: 3051455 - DNA, 25 bp, Homo sapien
tatatagtgaatacccttggaaaca

SEQ ID NO: 3051456 - DNA, 25 bp, Homo sapien
ttaatggtgttttatgatggaacat

SEQ ID NO: 3051457 - DNA, 25 bp, Homo sapien
tccttttgctgtaattttaatggtg

SEQ ID NO: 3051458 - DNA, 25 bp, Homo sapien
taattttaatggtgttttatgatgg

SEQ ID NO: 3051459 - DNA, 25 bp, Homo sapien
attttaatggtgttttatgatggaa

SEQ ID NO: 3051460 - DNA, 25 bp, Homo sapien
tctttcatcacaacagagtttcatc

SEQ ID NO: 3051461 - DNA, 25 bp, Homo sapien
aacactaaatactaatcagttgaac

SEQ ID NO: 3051462 - DNA, 25 bp, Homo sapien
gaagaccattttagaactagtcagt

SEQ ID NO: 3051463 - DNA, 25 bp, Homo sapien
taaatactaatcagttgaacttaac

SEQ ID NO: 3051464 - DNA, 25 bp, Homo sapien
ccaccccagggataaattggatata

SEQ ID NO: 3051465 - DNA, 25 bp, Homo sapien
tcccaggactgcacggtttaacaca

SEQ ID NO: 3051466 - DNA, 25 bp, Homo sapien
tccccagtctaggtaggaagctgat

SEQ ID NO: 3051467 - DNA, 25 bp, Homo sapien
tcttccgggtcctaaagagcacaga

SEQ ID NO: 3051468 - DNA, 25 bp, Homo sapien
cagagaaaatggaggtccccagtct

SEQ ID NO: 3051469 - DNA, 25 bp, Homo sapien
ggtgggctggctacaagagcactaa

SEQ ID NO: 3051470 - DNA, 25 bp, Homo sapien
ttttcacagcgtaggccaacagagt

SEQ ID NO: 3051471 - DNA, 25 bp, Homo sapien
aaaggcctgggtctagatctagtca

SEQ ID NO: 3051472 - DNA, 25 bp, Homo sapien
gacattgcccagctaagcatcagga

SEQ ID NO: 3051473 - DNA, 25 bp, Homo sapien
tgtgtgttcatctgtctgcatgtgg

SEQ ID NO: 3051474 - DNA, 25 bp, Homo sapien
tgtttctggcaatttagtgggttcc

SEQ ID NO: 3051475 - DNA, 25 bp, Homo sapien
gaatgacacgtgtgcgtgcgcacgc

SEQ ID NO: 3051476 - DNA, 25 bp, Homo sapien
tacattgagctgtctgcccttccgg

SEQ ID NO: 3051477 - DNA, 25 bp, Homo sapien
aagacaccccgcgtgcctggaggga

SEQ ID NO: 3051478 - DNA, 25 bp, Homo sapien
gctgggctgaactggtgataaagac

SEQ ID NO: 3051479 - DNA, 25 bp, Homo sapien
gctgcagtgtgagggcttgggatag

SEQ ID NO: 3051480 - DNA, 25 bp, Homo sapien
gagactaaatgtggcgggtgctggg

SEQ ID NO: 3051481 - DNA, 25 bp, Homo sapien
ttcttgggcactcccaagggcgttg

SEQ ID NO: 3051482 - DNA, 25 bp, Homo sapien
aatgcaagcaagtccacatggagat

SEQ ID NO: 3051483 - DNA, 25 bp, Homo sapien
tgttcatggtgcagatactacaaca

SEQ ID NO: 3051484 - DNA, 25 bp, Homo sapien
ggagactataactctacagattgtg

SEQ ID NO: 3051485 - DNA, 25 bp, Homo sapien
gattgagaacagatgcgaagcttga

SEQ ID NO: 3051486 - DNA, 25 bp, Homo sapien
gtgtccacagtaggatcctgcccaa

SEQ ID NO: 3051487 - DNA, 25 bp, Homo sapien
tgcaaagattgtccgaaggctgatg

SEQ ID NO: 3051488 - DNA, 25 bp, Homo sapien
taactgtagggcttgagtcaggaac

SEQ ID NO: 3051489 - DNA, 25 bp, Homo sapien
ccttttgtaaacactcattaactgc

SEQ ID NO: 3051490 - DNA, 25 bp, Homo sapien
ttataactgtagtggtggcccagct

SEQ ID NO: 3051491 - DNA, 25 bp, Homo sapien
tgaactttataactgtagtggtggc

SEQ ID NO: 3051492 - DNA, 25 bp, Homo sapien
ccagctgagatctgaggatctccaa

SEQ ID NO: 3051493 - DNA, 25 bp, Homo sapien
tggcgagtgggctttaggacccaac

SEQ ID NO: 3051494 - DNA, 25 bp, Homo sapien
acccagtcggggctggctggtggaa

SEQ ID NO: 3051495 - DNA, 25 bp, Homo sapien
agccttctagttggcgagtgggctt

SEQ ID NO: 3051496 - DNA, 25 bp, Homo sapien
ccccatcagtccttcgctctgcgcc

SEQ ID NO: 3051497 - DNA, 25 bp, Homo sapien
gtgtcttgcttctgggggtagtaga

SEQ ID NO: 3051498 - DNA, 25 bp, Homo sapien
tgtgagtgtgtgtcttgcttctggg

SEQ ID NO: 3051499 - DNA, 25 bp, Homo sapien
tgtgtgagtgtgtgtcttgcttctg

SEQ ID NO: 3051500 - DNA, 25 bp, Homo sapien
catgtgtgagtgtgtgtcttgcttc

SEQ ID NO: 3051501 - DNA, 25 bp, Homo sapien
cctggttgatattcgatgaccttaa

SEQ ID NO: 3051502 - DNA, 25 bp, Homo sapien
gttgatattcgatgaccttaatgtc

SEQ ID NO: 3051503 - DNA, 25 bp, Homo sapien
tcaggacctggttgatattcgatga

SEQ ID NO: 3051504 - DNA, 25 bp, Homo sapien
caaggtcctcaggacctggttgata

SEQ ID NO: 3051505 - DNA, 25 bp, Homo sapien
tctctgaaaatcccagcttggtttg

SEQ ID NO: 3051506 - DNA, 25 bp, Homo sapien
cttttttgtgcagggtctctgaaaa

SEQ ID NO: 3051507 - DNA, 25 bp, Homo sapien
cttcccttccctactgcagcaagga

SEQ ID NO: 3051508 - DNA, 25 bp, Homo sapien
tctgaaaatcccagcttggtttgtt

SEQ ID NO: 3051509 - DNA, 25 bp, Homo sapien
tgtactagaagtgtgggccctccta

SEQ ID NO: 3051510 - DNA, 25 bp, Homo sapien
ttaaggtacttgtgggaggagctcc

SEQ ID NO: 3051511 - DNA, 25 bp, Homo sapien
caaactcccgcaccatggtcttgga

SEQ ID NO: 3051512 - DNA, 25 bp, Homo sapien
gacaagctgtatgacgttgaggaag

SEQ ID NO: 3051513 - DNA, 25 bp, Homo sapien
gctgagcgcatgtttgcggatgaat

SEQ ID NO: 3051514 - DNA, 25 bp, Homo sapien
agctccctgctgttggcggggctca

SEQ ID NO: 3051515 - DNA, 25 bp, Homo sapien
tcctgccggctgagcgcatgtttgc

SEQ ID NO: 3051516 - DNA, 25 bp, Homo sapien
tgggagccattggcgcattcctgcc

SEQ ID NO: 3051517 - DNA, 25 bp, Homo sapien
cggaaatccagacgggagcgggaga

SEQ ID NO: 3051518 - DNA, 25 bp, Homo sapien
gacgggagcgggagacagctccggc

SEQ ID NO: 3051519 - DNA, 25 bp, Homo sapien
ctggggcagtttcccgtgcgccggc

SEQ ID NO: 3051520 - DNA, 25 bp, Homo sapien
cggcggacggaaatccagacgggag

SEQ ID NO: 3051521 - DNA, 25 bp, Homo sapien
tagatccgcccctgactggtgattg

SEQ ID NO: 3051522 - DNA, 25 bp, Homo sapien
tcccgaggtctattaaggagaggcg

SEQ ID NO: 3051523 - DNA, 25 bp, Homo sapien
tgtaggataccacacgctgcggtct

SEQ ID NO: 3051524 - DNA, 25 bp, Homo sapien
aatcttcggttctgggtctgaggga

SEQ ID NO: 3051525 - DNA, 25 bp, Homo sapien
aaagtttcagcctccgcacgtgact

SEQ ID NO: 3051526 - DNA, 25 bp, Homo sapien
tccgggtaaagtttcagcctccgca

SEQ ID NO: 3051527 - DNA, 25 bp, Homo sapien
agcctccgcacgtgactcgctatgg

SEQ ID NO: 3051528 - DNA, 25 bp, Homo sapien
cgtgactcgctatggccgctgccat

SEQ ID NO: 3051529 - DNA, 25 bp, Homo sapien
catgtcctgccccagattggtgctg

SEQ ID NO: 3051530 - DNA, 25 bp, Homo sapien
gtctgtgagtctgcctgcgccgtgt

SEQ ID NO: 3051531 - DNA, 25 bp, Homo sapien
gctgcgaggtaattcctcccctggg

SEQ ID NO: 3051532 - DNA, 25 bp, Homo sapien
gtcttcgcgcgcagccttgaggcgt

SEQ ID NO: 3051533 - DNA, 25 bp, Homo sapien
tgcagatcaaggaggggttggcccc

SEQ ID NO: 3051534 - DNA, 25 bp, Homo sapien
tgtgcagatcaaggaggggttggcc

SEQ ID NO: 3051535 - DNA, 25 bp, Homo sapien
tccccagggggtgcaaacaatcttc

SEQ ID NO: 3051536 - DNA, 25 bp, Homo sapien
cccagggggtgcaaacaatcttcat

SEQ ID NO: 3051537 - DNA, 25 bp, Homo sapien
tattattagtaatgtgatcttggac

SEQ ID NO: 3051538 - DNA, 25 bp, Homo sapien
ttcaaatacctgctctactctttat

SEQ ID NO: 3051539 - DNA, 25 bp, Homo sapien
caaatacctgctctactctttatta

SEQ ID NO: 3051540 - DNA, 25 bp, Homo sapien
gctctactctttattattagtaatg

SEQ ID NO: 3051541 - DNA, 25 bp, Homo sapien
ggcggccggagtcacacatgatgtc

SEQ ID NO: 3051542 - DNA, 25 bp, Homo sapien
ttccagtgaaacgtgcatcccgagg

SEQ ID NO: 3051543 - DNA, 25 bp, Homo sapien
ccaggcgagttcagcgagagttcag

SEQ ID NO: 3051544 - DNA, 25 bp, Homo sapien
cattgcattaggcaaatgaggcccg

SEQ ID NO: 3051545 - DNA, 25 bp, Homo sapien
cctcgaggtgaagccgctgagttcc

SEQ ID NO: 3051546 - DNA, 25 bp, Homo sapien
gacgccacgagactctagacgggag

SEQ ID NO: 3051547 - DNA, 25 bp, Homo sapien
gggagccgctgtactctgcctcgga

SEQ ID NO: 3051548 - DNA, 25 bp, Homo sapien
tcgccacggagaatccctggagaag

SEQ ID NO: 3051549 - DNA, 25 bp, Homo sapien
cttaacccgtgttgcccttgctgga

SEQ ID NO: 3051550 - DNA, 25 bp, Homo sapien
caatttgtgttagattagggctgag

SEQ ID NO: 3051551 - DNA, 25 bp, Homo sapien
ttgctggacaattgaaccctcccgg

SEQ ID NO: 3051552 - DNA, 25 bp, Homo sapien
tgggcggtagggcttccactactac

SEQ ID NO: 3051553 - DNA, 25 bp, Homo sapien
taagacttgaatcctgccagcagtg

SEQ ID NO: 3051554 - DNA, 25 bp, Homo sapien
gctccgggaccgtgtatgtgtaacc

SEQ ID NO: 3051555 - DNA, 25 bp, Homo sapien
tcaagggcaaagcacaaggactcag

SEQ ID NO: 3051556 - DNA, 25 bp, Homo sapien
tctgaagagatagtgcccagccctc

SEQ ID NO: 3051557 - DNA, 25 bp, Homo sapien
tggagcccgtgggtgcacctgttac

SEQ ID NO: 3051558 - DNA, 25 bp, Homo sapien
tggctctgccccgacctccttcacc

SEQ ID NO: 3051559 - DNA, 25 bp, Homo sapien
agcccgtgggtgcacctgttactgt

SEQ ID NO: 3051560 - DNA, 25 bp, Homo sapien
cttaccccgcaggacgggcctacag

SEQ ID NO: 3051561 - DNA, 25 bp, Homo sapien
ggaacattaaagagcatgggtggat

SEQ ID NO: 3051562 - DNA, 25 bp, Homo sapien
gaacattaaagagcatgggtggatg

SEQ ID NO: 3051563 - DNA, 25 bp, Homo sapien
gatgctgatcttgaacatcttctga

SEQ ID NO: 3051564 - DNA, 25 bp, Homo sapien
ggctcatatgctatttccatcggat

SEQ ID NO: 3051565 - DNA, 25 bp, Homo sapien
ccatagcatggatagtgttcgggca

SEQ ID NO: 3051566 - DNA, 25 bp, Homo sapien
tctgggttgtggacacagaactgtc

SEQ ID NO: 3051567 - DNA, 25 bp, Homo sapien
aagcgaggggcatccagctctgtct

SEQ ID NO: 3051568 - DNA, 25 bp, Homo sapien
tgcaggagaagtgctttccctacgg

SEQ ID NO: 3051569 - DNA, 25 bp, Homo sapien
agtgctttccctacggaagcgaggg

SEQ ID NO: 3051570 - DNA, 25 bp, Homo sapien
ggagagagcaatgccatcctgcagg

SEQ ID NO: 3051571 - DNA, 25 bp, Homo sapien
cacgttcaaacgcttggcagcaagc

SEQ ID NO: 3051572 - DNA, 25 bp, Homo sapien
gaacagcacgttcaaacgcttggca

SEQ ID NO: 3051573 - DNA, 25 bp, Homo sapien
tcaaacgcttggcagcaagcaggtc

SEQ ID NO: 3051574 - DNA, 25 bp, Homo sapien
agcacgttcaaacgcttggcagcaa

SEQ ID NO: 3051575 - DNA, 25 bp, Homo sapien
cctggaagccggtgctgtggagtcg

SEQ ID NO: 3051576 - DNA, 25 bp, Homo sapien
ctatggttctgagcacacctggaag

SEQ ID NO: 3051577 - DNA, 25 bp, Homo sapien
agcacacctggaagccggtgctgtg

SEQ ID NO: 3051578 - DNA, 25 bp, Homo sapien
aagccggtgctgtggagtcgaaggc

SEQ ID NO: 3051579 - DNA, 25 bp, Homo sapien
aagctttgtgaaggcgcttgactca

SEQ ID NO: 3051580 - DNA, 25 bp, Homo sapien
gctttgtgaaggcgcttgactcacc

SEQ ID NO: 3051581 - DNA, 25 bp, Homo sapien
agctttgtgaaggcgcttgactcac

SEQ ID NO: 3051582 - DNA, 25 bp, Homo sapien
cgccgggtgcgcataggccggcggg

SEQ ID NO: 3051583 - DNA, 25 bp, Homo sapien
ggtggccggtgacgccttgccgcgg

SEQ ID NO: 3051584 - DNA, 25 bp, Homo sapien
actcgcggaggctggccggcgccgg

SEQ ID NO: 3051585 - DNA, 25 bp, Homo sapien
ctcggcggccggtggccggtgacgc

SEQ ID NO: 3051586 - DNA, 25 bp, Homo sapien
ggcggcgggagcagcttctgcgcct

SEQ ID NO: 3051587 - DNA, 25 bp, Homo sapien
gcggcgggagcagcttctgcgcctc

SEQ ID NO: 3051588 - DNA, 25 bp, Homo sapien
cggcgggagcagcttctgcgcctct

SEQ ID NO: 3051589 - DNA, 25 bp, Homo sapien
ggttgcagcggttgtcacgctcccc

SEQ ID NO: 3051590 - DNA, 25 bp, Homo sapien
ttgcagcggttgtcacgctccccgg

SEQ ID NO: 3051591 - DNA, 25 bp, Homo sapien
gcagcggttgtcacgctccccggcg

SEQ ID NO: 3051592 - DNA, 25 bp, Homo sapien
gcggttgtcacgctccccggcgcgc

SEQ ID NO: 3051593 - DNA, 25 bp, Homo sapien
gctgagcagcgccgacagcagcccc

SEQ ID NO: 3051594 - DNA, 25 bp, Homo sapien
ctgagcagcgccgacagcagcccca

SEQ ID NO: 3051595 - DNA, 25 bp, Homo sapien
tgagcagcgccgacagcagccccac

SEQ ID NO: 3051596 - DNA, 25 bp, Homo sapien
acggtcttctcggtgggccggctca

SEQ ID NO: 3051597 - DNA, 25 bp, Homo sapien
tcacgaagcagtcgaccgtgtgcgg

SEQ ID NO: 3051598 - DNA, 25 bp, Homo sapien
tagaagagcacgaagacggtcttct

SEQ ID NO: 3051599 - DNA, 25 bp, Homo sapien
cggaccggcgcacgcgaagtgcggg

SEQ ID NO: 3051600 - DNA, 25 bp, Homo sapien
ctggccgcccaggaaggtcagctcg

SEQ ID NO: 3051601 - DNA, 25 bp, Homo sapien
tggccgcccaggaaggtcagctcgg

SEQ ID NO: 3051602 - DNA, 25 bp, Homo sapien
gccgcccaggaaggtcagctcggcc

SEQ ID NO: 3051603 - DNA, 25 bp, Homo sapien
cgcccaggaaggtcagctcggccag

SEQ ID NO: 3051604 - DNA, 25 bp, Homo sapien
ctcagcaggtagcagcggcgcgcgc

SEQ ID NO: 3051605 - DNA, 25 bp, Homo sapien
gggcgcgcagggcgcacggcgcgca

SEQ ID NO: 3051606 - DNA, 25 bp, Homo sapien
gcggcgggcgcgcagggcgcacggc

SEQ ID NO: 3051607 - DNA, 25 bp, Homo sapien
gcgcggcgggcgcgcagggcgcacg

SEQ ID NO: 3051608 - DNA, 25 bp, Homo sapien
gggcctcgggcagtccgggggcgca

SEQ ID NO: 3051609 - DNA, 25 bp, Homo sapien
ggcctcgggcagtccgggggcgcac

SEQ ID NO: 3051610 - DNA, 25 bp, Homo sapien
tgggcctcgggcagtccgggggcgc

SEQ ID NO: 3051611 - DNA, 25 bp, Homo sapien
tgcagcgtgttgcacacgaactcct

SEQ ID NO: 3051612 - DNA, 25 bp, Homo sapien
tccttgcctgcccggtgcatggagt

SEQ ID NO: 3051613 - DNA, 25 bp, Homo sapien
gcatggagtagacgacgaacagcac

SEQ ID NO: 3051614 - DNA, 25 bp, Homo sapien
gtcgtagcaggtctggcgacagccc

SEQ ID NO: 3051615 - DNA, 25 bp, Homo sapien
agccagaggcggcccacgagcggcg

SEQ ID NO: 3051616 - DNA, 25 bp, Homo sapien
ctgcacggcgtccagcagcgagccc

SEQ ID NO: 3051617 - DNA, 25 bp, Homo sapien
cggcccacgagcggcgactgcagct

SEQ ID NO: 3051618 - DNA, 25 bp, Homo sapien
agcggcgactgcagctgcacggcgt

SEQ ID NO: 3051619 - DNA, 25 bp, Homo sapien
cccgggtttagcgatgagaccagta

SEQ ID NO: 3051620 - DNA, 25 bp, Homo sapien
cccgagacgctagacccaatttggt

SEQ ID NO: 3051621 - DNA, 25 bp, Homo sapien
accagtatgaaacggagggccacgg

SEQ ID NO: 3051622 - DNA, 25 bp, Homo sapien
caggcgacgctcagctatgggttac

SEQ ID NO: 3051623 - DNA, 25 bp, Homo sapien
gatcttggatcaaatgttgtccccg

SEQ ID NO: 3051624 - DNA, 25 bp, Homo sapien
cacatataacaatgtagacaggtct

SEQ ID NO: 3051625 - DNA, 25 bp, Homo sapien
gaatctaatagctcattgctgagca

SEQ ID NO: 3051626 - DNA, 25 bp, Homo sapien
tgtccccgagtcttctgcaatccag

SEQ ID NO: 3051627 - DNA, 25 bp, Homo sapien
aaacaatgcccatgagatggtcact

SEQ ID NO: 3051628 - DNA, 25 bp, Homo sapien
caagttatagacacagccaaagtgt

SEQ ID NO: 3051629 - DNA, 25 bp, Homo sapien
tcttcggcctctgatgatttgagaa

SEQ ID NO: 3051630 - DNA, 25 bp, Homo sapien
cactgctttacgctgaagtgatcag

SEQ ID NO: 3051631 - DNA, 25 bp, Homo sapien
tataggtttctttgcccgtacagat

SEQ ID NO: 3051632 - DNA, 25 bp, Homo sapien
cccgtacagattttgcccgaggagc

SEQ ID NO: 3051633 - DNA, 25 bp, Homo sapien
cacagctgagtcaaagtccatatgg

SEQ ID NO: 3051634 - DNA, 25 bp, Homo sapien
atggaagtcatcactctcccccttg

SEQ ID NO: 3051635 - DNA, 25 bp, Homo sapien
tttgcggcgattcttggttttggca

SEQ ID NO: 3051636 - DNA, 25 bp, Homo sapien
cttgcttgtgactgctttcgaaaca

SEQ ID NO: 3051637 - DNA, 25 bp, Homo sapien
ggatcaggcttttgagagacaccag

SEQ ID NO: 3051638 - DNA, 25 bp, Homo sapien
agtggatggcttccttttgcggcga

SEQ ID NO: 3051639 - DNA, 25 bp, Homo sapien
cagccttaaacttaattcaatttca

SEQ ID NO: 3051640 - DNA, 25 bp, Homo sapien
cacccagccttaaacttaattcaat

SEQ ID NO: 3051641 - DNA, 25 bp, Homo sapien
acaatcaatagagataacttactgt

SEQ ID NO: 3051642 - DNA, 25 bp, Homo sapien
caatcaatagagataacttactgtt

SEQ ID NO: 3051643 - DNA, 25 bp, Homo sapien
gataacttactgttttggaacagcc

SEQ ID NO: 3051644 - DNA, 25 bp, Homo sapien
agagataacttactgttttggaaca

SEQ ID NO: 3051645 - DNA, 25 bp, Homo sapien
ttcttcactgtcacattctttttag

SEQ ID NO: 3051646 - DNA, 25 bp, Homo sapien
cttcactgtcacattctttttagga

SEQ ID NO: 3051647 - DNA, 25 bp, Homo sapien
cactgtcacattctttttaggaact

SEQ ID NO: 3051648 - DNA, 25 bp, Homo sapien
tcactgtcacattctttttaggaac

SEQ ID NO: 3051649 - DNA, 25 bp, Homo sapien
ctgggaaatgtgtagcaggagggct

SEQ ID NO: 3051650 - DNA, 25 bp, Homo sapien
ggcttgaagacagtggtacactgcc

SEQ ID NO: 3051651 - DNA, 25 bp, Homo sapien
aggagggcttgaagacagtggtaca

SEQ ID NO: 3051652 - DNA, 25 bp, Homo sapien
tgggaaatgtgtagcaggagggctt

SEQ ID NO: 3051653 - DNA, 25 bp, Homo sapien
gtccctggtatgaattcctatttaa

SEQ ID NO: 3051654 - DNA, 25 bp, Homo sapien
gctttgtccctggtatgaattccta

SEQ ID NO: 3051655 - DNA, 25 bp, Homo sapien
ctgctttgtccctggtatgaattcc

SEQ ID NO: 3051656 - DNA, 25 bp, Homo sapien
tttgtccctggtatgaattcctatt

SEQ ID NO: 3051657 - DNA, 25 bp, Homo sapien
ctgacacgacacttttctgtggttt

SEQ ID NO: 3051658 - DNA, 25 bp, Homo sapien
ctgtggtttcagttctttgttacta

SEQ ID NO: 3051659 - DNA, 25 bp, Homo sapien
tgtggtttcagttctttgttactaa

SEQ ID NO: 3051660 - DNA, 25 bp, Homo sapien
tgacacgacacttttctgtggtttc

SEQ ID NO: 3051661 - DNA, 25 bp, Homo sapien
atctgatgggacaaaatcttcatca

SEQ ID NO: 3051662 - DNA, 25 bp, Homo sapien
tctgaatcagaccagggatttctct

SEQ ID NO: 3051663 - DNA, 25 bp, Homo sapien
tactttcgtcactgctcctatctga

SEQ ID NO: 3051664 - DNA, 25 bp, Homo sapien
tggcttaaatgccaatgtagtttgt

SEQ ID NO: 3051665 - DNA, 25 bp, Homo sapien
tctcgtggagggacatcaaaattac

SEQ ID NO: 3051666 - DNA, 25 bp, Homo sapien
ctaatctttgttttaggccttctag

SEQ ID NO: 3051667 - DNA, 25 bp, Homo sapien
ttgttttaggccttctagttccaca

SEQ ID NO: 3051668 - DNA, 25 bp, Homo sapien
tcttgagggcttccttcagtatttt

SEQ ID NO: 3051669 - DNA, 25 bp, Homo sapien
taggccttctagttccacaccatct

SEQ ID NO: 3051670 - DNA, 25 bp, Homo sapien
ttattcgtggaatgactctttgacc

SEQ ID NO: 3051671 - DNA, 25 bp, Homo sapien
ggaagtccgacttgttcatcttgtt

SEQ ID NO: 3051672 - DNA, 25 bp, Homo sapien
actctttgaccacgcggagaaggca

SEQ ID NO: 3051673 - DNA, 25 bp, Homo sapien
ttcatttctatggttattcgtggaa

SEQ ID NO: 3051674 - DNA, 25 bp, Homo sapien
tttccacaaatctgatggactcttt

SEQ ID NO: 3051675 - DNA, 25 bp, Homo sapien
ctttccacaaatctgatggactctt

SEQ ID NO: 3051676 - DNA, 25 bp, Homo sapien
tttttaatgtgtccagctcttgttc

SEQ ID NO: 3051677 - DNA, 25 bp, Homo sapien
tagttgaaggttggtccagaatctg

SEQ ID NO: 3051678 - DNA, 25 bp, Homo sapien
tggtccagaatctgttacggagtca

SEQ ID NO: 3051679 - DNA, 25 bp, Homo sapien
ggcatatcaagaagatagttgaagg

SEQ ID NO: 3051680 - DNA, 25 bp, Homo sapien
ggttaaataccaaaggggcatatca

SEQ ID NO: 3051681 - DNA, 25 bp, Homo sapien
ttccttttcgttgtcactctcttca

SEQ ID NO: 3051682 - DNA, 25 bp, Homo sapien
ccttttcgttgtcactctcttcatt

SEQ ID NO: 3051683 - DNA, 25 bp, Homo sapien
tttccttttcgttgtcactctcttc

SEQ ID NO: 3051684 - DNA, 25 bp, Homo sapien
tccttttcgttgtcactctcttcat

SEQ ID NO: 3051685 - DNA, 25 bp, Homo sapien
gaatcatatcccctctgaatcagaa

SEQ ID NO: 3051686 - DNA, 25 bp, Homo sapien
ggatccgaatcatatcccctctgaa

SEQ ID NO: 3051687 - DNA, 25 bp, Homo sapien
cctctgaatcagaactttaattaat

SEQ ID NO: 3051688 - DNA, 25 bp, Homo sapien
gccttcacaggatccgaatcatatc

SEQ ID NO: 3051689 - DNA, 25 bp, Homo sapien
taaagaaatgcgtgtataagtgacc

SEQ ID NO: 3051690 - DNA, 25 bp, Homo sapien
taaactgtcttcgtgcttgcataaa

SEQ ID NO: 3051691 - DNA, 25 bp, Homo sapien
tatcccggtatacaggcaagtctcc

SEQ ID NO: 3051692 - DNA, 25 bp, Homo sapien
tcaagatgctcagtcaaggaaacat

SEQ ID NO: 3051693 - DNA, 25 bp, Homo sapien
ttaagtctgagttcaaaaaagtctc

SEQ ID NO: 3051694 - DNA, 25 bp, Homo sapien
tctctaagataaagcgagcctgatt

SEQ ID NO: 3051695 - DNA, 25 bp, Homo sapien
taaacagcctacgtggtcaaaaagc

SEQ ID NO: 3051696 - DNA, 25 bp, Homo sapien
gcaccaagcattcctaggagccatt

SEQ ID NO: 3051697 - DNA, 25 bp, Homo sapien
ctttgtgtagtccaactctctctgc

SEQ ID NO: 3051698 - DNA, 25 bp, Homo sapien
tatctgtatggtattccctatagtc

SEQ ID NO: 3051699 - DNA, 25 bp, Homo sapien
ctagtttggagtttgaagactttgt

SEQ ID NO: 3051700 - DNA, 25 bp, Homo sapien
ccctatagtctgttatgagaggagg

SEQ ID NO: 3051701 - DNA, 25 bp, Homo sapien
ctaatcacatattgatttggagcca

SEQ ID NO: 3051702 - DNA, 25 bp, Homo sapien
tccatgttctgacgggaagctctga

SEQ ID NO: 3051703 - DNA, 25 bp, Homo sapien
gaagctctgagatttcaatggttgt

SEQ ID NO: 3051704 - DNA, 25 bp, Homo sapien
gccagttcttcaatagtacccttga

SEQ ID NO: 3051705 - DNA, 25 bp, Homo sapien
gggattttgcaggaccacccagtac

SEQ ID NO: 3051706 - DNA, 25 bp, Homo sapien
gaatgtaccattcaggctcaacacg

SEQ ID NO: 3051707 - DNA, 25 bp, Homo sapien
caatttcacgcacatcaaagttggg

SEQ ID NO: 3051708 - DNA, 25 bp, Homo sapien
ttttggtggaaataacaatcgagcc

SEQ ID NO: 3051709 - DNA, 25 bp, Homo sapien
gaatccttgccaccatgtagcctgg

SEQ ID NO: 3051710 - DNA, 25 bp, Homo sapien
tggtaccaaactgaccaatgggctg

SEQ ID NO: 3051711 - DNA, 25 bp, Homo sapien
tatcgtggactagcagaatccttgc

SEQ ID NO: 3051712 - DNA, 25 bp, Homo sapien
attctgagccaaattgataatggtc

SEQ ID NO: 3051713 - DNA, 25 bp, Homo sapien
tacttctcgcttgtcattccgtttg

SEQ ID NO: 3051714 - DNA, 25 bp, Homo sapien
tcattccgtttgaagcaagtaaaca

SEQ ID NO: 3051715 - DNA, 25 bp, Homo sapien
cagctaattgggcaacctttacttc

SEQ ID NO: 3051716 - DNA, 25 bp, Homo sapien
ggcaacctttacttctcgcttgtca

SEQ ID NO: 3051717 - DNA, 25 bp, Homo sapien
caagataagttccttgttgatgaag

SEQ ID NO: 3051718 - DNA, 25 bp, Homo sapien
gttgatgaagtcattatatgtcaga

SEQ ID NO: 3051719 - DNA, 25 bp, Homo sapien
tagatctctcgttatcagaatttga

SEQ ID NO: 3051720 - DNA, 25 bp, Homo sapien
catccaccatagaagggatagatct

SEQ ID NO: 3051721 - DNA, 25 bp, Homo sapien
tagttaaccattcctttcgatcatc

SEQ ID NO: 3051722 - DNA, 25 bp, Homo sapien
tctatcctccatgaaattagttaac

SEQ ID NO: 3051723 - DNA, 25 bp, Homo sapien
caggaagcccaagtaactttcgttg

SEQ ID NO: 3051724 - DNA, 25 bp, Homo sapien
cattcctttcgatcatctatctgtt

SEQ ID NO: 3051725 - DNA, 25 bp, Homo sapien
tttgaactggatacgatgtcttttc

SEQ ID NO: 3051726 - DNA, 25 bp, Homo sapien
tctttagcttcctttgatgtgctgg

SEQ ID NO: 3051727 - DNA, 25 bp, Homo sapien
tatctgcaaagtattctttagcttc

SEQ ID NO: 3051728 - DNA, 25 bp, Homo sapien
accagaatatttgaactggatacga

SEQ ID NO: 3051729 - DNA, 25 bp, Homo sapien
atttggagtagaactcttccactct

SEQ ID NO: 3051730 - DNA, 25 bp, Homo sapien
ttggagtagaactcttccactcttc

SEQ ID NO: 3051731 - DNA, 25 bp, Homo sapien
tttggagtagaactcttccactctt

SEQ ID NO: 3051732 - DNA, 25 bp, Homo sapien
cagaaaacgatgtcgcagaagagag

SEQ ID NO: 3051733 - DNA, 25 bp, Homo sapien
aacgatgtcgcagaagagagggcca

SEQ ID NO: 3051734 - DNA, 25 bp, Homo sapien
aattcctccagaaaacgatgtcgca

SEQ ID NO: 3051735 - DNA, 25 bp, Homo sapien
ttcctccagaaaacgatgtcgcaga

SEQ ID NO: 3051736 - DNA, 25 bp, Homo sapien
tcttgtactgaagacccacaatctt

SEQ ID NO: 3051737 - DNA, 25 bp, Homo sapien
gaagacccacaatcttgatgatatt

SEQ ID NO: 3051738 - DNA, 25 bp, Homo sapien
cataacgaagcgtcttcaatgaatc

SEQ ID NO: 3051739 - DNA, 25 bp, Homo sapien
ttcccataacgaagcgtcttcaatg

SEQ ID NO: 3051740 - DNA, 25 bp, Homo sapien
aagcttctcgaacattgagtatttt

SEQ ID NO: 3051741 - DNA, 25 bp, Homo sapien
ctgcttatgagaagcttctcgaaca

SEQ ID NO: 3051742 - DNA, 25 bp, Homo sapien
gaaaaccccatatttgtctctccca

SEQ ID NO: 3051743 - DNA, 25 bp, Homo sapien
agccaaagttttggctgaatctccc

SEQ ID NO: 3051744 - DNA, 25 bp, Homo sapien
gaatctccctcagtcaggataagcg

SEQ ID NO: 3051745 - DNA, 25 bp, Homo sapien
caggataagcgtacactcagtggag

SEQ ID NO: 3051746 - DNA, 25 bp, Homo sapien
caaagttttggctgaatctccctca

SEQ ID NO: 3051747 - DNA, 25 bp, Homo sapien
gaacatgctgtttatagccttgtga

SEQ ID NO: 3051748 - DNA, 25 bp, Homo sapien
aacacaatttactatataatgagca

SEQ ID NO: 3051749 - DNA, 25 bp, Homo sapien
cttccataataggaaacgggccgat

SEQ ID NO: 3051750 - DNA, 25 bp, Homo sapien
ggaaatgacctaaatcttccataat

SEQ ID NO: 3051751 - DNA, 25 bp, Homo sapien
tacagctgaacacttcttgtttaac

SEQ ID NO: 3051752 - DNA, 25 bp, Homo sapien
tcgagtttgggaattcccttgattc

SEQ ID NO: 3051753 - DNA, 25 bp, Homo sapien
cacccagtttagtatgctttctaca

SEQ ID NO: 3051754 - DNA, 25 bp, Homo sapien
gctttctacaataccacagccaatg

SEQ ID NO: 3051755 - DNA, 25 bp, Homo sapien
gaagattcatattagggatcatatt

SEQ ID NO: 3051756 - DNA, 25 bp, Homo sapien
tattagggatcatattagggaagaa

SEQ ID NO: 3051757 - DNA, 25 bp, Homo sapien
ctatcagaaatctagaatacaaatg

SEQ ID NO: 3051758 - DNA, 25 bp, Homo sapien
tcagaaatctagaatacaaatgagc

SEQ ID NO: 3051759 - DNA, 25 bp, Homo sapien
tgggttttcaattaaggcatttaca

SEQ ID NO: 3051760 - DNA, 25 bp, Homo sapien
ctcttgggttgtaaagtcatgtttt

SEQ ID NO: 3051761 - DNA, 25 bp, Homo sapien
tgagagtcaaaggttgggttttcaa

SEQ ID NO: 3051762 - DNA, 25 bp, Homo sapien
ttgtctgagagtcaaaggttgggtt

SEQ ID NO: 3051763 - DNA, 25 bp, Homo sapien
ctgcaatagaagttgatattaagcc

SEQ ID NO: 3051764 - DNA, 25 bp, Homo sapien
ctaaaaatgtactcatgctttattt

SEQ ID NO: 3051765 - DNA, 25 bp, Homo sapien
gatattaagccactaaaaatgtact

SEQ ID NO: 3051766 - DNA, 25 bp, Homo sapien
tagaagttgatattaagccactaaa

SEQ ID NO: 3051767 - DNA, 25 bp, Homo sapien
caagtttagtcacaatctgatcagc

SEQ ID NO: 3051768 - DNA, 25 bp, Homo sapien
ctgatgtgcttttactgcaacacca

SEQ ID NO: 3051769 - DNA, 25 bp, Homo sapien
gcttttactgcaacaccacccttgt

SEQ ID NO: 3051770 - DNA, 25 bp, Homo sapien
aacatcaacaagtttagtcacaatc

SEQ ID NO: 3051771 - DNA, 25 bp, Homo sapien
gataaatcatgattaataatttaag

SEQ ID NO: 3051772 - DNA, 25 bp, Homo sapien
acatatatgtaaagataaatcatga

SEQ ID NO: 3051773 - DNA, 25 bp, Homo sapien
acaataagaacacatatatgtaaag

SEQ ID NO: 3051774 - DNA, 25 bp, Homo sapien
taagaacacatatatgtaaagataa

SEQ ID NO: 3051775 - DNA, 25 bp, Homo sapien
tgtccacataactacgaaatccttt

SEQ ID NO: 3051776 - DNA, 25 bp, Homo sapien
gacaaagctaatttgctgaaagcct

SEQ ID NO: 3051777 - DNA, 25 bp, Homo sapien
ggagttaccagtttcatccaacttg

SEQ ID NO: 3051778 - DNA, 25 bp, Homo sapien
agttaaacacacttcccacctgtgg

SEQ ID NO: 3051779 - DNA, 25 bp, Homo sapien
gacatctttggtggatccagcaata

SEQ ID NO: 3051780 - DNA, 25 bp, Homo sapien
aatatctttgtccaggctttgcatt

SEQ ID NO: 3051781 - DNA, 25 bp, Homo sapien
caggctgaaaggtgatacatgtata

SEQ ID NO: 3051782 - DNA, 25 bp, Homo sapien
gctcttctgaccattagtgcaacaa

SEQ ID NO: 3051783 - DNA, 25 bp, Homo sapien
gttacacaatttggctccatagcca

SEQ ID NO: 3051784 - DNA, 25 bp, Homo sapien
tgttacacaatttggctccatagcc

SEQ ID NO: 3051785 - DNA, 25 bp, Homo sapien
gtaaatttggtactgaatatgttac

SEQ ID NO: 3051786 - DNA, 25 bp, Homo sapien
tactagaagttaggagctgtccaaa

SEQ ID NO: 3051787 - DNA, 25 bp, Homo sapien
gagagctgggacatacatcttttca

SEQ ID NO: 3051788 - DNA, 25 bp, Homo sapien
aagttaggagctgtccaaatatgag

SEQ ID NO: 3051789 - DNA, 25 bp, Homo sapien
catagttactagaagttaggagctg

SEQ ID NO: 3051790 - DNA, 25 bp, Homo sapien
gcaggaacatttcccaccatgctta

SEQ ID NO: 3051791 - DNA, 25 bp, Homo sapien
agcaggaacatttcccaccatgctt

SEQ ID NO: 3051792 - DNA, 25 bp, Homo sapien
ggaacatttcccaccatgcttagtt

SEQ ID NO: 3051793 - DNA, 25 bp, Homo sapien
aacatttcccaccatgcttagttcc

SEQ ID NO: 3051794 - DNA, 25 bp, Homo sapien
tgggtccctttgtttgttgtccgca

SEQ ID NO: 3051795 - DNA, 25 bp, Homo sapien
ggatcaattgtgactctaatacaag

SEQ ID NO: 3051796 - DNA, 25 bp, Homo sapien
cctttgtttgttgtccgcagcatta

SEQ ID NO: 3051797 - DNA, 25 bp, Homo sapien
tctaatacaagacatttttgggtcc

SEQ ID NO: 3051798 - DNA, 25 bp, Homo sapien
tgtacaaaccaggaacaaaagtgac

SEQ ID NO: 3051799 - DNA, 25 bp, Homo sapien
aagtgacttccctatagttaatgcc

SEQ ID NO: 3051800 - DNA, 25 bp, Homo sapien
ttccctatagttaatgccaacatct

SEQ ID NO: 3051801 - DNA, 25 bp, Homo sapien
catcttcatcgtaaacccacatttg

SEQ ID NO: 3051802 - DNA, 25 bp, Homo sapien
ctgggtcactaattccacagaacca

SEQ ID NO: 3051803 - DNA, 25 bp, Homo sapien
tgtctgggcggagcaaaatatgttc

SEQ ID NO: 3051804 - DNA, 25 bp, Homo sapien
cagaaccaatgtaggtgtctgggcg

SEQ ID NO: 3051805 - DNA, 25 bp, Homo sapien
taattccacagaaccaatgtaggtg

SEQ ID NO: 3051806 - DNA, 25 bp, Homo sapien
tattttgttgacttgcatattttca

SEQ ID NO: 3051807 - DNA, 25 bp, Homo sapien
ctttattttgttgacttgcatattt

SEQ ID NO: 3051808 - DNA, 25 bp, Homo sapien
tgacttgcatattttcatttacagg

SEQ ID NO: 3051809 - DNA, 25 bp, Homo sapien
tgttgacttgcatattttcatttac

SEQ ID NO: 3051810 - DNA, 25 bp, Homo sapien
gtgacggtcgtgaaggggctcaaga

SEQ ID NO: 3051811 - DNA, 25 bp, Homo sapien
tgacggtcgtgaaggggctcaagaa

SEQ ID NO: 3051812 - DNA, 25 bp, Homo sapien
gacggtcgtgaaggggctcaagaac

SEQ ID NO: 3051813 - DNA, 25 bp, Homo sapien
ggtgacggtcgtgaaggggctcaag

SEQ ID NO: 3051814 - DNA, 25 bp, Homo sapien
gtcggttaggagagctccacttgaa

SEQ ID NO: 3051815 - DNA, 25 bp, Homo sapien
gaaagcgactaaacaggcaggaccc

SEQ ID NO: 3051816 - DNA, 25 bp, Homo sapien
gcttctccacagacgcgcgtcggtt

SEQ ID NO: 3051817 - DNA, 25 bp, Homo sapien
ctgaaagcgactaaacaggcaggac

SEQ ID NO: 3051818 - DNA, 25 bp, Homo sapien
gaagaaccaatcgtagcttgccttt

SEQ ID NO: 3051819 - DNA, 25 bp, Homo sapien
tccagaagaaccaatcgtagcttgc

SEQ ID NO: 3051820 - DNA, 25 bp, Homo sapien
gaaccaatcgtagcttgccttttat

SEQ ID NO: 3051821 - DNA, 25 bp, Homo sapien
cgtccagaagaaccaatcgtagctt

SEQ ID NO: 3051822 - DNA, 25 bp, Homo sapien
gtagggaagcttggccagtagcctc

SEQ ID NO: 3051823 - DNA, 25 bp, Homo sapien
gaagcttggccagtagcctctgctc

SEQ ID NO: 3051824 - DNA, 25 bp, Homo sapien
gtggtagggaagcttggccagtagc

SEQ ID NO: 3051825 - DNA, 25 bp, Homo sapien
gggaagcttggccagtagcctctgc

SEQ ID NO: 3051826 - DNA, 25 bp, Homo sapien
tgcaggacacccgagggccctgaca

SEQ ID NO: 3051827 - DNA, 25 bp, Homo sapien
caggacacccgagggccctgacaga

SEQ ID NO: 3051828 - DNA, 25 bp, Homo sapien
cgagggccctgacagaaaccagcca

SEQ ID NO: 3051829 - DNA, 25 bp, Homo sapien
cacccgagggccctgacagaaacca

SEQ ID NO: 3051830 - DNA, 25 bp, Homo sapien
catggattcccaggagcttgtctgg

SEQ ID NO: 3051831 - DNA, 25 bp, Homo sapien
ttcactggttcttgagctccatgga

SEQ ID NO: 3051832 - DNA, 25 bp, Homo sapien
ttgtccttgaggagaccctggccca

SEQ ID NO: 3051833 - DNA, 25 bp, Homo sapien
tgtagacctggctggcctggttgtc

SEQ ID NO: 3051834 - DNA, 25 bp, Homo sapien
tttggacaatgagaaagcgctcctg

SEQ ID NO: 3051835 - DNA, 25 bp, Homo sapien
gcgctcctgttggtgccaattggcc

SEQ ID NO: 3051836 - DNA, 25 bp, Homo sapien
ggcccaacatcattcacttggcttg

SEQ ID NO: 3051837 - DNA, 25 bp, Homo sapien
tctcctgcttaagctttggacaatg

SEQ ID NO: 3051838 - DNA, 25 bp, Homo sapien
tctccatcaggctgaatcggggtgt

SEQ ID NO: 3051839 - DNA, 25 bp, Homo sapien
ggctgaatcggggtgttgaccttgg

SEQ ID NO: 3051840 - DNA, 25 bp, Homo sapien
atcaggctgaatcggggtgttgacc

SEQ ID NO: 3051841 - DNA, 25 bp, Homo sapien
ccatcaggctgaatcggggtgttga

SEQ ID NO: 3051842 - DNA, 25 bp, Homo sapien
gtcagtggaaacttagtgatagcat

SEQ ID NO: 3051843 - DNA, 25 bp, Homo sapien
cagtggaaacttagtgatagcatag

SEQ ID NO: 3051844 - DNA, 25 bp, Homo sapien
agtggtcagtggaaacttagtgata

SEQ ID NO: 3051845 - DNA, 25 bp, Homo sapien
tggtcagtggaaacttagtgatagc

SEQ ID NO: 3051846 - DNA, 25 bp, Homo sapien
tttgccttcagcaccgtcttgtgaa

SEQ ID NO: 3051847 - DNA, 25 bp, Homo sapien
tgccttcttgagttcggctttaaga

SEQ ID NO: 3051848 - DNA, 25 bp, Homo sapien
agaggggcaggagattctttctttg

SEQ ID NO: 3051849 - DNA, 25 bp, Homo sapien
tcagcaccgtcttgtgaaaaaggat

SEQ ID NO: 3051850 - DNA, 25 bp, Homo sapien
cctctggttgggtaggaatactcca

SEQ ID NO: 3051851 - DNA, 25 bp, Homo sapien
gcatgagaattttgtggttgtcctc

SEQ ID NO: 3051852 - DNA, 25 bp, Homo sapien
cagcactttgaatgcaagacagaag

SEQ ID NO: 3051853 - DNA, 25 bp, Homo sapien
tctggcaccagataaggatggctgg

SEQ ID NO: 3051854 - DNA, 25 bp, Homo sapien
tttcgagagtgaggcctgccagcag

SEQ ID NO: 3051855 - DNA, 25 bp, Homo sapien
cacttagcccaagaggtctgagccc

SEQ ID NO: 3051856 - DNA, 25 bp, Homo sapien
gaagtttccctcaaatgcgcgtgtg

SEQ ID NO: 3051857 - DNA, 25 bp, Homo sapien
ccaagaggactgagactggcactta

SEQ ID NO: 3051858 - DNA, 25 bp, Homo sapien
gtactacgtgccagctctagttttc

SEQ ID NO: 3051859 - DNA, 25 bp, Homo sapien
gagacatgtaccttgaccatcgtcc

SEQ ID NO: 3051860 - DNA, 25 bp, Homo sapien
taaggagagttcaagcctgtgggag

SEQ ID NO: 3051861 - DNA, 25 bp, Homo sapien
tcctctcaagctagccagagggtgg

SEQ ID NO: 3051862 - DNA, 25 bp, Homo sapien
gtggagacactcctataaggagagt

SEQ ID NO: 3051863 - DNA, 25 bp, Homo sapien
gtagcagatggagtaatggtcacga

SEQ ID NO: 3051864 - DNA, 25 bp, Homo sapien
cctttaggtctggttgttgcaccat

SEQ ID NO: 3051865 - DNA, 25 bp, Homo sapien
tccttcctttaggtctggttgttgc

SEQ ID NO: 3051866 - DNA, 25 bp, Homo sapien
gatggagtaatggtcacgaggtcca

SEQ ID NO: 3051867 - DNA, 25 bp, Homo sapien
tcacagccatgaagtcaccgggatg

SEQ ID NO: 3051868 - DNA, 25 bp, Homo sapien
cgggatgaacctatccttccagtgg

SEQ ID NO: 3051869 - DNA, 25 bp, Homo sapien
caagagtggactgaatgtgcctaat

SEQ ID NO: 3051870 - DNA, 25 bp, Homo sapien
tgtgcctaatggagaagacccacgt

SEQ ID NO: 3051871 - DNA, 25 bp, Homo sapien
cccggcaggatggtggctttataag

SEQ ID NO: 3051872 - DNA, 25 bp, Homo sapien
agggatctctttctccatgcacaca

SEQ ID NO: 3051873 - DNA, 25 bp, Homo sapien
tgcccggcaggatggtggctttata

SEQ ID NO: 3051874 - DNA, 25 bp, Homo sapien
gagagggagagggatctctttctcc

SEQ ID NO: 3051875 - DNA, 25 bp, Homo sapien
cacacgaatgtctccatctgctttc

SEQ ID NO: 3051876 - DNA, 25 bp, Homo sapien
ttctctgccatttacagttaggtga

SEQ ID NO: 3051877 - DNA, 25 bp, Homo sapien
ttacagttaggtgaatgtgggcaag

SEQ ID NO: 3051878 - DNA, 25 bp, Homo sapien
tcatacctgtgtgcttcacacacga

SEQ ID NO: 3051879 - DNA, 25 bp, Homo sapien
gaggtctctgtagcctgagagcagg

SEQ ID NO: 3051880 - DNA, 25 bp, Homo sapien
gtctaagaccttgccctgggtctaa

SEQ ID NO: 3051881 - DNA, 25 bp, Homo sapien
tgggtctaagccctggcacaagaat

SEQ ID NO: 3051882 - DNA, 25 bp, Homo sapien
tcggggtaagggcacttcagcctcc

SEQ ID NO: 3051883 - DNA, 25 bp, Homo sapien
gcagcagaaatgatcgccttccacg

SEQ ID NO: 3051884 - DNA, 25 bp, Homo sapien
tccttgggtggataagatggctcct

SEQ ID NO: 3051885 - DNA, 25 bp, Homo sapien
tcaggagaacagaagtgccatagcc

SEQ ID NO: 3051886 - DNA, 25 bp, Homo sapien
tgccctcagcagtcttaagtcaagt

SEQ ID NO: 3051887 - DNA, 25 bp, Homo sapien
ggctgagtgagaccttggaatccgt

SEQ ID NO: 3051888 - DNA, 25 bp, Homo sapien
gatcaagaggccatggtccagttct

SEQ ID NO: 3051889 - DNA, 25 bp, Homo sapien
gggcaccgtacacactcactttggg

SEQ ID NO: 3051890 - DNA, 25 bp, Homo sapien
ggactcttccggactcctcttgagg

SEQ ID NO: 3051891 - DNA, 25 bp, Homo sapien
ccatagcaggttcaagggtgtcaac

SEQ ID NO: 3051892 - DNA, 25 bp, Homo sapien
tccaagcctcttagggaagcggcct

SEQ ID NO: 3051893 - DNA, 25 bp, Homo sapien
caacattagggcagctacgatacca

SEQ ID NO: 3051894 - DNA, 25 bp, Homo sapien
ttccttaggaactcaggcctgcggg

SEQ ID NO: 3051895 - DNA, 25 bp, Homo sapien
gctggctggaccatgtcatactccg

SEQ ID NO: 3051896 - DNA, 25 bp, Homo sapien
accaggccgatgacctgcgaggctg

SEQ ID NO: 3051897 - DNA, 25 bp, Homo sapien
tggcatacgttctcctgaggctctg

SEQ ID NO: 3051898 - DNA, 25 bp, Homo sapien
tgtcatactccgcaaagaggtggca

SEQ ID NO: 3051899 - DNA, 25 bp, Homo sapien
ggagatgcctctcccgtcagactgg

SEQ ID NO: 3051900 - DNA, 25 bp, Homo sapien
tcttgcagaagattgagggctccca

SEQ ID NO: 3051901 - DNA, 25 bp, Homo sapien
tccccattagagtggaagctccctg

SEQ ID NO: 3051902 - DNA, 25 bp, Homo sapien
tccctgaagttagagcctgtgcctc

SEQ ID NO: 3051903 - DNA, 25 bp, Homo sapien
caggagggtttgcagtacttctgcc

SEQ ID NO: 3051904 - DNA, 25 bp, Homo sapien
aggagggtttgcagtacttctgcca

SEQ ID NO: 3051905 - DNA, 25 bp, Homo sapien
ggagggtttgcagtacttctgccac

SEQ ID NO: 3051906 - DNA, 25 bp, Homo sapien
tgagtgggtaatggcgccggaaaaa

SEQ ID NO: 3051907 - DNA, 25 bp, Homo sapien
cgttgctcagggtccataccacaga

SEQ ID NO: 3051908 - DNA, 25 bp, Homo sapien
ggtggtgagtgggtaatggcgccgg

SEQ ID NO: 3051909 - DNA, 25 bp, Homo sapien
ttccgttgctcagggtccataccac

SEQ ID NO: 3051910 - DNA, 25 bp, Homo sapien
gaggatgtccctctcaaaggtggtg

SEQ ID NO: 3051911 - DNA, 25 bp, Homo sapien
tgtgactttgaagtggaccacggtg

SEQ ID NO: 3051912 - DNA, 25 bp, Homo sapien
cgctcactgagctcaggtacagggt

SEQ ID NO: 3051913 - DNA, 25 bp, Homo sapien
catcagtcagagtgatgccctgctc

SEQ ID NO: 3051914 - DNA, 25 bp, Homo sapien
ggccactgacccagggcccaggttc

SEQ ID NO: 3051915 - DNA, 25 bp, Homo sapien
gccactgacccagggcccaggttct

SEQ ID NO: 3051916 - DNA, 25 bp, Homo sapien
cagacactgcgctggggccactgac

SEQ ID NO: 3051917 - DNA, 25 bp, Homo sapien
ctgtgggaggcagacactgcgctgg

SEQ ID NO: 3051918 - DNA, 25 bp, Homo sapien
aatccagtggagctcctcttagagc

SEQ ID NO: 3051919 - DNA, 25 bp, Homo sapien
ttagagccgccacccaacagaaagt

SEQ ID NO: 3051920 - DNA, 25 bp, Homo sapien
aggaatccagtggagctcctcttag

SEQ ID NO: 3051921 - DNA, 25 bp, Homo sapien
tcttagagccgccacccaacagaaa

SEQ ID NO: 3051922 - DNA, 25 bp, Homo sapien
gagtccgaggccccatctgcacctc

SEQ ID NO: 3051923 - DNA, 25 bp, Homo sapien
tgtagagtccgaggccccatctgca

SEQ ID NO: 3051924 - DNA, 25 bp, Homo sapien
tctgtagagtccgaggccccatctg

SEQ ID NO: 3051925 - DNA, 25 bp, Homo sapien
ctgtctgtagagtccgaggccccat

SEQ ID NO: 3051926 - DNA, 25 bp, Homo sapien
acaggaacaggcctcatgaatccct

SEQ ID NO: 3051927 - DNA, 25 bp, Homo sapien
tggagtgaatggacccctctcacag

SEQ ID NO: 3051928 - DNA, 25 bp, Homo sapien
atggacccctctcacaggaacaggc

SEQ ID NO: 3051929 - DNA, 25 bp, Homo sapien
ggaacaggcctcatgaatccctttg

SEQ ID NO: 3051930 - DNA, 25 bp, Homo sapien
attgcctctttggggcccagaccca

SEQ ID NO: 3051931 - DNA, 25 bp, Homo sapien
tggcattgcctctttggggcccaga

SEQ ID NO: 3051932 - DNA, 25 bp, Homo sapien
cttggcattgcctctttggggccca

SEQ ID NO: 3051933 - DNA, 25 bp, Homo sapien
gcattgcctctttggggcccagacc

SEQ ID NO: 3051934 - DNA, 25 bp, Homo sapien
atggaatgctggcacacgaaggcag

SEQ ID NO: 3051935 - DNA, 25 bp, Homo sapien
ctggcacacgaaggcagagaggctc

SEQ ID NO: 3051936 - DNA, 25 bp, Homo sapien
gatggtgagtttgcagggcagggcc

SEQ ID NO: 3051937 - DNA, 25 bp, Homo sapien
gggatggtgagtttgcagggcaggg

SEQ ID NO: 3051938 - DNA, 25 bp, Homo sapien
ccctcagctcacaacggagacttcg

SEQ ID NO: 3051939 - DNA, 25 bp, Homo sapien
cagctcacaacggagacttcgctgg

SEQ ID NO: 3051940 - DNA, 25 bp, Homo sapien
ctcagctcacaacggagacttcgct

SEQ ID NO: 3051941 - DNA, 25 bp, Homo sapien
gctcacaacggagacttcgctggcc

SEQ ID NO: 3051942 - DNA, 25 bp, Homo sapien
gcactcctttggcagacgactcgat

SEQ ID NO: 3051943 - DNA, 25 bp, Homo sapien
gcagacgactcgatgaggaagtgtc

SEQ ID NO: 3051944 - DNA, 25 bp, Homo sapien
cctcatctgctcctttgagatgcac

SEQ ID NO: 3051945 - DNA, 25 bp, Homo sapien
aagtgtcggatgaggtcattgctgt

SEQ ID NO: 3051946 - DNA, 25 bp, Homo sapien
gtcgactctgagcagacgcgggaac

SEQ ID NO: 3051947 - DNA, 25 bp, Homo sapien
ccgaaggagcctcggtatgaagagc

SEQ ID NO: 3051948 - DNA, 25 bp, Homo sapien
gagcagacgcgggaacctcctgcac

SEQ ID NO: 3051949 - DNA, 25 bp, Homo sapien
gaagagctgtcccttatgacaaaag

SEQ ID NO: 3051950 - DNA, 25 bp, Homo sapien
tggaacaatccttgagtcagagatg

SEQ ID NO: 3051951 - DNA, 25 bp, Homo sapien
ctggaacaatccttgagtcagagat

SEQ ID NO: 3051952 - DNA, 25 bp, Homo sapien
cttcacagagcagatgttacagagt

SEQ ID NO: 3051953 - DNA, 25 bp, Homo sapien
ttagatgtgtccatcacgaacttca

SEQ ID NO: 3051954 - DNA, 25 bp, Homo sapien
ttaaaccagtatttagatgtgtcca

SEQ ID NO: 3051955 - DNA, 25 bp, Homo sapien
ccagtatttagatgtgtccatcacg

SEQ ID NO: 3051956 - DNA, 25 bp, Homo sapien
tgtccatcacgaacttcatggtggg

SEQ ID NO: 3051957 - DNA, 25 bp, Homo sapien
tggagacagacagagaagggggacc

SEQ ID NO: 3051958 - DNA, 25 bp, Homo sapien
ctggagacagacagagaagggggac

SEQ ID NO: 3051959 - DNA, 25 bp, Homo sapien
ccttacgggaatattcagcttggaa

SEQ ID NO: 3051960 - DNA, 25 bp, Homo sapien
aaatctactgttgagtcccctggtg

SEQ ID NO: 3051961 - DNA, 25 bp, Homo sapien
cagcttctgagggtctttaatgttc

SEQ ID NO: 3051962 - DNA, 25 bp, Homo sapien
tgatattatgggaccaaagcaggat

SEQ ID NO: 3051963 - DNA, 25 bp, Homo sapien
ggttgaacggagttctggtgtcctg

SEQ ID NO: 3051964 - DNA, 25 bp, Homo sapien
tgggcagccgttgatcagcacaatg

SEQ ID NO: 3051965 - DNA, 25 bp, Homo sapien
tctgggcagccgttgatcagcacaa

SEQ ID NO: 3051966 - DNA, 25 bp, Homo sapien
cagccgttgatcagcacaatgggta

SEQ ID NO: 3051967 - DNA, 25 bp, Homo sapien
gtttctgggagcctggaagtcactg

SEQ ID NO: 3051968 - DNA, 25 bp, Homo sapien
gggtttctgggagcctggaagtcac

SEQ ID NO: 3051969 - DNA, 25 bp, Homo sapien
tttctgggagcctggaagtcactgg

SEQ ID NO: 3051970 - DNA, 25 bp, Homo sapien
tggggtttctgggagcctggaagtc

SEQ ID NO: 3051971 - DNA, 25 bp, Homo sapien
aggaagagttggctggactttccaa

SEQ ID NO: 3051972 - DNA, 25 bp, Homo sapien
tccaaggatctggaagatgactgat

SEQ ID NO: 3051973 - DNA, 25 bp, Homo sapien
tggctggactttccaaggatctgga

SEQ ID NO: 3051974 - DNA, 25 bp, Homo sapien
cttgtacacagggacactgagccaa

SEQ ID NO: 3051975 - DNA, 25 bp, Homo sapien
catgggggctcgaggccttgctccc

SEQ ID NO: 3051976 - DNA, 25 bp, Homo sapien
gacagcacagagatcctgctgcccc

SEQ ID NO: 3051977 - DNA, 25 bp, Homo sapien
agcacagagatcctgctgccccgct

SEQ ID NO: 3051978 - DNA, 25 bp, Homo sapien
agcccaaaccatgggggctcgaggc

SEQ ID NO: 3051979 - DNA, 25 bp, Homo sapien
tgggggccatcgtggcaccttgatc

SEQ ID NO: 3051980 - DNA, 25 bp, Homo sapien
ggccaccactgcgaagggagccgaa

SEQ ID NO: 3051981 - DNA, 25 bp, Homo sapien
tgatctggcggaggtcacctcgatg

SEQ ID NO: 3051982 - DNA, 25 bp, Homo sapien
tcactgctgcttcgtgtctctcggg

SEQ ID NO: 3051983 - DNA, 25 bp, Homo sapien
taaggtggggatctctctgcttaga

SEQ ID NO: 3051984 - DNA, 25 bp, Homo sapien
tgctttttggggacagtattggcca

SEQ ID NO: 3051985 - DNA, 25 bp, Homo sapien
cttagaaagatgactgcaagaagag

SEQ ID NO: 3051986 - DNA, 25 bp, Homo sapien
ctctctgcttagaaagatgactgca

SEQ ID NO: 3051987 - DNA, 25 bp, Homo sapien
caacgatgtttcacagagactggtc

SEQ ID NO: 3051988 - DNA, 25 bp, Homo sapien
gaaccttataatagcccttgagcag

SEQ ID NO: 3051989 - DNA, 25 bp, Homo sapien
tgccaggaccactacgaacacattg

SEQ ID NO: 3051990 - DNA, 25 bp, Homo sapien
taggactttatagtgtttacaccca

SEQ ID NO: 3051991 - DNA, 25 bp, Homo sapien
catttgaggacgttccacagggact

SEQ ID NO: 3051992 - DNA, 25 bp, Homo sapien
gaggaagggcctagttgtcaccaac

SEQ ID NO: 3051993 - DNA, 25 bp, Homo sapien
catgaacggtaaaaccctgggcttg

SEQ ID NO: 3051994 - DNA, 25 bp, Homo sapien
catctgtggatgtggacccatgcca

SEQ ID NO: 3051995 - DNA, 25 bp, Homo sapien
actgcttgaacactaccgggtcctt

SEQ ID NO: 3051996 - DNA, 25 bp, Homo sapien
taacttggttaggtttgcacagcac

SEQ ID NO: 3051997 - DNA, 25 bp, Homo sapien
tatttatcccctttgtgtagcacag

SEQ ID NO: 3051998 - DNA, 25 bp, Homo sapien
tgagctcttctttatgggcacggca

SEQ ID NO: 3051999 - DNA, 25 bp, Homo sapien
tcattgacatggtgctctgggccag

SEQ ID NO: 3052000 - DNA, 25 bp, Homo sapien
ccaaggcttcagattcctccttctt

SEQ ID NO: 3052001 - DNA, 25 bp, Homo sapien
ccttctttctcattgacatggtgct

SEQ ID NO: 3052002 - DNA, 25 bp, Homo sapien
aggtggggtccagttccaggatcat

SEQ ID NO: 3052003 - DNA, 25 bp, Homo sapien
ctctccagtgagaagtcaatgtagg

SEQ ID NO: 3052004 - DNA, 25 bp, Homo sapien
ccttccgtggtgtagtaagaacact

SEQ ID NO: 3052005 - DNA, 25 bp, Homo sapien
ggctcatcacaaggcgccaagctga

SEQ ID NO: 3052006 - DNA, 25 bp, Homo sapien
tcaatgtaggagtcaaggtcctctg

SEQ ID NO: 3052007 - DNA, 25 bp, Homo sapien
gatctcacttgctaaccaggagctc

SEQ ID NO: 3052008 - DNA, 25 bp, Homo sapien
cctctggtcttcaaccagcctcact

SEQ ID NO: 3052009 - DNA, 25 bp, Homo sapien
tacctctggtcttcaaccagcctca

SEQ ID NO: 3052010 - DNA, 25 bp, Homo sapien
tctcacttgctaaccaggagctccc

SEQ ID NO: 3052011 - DNA, 25 bp, Homo sapien
ggcagactgttgccttcactactgg

SEQ ID NO: 3052012 - DNA, 25 bp, Homo sapien
ggtgggcagactgttgccttcacta

SEQ ID NO: 3052013 - DNA, 25 bp, Homo sapien
gactgttgccttcactactggctcc

SEQ ID NO: 3052014 - DNA, 25 bp, Homo sapien
cagactgttgccttcactactggct

SEQ ID NO: 3052015 - DNA, 25 bp, Homo sapien
gagggttgactaaatgcacatgggc

SEQ ID NO: 3052016 - DNA, 25 bp, Homo sapien
tcattacaaggtcagtgggacttcc

SEQ ID NO: 3052017 - DNA, 25 bp, Homo sapien
gtctatgtaaaagcacacacccatg

SEQ ID NO: 3052018 - DNA, 25 bp, Homo sapien
tagaaggactgcacagtctgctcag

SEQ ID NO: 3052019 - DNA, 25 bp, Homo sapien
atgagcaccagggcgggtccagccc

SEQ ID NO: 3052020 - DNA, 25 bp, Homo sapien
ccagggcgggtccagcccttgcttg

SEQ ID NO: 3052021 - DNA, 25 bp, Homo sapien
ggaggacttcaatagtccagctgct

SEQ ID NO: 3052022 - DNA, 25 bp, Homo sapien
gcttgggaggacttcaatagtccag

SEQ ID NO: 3052023 - DNA, 25 bp, Homo sapien
ctttccactaagtctggtgggggcg

SEQ ID NO: 3052024 - DNA, 25 bp, Homo sapien
cagggactttccactaagtctggtg

SEQ ID NO: 3052025 - DNA, 25 bp, Homo sapien
agcagggactttccactaagtctgg

SEQ ID NO: 3052026 - DNA, 25 bp, Homo sapien
agggactttccactaagtctggtgg

SEQ ID NO: 3052027 - DNA, 25 bp, Homo sapien
tacactgtgtagtagaagcattctc

SEQ ID NO: 3052028 - DNA, 25 bp, Homo sapien
tgtcatacatcatcaggacctgtgg

SEQ ID NO: 3052029 - DNA, 25 bp, Homo sapien
tgtatgcagataacacttggcttcg

SEQ ID NO: 3052030 - DNA, 25 bp, Homo sapien
aaggcactataccaacccagcatcg

SEQ ID NO: 3052031 - DNA, 25 bp, Homo sapien
tggggccccagttgtcacctggcag

SEQ ID NO: 3052032 - DNA, 25 bp, Homo sapien
cccatgctcatccttctccctgagg

SEQ ID NO: 3052033 - DNA, 25 bp, Homo sapien
ctctggggccccagttgtcacctgg

SEQ ID NO: 3052034 - DNA, 25 bp, Homo sapien
ggccccagttgtcacctggcagcct

SEQ ID NO: 3052035 - DNA, 25 bp, Homo sapien
gaagtggctccagatgccgtgggtg

SEQ ID NO: 3052036 - DNA, 25 bp, Homo sapien
ctgctcgctgttcccagatttctca

SEQ ID NO: 3052037 - DNA, 25 bp, Homo sapien
agatgccgtgggtgggacattcctt

SEQ ID NO: 3052038 - DNA, 25 bp, Homo sapien
gaaggaagtggctccagatgccgtg

SEQ ID NO: 3052039 - DNA, 25 bp, Homo sapien
aggctctggcagtcgcactttcaca

SEQ ID NO: 3052040 - DNA, 25 bp, Homo sapien
tgttgaataacccagggactgtggc

SEQ ID NO: 3052041 - DNA, 25 bp, Homo sapien
gctgcctgtcctggtagccgctgtt

SEQ ID NO: 3052042 - DNA, 25 bp, Homo sapien
ttgtggctcgggacacggtggaggg

SEQ ID NO: 3052043 - DNA, 25 bp, Homo sapien
ctggaagcatgagagcaggtgttat

SEQ ID NO: 3052044 - DNA, 25 bp, Homo sapien
cctagtccttggtgcatcacgggca

SEQ ID NO: 3052045 - DNA, 25 bp, Homo sapien
aaaggttgtatagctagcctagtcc

SEQ ID NO: 3052046 - DNA, 25 bp, Homo sapien
caggtaagttacatgagctctctaa

SEQ ID NO: 3052047 - DNA, 25 bp, Homo sapien
taaagttgctagctgtgtcaccaca

SEQ ID NO: 3052048 - DNA, 25 bp, Homo sapien
caagactcagaccagttgggcaaca

SEQ ID NO: 3052049 - DNA, 25 bp, Homo sapien
tacagggaggctaagtaaccagccc

SEQ ID NO: 3052050 - DNA, 25 bp, Homo sapien
ggacataggtaccattagtatcccc

SEQ ID NO: 3052051 - DNA, 25 bp, Homo sapien
ttcaaagtcggcagagctccagagt

SEQ ID NO: 3052052 - DNA, 25 bp, Homo sapien
cttgggcttggcttggggttgcagc

SEQ ID NO: 3052053 - DNA, 25 bp, Homo sapien
cttggggttgcagccagcaaggatg

SEQ ID NO: 3052054 - DNA, 25 bp, Homo sapien
cttggcttggggttgcagccagcaa

SEQ ID NO: 3052055 - DNA, 25 bp, Homo sapien
ggcttggggttgcagccagcaagga

SEQ ID NO: 3052056 - DNA, 25 bp, Homo sapien
cagcgggctccacacgcacatgcgc

SEQ ID NO: 3052057 - DNA, 25 bp, Homo sapien
ggttcccctcggggacacacacgca

SEQ ID NO: 3052058 - DNA, 25 bp, Homo sapien
tccacacgcacatgcgctccggcag

SEQ ID NO: 3052059 - DNA, 25 bp, Homo sapien
gggctccacacgcacatgcgctccg

SEQ ID NO: 3052060 - DNA, 25 bp, Homo sapien
tggctttgatcacgcggaggcagct

SEQ ID NO: 3052061 - DNA, 25 bp, Homo sapien
tcccgctggcttggaggacagtgaa

SEQ ID NO: 3052062 - DNA, 25 bp, Homo sapien
gataaggcctggttttcggaagagc

SEQ ID NO: 3052063 - DNA, 25 bp, Homo sapien
gaggtccctctagtccaggcagaag

SEQ ID NO: 3052064 - DNA, 25 bp, Homo sapien
cagtaggcccacgaaacaaatgatg

SEQ ID NO: 3052065 - DNA, 25 bp, Homo sapien
aaagttccgcacgtccttcttggag

SEQ ID NO: 3052066 - DNA, 25 bp, Homo sapien
gacaaggtaacagaagctcatggcc

SEQ ID NO: 3052067 - DNA, 25 bp, Homo sapien
gaagactatgaagaccacgaccaca

SEQ ID NO: 3052068 - DNA, 25 bp, Homo sapien
tactcccggcctctatgaagtgcac

SEQ ID NO: 3052069 - DNA, 25 bp, Homo sapien
cctgcttgggaacatggtgaggaca

SEQ ID NO: 3052070 - DNA, 25 bp, Homo sapien
tggcccagccatggttacggcccaa

SEQ ID NO: 3052071 - DNA, 25 bp, Homo sapien
cattgctagcctgagacgaaaagtc

SEQ ID NO: 3052072 - DNA, 25 bp, Homo sapien
tgccagcaatacagccccccagagt

SEQ ID NO: 3052073 - DNA, 25 bp, Homo sapien
ttttgggaacagtgcccagcttggg

SEQ ID NO: 3052074 - DNA, 25 bp, Homo sapien
gcctgagcttctggaaagctgcccc

SEQ ID NO: 3052075 - DNA, 25 bp, Homo sapien
tggggttttgggaacagtgcccagc

SEQ ID NO: 3052076 - DNA, 25 bp, Homo sapien
ccaccagcacgcttttcattggttt

SEQ ID NO: 3052077 - DNA, 25 bp, Homo sapien
caccaccagcacgcttttcattggt

SEQ ID NO: 3052078 - DNA, 25 bp, Homo sapien
gccaccaccagcacgcttttcattg

SEQ ID NO: 3052079 - DNA, 25 bp, Homo sapien
caccagcacgcttttcattggtttc

SEQ ID NO: 3052080 - DNA, 25 bp, Homo sapien
gaacatcagaaccagattgtgcctt

SEQ ID NO: 3052081 - DNA, 25 bp, Homo sapien
acatcagaaccagattgtgcctttg

SEQ ID NO: 3052082 - DNA, 25 bp, Homo sapien
ctgtaggagacaaggcgagaaagtt

SEQ ID NO: 3052083 - DNA, 25 bp, Homo sapien
agaaagttattgcttggcagggaca

SEQ ID NO: 3052084 - DNA, 25 bp, Homo sapien
cctgctgcccggcatcactgtcctc

SEQ ID NO: 3052085 - DNA, 25 bp, Homo sapien
tccttcttgtcctcctccactccca

SEQ ID NO: 3052086 - DNA, 25 bp, Homo sapien
tcttgtcctcctccactcccaggtc

SEQ ID NO: 3052087 - DNA, 25 bp, Homo sapien
cttcttgtcctcctccactcccagg

SEQ ID NO: 3052088 - DNA, 25 bp, Homo sapien
ctccttcttgtcctcctccactccc

SEQ ID NO: 3052089 - DNA, 25 bp, Homo sapien
cctggcatccaggtgagtgcgcagc

SEQ ID NO: 3052090 - DNA, 25 bp, Homo sapien
tgaggcggcaaagctatgaggtcgt

SEQ ID NO: 3052091 - DNA, 25 bp, Homo sapien
agtgcgcagccacacgtgcatgaag

SEQ ID NO: 3052092 - DNA, 25 bp, Homo sapien
tggggtaggtgcacacgtttccagc

SEQ ID NO: 3052093 - DNA, 25 bp, Homo sapien
gagtcagtaactgcgatgccacaag

SEQ ID NO: 3052094 - DNA, 25 bp, Homo sapien
tagcttacctacaagtcagggcggc

SEQ ID NO: 3052095 - DNA, 25 bp, Homo sapien
tgaccctcaggtcccagctaggtag

SEQ ID NO: 3052096 - DNA, 25 bp, Homo sapien
tcaatagcgccaggaaatgcgtggg

SEQ ID NO: 3052097 - DNA, 25 bp, Homo sapien
tgtcggcctctgatggcaatggagt

SEQ ID NO: 3052098 - DNA, 25 bp, Homo sapien
gtcggcctctgatggcaatggagtt

SEQ ID NO: 3052099 - DNA, 25 bp, Homo sapien
ttgtcggcctctgatggcaatggag

SEQ ID NO: 3052100 - DNA, 25 bp, Homo sapien
ccagagagcccgttttgagtaaagc

SEQ ID NO: 3052101 - DNA, 25 bp, Homo sapien
gagtaaagcttgtcagcggcttccc

SEQ ID NO: 3052102 - DNA, 25 bp, Homo sapien
cattcaaaccgtgaaaaaggccagc

SEQ ID NO: 3052103 - DNA, 25 bp, Homo sapien
tccctgcatcaaagcctaggagtct

SEQ ID NO: 3052104 - DNA, 25 bp, Homo sapien
cacagggtcagtctgggtgtccaag

SEQ ID NO: 3052105 - DNA, 25 bp, Homo sapien
taaaaggtcctaagctctctaggga

SEQ ID NO: 3052106 - DNA, 25 bp, Homo sapien
gaatcagagagtgggtaaaaggtcc

SEQ ID NO: 3052107 - DNA, 25 bp, Homo sapien
ggaagtagcttccaatgcccaccaa

SEQ ID NO: 3052108 - DNA, 25 bp, Homo sapien
tgtgcccggcctcgcactacccctg

SEQ ID NO: 3052109 - DNA, 25 bp, Homo sapien
gacgctctctgggcggtaaaaccac

SEQ ID NO: 3052110 - DNA, 25 bp, Homo sapien
ctctgggcggtaaaaccacacagga

SEQ ID NO: 3052111 - DNA, 25 bp, Homo sapien
ctgggcggtaaaaccacacaggaag

SEQ ID NO: 3052112 - DNA, 25 bp, Homo sapien
cagatcctggtatcggcagtagctt

SEQ ID NO: 3052113 - DNA, 25 bp, Homo sapien
gactgcagatcctggtatcggcagt

SEQ ID NO: 3052114 - DNA, 25 bp, Homo sapien
tcctggtatcggcagtagcttgagt

SEQ ID NO: 3052115 - DNA, 25 bp, Homo sapien
gtatcggcagtagcttgagtatcat

SEQ ID NO: 3052116 - DNA, 25 bp, Homo sapien
gagagaacaatgggtttgccttgac

SEQ ID NO: 3052117 - DNA, 25 bp, Homo sapien
gcatgggttcattgttgggcattaa

SEQ ID NO: 3052118 - DNA, 25 bp, Homo sapien
acttgtcaggacgtgtgcacagaga

SEQ ID NO: 3052119 - DNA, 25 bp, Homo sapien
ccggcggcggtttcctgacttgtca

SEQ ID NO: 3052120 - DNA, 25 bp, Homo sapien
tgtctgtgtttttcgtgttgccaaa

SEQ ID NO: 3052121 - DNA, 25 bp, Homo sapien
tatgtgtctgtgtttttcgtgttgc

SEQ ID NO: 3052122 - DNA, 25 bp, Homo sapien
tgtgtttttcgtgttgccaaaagct

SEQ ID NO: 3052123 - DNA, 25 bp, Homo sapien
tgtttttcgtgttgccaaaagctct

SEQ ID NO: 3052124 - DNA, 25 bp, Homo sapien
ggtcacatgaatcaattcctacatg

SEQ ID NO: 3052125 - DNA, 25 bp, Homo sapien
catgaatcaattcctacatgactgc

SEQ ID NO: 3052126 - DNA, 25 bp, Homo sapien
tggagggtaggtcacatgaatcaat

SEQ ID NO: 3052127 - DNA, 25 bp, Homo sapien
tctgattggtggagggtaggtcaca

SEQ ID NO: 3052128 - DNA, 25 bp, Homo sapien
tttctcgtgtctaccccatcctcct

SEQ ID NO: 3052129 - DNA, 25 bp, Homo sapien
ggagagtaatcttgtgcctagaaag

SEQ ID NO: 3052130 - DNA, 25 bp, Homo sapien
tcctatctgttcagcctggtccagg

SEQ ID NO: 3052131 - DNA, 25 bp, Homo sapien
ccctgagcatggtgaagctcagtgc

SEQ ID NO: 3052132 - DNA, 25 bp, Homo sapien
caagtgctcggtggagagcagaaca

SEQ ID NO: 3052133 - DNA, 25 bp, Homo sapien
aacaggccgagagtgttttccacgg

SEQ ID NO: 3052134 - DNA, 25 bp, Homo sapien
agagcagaacaggccgagagtgttt

SEQ ID NO: 3052135 - DNA, 25 bp, Homo sapien
gcagaacaggccgagagtgttttcc

SEQ ID NO: 3052136 - DNA, 25 bp, Homo sapien
tccaggcctgtacacagagcctggg

SEQ ID NO: 3052137 - DNA, 25 bp, Homo sapien
cctccaggcctgtacacagagcctg

SEQ ID NO: 3052138 - DNA, 25 bp, Homo sapien
cttccataccccgacagccagaaaa

SEQ ID NO: 3052139 - DNA, 25 bp, Homo sapien
ggcctggactcacacttttccccag

SEQ ID NO: 3052140 - DNA, 25 bp, Homo sapien
cttgtttcacactgaagactgaagg

SEQ ID NO: 3052141 - DNA, 25 bp, Homo sapien
ttgtttcacactgaagactgaagga

SEQ ID NO: 3052142 - DNA, 25 bp, Homo sapien
tgtttcacactgaagactgaaggat

SEQ ID NO: 3052143 - DNA, 25 bp, Homo sapien
aaaggagaagttcaggttggaccag

SEQ ID NO: 3052144 - DNA, 25 bp, Homo sapien
taaaggagaagttcaggttggacca

SEQ ID NO: 3052145 - DNA, 25 bp, Homo sapien
agaagttcaggttggaccaggaggg

SEQ ID NO: 3052146 - DNA, 25 bp, Homo sapien
agttcaggttggaccaggagggctt

SEQ ID NO: 3052147 - DNA, 25 bp, Homo sapien
ccctcgggaagacactgtccagggc

SEQ ID NO: 3052148 - DNA, 25 bp, Homo sapien
cctcgggaagacactgtccagggca

SEQ ID NO: 3052149 - DNA, 25 bp, Homo sapien
agtccagggccctcggctctggtga

SEQ ID NO: 3052150 - DNA, 25 bp, Homo sapien
gggccctcggctctggtgaccacat

SEQ ID NO: 3052151 - DNA, 25 bp, Homo sapien
taggagagccatttgaaaagacagc

SEQ ID NO: 3052152 - DNA, 25 bp, Homo sapien
catttgcaaagacgttaagccctcc

SEQ ID NO: 3052153 - DNA, 25 bp, Homo sapien
tgcctgttcacgagaaaccaaagct

SEQ ID NO: 3052154 - DNA, 25 bp, Homo sapien
ccagcaaggtttgcccagcggtaaa

SEQ ID NO: 3052155 - DNA, 25 bp, Homo sapien
aggcagaggagggtggatcaggagg

SEQ ID NO: 3052156 - DNA, 25 bp, Homo sapien
ccaggctggcaaacatggcaaaatc

SEQ ID NO: 3052157 - DNA, 25 bp, Homo sapien
gctggcaaacatggcaaaatcctgt

SEQ ID NO: 3052158 - DNA, 25 bp, Homo sapien
ggctggcaaacatggcaaaatcctg

SEQ ID NO: 3052159 - DNA, 25 bp, Homo sapien
gacaagggccctgagtacacaaatt

SEQ ID NO: 3052160 - DNA, 25 bp, Homo sapien
gatgtcaagagttgtttccacccag

SEQ ID NO: 3052161 - DNA, 25 bp, Homo sapien
ccagcaccttttgggacatgggaaa

SEQ ID NO: 3052162 - DNA, 25 bp, Homo sapien
aaaatcaaggagcagtaagggcacc

SEQ ID NO: 3052163 - DNA, 25 bp, Homo sapien
tgggctctggtctatgggatcctga

SEQ ID NO: 3052164 - DNA, 25 bp, Homo sapien
cagttgagggctagaaacaagatcc

SEQ ID NO: 3052165 - DNA, 25 bp, Homo sapien
tggctttggtaagcaccccagtgag

SEQ ID NO: 3052166 - DNA, 25 bp, Homo sapien
cttaagaaaggtgactgactgagcc

SEQ ID NO: 3052167 - DNA, 25 bp, Homo sapien
tccactgttgcactgttgctctccg

SEQ ID NO: 3052168 - DNA, 25 bp, Homo sapien
tggctcctccactgttgcactgttg

SEQ ID NO: 3052169 - DNA, 25 bp, Homo sapien
tgttgcactgttgctctccgagcca

SEQ ID NO: 3052170 - DNA, 25 bp, Homo sapien
cactgttgctctccgagccagtgtt

SEQ ID NO: 3052171 - DNA, 25 bp, Homo sapien
cactgtcagttccaagatgaaattt

SEQ ID NO: 3052172 - DNA, 25 bp, Homo sapien
tgtaatcacacatttgtcactgtca

SEQ ID NO: 3052173 - DNA, 25 bp, Homo sapien
cacacatttgtcactgtcagttcca

SEQ ID NO: 3052174 - DNA, 25 bp, Homo sapien
taatcacacatttgtcactgtcagt

SEQ ID NO: 3052175 - DNA, 25 bp, Homo sapien
tttgtttaaagtcatgctgggctgt

SEQ ID NO: 3052176 - DNA, 25 bp, Homo sapien
ctttgtttaaagtcatgctgggctg

SEQ ID NO: 3052177 - DNA, 25 bp, Homo sapien
taatataaggttggtcttttagaca

SEQ ID NO: 3052178 - DNA, 25 bp, Homo sapien
ttgtttaaagtcatgctgggctgtt

SEQ ID NO: 3052179 - DNA, 25 bp, Homo sapien
tcttgcaacgatgctccaggaagcc

SEQ ID NO: 3052180 - DNA, 25 bp, Homo sapien
gagtaccaagtatgactactgtccc

SEQ ID NO: 3052181 - DNA, 25 bp, Homo sapien
cacagtgtactaggcagtgttaaaa

SEQ ID NO: 3052182 - DNA, 25 bp, Homo sapien
cagtgccatgaggtaaggtgatctc

SEQ ID NO: 3052183 - DNA, 25 bp, Homo sapien
tcaggaaaatcagtatacctagaag

SEQ ID NO: 3052184 - DNA, 25 bp, Homo sapien
cttttaatcaggaaaatcagtatac

SEQ ID NO: 3052185 - DNA, 25 bp, Homo sapien
atcagtatacctagaagtaagggtt

SEQ ID NO: 3052186 - DNA, 25 bp, Homo sapien
taatcaggaaaatcagtatacctag

SEQ ID NO: 3052187 - DNA, 25 bp, Homo sapien
cttaacggtaataaccacatcttga

SEQ ID NO: 3052188 - DNA, 25 bp, Homo sapien
ccaggcagttgttgttgcaactact

SEQ ID NO: 3052189 - DNA, 25 bp, Homo sapien
tattttagacttcgcaggccaggca

SEQ ID NO: 3052190 - DNA, 25 bp, Homo sapien
ggcaggattggcttacaggtattac

SEQ ID NO: 3052191 - DNA, 25 bp, Homo sapien
tctcctcgcctttgttagctgcttg

SEQ ID NO: 3052192 - DNA, 25 bp, Homo sapien
ccatcggaatgttctcgtcgtcttt

SEQ ID NO: 3052193 - DNA, 25 bp, Homo sapien
tgtctccatcggaatgttctcgtcg

SEQ ID NO: 3052194 - DNA, 25 bp, Homo sapien
gaacgatgctgctctgactgcgctc

SEQ ID NO: 3052195 - DNA, 25 bp, Homo sapien
tcttctcctggtgtcgttcctctat

SEQ ID NO: 3052196 - DNA, 25 bp, Homo sapien
taggcatggtgtaggaatcatatca

SEQ ID NO: 3052197 - DNA, 25 bp, Homo sapien
caggatcaggcttcataattgtgtc

SEQ ID NO: 3052198 - DNA, 25 bp, Homo sapien
acctgggatttgtggtataggcaca

SEQ ID NO: 3052199 - DNA, 25 bp, Homo sapien
cagtaaagattgataggatgcctca

SEQ ID NO: 3052200 - DNA, 25 bp, Homo sapien
acgggcggtggctgtatgcttcatt

SEQ ID NO: 3052201 - DNA, 25 bp, Homo sapien
cctgccgtttgaggacctgcattct

SEQ ID NO: 3052202 - DNA, 25 bp, Homo sapien
tgtgacaactgaccgaacgtctggc

SEQ ID NO: 3052203 - DNA, 25 bp, Homo sapien
agaatttcactgatgaggcggtggt

SEQ ID NO: 3052204 - DNA, 25 bp, Homo sapien
gaggcctatgttgcgctgctatgtc

SEQ ID NO: 3052205 - DNA, 25 bp, Homo sapien
gacagggaggaaccacacttaagaa

SEQ ID NO: 3052206 - DNA, 25 bp, Homo sapien
ttagcacctcccttattgtctggca

SEQ ID NO: 3052207 - DNA, 25 bp, Homo sapien
ggaaaccctgttacagaggcctatg

SEQ ID NO: 3052208 - DNA, 25 bp, Homo sapien
gacataaggtctaagcaatttgggc

SEQ ID NO: 3052209 - DNA, 25 bp, Homo sapien
ctttgcatgttagtcgtctgcttcc

SEQ ID NO: 3052210 - DNA, 25 bp, Homo sapien
tatcctatgatgaagaggctctcac

SEQ ID NO: 3052211 - DNA, 25 bp, Homo sapien
tgtgtggataattgcacatgccctc

SEQ ID NO: 3052212 - DNA, 25 bp, Homo sapien
gatagtcctctgttaaagaagtcag

SEQ ID NO: 3052213 - DNA, 25 bp, Homo sapien
tggcgcctggcaatgtctatctttt

SEQ ID NO: 3052214 - DNA, 25 bp, Homo sapien
gctgttgtacttcatgcagatgcca

SEQ ID NO: 3052215 - DNA, 25 bp, Homo sapien
tcgtactggtatgctaaagacattc

SEQ ID NO: 3052216 - DNA, 25 bp, Homo sapien
tttctcatatcttaactcacagaga

SEQ ID NO: 3052217 - DNA, 25 bp, Homo sapien
catgcgagattgtctctgtcgactt

SEQ ID NO: 3052218 - DNA, 25 bp, Homo sapien
gattgtctctgtcgactttcttcct

SEQ ID NO: 3052219 - DNA, 25 bp, Homo sapien
ctgaatgctcatgtacggttctcct

SEQ ID NO: 3052220 - DNA, 25 bp, Homo sapien
tcctttctccatgcgagattgtctc

SEQ ID NO: 3052221 - DNA, 25 bp, Homo sapien
gagatctcgccacatgccaccaata

SEQ ID NO: 3052222 - DNA, 25 bp, Homo sapien
tttctgcttcgtattcgtttaaata

SEQ ID NO: 3052223 - DNA, 25 bp, Homo sapien
tcagtgagatctcgccacatgccac

SEQ ID NO: 3052224 - DNA, 25 bp, Homo sapien
tcttcatcagtgagatctcgccaca

SEQ ID NO: 3052225 - DNA, 25 bp, Homo sapien
gggttttggaatcgtgataccagag

SEQ ID NO: 3052226 - DNA, 25 bp, Homo sapien
gttttggaatcgtgataccagagga

SEQ ID NO: 3052227 - DNA, 25 bp, Homo sapien
tttggaatcgtgataccagaggatg

SEQ ID NO: 3052228 - DNA, 25 bp, Homo sapien
ttggaatcgtgataccagaggatgc

SEQ ID NO: 3052229 - DNA, 25 bp, Homo sapien
aatgcgcctttcttctattcgtcca

SEQ ID NO: 3052230 - DNA, 25 bp, Homo sapien
ggcaaactgaaaagagagtccctta

SEQ ID NO: 3052231 - DNA, 25 bp, Homo sapien
aaaaattctaatgcgcctttcttct

SEQ ID NO: 3052232 - DNA, 25 bp, Homo sapien
ttcattattcaactgtaaggagttc

SEQ ID NO: 3052233 - DNA, 25 bp, Homo sapien
gttgctatgataaaaccccagagat

SEQ ID NO: 3052234 - DNA, 25 bp, Homo sapien
ttcaaagcatttcgccttggaagca

SEQ ID NO: 3052235 - DNA, 25 bp, Homo sapien
taattatcgaaagacaggattggca

SEQ ID NO: 3052236 - DNA, 25 bp, Homo sapien
cctgtggcttaaagtctaggtgaga

SEQ ID NO: 3052237 - DNA, 25 bp, Homo sapien
tacccaagtatactggagtcatcag

SEQ ID NO: 3052238 - DNA, 25 bp, Homo sapien
taagcactccaaaaggtctcgacat

SEQ ID NO: 3052239 - DNA, 25 bp, Homo sapien
gtgttttcacacctgtacttaagag

SEQ ID NO: 3052240 - DNA, 25 bp, Homo sapien
gaactgactaggagtgaattccatc

SEQ ID NO: 3052241 - DNA, 25 bp, Homo sapien
aagtaatgcataactagggtcatag

SEQ ID NO: 3052242 - DNA, 25 bp, Homo sapien
acaataccatacaggagcttcccct

SEQ ID NO: 3052243 - DNA, 25 bp, Homo sapien
aaaaccactaatgcaatctgcgcac

SEQ ID NO: 3052244 - DNA, 25 bp, Homo sapien
gggcttcacagattcgttccttgaa

SEQ ID NO: 3052245 - DNA, 25 bp, Homo sapien
tacatacagtataagcatcaagtgc

SEQ ID NO: 3052246 - DNA, 25 bp, Homo sapien
cagttccagcttgactacagggtga

SEQ ID NO: 3052247 - DNA, 25 bp, Homo sapien
gaaacaacatgtttaggccagggaa

SEQ ID NO: 3052248 - DNA, 25 bp, Homo sapien
ttactgcccgtgaaaaaattgctgc

SEQ ID NO: 3052249 - DNA, 25 bp, Homo sapien
ccagcctgtagttgttgtaggcgag

SEQ ID NO: 3052250 - DNA, 25 bp, Homo sapien
cgtgacccggctgttggtgcccggg

SEQ ID NO: 3052251 - DNA, 25 bp, Homo sapien
tggattgtatcccacaaaccctggt

SEQ ID NO: 3052252 - DNA, 25 bp, Homo sapien
ttgtaggcgagatgactgtatggat

SEQ ID NO: 3052253 - DNA, 25 bp, Homo sapien
aatgagctcaaacgaggaaaacaca

SEQ ID NO: 3052254 - DNA, 25 bp, Homo sapien
gagctcaaacgaggaaaacacagaa

SEQ ID NO: 3052255 - DNA, 25 bp, Homo sapien
agaaatgagctcaaacgaggaaaac

SEQ ID NO: 3052256 - DNA, 25 bp, Homo sapien
tgagctcaaacgaggaaaacacaga

SEQ ID NO: 3052257 - DNA, 25 bp, Homo sapien
gtcagaatctcaattgttcagctcc

SEQ ID NO: 3052258 - DNA, 25 bp, Homo sapien
ctttgaggtcagaatctcaattgtt

SEQ ID NO: 3052259 - DNA, 25 bp, Homo sapien
gaatctcaattgttcagctccacct

SEQ ID NO: 3052260 - DNA, 25 bp, Homo sapien
gaggtcagaatctcaattgttcagc

SEQ ID NO: 3052261 - DNA, 25 bp, Homo sapien
tagtagtgaaaagtagactagcctg

SEQ ID NO: 3052262 - DNA, 25 bp, Homo sapien
ttagcggagaaaactaagttacaca

SEQ ID NO: 3052263 - DNA, 25 bp, Homo sapien
gactagcctgaaatttaggtggtgg

SEQ ID NO: 3052264 - DNA, 25 bp, Homo sapien
ctaagttacacaaggacctaattag

SEQ ID NO: 3052265 - DNA, 25 bp, Homo sapien
tagccagaatgagcattcactcagt

SEQ ID NO: 3052266 - DNA, 25 bp, Homo sapien
tgaaatctttacttgaacagcttga

SEQ ID NO: 3052267 - DNA, 25 bp, Homo sapien
taagattcaatagcaagatctgccc

SEQ ID NO: 3052268 - DNA, 25 bp, Homo sapien
aattattttacatgctgaccaagct

SEQ ID NO: 3052269 - DNA, 25 bp, Homo sapien
gaagacatctgggtttttgtatcaa

SEQ ID NO: 3052270 - DNA, 25 bp, Homo sapien
cagagttggctattacattaacaag

SEQ ID NO: 3052271 - DNA, 25 bp, Homo sapien
gagtgactgtcactggaagacatct

SEQ ID NO: 3052272 - DNA, 25 bp, Homo sapien
tttttgtatcaaggccagagttggc

SEQ ID NO: 3052273 - DNA, 25 bp, Homo sapien
gggtgggaggtggggcataagatgg

SEQ ID NO: 3052274 - DNA, 25 bp, Homo sapien
ggaggtggggcataagatggtcttt

SEQ ID NO: 3052275 - DNA, 25 bp, Homo sapien
tgggaggtggggcataagatggtct

SEQ ID NO: 3052276 - DNA, 25 bp, Homo sapien
gtgggaggtggggcataagatggtc

SEQ ID NO: 3052277 - DNA, 25 bp, Homo sapien
tggaagattaagttctcagttcctt

SEQ ID NO: 3052278 - DNA, 25 bp, Homo sapien
tcagttccttaagaatgaatctgag

SEQ ID NO: 3052279 - DNA, 25 bp, Homo sapien
tttggaagattaagttctcagttcc

SEQ ID NO: 3052280 - DNA, 25 bp, Homo sapien
gttccttaagaatgaatctgagaca

SEQ ID NO: 3052281 - DNA, 25 bp, Homo sapien
aacatccagcaggcctcgctgcagg

SEQ ID NO: 3052282 - DNA, 25 bp, Homo sapien
caactaacataagctccctgtacgt

SEQ ID NO: 3052283 - DNA, 25 bp, Homo sapien
taagctccctgtacgttatacttca

SEQ ID NO: 3052284 - DNA, 25 bp, Homo sapien
gggaccctgacaactaacataagct

SEQ ID NO: 3052285 - DNA, 25 bp, Homo sapien
gcttccctttgtcccgcgctcgccc

SEQ ID NO: 3052286 - DNA, 25 bp, Homo sapien
tccctttgtcccgcgctcgccccgc

SEQ ID NO: 3052287 - DNA, 25 bp, Homo sapien
attttgatactttcccagccgggcg

SEQ ID NO: 3052288 - DNA, 25 bp, Homo sapien
gatgcttagcacactcagggatttt

SEQ ID NO: 3052289 - DNA, 25 bp, Homo sapien
ccgggcgctgattcgtcacggcgaa

SEQ ID NO: 3052290 - DNA, 25 bp, Homo sapien
tctagtgaagatgcggtgatgctta

SEQ ID NO: 3052291 - DNA, 25 bp, Homo sapien
agtggcgggaggtgccgagccttgc

SEQ ID NO: 3052292 - DNA, 25 bp, Homo sapien
cagaataggcctgggtttagcggct

SEQ ID NO: 3052293 - DNA, 25 bp, Homo sapien
tagcggctgtgaggagccggagccg

SEQ ID NO: 3052294 - DNA, 25 bp, Homo sapien
cgcagcgaccgaggaagtggcggga

SEQ ID NO: 3052295 - DNA, 25 bp, Homo sapien
gagtctacacttcactaaacctggg

SEQ ID NO: 3052296 - DNA, 25 bp, Homo sapien
tagctttggcgaaaatcagcacgag

SEQ ID NO: 3052297 - DNA, 25 bp, Homo sapien
caagcgcttttagggtgtaatcgtc

SEQ ID NO: 3052298 - DNA, 25 bp, Homo sapien
tcgtcccaggtttctaagccaaggc

SEQ ID NO: 3052299 - DNA, 25 bp, Homo sapien
agaatgaacgtatgggatccctgac

SEQ ID NO: 3052300 - DNA, 25 bp, Homo sapien
gacccattcattgttagacgctcag

SEQ ID NO: 3052301 - DNA, 25 bp, Homo sapien
catctccagtgctttatgaaggcct

SEQ ID NO: 3052302 - DNA, 25 bp, Homo sapien
cattgccagtgcctacgaagggctt

SEQ ID NO: 3052303 - DNA, 25 bp, Homo sapien
gtacttatctcaaattagccctggg

SEQ ID NO: 3052304 - DNA, 25 bp, Homo sapien
ccttagatgatactttagctgggaa

SEQ ID NO: 3052305 - DNA, 25 bp, Homo sapien
cctcattaggtgaatagtgagtccc

SEQ ID NO: 3052306 - DNA, 25 bp, Homo sapien
tcatgttttgtttgcgcagttggcc

SEQ ID NO: 3052307 - DNA, 25 bp, Homo sapien
tttttaagctactccctctcattca

SEQ ID NO: 3052308 - DNA, 25 bp, Homo sapien
atttttaagctactccctctcattc

SEQ ID NO: 3052309 - DNA, 25 bp, Homo sapien
tatttttaagctactccctctcatt

SEQ ID NO: 3052310 - DNA, 25 bp, Homo sapien
ttttaagctactccctctcattcat

SEQ ID NO: 3052311 - DNA, 25 bp, Homo sapien
tttccatacatacgtaataacttac

SEQ ID NO: 3052312 - DNA, 25 bp, Homo sapien
cattttccatacatacgtaataact

SEQ ID NO: 3052313 - DNA, 25 bp, Homo sapien
ttttccatacatacgtaataactta

SEQ ID NO: 3052314 - DNA, 25 bp, Homo sapien
attttccatacatacgtaataactt

SEQ ID NO: 3052315 - DNA, 25 bp, Homo sapien
caatcaagtcaaatactatctttgg

SEQ ID NO: 3052316 - DNA, 25 bp, Homo sapien
ccttggtccatcctaacattttcca

SEQ ID NO: 3052317 - DNA, 25 bp, Homo sapien
ttttccaatcaagtcaaatactatc

SEQ ID NO: 3052318 - DNA, 25 bp, Homo sapien
cagagggagttggtatggcccacct

SEQ ID NO: 3052319 - DNA, 25 bp, Homo sapien
tgatagagggaatactgcatgatct

SEQ ID NO: 3052320 - DNA, 25 bp, Homo sapien
catgatcttctcatgataagcctga

SEQ ID NO: 3052321 - DNA, 25 bp, Homo sapien
gaggtttgatagagggaatactgca

SEQ ID NO: 3052322 - DNA, 25 bp, Homo sapien
ttaattagctgttgatggaggtttg

SEQ ID NO: 3052323 - DNA, 25 bp, Homo sapien
cttcatcagtggctgctaaatgaag

SEQ ID NO: 3052324 - DNA, 25 bp, Homo sapien
tagtctctaaacacccttcatcagt

SEQ ID NO: 3052325 - DNA, 25 bp, Homo sapien
ggtagattatcctgcttagtctcta

SEQ ID NO: 3052326 - DNA, 25 bp, Homo sapien
cctcaatcgagggttatctttaaag

SEQ ID NO: 3052327 - DNA, 25 bp, Homo sapien
gaatagtgccatgagcttcagtgct

SEQ ID NO: 3052328 - DNA, 25 bp, Homo sapien
tcagtgctctccttaacgatactcc

SEQ ID NO: 3052329 - DNA, 25 bp, Homo sapien
tgcctgtttggttactgtttctaca

SEQ ID NO: 3052330 - DNA, 25 bp, Homo sapien
gatactcccatttaagattgcctgt

SEQ ID NO: 3052331 - DNA, 25 bp, Homo sapien
cttttgtagtaaaagatatttcatt

SEQ ID NO: 3052332 - DNA, 25 bp, Homo sapien
gtaaaagatatttcatttataatgg

SEQ ID NO: 3052333 - DNA, 25 bp, Homo sapien
tttgtagtaaaagatatttcattta

SEQ ID NO: 3052334 - DNA, 25 bp, Homo sapien
tgtagtaaaagatatttcatttata

SEQ ID NO: 3052335 - DNA, 25 bp, Homo sapien
accaactctacttgtggtaggcttt

SEQ ID NO: 3052336 - DNA, 25 bp, Homo sapien
cccaccttggatacaaccataatat

SEQ ID NO: 3052337 - DNA, 25 bp, Homo sapien
tctacttgtggtaggctttttgtct

SEQ ID NO: 3052338 - DNA, 25 bp, Homo sapien
ttttcccaccttggatacaaccata

SEQ ID NO: 3052339 - DNA, 25 bp, Homo sapien
catctggtaatgctgctcgctggca

SEQ ID NO: 3052340 - DNA, 25 bp, Homo sapien
tcgctggcatgtagggagttttcaa

SEQ ID NO: 3052341 - DNA, 25 bp, Homo sapien
tgaagctgcttttcgatgccgcgcc

SEQ ID NO: 3052342 - DNA, 25 bp, Homo sapien
aatcacagtctctaggtcttgcagc

SEQ ID NO: 3052343 - DNA, 25 bp, Homo sapien
tcagtgaatcagtaacacagaatgt

SEQ ID NO: 3052344 - DNA, 25 bp, Homo sapien
atcagtgaatcagtaacacagaatg

SEQ ID NO: 3052345 - DNA, 25 bp, Homo sapien
gatgggtcggttacttttgggatca

SEQ ID NO: 3052346 - DNA, 25 bp, Homo sapien
atgggtcggttacttttgggatcat

SEQ ID NO: 3052347 - DNA, 25 bp, Homo sapien
tgaggactcgatgggtcggttactt

SEQ ID NO: 3052348 - DNA, 25 bp, Homo sapien
atctgaggactcgatgggtcggtta

SEQ ID NO: 3052349 - DNA, 25 bp, Homo sapien
gcaggtggtgccactggcgtcgggc

SEQ ID NO: 3052350 - DNA, 25 bp, Homo sapien
ttgagttctgcttgagctgccttca

SEQ ID NO: 3052351 - DNA, 25 bp, Homo sapien
tgccactggcgtcgggcctccttga

SEQ ID NO: 3052352 - DNA, 25 bp, Homo sapien
tgagttctgcttgagctgccttcaa

SEQ ID NO: 3052353 - DNA, 25 bp, Homo sapien
gagaggccgggacaggaattgggta

SEQ ID NO: 3052354 - DNA, 25 bp, Homo sapien
aattgggtagacatggactgtctcc

SEQ ID NO: 3052355 - DNA, 25 bp, Homo sapien
agacatggactgtctccttattctg

SEQ ID NO: 3052356 - DNA, 25 bp, Homo sapien
gacaggaattgggtagacatggact

SEQ ID NO: 3052357 - DNA, 25 bp, Homo sapien
tgagagcaccgtctctatctgattt

SEQ ID NO: 3052358 - DNA, 25 bp, Homo sapien
gagagcaccgtctctatctgatttc

SEQ ID NO: 3052359 - DNA, 25 bp, Homo sapien
gagcaccgtctctatctgatttctg

SEQ ID NO: 3052360 - DNA, 25 bp, Homo sapien
agcaccgtctctatctgatttctgg

SEQ ID NO: 3052361 - DNA, 25 bp, Homo sapien
ggctaactgaaccttatcgatagga

SEQ ID NO: 3052362 - DNA, 25 bp, Homo sapien
taactgaaccttatcgataggatga

SEQ ID NO: 3052363 - DNA, 25 bp, Homo sapien
ctgaaccttatcgataggatgagtc

SEQ ID NO: 3052364 - DNA, 25 bp, Homo sapien
tgaaccttatcgataggatgagtcg

SEQ ID NO: 3052365 - DNA, 25 bp, Homo sapien
tcttctattctgtgtcctgatactc

SEQ ID NO: 3052366 - DNA, 25 bp, Homo sapien
gtcttctattctgtgtcctgatact

SEQ ID NO: 3052367 - DNA, 25 bp, Homo sapien
tctattctgtgtcctgatactctag

SEQ ID NO: 3052368 - DNA, 25 bp, Homo sapien
ttctattctgtgtcctgatactcta

SEQ ID NO: 3052369 - DNA, 25 bp, Homo sapien
ctggtccttggtcttgcaatgccct

SEQ ID NO: 3052370 - DNA, 25 bp, Homo sapien
tggtccttggtcttgcaatgccctt

SEQ ID NO: 3052371 - DNA, 25 bp, Homo sapien
cattcaccaggcacgccttgacctt

SEQ ID NO: 3052372 - DNA, 25 bp, Homo sapien
ggcacgccttgaccttcagcagctg

SEQ ID NO: 3052373 - DNA, 25 bp, Homo sapien
tggcgcttggcctttgattccatca

SEQ ID NO: 3052374 - DNA, 25 bp, Homo sapien
gctggcgcttggcctttgattccat

SEQ ID NO: 3052375 - DNA, 25 bp, Homo sapien
ctggcgcttggcctttgattccatc

SEQ ID NO: 3052376 - DNA, 25 bp, Homo sapien
gagaaacagtgatctcattctgaac

SEQ ID NO: 3052377 - DNA, 25 bp, Homo sapien
tgatctcattctgaacgtgggccaa

SEQ ID NO: 3052378 - DNA, 25 bp, Homo sapien
tctcattctgaacgtgggccaacat

SEQ ID NO: 3052379 - DNA, 25 bp, Homo sapien
aacagtgatctcattctgaacgtgg

SEQ ID NO: 3052380 - DNA, 25 bp, Homo sapien
ttcctgaattggaaacaaccctcgc

SEQ ID NO: 3052381 - DNA, 25 bp, Homo sapien
aaccctcgctcaaggaattcggcca

SEQ ID NO: 3052382 - DNA, 25 bp, Homo sapien
gaattggaaacaaccctcgctcaag

SEQ ID NO: 3052383 - DNA, 25 bp, Homo sapien
tggaaacaaccctcgctcaaggaat

SEQ ID NO: 3052384 - DNA, 25 bp, Homo sapien
cagctgctagttttacgctgacgat

SEQ ID NO: 3052385 - DNA, 25 bp, Homo sapien
gacgatctgtagcatgaagttgcat

SEQ ID NO: 3052386 - DNA, 25 bp, Homo sapien
gaagttgcattgtcagtgtttgcat

SEQ ID NO: 3052387 - DNA, 25 bp, Homo sapien
gcattgtcagtgtttgcatctgaaa

SEQ ID NO: 3052388 - DNA, 25 bp, Homo sapien
agctgcctgctgtgaaccttgtttc

SEQ ID NO: 3052389 - DNA, 25 bp, Homo sapien
gtgaggatggatgccacgtcgacca

SEQ ID NO: 3052390 - DNA, 25 bp, Homo sapien
ggatggatgccacgtcgaccattct

SEQ ID NO: 3052391 - DNA, 25 bp, Homo sapien
tgccacgtcgaccattctcatcatt

SEQ ID NO: 3052392 - DNA, 25 bp, Homo sapien
tatttcaagagcattctaatgagga

SEQ ID NO: 3052393 - DNA, 25 bp, Homo sapien
agatgcctagattgatgccatttct

SEQ ID NO: 3052394 - DNA, 25 bp, Homo sapien
gatgccatttcttcgcttgtgtcct

SEQ ID NO: 3052395 - DNA, 25 bp, Homo sapien
tccatttctggactgaagcttttcc

SEQ ID NO: 3052396 - DNA, 25 bp, Homo sapien
accaactcctctacgatagtcttag

SEQ ID NO: 3052397 - DNA, 25 bp, Homo sapien
cttagtcactctagtcttgcttgaa

SEQ ID NO: 3052398 - DNA, 25 bp, Homo sapien
gacttgagacgagacaaccttgcca

SEQ ID NO: 3052399 - DNA, 25 bp, Homo sapien
aactttcacctcagaaatactgctg

SEQ ID NO: 3052400 - DNA, 25 bp, Homo sapien
tgtcagtctggaaactctcacagaa

SEQ ID NO: 3052401 - DNA, 25 bp, Homo sapien
gcggactcttttagtatgacaagca

SEQ ID NO: 3052402 - DNA, 25 bp, Homo sapien
aacacagagcaagagaaattcaatc

SEQ ID NO: 3052403 - DNA, 25 bp, Homo sapien
gcattcaacgtgttctgtctgggta

SEQ ID NO: 3052404 - DNA, 25 bp, Homo sapien
gtttacagatcctgagtttctacca

SEQ ID NO: 3052405 - DNA, 25 bp, Homo sapien
cagatcttgagtcaccagataccag

SEQ ID NO: 3052406 - DNA, 25 bp, Homo sapien
ttacagatcctgagtttctaccacc

SEQ ID NO: 3052407 - DNA, 25 bp, Homo sapien
tgtttacagatcctgagtttctacc

SEQ ID NO: 3052408 - DNA, 25 bp, Homo sapien
caattgcttgtactctgcgttctgg

SEQ ID NO: 3052409 - DNA, 25 bp, Homo sapien
tgcgttctggcatttagtctcaccc

SEQ ID NO: 3052410 - DNA, 25 bp, Homo sapien
cagggcactgatctgcgtttgaatt

SEQ ID NO: 3052411 - DNA, 25 bp, Homo sapien
tagtctcaccccagatctggcagat

SEQ ID NO: 3052412 - DNA, 25 bp, Homo sapien
ggccagttgggactgaagctcaatt

SEQ ID NO: 3052413 - DNA, 25 bp, Homo sapien
tgccccagcatcagtggagatttgt

SEQ ID NO: 3052414 - DNA, 25 bp, Homo sapien
tagttctgttatctcattcttggca

SEQ ID NO: 3052415 - DNA, 25 bp, Homo sapien
ccagggcttgcagggtacgttttag

SEQ ID NO: 3052416 - DNA, 25 bp, Homo sapien
cattcagtaatttggtcaggtcggt

SEQ ID NO: 3052417 - DNA, 25 bp, Homo sapien
tctcggcggttttgctcagccagct

SEQ ID NO: 3052418 - DNA, 25 bp, Homo sapien
tcgtactgcgccctcatgtcattca

SEQ ID NO: 3052419 - DNA, 25 bp, Homo sapien
tcaggtcggtccctggcgcagcatt

SEQ ID NO: 3052420 - DNA, 25 bp, Homo sapien
catctccaggtcagagcgggtcata

SEQ ID NO: 3052421 - DNA, 25 bp, Homo sapien
gtaggctagctcctcggtgaaactc

SEQ ID NO: 3052422 - DNA, 25 bp, Homo sapien
gcgggtcatagtcaggtcatccagg

SEQ ID NO: 3052423 - DNA, 25 bp, Homo sapien
ctctgccggagacacagctcgttct

SEQ ID NO: 3052424 - DNA, 25 bp, Homo sapien
caatctggcattgtcaatgtgcaaa

SEQ ID NO: 3052425 - DNA, 25 bp, Homo sapien
agccaatctggcattgtcaatgtgc

SEQ ID NO: 3052426 - DNA, 25 bp, Homo sapien
aatctggcattgtcaatgtgcaaaa

SEQ ID NO: 3052427 - DNA, 25 bp, Homo sapien
ccaatctggcattgtcaatgtgcaa

SEQ ID NO: 3052428 - DNA, 25 bp, Homo sapien
acagaatccagaacccctgccaaat

SEQ ID NO: 3052429 - DNA, 25 bp, Homo sapien
gcaccactgctgaatctagaactcc

SEQ ID NO: 3052430 - DNA, 25 bp, Homo sapien
taggtaattggccaagcggtcattg

SEQ ID NO: 3052431 - DNA, 25 bp, Homo sapien
ggcccatatttgtcataccactcct

SEQ ID NO: 3052432 - DNA, 25 bp, Homo sapien
ggaggaggaggcgcgagacgagcaa

SEQ ID NO: 3052433 - DNA, 25 bp, Homo sapien
aggaggcgcgagacgagcaagacat

SEQ ID NO: 3052434 - DNA, 25 bp, Homo sapien
aggaggaggcgcgagacgagcaaga

SEQ ID NO: 3052435 - DNA, 25 bp, Homo sapien
ctggaggaggaggcgcgagacgagc

SEQ ID NO: 3052436 - DNA, 25 bp, Homo sapien
cgaataggagaggtgatgacgaaga

SEQ ID NO: 3052437 - DNA, 25 bp, Homo sapien
tgctcctgcaaacatgagcttgtcc

SEQ ID NO: 3052438 - DNA, 25 bp, Homo sapien
tcctgcaaacatgagcttgtccagg

SEQ ID NO: 3052439 - DNA, 25 bp, Homo sapien
tgagcttgtccaggcgaataggaga

SEQ ID NO: 3052440 - DNA, 25 bp, Homo sapien
gccgcaggtttgttgcagtgcttca

SEQ ID NO: 3052441 - DNA, 25 bp, Homo sapien
ttaggtgtcatcatttacatcctgg

SEQ ID NO: 3052442 - DNA, 25 bp, Homo sapien
agtgcttcagcacgcctttgttagg

SEQ ID NO: 3052443 - DNA, 25 bp, Homo sapien
gtcattatccgtcaccagcctggtt

SEQ ID NO: 3052444 - DNA, 25 bp, Homo sapien
ttcccctcgattgagctgtgttggt

SEQ ID NO: 3052445 - DNA, 25 bp, Homo sapien
cagagaatcatcctttagattcagc

SEQ ID NO: 3052446 - DNA, 25 bp, Homo sapien
ctgtgttggttattcctttggagtc

SEQ ID NO: 3052447 - DNA, 25 bp, Homo sapien
aaagcgactcttcccctcgattgag

SEQ ID NO: 3052448 - DNA, 25 bp, Homo sapien
tatacatcttaatttctgacagctg

SEQ ID NO: 3052449 - DNA, 25 bp, Homo sapien
ggtattcagtctcgccccggatctg

SEQ ID NO: 3052450 - DNA, 25 bp, Homo sapien
tgtgttctggtattcagtctcgccc

SEQ ID NO: 3052451 - DNA, 25 bp, Homo sapien
gcagttgtgcatactctgtgttctg

SEQ ID NO: 3052452 - DNA, 25 bp, Homo sapien
tcagcatccgtggagatctgtgtct

SEQ ID NO: 3052453 - DNA, 25 bp, Homo sapien
cagactgcagttcatgctggaggga

SEQ ID NO: 3052454 - DNA, 25 bp, Homo sapien
tcactcttggccgagctaactgctt

SEQ ID NO: 3052455 - DNA, 25 bp, Homo sapien
tggaggacttgtttcagctccatta

SEQ ID NO: 3052456 - DNA, 25 bp, Homo sapien
gtcaattggggaagtcatgctggca

SEQ ID NO: 3052457 - DNA, 25 bp, Homo sapien
gcattattaatcgtggctgcaatga

SEQ ID NO: 3052458 - DNA, 25 bp, Homo sapien
gctggcattattaatcgtggctgca

SEQ ID NO: 3052459 - DNA, 25 bp, Homo sapien
tccagcactgtcaattggggaagtc

SEQ ID NO: 3052460 - DNA, 25 bp, Homo sapien
gagatcttcaattattggatagtat

SEQ ID NO: 3052461 - DNA, 25 bp, Homo sapien
tgagatcttcaattattggatagta

SEQ ID NO: 3052462 - DNA, 25 bp, Homo sapien
tgtcacactactccttgattttgtg

SEQ ID NO: 3052463 - DNA, 25 bp, Homo sapien
ggcccaaatttgtcacactactcct

SEQ ID NO: 3052464 - DNA, 25 bp, Homo sapien
caaatttgtcacactactccttgat

SEQ ID NO: 3052465 - DNA, 25 bp, Homo sapien
actactccttgattttgtgttggcc

SEQ ID NO: 3052466 - DNA, 25 bp, Homo sapien
attgtctaggtaattggctaggccg

SEQ ID NO: 3052467 - DNA, 25 bp, Homo sapien
gtctaggtaattggctaggccgtca

SEQ ID NO: 3052468 - DNA, 25 bp, Homo sapien
tggctaggccgtcattgaggttctg

SEQ ID NO: 3052469 - DNA, 25 bp, Homo sapien
ggtaattggctaggccgtcattgag

SEQ ID NO: 3052470 - DNA, 25 bp, Homo sapien
tccagagaaaagccccccgttgcca

SEQ ID NO: 3052471 - DNA, 25 bp, Homo sapien
tgcttttcccctccagagaaaagcc

SEQ ID NO: 3052472 - DNA, 25 bp, Homo sapien
ttgcttttcccctccagagaaaagc

SEQ ID NO: 3052473 - DNA, 25 bp, Homo sapien
ccccgttgccaccaccacctcccat

SEQ ID NO: 3052474 - DNA, 25 bp, Homo sapien
caaaccgtcgagaccagtgtaggag

SEQ ID NO: 3052475 - DNA, 25 bp, Homo sapien
gttgtgccatctccataaggtccaa

SEQ ID NO: 3052476 - DNA, 25 bp, Homo sapien
tcatctgctgctaaaaagttgtgcc

SEQ ID NO: 3052477 - DNA, 25 bp, Homo sapien
gccacagacttgcaaccatgtcctg

SEQ ID NO: 3052478 - DNA, 25 bp, Homo sapien
gtaggggagcacgtctatgtctctg

SEQ ID NO: 3052479 - DNA, 25 bp, Homo sapien
ctgtaggggagcacgtctatgtctc

SEQ ID NO: 3052480 - DNA, 25 bp, Homo sapien
tgtaggggagcacgtctatgtctct

SEQ ID NO: 3052481 - DNA, 25 bp, Homo sapien
taggggagcacgtctatgtctctgc

SEQ ID NO: 3052482 - DNA, 25 bp, Homo sapien
gactctctactctctaatggagata

SEQ ID NO: 3052483 - DNA, 25 bp, Homo sapien
tcccagcgagcctattatgttccct

SEQ ID NO: 3052484 - DNA, 25 bp, Homo sapien
gagataactggtagttcatcccata

SEQ ID NO: 3052485 - DNA, 25 bp, Homo sapien
tcagggacctgtccatgtctctcta

SEQ ID NO: 3052486 - DNA, 25 bp, Homo sapien
gagatgctgtcattgattgcccaga

SEQ ID NO: 3052487 - DNA, 25 bp, Homo sapien
tcttctagatgaatggggagatgct

SEQ ID NO: 3052488 - DNA, 25 bp, Homo sapien
tgaatacaaagaattgacaacagat

SEQ ID NO: 3052489 - DNA, 25 bp, Homo sapien
tttctgtaggataatcaaatgagtc

SEQ ID NO: 3052490 - DNA, 25 bp, Homo sapien
tcttcgcaggggctatgtggcatac

SEQ ID NO: 3052491 - DNA, 25 bp, Homo sapien
ccttttcttcgcaggggctatgtgg

SEQ ID NO: 3052492 - DNA, 25 bp, Homo sapien
gggctatgtggcatacgttctctgt

SEQ ID NO: 3052493 - DNA, 25 bp, Homo sapien
catacgttctctgttgcatctcaaa

SEQ ID NO: 3052494 - DNA, 25 bp, Homo sapien
tggagcctggtggtaagtattttgc

SEQ ID NO: 3052495 - DNA, 25 bp, Homo sapien
agtggagcctggtggtaagtatttt

SEQ ID NO: 3052496 - DNA, 25 bp, Homo sapien
gagtggagcctggtggtaagtattt

SEQ ID NO: 3052497 - DNA, 25 bp, Homo sapien
gtggagcctggtggtaagtattttg

SEQ ID NO: 3052498 - DNA, 25 bp, Homo sapien
tttcttaaccactatggctttggct

SEQ ID NO: 3052499 - DNA, 25 bp, Homo sapien
agaactttcttaaccactatggctt

SEQ ID NO: 3052500 - DNA, 25 bp, Homo sapien
cctcaagaactttcttaaccactat

SEQ ID NO: 3052501 - DNA, 25 bp, Homo sapien
caagaactttcttaaccactatggc

SEQ ID NO: 3052502 - DNA, 25 bp, Homo sapien
tttgacttgacttcccacatttcca

SEQ ID NO: 3052503 - DNA, 25 bp, Homo sapien
tccataatctttagacttgtaaccc

SEQ ID NO: 3052504 - DNA, 25 bp, Homo sapien
atttccagatccataatctttagac

SEQ ID NO: 3052505 - DNA, 25 bp, Homo sapien
cttgtaacccccagacttacaggct

SEQ ID NO: 3052506 - DNA, 25 bp, Homo sapien
ctccagggccccgatctgagcctgg

SEQ ID NO: 3052507 - DNA, 25 bp, Homo sapien
agggccccgatctgagcctggatct

SEQ ID NO: 3052508 - DNA, 25 bp, Homo sapien
gggccccgatctgagcctggatctg

SEQ ID NO: 3052509 - DNA, 25 bp, Homo sapien
ccagggccccgatctgagcctggat

SEQ ID NO: 3052510 - DNA, 25 bp, Homo sapien
ggctaggagagactgaagttcaatt

SEQ ID NO: 3052511 - DNA, 25 bp, Homo sapien
cgtggctaggagagactgaagttca

SEQ ID NO: 3052512 - DNA, 25 bp, Homo sapien
gtggctaggagagactgaagttcaa

SEQ ID NO: 3052513 - DNA, 25 bp, Homo sapien
ctaggagagactgaagttcaatttc

SEQ ID NO: 3052514 - DNA, 25 bp, Homo sapien
attccgggctgaggttgtggctccg

SEQ ID NO: 3052515 - DNA, 25 bp, Homo sapien
tccgacatcctcagagatctgctgc

SEQ ID NO: 3052516 - DNA, 25 bp, Homo sapien
tcatttcagtcagctcattccgggc

SEQ ID NO: 3052517 - DNA, 25 bp, Homo sapien
ggtttgaagagtgcgcttcatttca

SEQ ID NO: 3052518 - DNA, 25 bp, Homo sapien
caggcctccgcgtccctgcggttct

SEQ ID NO: 3052519 - DNA, 25 bp, Homo sapien
ctccgcgtccctgcggttctgctct

SEQ ID NO: 3052520 - DNA, 25 bp, Homo sapien
ggttctgctctgcaagggcttcgta

SEQ ID NO: 3052521 - DNA, 25 bp, Homo sapien
gcctccgcgtccctgcggttctgct

SEQ ID NO: 3052522 - DNA, 25 bp, Homo sapien
ctccagctgcgcactgcagaacttg

SEQ ID NO: 3052523 - DNA, 25 bp, Homo sapien
cctccagctgcgcactgcagaactt

SEQ ID NO: 3052524 - DNA, 25 bp, Homo sapien
tgcctccagctgcgcactgcagaac

SEQ ID NO: 3052525 - DNA, 25 bp, Homo sapien
tccagctgcgcactgcagaacttgc

SEQ ID NO: 3052526 - DNA, 25 bp, Homo sapien
cggagggatagcaaaatgtagacga

SEQ ID NO: 3052527 - DNA, 25 bp, Homo sapien
ctgcggagggatagcaaaatgtaga

SEQ ID NO: 3052528 - DNA, 25 bp, Homo sapien
gggatagcaaaatgtagacgaccag

SEQ ID NO: 3052529 - DNA, 25 bp, Homo sapien
gagggatagcaaaatgtagacgacc

SEQ ID NO: 3052530 - DNA, 25 bp, Homo sapien
catcagcctctacactctggtgaag

SEQ ID NO: 3052531 - DNA, 25 bp, Homo sapien
ggtttcatactgaatctccagatct

SEQ ID NO: 3052532 - DNA, 25 bp, Homo sapien
tcttcgtaacccattgacatcagcc

SEQ ID NO: 3052533 - DNA, 25 bp, Homo sapien
tctgcacagggttatttcatccaaa

SEQ ID NO: 3052534 - DNA, 25 bp, Homo sapien
cagcattagcattgctggtggtgga

SEQ ID NO: 3052535 - DNA, 25 bp, Homo sapien
cgatctgcagaacagcattagcatt

SEQ ID NO: 3052536 - DNA, 25 bp, Homo sapien
cagaacagcattagcattgctggtg

SEQ ID NO: 3052537 - DNA, 25 bp, Homo sapien
cctggcattatcgatctgcagaaca

SEQ ID NO: 3052538 - DNA, 25 bp, Homo sapien
agaccacggcaagagccaggcccaa

SEQ ID NO: 3052539 - DNA, 25 bp, Homo sapien
aagaccacggcaagagccaggccca

SEQ ID NO: 3052540 - DNA, 25 bp, Homo sapien
tcaagaccacggcaagagccaggcc

SEQ ID NO: 3052541 - DNA, 25 bp, Homo sapien
atcaagaccacggcaagagccaggc

SEQ ID NO: 3052542 - DNA, 25 bp, Homo sapien
gcccccgctcattcacagtgaagcc

SEQ ID NO: 3052543 - DNA, 25 bp, Homo sapien
gaatttccagtaccaaagctggttc

SEQ ID NO: 3052544 - DNA, 25 bp, Homo sapien
gctgcctccgaaggcactagagaag

SEQ ID NO: 3052545 - DNA, 25 bp, Homo sapien
tgaagccagcacagggattacctcc

SEQ ID NO: 3052546 - DNA, 25 bp, Homo sapien
tggatgcactggaaagtcgaagaga

SEQ ID NO: 3052547 - DNA, 25 bp, Homo sapien
gtggtgggacgaggacaggacctcc

SEQ ID NO: 3052548 - DNA, 25 bp, Homo sapien
ctgagtgatccagtggtgggacgag

SEQ ID NO: 3052549 - DNA, 25 bp, Homo sapien
gatgcactggaaagtcgaagagaca

SEQ ID NO: 3052550 - DNA, 25 bp, Homo sapien
aagccagaatggagtgccttcttgt

SEQ ID NO: 3052551 - DNA, 25 bp, Homo sapien
cagggcaaacgcgttgcagagctgt

SEQ ID NO: 3052552 - DNA, 25 bp, Homo sapien
ggtatcagggcaaacgcgttgcaga

SEQ ID NO: 3052553 - DNA, 25 bp, Homo sapien
caaacgcgttgcagagctgtatttg

SEQ ID NO: 3052554 - DNA, 25 bp, Homo sapien
tttgctgggctcattcctgtaggag

SEQ ID NO: 3052555 - DNA, 25 bp, Homo sapien
gttgccctcaggttggtggttatct

SEQ ID NO: 3052556 - DNA, 25 bp, Homo sapien
ggctcattcctgtaggagggcagtt

SEQ ID NO: 3052557 - DNA, 25 bp, Homo sapien
agggcagttgccctcaggttggtgg

SEQ ID NO: 3052558 - DNA, 25 bp, Homo sapien
tctagcccttttaagaacagaaatg

SEQ ID NO: 3052559 - DNA, 25 bp, Homo sapien
tccttaggttatttgaccagtagga

SEQ ID NO: 3052560 - DNA, 25 bp, Homo sapien
attacatgcatagaacatgagaaaa

SEQ ID NO: 3052561 - DNA, 25 bp, Homo sapien
ttatttgaccagtaggatttttgca

SEQ ID NO: 3052562 - DNA, 25 bp, Homo sapien
gaggacttttcttcaactgagtgga

SEQ ID NO: 3052563 - DNA, 25 bp, Homo sapien
cgttgctctactgtaatgttgctta

SEQ ID NO: 3052564 - DNA, 25 bp, Homo sapien
tctcagtgaaaggagattgccaatt

SEQ ID NO: 3052565 - DNA, 25 bp, Homo sapien
gattgccaatttgatccagttcctc

SEQ ID NO: 3052566 - DNA, 25 bp, Homo sapien
tttgatttgtaacatgtggatttgc

SEQ ID NO: 3052567 - DNA, 25 bp, Homo sapien
gatttgtaacatgtggatttgcttt

SEQ ID NO: 3052568 - DNA, 25 bp, Homo sapien
tgatttgtaacatgtggatttgctt

SEQ ID NO: 3052569 - DNA, 25 bp, Homo sapien
ttgatttgtaacatgtggatttgct

SEQ ID NO: 3052570 - DNA, 25 bp, Homo sapien
cttcagtctcagccaaggagcattc

SEQ ID NO: 3052571 - DNA, 25 bp, Homo sapien
ttcgaatctgttgcagttgttcctc

SEQ ID NO: 3052572 - DNA, 25 bp, Homo sapien
ctgtttctgttcgaatctgttgcag

SEQ ID NO: 3052573 - DNA, 25 bp, Homo sapien
tcttctccatctagtaagttgcaat

SEQ ID NO: 3052574 - DNA, 25 bp, Homo sapien
cagattgcgttttaattcggtcagc

SEQ ID NO: 3052575 - DNA, 25 bp, Homo sapien
tttaattcggtcagctcatttctgg

SEQ ID NO: 3052576 - DNA, 25 bp, Homo sapien
tgctccctcatgatcggaaatctgt

SEQ ID NO: 3052577 - DNA, 25 bp, Homo sapien
acagccatgagggactgaagttcta

SEQ ID NO: 3052578 - DNA, 25 bp, Homo sapien
cgaaagggttagtgactggcctgat

SEQ ID NO: 3052579 - DNA, 25 bp, Homo sapien
tagtgactggcctgattgtctcctg

SEQ ID NO: 3052580 - DNA, 25 bp, Homo sapien
tgtaattgtcgaaagggttagtgac

SEQ ID NO: 3052581 - DNA, 25 bp, Homo sapien
cctgagcaagccctttgtaatttgc

SEQ ID NO: 3052582 - DNA, 25 bp, Homo sapien
caggacagttaggtccactcctggg

SEQ ID NO: 3052583 - DNA, 25 bp, Homo sapien
tgttgttcaacaggacagttaggtc

SEQ ID NO: 3052584 - DNA, 25 bp, Homo sapien
agcatctttgcggttctgctcagcc

SEQ ID NO: 3052585 - DNA, 25 bp, Homo sapien
tcctcatactcagccctcatgttgt

SEQ ID NO: 3052586 - DNA, 25 bp, Homo sapien
cagctgtatattgcaagacttccat

SEQ ID NO: 3052587 - DNA, 25 bp, Homo sapien
ccccagctgtatattgcaagacttc

SEQ ID NO: 3052588 - DNA, 25 bp, Homo sapien
gttccccccagctgtatattgcaag

SEQ ID NO: 3052589 - DNA, 25 bp, Homo sapien
tcacgttccccccagctgtatattg

SEQ ID NO: 3052590 - DNA, 25 bp, Homo sapien
cactctgcgaagaccactggtgtcg

SEQ ID NO: 3052591 - DNA, 25 bp, Homo sapien
tttgaggtaggtcaattcctcactg

SEQ ID NO: 3052592 - DNA, 25 bp, Homo sapien
tccaggtcggttgtacaaagggtca

SEQ ID NO: 3052593 - DNA, 25 bp, Homo sapien
gtctcacactgtatctccaggtcgg

SEQ ID NO: 3052594 - DNA, 25 bp, Homo sapien
ctgtggtgcagagccagctcatttt

SEQ ID NO: 3052595 - DNA, 25 bp, Homo sapien
gtgcagagccagctcattttcatac

SEQ ID NO: 3052596 - DNA, 25 bp, Homo sapien
gtggtgcagagccagctcattttca

SEQ ID NO: 3052597 - DNA, 25 bp, Homo sapien
ggtgcagagccagctcattttcata

SEQ ID NO: 3052598 - DNA, 25 bp, Homo sapien
cctgaagtcatcagcggtcagtctg

SEQ ID NO: 3052599 - DNA, 25 bp, Homo sapien
tgctggcattgcagatggtcgcaga

SEQ ID NO: 3052600 - DNA, 25 bp, Homo sapien
agcggtcagtctggcattgtcattt

SEQ ID NO: 3052601 - DNA, 25 bp, Homo sapien
atgctggcattgcagatggtcgcag

SEQ ID NO: 3052602 - DNA, 25 bp, Homo sapien
gactgagaagtatctgctatagtca

SEQ ID NO: 3052603 - DNA, 25 bp, Homo sapien
gccttttaagatcttctatgactga

SEQ ID NO: 3052604 - DNA, 25 bp, Homo sapien
gctatagtcatgatcgtgttcccgg

SEQ ID NO: 3052605 - DNA, 25 bp, Homo sapien
catgatcgtgttcccgggaagagcc

SEQ ID NO: 3052606 - DNA, 25 bp, Homo sapien
agttcgcgagcagatcctcctggat

SEQ ID NO: 3052607 - DNA, 25 bp, Homo sapien
tccaccgctattgcagaagcttcct

SEQ ID NO: 3052608 - DNA, 25 bp, Homo sapien
gatccaccagaaagtcgaaaagaca

SEQ ID NO: 3052609 - DNA, 25 bp, Homo sapien
acattcccagccacgaagcctgttc

SEQ ID NO: 3052610 - DNA, 25 bp, Homo sapien
gcaaccccttcccagaaagaggagc

SEQ ID NO: 3052611 - DNA, 25 bp, Homo sapien
ggcagcacagccgggcaaccccttc

SEQ ID NO: 3052612 - DNA, 25 bp, Homo sapien
agcacagccgggcaaccccttccca

SEQ ID NO: 3052613 - DNA, 25 bp, Homo sapien
ggtggcagcacagccgggcaacccc

SEQ ID NO: 3052614 - DNA, 25 bp, Homo sapien
gaaggtggagtcataaagttctcac

SEQ ID NO: 3052615 - DNA, 25 bp, Homo sapien
aaatctgagctaagtattcggtggc

SEQ ID NO: 3052616 - DNA, 25 bp, Homo sapien
ggtattatgtcgtggtgaagcacca

SEQ ID NO: 3052617 - DNA, 25 bp, Homo sapien
taatctcagaccgactggagtgagc

SEQ ID NO: 3052618 - DNA, 25 bp, Homo sapien
acaccaccatagagaaaaagccaaa

SEQ ID NO: 3052619 - DNA, 25 bp, Homo sapien
cttaattcattggaagaaaagcaga

SEQ ID NO: 3052620 - DNA, 25 bp, Homo sapien
taggaaactagcttcattttggtat

SEQ ID NO: 3052621 - DNA, 25 bp, Homo sapien
gaacttttattgaaacaccaccata

SEQ ID NO: 3052622 - DNA, 25 bp, Homo sapien
gccacgaggatctatctcttcaaca

SEQ ID NO: 3052623 - DNA, 25 bp, Homo sapien
ctgttttgacaatggtggttttaga

SEQ ID NO: 3052624 - DNA, 25 bp, Homo sapien
gatgagagaactttgccacgaggat

SEQ ID NO: 3052625 - DNA, 25 bp, Homo sapien
agtgtgaactctggatgagagaact

SEQ ID NO: 3052626 - DNA, 25 bp, Homo sapien
catagccttttgatttagaacagga

SEQ ID NO: 3052627 - DNA, 25 bp, Homo sapien
tgggcctccatagccttttgattta

SEQ ID NO: 3052628 - DNA, 25 bp, Homo sapien
ttcctgggcctccatagccttttga

SEQ ID NO: 3052629 - DNA, 25 bp, Homo sapien
gcctccatagccttttgatttagaa

SEQ ID NO: 3052630 - DNA, 25 bp, Homo sapien
tcatagatattttgtacttgatttc

SEQ ID NO: 3052631 - DNA, 25 bp, Homo sapien
ttgatttcaaatcatctttagtaac

SEQ ID NO: 3052632 - DNA, 25 bp, Homo sapien
tagatattttgtacttgatttcaaa

SEQ ID NO: 3052633 - DNA, 25 bp, Homo sapien
cttgatttcaaatcatctttagtaa

SEQ ID NO: 3052634 - DNA, 25 bp, Homo sapien
gttttctcaatggcggcaatactga

SEQ ID NO: 3052635 - DNA, 25 bp, Homo sapien
ttttctcaatggcggcaatactgac

SEQ ID NO: 3052636 - DNA, 25 bp, Homo sapien
tgttttctcaatggcggcaatactg

SEQ ID NO: 3052637 - DNA, 25 bp, Homo sapien
ttgttttctcaatggcggcaatact

SEQ ID NO: 3052638 - DNA, 25 bp, Homo sapien
ctccagggccccgatctgagcctgg

SEQ ID NO: 3052639 - DNA, 25 bp, Homo sapien
agggccccgatctgagcctggatct

SEQ ID NO: 3052640 - DNA, 25 bp, Homo sapien
gggccccgatctgagcctggatctg

SEQ ID NO: 3052641 - DNA, 25 bp, Homo sapien
ccagggccccgatctgagcctggat

SEQ ID NO: 3052642 - DNA, 25 bp, Homo sapien
ttgcctttattaaatgtcctactac

SEQ ID NO: 3052643 - DNA, 25 bp, Homo sapien
tgcctttattaaatgtcctactact

SEQ ID NO: 3052644 - DNA, 25 bp, Homo sapien
tattaaatgtcctactacttttcta

SEQ ID NO: 3052645 - DNA, 25 bp, Homo sapien
tgtcctactacttttctatttgaga

SEQ ID NO: 3052646 - DNA, 25 bp, Homo sapien
gtggcgccagcgtcgtcagagatct

SEQ ID NO: 3052647 - DNA, 25 bp, Homo sapien
ggtttgaagagtgcgtttcatctcg

SEQ ID NO: 3052648 - DNA, 25 bp, Homo sapien
gcgccagcgtcgtcagagatctgct

SEQ ID NO: 3052649 - DNA, 25 bp, Homo sapien
tcatctcgataagctcattccgggc

SEQ ID NO: 3052650 - DNA, 25 bp, Homo sapien
acggcaggggccgcgttagggcgct

SEQ ID NO: 3052651 - DNA, 25 bp, Homo sapien
gcgcccgggcgcacccaagcgtggt

SEQ ID NO: 3052652 - DNA, 25 bp, Homo sapien
cgcccgggcgcacccaagcgtggtt

SEQ ID NO: 3052653 - DNA, 25 bp, Homo sapien
ggccgcgttagggcgctggggctga

SEQ ID NO: 3052654 - DNA, 25 bp, Homo sapien
gttcatctccacgttcacgttgcct

SEQ ID NO: 3052655 - DNA, 25 bp, Homo sapien
tccagccgcgcactgaagagctttc

SEQ ID NO: 3052656 - DNA, 25 bp, Homo sapien
gagggcttcgtactcagctcgcata

SEQ ID NO: 3052657 - DNA, 25 bp, Homo sapien
tcagcagaaccgtgaggtctacccc

SEQ ID NO: 3052658 - DNA, 25 bp, Homo sapien
caggtccgttctgcacaaggtcagc

SEQ ID NO: 3052659 - DNA, 25 bp, Homo sapien
ttcttcttgaggtaagcgagctcct

SEQ ID NO: 3052660 - DNA, 25 bp, Homo sapien
tcctcactgagagtttccagctgga

SEQ ID NO: 3052661 - DNA, 25 bp, Homo sapien
tccacgctctggtgaagcgctagct

SEQ ID NO: 3052662 - DNA, 25 bp, Homo sapien
gcattactggtagttgcagaaatta

SEQ ID NO: 3052663 - DNA, 25 bp, Homo sapien
aacatgggcattactggtagttgca

SEQ ID NO: 3052664 - DNA, 25 bp, Homo sapien
ggacaacatgggcattactggtagt

SEQ ID NO: 3052665 - DNA, 25 bp, Homo sapien
tcagctgttagtcttgcattatcat

SEQ ID NO: 3052666 - DNA, 25 bp, Homo sapien
aggccacggcaagaaccaggtccaa

SEQ ID NO: 3052667 - DNA, 25 bp, Homo sapien
tagggctcgaacattctccaggtag

SEQ ID NO: 3052668 - DNA, 25 bp, Homo sapien
tcttaagttcgtcaataattgggaa

SEQ ID NO: 3052669 - DNA, 25 bp, Homo sapien
gttggcctcctctagggctcgaaca

SEQ ID NO: 3052670 - DNA, 25 bp, Homo sapien
accgcatgtgtttccagccccaaag

SEQ ID NO: 3052671 - DNA, 25 bp, Homo sapien
tgctcccccactagagagcctcaca

SEQ ID NO: 3052672 - DNA, 25 bp, Homo sapien
caatgcctggcacaccgcatgtgtt

SEQ ID NO: 3052673 - DNA, 25 bp, Homo sapien
agacctccgccatagcctcctgcag

SEQ ID NO: 3052674 - DNA, 25 bp, Homo sapien
gaggtagaagaaaagcgcacagaca

SEQ ID NO: 3052675 - DNA, 25 bp, Homo sapien
agcctttgtttctgcggtgatgctc

SEQ ID NO: 3052676 - DNA, 25 bp, Homo sapien
gagcctttgtttctgcggtgatgct

SEQ ID NO: 3052677 - DNA, 25 bp, Homo sapien
cctgtttagacgaggaatggtatcc

SEQ ID NO: 3052678 - DNA, 25 bp, Homo sapien
aataccaggaatgcgtcatctagtg

SEQ ID NO: 3052679 - DNA, 25 bp, Homo sapien
tatttgcccacatagacacgatgtg

SEQ ID NO: 3052680 - DNA, 25 bp, Homo sapien
tcatattcaaatgccatgtggcggt

SEQ ID NO: 3052681 - DNA, 25 bp, Homo sapien
atagttatttattagtcatcagtga

SEQ ID NO: 3052682 - DNA, 25 bp, Homo sapien
cacaaatagttatttattagtcatc

SEQ ID NO: 3052683 - DNA, 25 bp, Homo sapien
caaatagttatttattagtcatcag

SEQ ID NO: 3052684 - DNA, 25 bp, Homo sapien
aaaatcacaaatagttatttattag

SEQ ID NO: 3052685 - DNA, 25 bp, Homo sapien
caaacactcaatatcctgtaaaact

SEQ ID NO: 3052686 - DNA, 25 bp, Homo sapien
gcaattgtacaggatcctttcccaa

SEQ ID NO: 3052687 - DNA, 25 bp, Homo sapien
tattggaaacaaacactcaatatcc

SEQ ID NO: 3052688 - DNA, 25 bp, Homo sapien
ttgtacaggatcctttcccaaatta

SEQ ID NO: 3052689 - DNA, 25 bp, Homo sapien
ctttgttctgtcttgccgttggtca

SEQ ID NO: 3052690 - DNA, 25 bp, Homo sapien
ctgtctttaccagtgtggttttgga

SEQ ID NO: 3052691 - DNA, 25 bp, Homo sapien
tcttttcttcaatggagtgaatcct

SEQ ID NO: 3052692 - DNA, 25 bp, Homo sapien
gaactttaccacgttgatctagctc

SEQ ID NO: 3052693 - DNA, 25 bp, Homo sapien
ctagaaataaaacataggcatacat

SEQ ID NO: 3052694 - DNA, 25 bp, Homo sapien
ccaaagccctttgatttggagcatg

SEQ ID NO: 3052695 - DNA, 25 bp, Homo sapien
tccaaagccctttgatttggagcat

SEQ ID NO: 3052696 - DNA, 25 bp, Homo sapien
aaagccctttgatttggagcatgaa

SEQ ID NO: 3052697 - DNA, 25 bp, Homo sapien
caaagccctttgatttggagcatga

SEQ ID NO: 3052698 - DNA, 25 bp, Homo sapien
ttccaagtggaccttgacatcgagg

SEQ ID NO: 3052699 - DNA, 25 bp, Homo sapien
gacatcgaggagatgctcatactcc

SEQ ID NO: 3052700 - DNA, 25 bp, Homo sapien
tctttttccaagtggaccttgacat

SEQ ID NO: 3052701 - DNA, 25 bp, Homo sapien
tggaccttgacatcgaggagatgct

SEQ ID NO: 3052702 - DNA, 25 bp, Homo sapien
cattcaggtgtgtaccctctcttcc

SEQ ID NO: 3052703 - DNA, 25 bp, Homo sapien
ccacatgtggcttctaatatgtctt

SEQ ID NO: 3052704 - DNA, 25 bp, Homo sapien
gccctggactctgtggcgatgaaga

SEQ ID NO: 3052705 - DNA, 25 bp, Homo sapien
gacagtgcccatgtggcattcaggt

SEQ ID NO: 3052706 - DNA, 25 bp, Homo sapien
ggtgagctggctccgggcgaaagtg

SEQ ID NO: 3052707 - DNA, 25 bp, Homo sapien
gagtcgtgggagatctgttgctgca

SEQ ID NO: 3052708 - DNA, 25 bp, Homo sapien
agggtgcgcctcatctcggtgagct

SEQ ID NO: 3052709 - DNA, 25 bp, Homo sapien
gcctcatctcggtgagctggctccg

SEQ ID NO: 3052710 - DNA, 25 bp, Homo sapien
ctcgcatgttgttcaacaaaaccgc

SEQ ID NO: 3052711 - DNA, 25 bp, Homo sapien
tgttgttcaacaaaaccgcgaggtc

SEQ ID NO: 3052712 - DNA, 25 bp, Homo sapien
tgttcaacaaaaccgcgaggtctac

SEQ ID NO: 3052713 - DNA, 25 bp, Homo sapien
catgttgttcaacaaaaccgcgagg

SEQ ID NO: 3052714 - DNA, 25 bp, Homo sapien
tcactcagagactcatattgcagct

SEQ ID NO: 3052715 - DNA, 25 bp, Homo sapien
tgcagagcgtcagctcgtccaggac

SEQ ID NO: 3052716 - DNA, 25 bp, Homo sapien
tgtcggcctctacgttttggtgaag

SEQ ID NO: 3052717 - DNA, 25 bp, Homo sapien
gactcgccgtaatccgttgatgtcg

SEQ ID NO: 3052718 - DNA, 25 bp, Homo sapien
agcattagtagtagtggaggagata

SEQ ID NO: 3052719 - DNA, 25 bp, Homo sapien
ctgcagaatgacattagcattagta

SEQ ID NO: 3052720 - DNA, 25 bp, Homo sapien
gcattagtagtagtggaggagataa

SEQ ID NO: 3052721 - DNA, 25 bp, Homo sapien
cagaatgacattagcattagtagta

SEQ ID NO: 3052722 - DNA, 25 bp, Homo sapien
ctccagagctcgcacattatccagg

SEQ ID NO: 3052723 - DNA, 25 bp, Homo sapien
tcctcaattgttaggtgatatctgc

SEQ ID NO: 3052724 - DNA, 25 bp, Homo sapien
cacggcaagatccaggtccgtattt

SEQ ID NO: 3052725 - DNA, 25 bp, Homo sapien
gtaggatgccaagcggtcattaaga

SEQ ID NO: 3052726 - DNA, 25 bp, Homo sapien
ttccagagaggagtcccccttcgct

SEQ ID NO: 3052727 - DNA, 25 bp, Homo sapien
tccagagaggagtcccccttcgctt

SEQ ID NO: 3052728 - DNA, 25 bp, Homo sapien
gcaaagccaatacaagcagcatttc

SEQ ID NO: 3052729 - DNA, 25 bp, Homo sapien
caatacaagcagcatttccaagggc

SEQ ID NO: 3052730 - DNA, 25 bp, Homo sapien
tgaggggtctgacagatccagctcc

SEQ ID NO: 3052731 - DNA, 25 bp, Homo sapien
cattgaggggtctgacagatccagc

SEQ ID NO: 3052732 - DNA, 25 bp, Homo sapien
ctccattgaggggtctgacagatcc

SEQ ID NO: 3052733 - DNA, 25 bp, Homo sapien
gcacctccattgaggggtctgacag

SEQ ID NO: 3052734 - DNA, 25 bp, Homo sapien
ggatccattagaaaattggagagac

SEQ ID NO: 3052735 - DNA, 25 bp, Homo sapien
atccattagaaaattggagagacat

SEQ ID NO: 3052736 - DNA, 25 bp, Homo sapien
ctggatccattagaaaattggagag

SEQ ID NO: 3052737 - DNA, 25 bp, Homo sapien
gatccattagaaaattggagagaca

SEQ ID NO: 3052738 - DNA, 25 bp, Homo sapien
tgagaaatgttcaccttgtctatgc

SEQ ID NO: 3052739 - DNA, 25 bp, Homo sapien
cttgtctatgcaaaactgtaatgtc

SEQ ID NO: 3052740 - DNA, 25 bp, Homo sapien
ttgagaaatgttcaccttgtctatg

SEQ ID NO: 3052741 - DNA, 25 bp, Homo sapien
tgttcaccttgtctatgcaaaactg

SEQ ID NO: 3052742 - DNA, 25 bp, Homo sapien
cgttgtcggacacagctgtttctgc

SEQ ID NO: 3052743 - DNA, 25 bp, Homo sapien
gaaaagagctggtgcaccaagccct

SEQ ID NO: 3052744 - DNA, 25 bp, Homo sapien
gcaccaagcccttgatgtagttcag

SEQ ID NO: 3052745 - DNA, 25 bp, Homo sapien
ctgtttctgctacaccattcctctg

SEQ ID NO: 3052746 - DNA, 25 bp, Homo sapien
gccttgactatagggaaatccatcc

SEQ ID NO: 3052747 - DNA, 25 bp, Homo sapien
acaaggctcctgtcatcaatttggg

SEQ ID NO: 3052748 - DNA, 25 bp, Homo sapien
gctaagcaggttatgaagccttgac

SEQ ID NO: 3052749 - DNA, 25 bp, Homo sapien
cctctgggctgtgctaatatttggt

SEQ ID NO: 3052750 - DNA, 25 bp, Homo sapien
gtcaagctatataacaattgggaag

SEQ ID NO: 3052751 - DNA, 25 bp, Homo sapien
caagctatataacaattgggaagaa

SEQ ID NO: 3052752 - DNA, 25 bp, Homo sapien
ttgggtggtgtcagaagatatgtca

SEQ ID NO: 3052753 - DNA, 25 bp, Homo sapien
ggtgtcagaagatatgtcaagctat

SEQ ID NO: 3052754 - DNA, 25 bp, Homo sapien
aaagataaattctgacaaattggga

SEQ ID NO: 3052755 - DNA, 25 bp, Homo sapien
tcctcttgatgcagtttaatagtag

SEQ ID NO: 3052756 - DNA, 25 bp, Homo sapien
tgtgtgaagggagactctttcctct

SEQ ID NO: 3052757 - DNA, 25 bp, Homo sapien
gatgaaagaactctaccgtcgggcg

SEQ ID NO: 3052758 - DNA, 25 bp, Homo sapien
tctatttccatagaccatcaagaca

SEQ ID NO: 3052759 - DNA, 25 bp, Homo sapien
tcccttagatgaagactcgcccacg

SEQ ID NO: 3052760 - DNA, 25 bp, Homo sapien
cttggtcccttagatgaagactcgc

SEQ ID NO: 3052761 - DNA, 25 bp, Homo sapien
ggtcccttagatgaagactcgccca

SEQ ID NO: 3052762 - DNA, 25 bp, Homo sapien
cttagatgaagactcgcccacggac

SEQ ID NO: 3052763 - DNA, 25 bp, Homo sapien
ggaggacttgtggcctccgctggag

SEQ ID NO: 3052764 - DNA, 25 bp, Homo sapien
aggaggacttgtggcctccgctgga

SEQ ID NO: 3052765 - DNA, 25 bp, Homo sapien
ccaccaccgtagccgccgctggaac

SEQ ID NO: 3052766 - DNA, 25 bp, Homo sapien
tgccaccaccgtagccgccgctgga

SEQ ID NO: 3052767 - DNA, 25 bp, Homo sapien
gccaccaccgtagccgccgctggaa

SEQ ID NO: 3052768 - DNA, 25 bp, Homo sapien
caccaccgtagccgccgctggaact

SEQ ID NO: 3052769 - DNA, 25 bp, Homo sapien
gagcttccgccgccggagcttccgc

SEQ ID NO: 3052770 - DNA, 25 bp, Homo sapien
ccgccggagcttccgccgccggagc

SEQ ID NO: 3052771 - DNA, 25 bp, Homo sapien
gccggagcttccgccgccggagctt

SEQ ID NO: 3052772 - DNA, 25 bp, Homo sapien
ggagcttccgccgccggagcttccg

SEQ ID NO: 3052773 - DNA, 25 bp, Homo sapien
tctgggcctgaatctgtgagagctg

SEQ ID NO: 3052774 - DNA, 25 bp, Homo sapien
caggctgcggtaggtttgaatttca

SEQ ID NO: 3052775 - DNA, 25 bp, Homo sapien
tcttccagagcggatatctgggcct

SEQ ID NO: 3052776 - DNA, 25 bp, Homo sapien
cagtattctggcactcggtttcagc

SEQ ID NO: 3052777 - DNA, 25 bp, Homo sapien
gatttttttgtggcttagtgacttc

SEQ ID NO: 3052778 - DNA, 25 bp, Homo sapien
cggatttttttgtggcttagtgact

SEQ ID NO: 3052779 - DNA, 25 bp, Homo sapien
tacattacgtctcaattcagtaatc

SEQ ID NO: 3052780 - DNA, 25 bp, Homo sapien
gttgggactgtagttctatctccag

SEQ ID NO: 3052781 - DNA, 25 bp, Homo sapien
gatttatagctggatatctgttcaa

SEQ ID NO: 3052782 - DNA, 25 bp, Homo sapien
caatttctgtagtcagttccttgct

SEQ ID NO: 3052783 - DNA, 25 bp, Homo sapien
aagttgagtcagatcaacacccggg

SEQ ID NO: 3052784 - DNA, 25 bp, Homo sapien
gcatctttgcggttttgttcagcaa

SEQ ID NO: 3052785 - DNA, 25 bp, Homo sapien
cagtggacacatttcgaaggtcttt

SEQ ID NO: 3052786 - DNA, 25 bp, Homo sapien
tgttcagcaagttgttcatattggc

SEQ ID NO: 3052787 - DNA, 25 bp, Homo sapien
cttcagtcaggctctcaatttgcat

SEQ ID NO: 3052788 - DNA, 25 bp, Homo sapien
acgctctggcgcagagctacctcat

SEQ ID NO: 3052789 - DNA, 25 bp, Homo sapien
tggcgcagagctacctcattctcat

SEQ ID NO: 3052790 - DNA, 25 bp, Homo sapien
tcagtcaggctctcaatttgcatct

SEQ ID NO: 3052791 - DNA, 25 bp, Homo sapien
ggcattatcagttgttaggttgaga

SEQ ID NO: 3052792 - DNA, 25 bp, Homo sapien
tggcattatcagttgttaggttgag

SEQ ID NO: 3052793 - DNA, 25 bp, Homo sapien
atggacaagatacttaaagctggat

SEQ ID NO: 3052794 - DNA, 25 bp, Homo sapien
tggacaagatacttaaagctggatt

SEQ ID NO: 3052795 - DNA, 25 bp, Homo sapien
gacaagatacttaaagctggattta

SEQ ID NO: 3052796 - DNA, 25 bp, Homo sapien
caagatacttaaagctggatttaaa

SEQ ID NO: 3052797 - DNA, 25 bp, Homo sapien
ttttgccttccagctcatagtttga

SEQ ID NO: 3052798 - DNA, 25 bp, Homo sapien
gtgagttgccatgcttttcatacca

SEQ ID NO: 3052799 - DNA, 25 bp, Homo sapien
tccagagcccgaactttgtccaagt

SEQ ID NO: 3052800 - DNA, 25 bp, Homo sapien
ttgtagtatttgctgtagtcacgag

SEQ ID NO: 3052801 - DNA, 25 bp, Homo sapien
tttttcatttccagagagaaggcca

SEQ ID NO: 3052802 - DNA, 25 bp, Homo sapien
ccaaagccgcctccaccaaagccgc

SEQ ID NO: 3052803 - DNA, 25 bp, Homo sapien
ccaccaaagcctcctccaaagccgc

SEQ ID NO: 3052804 - DNA, 25 bp, Homo sapien
atctcctccaaatccaccaccaaag

SEQ ID NO: 3052805 - DNA, 25 bp, Homo sapien
accaaagctgccacctccgaaactg

SEQ ID NO: 3052806 - DNA, 25 bp, Homo sapien
gaaactgccccctccaaagatgcct

SEQ ID NO: 3052807 - DNA, 25 bp, Homo sapien
tccaaagatgcctccataactccca

SEQ ID NO: 3052808 - DNA, 25 bp, Homo sapien
tacttccatagcttccacgaaagct

SEQ ID NO: 3052809 - DNA, 25 bp, Homo sapien
caccagagctcccacggctaaaaga

SEQ ID NO: 3052810 - DNA, 25 bp, Homo sapien
aaagagccaccactgaacccccctg

SEQ ID NO: 3052811 - DNA, 25 bp, Homo sapien
ccagagctcccacggctaaaagagc

SEQ ID NO: 3052812 - DNA, 25 bp, Homo sapien
ccccaccagagctcccacggctaaa

SEQ ID NO: 3052813 - DNA, 25 bp, Homo sapien
tgcttgagctgtatcgaacagacat

SEQ ID NO: 3052814 - DNA, 25 bp, Homo sapien
tagaaattcttagggatgacactcc

SEQ ID NO: 3052815 - DNA, 25 bp, Homo sapien
gaagagtagtgcttgcttgagctgt

SEQ ID NO: 3052816 - DNA, 25 bp, Homo sapien
cctccactgcgggaggaagagtagt

SEQ ID NO: 3052817 - DNA, 25 bp, Homo sapien
tctgggcttgccctgaaattactcg

SEQ ID NO: 3052818 - DNA, 25 bp, Homo sapien
ctctgggcttgccctgaaattactc

SEQ ID NO: 3052819 - DNA, 25 bp, Homo sapien
tcaagggtctcacgttgcagcattc

SEQ ID NO: 3052820 - DNA, 25 bp, Homo sapien
tttgtgcttgcggtcatcggttgag

SEQ ID NO: 3052821 - DNA, 25 bp, Homo sapien
ccttggtgttggctcgtggttgctc

SEQ ID NO: 3052822 - DNA, 25 bp, Homo sapien
tcttcaacaactggactggaggctc

SEQ ID NO: 3052823 - DNA, 25 bp, Homo sapien
aattgtcagcagaagccgatgcctg

SEQ ID NO: 3052824 - DNA, 25 bp, Homo sapien
tccagttccagtgtctggagagtcc

SEQ ID NO: 3052825 - DNA, 25 bp, Homo sapien
ctcatgccggttggcaattgtcagc

SEQ ID NO: 3052826 - DNA, 25 bp, Homo sapien
gagagtccacctcagctcagcaatc

SEQ ID NO: 3052827 - DNA, 25 bp, Homo sapien
agttcccgcctcttcatgattgttt

SEQ ID NO: 3052828 - DNA, 25 bp, Homo sapien
agactgtctcttataatgatagcca

SEQ ID NO: 3052829 - DNA, 25 bp, Homo sapien
tatcttgacaagtattgacatactg

SEQ ID NO: 3052830 - DNA, 25 bp, Homo sapien
taaattcattttgtgtagttcccgc

SEQ ID NO: 3052831 - DNA, 25 bp, Homo sapien
cttgctatcagcctcaacacagtga

SEQ ID NO: 3052832 - DNA, 25 bp, Homo sapien
aagacacttcgcaggcccttgctat

SEQ ID NO: 3052833 - DNA, 25 bp, Homo sapien
cagcctcaacacagtgataaaggac

SEQ ID NO: 3052834 - DNA, 25 bp, Homo sapien
tcttgttcaaagtcaactcatctaa

SEQ ID NO: 3052835 - DNA, 25 bp, Homo sapien
catccacagtgagcctggcattgtg

SEQ ID NO: 3052836 - DNA, 25 bp, Homo sapien
ttgaagtcatccacagtgagcctgg

SEQ ID NO: 3052837 - DNA, 25 bp, Homo sapien
agtcatccacagtgagcctggcatt

SEQ ID NO: 3052838 - DNA, 25 bp, Homo sapien
ccacagtgagcctggcattgtggat

SEQ ID NO: 3052839 - DNA, 25 bp, Homo sapien
cttgatgagcttacataaaaaggcc

SEQ ID NO: 3052840 - DNA, 25 bp, Homo sapien
tcaatgtgaatagggaatccaaaga

SEQ ID NO: 3052841 - DNA, 25 bp, Homo sapien
cgttaaaagactactccaggtccag

SEQ ID NO: 3052842 - DNA, 25 bp, Homo sapien
aaaacttctctctatgctcttgaca

SEQ ID NO: 3052843 - DNA, 25 bp, Homo sapien
tcaatttcctgaacttgagatgaga

SEQ ID NO: 3052844 - DNA, 25 bp, Homo sapien
tgaacttgagatgagaccacctcac

SEQ ID NO: 3052845 - DNA, 25 bp, Homo sapien
gttcttcaatttcctgaacttgaga

SEQ ID NO: 3052846 - DNA, 25 bp, Homo sapien
ttcctgaacttgagatgagaccacc

SEQ ID NO: 3052847 - DNA, 25 bp, Homo sapien
cctgcacaactgtcttgatttttcg

SEQ ID NO: 3052848 - DNA, 25 bp, Homo sapien
catctcctgcacaactgtcttgatt

SEQ ID NO: 3052849 - DNA, 25 bp, Homo sapien
accatctcctgcacaactgtcttga

SEQ ID NO: 3052850 - DNA, 25 bp, Homo sapien
tctcctgcacaactgtcttgatttt

SEQ ID NO: 3052851 - DNA, 25 bp, Homo sapien
tagaggaatcagttgactgtgcttg

SEQ ID NO: 3052852 - DNA, 25 bp, Homo sapien
ctttagaggaatcagttgactgtgc

SEQ ID NO: 3052853 - DNA, 25 bp, Homo sapien
tttagaggaatcagttgactgtgct

SEQ ID NO: 3052854 - DNA, 25 bp, Homo sapien
agaggaatcagttgactgtgcttgt

SEQ ID NO: 3052855 - DNA, 25 bp, Homo sapien
ccgctggtggtccacgttctggcgc

SEQ ID NO: 3052856 - DNA, 25 bp, Homo sapien
tggtggtccacgttctggcgctctg

SEQ ID NO: 3052857 - DNA, 25 bp, Homo sapien
tcgccctcggcttcggccaaggagt

SEQ ID NO: 3052858 - DNA, 25 bp, Homo sapien
gacagctgcgcgcagtaatcgccct

SEQ ID NO: 3052859 - DNA, 25 bp, Homo sapien
cgatggaggggaccgaaaagaggag

SEQ ID NO: 3052860 - DNA, 25 bp, Homo sapien
cacgtgggagggaaatggcatagaa

SEQ ID NO: 3052861 - DNA, 25 bp, Homo sapien
atggcatagaaataacgatggaggg

SEQ ID NO: 3052862 - DNA, 25 bp, Homo sapien
ggagggaaatggcatagaaataacg

SEQ ID NO: 3052863 - DNA, 25 bp, Homo sapien
tctccaggttctgaaaggcgcgacg

SEQ ID NO: 3052864 - DNA, 25 bp, Homo sapien
tcgctcttgctggactgaagctgct

SEQ ID NO: 3052865 - DNA, 25 bp, Homo sapien
gcaggtcggtgacctcgctcttgct

SEQ ID NO: 3052866 - DNA, 25 bp, Homo sapien
tgttggtgctaatctccttacggag

SEQ ID NO: 3052867 - DNA, 25 bp, Homo sapien
gcccgcatatcattgaggagcctgg

SEQ ID NO: 3052868 - DNA, 25 bp, Homo sapien
cgcccacccggaagctttggagctc

SEQ ID NO: 3052869 - DNA, 25 bp, Homo sapien
gcgtccttccgattctgctcagcga

SEQ ID NO: 3052870 - DNA, 25 bp, Homo sapien
tgctcagcgatggtttcatactgcg

SEQ ID NO: 3052871 - DNA, 25 bp, Homo sapien
gttcaggctctcgatctgcatctcc

SEQ ID NO: 3052872 - DNA, 25 bp, Homo sapien
gctcctcgttcaggctctcgatctg

SEQ ID NO: 3052873 - DNA, 25 bp, Homo sapien
ttcatgtaggccagctcctcgttca

SEQ ID NO: 3052874 - DNA, 25 bp, Homo sapien
cttcatgtaggccagctcctcgttc

SEQ ID NO: 3052875 - DNA, 25 bp, Homo sapien
gcgcagggccagttcattctcatac

SEQ ID NO: 3052876 - DNA, 25 bp, Homo sapien
tacgccctggcgcagggccagttca

SEQ ID NO: 3052877 - DNA, 25 bp, Homo sapien
ctggcgcagggccagttcattctca

SEQ ID NO: 3052878 - DNA, 25 bp, Homo sapien
attgatgtcggcctctacgccctgg

SEQ ID NO: 3052879 - DNA, 25 bp, Homo sapien
ctgaaaaccaagtgcaaagcagttg

SEQ ID NO: 3052880 - DNA, 25 bp, Homo sapien
cagttgagggaatcaacacaaccat

SEQ ID NO: 3052881 - DNA, 25 bp, Homo sapien
caagtgcaaagcagttgagggaatc

SEQ ID NO: 3052882 - DNA, 25 bp, Homo sapien
caaagcagttgagggaatcaacaca

SEQ ID NO: 3052883 - DNA, 25 bp, Homo sapien
tgggcatttccaatgctggctgaaa

SEQ ID NO: 3052884 - DNA, 25 bp, Homo sapien
aggagctgggcatttccaatgctgg

SEQ ID NO: 3052885 - DNA, 25 bp, Homo sapien
agctagtctcgcattgtcaatctgc

SEQ ID NO: 3052886 - DNA, 25 bp, Homo sapien
gtcctcagcagctagtctcgcattg

SEQ ID NO: 3052887 - DNA, 25 bp, Homo sapien
taatcgctctgtgaagcatctgcag

SEQ ID NO: 3052888 - DNA, 25 bp, Homo sapien
tattttctagctcagtattagcctc

SEQ ID NO: 3052889 - DNA, 25 bp, Homo sapien
gcagtcccagttcctcgtgtttcat

SEQ ID NO: 3052890 - DNA, 25 bp, Homo sapien
tattagcctcttctagagctcgcac

SEQ ID NO: 3052891 - DNA, 25 bp, Homo sapien
ggtgcgcactgagagtgacatggtg

SEQ ID NO: 3052892 - DNA, 25 bp, Homo sapien
tgcctatcacactctgcgaggagag

SEQ ID NO: 3052893 - DNA, 25 bp, Homo sapien
gccggaactagaaccaaacatggaa

SEQ ID NO: 3052894 - DNA, 25 bp, Homo sapien
cgagagaatacctagagagccacct

SEQ ID NO: 3052895 - DNA, 25 bp, Homo sapien
catcttaggaattcaaagtggtacc

SEQ ID NO: 3052896 - DNA, 25 bp, Homo sapien
aaattatcatatattggcaagttca

SEQ ID NO: 3052897 - DNA, 25 bp, Homo sapien
atttactggaatacaatgatttagc

SEQ ID NO: 3052898 - DNA, 25 bp, Homo sapien
gtgcctgctatgtgttagatattat

SEQ ID NO: 3052899 - DNA, 25 bp, Homo sapien
gctcaataagaaaccagggactccc

SEQ ID NO: 3052900 - DNA, 25 bp, Homo sapien
gcagatatagctcaaaggttgtaga

SEQ ID NO: 3052901 - DNA, 25 bp, Homo sapien
ataagattaacccagaaattggctc

SEQ ID NO: 3052902 - DNA, 25 bp, Homo sapien
gagaggacctgatagtatatgcagc

SEQ ID NO: 3052903 - DNA, 25 bp, Homo sapien
tgataaataggattcccgccacccc

SEQ ID NO: 3052904 - DNA, 25 bp, Homo sapien
aaattgatattaggtggtctacagc

SEQ ID NO: 3052905 - DNA, 25 bp, Homo sapien
ccccttctaatcactgcagagtatt

SEQ ID NO: 3052906 - DNA, 25 bp, Homo sapien
tatttgcaatttacatggattcctc

SEQ ID NO: 3052907 - DNA, 25 bp, Homo sapien
tttgacttcagatgacacgaccttg

SEQ ID NO: 3052908 - DNA, 25 bp, Homo sapien
gcacgactgtcttaatcttcctggt

SEQ ID NO: 3052909 - DNA, 25 bp, Homo sapien
tcagatgacacgaccttgccatcca

SEQ ID NO: 3052910 - DNA, 25 bp, Homo sapien
catccactacttcttgcacgactgt

SEQ ID NO: 3052911 - DNA, 25 bp, Homo sapien
tcttccagggtgcttaactgatatt

SEQ ID NO: 3052912 - DNA, 25 bp, Homo sapien
ttccagggtgcttaactgatattct

SEQ ID NO: 3052913 - DNA, 25 bp, Homo sapien
gggtgcttaactgatattctgtagt

SEQ ID NO: 3052914 - DNA, 25 bp, Homo sapien
ccagggtgcttaactgatattctgt

SEQ ID NO: 3052915 - DNA, 25 bp, Homo sapien
tgttactccgaatctgcatcagttg

SEQ ID NO: 3052916 - DNA, 25 bp, Homo sapien
tgttctggcgttccatgttactccg

SEQ ID NO: 3052917 - DNA, 25 bp, Homo sapien
gcggcggtaagtagcaatttcctgt

SEQ ID NO: 3052918 - DNA, 25 bp, Homo sapien
aactggctgctgtaacgggccttgg

SEQ ID NO: 3052919 - DNA, 25 bp, Homo sapien
agctccgttagttgaacctcagttc

SEQ ID NO: 3052920 - DNA, 25 bp, Homo sapien
tctcagctccgttagttgaacctca

SEQ ID NO: 3052921 - DNA, 25 bp, Homo sapien
ggtgcgtctcagctccgttagttga

SEQ ID NO: 3052922 - DNA, 25 bp, Homo sapien
ctgggaggtgcgtctcagctccgtt

SEQ ID NO: 3052923 - DNA, 25 bp, Homo sapien
gtgacctgttgctgcagaactgcag

SEQ ID NO: 3052924 - DNA, 25 bp, Homo sapien
tgacctgttgctgcagaactgcagt

SEQ ID NO: 3052925 - DNA, 25 bp, Homo sapien
tgtgacctgttgctgcagaactgca

SEQ ID NO: 3052926 - DNA, 25 bp, Homo sapien
ctgtgacctgttgctgcagaactgc

SEQ ID NO: 3052927 - DNA, 25 bp, Homo sapien
gggccatgacttcatacttctgcct

SEQ ID NO: 3052928 - DNA, 25 bp, Homo sapien
atttcattcatgatgacgccaaggt

SEQ ID NO: 3052929 - DNA, 25 bp, Homo sapien
gacgccaaggttcaggcctggagca

SEQ ID NO: 3052930 - DNA, 25 bp, Homo sapien
gatgcttgtgtaggccatcgacttc

SEQ ID NO: 3052931 - DNA, 25 bp, Homo sapien
ggagatcagcttccactgttagacg

SEQ ID NO: 3052932 - DNA, 25 bp, Homo sapien
tgttagacgtattcctctctcagtc

SEQ ID NO: 3052933 - DNA, 25 bp, Homo sapien
tcctttttgaggagagctaggtctt

SEQ ID NO: 3052934 - DNA, 25 bp, Homo sapien
tatgtagggttaggtcatcaaagac

SEQ ID NO: 3052935 - DNA, 25 bp, Homo sapien
tcagaaacttttgccacgtattagg

SEQ ID NO: 3052936 - DNA, 25 bp, Homo sapien
aacaatgatatggaaagctgagtat

SEQ ID NO: 3052937 - DNA, 25 bp, Homo sapien
tttcagaaacttttgccacgtatta

SEQ ID NO: 3052938 - DNA, 25 bp, Homo sapien
atgatatggaaagctgagtatctgg

SEQ ID NO: 3052939 - DNA, 25 bp, Homo sapien
tttgcaggacacaccgagcattttg

SEQ ID NO: 3052940 - DNA, 25 bp, Homo sapien
agcattatcaatttgcaggacacac

SEQ ID NO: 3052941 - DNA, 25 bp, Homo sapien
ttgcaggacacaccgagcattttgc

SEQ ID NO: 3052942 - DNA, 25 bp, Homo sapien
agcagccagtttagcattatcaatt

SEQ ID NO: 3052943 - DNA, 25 bp, Homo sapien
taatatgcactgtagtcgcgaccag

SEQ ID NO: 3052944 - DNA, 25 bp, Homo sapien
cagggtccgcaccttttctaggtag

SEQ ID NO: 3052945 - DNA, 25 bp, Homo sapien
gagatcgctcccatagttcaccgtg

SEQ ID NO: 3052946 - DNA, 25 bp, Homo sapien
ataaacgctgggtgtcgtcccgagg

SEQ ID NO: 3052947 - DNA, 25 bp, Homo sapien
gtggaagcttctgcgactgaaatcc

SEQ ID NO: 3052948 - DNA, 25 bp, Homo sapien
ggaagcttctgcgactgaaatccat

SEQ ID NO: 3052949 - DNA, 25 bp, Homo sapien
tgtggaagcttctgcgactgaaatc

SEQ ID NO: 3052950 - DNA, 25 bp, Homo sapien
ctgtggaagcttctgcgactgaaat

SEQ ID NO: 3052951 - DNA, 25 bp, Homo sapien
gagattccaggagggagcacctgta

SEQ ID NO: 3052952 - DNA, 25 bp, Homo sapien
ggagattccaggagggagcacctgt

SEQ ID NO: 3052953 - DNA, 25 bp, Homo sapien
agattccaggagggagcacctgtag

SEQ ID NO: 3052954 - DNA, 25 bp, Homo sapien
tggagattccaggagggagcacctg

SEQ ID NO: 3052955 - DNA, 25 bp, Homo sapien
tcaaagatctagctcctgcctacct

SEQ ID NO: 3052956 - DNA, 25 bp, Homo sapien
gacaacagtatgtagtcaagtccaa

SEQ ID NO: 3052957 - DNA, 25 bp, Homo sapien
ttagttcatgaacgttgaggtccag

SEQ ID NO: 3052958 - DNA, 25 bp, Homo sapien
caagtccaatatacagctctcaaag

SEQ ID NO: 3052959 - DNA, 25 bp, Homo sapien
ggcttggatgggaagcaccggcatg

SEQ ID NO: 3052960 - DNA, 25 bp, Homo sapien
ggatgggaagcaccggcatgtgaaa

SEQ ID NO: 3052961 - DNA, 25 bp, Homo sapien
cttggatgggaagcaccggcatgtg

SEQ ID NO: 3052962 - DNA, 25 bp, Homo sapien
gggaagcaccggcatgtgaaaggcc

SEQ ID NO: 3052963 - DNA, 25 bp, Homo sapien
tatccacctgcaggtgtaagagtca

SEQ ID NO: 3052964 - DNA, 25 bp, Homo sapien
tcacactggattaggtaggttttgg

SEQ ID NO: 3052965 - DNA, 25 bp, Homo sapien
cacactggattaggtaggttttggg

SEQ ID NO: 3052966 - DNA, 25 bp, Homo sapien
ctgcaggtgtaagagtcacactgga

SEQ ID NO: 3052967 - DNA, 25 bp, Homo sapien
ctgaagtgggaacgaggcagaggct

SEQ ID NO: 3052968 - DNA, 25 bp, Homo sapien
agctagctgagagcttgccacagat

SEQ ID NO: 3052969 - DNA, 25 bp, Homo sapien
atgtaagcaggaacgcccggctgaa

SEQ ID NO: 3052970 - DNA, 25 bp, Homo sapien
tgtgcaacagatgccgcctggcaga

SEQ ID NO: 3052971 - DNA, 25 bp, Homo sapien
tagatccagctgcaccgatccagtg

SEQ ID NO: 3052972 - DNA, 25 bp, Homo sapien
gatgacaatgggactaaatcacacc

SEQ ID NO: 3052973 - DNA, 25 bp, Homo sapien
ggcattgccaatgtatcagatgaca

SEQ ID NO: 3052974 - DNA, 25 bp, Homo sapien
taattccatgtgcagtattctgacg

SEQ ID NO: 3052975 - DNA, 25 bp, Homo sapien
cataaactcgcactttgattagaaa

SEQ ID NO: 3052976 - DNA, 25 bp, Homo sapien
gcagtaggaaagtagagctttaccc

SEQ ID NO: 3052977 - DNA, 25 bp, Homo sapien
actggtgtctgtgcaaggactttcc

SEQ ID NO: 3052978 - DNA, 25 bp, Homo sapien
taagagcattatgagaagtctggtg

SEQ ID NO: 3052979 - DNA, 25 bp, Homo sapien
tcatgcgtgcttttggatttcattc

SEQ ID NO: 3052980 - DNA, 25 bp, Homo sapien
catgcgtgcttttggatttcattca

SEQ ID NO: 3052981 - DNA, 25 bp, Homo sapien
ctaatcttccgttgatggtctcctg

SEQ ID NO: 3052982 - DNA, 25 bp, Homo sapien
aactaatcttccgttgatggtctcc

SEQ ID NO: 3052983 - DNA, 25 bp, Homo sapien
aagaactaatcttccgttgatggtc

SEQ ID NO: 3052984 - DNA, 25 bp, Homo sapien
acaaagaactaatcttccgttgatg

SEQ ID NO: 3052985 - DNA, 25 bp, Homo sapien
gaacctagtctctgaccacaagcac

SEQ ID NO: 3052986 - DNA, 25 bp, Homo sapien
cactaagcaatgaggtgggctctgc

SEQ ID NO: 3052987 - DNA, 25 bp, Homo sapien
gaagaccttcatcataggtgtgcct

SEQ ID NO: 3052988 - DNA, 25 bp, Homo sapien
caccttctggaggtgaagaccttca

SEQ ID NO: 3052989 - DNA, 25 bp, Homo sapien
atgctcgactttgattcttcccgtg

SEQ ID NO: 3052990 - DNA, 25 bp, Homo sapien
ttcatgctcgactttgattcttccc

SEQ ID NO: 3052991 - DNA, 25 bp, Homo sapien
ctttcatgctcgactttgattcttc

SEQ ID NO: 3052992 - DNA, 25 bp, Homo sapien
catgctcgactttgattcttcccgt

SEQ ID NO: 3052993 - DNA, 25 bp, Homo sapien
tggagcttgcaggagtaccgagact

SEQ ID NO: 3052994 - DNA, 25 bp, Homo sapien
ccaggtgggttttgatgcccagcag

SEQ ID NO: 3052995 - DNA, 25 bp, Homo sapien
ccagttcatggcgtagctgcgtcag

SEQ ID NO: 3052996 - DNA, 25 bp, Homo sapien
gagccgtcggtacgtggtgatttcc

SEQ ID NO: 3052997 - DNA, 25 bp, Homo sapien
tgttaattaactgatggcttgattg

SEQ ID NO: 3052998 - DNA, 25 bp, Homo sapien
ctgttaattaactgatggcttgatt

SEQ ID NO: 3052999 - DNA, 25 bp, Homo sapien
tgaaaactcccaaagagcgacagca

SEQ ID NO: 3053000 - DNA, 25 bp, Homo sapien
gacagcaactgggactgctatctct

SEQ ID NO: 3053001 - DNA, 25 bp, Homo sapien
tattgctccagtattgcatgggaca

SEQ ID NO: 3053002 - DNA, 25 bp, Homo sapien
ccaagatgagaagtaggctgactta

SEQ ID NO: 3053003 - DNA, 25 bp, Homo sapien
acacttgtgccttgtcgcttttgca

SEQ ID NO: 3053004 - DNA, 25 bp, Homo sapien
tgaccaccttgtttaagatagcagc

SEQ ID NO: 3053005 - DNA, 25 bp, Homo sapien
gattggtgtcagatagtagaatgca

SEQ ID NO: 3053006 - DNA, 25 bp, Homo sapien
gctcactgccactctaacaggaaaa

SEQ ID NO: 3053007 - DNA, 25 bp, Homo sapien
aaagtgagagttgtcccaagggagt

SEQ ID NO: 3053008 - DNA, 25 bp, Homo sapien
gggacactaagacctatctgggaag

SEQ ID NO: 3053009 - DNA, 25 bp, Homo sapien
ggtttcatcaccagttacttactag

SEQ ID NO: 3053010 - DNA, 25 bp, Homo sapien
ggcaccatcgggacactcaatacat

SEQ ID NO: 3053011 - DNA, 25 bp, Homo sapien
gaatgtgcgcttcagttcgtggatg

SEQ ID NO: 3053012 - DNA, 25 bp, Homo sapien
ggcctggaatgtgcgcttcagttcg

SEQ ID NO: 3053013 - DNA, 25 bp, Homo sapien
tgcgcttcagttcgtggatgtcacc

SEQ ID NO: 3053014 - DNA, 25 bp, Homo sapien
tccagggcctggaatgtgcgcttca

SEQ ID NO: 3053015 - DNA, 25 bp, Homo sapien
tataccaagtgtccaagtctcgatg

SEQ ID NO: 3053016 - DNA, 25 bp, Homo sapien
ctgggacctgtatccaccttcacat

SEQ ID NO: 3053017 - DNA, 25 bp, Homo sapien
tttattataagctcatattcttgtc

SEQ ID NO: 3053018 - DNA, 25 bp, Homo sapien
tgtatccaccttcacattgacattg

SEQ ID NO: 3053019 - DNA, 25 bp, Homo sapien
caatggtcaggttgtctaaggtcct

SEQ ID NO: 3053020 - DNA, 25 bp, Homo sapien
tgctcatggtgcttcttcatgagaa

SEQ ID NO: 3053021 - DNA, 25 bp, Homo sapien
tctaggtctgttgtgacaatggtca

SEQ ID NO: 3053022 - DNA, 25 bp, Homo sapien
gaggccctcgacttcaatttccaag

SEQ ID NO: 3053023 - DNA, 25 bp, Homo sapien
gaggttgaagtcatccactgccatc

SEQ ID NO: 3053024 - DNA, 25 bp, Homo sapien
tgaggttgaagtcatccactgccat

SEQ ID NO: 3053025 - DNA, 25 bp, Homo sapien
ttgaagtcatccactgccatcctgg

SEQ ID NO: 3053026 - DNA, 25 bp, Homo sapien
ggttgaagtcatccactgccatcct

SEQ ID NO: 3053027 - DNA, 25 bp, Homo sapien
catgcacaaaagcacaaaaggttat

SEQ ID NO: 3053028 - DNA, 25 bp, Homo sapien
tgcacaaaagcacaaaaggttatct

SEQ ID NO: 3053029 - DNA, 25 bp, Homo sapien
aaacatgcacaaaagcacaaaaggt

SEQ ID NO: 3053030 - DNA, 25 bp, Homo sapien
caaaagcacaaaaggttatctcact

SEQ ID NO: 3053031 - DNA, 25 bp, Homo sapien
taaccgaatcagtaaatgcttagtg

SEQ ID NO: 3053032 - DNA, 25 bp, Homo sapien
catgtctgtcctctagcttcctgaa

SEQ ID NO: 3053033 - DNA, 25 bp, Homo sapien
cacacatgaccgctgcatgtctgtc

SEQ ID NO: 3053034 - DNA, 25 bp, Homo sapien
cagacaacttcttgttctggcagtg

SEQ ID NO: 3053035 - DNA, 25 bp, Homo sapien
aacagtctgtagcacttctatcatt

SEQ ID NO: 3053036 - DNA, 25 bp, Homo sapien
tccatggacagtagactaattaaac

SEQ ID NO: 3053037 - DNA, 25 bp, Homo sapien
tttcccactccaaatttaagatata

SEQ ID NO: 3053038 - DNA, 25 bp, Homo sapien
tcaagcgctgatgccattttcctgg

SEQ ID NO: 3053039 - DNA, 25 bp, Homo sapien
tgtgatgttttcctcatactgggaa

SEQ ID NO: 3053040 - DNA, 25 bp, Homo sapien
tttcttactgccaggatctctctgc

SEQ ID NO: 3053041 - DNA, 25 bp, Homo sapien
caccgccatggacggtgggagccct

SEQ ID NO: 3053042 - DNA, 25 bp, Homo sapien
tgctggtgccatttcaggatgcggc

SEQ ID NO: 3053043 - DNA, 25 bp, Homo sapien
cacactgttgttgtttagagccaca

SEQ ID NO: 3053044 - DNA, 25 bp, Homo sapien
gagccacatcaatatgacagtttgc

SEQ ID NO: 3053045 - DNA, 25 bp, Homo sapien
tggcccacgacatcaggcgggtatt

SEQ ID NO: 3053046 - DNA, 25 bp, Homo sapien
tggtcaatcccaaagtgcccctggg

SEQ ID NO: 3053047 - DNA, 25 bp, Homo sapien
gaacaggatctcaggtcccagaata

SEQ ID NO: 3053048 - DNA, 25 bp, Homo sapien
agtactttcaaaggactcgctctta

SEQ ID NO: 3053049 - DNA, 25 bp, Homo sapien
cccagaataaagcttgctgtgctga

SEQ ID NO: 3053050 - DNA, 25 bp, Homo sapien
ggtgaatatctgatgcctttgtggc

SEQ ID NO: 3053051 - DNA, 25 bp, Homo sapien
cagagggacgatggaaaacaggaaa

SEQ ID NO: 3053052 - DNA, 25 bp, Homo sapien
ggcctgcgctcaggatttcccttgg

SEQ ID NO: 3053053 - DNA, 25 bp, Homo sapien
aatgtagccgttgttagcagccccg

SEQ ID NO: 3053054 - DNA, 25 bp, Homo sapien
gccatgggctgtcaaatgtggttga

SEQ ID NO: 3053055 - DNA, 25 bp, Homo sapien
gacccgctgtagtagtaagaaacta

SEQ ID NO: 3053056 - DNA, 25 bp, Homo sapien
ggagttttcttaaacctctctggca

SEQ ID NO: 3053057 - DNA, 25 bp, Homo sapien
caggagcatgtattggcctctgttt

SEQ ID NO: 3053058 - DNA, 25 bp, Homo sapien
aaaagatattctacctagcaatggg

SEQ ID NO: 3053059 - DNA, 25 bp, Homo sapien
ttggcaggtctgatgatgaaacaag

SEQ ID NO: 3053060 - DNA, 25 bp, Homo sapien
catgctcgtaagaagaaatgacctt

SEQ ID NO: 3053061 - DNA, 25 bp, Homo sapien
tcgtaagaagaaatgaccttcccat

SEQ ID NO: 3053062 - DNA, 25 bp, Homo sapien
gtctgatgatgaaacaaggctgcac

SEQ ID NO: 3053063 - DNA, 25 bp, Homo sapien
gggccgtgctttctatggctccgga

SEQ ID NO: 3053064 - DNA, 25 bp, Homo sapien
gctccggacttacaagatgtccaag

SEQ ID NO: 3053065 - DNA, 25 bp, Homo sapien
ctcacatttggtggcacgtgggtaa

SEQ ID NO: 3053066 - DNA, 25 bp, Homo sapien
gaaggctcacatttggtggcacgtg

SEQ ID NO: 3053067 - DNA, 25 bp, Homo sapien
gagcctctgtctccgttaggatgca

SEQ ID NO: 3053068 - DNA, 25 bp, Homo sapien
aaggctgcggtatgtggtaatctca

SEQ ID NO: 3053069 - DNA, 25 bp, Homo sapien
tcagcaaggccgtgtagcgagcctc

SEQ ID NO: 3053070 - DNA, 25 bp, Homo sapien
gtaatctcacattccagccgggact

SEQ ID NO: 3053071 - DNA, 25 bp, Homo sapien
caaaacccaaatgatcaactatgct

SEQ ID NO: 3053072 - DNA, 25 bp, Homo sapien
aatgactcctttaagcccaggtcac

SEQ ID NO: 3053073 - DNA, 25 bp, Homo sapien
gacactactgatagatctccaagca

SEQ ID NO: 3053074 - DNA, 25 bp, Homo sapien
cacctgtgacctgtatcatttaaaa

SEQ ID NO: 3053075 - DNA, 25 bp, Homo sapien
tcacactgcgtctcagttctatgat

SEQ ID NO: 3053076 - DNA, 25 bp, Homo sapien
agagtgttcacactgcgtctcagtt

SEQ ID NO: 3053077 - DNA, 25 bp, Homo sapien
gagctggtcaccacttgttgattca

SEQ ID NO: 3053078 - DNA, 25 bp, Homo sapien
gctggtcaccacttgttgattcagc

SEQ ID NO: 3053079 - DNA, 25 bp, Homo sapien
caagctgacactgtaaagaattgat

SEQ ID NO: 3053080 - DNA, 25 bp, Homo sapien
tagaacctggtttaggtcagcagaa

SEQ ID NO: 3053081 - DNA, 25 bp, Homo sapien
tttgcggtttgtctccatgatgggc

SEQ ID NO: 3053082 - DNA, 25 bp, Homo sapien
tcaatgtcaagtctctccccaagct

SEQ ID NO: 3053083 - DNA, 25 bp, Homo sapien
ggatctgcttgaggccattggcatc

SEQ ID NO: 3053084 - DNA, 25 bp, Homo sapien
ctaccagctggcgtagagacacctc

SEQ ID NO: 3053085 - DNA, 25 bp, Homo sapien
gtgcctctaggtcggccttgcccag

SEQ ID NO: 3053086 - DNA, 25 bp, Homo sapien
ctctttcagagactggacttgtgcc

SEQ ID NO: 3053087 - DNA, 25 bp, Homo sapien
tgttgtcaatttgcgagaccagtct

SEQ ID NO: 3053088 - DNA, 25 bp, Homo sapien
gaattctcggccttggtacacaaga

SEQ ID NO: 3053089 - DNA, 25 bp, Homo sapien
cagtctggaattctcggccttggta

SEQ ID NO: 3053090 - DNA, 25 bp, Homo sapien
tggtgttgtcaatttgcgagaccag

SEQ ID NO: 3053091 - DNA, 25 bp, Homo sapien
caggtagttagcaaggcgctcgttc

SEQ ID NO: 3053092 - DNA, 25 bp, Homo sapien
tcctcaatggtagtgtagtaagaca

SEQ ID NO: 3053093 - DNA, 25 bp, Homo sapien
aagacaggtaatcaggacatagaac

SEQ ID NO: 3053094 - DNA, 25 bp, Homo sapien
tctagcattcgcaccttttgcaggt

SEQ ID NO: 3053095 - DNA, 25 bp, Homo sapien
gtagatgggcttgcgacaaaagcga

SEQ ID NO: 3053096 - DNA, 25 bp, Homo sapien
caaaagcgaggagtgggttggcagc

SEQ ID NO: 3053097 - DNA, 25 bp, Homo sapien
aagttgttcattaggtagatgggct

SEQ ID NO: 3053098 - DNA, 25 bp, Homo sapien
gtcatccagagaaaaacgggcattg

SEQ ID NO: 3053099 - DNA, 25 bp, Homo sapien
taatcctagagcagttttgacatgg

SEQ ID NO: 3053100 - DNA, 25 bp, Homo sapien
caccaggatggcagccgttgttaga

SEQ ID NO: 3053101 - DNA, 25 bp, Homo sapien
gaattggttgttgtacagcccttgg

SEQ ID NO: 3053102 - DNA, 25 bp, Homo sapien
ggaattctgagaacgtggccagctg

SEQ ID NO: 3053103 - DNA, 25 bp, Homo sapien
ggaaggcctttgtaacagtgacttg

SEQ ID NO: 3053104 - DNA, 25 bp, Homo sapien
tgaaatagtccattagtttgaaaat

SEQ ID NO: 3053105 - DNA, 25 bp, Homo sapien
tgacttgaaattaagaacctgtaaa

SEQ ID NO: 3053106 - DNA, 25 bp, Homo sapien
ggcctttgtaacagtgacttgaaat

SEQ ID NO: 3053107 - DNA, 25 bp, Homo sapien
gagtgataggaaggccttatctgcc

SEQ ID NO: 3053108 - DNA, 25 bp, Homo sapien
gcctgagaccagtagctgagtgata

SEQ ID NO: 3053109 - DNA, 25 bp, Homo sapien
cactgcctggaagatcgaatctgga

SEQ ID NO: 3053110 - DNA, 25 bp, Homo sapien
gagaaggcagctgttctagaagtgc

SEQ ID NO: 3053111 - DNA, 25 bp, Homo sapien
tgtggtcgaacatgggctacaggaa

SEQ ID NO: 3053112 - DNA, 25 bp, Homo sapien
tataccacaaataagccggaaggag

SEQ ID NO: 3053113 - DNA, 25 bp, Homo sapien
gcaattccaggatatgagagcctcc

SEQ ID NO: 3053114 - DNA, 25 bp, Homo sapien
tcacaagtgttgctcgaggtgcatg

SEQ ID NO: 3053115 - DNA, 25 bp, Homo sapien
ctgggggatttcatgagtaactgtg

SEQ ID NO: 3053116 - DNA, 25 bp, Homo sapien
tgactctgggggatttcatgagtaa

SEQ ID NO: 3053117 - DNA, 25 bp, Homo sapien
gggatttcatgagtaactgtggaac

SEQ ID NO: 3053118 - DNA, 25 bp, Homo sapien
ctttgtgactctgggggatttcatg

SEQ ID NO: 3053119 - DNA, 25 bp, Homo sapien
ttctccaggttatcgatcagacact

SEQ ID NO: 3053120 - DNA, 25 bp, Homo sapien
ctccaggttatcgatcagacactga

SEQ ID NO: 3053121 - DNA, 25 bp, Homo sapien
ggttctccaggttatcgatcagaca

SEQ ID NO: 3053122 - DNA, 25 bp, Homo sapien
ctggttctccaggttatcgatcaga

SEQ ID NO: 3053123 - DNA, 25 bp, Homo sapien
ccacggtgcattccagagattctgt

SEQ ID NO: 3053124 - DNA, 25 bp, Homo sapien
gccacggtgcattccagagattctg

SEQ ID NO: 3053125 - DNA, 25 bp, Homo sapien
tgccacggtgcattccagagattct

SEQ ID NO: 3053126 - DNA, 25 bp, Homo sapien
ctgccacggtgcattccagagattc

SEQ ID NO: 3053127 - DNA, 25 bp, Homo sapien
ttatcagtgacacaacggacactgc

SEQ ID NO: 3053128 - DNA, 25 bp, Homo sapien
tcagtgacacaacggacactgcctt

SEQ ID NO: 3053129 - DNA, 25 bp, Homo sapien
agtgacacaacggacactgcctttg

SEQ ID NO: 3053130 - DNA, 25 bp, Homo sapien
gacacaacggacactgcctttgcct

SEQ ID NO: 3053131 - DNA, 25 bp, Homo sapien
tgctccgcgctggacagttgctgct

SEQ ID NO: 3053132 - DNA, 25 bp, Homo sapien
gcttggagctcaatttccagagcac

SEQ ID NO: 3053133 - DNA, 25 bp, Homo sapien
ttcagttccaagatctccatctggc

SEQ ID NO: 3053134 - DNA, 25 bp, Homo sapien
gctgtgcgtttcagttccaagatct

SEQ ID NO: 3053135 - DNA, 25 bp, Homo sapien
cactgacagcgcatctcatccagga

SEQ ID NO: 3053136 - DNA, 25 bp, Homo sapien
ggcaagcaccgtttcacactgacag

SEQ ID NO: 3053137 - DNA, 25 bp, Homo sapien
catccaggaccctgttgaggtcaag

SEQ ID NO: 3053138 - DNA, 25 bp, Homo sapien
gctccacactgaggcggtcgccaag

SEQ ID NO: 3053139 - DNA, 25 bp, Homo sapien
cagtgggtaaaagtgtgagattttg

SEQ ID NO: 3053140 - DNA, 25 bp, Homo sapien
acatccaatggcattctacttctgt

SEQ ID NO: 3053141 - DNA, 25 bp, Homo sapien
catccaatggcattctacttctgtt

SEQ ID NO: 3053142 - DNA, 25 bp, Homo sapien
gagcagtgggtaaaagtgtgagatt

SEQ ID NO: 3053143 - DNA, 25 bp, Homo sapien
ttcaccacttagaagggcctcagtt

SEQ ID NO: 3053144 - DNA, 25 bp, Homo sapien
aatctcttttcaccacttagaaggg

SEQ ID NO: 3053145 - DNA, 25 bp, Homo sapien
ttttcaccacttagaagggcctcag

SEQ ID NO: 3053146 - DNA, 25 bp, Homo sapien
tcttttcaccacttagaagggcctc

SEQ ID NO: 3053147 - DNA, 25 bp, Homo sapien
tgcccaaattcgatttacaaacatc

SEQ ID NO: 3053148 - DNA, 25 bp, Homo sapien
tgtaagtacgttactctcggagtcc

SEQ ID NO: 3053149 - DNA, 25 bp, Homo sapien
tacaaacatcaacagatcatctgtc

SEQ ID NO: 3053150 - DNA, 25 bp, Homo sapien
gtccttcagcggagttgccactttc

SEQ ID NO: 3053151 - DNA, 25 bp, Homo sapien
ctgctgatgtcagcctctaacagct

SEQ ID NO: 3053152 - DNA, 25 bp, Homo sapien
atcagatttgcacagggtcagttcc

SEQ ID NO: 3053153 - DNA, 25 bp, Homo sapien
cctctaacagctggcgaagggacag

SEQ ID NO: 3053154 - DNA, 25 bp, Homo sapien
cagatcagatttgcacagggtcagt

SEQ ID NO: 3053155 - DNA, 25 bp, Homo sapien
aatccaacgcttactttgctgaacg

SEQ ID NO: 3053156 - DNA, 25 bp, Homo sapien
gtggccagtttgcagttgtcaagct

SEQ ID NO: 3053157 - DNA, 25 bp, Homo sapien
gaattctctgctttcgtgcataaga

SEQ ID NO: 3053158 - DNA, 25 bp, Homo sapien
tacagcaagtctagaattctctgct

SEQ ID NO: 3053159 - DNA, 25 bp, Homo sapien
ttgtcaagctgtacagcaagtctag

SEQ ID NO: 3053160 - DNA, 25 bp, Homo sapien
tcattgctagtgaacaccccatcct

SEQ ID NO: 3053161 - DNA, 25 bp, Homo sapien
tgataatccgggcacaccattggga

SEQ ID NO: 3053162 - DNA, 25 bp, Homo sapien
caatggtgttgaagtaacgctgata

SEQ ID NO: 3053163 - DNA, 25 bp, Homo sapien
tagctggcgagtctgtcattcagga

SEQ ID NO: 3053164 - DNA, 25 bp, Homo sapien
tacaactcccagtaaagtagcatgg

SEQ ID NO: 3053165 - DNA, 25 bp, Homo sapien
gacatcgggatgtagcacaggtacc

SEQ ID NO: 3053166 - DNA, 25 bp, Homo sapien
ggaggcaaccagtcagcccgcgaga

SEQ ID NO: 3053167 - DNA, 25 bp, Homo sapien
cccgcgagacctggataggaagctt

SEQ ID NO: 3053168 - DNA, 25 bp, Homo sapien
tgtttccacggagcagcttgaggca

SEQ ID NO: 3053169 - DNA, 25 bp, Homo sapien
cttgaggcaggtgcacaaccggaag

SEQ ID NO: 3053170 - DNA, 25 bp, Homo sapien
ctgtttccacggagcagcttgaggc

SEQ ID NO: 3053171 - DNA, 25 bp, Homo sapien
aagccgtgccacaggactcaggaga

SEQ ID NO: 3053172 - DNA, 25 bp, Homo sapien
atagccctcctgcacaatattcctg

SEQ ID NO: 3053173 - DNA, 25 bp, Homo sapien
tattcctgcacccagctatcaccag

SEQ ID NO: 3053174 - DNA, 25 bp, Homo sapien
ggacacatagccctcctgcacaata

SEQ ID NO: 3053175 - DNA, 25 bp, Homo sapien
tgcacaatattcctgcacccagcta

SEQ ID NO: 3053176 - DNA, 25 bp, Homo sapien
ccttcaagcttcgtaggtactattt

SEQ ID NO: 3053177 - DNA, 25 bp, Homo sapien
tgatgttctgtctcacaaaccctaa

SEQ ID NO: 3053178 - DNA, 25 bp, Homo sapien
gatgttctgtctcacaaaccctaag

SEQ ID NO: 3053179 - DNA, 25 bp, Homo sapien
tccagccatccttcaagcttcgtag

SEQ ID NO: 3053180 - DNA, 25 bp, Homo sapien
tatgaaggaatcgaacagcttcagg

SEQ ID NO: 3053181 - DNA, 25 bp, Homo sapien
gaagctataggcatccactgattca

SEQ ID NO: 3053182 - DNA, 25 bp, Homo sapien
aattttcagaaagataccacccaag

SEQ ID NO: 3053183 - DNA, 25 bp, Homo sapien
caaactgcagttggttatagctgaa

SEQ ID NO: 3053184 - DNA, 25 bp, Homo sapien
tagttgtaggtactgagataggtga

SEQ ID NO: 3053185 - DNA, 25 bp, Homo sapien
ggtgaatgctaaagcttctatgttg

SEQ ID NO: 3053186 - DNA, 25 bp, Homo sapien
gaatgctaaagcttctatgttgact

SEQ ID NO: 3053187 - DNA, 25 bp, Homo sapien
ggtactgagataggtgaatgctaaa

SEQ ID NO: 3053188 - DNA, 25 bp, Homo sapien
gacagttgtcacagcaggtgggctc

SEQ ID NO: 3053189 - DNA, 25 bp, Homo sapien
ttggctggcaggagttgagcaggaa

SEQ ID NO: 3053190 - DNA, 25 bp, Homo sapien
ggcacgcagggctgaggaatgtggc

SEQ ID NO: 3053191 - DNA, 25 bp, Homo sapien
gtggtgaggttgagggtctccaggc

SEQ ID NO: 3053192 - DNA, 25 bp, Homo sapien
actccacagcggcaggatttgtcag

SEQ ID NO: 3053193 - DNA, 25 bp, Homo sapien
ctgcagcctcgagaggcacagcaat

SEQ ID NO: 3053194 - DNA, 25 bp, Homo sapien
gcagcctcgagaggcacagcaatcc

SEQ ID NO: 3053195 - DNA, 25 bp, Homo sapien
agcctcgagaggcacagcaatccat

SEQ ID NO: 3053196 - DNA, 25 bp, Homo sapien
tgcagcctcgagaggcacagcaatc

SEQ ID NO: 3053197 - DNA, 25 bp, Homo sapien
gtttgattgaaaagaaggataaggc

SEQ ID NO: 3053198 - DNA, 25 bp, Homo sapien
tgattgaaaagaaggataaggcttc

SEQ ID NO: 3053199 - DNA, 25 bp, Homo sapien
tatttatgggtttgattgaaaagaa

SEQ ID NO: 3053200 - DNA, 25 bp, Homo sapien
tatgggtttgattgaaaagaaggat

SEQ ID NO: 3053201 - DNA, 25 bp, Homo sapien
tttttcttatccattagtgctgttt

SEQ ID NO: 3053202 - DNA, 25 bp, Homo sapien
tatccattagtgctgttttaaggac

SEQ ID NO: 3053203 - DNA, 25 bp, Homo sapien
cagaatgttgaataacgcttaaaac

SEQ ID NO: 3053204 - DNA, 25 bp, Homo sapien
tgttgaataacgcttaaaacttcat

SEQ ID NO: 3053205 - DNA, 25 bp, Homo sapien
aatttactggtgaagagtagataaa

SEQ ID NO: 3053206 - DNA, 25 bp, Homo sapien
taatttactggtgaagagtagataa

SEQ ID NO: 3053207 - DNA, 25 bp, Homo sapien
ttactggtgaagagtagataaataa

SEQ ID NO: 3053208 - DNA, 25 bp, Homo sapien
tttactggtgaagagtagataaata

SEQ ID NO: 3053209 - DNA, 25 bp, Homo sapien
aatgttagtcattctgccaatagag

SEQ ID NO: 3053210 - DNA, 25 bp, Homo sapien
gagaacctgttaaaagttagcaagc

SEQ ID NO: 3053211 - DNA, 25 bp, Homo sapien
ctgccaatagagtcttctttaaaag

SEQ ID NO: 3053212 - DNA, 25 bp, Homo sapien
ttagcaagccatgttagtagtagca

SEQ ID NO: 3053213 - DNA, 25 bp, Homo sapien
caggaagcaatatgatcaagaacat

SEQ ID NO: 3053214 - DNA, 25 bp, Homo sapien
gcaatatgatcaagaacatgtaatc

SEQ ID NO: 3053215 - DNA, 25 bp, Homo sapien
tctgaggtcttaaagattgaaacag

SEQ ID NO: 3053216 - DNA, 25 bp, Homo sapien
acatgtaatctgaggtcttaaagat

SEQ ID NO: 3053217 - DNA, 25 bp, Homo sapien
ctgcccacaggaaccaaatggtttt

SEQ ID NO: 3053218 - DNA, 25 bp, Homo sapien
ccacaggaaccaaatggtttttcag

SEQ ID NO: 3053219 - DNA, 25 bp, Homo sapien
aaccaaaggtaagttcttcatatct

SEQ ID NO: 3053220 - DNA, 25 bp, Homo sapien
accaaaggtaagttcttcatatctg

SEQ ID NO: 3053221 - DNA, 25 bp, Homo sapien
ttcgttgtcgggcactgagcaaagt

SEQ ID NO: 3053222 - DNA, 25 bp, Homo sapien
aactactgaggcaagtgaatactga

SEQ ID NO: 3053223 - DNA, 25 bp, Homo sapien
ttaacatctggcaaactactgaggc

SEQ ID NO: 3053224 - DNA, 25 bp, Homo sapien
cttctggattcttcgttgtcgggca

SEQ ID NO: 3053225 - DNA, 25 bp, Homo sapien
actccacagcggcaggatttgtcgg

SEQ ID NO: 3053226 - DNA, 25 bp, Homo sapien
agctgcgagaggcacagcaatccat

SEQ ID NO: 3053227 - DNA, 25 bp, Homo sapien
tgcagctgcgagaggcacagcaatc

SEQ ID NO: 3053228 - DNA, 25 bp, Homo sapien
ctgcagctgcgagaggcacagcaat

SEQ ID NO: 3053229 - DNA, 25 bp, Homo sapien
gcagctgcgagaggcacagcaatcc

SEQ ID NO: 3053230 - DNA, 25 bp, Homo sapien
caatgggcgtctggttagctttcag

SEQ ID NO: 3053231 - DNA, 25 bp, Homo sapien
atgggcgtctggttagctttcagtt

SEQ ID NO: 3053232 - DNA, 25 bp, Homo sapien
ggcaatgggcgtctggttagctttc

SEQ ID NO: 3053233 - DNA, 25 bp, Homo sapien
gcaatgggcgtctggttagctttca

SEQ ID NO: 3053234 - DNA, 25 bp, Homo sapien
cattggtccaactggaagccttcct

SEQ ID NO: 3053235 - DNA, 25 bp, Homo sapien
ttcacaggtttctggcatgccaaac

SEQ ID NO: 3053236 - DNA, 25 bp, Homo sapien
tacatgtccattaagagttcccgct

SEQ ID NO: 3053237 - DNA, 25 bp, Homo sapien
tatgggtaatcaatccaagtgacaa

SEQ ID NO: 3053238 - DNA, 25 bp, Homo sapien
gaagggaggtctccaatggtaccca

SEQ ID NO: 3053239 - DNA, 25 bp, Homo sapien
gaggacattgggcagccacctcacg

SEQ ID NO: 3053240 - DNA, 25 bp, Homo sapien
tcacggaacctgtgcagactcggct

SEQ ID NO: 3053241 - DNA, 25 bp, Homo sapien
gatggccttagccttgatgtaggca

SEQ ID NO: 3053242 - DNA, 25 bp, Homo sapien
ccaggctgaacataggtggtcaggt

SEQ ID NO: 3053243 - DNA, 25 bp, Homo sapien
cacataggtatcaggcttgcagcag

SEQ ID NO: 3053244 - DNA, 25 bp, Homo sapien
cagccagcaagttggcacataggta

SEQ ID NO: 3053245 - DNA, 25 bp, Homo sapien
caggttgatcccactcagtccggga

SEQ ID NO: 3053246 - DNA, 25 bp, Homo sapien
ctgcaggagcggagagcacagcaat

SEQ ID NO: 3053247 - DNA, 25 bp, Homo sapien
aggagcggagagcacagcaatacat

SEQ ID NO: 3053248 - DNA, 25 bp, Homo sapien
tgcaggagcggagagcacagcaata

SEQ ID NO: 3053249 - DNA, 25 bp, Homo sapien
caggagcggagagcacagcaataca

SEQ ID NO: 3053250 - DNA, 25 bp, Homo sapien
gaggtgggtttttgttgagttgaga

SEQ ID NO: 3053251 - DNA, 25 bp, Homo sapien
gcaatgggaggtgggtttttgttga

SEQ ID NO: 3053252 - DNA, 25 bp, Homo sapien
gtttttgttgagttgagagaagtct

SEQ ID NO: 3053253 - DNA, 25 bp, Homo sapien
tgggtttttgttgagttgagagaag

SEQ ID NO: 3053254 - DNA, 25 bp, Homo sapien
gagatagtcacttttatgtgcgtta

SEQ ID NO: 3053255 - DNA, 25 bp, Homo sapien
cctggactgagaacgagatagtcac

SEQ ID NO: 3053256 - DNA, 25 bp, Homo sapien
tagtcacttttatgtgcgttagtca

SEQ ID NO: 3053257 - DNA, 25 bp, Homo sapien
aatgatgtgcctggactgagaacga

SEQ ID NO: 3053258 - DNA, 25 bp, Homo sapien
tgaggacatctgatagtctctataa

SEQ ID NO: 3053259 - DNA, 25 bp, Homo sapien
gcactgaaaattacccccaaattga

SEQ ID NO: 3053260 - DNA, 25 bp, Homo sapien
tattagcttgcactgaaaattaccc

SEQ ID NO: 3053261 - DNA, 25 bp, Homo sapien
tctgatagtctctataattgtcatc

SEQ ID NO: 3053262 - DNA, 25 bp, Homo sapien
aggccagggacaggtatcgctctgc

SEQ ID NO: 3053263 - DNA, 25 bp, Homo sapien
gccagggacaggtatcgctctgcaa

SEQ ID NO: 3053264 - DNA, 25 bp, Homo sapien
agggacaggtatcgctctgcaaccc

SEQ ID NO: 3053265 - DNA, 25 bp, Homo sapien
gacaggtatcgctctgcaacccggg

SEQ ID NO: 3053266 - DNA, 25 bp, Homo sapien
tccaaaaaccaagggatggatcaga

SEQ ID NO: 3053267 - DNA, 25 bp, Homo sapien
cttgttagtggtccagaggtggtca

SEQ ID NO: 3053268 - DNA, 25 bp, Homo sapien
gaaagtccagcctacttcttagaag

SEQ ID NO: 3053269 - DNA, 25 bp, Homo sapien
tgtccccagtgaagggtcaaggtat

SEQ ID NO: 3053270 - DNA, 25 bp, Homo sapien
gggctcacagcagcagactgggcgg

SEQ ID NO: 3053271 - DNA, 25 bp, Homo sapien
ctcacagcagcagactgggcggcag

SEQ ID NO: 3053272 - DNA, 25 bp, Homo sapien
cagcaagtgggctcacagcagcaga

SEQ ID NO: 3053273 - DNA, 25 bp, Homo sapien
tcagcaagtgggctcacagcagcag

SEQ ID NO: 3053274 - DNA, 25 bp, Homo sapien
tgtccacagtaggacgggcggcagc

SEQ ID NO: 3053275 - DNA, 25 bp, Homo sapien
gtccacagtaggacgggcggcagca

SEQ ID NO: 3053276 - DNA, 25 bp, Homo sapien
ggtgccctccacacgactgtctggg

SEQ ID NO: 3053277 - DNA, 25 bp, Homo sapien
cacagcaggggggtaggtaggtgcc

SEQ ID NO: 3053278 - DNA, 25 bp, Homo sapien
gtaggtgccctccacacgactgtct

SEQ ID NO: 3053279 - DNA, 25 bp, Homo sapien
taggtaggtgccctccacacgactg

SEQ ID NO: 3053280 - DNA, 25 bp, Homo sapien
atagctgatgccaccaccaatgcca

SEQ ID NO: 3053281 - DNA, 25 bp, Homo sapien
cagccagttccgcaggagctgatct

SEQ ID NO: 3053282 - DNA, 25 bp, Homo sapien
gagctgatctggcagcagcttggct

SEQ ID NO: 3053283 - DNA, 25 bp, Homo sapien
atgccacagccagttccgcaggagc

SEQ ID NO: 3053284 - DNA, 25 bp, Homo sapien
cagaagctagtctggcagctgcgtg

SEQ ID NO: 3053285 - DNA, 25 bp, Homo sapien
cgcagaagctagtctggcagctgcg

SEQ ID NO: 3053286 - DNA, 25 bp, Homo sapien
gcagaagctagtctggcagctgcgt

SEQ ID NO: 3053287 - DNA, 25 bp, Homo sapien
tgggttaagagttaggttgcttgga

SEQ ID NO: 3053288 - DNA, 25 bp, Homo sapien
gttaagagttaggttgcttggagga

SEQ ID NO: 3053289 - DNA, 25 bp, Homo sapien
ttaagagttaggttgcttggaggag

SEQ ID NO: 3053290 - DNA, 25 bp, Homo sapien
tggcagcagcaggctgggcggcagc

SEQ ID NO: 3053291 - DNA, 25 bp, Homo sapien
gcagcaggctgggcggcagcaggac

SEQ ID NO: 3053292 - DNA, 25 bp, Homo sapien
tcacagcagtggcagcagcaggctg

SEQ ID NO: 3053293 - DNA, 25 bp, Homo sapien
cacagcagtggcagcagcaggctgg

SEQ ID NO: 3053294 - DNA, 25 bp, Homo sapien
tgtccacagtaggacgggcggcagc

SEQ ID NO: 3053295 - DNA, 25 bp, Homo sapien
gtccacagtaggacgggcggcagca

SEQ ID NO: 3053296 - DNA, 25 bp, Homo sapien
aggcaggtgccctccacgtggcaat

SEQ ID NO: 3053297 - DNA, 25 bp, Homo sapien
tggcaatctgggtggcaccacctga

SEQ ID NO: 3053298 - DNA, 25 bp, Homo sapien
cacctgatacgggtgctcacagatc

SEQ ID NO: 3053299 - DNA, 25 bp, Homo sapien
acctgatacgggtgctcacagatcc

SEQ ID NO: 3053300 - DNA, 25 bp, Homo sapien
tcccactggtggaacagctggccat

SEQ ID NO: 3053301 - DNA, 25 bp, Homo sapien
gtcccactggtggaacagctggcca

SEQ ID NO: 3053302 - DNA, 25 bp, Homo sapien
ggtcccactggtggaacagctggcc

SEQ ID NO: 3053303 - DNA, 25 bp, Homo sapien
gactcagagcgtgggcttcaatgct

SEQ ID NO: 3053304 - DNA, 25 bp, Homo sapien
tctcgtcggcgctgagactcagagc

SEQ ID NO: 3053305 - DNA, 25 bp, Homo sapien
tcaatgcttgcaaaggctcagtttc

SEQ ID NO: 3053306 - DNA, 25 bp, Homo sapien
tgcaatttgcaggacggtgggatac

SEQ ID NO: 3053307 - DNA, 25 bp, Homo sapien
cctccacacggcagtctgggcggca

SEQ ID NO: 3053308 - DNA, 25 bp, Homo sapien
actgtccacagtaggatgggcggca

SEQ ID NO: 3053309 - DNA, 25 bp, Homo sapien
cacacggcagtctgggcggcaccac

SEQ ID NO: 3053310 - DNA, 25 bp, Homo sapien
ggcaccacctgatacgggtgctcac

SEQ ID NO: 3053311 - DNA, 25 bp, Homo sapien
ggagctgcaggtcccactagttgag

SEQ ID NO: 3053312 - DNA, 25 bp, Homo sapien
gagctgcaggtcccactagttgaga

SEQ ID NO: 3053313 - DNA, 25 bp, Homo sapien
tggagctgcaggtcccactagttga

SEQ ID NO: 3053314 - DNA, 25 bp, Homo sapien
tggtggagcagctgggatatccaca

SEQ ID NO: 3053315 - DNA, 25 bp, Homo sapien
agccgcatgtcccactggtggagca

SEQ ID NO: 3053316 - DNA, 25 bp, Homo sapien
ctggagccgcatgtcccactggtgg

SEQ ID NO: 3053317 - DNA, 25 bp, Homo sapien
ggagcagctgggatatccacagaag

SEQ ID NO: 3053318 - DNA, 25 bp, Homo sapien
tatttcttacatcaagctggaggct

SEQ ID NO: 3053319 - DNA, 25 bp, Homo sapien
tgtatagatgtacaggtcgcgccct

SEQ ID NO: 3053320 - DNA, 25 bp, Homo sapien
taaaccctctcagagacaacagagc

SEQ ID NO: 3053321 - DNA, 25 bp, Homo sapien
tatcctaagccaagtcacaagatct

SEQ ID NO: 3053322 - DNA, 25 bp, Homo sapien
tcctgcttcagcctgtaagaccaca

SEQ ID NO: 3053323 - DNA, 25 bp, Homo sapien
tcagcctgtaagaccacaggtgccc

SEQ ID NO: 3053324 - DNA, 25 bp, Homo sapien
tgcttcagcctgtaagaccacaggt

SEQ ID NO: 3053325 - DNA, 25 bp, Homo sapien
cagcctgtaagaccacaggtgcccg

SEQ ID NO: 3053326 - DNA, 25 bp, Homo sapien
catcttatcaggatccccagcagaa

SEQ ID NO: 3053327 - DNA, 25 bp, Homo sapien
gagaggttgcaagcccagttatagg

SEQ ID NO: 3053328 - DNA, 25 bp, Homo sapien
cttcctagggaatttatgtggctgt

SEQ ID NO: 3053329 - DNA, 25 bp, Homo sapien
ttgtaggactttggctgacaaccag

SEQ ID NO: 3053330 - DNA, 25 bp, Homo sapien
actgtccacagtaggatgggcggca

SEQ ID NO: 3053331 - DNA, 25 bp, Homo sapien
cacacggcagtctgggcggcaccac

SEQ ID NO: 3053332 - DNA, 25 bp, Homo sapien
cctccacacggcagtctgggcggca

SEQ ID NO: 3053333 - DNA, 25 bp, Homo sapien
ggcaccacctgatacgggtgctcac

SEQ ID NO: 3053334 - DNA, 25 bp, Homo sapien
aagtcccaccggttgagaagctagg

SEQ ID NO: 3053335 - DNA, 25 bp, Homo sapien
gctagagtcacaagtcccaccggtt

SEQ ID NO: 3053336 - DNA, 25 bp, Homo sapien
ccggttgagaagctaggaaatccac

SEQ ID NO: 3053337 - DNA, 25 bp, Homo sapien
cagcagctagagtcacaagtcccac

SEQ ID NO: 3053338 - DNA, 25 bp, Homo sapien
ctggtctcacagcagcgtggctggc

SEQ ID NO: 3053339 - DNA, 25 bp, Homo sapien
gcagctggtctcacagcagcgtggc

SEQ ID NO: 3053340 - DNA, 25 bp, Homo sapien
agctggtctcacagcagcgtggctg

SEQ ID NO: 3053341 - DNA, 25 bp, Homo sapien
tggtctcacagcagcgtggctggca

SEQ ID NO: 3053342 - DNA, 25 bp, Homo sapien
gtctcacagcagcttggctggcagc

SEQ ID NO: 3053343 - DNA, 25 bp, Homo sapien
ctggcagcagctggagccgcaggtc

SEQ ID NO: 3053344 - DNA, 25 bp, Homo sapien
ctggtctcacagcagcttggctggc

SEQ ID NO: 3053345 - DNA, 25 bp, Homo sapien
ggctggcagcagctggagccgcagg

SEQ ID NO: 3053346 - DNA, 25 bp, Homo sapien
tggagcagctgggaaatccacagaa

SEQ ID NO: 3053347 - DNA, 25 bp, Homo sapien
agctgggaaatccacagaagctggt

SEQ ID NO: 3053348 - DNA, 25 bp, Homo sapien
gcagctgggaaatccacagaagctg

SEQ ID NO: 3053349 - DNA, 25 bp, Homo sapien
tggtggagcagctgggaaatccaca

SEQ ID NO: 3053350 - DNA, 25 bp, Homo sapien
tctgaaggttgggttgcttggagga

SEQ ID NO: 3053351 - DNA, 25 bp, Homo sapien
ctgaaggttgggttgcttggaggag

SEQ ID NO: 3053352 - DNA, 25 bp, Homo sapien
cttaatagatgagcccagtgctcgg

SEQ ID NO: 3053353 - DNA, 25 bp, Homo sapien
cagtgctcggttccctgcttggttg

SEQ ID NO: 3053354 - DNA, 25 bp, Homo sapien
catgccacgaaatcttaagaagaag

SEQ ID NO: 3053355 - DNA, 25 bp, Homo sapien
cagaatggcccaggtcttaatagat

SEQ ID NO: 3053356 - DNA, 25 bp, Homo sapien
gggcagtcagtgcactgctcagcag

SEQ ID NO: 3053357 - DNA, 25 bp, Homo sapien
gcgttccgggcagtcagtgcactgc

SEQ ID NO: 3053358 - DNA, 25 bp, Homo sapien
cagcagggggactgcacagacacag

SEQ ID NO: 3053359 - DNA, 25 bp, Homo sapien
gcagtcagtgcactgctcagcagga

SEQ ID NO: 3053360 - DNA, 25 bp, Homo sapien
ccgtgcacgacgaggggcagcaggt

SEQ ID NO: 3053361 - DNA, 25 bp, Homo sapien
gccgtgcacgacgaggggcagcagg

SEQ ID NO: 3053362 - DNA, 25 bp, Homo sapien
gcagggagcaggggtcgcagcacac

SEQ ID NO: 3053363 - DNA, 25 bp, Homo sapien
ctgcagggagcaggggtcgcagcac

SEQ ID NO: 3053364 - DNA, 25 bp, Homo sapien
tgcagggagcaggggtcgcagcaca

SEQ ID NO: 3053365 - DNA, 25 bp, Homo sapien
gggcacgcaggtcacggggcggcac

SEQ ID NO: 3053366 - DNA, 25 bp, Homo sapien
cctcccccgtagctcagggaggaga

SEQ ID NO: 3053367 - DNA, 25 bp, Homo sapien
acacggtggtctggcaggtcacggg

SEQ ID NO: 3053368 - DNA, 25 bp, Homo sapien
agggctcgcagatggggcgcgtgca

SEQ ID NO: 3053369 - DNA, 25 bp, Homo sapien
caacatgatataggagttagactgg

SEQ ID NO: 3053370 - DNA, 25 bp, Homo sapien
gatataggagttagactggagtcct

SEQ ID NO: 3053371 - DNA, 25 bp, Homo sapien
ctggagtcctaggaaaagtatttct

SEQ ID NO: 3053372 - DNA, 25 bp, Homo sapien
gcagacaacatgatataggagttag

SEQ ID NO: 3053373 - DNA, 25 bp, Homo sapien
caaggaaacgtgtattgctctgcgg

SEQ ID NO: 3053374 - DNA, 25 bp, Homo sapien
tgtgagctagtatgaagagatgaga

SEQ ID NO: 3053375 - DNA, 25 bp, Homo sapien
tattgctctgcggtgaagccctgag

SEQ ID NO: 3053376 - DNA, 25 bp, Homo sapien
gagaaatgggcttctcaaggaaacg

SEQ ID NO: 3053377 - DNA, 25 bp, Homo sapien
gggcccttcgtgataacgggctgct

SEQ ID NO: 3053378 - DNA, 25 bp, Homo sapien
tctgaggggcccttcgtgataacgg

SEQ ID NO: 3053379 - DNA, 25 bp, Homo sapien
ccttcgtgataacgggctgctcagc

SEQ ID NO: 3053380 - DNA, 25 bp, Homo sapien
gcccttcgtgataacgggctgctca

SEQ ID NO: 3053381 - DNA, 25 bp, Homo sapien
gctgcaaggggtcggctggccgcag

SEQ ID NO: 3053382 - DNA, 25 bp, Homo sapien
gctggccgcagggggactgcacaga

SEQ ID NO: 3053383 - DNA, 25 bp, Homo sapien
ctggccgcagggggactgcacagac

SEQ ID NO: 3053384 - DNA, 25 bp, Homo sapien
gtgctgcaaggggtcggctggccgc

SEQ ID NO: 3053385 - DNA, 25 bp, Homo sapien
gctgcaaggggtcggctggccgcag

SEQ ID NO: 3053386 - DNA, 25 bp, Homo sapien
gctggccgcagggggactgcacaga

SEQ ID NO: 3053387 - DNA, 25 bp, Homo sapien
ctggccgcagggggactgcacagac

SEQ ID NO: 3053388 - DNA, 25 bp, Homo sapien
gtgctgcaaggggtcggctggccgc

SEQ ID NO: 3053389 - DNA, 25 bp, Homo sapien
ccgtgcacgacgaggggcagcaggt

SEQ ID NO: 3053390 - DNA, 25 bp, Homo sapien
gccgtgcacgacgaggggcagcagg

SEQ ID NO: 3053391 - DNA, 25 bp, Homo sapien
acacggtggtctggcaggtcacggg

SEQ ID NO: 3053392 - DNA, 25 bp, Homo sapien
gggcacgcaggtcacggggcggcac

SEQ ID NO: 3053393 - DNA, 25 bp, Homo sapien
cagatggggcgcgtgcagcggggca

SEQ ID NO: 3053394 - DNA, 25 bp, Homo sapien
agggctcgcagatggggcgcgtgca

SEQ ID NO: 3053395 - DNA, 25 bp, Homo sapien
ctcagggaggagaaggtggagccgc

SEQ ID NO: 3053396 - DNA, 25 bp, Homo sapien
tcagggaggagaaggtggagccgca

SEQ ID NO: 3053397 - DNA, 25 bp, Homo sapien
gggaggagaaggtggagccgcagca

SEQ ID NO: 3053398 - DNA, 25 bp, Homo sapien
aggagaaggtggagccgcagcagga

SEQ ID NO: 3053399 - DNA, 25 bp, Homo sapien
gcttgaggatcagctaggctgcaaa

SEQ ID NO: 3053400 - DNA, 25 bp, Homo sapien
tctcaagattgtcagagagggccag

SEQ ID NO: 3053401 - DNA, 25 bp, Homo sapien
aaaggtggagtctctcatctgatcc

SEQ ID NO: 3053402 - DNA, 25 bp, Homo sapien
tcaagccaggaattcgaatgatgaa

SEQ ID NO: 3053403 - DNA, 25 bp, Homo sapien
gctgcaaggggtcggctggccgcag

SEQ ID NO: 3053404 - DNA, 25 bp, Homo sapien
tgctgcaaggggtcggctggccgca

SEQ ID NO: 3053405 - DNA, 25 bp, Homo sapien
gtgctgcaaggggtcggctggccgc

SEQ ID NO: 3053406 - DNA, 25 bp, Homo sapien
ccgtgcacgacgaggggcagcaggt

SEQ ID NO: 3053407 - DNA, 25 bp, Homo sapien
gccgtgcacgacgaggggcagcagg

SEQ ID NO: 3053408 - DNA, 25 bp, Homo sapien
gcagggagcaggggtcgcagcacac

SEQ ID NO: 3053409 - DNA, 25 bp, Homo sapien
tgcagggagcaggggtcgcagcaca

SEQ ID NO: 3053410 - DNA, 25 bp, Homo sapien
ctgcagggagcaggggtcgcagcac

SEQ ID NO: 3053411 - DNA, 25 bp, Homo sapien
tcccccgtagctcagggaggacaag

SEQ ID NO: 3053412 - DNA, 25 bp, Homo sapien
acacggtggtctggcaggtcacggg

SEQ ID NO: 3053413 - DNA, 25 bp, Homo sapien
gggcacgcaggtcacggggcggcac

SEQ ID NO: 3053414 - DNA, 25 bp, Homo sapien
agggctcgcagatggggcgcgtgca

SEQ ID NO: 3053415 - DNA, 25 bp, Homo sapien
gtgggttgggctgttgagaggagct

SEQ ID NO: 3053416 - DNA, 25 bp, Homo sapien
tgtgggttgggctgttgagaggagc

SEQ ID NO: 3053417 - DNA, 25 bp, Homo sapien
gtgtgggttgggctgttgagaggag

SEQ ID NO: 3053418 - DNA, 25 bp, Homo sapien
ggttgggctgttgagaggagctgga

SEQ ID NO: 3053419 - DNA, 25 bp, Homo sapien
gactaaggctgatgtagacacctga

SEQ ID NO: 3053420 - DNA, 25 bp, Homo sapien
gacagtttgagcagtaaaaaccatc

SEQ ID NO: 3053421 - DNA, 25 bp, Homo sapien
gtaatggacgtctgcttacaccagg

SEQ ID NO: 3053422 - DNA, 25 bp, Homo sapien
tattgacaacagtgagcaacacatt

SEQ ID NO: 3053423 - DNA, 25 bp, Homo sapien
ccgtgcacgacgaggggcagcaggt

SEQ ID NO: 3053424 - DNA, 25 bp, Homo sapien
gctgcaaggggtcggctggccgcag

SEQ ID NO: 3053425 - DNA, 25 bp, Homo sapien
gccgtgcacgacgaggggcagcagg

SEQ ID NO: 3053426 - DNA, 25 bp, Homo sapien
gtgctgcaaggggtcggctggccgc

SEQ ID NO: 3053427 - DNA, 25 bp, Homo sapien
gcagggagcaggggtcgcagcacac

SEQ ID NO: 3053428 - DNA, 25 bp, Homo sapien
ctgcagggagcaggggtcgcagcac

SEQ ID NO: 3053429 - DNA, 25 bp, Homo sapien
tgcagggagcaggggtcgcagcaca

SEQ ID NO: 3053430 - DNA, 25 bp, Homo sapien
cagatggggcgcgtgcagcggggca

SEQ ID NO: 3053431 - DNA, 25 bp, Homo sapien
acacggtggtctggcaggtcacggg

SEQ ID NO: 3053432 - DNA, 25 bp, Homo sapien
gggcacgcaggtcacggggcggcac

SEQ ID NO: 3053433 - DNA, 25 bp, Homo sapien
agggctcgcagatggggcgcgtgca

SEQ ID NO: 3053434 - DNA, 25 bp, Homo sapien
tcccccgtagctcagggaggacaag

SEQ ID NO: 3053435 - DNA, 25 bp, Homo sapien
gcctcccccgtagctcagggaggac

SEQ ID NO: 3053436 - DNA, 25 bp, Homo sapien
cctcccccgtagctcagggaggaca

SEQ ID NO: 3053437 - DNA, 25 bp, Homo sapien
ctcccccgtagctcagggaggacaa

SEQ ID NO: 3053438 - DNA, 25 bp, Homo sapien
atcctccccgttctgacaccatggt

SEQ ID NO: 3053439 - DNA, 25 bp, Homo sapien
agccaagacctctgtcaggagacct

SEQ ID NO: 3053440 - DNA, 25 bp, Homo sapien
agatcctccccgttctgacaccatg

SEQ ID NO: 3053441 - DNA, 25 bp, Homo sapien
actctcttggaaacccacccagatc

SEQ ID NO: 3053442 - DNA, 25 bp, Homo sapien
ctgaaaggctgacagacaaatagta

SEQ ID NO: 3053443 - DNA, 25 bp, Homo sapien
aggctgacagacaaatagtatgttt

SEQ ID NO: 3053444 - DNA, 25 bp, Homo sapien
gggagataatgtgtacctaattggg

SEQ ID NO: 3053445 - DNA, 25 bp, Homo sapien
gaaggatattctgtaggctcaaaat

SEQ ID NO: 3053446 - DNA, 25 bp, Homo sapien
tgttctcacagagtcagcgggatgg

SEQ ID NO: 3053447 - DNA, 25 bp, Homo sapien
tacatttgtggaccagcggtgaagg

SEQ ID NO: 3053448 - DNA, 25 bp, Homo sapien
actccatgtgtcctaatattcagca

SEQ ID NO: 3053449 - DNA, 25 bp, Homo sapien
tccaccctgctgaatgacataaatc

SEQ ID NO: 3053450 - DNA, 25 bp, Homo sapien
gacacacagcagctggggcgacagc

SEQ ID NO: 3053451 - DNA, 25 bp, Homo sapien
tgggctggcagcacacagactggca

SEQ ID NO: 3053452 - DNA, 25 bp, Homo sapien
acacagactggcagcactggggtct

SEQ ID NO: 3053453 - DNA, 25 bp, Homo sapien
gctggggcgacagcaggtgggctgg

SEQ ID NO: 3053454 - DNA, 25 bp, Homo sapien
gctggggcggtagcaggtggtcctg

SEQ ID NO: 3053455 - DNA, 25 bp, Homo sapien
gtcctgcagcaggtggtctgacagc

SEQ ID NO: 3053456 - DNA, 25 bp, Homo sapien
gcagcaggtggtctgacagcagctg

SEQ ID NO: 3053457 - DNA, 25 bp, Homo sapien
cctgcagcaggtggtctgacagcag

SEQ ID NO: 3053458 - DNA, 25 bp, Homo sapien
agagcacacggagccacaacaggag

SEQ ID NO: 3053459 - DNA, 25 bp, Homo sapien
aatgggggacgatttttataatgtg

SEQ ID NO: 3053460 - DNA, 25 bp, Homo sapien
gtctgcaaataatgggggacgattt

SEQ ID NO: 3053461 - DNA, 25 bp, Homo sapien
atgggggacgatttttataatgtga

SEQ ID NO: 3053462 - DNA, 25 bp, Homo sapien
gctgtctgcaaataatgggggacga

SEQ ID NO: 3053463 - DNA, 25 bp, Homo sapien
gcaggtacttgcataagacacatgg

SEQ ID NO: 3053464 - DNA, 25 bp, Homo sapien
cacatggataggaaacagtttggca

SEQ ID NO: 3053465 - DNA, 25 bp, Homo sapien
aacacccagcctgattaatctttga

SEQ ID NO: 3053466 - DNA, 25 bp, Homo sapien
tgggtactctgggtgtagaacagat

SEQ ID NO: 3053467 - DNA, 25 bp, Homo sapien
actggggtctgcagcagctggacac

SEQ ID NO: 3053468 - DNA, 25 bp, Homo sapien
tggggtctgcagcagctggacacac

SEQ ID NO: 3053469 - DNA, 25 bp, Homo sapien
gcactggggtctgcagcagctggac

SEQ ID NO: 3053470 - DNA, 25 bp, Homo sapien
ggaatggcagcactggggtctgcag

SEQ ID NO: 3053471 - DNA, 25 bp, Homo sapien
gcagcaggtggtctgacagcagctg

SEQ ID NO: 3053472 - DNA, 25 bp, Homo sapien
tctgcagcaggtggtctgacaacag

SEQ ID NO: 3053473 - DNA, 25 bp, Homo sapien
ggttctgcagcaggtggtctgacaa

SEQ ID NO: 3053474 - DNA, 25 bp, Homo sapien
tggcagcacacggaatggcagcact

SEQ ID NO: 3053475 - DNA, 25 bp, Homo sapien
gtgtgctgccaacccacttgttccc

SEQ ID NO: 3053476 - DNA, 25 bp, Homo sapien
tgccaacccacttgttcccgcccca

SEQ ID NO: 3053477 - DNA, 25 bp, Homo sapien
gctgccaacccacttgttcccgccc

SEQ ID NO: 3053478 - DNA, 25 bp, Homo sapien
gtgctgccaacccacttgttcccgc

SEQ ID NO: 3053479 - DNA, 25 bp, Homo sapien
ctggcaaacttgaacaaacagagac

SEQ ID NO: 3053480 - DNA, 25 bp, Homo sapien
aatggtctacaactgtgggcctgca

SEQ ID NO: 3053481 - DNA, 25 bp, Homo sapien
tggagataatgtgtacctcactggg

SEQ ID NO: 3053482 - DNA, 25 bp, Homo sapien
aatcccactccatgtgtcctaatag

SEQ ID NO: 3053483 - DNA, 25 bp, Homo sapien
atagcaagtggtgtggcaggagact

SEQ ID NO: 3053484 - DNA, 25 bp, Homo sapien
caggttgggcgatagcaagtggtgt

SEQ ID NO: 3053485 - DNA, 25 bp, Homo sapien
ttgggcgatagcaagtggtgtggca

SEQ ID NO: 3053486 - DNA, 25 bp, Homo sapien
cacaggttgggcgatagcaagtggt

SEQ ID NO: 3053487 - DNA, 25 bp, Homo sapien
ctggattcacagcaagaggggcggc

SEQ ID NO: 3053488 - DNA, 25 bp, Homo sapien
tggattcacagcaagaggggcggca

SEQ ID NO: 3053489 - DNA, 25 bp, Homo sapien
ggtctcctggcagaggtctcggcca

SEQ ID NO: 3053490 - DNA, 25 bp, Homo sapien
gtctcctggcagaggtctcggccac

SEQ ID NO: 3053491 - DNA, 25 bp, Homo sapien
tctcctggcagaggtctcggccaca

SEQ ID NO: 3053492 - DNA, 25 bp, Homo sapien
ttgggtttctaggagagtgaagttc

SEQ ID NO: 3053493 - DNA, 25 bp, Homo sapien
ctgtagtccctttataccctcctga

SEQ ID NO: 3053494 - DNA, 25 bp, Homo sapien
tgtagtccctttataccctcctgaa

SEQ ID NO: 3053495 - DNA, 25 bp, Homo sapien
ggtgtcagagggtgaaggatctagt

SEQ ID NO: 3053496 - DNA, 25 bp, Homo sapien
gaacagtccgcatgtttgcaatgag

SEQ ID NO: 3053497 - DNA, 25 bp, Homo sapien
tctgtggccctacaaatgatggagg

SEQ ID NO: 3053498 - DNA, 25 bp, Homo sapien
ttggaggctttaagatctgtggccc

SEQ ID NO: 3053499 - DNA, 25 bp, Homo sapien
tatgggacccagatcaattctcttg

SEQ ID NO: 3053500 - DNA, 25 bp, Homo sapien
ttagcagcaagaggaggcacagcac

SEQ ID NO: 3053501 - DNA, 25 bp, Homo sapien
gcaggagactcggccacagactgga

SEQ ID NO: 3053502 - DNA, 25 bp, Homo sapien
atagcaagtggtgtggcaggagact

SEQ ID NO: 3053503 - DNA, 25 bp, Homo sapien
ctcggccacagactggacgcaggca

SEQ ID NO: 3053504 - DNA, 25 bp, Homo sapien
cacaggttgggcgatagcaagtggt

SEQ ID NO: 3053505 - DNA, 25 bp, Homo sapien
gtcctgcagcaggtggtctgacagc

SEQ ID NO: 3053506 - DNA, 25 bp, Homo sapien
gcagcaggtggtctgacagcagctg

SEQ ID NO: 3053507 - DNA, 25 bp, Homo sapien
cctgcagcaggtggtctgacagcag

SEQ ID NO: 3053508 - DNA, 25 bp, Homo sapien
tggtcctgcagcaggtggtctgaca

SEQ ID NO: 3053509 - DNA, 25 bp, Homo sapien
aggtgggctgacagcacacagactg

SEQ ID NO: 3053510 - DNA, 25 bp, Homo sapien
caggtggtcctacagcaggtggtct

SEQ ID NO: 3053511 - DNA, 25 bp, Homo sapien
gtgggctgacagcacacagactggc

SEQ ID NO: 3053512 - DNA, 25 bp, Homo sapien
tacagcaggtggtctgacagcagct

SEQ ID NO: 3053513 - DNA, 25 bp, Homo sapien
gggcggcagcagttctccaggccac

SEQ ID NO: 3053514 - DNA, 25 bp, Homo sapien
tcctgcagcaggtggtctggcagca

SEQ ID NO: 3053515 - DNA, 25 bp, Homo sapien
ctggggcggcagcagttctccaggc

SEQ ID NO: 3053516 - DNA, 25 bp, Homo sapien
cagctggggcggcagcagttctcca

SEQ ID NO: 3053517 - DNA, 25 bp, Homo sapien
cacagagccacaacaggagttgacc

SEQ ID NO: 3053518 - DNA, 25 bp, Homo sapien
cacacagagccacaacaggagttga

SEQ ID NO: 3053519 - DNA, 25 bp, Homo sapien
cagagccacaacaggagttgaccat

SEQ ID NO: 3053520 - DNA, 25 bp, Homo sapien
gcacacagagccacaacaggagttg

SEQ ID NO: 3053521 - DNA, 25 bp, Homo sapien
tgagtgttctgagtttgatctctcc

SEQ ID NO: 3053522 - DNA, 25 bp, Homo sapien
agtgttctgagtttgatctctcctt

SEQ ID NO: 3053523 - DNA, 25 bp, Homo sapien
gtgagtgttctgagtttgatctctc

SEQ ID NO: 3053524 - DNA, 25 bp, Homo sapien
gagtgagtgttctgagtttgatctc

SEQ ID NO: 3053525 - DNA, 25 bp, Homo sapien
ggtctctcaaatactgcctgcataa

SEQ ID NO: 3053526 - DNA, 25 bp, Homo sapien
tatatgaaaaactagaggctggagg

SEQ ID NO: 3053527 - DNA, 25 bp, Homo sapien
tacctgtatatagatcatccttggc

SEQ ID NO: 3053528 - DNA, 25 bp, Homo sapien
gaggtgatcttgtctttcagctgaa

SEQ ID NO: 3053529 - DNA, 25 bp, Homo sapien
tccaggatatggaaacacagttggt

SEQ ID NO: 3053530 - DNA, 25 bp, Homo sapien
tctgagagtgagacaaccttgcccc

SEQ ID NO: 3053531 - DNA, 25 bp, Homo sapien
gaaatacagggtgaaacaatcagac

SEQ ID NO: 3053532 - DNA, 25 bp, Homo sapien
ccgagttaccctgcaagaatttcca

SEQ ID NO: 3053533 - DNA, 25 bp, Homo sapien
cacaggttgggcgatagcaagtggt

SEQ ID NO: 3053534 - DNA, 25 bp, Homo sapien
atagcaagtggtgtggcaggagact

SEQ ID NO: 3053535 - DNA, 25 bp, Homo sapien
aggagactcggccacagactggacg

SEQ ID NO: 3053536 - DNA, 25 bp, Homo sapien
ctggattcacagcaagaggggcggc

SEQ ID NO: 3053537 - DNA, 25 bp, Homo sapien
gggacggcagcaggttggctggcag

SEQ ID NO: 3053538 - DNA, 25 bp, Homo sapien
ctgggacggcagcaggttggctggc

SEQ ID NO: 3053539 - DNA, 25 bp, Homo sapien
ggcagcaggttggctggcagcacac

SEQ ID NO: 3053540 - DNA, 25 bp, Homo sapien
acggcagcaggttggctggcagcac

SEQ ID NO: 3053541 - DNA, 25 bp, Homo sapien
gggcgacagcagctggagatgctgc

SEQ ID NO: 3053542 - DNA, 25 bp, Homo sapien
tgggctggcagcacacagactggca

SEQ ID NO: 3053543 - DNA, 25 bp, Homo sapien
cagctgggacggcagcaagtgggct

SEQ ID NO: 3053544 - DNA, 25 bp, Homo sapien
ggtctgcagcagctggatacacagc

SEQ ID NO: 3053545 - DNA, 25 bp, Homo sapien
agctgggacagcagctgggacggca

SEQ ID NO: 3053546 - DNA, 25 bp, Homo sapien
gggacagcagctgggacggcagcag

SEQ ID NO: 3053547 - DNA, 25 bp, Homo sapien
gcagctgggacagcagctgggacgg

SEQ ID NO: 3053548 - DNA, 25 bp, Homo sapien
ctgggacagcagctgggacggcagc

SEQ ID NO: 3053549 - DNA, 25 bp, Homo sapien
acacacagcagctggggcggcagca

SEQ ID NO: 3053550 - DNA, 25 bp, Homo sapien
actggcagcactggggtctgcagca

SEQ ID NO: 3053551 - DNA, 25 bp, Homo sapien
tggtcctgcagcaggtggtctgaca

SEQ ID NO: 3053552 - DNA, 25 bp, Homo sapien
cctgcagcaggtggtctgacagcag

SEQ ID NO: 3053553 - DNA, 25 bp, Homo sapien
gggcggcagcaggtctccaggccac

SEQ ID NO: 3053554 - DNA, 25 bp, Homo sapien
gcggcagcaggtctccaggccacag

SEQ ID NO: 3053555 - DNA, 25 bp, Homo sapien
cggcagcaggtctccaggccacagc

SEQ ID NO: 3053556 - DNA, 25 bp, Homo sapien
ctggggcggcagcaggtctccaggc

SEQ ID NO: 3053557 - DNA, 25 bp, Homo sapien
tcatgatatcgttttgggagagctt

SEQ ID NO: 3053558 - DNA, 25 bp, Homo sapien
ggtttcagtgtcacatgacttcagt

SEQ ID NO: 3053559 - DNA, 25 bp, Homo sapien
gccactgtcacttgtctgtttctca

SEQ ID NO: 3053560 - DNA, 25 bp, Homo sapien
ggagagcttctgattgggctaagat

SEQ ID NO: 3053561 - DNA, 25 bp, Homo sapien
gagctgaatgtccactctgaatgcc

SEQ ID NO: 3053562 - DNA, 25 bp, Homo sapien
tcacagttagtgtccccttcgaatg

SEQ ID NO: 3053563 - DNA, 25 bp, Homo sapien
caatattatatgagatcatcacagt

SEQ ID NO: 3053564 - DNA, 25 bp, Homo sapien
tggctggctacagtgcattttaaat

SEQ ID NO: 3053565 - DNA, 25 bp, Homo sapien
agactcggccacagactggacgcac

SEQ ID NO: 3053566 - DNA, 25 bp, Homo sapien
gactcggccacagactggacgcacg

SEQ ID NO: 3053567 - DNA, 25 bp, Homo sapien
gccacagactggacgcacgcagcag

SEQ ID NO: 3053568 - DNA, 25 bp, Homo sapien
tcggccacagactggacgcacgcag

SEQ ID NO: 3053569 - DNA, 25 bp, Homo sapien
gggcggcagcagttctccaggccac

SEQ ID NO: 3053570 - DNA, 25 bp, Homo sapien
caggagctgaccatggtgtcagagg

SEQ ID NO: 3053571 - DNA, 25 bp, Homo sapien
gccacaacaggagctgaccatggtg

SEQ ID NO: 3053572 - DNA, 25 bp, Homo sapien
ctcagagctgacagagccacaacag

SEQ ID NO: 3053573 - DNA, 25 bp, Homo sapien
gagcatatatttggaggccagattc

SEQ ID NO: 3053574 - DNA, 25 bp, Homo sapien
gaatgctggttgatgagaatctggt

SEQ ID NO: 3053575 - DNA, 25 bp, Homo sapien
gatgagctacatcaagaatgctggt

SEQ ID NO: 3053576 - DNA, 25 bp, Homo sapien
tcccataactcagctcatagatgag

SEQ ID NO: 3053577 - DNA, 25 bp, Homo sapien
ctggcagcagctggaaatgcaatag

SEQ ID NO: 3053578 - DNA, 25 bp, Homo sapien
ggctggcagcagctggaaatgcaat

SEQ ID NO: 3053579 - DNA, 25 bp, Homo sapien
gaaggctggcagcagctggaaatgc

SEQ ID NO: 3053580 - DNA, 25 bp, Homo sapien
caggaaggctggcagcagctggaaa

SEQ ID NO: 3053581 - DNA, 25 bp, Homo sapien
tagcaggtggtttgccagcagatgg

SEQ ID NO: 3053582 - DNA, 25 bp, Homo sapien
gtagcaggtggtttgccagcagatg

SEQ ID NO: 3053583 - DNA, 25 bp, Homo sapien
tctgcagcaggtggtctggcagcac

SEQ ID NO: 3053584 - DNA, 25 bp, Homo sapien
cagcaggtggtctggcagcactggg

SEQ ID NO: 3053585 - DNA, 25 bp, Homo sapien
tggggcggcagcaggtggttctgca

SEQ ID NO: 3053586 - DNA, 25 bp, Homo sapien
gggcggcagcaggtggttctgcagc

SEQ ID NO: 3053587 - DNA, 25 bp, Homo sapien
cagcacacagactggcagcactggg

SEQ ID NO: 3053588 - DNA, 25 bp, Homo sapien
cacagactggcagcactggggcctg

SEQ ID NO: 3053589 - DNA, 25 bp, Homo sapien
gctggcagcacacagactggcagca

SEQ ID NO: 3053590 - DNA, 25 bp, Homo sapien
ggtgggctggcagcacacagactgg

SEQ ID NO: 3053591 - DNA, 25 bp, Homo sapien
ctacagcaggtagtctggcagcatt

SEQ ID NO: 3053592 - DNA, 25 bp, Homo sapien
gcaggtgggctggcagcacacagac

SEQ ID NO: 3053593 - DNA, 25 bp, Homo sapien
agcattggggtctgcagcaggtggg

SEQ ID NO: 3053594 - DNA, 25 bp, Homo sapien
tggcagcattggggtctgcagcagg

SEQ ID NO: 3053595 - DNA, 25 bp, Homo sapien
cagcaggtggtctggcagcactggg

SEQ ID NO: 3053596 - DNA, 25 bp, Homo sapien
ggtggtctggcagcactggggtctg

SEQ ID NO: 3053597 - DNA, 25 bp, Homo sapien
gtggtctggcagcactggggtctgc

SEQ ID NO: 3053598 - DNA, 25 bp, Homo sapien
tcctgcagcaggtggtctggcagca

SEQ ID NO: 3053599 - DNA, 25 bp, Homo sapien
taggccacagccctggtcagagcac

SEQ ID NO: 3053600 - DNA, 25 bp, Homo sapien
gcacacagagccacaacaggagttg

SEQ ID NO: 3053601 - DNA, 25 bp, Homo sapien
aggccacagccctggtcagagcaca

SEQ ID NO: 3053602 - DNA, 25 bp, Homo sapien
cagagccacaacaggagttgaccat

SEQ ID NO: 3053603 - DNA, 25 bp, Homo sapien
tcagagggtggaggttctgggtggg

SEQ ID NO: 3053604 - DNA, 25 bp, Homo sapien
ggtgtcagagggtggaggttctggg

SEQ ID NO: 3053605 - DNA, 25 bp, Homo sapien
cagagggtggaggttctgggtgggt

SEQ ID NO: 3053606 - DNA, 25 bp, Homo sapien
tgtcagagggtggaggttctgggtg

SEQ ID NO: 3053607 - DNA, 25 bp, Homo sapien
tgattttaattcttctaggcccgta

SEQ ID NO: 3053608 - DNA, 25 bp, Homo sapien
tttggtgactcaggaggagaaagct

SEQ ID NO: 3053609 - DNA, 25 bp, Homo sapien
aggagaaagctgtgctttaatctca

SEQ ID NO: 3053610 - DNA, 25 bp, Homo sapien
ccgtaattttcttttggtgactcag

SEQ ID NO: 3053611 - DNA, 25 bp, Homo sapien
cttgggtgattttaattcttctagg

SEQ ID NO: 3053612 - DNA, 25 bp, Homo sapien
ggtgattttaattcttctaggccca

SEQ ID NO: 3053613 - DNA, 25 bp, Homo sapien
gtgattttaattcttctaggcccat

SEQ ID NO: 3053614 - DNA, 25 bp, Homo sapien
tgggtgattttaattcttctaggcc

SEQ ID NO: 3053615 - DNA, 25 bp, Homo sapien
tgcctctgttttcacgacatcagga

SEQ ID NO: 3053616 - DNA, 25 bp, Homo sapien
gagcaagaaggtgcacaaatccaga

SEQ ID NO: 3053617 - DNA, 25 bp, Homo sapien
gacatcaggaagtccacatgttctc

SEQ ID NO: 3053618 - DNA, 25 bp, Homo sapien
tctctgaatagatactctgtgcctg

SEQ ID NO: 3053619 - DNA, 25 bp, Homo sapien
ggttgttctacagcaggtggtcggg

SEQ ID NO: 3053620 - DNA, 25 bp, Homo sapien
aggttgttctacagcaggtggtcgg

SEQ ID NO: 3053621 - DNA, 25 bp, Homo sapien
agcaggtggtcgggcagctgaaagg

SEQ ID NO: 3053622 - DNA, 25 bp, Homo sapien
aagcaggttgttctacagcaggtgg

SEQ ID NO: 3053623 - DNA, 25 bp, Homo sapien
gctgggatgacagcaactagaaatg

SEQ ID NO: 3053624 - DNA, 25 bp, Homo sapien
ctagagatacagcaggaaggcctgc

SEQ ID NO: 3053625 - DNA, 25 bp, Homo sapien
gatacagcaggaaggcctgcagcaa

SEQ ID NO: 3053626 - DNA, 25 bp, Homo sapien
gagatacagcaggaaggcctgcagc

SEQ ID NO: 3053627 - DNA, 25 bp, Homo sapien
tagagatacagcaggaaggcctgca

SEQ ID NO: 3053628 - DNA, 25 bp, Homo sapien
gaaggcctgcagcaactggaaatgc

SEQ ID NO: 3053629 - DNA, 25 bp, Homo sapien
ggaaggcctgcagcaactggaaatg

SEQ ID NO: 3053630 - DNA, 25 bp, Homo sapien
cagctctggtcagagcagacagagc

SEQ ID NO: 3053631 - DNA, 25 bp, Homo sapien
cacagctctggtcagagcagacaga

SEQ ID NO: 3053632 - DNA, 25 bp, Homo sapien
agcagacagagccacagcaggagct

SEQ ID NO: 3053633 - DNA, 25 bp, Homo sapien
agacagagccacagcaggagctgac

SEQ ID NO: 3053634 - DNA, 25 bp, Homo sapien
tattcatttggtagagggtagcaac

SEQ ID NO: 3053635 - DNA, 25 bp, Homo sapien
cacaggtggatcatatcaagaatgc

SEQ ID NO: 3053636 - DNA, 25 bp, Homo sapien
ggaactgaggttgtccaattggcct

SEQ ID NO: 3053637 - DNA, 25 bp, Homo sapien
caattggccttgcatgattcagttc

SEQ ID NO: 3053638 - DNA, 25 bp, Homo sapien
aggttgggcggcagcaggtggacac

SEQ ID NO: 3053639 - DNA, 25 bp, Homo sapien
agagcaggttgggcggcagcaggtg

SEQ ID NO: 3053640 - DNA, 25 bp, Homo sapien
gttgggcggcagcaggtggacacac

SEQ ID NO: 3053641 - DNA, 25 bp, Homo sapien
ctagagcaggttgggcggcagcagg

SEQ ID NO: 3053642 - DNA, 25 bp, Homo sapien
gcagtacacagactggcagcactgg

SEQ ID NO: 3053643 - DNA, 25 bp, Homo sapien
caggtgggctggcagtacacagact

SEQ ID NO: 3053644 - DNA, 25 bp, Homo sapien
acacacagcagctgggacggcagca

SEQ ID NO: 3053645 - DNA, 25 bp, Homo sapien
actggggtctgaagcagctggacac

SEQ ID NO: 3053646 - DNA, 25 bp, Homo sapien
acacagactggcagcactgcggtct

SEQ ID NO: 3053647 - DNA, 25 bp, Homo sapien
ggcagcactgcggtctgcagcagct

SEQ ID NO: 3053648 - DNA, 25 bp, Homo sapien
ctgcagcaagtggtctggcagcagc

SEQ ID NO: 3053649 - DNA, 25 bp, Homo sapien
actggcagcactgcggtctgcagca

SEQ ID NO: 3053650 - DNA, 25 bp, Homo sapien
cacagagccacaacaggagttgacc

SEQ ID NO: 3053651 - DNA, 25 bp, Homo sapien
cacacagagccacaacaggagttga

SEQ ID NO: 3053652 - DNA, 25 bp, Homo sapien
cagagccacaacaggagttgaccat

SEQ ID NO: 3053653 - DNA, 25 bp, Homo sapien
gcacacagagccacaacaggagttg

SEQ ID NO: 3053654 - DNA, 25 bp, Homo sapien
tcagagggtggaggttctgggtgga

SEQ ID NO: 3053655 - DNA, 25 bp, Homo sapien
ggtgtcagagggtggaggttctggg

SEQ ID NO: 3053656 - DNA, 25 bp, Homo sapien
agagggtggaggttctgggtggatt

SEQ ID NO: 3053657 - DNA, 25 bp, Homo sapien
tgtcagagggtggaggttctgggtg

SEQ ID NO: 3053658 - DNA, 25 bp, Homo sapien
gaaatgttttatgaactgggcagcc

SEQ ID NO: 3053659 - DNA, 25 bp, Homo sapien
ccatcatttgcaatgaccttccact

SEQ ID NO: 3053660 - DNA, 25 bp, Homo sapien
catttgcaatgaccttccactgcat

SEQ ID NO: 3053661 - DNA, 25 bp, Homo sapien
tacccatcagctgagtggcaccccc

SEQ ID NO: 3053662 - DNA, 25 bp, Homo sapien
gagtggcacccccatcatttgcaat

SEQ ID NO: 3053663 - DNA, 25 bp, Homo sapien
ggtcaaatcaagcataacagtcaga

SEQ ID NO: 3053664 - DNA, 25 bp, Homo sapien
aaatgtagatggatgccctttcacc

SEQ ID NO: 3053665 - DNA, 25 bp, Homo sapien
cagtcagaaacttagaggcttagtc

SEQ ID NO: 3053666 - DNA, 25 bp, Homo sapien
caccagttacttagtggaataacag

SEQ ID NO: 3053667 - DNA, 25 bp, Homo sapien
ttcatatcatgggatggtgactggc

SEQ ID NO: 3053668 - DNA, 25 bp, Homo sapien
tttcatatcatgggatggtgactgg

SEQ ID NO: 3053669 - DNA, 25 bp, Homo sapien
tcatggttgatagtccaatatgagg

SEQ ID NO: 3053670 - DNA, 25 bp, Homo sapien
catggttgatagtccaatatgaggt

SEQ ID NO: 3053671 - DNA, 25 bp, Homo sapien
tcaacaagaggatccacagcagctg

SEQ ID NO: 3053672 - DNA, 25 bp, Homo sapien
gcagctggggcggcagcaagttgca

SEQ ID NO: 3053673 - DNA, 25 bp, Homo sapien
cagctggggcggcagcaagttgcac

SEQ ID NO: 3053674 - DNA, 25 bp, Homo sapien
acagcagctggggcggcagcaagtt

SEQ ID NO: 3053675 - DNA, 25 bp, Homo sapien
ggcggcaggtggtctgacaacagag

SEQ ID NO: 3053676 - DNA, 25 bp, Homo sapien
gtctgacagcagagtggacggcagc

SEQ ID NO: 3053677 - DNA, 25 bp, Homo sapien
ctgacaacagagtggacggcagcag

SEQ ID NO: 3053678 - DNA, 25 bp, Homo sapien
tctgacagcagagtggacggcagca

SEQ ID NO: 3053679 - DNA, 25 bp, Homo sapien
caggtggtctgacagcagagtgggc

SEQ ID NO: 3053680 - DNA, 25 bp, Homo sapien
gtggtctgacagcagagtgggcggc

SEQ ID NO: 3053681 - DNA, 25 bp, Homo sapien
tggacataccacagctggggtggca

SEQ ID NO: 3053682 - DNA, 25 bp, Homo sapien
tggcaggtggtctgacagcagagtg

SEQ ID NO: 3053683 - DNA, 25 bp, Homo sapien
cggcaggtggtctgacaacagactg

SEQ ID NO: 3053684 - DNA, 25 bp, Homo sapien
ggcggcaggtggtctgacaacagac

SEQ ID NO: 3053685 - DNA, 25 bp, Homo sapien
tggcagcaggtagtctgagagcagg

SEQ ID NO: 3053686 - DNA, 25 bp, Homo sapien
aggtggtctgacaacagactgggtg

SEQ ID NO: 3053687 - DNA, 25 bp, Homo sapien
tgatcacagccctggtcagagcaga

SEQ ID NO: 3053688 - DNA, 25 bp, Homo sapien
gacagagccacaacaagagttaacc

SEQ ID NO: 3053689 - DNA, 25 bp, Homo sapien
tcagagcagacagagccacaacaag

SEQ ID NO: 3053690 - DNA, 25 bp, Homo sapien
gcagacagagccacaacaagagtta

SEQ ID NO: 3053691 - DNA, 25 bp, Homo sapien
tgttagagtttagccaatccagtct

SEQ ID NO: 3053692 - DNA, 25 bp, Homo sapien
taggtaggtttccaagacagtgagt

SEQ ID NO: 3053693 - DNA, 25 bp, Homo sapien
gagtttttcgaatgtgggaatctcc

SEQ ID NO: 3053694 - DNA, 25 bp, Homo sapien
tatctgtataaaaggtggaatgcac

SEQ ID NO: 3053695 - DNA, 25 bp, Homo sapien
tcatccagtcgattgtcaggtgaca

SEQ ID NO: 3053696 - DNA, 25 bp, Homo sapien
ctgtgtgtctcacagcagtcctcaa

SEQ ID NO: 3053697 - DNA, 25 bp, Homo sapien
gtcgattgtcaggtgacagatcact

SEQ ID NO: 3053698 - DNA, 25 bp, Homo sapien
agcattctgtgtgtcatcctgaaaa

SEQ ID NO: 3053699 - DNA, 25 bp, Homo sapien
cggcagcagcaagcggtcttgcagc

SEQ ID NO: 3053700 - DNA, 25 bp, Homo sapien
tcttggcagaggtcttaaccacacc

SEQ ID NO: 3053701 - DNA, 25 bp, Homo sapien
ttggcagaggtcttaaccacacctc

SEQ ID NO: 3053702 - DNA, 25 bp, Homo sapien
gcagcagcaagcggtcttgcagcag

SEQ ID NO: 3053703 - DNA, 25 bp, Homo sapien
tgatcagatattctgattgaagcat

SEQ ID NO: 3053704 - DNA, 25 bp, Homo sapien
ctgaagagaaatgatcagatattct

SEQ ID NO: 3053705 - DNA, 25 bp, Homo sapien
aatgatcagatattctgattgaagc

SEQ ID NO: 3053706 - DNA, 25 bp, Homo sapien
agagaaatgatcagatattctgatt

SEQ ID NO: 3053707 - DNA, 25 bp, Homo sapien
gacattgtagcagttagccttggtt

SEQ ID NO: 3053708 - DNA, 25 bp, Homo sapien
ttaaaatggatgctaaggtaatttc

SEQ ID NO: 3053709 - DNA, 25 bp, Homo sapien
aaaatggatgctaaggtaatttcca

SEQ ID NO: 3053710 - DNA, 25 bp, Homo sapien
ttgtagcagttagccttggttttta

SEQ ID NO: 3053711 - DNA, 25 bp, Homo sapien
gtcaaaccatttgtagatccacctg

SEQ ID NO: 3053712 - DNA, 25 bp, Homo sapien
tttgtgggtccagttgctgtcagcc

SEQ ID NO: 3053713 - DNA, 25 bp, Homo sapien
tccagctgctgtagccaaacctgca

SEQ ID NO: 3053714 - DNA, 25 bp, Homo sapien
tgccagccaacctgtggtgggtcca

SEQ ID NO: 3053715 - DNA, 25 bp, Homo sapien
ctggcatttggccataacagctgca

SEQ ID NO: 3053716 - DNA, 25 bp, Homo sapien
tggcatttggccataacagctgcag

SEQ ID NO: 3053717 - DNA, 25 bp, Homo sapien
ttctggcatttggccataacagctg

SEQ ID NO: 3053718 - DNA, 25 bp, Homo sapien
gcatttggccataacagctgcagct

SEQ ID NO: 3053719 - DNA, 25 bp, Homo sapien
ctctgaacaggagtgcaccctccac

SEQ ID NO: 3053720 - DNA, 25 bp, Homo sapien
tgctgccagcctacgacgtgctgca

SEQ ID NO: 3053721 - DNA, 25 bp, Homo sapien
cttgctgccagcctacgacgtgctg

SEQ ID NO: 3053722 - DNA, 25 bp, Homo sapien
agcctacgacgtgctgcaggaccac

SEQ ID NO: 3053723 - DNA, 25 bp, Homo sapien
tgccagcctacgacgtgctgcagga

SEQ ID NO: 3053724 - DNA, 25 bp, Homo sapien
acatcctgctgccaacctagctgct

SEQ ID NO: 3053725 - DNA, 25 bp, Homo sapien
ccccagttgctgcaacacatcctgc

SEQ ID NO: 3053726 - DNA, 25 bp, Homo sapien
tgctgccaacctagctgctgtgcac

SEQ ID NO: 3053727 - DNA, 25 bp, Homo sapien
cacccccccagttgctgcaacacat

SEQ ID NO: 3053728 - DNA, 25 bp, Homo sapien
gctgccagtacacctgtgtgacaag

SEQ ID NO: 3053729 - DNA, 25 bp, Homo sapien
tgcaggaccacttgctgccagtaca

SEQ ID NO: 3053730 - DNA, 25 bp, Homo sapien
tgccagtacacctgtgtgacaagct

SEQ ID NO: 3053731 - DNA, 25 bp, Homo sapien
caggaccacttgctgccagtacacc

SEQ ID NO: 3053732 - DNA, 25 bp, Homo sapien
ctgttacggccaaactggcagtggg

SEQ ID NO: 3053733 - DNA, 25 bp, Homo sapien
tacggccaaactggcagtgggtcca

SEQ ID NO: 3053734 - DNA, 25 bp, Homo sapien
tgttacggccaaactggcagtgggt

SEQ ID NO: 3053735 - DNA, 25 bp, Homo sapien
caaactggcagtgggtccagctgct

SEQ ID NO: 3053736 - DNA, 25 bp, Homo sapien
tgccagcccgcctgctgtgtgtcca

SEQ ID NO: 3053737 - DNA, 25 bp, Homo sapien
ctgctggaagcccaccactgtgacc

SEQ ID NO: 3053738 - DNA, 25 bp, Homo sapien
gccagccttgctgccgcccaacttg

SEQ ID NO: 3053739 - DNA, 25 bp, Homo sapien
tgctgcaggaccacctgctgcagga

SEQ ID NO: 3053740 - DNA, 25 bp, Homo sapien
tgtaggaccacctgctgccagccca

SEQ ID NO: 3053741 - DNA, 25 bp, Homo sapien
ctgctgtaggaccacctgctgccag

SEQ ID NO: 3053742 - DNA, 25 bp, Homo sapien
gtaggaccacctgctgccagcccac

SEQ ID NO: 3053743 - DNA, 25 bp, Homo sapien
gctgtaggaccacctgctgccagcc

SEQ ID NO: 3053744 - DNA, 25 bp, Homo sapien
gtgggtccagctgctgtggccaaac

SEQ ID NO: 3053745 - DNA, 25 bp, Homo sapien
agctgctgtggccaaaccagctgtg

SEQ ID NO: 3053746 - DNA, 25 bp, Homo sapien
gtggccaaaccagctgtgggtccag

SEQ ID NO: 3053747 - DNA, 25 bp, Homo sapien
ctgtggccaaaccagctgtgggtcc

SEQ ID NO: 3053748 - DNA, 25 bp, Homo sapien
cagagcagctcctgtgcacctgtgt

SEQ ID NO: 3053749 - DNA, 25 bp, Homo sapien
agagcagctcctgtgcacctgtgta

SEQ ID NO: 3053750 - DNA, 25 bp, Homo sapien
ggccagagcagctcctgtgcacctg

SEQ ID NO: 3053751 - DNA, 25 bp, Homo sapien
ctgtggccagagcagctcctgtgca

SEQ ID NO: 3053752 - DNA, 25 bp, Homo sapien
tgctgctgatcacgttccaagagaa

SEQ ID NO: 3053753 - DNA, 25 bp, Homo sapien
cttcttgctgctgatcacgttccaa

SEQ ID NO: 3053754 - DNA, 25 bp, Homo sapien
tgctgatcacgttccaagagaacca

SEQ ID NO: 3053755 - DNA, 25 bp, Homo sapien
gatcacgttccaagagaaccaccat

SEQ ID NO: 3053756 - DNA, 25 bp, Homo sapien
ccacccaacttgctgtcaaaacacc

SEQ ID NO: 3053757 - DNA, 25 bp, Homo sapien
acccaacttgctgtcaaaacacctg

SEQ ID NO: 3053758 - DNA, 25 bp, Homo sapien
cacccaacttgctgtcaaaacacct

SEQ ID NO: 3053759 - DNA, 25 bp, Homo sapien
cttgctgtcagcctacatgctgcag

SEQ ID NO: 3053760 - DNA, 25 bp, Homo sapien
cccttgctgtcagcctacatgctgc

SEQ ID NO: 3053761 - DNA, 25 bp, Homo sapien
gcccaacttgctgtcaaaacacctg

SEQ ID NO: 3053762 - DNA, 25 bp, Homo sapien
cgcccaacttgctgtcaaaacacct

SEQ ID NO: 3053763 - DNA, 25 bp, Homo sapien
ctgtgtgaccagctgctgccagcct

SEQ ID NO: 3053764 - DNA, 25 bp, Homo sapien
gccttcctgctgcagcacaccctgc

SEQ ID NO: 3053765 - DNA, 25 bp, Homo sapien
gtgtgaccagctgctgccagccttc

SEQ ID NO: 3053766 - DNA, 25 bp, Homo sapien
ctgcagcacaccctgctgccagccc

SEQ ID NO: 3053767 - DNA, 25 bp, Homo sapien
ctggttgcctcaaccagagctgtgg

SEQ ID NO: 3053768 - DNA, 25 bp, Homo sapien
tgtctgcctgcctggttgcctcaac

SEQ ID NO: 3053769 - DNA, 25 bp, Homo sapien
tgcctgcctggttgcctcaaccaga

SEQ ID NO: 3053770 - DNA, 25 bp, Homo sapien
tgcctggttgcctcaaccagagctg

SEQ ID NO: 3053771 - DNA, 25 bp, Homo sapien
tgtctgcctgcctggttgcctcaac

SEQ ID NO: 3053772 - DNA, 25 bp, Homo sapien
tgcctgcctggttgcctcaaccaga

SEQ ID NO: 3053773 - DNA, 25 bp, Homo sapien
ctggttgcctcaaccagagctgtgg

SEQ ID NO: 3053774 - DNA, 25 bp, Homo sapien
acccaacttgctgtcaaaacacctg

SEQ ID NO: 3053775 - DNA, 25 bp, Homo sapien
gtgggtccagctgctgtggccaaac

SEQ ID NO: 3053776 - DNA, 25 bp, Homo sapien
agctgctgtggccaaaccagctgtg

SEQ ID NO: 3053777 - DNA, 25 bp, Homo sapien
gtggccaaaccagctgtgggtccag

SEQ ID NO: 3053778 - DNA, 25 bp, Homo sapien
ctgtggccaaaccagctgtgggtcc

SEQ ID NO: 3053779 - DNA, 25 bp, Homo sapien
ttaagaaggatctcttcgtgcctgg

SEQ ID NO: 3053780 - DNA, 25 bp, Homo sapien
ctcttcgtgcctggacaagttccct

SEQ ID NO: 3053781 - DNA, 25 bp, Homo sapien
ggatctcttcgtgcctggacaagtt

SEQ ID NO: 3053782 - DNA, 25 bp, Homo sapien
gaaggatctcttcgtgcctggacaa

SEQ ID NO: 3053783 - DNA, 25 bp, Homo sapien
cactgacgggttgacatgaacttcc

SEQ ID NO: 3053784 - DNA, 25 bp, Homo sapien
cactactgggtgatgtgcctaaacc

SEQ ID NO: 3053785 - DNA, 25 bp, Homo sapien
aacacacaagtcgatggctggcagg

SEQ ID NO: 3053786 - DNA, 25 bp, Homo sapien
catgaagtcggcaagcaattggagc

SEQ ID NO: 3053787 - DNA, 25 bp, Homo sapien
cagcatcacagcagactgattggcc

SEQ ID NO: 3053788 - DNA, 25 bp, Homo sapien
catgagctaaccagacaaggagact

SEQ ID NO: 3053789 - DNA, 25 bp, Homo sapien
gattcctggcaggagctttgctggc

SEQ ID NO: 3053790 - DNA, 25 bp, Homo sapien
caagtagattccgagcaggatggct

SEQ ID NO: 3053791 - DNA, 25 bp, Homo sapien
ggctgacagctttcttggcatgtga

SEQ ID NO: 3053792 - DNA, 25 bp, Homo sapien
cgtgggagcacataggttggcaaac

SEQ ID NO: 3053793 - DNA, 25 bp, Homo sapien
tcttggcatgtgaccagttgccaca

SEQ ID NO: 3053794 - DNA, 25 bp, Homo sapien
cacacaagacgttgctggaaggcgg

SEQ ID NO: 3053795 - DNA, 25 bp, Homo sapien
caaacagagagcatgtcgaaatcca

SEQ ID NO: 3053796 - DNA, 25 bp, Homo sapien
gcaaacagagagcatgtcgaaatcc

SEQ ID NO: 3053797 - DNA, 25 bp, Homo sapien
aaacagagagcatgtcgaaatccac

SEQ ID NO: 3053798 - DNA, 25 bp, Homo sapien
ttccaggacaacagccgtctgccat

SEQ ID NO: 3053799 - DNA, 25 bp, Homo sapien
tttccaggacaacagccgtctgcca

SEQ ID NO: 3053800 - DNA, 25 bp, Homo sapien
ctgggaagttgcaagctcagtatac

SEQ ID NO: 3053801 - DNA, 25 bp, Homo sapien
tagtccttcactaggggtgttggca

SEQ ID NO: 3053802 - DNA, 25 bp, Homo sapien
ggaaagacatccgatacagaggggc

SEQ ID NO: 3053803 - DNA, 25 bp, Homo sapien
gaggggcttttatagtccttcacta

SEQ ID NO: 3053804 - DNA, 25 bp, Homo sapien
cactaggggtgttggcacgccatgc

SEQ ID NO: 3053805 - DNA, 25 bp, Homo sapien
cagttggcaggcttgctggcagcag

SEQ ID NO: 3053806 - DNA, 25 bp, Homo sapien
tagcagttggcaggcttgctggcag

SEQ ID NO: 3053807 - DNA, 25 bp, Homo sapien
ttagcagttggcaggcttgctggca

SEQ ID NO: 3053808 - DNA, 25 bp, Homo sapien
gcagttggcaggcttgctggcagca

SEQ ID NO: 3053809 - DNA, 25 bp, Homo sapien
tgcaatcccgtttgcaagagtcaga

SEQ ID NO: 3053810 - DNA, 25 bp, Homo sapien
tggaagtggattttttgcaatcccg

SEQ ID NO: 3053811 - DNA, 25 bp, Homo sapien
accttgcagggggttgtgtcaacac

SEQ ID NO: 3053812 - DNA, 25 bp, Homo sapien
agagtcagactcagtgcaagatggg

SEQ ID NO: 3053813 - DNA, 25 bp, Homo sapien
tccagagcagattgggcggcagatc

SEQ ID NO: 3053814 - DNA, 25 bp, Homo sapien
gctgcctataggtgaggagtccaga

SEQ ID NO: 3053815 - DNA, 25 bp, Homo sapien
aagtcctaggacaagttggtcggca

SEQ ID NO: 3053816 - DNA, 25 bp, Homo sapien
ggtaggaaatcgtagcactgcaagg

SEQ ID NO: 3053817 - DNA, 25 bp, Homo sapien
taggttggcatggactggacacaca

SEQ ID NO: 3053818 - DNA, 25 bp, Homo sapien
gagacacaacaagaaggctcttggc

SEQ ID NO: 3053819 - DNA, 25 bp, Homo sapien
gacagaaggacagcgcttgactaca

SEQ ID NO: 3053820 - DNA, 25 bp, Homo sapien
cagagcagatgggttggcagatact

SEQ ID NO: 3053821 - DNA, 25 bp, Homo sapien
agatgctagactctgagcaacttgg

SEQ ID NO: 3053822 - DNA, 25 bp, Homo sapien
ggctggcagatgctagactctgagc

SEQ ID NO: 3053823 - DNA, 25 bp, Homo sapien
atgctagactctgagcaacttggct

SEQ ID NO: 3053824 - DNA, 25 bp, Homo sapien
gctggctggcagatgctagactctg

SEQ ID NO: 3053825 - DNA, 25 bp, Homo sapien
gcaggtaggtgtcgggcacaccggc

SEQ ID NO: 3053826 - DNA, 25 bp, Homo sapien
cacaccggctgacagcaggaaggct

SEQ ID NO: 3053827 - DNA, 25 bp, Homo sapien
gggcacaccggctgacagcaggaag

SEQ ID NO: 3053828 - DNA, 25 bp, Homo sapien
aggtaggtgtcgggcacaccggctg

SEQ ID NO: 3053829 - DNA, 25 bp, Homo sapien
caagaaggctcacaaatagcaggct

SEQ ID NO: 3053830 - DNA, 25 bp, Homo sapien
gcaagaaggctcacaaatagcaggc

SEQ ID NO: 3053831 - DNA, 25 bp, Homo sapien
agaaggctcacaaatagcaggctca

SEQ ID NO: 3053832 - DNA, 25 bp, Homo sapien
gaaggctcacaaatagcaggctcac

SEQ ID NO: 3053833 - DNA, 25 bp, Homo sapien
aaacggtggcctcaaagcacacagg

SEQ ID NO: 3053834 - DNA, 25 bp, Homo sapien
gaacaagaaggctcacaaacggtgg

SEQ ID NO: 3053835 - DNA, 25 bp, Homo sapien
acagcacacgggttggcagccgctg

SEQ ID NO: 3053836 - DNA, 25 bp, Homo sapien
agcacagctgctcacggaacaagaa

SEQ ID NO: 3053837 - DNA, 25 bp, Homo sapien
ctgtcttgacaagtcaccagctgcc

SEQ ID NO: 3053838 - DNA, 25 bp, Homo sapien
gatgatccacagctgtcttgacaag

SEQ ID NO: 3053839 - DNA, 25 bp, Homo sapien
gacaggagggctgacggcactgtgg

SEQ ID NO: 3053840 - DNA, 25 bp, Homo sapien
cacagctgtcttgacaagtcaccag

SEQ ID NO: 3053841 - DNA, 25 bp, Homo sapien
ggtggctggcacggagaagcatttc

SEQ ID NO: 3053842 - DNA, 25 bp, Homo sapien
agaggtggctggcacggagaagcat

SEQ ID NO: 3053843 - DNA, 25 bp, Homo sapien
aggtggctggcacggagaagcattt

SEQ ID NO: 3053844 - DNA, 25 bp, Homo sapien
gaggtggctggcacggagaagcatt

SEQ ID NO: 3053845 - DNA, 25 bp, Homo sapien
tcatcaaagtcacatatcgccagct

SEQ ID NO: 3053846 - DNA, 25 bp, Homo sapien
aaagtcacatatcgccagcttagcc

SEQ ID NO: 3053847 - DNA, 25 bp, Homo sapien
acttcatcaaagtcacatatcgcca

SEQ ID NO: 3053848 - DNA, 25 bp, Homo sapien
tcaaagtcacatatcgccagcttag

SEQ ID NO: 3053849 - DNA, 25 bp, Homo sapien
ttaatgtttcatcagagtatggctc

SEQ ID NO: 3053850 - DNA, 25 bp, Homo sapien
gattcacccttgagcttgggatcac

SEQ ID NO: 3053851 - DNA, 25 bp, Homo sapien
gggcggaggatcagtcccaaagaca

SEQ ID NO: 3053852 - DNA, 25 bp, Homo sapien
ttaagaggctcacaaagaagatgga

SEQ ID NO: 3053853 - DNA, 25 bp, Homo sapien
tttgtgtcgcatataggtgtgggct

SEQ ID NO: 3053854 - DNA, 25 bp, Homo sapien
tcacagcagttttgctcctgggtgc

SEQ ID NO: 3053855 - DNA, 25 bp, Homo sapien
acagcaagacgatccgcagcagctg

SEQ ID NO: 3053856 - DNA, 25 bp, Homo sapien
ggacccacagcaactggatccacag

SEQ ID NO: 3053857 - DNA, 25 bp, Homo sapien
ggtccgggcccgtcagctcgcaggt

SEQ ID NO: 3053858 - DNA, 25 bp, Homo sapien
ggcccgtcagctcgcaggtcggtaa

SEQ ID NO: 3053859 - DNA, 25 bp, Homo sapien
ctcgcaggtcggtaacgcagccgga

SEQ ID NO: 3053860 - DNA, 25 bp, Homo sapien
tcagctcgcaggtcggtaacgcagc

SEQ ID NO: 3053861 - DNA, 25 bp, Homo sapien
ccacatcttcgcaggttggcgatgg

SEQ ID NO: 3053862 - DNA, 25 bp, Homo sapien
ggttggcgatggaccccatcttcca

SEQ ID NO: 3053863 - DNA, 25 bp, Homo sapien
ggcaacagccgaatgctctgttccc

SEQ ID NO: 3053864 - DNA, 25 bp, Homo sapien
cctggaaaggcagaccggcaacagc

SEQ ID NO: 3053865 - DNA, 25 bp, Homo sapien
ctgcttccagttggcttggacagca

SEQ ID NO: 3053866 - DNA, 25 bp, Homo sapien
tccccaaggctctgcgtggctttcc

SEQ ID NO: 3053867 - DNA, 25 bp, Homo sapien
acagcacggtgtgcagaaagtgatg

SEQ ID NO: 3053868 - DNA, 25 bp, Homo sapien
tgggactcgtcagcagagtcccagc

SEQ ID NO: 3053869 - DNA, 25 bp, Homo sapien
gacctccacttttagtgaaggcacc

SEQ ID NO: 3053870 - DNA, 25 bp, Homo sapien
tgaaggcaccttcctgtgtcgccaa

SEQ ID NO: 3053871 - DNA, 25 bp, Homo sapien
cacagatgggtcgatgaagcccaga

SEQ ID NO: 3053872 - DNA, 25 bp, Homo sapien
gaagcccaggactgaacggataccc

SEQ ID NO: 3053873 - DNA, 25 bp, Homo sapien
gaccatgaggcacttggtgagttta

SEQ ID NO: 3053874 - DNA, 25 bp, Homo sapien
tgcccagcaattccagccgacagtt

SEQ ID NO: 3053875 - DNA, 25 bp, Homo sapien
tccagaggatgttcccatccctctt

SEQ ID NO: 3053876 - DNA, 25 bp, Homo sapien
atggtcccctcgactcttccctaga

SEQ ID NO: 3053877 - DNA, 25 bp, Homo sapien
ccatgtactgggagttgggtttcct

SEQ ID NO: 3053878 - DNA, 25 bp, Homo sapien
gggacgtggggttctccatgtactg

SEQ ID NO: 3053879 - DNA, 25 bp, Homo sapien
gttctccatgtactgggagttgggt

SEQ ID NO: 3053880 - DNA, 25 bp, Homo sapien
tctccatgtactgggagttgggttt

SEQ ID NO: 3053881 - DNA, 25 bp, Homo sapien
cacccagtactctgcacttggggaa

SEQ ID NO: 3053882 - DNA, 25 bp, Homo sapien
tggacaccacccagtactctgcact

SEQ ID NO: 3053883 - DNA, 25 bp, Homo sapien
cagtgtgtccactgggaatgcagga

SEQ ID NO: 3053884 - DNA, 25 bp, Homo sapien
gagccctggacaccacccagtactc

SEQ ID NO: 3053885 - DNA, 25 bp, Homo sapien
ttcaaggttcagaggagtaagtcca

SEQ ID NO: 3053886 - DNA, 25 bp, Homo sapien
tgccttcaaggttcagaggagtaag

SEQ ID NO: 3053887 - DNA, 25 bp, Homo sapien
ccttcaaggttcagaggagtaagtc

SEQ ID NO: 3053888 - DNA, 25 bp, Homo sapien
caaggttcagaggagtaagtccacg

SEQ ID NO: 3053889 - DNA, 25 bp, Homo sapien
cacaagagagagacgtgagcacggc

SEQ ID NO: 3053890 - DNA, 25 bp, Homo sapien
tggtcccatcaaggccacaagagag

SEQ ID NO: 3053891 - DNA, 25 bp, Homo sapien
gagacgtgagcacggcatccctgca

SEQ ID NO: 3053892 - DNA, 25 bp, Homo sapien
cagccccagataccttggaagatcc

SEQ ID NO: 3053893 - DNA, 25 bp, Homo sapien
agtcccggcagccttgtgcgtgtgc

SEQ ID NO: 3053894 - DNA, 25 bp, Homo sapien
tgtactgggaccaagtcccggcagc

SEQ ID NO: 3053895 - DNA, 25 bp, Homo sapien
tgtgccctggaaggtagcctaggag

SEQ ID NO: 3053896 - DNA, 25 bp, Homo sapien
gggcactgtactgggaccaagtccc

SEQ ID NO: 3053897 - DNA, 25 bp, Homo sapien
tgagcaaaaccttttattctcaagg

SEQ ID NO: 3053898 - DNA, 25 bp, Homo sapien
agcaaaaccttttattctcaaggct

SEQ ID NO: 3053899 - DNA, 25 bp, Homo sapien
aatgagcaaaaccttttattctcaa

SEQ ID NO: 3053900 - DNA, 25 bp, Homo sapien
tgaaggactcaaatgagcaaaacct

SEQ ID NO: 3053901 - DNA, 25 bp, Homo sapien
acagcttcatttgtgccgctgcagg

SEQ ID NO: 3053902 - DNA, 25 bp, Homo sapien
ccaagctttagctcgtcgggatccc

SEQ ID NO: 3053903 - DNA, 25 bp, Homo sapien
agcttcatttgtgccgctgcaggaa

SEQ ID NO: 3053904 - DNA, 25 bp, Homo sapien
gtcgggatcccccacagcttcattt

SEQ ID NO: 3053905 - DNA, 25 bp, Homo sapien
ccagggttgatagaaaggtttctgc

SEQ ID NO: 3053906 - DNA, 25 bp, Homo sapien
cagtggaaggctagagctgacccct

SEQ ID NO: 3053907 - DNA, 25 bp, Homo sapien
gaagacagattttgcagccttatgc

SEQ ID NO: 3053908 - DNA, 25 bp, Homo sapien
cttatgctgaagaatcaagccaggg

SEQ ID NO: 3053909 - DNA, 25 bp, Homo sapien
tcacatgcattggttgtggcgcagg

SEQ ID NO: 3053910 - DNA, 25 bp, Homo sapien
tacagggcccagtggacttgtcaca

SEQ ID NO: 3053911 - DNA, 25 bp, Homo sapien
tagtacccaaatgtgttgcaaggcc

SEQ ID NO: 3053912 - DNA, 25 bp, Homo sapien
tgcaaggcccacaccgagcacgtag

SEQ ID NO: 3053913 - DNA, 25 bp, Homo sapien
tccaggtcactgcggatctccgcca

SEQ ID NO: 3053914 - DNA, 25 bp, Homo sapien
aggtcactgcggatctccgccagct

SEQ ID NO: 3053915 - DNA, 25 bp, Homo sapien
ctccaggtcactgcggatctccgcc

SEQ ID NO: 3053916 - DNA, 25 bp, Homo sapien
caggtcactgcggatctccgccagc

SEQ ID NO: 3053917 - DNA, 25 bp, Homo sapien
tccgcctggtaggactgcagctgct

SEQ ID NO: 3053918 - DNA, 25 bp, Homo sapien
tgatctccgcctggtaggactgcag

SEQ ID NO: 3053919 - DNA, 25 bp, Homo sapien
tctccgcctggtaggactgcagctg

SEQ ID NO: 3053920 - DNA, 25 bp, Homo sapien
gatctccgcctggtaggactgcagc

SEQ ID NO: 3053921 - DNA, 25 bp, Homo sapien
ggggagaaaggatcagaccctgcct

SEQ ID NO: 3053922 - DNA, 25 bp, Homo sapien
caaggggagaaaggatcagaccctg

SEQ ID NO: 3053923 - DNA, 25 bp, Homo sapien
gggagaaaggatcagaccctgcctc

SEQ ID NO: 3053924 - DNA, 25 bp, Homo sapien
aaggggagaaaggatcagaccctgc

SEQ ID NO: 3053925 - DNA, 25 bp, Homo sapien
acctccacgttgaggcggtctccaa

SEQ ID NO: 3053926 - DNA, 25 bp, Homo sapien
cttccctgcggttggtttccaccag

SEQ ID NO: 3053927 - DNA, 25 bp, Homo sapien
tgcgtggcgaaccattgctccactt

SEQ ID NO: 3053928 - DNA, 25 bp, Homo sapien
agggcctcatactgactcctggtct

SEQ ID NO: 3053929 - DNA, 25 bp, Homo sapien
cagctcatccaggatcctgcgcagg

SEQ ID NO: 3053930 - DNA, 25 bp, Homo sapien
ctcatggttctgcttgaggcacagc

SEQ ID NO: 3053931 - DNA, 25 bp, Homo sapien
aggccattgatgtccgactccacca

SEQ ID NO: 3053932 - DNA, 25 bp, Homo sapien
ccgcagggacagctcggtctcatat

SEQ ID NO: 3053933 - DNA, 25 bp, Homo sapien
attgtcgatctgcaccacaagcctg

SEQ ID NO: 3053934 - DNA, 25 bp, Homo sapien
gaggccagcttggcattgtcgatct

SEQ ID NO: 3053935 - DNA, 25 bp, Homo sapien
ggtcctgaagtcatctgaggccagc

SEQ ID NO: 3053936 - DNA, 25 bp, Homo sapien
gcattctcagacttgctgcacagga

SEQ ID NO: 3053937 - DNA, 25 bp, Homo sapien
agtaggactggtagctggcacacac

SEQ ID NO: 3053938 - DNA, 25 bp, Homo sapien
ggagcagctggtgcggcagctcagg

SEQ ID NO: 3053939 - DNA, 25 bp, Homo sapien
ctggggggcacacagggccgggagg

SEQ ID NO: 3053940 - DNA, 25 bp, Homo sapien
acacagggccgggaggagcagctgg

SEQ ID NO: 3053941 - DNA, 25 bp, Homo sapien
aggagcagctggtgcggcagctcag

SEQ ID NO: 3053942 - DNA, 25 bp, Homo sapien
gggagggagtgtccagctgaagaca

SEQ ID NO: 3053943 - DNA, 25 bp, Homo sapien
ggagggagtgtccagctgaagacag

SEQ ID NO: 3053944 - DNA, 25 bp, Homo sapien
ctcctctccaagctctctttttacc

SEQ ID NO: 3053945 - DNA, 25 bp, Homo sapien
caagctctctttttaccttgagcat

SEQ ID NO: 3053946 - DNA, 25 bp, Homo sapien
ccttcttcagacaggccgtcccttt

SEQ ID NO: 3053947 - DNA, 25 bp, Homo sapien
ttcttcagacaggccgtccctttct

SEQ ID NO: 3053948 - DNA, 25 bp, Homo sapien
ttttgtcacaagatgtaagatgagc

SEQ ID NO: 3053949 - DNA, 25 bp, Homo sapien
ctgttttgtcacaagatgtaagatg

SEQ ID NO: 3053950 - DNA, 25 bp, Homo sapien
tgtcacaagatgtaagatgagcctt

SEQ ID NO: 3053951 - DNA, 25 bp, Homo sapien
tgtaagatgagccttatttgatatc

SEQ ID NO: 3053952 - DNA, 25 bp, Homo sapien
gcagaactggcccaccgatggtagt

SEQ ID NO: 3053953 - DNA, 25 bp, Homo sapien
tcagactgactacaggagagggacc

SEQ ID NO: 3053954 - DNA, 25 bp, Homo sapien
ggaggatcaagtagccctaggctca

SEQ ID NO: 3053955 - DNA, 25 bp, Homo sapien
cagagtcagacccaaacgctgggca

SEQ ID NO: 3053956 - DNA, 25 bp, Homo sapien
cagcgggaacgaggaccacaaggat

SEQ ID NO: 3053957 - DNA, 25 bp, Homo sapien
aaaggtgttgcaaggcccacagcgg

SEQ ID NO: 3053958 - DNA, 25 bp, Homo sapien
caatgggcttttcacatgcattggt

SEQ ID NO: 3053959 - DNA, 25 bp, Homo sapien
gtgacacaggatccaatgggctttt

SEQ ID NO: 3053960 - DNA, 25 bp, Homo sapien
aggtcactgcggatctccgccagct

SEQ ID NO: 3053961 - DNA, 25 bp, Homo sapien
ctccaggtcactgcggatctccgcc

SEQ ID NO: 3053962 - DNA, 25 bp, Homo sapien
caggtcactgcggatctccgccagc

SEQ ID NO: 3053963 - DNA, 25 bp, Homo sapien
ccacgttggtgatcaggctctgcac

SEQ ID NO: 3053964 - DNA, 25 bp, Homo sapien
agctcgatctccagggcattgactg

SEQ ID NO: 3053965 - DNA, 25 bp, Homo sapien
gggagaaaggatcagaccctgcctc

SEQ ID NO: 3053966 - DNA, 25 bp, Homo sapien
ggggagaaaggatcagaccctgcct

SEQ ID NO: 3053967 - DNA, 25 bp, Homo sapien
caaggggagaaaggatcagaccctg

SEQ ID NO: 3053968 - DNA, 25 bp, Homo sapien
aaggggagaaaggatcagaccctgc

SEQ ID NO: 3053969 - DNA, 25 bp, Homo sapien
cttccctgcggttggtttccaccag

SEQ ID NO: 3053970 - DNA, 25 bp, Homo sapien
tgcgtggcgaaccattgctccactt

SEQ ID NO: 3053971 - DNA, 25 bp, Homo sapien
gctccacttccctgcggttggtttc

SEQ ID NO: 3053972 - DNA, 25 bp, Homo sapien
acctccacgttgaggcggtctccaa

SEQ ID NO: 3053973 - DNA, 25 bp, Homo sapien
ggctgttgatgtcggactccaccag

SEQ ID NO: 3053974 - DNA, 25 bp, Homo sapien
tcctgcgcaggctgttgatgtcgga

SEQ ID NO: 3053975 - DNA, 25 bp, Homo sapien
ctcatccagaatcctgcgcaggctg

SEQ ID NO: 3053976 - DNA, 25 bp, Homo sapien
tcatggttctgcttgagggacagca

SEQ ID NO: 3053977 - DNA, 25 bp, Homo sapien
attgtcgatctgcaccaccagcctg

SEQ ID NO: 3053978 - DNA, 25 bp, Homo sapien
accagcctggcattctcagacttgc

SEQ ID NO: 3053979 - DNA, 25 bp, Homo sapien
ttgtcgatctgcaccaccagcctgg

SEQ ID NO: 3053980 - DNA, 25 bp, Homo sapien
cattctcagacttgctgcacaggat

SEQ ID NO: 3053981 - DNA, 25 bp, Homo sapien
attaagctggcagtgtggtgcccac

SEQ ID NO: 3053982 - DNA, 25 bp, Homo sapien
tatagataagtagttcattaagctg

SEQ ID NO: 3053983 - DNA, 25 bp, Homo sapien
tcattaagctggcagtgtggtgccc

SEQ ID NO: 3053984 - DNA, 25 bp, Homo sapien
tcaaatatagataagtagttcatta

SEQ ID NO: 3053985 - DNA, 25 bp, Homo sapien
ctgctgctgagaccgctcccggatg

SEQ ID NO: 3053986 - DNA, 25 bp, Homo sapien
cagaaccagttgcagttgctcacat

SEQ ID NO: 3053987 - DNA, 25 bp, Homo sapien
gaaccagttgcagttgctcacattg

SEQ ID NO: 3053988 - DNA, 25 bp, Homo sapien
gaccgctcccggatgaggttctcca

SEQ ID NO: 3053989 - DNA, 25 bp, Homo sapien
cacacagggccgggaggagcagctg

SEQ ID NO: 3053990 - DNA, 25 bp, Homo sapien
ctggggggcacacagggccgggagg

SEQ ID NO: 3053991 - DNA, 25 bp, Homo sapien
ggagcagctggtgcggcagctcagg

SEQ ID NO: 3053992 - DNA, 25 bp, Homo sapien
ctgggcaggcagaagttgtagggca

SEQ ID NO: 3053993 - DNA, 25 bp, Homo sapien
agctctggaagtcagtttcaaaacc

SEQ ID NO: 3053994 - DNA, 25 bp, Homo sapien
ggagctctggaagtcagtttcaaaa

SEQ ID NO: 3053995 - DNA, 25 bp, Homo sapien
gtggagctctggaagtcagtttcaa

SEQ ID NO: 3053996 - DNA, 25 bp, Homo sapien
gcagtggagctctggaagtcagttt

SEQ ID NO: 3053997 - DNA, 25 bp, Homo sapien
tgcttaaccacggagtggacatagg

SEQ ID NO: 3053998 - DNA, 25 bp, Homo sapien
taaccacggagtggacataggatgg

SEQ ID NO: 3053999 - DNA, 25 bp, Homo sapien
gcgatgcttaaccacggagtggaca

SEQ ID NO: 3054000 - DNA, 25 bp, Homo sapien
cagcgatgcttaaccacggagtgga

SEQ ID NO: 3054001 - DNA, 25 bp, Homo sapien
tgcagtagtacgttcaggaaacacc

SEQ ID NO: 3054002 - DNA, 25 bp, Homo sapien
taacatagaggcaagatgaggtttc

SEQ ID NO: 3054003 - DNA, 25 bp, Homo sapien
gaagtaaatgaagtctcctccttgc

SEQ ID NO: 3054004 - DNA, 25 bp, Homo sapien
ggctcgaccctcaacaggaaggagt

SEQ ID NO: 3054005 - DNA, 25 bp, Homo sapien
cctgtggttgatctaaatggctttg

SEQ ID NO: 3054006 - DNA, 25 bp, Homo sapien
tgtcttcaaagaggatacaagcttt

SEQ ID NO: 3054007 - DNA, 25 bp, Homo sapien
ttgtagatgtcttcaaagaggatac

SEQ ID NO: 3054008 - DNA, 25 bp, Homo sapien
tcctgtggttgatctaaatggcttt

SEQ ID NO: 3054009 - DNA, 25 bp, Homo sapien
attacagcaacccttttgagaggtg

SEQ ID NO: 3054010 - DNA, 25 bp, Homo sapien
tccacaggagttgccactagcattg

SEQ ID NO: 3054011 - DNA, 25 bp, Homo sapien
ggtccacaggagttgccactagcat

SEQ ID NO: 3054012 - DNA, 25 bp, Homo sapien
ccttttgagaggtgccacagggtcc

SEQ ID NO: 3054013 - DNA, 25 bp, Homo sapien
ccacgttggtgatcaggctctgcac

SEQ ID NO: 3054014 - DNA, 25 bp, Homo sapien
actgtgcgtctcagctcgatgatct

SEQ ID NO: 3054015 - DNA, 25 bp, Homo sapien
gcagctcgatctccagggcgttgac

SEQ ID NO: 3054016 - DNA, 25 bp, Homo sapien
tgctctgagctggataccacctgct

SEQ ID NO: 3054017 - DNA, 25 bp, Homo sapien
agctcgatgatctccgcctggcagg

SEQ ID NO: 3054018 - DNA, 25 bp, Homo sapien
cacccaagtggggaaaggatcagac

SEQ ID NO: 3054019 - DNA, 25 bp, Homo sapien
gggaaaggatcagaccctgtctcca

SEQ ID NO: 3054020 - DNA, 25 bp, Homo sapien
aacacccaagtggggaaaggatcag

SEQ ID NO: 3054021 - DNA, 25 bp, Homo sapien
aagtggggaaaggatcagaccctgt

SEQ ID NO: 3054022 - DNA, 25 bp, Homo sapien
gcctcatactgactcctggtctcgt

SEQ ID NO: 3054023 - DNA, 25 bp, Homo sapien
tccacctccacgttgaggcggtctc

SEQ ID NO: 3054024 - DNA, 25 bp, Homo sapien
tgcgtggcgaaccattgctccactt

SEQ ID NO: 3054025 - DNA, 25 bp, Homo sapien
cacgttgaggcggtctccaagctgg

SEQ ID NO: 3054026 - DNA, 25 bp, Homo sapien
ccagggaaatgagcacaatactgcc

SEQ ID NO: 3054027 - DNA, 25 bp, Homo sapien
gaacctacggcaatggatctgccat

SEQ ID NO: 3054028 - DNA, 25 bp, Homo sapien
gaaacaatgaacctacggcaatgga

SEQ ID NO: 3054029 - DNA, 25 bp, Homo sapien
cacaatactgcccaaaaagcactaa

SEQ ID NO: 3054030 - DNA, 25 bp, Homo sapien
catcaattgctgtcccatggaagat

SEQ ID NO: 3054031 - DNA, 25 bp, Homo sapien
gggatcacatcaattgctgtcccat

SEQ ID NO: 3054032 - DNA, 25 bp, Homo sapien
tgcccagaaagcactaaaaggggcc

SEQ ID NO: 3054033 - DNA, 25 bp, Homo sapien
cacatcaattgctgtcccatggaag

SEQ ID NO: 3054034 - DNA, 25 bp, Homo sapien
atccaggatcctgcgtatgctgttg

SEQ ID NO: 3054035 - DNA, 25 bp, Homo sapien
tgttgatgtccgactccaccaacag

SEQ ID NO: 3054036 - DNA, 25 bp, Homo sapien
caggatcctgcgtatgctgttgatg

SEQ ID NO: 3054037 - DNA, 25 bp, Homo sapien
atcctgcgtatgctgttgatgtccg

SEQ ID NO: 3054038 - DNA, 25 bp, Homo sapien
cttctgaagtcgtcagaggccagct

SEQ ID NO: 3054039 - DNA, 25 bp, Homo sapien
tgcttctgaagtcgtcagaggccag

SEQ ID NO: 3054040 - DNA, 25 bp, Homo sapien
ttctgaagtcgtcagaggccagctt

SEQ ID NO: 3054041 - DNA, 25 bp, Homo sapien
cttggcattgtcaatgttcaccacc

SEQ ID NO: 3054042 - DNA, 25 bp, Homo sapien
gctgggaccgctcctggatgagttt

SEQ ID NO: 3054043 - DNA, 25 bp, Homo sapien
ctgctgggaccgctcctggatgagt

SEQ ID NO: 3054044 - DNA, 25 bp, Homo sapien
ggaccgctcctggatgagtttctcc

SEQ ID NO: 3054045 - DNA, 25 bp, Homo sapien
tgggaccgctcctggatgagtttct

SEQ ID NO: 3054046 - DNA, 25 bp, Homo sapien
gggggcacgcagggccgggaggagc

SEQ ID NO: 3054047 - DNA, 25 bp, Homo sapien
tggggggcacgcagggccgggagga

SEQ ID NO: 3054048 - DNA, 25 bp, Homo sapien
gggcacgcagggccgggaggagcag

SEQ ID NO: 3054049 - DNA, 25 bp, Homo sapien
ctggggggcacgcagggccgggagg

SEQ ID NO: 3054050 - DNA, 25 bp, Homo sapien
tgtgggcaggtttgagtctctcctt

SEQ ID NO: 3054051 - DNA, 25 bp, Homo sapien
gatgtgggcaggtttgagtctctcc

SEQ ID NO: 3054052 - DNA, 25 bp, Homo sapien
tataccattaattgtgggtgggggc

SEQ ID NO: 3054053 - DNA, 25 bp, Homo sapien
cctctgcagtccttttataccatta

SEQ ID NO: 3054054 - DNA, 25 bp, Homo sapien
aaacgaaaattggagcaagggtgct

SEQ ID NO: 3054055 - DNA, 25 bp, Homo sapien
caagaaacgaaaattggagcaaggg

SEQ ID NO: 3054056 - DNA, 25 bp, Homo sapien
tgctcagaggtatctttgtatccat

SEQ ID NO: 3054057 - DNA, 25 bp, Homo sapien
agggtgctcagaggtatctttgtat

SEQ ID NO: 3054058 - DNA, 25 bp, Homo sapien
gaggcccactggcacatcagagagt

SEQ ID NO: 3054059 - DNA, 25 bp, Homo sapien
gagcaggacagtctggagtagttgg

SEQ ID NO: 3054060 - DNA, 25 bp, Homo sapien
gagtttcttggctgccttacgcggg

SEQ ID NO: 3054061 - DNA, 25 bp, Homo sapien
agagttctctgggtgagcataggaa

SEQ ID NO: 3054062 - DNA, 25 bp, Homo sapien
gagagacagggtccgatgggcttgc

SEQ ID NO: 3054063 - DNA, 25 bp, Homo sapien
cttgctgcacgcgttggtcgtggca

SEQ ID NO: 3054064 - DNA, 25 bp, Homo sapien
ctagcgcacgaaggaattgcagggc

SEQ ID NO: 3054065 - DNA, 25 bp, Homo sapien
acacaagaggtacagggattggaga

SEQ ID NO: 3054066 - DNA, 25 bp, Homo sapien
ctccaggtcactgcggatctccgcc

SEQ ID NO: 3054067 - DNA, 25 bp, Homo sapien
ccacgttggtgatcaggctctgcac

SEQ ID NO: 3054068 - DNA, 25 bp, Homo sapien
tccgcctggtaggactgcagctgct

SEQ ID NO: 3054069 - DNA, 25 bp, Homo sapien
tgatctccgcctggtaggactgcag

SEQ ID NO: 3054070 - DNA, 25 bp, Homo sapien
gatctccgcctggtaggactgcagc

SEQ ID NO: 3054071 - DNA, 25 bp, Homo sapien
tctccgcctggtaggactgcagctg

SEQ ID NO: 3054072 - DNA, 25 bp, Homo sapien
gggagaaaggatcagaccctgcctc

SEQ ID NO: 3054073 - DNA, 25 bp, Homo sapien
caaggggagaaaggatcagaccctg

SEQ ID NO: 3054074 - DNA, 25 bp, Homo sapien
ggggagaaaggatcagaccctgcct

SEQ ID NO: 3054075 - DNA, 25 bp, Homo sapien
aaggggagaaaggatcagaccctgc

SEQ ID NO: 3054076 - DNA, 25 bp, Homo sapien
cagcacccgattcaggtccacagtg

SEQ ID NO: 3054077 - DNA, 25 bp, Homo sapien
gttcagcacccgattcaggtccaca

SEQ ID NO: 3054078 - DNA, 25 bp, Homo sapien
ggtctcgttcagcacccgattcagg

SEQ ID NO: 3054079 - DNA, 25 bp, Homo sapien
tctcgttcagcacccgattcaggtc

SEQ ID NO: 3054080 - DNA, 25 bp, Homo sapien
ctgagacaggtttgtgcatttctca

SEQ ID NO: 3054081 - DNA, 25 bp, Homo sapien
tgagacaggtttgtgcatttctcat

SEQ ID NO: 3054082 - DNA, 25 bp, Homo sapien
gagacaggtttgtgcatttctcatt

SEQ ID NO: 3054083 - DNA, 25 bp, Homo sapien
ccgcagggacagctcggtctggtac

SEQ ID NO: 3054084 - DNA, 25 bp, Homo sapien
ctgcgcagaccgttgatgtccgact

SEQ ID NO: 3054085 - DNA, 25 bp, Homo sapien
tcatggttgctcttgaggcagagca

SEQ ID NO: 3054086 - DNA, 25 bp, Homo sapien
catccaggatcctgcgcagaccgtt

SEQ ID NO: 3054087 - DNA, 25 bp, Homo sapien
cagagtactacctggtagatcttca

SEQ ID NO: 3054088 - DNA, 25 bp, Homo sapien
cacaggaatgatttttgataacctc

SEQ ID NO: 3054089 - DNA, 25 bp, Homo sapien
aacctcatgtgccttatctttccac

SEQ ID NO: 3054090 - DNA, 25 bp, Homo sapien
tagatcttcaagactcacaggaatg

SEQ ID NO: 3054091 - DNA, 25 bp, Homo sapien
gaaatcatccgcagccagcttggcg

SEQ ID NO: 3054092 - DNA, 25 bp, Homo sapien
cagcttggcgttgtcgatctgcacc

SEQ ID NO: 3054093 - DNA, 25 bp, Homo sapien
cattctcagacttggtacacaggat

SEQ ID NO: 3054094 - DNA, 25 bp, Homo sapien
ttggttctgaaatcatccgcagcca

SEQ ID NO: 3054095 - DNA, 25 bp, Homo sapien
agaggtggcttagtgaggactgaaa

SEQ ID NO: 3054096 - DNA, 25 bp, Homo sapien
agcaaactctcttgcttggagatga

SEQ ID NO: 3054097 - DNA, 25 bp, Homo sapien
tggagatgacagcaatgccgctcac

SEQ ID NO: 3054098 - DNA, 25 bp, Homo sapien
ctctcttgcttggagatgacagcaa

SEQ ID NO: 3054099 - DNA, 25 bp, Homo sapien
tgcttggagatgacagcaatgccgc

SEQ ID NO: 3054100 - DNA, 25 bp, Homo sapien
gaaccagttgcagttgctcacattg

SEQ ID NO: 3054101 - DNA, 25 bp, Homo sapien
ctgctgctgagaccgctcccggatg

SEQ ID NO: 3054102 - DNA, 25 bp, Homo sapien
cagaaccagttgcagttgctcacat

SEQ ID NO: 3054103 - DNA, 25 bp, Homo sapien
gaccgctcccggatgaggttctcca

SEQ ID NO: 3054104 - DNA, 25 bp, Homo sapien
tggggggcacgcagggccgggagga

SEQ ID NO: 3054105 - DNA, 25 bp, Homo sapien
gcacgcagggccgggaggagcagct

SEQ ID NO: 3054106 - DNA, 25 bp, Homo sapien
ggagcagctggtgcggcagctcagg

SEQ ID NO: 3054107 - DNA, 25 bp, Homo sapien
ctgggcaggcagaagttgtagggca

SEQ ID NO: 3054108 - DNA, 25 bp, Homo sapien
ggagggagtgcctggctgaagacag

SEQ ID NO: 3054109 - DNA, 25 bp, Homo sapien
aagacagagtctaaattctccaagc

SEQ ID NO: 3054110 - DNA, 25 bp, Homo sapien
agacagagtctaaattctccaagcc

SEQ ID NO: 3054111 - DNA, 25 bp, Homo sapien
gaggctacacagtccagcccaagta

SEQ ID NO: 3054112 - DNA, 25 bp, Homo sapien
tgtgtcacataattctgcaggccca

SEQ ID NO: 3054113 - DNA, 25 bp, Homo sapien
tgctaagtcaggactcctccgcaga

SEQ ID NO: 3054114 - DNA, 25 bp, Homo sapien
gagttctgtggtaggccttcaaaga

SEQ ID NO: 3054115 - DNA, 25 bp, Homo sapien
ccgtcatggtgcaagaataagtggg

SEQ ID NO: 3054116 - DNA, 25 bp, Homo sapien
aattaagactaatcgagatggctct

SEQ ID NO: 3054117 - DNA, 25 bp, Homo sapien
cagctgggtcaggtactaaattaag

SEQ ID NO: 3054118 - DNA, 25 bp, Homo sapien
gacaatgcttgcctgtgccgtcatg

SEQ ID NO: 3054119 - DNA, 25 bp, Homo sapien
cactggaggacatatcaggacggca

SEQ ID NO: 3054120 - DNA, 25 bp, Homo sapien
gagggtctagctagtcaagggctca

SEQ ID NO: 3054121 - DNA, 25 bp, Homo sapien
gaaaggctctatcctgatctgatgg

SEQ ID NO: 3054122 - DNA, 25 bp, Homo sapien
gaatcacctgcaagtcatgctaaag

SEQ ID NO: 3054123 - DNA, 25 bp, Homo sapien
ttgacatagacaacagggtacgtac

SEQ ID NO: 3054124 - DNA, 25 bp, Homo sapien
tccttttaggtcattcccaagagaa

SEQ ID NO: 3054125 - DNA, 25 bp, Homo sapien
tctgtttttgcacacggtgttgaca

SEQ ID NO: 3054126 - DNA, 25 bp, Homo sapien
ggtcattcccaagagaagttatctg

SEQ ID NO: 3054127 - DNA, 25 bp, Homo sapien
gacagctgttcctccacattgttga

SEQ ID NO: 3054128 - DNA, 25 bp, Homo sapien
aaggttccggtatgtggcaatctca

SEQ ID NO: 3054129 - DNA, 25 bp, Homo sapien
tctgtgcggtagcggtcctcggctt

SEQ ID NO: 3054130 - DNA, 25 bp, Homo sapien
tcacacagggagttctgtagacagt

SEQ ID NO: 3054131 - DNA, 25 bp, Homo sapien
tcaccgagcgtctcaactccaggat

SEQ ID NO: 3054132 - DNA, 25 bp, Homo sapien
ccagggcgttcaccgagcgtctcaa

SEQ ID NO: 3054133 - DNA, 25 bp, Homo sapien
gagcgtctcaactccaggatctctg

SEQ ID NO: 3054134 - DNA, 25 bp, Homo sapien
gtctcaactccaggatctctgactg

SEQ ID NO: 3054135 - DNA, 25 bp, Homo sapien
gaaagtctcaatgcatcacaccaag

SEQ ID NO: 3054136 - DNA, 25 bp, Homo sapien
cagaaagtctcaatgcatcacacca

SEQ ID NO: 3054137 - DNA, 25 bp, Homo sapien
agtctcaatgcatcacaccaagggt

SEQ ID NO: 3054138 - DNA, 25 bp, Homo sapien
ctccagaaagtctcaatgcatcaca

SEQ ID NO: 3054139 - DNA, 25 bp, Homo sapien
gtgaggttgtctagcaccctgcgca

SEQ ID NO: 3054140 - DNA, 25 bp, Homo sapien
ttgcagcgagcgctctctctcgtac

SEQ ID NO: 3054141 - DNA, 25 bp, Homo sapien
cacacttggcgagggtgaggttgtc

SEQ ID NO: 3054142 - DNA, 25 bp, Homo sapien
agcctccaccagctgttgcagcgag

SEQ ID NO: 3054143 - DNA, 25 bp, Homo sapien
ctattgttctccgatttggtgcaca

SEQ ID NO: 3054144 - DNA, 25 bp, Homo sapien
attgttctccgatttggtgcacaga

SEQ ID NO: 3054145 - DNA, 25 bp, Homo sapien
tgttctccgatttggtgcacagaat

SEQ ID NO: 3054146 - DNA, 25 bp, Homo sapien
gcctattgttctccgatttggtgca

SEQ ID NO: 3054147 - DNA, 25 bp, Homo sapien
agtttcggcacacgctggactcgtg

SEQ ID NO: 3054148 - DNA, 25 bp, Homo sapien
agtaggactggtagtttcggcacac

SEQ ID NO: 3054149 - DNA, 25 bp, Homo sapien
ggactggtagtttcggcacacgctg

SEQ ID NO: 3054150 - DNA, 25 bp, Homo sapien
tggtagtttcggcacacgctggact

SEQ ID NO: 3054151 - DNA, 25 bp, Homo sapien
caggtagttggccaggcggtcgttt

SEQ ID NO: 3054152 - DNA, 25 bp, Homo sapien
tagttggccaggcggtcgtttagga

SEQ ID NO: 3054153 - DNA, 25 bp, Homo sapien
ccaggcggtcgtttaggaactgcat

SEQ ID NO: 3054154 - DNA, 25 bp, Homo sapien
tggccaggcggtcgtttaggaactg

SEQ ID NO: 3054155 - DNA, 25 bp, Homo sapien
cgtggccgttcagggtgttttcgcg

SEQ ID NO: 3054156 - DNA, 25 bp, Homo sapien
tcgtggccgttcagggtgttttcgc

SEQ ID NO: 3054157 - DNA, 25 bp, Homo sapien
ctcgtggccgttcagggtgttttcg

SEQ ID NO: 3054158 - DNA, 25 bp, Homo sapien
gactcgattggcatgtgccacatta

SEQ ID NO: 3054159 - DNA, 25 bp, Homo sapien
gcatgtgccacattagccaagaggc

SEQ ID NO: 3054160 - DNA, 25 bp, Homo sapien
gcagcgttggcctctgaaacctgcc

SEQ ID NO: 3054161 - DNA, 25 bp, Homo sapien
agcgttggcctctgaaacctgcccg

SEQ ID NO: 3054162 - DNA, 25 bp, Homo sapien
ctgaggagggaactgcaatggtcag

SEQ ID NO: 3054163 - DNA, 25 bp, Homo sapien
gggaactgcaatggtcagaagtcat

SEQ ID NO: 3054164 - DNA, 25 bp, Homo sapien
gagggaactgcaatggtcagaagtc

SEQ ID NO: 3054165 - DNA, 25 bp, Homo sapien
gaggagggaactgcaatggtcagaa

SEQ ID NO: 3054166 - DNA, 25 bp, Homo sapien
tttaatgcagggaacccagttacat

SEQ ID NO: 3054167 - DNA, 25 bp, Homo sapien
aatacagcttagaggcataggcagg

SEQ ID NO: 3054168 - DNA, 25 bp, Homo sapien
aaataattgctttcatggaagataa

SEQ ID NO: 3054169 - DNA, 25 bp, Homo sapien
taggcagggagccactccttggaag

SEQ ID NO: 3054170 - DNA, 25 bp, Homo sapien
aggaagactgggcaaggtgagggca

SEQ ID NO: 3054171 - DNA, 25 bp, Homo sapien
aagactgggcaaggtgagggcactc

SEQ ID NO: 3054172 - DNA, 25 bp, Homo sapien
ctcctaactcgggccttcagaatca

SEQ ID NO: 3054173 - DNA, 25 bp, Homo sapien
accccagtgcaaccagcctcaatct

SEQ ID NO: 3054174 - DNA, 25 bp, Homo sapien
tgacagggccacagcttggacaaga

SEQ ID NO: 3054175 - DNA, 25 bp, Homo sapien
gaggcaggcgtggaacagggattgc

SEQ ID NO: 3054176 - DNA, 25 bp, Homo sapien
gtacaggaggcaggcgtggaacagg

SEQ ID NO: 3054177 - DNA, 25 bp, Homo sapien
gcttggacaagaagtacaggaggca

SEQ ID NO: 3054178 - DNA, 25 bp, Homo sapien
ctcgttctccaaccgggccttcacg

SEQ ID NO: 3054179 - DNA, 25 bp, Homo sapien
ggtatgtggcaatctcgttctccaa

SEQ ID NO: 3054180 - DNA, 25 bp, Homo sapien
tctcgttctccaaccgggccttcac

SEQ ID NO: 3054181 - DNA, 25 bp, Homo sapien
atctcgttctccaaccgggccttca

SEQ ID NO: 3054182 - DNA, 25 bp, Homo sapien
agctcctcggagcaggacatggcct

SEQ ID NO: 3054183 - DNA, 25 bp, Homo sapien
tccagggcattcaccgtgcatctca

SEQ ID NO: 3054184 - DNA, 25 bp, Homo sapien
tggcctgcaggctgatgccttcaga

SEQ ID NO: 3054185 - DNA, 25 bp, Homo sapien
aggatctccgactggcagcactgca

SEQ ID NO: 3054186 - DNA, 25 bp, Homo sapien
caccctgttcaggtcaatggtgggc

SEQ ID NO: 3054187 - DNA, 25 bp, Homo sapien
tgttcaggtcaatggtgggctcaat

SEQ ID NO: 3054188 - DNA, 25 bp, Homo sapien
caggtcaatggtgggctcaatgtcc

SEQ ID NO: 3054189 - DNA, 25 bp, Homo sapien
tcaatggtgggctcaatgtccagct

SEQ ID NO: 3054190 - DNA, 25 bp, Homo sapien
cggccttggccagggtcgcgtcatc

SEQ ID NO: 3054191 - DNA, 25 bp, Homo sapien
accagctggtgaagggagcgctcac

SEQ ID NO: 3054192 - DNA, 25 bp, Homo sapien
agggtcgcgtcatccaggagcttct

SEQ ID NO: 3054193 - DNA, 25 bp, Homo sapien
gagcttctgcgtcccgcacttgtcc

SEQ ID NO: 3054194 - DNA, 25 bp, Homo sapien
cagcagccagcttcgcgttgtcaat

SEQ ID NO: 3054195 - DNA, 25 bp, Homo sapien
agcagccagcttcgcgttgtcaatt

SEQ ID NO: 3054196 - DNA, 25 bp, Homo sapien
tcagcagccagcttcgcgttgtcaa

SEQ ID NO: 3054197 - DNA, 25 bp, Homo sapien
gctcctcgattgtacggaagtagga

SEQ ID NO: 3054198 - DNA, 25 bp, Homo sapien
gctggagctcctcgattgtacggaa

SEQ ID NO: 3054199 - DNA, 25 bp, Homo sapien
tggagctcctcgattgtacggaagt

SEQ ID NO: 3054200 - DNA, 25 bp, Homo sapien
gagctcctcgattgtacggaagtag

SEQ ID NO: 3054201 - DNA, 25 bp, Homo sapien
ggactcgtggcacttgctcctctcg

SEQ ID NO: 3054202 - DNA, 25 bp, Homo sapien
tggccaggcggtcattcaggaactt

SEQ ID NO: 3054203 - DNA, 25 bp, Homo sapien
ttctccaggtagttggccaggcggt

SEQ ID NO: 3054204 - DNA, 25 bp, Homo sapien
cttctccaggtagttggccaggcgg

SEQ ID NO: 3054205 - DNA, 25 bp, Homo sapien
ccaggcggtcattcaggaacttcat

SEQ ID NO: 3054206 - DNA, 25 bp, Homo sapien
ttggccaagaggcacatggaggcag

SEQ ID NO: 3054207 - DNA, 25 bp, Homo sapien
caacatcgataggagagacaaagac

SEQ ID NO: 3054208 - DNA, 25 bp, Homo sapien
cattcagggtgtttttgccgtaggc

SEQ ID NO: 3054209 - DNA, 25 bp, Homo sapien
cacaggctggcacccaacatcgata

SEQ ID NO: 3054210 - DNA, 25 bp, Homo sapien
gaagttcctcagctcattaaagcaa

SEQ ID NO: 3054211 - DNA, 25 bp, Homo sapien
catatcaggttagctgttggtggga

SEQ ID NO: 3054212 - DNA, 25 bp, Homo sapien
acaccagcagttgattcaggcccca

SEQ ID NO: 3054213 - DNA, 25 bp, Homo sapien
cagagactcactgtttctgctcaac

SEQ ID NO: 3054214 - DNA, 25 bp, Homo sapien
cagatattctgagccaccatgggtg

SEQ ID NO: 3054215 - DNA, 25 bp, Homo sapien
tgcaatccagccactgagggcatag

SEQ ID NO: 3054216 - DNA, 25 bp, Homo sapien
tggacaggcctatacatacagaaag

SEQ ID NO: 3054217 - DNA, 25 bp, Homo sapien
ggaacatttccgctgacctgaacat

SEQ ID NO: 3054218 - DNA, 25 bp, Homo sapien
gagacgtggagcacggattgcaggg

SEQ ID NO: 3054219 - DNA, 25 bp, Homo sapien
acagggggcagtcacgcaggaggga

SEQ ID NO: 3054220 - DNA, 25 bp, Homo sapien
atcggcttccggtggtgctggctcc

SEQ ID NO: 3054221 - DNA, 25 bp, Homo sapien
tcagaatcggcttccggtggtgctg

SEQ ID NO: 3054222 - DNA, 25 bp, Homo sapien
tcctcggcttcacacagggagttct

SEQ ID NO: 3054223 - DNA, 25 bp, Homo sapien
aaaatgctactaggccatggcacgg

SEQ ID NO: 3054224 - DNA, 25 bp, Homo sapien
acggggcatttgcagtgcagtgaga

SEQ ID NO: 3054225 - DNA, 25 bp, Homo sapien
ggcatttgcagtgcagtgagagtga

SEQ ID NO: 3054226 - DNA, 25 bp, Homo sapien
gccccaagggaaactgctacatgcc

SEQ ID NO: 3054227 - DNA, 25 bp, Homo sapien
cacctccagggcattcaccgtgcat

SEQ ID NO: 3054228 - DNA, 25 bp, Homo sapien
gctccaggatctccgactggcagca

SEQ ID NO: 3054229 - DNA, 25 bp, Homo sapien
gtgtgctgggcttggcgctccacct

SEQ ID NO: 3054230 - DNA, 25 bp, Homo sapien
agggcattcaccgtgcatctcagct

SEQ ID NO: 3054231 - DNA, 25 bp, Homo sapien
cagctcctcggagcaggacatgtcc

SEQ ID NO: 3054232 - DNA, 25 bp, Homo sapien
gcagctcctcggagcaggacatgtc

SEQ ID NO: 3054233 - DNA, 25 bp, Homo sapien
gctcctcggagcaggacatgtcctg

SEQ ID NO: 3054234 - DNA, 25 bp, Homo sapien
cctcggagcaggacatgtcctgcag

SEQ ID NO: 3054235 - DNA, 25 bp, Homo sapien
caccctgttcaggtcaatggtgggc

SEQ ID NO: 3054236 - DNA, 25 bp, Homo sapien
caggtcaatggtgggctcaatgtcc

SEQ ID NO: 3054237 - DNA, 25 bp, Homo sapien
tgttcaggtcaatggtgggctcaat

SEQ ID NO: 3054238 - DNA, 25 bp, Homo sapien
tcaatggtgggctcaatgtccagct

SEQ ID NO: 3054239 - DNA, 25 bp, Homo sapien
tcgtggttgctcttgagggagagct

SEQ ID NO: 3054240 - DNA, 25 bp, Homo sapien
agctggcgcagggagcgctcactct

SEQ ID NO: 3054241 - DNA, 25 bp, Homo sapien
gagcttctgtgtcccacacttgtct

SEQ ID NO: 3054242 - DNA, 25 bp, Homo sapien
tggccagggtcgcatcatccaggag

SEQ ID NO: 3054243 - DNA, 25 bp, Homo sapien
gcattctcggccttgctgcacagga

SEQ ID NO: 3054244 - DNA, 25 bp, Homo sapien
agcttggcattgtcaatttgtacaa

SEQ ID NO: 3054245 - DNA, 25 bp, Homo sapien
tacaatcagcctggcattctcggcc

SEQ ID NO: 3054246 - DNA, 25 bp, Homo sapien
gatcctaaagtcatcggcagccagc

SEQ ID NO: 3054247 - DNA, 25 bp, Homo sapien
ctgttggagctcctcgatggtgtgg

SEQ ID NO: 3054248 - DNA, 25 bp, Homo sapien
tctgttggagctcctcgatggtgtg

SEQ ID NO: 3054249 - DNA, 25 bp, Homo sapien
ttctgttggagctcctcgatggtgt

SEQ ID NO: 3054250 - DNA, 25 bp, Homo sapien
ggactcgtggcacttgctcctctcg

SEQ ID NO: 3054251 - DNA, 25 bp, Homo sapien
cggtggactcgtggcacttgctcct

SEQ ID NO: 3054252 - DNA, 25 bp, Homo sapien
ctcgtggcacttgctcctctcgagg

SEQ ID NO: 3054253 - DNA, 25 bp, Homo sapien
ggcacacggtggactcgtggcactt

SEQ ID NO: 3054254 - DNA, 25 bp, Homo sapien
ttctccaggtagttggccaggcggt

SEQ ID NO: 3054255 - DNA, 25 bp, Homo sapien
tggccaggcggtcattcaggaactg

SEQ ID NO: 3054256 - DNA, 25 bp, Homo sapien
cttctccaggtagttggccaggcgg

SEQ ID NO: 3054257 - DNA, 25 bp, Homo sapien
ccaggcggtcattcaggaactgcat

SEQ ID NO: 3054258 - DNA, 25 bp, Homo sapien
ttcagggtgttttcaccataggccc

SEQ ID NO: 3054259 - DNA, 25 bp, Homo sapien
cattcagggtgttttcaccataggc

SEQ ID NO: 3054260 - DNA, 25 bp, Homo sapien
gttttcaccataggccccacagatt

SEQ ID NO: 3054261 - DNA, 25 bp, Homo sapien
gggtgttttcaccataggccccaca

SEQ ID NO: 3054262 - DNA, 25 bp, Homo sapien
caggctggcacccaatgtcgatggg

SEQ ID NO: 3054263 - DNA, 25 bp, Homo sapien
gggacaagcagtgtggcaggtaggc

SEQ ID NO: 3054264 - DNA, 25 bp, Homo sapien
agtgtggcaggtaggcggcagacag

SEQ ID NO: 3054265 - DNA, 25 bp, Homo sapien
acccaatgtcgatgggagagacaga

SEQ ID NO: 3054266 - DNA, 25 bp, Homo sapien
cttagaccttgactgggtttggcct

SEQ ID NO: 3054267 - DNA, 25 bp, Homo sapien
gagacacaaactttcctgttggtca

SEQ ID NO: 3054268 - DNA, 25 bp, Homo sapien
gaatgttgacgaatctgaggcctct

SEQ ID NO: 3054269 - DNA, 25 bp, Homo sapien
gtttctcagctcgttaaaggaatgt

SEQ ID NO: 3054270 - DNA, 25 bp, Homo sapien
gttgggccctgatatccagctgctc

SEQ ID NO: 3054271 - DNA, 25 bp, Homo sapien
ccctccagttgggccctgatatcca

SEQ ID NO: 3054272 - DNA, 25 bp, Homo sapien
gatctcaccctccagttgggccctg

SEQ ID NO: 3054273 - DNA, 25 bp, Homo sapien
ccagttgggccctgatatccagctg

SEQ ID NO: 3054274 - DNA, 25 bp, Homo sapien
tcttctacactgctgatgaggctct

SEQ ID NO: 3054275 - DNA, 25 bp, Homo sapien
ctaactcttggacagctgctcttct

SEQ ID NO: 3054276 - DNA, 25 bp, Homo sapien
tgggccagctccatgccgtagtggt

SEQ ID NO: 3054277 - DNA, 25 bp, Homo sapien
catgccgtagtggtcctcagcttca

SEQ ID NO: 3054278 - DNA, 25 bp, Homo sapien
gggtgttcaccgagcagctcagctc

SEQ ID NO: 3054279 - DNA, 25 bp, Homo sapien
ggtgttcaccgagcagctcagctcc

SEQ ID NO: 3054280 - DNA, 25 bp, Homo sapien
agggtgttcaccgagcagctcagct

SEQ ID NO: 3054281 - DNA, 25 bp, Homo sapien
tgttcaccgagcagctcagctccag

SEQ ID NO: 3054282 - DNA, 25 bp, Homo sapien
gacatggcctgcaggctgatgcctt

SEQ ID NO: 3054283 - DNA, 25 bp, Homo sapien
tggcctgcaggctgatgccttcaga

SEQ ID NO: 3054284 - DNA, 25 bp, Homo sapien
tagagcaggacatggcctgcaggct

SEQ ID NO: 3054285 - DNA, 25 bp, Homo sapien
atggcctgcaggctgatgccttcag

SEQ ID NO: 3054286 - DNA, 25 bp, Homo sapien
gttgggcccttgacatcacagttta

SEQ ID NO: 3054287 - DNA, 25 bp, Homo sapien
agtcctctcattgcagacatcagca

SEQ ID NO: 3054288 - DNA, 25 bp, Homo sapien
ggcccttgacatcacagtttatttc

SEQ ID NO: 3054289 - DNA, 25 bp, Homo sapien
tagaaccaagtggttgggcccttga

SEQ ID NO: 3054290 - DNA, 25 bp, Homo sapien
gctgctgaggatgtcttcactgaac

SEQ ID NO: 3054291 - DNA, 25 bp, Homo sapien
gtcttcactgaaccagccacaggtg

SEQ ID NO: 3054292 - DNA, 25 bp, Homo sapien
tgctgctgaggatgtcttcactgaa

SEQ ID NO: 3054293 - DNA, 25 bp, Homo sapien
ctgctgaggatgtcttcactgaacc

SEQ ID NO: 3054294 - DNA, 25 bp, Homo sapien
tagcagaggagggtactcctggccc

SEQ ID NO: 3054295 - DNA, 25 bp, Homo sapien
tcacttctagcagaggagggtactc

SEQ ID NO: 3054296 - DNA, 25 bp, Homo sapien
ttctagcagaggagggtactcctgg

SEQ ID NO: 3054297 - DNA, 25 bp, Homo sapien
gatgatgggcctcacttctagcaga

SEQ ID NO: 3054298 - DNA, 25 bp, Homo sapien
acctctcaagcctctatggaagcag

SEQ ID NO: 3054299 - DNA, 25 bp, Homo sapien
taaatacagaatttgcccacgttcc

SEQ ID NO: 3054300 - DNA, 25 bp, Homo sapien
gatgcagcagcgtaagtgacaaaca

SEQ ID NO: 3054301 - DNA, 25 bp, Homo sapien
gcatgcgggcccttttagtgaacac

SEQ ID NO: 3054302 - DNA, 25 bp, Homo sapien
gcaaggccactgagtacagctctat

SEQ ID NO: 3054303 - DNA, 25 bp, Homo sapien
aggtgatccacggtcctgctcaggg

SEQ ID NO: 3054304 - DNA, 25 bp, Homo sapien
tatcccctggagtatcagagcttgt

SEQ ID NO: 3054305 - DNA, 25 bp, Homo sapien
tgaggcagcacagacaaccagaaac

SEQ ID NO: 3054306 - DNA, 25 bp, Homo sapien
tgctcttctggtggccactgaatac

SEQ ID NO: 3054307 - DNA, 25 bp, Homo sapien
cctccaggatccactggcacaaagg

SEQ ID NO: 3054308 - DNA, 25 bp, Homo sapien
tggccactgaataccaggctgccca

SEQ ID NO: 3054309 - DNA, 25 bp, Homo sapien
ccaggatccactggcacaaagggac

SEQ ID NO: 3054310 - DNA, 25 bp, Homo sapien
aggcatgccaacagtgcgtggcaca

SEQ ID NO: 3054311 - DNA, 25 bp, Homo sapien
ggcacgcatggggagggcacacagg

SEQ ID NO: 3054312 - DNA, 25 bp, Homo sapien
tgcggggcacgcatggggagggcac

SEQ ID NO: 3054313 - DNA, 25 bp, Homo sapien
caaggcatgccaacagtgcgtggca

SEQ ID NO: 3054314 - DNA, 25 bp, Homo sapien
ctaagcctcagctgggcctgcgtac

SEQ ID NO: 3054315 - DNA, 25 bp, Homo sapien
gctccggtacgtgttgatctcgccc

SEQ ID NO: 3054316 - DNA, 25 bp, Homo sapien
tgatcatgcactgcatctgggccag

SEQ ID NO: 3054317 - DNA, 25 bp, Homo sapien
gggcctcaacgttggtgatcatgca

SEQ ID NO: 3054318 - DNA, 25 bp, Homo sapien
tgtagcgggcctcactctccgtcag

SEQ ID NO: 3054319 - DNA, 25 bp, Homo sapien
gccacctgttggttaagctcctcca

SEQ ID NO: 3054320 - DNA, 25 bp, Homo sapien
tcgatctccagcgtgttgaccgtgc

SEQ ID NO: 3054321 - DNA, 25 bp, Homo sapien
gaccgtgcgtctcaggtcaatgatg

SEQ ID NO: 3054322 - DNA, 25 bp, Homo sapien
gcgtctcaggtcaatgatgtctgac

SEQ ID NO: 3054323 - DNA, 25 bp, Homo sapien
cagttgggggaaggagaaggctaga

SEQ ID NO: 3054324 - DNA, 25 bp, Homo sapien
ggaaggagaaggctagagtcccttc

SEQ ID NO: 3054325 - DNA, 25 bp, Homo sapien
tgggggaaggagaaggctagagtcc

SEQ ID NO: 3054326 - DNA, 25 bp, Homo sapien
tgcagttgggggaaggagaaggcta

SEQ ID NO: 3054327 - DNA, 25 bp, Homo sapien
gcatattgaaccattcctccacgtc

SEQ ID NO: 3054328 - DNA, 25 bp, Homo sapien
tgcagcgtccacctcgatgttaagg

SEQ ID NO: 3054329 - DNA, 25 bp, Homo sapien
cctcgatgttaaggcggtccccaag

SEQ ID NO: 3054330 - DNA, 25 bp, Homo sapien
gctggcatcgaagggaaccgacttc

SEQ ID NO: 3054331 - DNA, 25 bp, Homo sapien
ggcccgagttagggcagctgcctcc

SEQ ID NO: 3054332 - DNA, 25 bp, Homo sapien
ttaaaggcccgagttagggcagctg

SEQ ID NO: 3054333 - DNA, 25 bp, Homo sapien
taaaggcccgagttagggcagctgc

SEQ ID NO: 3054334 - DNA, 25 bp, Homo sapien
aaggcccgagttagggcagctgcct

SEQ ID NO: 3054335 - DNA, 25 bp, Homo sapien
tccttcagggactcaacctgggcct

SEQ ID NO: 3054336 - DNA, 25 bp, Homo sapien
cagagtgagatcatccaggatcctg

SEQ ID NO: 3054337 - DNA, 25 bp, Homo sapien
tcatggttctttttgaggcacatca

SEQ ID NO: 3054338 - DNA, 25 bp, Homo sapien
caggtcagccttgcacagagtgaga

SEQ ID NO: 3054339 - DNA, 25 bp, Homo sapien
ctcagggaaggccttaaactgccgg

SEQ ID NO: 3054340 - DNA, 25 bp, Homo sapien
cagcaaccaagggtgaaacagaatg

SEQ ID NO: 3054341 - DNA, 25 bp, Homo sapien
gccttaaactgccggcactttccaa

SEQ ID NO: 3054342 - DNA, 25 bp, Homo sapien
tcagcaaccaagggtgaaacagaat

SEQ ID NO: 3054343 - DNA, 25 bp, Homo sapien
agccagtttggcattatcaatgttc

SEQ ID NO: 3054344 - DNA, 25 bp, Homo sapien
ttgaaggccccttcgctgtaccagc

SEQ ID NO: 3054345 - DNA, 25 bp, Homo sapien
catggagccggagatgccactggct

SEQ ID NO: 3054346 - DNA, 25 bp, Homo sapien
ggtcctgaaatgagactggtagtca

SEQ ID NO: 3054347 - DNA, 25 bp, Homo sapien
ctggcaggaactggatagataggtt

SEQ ID NO: 3054348 - DNA, 25 bp, Homo sapien
cttgcaagttgttggtgacacagca

SEQ ID NO: 3054349 - DNA, 25 bp, Homo sapien
gggcagctcttgagagaggcttgca

SEQ ID NO: 3054350 - DNA, 25 bp, Homo sapien
ggcttgcaagttgttggtgacacag

SEQ ID NO: 3054351 - DNA, 25 bp, Homo sapien
caagttgttggtgacacagcaggag

SEQ ID NO: 3054352 - DNA, 25 bp, Homo sapien
cagctacctggatgtctacagaccc

SEQ ID NO: 3054353 - DNA, 25 bp, Homo sapien
agctacctggatgtctacagacccc

SEQ ID NO: 3054354 - DNA, 25 bp, Homo sapien
gctacctggatgtctacagacccca

SEQ ID NO: 3054355 - DNA, 25 bp, Homo sapien
tctgagaaactttagggcatgtatt

SEQ ID NO: 3054356 - DNA, 25 bp, Homo sapien
ggcacccattgaaatgatgaggagt

SEQ ID NO: 3054357 - DNA, 25 bp, Homo sapien
agaatccaccggaacagcacctaga

SEQ ID NO: 3054358 - DNA, 25 bp, Homo sapien
aaagccctctactgcatttcagaat

SEQ ID NO: 3054359 - DNA, 25 bp, Homo sapien
agttcaagccctggagacaatagcc

SEQ ID NO: 3054360 - DNA, 25 bp, Homo sapien
tctgcgcgaagagaggggattgggc

SEQ ID NO: 3054361 - DNA, 25 bp, Homo sapien
gccaagttcaagccctggagacaat

SEQ ID NO: 3054362 - DNA, 25 bp, Homo sapien
caagccctggagacaatagccatgg

SEQ ID NO: 3054363 - DNA, 25 bp, Homo sapien
gctgcagtttgtgcgggctgcacta

SEQ ID NO: 3054364 - DNA, 25 bp, Homo sapien
ttgtgcgggctgcactaggaccgca

SEQ ID NO: 3054365 - DNA, 25 bp, Homo sapien
tagtcaggtgcacatgggttacagg

SEQ ID NO: 3054366 - DNA, 25 bp, Homo sapien
cttggagggtgagtagtcaggtgca

SEQ ID NO: 3054367 - DNA, 25 bp, Homo sapien
agctatagcgggcctccgtctctgc

SEQ ID NO: 3054368 - DNA, 25 bp, Homo sapien
ctgggagctatagcgggcctccgtc

SEQ ID NO: 3054369 - DNA, 25 bp, Homo sapien
ggagctatagcgggcctccgtctct

SEQ ID NO: 3054370 - DNA, 25 bp, Homo sapien
ctatagcgggcctccgtctctgcca

SEQ ID NO: 3054371 - DNA, 25 bp, Homo sapien
tgcctggcaggactgcaactgctct

SEQ ID NO: 3054372 - DNA, 25 bp, Homo sapien
tgcgtctcagctcgatgatctctgc

SEQ ID NO: 3054373 - DNA, 25 bp, Homo sapien
gctcgatgatctctgcctggcagga

SEQ ID NO: 3054374 - DNA, 25 bp, Homo sapien
tcaatctccagggcgttgaccgtgc

SEQ ID NO: 3054375 - DNA, 25 bp, Homo sapien
tggacaccacctgctggttcagctc

SEQ ID NO: 3054376 - DNA, 25 bp, Homo sapien
ctggacaccacctgctggttcagct

SEQ ID NO: 3054377 - DNA, 25 bp, Homo sapien
ctgttgcactgactgtttccaggta

SEQ ID NO: 3054378 - DNA, 25 bp, Homo sapien
gcactgactgtttccaggtacctac

SEQ ID NO: 3054379 - DNA, 25 bp, Homo sapien
gttgcactgactgtttccaggtacc

SEQ ID NO: 3054380 - DNA, 25 bp, Homo sapien
ccctgttgcactgactgtttccagg

SEQ ID NO: 3054381 - DNA, 25 bp, Homo sapien
cagaactcggttcaggtcaacaggt

SEQ ID NO: 3054382 - DNA, 25 bp, Homo sapien
cagtcttcagcatcccggcggttat

SEQ ID NO: 3054383 - DNA, 25 bp, Homo sapien
accaagttggcagcgcagtgagttc

SEQ ID NO: 3054384 - DNA, 25 bp, Homo sapien
gcggttattctccaccagggtttca

SEQ ID NO: 3054385 - DNA, 25 bp, Homo sapien
gcagctcctccttcagggactccac

SEQ ID NO: 3054386 - DNA, 25 bp, Homo sapien
gagcagctcctccttcagggactcc

SEQ ID NO: 3054387 - DNA, 25 bp, Homo sapien
catggttcttcttcaggcagagcag

SEQ ID NO: 3054388 - DNA, 25 bp, Homo sapien
ctcctcatggttcttcttcaggcag

SEQ ID NO: 3054389 - DNA, 25 bp, Homo sapien
ggccgttgatgtctgactccaccag

SEQ ID NO: 3054390 - DNA, 25 bp, Homo sapien
catccaggatcctgcgcaggccgtt

SEQ ID NO: 3054391 - DNA, 25 bp, Homo sapien
cttgcacagggtcaggtcatccagg

SEQ ID NO: 3054392 - DNA, 25 bp, Homo sapien
agctgccgcagggacacctccgtct

SEQ ID NO: 3054393 - DNA, 25 bp, Homo sapien
cattgtcaatctccaccaccagcct

SEQ ID NO: 3054394 - DNA, 25 bp, Homo sapien
ccaccagcctggcattctcagcctt

SEQ ID NO: 3054395 - DNA, 25 bp, Homo sapien
gtcatctgcagccaatttggcattg

SEQ ID NO: 3054396 - DNA, 25 bp, Homo sapien
cattctcagccttgctgcatagagt

SEQ ID NO: 3054397 - DNA, 25 bp, Homo sapien
ggactggtagtcagggcacatgtag

SEQ ID NO: 3054398 - DNA, 25 bp, Homo sapien
tcagggcacatgtaggggacctgct

SEQ ID NO: 3054399 - DNA, 25 bp, Homo sapien
tcacaccactcacggatgcggctct

SEQ ID NO: 3054400 - DNA, 25 bp, Homo sapien
acaccactcacggatgcggctctcc

SEQ ID NO: 3054401 - DNA, 25 bp, Homo sapien
tgccagtgaggatgccctccccaaa

SEQ ID NO: 3054402 - DNA, 25 bp, Homo sapien
ctcattgccagtgaggatgccctcc

SEQ ID NO: 3054403 - DNA, 25 bp, Homo sapien
tctccttctcattgccagtgaggat

SEQ ID NO: 3054404 - DNA, 25 bp, Homo sapien
ttctcattgccagtgaggatgccct

SEQ ID NO: 3054405 - DNA, 25 bp, Homo sapien
gacttggaagcttgcaagagctgct

SEQ ID NO: 3054406 - DNA, 25 bp, Homo sapien
cccagacccactgagcaggcagaga

SEQ ID NO: 3054407 - DNA, 25 bp, Homo sapien
gagagacttggaagcttgcaagagc

SEQ ID NO: 3054408 - DNA, 25 bp, Homo sapien
gcttgcaagagctgctggagtacat

SEQ ID NO: 3054409 - DNA, 25 bp, Homo sapien
gagagacccagaagagaagccggcc

SEQ ID NO: 3054410 - DNA, 25 bp, Homo sapien
agacccagaagagaagccggccttg

SEQ ID NO: 3054411 - DNA, 25 bp, Homo sapien
acccagaagagaagccggccttgag

SEQ ID NO: 3054412 - DNA, 25 bp, Homo sapien
gagacccagaagagaagccggcctt

SEQ ID NO: 3054413 - DNA, 25 bp, Homo sapien
gatgcaattgataggtctctgaggc

SEQ ID NO: 3054414 - DNA, 25 bp, Homo sapien
ggcccctgcaactcagatgcaattg

SEQ ID NO: 3054415 - DNA, 25 bp, Homo sapien
caaagggacctgtcatttgagccca

SEQ ID NO: 3054416 - DNA, 25 bp, Homo sapien
aataggagccccattactatgtcaa

SEQ ID NO: 3054417 - DNA, 25 bp, Homo sapien
ttttgcatggcgtaaaagcacagtt

SEQ ID NO: 3054418 - DNA, 25 bp, Homo sapien
cagttaagtccggaaacacaatacg

SEQ ID NO: 3054419 - DNA, 25 bp, Homo sapien
tccaggaaacctggttttgcatggc

SEQ ID NO: 3054420 - DNA, 25 bp, Homo sapien
gaagggcagggtcgttaagcctcca

SEQ ID NO: 3054421 - DNA, 25 bp, Homo sapien
acagcgggcgggactgcacgtgctc

SEQ ID NO: 3054422 - DNA, 25 bp, Homo sapien
cttgcatgccgtggcacaaggttgg

SEQ ID NO: 3054423 - DNA, 25 bp, Homo sapien
gaaggaactctaataacaggcttgc

SEQ ID NO: 3054424 - DNA, 25 bp, Homo sapien
tgatggtgcggatctgagtgccaac

SEQ ID NO: 3054425 - DNA, 25 bp, Homo sapien
agccgggccttgacgtccagtaaca

SEQ ID NO: 3054426 - DNA, 25 bp, Homo sapien
tggcggtaggtagcgatctcgccct

SEQ ID NO: 3054427 - DNA, 25 bp, Homo sapien
ttgacgtccagtaacacctggtact

SEQ ID NO: 3054428 - DNA, 25 bp, Homo sapien
ggccagggtggattccaaggaattc

SEQ ID NO: 3054429 - DNA, 25 bp, Homo sapien
gccgtggccagcgacgcaggcaggg

SEQ ID NO: 3054430 - DNA, 25 bp, Homo sapien
acaggccgtggccagcgacgcaggc

SEQ ID NO: 3054431 - DNA, 25 bp, Homo sapien
tgcacgctgaggctggtgcgtcggg

SEQ ID NO: 3054432 - DNA, 25 bp, Homo sapien
cccatgagagcctgcacgctgaggc

SEQ ID NO: 3054433 - DNA, 25 bp, Homo sapien
ctagcgcgttgaccgtacgtctcag

SEQ ID NO: 3054434 - DNA, 25 bp, Homo sapien
tctagcgcgttgaccgtacgtctca

SEQ ID NO: 3054435 - DNA, 25 bp, Homo sapien
tagcgcgttgaccgtacgtctcagc

SEQ ID NO: 3054436 - DNA, 25 bp, Homo sapien
cattcagtcggtccccaagttggca

SEQ ID NO: 3054437 - DNA, 25 bp, Homo sapien
accagggcctcgtactggcatctca

SEQ ID NO: 3054438 - DNA, 25 bp, Homo sapien
caggatcttgttgagatccactggg

SEQ ID NO: 3054439 - DNA, 25 bp, Homo sapien
ctctgcggttattctccaccagggc

SEQ ID NO: 3054440 - DNA, 25 bp, Homo sapien
ctcgtgattcttcttgaggcacatc

SEQ ID NO: 3054441 - DNA, 25 bp, Homo sapien
cgtgattcttcttgaggcacatcag

SEQ ID NO: 3054442 - DNA, 25 bp, Homo sapien
ctcctcgtgattcttcttgaggcac

SEQ ID NO: 3054443 - DNA, 25 bp, Homo sapien
tcctcgtgattcttcttgaggcaca

SEQ ID NO: 3054444 - DNA, 25 bp, Homo sapien
ctgcacacacagaaccctgccaagt

SEQ ID NO: 3054445 - DNA, 25 bp, Homo sapien
ggcattctcagacttagtcagcagg

SEQ ID NO: 3054446 - DNA, 25 bp, Homo sapien
cattctcagacttagtcagcaggat

SEQ ID NO: 3054447 - DNA, 25 bp, Homo sapien
gcattctcagacttagtcagcagga

SEQ ID NO: 3054448 - DNA, 25 bp, Homo sapien
ggtccggaagtcgtcagcagccagc

SEQ ID NO: 3054449 - DNA, 25 bp, Homo sapien
tcagctggaaaggggccaggtctcc

SEQ ID NO: 3054450 - DNA, 25 bp, Homo sapien
cagctggaaaggggccaggtctccc

SEQ ID NO: 3054451 - DNA, 25 bp, Homo sapien
gctggaaaggggccaggtctccctc

SEQ ID NO: 3054452 - DNA, 25 bp, Homo sapien
tggaaaggggccaggtctccctcac

SEQ ID NO: 3054453 - DNA, 25 bp, Homo sapien
tctgctggaaatcttcgatggtctt

SEQ ID NO: 3054454 - DNA, 25 bp, Homo sapien
gtaggagccaggcaagcagctccca

SEQ ID NO: 3054455 - DNA, 25 bp, Homo sapien
tagtctgggcagatgtatgggatct

SEQ ID NO: 3054456 - DNA, 25 bp, Homo sapien
gatctgaaactcgtaccactcctgg

SEQ ID NO: 3054457 - DNA, 25 bp, Homo sapien
taccctgcagcaccggcgagactgg

SEQ ID NO: 3054458 - DNA, 25 bp, Homo sapien
gagcccacagaacggatggaggaca

SEQ ID NO: 3054459 - DNA, 25 bp, Homo sapien
tgccacagaggcccttgatagaccc

SEQ ID NO: 3054460 - DNA, 25 bp, Homo sapien
tagcagaagagatgtaccctgcagc

SEQ ID NO: 3054461 - DNA, 25 bp, Homo sapien
gagcaggtgaccagctcgtcaaagg

SEQ ID NO: 3054462 - DNA, 25 bp, Homo sapien
gagccgggactcagcgagaactaag

SEQ ID NO: 3054463 - DNA, 25 bp, Homo sapien
agaggaatgtaccttccctggagca

SEQ ID NO: 3054464 - DNA, 25 bp, Homo sapien
ggtgaccagctcgtcaaaggtaaaa

SEQ ID NO: 3054465 - DNA, 25 bp, Homo sapien
agagaggagagagatccgaccggaa

SEQ ID NO: 3054466 - DNA, 25 bp, Homo sapien
aaagcgtatccaggtcagagaggag

SEQ ID NO: 3054467 - DNA, 25 bp, Homo sapien
aagcgtatccaggtcagagaggaga

SEQ ID NO: 3054468 - DNA, 25 bp, Homo sapien
gatccgaccggaagagaagagcaca

SEQ ID NO: 3054469 - DNA, 25 bp, Homo sapien
ctctgggtgctgaagacagagggag

SEQ ID NO: 3054470 - DNA, 25 bp, Homo sapien
cagagggaggggacgccaggcagat

SEQ ID NO: 3054471 - DNA, 25 bp, Homo sapien
tgaagacagagggaggggacgccag

SEQ ID NO: 3054472 - DNA, 25 bp, Homo sapien
tgctgaagacagagggaggggacgc

SEQ ID NO: 3054473 - DNA, 25 bp, Homo sapien
gaggcactagaagtcgtggtaacag

SEQ ID NO: 3054474 - DNA, 25 bp, Homo sapien
aagtgcggcgaccagaggcattaga

SEQ ID NO: 3054475 - DNA, 25 bp, Homo sapien
cattagaggtggtggtaacagaggc

SEQ ID NO: 3054476 - DNA, 25 bp, Homo sapien
ttaaggcctacggacatcagaagtg

SEQ ID NO: 3054477 - DNA, 25 bp, Homo sapien
ctcattagtcaggtggtgcgtggat

SEQ ID NO: 3054478 - DNA, 25 bp, Homo sapien
agtgagcgaatgaccacttccaccc

SEQ ID NO: 3054479 - DNA, 25 bp, Homo sapien
ggaaaatcagtgagcgaatgaccac

SEQ ID NO: 3054480 - DNA, 25 bp, Homo sapien
cccctccctacactggagagcccag

SEQ ID NO: 3054481 - DNA, 25 bp, Homo sapien
tgctgaggaagggaaaccaatcatc

SEQ ID NO: 3054482 - DNA, 25 bp, Homo sapien
ctgctgaggaagggaaaccaatcat

SEQ ID NO: 3054483 - DNA, 25 bp, Homo sapien
tgagcagagggtaactgagggcagg

SEQ ID NO: 3054484 - DNA, 25 bp, Homo sapien
cagagggtaactgagggcaggtgct

SEQ ID NO: 3054485 - DNA, 25 bp, Homo sapien
gccatgagcagagggtaactgaggg

SEQ ID NO: 3054486 - DNA, 25 bp, Homo sapien
agcagagggtaactgagggcaggtg

SEQ ID NO: 3054487 - DNA, 25 bp, Homo sapien
ttgtcttccctctggatcgcccaaa

SEQ ID NO: 3054488 - DNA, 25 bp, Homo sapien
gtctaaaggcagttaaagcaccata

SEQ ID NO: 3054489 - DNA, 25 bp, Homo sapien
aagtgcctcggcttatcatttcaag

SEQ ID NO: 3054490 - DNA, 25 bp, Homo sapien
caagattcagggtgtttgtcttccc

SEQ ID NO: 3054491 - DNA, 25 bp, Homo sapien
gtcactatcctaagaaagaggctgg

SEQ ID NO: 3054492 - DNA, 25 bp, Homo sapien
ttaaaggtgttaaccctgcagccta

SEQ ID NO: 3054493 - DNA, 25 bp, Homo sapien
gcagcctaccaaggaaatgtccccg

SEQ ID NO: 3054494 - DNA, 25 bp, Homo sapien
tgaggggtctcctctctgacatgag

SEQ ID NO: 3054495 - DNA, 25 bp, Homo sapien
atctcactgcggagctcgctcagct

SEQ ID NO: 3054496 - DNA, 25 bp, Homo sapien
tcactgcggagctcgctcagctggg

SEQ ID NO: 3054497 - DNA, 25 bp, Homo sapien
ttggttctggcactccatctcactg

SEQ ID NO: 3054498 - DNA, 25 bp, Homo sapien
tggcactccatctcactgcggagct

SEQ ID NO: 3054499 - DNA, 25 bp, Homo sapien
agctgcagggcatagcggcactccg

SEQ ID NO: 3054500 - DNA, 25 bp, Homo sapien
gctgcagggcatagcggcactccgt

SEQ ID NO: 3054501 - DNA, 25 bp, Homo sapien
gcagctgcagggcatagcggcactc

SEQ ID NO: 3054502 - DNA, 25 bp, Homo sapien
tgcagggcatagcggcactccgtct

SEQ ID NO: 3054503 - DNA, 25 bp, Homo sapien
tgccaccgtgttctccagccccgct

SEQ ID NO: 3054504 - DNA, 25 bp, Homo sapien
ctgccaccgtgttctccagccccgc

SEQ ID NO: 3054505 - DNA, 25 bp, Homo sapien
ccaccgtgttctccagccccgcttt

SEQ ID NO: 3054506 - DNA, 25 bp, Homo sapien
gccaccgtgttctccagccccgctt

SEQ ID NO: 3054507 - DNA, 25 bp, Homo sapien
tcttgctggtctgaatcatggcagt

SEQ ID NO: 3054508 - DNA, 25 bp, Homo sapien
gcagtgttggtagacacctccttgt

SEQ ID NO: 3054509 - DNA, 25 bp, Homo sapien
catggcagtgttggtagacacctcc

SEQ ID NO: 3054510 - DNA, 25 bp, Homo sapien
tccaggccttggagcgtgcgcctga

SEQ ID NO: 3054511 - DNA, 25 bp, Homo sapien
ggtggggaagctcagctcgagcagc

SEQ ID NO: 3054512 - DNA, 25 bp, Homo sapien
gctcgagcagcctgaccaagaggct

SEQ ID NO: 3054513 - DNA, 25 bp, Homo sapien
caagaggctgtgtccgcccggcccc

SEQ ID NO: 3054514 - DNA, 25 bp, Homo sapien
tcgagcagcctgaccaagaggctgt

SEQ ID NO: 3054515 - DNA, 25 bp, Homo sapien
cttggtgtggaaccattcctcagca

SEQ ID NO: 3054516 - DNA, 25 bp, Homo sapien
agcacgcgggtcaggtcaatgcctg

SEQ ID NO: 3054517 - DNA, 25 bp, Homo sapien
tccctcatctctgccagcacgcggg

SEQ ID NO: 3054518 - DNA, 25 bp, Homo sapien
gaccacctggttgctaaattccttc

SEQ ID NO: 3054519 - DNA, 25 bp, Homo sapien
tggaggttgttgagcccagggcagc

SEQ ID NO: 3054520 - DNA, 25 bp, Homo sapien
ccagggcagcctgcaattcccgctc

SEQ ID NO: 3054521 - DNA, 25 bp, Homo sapien
gcccagggcagcctgcaattcccgc

SEQ ID NO: 3054522 - DNA, 25 bp, Homo sapien
agggcagcctgcaattcccgctcac

SEQ ID NO: 3054523 - DNA, 25 bp, Homo sapien
tctccaggtcagtcttagacagagt

SEQ ID NO: 3054524 - DNA, 25 bp, Homo sapien
cttcttcatgtaggctagctcttca

SEQ ID NO: 3054525 - DNA, 25 bp, Homo sapien
ttcatgtaggctagctcttcattca

SEQ ID NO: 3054526 - DNA, 25 bp, Homo sapien
cagtcttagacagagtgagctcatc

SEQ ID NO: 3054527 - DNA, 25 bp, Homo sapien
tggcgcagggccagctcattctcat

SEQ ID NO: 3054528 - DNA, 25 bp, Homo sapien
ctggcgcagggccagctcattctca

SEQ ID NO: 3054529 - DNA, 25 bp, Homo sapien
gcgcagggccagctcattctcatac

SEQ ID NO: 3054530 - DNA, 25 bp, Homo sapien
ggcgcagggccagctcattctcata

SEQ ID NO: 3054531 - DNA, 25 bp, Homo sapien
gcaagacataaatgatatgagacat

SEQ ID NO: 3054532 - DNA, 25 bp, Homo sapien
aagacataaatgatatgagacattc

SEQ ID NO: 3054533 - DNA, 25 bp, Homo sapien
aaagcaagacataaatgatatgaga

SEQ ID NO: 3054534 - DNA, 25 bp, Homo sapien
acataaatgatatgagacattctcc

SEQ ID NO: 3054535 - DNA, 25 bp, Homo sapien
ttgttttcaatggtggcggtcagga

SEQ ID NO: 3054536 - DNA, 25 bp, Homo sapien
tgttttcaatggtggcggtcaggat

SEQ ID NO: 3054537 - DNA, 25 bp, Homo sapien
aggatgacccggttgttttcaatgg

SEQ ID NO: 3054538 - DNA, 25 bp, Homo sapien
tccaggatgacccggttgttttcaa

SEQ ID NO: 3054539 - DNA, 25 bp, Homo sapien
gagatccatcccctgaaagtcagga

SEQ ID NO: 3054540 - DNA, 25 bp, Homo sapien
ggttcgtcatgtcttggcagcctca

SEQ ID NO: 3054541 - DNA, 25 bp, Homo sapien
tacaaatttgtgttaggcctcaatc

SEQ ID NO: 3054542 - DNA, 25 bp, Homo sapien
tgaggaacgacctgctgagaacatc

SEQ ID NO: 3054543 - DNA, 25 bp, Homo sapien
tagtcccgctcagggctagctgggc

SEQ ID NO: 3054544 - DNA, 25 bp, Homo sapien
tcccggagctcttcaatggtcttgt

SEQ ID NO: 3054545 - DNA, 25 bp, Homo sapien
tagtaggggctgtagtcccgctcag

SEQ ID NO: 3054546 - DNA, 25 bp, Homo sapien
gcttcaggtgccagtcacggatctt

SEQ ID NO: 3054547 - DNA, 25 bp, Homo sapien
atcacaagcaccaaagtcaacaaag

SEQ ID NO: 3054548 - DNA, 25 bp, Homo sapien
ccgccatcacaagcaccaaagtcaa

SEQ ID NO: 3054549 - DNA, 25 bp, Homo sapien
gccatcacaagcaccaaagtcaaca

SEQ ID NO: 3054550 - DNA, 25 bp, Homo sapien
ggccgccatcacaagcaccaaagtc

SEQ ID NO: 3054551 - DNA, 25 bp, Homo sapien
cctccaaggccacctccatagccac

SEQ ID NO: 3054552 - DNA, 25 bp, Homo sapien
tagccacctccaaggccacctccat

SEQ ID NO: 3054553 - DNA, 25 bp, Homo sapien
cacctccaaggccacctccatagcc

SEQ ID NO: 3054554 - DNA, 25 bp, Homo sapien
ccatagccacctccaaggccacctc

SEQ ID NO: 3054555 - DNA, 25 bp, Homo sapien
agcccccagctgatcccccggacac

SEQ ID NO: 3054556 - DNA, 25 bp, Homo sapien
cccccagctgatcccccggacacaa

SEQ ID NO: 3054557 - DNA, 25 bp, Homo sapien
caaaaccacagctcacgccgcctcc

SEQ ID NO: 3054558 - DNA, 25 bp, Homo sapien
aaccacagctcacgccgcctccata

SEQ ID NO: 3054559 - DNA, 25 bp, Homo sapien
ctggcaagagccacccccgaaacca

SEQ ID NO: 3054560 - DNA, 25 bp, Homo sapien
gaaaccacctccatagctggcagag

SEQ ID NO: 3054561 - DNA, 25 bp, Homo sapien
cgagttgaacaggtagagacaccac

SEQ ID NO: 3054562 - DNA, 25 bp, Homo sapien
ttgaacaggtagagacaccacggcc

SEQ ID NO: 3054563 - DNA, 25 bp, Homo sapien
tagaagcttgcttggcctgggccga

SEQ ID NO: 3054564 - DNA, 25 bp, Homo sapien
gagcaggattgagagcaggtgcaga

SEQ ID NO: 3054565 - DNA, 25 bp, Homo sapien
tgcagatagaagcttgcttggcctg

SEQ ID NO: 3054566 - DNA, 25 bp, Homo sapien
ttgagagcaggtgcagatagaagct

SEQ ID NO: 3054567 - DNA, 25 bp, Homo sapien
acactgtacaaatgagcttgttaca

SEQ ID NO: 3054568 - DNA, 25 bp, Homo sapien
cagagggggaatagagcgcatgcaa

SEQ ID NO: 3054569 - DNA, 25 bp, Homo sapien
tacaaatgagcttgttacacaatac

SEQ ID NO: 3054570 - DNA, 25 bp, Homo sapien
ttgttacacaatacagctgcatctc

SEQ ID NO: 3054571 - DNA, 25 bp, Homo sapien
gcaagggacgtttctcctgcaatag

SEQ ID NO: 3054572 - DNA, 25 bp, Homo sapien
gggacgtttctcctgcaatagacac

SEQ ID NO: 3054573 - DNA, 25 bp, Homo sapien
ggagtttgcatgtgcaggccctctg

SEQ ID NO: 3054574 - DNA, 25 bp, Homo sapien
accgagggacccttttcagctctct

SEQ ID NO: 3054575 - DNA, 25 bp, Homo sapien
tttctctcttgtgggaagaaaccac

SEQ ID NO: 3054576 - DNA, 25 bp, Homo sapien
ttagatttctctcttgtgggaagaa

SEQ ID NO: 3054577 - DNA, 25 bp, Homo sapien
tagatttctctcttgtgggaagaaa

SEQ ID NO: 3054578 - DNA, 25 bp, Homo sapien
gatttctctcttgtgggaagaaacc

SEQ ID NO: 3054579 - DNA, 25 bp, Homo sapien
actgactcttctacattgatgtgga

SEQ ID NO: 3054580 - DNA, 25 bp, Homo sapien
tgactcttctacattgatgtggaaa

SEQ ID NO: 3054581 - DNA, 25 bp, Homo sapien
tccactgactcttctacattgatgt

SEQ ID NO: 3054582 - DNA, 25 bp, Homo sapien
ctcttctacattgatgtggaaattg

SEQ ID NO: 3054583 - DNA, 25 bp, Homo sapien
tgaattgtgggcatcttagcggaag

SEQ ID NO: 3054584 - DNA, 25 bp, Homo sapien
ggaaaactagacagcacccctgaga

SEQ ID NO: 3054585 - DNA, 25 bp, Homo sapien
ggtatgcccggcagggagcaacaat

SEQ ID NO: 3054586 - DNA, 25 bp, Homo sapien
catgccctgaatgaagcctactcaa

SEQ ID NO: 3054587 - DNA, 25 bp, Homo sapien
ttccctgatggcaatgccagccatc

SEQ ID NO: 3054588 - DNA, 25 bp, Homo sapien
cttccctgatggcaatgccagccat

SEQ ID NO: 3054589 - DNA, 25 bp, Homo sapien
gaccagagtgaggagtccagatcct

SEQ ID NO: 3054590 - DNA, 25 bp, Homo sapien
gatttaagcaaagggcacaagctca

SEQ ID NO: 3054591 - DNA, 25 bp, Homo sapien
cactgagctggtcaagattctgaac

SEQ ID NO: 3054592 - DNA, 25 bp, Homo sapien
cacaagctcaagtgtccgtaaggga

SEQ ID NO: 3054593 - DNA, 25 bp, Homo sapien
ccagccgtgtctttatgtcaagcag

SEQ ID NO: 3054594 - DNA, 25 bp, Homo sapien
cagctgcgtggcatagcggcactct

SEQ ID NO: 3054595 - DNA, 25 bp, Homo sapien
gtactcctggttctgagcctccatc

SEQ ID NO: 3054596 - DNA, 25 bp, Homo sapien
tgagcctccatctcgcatcggagct

SEQ ID NO: 3054597 - DNA, 25 bp, Homo sapien
ggggagtgacagatgcatagacaca

SEQ ID NO: 3054598 - DNA, 25 bp, Homo sapien
ggagtgacagatgcatagacacatc

SEQ ID NO: 3054599 - DNA, 25 bp, Homo sapien
tgggggagtgacagatgcatagaca

SEQ ID NO: 3054600 - DNA, 25 bp, Homo sapien
gtgacagatgcatagacacatcagg

SEQ ID NO: 3054601 - DNA, 25 bp, Homo sapien
ctcctgcatcgtgcgtctcaggtct

SEQ ID NO: 3054602 - DNA, 25 bp, Homo sapien
catttctgtgttggaggccacctct

SEQ ID NO: 3054603 - DNA, 25 bp, Homo sapien
cagctcctgcatcgtgcgtctcagg

SEQ ID NO: 3054604 - DNA, 25 bp, Homo sapien
ccgtcttgctggtctggatcatttc

SEQ ID NO: 3054605 - DNA, 25 bp, Homo sapien
aggcctcgacatcccggcggttctt

SEQ ID NO: 3054606 - DNA, 25 bp, Homo sapien
cctcatctctgccagcacacgggtc

SEQ ID NO: 3054607 - DNA, 25 bp, Homo sapien
tctccacattgacctggccggccag

SEQ ID NO: 3054608 - DNA, 25 bp, Homo sapien
gtcaggtccacacccggtgctgcgt

SEQ ID NO: 3054609 - DNA, 25 bp, Homo sapien
tcaggggtgatgggggccagctctc

SEQ ID NO: 3054610 - DNA, 25 bp, Homo sapien
caggggtgatgggggccagctctca

SEQ ID NO: 3054611 - DNA, 25 bp, Homo sapien
aggggtgatgggggccagctctcac

SEQ ID NO: 3054612 - DNA, 25 bp, Homo sapien
gctcatccaggactcggcgcaagcc

SEQ ID NO: 3054613 - DNA, 25 bp, Homo sapien
tcatccaggactcggcgcaagccgt

SEQ ID NO: 3054614 - DNA, 25 bp, Homo sapien
gactcggcgcaagccgttgatgtca

SEQ ID NO: 3054615 - DNA, 25 bp, Homo sapien
caggactcggcgcaagccgttgatg

SEQ ID NO: 3054616 - DNA, 25 bp, Homo sapien
gtaaagtgggcaatgcaggaagagg

SEQ ID NO: 3054617 - DNA, 25 bp, Homo sapien
aaagtgggcaatgcaggaagaggag

SEQ ID NO: 3054618 - DNA, 25 bp, Homo sapien
ggaagtgggaggggtcttggctgcc

SEQ ID NO: 3054619 - DNA, 25 bp, Homo sapien
taaagtgggcaatgcaggaagagga

SEQ ID NO: 3054620 - DNA, 25 bp, Homo sapien
cgatctccaggatgacccgggagtt

SEQ ID NO: 3054621 - DNA, 25 bp, Homo sapien
aggatgacccgggagttgtcgatgg

SEQ ID NO: 3054622 - DNA, 25 bp, Homo sapien
ggatgacccgggagttgtcgatggt

SEQ ID NO: 3054623 - DNA, 25 bp, Homo sapien
tctccaggatgacccgggagttgtc

SEQ ID NO: 3054624 - DNA, 25 bp, Homo sapien
ggacacagccatggatctacagaac

SEQ ID NO: 3054625 - DNA, 25 bp, Homo sapien
tctccagggcacgaaagaccaagga

SEQ ID NO: 3054626 - DNA, 25 bp, Homo sapien
tgtggacaactcatggtcactgcct

SEQ ID NO: 3054627 - DNA, 25 bp, Homo sapien
tattgcctgtgggaattggttgccc

SEQ ID NO: 3054628 - DNA, 25 bp, Homo sapien
cctctctttgacatccgaggactca

SEQ ID NO: 3054629 - DNA, 25 bp, Homo sapien
ctctctttgacatccgaggactcac

SEQ ID NO: 3054630 - DNA, 25 bp, Homo sapien
attggctgtagtcgcattctgggct

SEQ ID NO: 3054631 - DNA, 25 bp, Homo sapien
gctgtagtcgcattctgggctggtt

SEQ ID NO: 3054632 - DNA, 25 bp, Homo sapien
ctgtagtcgcattctgggctggttg

SEQ ID NO: 3054633 - DNA, 25 bp, Homo sapien
agtattggctgtagtcgcattctgg

SEQ ID NO: 3054634 - DNA, 25 bp, Homo sapien
taggaggccaggcggtcattgaggt

SEQ ID NO: 3054635 - DNA, 25 bp, Homo sapien
aggaggccaggcggtcattgaggtt

SEQ ID NO: 3054636 - DNA, 25 bp, Homo sapien
ggtaggaggccaggcggtcattgag

SEQ ID NO: 3054637 - DNA, 25 bp, Homo sapien
catggtaattttctcattgccagag

SEQ ID NO: 3054638 - DNA, 25 bp, Homo sapien
gcatggtaattttctcattgccaga

SEQ ID NO: 3054639 - DNA, 25 bp, Homo sapien
tcctcctgaccctgaagagacaaac

SEQ ID NO: 3054640 - DNA, 25 bp, Homo sapien
gaccctcatgccacccccatatcct

SEQ ID NO: 3054641 - DNA, 25 bp, Homo sapien
ccaaagccacagaccctcatgccac

SEQ ID NO: 3054642 - DNA, 25 bp, Homo sapien
gaaaacactaccagcccctccacca

SEQ ID NO: 3054643 - DNA, 25 bp, Homo sapien
gcagaagaagctgagatacttcggc

SEQ ID NO: 3054644 - DNA, 25 bp, Homo sapien
aagctgagatacttcggcttccacc

SEQ ID NO: 3054645 - DNA, 25 bp, Homo sapien
cagaagaagctgagatacttcggct

SEQ ID NO: 3054646 - DNA, 25 bp, Homo sapien
aagaagctgagatacttcggcttcc

SEQ ID NO: 3054647 - DNA, 25 bp, Homo sapien
gggctccttatatacccttcagagg

SEQ ID NO: 3054648 - DNA, 25 bp, Homo sapien
ccttcagagggtgttgtgggacctc

SEQ ID NO: 3054649 - DNA, 25 bp, Homo sapien
caggtagctggagcccgtgagttct

SEQ ID NO: 3054650 - DNA, 25 bp, Homo sapien
cgtgagttctcagcaaacccaagag

SEQ ID NO: 3054651 - DNA, 25 bp, Homo sapien
taccaaggcctctgcctgtactgag

SEQ ID NO: 3054652 - DNA, 25 bp, Homo sapien
tagtttgggagtccactggccgatc

SEQ ID NO: 3054653 - DNA, 25 bp, Homo sapien
cagggcacggttttaacacttggat

SEQ ID NO: 3054654 - DNA, 25 bp, Homo sapien
cagggagcgaactctcatcacagca

SEQ ID NO: 3054655 - DNA, 25 bp, Homo sapien
gaccttgagtagtgttccagctgag

SEQ ID NO: 3054656 - DNA, 25 bp, Homo sapien
aactgcacggcgctgaacctttgct

SEQ ID NO: 3054657 - DNA, 25 bp, Homo sapien
ggatgactgatgatcccgacacctg

SEQ ID NO: 3054658 - DNA, 25 bp, Homo sapien
gcaaacctccgctgataaggctggg

SEQ ID NO: 3054659 - DNA, 25 bp, Homo sapien
gagttgaacactcaggagagccctt

SEQ ID NO: 3054660 - DNA, 25 bp, Homo sapien
ggccttgcgaagataaagctctgtc

SEQ ID NO: 3054661 - DNA, 25 bp, Homo sapien
tcctagcccaggttgcagcatggtg

SEQ ID NO: 3054662 - DNA, 25 bp, Homo sapien
tgttcttaggctcaacggcatcgac

SEQ ID NO: 3054663 - DNA, 25 bp, Homo sapien
gaaatgctcaacagactgaagtggc

SEQ ID NO: 3054664 - DNA, 25 bp, Homo sapien
catgcgggcgtggaactagtgtccc

SEQ ID NO: 3054665 - DNA, 25 bp, Homo sapien
ccatcactcatagggttgggcctgc

SEQ ID NO: 3054666 - DNA, 25 bp, Homo sapien
tgagccttagtctaccaatcaggaa

SEQ ID NO: 3054667 - DNA, 25 bp, Homo sapien
gctgagatgtaaaccacaggagcag

SEQ ID NO: 3054668 - DNA, 25 bp, Homo sapien
ttgaattggcctcagttcttggcag

SEQ ID NO: 3054669 - DNA, 25 bp, Homo sapien
tgaattggcctcagttcttggcagc

SEQ ID NO: 3054670 - DNA, 25 bp, Homo sapien
tacccagaagacaccctccaaagga

SEQ ID NO: 3054671 - DNA, 25 bp, Homo sapien
aagacaccctccaaaggacagcaga

SEQ ID NO: 3054672 - DNA, 25 bp, Homo sapien
ccagaagacaccctccaaaggacag

SEQ ID NO: 3054673 - DNA, 25 bp, Homo sapien
cctctacccagaagacaccctccaa

SEQ ID NO: 3054674 - DNA, 25 bp, Homo sapien
aggaccttggaggcagacaaattgt

SEQ ID NO: 3054675 - DNA, 25 bp, Homo sapien
gaggaccttggaggcagacaaattg

SEQ ID NO: 3054676 - DNA, 25 bp, Homo sapien
aataccgctgatcagcgcctggata

SEQ ID NO: 3054677 - DNA, 25 bp, Homo sapien
tgatgtccatgagccgctggtactc

SEQ ID NO: 3054678 - DNA, 25 bp, Homo sapien
gcgcctggatatgcgccagctgggc

SEQ ID NO: 3054679 - DNA, 25 bp, Homo sapien
acttgatgtccatgagccgctggta

SEQ ID NO: 3054680 - DNA, 25 bp, Homo sapien
gtttctgccagtgtgtcttccaagg

SEQ ID NO: 3054681 - DNA, 25 bp, Homo sapien
cgtttctgccagtgtgtcttccaag

SEQ ID NO: 3054682 - DNA, 25 bp, Homo sapien
ctccgtttctgccagtgtgtcttcc

SEQ ID NO: 3054683 - DNA, 25 bp, Homo sapien
ccgtttctgccagtgtgtcttccaa

SEQ ID NO: 3054684 - DNA, 25 bp, Homo sapien
taagtgtgaattgcacagggaagcg

SEQ ID NO: 3054685 - DNA, 25 bp, Homo sapien
taggctgcaagggtataagtgtgaa

SEQ ID NO: 3054686 - DNA, 25 bp, Homo sapien
cagagcctggttcccggagagggca

SEQ ID NO: 3054687 - DNA, 25 bp, Homo sapien
ccaggctgccctaggctgcaagggt

SEQ ID NO: 3054688 - DNA, 25 bp, Homo sapien
aggtcagtaacctcggacctgctca

SEQ ID NO: 3054689 - DNA, 25 bp, Homo sapien
tgcgccgcaggtcagtaacctcgga

SEQ ID NO: 3054690 - DNA, 25 bp, Homo sapien
cagtaacctcggacctgctcatctg

SEQ ID NO: 3054691 - DNA, 25 bp, Homo sapien
gccgcaggtcagtaacctcggacct

SEQ ID NO: 3054692 - DNA, 25 bp, Homo sapien
tcggtgcccggagcggaatccacct

SEQ ID NO: 3054693 - DNA, 25 bp, Homo sapien
ttggcgagatcggtgcccggagcgg

SEQ ID NO: 3054694 - DNA, 25 bp, Homo sapien
agatcggtgcccggagcggaatcca

SEQ ID NO: 3054695 - DNA, 25 bp, Homo sapien
cggttctgctcggccatgacctcat

SEQ ID NO: 3054696 - DNA, 25 bp, Homo sapien
gacagactgggtcatcactgattcc

SEQ ID NO: 3054697 - DNA, 25 bp, Homo sapien
tgggatccatgatcccacacccagg

SEQ ID NO: 3054698 - DNA, 25 bp, Homo sapien
cactgattcctcttggaaccctggg

SEQ ID NO: 3054699 - DNA, 25 bp, Homo sapien
cttagttttcaggtgcaggcctagt

SEQ ID NO: 3054700 - DNA, 25 bp, Homo sapien
gaagaaaggcccagcttcaaaccca

SEQ ID NO: 3054701 - DNA, 25 bp, Homo sapien
tgttaccacggtcagagaatacaga

SEQ ID NO: 3054702 - DNA, 25 bp, Homo sapien
gtgttaccacggtcagagaatacag

SEQ ID NO: 3054703 - DNA, 25 bp, Homo sapien
ctcatgcgcagagcctgttccgtct

SEQ ID NO: 3054704 - DNA, 25 bp, Homo sapien
catgcgcagagcctgttccgtctca

SEQ ID NO: 3054705 - DNA, 25 bp, Homo sapien
acgctcatgcgcagagcctgttccg

SEQ ID NO: 3054706 - DNA, 25 bp, Homo sapien
tgcgcagagcctgttccgtctcaaa

SEQ ID NO: 3054707 - DNA, 25 bp, Homo sapien
tcaggccatctaggctaggtgaggg

SEQ ID NO: 3054708 - DNA, 25 bp, Homo sapien
ctccccagagttcaggagtccatag

SEQ ID NO: 3054709 - DNA, 25 bp, Homo sapien
cataggggggttagcttcaggccat

SEQ ID NO: 3054710 - DNA, 25 bp, Homo sapien
ccccagagttcaggagtccataggg

SEQ ID NO: 3054711 - DNA, 25 bp, Homo sapien
attgtcgatctgcaggacaatcctg

SEQ ID NO: 3054712 - DNA, 25 bp, Homo sapien
ggagttctcaatggtggcaccaaga

SEQ ID NO: 3054713 - DNA, 25 bp, Homo sapien
gatctgcaggacaatcctggagttc

SEQ ID NO: 3054714 - DNA, 25 bp, Homo sapien
ctggagttctcaatggtggcaccaa

SEQ ID NO: 3054715 - DNA, 25 bp, Homo sapien
ggttggtaccagttcaacacacagg

SEQ ID NO: 3054716 - DNA, 25 bp, Homo sapien
acaggcactgcccactcactttctt

SEQ ID NO: 3054717 - DNA, 25 bp, Homo sapien
acacacaggcactgcccactcactt

SEQ ID NO: 3054718 - DNA, 25 bp, Homo sapien
aggcactgcccactcactttcttcc

SEQ ID NO: 3054719 - DNA, 25 bp, Homo sapien
tgtgcaatgaaactctaaatggcct

SEQ ID NO: 3054720 - DNA, 25 bp, Homo sapien
tctgggaggccttgcaaacagtcca

SEQ ID NO: 3054721 - DNA, 25 bp, Homo sapien
gcccattggcccgctctctgggagg

SEQ ID NO: 3054722 - DNA, 25 bp, Homo sapien
cactatgcgaagcatattttgcccc

SEQ ID NO: 3054723 - DNA, 25 bp, Homo sapien
caccaggtggtgattgtatagtttt

SEQ ID NO: 3054724 - DNA, 25 bp, Homo sapien
cggccgattgtgtagttttttaatg

SEQ ID NO: 3054725 - DNA, 25 bp, Homo sapien
cattagtcaaggcaccaggtggtga

SEQ ID NO: 3054726 - DNA, 25 bp, Homo sapien
gcaggtcatcactcattagtcaagg

SEQ ID NO: 3054727 - DNA, 25 bp, Homo sapien
tagggttcccctgtaagagcgtgtg

SEQ ID NO: 3054728 - DNA, 25 bp, Homo sapien
tgggtctatgccacgagtacagcac

SEQ ID NO: 3054729 - DNA, 25 bp, Homo sapien
tgcagtggcactgatcacgtacagc

SEQ ID NO: 3054730 - DNA, 25 bp, Homo sapien
caaggagctgccactgtactgggtc

SEQ ID NO: 3054731 - DNA, 25 bp, Homo sapien
atcttcacctctagctcgccgttgg

SEQ ID NO: 3054732 - DNA, 25 bp, Homo sapien
ccaggcctccgaaggacgacgtggc

SEQ ID NO: 3054733 - DNA, 25 bp, Homo sapien
acgacgtggccgacgactggcgata

SEQ ID NO: 3054734 - DNA, 25 bp, Homo sapien
ccccgtgaatgctgggcgcgcgaaa

SEQ ID NO: 3054735 - DNA, 25 bp, Homo sapien
tggcgccttttatgcccgcggccgg

SEQ ID NO: 3054736 - DNA, 25 bp, Homo sapien
agcaaccctggtctcagaagctgcg

SEQ ID NO: 3054737 - DNA, 25 bp, Homo sapien
gcgaggcggagcacggacggagcaa

SEQ ID NO: 3054738 - DNA, 25 bp, Homo sapien
tcacctggcgccttttatgcccgcg

SEQ ID NO: 3054739 - DNA, 25 bp, Homo sapien
tgttcatgtctccagtctcaggtct

SEQ ID NO: 3054740 - DNA, 25 bp, Homo sapien
catccaatgttcatgtctccagtct

SEQ ID NO: 3054741 - DNA, 25 bp, Homo sapien
gagcatccatccaatgttcatgtct

SEQ ID NO: 3054742 - DNA, 25 bp, Homo sapien
cagaggagcatccatccaatgttca

SEQ ID NO: 3054743 - DNA, 25 bp, Homo sapien
tctggaagcatctgaagttggcccc

SEQ ID NO: 3054744 - DNA, 25 bp, Homo sapien
tggttctccaaggatccatcgtctg

SEQ ID NO: 3054745 - DNA, 25 bp, Homo sapien
gaggaaagccctcccactctggttc

SEQ ID NO: 3054746 - DNA, 25 bp, Homo sapien
agacaacaaggctctcccaggtggt

SEQ ID NO: 3054747 - DNA, 25 bp, Homo sapien
caaattgtcctcctcggatgcaggg

SEQ ID NO: 3054748 - DNA, 25 bp, Homo sapien
gatgcaggggtcttggacactgcaa

SEQ ID NO: 3054749 - DNA, 25 bp, Homo sapien
caggggtcttggacactgcaagcat

SEQ ID NO: 3054750 - DNA, 25 bp, Homo sapien
ttcccgtccagaaactcaaattgtc

SEQ ID NO: 3054751 - DNA, 25 bp, Homo sapien
taaatcggtagagccagagagtcct

SEQ ID NO: 3054752 - DNA, 25 bp, Homo sapien
gcaaaggatcgtgtacccagctcag

SEQ ID NO: 3054753 - DNA, 25 bp, Homo sapien
tagtctgtctaacgtgcctgggacc

SEQ ID NO: 3054754 - DNA, 25 bp, Homo sapien
aaaacaaggtgcgatgaactggcgg

SEQ ID NO: 3054755 - DNA, 25 bp, Homo sapien
ggagtttcgcaggtggtgcttctca

SEQ ID NO: 3054756 - DNA, 25 bp, Homo sapien
tgacttctgtacatgcttgccaccg

SEQ ID NO: 3054757 - DNA, 25 bp, Homo sapien
gggtcagacccactcagatcctttg

SEQ ID NO: 3054758 - DNA, 25 bp, Homo sapien
tcctgctcgtgggaggtgtctgtaa

SEQ ID NO: 3054759 - DNA, 25 bp, Homo sapien
tctcagtctagtaagaggaacagag

SEQ ID NO: 3054760 - DNA, 25 bp, Homo sapien
gaattccctcagacaatcccagtgg

SEQ ID NO: 3054761 - DNA, 25 bp, Homo sapien
ttctttctggtttcacaagaattcc

SEQ ID NO: 3054762 - DNA, 25 bp, Homo sapien
tcagtctagtaagaggaacagagaa

SEQ ID NO: 3054763 - DNA, 25 bp, Homo sapien
tgtcaggatccaataagcaggcttc

SEQ ID NO: 3054764 - DNA, 25 bp, Homo sapien
tatagtcaagatcgtgcagggtgtg

SEQ ID NO: 3054765 - DNA, 25 bp, Homo sapien
tacagaggctctagtatcgcgaaag

SEQ ID NO: 3054766 - DNA, 25 bp, Homo sapien
agttcagtcccaaacgggcacaggg

SEQ ID NO: 3054767 - DNA, 25 bp, Homo sapien
tcatcttggtcaccagattttgagg

SEQ ID NO: 3054768 - DNA, 25 bp, Homo sapien
ttgtctcatcttggtcaccagattt

SEQ ID NO: 3054769 - DNA, 25 bp, Homo sapien
tgtctcatcttggtcaccagatttt

SEQ ID NO: 3054770 - DNA, 25 bp, Homo sapien
cttggtcaccagattttgaggaaga

SEQ ID NO: 3054771 - DNA, 25 bp, Homo sapien
cttcttcaccgcctccgtagctgcc

SEQ ID NO: 3054772 - DNA, 25 bp, Homo sapien
ccgtagctgcctccactttcacctc

SEQ ID NO: 3054773 - DNA, 25 bp, Homo sapien
ctccgtagccgccaccacttccact

SEQ ID NO: 3054774 - DNA, 25 bp, Homo sapien
tcctcctccgtagccgccaccactt

SEQ ID NO: 3054775 - DNA, 25 bp, Homo sapien
cctcctccatagttgcccccacttc

SEQ ID NO: 3054776 - DNA, 25 bp, Homo sapien
tcctccatagttgcccccacttcct

SEQ ID NO: 3054777 - DNA, 25 bp, Homo sapien
cctccacttcctccgctatggccac

SEQ ID NO: 3054778 - DNA, 25 bp, Homo sapien
tccacttcctccgctatggccacct

SEQ ID NO: 3054779 - DNA, 25 bp, Homo sapien
ctggatcctcttccataactgcctc

SEQ ID NO: 3054780 - DNA, 25 bp, Homo sapien
gatcctcttccataactgcctccac

SEQ ID NO: 3054781 - DNA, 25 bp, Homo sapien
ccctggatcctcttccataactgcc

SEQ ID NO: 3054782 - DNA, 25 bp, Homo sapien
tcctcccctggatcctcttccataa

SEQ ID NO: 3054783 - DNA, 25 bp, Homo sapien
caatttttccagctccggaggattc

SEQ ID NO: 3054784 - DNA, 25 bp, Homo sapien
ccaatttttccagctccggaggatt

SEQ ID NO: 3054785 - DNA, 25 bp, Homo sapien
aatttttccagctccggaggattca

SEQ ID NO: 3054786 - DNA, 25 bp, Homo sapien
tgggcctccaagttactgatctgct

SEQ ID NO: 3054787 - DNA, 25 bp, Homo sapien
tgcagctggccacagtagcggttct

SEQ ID NO: 3054788 - DNA, 25 bp, Homo sapien
tctcttgccggacgtcagtgatctg

SEQ ID NO: 3054789 - DNA, 25 bp, Homo sapien
tagcggttcttcgtgtcttccaagc

SEQ ID NO: 3054790 - DNA, 25 bp, Homo sapien
gaccactactggatacctcatgctc

SEQ ID NO: 3054791 - DNA, 25 bp, Homo sapien
ttggcactggactgcacctcctgac

SEQ ID NO: 3054792 - DNA, 25 bp, Homo sapien
aactcctggacaccgtgccggagct

SEQ ID NO: 3054793 - DNA, 25 bp, Homo sapien
gatacctcatgctcgatctgggtta

SEQ ID NO: 3054794 - DNA, 25 bp, Homo sapien
cgcatgtcattgagggtcttggtga

SEQ ID NO: 3054795 - DNA, 25 bp, Homo sapien
tctgttcttagcaatgagctgctca

SEQ ID NO: 3054796 - DNA, 25 bp, Homo sapien
ttgacatctccactgttctgcccag

SEQ ID NO: 3054797 - DNA, 25 bp, Homo sapien
tttgccaggagcaacgtttatctcc

SEQ ID NO: 3054798 - DNA, 25 bp, Homo sapien
gccgcaggttttgctccatctcaaa

SEQ ID NO: 3054799 - DNA, 25 bp, Homo sapien
tggtcagattgtccagcacctgccg

SEQ ID NO: 3054800 - DNA, 25 bp, Homo sapien
cagagtctcatactgcatctccagg

SEQ ID NO: 3054801 - DNA, 25 bp, Homo sapien
agcatccactccttgccgcaggttt

SEQ ID NO: 3054802 - DNA, 25 bp, Homo sapien
catccagtgtcatgcgagtgttgtc

SEQ ID NO: 3054803 - DNA, 25 bp, Homo sapien
agtgtcatgcgagtgttgtcaatgt

SEQ ID NO: 3054804 - DNA, 25 bp, Homo sapien
ccagtgtcatgcgagtgttgtcaat

SEQ ID NO: 3054805 - DNA, 25 bp, Homo sapien
gttgtcaatgtccaggagagttttg

SEQ ID NO: 3054806 - DNA, 25 bp, Homo sapien
ccttcttgtcgtaccaatcctggat

SEQ ID NO: 3054807 - DNA, 25 bp, Homo sapien
gggagtagttcttctggatagcagc

SEQ ID NO: 3054808 - DNA, 25 bp, Homo sapien
cgagaattgagttcctgcatggtgc

SEQ ID NO: 3054809 - DNA, 25 bp, Homo sapien
ttatccaagtaagaggccagccgag

SEQ ID NO: 3054810 - DNA, 25 bp, Homo sapien
ccagaagcaccaccaaaacctctgg

SEQ ID NO: 3054811 - DNA, 25 bp, Homo sapien
tactatagcctcctccagaagcacc

SEQ ID NO: 3054812 - DNA, 25 bp, Homo sapien
actactatagcctcctccagaagca

SEQ ID NO: 3054813 - DNA, 25 bp, Homo sapien
gaagcaccaccaaaacctctggaac

SEQ ID NO: 3054814 - DNA, 25 bp, Homo sapien
gtagctgtagccaaaactgccaccg

SEQ ID NO: 3054815 - DNA, 25 bp, Homo sapien
gctcaagtaggacgaggagaactgt

SEQ ID NO: 3054816 - DNA, 25 bp, Homo sapien
cggctgtaggaagaccttatgctgc

SEQ ID NO: 3054817 - DNA, 25 bp, Homo sapien
caccatagccactagaagagctgaa

SEQ ID NO: 3054818 - DNA, 25 bp, Homo sapien
tagctcacgggttgagaagcagtga

SEQ ID NO: 3054819 - DNA, 25 bp, Homo sapien
gagaagcagtgataggagtgctacc

SEQ ID NO: 3054820 - DNA, 25 bp, Homo sapien
ataggagtgctaccggctcccaagt

SEQ ID NO: 3054821 - DNA, 25 bp, Homo sapien
gacacagctggtagctcacgggttg

SEQ ID NO: 3054822 - DNA, 25 bp, Homo sapien
gataatgaagctgtattgattgcca

SEQ ID NO: 3054823 - DNA, 25 bp, Homo sapien
ctgtgtccacacggggggcctccta

SEQ ID NO: 3054824 - DNA, 25 bp, Homo sapien
ccttggtgcggatttggcggctgga

SEQ ID NO: 3054825 - DNA, 25 bp, Homo sapien
tgaccttggtgcggatttggcggct

SEQ ID NO: 3054826 - DNA, 25 bp, Homo sapien
ccatgaccttggtgcggatttggcg

SEQ ID NO: 3054827 - DNA, 25 bp, Homo sapien
tccatgaccttggtgcggatttggc

SEQ ID NO: 3054828 - DNA, 25 bp, Homo sapien
aactgggtgacagcactagagctca

SEQ ID NO: 3054829 - DNA, 25 bp, Homo sapien
cacagacaccacgtagaagcaagag

SEQ ID NO: 3054830 - DNA, 25 bp, Homo sapien
tattcacccaatggagtggtctcag

SEQ ID NO: 3054831 - DNA, 25 bp, Homo sapien
catttctttcagacgagggctccca

SEQ ID NO: 3054832 - DNA, 25 bp, Homo sapien
tctctggatgactgcgatccagagg

SEQ ID NO: 3054833 - DNA, 25 bp, Homo sapien
atgactgcgatccagaggagaactg

SEQ ID NO: 3054834 - DNA, 25 bp, Homo sapien
gtgaaaatagaaaaggacaggatca

SEQ ID NO: 3054835 - DNA, 25 bp, Homo sapien
gagtgccatggggggggcggactaa

SEQ ID NO: 3054836 - DNA, 25 bp, Homo sapien
tagaaaaggacaggatcattagata

SEQ ID NO: 3054837 - DNA, 25 bp, Homo sapien
cattagatacatggtggggccgtga

SEQ ID NO: 3054838 - DNA, 25 bp, Homo sapien
agtagcgacctttggtctcctccag

SEQ ID NO: 3054839 - DNA, 25 bp, Homo sapien
acgctgccaatcatctcctggatct

SEQ ID NO: 3054840 - DNA, 25 bp, Homo sapien
atgcagtagcgacctttggtctcct

SEQ ID NO: 3054841 - DNA, 25 bp, Homo sapien
ctgcatgcagtagcgacctttggtc

SEQ ID NO: 3054842 - DNA, 25 bp, Homo sapien
gaaagggaatcaacgattagtgagt

SEQ ID NO: 3054843 - DNA, 25 bp, Homo sapien
ggaatcaacgattagtgagtgtggc

SEQ ID NO: 3054844 - DNA, 25 bp, Homo sapien
cgattagtgagtgtggccgttctct

SEQ ID NO: 3054845 - DNA, 25 bp, Homo sapien
gtgcaccacccttcctggcactatt

SEQ ID NO: 3054846 - DNA, 25 bp, Homo sapien
gttctgcatggtgcgccggagctcc

SEQ ID NO: 3054847 - DNA, 25 bp, Homo sapien
tgcaccagctcgctgttggtggcca

SEQ ID NO: 3054848 - DNA, 25 bp, Homo sapien
ctgcagctcaatctccaggttctgc

SEQ ID NO: 3054849 - DNA, 25 bp, Homo sapien
ccggagctccgagatctcgctcttg

SEQ ID NO: 3054850 - DNA, 25 bp, Homo sapien
agagaatgccattcacaccagaagg

SEQ ID NO: 3054851 - DNA, 25 bp, Homo sapien
cacctggcctctcagggcattcatc

SEQ ID NO: 3054852 - DNA, 25 bp, Homo sapien
atactggtcacgcatctcgttcaga

SEQ ID NO: 3054853 - DNA, 25 bp, Homo sapien
cacgccaggtgcagcgtccatctcc

SEQ ID NO: 3054854 - DNA, 25 bp, Homo sapien
acattgacatctccacccacctggc

SEQ ID NO: 3054855 - DNA, 25 bp, Homo sapien
agggacagtccacagtcaggagttc

SEQ ID NO: 3054856 - DNA, 25 bp, Homo sapien
agccagggacagtccacagtcagga

SEQ ID NO: 3054857 - DNA, 25 bp, Homo sapien
catggcagcggattggtgttcctta

SEQ ID NO: 3054858 - DNA, 25 bp, Homo sapien
ttccaccatggcagcggattggtgt

SEQ ID NO: 3054859 - DNA, 25 bp, Homo sapien
gcgcaggttcaactctgtctcatac

SEQ ID NO: 3054860 - DNA, 25 bp, Homo sapien
cacactcatgcgcaggttcaactct

SEQ ID NO: 3054861 - DNA, 25 bp, Homo sapien
cactcatgcgcaggttcaactctgt

SEQ ID NO: 3054862 - DNA, 25 bp, Homo sapien
catgcgcaggttcaactctgtctca

SEQ ID NO: 3054863 - DNA, 25 bp, Homo sapien
accccagagaaaaggtatgagacac

SEQ ID NO: 3054864 - DNA, 25 bp, Homo sapien
gaatgaccccagagaaaaggtatga

SEQ ID NO: 3054865 - DNA, 25 bp, Homo sapien
agagaaaaggtatgagacacccatc

SEQ ID NO: 3054866 - DNA, 25 bp, Homo sapien
ctggaatgaccccagagaaaaggta

SEQ ID NO: 3054867 - DNA, 25 bp, Homo sapien
gggaaacactgctccaaaaatgccc

SEQ ID NO: 3054868 - DNA, 25 bp, Homo sapien
ccaaaaatgccctactctggggaca

SEQ ID NO: 3054869 - DNA, 25 bp, Homo sapien
ggctagttctatttgggaaacactg

SEQ ID NO: 3054870 - DNA, 25 bp, Homo sapien
aaaatgccctactctggggacactg

SEQ ID NO: 3054871 - DNA, 25 bp, Homo sapien
ttggtgcggaagtcatccgcggcca

SEQ ID NO: 3054872 - DNA, 25 bp, Homo sapien
atccgcggccagacgggcattgtca

SEQ ID NO: 3054873 - DNA, 25 bp, Homo sapien
gacattggcattgtccactgtggct

SEQ ID NO: 3054874 - DNA, 25 bp, Homo sapien
tgtcaatctgcagaaggacattggc

SEQ ID NO: 3054875 - DNA, 25 bp, Homo sapien
cctaatgggtcttggggcttcaagt

SEQ ID NO: 3054876 - DNA, 25 bp, Homo sapien
taatgggtcttggggcttcaagttc

SEQ ID NO: 3054877 - DNA, 25 bp, Homo sapien
tgcaaaacctaatgggtcttggggc

SEQ ID NO: 3054878 - DNA, 25 bp, Homo sapien
acctaatgggtcttggggcttcaag

SEQ ID NO: 3054879 - DNA, 25 bp, Homo sapien
ggtggactctgtcctatagagaaat

SEQ ID NO: 3054880 - DNA, 25 bp, Homo sapien
cagtcttagggcatccaagacctcg

SEQ ID NO: 3054881 - DNA, 25 bp, Homo sapien
gggcctggggcatgaattgttccca

SEQ ID NO: 3054882 - DNA, 25 bp, Homo sapien
gaaatcttaaggtctcaggggcctg

SEQ ID NO: 3054883 - DNA, 25 bp, Homo sapien
gtcttgaagtagggactgtagtctt

SEQ ID NO: 3054884 - DNA, 25 bp, Homo sapien
tcacttccaggtcggcgttggcctc

SEQ ID NO: 3054885 - DNA, 25 bp, Homo sapien
tcttgaagtagggactgtagtcttt

SEQ ID NO: 3054886 - DNA, 25 bp, Homo sapien
cttcacttccaggtcggcgttggcc

SEQ ID NO: 3054887 - DNA, 25 bp, Homo sapien
accacccaagccagcaccaaggcca

SEQ ID NO: 3054888 - DNA, 25 bp, Homo sapien
caccagcaaagccaccaccaaagcc

SEQ ID NO: 3054889 - DNA, 25 bp, Homo sapien
cagaagcccatcaccaccagcaaag

SEQ ID NO: 3054890 - DNA, 25 bp, Homo sapien
aaggccaccaccatatcctccccca

SEQ ID NO: 3054891 - DNA, 25 bp, Homo sapien
accctccggccaggacggaggagat

SEQ ID NO: 3054892 - DNA, 25 bp, Homo sapien
ctgagtgaagagaaggtgctcgggt

SEQ ID NO: 3054893 - DNA, 25 bp, Homo sapien
cgagcagttggctgagtgaagagaa

SEQ ID NO: 3054894 - DNA, 25 bp, Homo sapien
tgagcgagcgagcagttggctgagt

SEQ ID NO: 3054895 - DNA, 25 bp, Homo sapien
gcgagcgagcagttggctgagtgaa

SEQ ID NO: 3054896 - DNA, 25 bp, Homo sapien
tgggcctgcaggctacactttccca

SEQ ID NO: 3054897 - DNA, 25 bp, Homo sapien
tacactttcccatcggaccctggga

SEQ ID NO: 3054898 - DNA, 25 bp, Homo sapien
gtcccgccaggcgtgattcacaggg

SEQ ID NO: 3054899 - DNA, 25 bp, Homo sapien
gggctttcttgtcccgccaggcgtg

SEQ ID NO: 3054900 - DNA, 25 bp, Homo sapien
gaggcctttcgtgatgagctttcca

SEQ ID NO: 3054901 - DNA, 25 bp, Homo sapien
gagctttccaaggatctgctcctgg

SEQ ID NO: 3054902 - DNA, 25 bp, Homo sapien
cggaagatacgggtacagacaactt

SEQ ID NO: 3054903 - DNA, 25 bp, Homo sapien
gttaggcactcggaagatacgggta

SEQ ID NO: 3054904 - DNA, 25 bp, Homo sapien
tgctcatcagcacgcaattcaccag

SEQ ID NO: 3054905 - DNA, 25 bp, Homo sapien
ggacccagttaggctgtgcccaggt

SEQ ID NO: 3054906 - DNA, 25 bp, Homo sapien
gtgctcatcagcacgcaattcacca

SEQ ID NO: 3054907 - DNA, 25 bp, Homo sapien
ggagatagctgggaactgcgccagg

SEQ ID NO: 3054908 - DNA, 25 bp, Homo sapien
gatagctgggaactgcgccaggaga

SEQ ID NO: 3054909 - DNA, 25 bp, Homo sapien
tagctgggaactgcgccaggagagc

SEQ ID NO: 3054910 - DNA, 25 bp, Homo sapien
aggggagatagctgggaactgcgcc

SEQ ID NO: 3054911 - DNA, 25 bp, Homo sapien
ccgggccttcaggaggtgaggccag

SEQ ID NO: 3054912 - DNA, 25 bp, Homo sapien
gaggtgaggccagctggtgggcagg

SEQ ID NO: 3054913 - DNA, 25 bp, Homo sapien
aggaggctgtggtagaggcagctca

SEQ ID NO: 3054914 - DNA, 25 bp, Homo sapien
caggaggctgtggtagaggcagctc

SEQ ID NO: 3054915 - DNA, 25 bp, Homo sapien
tctgacggctcgaagaggacgagga

SEQ ID NO: 3054916 - DNA, 25 bp, Homo sapien
tggctgaagctggatgagctctgct

SEQ ID NO: 3054917 - DNA, 25 bp, Homo sapien
gggccgggtctgacggctcgaagag

SEQ ID NO: 3054918 - DNA, 25 bp, Homo sapien
ctgaagctggatgagctctgctcct

SEQ ID NO: 3054919 - DNA, 25 bp, Homo sapien
cagtgccggggagcctcagaagcct

SEQ ID NO: 3054920 - DNA, 25 bp, Homo sapien
agcccccactccatggaaacaggca

SEQ ID NO: 3054921 - DNA, 25 bp, Homo sapien
agctctgaggagaagggcccagccc

SEQ ID NO: 3054922 - DNA, 25 bp, Homo sapien
tgagagctaagctgactccagggca

SEQ ID NO: 3054923 - DNA, 25 bp, Homo sapien
ctcgcgggaagaataggattggcca

SEQ ID NO: 3054924 - DNA, 25 bp, Homo sapien
cctcgcgggaagaataggattggcc

SEQ ID NO: 3054925 - DNA, 25 bp, Homo sapien
aaaaagcagggcagtcagttgtgct

SEQ ID NO: 3054926 - DNA, 25 bp, Homo sapien
gaaaaagcagggcagtcagttgtgc

SEQ ID NO: 3054927 - DNA, 25 bp, Homo sapien
cgtcttcacatccagcaagatctgg

SEQ ID NO: 3054928 - DNA, 25 bp, Homo sapien
gcgtcttcacatccagcaagatctg

SEQ ID NO: 3054929 - DNA, 25 bp, Homo sapien
ccatggaggtggtcactcctgttcc

SEQ ID NO: 3054930 - DNA, 25 bp, Homo sapien
gagtccatggaggtggtcactcctg

SEQ ID NO: 3054931 - DNA, 25 bp, Homo sapien
aaaagagtccatggaggtggtcact

SEQ ID NO: 3054932 - DNA, 25 bp, Homo sapien
agagagaaaaagagtccatggaggt

SEQ ID NO: 3054933 - DNA, 25 bp, Homo sapien
acaatatggagaaaagctagcccac

SEQ ID NO: 3054934 - DNA, 25 bp, Homo sapien
tagggcttagtttctctatctatat

SEQ ID NO: 3054935 - DNA, 25 bp, Homo sapien
gaaaagctagcccactattctaggg

SEQ ID NO: 3054936 - DNA, 25 bp, Homo sapien
ataacggtcccatgagtcccctggt

SEQ ID NO: 3054937 - DNA, 25 bp, Homo sapien
ccagttcgctgttggaggccacttc

SEQ ID NO: 3054938 - DNA, 25 bp, Homo sapien
agttcgctgttggaggccacttctt

SEQ ID NO: 3054939 - DNA, 25 bp, Homo sapien
gttcgctgttggaggccacttcttt

SEQ ID NO: 3054940 - DNA, 25 bp, Homo sapien
cagttcgctgttggaggccacttct

SEQ ID NO: 3054941 - DNA, 25 bp, Homo sapien
tcacatctccgccggtctgacctct

SEQ ID NO: 3054942 - DNA, 25 bp, Homo sapien
tgctcaggaaccaggtctcagcgtc

SEQ ID NO: 3054943 - DNA, 25 bp, Homo sapien
catctccgccggtctgacctctcag

SEQ ID NO: 3054944 - DNA, 25 bp, Homo sapien
ggaaccaggtctcagcgtctctgcg

SEQ ID NO: 3054945 - DNA, 25 bp, Homo sapien
ggatggcaggaggcggtcagttcag

SEQ ID NO: 3054946 - DNA, 25 bp, Homo sapien
gatggcaggaggcggtcagttcagc

SEQ ID NO: 3054947 - DNA, 25 bp, Homo sapien
gggatggcaggaggcggtcagttca

SEQ ID NO: 3054948 - DNA, 25 bp, Homo sapien
caggaggcggtcagttcagcagact

SEQ ID NO: 3054949 - DNA, 25 bp, Homo sapien
attgacgtcggcctccacagtctgc

SEQ ID NO: 3054950 - DNA, 25 bp, Homo sapien
ggcgcaggccattgacgtcggcctc

SEQ ID NO: 3054951 - DNA, 25 bp, Homo sapien
acccggcgcaggccattgacgtcgg

SEQ ID NO: 3054952 - DNA, 25 bp, Homo sapien
cacagtctgccgcagggccagttca

SEQ ID NO: 3054953 - DNA, 25 bp, Homo sapien
tgggtggaccgccccactctttgtc

SEQ ID NO: 3054954 - DNA, 25 bp, Homo sapien
tggcaggacagaggtcaggtcctca

SEQ ID NO: 3054955 - DNA, 25 bp, Homo sapien
caggctgcagccctgaggattctga

SEQ ID NO: 3054956 - DNA, 25 bp, Homo sapien
cccactctttgtcccttgccctctg

SEQ ID NO: 3054957 - DNA, 25 bp, Homo sapien
ttggtcctgaagtcatcggctgcca

SEQ ID NO: 3054958 - DNA, 25 bp, Homo sapien
gaagtcatcggctgccagcctggca

SEQ ID NO: 3054959 - DNA, 25 bp, Homo sapien
tcctgaagtcatcggctgccagcct

SEQ ID NO: 3054960 - DNA, 25 bp, Homo sapien
ggtcctgaagtcatcggctgccagc

SEQ ID NO: 3054961 - DNA, 25 bp, Homo sapien
gcaaaatgggctgcgcattctcaat

SEQ ID NO: 3054962 - DNA, 25 bp, Homo sapien
aaatgggctgcgcattctcaatggt

SEQ ID NO: 3054963 - DNA, 25 bp, Homo sapien
aaaatgggctgcgcattctcaatgg

SEQ ID NO: 3054964 - DNA, 25 bp, Homo sapien
ctgcaaaatgggctgcgcattctca

SEQ ID NO: 3054965 - DNA, 25 bp, Homo sapien
ccctggtcagccaaggaccttacta

SEQ ID NO: 3054966 - DNA, 25 bp, Homo sapien
gccaaggaccttactacttgagcat

SEQ ID NO: 3054967 - DNA, 25 bp, Homo sapien
tagggatgcactccatcccgatcac

SEQ ID NO: 3054968 - DNA, 25 bp, Homo sapien
tccaccagctcaggctacgtaggga

SEQ ID NO: 3054969 - DNA, 25 bp, Homo sapien
gtcttgaagtagggactgtagtctt

SEQ ID NO: 3054970 - DNA, 25 bp, Homo sapien
tcacttccaggtcggcgttggcctc

SEQ ID NO: 3054971 - DNA, 25 bp, Homo sapien
tcttgaagtagggactgtagtcttt

SEQ ID NO: 3054972 - DNA, 25 bp, Homo sapien
cttcacttccaggtcggcgttggcc

SEQ ID NO: 3054973 - DNA, 25 bp, Homo sapien
ggccaggcggtcattgaggttctgc

SEQ ID NO: 3054974 - DNA, 25 bp, Homo sapien
ggtcattgaggttctgcatggtcac

SEQ ID NO: 3054975 - DNA, 25 bp, Homo sapien
tgaggttctgcatggtcaccttctc

SEQ ID NO: 3054976 - DNA, 25 bp, Homo sapien
cattgaggttctgcatggtcacctt

SEQ ID NO: 3054977 - DNA, 25 bp, Homo sapien
cagaagcccatcaccaccagcaaaa

SEQ ID NO: 3054978 - DNA, 25 bp, Homo sapien
acccaagccaccaccgaagccagca

SEQ ID NO: 3054979 - DNA, 25 bp, Homo sapien
cccagaggagaagcgagaggagaca

SEQ ID NO: 3054980 - DNA, 25 bp, Homo sapien
gaagccactaccaaagctgctgctg

SEQ ID NO: 3054981 - DNA, 25 bp, Homo sapien
gccgcccccgtaggtgctgggggca

SEQ ID NO: 3054982 - DNA, 25 bp, Homo sapien
ccccgtaggtgctgggggcacggca

SEQ ID NO: 3054983 - DNA, 25 bp, Homo sapien
gtaggtgctgggggcacggcaggac

SEQ ID NO: 3054984 - DNA, 25 bp, Homo sapien
cccgtaggtgctgggggcacggcag

SEQ ID NO: 3054985 - DNA, 25 bp, Homo sapien
agccgcccccgatgccgcctccgat

SEQ ID NO: 3054986 - DNA, 25 bp, Homo sapien
ccaggacggaggagatgcggctgga

SEQ ID NO: 3054987 - DNA, 25 bp, Homo sapien
tccgatgccgcaggagcccttcatg

SEQ ID NO: 3054988 - DNA, 25 bp, Homo sapien
ctccggccaggacggaggagatgcg

SEQ ID NO: 3054989 - DNA, 25 bp, Homo sapien
gggaggtgagcgagtgagcagttgg

SEQ ID NO: 3054990 - DNA, 25 bp, Homo sapien
ggagggaggtgagcgagtgagcagt

SEQ ID NO: 3054991 - DNA, 25 bp, Homo sapien
gtgccaaggagggaggtgagcgagt

SEQ ID NO: 3054992 - DNA, 25 bp, Homo sapien
aaggagggaggtgagcgagtgagca

SEQ ID NO: 3054993 - DNA, 25 bp, Homo sapien
aagaaggaaaggtgctcaggaaggc

SEQ ID NO: 3054994 - DNA, 25 bp, Homo sapien
gaaagaaggaaaggtgctcaggaag

SEQ ID NO: 3054995 - DNA, 25 bp, Homo sapien
tgaaagaaggaaaggtgctcaggaa

SEQ ID NO: 3054996 - DNA, 25 bp, Homo sapien
gaaggaaaggtgctcaggaaggctg

SEQ ID NO: 3054997 - DNA, 25 bp, Homo sapien
aggcggggccctcctaactgctgac

SEQ ID NO: 3054998 - DNA, 25 bp, Homo sapien
ggcggggccctcctaactgctgact

SEQ ID NO: 3054999 - DNA, 25 bp, Homo sapien
cccacgatcactggcaggaggtctg

SEQ ID NO: 3055000 - DNA, 25 bp, Homo sapien
ggaggtctgcccatggtgggcatgg

SEQ ID NO: 3055001 - DNA, 25 bp, Homo sapien
catggccttggcctgagagcctggt

SEQ ID NO: 3055002 - DNA, 25 bp, Homo sapien
tccccacgatcactggcaggaggtc

SEQ ID NO: 3055003 - DNA, 25 bp, Homo sapien
catagtctctgaccttagaagaact

SEQ ID NO: 3055004 - DNA, 25 bp, Homo sapien
tagtctctgaccttagaagaactta

SEQ ID NO: 3055005 - DNA, 25 bp, Homo sapien
tctctgaccttagaagaacttatca

SEQ ID NO: 3055006 - DNA, 25 bp, Homo sapien
tgacatagtctctgaccttagaaga

SEQ ID NO: 3055007 - DNA, 25 bp, Homo sapien
tgacccctcctcacttgtcccatca

SEQ ID NO: 3055008 - DNA, 25 bp, Homo sapien
tgtggagaagggtttcttccccagc

SEQ ID NO: 3055009 - DNA, 25 bp, Homo sapien
catcagtaattgtggaccccaggat

SEQ ID NO: 3055010 - DNA, 25 bp, Homo sapien
ctcacttgtcccatcagtaattgtg

SEQ ID NO: 3055011 - DNA, 25 bp, Homo sapien
cagggagacgtcagcctctgatgga

SEQ ID NO: 3055012 - DNA, 25 bp, Homo sapien
ggttcttctggttgtggcgggatgt

SEQ ID NO: 3055013 - DNA, 25 bp, Homo sapien
cctccatggcgccacatttgctgcc

SEQ ID NO: 3055014 - DNA, 25 bp, Homo sapien
tcttctggttgtggcgggatgtgtg

SEQ ID NO: 3055015 - DNA, 25 bp, Homo sapien
acttcaggggccagaacaaggacac

SEQ ID NO: 3055016 - DNA, 25 bp, Homo sapien
cttcaggggccagaacaaggacaca

SEQ ID NO: 3055017 - DNA, 25 bp, Homo sapien
ccccacttcaggggccagaacaagg

SEQ ID NO: 3055018 - DNA, 25 bp, Homo sapien
ccacttcaggggccagaacaaggac

SEQ ID NO: 3055019 - DNA, 25 bp, Homo sapien
gtggccggccggggtagctgagtcc

SEQ ID NO: 3055020 - DNA, 25 bp, Homo sapien
ctcgcgggaggagatgaccttgcca

SEQ ID NO: 3055021 - DNA, 25 bp, Homo sapien
gtacgcacctgacgggtggtcaccg

SEQ ID NO: 3055022 - DNA, 25 bp, Homo sapien
tgaccttgccatcctggacctcttc

SEQ ID NO: 3055023 - DNA, 25 bp, Homo sapien
ctcttccacaatggtacgcacctga

SEQ ID NO: 3055024 - DNA, 25 bp, Homo sapien
tcagactaggatctccaaggtaagg

SEQ ID NO: 3055025 - DNA, 25 bp, Homo sapien
agggccgaagccacgcagatactta

SEQ ID NO: 3055026 - DNA, 25 bp, Homo sapien
cagatgacaatctccagagctggga

SEQ ID NO: 3055027 - DNA, 25 bp, Homo sapien
tgagggacagccatcaactcctgga

SEQ ID NO: 3055028 - DNA, 25 bp, Homo sapien
atccagcaggattttgtattcctgg

SEQ ID NO: 3055029 - DNA, 25 bp, Homo sapien
ggtgcgccggagctccgagatctca

SEQ ID NO: 3055030 - DNA, 25 bp, Homo sapien
gccggagctccgagatctcactctt

SEQ ID NO: 3055031 - DNA, 25 bp, Homo sapien
cgccggagctccgagatctcactct

SEQ ID NO: 3055032 - DNA, 25 bp, Homo sapien
tgcgccggagctccgagatctcact

SEQ ID NO: 3055033 - DNA, 25 bp, Homo sapien
gcctttattctgagggagctcccta

SEQ ID NO: 3055034 - DNA, 25 bp, Homo sapien
catgtagcctggctcttgatgctag

SEQ ID NO: 3055035 - DNA, 25 bp, Homo sapien
gatgctagttcctgacttcttgagg

SEQ ID NO: 3055036 - DNA, 25 bp, Homo sapien
aatctaactgtggagagagtgtgcc

SEQ ID NO: 3055037 - DNA, 25 bp, Homo sapien
gtcacgcatctcgttgaggatgcgg

SEQ ID NO: 3055038 - DNA, 25 bp, Homo sapien
gaggatgcggctcaggtccacgcct

SEQ ID NO: 3055039 - DNA, 25 bp, Homo sapien
tccacattgatctcaccacccacct

SEQ ID NO: 3055040 - DNA, 25 bp, Homo sapien
ttctcatactggtcacgcatctcgt

SEQ ID NO: 3055041 - DNA, 25 bp, Homo sapien
gatgtgcgcatctggacccatcctg

SEQ ID NO: 3055042 - DNA, 25 bp, Homo sapien
gaggttccttgtgtacagagaagca

SEQ ID NO: 3055043 - DNA, 25 bp, Homo sapien
cagagaagcagtgtggtacaaagag

SEQ ID NO: 3055044 - DNA, 25 bp, Homo sapien
tctaaggtgactaatcccggtgcac

SEQ ID NO: 3055045 - DNA, 25 bp, Homo sapien
gaggttctcaatctgcatctccagg

SEQ ID NO: 3055046 - DNA, 25 bp, Homo sapien
ttgaggttctcaatctgcatctcca

SEQ ID NO: 3055047 - DNA, 25 bp, Homo sapien
ctccttgaggttctcaatctgcatc

SEQ ID NO: 3055048 - DNA, 25 bp, Homo sapien
gcatctccaggtcggctctggccag

SEQ ID NO: 3055049 - DNA, 25 bp, Homo sapien
caggccattgatgtcggcctccaca

SEQ ID NO: 3055050 - DNA, 25 bp, Homo sapien
tcggcctccacactcaggcgcaggg

SEQ ID NO: 3055051 - DNA, 25 bp, Homo sapien
gcctccacactcaggcgcagggcct

SEQ ID NO: 3055052 - DNA, 25 bp, Homo sapien
tgatgtcggcctccacactcaggcg

SEQ ID NO: 3055053 - DNA, 25 bp, Homo sapien
caggctgcttggacctgcagatcca

SEQ ID NO: 3055054 - DNA, 25 bp, Homo sapien
ctgccgtgggaatcagagacttcag

SEQ ID NO: 3055055 - DNA, 25 bp, Homo sapien
agcccaggctgcttggacctgcaga

SEQ ID NO: 3055056 - DNA, 25 bp, Homo sapien
cgtgggaatcagagacttcagccca

SEQ ID NO: 3055057 - DNA, 25 bp, Homo sapien
gagggtcgagtggaaacgaattcca

SEQ ID NO: 3055058 - DNA, 25 bp, Homo sapien
tgccacaagcaaccaaggaatcctg

SEQ ID NO: 3055059 - DNA, 25 bp, Homo sapien
ttcattttgccaggactctaaggag

SEQ ID NO: 3055060 - DNA, 25 bp, Homo sapien
cactgcatcctggactaaggagtgg

SEQ ID NO: 3055061 - DNA, 25 bp, Homo sapien
gatgttggcattgtccacggtggct

SEQ ID NO: 3055062 - DNA, 25 bp, Homo sapien
tagcaggatgttggcattgtccacg

SEQ ID NO: 3055063 - DNA, 25 bp, Homo sapien
gcattgtcaatctgtagcaggatgt

SEQ ID NO: 3055064 - DNA, 25 bp, Homo sapien
gtgcggaagtcatcagcagccagac

SEQ ID NO: 3055065 - DNA, 25 bp, Homo sapien
tcttcttcccccgatactcagtacc

SEQ ID NO: 3055066 - DNA, 25 bp, Homo sapien
ctcccttgccccgtgctgtattatt

SEQ ID NO: 3055067 - DNA, 25 bp, Homo sapien
cccttgccccgtgctgtattattgg

SEQ ID NO: 3055068 - DNA, 25 bp, Homo sapien
tgccccgtgctgtattattggcaga

SEQ ID NO: 3055069 - DNA, 25 bp, Homo sapien
tcctgtagtactggctgtagtcacg

SEQ ID NO: 3055070 - DNA, 25 bp, Homo sapien
ctgcatggtggccttctcacctcca

SEQ ID NO: 3055071 - DNA, 25 bp, Homo sapien
tgcatggtggccttctcacctccag

SEQ ID NO: 3055072 - DNA, 25 bp, Homo sapien
agccagcagcccatcaacaccccca

SEQ ID NO: 3055073 - DNA, 25 bp, Homo sapien
catcaacacccccaaagctgctgcc

SEQ ID NO: 3055074 - DNA, 25 bp, Homo sapien
caccaccagagccaaagctgtagca

SEQ ID NO: 3055075 - DNA, 25 bp, Homo sapien
aagctgtagcagctggagtagctgc

SEQ ID NO: 3055076 - DNA, 25 bp, Homo sapien
gagtagctgctacccccgagggtgc

SEQ ID NO: 3055077 - DNA, 25 bp, Homo sapien
agacagccggcaggaggtgcgggac

SEQ ID NO: 3055078 - DNA, 25 bp, Homo sapien
gcaggaggcaggcacacaggagaag

SEQ ID NO: 3055079 - DNA, 25 bp, Homo sapien
aggaggcaggcacacaggagaaggg

SEQ ID NO: 3055080 - DNA, 25 bp, Homo sapien
caggaggcaggcacacaggagaagg

SEQ ID NO: 3055081 - DNA, 25 bp, Homo sapien
ggtggcggcggcaggaggcaggcac

SEQ ID NO: 3055082 - DNA, 25 bp, Homo sapien
ccccaagttgtgtagggctgccggg

SEQ ID NO: 3055083 - DNA, 25 bp, Homo sapien
gttcgcccgcttcctttataggcca

SEQ ID NO: 3055084 - DNA, 25 bp, Homo sapien
caccaagtgggcgtagcgattacaa

SEQ ID NO: 3055085 - DNA, 25 bp, Homo sapien
cctgggctttcatcaccactggcca

SEQ ID NO: 3055086 - DNA, 25 bp, Homo sapien
tcctcgtgctgagtgccgtgcgtgt

SEQ ID NO: 3055087 - DNA, 25 bp, Homo sapien
caaatcctcgtgctgagtgccgtgc

SEQ ID NO: 3055088 - DNA, 25 bp, Homo sapien
tctccaaatcctcgtgctgagtgcc

SEQ ID NO: 3055089 - DNA, 25 bp, Homo sapien
ctcatttctccaaatcctcgtgctg

SEQ ID NO: 3055090 - DNA, 25 bp, Homo sapien
gggccctccagctatgctttcccat

SEQ ID NO: 3055091 - DNA, 25 bp, Homo sapien
cgggccctccagctatgctttccca

SEQ ID NO: 3055092 - DNA, 25 bp, Homo sapien
ggccctccagctatgctttcccatg

SEQ ID NO: 3055093 - DNA, 25 bp, Homo sapien
ggcgggccctccagctatgctttcc

SEQ ID NO: 3055094 - DNA, 25 bp, Homo sapien
tcacacgaggcattgaacttggagc

SEQ ID NO: 3055095 - DNA, 25 bp, Homo sapien
gagcaaagctttaatagtaggcact

SEQ ID NO: 3055096 - DNA, 25 bp, Homo sapien
acacgaggcattgaacttggagcaa

SEQ ID NO: 3055097 - DNA, 25 bp, Homo sapien
cttggagcaaagctttaatagtagg

SEQ ID NO: 3055098 - DNA, 25 bp, Homo sapien
acaggccatgcaccggggcccagac

SEQ ID NO: 3055099 - DNA, 25 bp, Homo sapien
cagaaagacaacaggccatgcaccg

SEQ ID NO: 3055100 - DNA, 25 bp, Homo sapien
agctgatggctgtgccgtggccctc

SEQ ID NO: 3055101 - DNA, 25 bp, Homo sapien
ggagctgatggctgtgccgtggccc

SEQ ID NO: 3055102 - DNA, 25 bp, Homo sapien
aggggtctcagtgggtggagaagtg

SEQ ID NO: 3055103 - DNA, 25 bp, Homo sapien
tctcagtgggtggagaagtggacct

SEQ ID NO: 3055104 - DNA, 25 bp, Homo sapien
ctgtcgcagacagaaaggggtctca

SEQ ID NO: 3055105 - DNA, 25 bp, Homo sapien
gggtctcagtgggtggagaagtgga

SEQ ID NO: 3055106 - DNA, 25 bp, Homo sapien
ctccaacctggacttcctccacgat

SEQ ID NO: 3055107 - DNA, 25 bp, Homo sapien
caacctggacttcctccacgatggc

SEQ ID NO: 3055108 - DNA, 25 bp, Homo sapien
aacctggacttcctccacgatggca

SEQ ID NO: 3055109 - DNA, 25 bp, Homo sapien
agaagaagaccacctctccaacctg

SEQ ID NO: 3055110 - DNA, 25 bp, Homo sapien
ggtgggctgcgaggccagggacaag

SEQ ID NO: 3055111 - DNA, 25 bp, Homo sapien
gaaagggcaggggttcagcacagca

SEQ ID NO: 3055112 - DNA, 25 bp, Homo sapien
acagcagtaggtctggcggcactct

SEQ ID NO: 3055113 - DNA, 25 bp, Homo sapien
atgaaagggcaggggttcagcacag

SEQ ID NO: 3055114 - DNA, 25 bp, Homo sapien
agcagtaggtctggcggcactctgt

SEQ ID NO: 3055115 - DNA, 25 bp, Homo sapien
gctgcaacgtgtgactaagcatgga

SEQ ID NO: 3055116 - DNA, 25 bp, Homo sapien
taagcatggagactccgggacactc

SEQ ID NO: 3055117 - DNA, 25 bp, Homo sapien
ccattgcctacgtgatctagtccag

SEQ ID NO: 3055118 - DNA, 25 bp, Homo sapien
tgtgagccatgcttaccccgagatc

SEQ ID NO: 3055119 - DNA, 25 bp, Homo sapien
gccacgtcttcacgtccagaaggac

SEQ ID NO: 3055120 - DNA, 25 bp, Homo sapien
tcctcaacctccagcaagcggcggt

SEQ ID NO: 3055121 - DNA, 25 bp, Homo sapien
aacctccagcaagcggcggtaggtg

SEQ ID NO: 3055122 - DNA, 25 bp, Homo sapien
gcgtcctcaacctccagcaagcggc

SEQ ID NO: 3055123 - DNA, 25 bp, Homo sapien
cctggtgctccgtgtcgcagcagag

SEQ ID NO: 3055124 - DNA, 25 bp, Homo sapien
gctccgtgtcgcagcagagctcgca

SEQ ID NO: 3055125 - DNA, 25 bp, Homo sapien
ggtgctccgtgtcgcagcagagctc

SEQ ID NO: 3055126 - DNA, 25 bp, Homo sapien
cttgtggtcctggtgctccgtgtcg

SEQ ID NO: 3055127 - DNA, 25 bp, Homo sapien
ctgttaagcccctgcagctgggccg

SEQ ID NO: 3055128 - DNA, 25 bp, Homo sapien
tgggccggcagggtcctgtaacaca

SEQ ID NO: 3055129 - DNA, 25 bp, Homo sapien
agctgggccggcagggtcctgtaac

SEQ ID NO: 3055130 - DNA, 25 bp, Homo sapien
gggccggcagggtcctgtaacacac

SEQ ID NO: 3055131 - DNA, 25 bp, Homo sapien
ctccatctccaccaggctgccctcc

SEQ ID NO: 3055132 - DNA, 25 bp, Homo sapien
tccaccaggctgccctccagcgatg

SEQ ID NO: 3055133 - DNA, 25 bp, Homo sapien
accaggctgccctccagcgatgctt

SEQ ID NO: 3055134 - DNA, 25 bp, Homo sapien
tccatctccaccaggctgccctcca

SEQ ID NO: 3055135 - DNA, 25 bp, Homo sapien
agagctccatatctctatccagcca

SEQ ID NO: 3055136 - DNA, 25 bp, Homo sapien
tccatatctctatccagccactctg

SEQ ID NO: 3055137 - DNA, 25 bp, Homo sapien
cagagacgtagagctccatatctct

SEQ ID NO: 3055138 - DNA, 25 bp, Homo sapien
atatctctatccagccactctgcag

SEQ ID NO: 3055139 - DNA, 25 bp, Homo sapien
ttttcctactgaactgcagcacctc

SEQ ID NO: 3055140 - DNA, 25 bp, Homo sapien
gacagcctgtggatctgccagtgct

SEQ ID NO: 3055141 - DNA, 25 bp, Homo sapien
taggataccggagatactcagcctg

SEQ ID NO: 3055142 - DNA, 25 bp, Homo sapien
gcttgccaagggtatacatatgtat

SEQ ID NO: 3055143 - DNA, 25 bp, Homo sapien
agaaccagccctcggcatccttgca

SEQ ID NO: 3055144 - DNA, 25 bp, Homo sapien
ggatgcagctcaggttcactccagg

SEQ ID NO: 3055145 - DNA, 25 bp, Homo sapien
cacgcatctcattcaggatgcagct

SEQ ID NO: 3055146 - DNA, 25 bp, Homo sapien
atgtcttgtcctggtcacgcatctc

SEQ ID NO: 3055147 - DNA, 25 bp, Homo sapien
tctcaaacatacagggctgtgaata

SEQ ID NO: 3055148 - DNA, 25 bp, Homo sapien
ggaattcacccatccccaacaagtg

SEQ ID NO: 3055149 - DNA, 25 bp, Homo sapien
ccaacacacaccgtgacgcgggact

SEQ ID NO: 3055150 - DNA, 25 bp, Homo sapien
ttctttccctcggagagacaggtac

SEQ ID NO: 3055151 - DNA, 25 bp, Homo sapien
gagcagcacagagctcggctgagaa

SEQ ID NO: 3055152 - DNA, 25 bp, Homo sapien
tgtcctgcttctcggggagtaggct

SEQ ID NO: 3055153 - DNA, 25 bp, Homo sapien
gagctcggctgagaaggaagacaca

SEQ ID NO: 3055154 - DNA, 25 bp, Homo sapien
cacaggacagggcatgtaaggcctc

SEQ ID NO: 3055155 - DNA, 25 bp, Homo sapien
tcaggtagaccaggtcctccttgag

SEQ ID NO: 3055156 - DNA, 25 bp, Homo sapien
tcttcttcaggtagaccaggtcctc

SEQ ID NO: 3055157 - DNA, 25 bp, Homo sapien
aggtagaccaggtcctccttgaggt

SEQ ID NO: 3055158 - DNA, 25 bp, Homo sapien
cttcaggtagaccaggtcctccttg

SEQ ID NO: 3055159 - DNA, 25 bp, Homo sapien
ttggccccggccagggtcagcttgt

SEQ ID NO: 3055160 - DNA, 25 bp, Homo sapien
tccaggttggccccggccagggtca

SEQ ID NO: 3055161 - DNA, 25 bp, Homo sapien
gttggccccggccagggtcagcttg

SEQ ID NO: 3055162 - DNA, 25 bp, Homo sapien
aggttggccccggccagggtcagct

SEQ ID NO: 3055163 - DNA, 25 bp, Homo sapien
cggcagccaggtgggcatcatccac

SEQ ID NO: 3055164 - DNA, 25 bp, Homo sapien
ttggtgcagaggtcatcggcagcca

SEQ ID NO: 3055165 - DNA, 25 bp, Homo sapien
tgcagaggtcatcggcagccaggtg

SEQ ID NO: 3055166 - DNA, 25 bp, Homo sapien
gtgcagaggtcatcggcagccaggt

SEQ ID NO: 3055167 - DNA, 25 bp, Homo sapien
tgtagccagcacgaagctggaatta

SEQ ID NO: 3055168 - DNA, 25 bp, Homo sapien
ctgtagccagcacgaagctggaatt

SEQ ID NO: 3055169 - DNA, 25 bp, Homo sapien
gtagccagcacgaagctggaattac

SEQ ID NO: 3055170 - DNA, 25 bp, Homo sapien
gagacggggtctccatgagaaaatg

SEQ ID NO: 3055171 - DNA, 25 bp, Homo sapien
tgagaaaatgcccttggcagcctcc

SEQ ID NO: 3055172 - DNA, 25 bp, Homo sapien
tgggagagacggggtctccatgaga

SEQ ID NO: 3055173 - DNA, 25 bp, Homo sapien
gagaaaatgcccttggcagcctcca

SEQ ID NO: 3055174 - DNA, 25 bp, Homo sapien
gggtgatgagagtccccgtggtctt

SEQ ID NO: 3055175 - DNA, 25 bp, Homo sapien
gtgatgagagtccccgtggtcttct

SEQ ID NO: 3055176 - DNA, 25 bp, Homo sapien
ggtgatgagagtccccgtggtcttc

SEQ ID NO: 3055177 - DNA, 25 bp, Homo sapien
gggtgatgagagtccccgtggtctt

SEQ ID NO: 3055178 - DNA, 25 bp, Homo sapien
ggtgatgagagtccccgtggtcttc

SEQ ID NO: 3055179 - DNA, 25 bp, Homo sapien
tgtgaaaacacggagagaatgcgtg

SEQ ID NO: 3055180 - DNA, 25 bp, Homo sapien
cacagcgagggtcggctgtgaaaac

SEQ ID NO: 3055181 - DNA, 25 bp, Homo sapien
tgaggtgctggctgatcccgaagat

SEQ ID NO: 3055182 - DNA, 25 bp, Homo sapien
tgtagggtgactcgaggcacagccc

SEQ ID NO: 3055183 - DNA, 25 bp, Homo sapien
caaccccaatatctgatctggcact

SEQ ID NO: 3055184 - DNA, 25 bp, Homo sapien
gcttccaaggggagattgcaggaat

SEQ ID NO: 3055185 - DNA, 25 bp, Homo sapien
tgcttccaaggggagattgcaggaa

SEQ ID NO: 3055186 - DNA, 25 bp, Homo sapien
cttccaaggggagattgcaggaatt

SEQ ID NO: 3055187 - DNA, 25 bp, Homo sapien
agacaaagcccctcgtaggcagcac

SEQ ID NO: 3055188 - DNA, 25 bp, Homo sapien
cagacaaagcccctcgtaggcagca

SEQ ID NO: 3055189 - DNA, 25 bp, Homo sapien
ggagcagacaaagcccctcgtaggc

SEQ ID NO: 3055190 - DNA, 25 bp, Homo sapien
gcaggagcagacaaagcccctcgta

SEQ ID NO: 3055191 - DNA, 25 bp, Homo sapien
cgcccccgcagcagggcatccgcca

SEQ ID NO: 3055192 - DNA, 25 bp, Homo sapien
gcccccgcagcagggcatccgccac

SEQ ID NO: 3055193 - DNA, 25 bp, Homo sapien
acaggtgtagccaccgctgtagcct

SEQ ID NO: 3055194 - DNA, 25 bp, Homo sapien
gccaccgctgtagcctcccccaagt

SEQ ID NO: 3055195 - DNA, 25 bp, Homo sapien
caccgctgtagcctcccccaagtcc

SEQ ID NO: 3055196 - DNA, 25 bp, Homo sapien
cccacccaggttacaggtgtagcca

SEQ ID NO: 3055197 - DNA, 25 bp, Homo sapien
aggtggagaactggcagatgctggt

SEQ ID NO: 3055198 - DNA, 25 bp, Homo sapien
agaaacccccgccaggtgtccacag

SEQ ID NO: 3055199 - DNA, 25 bp, Homo sapien
gtggagaactggcagatgctggtag

SEQ ID NO: 3055200 - DNA, 25 bp, Homo sapien
ccagggtgtccatgggtcgggtgaa

SEQ ID NO: 3055201 - DNA, 25 bp, Homo sapien
ggaaatagacgtggccgctgaactg

SEQ ID NO: 3055202 - DNA, 25 bp, Homo sapien
caaggatccctgtgtctgagggaaa

SEQ ID NO: 3055203 - DNA, 25 bp, Homo sapien
tcttgggattcttccaagtccgcgg

SEQ ID NO: 3055204 - DNA, 25 bp, Homo sapien
gagatacagcccacaggttcaagga

SEQ ID NO: 3055205 - DNA, 25 bp, Homo sapien
ctgagcaatgtcagtccagagcagt

SEQ ID NO: 3055206 - DNA, 25 bp, Homo sapien
caggatctgtgcaggagccagcgtc

SEQ ID NO: 3055207 - DNA, 25 bp, Homo sapien
atgtcagtccagagcagtcccggag

SEQ ID NO: 3055208 - DNA, 25 bp, Homo sapien
cacagaggagcaggatctgtgcagg

SEQ ID NO: 3055209 - DNA, 25 bp, Homo sapien
tgactggtttccaggaactgtcagc

SEQ ID NO: 3055210 - DNA, 25 bp, Homo sapien
ctgactggtttccaggaactgtcag

SEQ ID NO: 3055211 - DNA, 25 bp, Homo sapien
tctgactggtttccaggaactgtca

SEQ ID NO: 3055212 - DNA, 25 bp, Homo sapien
ctctgactggtttccaggaactgtc

SEQ ID NO: 3055213 - DNA, 25 bp, Homo sapien
ttggacacttcctcaaggtagcagc

SEQ ID NO: 3055214 - DNA, 25 bp, Homo sapien
tccatggagtgttctgcctgagccc

SEQ ID NO: 3055215 - DNA, 25 bp, Homo sapien
actgaccaacaagggaggagaagca

SEQ ID NO: 3055216 - DNA, 25 bp, Homo sapien
cgaggaccagagcaagccatcatct

SEQ ID NO: 3055217 - DNA, 25 bp, Homo sapien
gccagctgcgtgaacgcccgtaact

SEQ ID NO: 3055218 - DNA, 25 bp, Homo sapien
agaagaccaagggtgcgtctggtcc

SEQ ID NO: 3055219 - DNA, 25 bp, Homo sapien
gggtgcgtctggtcctcagaactgc

SEQ ID NO: 3055220 - DNA, 25 bp, Homo sapien
tggcagtgttcacccgccagctgcg

SEQ ID NO: 3055221 - DNA, 25 bp, Homo sapien
gagccctctctagaatgtggaaaga

SEQ ID NO: 3055222 - DNA, 25 bp, Homo sapien
acgagacaccgtggagacctgtgca

SEQ ID NO: 3055223 - DNA, 25 bp, Homo sapien
tcagtggagcaaagtgagcctacaa

SEQ ID NO: 3055224 - DNA, 25 bp, Homo sapien
tacacaggtgcatgctcacaggttg

SEQ ID NO: 3055225 - DNA, 25 bp, Homo sapien
gagactgaggctgtaggatcgctag

SEQ ID NO: 3055226 - DNA, 25 bp, Homo sapien
actgaggctgtaggatcgctagagc

SEQ ID NO: 3055227 - DNA, 25 bp, Homo sapien
agactgaggctgtaggatcgctaga

SEQ ID NO: 3055228 - DNA, 25 bp, Homo sapien
aatcagataagatggcctgaaaggc

SEQ ID NO: 3055229 - DNA, 25 bp, Homo sapien
tctgacctacccaggacacatggaa

SEQ ID NO: 3055230 - DNA, 25 bp, Homo sapien
ctgtgttatgccaacctcctctgag

SEQ ID NO: 3055231 - DNA, 25 bp, Homo sapien
aaaggctgccaccagttctaatgct

SEQ ID NO: 3055232 - DNA, 25 bp, Homo sapien
gcagctccccagcgtagccctcccc

SEQ ID NO: 3055233 - DNA, 25 bp, Homo sapien
ccgcagctccccagcgtagccctcc

SEQ ID NO: 3055234 - DNA, 25 bp, Homo sapien
agctccccagcgtagccctccccca

SEQ ID NO: 3055235 - DNA, 25 bp, Homo sapien
gctccccagcgtagccctcccccat

SEQ ID NO: 3055236 - DNA, 25 bp, Homo sapien
tgtatgtagcctcaggaccgtgatg

SEQ ID NO: 3055237 - DNA, 25 bp, Homo sapien
tatgtagcctcaggaccgtgatgat

SEQ ID NO: 3055238 - DNA, 25 bp, Homo sapien
gatgtatgtagcctcaggaccgtga

SEQ ID NO: 3055239 - DNA, 25 bp, Homo sapien
gtatgtagcctcaggaccgtgatga

SEQ ID NO: 3055240 - DNA, 25 bp, Homo sapien
taagaattcaacagagaaacggcag

SEQ ID NO: 3055241 - DNA, 25 bp, Homo sapien
actgtccaagggatcgctgatgatt

SEQ ID NO: 3055242 - DNA, 25 bp, Homo sapien
tgattacgataaaaagaaactagtg

SEQ ID NO: 3055243 - DNA, 25 bp, Homo sapien
aggaagacccttactactgtccaag

SEQ ID NO: 3055244 - DNA, 25 bp, Homo sapien
gaacatatgccagttcctcgtagag

SEQ ID NO: 3055245 - DNA, 25 bp, Homo sapien
tggagaagtaattcagctacagggt

SEQ ID NO: 3055246 - DNA, 25 bp, Homo sapien
tacagggtgaccaacgcaagaacat

SEQ ID NO: 3055247 - DNA, 25 bp, Homo sapien
tgagcatccggaatatggagaagta

SEQ ID NO: 3055248 - DNA, 25 bp, Homo sapien
taaacagaggtcaagcaataggcgc

SEQ ID NO: 3055249 - DNA, 25 bp, Homo sapien
taagattacaaacaactatggccgg

SEQ ID NO: 3055250 - DNA, 25 bp, Homo sapien
caataggcgcctggcagtgtcaagc

SEQ ID NO: 3055251 - DNA, 25 bp, Homo sapien
gactggctaaggacgatcagctgaa

SEQ ID NO: 3055252 - DNA, 25 bp, Homo sapien
gaagttaagtgttgggaggccatcc

SEQ ID NO: 3055253 - DNA, 25 bp, Homo sapien
taacagccttggtttaagggcgcag

SEQ ID NO: 3055254 - DNA, 25 bp, Homo sapien
taaatgcaagggctataacaagggc

SEQ ID NO: 3055255 - DNA, 25 bp, Homo sapien
ggttgcttggaaatcttggcgcccc

SEQ ID NO: 3055256 - DNA, 25 bp, Homo sapien
cccagctagtcggtgttagagccat

SEQ ID NO: 3055257 - DNA, 25 bp, Homo sapien
ggaggtccagcttccatagactcta

SEQ ID NO: 3055258 - DNA, 25 bp, Homo sapien
ccccaagtgtataaagcgtgtgcac

SEQ ID NO: 3055259 - DNA, 25 bp, Homo sapien
ggtcttcaatttggtaggcccagaa

SEQ ID NO: 3055260 - DNA, 25 bp, Homo sapien
tatccccggtggcaagaataggagg

SEQ ID NO: 3055261 - DNA, 25 bp, Homo sapien
tacccatcttaggtcctcggctggg

SEQ ID NO: 3055262 - DNA, 25 bp, Homo sapien
caggcattgctggtgtctcactcca

SEQ ID NO: 3055263 - DNA, 25 bp, Homo sapien
caggaaactgggagcgtgacaagtc

SEQ ID NO: 3055264 - DNA, 25 bp, Homo sapien
tcaaagctttatcaaagctggcaat

SEQ ID NO: 3055265 - DNA, 25 bp, Homo sapien
cttcaaagctttatcaaagctggca

SEQ ID NO: 3055266 - DNA, 25 bp, Homo sapien
agctttatcaaagctggcaatttcc

SEQ ID NO: 3055267 - DNA, 25 bp, Homo sapien
caaagctttatcaaagctggcaatt

SEQ ID NO: 3055268 - DNA, 25 bp, Homo sapien
cacgcacacaggctgacaagcaata

SEQ ID NO: 3055269 - DNA, 25 bp, Homo sapien
ctttatttcctgcaccacacgcaca

SEQ ID NO: 3055270 - DNA, 25 bp, Homo sapien
caataggagattgagaggtgctgtg

SEQ ID NO: 3055271 - DNA, 25 bp, Homo sapien
gcacacaggctgacaagcaatagga

SEQ ID NO: 3055272 - DNA, 25 bp, Homo sapien
ctcaagtcaacaagaaccagggtgg

SEQ ID NO: 3055273 - DNA, 25 bp, Homo sapien
ggctaccattagcatgggcatcaag

SEQ ID NO: 3055274 - DNA, 25 bp, Homo sapien
agacacttgtggttacaaacagtag

SEQ ID NO: 3055275 - DNA, 25 bp, Homo sapien
gcacattgttgggaaggcgctcaca

SEQ ID NO: 3055276 - DNA, 25 bp, Homo sapien
cagcccaggttcatgaacacagagg

SEQ ID NO: 3055277 - DNA, 25 bp, Homo sapien
tccagcccaggttcatgaacacaga

SEQ ID NO: 3055278 - DNA, 25 bp, Homo sapien
agctccagcccaggttcatgaacac

SEQ ID NO: 3055279 - DNA, 25 bp, Homo sapien
ccaggttcatgaacacagagggtgg

SEQ ID NO: 3055280 - DNA, 25 bp, Homo sapien
catgtcctgcggctccttaaagagg

SEQ ID NO: 3055281 - DNA, 25 bp, Homo sapien
tcacatggcctgcactcggaaggtg

SEQ ID NO: 3055282 - DNA, 25 bp, Homo sapien
tgtgtggccccaaacaagtgtcctt

SEQ ID NO: 3055283 - DNA, 25 bp, Homo sapien
tgcacaagcttacatgacacgcctg

SEQ ID NO: 3055284 - DNA, 25 bp, Homo sapien
ccccgggctgctccaccatcccacc

SEQ ID NO: 3055285 - DNA, 25 bp, Homo sapien
cagcccccgggctgctccaccatcc

SEQ ID NO: 3055286 - DNA, 25 bp, Homo sapien
gcccccgggctgctccaccatccca

SEQ ID NO: 3055287 - DNA, 25 bp, Homo sapien
cccgggctgctccaccatcccaccc

SEQ ID NO: 3055288 - DNA, 25 bp, Homo sapien
tgccactgctgcagagttggagagc

SEQ ID NO: 3055289 - DNA, 25 bp, Homo sapien
tgtttgttttgactgctgctgccac

SEQ ID NO: 3055290 - DNA, 25 bp, Homo sapien
ccccccgtgtttgttttgactgctg

SEQ ID NO: 3055291 - DNA, 25 bp, Homo sapien
ctgccactgctgcagagttggagag

SEQ ID NO: 3055292 - DNA, 25 bp, Homo sapien
cagaggtgtctatgcaaatgatatg

SEQ ID NO: 3055293 - DNA, 25 bp, Homo sapien
aaaagtggatggagatctggaatcc

SEQ ID NO: 3055294 - DNA, 25 bp, Homo sapien
tgacactacggttcccactgaaggg

SEQ ID NO: 3055295 - DNA, 25 bp, Homo sapien
tgcaaagtccatgcaaataagcaca

SEQ ID NO: 3055296 - DNA, 25 bp, Homo sapien
tcatcggcacgacgatctgcagctt

SEQ ID NO: 3055297 - DNA, 25 bp, Homo sapien
atctgcagcttgtccggctggcggc

SEQ ID NO: 3055298 - DNA, 25 bp, Homo sapien
tctgcagcttgtccggctggcggca

SEQ ID NO: 3055299 - DNA, 25 bp, Homo sapien
tcggcacgacgatctgcagcttgtc

SEQ ID NO: 3055300 - DNA, 25 bp, Homo sapien
tgggcatcttgccagttggccagct

SEQ ID NO: 3055301 - DNA, 25 bp, Homo sapien
ctcagctgccgcctgtaatgggcat

SEQ ID NO: 3055302 - DNA, 25 bp, Homo sapien
tgccgcctgtaatgggcatcttgcc

SEQ ID NO: 3055303 - DNA, 25 bp, Homo sapien
ctttctggagcatcttccacctcag

SEQ ID NO: 3055304 - DNA, 25 bp, Homo sapien
acataattcatgtccaggtgtgaag

SEQ ID NO: 3055305 - DNA, 25 bp, Homo sapien
cgttcatccgcgttgcctcatccag

SEQ ID NO: 3055306 - DNA, 25 bp, Homo sapien
gatgtcaccacgttcatccgcgttg

SEQ ID NO: 3055307 - DNA, 25 bp, Homo sapien
cagggctgatgtcaccacgttcatc

SEQ ID NO: 3055308 - DNA, 25 bp, Homo sapien
cctcctggggcacgaactcctccgc

SEQ ID NO: 3055309 - DNA, 25 bp, Homo sapien
ctggggcacgaactcctccgcaggc

SEQ ID NO: 3055310 - DNA, 25 bp, Homo sapien
gggcacgaactcctccgcaggcgtg

SEQ ID NO: 3055311 - DNA, 25 bp, Homo sapien
gcacgaactcctccgcaggcgtgaa

SEQ ID NO: 3055312 - DNA, 25 bp, Homo sapien
gatcctcactgtagcgaaaatcata

SEQ ID NO: 3055313 - DNA, 25 bp, Homo sapien
ccgcacctgctctcgatcctcactg

SEQ ID NO: 3055314 - DNA, 25 bp, Homo sapien
ctctcgatcctcactgtagcgaaaa

SEQ ID NO: 3055315 - DNA, 25 bp, Homo sapien
cttccccccgcatgatatccgctgc

SEQ ID NO: 3055316 - DNA, 25 bp, Homo sapien
cttaggctggatgtgtcccctctgg

SEQ ID NO: 3055317 - DNA, 25 bp, Homo sapien
tcatcctccttagagacgttctgag

SEQ ID NO: 3055318 - DNA, 25 bp, Homo sapien
atacacagggtctgagatcatcctc

SEQ ID NO: 3055319 - DNA, 25 bp, Homo sapien
tctccataaaatacacagggtctga

SEQ ID NO: 3055320 - DNA, 25 bp, Homo sapien
cctccttagagacgttctgagctcc

SEQ ID NO: 3055321 - DNA, 25 bp, Homo sapien
caggcacagacgtaggaaagtgggc

SEQ ID NO: 3055322 - DNA, 25 bp, Homo sapien
aggcacagacgtaggaaagtgggca

SEQ ID NO: 3055323 - DNA, 25 bp, Homo sapien
cagaggcacgctgtatgggtaatgg

SEQ ID NO: 3055324 - DNA, 25 bp, Homo sapien
tgtatgggtaatgggtggcagaccc

SEQ ID NO: 3055325 - DNA, 25 bp, Homo sapien
gggggttgctggcggagggtcttca

SEQ ID NO: 3055326 - DNA, 25 bp, Homo sapien
cacgctgtatgggtaatgggtggca

SEQ ID NO: 3055327 - DNA, 25 bp, Homo sapien
gcatgcccccacaatccatgtactt

SEQ ID NO: 3055328 - DNA, 25 bp, Homo sapien
tctcaatcagcatgcccccacaatc

SEQ ID NO: 3055329 - DNA, 25 bp, Homo sapien
tcagcatgcccccacaatccatgta

SEQ ID NO: 3055330 - DNA, 25 bp, Homo sapien
ctgcatctcaatcagcatgccccca

SEQ ID NO: 3055331 - DNA, 25 bp, Homo sapien
cttgatggaactgtcacctgctggg

SEQ ID NO: 3055332 - DNA, 25 bp, Homo sapien
ttctggactccaagtgtcatgtggg

SEQ ID NO: 3055333 - DNA, 25 bp, Homo sapien
tccagagtcaggtagctgccaaggg

SEQ ID NO: 3055334 - DNA, 25 bp, Homo sapien
ggtggaaacggacaagactcagttc

SEQ ID NO: 3055335 - DNA, 25 bp, Homo sapien
ctgcaacttttcagtctcagcccca

SEQ ID NO: 3055336 - DNA, 25 bp, Homo sapien
gcatctggatttccttctccgaagc

SEQ ID NO: 3055337 - DNA, 25 bp, Homo sapien
cagctgcttctgcaacttttcagtc

SEQ ID NO: 3055338 - DNA, 25 bp, Homo sapien
tttccttctccgaagccagctgctt

SEQ ID NO: 3055339 - DNA, 25 bp, Homo sapien
ccaaaaccagtgaacccccatctga

SEQ ID NO: 3055340 - DNA, 25 bp, Homo sapien
cccaaaaccagtgaacccccatctg

SEQ ID NO: 3055341 - DNA, 25 bp, Homo sapien
caaaaccagtgaacccccatctgag

SEQ ID NO: 3055342 - DNA, 25 bp, Homo sapien
gacagctcagccatctgttggctgg

SEQ ID NO: 3055343 - DNA, 25 bp, Homo sapien
cacctccgacagctcagccatctgt

SEQ ID NO: 3055344 - DNA, 25 bp, Homo sapien
tgctgctgccgttcatagttttcca

SEQ ID NO: 3055345 - DNA, 25 bp, Homo sapien
ttcatagttttccagcctgagcacc

SEQ ID NO: 3055346 - DNA, 25 bp, Homo sapien
aaatgaggtcttgccaggttcccag

SEQ ID NO: 3055347 - DNA, 25 bp, Homo sapien
aacccagtggtactccactccctgg

SEQ ID NO: 3055348 - DNA, 25 bp, Homo sapien
cataggtgcgatcctattactgatc

SEQ ID NO: 3055349 - DNA, 25 bp, Homo sapien
tactgaccctgtcggcatagtgtac

SEQ ID NO: 3055350 - DNA, 25 bp, Homo sapien
actccagaatgagcatctgttcctc

SEQ ID NO: 3055351 - DNA, 25 bp, Homo sapien
ttctctcagctgatgattctcctcc

SEQ ID NO: 3055352 - DNA, 25 bp, Homo sapien
tgggcagtggtgctggtgcagcaat

SEQ ID NO: 3055353 - DNA, 25 bp, Homo sapien
ggcagtggtgctggtgcagcaatgc

SEQ ID NO: 3055354 - DNA, 25 bp, Homo sapien
agtggtgctggtgcagcaatgcctc

SEQ ID NO: 3055355 - DNA, 25 bp, Homo sapien
cagtggtgctggtgcagcaatgcct

SEQ ID NO: 3055356 - DNA, 25 bp, Homo sapien
catcagaatctgagtagagctggag

SEQ ID NO: 3055357 - DNA, 25 bp, Homo sapien
catcccgcaagttcacctggtgtct

SEQ ID NO: 3055358 - DNA, 25 bp, Homo sapien
ggaggagctcatcccgcaagttcac

SEQ ID NO: 3055359 - DNA, 25 bp, Homo sapien
tcctcatcagaatctgagtagagct

SEQ ID NO: 3055360 - DNA, 25 bp, Homo sapien
tcctccatcaaaacactgttctgtt

SEQ ID NO: 3055361 - DNA, 25 bp, Homo sapien
tcaaaacactgttctgtttcaccag

SEQ ID NO: 3055362 - DNA, 25 bp, Homo sapien
tccatcaaaacactgttctgtttca

SEQ ID NO: 3055363 - DNA, 25 bp, Homo sapien
tctcctccatcaaaacactgttctg

SEQ ID NO: 3055364 - DNA, 25 bp, Homo sapien
atcccataggtaacgctctcccaga

SEQ ID NO: 3055365 - DNA, 25 bp, Homo sapien
ggaccatcccataggtaacgctctc

SEQ ID NO: 3055366 - DNA, 25 bp, Homo sapien
ctgcaggaccatcccataggtaacg

SEQ ID NO: 3055367 - DNA, 25 bp, Homo sapien
aggtaacgctctcccagacaggtgg

SEQ ID NO: 3055368 - DNA, 25 bp, Homo sapien
ataacatcactttgacgtcttcctg

SEQ ID NO: 3055369 - DNA, 25 bp, Homo sapien
tcctccagcaaatataacatcactt

SEQ ID NO: 3055370 - DNA, 25 bp, Homo sapien
aatataacatcactttgacgtcttc

SEQ ID NO: 3055371 - DNA, 25 bp, Homo sapien
cagcaaatataacatcactttgacg

SEQ ID NO: 3055372 - DNA, 25 bp, Homo sapien
ctggcggaggtaggttaggacacag

SEQ ID NO: 3055373 - DNA, 25 bp, Homo sapien
tggcggaggtaggttaggacacagt

SEQ ID NO: 3055374 - DNA, 25 bp, Homo sapien
ggcggaggtaggttaggacacagtg

SEQ ID NO: 3055375 - DNA, 25 bp, Homo sapien
cagaaactgggctctccggacacct

SEQ ID NO: 3055376 - DNA, 25 bp, Homo sapien
ccaggctcagaaactgggctctccg

SEQ ID NO: 3055377 - DNA, 25 bp, Homo sapien
ggctcagaaactgggctctccggac

SEQ ID NO: 3055378 - DNA, 25 bp, Homo sapien
tgaggtaagggggtcacagtcctcc

SEQ ID NO: 3055379 - DNA, 25 bp, Homo sapien
ggtcgccggccaacgtaggcggctg

SEQ ID NO: 3055380 - DNA, 25 bp, Homo sapien
ctccagctcccgaataaaggcggcg

SEQ ID NO: 3055381 - DNA, 25 bp, Homo sapien
ctcccgaataaaggcggcgcgctca

SEQ ID NO: 3055382 - DNA, 25 bp, Homo sapien
gccggccaacgtaggcggctggcgt

SEQ ID NO: 3055383 - DNA, 25 bp, Homo sapien
ttccgagaggaactgggatccagag

SEQ ID NO: 3055384 - DNA, 25 bp, Homo sapien
gcatagaccggacatccccttggat

SEQ ID NO: 3055385 - DNA, 25 bp, Homo sapien
tccagaggtggctcgggatcctact

SEQ ID NO: 3055386 - DNA, 25 bp, Homo sapien
caaacggcccttggaatacgaagcg

SEQ ID NO: 3055387 - DNA, 25 bp, Homo sapien
tcgagtctgccgtccgctgctgcgg

SEQ ID NO: 3055388 - DNA, 25 bp, Homo sapien
gtctgccgtccgctgctgcggcggg

SEQ ID NO: 3055389 - DNA, 25 bp, Homo sapien
gagtctgccgtccgctgctgcggcg

SEQ ID NO: 3055390 - DNA, 25 bp, Homo sapien
ctcgagtctgccgtccgctgctgcg

SEQ ID NO: 3055391 - DNA, 25 bp, Homo sapien
gactcccaaaccagggctccacatc

SEQ ID NO: 3055392 - DNA, 25 bp, Homo sapien
tggactcccaaaccagggctccaca

SEQ ID NO: 3055393 - DNA, 25 bp, Homo sapien
tcccaaaccagggctccacatcccc

SEQ ID NO: 3055394 - DNA, 25 bp, Homo sapien
ccaaaccagggctccacatcccctg

SEQ ID NO: 3055395 - DNA, 25 bp, Homo sapien
cagagaagcgaactgactttctcaa

SEQ ID NO: 3055396 - DNA, 25 bp, Homo sapien
gactttctcaaggttgcaaggctca

SEQ ID NO: 3055397 - DNA, 25 bp, Homo sapien
aggaaactgacgttcagagaagcga

SEQ ID NO: 3055398 - DNA, 25 bp, Homo sapien
ggctcagctagctcttccatgaaaa

SEQ ID NO: 3055399 - DNA, 25 bp, Homo sapien
tcatgtggcttgagcgagcagtcct

SEQ ID NO: 3055400 - DNA, 25 bp, Homo sapien
tgacggcctactgtgaagctccaat

SEQ ID NO: 3055401 - DNA, 25 bp, Homo sapien
gaatatcactataaatagcccggca

SEQ ID NO: 3055402 - DNA, 25 bp, Homo sapien
cccaattcgagtgtttcctgccagg

SEQ ID NO: 3055403 - DNA, 25 bp, Homo sapien
tgtgtctcatcacctagtgtctgga

SEQ ID NO: 3055404 - DNA, 25 bp, Homo sapien
tacagccagcccttaattggaagca

SEQ ID NO: 3055405 - DNA, 25 bp, Homo sapien
tttgccgggtgcattgtaaccagca

SEQ ID NO: 3055406 - DNA, 25 bp, Homo sapien
tctagtcggcagagctcagctctgt

SEQ ID NO: 3055407 - DNA, 25 bp, Homo sapien
tcacaggcacggctaagggcagagt

SEQ ID NO: 3055408 - DNA, 25 bp, Homo sapien
tgggaacagcatggacaaagaacag

SEQ ID NO: 3055409 - DNA, 25 bp, Homo sapien
tggacccaaagccataagcctcggg

SEQ ID NO: 3055410 - DNA, 25 bp, Homo sapien
tattgggttaaatccactccggctc

SEQ ID NO: 3055411 - DNA, 25 bp, Homo sapien
gccaggccgctagggaagcccctca

SEQ ID NO: 3055412 - DNA, 25 bp, Homo sapien
ccatgtgcgggaaatgggggggtct

SEQ ID NO: 3055413 - DNA, 25 bp, Homo sapien
cataaagcgataataataaaacact

SEQ ID NO: 3055414 - DNA, 25 bp, Homo sapien
accacacaccagaggggtcagccaa

SEQ ID NO: 3055415 - DNA, 25 bp, Homo sapien
ccagaggggtcagccaagagcactt

SEQ ID NO: 3055416 - DNA, 25 bp, Homo sapien
ggtgggcaaagccaactaagcaccc

SEQ ID NO: 3055417 - DNA, 25 bp, Homo sapien
atctcccctggacggtccctgaact

SEQ ID NO: 3055418 - DNA, 25 bp, Homo sapien
tggagcaggtgactcactccatatc

SEQ ID NO: 3055419 - DNA, 25 bp, Homo sapien
ggcaaagccaactaagcaccctgga

SEQ ID NO: 3055420 - DNA, 25 bp, Homo sapien
gggcttagggcagttggtcggtgga

SEQ ID NO: 3055421 - DNA, 25 bp, Homo sapien
cagttggtcggtggagttcagtgag

SEQ ID NO: 3055422 - DNA, 25 bp, Homo sapien
tcggtggagttcagtgagaaaatca

SEQ ID NO: 3055423 - DNA, 25 bp, Homo sapien
ggaaaacagaatgggtacttgagtc

SEQ ID NO: 3055424 - DNA, 25 bp, Homo sapien
gcagaacactatcccaagaaagacc

SEQ ID NO: 3055425 - DNA, 25 bp, Homo sapien
aagaccctacggaggacctctggag

SEQ ID NO: 3055426 - DNA, 25 bp, Homo sapien
gcacggagagcctctcagatgagga

SEQ ID NO: 3055427 - DNA, 25 bp, Homo sapien
ggtgcagcaggaagttacaccccgg

SEQ ID NO: 3055428 - DNA, 25 bp, Homo sapien
gagggcctccaacagaaggaggttc

SEQ ID NO: 3055429 - DNA, 25 bp, Homo sapien
gaagctcagcagcaaaggatccccc

SEQ ID NO: 3055430 - DNA, 25 bp, Homo sapien
aaaaaggagcgcaggtttcagcggg

SEQ ID NO: 3055431 - DNA, 25 bp, Homo sapien
agaagctcaagccactccgtgtcac

SEQ ID NO: 3055432 - DNA, 25 bp, Homo sapien
ggtgtcgatggggtagtctccatcc

SEQ ID NO: 3055433 - DNA, 25 bp, Homo sapien
atgtgcatctccagcgggtcaaggg

SEQ ID NO: 3055434 - DNA, 25 bp, Homo sapien
gaggccgtcgctgtaggtgtcgatg

SEQ ID NO: 3055435 - DNA, 25 bp, Homo sapien
ctaggccagcatgtggtctgcagtg

SEQ ID NO: 3055436 - DNA, 25 bp, Homo sapien
agggtcctgaagagcccggcacaca

SEQ ID NO: 3055437 - DNA, 25 bp, Homo sapien
cctagggtctgcaagctaccctgca

SEQ ID NO: 3055438 - DNA, 25 bp, Homo sapien
tctggccccggagacataatattgt

SEQ ID NO: 3055439 - DNA, 25 bp, Homo sapien
ggtacatgtggatgccacacagcag

SEQ ID NO: 3055440 - DNA, 25 bp, Homo sapien
tccatagggctcattgatgggaatc

SEQ ID NO: 3055441 - DNA, 25 bp, Homo sapien
tctccatagggctcattgatgggaa

SEQ ID NO: 3055442 - DNA, 25 bp, Homo sapien
ccatagggctcattgatgggaatca

SEQ ID NO: 3055443 - DNA, 25 bp, Homo sapien
atctccatagggctcattgatggga

SEQ ID NO: 3055444 - DNA, 25 bp, Homo sapien
catggaggggaggtttgaaaatgca

SEQ ID NO: 3055445 - DNA, 25 bp, Homo sapien
aggtttgaaaatgcaggctccgagc

SEQ ID NO: 3055446 - DNA, 25 bp, Homo sapien
gaggggaggtttgaaaatgcaggct

SEQ ID NO: 3055447 - DNA, 25 bp, Homo sapien
ggaggtttgaaaatgcaggctccga

SEQ ID NO: 3055448 - DNA, 25 bp, Homo sapien
gagttggtgagctccacggacacgc

SEQ ID NO: 3055449 - DNA, 25 bp, Homo sapien
ctgggttcttgtcctcggagatgcg

SEQ ID NO: 3055450 - DNA, 25 bp, Homo sapien
ccaggcagccgggtcatgcttgaag

SEQ ID NO: 3055451 - DNA, 25 bp, Homo sapien
cacgcgcttccggtagtctgggttc

SEQ ID NO: 3055452 - DNA, 25 bp, Homo sapien
tgttctccaccgacgagtacaggag

SEQ ID NO: 3055453 - DNA, 25 bp, Homo sapien
gcagccacgcgctggatgttctcca

SEQ ID NO: 3055454 - DNA, 25 bp, Homo sapien
ccctcgttgcgggagtgcagcaact

SEQ ID NO: 3055455 - DNA, 25 bp, Homo sapien
tctgcatcaatggcgtcggccgcct

SEQ ID NO: 3055456 - DNA, 25 bp, Homo sapien
taaccttgccctttaagcagtggtg

SEQ ID NO: 3055457 - DNA, 25 bp, Homo sapien
caaatctgggactcctaaccttgcc

SEQ ID NO: 3055458 - DNA, 25 bp, Homo sapien
tttgaagcttagaaagccatgccca

SEQ ID NO: 3055459 - DNA, 25 bp, Homo sapien
tcaatctggagtggcaactttcctc

SEQ ID NO: 3055460 - DNA, 25 bp, Homo sapien
gaatggtgttgagccggaagatctc

SEQ ID NO: 3055461 - DNA, 25 bp, Homo sapien
ggaagatctccatgcggttcatggg

SEQ ID NO: 3055462 - DNA, 25 bp, Homo sapien
tcccgggcgaggatgtgcagtgctc

SEQ ID NO: 3055463 - DNA, 25 bp, Homo sapien
atgtgcagtgctccggtgcagccct

SEQ ID NO: 3055464 - DNA, 25 bp, Homo sapien
gttcttggaattggcatcagttgca

SEQ ID NO: 3055465 - DNA, 25 bp, Homo sapien
atcagttgcaactgacctccccatt

SEQ ID NO: 3055466 - DNA, 25 bp, Homo sapien
cttggacatggccacaactcctccc

SEQ ID NO: 3055467 - DNA, 25 bp, Homo sapien
gcatgggacaggtgccttggacatg

SEQ ID NO: 3055468 - DNA, 25 bp, Homo sapien
tagggctgctgtgtgcctgcagcta

SEQ ID NO: 3055469 - DNA, 25 bp, Homo sapien
tgtagggctgctgtgtgcctgcagc

SEQ ID NO: 3055470 - DNA, 25 bp, Homo sapien
agggctgctgtgtgcctgcagctac

SEQ ID NO: 3055471 - DNA, 25 bp, Homo sapien
cgtgtagggctgctgtgtgcctgca

SEQ ID NO: 3055472 - DNA, 25 bp, Homo sapien
gggccagattcctgatcaagccgat

SEQ ID NO: 3055473 - DNA, 25 bp, Homo sapien
gcatcctggtgggccttcaccagca

SEQ ID NO: 3055474 - DNA, 25 bp, Homo sapien
ccagcagttggacgaggcgggggat

SEQ ID NO: 3055475 - DNA, 25 bp, Homo sapien
gattcctgatcaagccgatggttgc

SEQ ID NO: 3055476 - DNA, 25 bp, Homo sapien
taaacttctgtcttattcgagccac

SEQ ID NO: 3055477 - DNA, 25 bp, Homo sapien
gaggtctaaactattacacgagaga

SEQ ID NO: 3055478 - DNA, 25 bp, Homo sapien
acccagggtactcatgtgcattttg

SEQ ID NO: 3055479 - DNA, 25 bp, Homo sapien
tcttttaagacacgggttcttgctc

SEQ ID NO: 3055480 - DNA, 25 bp, Homo sapien
agagttctgggccatctcggcctca

SEQ ID NO: 3055481 - DNA, 25 bp, Homo sapien
cagcttcacgatggctgggatgcca

SEQ ID NO: 3055482 - DNA, 25 bp, Homo sapien
cgtgatgtcgtccttgtcaccagca

SEQ ID NO: 3055483 - DNA, 25 bp, Homo sapien
gatgccatagttgagacgcacagag

SEQ ID NO: 3055484 - DNA, 25 bp, Homo sapien
tgcttggtggccacatctgagaggt

SEQ ID NO: 3055485 - DNA, 25 bp, Homo sapien
tggccacatctgagaggttgcgcag

SEQ ID NO: 3055486 - DNA, 25 bp, Homo sapien
catctgagaggttgcgcagggtcca

SEQ ID NO: 3055487 - DNA, 25 bp, Homo sapien
cacaggcagttctgcaccaggcggg

SEQ ID NO: 3055488 - DNA, 25 bp, Homo sapien
ggatagcaccttgagcacacgactg

SEQ ID NO: 3055489 - DNA, 25 bp, Homo sapien
cacacgactggtggtccagagcagc

SEQ ID NO: 3055490 - DNA, 25 bp, Homo sapien
cctccacaatggcaggcttattgct

SEQ ID NO: 3055491 - DNA, 25 bp, Homo sapien
caggcttattgctgggacacacgga

SEQ ID NO: 3055492 - DNA, 25 bp, Homo sapien
gggcctggggcccaccattggccag

SEQ ID NO: 3055493 - DNA, 25 bp, Homo sapien
cacgagggcctggggcccaccattg

SEQ ID NO: 3055494 - DNA, 25 bp, Homo sapien
ctgcacgagggcctggggcccacca

SEQ ID NO: 3055495 - DNA, 25 bp, Homo sapien
gcctggggcccaccattggccagga

SEQ ID NO: 3055496 - DNA, 25 bp, Homo sapien
gatggcatagaacaggaccgactcc

SEQ ID NO: 3055497 - DNA, 25 bp, Homo sapien
atcttggcgccctcctggtacagga

SEQ ID NO: 3055498 - DNA, 25 bp, Homo sapien
ttgctctcctggttgccgtaggcca

SEQ ID NO: 3055499 - DNA, 25 bp, Homo sapien
gagcaggggcaccatcttttgcagc

SEQ ID NO: 3055500 - DNA, 25 bp, Homo sapien
ttctgcatggtacgcacgacagcgg

SEQ ID NO: 3055501 - DNA, 25 bp, Homo sapien
gacgcctccttcttcgacagctggt

SEQ ID NO: 3055502 - DNA, 25 bp, Homo sapien
gacagctggttcacaatcatggccg

SEQ ID NO: 3055503 - DNA, 25 bp, Homo sapien
gggatgccacccgacttgaagatgg

SEQ ID NO: 3055504 - DNA, 25 bp, Homo sapien
acaatggccgacttgagcagctggg

SEQ ID NO: 3055505 - DNA, 25 bp, Homo sapien
tagttgatgagatgcacaatggccg

SEQ ID NO: 3055506 - DNA, 25 bp, Homo sapien
ctcgtcgttgagcagtttggtgagc

SEQ ID NO: 3055507 - DNA, 25 bp, Homo sapien
agctcggcatcgtcctggtagttga

SEQ ID NO: 3055508 - DNA, 25 bp, Homo sapien
gcacatggcctcccgcacccgtttg

SEQ ID NO: 3055509 - DNA, 25 bp, Homo sapien
catggcctcccgcacccgtttggcc

SEQ ID NO: 3055510 - DNA, 25 bp, Homo sapien
ctgacacaccagggcacatggcctc

SEQ ID NO: 3055511 - DNA, 25 bp, Homo sapien
tgacacaccagggcacatggcctcc

SEQ ID NO: 3055512 - DNA, 25 bp, Homo sapien
ttgtggacatctggtactccagatc

SEQ ID NO: 3055513 - DNA, 25 bp, Homo sapien
gtggacatctggtactccagatcac

SEQ ID NO: 3055514 - DNA, 25 bp, Homo sapien
tgttgtggacatctggtactccaga

SEQ ID NO: 3055515 - DNA, 25 bp, Homo sapien
ctgttgtggacatctggtactccag

SEQ ID NO: 3055516 - DNA, 25 bp, Homo sapien
ggtaagtactatcactggctccact

SEQ ID NO: 3055517 - DNA, 25 bp, Homo sapien
gacaacgaccctgcaaggtaagtac

SEQ ID NO: 3055518 - DNA, 25 bp, Homo sapien
tcctcagctgagacgtcaggttcct

SEQ ID NO: 3055519 - DNA, 25 bp, Homo sapien
tctgggagtcccacaggtaggtgcc

SEQ ID NO: 3055520 - DNA, 25 bp, Homo sapien
gcccgagtggatacccgagtcgtag

SEQ ID NO: 3055521 - DNA, 25 bp, Homo sapien
ctccatgatgcccttgctgctgacg

SEQ ID NO: 3055522 - DNA, 25 bp, Homo sapien
ttcttgagcgtgtactggcgcccgc

SEQ ID NO: 3055523 - DNA, 25 bp, Homo sapien
gataggctgctccatcaggttcatc

SEQ ID NO: 3055524 - DNA, 25 bp, Homo sapien
gtcctgggcttgcatctctgacctc

SEQ ID NO: 3055525 - DNA, 25 bp, Homo sapien
gcaggacagtcaagggccagctgcc

SEQ ID NO: 3055526 - DNA, 25 bp, Homo sapien
caggaagcaggaagtcacctggccc

SEQ ID NO: 3055527 - DNA, 25 bp, Homo sapien
acgagataccctgggagcagtgagc

SEQ ID NO: 3055528 - DNA, 25 bp, Homo sapien
ggcaagagaaggcactcagggcttc

SEQ ID NO: 3055529 - DNA, 25 bp, Homo sapien
caagagaaggcactcagggcttcta

SEQ ID NO: 3055530 - DNA, 25 bp, Homo sapien
agagaaggcactcagggcttctagc

SEQ ID NO: 3055531 - DNA, 25 bp, Homo sapien
ccaactctcccaggggcaagagaag

SEQ ID NO: 3055532 - DNA, 25 bp, Homo sapien
tggtctgtgtttggctccactgtcc

SEQ ID NO: 3055533 - DNA, 25 bp, Homo sapien
ggaggtgaacttcccgcttggtctg

SEQ ID NO: 3055534 - DNA, 25 bp, Homo sapien
cccgcttggtctgtgtttggctcca

SEQ ID NO: 3055535 - DNA, 25 bp, Homo sapien
tgtaccagggaggtgaacttcccgc

SEQ ID NO: 3055536 - DNA, 25 bp, Homo sapien
ggggagaatggacgccgtgatccca

SEQ ID NO: 3055537 - DNA, 25 bp, Homo sapien
gggagaatggacgccgtgatcccat

SEQ ID NO: 3055538 - DNA, 25 bp, Homo sapien
gcggggagaatggacgccgtgatcc

SEQ ID NO: 3055539 - DNA, 25 bp, Homo sapien
ctgcggggagaatggacgccgtgat

SEQ ID NO: 3055540 - DNA, 25 bp, Homo sapien
gcctgagagagtctagcattgaaga

SEQ ID NO: 3055541 - DNA, 25 bp, Homo sapien
tcaaatggaaggcaagtcccacagc

SEQ ID NO: 3055542 - DNA, 25 bp, Homo sapien
caaattctttcaggaaagcgggtgg

SEQ ID NO: 3055543 - DNA, 25 bp, Homo sapien
gatcaagatccccaattctgggtgg

SEQ ID NO: 3055544 - DNA, 25 bp, Homo sapien
cgccgcaggtagtatcgacgaggct

SEQ ID NO: 3055545 - DNA, 25 bp, Homo sapien
tagtatcgacgaggctctgggagct

SEQ ID NO: 3055546 - DNA, 25 bp, Homo sapien
gagccgggctcccaccggcgtggag

SEQ ID NO: 3055547 - DNA, 25 bp, Homo sapien
caccggcgtggagggaggcgccgca

SEQ ID NO: 3055548 - DNA, 25 bp, Homo sapien
tgggcgcaaacaatagggccccacc

SEQ ID NO: 3055549 - DNA, 25 bp, Homo sapien
tgggcaagctgggcgcaaacaatag

SEQ ID NO: 3055550 - DNA, 25 bp, Homo sapien
caagctgggcgcaaacaatagggcc

SEQ ID NO: 3055551 - DNA, 25 bp, Homo sapien
gagggaaagcgaggatgacgcgtgg

SEQ ID NO: 3055552 - DNA, 25 bp, Homo sapien
agatctctggttcgcggagctccga

SEQ ID NO: 3055553 - DNA, 25 bp, Homo sapien
tccgaggcgcgctcggcccgaaccg

SEQ ID NO: 3055554 - DNA, 25 bp, Homo sapien
ggtggcgctcgatggcaccggccct

SEQ ID NO: 3055555 - DNA, 25 bp, Homo sapien
ccggtgcagggtggcgctcgatggc

SEQ ID NO: 3055556 - DNA, 25 bp, Homo sapien
ctgagctcggcgtggtcgggcggcg

SEQ ID NO: 3055557 - DNA, 25 bp, Homo sapien
acagcgaactgagctcggcgtggtc

SEQ ID NO: 3055558 - DNA, 25 bp, Homo sapien
tgagtatggggcctgaccgggccgg

SEQ ID NO: 3055559 - DNA, 25 bp, Homo sapien
ggagccggcgcggacagcgaactga

SEQ ID NO: 3055560 - DNA, 25 bp, Homo sapien
tctgtttatccgcttgccattggcc

SEQ ID NO: 3055561 - DNA, 25 bp, Homo sapien
cctctggtgcgagctcactggctat

SEQ ID NO: 3055562 - DNA, 25 bp, Homo sapien
gtttatccgcttgccattggccccg

SEQ ID NO: 3055563 - DNA, 25 bp, Homo sapien
ggctatctcgcctgactgtcccgtg

SEQ ID NO: 3055564 - DNA, 25 bp, Homo sapien
caagggaagggacagacgccttcac

SEQ ID NO: 3055565 - DNA, 25 bp, Homo sapien
taagtcatagggataccaagggaag

SEQ ID NO: 3055566 - DNA, 25 bp, Homo sapien
tccaacaggtaagtcatagggatac

SEQ ID NO: 3055567 - DNA, 25 bp, Homo sapien
cagcgtcaggcatgatgcttctttg

SEQ ID NO: 3055568 - DNA, 25 bp, Homo sapien
tgcagatgtgcttccccggaagacc

SEQ ID NO: 3055569 - DNA, 25 bp, Homo sapien
taccactgcagatgtgcttccccgg

SEQ ID NO: 3055570 - DNA, 25 bp, Homo sapien
actgcagatgtgcttccccggaaga

SEQ ID NO: 3055571 - DNA, 25 bp, Homo sapien
accactgcagatgtgcttccccgga

SEQ ID NO: 3055572 - DNA, 25 bp, Homo sapien
tgaggagggcggaccccatcagccc

SEQ ID NO: 3055573 - DNA, 25 bp, Homo sapien
agccagcagctggaaactccttgtc

SEQ ID NO: 3055574 - DNA, 25 bp, Homo sapien
gggccctggaaccactagactctta

SEQ ID NO: 3055575 - DNA, 25 bp, Homo sapien
tggaggaccctctgcaatttggcct

SEQ ID NO: 3055576 - DNA, 25 bp, Homo sapien
gtccagagacatagaagtggcagga

SEQ ID NO: 3055577 - DNA, 25 bp, Homo sapien
tgtggtccagagacatagaagtggc

SEQ ID NO: 3055578 - DNA, 25 bp, Homo sapien
ccagagacatagaagtggcaggatg

SEQ ID NO: 3055579 - DNA, 25 bp, Homo sapien
tggtccagagacatagaagtggcag

SEQ ID NO: 3055580 - DNA, 25 bp, Homo sapien
ggtgaggcaggatgggggtccagtc

SEQ ID NO: 3055581 - DNA, 25 bp, Homo sapien
gggggtccagtcagctgtgtccatc

SEQ ID NO: 3055582 - DNA, 25 bp, Homo sapien
gggtgcagcacccatgggtgaggca

SEQ ID NO: 3055583 - DNA, 25 bp, Homo sapien
tggggtgcagcacccatgggtgagg

SEQ ID NO: 3055584 - DNA, 25 bp, Homo sapien
cctgcctcagctacgattacaggtg

SEQ ID NO: 3055585 - DNA, 25 bp, Homo sapien
tcctgcctcagctacgattacaggt

SEQ ID NO: 3055586 - DNA, 25 bp, Homo sapien
tgtgccaccatgcctggctaatttt

SEQ ID NO: 3055587 - DNA, 25 bp, Homo sapien
tcggcaccaggcttcccaagcttga

SEQ ID NO: 3055588 - DNA, 25 bp, Homo sapien
gggccatcggcaccaggcttcccaa

SEQ ID NO: 3055589 - DNA, 25 bp, Homo sapien
gtggggccatcggcaccaggcttcc

SEQ ID NO: 3055590 - DNA, 25 bp, Homo sapien
aggcttcccaagcttgagcggtgtg

SEQ ID NO: 3055591 - DNA, 25 bp, Homo sapien
agcatacatgccctcctcgtagtca

SEQ ID NO: 3055592 - DNA, 25 bp, Homo sapien
tgccaccagtcagcatacatgccct

SEQ ID NO: 3055593 - DNA, 25 bp, Homo sapien
tcggcgtcagatagggcatcctcag

SEQ ID NO: 3055594 - DNA, 25 bp, Homo sapien
ctcaaactcggcgtcagatagggca

SEQ ID NO: 3055595 - DNA, 25 bp, Homo sapien
caggtactggctctttatcaagtgc

SEQ ID NO: 3055596 - DNA, 25 bp, Homo sapien
gctttacatacttgatctcagccag

SEQ ID NO: 3055597 - DNA, 25 bp, Homo sapien
gactcggctgtcattcactgtgcac

SEQ ID NO: 3055598 - DNA, 25 bp, Homo sapien
aaatgcatacttgaggccgggtgtg

SEQ ID NO: 3055599 - DNA, 25 bp, Homo sapien
gaaaaggtccaaggtgtccccatca

SEQ ID NO: 3055600 - DNA, 25 bp, Homo sapien
aggtccaaggtgtccccatcacagc

SEQ ID NO: 3055601 - DNA, 25 bp, Homo sapien
gctgaattctggcacactggtggcc

SEQ ID NO: 3055602 - DNA, 25 bp, Homo sapien
ggctggggctgaattctggcacact

SEQ ID NO: 3055603 - DNA, 25 bp, Homo sapien
tcccgcagctcggcggtctggttgt

SEQ ID NO: 3055604 - DNA, 25 bp, Homo sapien
gtacatgtgggtgaactccagcagc

SEQ ID NO: 3055605 - DNA, 25 bp, Homo sapien
tctggttgtggtagagcatggcctc

SEQ ID NO: 3055606 - DNA, 25 bp, Homo sapien
ctcatcatctgactgcaggtacatg

SEQ ID NO: 3055607 - DNA, 25 bp, Homo sapien
gggtgagccataccctgttgccaga

SEQ ID NO: 3055608 - DNA, 25 bp, Homo sapien
gaataggtatcagctcacaagctca

SEQ ID NO: 3055609 - DNA, 25 bp, Homo sapien
gatcatcgtggctgcttggaacact

SEQ ID NO: 3055610 - DNA, 25 bp, Homo sapien
aatgtctgccactgacaaggaaggc

SEQ ID NO: 3055611 - DNA, 25 bp, Homo sapien
tgcgggcagcctggcgcacatcatt

SEQ ID NO: 3055612 - DNA, 25 bp, Homo sapien
cttggggtcgaagagcatgtagctg

SEQ ID NO: 3055613 - DNA, 25 bp, Homo sapien
ggtcgaagagcatgtagctggcggc

SEQ ID NO: 3055614 - DNA, 25 bp, Homo sapien
tctgctgcatgacgctgtccttggg

SEQ ID NO: 3055615 - DNA, 25 bp, Homo sapien
atggtcacctcaagcttgatctccc

SEQ ID NO: 3055616 - DNA, 25 bp, Homo sapien
tatggtcacctcaagcttgatctcc

SEQ ID NO: 3055617 - DNA, 25 bp, Homo sapien
ccacgaagtagccacccacattggg

SEQ ID NO: 3055618 - DNA, 25 bp, Homo sapien
gtggtacatggtggccacgaacttg

SEQ ID NO: 3055619 - DNA, 25 bp, Homo sapien
tggccacgaacttgtccacgaagta

SEQ ID NO: 3055620 - DNA, 25 bp, Homo sapien
tggcctcacagtccaccttgcactg

SEQ ID NO: 3055621 - DNA, 25 bp, Homo sapien
ccctgtgggtgagaggaccgcccac

SEQ ID NO: 3055622 - DNA, 25 bp, Homo sapien
ggctggctcctccgcattcgcagtg

SEQ ID NO: 3055623 - DNA, 25 bp, Homo sapien
acatctgccttaccgggccctgtgg

SEQ ID NO: 3055624 - DNA, 25 bp, Homo sapien
tgcacccagcgtctttctcaacaga

SEQ ID NO: 3055625 - DNA, 25 bp, Homo sapien
aagactgccaggtactctgacaagg

SEQ ID NO: 3055626 - DNA, 25 bp, Homo sapien
tccccgctgttgtagagcttcacag

SEQ ID NO: 3055627 - DNA, 25 bp, Homo sapien
cgtgctgctgcggaaatccccgctg

SEQ ID NO: 3055628 - DNA, 25 bp, Homo sapien
gccggccaggcaccgggcaaagact

SEQ ID NO: 3055629 - DNA, 25 bp, Homo sapien
tcctctactagccctcctctacaag

SEQ ID NO: 3055630 - DNA, 25 bp, Homo sapien
tctactagccctcctctacaagcct

SEQ ID NO: 3055631 - DNA, 25 bp, Homo sapien
gggagtcagggcgcccccaacatct

SEQ ID NO: 3055632 - DNA, 25 bp, Homo sapien
actagccctcctctacaagcctcct

SEQ ID NO: 3055633 - DNA, 25 bp, Homo sapien
gtccagcatcccctgatagtagttg

SEQ ID NO: 3055634 - DNA, 25 bp, Homo sapien
agttgagatacttggcggtcagctc

SEQ ID NO: 3055635 - DNA, 25 bp, Homo sapien
cgtgcttcgggttcctctggaggaa

SEQ ID NO: 3055636 - DNA, 25 bp, Homo sapien
cctctaggtccgtgagggactcgtc

SEQ ID NO: 3055637 - DNA, 25 bp, Homo sapien
cggcatcaggtcctcgggcgggaag

SEQ ID NO: 3055638 - DNA, 25 bp, Homo sapien
ggctctggaagtcacgcagcagctg

SEQ ID NO: 3055639 - DNA, 25 bp, Homo sapien
tggaaggcgggcagcgtccgcttgc

SEQ ID NO: 3055640 - DNA, 25 bp, Homo sapien
gaagctgtacttctcgtactgcgcc

SEQ ID NO: 3055641 - DNA, 25 bp, Homo sapien
cgctgggtcttagcgccgggcacga

SEQ ID NO: 3055642 - DNA, 25 bp, Homo sapien
agtgtcgttaagtcctctccgtcgg

SEQ ID NO: 3055643 - DNA, 25 bp, Homo sapien
gccggctctccggagctgagctggc

SEQ ID NO: 3055644 - DNA, 25 bp, Homo sapien
tttcccagagggtccgatagtgtcg

SEQ ID NO: 3055645 - DNA, 25 bp, Homo sapien
gtgcccccgcctgagatcaggacac

SEQ ID NO: 3055646 - DNA, 25 bp, Homo sapien
ccccgcccacgtcggaggcacacac

SEQ ID NO: 3055647 - DNA, 25 bp, Homo sapien
agcgcttcccgccagagatgggaag

SEQ ID NO: 3055648 - DNA, 25 bp, Homo sapien
gagccgggccttccgtcgctgcgcc

SEQ ID NO: 3055649 - DNA, 25 bp, Homo sapien
gtcacatcccaagtcacaaagtcct

SEQ ID NO: 3055650 - DNA, 25 bp, Homo sapien
gcttttgcgggaccaagctgctctt

SEQ ID NO: 3055651 - DNA, 25 bp, Homo sapien
tgccttcccttggagtacagctggg

SEQ ID NO: 3055652 - DNA, 25 bp, Homo sapien
ctttcagtccagcttttgcgggacc

SEQ ID NO: 3055653 - DNA, 25 bp, Homo sapien
tgcccgcgaaagaagcaaggttcat

SEQ ID NO: 3055654 - DNA, 25 bp, Homo sapien
tcagagttctcatctttcccgagcc

SEQ ID NO: 3055655 - DNA, 25 bp, Homo sapien
caaggttcatctccgcccggcttta

SEQ ID NO: 3055656 - DNA, 25 bp, Homo sapien
gactagaattcgaagtgcccgcgaa

SEQ ID NO: 3055657 - DNA, 25 bp, Homo sapien
taagtccccatctcggagcatgtcg

SEQ ID NO: 3055658 - DNA, 25 bp, Homo sapien
tccatggagagacctcaagtagcct

SEQ ID NO: 3055659 - DNA, 25 bp, Homo sapien
cctgcaatgagaccaccaagcttgg

SEQ ID NO: 3055660 - DNA, 25 bp, Homo sapien
aactgttctttgctggacggcaccc

SEQ ID NO: 3055661 - DNA, 25 bp, Homo sapien
ccaggacggcaagatcacagtcgac

SEQ ID NO: 3055662 - DNA, 25 bp, Homo sapien
cagtcgacgagctcaagctgaagtc

SEQ ID NO: 3055663 - DNA, 25 bp, Homo sapien
tgcacactcaaaggctaaactggtg

SEQ ID NO: 3055664 - DNA, 25 bp, Homo sapien
ggtccaggagccaactaaaacaatg

SEQ ID NO: 3055665 - DNA, 25 bp, Homo sapien
tgatgaaggtgctcagggaaaggag

SEQ ID NO: 3055666 - DNA, 25 bp, Homo sapien
tggagtagacaatccctagagcact

SEQ ID NO: 3055667 - DNA, 25 bp, Homo sapien
cacatggcggggttccttcaagcct

SEQ ID NO: 3055668 - DNA, 25 bp, Homo sapien
cacattatatttgtttgaacttccc

SEQ ID NO: 3055669 - DNA, 25 bp, Homo sapien
cacaggatgtgctgcagtagcccgt

SEQ ID NO: 3055670 - DNA, 25 bp, Homo sapien
ggatgtgctgcagtagcccgttgac

SEQ ID NO: 3055671 - DNA, 25 bp, Homo sapien
ggcacaggatgtgctgcagtagccc

SEQ ID NO: 3055672 - DNA, 25 bp, Homo sapien
caggatgtgctgcagtagcccgttg

SEQ ID NO: 3055673 - DNA, 25 bp, Homo sapien
atccagagtctcgtccttctccagc

SEQ ID NO: 3055674 - DNA, 25 bp, Homo sapien
ttctccagcacgatgtcataggagt

SEQ ID NO: 3055675 - DNA, 25 bp, Homo sapien
aggagtccatgtagcgctcccgccg

SEQ ID NO: 3055676 - DNA, 25 bp, Homo sapien
agcacgatgtcataggagtccatgt

SEQ ID NO: 3055677 - DNA, 25 bp, Homo sapien
tatgtgtgtatgagctggcccttaa

SEQ ID NO: 3055678 - DNA, 25 bp, Homo sapien
gtgaggtccccgatagagtctccca

SEQ ID NO: 3055679 - DNA, 25 bp, Homo sapien
aagtaaccagagttctcacacgcag

SEQ ID NO: 3055680 - DNA, 25 bp, Homo sapien
agtctcccagcaggatgacattggt

SEQ ID NO: 3055681 - DNA, 25 bp, Homo sapien
ctttcccagcccaaacaggatttgg

SEQ ID NO: 3055682 - DNA, 25 bp, Homo sapien
aagaagctagagtggcttccctccc

SEQ ID NO: 3055683 - DNA, 25 bp, Homo sapien
agggttcatgcagagttaactgccc

SEQ ID NO: 3055684 - DNA, 25 bp, Homo sapien
tcttccccaggttagggttcatgca

SEQ ID NO: 3055685 - DNA, 25 bp, Homo sapien
gggtggaacactttcatctgtcgga

SEQ ID NO: 3055686 - DNA, 25 bp, Homo sapien
atccatgtagttagacacgatgtgg

SEQ ID NO: 3055687 - DNA, 25 bp, Homo sapien
caccaatgcccgcagaaaagatgaa

SEQ ID NO: 3055688 - DNA, 25 bp, Homo sapien
tttcttccaggatatcaccaatgcc

SEQ ID NO: 3055689 - DNA, 25 bp, Homo sapien
gcattgcattggactctctaaccac

SEQ ID NO: 3055690 - DNA, 25 bp, Homo sapien
tctgctgacataggagattgtgtgc

SEQ ID NO: 3055691 - DNA, 25 bp, Homo sapien
accacctgggctatctgaaacttct

SEQ ID NO: 3055692 - DNA, 25 bp, Homo sapien
ctctaaccacctgggctatctgaaa

SEQ ID NO: 3055693 - DNA, 25 bp, Homo sapien
tccaccatatgaggtagcttctcct

SEQ ID NO: 3055694 - DNA, 25 bp, Homo sapien
tccggtgtgggtcgatctcaattgg

SEQ ID NO: 3055695 - DNA, 25 bp, Homo sapien
gcttctccttgacggtccggtgtgg

SEQ ID NO: 3055696 - DNA, 25 bp, Homo sapien
tctcaattgggtaatagtggtgaag

SEQ ID NO: 3055697 - DNA, 25 bp, Homo sapien
catatcaagttcttcccagcaacgt

SEQ ID NO: 3055698 - DNA, 25 bp, Homo sapien
ggccattagtccatatcaagttctt

SEQ ID NO: 3055699 - DNA, 25 bp, Homo sapien
cctacagcttagtatgagaaaaaag

SEQ ID NO: 3055700 - DNA, 25 bp, Homo sapien
gggagaaaggccattagtccatatc

SEQ ID NO: 3055701 - DNA, 25 bp, Homo sapien
ctgcaatcccagtgctttaggaggc

SEQ ID NO: 3055702 - DNA, 25 bp, Homo sapien
aggagttcgagtccagcctggccaa

SEQ ID NO: 3055703 - DNA, 25 bp, Homo sapien
ggccaacatggcgaaaccctgtctc

SEQ ID NO: 3055704 - DNA, 25 bp, Homo sapien
tgaggcaggtggatcacttgaggtc

SEQ ID NO: 3055705 - DNA, 25 bp, Homo sapien
caacttcatctaagagagtgttaca

SEQ ID NO: 3055706 - DNA, 25 bp, Homo sapien
gatgcaacttcatctaagagagtgt

SEQ ID NO: 3055707 - DNA, 25 bp, Homo sapien
gaagatgcaacttcatctaagagag

SEQ ID NO: 3055708 - DNA, 25 bp, Homo sapien
catctaagagagtgttacatgaaat

SEQ ID NO: 3055709 - DNA, 25 bp, Homo sapien
tctttccgacactcctcactgatga

SEQ ID NO: 3055710 - DNA, 25 bp, Homo sapien
actgatgatcttgctattatccaga

SEQ ID NO: 3055711 - DNA, 25 bp, Homo sapien
ctttccgacactcctcactgatgat

SEQ ID NO: 3055712 - DNA, 25 bp, Homo sapien
gatgatcttgctattatccagaata

SEQ ID NO: 3055713 - DNA, 25 bp, Homo sapien
ttccattatatgcaaacctgctcaa

SEQ ID NO: 3055714 - DNA, 25 bp, Homo sapien
agggcatcgctttccattatatgca

SEQ ID NO: 3055715 - DNA, 25 bp, Homo sapien
aagggcatcgctttccattatatgc

SEQ ID NO: 3055716 - DNA, 25 bp, Homo sapien
cattatatgcaaacctgctcaaggt

SEQ ID NO: 3055717 - DNA, 25 bp, Homo sapien
taccgagtgacacagagggatagag

SEQ ID NO: 3055718 - DNA, 25 bp, Homo sapien
gagatgatgcctaaataggcaccag

SEQ ID NO: 3055719 - DNA, 25 bp, Homo sapien
tggccaggatgtaggcaaagcccta

SEQ ID NO: 3055720 - DNA, 25 bp, Homo sapien
gccctaggggagttaccgagtgaca

SEQ ID NO: 3055721 - DNA, 25 bp, Homo sapien
ataaggccctaggtactggtgtggg

SEQ ID NO: 3055722 - DNA, 25 bp, Homo sapien
aggataaggccctaggtactggtgt

SEQ ID NO: 3055723 - DNA, 25 bp, Homo sapien
gaggataaggccctaggtactggtg

SEQ ID NO: 3055724 - DNA, 25 bp, Homo sapien
gataaggccctaggtactggtgtgg

SEQ ID NO: 3055725 - DNA, 25 bp, Homo sapien
ttcaagctcccggccatttcttggg

SEQ ID NO: 3055726 - DNA, 25 bp, Homo sapien
agcaaagcgggaaggcccaatgggc

SEQ ID NO: 3055727 - DNA, 25 bp, Homo sapien
ttaggacaggcgaaccaacccgctc

SEQ ID NO: 3055728 - DNA, 25 bp, Homo sapien
cagagagctaggaggggtccgcggc

SEQ ID NO: 3055729 - DNA, 25 bp, Homo sapien
aggctgccgcatcaggaccgtggcc

SEQ ID NO: 3055730 - DNA, 25 bp, Homo sapien
gggcgcccacgatctcctgcacccg

SEQ ID NO: 3055731 - DNA, 25 bp, Homo sapien
cgcccaggctgccgcatcaggaccg

SEQ ID NO: 3055732 - DNA, 25 bp, Homo sapien
cccaggctgccgcatcaggaccgtg

SEQ ID NO: 3055733 - DNA, 25 bp, Homo sapien
ccactgacccctgcgccacgctggg

SEQ ID NO: 3055734 - DNA, 25 bp, Homo sapien
gggctcgctcgggcgcgcgtgtgag

SEQ ID NO: 3055735 - DNA, 25 bp, Homo sapien
tcccgagacccgagagaaccactga

SEQ ID NO: 3055736 - DNA, 25 bp, Homo sapien
tcgctcgggcgcgcgtgtgaggcgg

SEQ ID NO: 3055737 - DNA, 25 bp, Homo sapien
ggcggtgcctcggtgaccagctggg

SEQ ID NO: 3055738 - DNA, 25 bp, Homo sapien
cggcggtgcctcggtgaccagctgg

SEQ ID NO: 3055739 - DNA, 25 bp, Homo sapien
gcggcggtgcctcggtgaccagctg

SEQ ID NO: 3055740 - DNA, 25 bp, Homo sapien
catcccgttcgaggcctggtcggcg

SEQ ID NO: 3055741 - DNA, 25 bp, Homo sapien
tctgccatcccgttcgaggcctggt

SEQ ID NO: 3055742 - DNA, 25 bp, Homo sapien
ggcggctcgcgggacaacgacagcc

SEQ ID NO: 3055743 - DNA, 25 bp, Homo sapien
acagccccgcgaccgcactgcgcag

SEQ ID NO: 3055744 - DNA, 25 bp, Homo sapien
tcaggtgagtaacaggagctggaat

SEQ ID NO: 3055745 - DNA, 25 bp, Homo sapien
ctagtggtcatggttctgttttggg

SEQ ID NO: 3055746 - DNA, 25 bp, Homo sapien
acaggagctggaatcaataaacact

SEQ ID NO: 3055747 - DNA, 25 bp, Homo sapien
tcaataaacactcagatggtgctag

SEQ ID NO: 3055748 - DNA, 25 bp, Homo sapien
tttgcagttaaagcaccctctggtg

SEQ ID NO: 3055749 - DNA, 25 bp, Homo sapien
gaaaagtgagccctagaaactgcct

SEQ ID NO: 3055750 - DNA, 25 bp, Homo sapien
caatgtcatgtctcaaggtgttcta

SEQ ID NO: 3055751 - DNA, 25 bp, Homo sapien
tattttcagtagagtagggacctgg

SEQ ID NO: 3055752 - DNA, 25 bp, Homo sapien
aacttttataaagctcaggagacat

SEQ ID NO: 3055753 - DNA, 25 bp, Homo sapien
tactccgtatgctgaggtggcagga

SEQ ID NO: 3055754 - DNA, 25 bp, Homo sapien
gacataagataattcgaataacgta

SEQ ID NO: 3055755 - DNA, 25 bp, Homo sapien
cccaccttggcttcaagtaggaagg

SEQ ID NO: 3055756 - DNA, 25 bp, Homo sapien
tatcttcagcttcacgaaacgggtg

SEQ ID NO: 3055757 - DNA, 25 bp, Homo sapien
aacagttttaatcggcacgcttgag

SEQ ID NO: 3055758 - DNA, 25 bp, Homo sapien
taccgtcacctcagattgaaggctt

SEQ ID NO: 3055759 - DNA, 25 bp, Homo sapien
gaccatgtattgaactgagtctccc

SEQ ID NO: 3055760 - DNA, 25 bp, Homo sapien
tatgggatcctcacgtgacaagcag

SEQ ID NO: 3055761 - DNA, 25 bp, Homo sapien
tctgtgtgccatgcaagtaccggta

SEQ ID NO: 3055762 - DNA, 25 bp, Homo sapien
tcagtgtcccggtctacaggagtgc

SEQ ID NO: 3055763 - DNA, 25 bp, Homo sapien
gacaagcagtggctctacaacgagg

SEQ ID NO: 3055764 - DNA, 25 bp, Homo sapien
ttgccacacaatttgagagatgaag

SEQ ID NO: 3055765 - DNA, 25 bp, Homo sapien
ccacacaatttgagagatgaagttt

SEQ ID NO: 3055766 - DNA, 25 bp, Homo sapien
acacaatttgagagatgaagttttt

SEQ ID NO: 3055767 - DNA, 25 bp, Homo sapien
tgccacacaatttgagagatgaagt

SEQ ID NO: 3055768 - DNA, 25 bp, Homo sapien
gatgcgcccggtgtacatgtactcg

SEQ ID NO: 3055769 - DNA, 25 bp, Homo sapien
tgagagctgcactcgaaatcctcgg

SEQ ID NO: 3055770 - DNA, 25 bp, Homo sapien
gcttccactgtgtcgggttcgggcc

SEQ ID NO: 3055771 - DNA, 25 bp, Homo sapien
cacagggtaatgtcgcagaagaggc

SEQ ID NO: 3055772 - DNA, 25 bp, Homo sapien
ctgaagagatgcagccgcggccgcc

SEQ ID NO: 3055773 - DNA, 25 bp, Homo sapien
gccgccgccgccgccactgccgcag

SEQ ID NO: 3055774 - DNA, 25 bp, Homo sapien
ccgccgccgccactgccgcagccgc

SEQ ID NO: 3055775 - DNA, 25 bp, Homo sapien
ccgccgccactgccgcagccgccat

SEQ ID NO: 3055776 - DNA, 25 bp, Homo sapien
ggcctccacagcctcggaacgatgc

SEQ ID NO: 3055777 - DNA, 25 bp, Homo sapien
ccggcctccacagcctcggaacgat

SEQ ID NO: 3055778 - DNA, 25 bp, Homo sapien
cgcccggcctccacagcctcggaac

SEQ ID NO: 3055779 - DNA, 25 bp, Homo sapien
cccggcctccacagcctcggaacga

SEQ ID NO: 3055780 - DNA, 25 bp, Homo sapien
tcagtgggataccaaacaagccctt

SEQ ID NO: 3055781 - DNA, 25 bp, Homo sapien
caatggctaaggatgcaatggcccc

SEQ ID NO: 3055782 - DNA, 25 bp, Homo sapien
tggcagctgcccagaatctttgtgg

SEQ ID NO: 3055783 - DNA, 25 bp, Homo sapien
tcagttacagacagacaaatcagct

SEQ ID NO: 3055784 - DNA, 25 bp, Homo sapien
tagcctgtggatgttggtcttcggt

SEQ ID NO: 3055785 - DNA, 25 bp, Homo sapien
gctgtttacattccaggcccctgct

SEQ ID NO: 3055786 - DNA, 25 bp, Homo sapien
gtcttcggtgcctgtaccccagtgg

SEQ ID NO: 3055787 - DNA, 25 bp, Homo sapien
cagctgtctgtacactttttcttgg

SEQ ID NO: 3055788 - DNA, 25 bp, Homo sapien
tacatgctcatgtgttccggaagaa

SEQ ID NO: 3055789 - DNA, 25 bp, Homo sapien
gaaatatcatcccacggatgacgat

SEQ ID NO: 3055790 - DNA, 25 bp, Homo sapien
cagcctcttctgatcaagatagtgt

SEQ ID NO: 3055791 - DNA, 25 bp, Homo sapien
acggatgacgatacagcccctgctt

SEQ ID NO: 3055792 - DNA, 25 bp, Homo sapien
gggctccaatgtcaatatattcatc

SEQ ID NO: 3055793 - DNA, 25 bp, Homo sapien
tcccagcacaaagatgccattgagg

SEQ ID NO: 3055794 - DNA, 25 bp, Homo sapien
aatgtcaatatattcatcagcttcc

SEQ ID NO: 3055795 - DNA, 25 bp, Homo sapien
aaagatgccattgagggctccaatg

SEQ ID NO: 3055796 - DNA, 25 bp, Homo sapien
tgcaacacacatcaacttgtagttt

SEQ ID NO: 3055797 - DNA, 25 bp, Homo sapien
tgtagttttaaaaggctcacgtgac

SEQ ID NO: 3055798 - DNA, 25 bp, Homo sapien
ccctcctccccacagacagtactac

SEQ ID NO: 3055799 - DNA, 25 bp, Homo sapien
ctcctccccacagacagtactacta

SEQ ID NO: 3055800 - DNA, 25 bp, Homo sapien
gatgagaccatctacattcaggata

SEQ ID NO: 3055801 - DNA, 25 bp, Homo sapien
taaaggacccacagtttctaagcat

SEQ ID NO: 3055802 - DNA, 25 bp, Homo sapien
tacaaatgcgactccgatgagacca

SEQ ID NO: 3055803 - DNA, 25 bp, Homo sapien
ttctaagcatgtctacaaatgcgac

SEQ ID NO: 3055804 - DNA, 25 bp, Homo sapien
gaggtggtaatcttctctacttcca

SEQ ID NO: 3055805 - DNA, 25 bp, Homo sapien
ccagtgcataatcgagcagaggagt

SEQ ID NO: 3055806 - DNA, 25 bp, Homo sapien
gatctgcactcgcatgtctgggttg

SEQ ID NO: 3055807 - DNA, 25 bp, Homo sapien
tgctgcctgacgtaatctttgagga

SEQ ID NO: 3055808 - DNA, 25 bp, Homo sapien
ggtccttgctcatcaagcaacctct

SEQ ID NO: 3055809 - DNA, 25 bp, Homo sapien
tcatcaagcaacctctgggtatcac

SEQ ID NO: 3055810 - DNA, 25 bp, Homo sapien
cttgctcatcaagcaacctctgggt

SEQ ID NO: 3055811 - DNA, 25 bp, Homo sapien
agcaacctctgggtatcacctgaga

SEQ ID NO: 3055812 - DNA, 25 bp, Homo sapien
tgctggagctacagagccaaggagc

SEQ ID NO: 3055813 - DNA, 25 bp, Homo sapien
cacctaggccagtggagtgaccaaa

SEQ ID NO: 3055814 - DNA, 25 bp, Homo sapien
tgaccggccctgtgtgagactatat

SEQ ID NO: 3055815 - DNA, 25 bp, Homo sapien
aggagctgtccccataaggccctga

SEQ ID NO: 3055816 - DNA, 25 bp, Homo sapien
tggcctccatcccacttttttagga

SEQ ID NO: 3055817 - DNA, 25 bp, Homo sapien
ctggcctccatcccacttttttagg

SEQ ID NO: 3055818 - DNA, 25 bp, Homo sapien
gcctccatcccacttttttaggaga

SEQ ID NO: 3055819 - DNA, 25 bp, Homo sapien
cctggcctccatcccacttttttag

SEQ ID NO: 3055820 - DNA, 25 bp, Homo sapien
tcggtgaccaatgcccatgatcagc

SEQ ID NO: 3055821 - DNA, 25 bp, Homo sapien
gacttcactcggtgaccaatgccca

SEQ ID NO: 3055822 - DNA, 25 bp, Homo sapien
gggataatgccactgtcaaaggctt

SEQ ID NO: 3055823 - DNA, 25 bp, Homo sapien
aaggctttactgaacatcttggctg

SEQ ID NO: 3055824 - DNA, 25 bp, Homo sapien
tctcaatgaactggcaagagtactt

SEQ ID NO: 3055825 - DNA, 25 bp, Homo sapien
ggtctttcccagctcgcgcacaaat

SEQ ID NO: 3055826 - DNA, 25 bp, Homo sapien
gaactggcaagagtacttaggcaac

SEQ ID NO: 3055827 - DNA, 25 bp, Homo sapien
cccagctcgcgcacaaatgatggtg

SEQ ID NO: 3055828 - DNA, 25 bp, Homo sapien
tgtcctcgctcatcgcagatgctgg

SEQ ID NO: 3055829 - DNA, 25 bp, Homo sapien
ccgcgtagatgagctcctgtcctcg

SEQ ID NO: 3055830 - DNA, 25 bp, Homo sapien
tgctggtcatgaacgaggcaggttt

SEQ ID NO: 3055831 - DNA, 25 bp, Homo sapien
ccttgaagacctcagtgatgggcat

SEQ ID NO: 3055832 - DNA, 25 bp, Homo sapien
cagctcattgcgagcgagccatgat

SEQ ID NO: 3055833 - DNA, 25 bp, Homo sapien
aatgggggagcccttcaatatgtct

SEQ ID NO: 3055834 - DNA, 25 bp, Homo sapien
ccaacagctcattgcgagcgagcca

SEQ ID NO: 3055835 - DNA, 25 bp, Homo sapien
cattgcgagcgagccatgatgacaa

SEQ ID NO: 3055836 - DNA, 25 bp, Homo sapien
gagttcaaggcaaatcaacgcgaaa

SEQ ID NO: 3055837 - DNA, 25 bp, Homo sapien
tccccgactaatacagaaggcctgg

SEQ ID NO: 3055838 - DNA, 25 bp, Homo sapien
cagatccacccttagtgtagtgagc

SEQ ID NO: 3055839 - DNA, 25 bp, Homo sapien
tgtgaagaagagagaccagcctagc

SEQ ID NO: 3055840 - DNA, 25 bp, Homo sapien
ggccacgagatcttcgtatacagac

SEQ ID NO: 3055841 - DNA, 25 bp, Homo sapien
ccaggagtagtccatgggcacggtt

SEQ ID NO: 3055842 - DNA, 25 bp, Homo sapien
cctggcccaggagtagtccatgggc

SEQ ID NO: 3055843 - DNA, 25 bp, Homo sapien
cctcctgggcaggtacaatgactcc

SEQ ID NO: 3055844 - DNA, 25 bp, Homo sapien
gctcatcaaagctccggggcacaaa

SEQ ID NO: 3055845 - DNA, 25 bp, Homo sapien
tggttggcacaagctccagcatggc

SEQ ID NO: 3055846 - DNA, 25 bp, Homo sapien
tcagaagcctggttggcacaagctc

SEQ ID NO: 3055847 - DNA, 25 bp, Homo sapien
caaagcctggttcttggctactgca

SEQ ID NO: 3055848 - DNA, 25 bp, Homo sapien
cccggcaaatcttatattcctcagt

SEQ ID NO: 3055849 - DNA, 25 bp, Homo sapien
atgggcttagtgaggcggccctcct

SEQ ID NO: 3055850 - DNA, 25 bp, Homo sapien
ggccctccttgatgccccggcaaat

SEQ ID NO: 3055851 - DNA, 25 bp, Homo sapien
atggtggcacacgtcccgatgcacc

SEQ ID NO: 3055852 - DNA, 25 bp, Homo sapien
gatagcgtaacacatgatccatgaa

SEQ ID NO: 3055853 - DNA, 25 bp, Homo sapien
tttgactcctggagtgtcctgatag

SEQ ID NO: 3055854 - DNA, 25 bp, Homo sapien
cctggagtgtcctgatagcgtaaca

SEQ ID NO: 3055855 - DNA, 25 bp, Homo sapien
acacatgatccatgaatgtggagcc

SEQ ID NO: 3055856 - DNA, 25 bp, Homo sapien
taggaagcacacttgtactgggtac

SEQ ID NO: 3055857 - DNA, 25 bp, Homo sapien
gatgccccagcaataatggacaggg

SEQ ID NO: 3055858 - DNA, 25 bp, Homo sapien
ccagtaagggtccagagatgcccca

SEQ ID NO: 3055859 - DNA, 25 bp, Homo sapien
gacttagaaagtacgccctggtgca

SEQ ID NO: 3055860 - DNA, 25 bp, Homo sapien
cctccggaacgtgagacataggcca

SEQ ID NO: 3055861 - DNA, 25 bp, Homo sapien
ggaggccaggatgttgtccagcatc

SEQ ID NO: 3055862 - DNA, 25 bp, Homo sapien
gagctcgttggacatgcctccggaa

SEQ ID NO: 3055863 - DNA, 25 bp, Homo sapien
ccgtggtccgagagatgatattgtt

SEQ ID NO: 3055864 - DNA, 25 bp, Homo sapien
agcatcgaacgtaaaaggctttccg

SEQ ID NO: 3055865 - DNA, 25 bp, Homo sapien
cataagatagcatcgaacgtaaaag

SEQ ID NO: 3055866 - DNA, 25 bp, Homo sapien
aacttcataagatagcatcgaacgt

SEQ ID NO: 3055867 - DNA, 25 bp, Homo sapien
gatagcatcgaacgtaaaaggcttt

SEQ ID NO: 3055868 - DNA, 25 bp, Homo sapien
caggtccgatgatggtcactccctt

SEQ ID NO: 3055869 - DNA, 25 bp, Homo sapien
agtggcaggtccgatgatggtcact

SEQ ID NO: 3055870 - DNA, 25 bp, Homo sapien
cttctggtccgccttcttgatcagc

SEQ ID NO: 3055871 - DNA, 25 bp, Homo sapien
tcttgatcagctttctcgtgagggc

SEQ ID NO: 3055872 - DNA, 25 bp, Homo sapien
tgtcataggcagagcggagagaggc

SEQ ID NO: 3055873 - DNA, 25 bp, Homo sapien
tgatgagcacatctacctccggatg

SEQ ID NO: 3055874 - DNA, 25 bp, Homo sapien
ggatgcttcctcatggcatcagcca

SEQ ID NO: 3055875 - DNA, 25 bp, Homo sapien
caggatctctttgtgcccccagtaa

SEQ ID NO: 3055876 - DNA, 25 bp, Homo sapien
ccactgagggctcgtctcgggagca

SEQ ID NO: 3055877 - DNA, 25 bp, Homo sapien
tcgggagcagacatagtcaaagtcc

SEQ ID NO: 3055878 - DNA, 25 bp, Homo sapien
tgaaagggtagaccatggcagccac

SEQ ID NO: 3055879 - DNA, 25 bp, Homo sapien
agcatgccttgcacggcccgggtct

SEQ ID NO: 3055880 - DNA, 25 bp, Homo sapien
agaacacatacccccaggagacctg

SEQ ID NO: 3055881 - DNA, 25 bp, Homo sapien
gacacagagagtgcacccagaacac

SEQ ID NO: 3055882 - DNA, 25 bp, Homo sapien
tgggcaaagacacagagagtgcacc

SEQ ID NO: 3055883 - DNA, 25 bp, Homo sapien
caaagacacagagagtgcacccaga

SEQ ID NO: 3055884 - DNA, 25 bp, Homo sapien
cagggatcttggacttgggactgaa

SEQ ID NO: 3055885 - DNA, 25 bp, Homo sapien
gcagggatcttggacttgggactga

SEQ ID NO: 3055886 - DNA, 25 bp, Homo sapien
agggatcttggacttgggactgaat

SEQ ID NO: 3055887 - DNA, 25 bp, Homo sapien
ttgcagggatcttggacttgggact

SEQ ID NO: 3055888 - DNA, 25 bp, Homo sapien
ggcaactgagtgacccactgatggc

SEQ ID NO: 3055889 - DNA, 25 bp, Homo sapien
actgagtgacccactgatggctgga

SEQ ID NO: 3055890 - DNA, 25 bp, Homo sapien
gaaaatgaccaaggcaactgagtga

SEQ ID NO: 3055891 - DNA, 25 bp, Homo sapien
aagaaaatgaccaaggcaactgagt

SEQ ID NO: 3055892 - DNA, 25 bp, Homo sapien
gtgtcccaggtgcactcccattgca

SEQ ID NO: 3055893 - DNA, 25 bp, Homo sapien
tgtctgttagggccccaagatggtg

SEQ ID NO: 3055894 - DNA, 25 bp, Homo sapien
agagaactttccacttcctgggatt

SEQ ID NO: 3055895 - DNA, 25 bp, Homo sapien
aggctcaagtcataccatcctcgtg

SEQ ID NO: 3055896 - DNA, 25 bp, Homo sapien
gccctggactcagaaaaagatgctg

SEQ ID NO: 3055897 - DNA, 25 bp, Homo sapien
cttgtggcatggcaggcttggcctt

SEQ ID NO: 3055898 - DNA, 25 bp, Homo sapien
ttgcaggcgccacctcatcggccct

SEQ ID NO: 3055899 - DNA, 25 bp, Homo sapien
gcttggccttctttgcaggcgccac

SEQ ID NO: 3055900 - DNA, 25 bp, Homo sapien
cctagtggaaaagatgagatggttc

SEQ ID NO: 3055901 - DNA, 25 bp, Homo sapien
catgcactaactcccgctgtatttc

SEQ ID NO: 3055902 - DNA, 25 bp, Homo sapien
tatactactttaatcaggacaggaa

SEQ ID NO: 3055903 - DNA, 25 bp, Homo sapien
agagatccacaaaccaaccatgcac

SEQ ID NO: 3055904 - DNA, 25 bp, Homo sapien
gcccacaatggccgtcatgtgagtc

SEQ ID NO: 3055905 - DNA, 25 bp, Homo sapien
acaatggccgtcatgtgagtctctg

SEQ ID NO: 3055906 - DNA, 25 bp, Homo sapien
tctgtgccaaagacatggatgggga

SEQ ID NO: 3055907 - DNA, 25 bp, Homo sapien
cgctggcgttgaggaggaagtttgc

SEQ ID NO: 3055908 - DNA, 25 bp, Homo sapien
tcaagtctgcagataagggcccaag

SEQ ID NO: 3055909 - DNA, 25 bp, Homo sapien
aagggccttttacagccatgatcag

SEQ ID NO: 3055910 - DNA, 25 bp, Homo sapien
ccatgatcagtgtttggcgcattca

SEQ ID NO: 3055911 - DNA, 25 bp, Homo sapien
tccatgtgaccctgcaaagggcctt

SEQ ID NO: 3055912 - DNA, 25 bp, Homo sapien
cacacccgtggtccccaatacttgg

SEQ ID NO: 3055913 - DNA, 25 bp, Homo sapien
tgtgacctgtagtgtctcgctgcca

SEQ ID NO: 3055914 - DNA, 25 bp, Homo sapien
ccccttaccactgcagggtatggga

SEQ ID NO: 3055915 - DNA, 25 bp, Homo sapien
acacttcttgtgcctgctgtctcac

SEQ ID NO: 3055916 - DNA, 25 bp, Homo sapien
acaaagattgtgacttcgtgctcct

SEQ ID NO: 3055917 - DNA, 25 bp, Homo sapien
tcgtgctccttcagggggccctggt

SEQ ID NO: 3055918 - DNA, 25 bp, Homo sapien
acccgtaagccctcctgatagttgg

SEQ ID NO: 3055919 - DNA, 25 bp, Homo sapien
gggccctggtaatctcgaattgctc

SEQ ID NO: 3055920 - DNA, 25 bp, Homo sapien
gagagttatagttcagcgtagcagc

SEQ ID NO: 3055921 - DNA, 25 bp, Homo sapien
agacacacagcgcagatgggcagct

SEQ ID NO: 3055922 - DNA, 25 bp, Homo sapien
cctgggaactcatggtaacttggct

SEQ ID NO: 3055923 - DNA, 25 bp, Homo sapien
agaaattcgcctcccatgcttcagg

SEQ ID NO: 3055924 - DNA, 25 bp, Homo sapien
aagtttgcgatgctgcctccaatga

SEQ ID NO: 3055925 - DNA, 25 bp, Homo sapien
cttgaacgtggcagccacgttggtg

SEQ ID NO: 3055926 - DNA, 25 bp, Homo sapien
ccacgttggtgaagtttgcgatgct

SEQ ID NO: 3055927 - DNA, 25 bp, Homo sapien
cgtggcagccacgttggtgaagttt

SEQ ID NO: 3055928 - DNA, 25 bp, Homo sapien
atagtttgccagctcgttgacaccc

SEQ ID NO: 3055929 - DNA, 25 bp, Homo sapien
tcttggcatagtcataggtctgctg

SEQ ID NO: 3055930 - DNA, 25 bp, Homo sapien
tgcttctctcgggtcatgagggaga

SEQ ID NO: 3055931 - DNA, 25 bp, Homo sapien
gggcgcctgagtactccccatagtt

SEQ ID NO: 3055932 - DNA, 25 bp, Homo sapien
acagaagtcagtgatggctctcaca

SEQ ID NO: 3055933 - DNA, 25 bp, Homo sapien
gagacagaagtcagtgatggctctc

SEQ ID NO: 3055934 - DNA, 25 bp, Homo sapien
gccaaggagacagaagtcagtgatg

SEQ ID NO: 3055935 - DNA, 25 bp, Homo sapien
tgccaaggagacagaagtcagtgat

SEQ ID NO: 3055936 - DNA, 25 bp, Homo sapien
tcaggcttgccccacttttggcatc

SEQ ID NO: 3055937 - DNA, 25 bp, Homo sapien
atggtccagatcctccctttggggt

SEQ ID NO: 3055938 - DNA, 25 bp, Homo sapien
ctgtacacgacagaggcgccacccc

SEQ ID NO: 3055939 - DNA, 25 bp, Homo sapien
catcgaggtctgcaatgtaggcttc

SEQ ID NO: 3055940 - DNA, 25 bp, Homo sapien
tttgcagatgtagtcggcagtggcg

SEQ ID NO: 3055941 - DNA, 25 bp, Homo sapien
gaactcgatgtcaccccacttcact

SEQ ID NO: 3055942 - DNA, 25 bp, Homo sapien
gtagtcggcagtggcgtccaccttg

SEQ ID NO: 3055943 - DNA, 25 bp, Homo sapien
tctggatatgcctcccgcccgaagg

SEQ ID NO: 3055944 - DNA, 25 bp, Homo sapien
agcagaggcaatcatcagacaccgg

SEQ ID NO: 3055945 - DNA, 25 bp, Homo sapien
gcagaggcaatcatcagacaccggc

SEQ ID NO: 3055946 - DNA, 25 bp, Homo sapien
gagcagaggcaatcatcagacaccg

SEQ ID NO: 3055947 - DNA, 25 bp, Homo sapien
cagaggcaatcatcagacaccggct

SEQ ID NO: 3055948 - DNA, 25 bp, Homo sapien
ggtgaagtacaagtcctcgtagaaa

SEQ ID NO: 3055949 - DNA, 25 bp, Homo sapien
gattgatctcgaggtaggtgaagta

SEQ ID NO: 3055950 - DNA, 25 bp, Homo sapien
ggccggagataaaactggccagaat

SEQ ID NO: 3055951 - DNA, 25 bp, Homo sapien
tcctcgtagaaattgaagaggccgg

SEQ ID NO: 3055952 - DNA, 25 bp, Homo sapien
acccctgctccctggacatagctct

SEQ ID NO: 3055953 - DNA, 25 bp, Homo sapien
ccctgctccctggacatagctcttc

SEQ ID NO: 3055954 - DNA, 25 bp, Homo sapien
tgctccctggacatagctcttcagc

SEQ ID NO: 3055955 - DNA, 25 bp, Homo sapien
tccatctcctctgcaacccctgctc

SEQ ID NO: 3055956 - DNA, 25 bp, Homo sapien
gtttctcatccacgccaacaagcag

SEQ ID NO: 3055957 - DNA, 25 bp, Homo sapien
tagatgcagacatagaactcctcag

SEQ ID NO: 3055958 - DNA, 25 bp, Homo sapien
cccttctcgggtggcatagatgcag

SEQ ID NO: 3055959 - DNA, 25 bp, Homo sapien
ccctcgtggtggaacaggacgtagt

SEQ ID NO: 3055960 - DNA, 25 bp, Homo sapien
gaaagttcttgaggaagcctgtggc

SEQ ID NO: 3055961 - DNA, 25 bp, Homo sapien
ggacgaagggctcgatcagaaagtt

SEQ ID NO: 3055962 - DNA, 25 bp, Homo sapien
cgatcagaaagttcttgaggaagcc

SEQ ID NO: 3055963 - DNA, 25 bp, Homo sapien
gaagggctcgatcagaaagttcttg

SEQ ID NO: 3055964 - DNA, 25 bp, Homo sapien
aagggctccaacaagtcacggctgt

SEQ ID NO: 3055965 - DNA, 25 bp, Homo sapien
ggacctgcgcaagtgaaagggctcc

SEQ ID NO: 3055966 - DNA, 25 bp, Homo sapien
agggtgacacaggacctgcgcaagt

SEQ ID NO: 3055967 - DNA, 25 bp, Homo sapien
tccaacaagtcacggctgtggcaga

SEQ ID NO: 3055968 - DNA, 25 bp, Homo sapien
gacttgaccccatccagagtgaggt

SEQ ID NO: 3055969 - DNA, 25 bp, Homo sapien
tgaggttgaccccaacgagaccaag

SEQ ID NO: 3055970 - DNA, 25 bp, Homo sapien
gctggtctggcttgactaccaagtt

SEQ ID NO: 3055971 - DNA, 25 bp, Homo sapien
cacgacgtttgatcagctggtctgg

SEQ ID NO: 3055972 - DNA, 25 bp, Homo sapien
tggtcctgcagcaagcgggcccagt

SEQ ID NO: 3055973 - DNA, 25 bp, Homo sapien
ctgaggtggtacagatgaacttgta

SEQ ID NO: 3055974 - DNA, 25 bp, Homo sapien
agtctgtgtcaggagtgacccgagc

SEQ ID NO: 3055975 - DNA, 25 bp, Homo sapien
tacttgaaccgattctggatggctg

SEQ ID NO: 3055976 - DNA, 25 bp, Homo sapien
agtgcgaggagggtccttgctgcga

SEQ ID NO: 3055977 - DNA, 25 bp, Homo sapien
aggagggtccttgctgcgagattcc

SEQ ID NO: 3055978 - DNA, 25 bp, Homo sapien
tccttgctgcgagattccagtcctc

SEQ ID NO: 3055979 - DNA, 25 bp, Homo sapien
agattccagtcctcgcggcgagacg

SEQ ID NO: 3055980 - DNA, 25 bp, Homo sapien
gcgattggccacacgcgttccctag

SEQ ID NO: 3055981 - DNA, 25 bp, Homo sapien
agcagccggtagcttcccgggatcc

SEQ ID NO: 3055982 - DNA, 25 bp, Homo sapien
gggacttgtagtcccgctggcccat

SEQ ID NO: 3055983 - DNA, 25 bp, Homo sapien
gttccctagcctgagcgccagggct

SEQ ID NO: 3055984 - DNA, 25 bp, Homo sapien
gcagaaccctggtgaggaagctcca

SEQ ID NO: 3055985 - DNA, 25 bp, Homo sapien
taacagggccttgctaatcgggttg

SEQ ID NO: 3055986 - DNA, 25 bp, Homo sapien
caatggagtagacccctggctggta

SEQ ID NO: 3055987 - DNA, 25 bp, Homo sapien
ttaatcagtgtagccccaagaaggc

SEQ ID NO: 3055988 - DNA, 25 bp, Homo sapien
ggtgaggttgggcagctgaacagtg

SEQ ID NO: 3055989 - DNA, 25 bp, Homo sapien
ccctagggctgggtgtattaggact

SEQ ID NO: 3055990 - DNA, 25 bp, Homo sapien
gccgggcacagctgtggtgaggttg

SEQ ID NO: 3055991 - DNA, 25 bp, Homo sapien
taggactggctttgtcccacagctt

SEQ ID NO: 3055992 - DNA, 25 bp, Homo sapien
ggcctcagactcatacagaaggtgg

SEQ ID NO: 3055993 - DNA, 25 bp, Homo sapien
tggcctcagactcatacagaaggtg

SEQ ID NO: 3055994 - DNA, 25 bp, Homo sapien
gcctcagactcatacagaaggtggg

SEQ ID NO: 3055995 - DNA, 25 bp, Homo sapien
gctgcatccgtgagcagtgtgtctc

SEQ ID NO: 3055996 - DNA, 25 bp, Homo sapien
acaccacgcttgacaggacagcatg

SEQ ID NO: 3055997 - DNA, 25 bp, Homo sapien
gtgcatgccgctgcatccgtgagca

SEQ ID NO: 3055998 - DNA, 25 bp, Homo sapien
ttgaacaccacgcttgacaggacag

SEQ ID NO: 3055999 - DNA, 25 bp, Homo sapien
ccacagcccgcatgcagcagcttgc

SEQ ID NO: 3056000 - DNA, 25 bp, Homo sapien
cccacagcccgcatgcagcagcttg

SEQ ID NO: 3056001 - DNA, 25 bp, Homo sapien
gaggaggtgaactgtttccacattc

SEQ ID NO: 3056002 - DNA, 25 bp, Homo sapien
aaacgaaactgctctaagcacacgg

SEQ ID NO: 3056003 - DNA, 25 bp, Homo sapien
caaaaattcacaagctgcctccctg

SEQ ID NO: 3056004 - DNA, 25 bp, Homo sapien
ctcggtcttcggcattggttccctt

SEQ ID NO: 3056005 - DNA, 25 bp, Homo sapien
aaaaagaaattccctggaccagatg

SEQ ID NO: 3056006 - DNA, 25 bp, Homo sapien
gaaactctatgggtatcaaacagct

SEQ ID NO: 3056007 - DNA, 25 bp, Homo sapien
tatggaaaagtcttcaagggctgct

SEQ ID NO: 3056008 - DNA, 25 bp, Homo sapien
caacagccgagtggatagatgccct

SEQ ID NO: 3056009 - DNA, 25 bp, Homo sapien
cagagatgcggtggctaaaggtccc

SEQ ID NO: 3056010 - DNA, 25 bp, Homo sapien
ccaggaccgccaaagaatgccttga

SEQ ID NO: 3056011 - DNA, 25 bp, Homo sapien
tgaagccgccaggaccgccaaagaa

SEQ ID NO: 3056012 - DNA, 25 bp, Homo sapien
cgccaggaccgccaaagaatgcctt

SEQ ID NO: 3056013 - DNA, 25 bp, Homo sapien
cttcaaagctgaagccgccaggacc

SEQ ID NO: 3056014 - DNA, 25 bp, Homo sapien
aaattagaaatgttcgaagagaact

SEQ ID NO: 3056015 - DNA, 25 bp, Homo sapien
aaatgttcgaagagaactgatgaca

SEQ ID NO: 3056016 - DNA, 25 bp, Homo sapien
tgttcgaagagaactgatgacactg

SEQ ID NO: 3056017 - DNA, 25 bp, Homo sapien
agagcagggcaagtaacatggaagg

SEQ ID NO: 3056018 - DNA, 25 bp, Homo sapien
gatttggcccaaatagactctccct

SEQ ID NO: 3056019 - DNA, 25 bp, Homo sapien
cttgctagtgctcgcctcctcagag

SEQ ID NO: 3056020 - DNA, 25 bp, Homo sapien
ttggaccagggatcagatttggccc

SEQ ID NO: 3056021 - DNA, 25 bp, Homo sapien
ctacagctgtcaaattcatcccagg

SEQ ID NO: 3056022 - DNA, 25 bp, Homo sapien
ctcctcatctaggtcctgtccactg

SEQ ID NO: 3056023 - DNA, 25 bp, Homo sapien
tcctcatctaggtcctgtccactgt

SEQ ID NO: 3056024 - DNA, 25 bp, Homo sapien
catattcatgccctcctcatctagg

SEQ ID NO: 3056025 - DNA, 25 bp, Homo sapien
tccactgtcatagcgagtctttttc

SEQ ID NO: 3056026 - DNA, 25 bp, Homo sapien
catcaaggcccgtttccgataagct

SEQ ID NO: 3056027 - DNA, 25 bp, Homo sapien
atcaaggcccgtttccgataagctt

SEQ ID NO: 3056028 - DNA, 25 bp, Homo sapien
ggtgcatcaaggcccgtttccgata

SEQ ID NO: 3056029 - DNA, 25 bp, Homo sapien
tgcatcaaggcccgtttccgataag

SEQ ID NO: 3056030 - DNA, 25 bp, Homo sapien
ctacaggaagacatctggcatcagt

SEQ ID NO: 3056031 - DNA, 25 bp, Homo sapien
ctgtctggtatactttttcatagtc

SEQ ID NO: 3056032 - DNA, 25 bp, Homo sapien
tttcatagtctcgtactgcttcttc

SEQ ID NO: 3056033 - DNA, 25 bp, Homo sapien
gaaggaaatacaaggcaatacagca

SEQ ID NO: 3056034 - DNA, 25 bp, Homo sapien
ctgagaaggaaatacaaggcaatac

SEQ ID NO: 3056035 - DNA, 25 bp, Homo sapien
agaaggaaatacaaggcaatacagc

SEQ ID NO: 3056036 - DNA, 25 bp, Homo sapien
gagaaggaaatacaaggcaatacag

SEQ ID NO: 3056037 - DNA, 25 bp, Homo sapien
gctggcctaccaattgaagactgtg

SEQ ID NO: 3056038 - DNA, 25 bp, Homo sapien
gaagtgatcatgcagtacagctagc

SEQ ID NO: 3056039 - DNA, 25 bp, Homo sapien
cactgcgcctggcataagcccattt

SEQ ID NO: 3056040 - DNA, 25 bp, Homo sapien
gagagtgctaccaatgtggctggca

SEQ ID NO: 3056041 - DNA, 25 bp, Homo sapien
tagccctgggtatagaatgatgtga

SEQ ID NO: 3056042 - DNA, 25 bp, Homo sapien
gggtgaactctagctcatgatggca

SEQ ID NO: 3056043 - DNA, 25 bp, Homo sapien
ccagatgtaagggtttggcccgagc

SEQ ID NO: 3056044 - DNA, 25 bp, Homo sapien
gcagcagtagtcaggccagatgtaa

SEQ ID NO: 3056045 - DNA, 25 bp, Homo sapien
gcttaaactactggctcatcaggca

SEQ ID NO: 3056046 - DNA, 25 bp, Homo sapien
taatcaccctgtcagacacagagtg

SEQ ID NO: 3056047 - DNA, 25 bp, Homo sapien
ctaagattgtcttccctcgcccaga

SEQ ID NO: 3056048 - DNA, 25 bp, Homo sapien
tcatcaggcatcagtgacagcatct

SEQ ID NO: 3056049 - DNA, 25 bp, Homo sapien
actgtgccagggtagagcataagtg

SEQ ID NO: 3056050 - DNA, 25 bp, Homo sapien
gggtcaggcatcagaggaaacttac

SEQ ID NO: 3056051 - DNA, 25 bp, Homo sapien
atttgggtcaggcatcagaggaaac

SEQ ID NO: 3056052 - DNA, 25 bp, Homo sapien
gagcataagtgtacaacacaaaata

SEQ ID NO: 3056053 - DNA, 25 bp, Homo sapien
tgagggagcttgtgcaatctcctcc

SEQ ID NO: 3056054 - DNA, 25 bp, Homo sapien
ctcctccgctggaggtctataaaga

SEQ ID NO: 3056055 - DNA, 25 bp, Homo sapien
actgagggagcttgtgcaatctcct

SEQ ID NO: 3056056 - DNA, 25 bp, Homo sapien
aaagatagtctagggctggaacaat

SEQ ID NO: 3056057 - DNA, 25 bp, Homo sapien
tctctgggtctgcttcgtcatccac

SEQ ID NO: 3056058 - DNA, 25 bp, Homo sapien
aaatgacctcacaacatctctgggt

SEQ ID NO: 3056059 - DNA, 25 bp, Homo sapien
aaggcaattcccctgaggccagcgg

SEQ ID NO: 3056060 - DNA, 25 bp, Homo sapien
cagggggaaggaccaaatgacctca

SEQ ID NO: 3056061 - DNA, 25 bp, Homo sapien
tcttctcaagtaggcttttatgtaa

SEQ ID NO: 3056062 - DNA, 25 bp, Homo sapien
cagtaggtgcttaagattatcccac

SEQ ID NO: 3056063 - DNA, 25 bp, Homo sapien
caaaagcttgcctcttggaagggag

SEQ ID NO: 3056064 - DNA, 25 bp, Homo sapien
gtccaactgccctcaaattccatag

SEQ ID NO: 3056065 - DNA, 25 bp, Homo sapien
tcttgcttaccctcactaggcagat

SEQ ID NO: 3056066 - DNA, 25 bp, Homo sapien
tgtacagttcatatgctagtttgta

SEQ ID NO: 3056067 - DNA, 25 bp, Homo sapien
ctgtgtacagttcatatgctagttt

SEQ ID NO: 3056068 - DNA, 25 bp, Homo sapien
tgtgtacagttcatatgctagtttg

SEQ ID NO: 3056069 - DNA, 25 bp, Homo sapien
tttatattgttggggtctatcccca

SEQ ID NO: 3056070 - DNA, 25 bp, Homo sapien
gcaggcaatgcaggccttctcgtgg

SEQ ID NO: 3056071 - DNA, 25 bp, Homo sapien
cctgtacgaaaaactgaactgcctt

SEQ ID NO: 3056072 - DNA, 25 bp, Homo sapien
ggcaaagacctcgtacatacagagc

SEQ ID NO: 3056073 - DNA, 25 bp, Homo sapien
ggtggaatccattcgtagaatgtca

SEQ ID NO: 3056074 - DNA, 25 bp, Homo sapien
ggataacgacccagcattgctaaac

SEQ ID NO: 3056075 - DNA, 25 bp, Homo sapien
gataacgacccagcattgctaaaca

SEQ ID NO: 3056076 - DNA, 25 bp, Homo sapien
gcggaggttgcagttagccactgtg

SEQ ID NO: 3056077 - DNA, 25 bp, Homo sapien
tgtaatcccagggtggctgaggcag

SEQ ID NO: 3056078 - DNA, 25 bp, Homo sapien
gttgcagttagccactgtgctccag

SEQ ID NO: 3056079 - DNA, 25 bp, Homo sapien
caggataatcgtttgaacccgggag

SEQ ID NO: 3056080 - DNA, 25 bp, Homo sapien
ttccgaaaatctcgcttctcaaaat

SEQ ID NO: 3056081 - DNA, 25 bp, Homo sapien
cgaaaatctcgcttctcaaaatctg

SEQ ID NO: 3056082 - DNA, 25 bp, Homo sapien
ccgaaaatctcgcttctcaaaatct

SEQ ID NO: 3056083 - DNA, 25 bp, Homo sapien
cttccgaaaatctcgcttctcaaaa

SEQ ID NO: 3056084 - DNA, 25 bp, Homo sapien
tctctggcaactgcgacaggctgcc

SEQ ID NO: 3056085 - DNA, 25 bp, Homo sapien
tctggcaactgcgacaggctgccat

SEQ ID NO: 3056086 - DNA, 25 bp, Homo sapien
gctctctggcaactgcgacaggctg

SEQ ID NO: 3056087 - DNA, 25 bp, Homo sapien
ggcaactgcgacaggctgccatggc

SEQ ID NO: 3056088 - DNA, 25 bp, Homo sapien
tggcacttgccctctcgtagatgtc

SEQ ID NO: 3056089 - DNA, 25 bp, Homo sapien
gagagaggtggcacttgccctctcg

SEQ ID NO: 3056090 - DNA, 25 bp, Homo sapien
gtggcacttgccctctcgtagatgt

SEQ ID NO: 3056091 - DNA, 25 bp, Homo sapien
gaggtggcacttgccctctcgtaga

SEQ ID NO: 3056092 - DNA, 25 bp, Homo sapien
ggtggctgctcgattaccataatag

SEQ ID NO: 3056093 - DNA, 25 bp, Homo sapien
aaccttccaagcatcatcaaggtgg

SEQ ID NO: 3056094 - DNA, 25 bp, Homo sapien
gctcgattaccataatagctagcat

SEQ ID NO: 3056095 - DNA, 25 bp, Homo sapien
catcatcaaggtggctgctcgatta

SEQ ID NO: 3056096 - DNA, 25 bp, Homo sapien
ggcatagtatgcatttccttgttcc

SEQ ID NO: 3056097 - DNA, 25 bp, Homo sapien
cttgttccttgaaagtctctgcttc

SEQ ID NO: 3056098 - DNA, 25 bp, Homo sapien
attataagcttcattgtaatctttc

SEQ ID NO: 3056099 - DNA, 25 bp, Homo sapien
cattgtaatctttcttggcatagta

SEQ ID NO: 3056100 - DNA, 25 bp, Homo sapien
taataatttcacctcctgaaaagtg

SEQ ID NO: 3056101 - DNA, 25 bp, Homo sapien
gaaaaatggttactccattcagggc

SEQ ID NO: 3056102 - DNA, 25 bp, Homo sapien
tttcacctcctgaaaagtggctcat

SEQ ID NO: 3056103 - DNA, 25 bp, Homo sapien
cagggcaacttatttctcaatgtga

SEQ ID NO: 3056104 - DNA, 25 bp, Homo sapien
aactgaacaaggctgcatcaggaac

SEQ ID NO: 3056105 - DNA, 25 bp, Homo sapien
cctgcgagaccagtcgaggaaagag

SEQ ID NO: 3056106 - DNA, 25 bp, Homo sapien
ggaacaattccagtgtcaaatccat

SEQ ID NO: 3056107 - DNA, 25 bp, Homo sapien
tctttggaatccagcatggcagcag

SEQ ID NO: 3056108 - DNA, 25 bp, Homo sapien
gctagtaggattaaaggcgtcagcc

SEQ ID NO: 3056109 - DNA, 25 bp, Homo sapien
taatttcacctatcctccaacagag

SEQ ID NO: 3056110 - DNA, 25 bp, Homo sapien
caacagaggaagagctagtgaggca

SEQ ID NO: 3056111 - DNA, 25 bp, Homo sapien
ggctgcacaggtctcctaagtccta

SEQ ID NO: 3056112 - DNA, 25 bp, Homo sapien
ggaatcatttggtatcacacaggtc

SEQ ID NO: 3056113 - DNA, 25 bp, Homo sapien
cacaggtcttagcagggctcagcat

SEQ ID NO: 3056114 - DNA, 25 bp, Homo sapien
caacttgggcttatggttgctagcc

SEQ ID NO: 3056115 - DNA, 25 bp, Homo sapien
aattactccaacaaacactgctaag

SEQ ID NO: 3056116 - DNA, 25 bp, Homo sapien
tttgggaaattataggctcacgcct

SEQ ID NO: 3056117 - DNA, 25 bp, Homo sapien
cagcaaaccatgttcctgcagcctg

SEQ ID NO: 3056118 - DNA, 25 bp, Homo sapien
aggagacggtggttgtgatgagcca

SEQ ID NO: 3056119 - DNA, 25 bp, Homo sapien
gctgaggcagaagacctcctgagcc

SEQ ID NO: 3056120 - DNA, 25 bp, Homo sapien
gtttcttggctgctgtaagggaaac

SEQ ID NO: 3056121 - DNA, 25 bp, Homo sapien
tagagaacacgagataagcccctcg

SEQ ID NO: 3056122 - DNA, 25 bp, Homo sapien
gactaacccgcagctgataaggaaa

SEQ ID NO: 3056123 - DNA, 25 bp, Homo sapien
gactggcaatctcgaaccactgcgg

SEQ ID NO: 3056124 - DNA, 25 bp, Homo sapien
tattacactttgtcaggcccctcag

SEQ ID NO: 3056125 - DNA, 25 bp, Homo sapien
atcgacgccgcgccgcttcccccac

SEQ ID NO: 3056126 - DNA, 25 bp, Homo sapien
catcgacgccgcgccgcttccccca

SEQ ID NO: 3056127 - DNA, 25 bp, Homo sapien
tcatcgacgccgcgccgcttccccc

SEQ ID NO: 3056128 - DNA, 25 bp, Homo sapien
aattgccctcggagactcggcctct

SEQ ID NO: 3056129 - DNA, 25 bp, Homo sapien
ctgaaattgccctcggagactcggc

SEQ ID NO: 3056130 - DNA, 25 bp, Homo sapien
aaggacgatcgtcctctcagctgga

SEQ ID NO: 3056131 - DNA, 25 bp, Homo sapien
ctctcctataaggacgatcgtcctc

SEQ ID NO: 3056132 - DNA, 25 bp, Homo sapien
gcagctccggctcggtcgccgccat

SEQ ID NO: 3056133 - DNA, 25 bp, Homo sapien
ttcgcctcttggtcgtcgagcagct

SEQ ID NO: 3056134 - DNA, 25 bp, Homo sapien
ctcttcgcctcttggtcgtcgagca

SEQ ID NO: 3056135 - DNA, 25 bp, Homo sapien
tcttggtcgtcgagcagctccggct

SEQ ID NO: 3056136 - DNA, 25 bp, Homo sapien
taccacatcgcactccgcggcagcc

SEQ ID NO: 3056137 - DNA, 25 bp, Homo sapien
ccacatcgcactccgcggcagccgc

SEQ ID NO: 3056138 - DNA, 25 bp, Homo sapien
acatcgcactccgcggcagccgcca

SEQ ID NO: 3056139 - DNA, 25 bp, Homo sapien
catcgcactccgcggcagccgccat

SEQ ID NO: 3056140 - DNA, 25 bp, Homo sapien
tgaagagcacttccggttggagcat

SEQ ID NO: 3056141 - DNA, 25 bp, Homo sapien
ttggagcatagagcagctccgcggc

SEQ ID NO: 3056142 - DNA, 25 bp, Homo sapien
cctcgggctcgtctaccagagagag

SEQ ID NO: 3056143 - DNA, 25 bp, Homo sapien
tctaccagagagaggctccgcttgg

SEQ ID NO: 3056144 - DNA, 25 bp, Homo sapien
tcttcccgggaaagtcaagagacac

SEQ ID NO: 3056145 - DNA, 25 bp, Homo sapien
tgtaccggtggtagcctctctaggg

SEQ ID NO: 3056146 - DNA, 25 bp, Homo sapien
gactctgtagggaaggagtccccac

SEQ ID NO: 3056147 - DNA, 25 bp, Homo sapien
gaccaggtgacccaagactctgtag

SEQ ID NO: 3056148 - DNA, 25 bp, Homo sapien
aaacagcatgtgccaatgctcatac

SEQ ID NO: 3056149 - DNA, 25 bp, Homo sapien
gcatgtgccaatgctcatactctgc

SEQ ID NO: 3056150 - DNA, 25 bp, Homo sapien
aacagcatgtgccaatgctcatact

SEQ ID NO: 3056151 - DNA, 25 bp, Homo sapien
cagcatgtgccaatgctcatactct

SEQ ID NO: 3056152 - DNA, 25 bp, Homo sapien
ctcatccctcaccctgacctttctc

SEQ ID NO: 3056153 - DNA, 25 bp, Homo sapien
tggcattaggcgtctcctcatccct

SEQ ID NO: 3056154 - DNA, 25 bp, Homo sapien
tatactggcattaggcgtctcctca

SEQ ID NO: 3056155 - DNA, 25 bp, Homo sapien
actggcattaggcgtctcctcatcc

SEQ ID NO: 3056156 - DNA, 25 bp, Homo sapien
tgcttgaactcagaaggcggaggct

SEQ ID NO: 3056157 - DNA, 25 bp, Homo sapien
ttgcttgaactcagaaggcggaggc

SEQ ID NO: 3056158 - DNA, 25 bp, Homo sapien
atgggcctcactggttgagatggaa

SEQ ID NO: 3056159 - DNA, 25 bp, Homo sapien
tcttgatttcgtaaagccaatggct

SEQ ID NO: 3056160 - DNA, 25 bp, Homo sapien
ctgctcagggagcagatgggcctca

SEQ ID NO: 3056161 - DNA, 25 bp, Homo sapien
agaataactgggctatgagtcacca

SEQ ID NO: 3056162 - DNA, 25 bp, Homo sapien
tgaacagaacaaggcaaacccgtag

SEQ ID NO: 3056163 - DNA, 25 bp, Homo sapien
ccagcggcctgcagagtaagcttat

SEQ ID NO: 3056164 - DNA, 25 bp, Homo sapien
cctagcctaggtgagacactgcagc

SEQ ID NO: 3056165 - DNA, 25 bp, Homo sapien
gcccgctttgtgcttctaaggtgca

SEQ ID NO: 3056166 - DNA, 25 bp, Homo sapien
catgaaaatgggtcttgccagtgca

SEQ ID NO: 3056167 - DNA, 25 bp, Homo sapien
gactgggcttatcagcaagtatcac

SEQ ID NO: 3056168 - DNA, 25 bp, Homo sapien
tagcactgctgatcgaaggactttt

SEQ ID NO: 3056169 - DNA, 25 bp, Homo sapien
tgttagctgagtccatagtctgagg

SEQ ID NO: 3056170 - DNA, 25 bp, Homo sapien
tgcaggcaagcctaggattaaccct

SEQ ID NO: 3056171 - DNA, 25 bp, Homo sapien
caagcctaggattaaccctggaagg

SEQ ID NO: 3056172 - DNA, 25 bp, Homo sapien
gggtgggaaatgcaggcaagcctag

SEQ ID NO: 3056173 - DNA, 25 bp, Homo sapien
taagattcctagagtctggccatgt

SEQ ID NO: 3056174 - DNA, 25 bp, Homo sapien
ggagtggctattgggaaatcagctc

SEQ ID NO: 3056175 - DNA, 25 bp, Homo sapien
gcagctgcccttaaaactagcccag

SEQ ID NO: 3056176 - DNA, 25 bp, Homo sapien
gacaaggagtggctattgggaaatc

SEQ ID NO: 3056177 - DNA, 25 bp, Homo sapien
gctctttctggatcgggcaggaccc

SEQ ID NO: 3056178 - DNA, 25 bp, Homo sapien
gctgccaacgtcttggtgagttgct

SEQ ID NO: 3056179 - DNA, 25 bp, Homo sapien
tcctgctggggtgcgaaacagagct

SEQ ID NO: 3056180 - DNA, 25 bp, Homo sapien
taataaggggcaaggacgataggtc

SEQ ID NO: 3056181 - DNA, 25 bp, Homo sapien
gcaggaagcgggctgccaacgtctt

SEQ ID NO: 3056182 - DNA, 25 bp, Homo sapien
tcttcccggccaggcggtctttgtg

SEQ ID NO: 3056183 - DNA, 25 bp, Homo sapien
ccggccaggcggtctttgtgcctcc

SEQ ID NO: 3056184 - DNA, 25 bp, Homo sapien
ggccaggcggtctttgtgcctcctg

SEQ ID NO: 3056185 - DNA, 25 bp, Homo sapien
tcccggccaggcggtctttgtgcct

SEQ ID NO: 3056186 - DNA, 25 bp, Homo sapien
gcccaaggaccccaagaccatcatc

SEQ ID NO: 3056187 - DNA, 25 bp, Homo sapien
caagaccatcatcctcgactcttcc

SEQ ID NO: 3056188 - DNA, 25 bp, Homo sapien
ttccccttcctctatccacagctca

SEQ ID NO: 3056189 - DNA, 25 bp, Homo sapien
gcctttgcccttaattggcccactg

SEQ ID NO: 3056190 - DNA, 25 bp, Homo sapien
ttcagttgggtctctgaattgacct

SEQ ID NO: 3056191 - DNA, 25 bp, Homo sapien
gggtctctgaattgacctggagctg

SEQ ID NO: 3056192 - DNA, 25 bp, Homo sapien
ttggctttgtgtccggcacctcccc

SEQ ID NO: 3056193 - DNA, 25 bp, Homo sapien
ttccatcatccaccggtgcttggct

SEQ ID NO: 3056194 - DNA, 25 bp, Homo sapien
tcaccttacacgtggggcagtagag

SEQ ID NO: 3056195 - DNA, 25 bp, Homo sapien
gttcactgtcaccttacacgtgggg

SEQ ID NO: 3056196 - DNA, 25 bp, Homo sapien
cactgtcaccttacacgtggggcag

SEQ ID NO: 3056197 - DNA, 25 bp, Homo sapien
ggcagtagaggtgccccttctcact

SEQ ID NO: 3056198 - DNA, 25 bp, Homo sapien
ggagcaaggtgggcaggaggaagaa

SEQ ID NO: 3056199 - DNA, 25 bp, Homo sapien
aagaggatgaggaggcagcatccaa

SEQ ID NO: 3056200 - DNA, 25 bp, Homo sapien
gatgaggaggcagcatccaagagct

SEQ ID NO: 3056201 - DNA, 25 bp, Homo sapien
gggagcaaggtgggcaggaggaaga

SEQ ID NO: 3056202 - DNA, 25 bp, Homo sapien
gctggctccctgcatgtagggtctg

SEQ ID NO: 3056203 - DNA, 25 bp, Homo sapien
tggctccctgcatgtagggtctgga

SEQ ID NO: 3056204 - DNA, 25 bp, Homo sapien
gctccctgcatgtagggtctggagt

SEQ ID NO: 3056205 - DNA, 25 bp, Homo sapien
ctggctccctgcatgtagggtctgg

SEQ ID NO: 3056206 - DNA, 25 bp, Homo sapien
ggaggcccaagaggaggggctgcag

SEQ ID NO: 3056207 - DNA, 25 bp, Homo sapien
ggagtggaggcccaagaggaggggc

SEQ ID NO: 3056208 - DNA, 25 bp, Homo sapien
ctggagtggaggcccaagaggaggg

SEQ ID NO: 3056209 - DNA, 25 bp, Homo sapien
ggcccaagaggaggggctgcaggaa

SEQ ID NO: 3056210 - DNA, 25 bp, Homo sapien
tggcagcctcgacagccttgagttt

SEQ ID NO: 3056211 - DNA, 25 bp, Homo sapien
gagttttctggcgtgtttgtggcct

SEQ ID NO: 3056212 - DNA, 25 bp, Homo sapien
cagcgttgggattggggacactaca

SEQ ID NO: 3056213 - DNA, 25 bp, Homo sapien
gcctttataatgtgcctcggcctgg

SEQ ID NO: 3056214 - DNA, 25 bp, Homo sapien
gatgacagctttctggaccgggtcc

SEQ ID NO: 3056215 - DNA, 25 bp, Homo sapien
ttgaacctcaggtgacagatgttac

SEQ ID NO: 3056216 - DNA, 25 bp, Homo sapien
cgctgagttgaacctcaggtgacag

SEQ ID NO: 3056217 - DNA, 25 bp, Homo sapien
caccaaacgtgtggctgatgacagc

SEQ ID NO: 3056218 - DNA, 25 bp, Homo sapien
gaagtggaaggcgagcaagtgcttg

SEQ ID NO: 3056219 - DNA, 25 bp, Homo sapien
gggcagcgccattgaagtggaaggc

SEQ ID NO: 3056220 - DNA, 25 bp, Homo sapien
gaaggcgagcaagtgcttgaagtcc

SEQ ID NO: 3056221 - DNA, 25 bp, Homo sapien
ggaagagactgagcggggcagcgcc

SEQ ID NO: 3056222 - DNA, 25 bp, Homo sapien
ggggcagggaggccagcagggggct

SEQ ID NO: 3056223 - DNA, 25 bp, Homo sapien
tgcagaggccgggtgggcaggggca

SEQ ID NO: 3056224 - DNA, 25 bp, Homo sapien
ctgggggcgccggaggccgggcctg

SEQ ID NO: 3056225 - DNA, 25 bp, Homo sapien
gcagggggctgggggcgccggaggc

SEQ ID NO: 3056226 - DNA, 25 bp, Homo sapien
gatccccaggatttcatggccaggg

SEQ ID NO: 3056227 - DNA, 25 bp, Homo sapien
ccccaggaggtaaataagccaacat

SEQ ID NO: 3056228 - DNA, 25 bp, Homo sapien
tctgatgaggcctaaactgcttccc

SEQ ID NO: 3056229 - DNA, 25 bp, Homo sapien
tctgaagggatgtgctccccagctc

SEQ ID NO: 3056230 - DNA, 25 bp, Homo sapien
gcagtcagcagatcatcttgggtgc

SEQ ID NO: 3056231 - DNA, 25 bp, Homo sapien
cctcaggtgagctgcgaccccagga

SEQ ID NO: 3056232 - DNA, 25 bp, Homo sapien
taggttggcccttacagtgcccagg

SEQ ID NO: 3056233 - DNA, 25 bp, Homo sapien
ggtcaagtctaggttggcccttaca

SEQ ID NO: 3056234 - DNA, 25 bp, Homo sapien
cccgaagtcaaactcgtgcagcggg

SEQ ID NO: 3056235 - DNA, 25 bp, Homo sapien
cagccaacccgaagtcaaactcgtg

SEQ ID NO: 3056236 - DNA, 25 bp, Homo sapien
taagaactccacagccaacccgaag

SEQ ID NO: 3056237 - DNA, 25 bp, Homo sapien
aagaactccacagccaacccgaagt

SEQ ID NO: 3056238 - DNA, 25 bp, Homo sapien
caccaccgcagctcccggctgcggc

SEQ ID NO: 3056239 - DNA, 25 bp, Homo sapien
cggccccactctgcccccaccaccg

SEQ ID NO: 3056240 - DNA, 25 bp, Homo sapien
tctgcccccaccaccgcagctcccg

SEQ ID NO: 3056241 - DNA, 25 bp, Homo sapien
cccaccaccgcagctcccggctgcg

SEQ ID NO: 3056242 - DNA, 25 bp, Homo sapien
accatggaggcggaatagggcatcc

SEQ ID NO: 3056243 - DNA, 25 bp, Homo sapien
aatagctgcaaggtccagtgctgcc

SEQ ID NO: 3056244 - DNA, 25 bp, Homo sapien
gcttccactacaggcagcagggagg

SEQ ID NO: 3056245 - DNA, 25 bp, Homo sapien
ctcatattgacccaagtaggccggg

SEQ ID NO: 3056246 - DNA, 25 bp, Homo sapien
cagcttgggtgcagatacgccgaaa

SEQ ID NO: 3056247 - DNA, 25 bp, Homo sapien
agtctctggtctcgtccaacaccag

SEQ ID NO: 3056248 - DNA, 25 bp, Homo sapien
ggctgtgtgactccggccagtctct

SEQ ID NO: 3056249 - DNA, 25 bp, Homo sapien
cctgcaggatgtccaagagctggcc

SEQ ID NO: 3056250 - DNA, 25 bp, Homo sapien
gactgtagtaatcgccatgctctgt

SEQ ID NO: 3056251 - DNA, 25 bp, Homo sapien
ctgggactgtagtaatcgccatgct

SEQ ID NO: 3056252 - DNA, 25 bp, Homo sapien
gggactgtagtaatcgccatgctct

SEQ ID NO: 3056253 - DNA, 25 bp, Homo sapien
tgtagtaatcgccatgctctgtgcc

SEQ ID NO: 3056254 - DNA, 25 bp, Homo sapien
cacttcttgttggagttggaggcct

SEQ ID NO: 3056255 - DNA, 25 bp, Homo sapien
tttgccatgcttgttccgtaccagg

SEQ ID NO: 3056256 - DNA, 25 bp, Homo sapien
ggcactcgaggcagaacatcagctt

SEQ ID NO: 3056257 - DNA, 25 bp, Homo sapien
gcgctggaagttgtctgtgcccaca

SEQ ID NO: 3056258 - DNA, 25 bp, Homo sapien
tggccttagcttaaccatccattcc

SEQ ID NO: 3056259 - DNA, 25 bp, Homo sapien
cctccagagtgccaggttcccatcc

SEQ ID NO: 3056260 - DNA, 25 bp, Homo sapien
gctgccctcccaatgctttacctgg

SEQ ID NO: 3056261 - DNA, 25 bp, Homo sapien
tgccctcccaatgctttacctggcc

SEQ ID NO: 3056262 - DNA, 25 bp, Homo sapien
tctggaattttgtcagatcctttcc

SEQ ID NO: 3056263 - DNA, 25 bp, Homo sapien
ctttccatgtacatcgaagctgcct

SEQ ID NO: 3056264 - DNA, 25 bp, Homo sapien
gtacatcgaagctgcctatcctgcc

SEQ ID NO: 3056265 - DNA, 25 bp, Homo sapien
gcccttctggaattttgtcagatcc

SEQ ID NO: 3056266 - DNA, 25 bp, Homo sapien
gccccagaatgtgggtcccgagcct

SEQ ID NO: 3056267 - DNA, 25 bp, Homo sapien
ccccagaatgtgggtcccgagcctc

SEQ ID NO: 3056268 - DNA, 25 bp, Homo sapien
ccatcttgggcggtggacgctctgg

SEQ ID NO: 3056269 - DNA, 25 bp, Homo sapien
caggagccaccatcttgggcggtgg

SEQ ID NO: 3056270 - DNA, 25 bp, Homo sapien
ttgggcggtggacgctctggccgcg

SEQ ID NO: 3056271 - DNA, 25 bp, Homo sapien
agccaccatcttgggcggtggacgc

SEQ ID NO: 3056272 - DNA, 25 bp, Homo sapien
gggcctcttacactgaagtgaaggg

SEQ ID NO: 3056273 - DNA, 25 bp, Homo sapien
aggactgactttgtccacagggacc

SEQ ID NO: 3056274 - DNA, 25 bp, Homo sapien
agaggattcccttgcctggggcctc

SEQ ID NO: 3056275 - DNA, 25 bp, Homo sapien
gaagtgaagggttggaaggactgac

SEQ ID NO: 3056276 - DNA, 25 bp, Homo sapien
taagccccctaattctgtacccaga

SEQ ID NO: 3056277 - DNA, 25 bp, Homo sapien
gggcagggatctgagctaagccccc

SEQ ID NO: 3056278 - DNA, 25 bp, Homo sapien
gggatctgagctaagccccctaatt

SEQ ID NO: 3056279 - DNA, 25 bp, Homo sapien
cctaattctgtacccagacagcctt

SEQ ID NO: 3056280 - DNA, 25 bp, Homo sapien
ggagggggatgccaatggtcagggt

SEQ ID NO: 3056281 - DNA, 25 bp, Homo sapien
ggggagggggatgccaatggtcagg

SEQ ID NO: 3056282 - DNA, 25 bp, Homo sapien
gggggagggggatgccaatggtcag

SEQ ID NO: 3056283 - DNA, 25 bp, Homo sapien
gggggatgccaatggtcagggtcac

SEQ ID NO: 3056284 - DNA, 25 bp, Homo sapien
gagggggatgtgatgacattcggga

SEQ ID NO: 3056285 - DNA, 25 bp, Homo sapien
ggggatgtgatgacattcgggaaga

SEQ ID NO: 3056286 - DNA, 25 bp, Homo sapien
atgtgatgacattcgggaagagcgt

SEQ ID NO: 3056287 - DNA, 25 bp, Homo sapien
gaagagcgtggggcacttctgtcac

SEQ ID NO: 3056288 - DNA, 25 bp, Homo sapien
cctgagggtatgtcccatgtggcaa

SEQ ID NO: 3056289 - DNA, 25 bp, Homo sapien
tccagacagacacatatgctccaga

SEQ ID NO: 3056290 - DNA, 25 bp, Homo sapien
ttgcttatgccgtgacctctgcctg

SEQ ID NO: 3056291 - DNA, 25 bp, Homo sapien
tgagtgactttcgaatccagacaga

SEQ ID NO: 3056292 - DNA, 25 bp, Homo sapien
gcaaggtaggtttctgttggcctcc

SEQ ID NO: 3056293 - DNA, 25 bp, Homo sapien
gcagcctgggtggttcttactttcc

SEQ ID NO: 3056294 - DNA, 25 bp, Homo sapien
cagctagaatcaccctcatggaggc

SEQ ID NO: 3056295 - DNA, 25 bp, Homo sapien
gaggtcagagtgtagcctccggcaa

SEQ ID NO: 3056296 - DNA, 25 bp, Homo sapien
ccccttgtccctgggttggagtgct

SEQ ID NO: 3056297 - DNA, 25 bp, Homo sapien
ccttgtccctgggttggagtgctgt

SEQ ID NO: 3056298 - DNA, 25 bp, Homo sapien
gtccctgggttggagtgctgtgtac

SEQ ID NO: 3056299 - DNA, 25 bp, Homo sapien
tctgcaaagtcaccccagctaggga

SEQ ID NO: 3056300 - DNA, 25 bp, Homo sapien
gcttaggagtcctgatcccaaaaga

SEQ ID NO: 3056301 - DNA, 25 bp, Homo sapien
tgctgcttaggagtcctgatcccaa

SEQ ID NO: 3056302 - DNA, 25 bp, Homo sapien
ctggagaagtgctgcttaggagtcc

SEQ ID NO: 3056303 - DNA, 25 bp, Homo sapien
gatcccaaaagatcccacagggaga

SEQ ID NO: 3056304 - DNA, 25 bp, Homo sapien
tagaaacaaagacccaagaggcggc

SEQ ID NO: 3056305 - DNA, 25 bp, Homo sapien
gattccgagaggtcctacagaaggg

SEQ ID NO: 3056306 - DNA, 25 bp, Homo sapien
tacagaagggttgtccagatgcaga

SEQ ID NO: 3056307 - DNA, 25 bp, Homo sapien
ttcagaccctaagaccccattgagg

SEQ ID NO: 3056308 - DNA, 25 bp, Homo sapien
tgggagcagcgtcccctctacactg

SEQ ID NO: 3056309 - DNA, 25 bp, Homo sapien
aaatttgtgggagcagcgtcccctc

SEQ ID NO: 3056310 - DNA, 25 bp, Homo sapien
ccaaaccaaatttgtgggagcagcg

SEQ ID NO: 3056311 - DNA, 25 bp, Homo sapien
aaccaaatttgtgggagcagcgtcc

SEQ ID NO: 3056312 - DNA, 25 bp, Homo sapien
gggctcttccccaagctgagctgcc

SEQ ID NO: 3056313 - DNA, 25 bp, Homo sapien
gatggccgctttctttctcgcttgg

SEQ ID NO: 3056314 - DNA, 25 bp, Homo sapien
tcagcagctccagatatgggggtct

SEQ ID NO: 3056315 - DNA, 25 bp, Homo sapien
cagacatcacagagcgtgtacgatg

SEQ ID NO: 3056316 - DNA, 25 bp, Homo sapien
tctcgcttgggcttaggtggttctg

SEQ ID NO: 3056317 - DNA, 25 bp, Homo sapien
cagccaaaaacacaaccttcctgtg

SEQ ID NO: 3056318 - DNA, 25 bp, Homo sapien
gcagccgccagccaaaaacacaacc

SEQ ID NO: 3056319 - DNA, 25 bp, Homo sapien
ggagacgcagcagccgccagccaaa

SEQ ID NO: 3056320 - DNA, 25 bp, Homo sapien
agccaaaaacacaaccttcctgtgc

SEQ ID NO: 3056321 - DNA, 25 bp, Homo sapien
tttgccttctctcggaaatctgcgt

SEQ ID NO: 3056322 - DNA, 25 bp, Homo sapien
ccttctctcggaaatctgcgtgcat

SEQ ID NO: 3056323 - DNA, 25 bp, Homo sapien
tgccttctctcggaaatctgcgtgc

SEQ ID NO: 3056324 - DNA, 25 bp, Homo sapien
ttttgccttctctcggaaatctgcg

SEQ ID NO: 3056325 - DNA, 25 bp, Homo sapien
tccactgtcgaagccactgagtctg

SEQ ID NO: 3056326 - DNA, 25 bp, Homo sapien
ggaagaccatcttcaagccaagaag

SEQ ID NO: 3056327 - DNA, 25 bp, Homo sapien
gcctttgaagaaatgaaccctcctg

SEQ ID NO: 3056328 - DNA, 25 bp, Homo sapien
caccgcgctgggtctcatatgactg

SEQ ID NO: 3056329 - DNA, 25 bp, Homo sapien
gcctactggggaccaggccacacag

SEQ ID NO: 3056330 - DNA, 25 bp, Homo sapien
aggcctactggggaccaggccacac

SEQ ID NO: 3056331 - DNA, 25 bp, Homo sapien
actggggcaggcctactggggacca

SEQ ID NO: 3056332 - DNA, 25 bp, Homo sapien
tggggaccaggccacacagagagga

SEQ ID NO: 3056333 - DNA, 25 bp, Homo sapien
cactggttgcaaatccccctgaaat

SEQ ID NO: 3056334 - DNA, 25 bp, Homo sapien
ggcggctccccactggttgcaaatc

SEQ ID NO: 3056335 - DNA, 25 bp, Homo sapien
cagttgtccttcacagtgaccggga

SEQ ID NO: 3056336 - DNA, 25 bp, Homo sapien
tggaaaccgggacagttgtccttca

SEQ ID NO: 3056337 - DNA, 25 bp, Homo sapien
atacaggccacgtggaggctccact

SEQ ID NO: 3056338 - DNA, 25 bp, Homo sapien
ccagatacaggccacgtggaggctc

SEQ ID NO: 3056339 - DNA, 25 bp, Homo sapien
tctcctggaccatgaccagatgagc

SEQ ID NO: 3056340 - DNA, 25 bp, Homo sapien
catgaccagatgagctccagataca

SEQ ID NO: 3056341 - DNA, 25 bp, Homo sapien
agccccttggctgaagcccctatgc

SEQ ID NO: 3056342 - DNA, 25 bp, Homo sapien
cccttggctgaagcccctatgccat

SEQ ID NO: 3056343 - DNA, 25 bp, Homo sapien
gctgaagcccctatgccatcctgtt

SEQ ID NO: 3056344 - DNA, 25 bp, Homo sapien
cctatgccatcctgttccatggcgt

SEQ ID NO: 3056345 - DNA, 25 bp, Homo sapien
cgtgattctgagtacagtatggcaa

SEQ ID NO: 3056346 - DNA, 25 bp, Homo sapien
tctatgtgcgtacaaggtaggtctg

SEQ ID NO: 3056347 - DNA, 25 bp, Homo sapien
aaaccgggcactgcagcaatgaggt

SEQ ID NO: 3056348 - DNA, 25 bp, Homo sapien
taggtctggactaagctctggccct

SEQ ID NO: 3056349 - DNA, 25 bp, Homo sapien
caagttctcggcacaatgctgcagg

SEQ ID NO: 3056350 - DNA, 25 bp, Homo sapien
cacgcgggaccactttttggcctgg

SEQ ID NO: 3056351 - DNA, 25 bp, Homo sapien
tccagggagaggtccgacaagttct

SEQ ID NO: 3056352 - DNA, 25 bp, Homo sapien
catgctgcggactttgagcactggc

SEQ ID NO: 3056353 - DNA, 25 bp, Homo sapien
atccctggagacattatagtagttc

SEQ ID NO: 3056354 - DNA, 25 bp, Homo sapien
acagttcctgcagctgatgacaccc

SEQ ID NO: 3056355 - DNA, 25 bp, Homo sapien
ccaggcttccagtccttgaagactt

SEQ ID NO: 3056356 - DNA, 25 bp, Homo sapien
ttgttgatgaccacaggatccctgg

SEQ ID NO: 3056357 - DNA, 25 bp, Homo sapien
tcaagcctcagcatcggttacctgg

SEQ ID NO: 3056358 - DNA, 25 bp, Homo sapien
taagaggaacctcctggataaaggc

SEQ ID NO: 3056359 - DNA, 25 bp, Homo sapien
tccaccaactgctagagggatctaa

SEQ ID NO: 3056360 - DNA, 25 bp, Homo sapien
agttctacctgtgtggcctccatcg

SEQ ID NO: 3056361 - DNA, 25 bp, Homo sapien
gggccgcccgcttggtcaaggctgc

SEQ ID NO: 3056362 - DNA, 25 bp, Homo sapien
tgccctccaccttccgcaggtcgct

SEQ ID NO: 3056363 - DNA, 25 bp, Homo sapien
catgcagttgatgcagagtagctgc

SEQ ID NO: 3056364 - DNA, 25 bp, Homo sapien
gcaggtcgctgccatggcccacagc

SEQ ID NO: 3056365 - DNA, 25 bp, Homo sapien
ggtactcggcctggtccattttctg

SEQ ID NO: 3056366 - DNA, 25 bp, Homo sapien
gcgtatacactctgatcggcccggg

SEQ ID NO: 3056367 - DNA, 25 bp, Homo sapien
gcgcctcgttgatcagctcccgctt

SEQ ID NO: 3056368 - DNA, 25 bp, Homo sapien
agctcccggctaccttcagttgcta

SEQ ID NO: 3056369 - DNA, 25 bp, Homo sapien
gaacttctggatcacttcttgctgg

SEQ ID NO: 3056370 - DNA, 25 bp, Homo sapien
ggagatttcattggtcaagagccca

SEQ ID NO: 3056371 - DNA, 25 bp, Homo sapien
attgcaatgtgggatgtccagcccc

SEQ ID NO: 3056372 - DNA, 25 bp, Homo sapien
cactcgtggccaccagaaggttcag

SEQ ID NO: 3056373 - DNA, 25 bp, Homo sapien
agcgccagcatctttccccgaagcc

SEQ ID NO: 3056374 - DNA, 25 bp, Homo sapien
tccccgcacttctctcctatggaat

SEQ ID NO: 3056375 - DNA, 25 bp, Homo sapien
cctgttccccgcacttctctcctat

SEQ ID NO: 3056376 - DNA, 25 bp, Homo sapien
aagaccctgttccccgcacttctct

SEQ ID NO: 3056377 - DNA, 25 bp, Homo sapien
gggctgttagagctactgaactgcc

SEQ ID NO: 3056378 - DNA, 25 bp, Homo sapien
gtgaagatgataccccgagggctgt

SEQ ID NO: 3056379 - DNA, 25 bp, Homo sapien
gcccggatgtccacagtctgcaggc

SEQ ID NO: 3056380 - DNA, 25 bp, Homo sapien
ccaatcagtagctgggcccggatgt

SEQ ID NO: 3056381 - DNA, 25 bp, Homo sapien
tgggccatgagttgccaagtgggcc

SEQ ID NO: 3056382 - DNA, 25 bp, Homo sapien
gggccatgagttgccaagtgggcca

SEQ ID NO: 3056383 - DNA, 25 bp, Homo sapien
ccatgagttgccaagtgggccagct

SEQ ID NO: 3056384 - DNA, 25 bp, Homo sapien
gccatgagttgccaagtgggccagc

SEQ ID NO: 3056385 - DNA, 25 bp, Homo sapien
tgaagcgcatacacccgttgctcct

SEQ ID NO: 3056386 - DNA, 25 bp, Homo sapien
tagtgacgtgctccctgtgatagaa

SEQ ID NO: 3056387 - DNA, 25 bp, Homo sapien
tgtgatagaaatcctgcagcgcagc

SEQ ID NO: 3056388 - DNA, 25 bp, Homo sapien
tgtcatggatgagcagcgcgtcatt

SEQ ID NO: 3056389 - DNA, 25 bp, Homo sapien
cgggaagagggcgcagggtctgagc

SEQ ID NO: 3056390 - DNA, 25 bp, Homo sapien
ctgcgggaagagggcgcagggtctg

SEQ ID NO: 3056391 - DNA, 25 bp, Homo sapien
tgcgggaagagggcgcagggtctga

SEQ ID NO: 3056392 - DNA, 25 bp, Homo sapien
gcgggaagagggcgcagggtctgag

SEQ ID NO: 3056393 - DNA, 25 bp, Homo sapien
ctgctgctcatacatttgcgtccca

SEQ ID NO: 3056394 - DNA, 25 bp, Homo sapien
tgcgtcccaaatttccggctcaact

SEQ ID NO: 3056395 - DNA, 25 bp, Homo sapien
aatttccggctcaactcaggcatct

SEQ ID NO: 3056396 - DNA, 25 bp, Homo sapien
catttgcgtcccaaatttccggctc

SEQ ID NO: 3056397 - DNA, 25 bp, Homo sapien
gcagttctggggtgacatgatgcac

SEQ ID NO: 3056398 - DNA, 25 bp, Homo sapien
gggtgacatgatgcaccacgtgtcc

SEQ ID NO: 3056399 - DNA, 25 bp, Homo sapien
tgtactgtttgcaaggctgttggct

SEQ ID NO: 3056400 - DNA, 25 bp, Homo sapien
ctgcgcctgtggcagaggttgtact

SEQ ID NO: 3056401 - DNA, 25 bp, Homo sapien
gttcaaagggaagcgcattctaggc

SEQ ID NO: 3056402 - DNA, 25 bp, Homo sapien
cagagatcagggaggactttcaaga

SEQ ID NO: 3056403 - DNA, 25 bp, Homo sapien
tggtaaatgcaaaggtccccgagat

SEQ ID NO: 3056404 - DNA, 25 bp, Homo sapien
caagaggtggcattaagctgttcaa

SEQ ID NO: 3056405 - DNA, 25 bp, Homo sapien
gtggggacggggtagtggcagggca

SEQ ID NO: 3056406 - DNA, 25 bp, Homo sapien
gttgatggccccatcgagtttggag

SEQ ID NO: 3056407 - DNA, 25 bp, Homo sapien
acctggggtagcggctgtgccctct

SEQ ID NO: 3056408 - DNA, 25 bp, Homo sapien
ccagcacctggggtagcggctgtgc

SEQ ID NO: 3056409 - DNA, 25 bp, Homo sapien
tggccccatcgagtttggaggcccc

SEQ ID NO: 3056410 - DNA, 25 bp, Homo sapien
ctcatccaccacgatcagggagaag

SEQ ID NO: 3056411 - DNA, 25 bp, Homo sapien
tcatccaccacgatcagggagaaga

SEQ ID NO: 3056412 - DNA, 25 bp, Homo sapien
cctcggggctggtcagtgccatctg

SEQ ID NO: 3056413 - DNA, 25 bp, Homo sapien
catctgcagaagctctgctgtgcag

SEQ ID NO: 3056414 - DNA, 25 bp, Homo sapien
gggctggtcagtgccatctgcagaa

SEQ ID NO: 3056415 - DNA, 25 bp, Homo sapien
tgccatctgcagaagctctgctgtg

SEQ ID NO: 3056416 - DNA, 25 bp, Homo sapien
agcgtccatccagcatgcgcctgaa

SEQ ID NO: 3056417 - DNA, 25 bp, Homo sapien
aaagccagcacgtggtcccatgtcc

SEQ ID NO: 3056418 - DNA, 25 bp, Homo sapien
agggttgtcacggtccagcgtccat

SEQ ID NO: 3056419 - DNA, 25 bp, Homo sapien
ggccaaagccagcacgtggtcccat

SEQ ID NO: 3056420 - DNA, 25 bp, Homo sapien
gcacccgtgggcagccagatgatga

SEQ ID NO: 3056421 - DNA, 25 bp, Homo sapien
ctgttgaccaatacaaccaccttgg

SEQ ID NO: 3056422 - DNA, 25 bp, Homo sapien
gccacataagcagccgcccgggtct

SEQ ID NO: 3056423 - DNA, 25 bp, Homo sapien
tctaggtgccgcttggccacataag

SEQ ID NO: 3056424 - DNA, 25 bp, Homo sapien
tcacctcccattggtaggaccgaag

SEQ ID NO: 3056425 - DNA, 25 bp, Homo sapien
cctcccattggtaggaccgaagctc

SEQ ID NO: 3056426 - DNA, 25 bp, Homo sapien
gatcacctcccattggtaggaccga

SEQ ID NO: 3056427 - DNA, 25 bp, Homo sapien
tcccattggtaggaccgaagctcca

SEQ ID NO: 3056428 - DNA, 25 bp, Homo sapien
agggcagtcccacttaactcagcct

SEQ ID NO: 3056429 - DNA, 25 bp, Homo sapien
cccagggcagtcccacttaactcag

SEQ ID NO: 3056430 - DNA, 25 bp, Homo sapien
ctgctctagtaggtaggtctgccca

SEQ ID NO: 3056431 - DNA, 25 bp, Homo sapien
ggcagtcccacttaactcagcctgg

SEQ ID NO: 3056432 - DNA, 25 bp, Homo sapien
ggagccagctgagccgacttaggaa

SEQ ID NO: 3056433 - DNA, 25 bp, Homo sapien
gccagctgagccgacttaggaatct

SEQ ID NO: 3056434 - DNA, 25 bp, Homo sapien
agctgagccgacttaggaatctccc

SEQ ID NO: 3056435 - DNA, 25 bp, Homo sapien
aggagccagctgagccgacttagga

SEQ ID NO: 3056436 - DNA, 25 bp, Homo sapien
gatcacctcccattggtagggccac

SEQ ID NO: 3056437 - DNA, 25 bp, Homo sapien
agtcatcgccaactgccgtgagtac

SEQ ID NO: 3056438 - DNA, 25 bp, Homo sapien
tagggccacagctccattctgggaa

SEQ ID NO: 3056439 - DNA, 25 bp, Homo sapien
tccggttaagtactgctgctgcgcc

SEQ ID NO: 3056440 - DNA, 25 bp, Homo sapien
gcctgctgtggccaaaaggtggggg

SEQ ID NO: 3056441 - DNA, 25 bp, Homo sapien
aagcctgctgtggccaaaaggtggg

SEQ ID NO: 3056442 - DNA, 25 bp, Homo sapien
gaagcctgctgtggccaaaaggtgg

SEQ ID NO: 3056443 - DNA, 25 bp, Homo sapien
ctgctgtggccaaaaggtgggggtg

SEQ ID NO: 3056444 - DNA, 25 bp, Homo sapien
cagcgcagagagcagaaatcagaaa

SEQ ID NO: 3056445 - DNA, 25 bp, Homo sapien
accacgtaggcctgcccaaggcggc

SEQ ID NO: 3056446 - DNA, 25 bp, Homo sapien
ctgtgctcagcgcagagagcagaaa

SEQ ID NO: 3056447 - DNA, 25 bp, Homo sapien
caaggcggccctgcttagctcagcc

SEQ ID NO: 3056448 - DNA, 25 bp, Homo sapien
aacagtgctggacaaggcatggccc

SEQ ID NO: 3056449 - DNA, 25 bp, Homo sapien
tgtctcaagctgagtcgggtccgtg

SEQ ID NO: 3056450 - DNA, 25 bp, Homo sapien
tcagaatccgaggtggagacattcc

SEQ ID NO: 3056451 - DNA, 25 bp, Homo sapien
gctaaaatgagcagttctggtcctc

SEQ ID NO: 3056452 - DNA, 25 bp, Homo sapien
ggttgtactcgcgacagttggcgat

SEQ ID NO: 3056453 - DNA, 25 bp, Homo sapien
cgggtcacgtagtagcggcttcgca

SEQ ID NO: 3056454 - DNA, 25 bp, Homo sapien
agttggcgatgacccgctgcaggtc

SEQ ID NO: 3056455 - DNA, 25 bp, Homo sapien
cagccgctcagtcatggtcttcagg

SEQ ID NO: 3056456 - DNA, 25 bp, Homo sapien
agcggatgacctcgtagtagtcagg

SEQ ID NO: 3056457 - DNA, 25 bp, Homo sapien
gaagcggatgacctcgtagtagtca

SEQ ID NO: 3056458 - DNA, 25 bp, Homo sapien
ctcgtagtagtcaggggcctccgac

SEQ ID NO: 3056459 - DNA, 25 bp, Homo sapien
gggaagcggatgacctcgtagtagt

SEQ ID NO: 3056460 - DNA, 25 bp, Homo sapien
ccctgctgcgcccacgccagcccga

SEQ ID NO: 3056461 - DNA, 25 bp, Homo sapien
ccacagccattggtgcaggggccct

SEQ ID NO: 3056462 - DNA, 25 bp, Homo sapien
gccacagccattggtgcaggggccc

SEQ ID NO: 3056463 - DNA, 25 bp, Homo sapien
acgccagcccgagaccactacccac

SEQ ID NO: 3056464 - DNA, 25 bp, Homo sapien
tttttgagggttgtgtagagctggt

SEQ ID NO: 3056465 - DNA, 25 bp, Homo sapien
aggtttttgagggttgtgtagagct

SEQ ID NO: 3056466 - DNA, 25 bp, Homo sapien
ttttgagggttgtgtagagctggtc

SEQ ID NO: 3056467 - DNA, 25 bp, Homo sapien
ttgagggttgtgtagagctggtcgg

SEQ ID NO: 3056468 - DNA, 25 bp, Homo sapien
cccaacccggctcctttgacactca

SEQ ID NO: 3056469 - DNA, 25 bp, Homo sapien
gggcgagagacaccaagtctgaggc

SEQ ID NO: 3056470 - DNA, 25 bp, Homo sapien
ccaacccggctcctttgacactcac

SEQ ID NO: 3056471 - DNA, 25 bp, Homo sapien
ctggggcgagagacaccaagtctga

SEQ ID NO: 3056472 - DNA, 25 bp, Homo sapien
tccccaatggcttccagcctgtctc

SEQ ID NO: 3056473 - DNA, 25 bp, Homo sapien
cttccccaatggcttccagcctgtc

SEQ ID NO: 3056474 - DNA, 25 bp, Homo sapien
tccttccccaatggcttccagcctg

SEQ ID NO: 3056475 - DNA, 25 bp, Homo sapien
cccaatggcttccagcctgtctctc

SEQ ID NO: 3056476 - DNA, 25 bp, Homo sapien
gtctctaagaatgccagtccacacc

SEQ ID NO: 3056477 - DNA, 25 bp, Homo sapien
gtccacaccccaagcatcgtgcccc

SEQ ID NO: 3056478 - DNA, 25 bp, Homo sapien
gggagaatgtctctaagaatgccag

SEQ ID NO: 3056479 - DNA, 25 bp, Homo sapien
ggaagtgggagaatgtctctaagaa

SEQ ID NO: 3056480 - DNA, 25 bp, Homo sapien
gatctgggcctgtttgcgctcaatc

SEQ ID NO: 3056481 - DNA, 25 bp, Homo sapien
gcctgtttgcgctcaatcagcttct

SEQ ID NO: 3056482 - DNA, 25 bp, Homo sapien
ccccgggtagaccttgcggatctgg

SEQ ID NO: 3056483 - DNA, 25 bp, Homo sapien
caggaacgctctccacagggatctg

SEQ ID NO: 3056484 - DNA, 25 bp, Homo sapien
ctcccagggccacagtcggagccac

SEQ ID NO: 3056485 - DNA, 25 bp, Homo sapien
ggccacagtcggagccactggctgc

SEQ ID NO: 3056486 - DNA, 25 bp, Homo sapien
ggaagggactgaggggccaactcca

SEQ ID NO: 3056487 - DNA, 25 bp, Homo sapien
cagggccacagtcggagccactggc

SEQ ID NO: 3056488 - DNA, 25 bp, Homo sapien
agcagagcaagagccaagatcctgg

SEQ ID NO: 3056489 - DNA, 25 bp, Homo sapien
gcaagagccaagatcctggcctgcc

SEQ ID NO: 3056490 - DNA, 25 bp, Homo sapien
tcataacttccccaagggagcagag

SEQ ID NO: 3056491 - DNA, 25 bp, Homo sapien
agggagcagagcaagagccaagatc

SEQ ID NO: 3056492 - DNA, 25 bp, Homo sapien
agcgtcgctccctcgtagtccttga

SEQ ID NO: 3056493 - DNA, 25 bp, Homo sapien
tcttgggcaccttgatgtccttgga

SEQ ID NO: 3056494 - DNA, 25 bp, Homo sapien
ggatgcggggattcagctcacactc

SEQ ID NO: 3056495 - DNA, 25 bp, Homo sapien
gtccttgatgtagcccaggtagcgg

SEQ ID NO: 3056496 - DNA, 25 bp, Homo sapien
cttcaggtggttcatcaggtgggtc

SEQ ID NO: 3056497 - DNA, 25 bp, Homo sapien
tactcgtcggcgtaggtgaggaagt

SEQ ID NO: 3056498 - DNA, 25 bp, Homo sapien
aatgttgtgcttgatgtgatactcc

SEQ ID NO: 3056499 - DNA, 25 bp, Homo sapien
tgctttttgaagtagccgatggcgt

SEQ ID NO: 3056500 - DNA, 25 bp, Homo sapien
cagttatcaaagtacggctgccacc

SEQ ID NO: 3056501 - DNA, 25 bp, Homo sapien
taagagaagagcaacgggctgctgc

SEQ ID NO: 3056502 - DNA, 25 bp, Homo sapien
tgcttgggctccgtctgtcaacagg

SEQ ID NO: 3056503 - DNA, 25 bp, Homo sapien
gaacgggccgctaactaagagaaga

SEQ ID NO: 3056504 - DNA, 25 bp, Homo sapien
cttgatcaaggccagagtcttgtgc

SEQ ID NO: 3056505 - DNA, 25 bp, Homo sapien
cctgctcattcgaggtgacagcaca

SEQ ID NO: 3056506 - DNA, 25 bp, Homo sapien
ggaaacatgcggaagcagatgccac

SEQ ID NO: 3056507 - DNA, 25 bp, Homo sapien
gatgacccgcccatccttgatcaag

SEQ ID NO: 3056508 - DNA, 25 bp, Homo sapien
ggagcaggggatccccaattttgag

SEQ ID NO: 3056509 - DNA, 25 bp, Homo sapien
gagaagtaagaatgctcaaaggatg

SEQ ID NO: 3056510 - DNA, 25 bp, Homo sapien
gatccccaattttgaggagtgaaga

SEQ ID NO: 3056511 - DNA, 25 bp, Homo sapien
agtaagaatgctcaaaggatgaacc

SEQ ID NO: 3056512 - DNA, 25 bp, Homo sapien
ccgcattggccgaaagcaggctcgt

SEQ ID NO: 3056513 - DNA, 25 bp, Homo sapien
gatatactccttaggcatgcgcggc

SEQ ID NO: 3056514 - DNA, 25 bp, Homo sapien
ccttgggcgtcagtgagttgccgat

SEQ ID NO: 3056515 - DNA, 25 bp, Homo sapien
gatgacatggaactcgatgatgccg

SEQ ID NO: 3056516 - DNA, 25 bp, Homo sapien
atcacacggagccgcttggcatcct

SEQ ID NO: 3056517 - DNA, 25 bp, Homo sapien
tccatggggatgtcacccatcacac

SEQ ID NO: 3056518 - DNA, 25 bp, Homo sapien
tgacctcattgaccagctccatggg

SEQ ID NO: 3056519 - DNA, 25 bp, Homo sapien
tggcagcagggtcagtgatggtcag

SEQ ID NO: 3056520 - DNA, 25 bp, Homo sapien
tcggcccctgcagaatccagactca

SEQ ID NO: 3056521 - DNA, 25 bp, Homo sapien
ctcggcccctgcagaatccagactc

SEQ ID NO: 3056522 - DNA, 25 bp, Homo sapien
gctcggcccctgcagaatccagact

SEQ ID NO: 3056523 - DNA, 25 bp, Homo sapien
tgctgggaacaaccgctgcactgac

SEQ ID NO: 3056524 - DNA, 25 bp, Homo sapien
gagtttgccccatagatctcctcct

SEQ ID NO: 3056525 - DNA, 25 bp, Homo sapien
gtggcatggtgaagcctgactccca

SEQ ID NO: 3056526 - DNA, 25 bp, Homo sapien
tgagggtggcatggtgaagcctgac

SEQ ID NO: 3056527 - DNA, 25 bp, Homo sapien
cccagattggagagtttgccccata

SEQ ID NO: 3056528 - DNA, 25 bp, Homo sapien
ctagcaagttgcttctgggccatgg

SEQ ID NO: 3056529 - DNA, 25 bp, Homo sapien
ccatccccagactagtactagcaag

SEQ ID NO: 3056530 - DNA, 25 bp, Homo sapien
cagactagtactagcaagttgcttc

SEQ ID NO: 3056531 - DNA, 25 bp, Homo sapien
tctgccaggtagacgcccagatccc

SEQ ID NO: 3056532 - DNA, 25 bp, Homo sapien
gaaaatggaccggagaaggcttcgc

SEQ ID NO: 3056533 - DNA, 25 bp, Homo sapien
tcttctcgggcaccaatttgtcctt

SEQ ID NO: 3056534 - DNA, 25 bp, Homo sapien
aaagacatgagtggtttcgtagcgg

SEQ ID NO: 3056535 - DNA, 25 bp, Homo sapien
gggcacgtggcagtaacagagccat

SEQ ID NO: 3056536 - DNA, 25 bp, Homo sapien
gctgggcctgcaagcctcccccgaa

SEQ ID NO: 3056537 - DNA, 25 bp, Homo sapien
ctcccccgaagctgcccctggctgg

SEQ ID NO: 3056538 - DNA, 25 bp, Homo sapien
cggaaaccactgaacccaggctggg

SEQ ID NO: 3056539 - DNA, 25 bp, Homo sapien
ggcggaaaccactgaacccaggctg

SEQ ID NO: 3056540 - DNA, 25 bp, Homo sapien
actgggcaggtgtctcaagcttcca

SEQ ID NO: 3056541 - DNA, 25 bp, Homo sapien
tgagagctcgaacatcgtctgccgc

SEQ ID NO: 3056542 - DNA, 25 bp, Homo sapien
caagcttccagtagttaaggcagag

SEQ ID NO: 3056543 - DNA, 25 bp, Homo sapien
ttgtaggtagccacgtcctcagcct

SEQ ID NO: 3056544 - DNA, 25 bp, Homo sapien
ataaaaccaggaatgaggtgtgagc

SEQ ID NO: 3056545 - DNA, 25 bp, Homo sapien
agcccgcagggccttcttagacaaa

SEQ ID NO: 3056546 - DNA, 25 bp, Homo sapien
gggccttcttagacaaaggaagatg

SEQ ID NO: 3056547 - DNA, 25 bp, Homo sapien
ccctggccagggacaaggttctcct

SEQ ID NO: 3056548 - DNA, 25 bp, Homo sapien
cacaggccgggtcatctgcaggatg

SEQ ID NO: 3056549 - DNA, 25 bp, Homo sapien
caccacaggccgggtcatctgcagg

SEQ ID NO: 3056550 - DNA, 25 bp, Homo sapien
accacaggccgggtcatctgcagga

SEQ ID NO: 3056551 - DNA, 25 bp, Homo sapien
ccacaggccgggtcatctgcaggat

SEQ ID NO: 3056552 - DNA, 25 bp, Homo sapien
tagaaatagacctgcttggtgtctg

SEQ ID NO: 3056553 - DNA, 25 bp, Homo sapien
cagcagtcggtttatctcatcctct

SEQ ID NO: 3056554 - DNA, 25 bp, Homo sapien
ttctccaagtgggatacgtggtcag

SEQ ID NO: 3056555 - DNA, 25 bp, Homo sapien
catccccagcagtcggtttatctca

SEQ ID NO: 3056556 - DNA, 25 bp, Homo sapien
tttccagccattacacttacaggtt

SEQ ID NO: 3056557 - DNA, 25 bp, Homo sapien
cttcctctgactggcgcgctgctgc

SEQ ID NO: 3056558 - DNA, 25 bp, Homo sapien
cggacttgcgccttcctctgactgg

SEQ ID NO: 3056559 - DNA, 25 bp, Homo sapien
caagccgagaagacccctagcttct

SEQ ID NO: 3056560 - DNA, 25 bp, Homo sapien
gctcaggccaggtcgagccggatcc

SEQ ID NO: 3056561 - DNA, 25 bp, Homo sapien
tgggagtcggaatcggggctgaagc

SEQ ID NO: 3056562 - DNA, 25 bp, Homo sapien
gggtgggagtcggaatcggggctga

SEQ ID NO: 3056563 - DNA, 25 bp, Homo sapien
gagtcggaatcggggctgaagccgg

SEQ ID NO: 3056564 - DNA, 25 bp, Homo sapien
gggagtcggaatcggggctgaagcc

SEQ ID NO: 3056565 - DNA, 25 bp, Homo sapien
gcagcggagagcggcgccgcgctcc

SEQ ID NO: 3056566 - DNA, 25 bp, Homo sapien
gctaggtctttctctgtgcactggg

SEQ ID NO: 3056567 - DNA, 25 bp, Homo sapien
tatggagaaatcatggtggacccct

SEQ ID NO: 3056568 - DNA, 25 bp, Homo sapien
tcaacttcaactacagagggcactg

SEQ ID NO: 3056569 - DNA, 25 bp, Homo sapien
tcaaacttggtcagcccaggtcagc

SEQ ID NO: 3056570 - DNA, 25 bp, Homo sapien
gattccagtcgggtcattcaggcgg

SEQ ID NO: 3056571 - DNA, 25 bp, Homo sapien
tccacacctcggtttcggcctggag

SEQ ID NO: 3056572 - DNA, 25 bp, Homo sapien
tggaggtccacacctcggtttcggc

SEQ ID NO: 3056573 - DNA, 25 bp, Homo sapien
acacctcggtttcggcctggagcac

SEQ ID NO: 3056574 - DNA, 25 bp, Homo sapien
gggctcgttcttgggaagcttctta

SEQ ID NO: 3056575 - DNA, 25 bp, Homo sapien
ctccatgaacagcaaactgttgtcg

SEQ ID NO: 3056576 - DNA, 25 bp, Homo sapien
caaactgttgtcgtctgcataggct

SEQ ID NO: 3056577 - DNA, 25 bp, Homo sapien
tattgccatgaagatttcgttcacg

SEQ ID NO: 3056578 - DNA, 25 bp, Homo sapien
gaagatttcgttcacgttcattgca

SEQ ID NO: 3056579 - DNA, 25 bp, Homo sapien
ctggtttggatggaggtgagaggag

SEQ ID NO: 3056580 - DNA, 25 bp, Homo sapien
gtgagaggaggtgagagggaaatgt

SEQ ID NO: 3056581 - DNA, 25 bp, Homo sapien
gaggaggtgagagggaaatgttggc

SEQ ID NO: 3056582 - DNA, 25 bp, Homo sapien
gagaggaggtgagagggaaatgttg

SEQ ID NO: 3056583 - DNA, 25 bp, Homo sapien
acagacaggagccatgttaggccca

SEQ ID NO: 3056584 - DNA, 25 bp, Homo sapien
ccatgcctgaggcacgagaggacag

SEQ ID NO: 3056585 - DNA, 25 bp, Homo sapien
ccatgttaggcccatgcctgaggca

SEQ ID NO: 3056586 - DNA, 25 bp, Homo sapien
atgcctgaggcacgagaggacagca

SEQ ID NO: 3056587 - DNA, 25 bp, Homo sapien
cccgcgagtgcaatgacgatgttgg

SEQ ID NO: 3056588 - DNA, 25 bp, Homo sapien
ccagttcttggcccgtgcaaatgta

SEQ ID NO: 3056589 - DNA, 25 bp, Homo sapien
gttacccgcgagtgcaatgacgatg

SEQ ID NO: 3056590 - DNA, 25 bp, Homo sapien
tgccttgttacccgcgagtgcaatg

SEQ ID NO: 3056591 - DNA, 25 bp, Homo sapien
tctgataacccaatccctgggactt

SEQ ID NO: 3056592 - DNA, 25 bp, Homo sapien
ctgataacccaatccctgggacttt

SEQ ID NO: 3056593 - DNA, 25 bp, Homo sapien
ctctgataacccaatccctgggact

SEQ ID NO: 3056594 - DNA, 25 bp, Homo sapien
catagaccacgatggcagcctgggc

SEQ ID NO: 3056595 - DNA, 25 bp, Homo sapien
tgtcatagaccacgatggcagcctg

SEQ ID NO: 3056596 - DNA, 25 bp, Homo sapien
tgatgtcatagaccacgatggcagc

SEQ ID NO: 3056597 - DNA, 25 bp, Homo sapien
gatgtcatagaccacgatggcagcc

SEQ ID NO: 3056598 - DNA, 25 bp, Homo sapien
tccaggcagacagtctgtgtgagga

SEQ ID NO: 3056599 - DNA, 25 bp, Homo sapien
atccaggcagacagtctgtgtgagg

SEQ ID NO: 3056600 - DNA, 25 bp, Homo sapien
ctgtaagagagaaggagcgtccatg

SEQ ID NO: 3056601 - DNA, 25 bp, Homo sapien
gctggatttgcctaccgcagactcc

SEQ ID NO: 3056602 - DNA, 25 bp, Homo sapien
ccagcagaaccagcttaaattgaca

SEQ ID NO: 3056603 - DNA, 25 bp, Homo sapien
gtgaaactgtcccttgacaaagcgg

SEQ ID NO: 3056604 - DNA, 25 bp, Homo sapien
tggtccattgggtcgtgctgcgcct

SEQ ID NO: 3056605 - DNA, 25 bp, Homo sapien
ctgtagtggtccagagagcgtgcgg

SEQ ID NO: 3056606 - DNA, 25 bp, Homo sapien
gcaaagaggcacttagtggggaggg

SEQ ID NO: 3056607 - DNA, 25 bp, Homo sapien
tggggactggtgctatgcaaagagg

SEQ ID NO: 3056608 - DNA, 25 bp, Homo sapien
tagtggtccagagagcgtgcgggtg

SEQ ID NO: 3056609 - DNA, 25 bp, Homo sapien
tcttgtcactaccaaaccacagggt

SEQ ID NO: 3056610 - DNA, 25 bp, Homo sapien
tctgagtgccctcaacagtgggagg

SEQ ID NO: 3056611 - DNA, 25 bp, Homo sapien
tagctggctctagcaacagtcacag

SEQ ID NO: 3056612 - DNA, 25 bp, Homo sapien
ttgtagaagccacctgagctgagcc

SEQ ID NO: 3056613 - DNA, 25 bp, Homo sapien
tgcactccggcctggcgagagagcg

SEQ ID NO: 3056614 - DNA, 25 bp, Homo sapien
gccactgcactccggcctggcgaga

SEQ ID NO: 3056615 - DNA, 25 bp, Homo sapien
ctgcactccggcctggcgagagagc

SEQ ID NO: 3056616 - DNA, 25 bp, Homo sapien
cactgcactccggcctggcgagaga

SEQ ID NO: 3056617 - DNA, 25 bp, Homo sapien
gatggggtccaccagagccccaagt

SEQ ID NO: 3056618 - DNA, 25 bp, Homo sapien
agtgcagacaccaactccaccaata

SEQ ID NO: 3056619 - DNA, 25 bp, Homo sapien
agagccccaagtgcagacaccaact

SEQ ID NO: 3056620 - DNA, 25 bp, Homo sapien
ccccaagtgcagacaccaactccac

SEQ ID NO: 3056621 - DNA, 25 bp, Homo sapien
tctcaaaggctggacaatgggtttc

SEQ ID NO: 3056622 - DNA, 25 bp, Homo sapien
catggccccaaatgttcataagact

SEQ ID NO: 3056623 - DNA, 25 bp, Homo sapien
taacagcacataacagcaagcctga

SEQ ID NO: 3056624 - DNA, 25 bp, Homo sapien
ttcaatgagcgaatcacacttctgc

SEQ ID NO: 3056625 - DNA, 25 bp, Homo sapien
ccatagtaggtgagcacagatacgg

SEQ ID NO: 3056626 - DNA, 25 bp, Homo sapien
catgtgagaggtaccgcccgcttac

SEQ ID NO: 3056627 - DNA, 25 bp, Homo sapien
agtaggtgagcacagatacggtgaa

SEQ ID NO: 3056628 - DNA, 25 bp, Homo sapien
actgtgcatgtgagaggtaccgccc

SEQ ID NO: 3056629 - DNA, 25 bp, Homo sapien
agacggctcgggtcccctaacagag

SEQ ID NO: 3056630 - DNA, 25 bp, Homo sapien
ggtcccctaacagagccacagagca

SEQ ID NO: 3056631 - DNA, 25 bp, Homo sapien
ggaagttgagggcttaaatctgcat

SEQ ID NO: 3056632 - DNA, 25 bp, Homo sapien
gcattcatctgccagacggctcggg

SEQ ID NO: 3056633 - DNA, 25 bp, Homo sapien
agggcctggcatcgggaagcattca

SEQ ID NO: 3056634 - DNA, 25 bp, Homo sapien
ggtggcctggtgttgtcactgaacc

SEQ ID NO: 3056635 - DNA, 25 bp, Homo sapien
ttctggaggcaccacttactagggt

SEQ ID NO: 3056636 - DNA, 25 bp, Homo sapien
taaaatggagagaccagtaccaccc

SEQ ID NO: 3056637 - DNA, 25 bp, Homo sapien
ggctcggacgggatccgcttctctc

SEQ ID NO: 3056638 - DNA, 25 bp, Homo sapien
cggacgggatccgcttctctccccg

SEQ ID NO: 3056639 - DNA, 25 bp, Homo sapien
cggggctcggacgggatccgcttct

SEQ ID NO: 3056640 - DNA, 25 bp, Homo sapien
ggacgggatccgcttctctccccgc

SEQ ID NO: 3056641 - DNA, 25 bp, Homo sapien
actgtccgcccgattgccaggggcg

SEQ ID NO: 3056642 - DNA, 25 bp, Homo sapien
tgcactgtccgcccgattgccaggg

SEQ ID NO: 3056643 - DNA, 25 bp, Homo sapien
ccttgtctgcactgtccgcccgatt

SEQ ID NO: 3056644 - DNA, 25 bp, Homo sapien
tgtgaactcgctgatctggagaagc

SEQ ID NO: 3056645 - DNA, 25 bp, Homo sapien
ttgggaaggtgaggaaagcgctgca

SEQ ID NO: 3056646 - DNA, 25 bp, Homo sapien
aaggtgaggaaagcgctgcaggaag

SEQ ID NO: 3056647 - DNA, 25 bp, Homo sapien
ctgtgattgggaaggtgaggaaagc

SEQ ID NO: 3056648 - DNA, 25 bp, Homo sapien
tgattgggaaggtgaggaaagcgct

SEQ ID NO: 3056649 - DNA, 25 bp, Homo sapien
cacttccgcgccagtgttcatgaga

SEQ ID NO: 3056650 - DNA, 25 bp, Homo sapien
cccacatctagttccatctggtcat

SEQ ID NO: 3056651 - DNA, 25 bp, Homo sapien
catctggtcatcagggcgtctctct

SEQ ID NO: 3056652 - DNA, 25 bp, Homo sapien
ataacacacaatccccacttccgcg

SEQ ID NO: 3056653 - DNA, 25 bp, Homo sapien
agaagagaccaccttgagagacagc

SEQ ID NO: 3056654 - DNA, 25 bp, Homo sapien
gagttttggagcagtccaggccctg

SEQ ID NO: 3056655 - DNA, 25 bp, Homo sapien
ctgagtgagaccatgttgtaatggg

SEQ ID NO: 3056656 - DNA, 25 bp, Homo sapien
ggatttttgagttgctagcagcaga

SEQ ID NO: 3056657 - DNA, 25 bp, Homo sapien
attactgggcccaaaaagcacctgt

SEQ ID NO: 3056658 - DNA, 25 bp, Homo sapien
cagaggttgcaaactcaacccctgg

SEQ ID NO: 3056659 - DNA, 25 bp, Homo sapien
ggaacacactgttaggtaaggcaga

SEQ ID NO: 3056660 - DNA, 25 bp, Homo sapien
ttgacagacccacgcctaggagtag

SEQ ID NO: 3056661 - DNA, 25 bp, Homo sapien
gcagaatctgcgttttaataggatc

SEQ ID NO: 3056662 - DNA, 25 bp, Homo sapien
caagaaacgtggtgactgcgaagta

SEQ ID NO: 3056663 - DNA, 25 bp, Homo sapien
ttttgagaactcaaatacccacaga

SEQ ID NO: 3056664 - DNA, 25 bp, Homo sapien
tcaaacaagggaagctagctgggtg

SEQ ID NO: 3056665 - DNA, 25 bp, Homo sapien
gaatagcgtcagaggtaaccacgct

SEQ ID NO: 3056666 - DNA, 25 bp, Homo sapien
aaccacgcttcattaaaaagtccag

SEQ ID NO: 3056667 - DNA, 25 bp, Homo sapien
cagcccaatgggcactgcggttcat

SEQ ID NO: 3056668 - DNA, 25 bp, Homo sapien
aaatccagagccaaccaggccagct

SEQ ID NO: 3056669 - DNA, 25 bp, Homo sapien
gtcccagagggtcaggctctgaggg

SEQ ID NO: 3056670 - DNA, 25 bp, Homo sapien
taggggggcaatatggaaggtctca

SEQ ID NO: 3056671 - DNA, 25 bp, Homo sapien
gggtcccagagggtcaggctctgag

SEQ ID NO: 3056672 - DNA, 25 bp, Homo sapien
gcctctggcactggagagggtccca

SEQ ID NO: 3056673 - DNA, 25 bp, Homo sapien
gcaagcgtagtatcctggaggctgg

SEQ ID NO: 3056674 - DNA, 25 bp, Homo sapien
tcagcaagcgtagtatcctggaggc

SEQ ID NO: 3056675 - DNA, 25 bp, Homo sapien
cagcaagcgtagtatcctggaggct

SEQ ID NO: 3056676 - DNA, 25 bp, Homo sapien
aagcgtagtatcctggaggctgggt

SEQ ID NO: 3056677 - DNA, 25 bp, Homo sapien
ggcccatgatgtgccgcagctcccg

SEQ ID NO: 3056678 - DNA, 25 bp, Homo sapien
gttgtttcacaggtgccacagtaat

SEQ ID NO: 3056679 - DNA, 25 bp, Homo sapien
ccacagtaataacaaggtgcacccc

SEQ ID NO: 3056680 - DNA, 25 bp, Homo sapien
aaagctctttcgcagccactttctg

SEQ ID NO: 3056681 - DNA, 25 bp, Homo sapien
tgttgaaaacacatcgagttgtttc

SEQ ID NO: 3056682 - DNA, 25 bp, Homo sapien
gaaatgctgttatatcaggcacgtc

SEQ ID NO: 3056683 - DNA, 25 bp, Homo sapien
gagccacgtgtagggtctgaaatgc

SEQ ID NO: 3056684 - DNA, 25 bp, Homo sapien
tatatcaggcacgtctctgagccag

SEQ ID NO: 3056685 - DNA, 25 bp, Homo sapien
cctcaagtgagccacgtgtagggtc

SEQ ID NO: 3056686 - DNA, 25 bp, Homo sapien
ctcctggttcagccggcaaaccttt

SEQ ID NO: 3056687 - DNA, 25 bp, Homo sapien
ctataacttgggctggaatcctcct

SEQ ID NO: 3056688 - DNA, 25 bp, Homo sapien
cccatcttggtacggagcttctctt

SEQ ID NO: 3056689 - DNA, 25 bp, Homo sapien
tgagttcatggagcattaatacctg

SEQ ID NO: 3056690 - DNA, 25 bp, Homo sapien
cttgccccatcttggtacggagctt

SEQ ID NO: 3056691 - DNA, 25 bp, Homo sapien
gctgaatcggaatgaaggggcctca

SEQ ID NO: 3056692 - DNA, 25 bp, Homo sapien
ctgggagcggggccttggcagttca

SEQ ID NO: 3056693 - DNA, 25 bp, Homo sapien
ctgctgaatcggaatgaaggggcct

SEQ ID NO: 3056694 - DNA, 25 bp, Homo sapien
cagagtcctcaatgccatccactat

SEQ ID NO: 3056695 - DNA, 25 bp, Homo sapien
aacgccagggatagagcccagagaa

SEQ ID NO: 3056696 - DNA, 25 bp, Homo sapien
ggcagagacggaatgtagcactgtt

SEQ ID NO: 3056697 - DNA, 25 bp, Homo sapien
gacggaatgtagcactgtttggaac

SEQ ID NO: 3056698 - DNA, 25 bp, Homo sapien
tagcactgtttggaacgccagggat

SEQ ID NO: 3056699 - DNA, 25 bp, Homo sapien
aggttcccagtgggggaatgagaag

SEQ ID NO: 3056700 - DNA, 25 bp, Homo sapien
caaaggttcccagtgggggaatgag

SEQ ID NO: 3056701 - DNA, 25 bp, Homo sapien
gagggggcttccaggcagcagagca

SEQ ID NO: 3056702 - DNA, 25 bp, Homo sapien
ctgagggggcttccaggcagcagag

SEQ ID NO: 3056703 - DNA, 25 bp, Homo sapien
tgagggggcttccaggcagcagagc

SEQ ID NO: 3056704 - DNA, 25 bp, Homo sapien
agggggcttccaggcagcagagcac

SEQ ID NO: 3056705 - DNA, 25 bp, Homo sapien
ggccgtgaggggaggcactgtggcc

SEQ ID NO: 3056706 - DNA, 25 bp, Homo sapien
ggggccgtgaggggaggcactgtgg

SEQ ID NO: 3056707 - DNA, 25 bp, Homo sapien
gggccgtgaggggaggcactgtggc

SEQ ID NO: 3056708 - DNA, 25 bp, Homo sapien
gggggccgtgaggggaggcactgtg

SEQ ID NO: 3056709 - DNA, 25 bp, Homo sapien
gcagctcctcgcccaaaaggctgac

SEQ ID NO: 3056710 - DNA, 25 bp, Homo sapien
ggcagctcctcgcccaaaaggctga

SEQ ID NO: 3056711 - DNA, 25 bp, Homo sapien
gaggagccgaggctttctgagcggg

SEQ ID NO: 3056712 - DNA, 25 bp, Homo sapien
gcgtcttgtctgaggaggagccgag

SEQ ID NO: 3056713 - DNA, 25 bp, Homo sapien
gggagccccgaggccgtgctgggct

SEQ ID NO: 3056714 - DNA, 25 bp, Homo sapien
ggatggcagcgtcttgtctgaggag

SEQ ID NO: 3056715 - DNA, 25 bp, Homo sapien
gggatcgggaaaagcggctgaggcc

SEQ ID NO: 3056716 - DNA, 25 bp, Homo sapien
gaggggatcgggaaaagcggctgag

SEQ ID NO: 3056717 - DNA, 25 bp, Homo sapien
gcgaggggatcgggaaaagcggctg

SEQ ID NO: 3056718 - DNA, 25 bp, Homo sapien
gagaggcgaggggatcgggaaaagc

SEQ ID NO: 3056719 - DNA, 25 bp, Homo sapien
aagggactctggaaggatggcggtc

SEQ ID NO: 3056720 - DNA, 25 bp, Homo sapien
ggatggcggtcatcaggggtgtaca

SEQ ID NO: 3056721 - DNA, 25 bp, Homo sapien
agggactctggaaggatggcggtca

SEQ ID NO: 3056722 - DNA, 25 bp, Homo sapien
tggcggtcatcaggggtgtacatac

SEQ ID NO: 3056723 - DNA, 25 bp, Homo sapien
aaggcagccccatactcaggataga

SEQ ID NO: 3056724 - DNA, 25 bp, Homo sapien
cagtaggtcagagctttcacatcag

SEQ ID NO: 3056725 - DNA, 25 bp, Homo sapien
tcagcactggtctttagcacgaagt

SEQ ID NO: 3056726 - DNA, 25 bp, Homo sapien
tcaggatagagcctcaggacctcag

SEQ ID NO: 3056727 - DNA, 25 bp, Homo sapien
ccggagcgcagaacgaggtcttgat

SEQ ID NO: 3056728 - DNA, 25 bp, Homo sapien
tcttgatgtgcagcgatagggcccg

SEQ ID NO: 3056729 - DNA, 25 bp, Homo sapien
caggatctcccgattcaggtgcata

SEQ ID NO: 3056730 - DNA, 25 bp, Homo sapien
tgttgtctcggagcacctcaagcga

SEQ ID NO: 3056731 - DNA, 25 bp, Homo sapien
ggtcagccttcaactgggagtcagg

SEQ ID NO: 3056732 - DNA, 25 bp, Homo sapien
acatcctcatatggagccccttggc

SEQ ID NO: 3056733 - DNA, 25 bp, Homo sapien
cagagttgttattagaccatgggca

SEQ ID NO: 3056734 - DNA, 25 bp, Homo sapien
agctcggctcctaagtccctgtgga

SEQ ID NO: 3056735 - DNA, 25 bp, Homo sapien
gtgggattacaagcacgcaccacta

SEQ ID NO: 3056736 - DNA, 25 bp, Homo sapien
ggtgggattacaagcacgcaccact

SEQ ID NO: 3056737 - DNA, 25 bp, Homo sapien
ttacaagcacgcaccactacgccca

SEQ ID NO: 3056738 - DNA, 25 bp, Homo sapien
gtaggtgggattacaagcacgcacc

SEQ ID NO: 3056739 - DNA, 25 bp, Homo sapien
acaggggcagcgactccttccccac

SEQ ID NO: 3056740 - DNA, 25 bp, Homo sapien
agctacaggggcagcgactccttcc

SEQ ID NO: 3056741 - DNA, 25 bp, Homo sapien
tacaggggcagcgactccttcccca

SEQ ID NO: 3056742 - DNA, 25 bp, Homo sapien
ttaagctacaggggcagcgactcct

SEQ ID NO: 3056743 - DNA, 25 bp, Homo sapien
aagggcaagattggagaccctgcag

SEQ ID NO: 3056744 - DNA, 25 bp, Homo sapien
gggcaagggcaagattggagaccct

SEQ ID NO: 3056745 - DNA, 25 bp, Homo sapien
cagggccacgcggagggcaagggca

SEQ ID NO: 3056746 - DNA, 25 bp, Homo sapien
agggccacgcggagggcaagggcaa

SEQ ID NO: 3056747 - DNA, 25 bp, Homo sapien
ccacgtggtctggaagtattcgagc

SEQ ID NO: 3056748 - DNA, 25 bp, Homo sapien
ggtgcacacggatgaagtccttgag

SEQ ID NO: 3056749 - DNA, 25 bp, Homo sapien
caggcggtgcacacggatgaagtcc

SEQ ID NO: 3056750 - DNA, 25 bp, Homo sapien
tcgttggcgtcgatgccgctgttga

SEQ ID NO: 3056751 - DNA, 25 bp, Homo sapien
tgcaaaagtccacgcctgtttgtgg

SEQ ID NO: 3056752 - DNA, 25 bp, Homo sapien
ctcagtttccccgtgcatgctgggc

SEQ ID NO: 3056753 - DNA, 25 bp, Homo sapien
ttgggtagacacctcgggcagatgt

SEQ ID NO: 3056754 - DNA, 25 bp, Homo sapien
ggaaacgtccgtgaatgaatgcgtg

SEQ ID NO: 3056755 - DNA, 25 bp, Homo sapien
tgcttagagtgaagtacagtgccgc

SEQ ID NO: 3056756 - DNA, 25 bp, Homo sapien
tgttggcacacacgttgccaaagcc

SEQ ID NO: 3056757 - DNA, 25 bp, Homo sapien
tcttctccgcgtcggtgttggcaca

SEQ ID NO: 3056758 - DNA, 25 bp, Homo sapien
attgacatagggcacctccagacgc

SEQ ID NO: 3056759 - DNA, 25 bp, Homo sapien
tgaggcagggaacggaaaatccatc

SEQ ID NO: 3056760 - DNA, 25 bp, Homo sapien
ttctggacatggtgcctggaaggca

SEQ ID NO: 3056761 - DNA, 25 bp, Homo sapien
gaacattgttccaagtgaggcaggg

SEQ ID NO: 3056762 - DNA, 25 bp, Homo sapien
gccctggtggaacctatagcctgga

SEQ ID NO: 3056763 - DNA, 25 bp, Homo sapien
ccggcgcccgatgacataccagatg

SEQ ID NO: 3056764 - DNA, 25 bp, Homo sapien
gcaaagaccgacatgagcagcgtga

SEQ ID NO: 3056765 - DNA, 25 bp, Homo sapien
gggcaaggagcgcaaagaccgacat

SEQ ID NO: 3056766 - DNA, 25 bp, Homo sapien
caatgtcccagagcagcgggtcatt

SEQ ID NO: 3056767 - DNA, 25 bp, Homo sapien
cgcaacagccgcactgtcttcagta

SEQ ID NO: 3056768 - DNA, 25 bp, Homo sapien
cagccgcactgtcttcagtaggtgc

SEQ ID NO: 3056769 - DNA, 25 bp, Homo sapien
caacagccgcactgtcttcagtagg

SEQ ID NO: 3056770 - DNA, 25 bp, Homo sapien
gccgcactgtcttcagtaggtgcac

SEQ ID NO: 3056771 - DNA, 25 bp, Homo sapien
tggcgggggaggctgtcagcaggca

SEQ ID NO: 3056772 - DNA, 25 bp, Homo sapien
ctgcaggaaggtggcgggggaggct

SEQ ID NO: 3056773 - DNA, 25 bp, Homo sapien
ggtggcgggggaggctgtcagcagg

SEQ ID NO: 3056774 - DNA, 25 bp, Homo sapien
gcgggggaggctgtcagcaggcaca

SEQ ID NO: 3056775 - DNA, 25 bp, Homo sapien
ggccttcccaccagacaacctggag

SEQ ID NO: 3056776 - DNA, 25 bp, Homo sapien
gccttcccaccagacaacctggagc

SEQ ID NO: 3056777 - DNA, 25 bp, Homo sapien
tatggacacttcttcttgtggatcg

SEQ ID NO: 3056778 - DNA, 25 bp, Homo sapien
ttatggacacttcttcttgtggatc

SEQ ID NO: 3056779 - DNA, 25 bp, Homo sapien
atggacacttcttcttgtggatcgg

SEQ ID NO: 3056780 - DNA, 25 bp, Homo sapien
gccaatggaacgaggagcagagatt

SEQ ID NO: 3056781 - DNA, 25 bp, Homo sapien
acctggccggactgggacacatagg

SEQ ID NO: 3056782 - DNA, 25 bp, Homo sapien
gaagatgtaaagcaggtcaaagggc

SEQ ID NO: 3056783 - DNA, 25 bp, Homo sapien
taaggtcgatgaagaaccaggtggc

SEQ ID NO: 3056784 - DNA, 25 bp, Homo sapien
agggtgggtgaggcagaaggtctga

SEQ ID NO: 3056785 - DNA, 25 bp, Homo sapien
cagggtgggtgaggcagaaggtctg

SEQ ID NO: 3056786 - DNA, 25 bp, Homo sapien
gggtgggtgaggcagaaggtctgac

SEQ ID NO: 3056787 - DNA, 25 bp, Homo sapien
gaagagcatttccacggcgatgtcg

SEQ ID NO: 3056788 - DNA, 25 bp, Homo sapien
tggcaaggaggataaggccgtccca

SEQ ID NO: 3056789 - DNA, 25 bp, Homo sapien
gtgtcatcgtcacccgagaaacaga

SEQ ID NO: 3056790 - DNA, 25 bp, Homo sapien
tgaccgcaacgtagaaggtggcaag

SEQ ID NO: 3056791 - DNA, 25 bp, Homo sapien
ggcagaccgaaatttccaggtggct

SEQ ID NO: 3056792 - DNA, 25 bp, Homo sapien
cagtacggctccgtcttctggcaga

SEQ ID NO: 3056793 - DNA, 25 bp, Homo sapien
ccaaagtggccggtcagtcggtgta

SEQ ID NO: 3056794 - DNA, 25 bp, Homo sapien
attattggccttcatgcctccctgg

SEQ ID NO: 3056795 - DNA, 25 bp, Homo sapien
agtgatatccttgaaggaaaagagg

SEQ ID NO: 3056796 - DNA, 25 bp, Homo sapien
agaggaacagcacgacctcccccat

SEQ ID NO: 3056797 - DNA, 25 bp, Homo sapien
actctgagtgatatccttgaaggaa

SEQ ID NO: 3056798 - DNA, 25 bp, Homo sapien
tctgagtgatatccttgaaggaaaa

SEQ ID NO: 3056799 - DNA, 25 bp, Homo sapien
tccaggaggcaccaaaaggctgagc

SEQ ID NO: 3056800 - DNA, 25 bp, Homo sapien
gtccaggaggcaccaaaaggctgag

SEQ ID NO: 3056801 - DNA, 25 bp, Homo sapien
catccttgcggtagaagcagatttc

SEQ ID NO: 3056802 - DNA, 25 bp, Homo sapien
ccagggctttgtgcagacgctgcag

SEQ ID NO: 3056803 - DNA, 25 bp, Homo sapien
tccttgcggtagaagcagatttcag

SEQ ID NO: 3056804 - DNA, 25 bp, Homo sapien
ggccctccagggctttgtgcagacg

SEQ ID NO: 3056805 - DNA, 25 bp, Homo sapien
tctctgggccgtagaggaaacggca

SEQ ID NO: 3056806 - DNA, 25 bp, Homo sapien
tgggaaagccccgtgtgccctgtgc

SEQ ID NO: 3056807 - DNA, 25 bp, Homo sapien
caggtcttctgcatgacctcggtgc

SEQ ID NO: 3056808 - DNA, 25 bp, Homo sapien
tcggtgcgaccgtagcctgtgagct

SEQ ID NO: 3056809 - DNA, 25 bp, Homo sapien
tctccttagtgtgggggcagacagt

SEQ ID NO: 3056810 - DNA, 25 bp, Homo sapien
agatctccttagtgtgggggcagac

SEQ ID NO: 3056811 - DNA, 25 bp, Homo sapien
ttttagcattcttgtagctgctttc

SEQ ID NO: 3056812 - DNA, 25 bp, Homo sapien
tagcattcttgtagctgctttcagg

SEQ ID NO: 3056813 - DNA, 25 bp, Homo sapien
gtcaaaacgggtggcgatggtgtcc

SEQ ID NO: 3056814 - DNA, 25 bp, Homo sapien
cgtcaaaacgggtggcgatggtgtc

SEQ ID NO: 3056815 - DNA, 25 bp, Homo sapien
tccgtcaaaacgggtggcgatggtg

SEQ ID NO: 3056816 - DNA, 25 bp, Homo sapien
tcaaaacgggtggcgatggtgtcca

SEQ ID NO: 3056817 - DNA, 25 bp, Homo sapien
cggctcggctcagcgccgtttcggt

SEQ ID NO: 3056818 - DNA, 25 bp, Homo sapien
gaaccccgtagctctcggctcggct

SEQ ID NO: 3056819 - DNA, 25 bp, Homo sapien
gggcgtgggttcaaggcgcggcgct

SEQ ID NO: 3056820 - DNA, 25 bp, Homo sapien
ctggggagctttcagcgcggccggg

SEQ ID NO: 3056821 - DNA, 25 bp, Homo sapien
atggagactcgtctttattgccttt

SEQ ID NO: 3056822 - DNA, 25 bp, Homo sapien
aatggagactcgtctttattgcctt

SEQ ID NO: 3056823 - DNA, 25 bp, Homo sapien
tggagactcgtctttattgcctttt

SEQ ID NO: 3056824 - DNA, 25 bp, Homo sapien
tcagatcccggactgtcctccgggc

SEQ ID NO: 3056825 - DNA, 25 bp, Homo sapien
cccatggtcaggatgcccgcggcgt

SEQ ID NO: 3056826 - DNA, 25 bp, Homo sapien
cttgcccagcgtgaggatgccggcc

SEQ ID NO: 3056827 - DNA, 25 bp, Homo sapien
gatgccggccgcgtgattgcccgcg

SEQ ID NO: 3056828 - DNA, 25 bp, Homo sapien
cttttgacgacagcagtcgggcagg

SEQ ID NO: 3056829 - DNA, 25 bp, Homo sapien
ttttgacgacagcagtcgggcaggg

SEQ ID NO: 3056830 - DNA, 25 bp, Homo sapien
tttgacgacagcagtcgggcagggg

SEQ ID NO: 3056831 - DNA, 25 bp, Homo sapien
cagcagtagcgtcacggcggcccag

SEQ ID NO: 3056832 - DNA, 25 bp, Homo sapien
gcagccgccccggacgacaacagcg

SEQ ID NO: 3056833 - DNA, 25 bp, Homo sapien
gcagcagcagtagcgtcacggcggc

SEQ ID NO: 3056834 - DNA, 25 bp, Homo sapien
cggacgacaacagcgcgggcggcag

SEQ ID NO: 3056835 - DNA, 25 bp, Homo sapien
ccaggaaccttgaggctgtcaattg

SEQ ID NO: 3056836 - DNA, 25 bp, Homo sapien
gatgtctgtggtggttcaaaaagcc

SEQ ID NO: 3056837 - DNA, 25 bp, Homo sapien
gaattgacaggcacttgcgtccaca

SEQ ID NO: 3056838 - DNA, 25 bp, Homo sapien
aagtctaagattagcctgctgcagg

SEQ ID NO: 3056839 - DNA, 25 bp, Homo sapien
cagtgcttaacaacccttagatggg

SEQ ID NO: 3056840 - DNA, 25 bp, Homo sapien
tgtgcacaggatctagcccagtttc

SEQ ID NO: 3056841 - DNA, 25 bp, Homo sapien
aggagaggactactgcccacatgag

SEQ ID NO: 3056842 - DNA, 25 bp, Homo sapien
tcaaaggccttgcatgaaagctagt

SEQ ID NO: 3056843 - DNA, 25 bp, Homo sapien
tatgatgtgaagtaatagctctccc

SEQ ID NO: 3056844 - DNA, 25 bp, Homo sapien
aggatgtgccacgagtcctccaagg

SEQ ID NO: 3056845 - DNA, 25 bp, Homo sapien
tgctggcctaggatgtgccacgagt

SEQ ID NO: 3056846 - DNA, 25 bp, Homo sapien
tgtgtgcgcatgcagccttgccagg

SEQ ID NO: 3056847 - DNA, 25 bp, Homo sapien
tagcttgcccagtgcactgactgag

SEQ ID NO: 3056848 - DNA, 25 bp, Homo sapien
gcatggtaactctctagcagtgtcc

SEQ ID NO: 3056849 - DNA, 25 bp, Homo sapien
catacttcagaaccggtcagctggg

SEQ ID NO: 3056850 - DNA, 25 bp, Homo sapien
gctgtgatacaggaaaccatcggtg

SEQ ID NO: 3056851 - DNA, 25 bp, Homo sapien
ccaggtgcctgtgccgaaggacccg

SEQ ID NO: 3056852 - DNA, 25 bp, Homo sapien
gggccaggtgcctgtgccgaaggac

SEQ ID NO: 3056853 - DNA, 25 bp, Homo sapien
gcctgtgccgaaggacccggggcat

SEQ ID NO: 3056854 - DNA, 25 bp, Homo sapien
cactgggccaggtgcctgtgccgaa

SEQ ID NO: 3056855 - DNA, 25 bp, Homo sapien
ctgcccggagtgctcggaaggctcc

SEQ ID NO: 3056856 - DNA, 25 bp, Homo sapien
gcccggagtgctcggaaggctccct

SEQ ID NO: 3056857 - DNA, 25 bp, Homo sapien
ggctgcccggagtgctcggaaggct

SEQ ID NO: 3056858 - DNA, 25 bp, Homo sapien
gagggctgcccggagtgctcggaag

SEQ ID NO: 3056859 - DNA, 25 bp, Homo sapien
ccacgctgccccagaaccgcaggga

SEQ ID NO: 3056860 - DNA, 25 bp, Homo sapien
tggactctggcagggcccacgctgc

SEQ ID NO: 3056861 - DNA, 25 bp, Homo sapien
cccagaaccgcagggacttgtagcg

SEQ ID NO: 3056862 - DNA, 25 bp, Homo sapien
gctgccccagaaccgcagggacttg

SEQ ID NO: 3056863 - DNA, 25 bp, Homo sapien
caaacacctcgtagtggggagcaga

SEQ ID NO: 3056864 - DNA, 25 bp, Homo sapien
aacacctcgtagtggggagcagagc

SEQ ID NO: 3056865 - DNA, 25 bp, Homo sapien
cctcagcgccacaaacacctcgtag

SEQ ID NO: 3056866 - DNA, 25 bp, Homo sapien
agcgccacaaacacctcgtagtggg

SEQ ID NO: 3056867 - DNA, 25 bp, Homo sapien
gcagctgccaagtctagtgtcctct

SEQ ID NO: 3056868 - DNA, 25 bp, Homo sapien
gtgtcctctgccctatctgttcttc

SEQ ID NO: 3056869 - DNA, 25 bp, Homo sapien
tgtgcacacatacttccggtgaatg

SEQ ID NO: 3056870 - DNA, 25 bp, Homo sapien
cacatacttccggtgaatgggcagc

SEQ ID NO: 3056871 - DNA, 25 bp, Homo sapien
actgcagcaggatggatgagagtta

SEQ ID NO: 3056872 - DNA, 25 bp, Homo sapien
gagtagtaaaggaggcttatctctt

SEQ ID NO: 3056873 - DNA, 25 bp, Homo sapien
ggtaaatggagaggaacctagagct

SEQ ID NO: 3056874 - DNA, 25 bp, Homo sapien
gatcctaaataggagacagatcagg

SEQ ID NO: 3056875 - DNA, 25 bp, Homo sapien
gaacaggtcttcaccaatatcttcc

SEQ ID NO: 3056876 - DNA, 25 bp, Homo sapien
ccctcgcacactcagggtctggtcc

SEQ ID NO: 3056877 - DNA, 25 bp, Homo sapien
agaacaggtcttcaccaatatcttc

SEQ ID NO: 3056878 - DNA, 25 bp, Homo sapien
aatatcttcccctcgcacactcagg

SEQ ID NO: 3056879 - DNA, 25 bp, Homo sapien
caggacacaaggatggcccttcagc

SEQ ID NO: 3056880 - DNA, 25 bp, Homo sapien
ggacacaaggatggcccttcagctc

SEQ ID NO: 3056881 - DNA, 25 bp, Homo sapien
gagcccaggacacaaggatggccct

SEQ ID NO: 3056882 - DNA, 25 bp, Homo sapien
gcccaggacacaaggatggcccttc

SEQ ID NO: 3056883 - DNA, 25 bp, Homo sapien
tgattgtaggcaccaaccactcgca

SEQ ID NO: 3056884 - DNA, 25 bp, Homo sapien
cgactggacactgattgtaggcacc

SEQ ID NO: 3056885 - DNA, 25 bp, Homo sapien
gaacctgacgactggacactgattg

SEQ ID NO: 3056886 - DNA, 25 bp, Homo sapien
ctgcagatgaacctgacgactggac

SEQ ID NO: 3056887 - DNA, 25 bp, Homo sapien
tgctctggctgtaggtttaggccca

SEQ ID NO: 3056888 - DNA, 25 bp, Homo sapien
agcagctcgataaagggggccccag

SEQ ID NO: 3056889 - DNA, 25 bp, Homo sapien
aggctggcgcggtccgtcagcacca

SEQ ID NO: 3056890 - DNA, 25 bp, Homo sapien
tgggtgccttccttgactgggagca

SEQ ID NO: 3056891 - DNA, 25 bp, Homo sapien
aaaacatccagaagttcgacagccg

SEQ ID NO: 3056892 - DNA, 25 bp, Homo sapien
cccgaggcagcataagcaggagaga

SEQ ID NO: 3056893 - DNA, 25 bp, Homo sapien
gagaagaaggctagtccttggcacc

SEQ ID NO: 3056894 - DNA, 25 bp, Homo sapien
tcagctgcccgttcacggagaggcg

SEQ ID NO: 3056895 - DNA, 25 bp, Homo sapien
cagagggagatgattccggaaggtg

SEQ ID NO: 3056896 - DNA, 25 bp, Homo sapien
ggagatgattccggaaggtgcttat

SEQ ID NO: 3056897 - DNA, 25 bp, Homo sapien
agatgattccggaaggtgcttatgt

SEQ ID NO: 3056898 - DNA, 25 bp, Homo sapien
gagggagatgattccggaaggtgct

SEQ ID NO: 3056899 - DNA, 25 bp, Homo sapien
tatagccccaatgacaacagaaacg

SEQ ID NO: 3056900 - DNA, 25 bp, Homo sapien
ctatagccccaatgacaacagaaac

SEQ ID NO: 3056901 - DNA, 25 bp, Homo sapien
atagccccaatgacaacagaaacgc

SEQ ID NO: 3056902 - DNA, 25 bp, Homo sapien
aagccagtttcccaagagtttcagg

SEQ ID NO: 3056903 - DNA, 25 bp, Homo sapien
gctccttctgagggaacagtggggg

SEQ ID NO: 3056904 - DNA, 25 bp, Homo sapien
gtgctccttctgagggaacagtggg

SEQ ID NO: 3056905 - DNA, 25 bp, Homo sapien
ctgtgctccttctgagggaacagtg

SEQ ID NO: 3056906 - DNA, 25 bp, Homo sapien
tgtgctccttctgagggaacagtgg

SEQ ID NO: 3056907 - DNA, 25 bp, Homo sapien
catggagcgtgctctgctccagcct

SEQ ID NO: 3056908 - DNA, 25 bp, Homo sapien
cacatggagcgtgctctgctccagc

SEQ ID NO: 3056909 - DNA, 25 bp, Homo sapien
acatggagcgtgctctgctccagcc

SEQ ID NO: 3056910 - DNA, 25 bp, Homo sapien
atggagcgtgctctgctccagcctc

SEQ ID NO: 3056911 - DNA, 25 bp, Homo sapien
actcggtgctggaggccagcaagcc

SEQ ID NO: 3056912 - DNA, 25 bp, Homo sapien
ggtgctggaggccagcaagccagga

SEQ ID NO: 3056913 - DNA, 25 bp, Homo sapien
gccactcggtgctggaggccagcaa

SEQ ID NO: 3056914 - DNA, 25 bp, Homo sapien
ctggaggccagcaagccaggacagc

SEQ ID NO: 3056915 - DNA, 25 bp, Homo sapien
ctgagcagggccaatgttggcagca

SEQ ID NO: 3056916 - DNA, 25 bp, Homo sapien
gccaatgttggcagcagcagcagca

SEQ ID NO: 3056917 - DNA, 25 bp, Homo sapien
agcagcagcagcagtggccacagca

SEQ ID NO: 3056918 - DNA, 25 bp, Homo sapien
gcagcagcagtggccacagcagcat

SEQ ID NO: 3056919 - DNA, 25 bp, Homo sapien
cttgttagctgtagggccctgagca

SEQ ID NO: 3056920 - DNA, 25 bp, Homo sapien
tgtagggccctgagcaatttagtgg

SEQ ID NO: 3056921 - DNA, 25 bp, Homo sapien
ctctgccgcttgttagctgtagggc

SEQ ID NO: 3056922 - DNA, 25 bp, Homo sapien
ccctgagcaatttagtgggctgcac

SEQ ID NO: 3056923 - DNA, 25 bp, Homo sapien
cagcgtggtgtcacacccatagtcg

SEQ ID NO: 3056924 - DNA, 25 bp, Homo sapien
cccagcgtggtgtcacacccatagt

SEQ ID NO: 3056925 - DNA, 25 bp, Homo sapien
aaaattgaaaaactagcccagcgtg

SEQ ID NO: 3056926 - DNA, 25 bp, Homo sapien
aattgaaaaactagcccagcgtggt

SEQ ID NO: 3056927 - DNA, 25 bp, Homo sapien
tttcggacagggtcggtcgggcaca

SEQ ID NO: 3056928 - DNA, 25 bp, Homo sapien
tggcacgtgacggagacccctgggt

SEQ ID NO: 3056929 - DNA, 25 bp, Homo sapien
ctcagcacacatccggccagaaaga

SEQ ID NO: 3056930 - DNA, 25 bp, Homo sapien
acagcccacttctgcctactcctgg

SEQ ID NO: 3056931 - DNA, 25 bp, Homo sapien
acgtgacggagacccctgggtgact

SEQ ID NO: 3056932 - DNA, 25 bp, Homo sapien
caactgcaaagtgagccaggacggc

SEQ ID NO: 3056933 - DNA, 25 bp, Homo sapien
cgaggacagctcacaactggacaag

SEQ ID NO: 3056934 - DNA, 25 bp, Homo sapien
cctgaaagtgtatcaagtctgaccc

SEQ ID NO: 3056935 - DNA, 25 bp, Homo sapien
gagagcgagcacacctttcatcaaa

SEQ ID NO: 3056936 - DNA, 25 bp, Homo sapien
ccttccccgatgcacccatcctcat

SEQ ID NO: 3056937 - DNA, 25 bp, Homo sapien
tgtatgaaaccaagccaaggcaaac

SEQ ID NO: 3056938 - DNA, 25 bp, Homo sapien
tgggatgcgggtagcctgctcctca

SEQ ID NO: 3056939 - DNA, 25 bp, Homo sapien
tttcatcaaatcttgaggggtaggg

SEQ ID NO: 3056940 - DNA, 25 bp, Homo sapien
aaataaatcagtgtatgaaaccaag

SEQ ID NO: 3056941 - DNA, 25 bp, Homo sapien
gtttatttactctcatgtataaaaa

SEQ ID NO: 3056942 - DNA, 25 bp, Homo sapien
ggtgcccatgcccttcttttggaga

SEQ ID NO: 3056943 - DNA, 25 bp, Homo sapien
aatatgtttatttactctcatgtat

SEQ ID NO: 3056944 - DNA, 25 bp, Homo sapien
cctgctgtagcccattccttccttc

SEQ ID NO: 3056945 - DNA, 25 bp, Homo sapien
cctccactacctgctgtagcccatt

SEQ ID NO: 3056946 - DNA, 25 bp, Homo sapien
tgctgtagcccattccttccttctg

SEQ ID NO: 3056947 - DNA, 25 bp, Homo sapien
cctcttcctccactacctgctgtag

SEQ ID NO: 3056948 - DNA, 25 bp, Homo sapien
ccagggcccaatgcacaagagagaa

SEQ ID NO: 3056949 - DNA, 25 bp, Homo sapien
gggtaaccaggcaacaatctcagcg

SEQ ID NO: 3056950 - DNA, 25 bp, Homo sapien
gctaagcaagctggcctaggttcag

SEQ ID NO: 3056951 - DNA, 25 bp, Homo sapien
tgcatccgctggctcagagaaaggc

SEQ ID NO: 3056952 - DNA, 25 bp, Homo sapien
gattgtgcgtgcgggatccactgac

SEQ ID NO: 3056953 - DNA, 25 bp, Homo sapien
catcggtgtcaaggactgagtcagg

SEQ ID NO: 3056954 - DNA, 25 bp, Homo sapien
tcgaagtccccatcggtgtcaagga

SEQ ID NO: 3056955 - DNA, 25 bp, Homo sapien
tccagatcgaagtccccatcggtgt

SEQ ID NO: 3056956 - DNA, 25 bp, Homo sapien
acacgccgcgctacgtccattgtgt

SEQ ID NO: 3056957 - DNA, 25 bp, Homo sapien
tcagactgaaataccctcccctgtt

SEQ ID NO: 3056958 - DNA, 25 bp, Homo sapien
tggctgtacagcaactcagactgaa

SEQ ID NO: 3056959 - DNA, 25 bp, Homo sapien
cactcagtccttagagcaagaaaaa

SEQ ID NO: 3056960 - DNA, 25 bp, Homo sapien
gggagcagtctgagccagcctatgc

SEQ ID NO: 3056961 - DNA, 25 bp, Homo sapien
tgtgggtacatgttatagtgagcct

SEQ ID NO: 3056962 - DNA, 25 bp, Homo sapien
ctgtgggtacatgttatagtgagcc

SEQ ID NO: 3056963 - DNA, 25 bp, Homo sapien
ttctgtgggtacatgttatagtgag

SEQ ID NO: 3056964 - DNA, 25 bp, Homo sapien
tgggtacatgttatagtgagcctgg

SEQ ID NO: 3056965 - DNA, 25 bp, Homo sapien
ccgcccccggcatctgcagatgcgt

SEQ ID NO: 3056966 - DNA, 25 bp, Homo sapien
ggcatctgcagatgcgttcacaaac

SEQ ID NO: 3056967 - DNA, 25 bp, Homo sapien
cgcccccggcatctgcagatgcgtt

SEQ ID NO: 3056968 - DNA, 25 bp, Homo sapien
cccggcatctgcagatgcgttcaca

SEQ ID NO: 3056969 - DNA, 25 bp, Homo sapien
tctgtggcttcacgtatccatcaac

SEQ ID NO: 3056970 - DNA, 25 bp, Homo sapien
agggaccacttgcttgatctgtggc

SEQ ID NO: 3056971 - DNA, 25 bp, Homo sapien
ttcacgtatccatcaacagctttag

SEQ ID NO: 3056972 - DNA, 25 bp, Homo sapien
cttgatctgtggcttcacgtatcca

SEQ ID NO: 3056973 - DNA, 25 bp, Homo sapien
gcttcaagtgtcaggagcgaccttt

SEQ ID NO: 3056974 - DNA, 25 bp, Homo sapien
gcagggttcaccaattgcttattac

SEQ ID NO: 3056975 - DNA, 25 bp, Homo sapien
taatcttcttctagggcttcaagtg

SEQ ID NO: 3056976 - DNA, 25 bp, Homo sapien
tgtcatttaagtagcccaagagggt

SEQ ID NO: 3056977 - DNA, 25 bp, Homo sapien
cagtgggattgtatgcagtcatcaa

SEQ ID NO: 3056978 - DNA, 25 bp, Homo sapien
tcctccgccttctaatgtgctggaa

SEQ ID NO: 3056979 - DNA, 25 bp, Homo sapien
gtatcttaaataaccaacatgtaac

SEQ ID NO: 3056980 - DNA, 25 bp, Homo sapien
aacatgtaactcaccatacagtggg

SEQ ID NO: 3056981 - DNA, 25 bp, Homo sapien
catcttttggccgatcaggaaacac

SEQ ID NO: 3056982 - DNA, 25 bp, Homo sapien
cagtagcagactcgcagggaactgg

SEQ ID NO: 3056983 - DNA, 25 bp, Homo sapien
tgtagtatttggagtatacttcatc

SEQ ID NO: 3056984 - DNA, 25 bp, Homo sapien
tcaggaaacacgtagataaggtaat

SEQ ID NO: 3056985 - DNA, 25 bp, Homo sapien
tagggaccgaatggagaagtctctg

SEQ ID NO: 3056986 - DNA, 25 bp, Homo sapien
gggaccgaatggagaagtctctggt

SEQ ID NO: 3056987 - DNA, 25 bp, Homo sapien
ctagggaccgaatggagaagtctct

SEQ ID NO: 3056988 - DNA, 25 bp, Homo sapien
taaaaggcatcagattccaaaacat

SEQ ID NO: 3056989 - DNA, 25 bp, Homo sapien
cttgttaatgagtaggtcatgggcc

SEQ ID NO: 3056990 - DNA, 25 bp, Homo sapien
taatgagtaggtcatgggcctgttg

SEQ ID NO: 3056991 - DNA, 25 bp, Homo sapien
ggtcccatctggcttgttaatgagt

SEQ ID NO: 3056992 - DNA, 25 bp, Homo sapien
gatgccgccaatttctgagtcactg

SEQ ID NO: 3056993 - DNA, 25 bp, Homo sapien
tcggcgccttaagaaataatgattc

SEQ ID NO: 3056994 - DNA, 25 bp, Homo sapien
ccttcagactctgtcggcgccttaa

SEQ ID NO: 3056995 - DNA, 25 bp, Homo sapien
gacagaagcagagtgtgacttacga

SEQ ID NO: 3056996 - DNA, 25 bp, Homo sapien
agtgtgacttacgatgccagagaga

SEQ ID NO: 3056997 - DNA, 25 bp, Homo sapien
taacacttccatcacaccgtcaaac

SEQ ID NO: 3056998 - DNA, 25 bp, Homo sapien
ccatcattccaatgaggcttgagat

SEQ ID NO: 3056999 - DNA, 25 bp, Homo sapien
cacaccgtcaaaccattgccagaaa

SEQ ID NO: 3057000 - DNA, 25 bp, Homo sapien
aaaccattgccagaaagtgtaattc

SEQ ID NO: 3057001 - DNA, 25 bp, Homo sapien
agcggctggcagctgggctcctcac

SEQ ID NO: 3057002 - DNA, 25 bp, Homo sapien
ctaacagcggctggcagctgggctc

SEQ ID NO: 3057003 - DNA, 25 bp, Homo sapien
acagcggctggcagctgggctcctc

SEQ ID NO: 3057004 - DNA, 25 bp, Homo sapien
aacagcggctggcagctgggctcct

SEQ ID NO: 3057005 - DNA, 25 bp, Homo sapien
aatttcatgttgagcgcctcacaca

SEQ ID NO: 3057006 - DNA, 25 bp, Homo sapien
actttgtcaggcacggcaaatggca

SEQ ID NO: 3057007 - DNA, 25 bp, Homo sapien
tttctgcgccaggaacacgaggttc

SEQ ID NO: 3057008 - DNA, 25 bp, Homo sapien
ggttgctctgcacttcggccttgaa

SEQ ID NO: 3057009 - DNA, 25 bp, Homo sapien
catgagacctagaatgaatcacaga

SEQ ID NO: 3057010 - DNA, 25 bp, Homo sapien
tgctcatcgagcagcatgctagtgg

SEQ ID NO: 3057011 - DNA, 25 bp, Homo sapien
gggtgcataaatccaccaaattata

SEQ ID NO: 3057012 - DNA, 25 bp, Homo sapien
gattcagatagcgtttgggtgcata

SEQ ID NO: 3057013 - DNA, 25 bp, Homo sapien
gtcctggctgccatgaacgatcacc

SEQ ID NO: 3057014 - DNA, 25 bp, Homo sapien
atgaacgatcaccaccactggcagg

SEQ ID NO: 3057015 - DNA, 25 bp, Homo sapien
aggctctgcaaaagcattgtcccag

SEQ ID NO: 3057016 - DNA, 25 bp, Homo sapien
gaacagtggccgtcgcattgttgtc

SEQ ID NO: 3057017 - DNA, 25 bp, Homo sapien
tcagggtgaggtcagtccattttca

SEQ ID NO: 3057018 - DNA, 25 bp, Homo sapien
tgcactgggccttgcttgttcatgt

SEQ ID NO: 3057019 - DNA, 25 bp, Homo sapien
tgcttggcctctgttcatgtcttaa

SEQ ID NO: 3057020 - DNA, 25 bp, Homo sapien
ggtctcacaaccagctccaggctgg

SEQ ID NO: 3057021 - DNA, 25 bp, Homo sapien
aactgggattcaaacaggattgtaa

SEQ ID NO: 3057022 - DNA, 25 bp, Homo sapien
gacttgaaaaaccagctcatttcca

SEQ ID NO: 3057023 - DNA, 25 bp, Homo sapien
ttctgtcaccgactctgccccacga

SEQ ID NO: 3057024 - DNA, 25 bp, Homo sapien
cggtctgacctcttaattcgtttca

SEQ ID NO: 3057025 - DNA, 25 bp, Homo sapien
ggcactaagggtgcctgtggcttgg

SEQ ID NO: 3057026 - DNA, 25 bp, Homo sapien
catattcctgaagtgggcactaagg

SEQ ID NO: 3057027 - DNA, 25 bp, Homo sapien
catgacgcagcagttgttcaagatc

SEQ ID NO: 3057028 - DNA, 25 bp, Homo sapien
ggcttggtggtactccatgacgcag

SEQ ID NO: 3057029 - DNA, 25 bp, Homo sapien
aaacagggatctgacacaggaggca

SEQ ID NO: 3057030 - DNA, 25 bp, Homo sapien
aggccagaagggcaaacagggatct

SEQ ID NO: 3057031 - DNA, 25 bp, Homo sapien
gacatgagacaagtagcagggaatg

SEQ ID NO: 3057032 - DNA, 25 bp, Homo sapien
ctgttgccaggacatgagacaagta

SEQ ID NO: 3057033 - DNA, 25 bp, Homo sapien
ttgcgggtgttctcgttcttgagca

SEQ ID NO: 3057034 - DNA, 25 bp, Homo sapien
ggtgttctcgttcttgagcagagac

SEQ ID NO: 3057035 - DNA, 25 bp, Homo sapien
gcgggtgttctcgttcttgagcaga

SEQ ID NO: 3057036 - DNA, 25 bp, Homo sapien
cgggtgttctcgttcttgagcagag

SEQ ID NO: 3057037 - DNA, 25 bp, Homo sapien
tgcggatctgctgccggttctgcca

SEQ ID NO: 3057038 - DNA, 25 bp, Homo sapien
tcaccagggctgagataatgtccgt

SEQ ID NO: 3057039 - DNA, 25 bp, Homo sapien
gttctgccagatgatctcggccaac

SEQ ID NO: 3057040 - DNA, 25 bp, Homo sapien
taatgtccgtgatggtggcgttgac

SEQ ID NO: 3057041 - DNA, 25 bp, Homo sapien
tgccgccgcttccactggatcagct

SEQ ID NO: 3057042 - DNA, 25 bp, Homo sapien
ccactggatcagctcgtcatccagg

SEQ ID NO: 3057043 - DNA, 25 bp, Homo sapien
ggatcagctcgtcatccaggatgat

SEQ ID NO: 3057044 - DNA, 25 bp, Homo sapien
caggactgtagcacgtccaggctgc

SEQ ID NO: 3057045 - DNA, 25 bp, Homo sapien
gtctgtgcctcacgctgcaaccagg

SEQ ID NO: 3057046 - DNA, 25 bp, Homo sapien
gtgtctgtgcctcacgctgcaacca

SEQ ID NO: 3057047 - DNA, 25 bp, Homo sapien
gtctcccggctcagacgctcctggg

SEQ ID NO: 3057048 - DNA, 25 bp, Homo sapien
tctgctggagggccgtctcccggct

SEQ ID NO: 3057049 - DNA, 25 bp, Homo sapien
cagaaagctgcctgacatgggtgag

SEQ ID NO: 3057050 - DNA, 25 bp, Homo sapien
gcatgtttgtccaggtgagctcact

SEQ ID NO: 3057051 - DNA, 25 bp, Homo sapien
taaaacgggagattctcggcacctg

SEQ ID NO: 3057052 - DNA, 25 bp, Homo sapien
ggtgaacctgggcaaatcgctttcc

SEQ ID NO: 3057053 - DNA, 25 bp, Homo sapien
gggacatggcatcagcaaggcttcc

SEQ ID NO: 3057054 - DNA, 25 bp, Homo sapien
tgtgccccttaggatgaagctctct

SEQ ID NO: 3057055 - DNA, 25 bp, Homo sapien
tttaaagagacaccaatagtgcacc

SEQ ID NO: 3057056 - DNA, 25 bp, Homo sapien
gagacaccaatagtgcaccctgagt

SEQ ID NO: 3057057 - DNA, 25 bp, Homo sapien
gctgggctgcactcagtcaagtctc

SEQ ID NO: 3057058 - DNA, 25 bp, Homo sapien
cattgtacaatatatggcggatgca

SEQ ID NO: 3057059 - DNA, 25 bp, Homo sapien
ccatggggcagcggtcatacgtgtt

SEQ ID NO: 3057060 - DNA, 25 bp, Homo sapien
tgtacaatatatggcggatgcagcg

SEQ ID NO: 3057061 - DNA, 25 bp, Homo sapien
caatatatggcggatgcagcggacc

SEQ ID NO: 3057062 - DNA, 25 bp, Homo sapien
ataagttttaaaagcctcgcaagag

SEQ ID NO: 3057063 - DNA, 25 bp, Homo sapien
tgcctaaagtatccggggaacattc

SEQ ID NO: 3057064 - DNA, 25 bp, Homo sapien
aaagcctcgcaagaggagaaactgg

SEQ ID NO: 3057065 - DNA, 25 bp, Homo sapien
ctctcaaatgggcaatcaaaactac

SEQ ID NO: 3057066 - DNA, 25 bp, Homo sapien
tagtgccccagcttgatcttcagta

SEQ ID NO: 3057067 - DNA, 25 bp, Homo sapien
ttgatcttcagtaaaaacccatctt

SEQ ID NO: 3057068 - DNA, 25 bp, Homo sapien
agtgccccagcttgatcttcagtaa

SEQ ID NO: 3057069 - DNA, 25 bp, Homo sapien
gatcttcagtaaaaacccatcttcc

SEQ ID NO: 3057070 - DNA, 25 bp, Homo sapien
ctgtggattatcaagatctactgag

SEQ ID NO: 3057071 - DNA, 25 bp, Homo sapien
accaaacagctgtcggactgaaata

SEQ ID NO: 3057072 - DNA, 25 bp, Homo sapien
aaacagctgtcggactgaaataaca

SEQ ID NO: 3057073 - DNA, 25 bp, Homo sapien
aagaaaccaaacagctgtcggactg

SEQ ID NO: 3057074 - DNA, 25 bp, Homo sapien
cagctgtcggactgaaataacattc

SEQ ID NO: 3057075 - DNA, 25 bp, Homo sapien
taaaaatcccaagagttattccatc

SEQ ID NO: 3057076 - DNA, 25 bp, Homo sapien
cccatgggcactcgaaacatatttg

SEQ ID NO: 3057077 - DNA, 25 bp, Homo sapien
taggacactgctaggcatcccatgg

SEQ ID NO: 3057078 - DNA, 25 bp, Homo sapien
tgggattacaacacaatgttgggct

SEQ ID NO: 3057079 - DNA, 25 bp, Homo sapien
gcttggctttcaatccactgggata

SEQ ID NO: 3057080 - DNA, 25 bp, Homo sapien
ggctttcaatccactgggataaata

SEQ ID NO: 3057081 - DNA, 25 bp, Homo sapien
catgcttggctttcaatccactggg

SEQ ID NO: 3057082 - DNA, 25 bp, Homo sapien
tccactgggataaataatgccgcac

SEQ ID NO: 3057083 - DNA, 25 bp, Homo sapien
tgctggccatataacgcttgcatct

SEQ ID NO: 3057084 - DNA, 25 bp, Homo sapien
tataacgcttgcatctgatgaaggg

SEQ ID NO: 3057085 - DNA, 25 bp, Homo sapien
ggccatataacgcttgcatctgatg

SEQ ID NO: 3057086 - DNA, 25 bp, Homo sapien
gctgctgagcttgtatccacacagc

SEQ ID NO: 3057087 - DNA, 25 bp, Homo sapien
tctgcttatttacgggcagctccaa

SEQ ID NO: 3057088 - DNA, 25 bp, Homo sapien
ccgccatcttctgcttatttacggg

SEQ ID NO: 3057089 - DNA, 25 bp, Homo sapien
gggcagctccaatttcagtgcgtga

SEQ ID NO: 3057090 - DNA, 25 bp, Homo sapien
aatttcagtgcgtgatgctcagaca

SEQ ID NO: 3057091 - DNA, 25 bp, Homo sapien
tgtggataaatctggcggacaatgc

SEQ ID NO: 3057092 - DNA, 25 bp, Homo sapien
ggacaatgccttaaccgagtgatca

SEQ ID NO: 3057093 - DNA, 25 bp, Homo sapien
tagtattctgggaagacaatccgcc

SEQ ID NO: 3057094 - DNA, 25 bp, Homo sapien
aatcaggtttcaatcagcaggttac

SEQ ID NO: 3057095 - DNA, 25 bp, Homo sapien
agtcttgctctttcaacagggttaa

SEQ ID NO: 3057096 - DNA, 25 bp, Homo sapien
ccgcgcctggctgagtcttgctctt

SEQ ID NO: 3057097 - DNA, 25 bp, Homo sapien
cccacctctcgcgttcatgcaattc

SEQ ID NO: 3057098 - DNA, 25 bp, Homo sapien
ctttcaacagggttaaagtgcagtg

SEQ ID NO: 3057099 - DNA, 25 bp, Homo sapien
tttactacagcactcatagtgggag

SEQ ID NO: 3057100 - DNA, 25 bp, Homo sapien
gaccgtctctcactatacctctaat

SEQ ID NO: 3057101 - DNA, 25 bp, Homo sapien
tagatctacacacaacttagcatgg

SEQ ID NO: 3057102 - DNA, 25 bp, Homo sapien
ctttttctggtaacagaccgtctct

SEQ ID NO: 3057103 - DNA, 25 bp, Homo sapien
actaacagcttatgctgcaaggcat

SEQ ID NO: 3057104 - DNA, 25 bp, Homo sapien
acctcttaactaacagcttatgctg

SEQ ID NO: 3057105 - DNA, 25 bp, Homo sapien
aaggctcccacctcttaactaacag

SEQ ID NO: 3057106 - DNA, 25 bp, Homo sapien
cccacctcttaactaacagcttatg

SEQ ID NO: 3057107 - DNA, 25 bp, Homo sapien
tagattagacatggagaaaagactg

SEQ ID NO: 3057108 - DNA, 25 bp, Homo sapien
taaagtcaagtcagtcattctgcaa

SEQ ID NO: 3057109 - DNA, 25 bp, Homo sapien
ctagggcacaggcaaggttcaatgc

SEQ ID NO: 3057110 - DNA, 25 bp, Homo sapien
tgctgacaaccagtagatatatata

SEQ ID NO: 3057111 - DNA, 25 bp, Homo sapien
aaaaatcatcagctagtcaaatgag

SEQ ID NO: 3057112 - DNA, 25 bp, Homo sapien
gagtttctcctgacagtgatacctg

SEQ ID NO: 3057113 - DNA, 25 bp, Homo sapien
tttaactcctttataacacgagcca

SEQ ID NO: 3057114 - DNA, 25 bp, Homo sapien
ctttataacacgagccacaaaatga

SEQ ID NO: 3057115 - DNA, 25 bp, Homo sapien
cctttccaataggagccagtcttgg

SEQ ID NO: 3057116 - DNA, 25 bp, Homo sapien
ggatgtcccctatctctgccaaaaa

SEQ ID NO: 3057117 - DNA, 25 bp, Homo sapien
gaaagagtctcctaacatcctgaaa

SEQ ID NO: 3057118 - DNA, 25 bp, Homo sapien
tattgaactcaaagagggccctatg

SEQ ID NO: 3057119 - DNA, 25 bp, Homo sapien
tccaggtgaactgctagagagctat

SEQ ID NO: 3057120 - DNA, 25 bp, Homo sapien
tcatctatatttggacccctagggt

SEQ ID NO: 3057121 - DNA, 25 bp, Homo sapien
taaagtagtctacagcccaagatcc

SEQ ID NO: 3057122 - DNA, 25 bp, Homo sapien
ttcaagaggctctaaaggagtccac

SEQ ID NO: 3057123 - DNA, 25 bp, Homo sapien
tgttgcccaggatacttttgaaccc

SEQ ID NO: 3057124 - DNA, 25 bp, Homo sapien
tgataccttcaacatgaggagaaag

SEQ ID NO: 3057125 - DNA, 25 bp, Homo sapien
gaattgtagccatgccactcaggaa

SEQ ID NO: 3057126 - DNA, 25 bp, Homo sapien
tattgcaaagtcaagggatcttgcc

SEQ ID NO: 3057127 - DNA, 25 bp, Homo sapien
tccatatatgtagtcaggcaccaca

SEQ ID NO: 3057128 - DNA, 25 bp, Homo sapien
ttatagctcttcttctatgatgtac

SEQ ID NO: 3057129 - DNA, 25 bp, Homo sapien
ttcttctatgatgtacacggtaatg

SEQ ID NO: 3057130 - DNA, 25 bp, Homo sapien
tagctcttcttctatgatgtacacg

SEQ ID NO: 3057131 - DNA, 25 bp, Homo sapien
agctcttcttctatgatgtacacgg

SEQ ID NO: 3057132 - DNA, 25 bp, Homo sapien
tggcatcataatgattagatacata

SEQ ID NO: 3057133 - DNA, 25 bp, Homo sapien
gcatcataatgattagatacataat

SEQ ID NO: 3057134 - DNA, 25 bp, Homo sapien
ggcatcataatgattagatacataa

SEQ ID NO: 3057135 - DNA, 25 bp, Homo sapien
catcataatgattagatacataatc

SEQ ID NO: 3057136 - DNA, 25 bp, Homo sapien
taccaaaggtaatagaaggatacat

SEQ ID NO: 3057137 - DNA, 25 bp, Homo sapien
gtggtgtcatccatgtgaaaatgga

SEQ ID NO: 3057138 - DNA, 25 bp, Homo sapien
cagtagattttgcaagctagcttcc

SEQ ID NO: 3057139 - DNA, 25 bp, Homo sapien
tctcttcatattagaaaagtacaaa

SEQ ID NO: 3057140 - DNA, 25 bp, Homo sapien
gcgagtccagaaaaacggctatcat

SEQ ID NO: 3057141 - DNA, 25 bp, Homo sapien
gcataaagcgagttaaaggccagga

SEQ ID NO: 3057142 - DNA, 25 bp, Homo sapien
gaaggtgattcctcctgagctctaa

SEQ ID NO: 3057143 - DNA, 25 bp, Homo sapien
tgagctctaataccataccctgaat

SEQ ID NO: 3057144 - DNA, 25 bp, Homo sapien
tgcgaggaaacagatagcagcacct

SEQ ID NO: 3057145 - DNA, 25 bp, Homo sapien
gaagtagcgcaaagggtcagagaca

SEQ ID NO: 3057146 - DNA, 25 bp, Homo sapien
cgattgggtattcaggcttcactca

SEQ ID NO: 3057147 - DNA, 25 bp, Homo sapien
agaacatcttgccttcccgattggg

SEQ ID NO: 3057148 - DNA, 25 bp, Homo sapien
gcggagttgcctgcgctgggtcccc

SEQ ID NO: 3057149 - DNA, 25 bp, Homo sapien
gagcgcgccccgcttcctggttccg

SEQ ID NO: 3057150 - DNA, 25 bp, Homo sapien
ggcgcgcgctcgctagcccgctgtc

SEQ ID NO: 3057151 - DNA, 25 bp, Homo sapien
gcgcgcgccgctcacgcgcggaggc

SEQ ID NO: 3057152 - DNA, 25 bp, Homo sapien
accgcacctgactcatgtttctctt

SEQ ID NO: 3057153 - DNA, 25 bp, Homo sapien
gtgagctttcatccctgcacacatg

SEQ ID NO: 3057154 - DNA, 25 bp, Homo sapien
cctgcacacatgctattccctctgc

SEQ ID NO: 3057155 - DNA, 25 bp, Homo sapien
ttctctttcttgtgagctttcatcc

SEQ ID NO: 3057156 - DNA, 25 bp, Homo sapien
gcccagccaatactgacaggataat

SEQ ID NO: 3057157 - DNA, 25 bp, Homo sapien
gatctatcatgcagtgtcttctcag

SEQ ID NO: 3057158 - DNA, 25 bp, Homo sapien
tggccctagaagaagggcagctcct

SEQ ID NO: 3057159 - DNA, 25 bp, Homo sapien
agtatttctgatcccgtgcctggct

SEQ ID NO: 3057160 - DNA, 25 bp, Homo sapien
gatgcttctcaaccctcggggccag

SEQ ID NO: 3057161 - DNA, 25 bp, Homo sapien
agggcccggcgccaagatgcttctc

SEQ ID NO: 3057162 - DNA, 25 bp, Homo sapien
gtggcaccacgcggctgcgctgttt

SEQ ID NO: 3057163 - DNA, 25 bp, Homo sapien
ggcagtcccagagccgcaacaaccg

SEQ ID NO: 3057164 - DNA, 25 bp, Homo sapien
ggtgtctgcgtgttgtccccgctgg

SEQ ID NO: 3057165 - DNA, 25 bp, Homo sapien
cagccaccaccgggtgtctgcgtgt

SEQ ID NO: 3057166 - DNA, 25 bp, Homo sapien
agccaccaccgggtgtctgcgtgtt

SEQ ID NO: 3057167 - DNA, 25 bp, Homo sapien
gcagccaccaccgggtgtctgcgtg

SEQ ID NO: 3057168 - DNA, 25 bp, Homo sapien
tcatcttagagaaggtcgtctcccc

SEQ ID NO: 3057169 - DNA, 25 bp, Homo sapien
cagaaactctgatcagctgaggcaa

SEQ ID NO: 3057170 - DNA, 25 bp, Homo sapien
ggtgttcccatacgcacaggagagg

SEQ ID NO: 3057171 - DNA, 25 bp, Homo sapien
gatgagggacctttagacacgcaag

SEQ ID NO: 3057172 - DNA, 25 bp, Homo sapien
cactccgaggtcaactccatgtcaa

SEQ ID NO: 3057173 - DNA, 25 bp, Homo sapien
aactccatgtcaaaggtgagggact

SEQ ID NO: 3057174 - DNA, 25 bp, Homo sapien
gcgcactccgaggtcaactccatgt

SEQ ID NO: 3057175 - DNA, 25 bp, Homo sapien
cgaggtcaactccatgtcaaaggtg

SEQ ID NO: 3057176 - DNA, 25 bp, Homo sapien
ccagctctcggtgtgtacatgtgag

SEQ ID NO: 3057177 - DNA, 25 bp, Homo sapien
tagggacaaagtctgtcaaccaaat

SEQ ID NO: 3057178 - DNA, 25 bp, Homo sapien
tacatgtgagagcatcacacaaagg

SEQ ID NO: 3057179 - DNA, 25 bp, Homo sapien
cattccgagtgaccagctctcggtg

SEQ ID NO: 3057180 - DNA, 25 bp, Homo sapien
ctgccctcctgctgagggttcagca

SEQ ID NO: 3057181 - DNA, 25 bp, Homo sapien
ttatttccaaactgcatcaatgaat

SEQ ID NO: 3057182 - DNA, 25 bp, Homo sapien
gcaggtcaatggtattgctgcaggt

SEQ ID NO: 3057183 - DNA, 25 bp, Homo sapien
tcggcaggtcaatggtattgctgca

SEQ ID NO: 3057184 - DNA, 25 bp, Homo sapien
gacatcggcaggtcaatggtattgc

SEQ ID NO: 3057185 - DNA, 25 bp, Homo sapien
gggacatcggcaggtcaatggtatt

SEQ ID NO: 3057186 - DNA, 25 bp, Homo sapien
gggttgacaagacacaatggaaaaa

SEQ ID NO: 3057187 - DNA, 25 bp, Homo sapien
aacggggggttgacaagacacaatg

SEQ ID NO: 3057188 - DNA, 25 bp, Homo sapien
ggttgacaagacacaatggaaaaaa

SEQ ID NO: 3057189 - DNA, 25 bp, Homo sapien
ggggggttgacaagacacaatggaa

SEQ ID NO: 3057190 - DNA, 25 bp, Homo sapien
tgtcacacagataaacttggtcttc

SEQ ID NO: 3057191 - DNA, 25 bp, Homo sapien
taaacttggtcttcaggtatggggc

SEQ ID NO: 3057192 - DNA, 25 bp, Homo sapien
ggtgtcacacagataaacttggtct

SEQ ID NO: 3057193 - DNA, 25 bp, Homo sapien
cacagataaacttggtcttcaggta

SEQ ID NO: 3057194 - DNA, 25 bp, Homo sapien
gatctcccaggcactagcagctgtg

SEQ ID NO: 3057195 - DNA, 25 bp, Homo sapien
tgacttcgcattcagtaagcagagc

SEQ ID NO: 3057196 - DNA, 25 bp, Homo sapien
tgcctcggcaggactgatttgaaac

SEQ ID NO: 3057197 - DNA, 25 bp, Homo sapien
tcatgccaagattgtctggaaagct

SEQ ID NO: 3057198 - DNA, 25 bp, Homo sapien
tgctgaatgcttacaccaagaggtc

SEQ ID NO: 3057199 - DNA, 25 bp, Homo sapien
ggatgagggcatgagtaactttcta

SEQ ID NO: 3057200 - DNA, 25 bp, Homo sapien
ggcttagacagaacctgagggatca

SEQ ID NO: 3057201 - DNA, 25 bp, Homo sapien
ttcaactagaagaccggagacctgg

SEQ ID NO: 3057202 - DNA, 25 bp, Homo sapien
taatttgtaagtggctccgaacctc

SEQ ID NO: 3057203 - DNA, 25 bp, Homo sapien
tttctcctgatgagtgcctggcccc

SEQ ID NO: 3057204 - DNA, 25 bp, Homo sapien
cctgaggaaacgctgacatcgctgg

SEQ ID NO: 3057205 - DNA, 25 bp, Homo sapien
ggtcacatgctcatcgtcctgaagg

SEQ ID NO: 3057206 - DNA, 25 bp, Homo sapien
tgtgtgtgtagtggggtcttgctat

SEQ ID NO: 3057207 - DNA, 25 bp, Homo sapien
aggactgcaggtgtgaacccccatg

SEQ ID NO: 3057208 - DNA, 25 bp, Homo sapien
catgcccagctgagattacagtatt

SEQ ID NO: 3057209 - DNA, 25 bp, Homo sapien
tgcccagctgagattacagtatttt

SEQ ID NO: 3057210 - DNA, 25 bp, Homo sapien
gactcatgcactctctgtggagcag

SEQ ID NO: 3057211 - DNA, 25 bp, Homo sapien
tgtggagcaggaactacactactct

SEQ ID NO: 3057212 - DNA, 25 bp, Homo sapien
tgcccaggctgtatcccctctttag

SEQ ID NO: 3057213 - DNA, 25 bp, Homo sapien
catttgcctatctatcctccaagga

SEQ ID NO: 3057214 - DNA, 25 bp, Homo sapien
tagagatagaccagtggagacacca

SEQ ID NO: 3057215 - DNA, 25 bp, Homo sapien
gctctctggccgacaatactttccg

SEQ ID NO: 3057216 - DNA, 25 bp, Homo sapien
tgtgtatggttccacggactggatc

SEQ ID NO: 3057217 - DNA, 25 bp, Homo sapien
tactttccgaatgcctcctccttgg

SEQ ID NO: 3057218 - DNA, 25 bp, Homo sapien
cactgtggaaatattcaggctggct

SEQ ID NO: 3057219 - DNA, 25 bp, Homo sapien
taagaagaggctactagttgggtca

SEQ ID NO: 3057220 - DNA, 25 bp, Homo sapien
tagtcactggagcaagcaaaacaaa

SEQ ID NO: 3057221 - DNA, 25 bp, Homo sapien
tttgcgagtctgagtgaaacaggga

SEQ ID NO: 3057222 - DNA, 25 bp, Homo sapien
tgaatcttagcaggaaggtgcctgg

SEQ ID NO: 3057223 - DNA, 25 bp, Homo sapien
tccacccaagtgaaagtgacgcctc

SEQ ID NO: 3057224 - DNA, 25 bp, Homo sapien
tccttactgataaagcccatgatgt

SEQ ID NO: 3057225 - DNA, 25 bp, Homo sapien
gcttagtgctcaagatggcccgctc

SEQ ID NO: 3057226 - DNA, 25 bp, Homo sapien
tgttattgctaacagggcatccatc

SEQ ID NO: 3057227 - DNA, 25 bp, Homo sapien
ggggacttggttacatctgtgcaca

SEQ ID NO: 3057228 - DNA, 25 bp, Homo sapien
ttattgctaacagggcatccatccc

SEQ ID NO: 3057229 - DNA, 25 bp, Homo sapien
gaggaggaacaatgttgttattgct

SEQ ID NO: 3057230 - DNA, 25 bp, Homo sapien
ccaggatgtactttttcacaaggtc

SEQ ID NO: 3057231 - DNA, 25 bp, Homo sapien
ggccaggatgtactttttcacaagg

SEQ ID NO: 3057232 - DNA, 25 bp, Homo sapien
aagggccaggatgtactttttcaca

SEQ ID NO: 3057233 - DNA, 25 bp, Homo sapien
gggccaggatgtactttttcacaag

SEQ ID NO: 3057234 - DNA, 25 bp, Homo sapien
cagccgtgcaggtgagcattcccat

SEQ ID NO: 3057235 - DNA, 25 bp, Homo sapien
tgggaaagccaagtctactgccatc

SEQ ID NO: 3057236 - DNA, 25 bp, Homo sapien
tggagaaaagagtaatgggaaagcc

SEQ ID NO: 3057237 - DNA, 25 bp, Homo sapien
cctactggccgctggaccaagagtt

SEQ ID NO: 3057238 - DNA, 25 bp, Homo sapien
tctgacaccctgaataattcacacc

SEQ ID NO: 3057239 - DNA, 25 bp, Homo sapien
tgtgatctgacaccctgaataattc

SEQ ID NO: 3057240 - DNA, 25 bp, Homo sapien
tagcccatgtgatctgacaccctga

SEQ ID NO: 3057241 - DNA, 25 bp, Homo sapien
ttgcaaaatttagcccatgtgatct

SEQ ID NO: 3057242 - DNA, 25 bp, Homo sapien
cacttgatcccaggttccaattggg

SEQ ID NO: 3057243 - DNA, 25 bp, Homo sapien
tctgccagtgtagtcagctgctcga

SEQ ID NO: 3057244 - DNA, 25 bp, Homo sapien
gatgctcagtcctcgcttggtggtg

SEQ ID NO: 3057245 - DNA, 25 bp, Homo sapien
cagctcaggacctcggccacttgat

SEQ ID NO: 3057246 - DNA, 25 bp, Homo sapien
ggagatcaccacaactggcaaggag

SEQ ID NO: 3057247 - DNA, 25 bp, Homo sapien
tggacgcccaggcatttggcatctg

SEQ ID NO: 3057248 - DNA, 25 bp, Homo sapien
cttgggattgttggtcagcatgttg

SEQ ID NO: 3057249 - DNA, 25 bp, Homo sapien
gttgtaccacaggatggacgcccag

SEQ ID NO: 3057250 - DNA, 25 bp, Homo sapien
ttggaaatctcttcacccgcatctc

SEQ ID NO: 3057251 - DNA, 25 bp, Homo sapien
ctcacagccttggaaatctcttcac

SEQ ID NO: 3057252 - DNA, 25 bp, Homo sapien
gaggggctctcacagccttggaaat

SEQ ID NO: 3057253 - DNA, 25 bp, Homo sapien
ggctctcacagccttggaaatctct

SEQ ID NO: 3057254 - DNA, 25 bp, Homo sapien
tgaggccttggtgatacacctcggt

SEQ ID NO: 3057255 - DNA, 25 bp, Homo sapien
ctctaggtcaatcttgaggccttgg

SEQ ID NO: 3057256 - DNA, 25 bp, Homo sapien
taggtcaatcttgaggccttggtga

SEQ ID NO: 3057257 - DNA, 25 bp, Homo sapien
aggccttggtgatacacctcggtct

SEQ ID NO: 3057258 - DNA, 25 bp, Homo sapien
atcacaattggctcggcccccattc

SEQ ID NO: 3057259 - DNA, 25 bp, Homo sapien
tcacaattggctcggcccccattcc

SEQ ID NO: 3057260 - DNA, 25 bp, Homo sapien
caattggctcggcccccattcccac

SEQ ID NO: 3057261 - DNA, 25 bp, Homo sapien
acaattggctcggcccccattccca

SEQ ID NO: 3057262 - DNA, 25 bp, Homo sapien
tgtgaaggggagctcctcccacata

SEQ ID NO: 3057263 - DNA, 25 bp, Homo sapien
cagccagaggccctttgtgaagggg

SEQ ID NO: 3057264 - DNA, 25 bp, Homo sapien
ctttgtgaaggggagctcctcccac

SEQ ID NO: 3057265 - DNA, 25 bp, Homo sapien
aggccctttgtgaaggggagctcct

SEQ ID NO: 3057266 - DNA, 25 bp, Homo sapien
ccgttgttggattcttccatgttca

SEQ ID NO: 3057267 - DNA, 25 bp, Homo sapien
tgtgtttgtgcccagaatgttaaat

SEQ ID NO: 3057268 - DNA, 25 bp, Homo sapien
agagaggctgccgttgttggattct

SEQ ID NO: 3057269 - DNA, 25 bp, Homo sapien
tcacttttgtgtttgtgcccagaat

SEQ ID NO: 3057270 - DNA, 25 bp, Homo sapien
cctctgagagctgcaacgtccccag

SEQ ID NO: 3057271 - DNA, 25 bp, Homo sapien
tctgagagctgcaacgtccccagag

SEQ ID NO: 3057272 - DNA, 25 bp, Homo sapien
ctctgagagctgcaacgtccccaga

SEQ ID NO: 3057273 - DNA, 25 bp, Homo sapien
cacctcccaggttcatgccattctc

SEQ ID NO: 3057274 - DNA, 25 bp, Homo sapien
cgcgcccagccacattttctctttt

SEQ ID NO: 3057275 - DNA, 25 bp, Homo sapien
caccgcgcccagccacattttctct

SEQ ID NO: 3057276 - DNA, 25 bp, Homo sapien
acctcccaggttcatgccattctcc

SEQ ID NO: 3057277 - DNA, 25 bp, Homo sapien
attcaactcagggaatttgaccagc

SEQ ID NO: 3057278 - DNA, 25 bp, Homo sapien
gataattcaactcagggaatttgac

SEQ ID NO: 3057279 - DNA, 25 bp, Homo sapien
taattcaactcagggaatttgacca

SEQ ID NO: 3057280 - DNA, 25 bp, Homo sapien
caactcagggaatttgaccagcaac

SEQ ID NO: 3057281 - DNA, 25 bp, Homo sapien
tagtgaactggacgccggtcttgat

SEQ ID NO: 3057282 - DNA, 25 bp, Homo sapien
gccggtcaggatgcatgggcatgca

SEQ ID NO: 3057283 - DNA, 25 bp, Homo sapien
aactggacgccggtcttgatgacga

SEQ ID NO: 3057284 - DNA, 25 bp, Homo sapien
ctgactttagtagtgaactggacgc

SEQ ID NO: 3057285 - DNA, 25 bp, Homo sapien
ctctcactctaccacgtgagtcttt

SEQ ID NO: 3057286 - DNA, 25 bp, Homo sapien
gaaagggacaaggatgctaaattac

SEQ ID NO: 3057287 - DNA, 25 bp, Homo sapien
atgaccagaagtcagcccgcctctc

SEQ ID NO: 3057288 - DNA, 25 bp, Homo sapien
tctaccacgtgagtctttaggtatt

SEQ ID NO: 3057289 - DNA, 25 bp, Homo sapien
agcatcggccggtgctgtacaatgg

SEQ ID NO: 3057290 - DNA, 25 bp, Homo sapien
caactcctccagtttcttaatttgt

SEQ ID NO: 3057291 - DNA, 25 bp, Homo sapien
gacgggtctgaagttgagattctgc

SEQ ID NO: 3057292 - DNA, 25 bp, Homo sapien
taaacagctccacgattctctcctc

SEQ ID NO: 3057293 - DNA, 25 bp, Homo sapien
agatgttgggcgggcctccaatgca

SEQ ID NO: 3057294 - DNA, 25 bp, Homo sapien
gttttctagccgatctaggcagatg

SEQ ID NO: 3057295 - DNA, 25 bp, Homo sapien
cacgtactccatcgctgacaaaagc

SEQ ID NO: 3057296 - DNA, 25 bp, Homo sapien
agccagctcctcgtccgtgagagtt

SEQ ID NO: 3057297 - DNA, 25 bp, Homo sapien
tccagcgcagtgagcatctgttcca

SEQ ID NO: 3057298 - DNA, 25 bp, Homo sapien
tctggtccagcgcagtgagcatctg

SEQ ID NO: 3057299 - DNA, 25 bp, Homo sapien
tctccgcatctggtccagcgcagtg

SEQ ID NO: 3057300 - DNA, 25 bp, Homo sapien
ctggtcactgactggttgtttccat

SEQ ID NO: 3057301 - DNA, 25 bp, Homo sapien
ctgcgaaggaagaaaaaactccttg

SEQ ID NO: 3057302 - DNA, 25 bp, Homo sapien
tgcgaaggaagaaaaaactccttga

SEQ ID NO: 3057303 - DNA, 25 bp, Homo sapien
tggacctgagggaatactccttgac

SEQ ID NO: 3057304 - DNA, 25 bp, Homo sapien
ggaatactccttgacctgagggaat

SEQ ID NO: 3057305 - DNA, 25 bp, Homo sapien
tcctggacctgagggaatactcctg

SEQ ID NO: 3057306 - DNA, 25 bp, Homo sapien
tcctggacctgagggaatactcctt

SEQ ID NO: 3057307 - DNA, 25 bp, Homo sapien
cctgagggaatactcctgtccttaa

SEQ ID NO: 3057308 - DNA, 25 bp, Homo sapien
gagggaatactcctgtccttaatga

SEQ ID NO: 3057309 - DNA, 25 bp, Homo sapien
ggacctgagggaatactcctgtcct

SEQ ID NO: 3057310 - DNA, 25 bp, Homo sapien
gaatactcctgtccttaatgaccag

SEQ ID NO: 3057311 - DNA, 25 bp, Homo sapien
ccttgcgccccgcccgccttaagat

SEQ ID NO: 3057312 - DNA, 25 bp, Homo sapien
ttaagacaaatgagtctttcaactc

SEQ ID NO: 3057313 - DNA, 25 bp, Homo sapien
gttaagacaaatgagtctttcaact

SEQ ID NO: 3057314 - DNA, 25 bp, Homo sapien
aagtcatcctggagattctctacca

SEQ ID NO: 3057315 - DNA, 25 bp, Homo sapien
cctggagattctctaccactttcat

SEQ ID NO: 3057316 - DNA, 25 bp, Homo sapien
ggttttatagttgaaatcaaagtca

SEQ ID NO: 3057317 - DNA, 25 bp, Homo sapien
tcttgagggttttatagttgaaatc

SEQ ID NO: 3057318 - DNA, 25 bp, Homo sapien
tccccaagagaaggctccctgttgg

SEQ ID NO: 3057319 - DNA, 25 bp, Homo sapien
aaatataaagtttctgaggagaatt

SEQ ID NO: 3057320 - DNA, 25 bp, Homo sapien
aaaaagatacatgcaggacctgcag

SEQ ID NO: 3057321 - DNA, 25 bp, Homo sapien
aggacctgcaggcagtatccccaag

SEQ ID NO: 3057322 - DNA, 25 bp, Homo sapien
tgctgcttctccgtcaccacggctg

SEQ ID NO: 3057323 - DNA, 25 bp, Homo sapien
ctgcttctccgtcaccacggctgct

SEQ ID NO: 3057324 - DNA, 25 bp, Homo sapien
cttctccgtcaccacggctgctgtg

SEQ ID NO: 3057325 - DNA, 25 bp, Homo sapien
gcactctcttccggacatcctgaag

SEQ ID NO: 3057326 - DNA, 25 bp, Homo sapien
cctcccagaccagggatttgttttg

SEQ ID NO: 3057327 - DNA, 25 bp, Homo sapien
ttagtagatctaataatttatctca

SEQ ID NO: 3057328 - DNA, 25 bp, Homo sapien
ctcccagaccagggatttgttttgt

SEQ ID NO: 3057329 - DNA, 25 bp, Homo sapien
ccacaatccgggcaatctccattgg

SEQ ID NO: 3057330 - DNA, 25 bp, Homo sapien
tgtagaaggcgtgattcttcccaca

SEQ ID NO: 3057331 - DNA, 25 bp, Homo sapien
tccattggcttctcaagatacctgc

SEQ ID NO: 3057332 - DNA, 25 bp, Homo sapien
agtggctgcagtctgtagaaggcgt

SEQ ID NO: 3057333 - DNA, 25 bp, Homo sapien
gtctttacacagtatactatcctgg

SEQ ID NO: 3057334 - DNA, 25 bp, Homo sapien
gagagtcatcttcctatcagtggac

SEQ ID NO: 3057335 - DNA, 25 bp, Homo sapien
tggtcttgcagggaagctactgact

SEQ ID NO: 3057336 - DNA, 25 bp, Homo sapien
tactgacttagtcaagaagtatccc

SEQ ID NO: 3057337 - DNA, 25 bp, Homo sapien
tgaaaatacaagatagattctcgtt

SEQ ID NO: 3057338 - DNA, 25 bp, Homo sapien
taacacccgactctgcgggtcctgt

SEQ ID NO: 3057339 - DNA, 25 bp, Homo sapien
gattctcgttacttagccaaatgag

SEQ ID NO: 3057340 - DNA, 25 bp, Homo sapien
tccaggaaagaacactaacacccga

SEQ ID NO: 3057341 - DNA, 25 bp, Homo sapien
tctcccaggagattatgaaacacca

SEQ ID NO: 3057342 - DNA, 25 bp, Homo sapien
catgtgattctttgctggccgcata

SEQ ID NO: 3057343 - DNA, 25 bp, Homo sapien
caggaagcggctatactgctggtca

SEQ ID NO: 3057344 - DNA, 25 bp, Homo sapien
aacattcgactcttgcaggaagcgg

SEQ ID NO: 3057345 - DNA, 25 bp, Homo sapien
gctgctccaggtaccgtgtgtcaag

SEQ ID NO: 3057346 - DNA, 25 bp, Homo sapien
caatcttgactctcaatccaagggg

SEQ ID NO: 3057347 - DNA, 25 bp, Homo sapien
gggccagaaactgccgcagctccat

SEQ ID NO: 3057348 - DNA, 25 bp, Homo sapien
ccaggtaccgtgtgtcaagctgctg

SEQ ID NO: 3057349 - DNA, 25 bp, Homo sapien
ttttacactgggatgacaagtggct

SEQ ID NO: 3057350 - DNA, 25 bp, Homo sapien
cttttacactgggatgacaagtggc

SEQ ID NO: 3057351 - DNA, 25 bp, Homo sapien
aacacattcacaatccccaccttgg

SEQ ID NO: 3057352 - DNA, 25 bp, Homo sapien
tccccaccttgggataatcacagct

SEQ ID NO: 3057353 - DNA, 25 bp, Homo sapien
ggcacgaagaagcacctagttagca

SEQ ID NO: 3057354 - DNA, 25 bp, Homo sapien
tgaaggtatgtacagaccaaggtcc

SEQ ID NO: 3057355 - DNA, 25 bp, Homo sapien
ggtgcgatcgtggaacctctaactc

SEQ ID NO: 3057356 - DNA, 25 bp, Homo sapien
tgtaacggaatgaaaggtgcgatcg

SEQ ID NO: 3057357 - DNA, 25 bp, Homo sapien
gcagcacagctccaaggtattttcc

SEQ ID NO: 3057358 - DNA, 25 bp, Homo sapien
cctgtgtactttacatgtgcagcac

SEQ ID NO: 3057359 - DNA, 25 bp, Homo sapien
aattccactggtgaaaaagctcagt

SEQ ID NO: 3057360 - DNA, 25 bp, Homo sapien
tatttgccccaattaggccaatacg

SEQ ID NO: 3057361 - DNA, 25 bp, Homo sapien
tccatagtcttctccttacaggctg

SEQ ID NO: 3057362 - DNA, 25 bp, Homo sapien
atatttaattaacagcagtcacagg

SEQ ID NO: 3057363 - DNA, 25 bp, Homo sapien
caggagatgactagccaaagtgtct

SEQ ID NO: 3057364 - DNA, 25 bp, Homo sapien
tacaggctgcttagctacaaaccat

SEQ ID NO: 3057365 - DNA, 25 bp, Homo sapien
gtcatagcattaatacagctgcata

SEQ ID NO: 3057366 - DNA, 25 bp, Homo sapien
ttttttacattggagtcatagcatt

SEQ ID NO: 3057367 - DNA, 25 bp, Homo sapien
cagtacctggcctgaaaagagatgt

SEQ ID NO: 3057368 - DNA, 25 bp, Homo sapien
aaaattgacatgttgatgtaattcc

SEQ ID NO: 3057369 - DNA, 25 bp, Homo sapien
cagcctccaggtgactttcataagt

SEQ ID NO: 3057370 - DNA, 25 bp, Homo sapien
gctggcaaccacgtaccatcctgat

SEQ ID NO: 3057371 - DNA, 25 bp, Homo sapien
gaacttcccacaggctaacttaaga

SEQ ID NO: 3057372 - DNA, 25 bp, Homo sapien
gaatccccacggtacatatataagc

SEQ ID NO: 3057373 - DNA, 25 bp, Homo sapien
tgttccaaccaatagagcatgctga

SEQ ID NO: 3057374 - DNA, 25 bp, Homo sapien
ctatgaacttttgaggcagaacctc

SEQ ID NO: 3057375 - DNA, 25 bp, Homo sapien
cacttacatggaacaatatacctgg

SEQ ID NO: 3057376 - DNA, 25 bp, Homo sapien
tggtggttggataacatggccctaa

SEQ ID NO: 3057377 - DNA, 25 bp, Homo sapien
ctttcaaaacaacgtttatacactg

SEQ ID NO: 3057378 - DNA, 25 bp, Homo sapien
ttctaaattattcagccccactttc

SEQ ID NO: 3057379 - DNA, 25 bp, Homo sapien
tctatgcactcctttctaaattatt

SEQ ID NO: 3057380 - DNA, 25 bp, Homo sapien
caaaacaacgtttatacactgacaa

SEQ ID NO: 3057381 - DNA, 25 bp, Homo sapien
gccggatatagtggcgcaagcctgt

SEQ ID NO: 3057382 - DNA, 25 bp, Homo sapien
aaaggaaggtgagcctttctcacaa

SEQ ID NO: 3057383 - DNA, 25 bp, Homo sapien
ttctcacaacctcccactgacgcag

SEQ ID NO: 3057384 - DNA, 25 bp, Homo sapien
tagccggatatagtggcgcaagcct

SEQ ID NO: 3057385 - DNA, 25 bp, Homo sapien
aacatgatctcagccgagcacggtg

SEQ ID NO: 3057386 - DNA, 25 bp, Homo sapien
tgagctgaaatcgtgccacctgcat

SEQ ID NO: 3057387 - DNA, 25 bp, Homo sapien
gtgagctgaaatcgtgccacctgca

SEQ ID NO: 3057388 - DNA, 25 bp, Homo sapien
gagctgaaatcgtgccacctgcatt

SEQ ID NO: 3057389 - DNA, 25 bp, Homo sapien
agtgagctgaaatcgtgccacctgc

SEQ ID NO: 3057390 - DNA, 25 bp, Homo sapien
aaacattgggattatacagatgtaa

SEQ ID NO: 3057391 - DNA, 25 bp, Homo sapien
actgcactttggccatgtgttggtt

SEQ ID NO: 3057392 - DNA, 25 bp, Homo sapien
ctataacctcgaactatcaaactcc

SEQ ID NO: 3057393 - DNA, 25 bp, Homo sapien
gcactttggccatgtgttggttttt

SEQ ID NO: 3057394 - DNA, 25 bp, Homo sapien
ggttcttaactgcaacactgttctg

SEQ ID NO: 3057395 - DNA, 25 bp, Homo sapien
cactttctgggtcgggagcaattcc

SEQ ID NO: 3057396 - DNA, 25 bp, Homo sapien
gaacctgtttcatggacaagctggg

SEQ ID NO: 3057397 - DNA, 25 bp, Homo sapien
gagtaatgtgcagcaatcagctccc

SEQ ID NO: 3057398 - DNA, 25 bp, Homo sapien
tacaccataatcaataagggctggg

SEQ ID NO: 3057399 - DNA, 25 bp, Homo sapien
tggccatactgactaaagcgcacta

SEQ ID NO: 3057400 - DNA, 25 bp, Homo sapien
taaacatcagtgcttcggctccaaa

SEQ ID NO: 3057401 - DNA, 25 bp, Homo sapien
ttaaccagcatcaggcaatcaggcc

SEQ ID NO: 3057402 - DNA, 25 bp, Homo sapien
ggcctcgtgatccgcgcgtctgggc

SEQ ID NO: 3057403 - DNA, 25 bp, Homo sapien
tggcctcgtgatccgcgcgtctggg

SEQ ID NO: 3057404 - DNA, 25 bp, Homo sapien
gcctcgtgatccgcgcgtctgggcc

SEQ ID NO: 3057405 - DNA, 25 bp, Homo sapien
ctggcctcgtgatccgcgcgtctgg

SEQ ID NO: 3057406 - DNA, 25 bp, Homo sapien
gtctggaacatgtaataaggaaata

SEQ ID NO: 3057407 - DNA, 25 bp, Homo sapien
tgggctagcactcctgtctggaaca

SEQ ID NO: 3057408 - DNA, 25 bp, Homo sapien
cactcctgtctggaacatgtaataa

SEQ ID NO: 3057409 - DNA, 25 bp, Homo sapien
tagcactcctgtctggaacatgtaa

SEQ ID NO: 3057410 - DNA, 25 bp, Homo sapien
tagttgcacatacagtaagaccagc

SEQ ID NO: 3057411 - DNA, 25 bp, Homo sapien
catggaaataccaacttgggcgacg

SEQ ID NO: 3057412 - DNA, 25 bp, Homo sapien
cacttaacaacgacctgatatggca

SEQ ID NO: 3057413 - DNA, 25 bp, Homo sapien
gaatcttgttaacttcagtgcaacc

SEQ ID NO: 3057414 - DNA, 25 bp, Homo sapien
accagccagcccgtaaggctgcagg

SEQ ID NO: 3057415 - DNA, 25 bp, Homo sapien
agcccgtaaggctgcaggcgacaga

SEQ ID NO: 3057416 - DNA, 25 bp, Homo sapien
aggcgacagacacacctattcctgc

SEQ ID NO: 3057417 - DNA, 25 bp, Homo sapien
ggctgcaggcgacagacacacctat

SEQ ID NO: 3057418 - DNA, 25 bp, Homo sapien
acagggcaagcggaggaagtggctc

SEQ ID NO: 3057419 - DNA, 25 bp, Homo sapien
gcgttctgtttctccgaagaacgaa

SEQ ID NO: 3057420 - DNA, 25 bp, Homo sapien
cggtgatccccgtcggcgtgacagt

SEQ ID NO: 3057421 - DNA, 25 bp, Homo sapien
cagtcgctccggtggccggaacgtc

SEQ ID NO: 3057422 - DNA, 25 bp, Homo sapien
aggccgaagggcctctccgagccga

SEQ ID NO: 3057423 - DNA, 25 bp, Homo sapien
tgttccctcggctgcgacgtcggaa

SEQ ID NO: 3057424 - DNA, 25 bp, Homo sapien
cgcagctccggaaaccgctgaatta

SEQ ID NO: 3057425 - DNA, 25 bp, Homo sapien
tttctccggcagaggccgagaggcc

SEQ ID NO: 3057426 - DNA, 25 bp, Homo sapien
gtgtgcggtacagccgaagccccgc

SEQ ID NO: 3057427 - DNA, 25 bp, Homo sapien
gcataattcatgaaaggccagctcg

SEQ ID NO: 3057428 - DNA, 25 bp, Homo sapien
agtgcgtgtgcggtacagccgaagc

SEQ ID NO: 3057429 - DNA, 25 bp, Homo sapien
agctcgttcggccacccagaggtcc

SEQ ID NO: 3057430 - DNA, 25 bp, Homo sapien
gaagcctgtctaagtctacagattc

SEQ ID NO: 3057431 - DNA, 25 bp, Homo sapien
tacctgaagcctgtctaagtctaca

SEQ ID NO: 3057432 - DNA, 25 bp, Homo sapien
atggttccccagatacctgaagcct

SEQ ID NO: 3057433 - DNA, 25 bp, Homo sapien
tacagattcagaccgctcgtaccac

SEQ ID NO: 3057434 - DNA, 25 bp, Homo sapien
gcgcctggcccccagctcaatattt

SEQ ID NO: 3057435 - DNA, 25 bp, Homo sapien
ctccgcctcctgcaaactcctgacc

SEQ ID NO: 3057436 - DNA, 25 bp, Homo sapien
ttttgaaaccaagtgtcgccctgtc

SEQ ID NO: 3057437 - DNA, 25 bp, Homo sapien
tgaaaccaagtgtcgccctgtcgcc

SEQ ID NO: 3057438 - DNA, 25 bp, Homo sapien
gagaacccagtccaaacagaatcag

SEQ ID NO: 3057439 - DNA, 25 bp, Homo sapien
gacacagcaacgtgagaggttcccc

SEQ ID NO: 3057440 - DNA, 25 bp, Homo sapien
caagagcccatttgagggatcgggt

SEQ ID NO: 3057441 - DNA, 25 bp, Homo sapien
gaacctggtcgtgtcttgagaaccc

SEQ ID NO: 3057442 - DNA, 25 bp, Homo sapien
gacaaccaggacagggattgaccat

SEQ ID NO: 3057443 - DNA, 25 bp, Homo sapien
aatttcctctgagatcccgacttgg

SEQ ID NO: 3057444 - DNA, 25 bp, Homo sapien
tccactcggactgtgtccaagcggg

SEQ ID NO: 3057445 - DNA, 25 bp, Homo sapien
gggcctaaccgtggaatcactgcaa

SEQ ID NO: 3057446 - DNA, 25 bp, Homo sapien
atctcagccagctcgagccgagaga

SEQ ID NO: 3057447 - DNA, 25 bp, Homo sapien
gctcgagccgagagagaatgcgaaa

SEQ ID NO: 3057448 - DNA, 25 bp, Homo sapien
gaagttcggaaggagcgaggaatgg

SEQ ID NO: 3057449 - DNA, 25 bp, Homo sapien
agaatgcgaaagaggaagttcggaa

SEQ ID NO: 3057450 - DNA, 25 bp, Homo sapien
acggcgtccgactcctcggtgatct

SEQ ID NO: 3057451 - DNA, 25 bp, Homo sapien
tcgctgtcgctcttgtccaccagca

SEQ ID NO: 3057452 - DNA, 25 bp, Homo sapien
agcacggcgtccgactcctcggtga

SEQ ID NO: 3057453 - DNA, 25 bp, Homo sapien
cgctgtcgctcttgtccaccagcac

SEQ ID NO: 3057454 - DNA, 25 bp, Homo sapien
cgtacaccacgtggtcgggcgtgaa

SEQ ID NO: 3057455 - DNA, 25 bp, Homo sapien
ggtggcaccttgtagaccgcggtct

SEQ ID NO: 3057456 - DNA, 25 bp, Homo sapien
cgcttgatacgctctgcgcgggact

SEQ ID NO: 3057457 - DNA, 25 bp, Homo sapien
gaaggatttgcgcaacttgtcccgc

SEQ ID NO: 3057458 - DNA, 25 bp, Homo sapien
gcgatttgctgatgctcagtttggc

SEQ ID NO: 3057459 - DNA, 25 bp, Homo sapien
gatgctcagtttggccggcagcttc

SEQ ID NO: 3057460 - DNA, 25 bp, Homo sapien
agcgcctccgactctttcagcgatt

SEQ ID NO: 3057461 - DNA, 25 bp, Homo sapien
ctttcagcgatttgctgatgctcag

SEQ ID NO: 3057462 - DNA, 25 bp, Homo sapien
ctcccagcaggcaaggtgacctggg

SEQ ID NO: 3057463 - DNA, 25 bp, Homo sapien
caggcaaggtgacctgggcacaggg

SEQ ID NO: 3057464 - DNA, 25 bp, Homo sapien
cccagcaggcaaggtgacctgggca

SEQ ID NO: 3057465 - DNA, 25 bp, Homo sapien
cagcaggcaaggtgacctgggcaca

SEQ ID NO: 3057466 - DNA, 25 bp, Homo sapien
aaaaaaattcagctctgatctttcc

SEQ ID NO: 3057467 - DNA, 25 bp, Homo sapien
aaaaaaaattcagctctgatctttc

SEQ ID NO: 3057468 - DNA, 25 bp, Homo sapien
aaaaaattcagctctgatctttcct

SEQ ID NO: 3057469 - DNA, 25 bp, Homo sapien
taaactcgagatctggcttaggaag

SEQ ID NO: 3057470 - DNA, 25 bp, Homo sapien
gctctcttgacttaaggctgaccag

SEQ ID NO: 3057471 - DNA, 25 bp, Homo sapien
tgagcacctattacacatctggccc

SEQ ID NO: 3057472 - DNA, 25 bp, Homo sapien
cctcgatggatgcagaggagccaca

SEQ ID NO: 3057473 - DNA, 25 bp, Homo sapien
aaactggagaaaatacgtgtaaatg

SEQ ID NO: 3057474 - DNA, 25 bp, Homo sapien
gatctggcaaacataagcgatctct

SEQ ID NO: 3057475 - DNA, 25 bp, Homo sapien
ccacccaaggcaggatctggcaaac

SEQ ID NO: 3057476 - DNA, 25 bp, Homo sapien
cataagcgatctctttgcaaagcat

SEQ ID NO: 3057477 - DNA, 25 bp, Homo sapien
cagagggtgcattcggcttcttctt

SEQ ID NO: 3057478 - DNA, 25 bp, Homo sapien
ccaggctctgggtaatatggcagtg

SEQ ID NO: 3057479 - DNA, 25 bp, Homo sapien
ccctaggcgtctggtcaaaaggtgg

SEQ ID NO: 3057480 - DNA, 25 bp, Homo sapien
ccaggtcagagggtgcattcggctt

SEQ ID NO: 3057481 - DNA, 25 bp, Homo sapien
ggcgtgatctctgatcttggttcac

SEQ ID NO: 3057482 - DNA, 25 bp, Homo sapien
gtggcgtgatctctgatcttggttc

SEQ ID NO: 3057483 - DNA, 25 bp, Homo sapien
gcgtgatctctgatcttggttcacc

SEQ ID NO: 3057484 - DNA, 25 bp, Homo sapien
tggcgtgatctctgatcttggttca

SEQ ID NO: 3057485 - DNA, 25 bp, Homo sapien
catggaagagggacatcctggcaat

SEQ ID NO: 3057486 - DNA, 25 bp, Homo sapien
gacacaggatgctaccccaaatgag

SEQ ID NO: 3057487 - DNA, 25 bp, Homo sapien
tgagcaatcagatgccaggcgagag

SEQ ID NO: 3057488 - DNA, 25 bp, Homo sapien
cacttggcggcactattggactcag

SEQ ID NO: 3057489 - DNA, 25 bp, Homo sapien
tctttggcatagggaagtttacctc

SEQ ID NO: 3057490 - DNA, 25 bp, Homo sapien
catagggaagtttacctccaggcca

SEQ ID NO: 3057491 - DNA, 25 bp, Homo sapien
tttggcatagggaagtttacctcca

SEQ ID NO: 3057492 - DNA, 25 bp, Homo sapien
tggcatagggaagtttacctccagg

SEQ ID NO: 3057493 - DNA, 25 bp, Homo sapien
ttcacgttgacgctgaccttgcgca

SEQ ID NO: 3057494 - DNA, 25 bp, Homo sapien
tgactttaaagttgcggcgccgcag

SEQ ID NO: 3057495 - DNA, 25 bp, Homo sapien
tgccgcgcacggtcttcacgttgac

SEQ ID NO: 3057496 - DNA, 25 bp, Homo sapien
gcttgctcaccgtattgctcgtggt

SEQ ID NO: 3057497 - DNA, 25 bp, Homo sapien
cctgagccccagcggaggaaggctc

SEQ ID NO: 3057498 - DNA, 25 bp, Homo sapien
tcagcaccagcacgccgttcacctg

SEQ ID NO: 3057499 - DNA, 25 bp, Homo sapien
cgttcacctggtccgacttgatcag

SEQ ID NO: 3057500 - DNA, 25 bp, Homo sapien
ttgatcagctcttctgagccggccc

SEQ ID NO: 3057501 - DNA, 25 bp, Homo sapien
gaagcggccgctcgacaatatagag

SEQ ID NO: 3057502 - DNA, 25 bp, Homo sapien
gccgctcgacaatatagagcgtggg

SEQ ID NO: 3057503 - DNA, 25 bp, Homo sapien
gggaagcggccgctcgacaatatag

SEQ ID NO: 3057504 - DNA, 25 bp, Homo sapien
gcggccgctcgacaatatagagcgt

SEQ ID NO: 3057505 - DNA, 25 bp, Homo sapien
cttcccgggatggttggaatagttg

SEQ ID NO: 3057506 - DNA, 25 bp, Homo sapien
gaatgcgagctgaggaacggaatca

SEQ ID NO: 3057507 - DNA, 25 bp, Homo sapien
tagttggagcgggagactagggcct

SEQ ID NO: 3057508 - DNA, 25 bp, Homo sapien
cggagagcagaggaaactcgagcca

SEQ ID NO: 3057509 - DNA, 25 bp, Homo sapien
tccccaagattggaggagaccctaa

SEQ ID NO: 3057510 - DNA, 25 bp, Homo sapien
ccttagatgggtggaactggtgtta

SEQ ID NO: 3057511 - DNA, 25 bp, Homo sapien
tgttagaggcatcagtataaaccca

SEQ ID NO: 3057512 - DNA, 25 bp, Homo sapien
gaatgtggaagctagagttctcact

SEQ ID NO: 3057513 - DNA, 25 bp, Homo sapien
gaacttaccgagagataaatccagg

SEQ ID NO: 3057514 - DNA, 25 bp, Homo sapien
gcagcacgactgtagttcactgcag

SEQ ID NO: 3057515 - DNA, 25 bp, Homo sapien
ggaattggaacttaccgagagataa

SEQ ID NO: 3057516 - DNA, 25 bp, Homo sapien
catagtagatgcttatggaattgga

SEQ ID NO: 3057517 - DNA, 25 bp, Homo sapien
tcctggtggtgagccagtctgcatt

SEQ ID NO: 3057518 - DNA, 25 bp, Homo sapien
tccccgtgcattgtagatggaagga

SEQ ID NO: 3057519 - DNA, 25 bp, Homo sapien
gtcactcatactcactgggcaccag

SEQ ID NO: 3057520 - DNA, 25 bp, Homo sapien
gccaccgtagtttctagcaggagta

SEQ ID NO: 3057521 - DNA, 25 bp, Homo sapien
gcagccctggctaagttaatcccca

SEQ ID NO: 3057522 - DNA, 25 bp, Homo sapien
taatcgtgtgctggcgtggcagccc

SEQ ID NO: 3057523 - DNA, 25 bp, Homo sapien
taatccccaccgctttcagtggtag

SEQ ID NO: 3057524 - DNA, 25 bp, Homo sapien
cctgggttttcgtgatgatctttgc

SEQ ID NO: 3057525 - DNA, 25 bp, Homo sapien
gataaagctccagttgaaaaagaag

SEQ ID NO: 3057526 - DNA, 25 bp, Homo sapien
tgagtttgtgatgctacatatgata

SEQ ID NO: 3057527 - DNA, 25 bp, Homo sapien
gaaggaatccacgttctagattggc

SEQ ID NO: 3057528 - DNA, 25 bp, Homo sapien
tggagtgacgacttcggtttgagtt

SEQ ID NO: 3057529 - DNA, 25 bp, Homo sapien
acgtggcctggtccggctctcagct

SEQ ID NO: 3057530 - DNA, 25 bp, Homo sapien
gaggccacgcccaacaggtaccgcc

SEQ ID NO: 3057531 - DNA, 25 bp, Homo sapien
gagccgctgccacccaaatcgggag

SEQ ID NO: 3057532 - DNA, 25 bp, Homo sapien
gagcgctggccggaaggcccagctg

SEQ ID NO: 3057533 - DNA, 25 bp, Homo sapien
tgctacaaaactgtgaagccagggc

SEQ ID NO: 3057534 - DNA, 25 bp, Homo sapien
tgtaaactgggactacctcataggt

SEQ ID NO: 3057535 - DNA, 25 bp, Homo sapien
taggtagaataacgcctggcccaga

SEQ ID NO: 3057536 - DNA, 25 bp, Homo sapien
tttaccaagcacgtgtacacatgcg

SEQ ID NO: 3057537 - DNA, 25 bp, Homo sapien
tactgctccggagtgtgtacaactg

SEQ ID NO: 3057538 - DNA, 25 bp, Homo sapien
ggcggccgtccctacagatgaatac

SEQ ID NO: 3057539 - DNA, 25 bp, Homo sapien
gttttcagagggacgcgtatgtgcc

SEQ ID NO: 3057540 - DNA, 25 bp, Homo sapien
catggtctttttggagccctagagg

SEQ ID NO: 3057541 - DNA, 25 bp, Homo sapien
tccaactggagcaggccttcgttct

SEQ ID NO: 3057542 - DNA, 25 bp, Homo sapien
cagagctggacagacatcacaggat

SEQ ID NO: 3057543 - DNA, 25 bp, Homo sapien
tgttttccgctaattccagggcaga

SEQ ID NO: 3057544 - DNA, 25 bp, Homo sapien
tggtgatagattcgccaccactggg

SEQ ID NO: 3057545 - DNA, 25 bp, Homo sapien
ccgtgcccaacctcaaaggatattt

SEQ ID NO: 3057546 - DNA, 25 bp, Homo sapien
cagccatatgaagagatacagacag

SEQ ID NO: 3057547 - DNA, 25 bp, Homo sapien
gagcaggagcttctatctccataga

SEQ ID NO: 3057548 - DNA, 25 bp, Homo sapien
aagtggctgggactctaagcataca

SEQ ID NO: 3057549 - DNA, 25 bp, Homo sapien
tatggagaactccattggctgtcca

SEQ ID NO: 3057550 - DNA, 25 bp, Homo sapien
gacaactgtgataatgtgattgggc

SEQ ID NO: 3057551 - DNA, 25 bp, Homo sapien
aggatcctacaacccacaatcagat

SEQ ID NO: 3057552 - DNA, 25 bp, Homo sapien
aggccagtccagattctttgggcct

SEQ ID NO: 3057553 - DNA, 25 bp, Homo sapien
tgaacttctgtggaggtctggtgca

SEQ ID NO: 3057554 - DNA, 25 bp, Homo sapien
tacaggactggctactttgctacaa

SEQ ID NO: 3057555 - DNA, 25 bp, Homo sapien
taagtgaatcaaagggagacagccc

SEQ ID NO: 3057556 - DNA, 25 bp, Homo sapien
aggactgagcgatccccaccatctg

SEQ ID NO: 3057557 - DNA, 25 bp, Homo sapien
aaatcaccctattccagactgcaca

SEQ ID NO: 3057558 - DNA, 25 bp, Homo sapien
gcaaatactgacagctctacctttg

SEQ ID NO: 3057559 - DNA, 25 bp, Homo sapien
gctcatcaaagcatatccccaaatc

SEQ ID NO: 3057560 - DNA, 25 bp, Homo sapien
gcccatcagcagtgaaattacccca

SEQ ID NO: 3057561 - DNA, 25 bp, Homo sapien
tctccgcagtgtgtaacgcaggcct

SEQ ID NO: 3057562 - DNA, 25 bp, Homo sapien
gattctttgtgtgcggagctgagcc

SEQ ID NO: 3057563 - DNA, 25 bp, Homo sapien
tgcagctggacgtaagggactcaaa

SEQ ID NO: 3057564 - DNA, 25 bp, Homo sapien
gcaagcaagtctttcgcgaggcggc

SEQ ID NO: 3057565 - DNA, 25 bp, Homo sapien
tgaacttctgtggaggtctggtgca

SEQ ID NO: 3057566 - DNA, 25 bp, Homo sapien
aggactgagcgatccccaccatctg

SEQ ID NO: 3057567 - DNA, 25 bp, Homo sapien
tacaggactggctactttgctacaa

SEQ ID NO: 3057568 - DNA, 25 bp, Homo sapien
taagtgaatcaaagggagacagccc

SEQ ID NO: 3057569 - DNA, 25 bp, Homo sapien
gggtggcctggctgaaactaatctc

SEQ ID NO: 3057570 - DNA, 25 bp, Homo sapien
tactaggagggctaatacagcgcag

SEQ ID NO: 3057571 - DNA, 25 bp, Homo sapien
tagcctcccatgtgagaatcctcgg

SEQ ID NO: 3057572 - DNA, 25 bp, Homo sapien
tgtgaaatgggtacgtggacagacc

SEQ ID NO: 3057573 - DNA, 25 bp, Homo sapien
tggactagggtggaggatccccaaa

SEQ ID NO: 3057574 - DNA, 25 bp, Homo sapien
tgcgttacgccaccagctgttacag

SEQ ID NO: 3057575 - DNA, 25 bp, Homo sapien
caaggtgttgctcagtgtcgcgtgc

SEQ ID NO: 3057576 - DNA, 25 bp, Homo sapien
ttacagctgttgtccgcgactggcc

SEQ ID NO: 3057577 - DNA, 25 bp, Homo sapien
gggactccatcttacaaaacgcgct

SEQ ID NO: 3057578 - DNA, 25 bp, Homo sapien
cgtgcacacactatctgcggcggtg

SEQ ID NO: 3057579 - DNA, 25 bp, Homo sapien
tgagaggccgcataacctagctagc

SEQ ID NO: 3057580 - DNA, 25 bp, Homo sapien
ggttctttgcaagggttcattccac

SEQ ID NO: 3057581 - DNA, 25 bp, Homo sapien
tattcccacagccatgaagggtgaa

SEQ ID NO: 3057582 - DNA, 25 bp, Homo sapien
aagtccttgggatgggcgtctgctc

SEQ ID NO: 3057583 - DNA, 25 bp, Homo sapien
ggttcccacaggctatgatgctgca

SEQ ID NO: 3057584 - DNA, 25 bp, Homo sapien
gaaagggcaccttgtgcctagacta

SEQ ID NO: 3057585 - DNA, 25 bp, Homo sapien
caaggtagccagtgcaagacatctc

SEQ ID NO: 3057586 - DNA, 25 bp, Homo sapien
taaatgttaacctcaagctactgca

SEQ ID NO: 3057587 - DNA, 25 bp, Homo sapien
cctgactgctctgcttaaaggtgaa

SEQ ID NO: 3057588 - DNA, 25 bp, Homo sapien
gtgggccctccaaatgctcgtttta

SEQ ID NO: 3057589 - DNA, 25 bp, Homo sapien
tcatccgtctctatcccaacttcct

SEQ ID NO: 3057590 - DNA, 25 bp, Homo sapien
ctgggagtgtgacgttgtaatcttc

SEQ ID NO: 3057591 - DNA, 25 bp, Homo sapien
ggagtgtgacgttgtaatcttcatc

SEQ ID NO: 3057592 - DNA, 25 bp, Homo sapien
gtctgggagtgtgacgttgtaatct

SEQ ID NO: 3057593 - DNA, 25 bp, Homo sapien
gtattgcatcagacagctctgtagc

SEQ ID NO: 3057594 - DNA, 25 bp, Homo sapien
cttcaagtattgcatcagacagctc

SEQ ID NO: 3057595 - DNA, 25 bp, Homo sapien
tcttggggtatccttcaagtattgc

SEQ ID NO: 3057596 - DNA, 25 bp, Homo sapien
caagtattgcatcagacagctctgt

SEQ ID NO: 3057597 - DNA, 25 bp, Homo sapien
cttcctccactccttacagtacttc

SEQ ID NO: 3057598 - DNA, 25 bp, Homo sapien
gtagccagcgcattccttctttaac

SEQ ID NO: 3057599 - DNA, 25 bp, Homo sapien
cacatgattggtagctgctttaatg

SEQ ID NO: 3057600 - DNA, 25 bp, Homo sapien
tctctgtagccagcgcattccttct

SEQ ID NO: 3057601 - DNA, 25 bp, Homo sapien
tctggagtcacatgattggtagctg

SEQ ID NO: 3057602 - DNA, 25 bp, Homo sapien
tcagggcactagataattccttgag

SEQ ID NO: 3057603 - DNA, 25 bp, Homo sapien
tggtcagggcactagataattcctt

SEQ ID NO: 3057604 - DNA, 25 bp, Homo sapien
cagggcactagataattccttgagc

SEQ ID NO: 3057605 - DNA, 25 bp, Homo sapien
gtgtggtcagggcactagataattc

SEQ ID NO: 3057606 - DNA, 25 bp, Homo sapien
tactgataatcgtggcagggagaac

SEQ ID NO: 3057607 - DNA, 25 bp, Homo sapien
tgaacacttacttaggcgtagccag

SEQ ID NO: 3057608 - DNA, 25 bp, Homo sapien
tagaatgaacctaagcctatgggca

SEQ ID NO: 3057609 - DNA, 25 bp, Homo sapien
ggtcacttgctacccctgaggaagg

SEQ ID NO: 3057610 - DNA, 25 bp, Homo sapien
gcagtgagggccacgattttgccat

SEQ ID NO: 3057611 - DNA, 25 bp, Homo sapien
ggacttgaaggtcagcatcactcac

SEQ ID NO: 3057612 - DNA, 25 bp, Homo sapien
gattttgccatctaggacttgaagg

SEQ ID NO: 3057613 - DNA, 25 bp, Homo sapien
tgctgcaagctctgcaccttagcag

SEQ ID NO: 3057614 - DNA, 25 bp, Homo sapien
atacaagtgaactgttgtgaggcac

SEQ ID NO: 3057615 - DNA, 25 bp, Homo sapien
aggaaccagccacaccccaaagtct

SEQ ID NO: 3057616 - DNA, 25 bp, Homo sapien
atagtgggagagtacttttgagaaa

SEQ ID NO: 3057617 - DNA, 25 bp, Homo sapien
ctgcagaaatagtgggagagtactt

SEQ ID NO: 3057618 - DNA, 25 bp, Homo sapien
ggatatgctcaggaaccagccacac

SEQ ID NO: 3057619 - DNA, 25 bp, Homo sapien
agtgataaaaccactacctgggctg

SEQ ID NO: 3057620 - DNA, 25 bp, Homo sapien
cataatagatagaaactggacaggt

SEQ ID NO: 3057621 - DNA, 25 bp, Homo sapien
cagttaagtaacattgttcccacgg

SEQ ID NO: 3057622 - DNA, 25 bp, Homo sapien
tactgattaggacagaaatcttccc

SEQ ID NO: 3057623 - DNA, 25 bp, Homo sapien
ggacagagcagtaaaacacaccaga

SEQ ID NO: 3057624 - DNA, 25 bp, Homo sapien
gaagacaacatgcaaaggacagagc

SEQ ID NO: 3057625 - DNA, 25 bp, Homo sapien
tttttgcagcactagagagccattg

SEQ ID NO: 3057626 - DNA, 25 bp, Homo sapien
ttttaaatagggaaggtgcatgacc

SEQ ID NO: 3057627 - DNA, 25 bp, Homo sapien
catgggtgacaatcggcgcaagttc

SEQ ID NO: 3057628 - DNA, 25 bp, Homo sapien
acctcgtgaagttgggatcctaaca

SEQ ID NO: 3057629 - DNA, 25 bp, Homo sapien
caggagtagattcacccgttgtcgg

SEQ ID NO: 3057630 - DNA, 25 bp, Homo sapien
tattgtaaatctggaaacctcgtga

SEQ ID NO: 3057631 - DNA, 25 bp, Homo sapien
atccgcaaaatagatcttctgcttg

SEQ ID NO: 3057632 - DNA, 25 bp, Homo sapien
tgatcttgccttgttgcgccagctg

SEQ ID NO: 3057633 - DNA, 25 bp, Homo sapien
tagatcttctgcttgccgtacatct

SEQ ID NO: 3057634 - DNA, 25 bp, Homo sapien
tcttgccttgttgcgccagctgctc

SEQ ID NO: 3057635 - DNA, 25 bp, Homo sapien
taggttcccgaacacatcctgggag

SEQ ID NO: 3057636 - DNA, 25 bp, Homo sapien
cctgcaggtacctcaggaggatccc

SEQ ID NO: 3057637 - DNA, 25 bp, Homo sapien
ttgcccagtccgtgttcccgctgta

SEQ ID NO: 3057638 - DNA, 25 bp, Homo sapien
ctgtagggccggttctgctcctgca

SEQ ID NO: 3057639 - DNA, 25 bp, Homo sapien
cactcaaccgacctcctcacccact

SEQ ID NO: 3057640 - DNA, 25 bp, Homo sapien
gccactcaaccgacctcctcaccca

SEQ ID NO: 3057641 - DNA, 25 bp, Homo sapien
actcaaccgacctcctcacccactg

SEQ ID NO: 3057642 - DNA, 25 bp, Homo sapien
ccactcaaccgacctcctcacccac

SEQ ID NO: 3057643 - DNA, 25 bp, Homo sapien
cgccgcagcttctgcccggccttta

SEQ ID NO: 3057644 - DNA, 25 bp, Homo sapien
cagcttctgcccggcctttactcat

SEQ ID NO: 3057645 - DNA, 25 bp, Homo sapien
cgcagcttctgcccggcctttactc

SEQ ID NO: 3057646 - DNA, 25 bp, Homo sapien
gccgcagcttctgcccggcctttac

SEQ ID NO: 3057647 - DNA, 25 bp, Homo sapien
gaggagcaaagcgacccctcccgga

SEQ ID NO: 3057648 - DNA, 25 bp, Homo sapien
aaagccggacgttgtagttgctcgg

SEQ ID NO: 3057649 - DNA, 25 bp, Homo sapien
gggcctcgaacggtgattggctgaa

SEQ ID NO: 3057650 - DNA, 25 bp, Homo sapien
aagccttccggaggagcaaagcgac

SEQ ID NO: 3057651 - DNA, 25 bp, Homo sapien
tggtggggctctcacaagaaggaaa

SEQ ID NO: 3057652 - DNA, 25 bp, Homo sapien
cagttatactgatggtggggctctc

SEQ ID NO: 3057653 - DNA, 25 bp, Homo sapien
tctcacaagaaggaaagtagcctca

SEQ ID NO: 3057654 - DNA, 25 bp, Homo sapien
gggctctcacaagaaggaaagtagc

SEQ ID NO: 3057655 - DNA, 25 bp, Homo sapien
tttacaagagaagacctatcaaggg

SEQ ID NO: 3057656 - DNA, 25 bp, Homo sapien
taatcagaactcagatttacaagag

SEQ ID NO: 3057657 - DNA, 25 bp, Homo sapien
tggtgggtccctcatacctgggctt

SEQ ID NO: 3057658 - DNA, 25 bp, Homo sapien
ttcctcttttaaggctatcacttca

SEQ ID NO: 3057659 - DNA, 25 bp, Homo sapien
taccatcctgatggagagaagcctc

SEQ ID NO: 3057660 - DNA, 25 bp, Homo sapien
gattcagggcaggatccctcaggta

SEQ ID NO: 3057661 - DNA, 25 bp, Homo sapien
taggtggtgcaagagattatggccc

SEQ ID NO: 3057662 - DNA, 25 bp, Homo sapien
gactgagctcagaaatgggcatcca

SEQ ID NO: 3057663 - DNA, 25 bp, Homo sapien
gctcctagaactggcagggtccagc

SEQ ID NO: 3057664 - DNA, 25 bp, Homo sapien
tggctcctagaactggcagggtcca

SEQ ID NO: 3057665 - DNA, 25 bp, Homo sapien
tcagtggctcctagaactggcaggg

SEQ ID NO: 3057666 - DNA, 25 bp, Homo sapien
agtggctcctagaactggcagggtc

SEQ ID NO: 3057667 - DNA, 25 bp, Homo sapien
ggagaacggtacatcaagctgggca

SEQ ID NO: 3057668 - DNA, 25 bp, Homo sapien
ggttggatcctacaggaagagcacc

SEQ ID NO: 3057669 - DNA, 25 bp, Homo sapien
aagcctctcgttgctctctgggcag

SEQ ID NO: 3057670 - DNA, 25 bp, Homo sapien
catgccaatgctagtgtcgtcctca

SEQ ID NO: 3057671 - DNA, 25 bp, Homo sapien
tgaatgtgccattgtctgtacagga

SEQ ID NO: 3057672 - DNA, 25 bp, Homo sapien
ggtgtttggccccttgaaagattga

SEQ ID NO: 3057673 - DNA, 25 bp, Homo sapien
tgtacaggagacttcagcgtctgag

SEQ ID NO: 3057674 - DNA, 25 bp, Homo sapien
cttcagagccttccgttagaggtgt

SEQ ID NO: 3057675 - DNA, 25 bp, Homo sapien
taggaggatacacatactgcacaga

SEQ ID NO: 3057676 - DNA, 25 bp, Homo sapien
cagacccaagggtgaactgggctgt

SEQ ID NO: 3057677 - DNA, 25 bp, Homo sapien
tatggcctaaatgtgagctgtcgga

SEQ ID NO: 3057678 - DNA, 25 bp, Homo sapien
gatcatactagctccagaagttctt

SEQ ID NO: 3057679 - DNA, 25 bp, Homo sapien
atggctcgttctgggtggagagctc

SEQ ID NO: 3057680 - DNA, 25 bp, Homo sapien
tctgggtggagagctctgcggcgta

SEQ ID NO: 3057681 - DNA, 25 bp, Homo sapien
cgttctgggtggagagctctgcggc

SEQ ID NO: 3057682 - DNA, 25 bp, Homo sapien
gctcgttctgggtggagagctctgc

SEQ ID NO: 3057683 - DNA, 25 bp, Homo sapien
gcttgataccttctcccagcgtaaa

SEQ ID NO: 3057684 - DNA, 25 bp, Homo sapien
caaagtcttgcttgataccttctcc

SEQ ID NO: 3057685 - DNA, 25 bp, Homo sapien
tgtgggaagagcacaaagtcttgct

SEQ ID NO: 3057686 - DNA, 25 bp, Homo sapien
gataccttctcccagcgtaaaatcc

SEQ ID NO: 3057687 - DNA, 25 bp, Homo sapien
ctctttgaaggccaggcctccataa

SEQ ID NO: 3057688 - DNA, 25 bp, Homo sapien
ttttgaggactggtattattcaact

SEQ ID NO: 3057689 - DNA, 25 bp, Homo sapien
gtattattcaactggctgccccaag

SEQ ID NO: 3057690 - DNA, 25 bp, Homo sapien
gtgaccaagtgcagggctctttgaa

SEQ ID NO: 3057691 - DNA, 25 bp, Homo sapien
cacccagtatgtcagacctatgggc

SEQ ID NO: 3057692 - DNA, 25 bp, Homo sapien
taagtggaaagaatgacaccatgac

SEQ ID NO: 3057693 - DNA, 25 bp, Homo sapien
gcttctccttttcgccccaaattgc

SEQ ID NO: 3057694 - DNA, 25 bp, Homo sapien
tccacttttgaggacccacccagta

SEQ ID NO: 3057695 - DNA, 25 bp, Homo sapien
cacatatgctcgatcccacagtcgg

SEQ ID NO: 3057696 - DNA, 25 bp, Homo sapien
cacagtcggtggtacacagcaaggg

SEQ ID NO: 3057697 - DNA, 25 bp, Homo sapien
cactgaagtctagccgctgcagagc

SEQ ID NO: 3057698 - DNA, 25 bp, Homo sapien
ggcttcagccgcacatatgctcgat

SEQ ID NO: 3057699 - DNA, 25 bp, Homo sapien
aaaaggtcagtatcccacagctcag

SEQ ID NO: 3057700 - DNA, 25 bp, Homo sapien
tcagtatcccacagctcagcaagca

SEQ ID NO: 3057701 - DNA, 25 bp, Homo sapien
gacgtagcggcccaagacagccaaa

SEQ ID NO: 3057702 - DNA, 25 bp, Homo sapien
ccagggacgtagcggcccaagacag

SEQ ID NO: 3057703 - DNA, 25 bp, Homo sapien
taacccagacttcagctacatggtg

SEQ ID NO: 3057704 - DNA, 25 bp, Homo sapien
tatgaaaatggtcccactaacccag

SEQ ID NO: 3057705 - DNA, 25 bp, Homo sapien
gagcaaccgagggtgcacaaagccc

SEQ ID NO: 3057706 - DNA, 25 bp, Homo sapien
ctacatggtggcagagctcgggcac

SEQ ID NO: 3057707 - DNA, 25 bp, Homo sapien
taaaagtgagcatagtctgactgac

SEQ ID NO: 3057708 - DNA, 25 bp, Homo sapien
tctgaccgggaactttaaatagcca

SEQ ID NO: 3057709 - DNA, 25 bp, Homo sapien
gaaagcaggagctgtaagacacaag

SEQ ID NO: 3057710 - DNA, 25 bp, Homo sapien
caaggccctttgtgcttagaaacgt

SEQ ID NO: 3057711 - DNA, 25 bp, Homo sapien
ttgtctaatgcgtcgggtcttggca

SEQ ID NO: 3057712 - DNA, 25 bp, Homo sapien
ctctcattgtctaatgcgtcgggtc

SEQ ID NO: 3057713 - DNA, 25 bp, Homo sapien
tctcattgtctaatgcgtcgggtct

SEQ ID NO: 3057714 - DNA, 25 bp, Homo sapien
tcattgtctaatgcgtcgggtcttg

SEQ ID NO: 3057715 - DNA, 25 bp, Homo sapien
tttcaggccagattttgttcttcca

SEQ ID NO: 3057716 - DNA, 25 bp, Homo sapien
ccattgatcaatacacacaatgatc

SEQ ID NO: 3057717 - DNA, 25 bp, Homo sapien
acgaagagatgtcagggcaaaaaac

SEQ ID NO: 3057718 - DNA, 25 bp, Homo sapien
tgatcatcaagccaaatgcaagtaa

SEQ ID NO: 3057719 - DNA, 25 bp, Homo sapien
ttttttgagacaccatattggctag

SEQ ID NO: 3057720 - DNA, 25 bp, Homo sapien
ttgagacggaattttttgagacacc

SEQ ID NO: 3057721 - DNA, 25 bp, Homo sapien
gaattttttgagacaccatattggc

SEQ ID NO: 3057722 - DNA, 25 bp, Homo sapien
agacggaattttttgagacaccata

SEQ ID NO: 3057723 - DNA, 25 bp, Homo sapien
gagtaacaggctatcacagtcccca

SEQ ID NO: 3057724 - DNA, 25 bp, Homo sapien
tcacagtccccaaactgaataattc

SEQ ID NO: 3057725 - DNA, 25 bp, Homo sapien
gtaacaggctatcacagtccccaaa

SEQ ID NO: 3057726 - DNA, 25 bp, Homo sapien
ggctatcacagtccccaaactgaat

SEQ ID NO: 3057727 - DNA, 25 bp, Homo sapien
cctgaaaggttgaggccccagtgag

SEQ ID NO: 3057728 - DNA, 25 bp, Homo sapien
aacagtctggcaagcctccctagag

SEQ ID NO: 3057729 - DNA, 25 bp, Homo sapien
gagaagatcaatggcctgaggcagc

SEQ ID NO: 3057730 - DNA, 25 bp, Homo sapien
tgttagtaatcgtgctctgggaagg

SEQ ID NO: 3057731 - DNA, 25 bp, Homo sapien
gggagcaagaaaccctagagctctt

SEQ ID NO: 3057732 - DNA, 25 bp, Homo sapien
ttttctgatcctgtcaggatacatg

SEQ ID NO: 3057733 - DNA, 25 bp, Homo sapien
tgatctcagagtacaagtcaaacca

SEQ ID NO: 3057734 - DNA, 25 bp, Homo sapien
tcctctgatctcagagtacaagtca

SEQ ID NO: 3057735 - DNA, 25 bp, Homo sapien
aggatacatgcttgttgactctcac

SEQ ID NO: 3057736 - DNA, 25 bp, Homo sapien
ttctgacttgagctaatgatcctcc

SEQ ID NO: 3057737 - DNA, 25 bp, Homo sapien
gaactccaatgccagactatccaag

SEQ ID NO: 3057738 - DNA, 25 bp, Homo sapien
gggcatattcacagttacggcaaaa

SEQ ID NO: 3057739 - DNA, 25 bp, Homo sapien
tgacactactagaatgtgaagccca

SEQ ID NO: 3057740 - DNA, 25 bp, Homo sapien
cagacaagcggcagaagaaaggtcc

SEQ ID NO: 3057741 - DNA, 25 bp, Homo sapien
aaagatatgtcccagtcacagcagc

SEQ ID NO: 3057742 - DNA, 25 bp, Homo sapien
tttaaggcccggtacagtgcagtgg

SEQ ID NO: 3057743 - DNA, 25 bp, Homo sapien
gcttaagtaaacactggtagaggcc

SEQ ID NO: 3057744 - DNA, 25 bp, Homo sapien
taaagggacgcagctttgtcgggct

SEQ ID NO: 3057745 - DNA, 25 bp, Homo sapien
ctttgcaagacttcacgcctctact

SEQ ID NO: 3057746 - DNA, 25 bp, Homo sapien
gaacttgcacttgagcagacaagag

SEQ ID NO: 3057747 - DNA, 25 bp, Homo sapien
ttgtcgggctcaaaagaggagccct

SEQ ID NO: 3057748 - DNA, 25 bp, Homo sapien
tgcgggcacaggtaaggcagagaag

SEQ ID NO: 3057749 - DNA, 25 bp, Homo sapien
cgggggtgcgggcacaggtaaggca

SEQ ID NO: 3057750 - DNA, 25 bp, Homo sapien
cgggcacaggtaaggcagagaagat

SEQ ID NO: 3057751 - DNA, 25 bp, Homo sapien
gggtgcgggcacaggtaaggcagag

SEQ ID NO: 3057752 - DNA, 25 bp, Homo sapien
aggagccagtgcagcgaagaaaaca

SEQ ID NO: 3057753 - DNA, 25 bp, Homo sapien
aagaaaacagggcaggcgagaagta

SEQ ID NO: 3057754 - DNA, 25 bp, Homo sapien
agccctagaggaaccaacgaattcg

SEQ ID NO: 3057755 - DNA, 25 bp, Homo sapien
gcgagaagtagagccctagaggaac

SEQ ID NO: 3057756 - DNA, 25 bp, Homo sapien
atctcggcggcccctgaaagtcgac

SEQ ID NO: 3057757 - DNA, 25 bp, Homo sapien
agaaagccgcgttcagccccaggca

SEQ ID NO: 3057758 - DNA, 25 bp, Homo sapien
aggcaccacagagcgctcctagctg

SEQ ID NO: 3057759 - DNA, 25 bp, Homo sapien
acccgactcagcagaggctcgtaag

SEQ ID NO: 3057760 - DNA, 25 bp, Homo sapien
tggcccgacaagtcacaataacagc

SEQ ID NO: 3057761 - DNA, 25 bp, Homo sapien
gggccgtggcccgacaagtcacaat

SEQ ID NO: 3057762 - DNA, 25 bp, Homo sapien
ccgacaagtcacaataacagcaact

SEQ ID NO: 3057763 - DNA, 25 bp, Homo sapien
gccgtggcccgacaagtcacaataa

SEQ ID NO: 3057764 - DNA, 25 bp, Homo sapien
tgccctcggcccaccgggtcagcgg

SEQ ID NO: 3057765 - DNA, 25 bp, Homo sapien
tcagcgggctcatgatggccaacca

SEQ ID NO: 3057766 - DNA, 25 bp, Homo sapien
agcgggctcatgatggccaaccaca

SEQ ID NO: 3057767 - DNA, 25 bp, Homo sapien
cgggtcagcgggctcatgatggcca

SEQ ID NO: 3057768 - DNA, 25 bp, Homo sapien
ggacaactttgatgagatggacaca

SEQ ID NO: 3057769 - DNA, 25 bp, Homo sapien
cagttccgcaaggaggacatgttca

SEQ ID NO: 3057770 - DNA, 25 bp, Homo sapien
tcgagagaacctgtcgccagtatga

SEQ ID NO: 3057771 - DNA, 25 bp, Homo sapien
tcagagcacagatcagggacctcac

SEQ ID NO: 3057772 - DNA, 25 bp, Homo sapien
gatgctgtgatgctcttctgtcccc

SEQ ID NO: 3057773 - DNA, 25 bp, Homo sapien
tatgcccattttatcctcaagatgc

SEQ ID NO: 3057774 - DNA, 25 bp, Homo sapien
ggattgccacagaccgcctgcacat

SEQ ID NO: 3057775 - DNA, 25 bp, Homo sapien
gacaacacagccctgaaccggattg

SEQ ID NO: 3057776 - DNA, 25 bp, Homo sapien
gaaaattacccacacccattgtagc

SEQ ID NO: 3057777 - DNA, 25 bp, Homo sapien
gcagggccaaaagggtccatgtttc

SEQ ID NO: 3057778 - DNA, 25 bp, Homo sapien
actagaaaattacccacacccattg

SEQ ID NO: 3057779 - DNA, 25 bp, Homo sapien
tgcagggccaaaagggtccatgttt

SEQ ID NO: 3057780 - DNA, 25 bp, Homo sapien
ggggctcgtccaggcccgggcgctg

SEQ ID NO: 3057781 - DNA, 25 bp, Homo sapien
cccaagcagccagactgtccctggg

SEQ ID NO: 3057782 - DNA, 25 bp, Homo sapien
tctggcaggtcttggcatggaggag

SEQ ID NO: 3057783 - DNA, 25 bp, Homo sapien
tgtccctggggctcgtccaggcccg

SEQ ID NO: 3057784 - DNA, 25 bp, Homo sapien
gggttggccaagtaggcattcacca

SEQ ID NO: 3057785 - DNA, 25 bp, Homo sapien
aagtaggcattcaccagctgcatga

SEQ ID NO: 3057786 - DNA, 25 bp, Homo sapien
cattcaccagctgcatgatctcttc

SEQ ID NO: 3057787 - DNA, 25 bp, Homo sapien
tggccaagtaggcattcaccagctg

SEQ ID NO: 3057788 - DNA, 25 bp, Homo sapien
agggtcctacgtgctctggccctgc

SEQ ID NO: 3057789 - DNA, 25 bp, Homo sapien
tccaggctctagggctccagcttcc

SEQ ID NO: 3057790 - DNA, 25 bp, Homo sapien
gcttccccaccagggtcctacgtgc

SEQ ID NO: 3057791 - DNA, 25 bp, Homo sapien
cccaccagggtcctacgtgctctgg

SEQ ID NO: 3057792 - DNA, 25 bp, Homo sapien
ccccagtgcttagagctctacctgg

SEQ ID NO: 3057793 - DNA, 25 bp, Homo sapien
tccactctagtgtaagctccttcag

SEQ ID NO: 3057794 - DNA, 25 bp, Homo sapien
tattgtctgactccactctagtgta

SEQ ID NO: 3057795 - DNA, 25 bp, Homo sapien
cttagagctctacctggcccaggtt

SEQ ID NO: 3057796 - DNA, 25 bp, Homo sapien
cccaccctcaaggccagggtgtggg

SEQ ID NO: 3057797 - DNA, 25 bp, Homo sapien
agcttctgtggagcaccccgaccag

SEQ ID NO: 3057798 - DNA, 25 bp, Homo sapien
catggccatagctgacactgtggat

SEQ ID NO: 3057799 - DNA, 25 bp, Homo sapien
ggcaggcggccacatggccatagct

SEQ ID NO: 3057800 - DNA, 25 bp, Homo sapien
tgtggatgggctccgtctcccctgg

SEQ ID NO: 3057801 - DNA, 25 bp, Homo sapien
gaggagcccagcgttatttttggta

SEQ ID NO: 3057802 - DNA, 25 bp, Homo sapien
tggaaggaggagcccagcgttattt

SEQ ID NO: 3057803 - DNA, 25 bp, Homo sapien
ggtggaaggaggagcccagcgttat

SEQ ID NO: 3057804 - DNA, 25 bp, Homo sapien
aaggaggagcccagcgttatttttg

SEQ ID NO: 3057805 - DNA, 25 bp, Homo sapien
gtgacactccgtgggacctgtggct

SEQ ID NO: 3057806 - DNA, 25 bp, Homo sapien
gatgtggggaattacgtgacactcc

SEQ ID NO: 3057807 - DNA, 25 bp, Homo sapien
gcttgggccgccagagtccccttct

SEQ ID NO: 3057808 - DNA, 25 bp, Homo sapien
gggaattacgtgacactccgtggga

SEQ ID NO: 3057809 - DNA, 25 bp, Homo sapien
cgtgctcagctccagaacgtcatac

SEQ ID NO: 3057810 - DNA, 25 bp, Homo sapien
aaccccggacactgcgccgccaggg

SEQ ID NO: 3057811 - DNA, 25 bp, Homo sapien
ccccgtagccgcttccagccgccca

SEQ ID NO: 3057812 - DNA, 25 bp, Homo sapien
atggcctcagctcggcccatgcccc

SEQ ID NO: 3057813 - DNA, 25 bp, Homo sapien
cgaaccccggacactgcgccgccag

SEQ ID NO: 3057814 - DNA, 25 bp, Homo sapien
ctccagagcgccccggccagcaggg

SEQ ID NO: 3057815 - DNA, 25 bp, Homo sapien
cgcgggcaatgcttcccgcagtgcg

SEQ ID NO: 3057816 - DNA, 25 bp, Homo sapien
ctcgcgggcaatgcttcccgcagtg

SEQ ID NO: 3057817 - DNA, 25 bp, Homo sapien
cgggcaatgcttcccgcagtgcggc

SEQ ID NO: 3057818 - DNA, 25 bp, Homo sapien
cagcgtgtcgtcgggtgggggcggc

SEQ ID NO: 3057819 - DNA, 25 bp, Homo sapien
gccagggcgcgcagcgtgtcgtcgg

SEQ ID NO: 3057820 - DNA, 25 bp, Homo sapien
cgccagggcgcgcagcgtgtcgtcg

SEQ ID NO: 3057821 - DNA, 25 bp, Homo sapien
ccgccagggcgcgcagcgtgtcgtc

SEQ ID NO: 3057822 - DNA, 25 bp, Homo sapien
ggagtcgggcgagtcctccaaccca

SEQ ID NO: 3057823 - DNA, 25 bp, Homo sapien
tgcagaggtccgtgaagacgcagac

SEQ ID NO: 3057824 - DNA, 25 bp, Homo sapien
acatagtctccacccggagtcgggc

SEQ ID NO: 3057825 - DNA, 25 bp, Homo sapien
tgaagacgcagacatagtctccacc

SEQ ID NO: 3057826 - DNA, 25 bp, Homo sapien
tacagcgcgaatgcgttgcggctcc

SEQ ID NO: 3057827 - DNA, 25 bp, Homo sapien
gctgctcgtacagcgcgaatgcgtt

SEQ ID NO: 3057828 - DNA, 25 bp, Homo sapien
cctcgctgctcgtacagcgcgaatg

SEQ ID NO: 3057829 - DNA, 25 bp, Homo sapien
ctcgtacagcgcgaatgcgttgcgg

SEQ ID NO: 3057830 - DNA, 25 bp, Homo sapien
catattccgccagttccgagtccgg

SEQ ID NO: 3057831 - DNA, 25 bp, Homo sapien
ccgttggctcaacgcggaaatctcc

SEQ ID NO: 3057832 - DNA, 25 bp, Homo sapien
tgtgggagtcgatggccacagcaca

SEQ ID NO: 3057833 - DNA, 25 bp, Homo sapien
ctttccggatgaagcgcgcatattc

SEQ ID NO: 3057834 - DNA, 25 bp, Homo sapien
gcagggtcttgggtagccgggagcc

SEQ ID NO: 3057835 - DNA, 25 bp, Homo sapien
gctcccccaggtcggaaggtgcagc

SEQ ID NO: 3057836 - DNA, 25 bp, Homo sapien
tcatgcaggtgaggagttgccagta

SEQ ID NO: 3057837 - DNA, 25 bp, Homo sapien
gagttgccagtaccgcagggccgca

SEQ ID NO: 3057838 - DNA, 25 bp, Homo sapien
cagggcccgaggtctgcttagccag

SEQ ID NO: 3057839 - DNA, 25 bp, Homo sapien
gcagggcccgaggtctgcttagcca

SEQ ID NO: 3057840 - DNA, 25 bp, Homo sapien
ctgcagggcccgaggtctgcttagc

SEQ ID NO: 3057841 - DNA, 25 bp, Homo sapien
tgcagggcccgaggtctgcttagcc

SEQ ID NO: 3057842 - DNA, 25 bp, Homo sapien
ctgcaggaagagttcatcccggagc

SEQ ID NO: 3057843 - DNA, 25 bp, Homo sapien
agttcatcccggagcgcgggcaagt

SEQ ID NO: 3057844 - DNA, 25 bp, Homo sapien
caggaagagttcatcccggagcgcg

SEQ ID NO: 3057845 - DNA, 25 bp, Homo sapien
gttcatcccggagcgcgggcaagtc

SEQ ID NO: 3057846 - DNA, 25 bp, Homo sapien
cctgcagcgccaagaacagccgcac

SEQ ID NO: 3057847 - DNA, 25 bp, Homo sapien
agcgcctgcagcgccaagaacagcc

SEQ ID NO: 3057848 - DNA, 25 bp, Homo sapien
cgcctgcagcgccaagaacagccgc

SEQ ID NO: 3057849 - DNA, 25 bp, Homo sapien
gcctgcagcgccaagaacagccgca

SEQ ID NO: 3057850 - DNA, 25 bp, Homo sapien
tcgcgcaggggtgcatagcccggac

SEQ ID NO: 3057851 - DNA, 25 bp, Homo sapien
ctcctcgcgcaggggtgcatagccc

SEQ ID NO: 3057852 - DNA, 25 bp, Homo sapien
ctcgcgcaggggtgcatagcccgga

SEQ ID NO: 3057853 - DNA, 25 bp, Homo sapien
tcctcgcgcaggggtgcatagcccg

SEQ ID NO: 3057854 - DNA, 25 bp, Homo sapien
ggtttggagaggggacacagagctg

SEQ ID NO: 3057855 - DNA, 25 bp, Homo sapien
tggagaggggacacagagctgcgcc

SEQ ID NO: 3057856 - DNA, 25 bp, Homo sapien
ggacggtttggagaggggacacaga

SEQ ID NO: 3057857 - DNA, 25 bp, Homo sapien
tttggagaggggacacagagctgcg

SEQ ID NO: 3057858 - DNA, 25 bp, Homo sapien
tgggccagtcactacaccgtttagg

SEQ ID NO: 3057859 - DNA, 25 bp, Homo sapien
tctaactttaggacctgggccagtc

SEQ ID NO: 3057860 - DNA, 25 bp, Homo sapien
catcagtagtcagaatgagacccat

SEQ ID NO: 3057861 - DNA, 25 bp, Homo sapien
caccttcatccttcgaaaagtgagg

SEQ ID NO: 3057862 - DNA, 25 bp, Homo sapien
tcaggtaaatgagggcaacggcctc

SEQ ID NO: 3057863 - DNA, 25 bp, Homo sapien
gggcatacaaggctccactagtgtg

SEQ ID NO: 3057864 - DNA, 25 bp, Homo sapien
tcagaatcgggttcctcaggtaaat

SEQ ID NO: 3057865 - DNA, 25 bp, Homo sapien
aaatgagggcaacggcctctgggtc

SEQ ID NO: 3057866 - DNA, 25 bp, Homo sapien
tggaggcgatcacttcccgcaatgc

SEQ ID NO: 3057867 - DNA, 25 bp, Homo sapien
ctgtatgtccctgagcagtagctgg

SEQ ID NO: 3057868 - DNA, 25 bp, Homo sapien
gtttccgaccagacacagtcactga

SEQ ID NO: 3057869 - DNA, 25 bp, Homo sapien
gagcagaggcggacactgtgtttcc

SEQ ID NO: 3057870 - DNA, 25 bp, Homo sapien
tgcgctctgggccggtcaccgagca

SEQ ID NO: 3057871 - DNA, 25 bp, Homo sapien
tgagcacgaggctcccgagacgccg

SEQ ID NO: 3057872 - DNA, 25 bp, Homo sapien
agggagtcccgcgtgagcacaaacc

SEQ ID NO: 3057873 - DNA, 25 bp, Homo sapien
agtcccgcgtgagcacaaaccaggc

SEQ ID NO: 3057874 - DNA, 25 bp, Homo sapien
tctccgggatgaggctccaagtctc

SEQ ID NO: 3057875 - DNA, 25 bp, Homo sapien
acgatgtccgggtcgtcctccggca

SEQ ID NO: 3057876 - DNA, 25 bp, Homo sapien
ctttcacaacgatgtccgggtcgtc

SEQ ID NO: 3057877 - DNA, 25 bp, Homo sapien
cctttctccgggatgaggctccaag

SEQ ID NO: 3057878 - DNA, 25 bp, Homo sapien
tgagtcagcgtcacttccaggggac

SEQ ID NO: 3057879 - DNA, 25 bp, Homo sapien
actggctgagtcagcgtcacttcca

SEQ ID NO: 3057880 - DNA, 25 bp, Homo sapien
ggctgagtcagcgtcacttccaggg

SEQ ID NO: 3057881 - DNA, 25 bp, Homo sapien
ctggctgagtcagcgtcacttccag

SEQ ID NO: 3057882 - DNA, 25 bp, Homo sapien
gtccccgccacagaccccaatcctg

SEQ ID NO: 3057883 - DNA, 25 bp, Homo sapien
caggtctccgcagcgggagctctcg

SEQ ID NO: 3057884 - DNA, 25 bp, Homo sapien
cctgggatgacttctccccctcgtc

SEQ ID NO: 3057885 - DNA, 25 bp, Homo sapien
gagctctcgcatctggcctccgcac

SEQ ID NO: 3057886 - DNA, 25 bp, Homo sapien
ggcctcgccacattcctcggcgctg

SEQ ID NO: 3057887 - DNA, 25 bp, Homo sapien
gggacccaggcgttcgagccgccca

SEQ ID NO: 3057888 - DNA, 25 bp, Homo sapien
agccggcctcgccacattcctcggc

SEQ ID NO: 3057889 - DNA, 25 bp, Homo sapien
gttcgagccgcccagccggcctcgc

SEQ ID NO: 3057890 - DNA, 25 bp, Homo sapien
cgtccccgtagtcccggtgcagaag

SEQ ID NO: 3057891 - DNA, 25 bp, Homo sapien
cgtagtcccggtgcagaagagtgaa

SEQ ID NO: 3057892 - DNA, 25 bp, Homo sapien
actcggggtccgcagctcaaaggtt

SEQ ID NO: 3057893 - DNA, 25 bp, Homo sapien
gctcaaaggtttcctcgtcctcgtc

SEQ ID NO: 3057894 - DNA, 25 bp, Homo sapien
agccaccatagtcccccggggagag

SEQ ID NO: 3057895 - DNA, 25 bp, Homo sapien
ctcgacggcagcagagaagccacca

SEQ ID NO: 3057896 - DNA, 25 bp, Homo sapien
cggcagcagagaagccaccatagtc

SEQ ID NO: 3057897 - DNA, 25 bp, Homo sapien
cagcagagaagccaccatagtcccc

SEQ ID NO: 3057898 - DNA, 25 bp, Homo sapien
gaagtagtgtccgttggagtgtcca

SEQ ID NO: 3057899 - DNA, 25 bp, Homo sapien
agggagcaatgtccggagctgggaa

SEQ ID NO: 3057900 - DNA, 25 bp, Homo sapien
tgcaaggggacgctagccagacgct

SEQ ID NO: 3057901 - DNA, 25 bp, Homo sapien
gaggtgggcagttgtccaagctcca

SEQ ID NO: 3057902 - DNA, 25 bp, Homo sapien
tctttctctcctcccttctttacta

SEQ ID NO: 3057903 - DNA, 25 bp, Homo sapien
tcttctttctctcctcccttcttta

SEQ ID NO: 3057904 - DNA, 25 bp, Homo sapien
ctttctctcctcccttctttactag

SEQ ID NO: 3057905 - DNA, 25 bp, Homo sapien
ctcttctttctctcctcccttcttt

SEQ ID NO: 3057906 - DNA, 25 bp, Homo sapien
cagaggaaaacccaactgccgctct

SEQ ID NO: 3057907 - DNA, 25 bp, Homo sapien
aaccctgttgaggagttttggcaca

SEQ ID NO: 3057908 - DNA, 25 bp, Homo sapien
tctgaacccctgtctcgtctcaggg

SEQ ID NO: 3057909 - DNA, 25 bp, Homo sapien
ctgttgaggagttttggcacaggac

SEQ ID NO: 3057910 - DNA, 25 bp, Homo sapien
ctaaggaattctgtggtctccgaat

SEQ ID NO: 3057911 - DNA, 25 bp, Homo sapien
tggtctccgaatacagtggaggcct

SEQ ID NO: 3057912 - DNA, 25 bp, Homo sapien
gaatacagtggaggcctcttagggc

SEQ ID NO: 3057913 - DNA, 25 bp, Homo sapien
ctcttagggctaatatcctgcggct

SEQ ID NO: 3057914 - DNA, 25 bp, Homo sapien
cagccattactggagagcgctctgg

SEQ ID NO: 3057915 - DNA, 25 bp, Homo sapien
cgggaactcagtatttgctaaggca

SEQ ID NO: 3057916 - DNA, 25 bp, Homo sapien
ttacagtattgcaagaggaaccacc

SEQ ID NO: 3057917 - DNA, 25 bp, Homo sapien
tagagctttagcagactcagcagcc

SEQ ID NO: 3057918 - DNA, 25 bp, Homo sapien
gagagactgtgggtctccgtgggag

SEQ ID NO: 3057919 - DNA, 25 bp, Homo sapien
tcccaggagagactgtgggtctccg

SEQ ID NO: 3057920 - DNA, 25 bp, Homo sapien
ctagttgtcccaggagagactgtgg

SEQ ID NO: 3057921 - DNA, 25 bp, Homo sapien
tgtgggtctccgtgggagctgagca

SEQ ID NO: 3057922 - DNA, 25 bp, Homo sapien
cgtagagaacgggattgaggccaca

SEQ ID NO: 3057923 - DNA, 25 bp, Homo sapien
tggacatcggccttgtagcaaagct

SEQ ID NO: 3057924 - DNA, 25 bp, Homo sapien
gtagatcggcagtatccagcagcag

SEQ ID NO: 3057925 - DNA, 25 bp, Homo sapien
catccttgcgtttgctggcagggca

SEQ ID NO: 3057926 - DNA, 25 bp, Homo sapien
gctctgtggcctccgtccccatctc

SEQ ID NO: 3057927 - DNA, 25 bp, Homo sapien
ctgctctgtggcctccgtccccatc

SEQ ID NO: 3057928 - DNA, 25 bp, Homo sapien
ggcctccgtccccatctctggctac

SEQ ID NO: 3057929 - DNA, 25 bp, Homo sapien
ctgtggcctccgtccccatctctgg

SEQ ID NO: 3057930 - DNA, 25 bp, Homo sapien
gagctggtgcccctgactgatgcta

SEQ ID NO: 3057931 - DNA, 25 bp, Homo sapien
tcttgggttgacttaggttgtggaa

SEQ ID NO: 3057932 - DNA, 25 bp, Homo sapien
gactgatgctaaggctggacatgga

SEQ ID NO: 3057933 - DNA, 25 bp, Homo sapien
aaggttttgccagggcttaaggctg

SEQ ID NO: 3057934 - DNA, 25 bp, Homo sapien
acggctgcgacgaggagctggtggg

SEQ ID NO: 3057935 - DNA, 25 bp, Homo sapien
agctggtgggtcccctgtatgcacg

SEQ ID NO: 3057936 - DNA, 25 bp, Homo sapien
ctgtatgcacgctccctgggcgcct

SEQ ID NO: 3057937 - DNA, 25 bp, Homo sapien
ctagacggctgcgacgaggagctgg

SEQ ID NO: 3057938 - DNA, 25 bp, Homo sapien
ctggcatttgggaaagcatacggcg

SEQ ID NO: 3057939 - DNA, 25 bp, Homo sapien
tcccgcagatgttcatcggaggtct

SEQ ID NO: 3057940 - DNA, 25 bp, Homo sapien
tccgcggctgcatagaaaacgtaat

SEQ ID NO: 3057941 - DNA, 25 bp, Homo sapien
gaagaacctggcctatcggcataac

SEQ ID NO: 3057942 - DNA, 25 bp, Homo sapien
gcaacctccacctcccgggctgaag

SEQ ID NO: 3057943 - DNA, 25 bp, Homo sapien
cacctcccgggctgaagcgattctc

SEQ ID NO: 3057944 - DNA, 25 bp, Homo sapien
gtgtgtgccaccacacccggctaat

SEQ ID NO: 3057945 - DNA, 25 bp, Homo sapien
tgtaatgactcgatctcggctcact

SEQ ID NO: 3057946 - DNA, 25 bp, Homo sapien
gaatgattcttaacatggaggaggc

SEQ ID NO: 3057947 - DNA, 25 bp, Homo sapien
caaaggcactagatgcacaatggca

SEQ ID NO: 3057948 - DNA, 25 bp, Homo sapien
tgagacaggctatgctgaaggtgac

SEQ ID NO: 3057949 - DNA, 25 bp, Homo sapien
tgatcactaagctgacctcccaaga

SEQ ID NO: 3057950 - DNA, 25 bp, Homo sapien
gctgctgtcagggattaacaacaga

SEQ ID NO: 3057951 - DNA, 25 bp, Homo sapien
ggaggaggctgctaaaccctatccc

SEQ ID NO: 3057952 - DNA, 25 bp, Homo sapien
gggttgacataggtcctttctgcca

SEQ ID NO: 3057953 - DNA, 25 bp, Homo sapien
gctcctggctgtttatctgccccaa

SEQ ID NO: 3057954 - DNA, 25 bp, Homo sapien
ctaacactttattaagaggtcacaa

SEQ ID NO: 3057955 - DNA, 25 bp, Homo sapien
ttctaacactttattaagaggtcac

SEQ ID NO: 3057956 - DNA, 25 bp, Homo sapien
gattctaacactttattaagaggtc

SEQ ID NO: 3057957 - DNA, 25 bp, Homo sapien
tctaacactttattaagaggtcaca

SEQ ID NO: 3057958 - DNA, 25 bp, Homo sapien
tacaggctagcgcttgttgggaact

SEQ ID NO: 3057959 - DNA, 25 bp, Homo sapien
tgtgagcacgaaagccaagacagtg

SEQ ID NO: 3057960 - DNA, 25 bp, Homo sapien
gaatacaaaccacggcggatgcaga

SEQ ID NO: 3057961 - DNA, 25 bp, Homo sapien
taccctgaagcgataagcaacactg

SEQ ID NO: 3057962 - DNA, 25 bp, Homo sapien
tctcgatccccacgtacttgagagc

SEQ ID NO: 3057963 - DNA, 25 bp, Homo sapien
taaaggacgtcggtctccctctcga

SEQ ID NO: 3057964 - DNA, 25 bp, Homo sapien
aaggacgtcggtctccctctcgatc

SEQ ID NO: 3057965 - DNA, 25 bp, Homo sapien
cccacgtacttgagagcatcagctt

SEQ ID NO: 3057966 - DNA, 25 bp, Homo sapien
agaagagctcttcgccagcttgaat

SEQ ID NO: 3057967 - DNA, 25 bp, Homo sapien
tgaattgccctcttggcaaagatcc

SEQ ID NO: 3057968 - DNA, 25 bp, Homo sapien
gagctcttcgccagcttgaattgcc

SEQ ID NO: 3057969 - DNA, 25 bp, Homo sapien
gatcccaatccgatggtctccattc

SEQ ID NO: 3057970 - DNA, 25 bp, Homo sapien
tctttggacaaaaaatagctcagct

SEQ ID NO: 3057971 - DNA, 25 bp, Homo sapien
atcacagtaaagaggcatccatccc

SEQ ID NO: 3057972 - DNA, 25 bp, Homo sapien
aagcaggataaacccgaggctaggt

SEQ ID NO: 3057973 - DNA, 25 bp, Homo sapien
caagtcaataaccagtaggcttctg

SEQ ID NO: 3057974 - DNA, 25 bp, Homo sapien
ttttgtttcctttccgagtagcatc

SEQ ID NO: 3057975 - DNA, 25 bp, Homo sapien
tttgtttcctttccgagtagcatcc

SEQ ID NO: 3057976 - DNA, 25 bp, Homo sapien
cactgaatgatttgcaaatcgaatt

SEQ ID NO: 3057977 - DNA, 25 bp, Homo sapien
ctttggcataacagttgggattcac

SEQ ID NO: 3057978 - DNA, 25 bp, Homo sapien
ctggacatgtatttgtcatagacct

SEQ ID NO: 3057979 - DNA, 25 bp, Homo sapien
gtcatagacctttccgcgtcgatca

SEQ ID NO: 3057980 - DNA, 25 bp, Homo sapien
tttccgcgtcgatcagcctcatcct

SEQ ID NO: 3057981 - DNA, 25 bp, Homo sapien
agctggacatgtatttgtcatagac

SEQ ID NO: 3057982 - DNA, 25 bp, Homo sapien
tgaattcgttcttctgcacagactc

SEQ ID NO: 3057983 - DNA, 25 bp, Homo sapien
gcacagactcctttatgaaggtgcc

SEQ ID NO: 3057984 - DNA, 25 bp, Homo sapien
cagaaatgaattcgttcttctgcac

SEQ ID NO: 3057985 - DNA, 25 bp, Homo sapien
atgaaggtgccccatccggccacat

SEQ ID NO: 3057986 - DNA, 25 bp, Homo sapien
ctgggtcttacagcgacagccaggg

SEQ ID NO: 3057987 - DNA, 25 bp, Homo sapien
gatgctgcagtttttacaggaaacc

SEQ ID NO: 3057988 - DNA, 25 bp, Homo sapien
ggacattgcttggtattgcactggg

SEQ ID NO: 3057989 - DNA, 25 bp, Homo sapien
gtcacattctcgcactgccagatag

SEQ ID NO: 3057990 - DNA, 25 bp, Homo sapien
agtgtcccctagagattccccaaca

SEQ ID NO: 3057991 - DNA, 25 bp, Homo sapien
caggtatactaataagaagtgtccc

SEQ ID NO: 3057992 - DNA, 25 bp, Homo sapien
catgccttcgagtcaaaaaagcagg

SEQ ID NO: 3057993 - DNA, 25 bp, Homo sapien
tgaggtggagagtaccccagagaat

SEQ ID NO: 3057994 - DNA, 25 bp, Homo sapien
cggtctgggtggtcgcagggttggt

SEQ ID NO: 3057995 - DNA, 25 bp, Homo sapien
gtcgcagggttggtagttgtacact

SEQ ID NO: 3057996 - DNA, 25 bp, Homo sapien
gttggtagttgtacacttgtgtgga

SEQ ID NO: 3057997 - DNA, 25 bp, Homo sapien
gttgtacacttgtgtggaagagtta

SEQ ID NO: 3057998 - DNA, 25 bp, Homo sapien
cagcttcaggataagtgattctttg

SEQ ID NO: 3057999 - DNA, 25 bp, Homo sapien
gcttcaggataagtgattctttgac

SEQ ID NO: 3058000 - DNA, 25 bp, Homo sapien
ggcagcttcaggataagtgattctt

SEQ ID NO: 3058001 - DNA, 25 bp, Homo sapien
cttcaggataagtgattctttgact

SEQ ID NO: 3058002 - DNA, 25 bp, Homo sapien
gcatacaaatccatagatggttacg

SEQ ID NO: 3058003 - DNA, 25 bp, Homo sapien
atccatagatggttacgttgagaac

SEQ ID NO: 3058004 - DNA, 25 bp, Homo sapien
ctattggccctttgtgggggatctt

SEQ ID NO: 3058005 - DNA, 25 bp, Homo sapien
gaacattcttgcatacaaatccata

SEQ ID NO: 3058006 - DNA, 25 bp, Homo sapien
ggtgccatggaagactcgaaaaaga

SEQ ID NO: 3058007 - DNA, 25 bp, Homo sapien
aaagagattcttcagccccagtcca

SEQ ID NO: 3058008 - DNA, 25 bp, Homo sapien
acagaagttgttgaagtaggtgcca

SEQ ID NO: 3058009 - DNA, 25 bp, Homo sapien
gcttgcacgtcttggtccccagaag

SEQ ID NO: 3058010 - DNA, 25 bp, Homo sapien
gagcatggcatactcctttgctcct

SEQ ID NO: 3058011 - DNA, 25 bp, Homo sapien
actggaggcccagtcattgcctgtg

SEQ ID NO: 3058012 - DNA, 25 bp, Homo sapien
cggcgacgaccagagcacttggagc

SEQ ID NO: 3058013 - DNA, 25 bp, Homo sapien
atgtggtgccttctccggcgacgac

SEQ ID NO: 3058014 - DNA, 25 bp, Homo sapien
cagcaaaaggaagcagtctgtgcca

SEQ ID NO: 3058015 - DNA, 25 bp, Homo sapien
aaaggaagcagtctgtgccacatgg

SEQ ID NO: 3058016 - DNA, 25 bp, Homo sapien
gcaaaaggaagcagtctgtgccaca

SEQ ID NO: 3058017 - DNA, 25 bp, Homo sapien
caaaaggaagcagtctgtgccacat

SEQ ID NO: 3058018 - DNA, 25 bp, Homo sapien
tctttattcttgcgtttatatacat

SEQ ID NO: 3058019 - DNA, 25 bp, Homo sapien
ttcttgcgtttatatacattagggg

SEQ ID NO: 3058020 - DNA, 25 bp, Homo sapien
cttgcgtttatatacattaggggtg

SEQ ID NO: 3058021 - DNA, 25 bp, Homo sapien
ttgcgtttatatacattaggggtgg

SEQ ID NO: 3058022 - DNA, 25 bp, Homo sapien
gatataaacggctaccatcagggtg

SEQ ID NO: 3058023 - DNA, 25 bp, Homo sapien
catcagggtgcacaaaattcagtca

SEQ ID NO: 3058024 - DNA, 25 bp, Homo sapien
gagcatttcaaacagagtagcccca

SEQ ID NO: 3058025 - DNA, 25 bp, Homo sapien
cagaagccaggaactctatacgaga

SEQ ID NO: 3058026 - DNA, 25 bp, Homo sapien
cagtcgtatttaaagcagcgccggc

SEQ ID NO: 3058027 - DNA, 25 bp, Homo sapien
tcccgctgcacagacttggcattgg

SEQ ID NO: 3058028 - DNA, 25 bp, Homo sapien
cagcgccggcaaaaaagtgtgtgga

SEQ ID NO: 3058029 - DNA, 25 bp, Homo sapien
tggaaggagtgcagagattgctccc

SEQ ID NO: 3058030 - DNA, 25 bp, Homo sapien
cagggaacattgaggcaattgcact

SEQ ID NO: 3058031 - DNA, 25 bp, Homo sapien
tgtttcttggaactctttttgttgc

SEQ ID NO: 3058032 - DNA, 25 bp, Homo sapien
cattgaggcaattgcactgaagatc

SEQ ID NO: 3058033 - DNA, 25 bp, Homo sapien
ggcaattgcactgaagatcatgtca

SEQ ID NO: 3058034 - DNA, 25 bp, Homo sapien
atctgagtactgattcagggcatcg

SEQ ID NO: 3058035 - DNA, 25 bp, Homo sapien
taatcagaacggatccagggatcat

SEQ ID NO: 3058036 - DNA, 25 bp, Homo sapien
agggcatcgaccaactccagaaaaa

SEQ ID NO: 3058037 - DNA, 25 bp, Homo sapien
tcaatagcatgtcgctttctctttc

SEQ ID NO: 3058038 - DNA, 25 bp, Homo sapien
cccatcatagttattgatcagctcc

SEQ ID NO: 3058039 - DNA, 25 bp, Homo sapien
ttcaccatggactttcccatcatag

SEQ ID NO: 3058040 - DNA, 25 bp, Homo sapien
tcatctcccatgtagggaatattgc

SEQ ID NO: 3058041 - DNA, 25 bp, Homo sapien
tcagctcctcaataaaagtctcatc

SEQ ID NO: 3058042 - DNA, 25 bp, Homo sapien
cagtgacctcattaacatatgttgg

SEQ ID NO: 3058043 - DNA, 25 bp, Homo sapien
tacatgatgggaaccaatgcaactg

SEQ ID NO: 3058044 - DNA, 25 bp, Homo sapien
tgttggcttgcaaatcccgggaaaa

SEQ ID NO: 3058045 - DNA, 25 bp, Homo sapien
caaatcccgggaaaatgctctctat

SEQ ID NO: 3058046 - DNA, 25 bp, Homo sapien
gagtgttgtggtgaaatcatagttt

SEQ ID NO: 3058047 - DNA, 25 bp, Homo sapien
aggaagactgagcttaaactcccaa

SEQ ID NO: 3058048 - DNA, 25 bp, Homo sapien
aagactgagcttaaactcccaaaag

SEQ ID NO: 3058049 - DNA, 25 bp, Homo sapien
gactgagcttaaactcccaaaagta

SEQ ID NO: 3058050 - DNA, 25 bp, Homo sapien
ttttgagaaaagggtgtccactcac

SEQ ID NO: 3058051 - DNA, 25 bp, Homo sapien
tttttgagaaaagggtgtccactca

SEQ ID NO: 3058052 - DNA, 25 bp, Homo sapien
ggttggacacgaagcttcttccatt

SEQ ID NO: 3058053 - DNA, 25 bp, Homo sapien
gacacgaagcttcttccattcttca

SEQ ID NO: 3058054 - DNA, 25 bp, Homo sapien
aacaggttggacacgaagcttcttc

SEQ ID NO: 3058055 - DNA, 25 bp, Homo sapien
tttcttgaacctttgcaaaatttgc

SEQ ID NO: 3058056 - DNA, 25 bp, Homo sapien
ccgtttaagttgtcgaagtcgcatg

SEQ ID NO: 3058057 - DNA, 25 bp, Homo sapien
tgtcgaagtcgcatgtattcagatt

SEQ ID NO: 3058058 - DNA, 25 bp, Homo sapien
ccatatttgcctgaagccgtttaag

SEQ ID NO: 3058059 - DNA, 25 bp, Homo sapien
ttgcctgaagccgtttaagttgtcg

SEQ ID NO: 3058060 - DNA, 25 bp, Homo sapien
cgcccggccaagaagtatgtattct

SEQ ID NO: 3058061 - DNA, 25 bp, Homo sapien
cccggccaagaagtatgtattctaa

SEQ ID NO: 3058062 - DNA, 25 bp, Homo sapien
caagaagtatgtattctaatatact

SEQ ID NO: 3058063 - DNA, 25 bp, Homo sapien
cggccaagaagtatgtattctaata

SEQ ID NO: 3058064 - DNA, 25 bp, Homo sapien
cttatagaatgcaaggggaagtgtt

SEQ ID NO: 3058065 - DNA, 25 bp, Homo sapien
gaatggcaggacacaacagcagaac

SEQ ID NO: 3058066 - DNA, 25 bp, Homo sapien
tacagtgtgcctctgttcttcagga

SEQ ID NO: 3058067 - DNA, 25 bp, Homo sapien
gaagtgttgggttttacagtgtgcc

SEQ ID NO: 3058068 - DNA, 25 bp, Homo sapien
ttttgtatgtctaagacaggtccct

SEQ ID NO: 3058069 - DNA, 25 bp, Homo sapien
caggtccctataatacttgatgcca

SEQ ID NO: 3058070 - DNA, 25 bp, Homo sapien
tagaccctgacaccctcagtaggat

SEQ ID NO: 3058071 - DNA, 25 bp, Homo sapien
gttagtgcagcaagttagaccctga

SEQ ID NO: 3058072 - DNA, 25 bp, Homo sapien
tagggtgtagtgtactcaagtctca

SEQ ID NO: 3058073 - DNA, 25 bp, Homo sapien
caggctagagccctatcttgactgg

SEQ ID NO: 3058074 - DNA, 25 bp, Homo sapien
ggttctgtactgtgtcagcccaaag

SEQ ID NO: 3058075 - DNA, 25 bp, Homo sapien
gacttggaagagtaaaagcaatctc

SEQ ID NO: 3058076 - DNA, 25 bp, Homo sapien
gtctcacacttctgaactcaagtga

SEQ ID NO: 3058077 - DNA, 25 bp, Homo sapien
ctcacacttctgaactcaagtgatt

SEQ ID NO: 3058078 - DNA, 25 bp, Homo sapien
ggtctcacacttctgaactcaagtg

SEQ ID NO: 3058079 - DNA, 25 bp, Homo sapien
tctcacacttctgaactcaagtgat

SEQ ID NO: 3058080 - DNA, 25 bp, Homo sapien
ggctcgagtgaacggtccacctcag

SEQ ID NO: 3058081 - DNA, 25 bp, Homo sapien
tgggctcgagtgaacggtccacctc

SEQ ID NO: 3058082 - DNA, 25 bp, Homo sapien
tccccgaaagccatcgcaagatcag

SEQ ID NO: 3058083 - DNA, 25 bp, Homo sapien
gcacttgcgcgaccctgagtcagtg

SEQ ID NO: 3058084 - DNA, 25 bp, Homo sapien
tgtgccttgggagccttactcacct

SEQ ID NO: 3058085 - DNA, 25 bp, Homo sapien
tgaggaggcgctcactgcacttgcg

SEQ ID NO: 3058086 - DNA, 25 bp, Homo sapien
agacgctgtcctcgcctgggtctct

SEQ ID NO: 3058087 - DNA, 25 bp, Homo sapien
cagccccagacgctgtcctcgcctg

SEQ ID NO: 3058088 - DNA, 25 bp, Homo sapien
ccccagacgctgtcctcgcctgggt

SEQ ID NO: 3058089 - DNA, 25 bp, Homo sapien
ctgggtctctctcgccccgtcgccc

SEQ ID NO: 3058090 - DNA, 25 bp, Homo sapien
attgtattcacagtacacacatcta

SEQ ID NO: 3058091 - DNA, 25 bp, Homo sapien
ttgtattcacagtacacacatctac

SEQ ID NO: 3058092 - DNA, 25 bp, Homo sapien
gtacacacatctacaaattatatcc

SEQ ID NO: 3058093 - DNA, 25 bp, Homo sapien
atctacaaattatatccatgatact

SEQ ID NO: 3058094 - DNA, 25 bp, Homo sapien
tagttcatctgtaccgctcagcgag

SEQ ID NO: 3058095 - DNA, 25 bp, Homo sapien
gatacacgctagtgatcccattttg

SEQ ID NO: 3058096 - DNA, 25 bp, Homo sapien
cattgcactgtgtaggaatcccatg

SEQ ID NO: 3058097 - DNA, 25 bp, Homo sapien
cctgggagtcaggtatcatccacat

SEQ ID NO: 3058098 - DNA, 25 bp, Homo sapien
tcagaaagccactgaagtcttcatc

SEQ ID NO: 3058099 - DNA, 25 bp, Homo sapien
ctgtgtgttaacaacatagcttaaa

SEQ ID NO: 3058100 - DNA, 25 bp, Homo sapien
gccaagaggaaatctttcaaaactg

SEQ ID NO: 3058101 - DNA, 25 bp, Homo sapien
ctttcaaaactggaagggaaatgtg

SEQ ID NO: 3058102 - DNA, 25 bp, Homo sapien
ctttggagacattctactagtgaca

SEQ ID NO: 3058103 - DNA, 25 bp, Homo sapien
ctttgcaggggcctttttaggcttg

SEQ ID NO: 3058104 - DNA, 25 bp, Homo sapien
gggttattcccctccttgccagcat

SEQ ID NO: 3058105 - DNA, 25 bp, Homo sapien
cctttgggtatcttctctcccttct

SEQ ID NO: 3058106 - DNA, 25 bp, Homo sapien
tgtgcctggtctgttttggcatctc

SEQ ID NO: 3058107 - DNA, 25 bp, Homo sapien
gtttagcagacaaccttgtggatct

SEQ ID NO: 3058108 - DNA, 25 bp, Homo sapien
ggtttagcagacaaccttgtggatc

SEQ ID NO: 3058109 - DNA, 25 bp, Homo sapien
ttagcagacaaccttgtggatcttc

SEQ ID NO: 3058110 - DNA, 25 bp, Homo sapien
caggtttagcagacaaccttgtgga

SEQ ID NO: 3058111 - DNA, 25 bp, Homo sapien
gtggcagcgacggtggcaggatgta

SEQ ID NO: 3058112 - DNA, 25 bp, Homo sapien
tggtggcagcgacggtggcaggatg

SEQ ID NO: 3058113 - DNA, 25 bp, Homo sapien
cagcgacggtggcaggatgtaggcg

SEQ ID NO: 3058114 - DNA, 25 bp, Homo sapien
ggcagcgacggtggcaggatgtagg

SEQ ID NO: 3058115 - DNA, 25 bp, Homo sapien
tgcccaccttggcatgtgccacaat

SEQ ID NO: 3058116 - DNA, 25 bp, Homo sapien
gcacacatcaccaggcccagataat

SEQ ID NO: 3058117 - DNA, 25 bp, Homo sapien
ataattttttgtagagatggggtct

SEQ ID NO: 3058118 - DNA, 25 bp, Homo sapien
ccctatattgcctaggctggtctca

SEQ ID NO: 3058119 - DNA, 25 bp, Homo sapien
ggtctcaaactcgcgggcttaagca

SEQ ID NO: 3058120 - DNA, 25 bp, Homo sapien
ttggccacggtccttgacagtcacg

SEQ ID NO: 3058121 - DNA, 25 bp, Homo sapien
tgtgctatgggtcacttggccacgg

SEQ ID NO: 3058122 - DNA, 25 bp, Homo sapien
gcattgggtcctacagcaaccatga

SEQ ID NO: 3058123 - DNA, 25 bp, Homo sapien
tgtgttatgcagtatccaggctcct

SEQ ID NO: 3058124 - DNA, 25 bp, Homo sapien
tctctagttaggaaggatcagcccc

SEQ ID NO: 3058125 - DNA, 25 bp, Homo sapien
tcagcacatgcgtcagtaggcacat

SEQ ID NO: 3058126 - DNA, 25 bp, Homo sapien
taggtccccagcagttgatgagtaa

SEQ ID NO: 3058127 - DNA, 25 bp, Homo sapien
catggtagtgactgttaggtcccca

SEQ ID NO: 3058128 - DNA, 25 bp, Homo sapien
tcagttacccggatgctctcagagg

SEQ ID NO: 3058129 - DNA, 25 bp, Homo sapien
acagtttggacacctgagctcagga

SEQ ID NO: 3058130 - DNA, 25 bp, Homo sapien
gggacttcccatgacgaaactagct

SEQ ID NO: 3058131 - DNA, 25 bp, Homo sapien
gggactatctcctatggctacatgg

SEQ ID NO: 3058132 - DNA, 25 bp, Homo sapien
ggccattgactctctcccactggat

SEQ ID NO: 3058133 - DNA, 25 bp, Homo sapien
tcttgaccatagaggaggacaacag

SEQ ID NO: 3058134 - DNA, 25 bp, Homo sapien
gagttcacgtcaagcaggccattga

SEQ ID NO: 3058135 - DNA, 25 bp, Homo sapien
caaaagcagcctcttgaccatagag

SEQ ID NO: 3058136 - DNA, 25 bp, Homo sapien
gatccaagagcttgagatcctgaga

SEQ ID NO: 3058137 - DNA, 25 bp, Homo sapien
caagagcttgagatcctgagatgaa

SEQ ID NO: 3058138 - DNA, 25 bp, Homo sapien
agagcttgagatcctgagatgaaga

SEQ ID NO: 3058139 - DNA, 25 bp, Homo sapien
tccaagagcttgagatcctgagatg

SEQ ID NO: 3058140 - DNA, 25 bp, Homo sapien
ggtaaacgtgtcattcaaggctcta

SEQ ID NO: 3058141 - DNA, 25 bp, Homo sapien
ctagcatttagcgagtgcagtgccc

SEQ ID NO: 3058142 - DNA, 25 bp, Homo sapien
ttctgaattcaaatcccgggctgtt

SEQ ID NO: 3058143 - DNA, 25 bp, Homo sapien
gacttgaacgtcatggccaaaccag

SEQ ID NO: 3058144 - DNA, 25 bp, Homo sapien
tcccaaccgtggtcctgaagagctg

SEQ ID NO: 3058145 - DNA, 25 bp, Homo sapien
ctcccaaccgtggtcctgaagagct

SEQ ID NO: 3058146 - DNA, 25 bp, Homo sapien
cattctttctcccaaccgtggtcct

SEQ ID NO: 3058147 - DNA, 25 bp, Homo sapien
tgaagtcgcacactgaaggttctaa

SEQ ID NO: 3058148 - DNA, 25 bp, Homo sapien
tagtcatcgtattttgccctcccca

SEQ ID NO: 3058149 - DNA, 25 bp, Homo sapien
tgaagggaaggtatttggactttgc

SEQ ID NO: 3058150 - DNA, 25 bp, Homo sapien
ctgggaacgtagtcatcgtattttg

SEQ ID NO: 3058151 - DNA, 25 bp, Homo sapien
cacaacaggtttgtggggtctaggc

SEQ ID NO: 3058152 - DNA, 25 bp, Homo sapien
cctggttttggctggcggactgaca

SEQ ID NO: 3058153 - DNA, 25 bp, Homo sapien
ttctcctccctggttttggctggcg

SEQ ID NO: 3058154 - DNA, 25 bp, Homo sapien
ttttggctggcggactgacatcagc

SEQ ID NO: 3058155 - DNA, 25 bp, Homo sapien
ggcggactgacatcagctggtattc

SEQ ID NO: 3058156 - DNA, 25 bp, Homo sapien
cgtcgagaggccgctggagctccca

SEQ ID NO: 3058157 - DNA, 25 bp, Homo sapien
gaagcagcggcgtcgagaggccgct

SEQ ID NO: 3058158 - DNA, 25 bp, Homo sapien
ggagagcagcttgccgacccctcca

SEQ ID NO: 3058159 - DNA, 25 bp, Homo sapien
aggacagccccttagaagcagcggc

SEQ ID NO: 3058160 - DNA, 25 bp, Homo sapien
tgtccagcctcgcggggtgagctac

SEQ ID NO: 3058161 - DNA, 25 bp, Homo sapien
gggagcgatcctgggagaccctgga

SEQ ID NO: 3058162 - DNA, 25 bp, Homo sapien
agagtcctgggcgccacgcagccga

SEQ ID NO: 3058163 - DNA, 25 bp, Homo sapien
gtgagctacgagagggtgggccaac

SEQ ID NO: 3058164 - DNA, 25 bp, Homo sapien
ccctccgaggaagcggcgcggcttc

SEQ ID NO: 3058165 - DNA, 25 bp, Homo sapien
gccgccgtcccagcccctccgagga

SEQ ID NO: 3058166 - DNA, 25 bp, Homo sapien
cagccgcgggccccgagcgtcgccc

SEQ ID NO: 3058167 - DNA, 25 bp, Homo sapien
cccagcccctccgaggaagcggcgc

SEQ ID NO: 3058168 - DNA, 25 bp, Homo sapien
cactggccctcggacggtccctgac

SEQ ID NO: 3058169 - DNA, 25 bp, Homo sapien
ggttaggaccgacgtacctagcagc

SEQ ID NO: 3058170 - DNA, 25 bp, Homo sapien
acgatggcctcgctccgggtggagc

SEQ ID NO: 3058171 - DNA, 25 bp, Homo sapien
tcctcgcctccttgctgcacgatgg

SEQ ID NO: 3058172 - DNA, 25 bp, Homo sapien
aggcttttgcaactgcacgcgcagc

SEQ ID NO: 3058173 - DNA, 25 bp, Homo sapien
tcttccagtagcagtcaggcttttg

SEQ ID NO: 3058174 - DNA, 25 bp, Homo sapien
atgtgtggtgctcccaagagttcac

SEQ ID NO: 3058175 - DNA, 25 bp, Homo sapien
aacagcgggagacttgttcaagatc

SEQ ID NO: 3058176 - DNA, 25 bp, Homo sapien
tccgcacggataagaacgagaggtg

SEQ ID NO: 3058177 - DNA, 25 bp, Homo sapien
tacccgaggtgaaggagatcattga

SEQ ID NO: 3058178 - DNA, 25 bp, Homo sapien
tcaagctctggctgcgcatggagga

SEQ ID NO: 3058179 - DNA, 25 bp, Homo sapien
gatcattgaaggctgcatccgcacg

SEQ ID NO: 3058180 - DNA, 25 bp, Homo sapien
tcagcaaagcttgcggctaaaagga

SEQ ID NO: 3058181 - DNA, 25 bp, Homo sapien
gcaaagcttgcggctaaaaggaatg

SEQ ID NO: 3058182 - DNA, 25 bp, Homo sapien
caaagcttgcggctaaaaggaatga

SEQ ID NO: 3058183 - DNA, 25 bp, Homo sapien
agcttgcggctaaaaggaatgagga

SEQ ID NO: 3058184 - DNA, 25 bp, Homo sapien
tcttctcctggaactcctttgtctc

SEQ ID NO: 3058185 - DNA, 25 bp, Homo sapien
acaggagctggacagccttctccac

SEQ ID NO: 3058186 - DNA, 25 bp, Homo sapien
tcatcttctcctggaactcctttgt

SEQ ID NO: 3058187 - DNA, 25 bp, Homo sapien
ccagagcagcacctccctggagcac

SEQ ID NO: 3058188 - DNA, 25 bp, Homo sapien
ttgaagatttgtacagccggctggg

SEQ ID NO: 3058189 - DNA, 25 bp, Homo sapien
gaacgccgtgaatccatatgccatg

SEQ ID NO: 3058190 - DNA, 25 bp, Homo sapien
tgacttcatccaaggaaccggctga

SEQ ID NO: 3058191 - DNA, 25 bp, Homo sapien
aaatgctggaaacaagaacgccgtg

SEQ ID NO: 3058192 - DNA, 25 bp, Homo sapien
acagagctgccacgtctaacctcgt

SEQ ID NO: 3058193 - DNA, 25 bp, Homo sapien
tttgaccctatgtatcccactgtag

SEQ ID NO: 3058194 - DNA, 25 bp, Homo sapien
taggctcaaacactgcacagagctg

SEQ ID NO: 3058195 - DNA, 25 bp, Homo sapien
gtctaacctcgtaacaactgcgtcc

SEQ ID NO: 3058196 - DNA, 25 bp, Homo sapien
gattcaatttctacagggtcatggg

SEQ ID NO: 3058197 - DNA, 25 bp, Homo sapien
tgggctcaatcacggtccaaggtta

SEQ ID NO: 3058198 - DNA, 25 bp, Homo sapien
ttgggaaaagccacggtcgcatgca

SEQ ID NO: 3058199 - DNA, 25 bp, Homo sapien
ccaacaatgttgtgagcaggattca

SEQ ID NO: 3058200 - DNA, 25 bp, Homo sapien
ggctcgggcagctttggcctcgtct

SEQ ID NO: 3058201 - DNA, 25 bp, Homo sapien
tagctcatctaggaaacgctcctgg

SEQ ID NO: 3058202 - DNA, 25 bp, Homo sapien
gaaatcgagtagaaggtgtaaccat

SEQ ID NO: 3058203 - DNA, 25 bp, Homo sapien
tgacgcccttgccagagctcgggct

SEQ ID NO: 3058204 - DNA, 25 bp, Homo sapien
taaacgggtggttcagccctcttgc

SEQ ID NO: 3058205 - DNA, 25 bp, Homo sapien
gccgctgctgtttctaaaccctgaa

SEQ ID NO: 3058206 - DNA, 25 bp, Homo sapien
ggaggtaggttcaggaaaccacaca

SEQ ID NO: 3058207 - DNA, 25 bp, Homo sapien
tatgcggtccccttgagtctacaac

SEQ ID NO: 3058208 - DNA, 25 bp, Homo sapien
atgcctaggccggtcacgatgttcc

SEQ ID NO: 3058209 - DNA, 25 bp, Homo sapien
tctccacgcttagaatccagagggt

SEQ ID NO: 3058210 - DNA, 25 bp, Homo sapien
ggtgtcagcttctcccgagtcgggt

SEQ ID NO: 3058211 - DNA, 25 bp, Homo sapien
gaatgcagttgctcgggtgtcagct

SEQ ID NO: 3058212 - DNA, 25 bp, Homo sapien
cctcgctgggaacagtagcccttgg

SEQ ID NO: 3058213 - DNA, 25 bp, Homo sapien
taattgggttttcctcagacttgag

SEQ ID NO: 3058214 - DNA, 25 bp, Homo sapien
ggcgacgacacactcattggaaggg

SEQ ID NO: 3058215 - DNA, 25 bp, Homo sapien
ttgtagtccgcgtgccctttgcggg

SEQ ID NO: 3058216 - DNA, 25 bp, Homo sapien
tgaagacgccctgcttcacttggcc

SEQ ID NO: 3058217 - DNA, 25 bp, Homo sapien
gatcggcctccctcgttgactttca

SEQ ID NO: 3058218 - DNA, 25 bp, Homo sapien
gagttgtcgccacagagacgattga

SEQ ID NO: 3058219 - DNA, 25 bp, Homo sapien
gactttcagtttggagttgtcgcca

SEQ ID NO: 3058220 - DNA, 25 bp, Homo sapien
tgtccagctgtaaggtgacttgtgt

SEQ ID NO: 3058221 - DNA, 25 bp, Homo sapien
ggtggttactaaacaaacagtgtca

SEQ ID NO: 3058222 - DNA, 25 bp, Homo sapien
taaagcaatgggagttctccagagg

SEQ ID NO: 3058223 - DNA, 25 bp, Homo sapien
cagatttacccagcaaactggtggt

SEQ ID NO: 3058224 - DNA, 25 bp, Homo sapien
tagaacttgattctcccagaataca

SEQ ID NO: 3058225 - DNA, 25 bp, Homo sapien
cctcaacagctatctatttttacta

SEQ ID NO: 3058226 - DNA, 25 bp, Homo sapien
catacctgcattcattagaacttga

SEQ ID NO: 3058227 - DNA, 25 bp, Homo sapien
tcagatctacacaaacaaggcttcc

SEQ ID NO: 3058228 - DNA, 25 bp, Homo sapien
ccagggctggcaactatagatggca

SEQ ID NO: 3058229 - DNA, 25 bp, Homo sapien
tatctctaacacagagcagagtcgg

SEQ ID NO: 3058230 - DNA, 25 bp, Homo sapien
cagagtcggcattcagtataagaac

SEQ ID NO: 3058231 - DNA, 25 bp, Homo sapien
cacatggtgaccaggtaaagcttag

SEQ ID NO: 3058232 - DNA, 25 bp, Homo sapien
tggtattgtaaacatgtactgttta

SEQ ID NO: 3058233 - DNA, 25 bp, Homo sapien
tgtaaacatgtactgtttaatatta

SEQ ID NO: 3058234 - DNA, 25 bp, Homo sapien
ggtattgtaaacatgtactgtttaa

SEQ ID NO: 3058235 - DNA, 25 bp, Homo sapien
tattgtaaacatgtactgtttaata

SEQ ID NO: 3058236 - DNA, 25 bp, Homo sapien
gttttgatggaataggagccgccac

SEQ ID NO: 3058237 - DNA, 25 bp, Homo sapien
caagcaagaccccacttaagattcg

SEQ ID NO: 3058238 - DNA, 25 bp, Homo sapien
gttataaaattgtgaggacacccaa

SEQ ID NO: 3058239 - DNA, 25 bp, Homo sapien
agaccccacttaagattcgtcagca

SEQ ID NO: 3058240 - DNA, 25 bp, Homo sapien
tctactccaaggactaggtggtcac

SEQ ID NO: 3058241 - DNA, 25 bp, Homo sapien
tgtcattgcagagtacagggacagg

SEQ ID NO: 3058242 - DNA, 25 bp, Homo sapien
cagggacttgatcatgggaccattc

SEQ ID NO: 3058243 - DNA, 25 bp, Homo sapien
gaggcttgagctctatgccaagaaa

SEQ ID NO: 3058244 - DNA, 25 bp, Homo sapien
tcactcagcattgcgctatactgac

SEQ ID NO: 3058245 - DNA, 25 bp, Homo sapien
aatttggtcctatacaagttcactc

SEQ ID NO: 3058246 - DNA, 25 bp, Homo sapien
tgttcaatttggtcctatacaagtt

SEQ ID NO: 3058247 - DNA, 25 bp, Homo sapien
agttcactcagcattgcgctatact

SEQ ID NO: 3058248 - DNA, 25 bp, Homo sapien
tagggaagacaaaaacgtgtctcgc

SEQ ID NO: 3058249 - DNA, 25 bp, Homo sapien
ccccagaacagtataacggcagctc

SEQ ID NO: 3058250 - DNA, 25 bp, Homo sapien
ggaaagccaccattgcatggtcaaa

SEQ ID NO: 3058251 - DNA, 25 bp, Homo sapien
catggtcaaacttgttgtcccagaa

SEQ ID NO: 3058252 - DNA, 25 bp, Homo sapien
acctttccaggaagagtacatggga

SEQ ID NO: 3058253 - DNA, 25 bp, Homo sapien
caactacaataagcttgggcaagta

SEQ ID NO: 3058254 - DNA, 25 bp, Homo sapien
tcccactggaaacttgtattgtagc

SEQ ID NO: 3058255 - DNA, 25 bp, Homo sapien
tatggatctggcaccaagaaaggct

SEQ ID NO: 3058256 - DNA, 25 bp, Homo sapien
cctgaaactttttgaccattgatat

SEQ ID NO: 3058257 - DNA, 25 bp, Homo sapien
ttgtatgaaattacctcagactaca

SEQ ID NO: 3058258 - DNA, 25 bp, Homo sapien
aattacctcagactacatgtatcag

SEQ ID NO: 3058259 - DNA, 25 bp, Homo sapien
tacctcagactacatgtatcaggta

SEQ ID NO: 3058260 - DNA, 25 bp, Homo sapien
tgaaattacctcagactacatgtat

SEQ ID NO: 3058261 - DNA, 25 bp, Homo sapien
tctcaacagactgtcaaaacctgat

SEQ ID NO: 3058262 - DNA, 25 bp, Homo sapien
taaacctgaactagacaagatattg

SEQ ID NO: 3058263 - DNA, 25 bp, Homo sapien
cacttctggtgatactcaacctgta

SEQ ID NO: 3058264 - DNA, 25 bp, Homo sapien
tactggctcttcatatctaggtcta

SEQ ID NO: 3058265 - DNA, 25 bp, Homo sapien
cttagatttgtctgtcagagactcc

SEQ ID NO: 3058266 - DNA, 25 bp, Homo sapien
gatatgaatggtttccgtaaggaac

SEQ ID NO: 3058267 - DNA, 25 bp, Homo sapien
tatgaatggtttccgtaaggaacaa

SEQ ID NO: 3058268 - DNA, 25 bp, Homo sapien
agatttgtctgtcagagactccaga

SEQ ID NO: 3058269 - DNA, 25 bp, Homo sapien
caaacagagatggatacaggactcc

SEQ ID NO: 3058270 - DNA, 25 bp, Homo sapien
tgatttcactcttcattctggccaa

SEQ ID NO: 3058271 - DNA, 25 bp, Homo sapien
gggcttcttttattatgctcaactc

SEQ ID NO: 3058272 - DNA, 25 bp, Homo sapien
gggaagttacaacccaatgatttca

SEQ ID NO: 3058273 - DNA, 25 bp, Homo sapien
ggactgtaggctgggaactatgcta

SEQ ID NO: 3058274 - DNA, 25 bp, Homo sapien
ggaaaatcagatgctgacagctctt

SEQ ID NO: 3058275 - DNA, 25 bp, Homo sapien
aatgcacatcactccccaagaaagg

SEQ ID NO: 3058276 - DNA, 25 bp, Homo sapien
tatgctatagtcacgcaactcagtg

SEQ ID NO: 3058277 - DNA, 25 bp, Homo sapien
tccattccacgggaacactgggcag

SEQ ID NO: 3058278 - DNA, 25 bp, Homo sapien
cagacccatcttattggccagagca

SEQ ID NO: 3058279 - DNA, 25 bp, Homo sapien
tggccccaagcagcattaatctcat

SEQ ID NO: 3058280 - DNA, 25 bp, Homo sapien
ggcgacccagcctgaagttattgat

SEQ ID NO: 3058281 - DNA, 25 bp, Homo sapien
gatcaagtgcccttatgtgttccca

SEQ ID NO: 3058282 - DNA, 25 bp, Homo sapien
tgggtttaccatcatcacactgcat

SEQ ID NO: 3058283 - DNA, 25 bp, Homo sapien
gggataagaaatcagcaccagacag

SEQ ID NO: 3058284 - DNA, 25 bp, Homo sapien
gtgccttttccagagtagacactca

SEQ ID NO: 3058285 - DNA, 25 bp, Homo sapien
tcctttctttagaagggcggatgtc

SEQ ID NO: 3058286 - DNA, 25 bp, Homo sapien
cggatgtcaccaagctctagaattc

SEQ ID NO: 3058287 - DNA, 25 bp, Homo sapien
tttagaagggcggatgtcaccaagc

SEQ ID NO: 3058288 - DNA, 25 bp, Homo sapien
aatccctactgtgcctatcccatca

SEQ ID NO: 3058289 - DNA, 25 bp, Homo sapien
gggcataacgcatctggttttcaac

SEQ ID NO: 3058290 - DNA, 25 bp, Homo sapien
cattaaagacgttggttttcttcag

SEQ ID NO: 3058291 - DNA, 25 bp, Homo sapien
aaattcactgtattctctctgatac

SEQ ID NO: 3058292 - DNA, 25 bp, Homo sapien
tcttcagcttatccagctgcgtctg

SEQ ID NO: 3058293 - DNA, 25 bp, Homo sapien
ctgtaactgttcactgtcatcctca

SEQ ID NO: 3058294 - DNA, 25 bp, Homo sapien
tttctgccactatcttgcggttctt

SEQ ID NO: 3058295 - DNA, 25 bp, Homo sapien
gcggttcttttccacgtcttccagc

SEQ ID NO: 3058296 - DNA, 25 bp, Homo sapien
tcagcctggaccttctcgagatttt

SEQ ID NO: 3058297 - DNA, 25 bp, Homo sapien
tcagtgacgttgagctgagtgtcca

SEQ ID NO: 3058298 - DNA, 25 bp, Homo sapien
tgatgtcaaaaaggtccccagtgac

SEQ ID NO: 3058299 - DNA, 25 bp, Homo sapien
gatccacatctgtctggcccgacat

SEQ ID NO: 3058300 - DNA, 25 bp, Homo sapien
cattcctcacagagtgggtgatcca

SEQ ID NO: 3058301 - DNA, 25 bp, Homo sapien
aagtgtgggagagtcagggtagggc

SEQ ID NO: 3058302 - DNA, 25 bp, Homo sapien
ctggaagtgtgggagagtcagggta

SEQ ID NO: 3058303 - DNA, 25 bp, Homo sapien
tggaagtgtgggagagtcagggtag

SEQ ID NO: 3058304 - DNA, 25 bp, Homo sapien
gaagtgtgggagagtcagggtaggg

SEQ ID NO: 3058305 - DNA, 25 bp, Homo sapien
catgcttcctgctcaattacccact

SEQ ID NO: 3058306 - DNA, 25 bp, Homo sapien
ccaggcctactgcttgccaccggaa

SEQ ID NO: 3058307 - DNA, 25 bp, Homo sapien
ggcctactgcttgccaccggaatgg

SEQ ID NO: 3058308 - DNA, 25 bp, Homo sapien
cccatgcttcctgctcaattaccca

SEQ ID NO: 3058309 - DNA, 25 bp, Homo sapien
gttggcactttctgtggacatcatc

SEQ ID NO: 3058310 - DNA, 25 bp, Homo sapien
ggctgaggttctccatggtgccgcc

SEQ ID NO: 3058311 - DNA, 25 bp, Homo sapien
catcagatgcctccccaatcagagt

SEQ ID NO: 3058312 - DNA, 25 bp, Homo sapien
caatcagagtgaagctgttggcact

SEQ ID NO: 3058313 - DNA, 25 bp, Homo sapien
cacgggccacatgagggaacagaga

SEQ ID NO: 3058314 - DNA, 25 bp, Homo sapien
ccacgggccacatgagggaacagag

SEQ ID NO: 3058315 - DNA, 25 bp, Homo sapien
ccgcccacgggccacatgagggaac

SEQ ID NO: 3058316 - DNA, 25 bp, Homo sapien
gcccacgggccacatgagggaacag

SEQ ID NO: 3058317 - DNA, 25 bp, Homo sapien
gccagtggcagagactctcaagcac

SEQ ID NO: 3058318 - DNA, 25 bp, Homo sapien
aggaacatacccactcctagcccga

SEQ ID NO: 3058319 - DNA, 25 bp, Homo sapien
tgaggggcctcaaggaacataccca

SEQ ID NO: 3058320 - DNA, 25 bp, Homo sapien
gtggcagagactctcaagcaccagc

SEQ ID NO: 3058321 - DNA, 25 bp, Homo sapien
actcagcatgaaggttggccttggt

SEQ ID NO: 3058322 - DNA, 25 bp, Homo sapien
cactcagcatgaaggttggccttgg

SEQ ID NO: 3058323 - DNA, 25 bp, Homo sapien
gacactcagcatgaaggttggcctt

SEQ ID NO: 3058324 - DNA, 25 bp, Homo sapien
acactcagcatgaaggttggccttg

SEQ ID NO: 3058325 - DNA, 25 bp, Homo sapien
tctgaaagggccaaaaggctaggtg

SEQ ID NO: 3058326 - DNA, 25 bp, Homo sapien
ctgcagcaatgagaactaaggacct

SEQ ID NO: 3058327 - DNA, 25 bp, Homo sapien
tgatgatgcatctctatcacctggc

SEQ ID NO: 3058328 - DNA, 25 bp, Homo sapien
aatccatactggaaggtgacgggcc

SEQ ID NO: 3058329 - DNA, 25 bp, Homo sapien
tcctggcgaggagtttcaataaatg

SEQ ID NO: 3058330 - DNA, 25 bp, Homo sapien
gagacaccatcctggcgaggagttt

SEQ ID NO: 3058331 - DNA, 25 bp, Homo sapien
ggcgaggagtttcaataaatggctc

SEQ ID NO: 3058332 - DNA, 25 bp, Homo sapien
accatcctggcgaggagtttcaata

SEQ ID NO: 3058333 - DNA, 25 bp, Homo sapien
gatgttgctccacaggatccctgat

SEQ ID NO: 3058334 - DNA, 25 bp, Homo sapien
tgtccagggcaatcatacaattcac

SEQ ID NO: 3058335 - DNA, 25 bp, Homo sapien
ggccagaattaatgacctccactaa

SEQ ID NO: 3058336 - DNA, 25 bp, Homo sapien
catagtacaaggaaaaagccagatc

SEQ ID NO: 3058337 - DNA, 25 bp, Homo sapien
attacccagagatcccaaaagtccg

SEQ ID NO: 3058338 - DNA, 25 bp, Homo sapien
ggtgcagatctgtacctccaatggt

SEQ ID NO: 3058339 - DNA, 25 bp, Homo sapien
ccaatggtgcatagcagcctgatca

SEQ ID NO: 3058340 - DNA, 25 bp, Homo sapien
tctagaagcgccaagtagcctgcag

SEQ ID NO: 3058341 - DNA, 25 bp, Homo sapien
ggtctctcctggtttcgcctgggct

SEQ ID NO: 3058342 - DNA, 25 bp, Homo sapien
tctctcctggtttcgcctgggctgt

SEQ ID NO: 3058343 - DNA, 25 bp, Homo sapien
ctcctgagttagtctcttcctcctg

SEQ ID NO: 3058344 - DNA, 25 bp, Homo sapien
tctcctggtttcgcctgggctgtgg

SEQ ID NO: 3058345 - DNA, 25 bp, Homo sapien
accctctttccaagggtctcgctga

SEQ ID NO: 3058346 - DNA, 25 bp, Homo sapien
cttccacattcttgaccaccctctt

SEQ ID NO: 3058347 - DNA, 25 bp, Homo sapien
ccctctttccaagggtctcgctgac

SEQ ID NO: 3058348 - DNA, 25 bp, Homo sapien
cattcttgaccaccctctttccaag

SEQ ID NO: 3058349 - DNA, 25 bp, Homo sapien
agcgctggcacacgaagctcacctg

SEQ ID NO: 3058350 - DNA, 25 bp, Homo sapien
aggatcttgaaactcgtgtccagtt

SEQ ID NO: 3058351 - DNA, 25 bp, Homo sapien
atggtgctgttgttggacgtcttag

SEQ ID NO: 3058352 - DNA, 25 bp, Homo sapien
tgttggacgtcttagacccttccat

SEQ ID NO: 3058353 - DNA, 25 bp, Homo sapien
tgtcttcagcgacttcccggtagcc

SEQ ID NO: 3058354 - DNA, 25 bp, Homo sapien
aagtccggtctaccgcggaggcact

SEQ ID NO: 3058355 - DNA, 25 bp, Homo sapien
tccagaactaccatcgctctgtctt

SEQ ID NO: 3058356 - DNA, 25 bp, Homo sapien
agcgaggcctccagaactaccatcg

SEQ ID NO: 3058357 - DNA, 25 bp, Homo sapien
gcttcatagtcctgcgtttcttcct

SEQ ID NO: 3058358 - DNA, 25 bp, Homo sapien
cttcatagtcctgcgtttcttcctg

SEQ ID NO: 3058359 - DNA, 25 bp, Homo sapien
ttcatagtcctgcgtttcttcctgc

SEQ ID NO: 3058360 - DNA, 25 bp, Homo sapien
tgtatacgcccatacagacatgcac

SEQ ID NO: 3058361 - DNA, 25 bp, Homo sapien
tataatgggcgttttcacatgcaca

SEQ ID NO: 3058362 - DNA, 25 bp, Homo sapien
taccttaggccttcagtcaattccg

SEQ ID NO: 3058363 - DNA, 25 bp, Homo sapien
gatcctcccacagttgccctggtga

SEQ ID NO: 3058364 - DNA, 25 bp, Homo sapien
tagcctcttggtacccagggtgagt

SEQ ID NO: 3058365 - DNA, 25 bp, Homo sapien
gctcttttattctaccacggctgga

SEQ ID NO: 3058366 - DNA, 25 bp, Homo sapien
gaaggtttctgcaagtgtgaggtcc

SEQ ID NO: 3058367 - DNA, 25 bp, Homo sapien
ggagagttgatacctgcagtcagcc

SEQ ID NO: 3058368 - DNA, 25 bp, Homo sapien
ccctggtgcaatgctctggtggcta

SEQ ID NO: 3058369 - DNA, 25 bp, Homo sapien
ggtggctagggatgtactcatgctc

SEQ ID NO: 3058370 - DNA, 25 bp, Homo sapien
tatgtgtgcacgcttggacacccac

SEQ ID NO: 3058371 - DNA, 25 bp, Homo sapien
catggacacctagccaccctgttgt

SEQ ID NO: 3058372 - DNA, 25 bp, Homo sapien
gagtgatacccatgaactgccagta

SEQ ID NO: 3058373 - DNA, 25 bp, Homo sapien
tagaggctgctatcgttccatgtgt

SEQ ID NO: 3058374 - DNA, 25 bp, Homo sapien
tcaaattacttggagggctgcctag

SEQ ID NO: 3058375 - DNA, 25 bp, Homo sapien
gaatgaactggttcaaggcgcgtcc

SEQ ID NO: 3058376 - DNA, 25 bp, Homo sapien
tgatacagccttacaatacaatagt

SEQ ID NO: 3058377 - DNA, 25 bp, Homo sapien
gaaatgtgtatagcgcacttcccat

SEQ ID NO: 3058378 - DNA, 25 bp, Homo sapien
aattgcttatgtatgcctattcaga

SEQ ID NO: 3058379 - DNA, 25 bp, Homo sapien
ggactggttaaatcaattctgatac

SEQ ID NO: 3058380 - DNA, 25 bp, Homo sapien
tgtttgcagacctgagccgagagga

SEQ ID NO: 3058381 - DNA, 25 bp, Homo sapien
tgtgatgcgctttctgacccagcag

SEQ ID NO: 3058382 - DNA, 25 bp, Homo sapien
ccagccctcggacaactgtgtcttc

SEQ ID NO: 3058383 - DNA, 25 bp, Homo sapien
gagctgacggctgtgatgcgctttc

SEQ ID NO: 3058384 - DNA, 25 bp, Homo sapien
tccttattccttatacatttattaa

SEQ ID NO: 3058385 - DNA, 25 bp, Homo sapien
tattcaaattgtatagactcatggt

SEQ ID NO: 3058386 - DNA, 25 bp, Homo sapien
ttccttattccttatacatttatta

SEQ ID NO: 3058387 - DNA, 25 bp, Homo sapien
ctacttgtgtgtgtggaccataaag

SEQ ID NO: 3058388 - DNA, 25 bp, Homo sapien
catagtgggcccttgagaaatacta

SEQ ID NO: 3058389 - DNA, 25 bp, Homo sapien
agaactcttagtctctggccgggca

SEQ ID NO: 3058390 - DNA, 25 bp, Homo sapien
gagaaatactaggtattgttgtgat

SEQ ID NO: 3058391 - DNA, 25 bp, Homo sapien
ttttttaatgagacataattcacat

SEQ ID NO: 3058392 - DNA, 25 bp, Homo sapien
aattcatccctttaaagtatacaat

SEQ ID NO: 3058393 - DNA, 25 bp, Homo sapien
aagtatacaatttcagccgggtgca

SEQ ID NO: 3058394 - DNA, 25 bp, Homo sapien
cataaaattcatccctttaaagtat

SEQ ID NO: 3058395 - DNA, 25 bp, Homo sapien
tgttgtagtgtatgtcagtgcctca

SEQ ID NO: 3058396 - DNA, 25 bp, Homo sapien
cgtaatgtttgtgagatacatccat

SEQ ID NO: 3058397 - DNA, 25 bp, Homo sapien
tgtattctggcatgaaaagattcaa

SEQ ID NO: 3058398 - DNA, 25 bp, Homo sapien
cattcatccgttggtgggtatttga

SEQ ID NO: 3058399 - DNA, 25 bp, Homo sapien
gtgtcccgtcccagcagatggtgaa

SEQ ID NO: 3058400 - DNA, 25 bp, Homo sapien
ggtgtcccgtcccagcagatggtga

SEQ ID NO: 3058401 - DNA, 25 bp, Homo sapien
ttcatacaaggactaaagccgtggg

SEQ ID NO: 3058402 - DNA, 25 bp, Homo sapien
tggaaatgctctgtcttgccctgaa

SEQ ID NO: 3058403 - DNA, 25 bp, Homo sapien
gctgctgtggctcacttgctgacca

SEQ ID NO: 3058404 - DNA, 25 bp, Homo sapien
cagaagagggatcatcaactgggat

SEQ ID NO: 3058405 - DNA, 25 bp, Homo sapien
tggggcaaatctggtaaacttcctg

SEQ ID NO: 3058406 - DNA, 25 bp, Homo sapien
caccctgacacttgacctgtggctg

SEQ ID NO: 3058407 - DNA, 25 bp, Homo sapien
tcctgggggtgccacagactcatct

SEQ ID NO: 3058408 - DNA, 25 bp, Homo sapien
tcaggctccgtggccggagagtctg

SEQ ID NO: 3058409 - DNA, 25 bp, Homo sapien
tttcacgacttgtgcagggcccaca

SEQ ID NO: 3058410 - DNA, 25 bp, Homo sapien
cacgaatttcacgacttgtgcaggg

SEQ ID NO: 3058411 - DNA, 25 bp, Homo sapien
atgcttcacgaatttcacgacttgt

SEQ ID NO: 3058412 - DNA, 25 bp, Homo sapien
acgacttgtgcagggcccacactaa

SEQ ID NO: 3058413 - DNA, 25 bp, Homo sapien
gcaacagctgggcaattgatgactt

SEQ ID NO: 3058414 - DNA, 25 bp, Homo sapien
ggacagcggtttgggcttagctcaa

SEQ ID NO: 3058415 - DNA, 25 bp, Homo sapien
tctgagagtctgctaaggaaaagga

SEQ ID NO: 3058416 - DNA, 25 bp, Homo sapien
ttaaaatccggtgatgcccatggcg

SEQ ID NO: 3058417 - DNA, 25 bp, Homo sapien
agcagttgatctggccagtttccca

SEQ ID NO: 3058418 - DNA, 25 bp, Homo sapien
gacagcagttgatctggccagtttc

SEQ ID NO: 3058419 - DNA, 25 bp, Homo sapien
tgtccaccatgaaacacttcctcca

SEQ ID NO: 3058420 - DNA, 25 bp, Homo sapien
gtgacagcagttgatctggccagtt

SEQ ID NO: 3058421 - DNA, 25 bp, Homo sapien
cctgaggagtggcttgcttgggtac

SEQ ID NO: 3058422 - DNA, 25 bp, Homo sapien
tgtacttcctggcatctttccttca

SEQ ID NO: 3058423 - DNA, 25 bp, Homo sapien
tagttgtggggaaaatgcctgagga

SEQ ID NO: 3058424 - DNA, 25 bp, Homo sapien
aagcctctggatttctagttgtggg

SEQ ID NO: 3058425 - DNA, 25 bp, Homo sapien
tttaaattagtggattctgcagggc

SEQ ID NO: 3058426 - DNA, 25 bp, Homo sapien
tggttgaattaaaccggagcacttc

SEQ ID NO: 3058427 - DNA, 25 bp, Homo sapien
gaacccctctctggagatagttctt

SEQ ID NO: 3058428 - DNA, 25 bp, Homo sapien
aacttttaattcctcagagagccag

SEQ ID NO: 3058429 - DNA, 25 bp, Homo sapien
aggaggaccacctgatgccgggagt

SEQ ID NO: 3058430 - DNA, 25 bp, Homo sapien
ggcaggaggaccacctgatgccggg

SEQ ID NO: 3058431 - DNA, 25 bp, Homo sapien
caggaggaccacctgatgccgggag

SEQ ID NO: 3058432 - DNA, 25 bp, Homo sapien
gaggaccacctgatgccgggagttt

SEQ ID NO: 3058433 - DNA, 25 bp, Homo sapien
gatgcaaaacgatcccttaagccca

SEQ ID NO: 3058434 - DNA, 25 bp, Homo sapien
gacctttgagaatccacggtgtctc

SEQ ID NO: 3058435 - DNA, 25 bp, Homo sapien
tgtctcgatgcagtcagctttctaa

SEQ ID NO: 3058436 - DNA, 25 bp, Homo sapien
ctcatatatccacaagacctttgag

SEQ ID NO: 3058437 - DNA, 25 bp, Homo sapien
caggtggaaagatgaggaccagctc

SEQ ID NO: 3058438 - DNA, 25 bp, Homo sapien
cggataaaaacgtgctggaggaagc

SEQ ID NO: 3058439 - DNA, 25 bp, Homo sapien
cccacggataaaaacgtgctggagg

SEQ ID NO: 3058440 - DNA, 25 bp, Homo sapien
ctggcaggtggaaagatgaggacca

SEQ ID NO: 3058441 - DNA, 25 bp, Homo sapien
tagttactccacaacagaggcttat

SEQ ID NO: 3058442 - DNA, 25 bp, Homo sapien
tgccctggcatgacccagacagtgg

SEQ ID NO: 3058443 - DNA, 25 bp, Homo sapien
catgactatgaggttgctctgatcc

SEQ ID NO: 3058444 - DNA, 25 bp, Homo sapien
cccagaggtcactgcaatagttact

SEQ ID NO: 3058445 - DNA, 25 bp, Homo sapien
gaaggaccaaacatcttttgtagaa

SEQ ID NO: 3058446 - DNA, 25 bp, Homo sapien
tttagtcctctgtcttaatagaagc

SEQ ID NO: 3058447 - DNA, 25 bp, Homo sapien
tgttatcaaggatgaatttctccct

SEQ ID NO: 3058448 - DNA, 25 bp, Homo sapien
gaggcacagactggaaagtttaaag

SEQ ID NO: 3058449 - DNA, 25 bp, Homo sapien
tccttaggtagagtagctaaggctc

SEQ ID NO: 3058450 - DNA, 25 bp, Homo sapien
cttaggtagagtagctaaggctcag

SEQ ID NO: 3058451 - DNA, 25 bp, Homo sapien
ctccttaggtagagtagctaaggct

SEQ ID NO: 3058452 - DNA, 25 bp, Homo sapien
ccttaggtagagtagctaaggctca

SEQ ID NO: 3058453 - DNA, 25 bp, Homo sapien
agtataccatacattatcattcaaa

SEQ ID NO: 3058454 - DNA, 25 bp, Homo sapien
aaccatcctgctcataacatctttg

SEQ ID NO: 3058455 - DNA, 25 bp, Homo sapien
tccttgcctgtttttcaatctcatc

SEQ ID NO: 3058456 - DNA, 25 bp, Homo sapien
tgaagcctatttatttgaaagtcct

SEQ ID NO: 3058457 - DNA, 25 bp, Homo sapien
ttataccgtccctttgctgatggtg

SEQ ID NO: 3058458 - DNA, 25 bp, Homo sapien
accgtccctttgctgatggtgatgt

SEQ ID NO: 3058459 - DNA, 25 bp, Homo sapien
tataccgtccctttgctgatggtga

SEQ ID NO: 3058460 - DNA, 25 bp, Homo sapien
tgttctggttgaccagactatcctc

SEQ ID NO: 3058461 - DNA, 25 bp, Homo sapien
taatccagtgaaatttagcaatggg

SEQ ID NO: 3058462 - DNA, 25 bp, Homo sapien
agttctgatgacccactaccatcgg

SEQ ID NO: 3058463 - DNA, 25 bp, Homo sapien
tagcaatggggggttgtataccaac

SEQ ID NO: 3058464 - DNA, 25 bp, Homo sapien
atgacccactaccatcggaccagcc

SEQ ID NO: 3058465 - DNA, 25 bp, Homo sapien
aaatatcccttcctgtatgtatcaa

SEQ ID NO: 3058466 - DNA, 25 bp, Homo sapien
gatttatttgttgcacctatccata

SEQ ID NO: 3058467 - DNA, 25 bp, Homo sapien
aggatttatttgttgcacctatcca

SEQ ID NO: 3058468 - DNA, 25 bp, Homo sapien
tttatttgttgcacctatccataag

SEQ ID NO: 3058469 - DNA, 25 bp, Homo sapien
aacaggaggtgagtgccctaagccc

SEQ ID NO: 3058470 - DNA, 25 bp, Homo sapien
aaacaggaggtgagtgccctaagcc

SEQ ID NO: 3058471 - DNA, 25 bp, Homo sapien
gaaacaggaggtgagtgccctaagc

SEQ ID NO: 3058472 - DNA, 25 bp, Homo sapien
tccgccggctcatcttggtggcctt

SEQ ID NO: 3058473 - DNA, 25 bp, Homo sapien
ccttagcactctgcgtgctgatgta

SEQ ID NO: 3058474 - DNA, 25 bp, Homo sapien
tgcgcctccatccgccggctcatct

SEQ ID NO: 3058475 - DNA, 25 bp, Homo sapien
atgtagtcctggagaagcgcctgcg

SEQ ID NO: 3058476 - DNA, 25 bp, Homo sapien
tgagtctttttccagggactgggag

SEQ ID NO: 3058477 - DNA, 25 bp, Homo sapien
cagggagactttgagggaaaagtca

SEQ ID NO: 3058478 - DNA, 25 bp, Homo sapien
agtcagggagactttgagggaaaag

SEQ ID NO: 3058479 - DNA, 25 bp, Homo sapien
ctggggaacagaggtatagtcaggg

SEQ ID NO: 3058480 - DNA, 25 bp, Homo sapien
tttctcatcgcccacagttaagaac

SEQ ID NO: 3058481 - DNA, 25 bp, Homo sapien
ggccctgccagtaagaagagtccac

SEQ ID NO: 3058482 - DNA, 25 bp, Homo sapien
cctgccagtaagaagagtccaccac

SEQ ID NO: 3058483 - DNA, 25 bp, Homo sapien
cccagggtctccacagacgcaggtg

SEQ ID NO: 3058484 - DNA, 25 bp, Homo sapien
gatgaatgatgatacagcccctcca

SEQ ID NO: 3058485 - DNA, 25 bp, Homo sapien
ccaagtgacgctcctgatgaatgat

SEQ ID NO: 3058486 - DNA, 25 bp, Homo sapien
tactgaaggatgtagagtcaacccc

SEQ ID NO: 3058487 - DNA, 25 bp, Homo sapien
aaactttttgagagcaactatggga

SEQ ID NO: 3058488 - DNA, 25 bp, Homo sapien
gaatctcactctgtagcccatgcta

SEQ ID NO: 3058489 - DNA, 25 bp, Homo sapien
ccagcaaatttttgtcttctgtttt

SEQ ID NO: 3058490 - DNA, 25 bp, Homo sapien
gcaaatttttgtcttctgttttgag

SEQ ID NO: 3058491 - DNA, 25 bp, Homo sapien
acagaatctcactctgtagcccatg

SEQ ID NO: 3058492 - DNA, 25 bp, Homo sapien
caggccggggtagagaatctcatgc

SEQ ID NO: 3058493 - DNA, 25 bp, Homo sapien
tcctcctcatgtgttcatgtggagg

SEQ ID NO: 3058494 - DNA, 25 bp, Homo sapien
tcacttatgtctccctaggtctcta

SEQ ID NO: 3058495 - DNA, 25 bp, Homo sapien
gagggactttggctaaactagcgcc

SEQ ID NO: 3058496 - DNA, 25 bp, Homo sapien
cattggcaatgatattcatgaactc

SEQ ID NO: 3058497 - DNA, 25 bp, Homo sapien
tgacccaatctcattggcaatgata

SEQ ID NO: 3058498 - DNA, 25 bp, Homo sapien
tctgacccaatctcattggcaatga

SEQ ID NO: 3058499 - DNA, 25 bp, Homo sapien
aatctcattggcaatgatattcatg

SEQ ID NO: 3058500 - DNA, 25 bp, Homo sapien
tctcccttaaataggattcaccagg

SEQ ID NO: 3058501 - DNA, 25 bp, Homo sapien
tgtgaaactgcaggaagcctggccc

SEQ ID NO: 3058502 - DNA, 25 bp, Homo sapien
ctcagcctctgcagtttgtaatcaa

SEQ ID NO: 3058503 - DNA, 25 bp, Homo sapien
ttcaccaggataagcagaaatctgt

SEQ ID NO: 3058504 - DNA, 25 bp, Homo sapien
tctgttggtccaggccggagtgctg

SEQ ID NO: 3058505 - DNA, 25 bp, Homo sapien
ggcgcgtactaccatgcctagctaa

SEQ ID NO: 3058506 - DNA, 25 bp, Homo sapien
tggcgtgatctccactcaccacaac

SEQ ID NO: 3058507 - DNA, 25 bp, Homo sapien
actcaccacaacctctgcctcccgg

SEQ ID NO: 3058508 - DNA, 25 bp, Homo sapien
gtgtaatatgaccacacctccccag

SEQ ID NO: 3058509 - DNA, 25 bp, Homo sapien
tcctgaggctatgggcaatgtgcac

SEQ ID NO: 3058510 - DNA, 25 bp, Homo sapien
ggactgttcctgaggctatgggcaa

SEQ ID NO: 3058511 - DNA, 25 bp, Homo sapien
tgtgtaatatgaccacacctcccca

SEQ ID NO: 3058512 - DNA, 25 bp, Homo sapien
tggtaactcagtagataaatggaaa

SEQ ID NO: 3058513 - DNA, 25 bp, Homo sapien
aatggatatggtaactcagtagata

SEQ ID NO: 3058514 - DNA, 25 bp, Homo sapien
tatggtaactcagtagataaatgga

SEQ ID NO: 3058515 - DNA, 25 bp, Homo sapien
aaatggatatggtaactcagtagat

SEQ ID NO: 3058516 - DNA, 25 bp, Homo sapien
aggatcttggtggagttctggagct

SEQ ID NO: 3058517 - DNA, 25 bp, Homo sapien
gacctgcgcagcttcccagtcgttt

SEQ ID NO: 3058518 - DNA, 25 bp, Homo sapien
gcagtcagggaccaggagatattct

SEQ ID NO: 3058519 - DNA, 25 bp, Homo sapien
cagaggagacctgcgcagcttccca

SEQ ID NO: 3058520 - DNA, 25 bp, Homo sapien
gatgttggggacataaatcaataat

SEQ ID NO: 3058521 - DNA, 25 bp, Homo sapien
cacttttcgtggttctgatttacta

SEQ ID NO: 3058522 - DNA, 25 bp, Homo sapien
gatttactatccaaagcacttgatc

SEQ ID NO: 3058523 - DNA, 25 bp, Homo sapien
attaaccacttttcgtggttctgat

SEQ ID NO: 3058524 - DNA, 25 bp, Homo sapien
ggttctgatttactatccaaagcac

SEQ ID NO: 3058525 - DNA, 25 bp, Homo sapien
gcctggccgcactttatcatttacg

SEQ ID NO: 3058526 - DNA, 25 bp, Homo sapien
cccagaggtaagagattatgtcgaa

SEQ ID NO: 3058527 - DNA, 25 bp, Homo sapien
taatcgaaggtactgaaacaggcat

SEQ ID NO: 3058528 - DNA, 25 bp, Homo sapien
gattgcatcttatctcccagaggta

SEQ ID NO: 3058529 - DNA, 25 bp, Homo sapien
ggttcccagacagaaatatcaggtt

SEQ ID NO: 3058530 - DNA, 25 bp, Homo sapien
gcacccggttcccagacagaaatat

SEQ ID NO: 3058531 - DNA, 25 bp, Homo sapien
cagaaatatcaggttggttctgttc

SEQ ID NO: 3058532 - DNA, 25 bp, Homo sapien
ttcagcacccggttcccagacagaa

SEQ ID NO: 3058533 - DNA, 25 bp, Homo sapien
tttcacttaggactcctcgattatc

SEQ ID NO: 3058534 - DNA, 25 bp, Homo sapien
tcacttaggactcctcgattatccc

SEQ ID NO: 3058535 - DNA, 25 bp, Homo sapien
cctcgattatccccctctcccactc

SEQ ID NO: 3058536 - DNA, 25 bp, Homo sapien
gagatttcacttaggactcctcgat

SEQ ID NO: 3058537 - DNA, 25 bp, Homo sapien
gctcacatgggtcccacagcacatg

SEQ ID NO: 3058538 - DNA, 25 bp, Homo sapien
gcacatgttggaatcaacgccctcg

SEQ ID NO: 3058539 - DNA, 25 bp, Homo sapien
tgttaacaacccgaatgggcccagc

SEQ ID NO: 3058540 - DNA, 25 bp, Homo sapien
gaaggtcactgagattgctcacatg

SEQ ID NO: 3058541 - DNA, 25 bp, Homo sapien
tctgatgaggaatcattccgcagaa

SEQ ID NO: 3058542 - DNA, 25 bp, Homo sapien
gaatctgatgaggaatcattccgca

SEQ ID NO: 3058543 - DNA, 25 bp, Homo sapien
tctgaatctgatgaggaatcattcc

SEQ ID NO: 3058544 - DNA, 25 bp, Homo sapien
tgaggaatcattccgcagaaaccat

SEQ ID NO: 3058545 - DNA, 25 bp, Homo sapien
gctctgctcaatggcagctacttgc

SEQ ID NO: 3058546 - DNA, 25 bp, Homo sapien
attttttcattgacgctctgctcaa

SEQ ID NO: 3058547 - DNA, 25 bp, Homo sapien
cagttctcggacattcacaggcagc

SEQ ID NO: 3058548 - DNA, 25 bp, Homo sapien
tcatccaggctcagttctcggacat

SEQ ID NO: 3058549 - DNA, 25 bp, Homo sapien
ggtgtccagctcaatcgcactccga

SEQ ID NO: 3058550 - DNA, 25 bp, Homo sapien
gtccagctcaatcgcactccgaaat

SEQ ID NO: 3058551 - DNA, 25 bp, Homo sapien
ctgcagtcatagagggggtgtccag

SEQ ID NO: 3058552 - DNA, 25 bp, Homo sapien
caatcgcactccgaaatctccctaa

SEQ ID NO: 3058553 - DNA, 25 bp, Homo sapien
tggtcagcaactgccgtgatgagat

SEQ ID NO: 3058554 - DNA, 25 bp, Homo sapien
tgtcttcagcttaaatagatggtca

SEQ ID NO: 3058555 - DNA, 25 bp, Homo sapien
ttaaatagatggtcagcaactgccg

SEQ ID NO: 3058556 - DNA, 25 bp, Homo sapien
tcagcttaaatagatggtcagcaac

SEQ ID NO: 3058557 - DNA, 25 bp, Homo sapien
gaggccttatgataccatttcacag

SEQ ID NO: 3058558 - DNA, 25 bp, Homo sapien
gagatcaaataacttgccatggcaa

SEQ ID NO: 3058559 - DNA, 25 bp, Homo sapien
ttgttgaagacctgctaagcactgg

SEQ ID NO: 3058560 - DNA, 25 bp, Homo sapien
gaaaagtgagaagcctacatactcc

SEQ ID NO: 3058561 - DNA, 25 bp, Homo sapien
tacctaccaaatgcaaggcacaggg

SEQ ID NO: 3058562 - DNA, 25 bp, Homo sapien
agcagcatccctgattgacaagagt

SEQ ID NO: 3058563 - DNA, 25 bp, Homo sapien
gaacttaagttccaatatgcagcat

SEQ ID NO: 3058564 - DNA, 25 bp, Homo sapien
tgacataagagatacagcagcatcc

SEQ ID NO: 3058565 - DNA, 25 bp, Homo sapien
aaactacgtctcagtcatcacagca

SEQ ID NO: 3058566 - DNA, 25 bp, Homo sapien
gcaactgctccggtgttatgtcccc

SEQ ID NO: 3058567 - DNA, 25 bp, Homo sapien
tacagctgattctgaatagtctgtc

SEQ ID NO: 3058568 - DNA, 25 bp, Homo sapien
cccatacatggcaactgctccggtg

SEQ ID NO: 3058569 - DNA, 25 bp, Homo sapien
aatctacccggaccagaacctggct

SEQ ID NO: 3058570 - DNA, 25 bp, Homo sapien
tccgctcccaatctacccggaccag

SEQ ID NO: 3058571 - DNA, 25 bp, Homo sapien
tccccacggcgagtcactctcagca

SEQ ID NO: 3058572 - DNA, 25 bp, Homo sapien
gaaatgatcagcctgttccccacgg

SEQ ID NO: 3058573 - DNA, 25 bp, Homo sapien
agcaccacttggaaaccgctcagca

SEQ ID NO: 3058574 - DNA, 25 bp, Homo sapien
ctccgcgggacagcaggagaccacg

SEQ ID NO: 3058575 - DNA, 25 bp, Homo sapien
cttggaaaccgctcagcacttcttt

SEQ ID NO: 3058576 - DNA, 25 bp, Homo sapien
ttcttgccgttgctcccttcagtct

SEQ ID NO: 3058577 - DNA, 25 bp, Homo sapien
ttgccggcccggcagtctcaagtgc

SEQ ID NO: 3058578 - DNA, 25 bp, Homo sapien
cggcagtctcaagtgcctcgccgtg

SEQ ID NO: 3058579 - DNA, 25 bp, Homo sapien
agtctcaagtgcctcgccgtgacgc

SEQ ID NO: 3058580 - DNA, 25 bp, Homo sapien
cttgccggcccggcagtctcaagtg

SEQ ID NO: 3058581 - DNA, 25 bp, Homo sapien
cataactgtcacgctgacaccagaa

SEQ ID NO: 3058582 - DNA, 25 bp, Homo sapien
tgtcacgctgacaccagaacgccat

SEQ ID NO: 3058583 - DNA, 25 bp, Homo sapien
taactgtcacgctgacaccagaacg

SEQ ID NO: 3058584 - DNA, 25 bp, Homo sapien
aactgtcacgctgacaccagaacgc

SEQ ID NO: 3058585 - DNA, 25 bp, Homo sapien
aggcgtgtgaggaggcgcacgcgca

SEQ ID NO: 3058586 - DNA, 25 bp, Homo sapien
gcaggcgtgtgaggaggcgcacgcg

SEQ ID NO: 3058587 - DNA, 25 bp, Homo sapien
ctgcaggcgtgtgaggaggcgcacg

SEQ ID NO: 3058588 - DNA, 25 bp, Homo sapien
tgaggaggcgcacgcgcagagaagc

SEQ ID NO: 3058589 - DNA, 25 bp, Homo sapien
agagcgacgtgggacaaacgtcatc

SEQ ID NO: 3058590 - DNA, 25 bp, Homo sapien
gacaaacgtcatcaagggcgcttgt

SEQ ID NO: 3058591 - DNA, 25 bp, Homo sapien
cgtgggacaaacgtcatcaagggcg

SEQ ID NO: 3058592 - DNA, 25 bp, Homo sapien
tgggagcgaacggagagcgacgtgg

SEQ ID NO: 3058593 - DNA, 25 bp, Homo sapien
gaggaagcaccccagcttggttact

SEQ ID NO: 3058594 - DNA, 25 bp, Homo sapien
tggacaaatagaatagctgttggac

SEQ ID NO: 3058595 - DNA, 25 bp, Homo sapien
gaataagtacaagaaggaaacagac

SEQ ID NO: 3058596 - DNA, 25 bp, Homo sapien
tacagtcaactgtacatattaggca

SEQ ID NO: 3058597 - DNA, 25 bp, Homo sapien
gatctcagaagaacttggtgcacag

SEQ ID NO: 3058598 - DNA, 25 bp, Homo sapien
caaagcgctgacaaaggcctaggcg

SEQ ID NO: 3058599 - DNA, 25 bp, Homo sapien
cctgcatctgatgtggagccatagt

SEQ ID NO: 3058600 - DNA, 25 bp, Homo sapien
taagaaatcagaagccctaccagtc

SEQ ID NO: 3058601 - DNA, 25 bp, Homo sapien
atccaaatcatccatggcaggtgga

SEQ ID NO: 3058602 - DNA, 25 bp, Homo sapien
gcataatgttccacatgagccagct

SEQ ID NO: 3058603 - DNA, 25 bp, Homo sapien
tatcaaagtccacagacagccacac

SEQ ID NO: 3058604 - DNA, 25 bp, Homo sapien
ttcccagtctctccagttatcaaag

SEQ ID NO: 3058605 - DNA, 25 bp, Homo sapien
tctctccagttatcaaagtccacag

SEQ ID NO: 3058606 - DNA, 25 bp, Homo sapien
gaggcaccaagagtcacaggccagg

SEQ ID NO: 3058607 - DNA, 25 bp, Homo sapien
aagaggcaccaagagtcacaggcca

SEQ ID NO: 3058608 - DNA, 25 bp, Homo sapien
agaggcaccaagagtcacaggccag

SEQ ID NO: 3058609 - DNA, 25 bp, Homo sapien
gtcagtaggtccctagtcctcccaa

SEQ ID NO: 3058610 - DNA, 25 bp, Homo sapien
ccaactgcactcctttgaccaggaa

SEQ ID NO: 3058611 - DNA, 25 bp, Homo sapien
cacaaagctaggcatgatagagtct

SEQ ID NO: 3058612 - DNA, 25 bp, Homo sapien
ctgaaaatctcagaagtcctaccct

SEQ ID NO: 3058613 - DNA, 25 bp, Homo sapien
gggaagagcgcttatcctgggagtc

SEQ ID NO: 3058614 - DNA, 25 bp, Homo sapien
aacaagtaatagagcgggaagagcg

SEQ ID NO: 3058615 - DNA, 25 bp, Homo sapien
ttctcacaaaacaagtaatagagcg

SEQ ID NO: 3058616 - DNA, 25 bp, Homo sapien
tcctccttggtaagccgcggccagg

SEQ ID NO: 3058617 - DNA, 25 bp, Homo sapien
tagaactcaatctcattgtacaact

SEQ ID NO: 3058618 - DNA, 25 bp, Homo sapien
attgtacaactccactccatcggca

SEQ ID NO: 3058619 - DNA, 25 bp, Homo sapien
ttgtacaactccactccatcggcat

SEQ ID NO: 3058620 - DNA, 25 bp, Homo sapien
ttggcatagaactcaatctcattgt

SEQ ID NO: 3058621 - DNA, 25 bp, Homo sapien
cggaatactccgtgtggggacatta

SEQ ID NO: 3058622 - DNA, 25 bp, Homo sapien
ggaatactccgtgtggggacattag

SEQ ID NO: 3058623 - DNA, 25 bp, Homo sapien
gaagctgaggagatgcggaatactc

SEQ ID NO: 3058624 - DNA, 25 bp, Homo sapien
tgaggagatgcggaatactccgtgt

SEQ ID NO: 3058625 - DNA, 25 bp, Homo sapien
tcctcaataagcacgtggacatcgg

SEQ ID NO: 3058626 - DNA, 25 bp, Homo sapien
tggacatcggtgctgtcctcaacac

SEQ ID NO: 3058627 - DNA, 25 bp, Homo sapien
gaacacaatgcggtgatcctcaata

SEQ ID NO: 3058628 - DNA, 25 bp, Homo sapien
taagcacgtggacatcggtgctgtc

SEQ ID NO: 3058629 - DNA, 25 bp, Homo sapien
gtaccacaaggtccgggcgtgctgc

SEQ ID NO: 3058630 - DNA, 25 bp, Homo sapien
gcctgtcgtaccacaaggtccgggc

SEQ ID NO: 3058631 - DNA, 25 bp, Homo sapien
ctgtcgtaccacaaggtccgggcgt

SEQ ID NO: 3058632 - DNA, 25 bp, Homo sapien
ctgggcctgtcgtaccacaaggtcc

SEQ ID NO: 3058633 - DNA, 25 bp, Homo sapien
aagagaagttgaggtgtggcttcat

SEQ ID NO: 3058634 - DNA, 25 bp, Homo sapien
gaacgtgcaagactaggaaactagg

SEQ ID NO: 3058635 - DNA, 25 bp, Homo sapien
gactacccagggacctttgatgcca

SEQ ID NO: 3058636 - DNA, 25 bp, Homo sapien
tcaaagtggagctaaatgagacaga

SEQ ID NO: 3058637 - DNA, 25 bp, Homo sapien
ggccagggggagcaccggagccgga

SEQ ID NO: 3058638 - DNA, 25 bp, Homo sapien
gggagcaccggagccggaaacactc

SEQ ID NO: 3058639 - DNA, 25 bp, Homo sapien
acctggagcgcccagaagacttgga

SEQ ID NO: 3058640 - DNA, 25 bp, Homo sapien
agaacctggagcgcccagaagactt

SEQ ID NO: 3058641 - DNA, 25 bp, Homo sapien
aagagagaacatgacctggcagcca

SEQ ID NO: 3058642 - DNA, 25 bp, Homo sapien
tagacgctacacacagggaatgact

SEQ ID NO: 3058643 - DNA, 25 bp, Homo sapien
gaagagacaacccatctgctggaac

SEQ ID NO: 3058644 - DNA, 25 bp, Homo sapien
tcagtgtctgattcacaataggcgc

SEQ ID NO: 3058645 - DNA, 25 bp, Homo sapien
ttgactcccaggctcagtagatcct

SEQ ID NO: 3058646 - DNA, 25 bp, Homo sapien
aactcctggcctcgaacgcctgacc

SEQ ID NO: 3058647 - DNA, 25 bp, Homo sapien
tgacctcataatctgtccgactcgg

SEQ ID NO: 3058648 - DNA, 25 bp, Homo sapien
atgaaccactgtaccccgccaattt

SEQ ID NO: 3058649 - DNA, 25 bp, Homo sapien
ggagtcactagtcagcaaaacttac

SEQ ID NO: 3058650 - DNA, 25 bp, Homo sapien
tgcagaaactactggtggccaacag

SEQ ID NO: 3058651 - DNA, 25 bp, Homo sapien
tctagtttaagacgcagccttgccc

SEQ ID NO: 3058652 - DNA, 25 bp, Homo sapien
cgttgacaagactttaccaccctga

SEQ ID NO: 3058653 - DNA, 25 bp, Homo sapien
ccataaagggctaaataagtgtctc

SEQ ID NO: 3058654 - DNA, 25 bp, Homo sapien
gtttctaataggcaccattaagtat

SEQ ID NO: 3058655 - DNA, 25 bp, Homo sapien
agtaagtgcagtttccagaacaggc

SEQ ID NO: 3058656 - DNA, 25 bp, Homo sapien
tactgtatgccagtcctcattttac

SEQ ID NO: 3058657 - DNA, 25 bp, Homo sapien
gagtactgttctaggactggccaaa

SEQ ID NO: 3058658 - DNA, 25 bp, Homo sapien
cagcagatcgctgtttccagaacgg

SEQ ID NO: 3058659 - DNA, 25 bp, Homo sapien
ccacaggaggataggaactacagca

SEQ ID NO: 3058660 - DNA, 25 bp, Homo sapien
tactgtagcagggataggtgccaca

SEQ ID NO: 3058661 - DNA, 25 bp, Homo sapien
tagtgaccctaacgttgataagttc

SEQ ID NO: 3058662 - DNA, 25 bp, Homo sapien
caactttagtgaccctaacgttgat

SEQ ID NO: 3058663 - DNA, 25 bp, Homo sapien
ataacccactactatcggaccagcc

SEQ ID NO: 3058664 - DNA, 25 bp, Homo sapien
ctgataacccactactatcggacca

SEQ ID NO: 3058665 - DNA, 25 bp, Homo sapien
cagggtttggctttttattgacaca

SEQ ID NO: 3058666 - DNA, 25 bp, Homo sapien
tccctaatcctagctcagtgagtag

SEQ ID NO: 3058667 - DNA, 25 bp, Homo sapien
tagagggagtgacctccctacccag

SEQ ID NO: 3058668 - DNA, 25 bp, Homo sapien
cattttggttgcaatggcccaggtc

SEQ ID NO: 3058669 - DNA, 25 bp, Homo sapien
acacatttaggcctcatttagacaa

SEQ ID NO: 3058670 - DNA, 25 bp, Homo sapien
tttgagaaggcagtagggcctcccc

SEQ ID NO: 3058671 - DNA, 25 bp, Homo sapien
atagagacgggacatggcacagacc

SEQ ID NO: 3058672 - DNA, 25 bp, Homo sapien
cccagctccaccagaacaaggaagg

SEQ ID NO: 3058673 - DNA, 25 bp, Homo sapien
cagaccacgatgagggcacctgttt

SEQ ID NO: 3058674 - DNA, 25 bp, Homo sapien
caagcacaggttttcgttgctaagg

SEQ ID NO: 3058675 - DNA, 25 bp, Homo sapien
acacacaagcacaggttttcgttgc

SEQ ID NO: 3058676 - DNA, 25 bp, Homo sapien
gcacaggttttcgttgctaaggcac

SEQ ID NO: 3058677 - DNA, 25 bp, Homo sapien
caggttttcgttgctaaggcactga

SEQ ID NO: 3058678 - DNA, 25 bp, Homo sapien
gggactggctaaccttggcacaaaa

SEQ ID NO: 3058679 - DNA, 25 bp, Homo sapien
gacaggtacatgctggactcacaga

SEQ ID NO: 3058680 - DNA, 25 bp, Homo sapien
acgagattgggaactggtcaagccc

SEQ ID NO: 3058681 - DNA, 25 bp, Homo sapien
tgattcccgccctgttggaagaggc

SEQ ID NO: 3058682 - DNA, 25 bp, Homo sapien
agggcagagcattatgacagaggct

SEQ ID NO: 3058683 - DNA, 25 bp, Homo sapien
caacagaacgtagcttcccaacttc

SEQ ID NO: 3058684 - DNA, 25 bp, Homo sapien
aaatgcaagtctggtggccaacaga

SEQ ID NO: 3058685 - DNA, 25 bp, Homo sapien
ccttcgctggtctctagggtctcac

SEQ ID NO: 3058686 - DNA, 25 bp, Homo sapien
caggaggaccttgcccacattcttc

SEQ ID NO: 3058687 - DNA, 25 bp, Homo sapien
accaggaggaccttgcccacattct

SEQ ID NO: 3058688 - DNA, 25 bp, Homo sapien
ggaggaccttgcccacattcttctt

SEQ ID NO: 3058689 - DNA, 25 bp, Homo sapien
aggaccttgcccacattcttcttct

SEQ ID NO: 3058690 - DNA, 25 bp, Homo sapien
gtcacgctgaactgattccaccatg

SEQ ID NO: 3058691 - DNA, 25 bp, Homo sapien
cgtttggggcccgtcagcaggttgg

SEQ ID NO: 3058692 - DNA, 25 bp, Homo sapien
cagctgcagagctgtcacgctgaac

SEQ ID NO: 3058693 - DNA, 25 bp, Homo sapien
gagctgtcacgctgaactgattcca

SEQ ID NO: 3058694 - DNA, 25 bp, Homo sapien
taggtgacgactttgcccatgggtt

SEQ ID NO: 3058695 - DNA, 25 bp, Homo sapien
tctgacccacccagagggtccatga

SEQ ID NO: 3058696 - DNA, 25 bp, Homo sapien
gtagcccttggcagtatctgaccca

SEQ ID NO: 3058697 - DNA, 25 bp, Homo sapien
cataggtgacgactttgcccatggg

SEQ ID NO: 3058698 - DNA, 25 bp, Homo sapien
cattaggatccacagatctggagct

SEQ ID NO: 3058699 - DNA, 25 bp, Homo sapien
tgtcatagagtaggggaacccaaga

SEQ ID NO: 3058700 - DNA, 25 bp, Homo sapien
gaacaacattaggatccacagatct

SEQ ID NO: 3058701 - DNA, 25 bp, Homo sapien
ggatccacagatctggagctcccct

SEQ ID NO: 3058702 - DNA, 25 bp, Homo sapien
ggccgttccgaacactgtcacattc

SEQ ID NO: 3058703 - DNA, 25 bp, Homo sapien
tgcttgctggccgaggccgttccga

SEQ ID NO: 3058704 - DNA, 25 bp, Homo sapien
tcacattctccactgtacggcacag

SEQ ID NO: 3058705 - DNA, 25 bp, Homo sapien
tgatctcatccacgtagtcagtcgt

SEQ ID NO: 3058706 - DNA, 25 bp, Homo sapien
tgtaattgacgagcaaggcagcagc

SEQ ID NO: 3058707 - DNA, 25 bp, Homo sapien
gaagtcaaagaggaccatgtaggct

SEQ ID NO: 3058708 - DNA, 25 bp, Homo sapien
aaggtctggaccgagggcacagtca

SEQ ID NO: 3058709 - DNA, 25 bp, Homo sapien
aggctgtaggttgccgaagtcaaag

SEQ ID NO: 3058710 - DNA, 25 bp, Homo sapien
gattcttgccctggacaggatatcc

SEQ ID NO: 3058711 - DNA, 25 bp, Homo sapien
atcagattcttgccctggacaggat

SEQ ID NO: 3058712 - DNA, 25 bp, Homo sapien
cagattcttgccctggacaggatat

SEQ ID NO: 3058713 - DNA, 25 bp, Homo sapien
ttcttgccctggacaggatatcctg

SEQ ID NO: 3058714 - DNA, 25 bp, Homo sapien
tccatgcccggagtgacaggcagag

SEQ ID NO: 3058715 - DNA, 25 bp, Homo sapien
ggcagaggcgggagacggtcgtaca

SEQ ID NO: 3058716 - DNA, 25 bp, Homo sapien
agacggtcgtacagcccctgcctag

SEQ ID NO: 3058717 - DNA, 25 bp, Homo sapien
actgcgatcacaacacccgcgccct

SEQ ID NO: 3058718 - DNA, 25 bp, Homo sapien
gtctgcgaagttgagcccgcaggcc

SEQ ID NO: 3058719 - DNA, 25 bp, Homo sapien
gaggtctgcgaagttgagcccgcag

SEQ ID NO: 3058720 - DNA, 25 bp, Homo sapien
ctgcgaagttgagcccgcaggcccg

SEQ ID NO: 3058721 - DNA, 25 bp, Homo sapien
aggtctgcgaagttgagcccgcagg

SEQ ID NO: 3058722 - DNA, 25 bp, Homo sapien
cagctggccgggcccaggggccggg

SEQ ID NO: 3058723 - DNA, 25 bp, Homo sapien
cgtcagctggccgggcccaggggcc

SEQ ID NO: 3058724 - DNA, 25 bp, Homo sapien
gtcagctggccgggcccaggggccg

SEQ ID NO: 3058725 - DNA, 25 bp, Homo sapien
caggggccgggggcgctgccggccg

SEQ ID NO: 3058726 - DNA, 25 bp, Homo sapien
ctgcagcttcaccttgtcgtagcct

SEQ ID NO: 3058727 - DNA, 25 bp, Homo sapien
ttcaccttgtcgtagcctccaaagc

SEQ ID NO: 3058728 - DNA, 25 bp, Homo sapien
tccaaagccggtgagcactaggcag

SEQ ID NO: 3058729 - DNA, 25 bp, Homo sapien
gtagcctccaaagccggtgagcact

SEQ ID NO: 3058730 - DNA, 25 bp, Homo sapien
gggtcgctcgctgcctcggttttcg

SEQ ID NO: 3058731 - DNA, 25 bp, Homo sapien
cggctacctctctctcgtcggacat

SEQ ID NO: 3058732 - DNA, 25 bp, Homo sapien
ctcgctgcctcggttttcggaggcg

SEQ ID NO: 3058733 - DNA, 25 bp, Homo sapien
ggccccttcggaggccgcgggatgc

SEQ ID NO: 3058734 - DNA, 25 bp, Homo sapien
tgggactcccgacgagagcgcacag

SEQ ID NO: 3058735 - DNA, 25 bp, Homo sapien
gaagagccgcggctgcgggatccag

SEQ ID NO: 3058736 - DNA, 25 bp, Homo sapien
ctcccgacgagagcgcacagctgga

SEQ ID NO: 3058737 - DNA, 25 bp, Homo sapien
aggcggaacgcgtcgggaagagccg

SEQ ID NO: 3058738 - DNA, 25 bp, Homo sapien
tcaatgtaaccggagacccggctgc

SEQ ID NO: 3058739 - DNA, 25 bp, Homo sapien
tatgatgtcaccaccgtccgggtgg

SEQ ID NO: 3058740 - DNA, 25 bp, Homo sapien
tctgctagtctaggccggcggttaa

SEQ ID NO: 3058741 - DNA, 25 bp, Homo sapien
tctctcccgccgtgttcaggaagtg

SEQ ID NO: 3058742 - DNA, 25 bp, Homo sapien
agattctaggataacttcaatggca

SEQ ID NO: 3058743 - DNA, 25 bp, Homo sapien
cctatgggactagttcatctcagcc

SEQ ID NO: 3058744 - DNA, 25 bp, Homo sapien
tgagaggaaaggaatccctacccac

SEQ ID NO: 3058745 - DNA, 25 bp, Homo sapien
ttatgccaggttccagtcttgagag

SEQ ID NO: 3058746 - DNA, 25 bp, Homo sapien
cagagagctcggctgttgctgactc

SEQ ID NO: 3058747 - DNA, 25 bp, Homo sapien
acctgtctatgggtcggcctgcctc

SEQ ID NO: 3058748 - DNA, 25 bp, Homo sapien
cccttctgctcctagattgctaata

SEQ ID NO: 3058749 - DNA, 25 bp, Homo sapien
tctctatgctggagtcaaaggctgc

SEQ ID NO: 3058750 - DNA, 25 bp, Homo sapien
ggctctgtacctgtggctggctgca

SEQ ID NO: 3058751 - DNA, 25 bp, Homo sapien
taagggacccttgcatagccagaag

SEQ ID NO: 3058752 - DNA, 25 bp, Homo sapien
gaaaccagctattctcttgaggcca

SEQ ID NO: 3058753 - DNA, 25 bp, Homo sapien
gatttccaagggagacttcaagcag

SEQ ID NO: 3058754 - DNA, 25 bp, Homo sapien
agagtgctacactgtccaacaccca

SEQ ID NO: 3058755 - DNA, 25 bp, Homo sapien
acccactctcgggtcaccacaggtg

SEQ ID NO: 3058756 - DNA, 25 bp, Homo sapien
ggcactggtagagtgctacactgtc

SEQ ID NO: 3058757 - DNA, 25 bp, Homo sapien
atctggggtatcaggtaggtgtcca

SEQ ID NO: 3058758 - DNA, 25 bp, Homo sapien
tgataaaccaaacccatgcaaaagg

SEQ ID NO: 3058759 - DNA, 25 bp, Homo sapien
gaactgtgctactcaagcaccaggt

SEQ ID NO: 3058760 - DNA, 25 bp, Homo sapien
caaaaggaccccatatagcacaggt

SEQ ID NO: 3058761 - DNA, 25 bp, Homo sapien
gcaccaggtaatgagtgataaacca

SEQ ID NO: 3058762 - DNA, 25 bp, Homo sapien
ggctgcacaaccacaattgggtgga

SEQ ID NO: 3058763 - DNA, 25 bp, Homo sapien
tctggctgcacaaccacaattgggt

SEQ ID NO: 3058764 - DNA, 25 bp, Homo sapien
caggcatctggctgcacaaccacaa

SEQ ID NO: 3058765 - DNA, 25 bp, Homo sapien
gcacaaccacaattgggtggacacc

SEQ ID NO: 3058766 - DNA, 25 bp, Homo sapien
caaagtaggactactggaactgtca

SEQ ID NO: 3058767 - DNA, 25 bp, Homo sapien
agcattcaaagtgtcaaagtaggac

SEQ ID NO: 3058768 - DNA, 25 bp, Homo sapien
caaagtgtcaaagtaggactactgg

SEQ ID NO: 3058769 - DNA, 25 bp, Homo sapien
tgtcaaagtaggactactggaactg

SEQ ID NO: 3058770 - DNA, 25 bp, Homo sapien
tgtgccaagggtgaatgatgaaagc

SEQ ID NO: 3058771 - DNA, 25 bp, Homo sapien
cagaagcaccacacagctgtaccat

SEQ ID NO: 3058772 - DNA, 25 bp, Homo sapien
agctgtaccatccattccagttgat

SEQ ID NO: 3058773 - DNA, 25 bp, Homo sapien
gggtgaatgatgaaagctccttcac

SEQ ID NO: 3058774 - DNA, 25 bp, Homo sapien
catgttggtgaagggcccatagcaa

SEQ ID NO: 3058775 - DNA, 25 bp, Homo sapien
ctgtgggcatgttggtgaagggccc

SEQ ID NO: 3058776 - DNA, 25 bp, Homo sapien
catagcaacagatttctagccccct

SEQ ID NO: 3058777 - DNA, 25 bp, Homo sapien
aacagatttctagccccctgaagat

SEQ ID NO: 3058778 - DNA, 25 bp, Homo sapien
tggcaacagtgtgggacagtgcaaa

SEQ ID NO: 3058779 - DNA, 25 bp, Homo sapien
tggtggcaacagtgtgggacagtgc

SEQ ID NO: 3058780 - DNA, 25 bp, Homo sapien
gctggtggcaacagtgtgggacagt

SEQ ID NO: 3058781 - DNA, 25 bp, Homo sapien
gtggctggtggcaacagtgtgggac

SEQ ID NO: 3058782 - DNA, 25 bp, Homo sapien
gcttcaaagagactgcgatagagaa

SEQ ID NO: 3058783 - DNA, 25 bp, Homo sapien
tacacggatggccttttagaaagtg

SEQ ID NO: 3058784 - DNA, 25 bp, Homo sapien
caaagagactgcgatagagaaaaaa

SEQ ID NO: 3058785 - DNA, 25 bp, Homo sapien
gatggccttttagaaagtggtcacc

SEQ ID NO: 3058786 - DNA, 25 bp, Homo sapien
aaagaaatggcagtaggacaagtct

SEQ ID NO: 3058787 - DNA, 25 bp, Homo sapien
agaaatggcagtaggacaagtctgt

SEQ ID NO: 3058788 - DNA, 25 bp, Homo sapien
aagaaatggcagtaggacaagtctg

SEQ ID NO: 3058789 - DNA, 25 bp, Homo sapien
ccaacctgttgataggacctgcatg

SEQ ID NO: 3058790 - DNA, 25 bp, Homo sapien
tacctgtatgaataaaccgcacccc

SEQ ID NO: 3058791 - DNA, 25 bp, Homo sapien
ttatatccaggctaacactcagtga

SEQ ID NO: 3058792 - DNA, 25 bp, Homo sapien
gctcataatgctagaagttctcccc

SEQ ID NO: 3058793 - DNA, 25 bp, Homo sapien
cagaggactggctcacatggcgctc

SEQ ID NO: 3058794 - DNA, 25 bp, Homo sapien
gaagaatctggtgctaatactgcct

SEQ ID NO: 3058795 - DNA, 25 bp, Homo sapien
ggcgctcccctgtggtaaaggcaga

SEQ ID NO: 3058796 - DNA, 25 bp, Homo sapien
gaagcagaaataaggccagcagctt

SEQ ID NO: 3058797 - DNA, 25 bp, Homo sapien
tataaagggacagaaagtgctcagt

SEQ ID NO: 3058798 - DNA, 25 bp, Homo sapien
ctataaagggacagaaagtgctcag

SEQ ID NO: 3058799 - DNA, 25 bp, Homo sapien
ataaagggacagaaagtgctcagta

SEQ ID NO: 3058800 - DNA, 25 bp, Homo sapien
ctttctccctgtgaggaagtcagag

SEQ ID NO: 3058801 - DNA, 25 bp, Homo sapien
actgggaacatagcacttagggagc

SEQ ID NO: 3058802 - DNA, 25 bp, Homo sapien
gttctgaaatgcctggtagtgcaca

SEQ ID NO: 3058803 - DNA, 25 bp, Homo sapien
gtcttcttgggtctcatctgcaaag

SEQ ID NO: 3058804 - DNA, 25 bp, Homo sapien
attacagtacatagctcatagagtt

SEQ ID NO: 3058805 - DNA, 25 bp, Homo sapien
acatagctcatagagttgtcataaa

SEQ ID NO: 3058806 - DNA, 25 bp, Homo sapien
agaatttagacttggagctagactt

SEQ ID NO: 3058807 - DNA, 25 bp, Homo sapien
aatttagacttggagctagacttcc

SEQ ID NO: 3058808 - DNA, 25 bp, Homo sapien
gataacaggaacgagccgctgtgcc

SEQ ID NO: 3058809 - DNA, 25 bp, Homo sapien
gctaagatctgaacccgagacggga

SEQ ID NO: 3058810 - DNA, 25 bp, Homo sapien
gacgggaatccaaattacacagcct

SEQ ID NO: 3058811 - DNA, 25 bp, Homo sapien
taagtcttacaaaatgaagcggccc

SEQ ID NO: 3058812 - DNA, 25 bp, Homo sapien
ttcttccattgaccacatctcctct

SEQ ID NO: 3058813 - DNA, 25 bp, Homo sapien
tctcttgctcgctttggaccttggt

SEQ ID NO: 3058814 - DNA, 25 bp, Homo sapien
ctcttgctcgctttggaccttggtg

SEQ ID NO: 3058815 - DNA, 25 bp, Homo sapien
cttccattgaccacatctcctctga

SEQ ID NO: 3058816 - DNA, 25 bp, Homo sapien
tttctttctttaatagactgggtca

SEQ ID NO: 3058817 - DNA, 25 bp, Homo sapien
ttctttctttaatagactgggtcac

SEQ ID NO: 3058818 - DNA, 25 bp, Homo sapien
tctttctttaatagactgggtcacc

SEQ ID NO: 3058819 - DNA, 25 bp, Homo sapien
tttcacggagatagagaggtcagcg

SEQ ID NO: 3058820 - DNA, 25 bp, Homo sapien
cattgctaggagcagattaggtcct

SEQ ID NO: 3058821 - DNA, 25 bp, Homo sapien
tacatacagcagaagaacgtgctct

SEQ ID NO: 3058822 - DNA, 25 bp, Homo sapien
gaggtcagcgattcacaaaagagca

SEQ ID NO: 3058823 - DNA, 25 bp, Homo sapien
ttcctcccgcaattcctagaaaata

SEQ ID NO: 3058824 - DNA, 25 bp, Homo sapien
tttcagtgtccgttcacacacaaac

SEQ ID NO: 3058825 - DNA, 25 bp, Homo sapien
atatttcagtgtccgttcacacaca

SEQ ID NO: 3058826 - DNA, 25 bp, Homo sapien
aaaatatttcagtgtccgttcacac

SEQ ID NO: 3058827 - DNA, 25 bp, Homo sapien
aataacttgttctggcacctggctc

SEQ ID NO: 3058828 - DNA, 25 bp, Homo sapien
tgatgcaaacctatagcttaaggta

SEQ ID NO: 3058829 - DNA, 25 bp, Homo sapien
tggtataattttcatgagtaagtgg

SEQ ID NO: 3058830 - DNA, 25 bp, Homo sapien
taaggtatcttaaactttaatgaca

SEQ ID NO: 3058831 - DNA, 25 bp, Homo sapien
attgattgactattagaagactatc

SEQ ID NO: 3058832 - DNA, 25 bp, Homo sapien
gtaattgattgactattagaagact

SEQ ID NO: 3058833 - DNA, 25 bp, Homo sapien
aagtaattgattgactattagaaga

SEQ ID NO: 3058834 - DNA, 25 bp, Homo sapien
tctttcataaagtaattgattgact

SEQ ID NO: 3058835 - DNA, 25 bp, Homo sapien
cagatgcaaggtattctgtaaaggt

SEQ ID NO: 3058836 - DNA, 25 bp, Homo sapien
ccgtgcctcgcctcatgtggtttta

SEQ ID NO: 3058837 - DNA, 25 bp, Homo sapien
gtattctgtaaaggttcttggtata

SEQ ID NO: 3058838 - DNA, 25 bp, Homo sapien
caccgtgcctcgcctcatgtggttt

SEQ ID NO: 3058839 - DNA, 25 bp, Homo sapien
aaagtgatgtggtgttttctggcaa

SEQ ID NO: 3058840 - DNA, 25 bp, Homo sapien
taacaacatgagtagtctcttcagt

SEQ ID NO: 3058841 - DNA, 25 bp, Homo sapien
tagattagttaaagtgatgtggtgt

SEQ ID NO: 3058842 - DNA, 25 bp, Homo sapien
ttctggcaaacttgtacacgagcat

SEQ ID NO: 3058843 - DNA, 25 bp, Homo sapien
tctgttgaagctgtcaattctggct

SEQ ID NO: 3058844 - DNA, 25 bp, Homo sapien
tatgttgccaacacgagctgactct

SEQ ID NO: 3058845 - DNA, 25 bp, Homo sapien
tcagattcagggtcatcagagaaga

SEQ ID NO: 3058846 - DNA, 25 bp, Homo sapien
cagtatcagtagtatgagcagcagc

SEQ ID NO: 3058847 - DNA, 25 bp, Homo sapien
gagcagtggctgtaatctgtcctta

SEQ ID NO: 3058848 - DNA, 25 bp, Homo sapien
catctcagcttggtgaagtggctca

SEQ ID NO: 3058849 - DNA, 25 bp, Homo sapien
cctatattgtccaatttgggggcaa

SEQ ID NO: 3058850 - DNA, 25 bp, Homo sapien
gggcaatgagcttatagcaattttg

SEQ ID NO: 3058851 - DNA, 25 bp, Homo sapien
caaccttaatgagctcctcttgaga

SEQ ID NO: 3058852 - DNA, 25 bp, Homo sapien
tgccttggcaagtaagatgtttccg

SEQ ID NO: 3058853 - DNA, 25 bp, Homo sapien
ccacctatcatctaatgatgggcat

SEQ ID NO: 3058854 - DNA, 25 bp, Homo sapien
gatgtttccgtcaaatcgtgtggcc

SEQ ID NO: 3058855 - DNA, 25 bp, Homo sapien
gcttatagggtattcactacttttc

SEQ ID NO: 3058856 - DNA, 25 bp, Homo sapien
atttttactggtagaactatctgca

SEQ ID NO: 3058857 - DNA, 25 bp, Homo sapien
ctggcttatagggtattcactactt

SEQ ID NO: 3058858 - DNA, 25 bp, Homo sapien
tgtcagcagaaaggccttctggatt

SEQ ID NO: 3058859 - DNA, 25 bp, Homo sapien
ctactgcctccacattgaagactgt

SEQ ID NO: 3058860 - DNA, 25 bp, Homo sapien
gcctccacattgaagactgtatgaa

SEQ ID NO: 3058861 - DNA, 25 bp, Homo sapien
attattttctccatccctactgcct

SEQ ID NO: 3058862 - DNA, 25 bp, Homo sapien
cggagagcacaaagtacattatttt

SEQ ID NO: 3058863 - DNA, 25 bp, Homo sapien
gcacctgatatatgttctctaggcc

SEQ ID NO: 3058864 - DNA, 25 bp, Homo sapien
gaggagaggcacctgatatatgttc

SEQ ID NO: 3058865 - DNA, 25 bp, Homo sapien
tgttcctttggccatgtatatgcga

SEQ ID NO: 3058866 - DNA, 25 bp, Homo sapien
tcagtaatttgccaaaatgacgaac

SEQ ID NO: 3058867 - DNA, 25 bp, Homo sapien
gaccaaagccactgttctgtataag

SEQ ID NO: 3058868 - DNA, 25 bp, Homo sapien
caaagccactgttctgtataagtag

SEQ ID NO: 3058869 - DNA, 25 bp, Homo sapien
gggaccaaagccactgttctgtata

SEQ ID NO: 3058870 - DNA, 25 bp, Homo sapien
aagccactgttctgtataagtagca

SEQ ID NO: 3058871 - DNA, 25 bp, Homo sapien
aaataggtctttgtgatgtgacacc

SEQ ID NO: 3058872 - DNA, 25 bp, Homo sapien
taacaggagctctacatcactaggc

SEQ ID NO: 3058873 - DNA, 25 bp, Homo sapien
gcttccaatagagcaagagctatgt

SEQ ID NO: 3058874 - DNA, 25 bp, Homo sapien
tagttgtgagcagggacaagaacca

SEQ ID NO: 3058875 - DNA, 25 bp, Homo sapien
gggtagctgttagaaggctggctcc

SEQ ID NO: 3058876 - DNA, 25 bp, Homo sapien
tcacttatgatggaagggtagctgt

SEQ ID NO: 3058877 - DNA, 25 bp, Homo sapien
tgttctggatttcgcaggtcctcaa

SEQ ID NO: 3058878 - DNA, 25 bp, Homo sapien
gatgtgctttgttctggatttcgca

SEQ ID NO: 3058879 - DNA, 25 bp, Homo sapien
ggagctttatcaggttatgttgcat

SEQ ID NO: 3058880 - DNA, 25 bp, Homo sapien
ctgctggagctttatcaggttatgt

SEQ ID NO: 3058881 - DNA, 25 bp, Homo sapien
gctggagctttatcaggttatgttg

SEQ ID NO: 3058882 - DNA, 25 bp, Homo sapien
ttcctgctggagctttatcaggtta

SEQ ID NO: 3058883 - DNA, 25 bp, Homo sapien
ggaagcagagtgtatatctgaccct

SEQ ID NO: 3058884 - DNA, 25 bp, Homo sapien
ggaattccatgactctgtaccttta

SEQ ID NO: 3058885 - DNA, 25 bp, Homo sapien
aatgtctccttaagtccccaccagg

SEQ ID NO: 3058886 - DNA, 25 bp, Homo sapien
tcaaggcctagtttgaatgtctcct

SEQ ID NO: 3058887 - DNA, 25 bp, Homo sapien
tttcttgacaactccaaggggcttc

SEQ ID NO: 3058888 - DNA, 25 bp, Homo sapien
tcttgacaactccaaggggcttcag

SEQ ID NO: 3058889 - DNA, 25 bp, Homo sapien
tcaaaggtttcttgacaactccaag

SEQ ID NO: 3058890 - DNA, 25 bp, Homo sapien
ctcaaaggtttcttgacaactccaa

SEQ ID NO: 3058891 - DNA, 25 bp, Homo sapien
gagaacataagcaaactgtctaaga

SEQ ID NO: 3058892 - DNA, 25 bp, Homo sapien
tcacatagcccagtacagaactctc

SEQ ID NO: 3058893 - DNA, 25 bp, Homo sapien
tgtgtattctgcatagaaccctgtg

SEQ ID NO: 3058894 - DNA, 25 bp, Homo sapien
gaactctcaccaatattattgccag

SEQ ID NO: 3058895 - DNA, 25 bp, Homo sapien
ggatagccctgagcagtcttcagag

SEQ ID NO: 3058896 - DNA, 25 bp, Homo sapien
tcttcagagacgcttgtttcactct

SEQ ID NO: 3058897 - DNA, 25 bp, Homo sapien
gtcactctgagaggatagccctgag

SEQ ID NO: 3058898 - DNA, 25 bp, Homo sapien
gcttgtttcactctcacacccagat

SEQ ID NO: 3058899 - DNA, 25 bp, Homo sapien
gtaaaatgtgctccccaaaagcata

SEQ ID NO: 3058900 - DNA, 25 bp, Homo sapien
tgtaaaatgtgctccccaaaagcat

SEQ ID NO: 3058901 - DNA, 25 bp, Homo sapien
agcataaacatttagctcacttcta

SEQ ID NO: 3058902 - DNA, 25 bp, Homo sapien
agctcacttctataaatagactggg

SEQ ID NO: 3058903 - DNA, 25 bp, Homo sapien
agaaccaatcaagaaaggatcctgg

SEQ ID NO: 3058904 - DNA, 25 bp, Homo sapien
tgatgcctcatttgtttggaagaac

SEQ ID NO: 3058905 - DNA, 25 bp, Homo sapien
aggatcctgggtgtttgtatttgca

SEQ ID NO: 3058906 - DNA, 25 bp, Homo sapien
ttgtcactcagaccaactccctggc

SEQ ID NO: 3058907 - DNA, 25 bp, Homo sapien
tgtttcctcactaaggtgatgttcc

SEQ ID NO: 3058908 - DNA, 25 bp, Homo sapien
tttgtttcctcactaaggtgatgtt

SEQ ID NO: 3058909 - DNA, 25 bp, Homo sapien
ttgtttcctcactaaggtgatgttc

SEQ ID NO: 3058910 - DNA, 25 bp, Homo sapien
ttttgtttcctcactaaggtgatgt

SEQ ID NO: 3058911 - DNA, 25 bp, Homo sapien
tagacagacactcggtagcaacggt

SEQ ID NO: 3058912 - DNA, 25 bp, Homo sapien
tgaaaacggagcaaatgactggcgc

SEQ ID NO: 3058913 - DNA, 25 bp, Homo sapien
tgatagacaaaacctagagcctcct

SEQ ID NO: 3058914 - DNA, 25 bp, Homo sapien
gagatgcatgactacttcccatagg

SEQ ID NO: 3058915 - DNA, 25 bp, Homo sapien
agtaataaactgctgttctcatgct

SEQ ID NO: 3058916 - DNA, 25 bp, Homo sapien
catgagtatttgtgccacatggctc

SEQ ID NO: 3058917 - DNA, 25 bp, Homo sapien
tctcatgctgtaatgagctggcatg

SEQ ID NO: 3058918 - DNA, 25 bp, Homo sapien
ctgtctttagtgagtaataaactgc

SEQ ID NO: 3058919 - DNA, 25 bp, Homo sapien
tccgtctcagaaaattcacaagcag

SEQ ID NO: 3058920 - DNA, 25 bp, Homo sapien
cttctcagtggtgttcaaatcatta

SEQ ID NO: 3058921 - DNA, 25 bp, Homo sapien
tgttcagtatttgttacatccgtct

SEQ ID NO: 3058922 - DNA, 25 bp, Homo sapien
tgttacatccgtctcagaaaattca

SEQ ID NO: 3058923 - DNA, 25 bp, Homo sapien
gatttcatccctggttccttgaggg

SEQ ID NO: 3058924 - DNA, 25 bp, Homo sapien
ccttgaggggtgatttgtaacaatt

SEQ ID NO: 3058925 - DNA, 25 bp, Homo sapien
ttgtaacaattcttgatctcccaca

SEQ ID NO: 3058926 - DNA, 25 bp, Homo sapien
aatccaaactgatttcatccctggt

SEQ ID NO: 3058927 - DNA, 25 bp, Homo sapien
ctgcaataagttgccttattaacgg

SEQ ID NO: 3058928 - DNA, 25 bp, Homo sapien
tattaacggtatcttcagaagaatc

SEQ ID NO: 3058929 - DNA, 25 bp, Homo sapien
ataagttgccttattaacggtatct

SEQ ID NO: 3058930 - DNA, 25 bp, Homo sapien
gccttattaacggtatcttcagaag

SEQ ID NO: 3058931 - DNA, 25 bp, Homo sapien
caaggttagagagttggacactgag

SEQ ID NO: 3058932 - DNA, 25 bp, Homo sapien
cagttccaaggttagagagttggac

SEQ ID NO: 3058933 - DNA, 25 bp, Homo sapien
ttttgaggttgtatccgctgctttg

SEQ ID NO: 3058934 - DNA, 25 bp, Homo sapien
ccaattcaatgtagacagacgtctt

SEQ ID NO: 3058935 - DNA, 25 bp, Homo sapien
tccaaagcaaggaagggcctataag

SEQ ID NO: 3058936 - DNA, 25 bp, Homo sapien
attttagataagcatcacagagcag

SEQ ID NO: 3058937 - DNA, 25 bp, Homo sapien
gtgaccttatggctattttagataa

SEQ ID NO: 3058938 - DNA, 25 bp, Homo sapien
taagagctctcttttttggccgggc

SEQ ID NO: 3058939 - DNA, 25 bp, Homo sapien
tctgtagaagtcttttggcacggtt

SEQ ID NO: 3058940 - DNA, 25 bp, Homo sapien
tggcacggtttctgtagcccatact

SEQ ID NO: 3058941 - DNA, 25 bp, Homo sapien
agcccatactttggatgatagaaac

SEQ ID NO: 3058942 - DNA, 25 bp, Homo sapien
gattttcgggttcactctgtagaag

SEQ ID NO: 3058943 - DNA, 25 bp, Homo sapien
tagctcttcaacaagttgactaaat

SEQ ID NO: 3058944 - DNA, 25 bp, Homo sapien
gttgactaaatctcgtactttcttg

SEQ ID NO: 3058945 - DNA, 25 bp, Homo sapien
gctcttcaacaagttgactaaatct

SEQ ID NO: 3058946 - DNA, 25 bp, Homo sapien
aaatctcgtactttcttgtaggctc

SEQ ID NO: 3058947 - DNA, 25 bp, Homo sapien
ggacactgtgaaggccctttcttct

SEQ ID NO: 3058948 - DNA, 25 bp, Homo sapien
tcttctggttgagaagtttcagcat

SEQ ID NO: 3058949 - DNA, 25 bp, Homo sapien
aaaggacactgtgaaggccctttct

SEQ ID NO: 3058950 - DNA, 25 bp, Homo sapien
cctttcttctggttgagaagtttca

SEQ ID NO: 3058951 - DNA, 25 bp, Homo sapien
gagactgaggtgataggatcgcttg

SEQ ID NO: 3058952 - DNA, 25 bp, Homo sapien
ggagactgaggtgataggatcgctt

SEQ ID NO: 3058953 - DNA, 25 bp, Homo sapien
agcctaggaggtcaaggcaacagta

SEQ ID NO: 3058954 - DNA, 25 bp, Homo sapien
ctaggaggtcaaggcaacagtaagc

SEQ ID NO: 3058955 - DNA, 25 bp, Homo sapien
ctccagctgggacaacagagtaaga

SEQ ID NO: 3058956 - DNA, 25 bp, Homo sapien
tccagctgggacaacagagtaagac

SEQ ID NO: 3058957 - DNA, 25 bp, Homo sapien
caccactgtactccagctgggacaa

SEQ ID NO: 3058958 - DNA, 25 bp, Homo sapien
cactgtactccagctgggacaacag

SEQ ID NO: 3058959 - DNA, 25 bp, Homo sapien
ttgtggagacaggttccttgatcaa

SEQ ID NO: 3058960 - DNA, 25 bp, Homo sapien
aaatatgtggtcacactttgtggag

SEQ ID NO: 3058961 - DNA, 25 bp, Homo sapien
ttgcaaaatatgtggtcacactttg

SEQ ID NO: 3058962 - DNA, 25 bp, Homo sapien
tgtggagacaggttccttgatcaac

SEQ ID NO: 3058963 - DNA, 25 bp, Homo sapien
tcaacgcgaagagcagataaatcca

SEQ ID NO: 3058964 - DNA, 25 bp, Homo sapien
ttcaacgcgaagagcagataaatcc

SEQ ID NO: 3058965 - DNA, 25 bp, Homo sapien
caacgcgaagagcagataaatccat

SEQ ID NO: 3058966 - DNA, 25 bp, Homo sapien
tttctgcatagcattaatgacattt

SEQ ID NO: 3058967 - DNA, 25 bp, Homo sapien
tgacctcatgaccagccgacgtttt

SEQ ID NO: 3058968 - DNA, 25 bp, Homo sapien
aacgccttacgcctctcaggttccg

SEQ ID NO: 3058969 - DNA, 25 bp, Homo sapien
agttcctatcacgaggattccccca

SEQ ID NO: 3058970 - DNA, 25 bp, Homo sapien
aagacatagtgtccccctcaaggca

SEQ ID NO: 3058971 - DNA, 25 bp, Homo sapien
agtaccccagagcatcacttgggcc

SEQ ID NO: 3058972 - DNA, 25 bp, Homo sapien
tgtcagcttcggaaatccactctcc

SEQ ID NO: 3058973 - DNA, 25 bp, Homo sapien
ccagtaccccagagcatcacttggg

SEQ ID NO: 3058974 - DNA, 25 bp, Homo sapien
ccatctgtcagcttcggaaatccac

SEQ ID NO: 3058975 - DNA, 25 bp, Homo sapien
ccaggaagtctcagcgagctcacgc

SEQ ID NO: 3058976 - DNA, 25 bp, Homo sapien
gggcccagttatctgagaaacccca

SEQ ID NO: 3058977 - DNA, 25 bp, Homo sapien
gaaaccaaggggctaccgctaagca

SEQ ID NO: 3058978 - DNA, 25 bp, Homo sapien
agctcacgccgcgcagtcgcagttt

SEQ ID NO: 3058979 - DNA, 25 bp, Homo sapien
tgcaaatgttttgagcccttcctgc

SEQ ID NO: 3058980 - DNA, 25 bp, Homo sapien
tctaagctgacataccagtgggatg

SEQ ID NO: 3058981 - DNA, 25 bp, Homo sapien
tcttggatctcatcgtagagtgact

SEQ ID NO: 3058982 - DNA, 25 bp, Homo sapien
ggattctgcattttggacccgtccc

SEQ ID NO: 3058983 - DNA, 25 bp, Homo sapien
gcttcagcctcggtccaaaaggatc

SEQ ID NO: 3058984 - DNA, 25 bp, Homo sapien
gttctgcggaccccgtgcacttcca

SEQ ID NO: 3058985 - DNA, 25 bp, Homo sapien
ggcactaggcctaatacccgatagt

SEQ ID NO: 3058986 - DNA, 25 bp, Homo sapien
cactaggcctaatacccgatagttt

SEQ ID NO: 3058987 - DNA, 25 bp, Homo sapien
caggcactaggcctaatacccgata

SEQ ID NO: 3058988 - DNA, 25 bp, Homo sapien
gattaggggatacatgtgaacgttt

SEQ ID NO: 3058989 - DNA, 25 bp, Homo sapien
atccatctgtgttcctacaaaagag

SEQ ID NO: 3058990 - DNA, 25 bp, Homo sapien
ctaactatggttggaagcttagtgc

SEQ ID NO: 3058991 - DNA, 25 bp, Homo sapien
tgcatgataggagcgtcctttgttc

SEQ ID NO: 3058992 - DNA, 25 bp, Homo sapien
tcctgacacaaggattcctaaatcc

SEQ ID NO: 3058993 - DNA, 25 bp, Homo sapien
tcctccatcttgtaagggcgaaaag

SEQ ID NO: 3058994 - DNA, 25 bp, Homo sapien
ttttcctccatcttgtaagggcgaa

SEQ ID NO: 3058995 - DNA, 25 bp, Homo sapien
cctccatcttgtaagggcgaaaagc

SEQ ID NO: 3058996 - DNA, 25 bp, Homo sapien
ttcctccatcttgtaagggcgaaaa

SEQ ID NO: 3058997 - DNA, 25 bp, Homo sapien
cacagtgcaggtaggcccagtgatc

SEQ ID NO: 3058998 - DNA, 25 bp, Homo sapien
gcaggaggtcaagtatgtggtatta

SEQ ID NO: 3058999 - DNA, 25 bp, Homo sapien
tcccctgtgggcaggaggtcaagta

SEQ ID NO: 3059000 - DNA, 25 bp, Homo sapien
gccaggaggtggtaggtcccctgtg

SEQ ID NO: 3059001 - DNA, 25 bp, Homo sapien
gaggtcaagtatgtggtattatact

SEQ ID NO: 3059002 - DNA, 25 bp, Homo sapien
gatcagcgcaattgtcagctaaacc

SEQ ID NO: 3059003 - DNA, 25 bp, Homo sapien
tgccaggatgcccaagaaaaaggtc

SEQ ID NO: 3059004 - DNA, 25 bp, Homo sapien
agctccaccgaaggggctgccatgg

SEQ ID NO: 3059005 - DNA, 25 bp, Homo sapien
ccaagaggagatcagcgcaattgtc

SEQ ID NO: 3059006 - DNA, 25 bp, Homo sapien
agcagccgactctcctgttgagatc

SEQ ID NO: 3059007 - DNA, 25 bp, Homo sapien
gcagccgactctcctgttgagatct

SEQ ID NO: 3059008 - DNA, 25 bp, Homo sapien
cagccgactctcctgttgagatctt

SEQ ID NO: 3059009 - DNA, 25 bp, Homo sapien
catcactgttgaagatctcatcctc

SEQ ID NO: 3059010 - DNA, 25 bp, Homo sapien
cccgcatcactgttgaagatctcat

SEQ ID NO: 3059011 - DNA, 25 bp, Homo sapien
tcactgttgaagatctcatcctcac

SEQ ID NO: 3059012 - DNA, 25 bp, Homo sapien
cgcatcactgttgaagatctcatcc

SEQ ID NO: 3059013 - DNA, 25 bp, Homo sapien
agttaacgtgcgttttctcttgtgg

SEQ ID NO: 3059014 - DNA, 25 bp, Homo sapien
cagttaacgtgcgttttctcttgtg

SEQ ID NO: 3059015 - DNA, 25 bp, Homo sapien
tacagttaacgtgcgttttctcttg

SEQ ID NO: 3059016 - DNA, 25 bp, Homo sapien
acagttaacgtgcgttttctcttgt

SEQ ID NO: 3059017 - DNA, 25 bp, Homo sapien
caggtcactcgacctgtagagtttt

SEQ ID NO: 3059018 - DNA, 25 bp, Homo sapien
ctgattgtataaccccatggtgagg

SEQ ID NO: 3059019 - DNA, 25 bp, Homo sapien
tttgctgattgtataaccccatggt

SEQ ID NO: 3059020 - DNA, 25 bp, Homo sapien
atttaggagacgaactgctggacag

SEQ ID NO: 3059021 - DNA, 25 bp, Homo sapien
tatttcagtatggtaattataatct

SEQ ID NO: 3059022 - DNA, 25 bp, Homo sapien
aacacactgtaaacataaactgtga

SEQ ID NO: 3059023 - DNA, 25 bp, Homo sapien
cactatataaacacactgtaaacat

SEQ ID NO: 3059024 - DNA, 25 bp, Homo sapien
tataatctacactatataaacacac

SEQ ID NO: 3059025 - DNA, 25 bp, Homo sapien
aggttgtggtgagccgagatgtgcc

SEQ ID NO: 3059026 - DNA, 25 bp, Homo sapien
tccagcctgggcaacaagagcgaaa

SEQ ID NO: 3059027 - DNA, 25 bp, Homo sapien
cagcctgggcaacaagagcgaaact

SEQ ID NO: 3059028 - DNA, 25 bp, Homo sapien
gatgtgccattgcactccagcctgg

SEQ ID NO: 3059029 - DNA, 25 bp, Homo sapien
gagtttacattctgtgggactagag

SEQ ID NO: 3059030 - DNA, 25 bp, Homo sapien
tgagtggcaactaggtcccaagtac

SEQ ID NO: 3059031 - DNA, 25 bp, Homo sapien
gaggcaataggtataaattttcaac

SEQ ID NO: 3059032 - DNA, 25 bp, Homo sapien
tagatacattacatagaaggtcagc

SEQ ID NO: 3059033 - DNA, 25 bp, Homo sapien
ggatcgcttgagcctggcgaggttg

SEQ ID NO: 3059034 - DNA, 25 bp, Homo sapien
gcactccagcctctcgacagagatc

SEQ ID NO: 3059035 - DNA, 25 bp, Homo sapien
aggctgcagtgagctgtgatagcac

SEQ ID NO: 3059036 - DNA, 25 bp, Homo sapien
tgtgatagcaccactgcactccagc

SEQ ID NO: 3059037 - DNA, 25 bp, Homo sapien
ctcacatcacagatacttgaaggca

SEQ ID NO: 3059038 - DNA, 25 bp, Homo sapien
cctcacatcacagatacttgaaggc

SEQ ID NO: 3059039 - DNA, 25 bp, Homo sapien
tcctcacatcacagatacttgaagg

SEQ ID NO: 3059040 - DNA, 25 bp, Homo sapien
cgcaccagtaattagattggaacaa

SEQ ID NO: 3059041 - DNA, 25 bp, Homo sapien
tcttatagctatgcttttcacggga

SEQ ID NO: 3059042 - DNA, 25 bp, Homo sapien
gatgcattttggtatactaaggtag

SEQ ID NO: 3059043 - DNA, 25 bp, Homo sapien
ggctctgccggttgcagtgattatt

SEQ ID NO: 3059044 - DNA, 25 bp, Homo sapien
gctactcttttttccagcgaggatc

SEQ ID NO: 3059045 - DNA, 25 bp, Homo sapien
tgtaaacttctcctcgaaccaagat

SEQ ID NO: 3059046 - DNA, 25 bp, Homo sapien
gaaacactggctcaagagagcattt

SEQ ID NO: 3059047 - DNA, 25 bp, Homo sapien
ccaagatatttactcggggattcag

SEQ ID NO: 3059048 - DNA, 25 bp, Homo sapien
agagaaccacactttattcctaact

SEQ ID NO: 3059049 - DNA, 25 bp, Homo sapien
ctttactcatatcatttatgagccc

SEQ ID NO: 3059050 - DNA, 25 bp, Homo sapien
atatcatttatgagcccccaccagt

SEQ ID NO: 3059051 - DNA, 25 bp, Homo sapien
ctcatatcatttatgagcccccacc

SEQ ID NO: 3059052 - DNA, 25 bp, Homo sapien
agtatgttcaactaggctctctgat

SEQ ID NO: 3059053 - DNA, 25 bp, Homo sapien
gctactcccgtccacgtacccctca

SEQ ID NO: 3059054 - DNA, 25 bp, Homo sapien
cacagtatgttcaactaggctctct

SEQ ID NO: 3059055 - DNA, 25 bp, Homo sapien
ctacacagtatgttcaactaggctc

SEQ ID NO: 3059056 - DNA, 25 bp, Homo sapien
cctttcgatgagaatgtgatcttca

SEQ ID NO: 3059057 - DNA, 25 bp, Homo sapien
gatttttcgtagctttagtttggca

SEQ ID NO: 3059058 - DNA, 25 bp, Homo sapien
gattctggtgtgacgagtccatcct

SEQ ID NO: 3059059 - DNA, 25 bp, Homo sapien
ccacctttcgatgagaatgtgatct

SEQ ID NO: 3059060 - DNA, 25 bp, Homo sapien
taatcaagtgtctctgtaagggaac

SEQ ID NO: 3059061 - DNA, 25 bp, Homo sapien
gtacatccttatgcctccttacaat

SEQ ID NO: 3059062 - DNA, 25 bp, Homo sapien
ttttgtgtcttgtggactaggccac

SEQ ID NO: 3059063 - DNA, 25 bp, Homo sapien
aatgtaggtgaaaatgtacatcctt

SEQ ID NO: 3059064 - DNA, 25 bp, Homo sapien
tcccagtggggcaaatgcctaacca

SEQ ID NO: 3059065 - DNA, 25 bp, Homo sapien
aggagcgccctcaggatccgtgttg

SEQ ID NO: 3059066 - DNA, 25 bp, Homo sapien
ccatgggggcctgccatacagtgct

SEQ ID NO: 3059067 - DNA, 25 bp, Homo sapien
tgggggcctgccatacagtgctctg

SEQ ID NO: 3059068 - DNA, 25 bp, Homo sapien
cgccattcacctcgcttcccagtca

SEQ ID NO: 3059069 - DNA, 25 bp, Homo sapien
ttgaccatccgccattcacctcgct

SEQ ID NO: 3059070 - DNA, 25 bp, Homo sapien
aggagctgccttgaccatccgccat

SEQ ID NO: 3059071 - DNA, 25 bp, Homo sapien
atccgccattcacctcgcttcccag

SEQ ID NO: 3059072 - DNA, 25 bp, Homo sapien
gaaccaatcaagacagggtccctgt

SEQ ID NO: 3059073 - DNA, 25 bp, Homo sapien
cagagtggatggagaacaaggattc

SEQ ID NO: 3059074 - DNA, 25 bp, Homo sapien
ccacaggatttgtgttgaagaggag

SEQ ID NO: 3059075 - DNA, 25 bp, Homo sapien
ttgccatttcaagtgatggagctgg

SEQ ID NO: 3059076 - DNA, 25 bp, Homo sapien
gcaaacagcagataaatctatctct

SEQ ID NO: 3059077 - DNA, 25 bp, Homo sapien
ttcaacgcaaacagcagataaatct

SEQ ID NO: 3059078 - DNA, 25 bp, Homo sapien
aacgcaaacagcagataaatctatc

SEQ ID NO: 3059079 - DNA, 25 bp, Homo sapien
tttctgcatagcattaaggacattt

SEQ ID NO: 3059080 - DNA, 25 bp, Homo sapien
cctgagcccaggggcccagttatct

SEQ ID NO: 3059081 - DNA, 25 bp, Homo sapien
acccagagcagagggtgcaggcctc

SEQ ID NO: 3059082 - DNA, 25 bp, Homo sapien
cttaacccagagcagagggtgcagg

SEQ ID NO: 3059083 - DNA, 25 bp, Homo sapien
agagggtgcaggcctcctgagccca

SEQ ID NO: 3059084 - DNA, 25 bp, Homo sapien
aaaggtcacctcatagtcctgcaga

SEQ ID NO: 3059085 - DNA, 25 bp, Homo sapien
aagtttcaatatttacactggctgc

SEQ ID NO: 3059086 - DNA, 25 bp, Homo sapien
tatcctccgtaaaggtcacctcata

SEQ ID NO: 3059087 - DNA, 25 bp, Homo sapien
gcagagtagatgcaggcaagctggg

SEQ ID NO: 3059088 - DNA, 25 bp, Homo sapien
tctgtaattcccacgctttactgtt

SEQ ID NO: 3059089 - DNA, 25 bp, Homo sapien
ttgccacggaaaccgctgagcaata

SEQ ID NO: 3059090 - DNA, 25 bp, Homo sapien
taattcccacgctttactgttgcca

SEQ ID NO: 3059091 - DNA, 25 bp, Homo sapien
gagcaatagcctctcagaataggaa

SEQ ID NO: 3059092 - DNA, 25 bp, Homo sapien
ggtataaatagcctctctctcttcg

SEQ ID NO: 3059093 - DNA, 25 bp, Homo sapien
tctcttcgtgattcttggtggtttt

SEQ ID NO: 3059094 - DNA, 25 bp, Homo sapien
aacttgcccttcacaggccaggcgt

SEQ ID NO: 3059095 - DNA, 25 bp, Homo sapien
ttgaaacttgcccttcacaggccag

SEQ ID NO: 3059096 - DNA, 25 bp, Homo sapien
cagccaacgctattgaggagtgacc

SEQ ID NO: 3059097 - DNA, 25 bp, Homo sapien
aaagagcttgtccatgaacccaggt

SEQ ID NO: 3059098 - DNA, 25 bp, Homo sapien
tagagcccatcgttgagttaccaag

SEQ ID NO: 3059099 - DNA, 25 bp, Homo sapien
gaagagtgtgctgataaacctacca

SEQ ID NO: 3059100 - DNA, 25 bp, Homo sapien
agccatgctgctacactcacctgaa

SEQ ID NO: 3059101 - DNA, 25 bp, Homo sapien
gcctgggccaagtgagtggaggtca

SEQ ID NO: 3059102 - DNA, 25 bp, Homo sapien
caggctgctccatgtgacacgtggt

SEQ ID NO: 3059103 - DNA, 25 bp, Homo sapien
tcagagtgatagtgcagccatgctg

SEQ ID NO: 3059104 - DNA, 25 bp, Homo sapien
attcaagtttaacatgagcagcaac

SEQ ID NO: 3059105 - DNA, 25 bp, Homo sapien
catgagcagcaacattagcaagacc

SEQ ID NO: 3059106 - DNA, 25 bp, Homo sapien
aaaaaagagctgggcgtaatggcgc

SEQ ID NO: 3059107 - DNA, 25 bp, Homo sapien
aaagagctgggcgtaatggcgcaca

SEQ ID NO: 3059108 - DNA, 25 bp, Homo sapien
tcttctagagtgggtggcttttgga

SEQ ID NO: 3059109 - DNA, 25 bp, Homo sapien
tgctgagaagatgtggttgctcatc

SEQ ID NO: 3059110 - DNA, 25 bp, Homo sapien
atgctgagaagatgtggttgctcat

SEQ ID NO: 3059111 - DNA, 25 bp, Homo sapien
accactgctgtatgtaattggtaga

SEQ ID NO: 3059112 - DNA, 25 bp, Homo sapien
caccactgctgtatgtaattggtag

SEQ ID NO: 3059113 - DNA, 25 bp, Homo sapien
tcaccactgctgtatgtaattggta

SEQ ID NO: 3059114 - DNA, 25 bp, Homo sapien
ccagtgtttctgatggggctagatt

SEQ ID NO: 3059115 - DNA, 25 bp, Homo sapien
tggggctagattggcatgggttcat

SEQ ID NO: 3059116 - DNA, 25 bp, Homo sapien
gatggggctagattggcatgggttc

SEQ ID NO: 3059117 - DNA, 25 bp, Homo sapien
tttctgatggggctagattggcatg

SEQ ID NO: 3059118 - DNA, 25 bp, Homo sapien
cctggaatctgttgttgatacagag

SEQ ID NO: 3059119 - DNA, 25 bp, Homo sapien
gatacagagattgccctccagctta

SEQ ID NO: 3059120 - DNA, 25 bp, Homo sapien
ctccagcttagtagatccccgctga

SEQ ID NO: 3059121 - DNA, 25 bp, Homo sapien
gatccccgctgaagtaggctggtga

SEQ ID NO: 3059122 - DNA, 25 bp, Homo sapien
tgtgctgagtacaacgggcttgagc

SEQ ID NO: 3059123 - DNA, 25 bp, Homo sapien
tgtgcctgtggcaatgttgatggct

SEQ ID NO: 3059124 - DNA, 25 bp, Homo sapien
gaatcctggagattgcatttggagg

SEQ ID NO: 3059125 - DNA, 25 bp, Homo sapien
ccactggtggttgcggcacatttaa

SEQ ID NO: 3059126 - DNA, 25 bp, Homo sapien
gcagcttggactaaatgcatgtgcc

SEQ ID NO: 3059127 - DNA, 25 bp, Homo sapien
gagcagcttggactaaatgcatgtg

SEQ ID NO: 3059128 - DNA, 25 bp, Homo sapien
cagcttggactaaatgcatgtgcca

SEQ ID NO: 3059129 - DNA, 25 bp, Homo sapien
tgagcagcttggactaaatgcatgt

SEQ ID NO: 3059130 - DNA, 25 bp, Homo sapien
gcatccagccactaaattttctaat

SEQ ID NO: 3059131 - DNA, 25 bp, Homo sapien
tgtaatccacgctttgtggcactga

SEQ ID NO: 3059132 - DNA, 25 bp, Homo sapien
gcctgtaatccacgctttgtggcac

SEQ ID NO: 3059133 - DNA, 25 bp, Homo sapien
atccagccactaaattttctaatag

SEQ ID NO: 3059134 - DNA, 25 bp, Homo sapien
tattttacttaaccccatgcatcca

SEQ ID NO: 3059135 - DNA, 25 bp, Homo sapien
agcacatcttaatttggacactaaa

SEQ ID NO: 3059136 - DNA, 25 bp, Homo sapien
cctagcttgaatttgaaacaacagc

SEQ ID NO: 3059137 - DNA, 25 bp, Homo sapien
gtggcgtgatcacaaggcttaccgt

SEQ ID NO: 3059138 - DNA, 25 bp, Homo sapien
atctccttcggtccaaagccatctg

SEQ ID NO: 3059139 - DNA, 25 bp, Homo sapien
ccttagctttgagtctcaatgggcc

SEQ ID NO: 3059140 - DNA, 25 bp, Homo sapien
caccttagctttgagtctcaatggg

SEQ ID NO: 3059141 - DNA, 25 bp, Homo sapien
ttcccaccttagctttgagtctcaa

SEQ ID NO: 3059142 - DNA, 25 bp, Homo sapien
tagctttgagtctcaatgggcccca

SEQ ID NO: 3059143 - DNA, 25 bp, Homo sapien
gcggggactcagatcgccgtagcca

SEQ ID NO: 3059144 - DNA, 25 bp, Homo sapien
cggatggtccagaccgggagcccca

SEQ ID NO: 3059145 - DNA, 25 bp, Homo sapien
ccgctgcgagcagagctggaccgca

SEQ ID NO: 3059146 - DNA, 25 bp, Homo sapien
tcaaaagagctcggaccactctcct

SEQ ID NO: 3059147 - DNA, 25 bp, Homo sapien
gggttacagatctcctatgcaagtc

SEQ ID NO: 3059148 - DNA, 25 bp, Homo sapien
tcaaaagcaagttagggtcgggcat

SEQ ID NO: 3059149 - DNA, 25 bp, Homo sapien
tatcattttgctgtagcccctccca

SEQ ID NO: 3059150 - DNA, 25 bp, Homo sapien
gcctaccagcctgtacaatcaaaag

SEQ ID NO: 3059151 - DNA, 25 bp, Homo sapien
tgactgcgggccggcctggctaatg

SEQ ID NO: 3059152 - DNA, 25 bp, Homo sapien
catggtccgcttggtacgggcatct

SEQ ID NO: 3059153 - DNA, 25 bp, Homo sapien
gattccttgcgggatctgcagacta

SEQ ID NO: 3059154 - DNA, 25 bp, Homo sapien
cataagagatggtggagtagagtct

SEQ ID NO: 3059155 - DNA, 25 bp, Homo sapien
agcagaccaggagcatgactactga

SEQ ID NO: 3059156 - DNA, 25 bp, Homo sapien
gaaaccgcaattagacctgcaatga

SEQ ID NO: 3059157 - DNA, 25 bp, Homo sapien
gatacgtatcacctgttcagacatc

SEQ ID NO: 3059158 - DNA, 25 bp, Homo sapien
gcccttacgaatagaatacttgttg

SEQ ID NO: 3059159 - DNA, 25 bp, Homo sapien
ccagcggttgccactgttgcagaaa

SEQ ID NO: 3059160 - DNA, 25 bp, Homo sapien
gaataaccaagtcctgtagaatctg

SEQ ID NO: 3059161 - DNA, 25 bp, Homo sapien
gaagcgtcaccaacaccaactaatg

SEQ ID NO: 3059162 - DNA, 25 bp, Homo sapien
gatctggagacttgatagtgaccac

SEQ ID NO: 3059163 - DNA, 25 bp, Homo sapien
tcagggcccatgcaatgtaaaattg

SEQ ID NO: 3059164 - DNA, 25 bp, Homo sapien
cttcttgctgcacccatgttgtcac

SEQ ID NO: 3059165 - DNA, 25 bp, Homo sapien
tcagcttacttgtctggcaagggca

SEQ ID NO: 3059166 - DNA, 25 bp, Homo sapien
tactggccataaaagagggagctgc

SEQ ID NO: 3059167 - DNA, 25 bp, Homo sapien
tgactgtttaggtttacatgaccct

SEQ ID NO: 3059168 - DNA, 25 bp, Homo sapien
tcaaggcgcaccttcacacagtgag

SEQ ID NO: 3059169 - DNA, 25 bp, Homo sapien
tggtactggcctgtcccatggtgtc

SEQ ID NO: 3059170 - DNA, 25 bp, Homo sapien
gacctcattgggtgccagacgtaag

SEQ ID NO: 3059171 - DNA, 25 bp, Homo sapien
cattggtagtccttcgctgagttcc

SEQ ID NO: 3059172 - DNA, 25 bp, Homo sapien
ggcaggcctggctactgttcgacct

SEQ ID NO: 3059173 - DNA, 25 bp, Homo sapien
aagtcacttgtccacgtgacaggca

SEQ ID NO: 3059174 - DNA, 25 bp, Homo sapien
ccaggtgtacaggcggaatgtgaaa

SEQ ID NO: 3059175 - DNA, 25 bp, Homo sapien
actgttcgacctcccacaagagctg

SEQ ID NO: 3059176 - DNA, 25 bp, Homo sapien
aagcctgaaccaacaagtaaaggtg

SEQ ID NO: 3059177 - DNA, 25 bp, Homo sapien
gattgctctgtaaactcttaggcgg

SEQ ID NO: 3059178 - DNA, 25 bp, Homo sapien
gagccactcaaacacttaataaggc

SEQ ID NO: 3059179 - DNA, 25 bp, Homo sapien
tcttaggcggaccaaatctaagact

SEQ ID NO: 3059180 - DNA, 25 bp, Homo sapien
tacaccgccccgaatgttctttcag

SEQ ID NO: 3059181 - DNA, 25 bp, Homo sapien
tgattcatgcccaaaacacgctgac

SEQ ID NO: 3059182 - DNA, 25 bp, Homo sapien
tggaggaagactgggcaatccctct

SEQ ID NO: 3059183 - DNA, 25 bp, Homo sapien
tggacctaacagctccctttggagg

SEQ ID NO: 3059184 - DNA, 25 bp, Homo sapien
attatacttcccgattgcttcaact

SEQ ID NO: 3059185 - DNA, 25 bp, Homo sapien
ggcaggatcagtgatattatacttc

SEQ ID NO: 3059186 - DNA, 25 bp, Homo sapien
cttcccgattgcttcaactaaatgc

SEQ ID NO: 3059187 - DNA, 25 bp, Homo sapien
ggatcagtgatattatacttcccga

SEQ ID NO: 3059188 - DNA, 25 bp, Homo sapien
ggtctcgcgcaagaaataactcagg

SEQ ID NO: 3059189 - DNA, 25 bp, Homo sapien
cagctatctggacactcgggtctct

SEQ ID NO: 3059190 - DNA, 25 bp, Homo sapien
cagaaatacgtcacaggaaaagggc

SEQ ID NO: 3059191 - DNA, 25 bp, Homo sapien
caagtccgcggtgcaaaataaaagc

SEQ ID NO: 3059192 - DNA, 25 bp, Homo sapien
tgaatgcaacgatcttcataccgca

SEQ ID NO: 3059193 - DNA, 25 bp, Homo sapien
aaagccacgtaaatccaaaagcagt

SEQ ID NO: 3059194 - DNA, 25 bp, Homo sapien
gtcatacagatctgacggcagtcag

SEQ ID NO: 3059195 - DNA, 25 bp, Homo sapien
gcagtccgactctcgatagtgaaac

SEQ ID NO: 3059196 - DNA, 25 bp, Homo sapien
ttgaatggaaagatgtttatactgc

SEQ ID NO: 3059197 - DNA, 25 bp, Homo sapien
cttgaatggaaagatgtttatactg

SEQ ID NO: 3059198 - DNA, 25 bp, Homo sapien
tatgggcgctcaacttaaataggac

SEQ ID NO: 3059199 - DNA, 25 bp, Homo sapien
taggaccgtccgcatatcgtatgtg

SEQ ID NO: 3059200 - DNA, 25 bp, Homo sapien
taaatacgcgagtactaagagaccg

SEQ ID NO: 3059201 - DNA, 25 bp, Homo sapien
ccagtgatccgacgtaaaggtgcaa

SEQ ID NO: 3059202 - DNA, 25 bp, Homo sapien
cgaagatccgatgcaaacgcgtgga

SEQ ID NO: 3059203 - DNA, 25 bp, Homo sapien
taataggtcccgacaatctgagtgg

SEQ ID NO: 3059204 - DNA, 25 bp, Homo sapien
agtgtgctaacaggccccgaagatc

SEQ ID NO: 3059205 - DNA, 25 bp, Homo sapien
caagaggctcccattctatgagtgg

SEQ ID NO: 3059206 - DNA, 25 bp, Homo sapien
ggtgtatttccaccagaaactgttc

SEQ ID NO: 3059207 - DNA, 25 bp, Homo sapien
tacatcggcctggtgtatttccacc

SEQ ID NO: 3059208 - DNA, 25 bp, Homo sapien
tgttcacatgtacatcggcctggtg

SEQ ID NO: 3059209 - DNA, 25 bp, Homo sapien
gaaactgttcctcattatactgtct

SEQ ID NO: 3059210 - DNA, 25 bp, Homo sapien
aaatgcacctgatagaactgtgaat

SEQ ID NO: 3059211 - DNA, 25 bp, Homo sapien
gggatcttggctccccatagccggt

SEQ ID NO: 3059212 - DNA, 25 bp, Homo sapien
cccatagccggtgcctcccggattc

SEQ ID NO: 3059213 - DNA, 25 bp, Homo sapien
gcacctgatagaactgtgaatttcc

SEQ ID NO: 3059214 - DNA, 25 bp, Homo sapien
acagcttcgaccataaaagatggcc

SEQ ID NO: 3059215 - DNA, 25 bp, Homo sapien
ttcgaccataaaagatggccgcccc

SEQ ID NO: 3059216 - DNA, 25 bp, Homo sapien
tttagaggcctaccctcagggacgc

SEQ ID NO: 3059217 - DNA, 25 bp, Homo sapien
cgccccccgaagcagccattttaga

SEQ ID NO: 3059218 - DNA, 25 bp, Homo sapien
gactcggcggcgtactttcccaata

SEQ ID NO: 3059219 - DNA, 25 bp, Homo sapien
tggcatatcaggatgccaacaagca

SEQ ID NO: 3059220 - DNA, 25 bp, Homo sapien
gcaaagaagtaataccacccaccaa

SEQ ID NO: 3059221 - DNA, 25 bp, Homo sapien
ttctcaatccggttagaagcaaaga

SEQ ID NO: 3059222 - DNA, 25 bp, Homo sapien
cacttaaatatatcgtcctcagacc

SEQ ID NO: 3059223 - DNA, 25 bp, Homo sapien
tacattggatcttagtcaaaaagcc

SEQ ID NO: 3059224 - DNA, 25 bp, Homo sapien
gaccctctttggaaacacggcaata

SEQ ID NO: 3059225 - DNA, 25 bp, Homo sapien
tcgatgcgcagagtggaaaaaacca

SEQ ID NO: 3059226 - DNA, 25 bp, Homo sapien
gaagtgtgtcactgaaccccagact

SEQ ID NO: 3059227 - DNA, 25 bp, Homo sapien
gacttctcgctttaccaactgtgta

SEQ ID NO: 3059228 - DNA, 25 bp, Homo sapien
cttaggaaacacaccgaagtattgg

SEQ ID NO: 3059229 - DNA, 25 bp, Homo sapien
ggtgaaatctgaactcggactgtag

SEQ ID NO: 3059230 - DNA, 25 bp, Homo sapien
acttttacatgctggaggtgggcag

SEQ ID NO: 3059231 - DNA, 25 bp, Homo sapien
ggtgggggctggaagagaatacaac

SEQ ID NO: 3059232 - DNA, 25 bp, Homo sapien
gggaactcacggaagtttcctctga

SEQ ID NO: 3059233 - DNA, 25 bp, Homo sapien
tgtcctgggaactcacggaagtttc

SEQ ID NO: 3059234 - DNA, 25 bp, Homo sapien
gatgtgtcctgggaactcacggaag

SEQ ID NO: 3059235 - DNA, 25 bp, Homo sapien
tggatgtgtcctgggaactcacgga

SEQ ID NO: 3059236 - DNA, 25 bp, Homo sapien
gataaggtcaagcaaatcacatggg

SEQ ID NO: 3059237 - DNA, 25 bp, Homo sapien
taccatcaatgcacggagtccagta

SEQ ID NO: 3059238 - DNA, 25 bp, Homo sapien
tctctgtaactgtagggtccagccc

SEQ ID NO: 3059239 - DNA, 25 bp, Homo sapien
gagagaggaccacatatgtcagcat

SEQ ID NO: 3059240 - DNA, 25 bp, Homo sapien
gagaatgcagtaatgccctgtccca

SEQ ID NO: 3059241 - DNA, 25 bp, Homo sapien
tgcaaaagcggtttcacaagcagtc

SEQ ID NO: 3059242 - DNA, 25 bp, Homo sapien
tacagaaacgttaagcacagggcaa

SEQ ID NO: 3059243 - DNA, 25 bp, Homo sapien
gactcgaatttccatggacaggcat

SEQ ID NO: 3059244 - DNA, 25 bp, Homo sapien
tcatggcagtttttcatcagggaac

SEQ ID NO: 3059245 - DNA, 25 bp, Homo sapien
tttgttagcaggtcatcgtggagga

SEQ ID NO: 3059246 - DNA, 25 bp, Homo sapien
gaggatgcacccatcgaaggtggcc

SEQ ID NO: 3059247 - DNA, 25 bp, Homo sapien
tctgaaatccatgcacctttgttag

SEQ ID NO: 3059248 - DNA, 25 bp, Homo sapien
cagtaaccatgatcacgaccacatt

SEQ ID NO: 3059249 - DNA, 25 bp, Homo sapien
tcgggagcaacttatcatggaggac

SEQ ID NO: 3059250 - DNA, 25 bp, Homo sapien
gggcaatacttctggatcgggagca

SEQ ID NO: 3059251 - DNA, 25 bp, Homo sapien
gagaatcagggctctttgcagctgg

SEQ ID NO: 3059252 - DNA, 25 bp, Homo sapien
gcgaccgcggctcagtagtctggaa

SEQ ID NO: 3059253 - DNA, 25 bp, Homo sapien
gaatgtgggtcccagtatccgacta

SEQ ID NO: 3059254 - DNA, 25 bp, Homo sapien
tgtgataccgaagcacctgagcaac

SEQ ID NO: 3059255 - DNA, 25 bp, Homo sapien
agggagcagaaacggagccgagggc

SEQ ID NO: 3059256 - DNA, 25 bp, Homo sapien
tagctgggattagatcttttagcaa

SEQ ID NO: 3059257 - DNA, 25 bp, Homo sapien
gggattagatcttttagcaagttgg

SEQ ID NO: 3059258 - DNA, 25 bp, Homo sapien
attagatcttttagcaagttgggca

SEQ ID NO: 3059259 - DNA, 25 bp, Homo sapien
tccaaggttcggggtagtctcctgc

SEQ ID NO: 3059260 - DNA, 25 bp, Homo sapien
tgtccgtgtggttagcaaggagcat

SEQ ID NO: 3059261 - DNA, 25 bp, Homo sapien
gccttgtccgtgtggttagcaagga

SEQ ID NO: 3059262 - DNA, 25 bp, Homo sapien
tggccttgtccgtgtggttagcaag

SEQ ID NO: 3059263 - DNA, 25 bp, Homo sapien
cttgtccgtgtggttagcaaggagc

SEQ ID NO: 3059264 - DNA, 25 bp, Homo sapien
ggctgcccttcaacaccatccactg

SEQ ID NO: 3059265 - DNA, 25 bp, Homo sapien
ctggctgcccttcaacaccatccac

SEQ ID NO: 3059266 - DNA, 25 bp, Homo sapien
tctggctgcccttcaacaccatcca

SEQ ID NO: 3059267 - DNA, 25 bp, Homo sapien
tggctgcccttcaacaccatccact

SEQ ID NO: 3059268 - DNA, 25 bp, Homo sapien
ctgaggagagcagcctattcaacta

SEQ ID NO: 3059269 - DNA, 25 bp, Homo sapien
tctaaggttttcagtccttgggcac

SEQ ID NO: 3059270 - DNA, 25 bp, Homo sapien
gagagcagcctattcaactattcaa

SEQ ID NO: 3059271 - DNA, 25 bp, Homo sapien
ctccaggtgcttctaaggttttcag

SEQ ID NO: 3059272 - DNA, 25 bp, Homo sapien
ggccctgattgcacttcagttttcg

SEQ ID NO: 3059273 - DNA, 25 bp, Homo sapien
ttcttggccctgattgcacttcagt

SEQ ID NO: 3059274 - DNA, 25 bp, Homo sapien
gattgcacttcagttttcgccctgt

SEQ ID NO: 3059275 - DNA, 25 bp, Homo sapien
gcacttcagttttcgccctgtcttc

SEQ ID NO: 3059276 - DNA, 25 bp, Homo sapien
caaacagagtaagttgaagtccagc

SEQ ID NO: 3059277 - DNA, 25 bp, Homo sapien
cagcgggtagttttgccaaggccag

SEQ ID NO: 3059278 - DNA, 25 bp, Homo sapien
gccctccaagtaaagtcgaacatgt

SEQ ID NO: 3059279 - DNA, 25 bp, Homo sapien
agtagaactactccatgggctgaag

SEQ ID NO: 3059280 - DNA, 25 bp, Homo sapien
aatctatctaatataattgttctct

SEQ ID NO: 3059281 - DNA, 25 bp, Homo sapien
aattgttctctgatagaggacgtat

SEQ ID NO: 3059282 - DNA, 25 bp, Homo sapien
tataattgttctctgatagaggacg

SEQ ID NO: 3059283 - DNA, 25 bp, Homo sapien
aaatctatctaatataattgttctc

SEQ ID NO: 3059284 - DNA, 25 bp, Homo sapien
ccattacacactcgggctgatttct

SEQ ID NO: 3059285 - DNA, 25 bp, Homo sapien
tctcatctacattcaagacgcggtg

SEQ ID NO: 3059286 - DNA, 25 bp, Homo sapien
gagaaatcccgtctcgactcaggag

SEQ ID NO: 3059287 - DNA, 25 bp, Homo sapien
gtccacaccaatattgacgccatta

SEQ ID NO: 3059288 - DNA, 25 bp, Homo sapien
cctccagctaaggagccgcggctgg

SEQ ID NO: 3059289 - DNA, 25 bp, Homo sapien
tgtatgagcgaaaagactgaaccaa

SEQ ID NO: 3059290 - DNA, 25 bp, Homo sapien
aaaacaagataggtctgtggaagag

SEQ ID NO: 3059291 - DNA, 25 bp, Homo sapien
aggcgtggccaccgcggttgactcc

SEQ ID NO: 3059292 - DNA, 25 bp, Homo sapien
tctttacgtcgtcaccagtgggcgg

SEQ ID NO: 3059293 - DNA, 25 bp, Homo sapien
gacgagtcgcaagatatcatcacca

SEQ ID NO: 3059294 - DNA, 25 bp, Homo sapien
tccccgtttctctgcgctagtctaa

SEQ ID NO: 3059295 - DNA, 25 bp, Homo sapien
gctagtctaattagtgcctggcaag

SEQ ID NO: 3059296 - DNA, 25 bp, Homo sapien
tgcaagtcatccttgcacggggcca

SEQ ID NO: 3059297 - DNA, 25 bp, Homo sapien
cacggggccatgctaatttctgtat

SEQ ID NO: 3059298 - DNA, 25 bp, Homo sapien
tttgcaagtcatccttgcacggggc

SEQ ID NO: 3059299 - DNA, 25 bp, Homo sapien
catgctaatttctgtatcgttcaaa

SEQ ID NO: 3059300 - DNA, 25 bp, Homo sapien
tggatggactgagtgctgaaacttc

SEQ ID NO: 3059301 - DNA, 25 bp, Homo sapien
ggatggactgagtgctgaaacttcc

SEQ ID NO: 3059302 - DNA, 25 bp, Homo sapien
cagagagtaagccactggtgcaaat

SEQ ID NO: 3059303 - DNA, 25 bp, Homo sapien
ggcaatgacgaagactgtctgaaaa

SEQ ID NO: 3059304 - DNA, 25 bp, Homo sapien
agcgagcaaggcgatcaggacttga

SEQ ID NO: 3059305 - DNA, 25 bp, Homo sapien
cactggtgcaaatagcgagcaaggc

SEQ ID NO: 3059306 - DNA, 25 bp, Homo sapien
tcagagctctgatagcagagggctg

SEQ ID NO: 3059307 - DNA, 25 bp, Homo sapien
tcgcgctcagcacaaatcgtttttc

SEQ ID NO: 3059308 - DNA, 25 bp, Homo sapien
cagctcagtctgcagaacgtcagct

SEQ ID NO: 3059309 - DNA, 25 bp, Homo sapien
gcagaacgtcagctggcagcgagca

SEQ ID NO: 3059310 - DNA, 25 bp, Homo sapien
tgttgatatttagcctccttctgag

SEQ ID NO: 3059311 - DNA, 25 bp, Homo sapien
tgtgcttgtccccttttgctctccg

SEQ ID NO: 3059312 - DNA, 25 bp, Homo sapien
tgagatgtgcttgtccccttttgct

SEQ ID NO: 3059313 - DNA, 25 bp, Homo sapien
gttgggataaccctgttgatattta

SEQ ID NO: 3059314 - DNA, 25 bp, Homo sapien
tgccacagcctaaactgcaaacatg

SEQ ID NO: 3059315 - DNA, 25 bp, Homo sapien
tgcaaacatggcatatctgggtgcc

SEQ ID NO: 3059316 - DNA, 25 bp, Homo sapien
gacaggaagccattgctggtcctca

SEQ ID NO: 3059317 - DNA, 25 bp, Homo sapien
ctcaggcaggctctgttcattgctg

SEQ ID NO: 3059318 - DNA, 25 bp, Homo sapien
tgtcctttgaagagtgttttgtggc

SEQ ID NO: 3059319 - DNA, 25 bp, Homo sapien
tagttgctgaagaaatgtcctttga

SEQ ID NO: 3059320 - DNA, 25 bp, Homo sapien
acagtttctgctcacgaacacatgg

SEQ ID NO: 3059321 - DNA, 25 bp, Homo sapien
tgctcacgaacacatggtagttgct

SEQ ID NO: 3059322 - DNA, 25 bp, Homo sapien
ggtgcctgaagctgtagaatccatc

SEQ ID NO: 3059323 - DNA, 25 bp, Homo sapien
gatttgaggacatggtgcctgaagc

SEQ ID NO: 3059324 - DNA, 25 bp, Homo sapien
gtgcctgaagctgtagaatccatct

SEQ ID NO: 3059325 - DNA, 25 bp, Homo sapien
agatttgaggacatggtgcctgaag

SEQ ID NO: 3059326 - DNA, 25 bp, Homo sapien
caatgattgggagcgttattaccac

SEQ ID NO: 3059327 - DNA, 25 bp, Homo sapien
cattcacctggtggctaagtgtgtc

SEQ ID NO: 3059328 - DNA, 25 bp, Homo sapien
tgatctagtccatagtcagggctgc

SEQ ID NO: 3059329 - DNA, 25 bp, Homo sapien
cactgtacaactcttaagggaacca

SEQ ID NO: 3059330 - DNA, 25 bp, Homo sapien
tgggcaataaaagcgaaattctgcc

SEQ ID NO: 3059331 - DNA, 25 bp, Homo sapien
atgagcagagaccacactattgcac

SEQ ID NO: 3059332 - DNA, 25 bp, Homo sapien
tgcaatgagcagagaccacactatt

SEQ ID NO: 3059333 - DNA, 25 bp, Homo sapien
caataaaagcgaaattctgcctcca

SEQ ID NO: 3059334 - DNA, 25 bp, Homo sapien
acaggcctgaatcatcttcatgtgc

SEQ ID NO: 3059335 - DNA, 25 bp, Homo sapien
catgtgatatcggaactgatattct

SEQ ID NO: 3059336 - DNA, 25 bp, Homo sapien
aggacaggcctgaatcatcttcatg

SEQ ID NO: 3059337 - DNA, 25 bp, Homo sapien
ttctgcatgtgatatcggaactgat

SEQ ID NO: 3059338 - DNA, 25 bp, Homo sapien
tgatctgagcaagcacaattggaaa

SEQ ID NO: 3059339 - DNA, 25 bp, Homo sapien
ccagctacgtggctcaaatattggc

SEQ ID NO: 3059340 - DNA, 25 bp, Homo sapien
gcaggctacagcatgtttggataaa

SEQ ID NO: 3059341 - DNA, 25 bp, Homo sapien
gttacacagacacagcgacaaaatt

SEQ ID NO: 3059342 - DNA, 25 bp, Homo sapien
tgtacaaccgctatgaggaacccaa

SEQ ID NO: 3059343 - DNA, 25 bp, Homo sapien
tccgacggcgctgaaaggcaagatt

SEQ ID NO: 3059344 - DNA, 25 bp, Homo sapien
gaatatctcgagctttccgacggcg

SEQ ID NO: 3059345 - DNA, 25 bp, Homo sapien
ccagggcttggacttatcgatgaca

SEQ ID NO: 3059346 - DNA, 25 bp, Homo sapien
tgccaggccaggtttcggaacttac

SEQ ID NO: 3059347 - DNA, 25 bp, Homo sapien
aggaggctccttacctggcggaaca

SEQ ID NO: 3059348 - DNA, 25 bp, Homo sapien
gagtattcgcctttgtaagcccagg

SEQ ID NO: 3059349 - DNA, 25 bp, Homo sapien
gattgggcacatcctgttacgttgc

SEQ ID NO: 3059350 - DNA, 25 bp, Homo sapien
tatatggcaggaccgtccctatggg

SEQ ID NO: 3059351 - DNA, 25 bp, Homo sapien
tcgtgtgtgtactcggccttcaggg

SEQ ID NO: 3059352 - DNA, 25 bp, Homo sapien
ccctgtggttgctgtagctgtctca

SEQ ID NO: 3059353 - DNA, 25 bp, Homo sapien
aggtttacttcatcccgcctggacg

SEQ ID NO: 3059354 - DNA, 25 bp, Homo sapien
aggcttctgtctccccgcagtggga

SEQ ID NO: 3059355 - DNA, 25 bp, Homo sapien
gtttcagatgaaggtttccccaaca

SEQ ID NO: 3059356 - DNA, 25 bp, Homo sapien
ccagtatgaagttgggaagcgcctt

SEQ ID NO: 3059357 - DNA, 25 bp, Homo sapien
gagcaccaagaactgacaaaccggg

SEQ ID NO: 3059358 - DNA, 25 bp, Homo sapien
gattgtccgggaaggccaaagagaa

SEQ ID NO: 3059359 - DNA, 25 bp, Homo sapien
actgacaggccggtcaaactcagcc

SEQ ID NO: 3059360 - DNA, 25 bp, Homo sapien
catccaagtgggacaaagggactgt

SEQ ID NO: 3059361 - DNA, 25 bp, Homo sapien
ccttgagagctggacgctgattgtc

SEQ ID NO: 3059362 - DNA, 25 bp, Homo sapien
ctttctcataatagtatcggagcga

SEQ ID NO: 3059363 - DNA, 25 bp, Homo sapien
tgatgcctttctcataatagtatcg

SEQ ID NO: 3059364 - DNA, 25 bp, Homo sapien
gcctttctcataatagtatcggagc

SEQ ID NO: 3059365 - DNA, 25 bp, Homo sapien
tctcataatagtatcggagcgagcg

SEQ ID NO: 3059366 - DNA, 25 bp, Homo sapien
acaaaacagttttggggtagagatg

SEQ ID NO: 3059367 - DNA, 25 bp, Homo sapien
aaaacagttttggggtagagatgct

SEQ ID NO: 3059368 - DNA, 25 bp, Homo sapien
caaaacagttttggggtagagatgc

SEQ ID NO: 3059369 - DNA, 25 bp, Homo sapien
aacagttttggggtagagatgctac

SEQ ID NO: 3059370 - DNA, 25 bp, Homo sapien
ctgtaaactttggaaaggagggctg

SEQ ID NO: 3059371 - DNA, 25 bp, Homo sapien
atgagcttgaactccattccccggc

SEQ ID NO: 3059372 - DNA, 25 bp, Homo sapien
aaatgggcatttgttgggtcatcca

SEQ ID NO: 3059373 - DNA, 25 bp, Homo sapien
gtagggcggcccctctcgaaatgca

SEQ ID NO: 3059374 - DNA, 25 bp, Homo sapien
ccggcccgtccaggcaatgaaatgg

SEQ ID NO: 3059375 - DNA, 25 bp, Homo sapien
gggacaacgcagacatcatctggga

SEQ ID NO: 3059376 - DNA, 25 bp, Homo sapien
cttcaaatttctcagggacaacgca

SEQ ID NO: 3059377 - DNA, 25 bp, Homo sapien
cgcagaggtttctcatagccatagc

SEQ ID NO: 3059378 - DNA, 25 bp, Homo sapien
catctgggaatggtcgcagaggttt

SEQ ID NO: 3059379 - DNA, 25 bp, Homo sapien
ggaggaaattgggggttgctcagat

SEQ ID NO: 3059380 - DNA, 25 bp, Homo sapien
cttgtggaggaaattgggggttgct

SEQ ID NO: 3059381 - DNA, 25 bp, Homo sapien
gtggaggaaattgggggttgctcag

SEQ ID NO: 3059382 - DNA, 25 bp, Homo sapien
tgtggaggaaattgggggttgctca

SEQ ID NO: 3059383 - DNA, 25 bp, Homo sapien
agaagccctctgtgtggaggtacat

SEQ ID NO: 3059384 - DNA, 25 bp, Homo sapien
gagaagccctctgtgtggaggtaca

SEQ ID NO: 3059385 - DNA, 25 bp, Homo sapien
gaaagagttcggtgtccacgcctaa

SEQ ID NO: 3059386 - DNA, 25 bp, Homo sapien
tgaaacatgacacctccgggaggag

SEQ ID NO: 3059387 - DNA, 25 bp, Homo sapien
aaaaatgtccggtcagcaggtcagg

SEQ ID NO: 3059388 - DNA, 25 bp, Homo sapien
tacagcctttgaaggtcagcggcaa

SEQ ID NO: 3059389 - DNA, 25 bp, Homo sapien
gcccctgggtacctgtgcccattga

SEQ ID NO: 3059390 - DNA, 25 bp, Homo sapien
gtctgttcctgtttgatcaccaccc

SEQ ID NO: 3059391 - DNA, 25 bp, Homo sapien
tgagtcgtaggcgaagtccgtctgt

SEQ ID NO: 3059392 - DNA, 25 bp, Homo sapien
tggctggcccgcctgttcatacagg

SEQ ID NO: 3059393 - DNA, 25 bp, Homo sapien
taggggcgactgtccaagggcacca

SEQ ID NO: 3059394 - DNA, 25 bp, Homo sapien
gtgccagaggatctcaggaaattcc

SEQ ID NO: 3059395 - DNA, 25 bp, Homo sapien
aggaaattccgttgctctgcccggg

SEQ ID NO: 3059396 - DNA, 25 bp, Homo sapien
ctatgttccccgaggtacccatggc

SEQ ID NO: 3059397 - DNA, 25 bp, Homo sapien
agtaaaggcactgctcgccatggtg

SEQ ID NO: 3059398 - DNA, 25 bp, Homo sapien
ctggagtaaaggcactgctcgccat

SEQ ID NO: 3059399 - DNA, 25 bp, Homo sapien
ctgcaggacagggccgggtctgtgc

SEQ ID NO: 3059400 - DNA, 25 bp, Homo sapien
tggtaggggagtggcggcttcctgc

SEQ ID NO: 3059401 - DNA, 25 bp, Homo sapien
ggaaatcaggaacaaactgctcatc

SEQ ID NO: 3059402 - DNA, 25 bp, Homo sapien
ggttttctgaatggaaatcaggaac

SEQ ID NO: 3059403 - DNA, 25 bp, Homo sapien
ggaacaaactgctcatcactgtctg

SEQ ID NO: 3059404 - DNA, 25 bp, Homo sapien
acaaactgctcatcactgtctggta

SEQ ID NO: 3059405 - DNA, 25 bp, Homo sapien
ccacgtctcctggaagtgacttaga

SEQ ID NO: 3059406 - DNA, 25 bp, Homo sapien
cgtctcctggaagtgacttagatcc

SEQ ID NO: 3059407 - DNA, 25 bp, Homo sapien
cttcagcgagccacgtctcctggaa

SEQ ID NO: 3059408 - DNA, 25 bp, Homo sapien
agcgagccacgtctcctggaagtga

SEQ ID NO: 3059409 - DNA, 25 bp, Homo sapien
ggccgatcagcgcttcgcgcaagct

SEQ ID NO: 3059410 - DNA, 25 bp, Homo sapien
ccccagcgggccgatcagcgcttcg

SEQ ID NO: 3059411 - DNA, 25 bp, Homo sapien
gcaagctcccatttccgggcgattt

SEQ ID NO: 3059412 - DNA, 25 bp, Homo sapien
ttcgcgcaagctcccatttccgggc

SEQ ID NO: 3059413 - DNA, 25 bp, Homo sapien
gggagaatgcccgcgagtcaccctg

SEQ ID NO: 3059414 - DNA, 25 bp, Homo sapien
aatgcccgcgagtcaccctgaggcg

SEQ ID NO: 3059415 - DNA, 25 bp, Homo sapien
cgcgagtcaccctgaggcgcttagt

SEQ ID NO: 3059416 - DNA, 25 bp, Homo sapien
ccgcgagtcaccctgaggcgcttag

SEQ ID NO: 3059417 - DNA, 25 bp, Homo sapien
aagtatccggctttcatcctccgct

SEQ ID NO: 3059418 - DNA, 25 bp, Homo sapien
gcacttgctggtccaagtatccggc

SEQ ID NO: 3059419 - DNA, 25 bp, Homo sapien
aaggtgtagggcacttgctggtcca

SEQ ID NO: 3059420 - DNA, 25 bp, Homo sapien
tagggcacttgctggtccaagtatc

SEQ ID NO: 3059421 - DNA, 25 bp, Homo sapien
ccgctccctccggccgcacggccgg

SEQ ID NO: 3059422 - DNA, 25 bp, Homo sapien
cgctccctccggccgcacggccggg

SEQ ID NO: 3059423 - DNA, 25 bp, Homo sapien
ggccgctccctccggccgcacggcc

SEQ ID NO: 3059424 - DNA, 25 bp, Homo sapien
ccggccgctccctccggccgcacgg

SEQ ID NO: 3059425 - DNA, 25 bp, Homo sapien
agggggctgcgttcgcacaccgtcc

SEQ ID NO: 3059426 - DNA, 25 bp, Homo sapien
gggctgcgttcgcacaccgtccagg

SEQ ID NO: 3059427 - DNA, 25 bp, Homo sapien
tgcgttcgcacaccgtccagggagg

SEQ ID NO: 3059428 - DNA, 25 bp, Homo sapien
gctgcgttcgcacaccgtccaggga

SEQ ID NO: 3059429 - DNA, 25 bp, Homo sapien
ccaggagccgggctcgccgtttctg

SEQ ID NO: 3059430 - DNA, 25 bp, Homo sapien
tttctgcagccctgctttacccggg

SEQ ID NO: 3059431 - DNA, 25 bp, Homo sapien
ctttctgcagccctgctttacccgg

SEQ ID NO: 3059432 - DNA, 25 bp, Homo sapien
cgggctcgccgtttctgctttctgc

SEQ ID NO: 3059433 - DNA, 25 bp, Homo sapien
cccagcgcaccgacttgtttttcgg

SEQ ID NO: 3059434 - DNA, 25 bp, Homo sapien
cgacttgtttttcgggcgcagcaga

SEQ ID NO: 3059435 - DNA, 25 bp, Homo sapien
cagcgcaccgacttgtttttcgggc

SEQ ID NO: 3059436 - DNA, 25 bp, Homo sapien
caccgacttgtttttcgggcgcagc

SEQ ID NO: 3059437 - DNA, 25 bp, Homo sapien
agaagccccagggtagatgatttcc

SEQ ID NO: 3059438 - DNA, 25 bp, Homo sapien
gatttccgaaagtgtagctccctct

SEQ ID NO: 3059439 - DNA, 25 bp, Homo sapien
gatgatttccgaaagtgtagctccc

SEQ ID NO: 3059440 - DNA, 25 bp, Homo sapien
ccagggtagatgatttccgaaagtg

SEQ ID NO: 3059441 - DNA, 25 bp, Homo sapien
ggtcccaggcctcccactgggccat

SEQ ID NO: 3059442 - DNA, 25 bp, Homo sapien
tgggctctcttcagggtcccaggcc

SEQ ID NO: 3059443 - DNA, 25 bp, Homo sapien
tcagggtcccaggcctcccactggg

SEQ ID NO: 3059444 - DNA, 25 bp, Homo sapien
ctgggctctcttcagggtcccaggc

SEQ ID NO: 3059445 - DNA, 25 bp, Homo sapien
gagcaagaagtagggatcattggct

SEQ ID NO: 3059446 - DNA, 25 bp, Homo sapien
tgagcaagaagtagggatcattggc

SEQ ID NO: 3059447 - DNA, 25 bp, Homo sapien
tttgagcaagaagtagggatcattg

SEQ ID NO: 3059448 - DNA, 25 bp, Homo sapien
agcaagaagtagggatcattggcta

SEQ ID NO: 3059449 - DNA, 25 bp, Homo sapien
tttaagcttcctgtggagctaggtc

SEQ ID NO: 3059450 - DNA, 25 bp, Homo sapien
ttaagcttcctgtggagctaggtcc

SEQ ID NO: 3059451 - DNA, 25 bp, Homo sapien
tggagaggaggcaactcctttgatc

SEQ ID NO: 3059452 - DNA, 25 bp, Homo sapien
aggaggcgggctcctaaaggccagc

SEQ ID NO: 3059453 - DNA, 25 bp, Homo sapien
ggcgggctcctaaaggccagcacgc

SEQ ID NO: 3059454 - DNA, 25 bp, Homo sapien
ctggagaggaggcaactcctttgat

SEQ ID NO: 3059455 - DNA, 25 bp, Homo sapien
tttggccccatagctagttagttcg

SEQ ID NO: 3059456 - DNA, 25 bp, Homo sapien
gatcattgactcaaaggccagcatg

SEQ ID NO: 3059457 - DNA, 25 bp, Homo sapien
tagttcggtgctaggaacatccacc

SEQ ID NO: 3059458 - DNA, 25 bp, Homo sapien
ctaaacaagtcgaggcaggatcatt

SEQ ID NO: 3059459 - DNA, 25 bp, Homo sapien
tacaaagtgaattgagctcgcacaa

SEQ ID NO: 3059460 - DNA, 25 bp, Homo sapien
gggacactttccagcctctacgttg

SEQ ID NO: 3059461 - DNA, 25 bp, Homo sapien
gaatgattacatctgcgtacaagag

SEQ ID NO: 3059462 - DNA, 25 bp, Homo sapien
cagtcaagcctgtgtggacgggcct

SEQ ID NO: 3059463 - DNA, 25 bp, Homo sapien
catttactttccgagtcgccagctg

SEQ ID NO: 3059464 - DNA, 25 bp, Homo sapien
ttactttccgagtcgccagctggtt

SEQ ID NO: 3059465 - DNA, 25 bp, Homo sapien
gccagctggttccaaagctcctctc

SEQ ID NO: 3059466 - DNA, 25 bp, Homo sapien
aagcatttactttccgagtcgccag

SEQ ID NO: 3059467 - DNA, 25 bp, Homo sapien
gccaagagacgctgagaagcagtat

SEQ ID NO: 3059468 - DNA, 25 bp, Homo sapien
catccggcccggtaggatctctgtc

SEQ ID NO: 3059469 - DNA, 25 bp, Homo sapien
tcctaagactcccaggaatgctggg

SEQ ID NO: 3059470 - DNA, 25 bp, Homo sapien
gaagctgtttccagattcatccggc

SEQ ID NO: 3059471 - DNA, 25 bp, Homo sapien
tctgaacttggagaggctgtggagt

SEQ ID NO: 3059472 - DNA, 25 bp, Homo sapien
tggagaggctgtggagtccccatcc

SEQ ID NO: 3059473 - DNA, 25 bp, Homo sapien
aacttggagaggctgtggagtcccc

SEQ ID NO: 3059474 - DNA, 25 bp, Homo sapien
acttggagaggctgtggagtcccca

SEQ ID NO: 3059475 - DNA, 25 bp, Homo sapien
tgcccattgggggagatgggctgac

SEQ ID NO: 3059476 - DNA, 25 bp, Homo sapien
cctgcccattgggggagatgggctg

SEQ ID NO: 3059477 - DNA, 25 bp, Homo sapien
agggtcctgcccattgggggagatg

SEQ ID NO: 3059478 - DNA, 25 bp, Homo sapien
tcagggtcctgcccattgggggaga

SEQ ID NO: 3059479 - DNA, 25 bp, Homo sapien
ttcggttctggaaccacactttgac

SEQ ID NO: 3059480 - DNA, 25 bp, Homo sapien
ccacttcatccttcggttctggaac

SEQ ID NO: 3059481 - DNA, 25 bp, Homo sapien
tcccttcacacgcttccacttcatc

SEQ ID NO: 3059482 - DNA, 25 bp, Homo sapien
ctcccttcacacgcttccacttcat

SEQ ID NO: 3059483 - DNA, 25 bp, Homo sapien
tgctccttggtgaaggccgtcctct

SEQ ID NO: 3059484 - DNA, 25 bp, Homo sapien
cggagccgagtcaggtagttatgat

SEQ ID NO: 3059485 - DNA, 25 bp, Homo sapien
gcaatctcatatctgcggagccgag

SEQ ID NO: 3059486 - DNA, 25 bp, Homo sapien
cagagaggtccaggtttaccgcaat

SEQ ID NO: 3059487 - DNA, 25 bp, Homo sapien
cagcagggaaggacgcgcagccccg

SEQ ID NO: 3059488 - DNA, 25 bp, Homo sapien
gcagcagggaaggacgcgcagcccc

SEQ ID NO: 3059489 - DNA, 25 bp, Homo sapien
ctccggaagcgggagcgtgggcagc

SEQ ID NO: 3059490 - DNA, 25 bp, Homo sapien
acctgcttaggtgtgcacaggtgcc

SEQ ID NO: 3059491 - DNA, 25 bp, Homo sapien
gcttaggtgtgcacaggtgccccat

SEQ ID NO: 3059492 - DNA, 25 bp, Homo sapien
caagacctgcttaggtgtgcacagg

SEQ ID NO: 3059493 - DNA, 25 bp, Homo sapien
tcctccaagacctgcttaggtgtgc

SEQ ID NO: 3059494 - DNA, 25 bp, Homo sapien
gatgcaagcattgcggcaataaaga

SEQ ID NO: 3059495 - DNA, 25 bp, Homo sapien
aggaggatgcaagcattgcggcaat

SEQ ID NO: 3059496 - DNA, 25 bp, Homo sapien
gaggatgcaagcattgcggcaataa

SEQ ID NO: 3059497 - DNA, 25 bp, Homo sapien
ggatgcaagcattgcggcaataaag

SEQ ID NO: 3059498 - DNA, 25 bp, Homo sapien
gtcctccaaatcctggctgatcctg

SEQ ID NO: 3059499 - DNA, 25 bp, Homo sapien
ggatccatttcacgtgtcctccaaa

SEQ ID NO: 3059500 - DNA, 25 bp, Homo sapien
tgcacccagaggatccatttcacgt

SEQ ID NO: 3059501 - DNA, 25 bp, Homo sapien
ccagtctgcacccagaggatccatt

SEQ ID NO: 3059502 - DNA, 25 bp, Homo sapien
aagcaccccgtagtcatcgcctggg

SEQ ID NO: 3059503 - DNA, 25 bp, Homo sapien
ctctgtctcattggcagtgctccca

SEQ ID NO: 3059504 - DNA, 25 bp, Homo sapien
tgagaagtcagggtacgctgccgtc

SEQ ID NO: 3059505 - DNA, 25 bp, Homo sapien
tcgctgtcgccaggaagtctggttt

SEQ ID NO: 3059506 - DNA, 25 bp, Homo sapien
tccgagtgggggtttcgaaggcagc

SEQ ID NO: 3059507 - DNA, 25 bp, Homo sapien
cattgccttccgagtgggggtttcg

SEQ ID NO: 3059508 - DNA, 25 bp, Homo sapien
gcgggtagtggggtagccctgaggc

SEQ ID NO: 3059509 - DNA, 25 bp, Homo sapien
gggtagccctgaggccccattgcct

SEQ ID NO: 3059510 - DNA, 25 bp, Homo sapien
caatgcaccagcctacctactggga

SEQ ID NO: 3059511 - DNA, 25 bp, Homo sapien
gccagctactcctatgtgtgtgcac

SEQ ID NO: 3059512 - DNA, 25 bp, Homo sapien
tgcacacacctatgtcgggcttgct

SEQ ID NO: 3059513 - DNA, 25 bp, Homo sapien
tatgtgtatttgtcgccaatgacac

SEQ ID NO: 3059514 - DNA, 25 bp, Homo sapien
cagctgacgaggagttcgtcctgga

SEQ ID NO: 3059515 - DNA, 25 bp, Homo sapien
gcatttgatttaaaggcccttctac

SEQ ID NO: 3059516 - DNA, 25 bp, Homo sapien
ccagggagtgaagtgaggaataaga

SEQ ID NO: 3059517 - DNA, 25 bp, Homo sapien
gagacaagcttggtgattgcatttg

SEQ ID NO: 3059518 - DNA, 25 bp, Homo sapien
aatccatcaaatgccaaattccagg

SEQ ID NO: 3059519 - DNA, 25 bp, Homo sapien
tcattttcctcgtgctgggggagca

SEQ ID NO: 3059520 - DNA, 25 bp, Homo sapien
atcacatgtcgatccacaaactggc

SEQ ID NO: 3059521 - DNA, 25 bp, Homo sapien
cagtctcattttcctcgtgctgggg

SEQ ID NO: 3059522 - DNA, 25 bp, Homo sapien
aatgtaagaatcacatgtcgatcca

SEQ ID NO: 3059523 - DNA, 25 bp, Homo sapien
gccatttctggtaaataggtttgat

SEQ ID NO: 3059524 - DNA, 25 bp, Homo sapien
ggcacagaacctttcacgattagca

SEQ ID NO: 3059525 - DNA, 25 bp, Homo sapien
aataggtttgatgggtttggcagca

SEQ ID NO: 3059526 - DNA, 25 bp, Homo sapien
ttagcaggctcatgacaatttctct

SEQ ID NO: 3059527 - DNA, 25 bp, Homo sapien
ctgccttcatcagaactgctcagca

SEQ ID NO: 3059528 - DNA, 25 bp, Homo sapien
gaactgctcagcaagcagttccatc

SEQ ID NO: 3059529 - DNA, 25 bp, Homo sapien
ccagtgtctacagacactgtggact

SEQ ID NO: 3059530 - DNA, 25 bp, Homo sapien
ggagggccagtgtctacagacactg

SEQ ID NO: 3059531 - DNA, 25 bp, Homo sapien
tcgtaaatctcatctttccggccct

SEQ ID NO: 3059532 - DNA, 25 bp, Homo sapien
gcagccaccttggtaggaagggccc

SEQ ID NO: 3059533 - DNA, 25 bp, Homo sapien
aaggccatggccatcgtaaatctca

SEQ ID NO: 3059534 - DNA, 25 bp, Homo sapien
ccaccttggtaggaagggccctcat

SEQ ID NO: 3059535 - DNA, 25 bp, Homo sapien
gaggccttgcaggagatatctctgg

SEQ ID NO: 3059536 - DNA, 25 bp, Homo sapien
ccaagaacccacctaggaggccttg

SEQ ID NO: 3059537 - DNA, 25 bp, Homo sapien
aatcatattcattggcattcctttc

SEQ ID NO: 3059538 - DNA, 25 bp, Homo sapien
ttgcaatcatattcattggcattcc

SEQ ID NO: 3059539 - DNA, 25 bp, Homo sapien
tgggctctgagtgtcaaatggcggc

SEQ ID NO: 3059540 - DNA, 25 bp, Homo sapien
atctcttgccgacagctctaaggct

SEQ ID NO: 3059541 - DNA, 25 bp, Homo sapien
cctgctgtctggaccaagaaaggct

SEQ ID NO: 3059542 - DNA, 25 bp, Homo sapien
tgccgacagctctaaggcttccagt

SEQ ID NO: 3059543 - DNA, 25 bp, Homo sapien
atttagaggcaaggtgtctctgagg

SEQ ID NO: 3059544 - DNA, 25 bp, Homo sapien
atgtggccagtggcctagccagctg

SEQ ID NO: 3059545 - DNA, 25 bp, Homo sapien
aagatttagaggcaaggtgtctctg

SEQ ID NO: 3059546 - DNA, 25 bp, Homo sapien
ttcaagatttagaggcaaggtgtct

SEQ ID NO: 3059547 - DNA, 25 bp, Homo sapien
gcccctggatgacatctggtctgtt

SEQ ID NO: 3059548 - DNA, 25 bp, Homo sapien
aattccgggcccctggatgacatct

SEQ ID NO: 3059549 - DNA, 25 bp, Homo sapien
gagatgcggatctgaggcttctgat

SEQ ID NO: 3059550 - DNA, 25 bp, Homo sapien
tggcagatggagatgcggatctgag

SEQ ID NO: 3059551 - DNA, 25 bp, Homo sapien
ctttggaggtcacaatagccagtgg

SEQ ID NO: 3059552 - DNA, 25 bp, Homo sapien
tgtcactgtgtagtgacaagtgcct

SEQ ID NO: 3059553 - DNA, 25 bp, Homo sapien
ttgtgtcactgtgtagtgacaagtg

SEQ ID NO: 3059554 - DNA, 25 bp, Homo sapien
acaatagccagtggtgatttctacc

SEQ ID NO: 3059555 - DNA, 25 bp, Homo sapien
acagttctcactaagcggccccaca

SEQ ID NO: 3059556 - DNA, 25 bp, Homo sapien
tcagccacagttctcactaagcggc

SEQ ID NO: 3059557 - DNA, 25 bp, Homo sapien
agttctcactaagcggccccacagg

SEQ ID NO: 3059558 - DNA, 25 bp, Homo sapien
ccacagttctcactaagcggcccca

SEQ ID NO: 3059559 - DNA, 25 bp, Homo sapien
gcagtggcagttcctctcgttcttt

SEQ ID NO: 3059560 - DNA, 25 bp, Homo sapien
tctcgttctttggttaggacaggaa

SEQ ID NO: 3059561 - DNA, 25 bp, Homo sapien
ccaacaaagggttaagcagtggcag

SEQ ID NO: 3059562 - DNA, 25 bp, Homo sapien
tgaggccaatacaagaggtagccgc

SEQ ID NO: 3059563 - DNA, 25 bp, Homo sapien
gtcgtggaggccataggtgaccagc

SEQ ID NO: 3059564 - DNA, 25 bp, Homo sapien
cagggagacattggtcgtggaggcc

SEQ ID NO: 3059565 - DNA, 25 bp, Homo sapien
gagacattggtcgtggaggccatag

SEQ ID NO: 3059566 - DNA, 25 bp, Homo sapien
cattggtcgtggaggccataggtga

SEQ ID NO: 3059567 - DNA, 25 bp, Homo sapien
ggcactgccagtactcatcccaaac

SEQ ID NO: 3059568 - DNA, 25 bp, Homo sapien
tggcactgccagtactcatcccaaa

SEQ ID NO: 3059569 - DNA, 25 bp, Homo sapien
ggggcccaagggcatgtacccatta

SEQ ID NO: 3059570 - DNA, 25 bp, Homo sapien
gggcccaagggcatgtacccattac

SEQ ID NO: 3059571 - DNA, 25 bp, Homo sapien
tgtgggcttctgtttgcccgtggag

SEQ ID NO: 3059572 - DNA, 25 bp, Homo sapien
gtgatggctcctccgtcctcgcagg

SEQ ID NO: 3059573 - DNA, 25 bp, Homo sapien
gcacccaacagggtgtgaccgtcac

SEQ ID NO: 3059574 - DNA, 25 bp, Homo sapien
ttgcccgtggaggtgaggaacttca

SEQ ID NO: 3059575 - DNA, 25 bp, Homo sapien
acatccgcaaattgaatagtgtgag

SEQ ID NO: 3059576 - DNA, 25 bp, Homo sapien
ccagacttgatctttgtaaatacag

SEQ ID NO: 3059577 - DNA, 25 bp, Homo sapien
ttgtgggaggaacaacatccgcaaa

SEQ ID NO: 3059578 - DNA, 25 bp, Homo sapien
gaggagtgtggacagaagatgtttt

SEQ ID NO: 3059579 - DNA, 25 bp, Homo sapien
taaggcacgataaggcggatgtaac

SEQ ID NO: 3059580 - DNA, 25 bp, Homo sapien
cacgataaggcggatgtaactgtgc

SEQ ID NO: 3059581 - DNA, 25 bp, Homo sapien
gataaggcggatgtaactgtgcttc

SEQ ID NO: 3059582 - DNA, 25 bp, Homo sapien
ctgtaaggcacgataaggcggatgt

SEQ ID NO: 3059583 - DNA, 25 bp, Homo sapien
gctgcgcttgaagaaagatgctgca

SEQ ID NO: 3059584 - DNA, 25 bp, Homo sapien
ctcccaccgctgcgcttgaagaaag

SEQ ID NO: 3059585 - DNA, 25 bp, Homo sapien
caccgctgcgcttgaagaaagatgc

SEQ ID NO: 3059586 - DNA, 25 bp, Homo sapien
cccaccgctgcgcttgaagaaagat

SEQ ID NO: 3059587 - DNA, 25 bp, Homo sapien
ttctctgagctttcggtggcagaca

SEQ ID NO: 3059588 - DNA, 25 bp, Homo sapien
ttttcatgctcataattcgaattac

SEQ ID NO: 3059589 - DNA, 25 bp, Homo sapien
ctttcggtggcagacagcgccttgg

SEQ ID NO: 3059590 - DNA, 25 bp, Homo sapien
ggcactttttcatgctcataattcg

SEQ ID NO: 3059591 - DNA, 25 bp, Homo sapien
tattatagagctggtcttcaaccat

SEQ ID NO: 3059592 - DNA, 25 bp, Homo sapien
atattatagagctggtcttcaacca

SEQ ID NO: 3059593 - DNA, 25 bp, Homo sapien
catattatagagctggtcttcaacc

SEQ ID NO: 3059594 - DNA, 25 bp, Homo sapien
tcatattatagagctggtcttcaac

SEQ ID NO: 3059595 - DNA, 25 bp, Homo sapien
tcctcaatcgctgtggagatggagc

SEQ ID NO: 3059596 - DNA, 25 bp, Homo sapien
cagtttcctcaatcgctgtggagat

SEQ ID NO: 3059597 - DNA, 25 bp, Homo sapien
tgtcactgaatctgacagagccctg

SEQ ID NO: 3059598 - DNA, 25 bp, Homo sapien
tcagtctacagtttcctcaatcgct

SEQ ID NO: 3059599 - DNA, 25 bp, Homo sapien
tctaattgatcttctctgttgcttc

SEQ ID NO: 3059600 - DNA, 25 bp, Homo sapien
tcttcttctttggcacaacctcagt

SEQ ID NO: 3059601 - DNA, 25 bp, Homo sapien
gttctaattgatcttctctgttgct

SEQ ID NO: 3059602 - DNA, 25 bp, Homo sapien
agttctaattgatcttctctgttgc

SEQ ID NO: 3059603 - DNA, 25 bp, Homo sapien
ctgtagaaccagatgttgcttcaag

SEQ ID NO: 3059604 - DNA, 25 bp, Homo sapien
ttagaaattataagcctgtcttgcc

SEQ ID NO: 3059605 - DNA, 25 bp, Homo sapien
gatatattctgcattggcttttcat

SEQ ID NO: 3059606 - DNA, 25 bp, Homo sapien
ccagatgttgcttcaagagatgata

SEQ ID NO: 3059607 - DNA, 25 bp, Homo sapien
ggagacatgttacacttctgcaaat

SEQ ID NO: 3059608 - DNA, 25 bp, Homo sapien
agacatgttacacttctgcaaatcc

SEQ ID NO: 3059609 - DNA, 25 bp, Homo sapien
tggagacatgttacacttctgcaaa

SEQ ID NO: 3059610 - DNA, 25 bp, Homo sapien
ctggagacatgttacacttctgcaa

SEQ ID NO: 3059611 - DNA, 25 bp, Homo sapien
tttatactcctgtacccatttttca

SEQ ID NO: 3059612 - DNA, 25 bp, Homo sapien
ctcctgtacccatttttcatgaacc

SEQ ID NO: 3059613 - DNA, 25 bp, Homo sapien
tactcctgtacccatttttcatgaa

SEQ ID NO: 3059614 - DNA, 25 bp, Homo sapien
tatactcctgtacccatttttcatg

SEQ ID NO: 3059615 - DNA, 25 bp, Homo sapien
aaggccagcacggataggttcccac

SEQ ID NO: 3059616 - DNA, 25 bp, Homo sapien
ttctgatatggtgtgaaccctctca

SEQ ID NO: 3059617 - DNA, 25 bp, Homo sapien
atatggtgtgaaccctctcatttgg

SEQ ID NO: 3059618 - DNA, 25 bp, Homo sapien
gatatggtgtgaaccctctcatttg

SEQ ID NO: 3059619 - DNA, 25 bp, Homo sapien
ctgatatggtgtgaaccctctcatt

SEQ ID NO: 3059620 - DNA, 25 bp, Homo sapien
tggtaccgaagtggtggctgtggag

SEQ ID NO: 3059621 - DNA, 25 bp, Homo sapien
tttggaatcacagtttgtggtaccg

SEQ ID NO: 3059622 - DNA, 25 bp, Homo sapien
tttgtggtaccgaagtggtggctgt

SEQ ID NO: 3059623 - DNA, 25 bp, Homo sapien
tcacagtttgtggtaccgaagtggt

SEQ ID NO: 3059624 - DNA, 25 bp, Homo sapien
ttaatgtggtcttctgtttagaatt

SEQ ID NO: 3059625 - DNA, 25 bp, Homo sapien
taatgtggtcttctgtttagaattt

SEQ ID NO: 3059626 - DNA, 25 bp, Homo sapien
ctaaagtttctagctgcgccaaagt

SEQ ID NO: 3059627 - DNA, 25 bp, Homo sapien
ttctagctgcgccaaagtcattggc

SEQ ID NO: 3059628 - DNA, 25 bp, Homo sapien
aagtttctagctgcgccaaagtcat

SEQ ID NO: 3059629 - DNA, 25 bp, Homo sapien
tagctgcgccaaagtcattggctga

SEQ ID NO: 3059630 - DNA, 25 bp, Homo sapien
gctgattgatggcaggtagccattt

SEQ ID NO: 3059631 - DNA, 25 bp, Homo sapien
taggtgagtattgaaagctttgctg

SEQ ID NO: 3059632 - DNA, 25 bp, Homo sapien
gctttgctgcaaggtagcttcgtat

SEQ ID NO: 3059633 - DNA, 25 bp, Homo sapien
tattgattatgcgactggtatttgg

SEQ ID NO: 3059634 - DNA, 25 bp, Homo sapien
tgcatgaaagagaaagagaaatcca

SEQ ID NO: 3059635 - DNA, 25 bp, Homo sapien
ttgcatgaaagagaaagagaaatcc

SEQ ID NO: 3059636 - DNA, 25 bp, Homo sapien
gcatgaaagagaaagagaaatccat

SEQ ID NO: 3059637 - DNA, 25 bp, Homo sapien
cttgcatgaaagagaaagagaaatc

SEQ ID NO: 3059638 - DNA, 25 bp, Homo sapien
atcccttcacacttgaacgctgtga

SEQ ID NO: 3059639 - DNA, 25 bp, Homo sapien
tcatcggggtagaccttttaatatc

SEQ ID NO: 3059640 - DNA, 25 bp, Homo sapien
aatcccttcacacttgaacgctgtg

SEQ ID NO: 3059641 - DNA, 25 bp, Homo sapien
tctcctgcatgtccaagtcacagga

SEQ ID NO: 3059642 - DNA, 25 bp, Homo sapien
tcatgaagctcccagtctaagggaa

SEQ ID NO: 3059643 - DNA, 25 bp, Homo sapien
tcctgcatgtccaagtcacaggaat

SEQ ID NO: 3059644 - DNA, 25 bp, Homo sapien
tgccctcatgaagctcccagtctaa

SEQ ID NO: 3059645 - DNA, 25 bp, Homo sapien
atacgtgaggacgatggctccacca

SEQ ID NO: 3059646 - DNA, 25 bp, Homo sapien
taagtaccaggctcaatgccgggct

SEQ ID NO: 3059647 - DNA, 25 bp, Homo sapien
cctccctgtaagtaccaggctcaat

SEQ ID NO: 3059648 - DNA, 25 bp, Homo sapien
cgatccccagcgcatacgtgaggac

SEQ ID NO: 3059649 - DNA, 25 bp, Homo sapien
tccctggaagatacggggctctgtc

SEQ ID NO: 3059650 - DNA, 25 bp, Homo sapien
ggcatcttgtctagtgtccctggaa

SEQ ID NO: 3059651 - DNA, 25 bp, Homo sapien
ttgatcggaactggcgaccattctg

SEQ ID NO: 3059652 - DNA, 25 bp, Homo sapien
ggctctgtcttgatcggaactggcg

SEQ ID NO: 3059653 - DNA, 25 bp, Homo sapien
gacatctgccaaccaagggtcagaa

SEQ ID NO: 3059654 - DNA, 25 bp, Homo sapien
catctgccaaccaagggtcagaaac

SEQ ID NO: 3059655 - DNA, 25 bp, Homo sapien
ttttggacatctgccaaccaagggt

SEQ ID NO: 3059656 - DNA, 25 bp, Homo sapien
tggacatctgccaaccaagggtcag

SEQ ID NO: 3059657 - DNA, 25 bp, Homo sapien
tacaaagtggaaattgaggtcccga

SEQ ID NO: 3059658 - DNA, 25 bp, Homo sapien
tcttgtggacaagtcccacgtggaa

SEQ ID NO: 3059659 - DNA, 25 bp, Homo sapien
cagaaggcggtgtctcaaaagggat

SEQ ID NO: 3059660 - DNA, 25 bp, Homo sapien
tttgtcagccgtaaatatgtcagcc

SEQ ID NO: 3059661 - DNA, 25 bp, Homo sapien
tgaggcgcttgcacttgcacgaggc

SEQ ID NO: 3059662 - DNA, 25 bp, Homo sapien
ggcgttctccagctcggcctggttg

SEQ ID NO: 3059663 - DNA, 25 bp, Homo sapien
gcccatcggtcacgtagcgggtgaa

SEQ ID NO: 3059664 - DNA, 25 bp, Homo sapien
agctcgcggcagctgtactcggaca

SEQ ID NO: 3059665 - DNA, 25 bp, Homo sapien
gagagaggcgcgcgtgagggtggcc

SEQ ID NO: 3059666 - DNA, 25 bp, Homo sapien
ggagagaggcgcgcgtgagggtggc

SEQ ID NO: 3059667 - DNA, 25 bp, Homo sapien
tgaccttgcctagaaggggagctgt

SEQ ID NO: 3059668 - DNA, 25 bp, Homo sapien
aggcagtcgctggagcccagctgac

SEQ ID NO: 3059669 - DNA, 25 bp, Homo sapien
ttttgaagacggagggtcctggctg

SEQ ID NO: 3059670 - DNA, 25 bp, Homo sapien
agttgccctttttagcaccccatag

SEQ ID NO: 3059671 - DNA, 25 bp, Homo sapien
gggcttctctgtgcaggcctgacca

SEQ ID NO: 3059672 - DNA, 25 bp, Homo sapien
caggcctgaccaggaacccagggtt

SEQ ID NO: 3059673 - DNA, 25 bp, Homo sapien
gcaggcctgaccaggaacccagggt

SEQ ID NO: 3059674 - DNA, 25 bp, Homo sapien
tgtgcaggcctgaccaggaacccag

SEQ ID NO: 3059675 - DNA, 25 bp, Homo sapien
ccaggaggagattctttgaaacctt

SEQ ID NO: 3059676 - DNA, 25 bp, Homo sapien
tctgcacctgaatttgaaggctgca

SEQ ID NO: 3059677 - DNA, 25 bp, Homo sapien
gaaggctgcaccagcgagccattct

SEQ ID NO: 3059678 - DNA, 25 bp, Homo sapien
tccaggcaagactgttcctcgacca

SEQ ID NO: 3059679 - DNA, 25 bp, Homo sapien
gtgtgtaccagcaggcagacgagac

SEQ ID NO: 3059680 - DNA, 25 bp, Homo sapien
cgtggcatcattcttgaacgcctgc

SEQ ID NO: 3059681 - DNA, 25 bp, Homo sapien
gttctccgcccggttcatggtcttg

SEQ ID NO: 3059682 - DNA, 25 bp, Homo sapien
ggccctccactacacggaaggctgt

SEQ ID NO: 3059683 - DNA, 25 bp, Homo sapien
tctagctcagcaaacttccaaattg

SEQ ID NO: 3059684 - DNA, 25 bp, Homo sapien
ctgcttcatgccagccaatgaggac

SEQ ID NO: 3059685 - DNA, 25 bp, Homo sapien
ccagccgagacacggtcgccttttt

SEQ ID NO: 3059686 - DNA, 25 bp, Homo sapien
gggcgtgtgaggcaaggcccaagcc

SEQ ID NO: 3059687 - DNA, 25 bp, Homo sapien
gtatcacggtttatctagtcaccta

SEQ ID NO: 3059688 - DNA, 25 bp, Homo sapien
actccatcgtcttgatgtatcacgg

SEQ ID NO: 3059689 - DNA, 25 bp, Homo sapien
gtcacctactgtcatctactgaagg

SEQ ID NO: 3059690 - DNA, 25 bp, Homo sapien
tccatggtttacatcacagcactag

SEQ ID NO: 3059691 - DNA, 25 bp, Homo sapien
aacactgatttgtgatacaacggac

SEQ ID NO: 3059692 - DNA, 25 bp, Homo sapien
aatttggtggcgttaagaggcaaca

SEQ ID NO: 3059693 - DNA, 25 bp, Homo sapien
gataaaaccttgacttacttgcaag

SEQ ID NO: 3059694 - DNA, 25 bp, Homo sapien
ttgcaaggactatcacggttagccc

SEQ ID NO: 3059695 - DNA, 25 bp, Homo sapien
cttcatattgaagatcagtactttt

SEQ ID NO: 3059696 - DNA, 25 bp, Homo sapien
gtagcatcttaacttgtggcacaaa

SEQ ID NO: 3059697 - DNA, 25 bp, Homo sapien
cacctgctgcccatcatattatggc

SEQ ID NO: 3059698 - DNA, 25 bp, Homo sapien
aaatttcctgcgagaaaagctcatg

SEQ ID NO: 3059699 - DNA, 25 bp, Homo sapien
gtttctggataactcagagtggcag

SEQ ID NO: 3059700 - DNA, 25 bp, Homo sapien
tagaggtcttctagatgagtcccct

SEQ ID NO: 3059701 - DNA, 25 bp, Homo sapien
ccataatttccttgcggtgctgaat

SEQ ID NO: 3059702 - DNA, 25 bp, Homo sapien
gattattagagacccctcagagcca

SEQ ID NO: 3059703 - DNA, 25 bp, Homo sapien
agaggtcctagttagccagccacac

SEQ ID NO: 3059704 - DNA, 25 bp, Homo sapien
ccacagagactttcgagaggtccta

SEQ ID NO: 3059705 - DNA, 25 bp, Homo sapien
ccaacctgctgtgttcgcgtaagta

SEQ ID NO: 3059706 - DNA, 25 bp, Homo sapien
tcccaggcagtagaaggctgtccag

SEQ ID NO: 3059707 - DNA, 25 bp, Homo sapien
tgagggtaagtgcagtacacctgga

SEQ ID NO: 3059708 - DNA, 25 bp, Homo sapien
ccttatggagctggacaaccctggg

SEQ ID NO: 3059709 - DNA, 25 bp, Homo sapien
aagaatccagcttcagggagcagca

SEQ ID NO: 3059710 - DNA, 25 bp, Homo sapien
agcaaacccaaaatcttgcccagct

SEQ ID NO: 3059711 - DNA, 25 bp, Homo sapien
tagaagctgtgcagtgaggtaccca

SEQ ID NO: 3059712 - DNA, 25 bp, Homo sapien
taagactccttcacaaggccttgcg

SEQ ID NO: 3059713 - DNA, 25 bp, Homo sapien
gccttgcgagtgatcctaccatgaa

SEQ ID NO: 3059714 - DNA, 25 bp, Homo sapien
gaaaagcggacagcaaatgaccagg

SEQ ID NO: 3059715 - DNA, 25 bp, Homo sapien
tgctctaccaccaataaaggatcca

SEQ ID NO: 3059716 - DNA, 25 bp, Homo sapien
tggacactccgccatgtctcatgtc

SEQ ID NO: 3059717 - DNA, 25 bp, Homo sapien
gaccctgaagataaatagcatcaca

SEQ ID NO: 3059718 - DNA, 25 bp, Homo sapien
cagagagctgtaagagccacctgca

SEQ ID NO: 3059719 - DNA, 25 bp, Homo sapien
cttctggccgcgtttctgagaggca

SEQ ID NO: 3059720 - DNA, 25 bp, Homo sapien
acaaggcctctttgtgtagggacca

SEQ ID NO: 3059721 - DNA, 25 bp, Homo sapien
gcttctttatgtgctccccagggtg

SEQ ID NO: 3059722 - DNA, 25 bp, Homo sapien
ctcaagacgtgagagggctgcctat

SEQ ID NO: 3059723 - DNA, 25 bp, Homo sapien
tcctaaacatggcagctcgggacac

SEQ ID NO: 3059724 - DNA, 25 bp, Homo sapien
tgtgtttcctaaacatggcagctcg

SEQ ID NO: 3059725 - DNA, 25 bp, Homo sapien
cttgtagacaagtgccttgtgatgc

SEQ ID NO: 3059726 - DNA, 25 bp, Homo sapien
aacatggcagctcgggacacctttg

SEQ ID NO: 3059727 - DNA, 25 bp, Homo sapien
tctcgagcagaggtggtgggggtgc

SEQ ID NO: 3059728 - DNA, 25 bp, Homo sapien
ctctcgagcagaggtggtgggggtg

SEQ ID NO: 3059729 - DNA, 25 bp, Homo sapien
ctcgagcagaggtggtgggggtgcc

SEQ ID NO: 3059730 - DNA, 25 bp, Homo sapien
ggctataaccttcccggcagtggac

SEQ ID NO: 3059731 - DNA, 25 bp, Homo sapien
catcttctgccgcatcatgaggtag

SEQ ID NO: 3059732 - DNA, 25 bp, Homo sapien
gatctcacggttctgcctcacgatg

SEQ ID NO: 3059733 - DNA, 25 bp, Homo sapien
tgctcagggcagacttgacgtccat

SEQ ID NO: 3059734 - DNA, 25 bp, Homo sapien
ctgggcaacaagagtgaaactccat

SEQ ID NO: 3059735 - DNA, 25 bp, Homo sapien
cagcctgggcaacaagagtgaaact

SEQ ID NO: 3059736 - DNA, 25 bp, Homo sapien
aagatcgcgccattgctcttcagcc

SEQ ID NO: 3059737 - DNA, 25 bp, Homo sapien
gcctgggcaacaagagtgaaactcc

SEQ ID NO: 3059738 - DNA, 25 bp, Homo sapien
agtgcagtcaaacgcgaggaccctg

SEQ ID NO: 3059739 - DNA, 25 bp, Homo sapien
caaagtgcagtcaaacgcgaggacc

SEQ ID NO: 3059740 - DNA, 25 bp, Homo sapien
ccagccaaagtgcagtcaaacgcga

SEQ ID NO: 3059741 - DNA, 25 bp, Homo sapien
gccaaagtgcagtcaaacgcgagga

SEQ ID NO: 3059742 - DNA, 25 bp, Homo sapien
cacatgggtgatgcctagtttctgc

SEQ ID NO: 3059743 - DNA, 25 bp, Homo sapien
ctcagccgcgttcagcacatgggtg

SEQ ID NO: 3059744 - DNA, 25 bp, Homo sapien
caaagcctggtcaatgaagtcggca

SEQ ID NO: 3059745 - DNA, 25 bp, Homo sapien
tgttgacgtgcatgaaggacctgcc

SEQ ID NO: 3059746 - DNA, 25 bp, Homo sapien
ctgcttaggacaccgcgcaagactg

SEQ ID NO: 3059747 - DNA, 25 bp, Homo sapien
aggacaccgcgcaagactgtgaagc

SEQ ID NO: 3059748 - DNA, 25 bp, Homo sapien
ctgtttattcctgcttaggacaccg

SEQ ID NO: 3059749 - DNA, 25 bp, Homo sapien
tattcctgcttaggacaccgcgcaa

SEQ ID NO: 3059750 - DNA, 25 bp, Homo sapien
ccaaggctgtacaggcatgctaata

SEQ ID NO: 3059751 - DNA, 25 bp, Homo sapien
tgagttttcaacatgccatccttgg

SEQ ID NO: 3059752 - DNA, 25 bp, Homo sapien
aactgggtcctcagagtatcgtgaa

SEQ ID NO: 3059753 - DNA, 25 bp, Homo sapien
gaacaagacattgaccctgtccttg

SEQ ID NO: 3059754 - DNA, 25 bp, Homo sapien
tagatccgcggggtgacctcgttgc

SEQ ID NO: 3059755 - DNA, 25 bp, Homo sapien
ccgagagctcgaacgagcccgacat

SEQ ID NO: 3059756 - DNA, 25 bp, Homo sapien
gttgagatcctgcaccgagagctcg

SEQ ID NO: 3059757 - DNA, 25 bp, Homo sapien
agccgctgccgtccgagagcaggtc

SEQ ID NO: 3059758 - DNA, 25 bp, Homo sapien
gcccggcaggagcaagcgaggcgga

SEQ ID NO: 3059759 - DNA, 25 bp, Homo sapien
ccggcaggagcaagcgaggcggaga

SEQ ID NO: 3059760 - DNA, 25 bp, Homo sapien
acgcccggcaggagcaagcgaggcg

SEQ ID NO: 3059761 - DNA, 25 bp, Homo sapien
ctgcacgcccggcaggagcaagcga

SEQ ID NO: 3059762 - DNA, 25 bp, Homo sapien
tactccctgcacttagacagtctgg

SEQ ID NO: 3059763 - DNA, 25 bp, Homo sapien
gaatcttctcatgggcaacagggtt

SEQ ID NO: 3059764 - DNA, 25 bp, Homo sapien
tgatataaacctgcgaatgcggtgc

SEQ ID NO: 3059765 - DNA, 25 bp, Homo sapien
gatttattcacagggagaccttccc

SEQ ID NO: 3059766 - DNA, 25 bp, Homo sapien
gaaggccctaggatttcttggctgc

SEQ ID NO: 3059767 - DNA, 25 bp, Homo sapien
aaagatacaagagaaggccctagga

SEQ ID NO: 3059768 - DNA, 25 bp, Homo sapien
caagacactcccgactggctgaatg

SEQ ID NO: 3059769 - DNA, 25 bp, Homo sapien
tggctgaatgctccatcttcagatg

SEQ ID NO: 3059770 - DNA, 25 bp, Homo sapien
tgattctgcccagctgctactgaac

SEQ ID NO: 3059771 - DNA, 25 bp, Homo sapien
attctgcccagctgctactgaacac

SEQ ID NO: 3059772 - DNA, 25 bp, Homo sapien
actgattctgcccagctgctactga

SEQ ID NO: 3059773 - DNA, 25 bp, Homo sapien
tactgattctgcccagctgctactg

SEQ ID NO: 3059774 - DNA, 25 bp, Homo sapien
tttggtacaaagaatcagggtcagc

SEQ ID NO: 3059775 - DNA, 25 bp, Homo sapien
aatgggaacccctatgatctcatgg

SEQ ID NO: 3059776 - DNA, 25 bp, Homo sapien
tgaaggcaccactgcagtacaggat

SEQ ID NO: 3059777 - DNA, 25 bp, Homo sapien
gacgtagccatagttttgacaggga

SEQ ID NO: 3059778 - DNA, 25 bp, Homo sapien
gatgatcttcaaggtcccgtccagc

SEQ ID NO: 3059779 - DNA, 25 bp, Homo sapien
tttcaaatcatgatccaaagaggtg

SEQ ID NO: 3059780 - DNA, 25 bp, Homo sapien
gcgcttgagattccttgatggtaaa

SEQ ID NO: 3059781 - DNA, 25 bp, Homo sapien
cccgtccagcttggatgttctggga

SEQ ID NO: 3059782 - DNA, 25 bp, Homo sapien
agcacggcgtctaccaggtgcccgt

SEQ ID NO: 3059783 - DNA, 25 bp, Homo sapien
ctatgaaggcggcagaagcggccat

SEQ ID NO: 3059784 - DNA, 25 bp, Homo sapien
taccaggtgcccgtaatgccggtct

SEQ ID NO: 3059785 - DNA, 25 bp, Homo sapien
taatgccggtctatgaaggcggcag

SEQ ID NO: 3059786 - DNA, 25 bp, Homo sapien
ttggatcagctttgccgggtcagaa

SEQ ID NO: 3059787 - DNA, 25 bp, Homo sapien
gaactcaggtgccagacaatggaca

SEQ ID NO: 3059788 - DNA, 25 bp, Homo sapien
gaagatcacataggaaagattcccc

SEQ ID NO: 3059789 - DNA, 25 bp, Homo sapien
aagagtcacagtcccgaagatcaca

SEQ ID NO: 3059790 - DNA, 25 bp, Homo sapien
ctgtggtagttgcaacaactctgtg

SEQ ID NO: 3059791 - DNA, 25 bp, Homo sapien
tacagtatgtaaattttatctcagt

SEQ ID NO: 3059792 - DNA, 25 bp, Homo sapien
tgggaaattctaatgggctcaaggt

SEQ ID NO: 3059793 - DNA, 25 bp, Homo sapien
aatactcttaaattgactgtggtag

SEQ ID NO: 3059794 - DNA, 25 bp, Homo sapien
agacttaagttgatattcccctatt

SEQ ID NO: 3059795 - DNA, 25 bp, Homo sapien
gacttaagttgatattcccctattc

SEQ ID NO: 3059796 - DNA, 25 bp, Homo sapien
aaattctgaggtcctcagttgtttc

SEQ ID NO: 3059797 - DNA, 25 bp, Homo sapien
ctggggacataggtggcgtttttct

SEQ ID NO: 3059798 - DNA, 25 bp, Homo sapien
ttctgaggtcctcagttgtttcagt

SEQ ID NO: 3059799 - DNA, 25 bp, Homo sapien
ctgaggtcctcagttgtttcagtgc

SEQ ID NO: 3059800 - DNA, 25 bp, Homo sapien
ccataacagcctgaatggcctccag

SEQ ID NO: 3059801 - DNA, 25 bp, Homo sapien
tccacatccaccaaacaaactttgt

SEQ ID NO: 3059802 - DNA, 25 bp, Homo sapien
ggctccacatccaccaaacaaactt

SEQ ID NO: 3059803 - DNA, 25 bp, Homo sapien
tggccataacagcctgaatggcctc

SEQ ID NO: 3059804 - DNA, 25 bp, Homo sapien
acaaagtgatattccactccttcct

SEQ ID NO: 3059805 - DNA, 25 bp, Homo sapien
tgttgtgatgtaagtcggcctcaaa

SEQ ID NO: 3059806 - DNA, 25 bp, Homo sapien
agtcggcctcaaatgcttgcttaga

SEQ ID NO: 3059807 - DNA, 25 bp, Homo sapien
tgcttgcttagacacaaagtgatat

SEQ ID NO: 3059808 - DNA, 25 bp, Homo sapien
agatgtcacatcacagcacgcaggg

SEQ ID NO: 3059809 - DNA, 25 bp, Homo sapien
cagtgacccacaaccagtagagagc

SEQ ID NO: 3059810 - DNA, 25 bp, Homo sapien
gtagagagcacagccagaatcggtc

SEQ ID NO: 3059811 - DNA, 25 bp, Homo sapien
cacggagaggttcagcactgtgcac

SEQ ID NO: 3059812 - DNA, 25 bp, Homo sapien
gtggaacagcgacgccaaagtgctg

SEQ ID NO: 3059813 - DNA, 25 bp, Homo sapien
gcttcagctcgtgcagtcgggctcc

SEQ ID NO: 3059814 - DNA, 25 bp, Homo sapien
ccaaagtgctgtgggttctcagcca

SEQ ID NO: 3059815 - DNA, 25 bp, Homo sapien
cagctcgtgcagtcgggctcccaga

SEQ ID NO: 3059816 - DNA, 25 bp, Homo sapien
tcagctccggaggacatctttcctt

SEQ ID NO: 3059817 - DNA, 25 bp, Homo sapien
taagtcagcagctccggagactcag

SEQ ID NO: 3059818 - DNA, 25 bp, Homo sapien
gaggacatctttccttcctgcgagc

SEQ ID NO: 3059819 - DNA, 25 bp, Homo sapien
tggtacctggccacctcttcgtaag

SEQ ID NO: 3059820 - DNA, 25 bp, Homo sapien
ccctcactgcgtggtagtggtgtta

SEQ ID NO: 3059821 - DNA, 25 bp, Homo sapien
tgtgtgtgcctttcccgccagggca

SEQ ID NO: 3059822 - DNA, 25 bp, Homo sapien
gctcagctcctgcttgggttgagag

SEQ ID NO: 3059823 - DNA, 25 bp, Homo sapien
gaataaactccaattgcaatgatgg

SEQ ID NO: 3059824 - DNA, 25 bp, Homo sapien
tgccctttgaggtagccctcacagt

SEQ ID NO: 3059825 - DNA, 25 bp, Homo sapien
catagtgccctttgaggtagccctc

SEQ ID NO: 3059826 - DNA, 25 bp, Homo sapien
ccacatagtgccctttgaggtagcc

SEQ ID NO: 3059827 - DNA, 25 bp, Homo sapien
agtgccctttgaggtagccctcaca

SEQ ID NO: 3059828 - DNA, 25 bp, Homo sapien
gacagcggatagatactgggcctac

SEQ ID NO: 3059829 - DNA, 25 bp, Homo sapien
cacagcgtagccgagtcctggaaag

SEQ ID NO: 3059830 - DNA, 25 bp, Homo sapien
tcctggacaccccaagaaagcaagg

SEQ ID NO: 3059831 - DNA, 25 bp, Homo sapien
cccagatagggaaagaacacgagcc

SEQ ID NO: 3059832 - DNA, 25 bp, Homo sapien
aagcggggaccctgcggctgagggc

SEQ ID NO: 3059833 - DNA, 25 bp, Homo sapien
ggaacagcattagtggagggaagcg

SEQ ID NO: 3059834 - DNA, 25 bp, Homo sapien
gacagatggaacagcattagtggag

SEQ ID NO: 3059835 - DNA, 25 bp, Homo sapien
aacagcattagtggagggaagcggg

SEQ ID NO: 3059836 - DNA, 25 bp, Homo sapien
tgggggctcggcagggtgcccgcgg

SEQ ID NO: 3059837 - DNA, 25 bp, Homo sapien
gcccgcggctctccggtagcttagt

SEQ ID NO: 3059838 - DNA, 25 bp, Homo sapien
cgcggctctccggtagcttagtcgt

SEQ ID NO: 3059839 - DNA, 25 bp, Homo sapien
ggtgcccgcggctctccggtagctt

SEQ ID NO: 3059840 - DNA, 25 bp, Homo sapien
gcttcgttctcagacttcggcatct

SEQ ID NO: 3059841 - DNA, 25 bp, Homo sapien
tcagacttcggcatctcagaatcgc

SEQ ID NO: 3059842 - DNA, 25 bp, Homo sapien
gacagagcttcgttctcagacttcg

SEQ ID NO: 3059843 - DNA, 25 bp, Homo sapien
ggagacagagcttcgttctcagact

SEQ ID NO: 3059844 - DNA, 25 bp, Homo sapien
cttgggggaacaatgctcagcaggc

SEQ ID NO: 3059845 - DNA, 25 bp, Homo sapien
tgggggaacaatgctcagcaggccc

SEQ ID NO: 3059846 - DNA, 25 bp, Homo sapien
ggggaacaatgctcagcaggcccct

SEQ ID NO: 3059847 - DNA, 25 bp, Homo sapien
gggaacaatgctcagcaggcccctc

SEQ ID NO: 3059848 - DNA, 25 bp, Homo sapien
ggatgaggccggctcgaaggttggt

SEQ ID NO: 3059849 - DNA, 25 bp, Homo sapien
tcctcccgagggttgtagtggaaga

SEQ ID NO: 3059850 - DNA, 25 bp, Homo sapien
tggtgtccccgactcgcttggcctg

SEQ ID NO: 3059851 - DNA, 25 bp, Homo sapien
ctggcaagggatggcccggtcctcc

SEQ ID NO: 3059852 - DNA, 25 bp, Homo sapien
acaaggagggctctggtgaggcggc

SEQ ID NO: 3059853 - DNA, 25 bp, Homo sapien
gcacaaggagggctctggtgaggcg

SEQ ID NO: 3059854 - DNA, 25 bp, Homo sapien
caaggagggctctggtgaggcggcc

SEQ ID NO: 3059855 - DNA, 25 bp, Homo sapien
ctgcacaaggagggctctggtgagg

SEQ ID NO: 3059856 - DNA, 25 bp, Homo sapien
gatttttagggtgatggatccctgg

SEQ ID NO: 3059857 - DNA, 25 bp, Homo sapien
tttagggtgatggatccctgggact

SEQ ID NO: 3059858 - DNA, 25 bp, Homo sapien
ctgggtggctgggatgatttttagg

SEQ ID NO: 3059859 - DNA, 25 bp, Homo sapien
tgctctcctttaagcgatcttcctc

SEQ ID NO: 3059860 - DNA, 25 bp, Homo sapien
agagaccctgtagcccaatgccagg

SEQ ID NO: 3059861 - DNA, 25 bp, Homo sapien
tctggagcacaagaaggttggcacc

SEQ ID NO: 3059862 - DNA, 25 bp, Homo sapien
catgagaacccaaggacactacgtg

SEQ ID NO: 3059863 - DNA, 25 bp, Homo sapien
gaagaatgcagtcggaccaggacag

SEQ ID NO: 3059864 - DNA, 25 bp, Homo sapien
gaccatggaggttttcagccaagca

SEQ ID NO: 3059865 - DNA, 25 bp, Homo sapien
tcaggacaacagcaaggctaagcca

SEQ ID NO: 3059866 - DNA, 25 bp, Homo sapien
ttcaactccccagaatggaccatgg

SEQ ID NO: 3059867 - DNA, 25 bp, Homo sapien
tcagaagttagcagagtgtcaggtc

SEQ ID NO: 3059868 - DNA, 25 bp, Homo sapien
gagctcatctccaacgtggaccagg

SEQ ID NO: 3059869 - DNA, 25 bp, Homo sapien
gatcccgttcacttctcggagctca

SEQ ID NO: 3059870 - DNA, 25 bp, Homo sapien
ttgtgcaggactgcgatcccgttca

SEQ ID NO: 3059871 - DNA, 25 bp, Homo sapien
aatctggctgatctcgtcgggccgc

SEQ ID NO: 3059872 - DNA, 25 bp, Homo sapien
ccctgagtgctcgtcccgccggatg

SEQ ID NO: 3059873 - DNA, 25 bp, Homo sapien
gcgcctcctcgcatgatcctggcca

SEQ ID NO: 3059874 - DNA, 25 bp, Homo sapien
ctgagtgctcgtcccgccggatggt

SEQ ID NO: 3059875 - DNA, 25 bp, Homo sapien
gctgcgcctcctcgcatgatcctgg

SEQ ID NO: 3059876 - DNA, 25 bp, Homo sapien
catcgatattgtcaggcagaggcgg

SEQ ID NO: 3059877 - DNA, 25 bp, Homo sapien
gatcttcaccgattcctcatcaaaa

SEQ ID NO: 3059878 - DNA, 25 bp, Homo sapien
tgggcaaccgtgtcatgtaccatga

SEQ ID NO: 3059879 - DNA, 25 bp, Homo sapien
ttcaccaagcggacgatcttcaccg

SEQ ID NO: 3059880 - DNA, 25 bp, Homo sapien
tgcacggaggcggcctgcaactcct

SEQ ID NO: 3059881 - DNA, 25 bp, Homo sapien
gtgcacggaggcggcctgcaactcc

SEQ ID NO: 3059882 - DNA, 25 bp, Homo sapien
tccctctcatcactgtgcacggagg

SEQ ID NO: 3059883 - DNA, 25 bp, Homo sapien
ctctcatcactgtgcacggaggcgg

SEQ ID NO: 3059884 - DNA, 25 bp, Homo sapien
cgccactgatggctagaggtgcccc

SEQ ID NO: 3059885 - DNA, 25 bp, Homo sapien
actgatggctagaggtgcccctgcc

SEQ ID NO: 3059886 - DNA, 25 bp, Homo sapien
caggcgccactgatggctagaggtg

SEQ ID NO: 3059887 - DNA, 25 bp, Homo sapien
tgccccatatctgctgggtccttcc

SEQ ID NO: 3059888 - DNA, 25 bp, Homo sapien
gaccctcaaccacccgacgacgatg

SEQ ID NO: 3059889 - DNA, 25 bp, Homo sapien
ccctcaaccacccgacgacgatgat

SEQ ID NO: 3059890 - DNA, 25 bp, Homo sapien
cagaccctcaaccacccgacgacga

SEQ ID NO: 3059891 - DNA, 25 bp, Homo sapien
cctcaaccacccgacgacgatgatc

SEQ ID NO: 3059892 - DNA, 25 bp, Homo sapien
gggaacatcacaccaggggtcagga

SEQ ID NO: 3059893 - DNA, 25 bp, Homo sapien
tgggaacatcacaccaggggtcagg

SEQ ID NO: 3059894 - DNA, 25 bp, Homo sapien
ctgggaacatcacaccaggggtcag

SEQ ID NO: 3059895 - DNA, 25 bp, Homo sapien
ggtgtccccacactaagcaagcgag

SEQ ID NO: 3059896 - DNA, 25 bp, Homo sapien
gagtggcctacttaacatcacagag

SEQ ID NO: 3059897 - DNA, 25 bp, Homo sapien
gaacctgggcttatctggctctcag

SEQ ID NO: 3059898 - DNA, 25 bp, Homo sapien
cacgcaacatagacgactaggtcca

SEQ ID NO: 3059899 - DNA, 25 bp, Homo sapien
tggactttgcctttcataatagcga

SEQ ID NO: 3059900 - DNA, 25 bp, Homo sapien
cataatagcgaagcttctcatgaat

SEQ ID NO: 3059901 - DNA, 25 bp, Homo sapien
agggccacagcgctgtgcagaactg

SEQ ID NO: 3059902 - DNA, 25 bp, Homo sapien
agcgagggccacagcgctgtgcaga

SEQ ID NO: 3059903 - DNA, 25 bp, Homo sapien
ccttccacgcaggatgacgtgggac

SEQ ID NO: 3059904 - DNA, 25 bp, Homo sapien
cacgcaggatgacgtgggacttcac

SEQ ID NO: 3059905 - DNA, 25 bp, Homo sapien
tccacgcaggatgacgtgggacttc

SEQ ID NO: 3059906 - DNA, 25 bp, Homo sapien
cttccacgcaggatgacgtgggact

SEQ ID NO: 3059907 - DNA, 25 bp, Homo sapien
cttcattaagtaactgaggcttttt

SEQ ID NO: 3059908 - DNA, 25 bp, Homo sapien
cagagtcctccgatagcactggcat

SEQ ID NO: 3059909 - DNA, 25 bp, Homo sapien
gctggcgttgtcacctcccgacctc

SEQ ID NO: 3059910 - DNA, 25 bp, Homo sapien
ttgtcacctcccgacctctccctgc

SEQ ID NO: 3059911 - DNA, 25 bp, Homo sapien
gcgttgtcacctcccgacctctccc

SEQ ID NO: 3059912 - DNA, 25 bp, Homo sapien
tggcgttgtcacctcccgacctctc

SEQ ID NO: 3059913 - DNA, 25 bp, Homo sapien
tatttattgaacaaactgactacac

SEQ ID NO: 3059914 - DNA, 25 bp, Homo sapien
caaactgactacacatctactgtgt

SEQ ID NO: 3059915 - DNA, 25 bp, Homo sapien
gaggtgggtattgaagctccatcaa

SEQ ID NO: 3059916 - DNA, 25 bp, Homo sapien
gggtattgaagctccatcaagcata

SEQ ID NO: 3059917 - DNA, 25 bp, Homo sapien
ggtgatttctatgataaactttttg

SEQ ID NO: 3059918 - DNA, 25 bp, Homo sapien
caaataactctgcttacttttttca

SEQ ID NO: 3059919 - DNA, 25 bp, Homo sapien
tgagaaatgactgcgaatgttccca

SEQ ID NO: 3059920 - DNA, 25 bp, Homo sapien
gagtgtcctcgatgtgccaagcatt

SEQ ID NO: 3059921 - DNA, 25 bp, Homo sapien
aggaggccgagcaccgactcccgct

SEQ ID NO: 3059922 - DNA, 25 bp, Homo sapien
ccgagcaccgactcccgctcgctct

SEQ ID NO: 3059923 - DNA, 25 bp, Homo sapien
aggccgagcaccgactcccgctcgc

SEQ ID NO: 3059924 - DNA, 25 bp, Homo sapien
caggaggccgagcaccgactcccgc

SEQ ID NO: 3059925 - DNA, 25 bp, Homo sapien
tgtgtgctccgcgaacgggagccgc

SEQ ID NO: 3059926 - DNA, 25 bp, Homo sapien
cgccgggatgtgtgctccgcgaacg

SEQ ID NO: 3059927 - DNA, 25 bp, Homo sapien
cgggagccgcgcgagtgcccagagc

SEQ ID NO: 3059928 - DNA, 25 bp, Homo sapien
gggatgtgtgctccgcgaacgggag

SEQ ID NO: 3059929 - DNA, 25 bp, Homo sapien
cagtctcccattactgccctcctcc

SEQ ID NO: 3059930 - DNA, 25 bp, Homo sapien
agtctcccattactgccctcctcca

SEQ ID NO: 3059931 - DNA, 25 bp, Homo sapien
gtctcccattactgccctcctccat

SEQ ID NO: 3059932 - DNA, 25 bp, Homo sapien
gtcacgagcccagtgacctgtccag

SEQ ID NO: 3059933 - DNA, 25 bp, Homo sapien
atgtgatgaggctgtcacgagccca

SEQ ID NO: 3059934 - DNA, 25 bp, Homo sapien
gcagcagcatcgaaccacattgaat

SEQ ID NO: 3059935 - DNA, 25 bp, Homo sapien
tatccatggatctttaatttgagga

SEQ ID NO: 3059936 - DNA, 25 bp, Homo sapien
tcctagccccatagctgggacctat

SEQ ID NO: 3059937 - DNA, 25 bp, Homo sapien
agtgttcacatgtcatttctaccag

SEQ ID NO: 3059938 - DNA, 25 bp, Homo sapien
gaaaaccaatcagtgagaaaactca

SEQ ID NO: 3059939 - DNA, 25 bp, Homo sapien
tgaggtccctcaaatacaagagtcc

SEQ ID NO: 3059940 - DNA, 25 bp, Homo sapien
aaaactcaagaattggatggctgag

SEQ ID NO: 3059941 - DNA, 25 bp, Homo sapien
gacagtggatggtagggtcctcact

SEQ ID NO: 3059942 - DNA, 25 bp, Homo sapien
gcatccctagcagtgaaggtgccat

SEQ ID NO: 3059943 - DNA, 25 bp, Homo sapien
ggcaagtgaccctatagcctcaggt

SEQ ID NO: 3059944 - DNA, 25 bp, Homo sapien
tgtagtatacgcagagccacaccaa

SEQ ID NO: 3059945 - DNA, 25 bp, Homo sapien
tgacagcctctgctaggtacctggg

SEQ ID NO: 3059946 - DNA, 25 bp, Homo sapien
cgctgcagcgaagactagttagaca

SEQ ID NO: 3059947 - DNA, 25 bp, Homo sapien
caagggtttggactcagggtgtcac

SEQ ID NO: 3059948 - DNA, 25 bp, Homo sapien
tccccttccctaggaaatgggcaca

SEQ ID NO: 3059949 - DNA, 25 bp, Homo sapien
tgaaggatgagatgcccaagtacat

SEQ ID NO: 3059950 - DNA, 25 bp, Homo sapien
tacagactacagtgtaaatggcgcc

SEQ ID NO: 3059951 - DNA, 25 bp, Homo sapien
gctacctggacctggctagacagaa

SEQ ID NO: 3059952 - DNA, 25 bp, Homo sapien
gacaggtgccgaacatgcacgtgga

SEQ ID NO: 3059953 - DNA, 25 bp, Homo sapien
cagagtgagccaaagaccaggtgaa

SEQ ID NO: 3059954 - DNA, 25 bp, Homo sapien
gaggtcaaagtagtgcccgtagccc

SEQ ID NO: 3059955 - DNA, 25 bp, Homo sapien
caggttgctattgaccaggcagagg

SEQ ID NO: 3059956 - DNA, 25 bp, Homo sapien
ctgtctggagctcgcggaaggtcct

SEQ ID NO: 3059957 - DNA, 25 bp, Homo sapien
cgtagccccgctggatgcggctgct

SEQ ID NO: 3059958 - DNA, 25 bp, Homo sapien
aagtctggggcctcgatgaacacca

SEQ ID NO: 3059959 - DNA, 25 bp, Homo sapien
gtggatattccactctccagcgcag

SEQ ID NO: 3059960 - DNA, 25 bp, Homo sapien
acaaactcggccgttcgtagcacct

SEQ ID NO: 3059961 - DNA, 25 bp, Homo sapien
atggcccgcagggtctcgaagtctg

SEQ ID NO: 3059962 - DNA, 25 bp, Homo sapien
acaggttgccctcgtattcgccatg

SEQ ID NO: 3059963 - DNA, 25 bp, Homo sapien
caatacgtgtgccatacaggttgcc

SEQ ID NO: 3059964 - DNA, 25 bp, Homo sapien
tccccacgggacacaaagctgtaac

SEQ ID NO: 3059965 - DNA, 25 bp, Homo sapien
cgccccggatggagtcaatacgtgt

SEQ ID NO: 3059966 - DNA, 25 bp, Homo sapien
caatcagtaccagggttttccggcg

SEQ ID NO: 3059967 - DNA, 25 bp, Homo sapien
ttgttcttcaggctgcgccgtccca

SEQ ID NO: 3059968 - DNA, 25 bp, Homo sapien
cgatctggatcccacatgatgagct

SEQ ID NO: 3059969 - DNA, 25 bp, Homo sapien
aatgagcagctcatgacggtcaaac

SEQ ID NO: 3059970 - DNA, 25 bp, Homo sapien
cagggagatggcgctgctcaccagg

SEQ ID NO: 3059971 - DNA, 25 bp, Homo sapien
acacagggagatggcgctgctcacc

SEQ ID NO: 3059972 - DNA, 25 bp, Homo sapien
ctggacacagggagatggcgctgct

SEQ ID NO: 3059973 - DNA, 25 bp, Homo sapien
tggacacagggagatggcgctgctc

SEQ ID NO: 3059974 - DNA, 25 bp, Homo sapien
ctgcattcttggtggtcaaatacat

SEQ ID NO: 3059975 - DNA, 25 bp, Homo sapien
ggtcaaatacatcattcgcttcttt

SEQ ID NO: 3059976 - DNA, 25 bp, Homo sapien
cttggtggtcaaatacatcattcgc

SEQ ID NO: 3059977 - DNA, 25 bp, Homo sapien
tcctgaaaggctgccgcatagggtc

SEQ ID NO: 3059978 - DNA, 25 bp, Homo sapien
gccctgttggatcccagattggagg

SEQ ID NO: 3059979 - DNA, 25 bp, Homo sapien
ggccctgttggatcccagattggag

SEQ ID NO: 3059980 - DNA, 25 bp, Homo sapien
agggccctgttggatcccagattgg

SEQ ID NO: 3059981 - DNA, 25 bp, Homo sapien
cctgttggatcccagattggaggtg

SEQ ID NO: 3059982 - DNA, 25 bp, Homo sapien
ctcttgacaaatgctttccgcttct

SEQ ID NO: 3059983 - DNA, 25 bp, Homo sapien
ttgacaaatgctttccgcttctcct

SEQ ID NO: 3059984 - DNA, 25 bp, Homo sapien
agcactgcccccttcgacatggcat

SEQ ID NO: 3059985 - DNA, 25 bp, Homo sapien
gcactgcccccttcgacatggcatg

SEQ ID NO: 3059986 - DNA, 25 bp, Homo sapien
tctcgggccgggtcatagtcaaagt

SEQ ID NO: 3059987 - DNA, 25 bp, Homo sapien
ctgccaccagttggcatcatcctgg

SEQ ID NO: 3059988 - DNA, 25 bp, Homo sapien
tgaagcgcaggcctgcttccttgca

SEQ ID NO: 3059989 - DNA, 25 bp, Homo sapien
tttacgatctggagcaagtccccgg

SEQ ID NO: 3059990 - DNA, 25 bp, Homo sapien
tgcataataccagccaatgtgggag

SEQ ID NO: 3059991 - DNA, 25 bp, Homo sapien
gctgaccataatgcaggcgctctct

SEQ ID NO: 3059992 - DNA, 25 bp, Homo sapien
tccgtgagacctgcaaccttgacag

SEQ ID NO: 3059993 - DNA, 25 bp, Homo sapien
tgcgcacgcgcacaaacgtgaagaa

SEQ ID NO: 3059994 - DNA, 25 bp, Homo sapien
tcgccgccctccacgcggaacgtta

SEQ ID NO: 3059995 - DNA, 25 bp, Homo sapien
agaatgcgcgcgatcaccagctcgc

SEQ ID NO: 3059996 - DNA, 25 bp, Homo sapien
agctcctgcagtgcgcgggggtcac

SEQ ID NO: 3059997 - DNA, 25 bp, Homo sapien
tgccactggcattgcgcaggagctc

SEQ ID NO: 3059998 - DNA, 25 bp, Homo sapien
tctttgaggccacagagtcgtgcgt

SEQ ID NO: 3059999 - DNA, 25 bp, Homo sapien
catgcgcacagcatcgggaggtaca

SEQ ID NO: 3060000 - DNA, 25 bp, Homo sapien
gatgttctccggctgtcttgcggat

SEQ ID NO: 3060001 - DNA, 25 bp, Homo sapien
ttgctgaatgtagggtccaggccag

SEQ ID NO: 3060002 - DNA, 25 bp, Homo sapien
gcaccagctccaggttgttgtctct

SEQ ID NO: 3060003 - DNA, 25 bp, Homo sapien
tgttgtctctcacggcctccagctt

SEQ ID NO: 3060004 - DNA, 25 bp, Homo sapien
agctcggcggctgtgctgctctgct

SEQ ID NO: 3060005 - DNA, 25 bp, Homo sapien
agccacgtgcgccaggtcccgcagg

SEQ ID NO: 3060006 - DNA, 25 bp, Homo sapien
catgtatttcataggaacaaagaca

SEQ ID NO: 3060007 - DNA, 25 bp, Homo sapien
tttcagcatgtatttcataggaaca

SEQ ID NO: 3060008 - DNA, 25 bp, Homo sapien
gcatgtatttcataggaacaaagac

SEQ ID NO: 3060009 - DNA, 25 bp, Homo sapien
aaagtatttcagcatgtatttcata

SEQ ID NO: 3060010 - DNA, 25 bp, Homo sapien
ccaagatgtggacactcaataccca

SEQ ID NO: 3060011 - DNA, 25 bp, Homo sapien
tgtcctgttgacatgttcccatcag

SEQ ID NO: 3060012 - DNA, 25 bp, Homo sapien
gatcactatcttcgttgacccagtt

SEQ ID NO: 3060013 - DNA, 25 bp, Homo sapien
tctggcacaggctcatctgatgcat

SEQ ID NO: 3060014 - DNA, 25 bp, Homo sapien
caagctcaacctcatagcccagagg

SEQ ID NO: 3060015 - DNA, 25 bp, Homo sapien
caaaaccaacaattcagtaggctga

SEQ ID NO: 3060016 - DNA, 25 bp, Homo sapien
ttatacccacagatatgaaagcaca

SEQ ID NO: 3060017 - DNA, 25 bp, Homo sapien
tagtgtgtttgtcattccctggctt

SEQ ID NO: 3060018 - DNA, 25 bp, Homo sapien
gaatcatgattttatccatccctgg

SEQ ID NO: 3060019 - DNA, 25 bp, Homo sapien
gcttttttactcactattattttgc

SEQ ID NO: 3060020 - DNA, 25 bp, Homo sapien
gcacccggccgtattttctatgaca

SEQ ID NO: 3060021 - DNA, 25 bp, Homo sapien
aactagaagagtgatttgaatttct

SEQ ID NO: 3060022 - DNA, 25 bp, Homo sapien
ccagctaagacaccagacatgtgag

SEQ ID NO: 3060023 - DNA, 25 bp, Homo sapien
gatgagagaccctcctagaggatga

SEQ ID NO: 3060024 - DNA, 25 bp, Homo sapien
ccttgcttgtgagactaccatgtga

SEQ ID NO: 3060025 - DNA, 25 bp, Homo sapien
gacattgcagttttcccagctaaga

SEQ ID NO: 3060026 - DNA, 25 bp, Homo sapien
tggccttgtctgtagctggaacacc

SEQ ID NO: 3060027 - DNA, 25 bp, Homo sapien
cttgtctgtagctggaacacctgct

SEQ ID NO: 3060028 - DNA, 25 bp, Homo sapien
gctggaacacctgctactggatcca

SEQ ID NO: 3060029 - DNA, 25 bp, Homo sapien
tgtagctggaacacctgctactgga

SEQ ID NO: 3060030 - DNA, 25 bp, Homo sapien
agccacctgccagggccgccacttg

SEQ ID NO: 3060031 - DNA, 25 bp, Homo sapien
ccagatgccagccacctgccagggc

SEQ ID NO: 3060032 - DNA, 25 bp, Homo sapien
gatgccagccacctgccagggccgc

SEQ ID NO: 3060033 - DNA, 25 bp, Homo sapien
ccagccacctgccagggccgccact

SEQ ID NO: 3060034 - DNA, 25 bp, Homo sapien
cagagagccaccgagccttcacctc

SEQ ID NO: 3060035 - DNA, 25 bp, Homo sapien
tcagagagccaccgagccttcacct

SEQ ID NO: 3060036 - DNA, 25 bp, Homo sapien
ctgcatccgacttccacagccccag

SEQ ID NO: 3060037 - DNA, 25 bp, Homo sapien
tccctgcatccgacttccacagccc

SEQ ID NO: 3060038 - DNA, 25 bp, Homo sapien
caattccctgcatccgacttccaca

SEQ ID NO: 3060039 - DNA, 25 bp, Homo sapien
cagctcccttcacaattccctgcat

SEQ ID NO: 3060040 - DNA, 25 bp, Homo sapien
cttggccagggatcttactatggga

SEQ ID NO: 3060041 - DNA, 25 bp, Homo sapien
ggagggatcccaagttgtccaggac

SEQ ID NO: 3060042 - DNA, 25 bp, Homo sapien
tactatgggactttccataatgcct

SEQ ID NO: 3060043 - DNA, 25 bp, Homo sapien
aatgcctcgaaggaagatcaggtcc

SEQ ID NO: 3060044 - DNA, 25 bp, Homo sapien
gggggaaggtacgggcagtgagata

SEQ ID NO: 3060045 - DNA, 25 bp, Homo sapien
ggtacgggcagtgagatacacaggt

SEQ ID NO: 3060046 - DNA, 25 bp, Homo sapien
gaaggtacgggcagtgagatacaca

SEQ ID NO: 3060047 - DNA, 25 bp, Homo sapien
gggaaggtacgggcagtgagataca

SEQ ID NO: 3060048 - DNA, 25 bp, Homo sapien
gaagactccagggatataccctcca

SEQ ID NO: 3060049 - DNA, 25 bp, Homo sapien
gactccagggatataccctccaagg

SEQ ID NO: 3060050 - DNA, 25 bp, Homo sapien
cagggatataccctccaaggagacc

SEQ ID NO: 3060051 - DNA, 25 bp, Homo sapien
tccagggatataccctccaaggaga

SEQ ID NO: 3060052 - DNA, 25 bp, Homo sapien
cccggagcgtcctacacgccgccgt

SEQ ID NO: 3060053 - DNA, 25 bp, Homo sapien
gagcgtcctacacgccgccgtctac

SEQ ID NO: 3060054 - DNA, 25 bp, Homo sapien
gactcccggagcgtcctacacgccg

SEQ ID NO: 3060055 - DNA, 25 bp, Homo sapien
gggactcccggagcgtcctacacgc

SEQ ID NO: 3060056 - DNA, 25 bp, Homo sapien
tctgagatcttgtgcccaagaggcc

SEQ ID NO: 3060057 - DNA, 25 bp, Homo sapien
aaggactcagctccgctccggtgac

SEQ ID NO: 3060058 - DNA, 25 bp, Homo sapien
ggaaggactcagctccgctccggtg

SEQ ID NO: 3060059 - DNA, 25 bp, Homo sapien
tggaactcagttccccagaaaggaa

SEQ ID NO: 3060060 - DNA, 25 bp, Homo sapien
tggagcaggtatgggtcttattctt

SEQ ID NO: 3060061 - DNA, 25 bp, Homo sapien
ctttctcttctccgttccagcacag

SEQ ID NO: 3060062 - DNA, 25 bp, Homo sapien
ccgttccagcacaggaacccacaca

SEQ ID NO: 3060063 - DNA, 25 bp, Homo sapien
ctggagcaggtatgggtcttattct

SEQ ID NO: 3060064 - DNA, 25 bp, Homo sapien
ttcagagttggtggcggcaaccggc

SEQ ID NO: 3060065 - DNA, 25 bp, Homo sapien
gtttcagagttggtggcggcaaccg

SEQ ID NO: 3060066 - DNA, 25 bp, Homo sapien
agtttcagagttggtggcggcaacc

SEQ ID NO: 3060067 - DNA, 25 bp, Homo sapien
tttcagagttggtggcggcaaccgg

SEQ ID NO: 3060068 - DNA, 25 bp, Homo sapien
aaggaggcaagggctctgaaacgtc

SEQ ID NO: 3060069 - DNA, 25 bp, Homo sapien
ggtgaaggaggcaagggctctgaaa

SEQ ID NO: 3060070 - DNA, 25 bp, Homo sapien
tgaaggaggcaagggctctgaaacg

SEQ ID NO: 3060071 - DNA, 25 bp, Homo sapien
ggaggcaagggctctgaaacgtctc

SEQ ID NO: 3060072 - DNA, 25 bp, Homo sapien
ggggaggccgcgcagataccggggc

SEQ ID NO: 3060073 - DNA, 25 bp, Homo sapien
ggtgcctgaagccactttggagccc

SEQ ID NO: 3060074 - DNA, 25 bp, Homo sapien
aggccgcgcagataccggggcccct

SEQ ID NO: 3060075 - DNA, 25 bp, Homo sapien
acagctcaccaccttggtgcctgaa

SEQ ID NO: 3060076 - DNA, 25 bp, Homo sapien
gtggtttgggagacaccgcacagac

SEQ ID NO: 3060077 - DNA, 25 bp, Homo sapien
ttgcttgtcaatcgctagcccggct

SEQ ID NO: 3060078 - DNA, 25 bp, Homo sapien
tagcccggctcttaaagcggcaagg

SEQ ID NO: 3060079 - DNA, 25 bp, Homo sapien
gccggcacaactcggaggaagtagt

SEQ ID NO: 3060080 - DNA, 25 bp, Homo sapien
agtctgggatctcagattctggccc

SEQ ID NO: 3060081 - DNA, 25 bp, Homo sapien
tcaggacagtctgggatctcagatt

SEQ ID NO: 3060082 - DNA, 25 bp, Homo sapien
tccatagcgacccacatcaaatctt

SEQ ID NO: 3060083 - DNA, 25 bp, Homo sapien
tagcgacccacatcaaatcttccat

SEQ ID NO: 3060084 - DNA, 25 bp, Homo sapien
cacctccactgaagtgccaagggct

SEQ ID NO: 3060085 - DNA, 25 bp, Homo sapien
taacaggtggcccatcgccaaagtg

SEQ ID NO: 3060086 - DNA, 25 bp, Homo sapien
ctttgatatgggcatcacgtgaggg

SEQ ID NO: 3060087 - DNA, 25 bp, Homo sapien
acaggtggcccatcgccaaagtggg

SEQ ID NO: 3060088 - DNA, 25 bp, Homo sapien
cacaggacttgaggacagcttagca

SEQ ID NO: 3060089 - DNA, 25 bp, Homo sapien
tcgaaggcatctagacttgattaag

SEQ ID NO: 3060090 - DNA, 25 bp, Homo sapien
catggctgagtctaatctcgaaggc

SEQ ID NO: 3060091 - DNA, 25 bp, Homo sapien
gggcagaaaactcagctgtttggcc

SEQ ID NO: 3060092 - DNA, 25 bp, Homo sapien
caaccccattccagttgtccagcct

SEQ ID NO: 3060093 - DNA, 25 bp, Homo sapien
cagatcaaaccactgtacatgtcgc

SEQ ID NO: 3060094 - DNA, 25 bp, Homo sapien
gtacatgtcgcatatattattgatg

SEQ ID NO: 3060095 - DNA, 25 bp, Homo sapien
cattccagttgtccagcctttccag

SEQ ID NO: 3060096 - DNA, 25 bp, Homo sapien
cgacccgtggtggagtcttcacaga

SEQ ID NO: 3060097 - DNA, 25 bp, Homo sapien
gacccgtggtggagtcttcacagag

SEQ ID NO: 3060098 - DNA, 25 bp, Homo sapien
acccgtggtggagtcttcacagaga

SEQ ID NO: 3060099 - DNA, 25 bp, Homo sapien
ccgtggtggagtcttcacagagaca

SEQ ID NO: 3060100 - DNA, 25 bp, Homo sapien
cgcttgccatggtttccttgtgggt

SEQ ID NO: 3060101 - DNA, 25 bp, Homo sapien
ccctggtttcgggcttgcccacgtg

SEQ ID NO: 3060102 - DNA, 25 bp, Homo sapien
tggtttcgggcttgcccacgtggct

SEQ ID NO: 3060103 - DNA, 25 bp, Homo sapien
ctgcaaccaccgcttgccatggttt

SEQ ID NO: 3060104 - DNA, 25 bp, Homo sapien
tcttcagccacggcccaaaaggatc

SEQ ID NO: 3060105 - DNA, 25 bp, Homo sapien
ttcttcagccacggcccaaaaggat

SEQ ID NO: 3060106 - DNA, 25 bp, Homo sapien
atgctgtatgtggttttctgctgag

SEQ ID NO: 3060107 - DNA, 25 bp, Homo sapien
tatgtggttttctgctgaggataat

SEQ ID NO: 3060108 - DNA, 25 bp, Homo sapien
ctgtatgtggttttctgctgaggat

SEQ ID NO: 3060109 - DNA, 25 bp, Homo sapien
acatgctgtatgtggttttctgctg

SEQ ID NO: 3060110 - DNA, 25 bp, Homo sapien
taagatgtatgttgctgagcaatca

SEQ ID NO: 3060111 - DNA, 25 bp, Homo sapien
gtatgttgctgagcaatcacaagta

SEQ ID NO: 3060112 - DNA, 25 bp, Homo sapien
ttaagatgtatgttgctgagcaatc

SEQ ID NO: 3060113 - DNA, 25 bp, Homo sapien
gatgtatgttgctgagcaatcacaa

SEQ ID NO: 3060114 - DNA, 25 bp, Homo sapien
taggtggacctgtgacttcagtcag

SEQ ID NO: 3060115 - DNA, 25 bp, Homo sapien
gtaggtggacctgtgacttcagtca

SEQ ID NO: 3060116 - DNA, 25 bp, Homo sapien
actaaagtcttcttcaggggtatag

SEQ ID NO: 3060117 - DNA, 25 bp, Homo sapien
tccagaggttcaactgtgacttgag

SEQ ID NO: 3060118 - DNA, 25 bp, Homo sapien
ctctgtggttggagacagtttaacc

SEQ ID NO: 3060119 - DNA, 25 bp, Homo sapien
aagtcttcttcaggggtatagaatg

SEQ ID NO: 3060120 - DNA, 25 bp, Homo sapien
ctggagtgatggtaagtcccagtcc

SEQ ID NO: 3060121 - DNA, 25 bp, Homo sapien
tggtaagtcccagtccaaaggttga

SEQ ID NO: 3060122 - DNA, 25 bp, Homo sapien
aatgctgggtgacattggatgctga

SEQ ID NO: 3060123 - DNA, 25 bp, Homo sapien
caaaggttgaactgtaatgctgggt

SEQ ID NO: 3060124 - DNA, 25 bp, Homo sapien
ggggtctcctggacgactggagaaa

SEQ ID NO: 3060125 - DNA, 25 bp, Homo sapien
tactgggcaatattgaatgctgagc

SEQ ID NO: 3060126 - DNA, 25 bp, Homo sapien
ttggggtctcctggacgactggaga

SEQ ID NO: 3060127 - DNA, 25 bp, Homo sapien
gtctcctggacgactggagaaagtt

SEQ ID NO: 3060128 - DNA, 25 bp, Homo sapien
gctgcaacctccttaggtggctctg

SEQ ID NO: 3060129 - DNA, 25 bp, Homo sapien
ggctgagatgggaccatctgctggc

SEQ ID NO: 3060130 - DNA, 25 bp, Homo sapien
tgtgttggaactgtcacctcataat

SEQ ID NO: 3060131 - DNA, 25 bp, Homo sapien
cctcataatgagctggaggttgagc

SEQ ID NO: 3060132 - DNA, 25 bp, Homo sapien
ttctacctcctgagggaactctgga

SEQ ID NO: 3060133 - DNA, 25 bp, Homo sapien
gagttagagatggttctacctcctg

SEQ ID NO: 3060134 - DNA, 25 bp, Homo sapien
ggaatctgagctggaatctcctgct

SEQ ID NO: 3060135 - DNA, 25 bp, Homo sapien
gctggaatctcctgctgagttagag

SEQ ID NO: 3060136 - DNA, 25 bp, Homo sapien
tgggtcagagagggttctatcacca

SEQ ID NO: 3060137 - DNA, 25 bp, Homo sapien
ctgggtcagagagggttctatcacc

SEQ ID NO: 3060138 - DNA, 25 bp, Homo sapien
gggtcagagagggttctatcaccat

SEQ ID NO: 3060139 - DNA, 25 bp, Homo sapien
cctcctgctggactggagatttaac

SEQ ID NO: 3060140 - DNA, 25 bp, Homo sapien
acctccttaggggaatctgaagtct

SEQ ID NO: 3060141 - DNA, 25 bp, Homo sapien
gctggaaactcttgctggactggaa

SEQ ID NO: 3060142 - DNA, 25 bp, Homo sapien
ctcttcagtggactttggaggatga

SEQ ID NO: 3060143 - DNA, 25 bp, Homo sapien
aatttctacatcattaattggccct

SEQ ID NO: 3060144 - DNA, 25 bp, Homo sapien
aaatttctacatcattaattggccc

SEQ ID NO: 3060145 - DNA, 25 bp, Homo sapien
tacctcgtggtgtatcaatggcgga

SEQ ID NO: 3060146 - DNA, 25 bp, Homo sapien
gctctgttgaagaagagtagacccc

SEQ ID NO: 3060147 - DNA, 25 bp, Homo sapien
tacctggctctagagttactgcaag

SEQ ID NO: 3060148 - DNA, 25 bp, Homo sapien
gctggatctgagaaggttcaacccc

SEQ ID NO: 3060149 - DNA, 25 bp, Homo sapien
ctagatggaattgacaaagtccagc

SEQ ID NO: 3060150 - DNA, 25 bp, Homo sapien
ttgacaaagtccagcttgctcaggc

SEQ ID NO: 3060151 - DNA, 25 bp, Homo sapien
gcaggctgccgggatacagtatatc

SEQ ID NO: 3060152 - DNA, 25 bp, Homo sapien
caaagtccagcttgctcaggcagtc

SEQ ID NO: 3060153 - DNA, 25 bp, Homo sapien
aacagccttagcaagcttccgatgc

SEQ ID NO: 3060154 - DNA, 25 bp, Homo sapien
gcaagcttccgatgctgagctagat

SEQ ID NO: 3060155 - DNA, 25 bp, Homo sapien
aatcggtgtggagttccaacagcct

SEQ ID NO: 3060156 - DNA, 25 bp, Homo sapien
aaggttttgatataaatcggtgtgg

SEQ ID NO: 3060157 - DNA, 25 bp, Homo sapien
ctgatctagacctgcagtttgaacc

SEQ ID NO: 3060158 - DNA, 25 bp, Homo sapien
gcagcctgatctagacctgcagttt

SEQ ID NO: 3060159 - DNA, 25 bp, Homo sapien
gcctgatctagacctgcagtttgaa

SEQ ID NO: 3060160 - DNA, 25 bp, Homo sapien
tgatctgcagcctgatctagacctg

SEQ ID NO: 3060161 - DNA, 25 bp, Homo sapien
cttgtcgaatcagcctgtcatttag

SEQ ID NO: 3060162 - DNA, 25 bp, Homo sapien
gggagcctttcttgtcgaatcagcc

SEQ ID NO: 3060163 - DNA, 25 bp, Homo sapien
gcagagaactgctttggccccggga

SEQ ID NO: 3060164 - DNA, 25 bp, Homo sapien
gagaactgctttggccccgggagca

SEQ ID NO: 3060165 - DNA, 25 bp, Homo sapien
tagcagaggaccccaggtaatcaaa

SEQ ID NO: 3060166 - DNA, 25 bp, Homo sapien
aggtagcagaggaccccaggtaatc

SEQ ID NO: 3060167 - DNA, 25 bp, Homo sapien
cagaggaccccaggtaatcaaagcc

SEQ ID NO: 3060168 - DNA, 25 bp, Homo sapien
ggtagcagaggaccccaggtaatca

SEQ ID NO: 3060169 - DNA, 25 bp, Homo sapien
ctcaggactccagcggcctgttggg

SEQ ID NO: 3060170 - DNA, 25 bp, Homo sapien
ggtggtctcaggactccagcggcct

SEQ ID NO: 3060171 - DNA, 25 bp, Homo sapien
gtcggggcgcggcacagcttcccaa

SEQ ID NO: 3060172 - DNA, 25 bp, Homo sapien
gtcacaggacctcgcctcgggatat

SEQ ID NO: 3060173 - DNA, 25 bp, Homo sapien
catgtaaactccaagaaggtgcttc

SEQ ID NO: 3060174 - DNA, 25 bp, Homo sapien
atgtaaactccaagaaggtgcttca

SEQ ID NO: 3060175 - DNA, 25 bp, Homo sapien
agcatgtaaactccaagaaggtgct

SEQ ID NO: 3060176 - DNA, 25 bp, Homo sapien
gcatgtaaactccaagaaggtgctt

SEQ ID NO: 3060177 - DNA, 25 bp, Homo sapien
tcctctcgccgtctccagcctgacc

SEQ ID NO: 3060178 - DNA, 25 bp, Homo sapien
cgtctctgtcctctcgccgtctcca

SEQ ID NO: 3060179 - DNA, 25 bp, Homo sapien
aggactgggcactgcggtggcccca

SEQ ID NO: 3060180 - DNA, 25 bp, Homo sapien
gccagttccagttccggcatgagcg

SEQ ID NO: 3060181 - DNA, 25 bp, Homo sapien
acgccatgcacctcggcctggagtg

SEQ ID NO: 3060182 - DNA, 25 bp, Homo sapien
cagtgtgacctgctgaagttgtccc

SEQ ID NO: 3060183 - DNA, 25 bp, Homo sapien
tggctgagaccctgtgggacgccat

SEQ ID NO: 3060184 - DNA, 25 bp, Homo sapien
tctcaggacatcactagcacccaga

SEQ ID NO: 3060185 - DNA, 25 bp, Homo sapien
aggacatcactagcacccagatgca

SEQ ID NO: 3060186 - DNA, 25 bp, Homo sapien
tctctcaggacatcactagcaccca

SEQ ID NO: 3060187 - DNA, 25 bp, Homo sapien
tcaggacatcactagcacccagatg

SEQ ID NO: 3060188 - DNA, 25 bp, Homo sapien
cagggagacccacccggagttgtgt

SEQ ID NO: 3060189 - DNA, 25 bp, Homo sapien
tggtggcaccaggtatctgcgtagc

SEQ ID NO: 3060190 - DNA, 25 bp, Homo sapien
tcaaaatggcgggtttagccccagc

SEQ ID NO: 3060191 - DNA, 25 bp, Homo sapien
ccatttaagtgggaactcgcagtca

SEQ ID NO: 3060192 - DNA, 25 bp, Homo sapien
gcctcaggggctccaaaatggccag

SEQ ID NO: 3060193 - DNA, 25 bp, Homo sapien
ggggcctgcaatcctgaaaccagaa

SEQ ID NO: 3060194 - DNA, 25 bp, Homo sapien
tccagaaggctcagcaggtcatgcc

SEQ ID NO: 3060195 - DNA, 25 bp, Homo sapien
gcctgcaatcctgaaaccagaaact

SEQ ID NO: 3060196 - DNA, 25 bp, Homo sapien
tgtctggtggccaagtctgggcccc

SEQ ID NO: 3060197 - DNA, 25 bp, Homo sapien
atgtctggtggccaagtctgggccc

SEQ ID NO: 3060198 - DNA, 25 bp, Homo sapien
cagctgtattctctaagagcttggg

SEQ ID NO: 3060199 - DNA, 25 bp, Homo sapien
ggcccccatcagctgtattctctaa

SEQ ID NO: 3060200 - DNA, 25 bp, Homo sapien
gggcagcttgggtgctagcgagagg

SEQ ID NO: 3060201 - DNA, 25 bp, Homo sapien
ggccccaggtaggacagcctggatg

SEQ ID NO: 3060202 - DNA, 25 bp, Homo sapien
ccggggccccaggtaggacagcctg

SEQ ID NO: 3060203 - DNA, 25 bp, Homo sapien
gcttgggtgctagcgagaggaagtt

SEQ ID NO: 3060204 - DNA, 25 bp, Homo sapien
gcgctgctcatggagtcgtaggaga

SEQ ID NO: 3060205 - DNA, 25 bp, Homo sapien
gctgctcatggagtcgtaggagaca

SEQ ID NO: 3060206 - DNA, 25 bp, Homo sapien
gctcatggagtcgtaggagacagaa

SEQ ID NO: 3060207 - DNA, 25 bp, Homo sapien
gagtcgtaggagacagaaggtggca

SEQ ID NO: 3060208 - DNA, 25 bp, Homo sapien
ttataagtccagcgggctgagctcc

SEQ ID NO: 3060209 - DNA, 25 bp, Homo sapien
agacagggcagggagtcaaactcac

SEQ ID NO: 3060210 - DNA, 25 bp, Homo sapien
gctccagggagctggacagacaggg

SEQ ID NO: 3060211 - DNA, 25 bp, Homo sapien
acagacagggcagggagtcaaactc

SEQ ID NO: 3060212 - DNA, 25 bp, Homo sapien
atttcagctccagggagctggacag

SEQ ID NO: 3060213 - DNA, 25 bp, Homo sapien
gagaaggccagcgtgtcctctttgt

SEQ ID NO: 3060214 - DNA, 25 bp, Homo sapien
ctgggagggaagaggcagcaggggc

SEQ ID NO: 3060215 - DNA, 25 bp, Homo sapien
agggaagaggcagcaggggcaagca

SEQ ID NO: 3060216 - DNA, 25 bp, Homo sapien
tgggagggaagaggcagcaggggca

SEQ ID NO: 3060217 - DNA, 25 bp, Homo sapien
ggagggaagaggcagcaggggcaag

SEQ ID NO: 3060218 - DNA, 25 bp, Homo sapien
ccctgggtacactggctccagtggg

SEQ ID NO: 3060219 - DNA, 25 bp, Homo sapien
gatgtatctacggagatcagctgca

SEQ ID NO: 3060220 - DNA, 25 bp, Homo sapien
gctgtagtaacagagccacgcaggt

SEQ ID NO: 3060221 - DNA, 25 bp, Homo sapien
tacggagatcagctgcatactgggc

SEQ ID NO: 3060222 - DNA, 25 bp, Homo sapien
ccggagtccagagtaaatgggcact

SEQ ID NO: 3060223 - DNA, 25 bp, Homo sapien
tccagagtaaatgggcactagacca

SEQ ID NO: 3060224 - DNA, 25 bp, Homo sapien
gagtaaatgggcactagaccaagcg

SEQ ID NO: 3060225 - DNA, 25 bp, Homo sapien
aatgggcactagaccaagcgagcac

SEQ ID NO: 3060226 - DNA, 25 bp, Homo sapien
cactgtctcctcatactggcaacgc

SEQ ID NO: 3060227 - DNA, 25 bp, Homo sapien
tctcctcatactggcaacgccagta

SEQ ID NO: 3060228 - DNA, 25 bp, Homo sapien
tgtctcctcatactggcaacgccag

SEQ ID NO: 3060229 - DNA, 25 bp, Homo sapien
ctgtctcctcatactggcaacgcca

SEQ ID NO: 3060230 - DNA, 25 bp, Homo sapien
gcagcttggcctgcaccaagtcctc

SEQ ID NO: 3060231 - DNA, 25 bp, Homo sapien
agcttggcctgcaccaagtcctcca

SEQ ID NO: 3060232 - DNA, 25 bp, Homo sapien
cagcagcttggcctgcaccaagtcc

SEQ ID NO: 3060233 - DNA, 25 bp, Homo sapien
gggcagcagcttggcctgcaccaag

SEQ ID NO: 3060234 - DNA, 25 bp, Homo sapien
ggaccagggaaggaccacacacagc

SEQ ID NO: 3060235 - DNA, 25 bp, Homo sapien
tcaccacaggtctgggccctccgac

SEQ ID NO: 3060236 - DNA, 25 bp, Homo sapien
tgcaggatgtgtggtaacgggcgct

SEQ ID NO: 3060237 - DNA, 25 bp, Homo sapien
gacgtcgttaagtgatgttgccagg

SEQ ID NO: 3060238 - DNA, 25 bp, Homo sapien
ggagacgtcgttaagtgatgttgcc

SEQ ID NO: 3060239 - DNA, 25 bp, Homo sapien
tcgttaagtgatgttgccagggtag

SEQ ID NO: 3060240 - DNA, 25 bp, Homo sapien
gaaagaagcgtgtccgggccgtctc

SEQ ID NO: 3060241 - DNA, 25 bp, Homo sapien
tggaaagaagcgtgtccgggccgtc

SEQ ID NO: 3060242 - DNA, 25 bp, Homo sapien
aaagaagcgtgtccgggccgtctct

SEQ ID NO: 3060243 - DNA, 25 bp, Homo sapien
cagggaggcgtagtagcggttcagc

SEQ ID NO: 3060244 - DNA, 25 bp, Homo sapien
gcagggccagaagcactgtggtcaa

SEQ ID NO: 3060245 - DNA, 25 bp, Homo sapien
caggttgaggtagtggcgcagggag

SEQ ID NO: 3060246 - DNA, 25 bp, Homo sapien
ttcagctcctccggcgaggcgtctt

SEQ ID NO: 3060247 - DNA, 25 bp, Homo sapien
ctgggaaggcgacattgggacgtgg

SEQ ID NO: 3060248 - DNA, 25 bp, Homo sapien
tgggaaggcgacattgggacgtggg

SEQ ID NO: 3060249 - DNA, 25 bp, Homo sapien
aaggcgacattgggacgtgggtcat

SEQ ID NO: 3060250 - DNA, 25 bp, Homo sapien
ggaaggcgacattgggacgtgggtc

SEQ ID NO: 3060251 - DNA, 25 bp, Homo sapien
ggcgagggaagtcccaagggctgca

SEQ ID NO: 3060252 - DNA, 25 bp, Homo sapien
tgcactgccgcaggtcaagctgagg

SEQ ID NO: 3060253 - DNA, 25 bp, Homo sapien
tgaggcctcctctgctcagcgcttt

SEQ ID NO: 3060254 - DNA, 25 bp, Homo sapien
tagcttgtgaagcagacgagcagga

SEQ ID NO: 3060255 - DNA, 25 bp, Homo sapien
taacagatacttgtggtgtgctgcg

SEQ ID NO: 3060256 - DNA, 25 bp, Homo sapien
acttgtggtgtgctgcgcgcccaag

SEQ ID NO: 3060257 - DNA, 25 bp, Homo sapien
agatacttgtggtgtgctgcgcgcc

SEQ ID NO: 3060258 - DNA, 25 bp, Homo sapien
aaacacagtaacagatacttgtggt

SEQ ID NO: 3060259 - DNA, 25 bp, Homo sapien
aggtgactgagttggaaatcttgac

SEQ ID NO: 3060260 - DNA, 25 bp, Homo sapien
ttagcttgttatctgaattcccaaa

SEQ ID NO: 3060261 - DNA, 25 bp, Homo sapien
tatctccatctcttcaggtgactga

SEQ ID NO: 3060262 - DNA, 25 bp, Homo sapien
tcactccaccaatgacctgagtcat

SEQ ID NO: 3060263 - DNA, 25 bp, Homo sapien
ttggaatgtgaccacaggggaattc

SEQ ID NO: 3060264 - DNA, 25 bp, Homo sapien
gaattggaatgtgaccacaggggaa

SEQ ID NO: 3060265 - DNA, 25 bp, Homo sapien
aggtccaggaattggaatgtgacca

SEQ ID NO: 3060266 - DNA, 25 bp, Homo sapien
gtccaggaattggaatgtgaccaca

SEQ ID NO: 3060267 - DNA, 25 bp, Homo sapien
attacagaaacatgccactactgcc

SEQ ID NO: 3060268 - DNA, 25 bp, Homo sapien
acagtctcagttcaccgcaatctcc

SEQ ID NO: 3060269 - DNA, 25 bp, Homo sapien
agtctcagttcaccgcaatctcctc

SEQ ID NO: 3060270 - DNA, 25 bp, Homo sapien
tacagaaacatgccactactgcctg

SEQ ID NO: 3060271 - DNA, 25 bp, Homo sapien
ccatgaccgatagtgggttcagttc

SEQ ID NO: 3060272 - DNA, 25 bp, Homo sapien
gattaaagacaacccgccacattta

SEQ ID NO: 3060273 - DNA, 25 bp, Homo sapien
gcagcagattaaagacaacccgcca

SEQ ID NO: 3060274 - DNA, 25 bp, Homo sapien
gccacatttagtctcggccccatga

SEQ ID NO: 3060275 - DNA, 25 bp, Homo sapien
tcaggaggccttgattaaaatgcaa

SEQ ID NO: 3060276 - DNA, 25 bp, Homo sapien
gaagtgaccccgtgggagcaagatt

SEQ ID NO: 3060277 - DNA, 25 bp, Homo sapien
tgcaaatacttgtctgagagtcagc

SEQ ID NO: 3060278 - DNA, 25 bp, Homo sapien
gagagtcagcttacacttgaaagaa

SEQ ID NO: 3060279 - DNA, 25 bp, Homo sapien
ctatataaaatgtttatttttggag

SEQ ID NO: 3060280 - DNA, 25 bp, Homo sapien
gagagccggtactgtttctgcccct

SEQ ID NO: 3060281 - DNA, 25 bp, Homo sapien
tctggtgtttgggagggaactccac

SEQ ID NO: 3060282 - DNA, 25 bp, Homo sapien
ctgctctactctcaaggtgagtgac

SEQ ID NO: 3060283 - DNA, 25 bp, Homo sapien
agcccagagcagaacagggtctgct

SEQ ID NO: 3060284 - DNA, 25 bp, Homo sapien
atgtgacttctgtagtgctcagccc

SEQ ID NO: 3060285 - DNA, 25 bp, Homo sapien
cttctgtagtgctcagcccctgtgc

SEQ ID NO: 3060286 - DNA, 25 bp, Homo sapien
tgacttctgtagtgctcagcccctg

SEQ ID NO: 3060287 - DNA, 25 bp, Homo sapien
tgtgacttctgtagtgctcagcccc

SEQ ID NO: 3060288 - DNA, 25 bp, Homo sapien
ctcccaagcgctgagcccagaaatt

SEQ ID NO: 3060289 - DNA, 25 bp, Homo sapien
aacctgtacagcattagtgccaggg

SEQ ID NO: 3060290 - DNA, 25 bp, Homo sapien
gcatctgccaggttcaaagaggaat

SEQ ID NO: 3060291 - DNA, 25 bp, Homo sapien
actctcccactctcagtagccgcat

SEQ ID NO: 3060292 - DNA, 25 bp, Homo sapien
ggatgccatacagcacgaagaacag

SEQ ID NO: 3060293 - DNA, 25 bp, Homo sapien
atggttcagatacgccagccggtcc

SEQ ID NO: 3060294 - DNA, 25 bp, Homo sapien
cagcgagggtcacgtagtagcctga

SEQ ID NO: 3060295 - DNA, 25 bp, Homo sapien
acgccgcgtgttgtgccagtaagca

SEQ ID NO: 3060296 - DNA, 25 bp, Homo sapien
ggagccatgagagaatcaccccatc

SEQ ID NO: 3060297 - DNA, 25 bp, Homo sapien
aatttaatggccagtctacctcgtg

SEQ ID NO: 3060298 - DNA, 25 bp, Homo sapien
cataagtggctaccctagagctctc

SEQ ID NO: 3060299 - DNA, 25 bp, Homo sapien
caattcccagggaactgggccatca

SEQ ID NO: 3060300 - DNA, 25 bp, Homo sapien
aaagccgccgatgatggcaactgtg

SEQ ID NO: 3060301 - DNA, 25 bp, Homo sapien
cacagatgaggtagatacccaggaa

SEQ ID NO: 3060302 - DNA, 25 bp, Homo sapien
ccaggaacacctggccggtggactg

SEQ ID NO: 3060303 - DNA, 25 bp, Homo sapien
agcaccgctggccaacacaagaaag

SEQ ID NO: 3060304 - DNA, 25 bp, Homo sapien
atgaaactagcgcacagcacggctg

SEQ ID NO: 3060305 - DNA, 25 bp, Homo sapien
cagccagtccccgtagtggacgtag

SEQ ID NO: 3060306 - DNA, 25 bp, Homo sapien
agcgccgcttcacgccaaaggacat

SEQ ID NO: 3060307 - DNA, 25 bp, Homo sapien
taatggccaattggagtgcggcccc

SEQ ID NO: 3060308 - DNA, 25 bp, Homo sapien
gatttggtccgacacccagaccaga

SEQ ID NO: 3060309 - DNA, 25 bp, Homo sapien
cagttcaagggtcccgacttctagc

SEQ ID NO: 3060310 - DNA, 25 bp, Homo sapien
ccagttcaagggtcccgacttctag

SEQ ID NO: 3060311 - DNA, 25 bp, Homo sapien
gcaggaccgccctaccagatttggt

SEQ ID NO: 3060312 - DNA, 25 bp, Homo sapien
gcagcgtgtgagcagcaccgaaccc

SEQ ID NO: 3060313 - DNA, 25 bp, Homo sapien
gcgtacagcatgagctggctgaagc

SEQ ID NO: 3060314 - DNA, 25 bp, Homo sapien
gcaccgaacccaactgcatgatcag

SEQ ID NO: 3060315 - DNA, 25 bp, Homo sapien
tcagccctctcagcgtacagcatga

SEQ ID NO: 3060316 - DNA, 25 bp, Homo sapien
gaaagggcagtccgctgcggcctca

SEQ ID NO: 3060317 - DNA, 25 bp, Homo sapien
aaagggcagtccgctgcggcctcac

SEQ ID NO: 3060318 - DNA, 25 bp, Homo sapien
gggaaagggcagtccgctgcggcct

SEQ ID NO: 3060319 - DNA, 25 bp, Homo sapien
ttgggaaagggcagtccgctgcggc

SEQ ID NO: 3060320 - DNA, 25 bp, Homo sapien
tagttccggatctaaggtgacccag

SEQ ID NO: 3060321 - DNA, 25 bp, Homo sapien
tgctcatggagccttcagggccata

SEQ ID NO: 3060322 - DNA, 25 bp, Homo sapien
atgggacacgcagcttccgggtcaa

SEQ ID NO: 3060323 - DNA, 25 bp, Homo sapien
tgacccagttgcgaagtccagcctt

SEQ ID NO: 3060324 - DNA, 25 bp, Homo sapien
tctgttaagatcaaagtaaggggtc

SEQ ID NO: 3060325 - DNA, 25 bp, Homo sapien
tacacataacgcaccagaggaaacc

SEQ ID NO: 3060326 - DNA, 25 bp, Homo sapien
tgatacacataacgcaccagaggaa

SEQ ID NO: 3060327 - DNA, 25 bp, Homo sapien
taaatgatacacataacgcaccaga

SEQ ID NO: 3060328 - DNA, 25 bp, Homo sapien
gaggaagcttgccttggtacccact

SEQ ID NO: 3060329 - DNA, 25 bp, Homo sapien
tgttgacgaggaccagaaccaggat

SEQ ID NO: 3060330 - DNA, 25 bp, Homo sapien
ggtgtacagccctaaagtgttgacg

SEQ ID NO: 3060331 - DNA, 25 bp, Homo sapien
aaaatagtcctaggagtctgcctgg

SEQ ID NO: 3060332 - DNA, 25 bp, Homo sapien
tactcttacggatacacagggaagc

SEQ ID NO: 3060333 - DNA, 25 bp, Homo sapien
tcagcctcagacatggtgatccagg

SEQ ID NO: 3060334 - DNA, 25 bp, Homo sapien
gtgtctccccgtccaagcaggtatt

SEQ ID NO: 3060335 - DNA, 25 bp, Homo sapien
gaagcttcggcacaatctaggaccc

SEQ ID NO: 3060336 - DNA, 25 bp, Homo sapien
tccattcatccgcattcaagtttgc

SEQ ID NO: 3060337 - DNA, 25 bp, Homo sapien
tccgcattcaagtttgcagttatgg

SEQ ID NO: 3060338 - DNA, 25 bp, Homo sapien
tcatccgcattcaagtttgcagtta

SEQ ID NO: 3060339 - DNA, 25 bp, Homo sapien
atgttgtaatccattcatccgcatt

SEQ ID NO: 3060340 - DNA, 25 bp, Homo sapien
atataataagcgaatgatataagca

SEQ ID NO: 3060341 - DNA, 25 bp, Homo sapien
tttggcatgagctccagtcacaagg

SEQ ID NO: 3060342 - DNA, 25 bp, Homo sapien
ctccagtcacaagggcccttcgtga

SEQ ID NO: 3060343 - DNA, 25 bp, Homo sapien
ggcatgagctccagtcacaagggcc

SEQ ID NO: 3060344 - DNA, 25 bp, Homo sapien
gctccagtcacaagggcccttcgtg

SEQ ID NO: 3060345 - DNA, 25 bp, Homo sapien
ttgcgggccctgtcttcgcttgcgc

SEQ ID NO: 3060346 - DNA, 25 bp, Homo sapien
gtcttcgcttgcgctcagccatcag

SEQ ID NO: 3060347 - DNA, 25 bp, Homo sapien
cagctccccggcttcttgcgggccc

SEQ ID NO: 3060348 - DNA, 25 bp, Homo sapien
ccagctccccggcttcttgcgggcc

SEQ ID NO: 3060349 - DNA, 25 bp, Homo sapien
tacgacactcaagtgccgcaggtga

SEQ ID NO: 3060350 - DNA, 25 bp, Homo sapien
ggcccagcgcaagtcaggatgccca

SEQ ID NO: 3060351 - DNA, 25 bp, Homo sapien
gatgcccaggtctacgacactcaag

SEQ ID NO: 3060352 - DNA, 25 bp, Homo sapien
ggtgacccaactttccgaaggctca

SEQ ID NO: 3060353 - DNA, 25 bp, Homo sapien
ggcccagtgctcctaaggttgcaaa

SEQ ID NO: 3060354 - DNA, 25 bp, Homo sapien
cagtgctcctaaggttgcaaacgcc

SEQ ID NO: 3060355 - DNA, 25 bp, Homo sapien
taaggttgcaaacgcctcggcctcc

SEQ ID NO: 3060356 - DNA, 25 bp, Homo sapien
gctcctaaggttgcaaacgcctcgg

SEQ ID NO: 3060357 - DNA, 25 bp, Homo sapien
ccagctggttatggctgaggttcag

SEQ ID NO: 3060358 - DNA, 25 bp, Homo sapien
atcccgcaggatattgagagaaagc

SEQ ID NO: 3060359 - DNA, 25 bp, Homo sapien
gaggacttccaagcccggcacagtg

SEQ ID NO: 3060360 - DNA, 25 bp, Homo sapien
ccagccagcgagagccagtgtaggt

SEQ ID NO: 3060361 - DNA, 25 bp, Homo sapien
gtccaccacgctgcctgaggtaggg

SEQ ID NO: 3060362 - DNA, 25 bp, Homo sapien
cgccagccggcagatggctgagatt

SEQ ID NO: 3060363 - DNA, 25 bp, Homo sapien
cagtccaccacgctgcctgaggtag

SEQ ID NO: 3060364 - DNA, 25 bp, Homo sapien
ccggcagatggctgagattattgtg

SEQ ID NO: 3060365 - DNA, 25 bp, Homo sapien
ccccacactgcagctcactgacttt

SEQ ID NO: 3060366 - DNA, 25 bp, Homo sapien
caccccacactgcagctcactgact

SEQ ID NO: 3060367 - DNA, 25 bp, Homo sapien
acactgcagctcactgactttcacc

SEQ ID NO: 3060368 - DNA, 25 bp, Homo sapien
ccacactgcagctcactgactttca

SEQ ID NO: 3060369 - DNA, 25 bp, Homo sapien
tcctcatagttaccactgctctgca

SEQ ID NO: 3060370 - DNA, 25 bp, Homo sapien
gaagcttatctcgtaactacagcaa

SEQ ID NO: 3060371 - DNA, 25 bp, Homo sapien
ttactttcccgaaggaagaggagca

SEQ ID NO: 3060372 - DNA, 25 bp, Homo sapien
ctacagcaatgatcactgagagtac

SEQ ID NO: 3060373 - DNA, 25 bp, Homo sapien
tcagttcggataggagtcaggtgtc

SEQ ID NO: 3060374 - DNA, 25 bp, Homo sapien
tagagggacccaggagaaactctgc

SEQ ID NO: 3060375 - DNA, 25 bp, Homo sapien
catttgtggagctcccgttctgcca

SEQ ID NO: 3060376 - DNA, 25 bp, Homo sapien
gagcatcaactagatcctggccctg

SEQ ID NO: 3060377 - DNA, 25 bp, Homo sapien
tcatatcaaccctaggagatggaca

SEQ ID NO: 3060378 - DNA, 25 bp, Homo sapien
tgcacctggtctaaactaaggcttc

SEQ ID NO: 3060379 - DNA, 25 bp, Homo sapien
taactgtccaaggatcaagctaaca

SEQ ID NO: 3060380 - DNA, 25 bp, Homo sapien
tgcttcctgccaaacccagttggta

SEQ ID NO: 3060381 - DNA, 25 bp, Homo sapien
ccaagtcaagttagtggcctggcta

SEQ ID NO: 3060382 - DNA, 25 bp, Homo sapien
tctagccagtcatgtgagcatcacc

SEQ ID NO: 3060383 - DNA, 25 bp, Homo sapien
gagaagagaaattacgggtcaccca

SEQ ID NO: 3060384 - DNA, 25 bp, Homo sapien
ggtgccaattttagctctcagcagg

SEQ ID NO: 3060385 - DNA, 25 bp, Homo sapien
aagtgagacgtttgctgctctggtc

SEQ ID NO: 3060386 - DNA, 25 bp, Homo sapien
atttaaagtgagacgtttgctgctc

SEQ ID NO: 3060387 - DNA, 25 bp, Homo sapien
aaatttaaagtgagacgtttgctgc

SEQ ID NO: 3060388 - DNA, 25 bp, Homo sapien
taaagtgagacgtttgctgctctgg

SEQ ID NO: 3060389 - DNA, 25 bp, Homo sapien
tccagaagagggctgtgaaaaggac

SEQ ID NO: 3060390 - DNA, 25 bp, Homo sapien
catggtggaccgaagtctgttagtc

SEQ ID NO: 3060391 - DNA, 25 bp, Homo sapien
tggaaatgctgaccctttgttaaga

SEQ ID NO: 3060392 - DNA, 25 bp, Homo sapien
gagccaacaggacatataggatccc

SEQ ID NO: 3060393 - DNA, 25 bp, Homo sapien
tgggcttgtgaacgttgcagtatct

SEQ ID NO: 3060394 - DNA, 25 bp, Homo sapien
gggcttgtgaacgttgcagtatctt

SEQ ID NO: 3060395 - DNA, 25 bp, Homo sapien
aaaccccatctctagccgggtgtgg

SEQ ID NO: 3060396 - DNA, 25 bp, Homo sapien
tactcgggaggctgaggcaggagaa

SEQ ID NO: 3060397 - DNA, 25 bp, Homo sapien
atcgcttgaacccgggaggcggagg

SEQ ID NO: 3060398 - DNA, 25 bp, Homo sapien
tggcatacgcctgtagtcccaggta

SEQ ID NO: 3060399 - DNA, 25 bp, Homo sapien
tacagttttccacttgatatggggg

SEQ ID NO: 3060400 - DNA, 25 bp, Homo sapien
gatatgggggtgtaataacaacttc

SEQ ID NO: 3060401 - DNA, 25 bp, Homo sapien
ttttccacttgatatgggggtgtaa

SEQ ID NO: 3060402 - DNA, 25 bp, Homo sapien
tccacttgatatgggggtgtaataa

SEQ ID NO: 3060403 - DNA, 25 bp, Homo sapien
accacagcctcaaacagctctgatg

SEQ ID NO: 3060404 - DNA, 25 bp, Homo sapien
agcctcaaacagctctgatgccagc

SEQ ID NO: 3060405 - DNA, 25 bp, Homo sapien
cagcctcaaacagctctgatgccag

SEQ ID NO: 3060406 - DNA, 25 bp, Homo sapien
cacagcctcaaacagctctgatgcc

SEQ ID NO: 3060407 - DNA, 25 bp, Homo sapien
gattgcataggcctggctcagcttc

SEQ ID NO: 3060408 - DNA, 25 bp, Homo sapien
gagctgctggccctctagagagaca

SEQ ID NO: 3060409 - DNA, 25 bp, Homo sapien
agcactgattgcataggcctggctc

SEQ ID NO: 3060410 - DNA, 25 bp, Homo sapien
ctgctggccctctagagagacacca

SEQ ID NO: 3060411 - DNA, 25 bp, Homo sapien
ggagtttccttgaatcttgctttcc

SEQ ID NO: 3060412 - DNA, 25 bp, Homo sapien
ttgctttccaaacaatgccttaaga

SEQ ID NO: 3060413 - DNA, 25 bp, Homo sapien
tgcaacctaaggaggagtttccttg

SEQ ID NO: 3060414 - DNA, 25 bp, Homo sapien
gaaaatctgaagtcggccagcgctg

SEQ ID NO: 3060415 - DNA, 25 bp, Homo sapien
gacaggctgagtaacaatgacacac

SEQ ID NO: 3060416 - DNA, 25 bp, Homo sapien
tgctaaatgatgtaagggagcactt

SEQ ID NO: 3060417 - DNA, 25 bp, Homo sapien
ccaaaataccagttgtgcaagtgca

SEQ ID NO: 3060418 - DNA, 25 bp, Homo sapien
caaaggagaatggactagacaattc

SEQ ID NO: 3060419 - DNA, 25 bp, Homo sapien
ttgatagttctaaatctgccaccta

SEQ ID NO: 3060420 - DNA, 25 bp, Homo sapien
gtttgatagttctaaatctgccacc

SEQ ID NO: 3060421 - DNA, 25 bp, Homo sapien
cggccctaatgtttgatagttctaa

SEQ ID NO: 3060422 - DNA, 25 bp, Homo sapien
cagcgcccggccctaatgtttgata

SEQ ID NO: 3060423 - DNA, 25 bp, Homo sapien
actccaggctgggcaacaagagcga

SEQ ID NO: 3060424 - DNA, 25 bp, Homo sapien
tccaggctgggcaacaagagcgaaa

SEQ ID NO: 3060425 - DNA, 25 bp, Homo sapien
tgagaccgtgccattgaactccagg

SEQ ID NO: 3060426 - DNA, 25 bp, Homo sapien
caggctgggcaacaagagcgaaact

SEQ ID NO: 3060427 - DNA, 25 bp, Homo sapien
agtgcagagcgggtctcaccatatt

SEQ ID NO: 3060428 - DNA, 25 bp, Homo sapien
actcccaacaaatgtgagattctgg

SEQ ID NO: 3060429 - DNA, 25 bp, Homo sapien
tatcactaagttaaatgctgctgtc

SEQ ID NO: 3060430 - DNA, 25 bp, Homo sapien
ttggacatatgaccactagtgcaga

SEQ ID NO: 3060431 - DNA, 25 bp, Homo sapien
aaatagacaacaatgtatcactaag

SEQ ID NO: 3060432 - DNA, 25 bp, Homo sapien
cactaagactcaatgagactcatct

SEQ ID NO: 3060433 - DNA, 25 bp, Homo sapien
actcatctttcccaccattttagag

SEQ ID NO: 3060434 - DNA, 25 bp, Homo sapien
atctttcccaccattttagagagcc

SEQ ID NO: 3060435 - DNA, 25 bp, Homo sapien
tgtaagtttatgagcaagatgtctg

SEQ ID NO: 3060436 - DNA, 25 bp, Homo sapien
tactgtaagtttatgagcaagatgt

SEQ ID NO: 3060437 - DNA, 25 bp, Homo sapien
ttatgagcaagatgtctgcatggtt

SEQ ID NO: 3060438 - DNA, 25 bp, Homo sapien
gcaagatgtctgcatggttgggctt

SEQ ID NO: 3060439 - DNA, 25 bp, Homo sapien
ccggcccggactcgggcttcacgca

SEQ ID NO: 3060440 - DNA, 25 bp, Homo sapien
tcgggcttcacgcagggaaggatac

SEQ ID NO: 3060441 - DNA, 25 bp, Homo sapien
ccggactcgggcttcacgcagggaa

SEQ ID NO: 3060442 - DNA, 25 bp, Homo sapien
actcgggcttcacgcagggaaggat

SEQ ID NO: 3060443 - DNA, 25 bp, Homo sapien
tggattggtagtcaaaggctaccac

SEQ ID NO: 3060444 - DNA, 25 bp, Homo sapien
gcattttggattggtagtcaaaggc

SEQ ID NO: 3060445 - DNA, 25 bp, Homo sapien
tttggattggtagtcaaaggctacc

SEQ ID NO: 3060446 - DNA, 25 bp, Homo sapien
cattttggattggtagtcaaaggct

SEQ ID NO: 3060447 - DNA, 25 bp, Homo sapien
tgctcctggcacgtccggcacgaca

SEQ ID NO: 3060448 - DNA, 25 bp, Homo sapien
acgacacctggctcccaacgctgaa

SEQ ID NO: 3060449 - DNA, 25 bp, Homo sapien
cgctgaagtactcgcccggaggagc

SEQ ID NO: 3060450 - DNA, 25 bp, Homo sapien
ggcacgtccggcacgacacctggct

SEQ ID NO: 3060451 - DNA, 25 bp, Homo sapien
cgcgcacggagcgtgcttgcgtcac

SEQ ID NO: 3060452 - DNA, 25 bp, Homo sapien
cggagcgtgcttgcgtcacacgccg

SEQ ID NO: 3060453 - DNA, 25 bp, Homo sapien
gcgacggcgcgcacggagcgtgctt

SEQ ID NO: 3060454 - DNA, 25 bp, Homo sapien
agtgagcgccgcgacgcgacggcgc

SEQ ID NO: 3060455 - DNA, 25 bp, Homo sapien
cacaactagcaaaaacagtctgcct

SEQ ID NO: 3060456 - DNA, 25 bp, Homo sapien
tagactaaacttgtccacggttcca

SEQ ID NO: 3060457 - DNA, 25 bp, Homo sapien
ttcttgagcatctaacagccctttg

SEQ ID NO: 3060458 - DNA, 25 bp, Homo sapien
cagccctttgaggtaggaatcaatg

SEQ ID NO: 3060459 - DNA, 25 bp, Homo sapien
gttgactgcactggccctcatgcta

SEQ ID NO: 3060460 - DNA, 25 bp, Homo sapien
actgcactggccctcatgctaggca

SEQ ID NO: 3060461 - DNA, 25 bp, Homo sapien
tctatgggttgactgcactggccct

SEQ ID NO: 3060462 - DNA, 25 bp, Homo sapien
tcatgctaggcaccagcctcatcta

SEQ ID NO: 3060463 - DNA, 25 bp, Homo sapien
agtggatacacgtggatagccggcc

SEQ ID NO: 3060464 - DNA, 25 bp, Homo sapien
aagaccagcgggttcttgcaacact

SEQ ID NO: 3060465 - DNA, 25 bp, Homo sapien
gaaatggccagaagatagcctgcct

SEQ ID NO: 3060466 - DNA, 25 bp, Homo sapien
tggtcttagccccaaagatgggcct

SEQ ID NO: 3060467 - DNA, 25 bp, Homo sapien
ttaaagacagtagtggatcctccag

SEQ ID NO: 3060468 - DNA, 25 bp, Homo sapien
gtttacatgagaaccagaccagcca

SEQ ID NO: 3060469 - DNA, 25 bp, Homo sapien
cacaagcacactatgaaccgatggt

SEQ ID NO: 3060470 - DNA, 25 bp, Homo sapien
cacagagaggcctagtacactgagc

SEQ ID NO: 3060471 - DNA, 25 bp, Homo sapien
aacaaaatcacaatggtgaagccca

SEQ ID NO: 3060472 - DNA, 25 bp, Homo sapien
caaaatcacaatggtgaagcccaga

SEQ ID NO: 3060473 - DNA, 25 bp, Homo sapien
aatcacaatggtgaagcccagaggg

SEQ ID NO: 3060474 - DNA, 25 bp, Homo sapien
cacaatggtgaagcccagagggatg

SEQ ID NO: 3060475 - DNA, 25 bp, Homo sapien
cacagggcaggctcctgctccatgg

SEQ ID NO: 3060476 - DNA, 25 bp, Homo sapien
ctcctgctccatgggctcctctgcc

SEQ ID NO: 3060477 - DNA, 25 bp, Homo sapien
tcacagggcaggctcctgctccatg

SEQ ID NO: 3060478 - DNA, 25 bp, Homo sapien
ctgctccatgggctcctctgccggc

SEQ ID NO: 3060479 - DNA, 25 bp, Homo sapien
gggcaagcacaggggagggtattga

SEQ ID NO: 3060480 - DNA, 25 bp, Homo sapien
caagcacaggggagggtattgagtg

SEQ ID NO: 3060481 - DNA, 25 bp, Homo sapien
agaggtggtgcgggttgctgcttac

SEQ ID NO: 3060482 - DNA, 25 bp, Homo sapien
gtattgagtggggcgcaccagcagg

SEQ ID NO: 3060483 - DNA, 25 bp, Homo sapien
aggccatggcgctcacagtctcggc

SEQ ID NO: 3060484 - DNA, 25 bp, Homo sapien
accggcccagaccagcggcgaactt

SEQ ID NO: 3060485 - DNA, 25 bp, Homo sapien
ctgcttgggcctctcgcagggaccg

SEQ ID NO: 3060486 - DNA, 25 bp, Homo sapien
cagcaaggccatggcgctcacagtc

SEQ ID NO: 3060487 - DNA, 25 bp, Homo sapien
ctggtgctcccacaagctccgtgcc

SEQ ID NO: 3060488 - DNA, 25 bp, Homo sapien
gagcccctctacgtgtcctcacgca

SEQ ID NO: 3060489 - DNA, 25 bp, Homo sapien
cagcctgagcccctctacgtgtcct

SEQ ID NO: 3060490 - DNA, 25 bp, Homo sapien
gcagaggacacccacatgaacagtc

SEQ ID NO: 3060491 - DNA, 25 bp, Homo sapien
tagcgtggccactgcgttgatgttg

SEQ ID NO: 3060492 - DNA, 25 bp, Homo sapien
gccactgcgttgatgttgggctttt

SEQ ID NO: 3060493 - DNA, 25 bp, Homo sapien
tctggatctcgatgactttctctag

SEQ ID NO: 3060494 - DNA, 25 bp, Homo sapien
tgactttctctagcgtggccactgc

SEQ ID NO: 3060495 - DNA, 25 bp, Homo sapien
ctgcaagactgcctcatccaagggc

SEQ ID NO: 3060496 - DNA, 25 bp, Homo sapien
acactgagcagagccgagacacaag

SEQ ID NO: 3060497 - DNA, 25 bp, Homo sapien
gccgagacacaagcctcagaggcat

SEQ ID NO: 3060498 - DNA, 25 bp, Homo sapien
tcacagatggcggtcaagtcatggc

SEQ ID NO: 3060499 - DNA, 25 bp, Homo sapien
tcagaggcatcacagatggcggtca

SEQ ID NO: 3060500 - DNA, 25 bp, Homo sapien
ctccctccagggccagcaccacccg

SEQ ID NO: 3060501 - DNA, 25 bp, Homo sapien
tccagggccagcaccacccggcccc

SEQ ID NO: 3060502 - DNA, 25 bp, Homo sapien
cctccagggccagcaccacccggcc

SEQ ID NO: 3060503 - DNA, 25 bp, Homo sapien
tccctccagggccagcaccacccgg

SEQ ID NO: 3060504 - DNA, 25 bp, Homo sapien
tttgaggatgggtgaagggaggaag

SEQ ID NO: 3060505 - DNA, 25 bp, Homo sapien
gaagggaggaagaagaaatggcgaa

SEQ ID NO: 3060506 - DNA, 25 bp, Homo sapien
ctttgaggatgggtgaagggaggaa

SEQ ID NO: 3060507 - DNA, 25 bp, Homo sapien
ggtgaagggaggaagaagaaatggc

SEQ ID NO: 3060508 - DNA, 25 bp, Homo sapien
gaactcgtgggcaatgggcatcacc

SEQ ID NO: 3060509 - DNA, 25 bp, Homo sapien
ttcaacagcatcaaacccggcggag

SEQ ID NO: 3060510 - DNA, 25 bp, Homo sapien
gagactaggaccacatcaggtgaga

SEQ ID NO: 3060511 - DNA, 25 bp, Homo sapien
aggtgagaactcgtgggcaatgggc

SEQ ID NO: 3060512 - DNA, 25 bp, Homo sapien
ctgcaaagggatggctcaagctgag

SEQ ID NO: 3060513 - DNA, 25 bp, Homo sapien
tgaaggctgtaaggtactccacgtc

SEQ ID NO: 3060514 - DNA, 25 bp, Homo sapien
taaggtactccacgtctccaatggg

SEQ ID NO: 3060515 - DNA, 25 bp, Homo sapien
cacattgtaccccacgcctggtcct

SEQ ID NO: 3060516 - DNA, 25 bp, Homo sapien
cctcctgtccatgccacgttcacat

SEQ ID NO: 3060517 - DNA, 25 bp, Homo sapien
ggtcattgtagaacgcctgctgggt

SEQ ID NO: 3060518 - DNA, 25 bp, Homo sapien
gctgggtgccattgccatggtgaat

SEQ ID NO: 3060519 - DNA, 25 bp, Homo sapien
tgtcatagcgatgcagagagatgta

SEQ ID NO: 3060520 - DNA, 25 bp, Homo sapien
aagttcccgttgtcatagcgatgca

SEQ ID NO: 3060521 - DNA, 25 bp, Homo sapien
gccacagggcatccatattctgttc

SEQ ID NO: 3060522 - DNA, 25 bp, Homo sapien
taaatgtggcatatctccctacaga

SEQ ID NO: 3060523 - DNA, 25 bp, Homo sapien
gttcacaatggtattgcacacccca

SEQ ID NO: 3060524 - DNA, 25 bp, Homo sapien
tagaagcatcgggaaaatggcccgc

SEQ ID NO: 3060525 - DNA, 25 bp, Homo sapien
cgttcttactactcgaggtggccat

SEQ ID NO: 3060526 - DNA, 25 bp, Homo sapien
tatcggctactagcaatggcggcag

SEQ ID NO: 3060527 - DNA, 25 bp, Homo sapien
gcttgaaactgcaacgtgagggcca

SEQ ID NO: 3060528 - DNA, 25 bp, Homo sapien
caagagattttgtccttcctgaggc

SEQ ID NO: 3060529 - DNA, 25 bp, Homo sapien
agttttgcggtgatggctacagagt

SEQ ID NO: 3060530 - DNA, 25 bp, Homo sapien
tgatggctacagagttgaagaagca

SEQ ID NO: 3060531 - DNA, 25 bp, Homo sapien
ttgcggtgatggctacagagttgaa

SEQ ID NO: 3060532 - DNA, 25 bp, Homo sapien
gaccttgcccacgttcaacttctgc

SEQ ID NO: 3060533 - DNA, 25 bp, Homo sapien
ggggccggatgatggcaaatccatt

SEQ ID NO: 3060534 - DNA, 25 bp, Homo sapien
tggctgtggattcctcggcgtggtg

SEQ ID NO: 3060535 - DNA, 25 bp, Homo sapien
ctgtggattcctcggcgtggtgtcc

SEQ ID NO: 3060536 - DNA, 25 bp, Homo sapien
cctgggggccggatgatggcaaatc

SEQ ID NO: 3060537 - DNA, 25 bp, Homo sapien
cactggaggagtgcatctcattcca

SEQ ID NO: 3060538 - DNA, 25 bp, Homo sapien
actgccatgcgcacagcactggagg

SEQ ID NO: 3060539 - DNA, 25 bp, Homo sapien
tgcgcacagcactggaggagtgcat

SEQ ID NO: 3060540 - DNA, 25 bp, Homo sapien
aggcagcccactgccatgcgcacag

SEQ ID NO: 3060541 - DNA, 25 bp, Homo sapien
ccgatgcccccacaaggcagcacag

SEQ ID NO: 3060542 - DNA, 25 bp, Homo sapien
ggcagcacagcatacatcttctggc

SEQ ID NO: 3060543 - DNA, 25 bp, Homo sapien
ccccacaaggcagcacagcatacat

SEQ ID NO: 3060544 - DNA, 25 bp, Homo sapien
caaggcagcacagcatacatcttct

SEQ ID NO: 3060545 - DNA, 25 bp, Homo sapien
cgagcaacttcttgctgtctagctt

SEQ ID NO: 3060546 - DNA, 25 bp, Homo sapien
gggactggtcccatagagcagggtg

SEQ ID NO: 3060547 - DNA, 25 bp, Homo sapien
cagggtgtggtattcagagtgcact

SEQ ID NO: 3060548 - DNA, 25 bp, Homo sapien
gtctggatctcatctagcgtggctt

SEQ ID NO: 3060549 - DNA, 25 bp, Homo sapien
aaacaggctgcaagggatggaacgg

SEQ ID NO: 3060550 - DNA, 25 bp, Homo sapien
ggatcagtaagaggggtcacacaaa

SEQ ID NO: 3060551 - DNA, 25 bp, Homo sapien
caaaggctggatttaagttgagagc

SEQ ID NO: 3060552 - DNA, 25 bp, Homo sapien
catgaagagaggcttatctaacagg

SEQ ID NO: 3060553 - DNA, 25 bp, Homo sapien
catgcactggtgctttagcatgaac

SEQ ID NO: 3060554 - DNA, 25 bp, Homo sapien
tagcatgaacgtgtcgtagaccaca

SEQ ID NO: 3060555 - DNA, 25 bp, Homo sapien
ctcgcacttgctaagcaggcctgtc

SEQ ID NO: 3060556 - DNA, 25 bp, Homo sapien
ggtgcacgtgtgtgttcccgcacat

SEQ ID NO: 3060557 - DNA, 25 bp, Homo sapien
ctgggccacagacctatgtgtcagc

SEQ ID NO: 3060558 - DNA, 25 bp, Homo sapien
cagggctcatggagctgtctccaac

SEQ ID NO: 3060559 - DNA, 25 bp, Homo sapien
tgggccacagacctatgtgtcagcc

SEQ ID NO: 3060560 - DNA, 25 bp, Homo sapien
tgaagaggtgcttgacgggctggtc

SEQ ID NO: 3060561 - DNA, 25 bp, Homo sapien
tggtgaagaggtgcttgacgggctg

SEQ ID NO: 3060562 - DNA, 25 bp, Homo sapien
gtctggggggctcttcatgccccca

SEQ ID NO: 3060563 - DNA, 25 bp, Homo sapien
aagaggtgcttgacgggctggtctg

SEQ ID NO: 3060564 - DNA, 25 bp, Homo sapien
gcctggtacacctgcaaaggctgca

SEQ ID NO: 3060565 - DNA, 25 bp, Homo sapien
gcgcctggtacacctgcaaaggctg

SEQ ID NO: 3060566 - DNA, 25 bp, Homo sapien
gggcgcctggtacacctgcaaaggc

SEQ ID NO: 3060567 - DNA, 25 bp, Homo sapien
ctgaggggcgcctggtacacctgca

SEQ ID NO: 3060568 - DNA, 25 bp, Homo sapien
ttttttgtatccagcaccaggctcc

SEQ ID NO: 3060569 - DNA, 25 bp, Homo sapien
ctcctccaagtcgggcccctcctca

SEQ ID NO: 3060570 - DNA, 25 bp, Homo sapien
tcagcaccactctcgccctcctcgt

SEQ ID NO: 3060571 - DNA, 25 bp, Homo sapien
caggctcctccaagtcgggcccctc

SEQ ID NO: 3060572 - DNA, 25 bp, Homo sapien
ctcctccccatcgtcttcctcgtcc

SEQ ID NO: 3060573 - DNA, 25 bp, Homo sapien
cctcctccaggtcttcctgtgtgct

SEQ ID NO: 3060574 - DNA, 25 bp, Homo sapien
tcctccaggtcttcctgtgtgctct

SEQ ID NO: 3060575 - DNA, 25 bp, Homo sapien
tcctcctccccatcgtcttcctcgt

SEQ ID NO: 3060576 - DNA, 25 bp, Homo sapien
tcccggggcatggtcagggctccct

SEQ ID NO: 3060577 - DNA, 25 bp, Homo sapien
cctcccggggcatggtcagggctcc

SEQ ID NO: 3060578 - DNA, 25 bp, Homo sapien
ctgtggagccctcccggggcatggt

SEQ ID NO: 3060579 - DNA, 25 bp, Homo sapien
gccctcccggggcatggtcagggct

SEQ ID NO: 3060580 - DNA, 25 bp, Homo sapien
gtgggtggtgggctgcctgggcagc

SEQ ID NO: 3060581 - DNA, 25 bp, Homo sapien
ctgctgctccgtcagctcctcctct

SEQ ID NO: 3060582 - DNA, 25 bp, Homo sapien
ctgggcagctcccctgtcttggtga

SEQ ID NO: 3060583 - DNA, 25 bp, Homo sapien
gcagctcccctgtcttggtgaggat

SEQ ID NO: 3060584 - DNA, 25 bp, Homo sapien
gccgatgccgcgggagcttgcctac

SEQ ID NO: 3060585 - DNA, 25 bp, Homo sapien
tctgcggcagcggtgaggactgagt

SEQ ID NO: 3060586 - DNA, 25 bp, Homo sapien
gctgttgttgcatgaccagctgctg

SEQ ID NO: 3060587 - DNA, 25 bp, Homo sapien
ttgttgcatgaccagctgctgcagg

SEQ ID NO: 3060588 - DNA, 25 bp, Homo sapien
gctggtggccacacgttcacccgtc

SEQ ID NO: 3060589 - DNA, 25 bp, Homo sapien
gccacacgttcacccgtcactagtg

SEQ ID NO: 3060590 - DNA, 25 bp, Homo sapien
tcacccgtcactagtggggactgcc

SEQ ID NO: 3060591 - DNA, 25 bp, Homo sapien
cacgttcacccgtcactagtgggga

SEQ ID NO: 3060592 - DNA, 25 bp, Homo sapien
gaggcatgcccgtgggggctcccgt

SEQ ID NO: 3060593 - DNA, 25 bp, Homo sapien
gctccagcaacagcacatgctgcag

SEQ ID NO: 3060594 - DNA, 25 bp, Homo sapien
gggtgctctgctgccgggcctgctc

SEQ ID NO: 3060595 - DNA, 25 bp, Homo sapien
cagcaatgagggtgctctgctgccg

SEQ ID NO: 3060596 - DNA, 25 bp, Homo sapien
gtgctcatgaacttgccggtcagcg

SEQ ID NO: 3060597 - DNA, 25 bp, Homo sapien
ccaggaatagaggatgtgctcatga

SEQ ID NO: 3060598 - DNA, 25 bp, Homo sapien
atgaacttgccggtcagcgtgccac

SEQ ID NO: 3060599 - DNA, 25 bp, Homo sapien
gcagccaggaatagaggatgtgctc

SEQ ID NO: 3060600 - DNA, 25 bp, Homo sapien
agttggtgacagtgaccgtggcctg

SEQ ID NO: 3060601 - DNA, 25 bp, Homo sapien
gacgtgtagaggctgaactggttgg

SEQ ID NO: 3060602 - DNA, 25 bp, Homo sapien
gtgacagtgaccgtggcctgcagcc

SEQ ID NO: 3060603 - DNA, 25 bp, Homo sapien
ggagacgtgtagaggctgaactggt

SEQ ID NO: 3060604 - DNA, 25 bp, Homo sapien
ggtgcgctgttacacacggacgacg

SEQ ID NO: 3060605 - DNA, 25 bp, Homo sapien
ccgggtgcgctgttacacacggacg

SEQ ID NO: 3060606 - DNA, 25 bp, Homo sapien
agccgggtgcgctgttacacacgga

SEQ ID NO: 3060607 - DNA, 25 bp, Homo sapien
gggtgcgctgttacacacggacgac

SEQ ID NO: 3060608 - DNA, 25 bp, Homo sapien
taggagaagtggctgtcacctgggc

SEQ ID NO: 3060609 - DNA, 25 bp, Homo sapien
ggagaagtggctgtcacctgggcct

SEQ ID NO: 3060610 - DNA, 25 bp, Homo sapien
gagaagtggctgtcacctgggcctg

SEQ ID NO: 3060611 - DNA, 25 bp, Homo sapien
ctataggagaagtggctgtcacctg

SEQ ID NO: 3060612 - DNA, 25 bp, Homo sapien
ctgtgaactacccccgacccctgat

SEQ ID NO: 3060613 - DNA, 25 bp, Homo sapien
cctgattcccagaccctcagaacag

SEQ ID NO: 3060614 - DNA, 25 bp, Homo sapien
ccctgattcccagaccctcagaaca

SEQ ID NO: 3060615 - DNA, 25 bp, Homo sapien
tcagaacaggtacatgagagcagcc

SEQ ID NO: 3060616 - DNA, 25 bp, Homo sapien
gtgctaataacagtcccatccttgc

SEQ ID NO: 3060617 - DNA, 25 bp, Homo sapien
gccttgaacgcactttcaagttggg

SEQ ID NO: 3060618 - DNA, 25 bp, Homo sapien
tctgttttagccttgaacgcacttt

SEQ ID NO: 3060619 - DNA, 25 bp, Homo sapien
aacagtcccatccttgcgacgcagg

SEQ ID NO: 3060620 - DNA, 25 bp, Homo sapien
tcgactgtcgtagggcccaggcaaa

SEQ ID NO: 3060621 - DNA, 25 bp, Homo sapien
gaagtcgtctcgactgtcgtagggc

SEQ ID NO: 3060622 - DNA, 25 bp, Homo sapien
tcgtctcgactgtcgtagggcccag

SEQ ID NO: 3060623 - DNA, 25 bp, Homo sapien
cagtttgtaggagggaggcgtccca

SEQ ID NO: 3060624 - DNA, 25 bp, Homo sapien
ctggtccaaagaagcatggtgggct

SEQ ID NO: 3060625 - DNA, 25 bp, Homo sapien
ctttgacttcgacaagaggaattcc

SEQ ID NO: 3060626 - DNA, 25 bp, Homo sapien
gtgggctcctttgacttcgacaaga

SEQ ID NO: 3060627 - DNA, 25 bp, Homo sapien
tcagctttacctcagtgctggcaat

SEQ ID NO: 3060628 - DNA, 25 bp, Homo sapien
ggagggaatggttgaggccgcctgg

SEQ ID NO: 3060629 - DNA, 25 bp, Homo sapien
ctgcaggacagggcacaactgacct

SEQ ID NO: 3060630 - DNA, 25 bp, Homo sapien
acagggcacaactgacctggctgct

SEQ ID NO: 3060631 - DNA, 25 bp, Homo sapien
gcaggacagggcacaactgacctgg

SEQ ID NO: 3060632 - DNA, 25 bp, Homo sapien
ggacagggcacaactgacctggctg

SEQ ID NO: 3060633 - DNA, 25 bp, Homo sapien
ttctccttgttccgcaggatgagca

SEQ ID NO: 3060634 - DNA, 25 bp, Homo sapien
tcttctccttgttccgcaggatgag

SEQ ID NO: 3060635 - DNA, 25 bp, Homo sapien
gaactcagcgaacaggagctgcttc

SEQ ID NO: 3060636 - DNA, 25 bp, Homo sapien
ggacctcatgctgccttgtcaggtg

SEQ ID NO: 3060637 - DNA, 25 bp, Homo sapien
ctggaactcagcgaacaggagctgc

SEQ ID NO: 3060638 - DNA, 25 bp, Homo sapien
gtcaggtggtcatgctgtttctgga

SEQ ID NO: 3060639 - DNA, 25 bp, Homo sapien
ccgcagtgtggggtccacagagccc

SEQ ID NO: 3060640 - DNA, 25 bp, Homo sapien
agccccccgtagctccacagggctg

SEQ ID NO: 3060641 - DNA, 25 bp, Homo sapien
cagagccccccgtagctccacaggg

SEQ ID NO: 3060642 - DNA, 25 bp, Homo sapien
agggctggggctgcctccaccccca

SEQ ID NO: 3060643 - DNA, 25 bp, Homo sapien
cacagggctggggctgcctccaccc

SEQ ID NO: 3060644 - DNA, 25 bp, Homo sapien
ctcttggcagcaccggcttcacctc

SEQ ID NO: 3060645 - DNA, 25 bp, Homo sapien
tggctcttggcagcaccggcttcac

SEQ ID NO: 3060646 - DNA, 25 bp, Homo sapien
gctcttggcagcaccggcttcacct

SEQ ID NO: 3060647 - DNA, 25 bp, Homo sapien
ggctcttggcagcaccggcttcacc

SEQ ID NO: 3060648 - DNA, 25 bp, Homo sapien
tatatagagtgagccaaacagcagc

SEQ ID NO: 3060649 - DNA, 25 bp, Homo sapien
tcctttgctggattatctcctttca

SEQ ID NO: 3060650 - DNA, 25 bp, Homo sapien
ggctgggagtcaagactcgcttcct

SEQ ID NO: 3060651 - DNA, 25 bp, Homo sapien
taccctgaaaatgccgctatatata

SEQ ID NO: 3060652 - DNA, 25 bp, Homo sapien
tgccctgtggttgccaggacaactg

SEQ ID NO: 3060653 - DNA, 25 bp, Homo sapien
gaaggggaaggcaggataccactgc

SEQ ID NO: 3060654 - DNA, 25 bp, Homo sapien
gccacatgtgcagaagtggccagat

SEQ ID NO: 3060655 - DNA, 25 bp, Homo sapien
agagggtggggttacacatactcat

SEQ ID NO: 3060656 - DNA, 25 bp, Homo sapien
gagccacatgtgcagaagtggccag

SEQ ID NO: 3060657 - DNA, 25 bp, Homo sapien
ccagagggtggggttacacatactc

SEQ ID NO: 3060658 - DNA, 25 bp, Homo sapien
gcagcagttgccatcagcaccaagc

SEQ ID NO: 3060659 - DNA, 25 bp, Homo sapien
cagcagttgccatcagcaccaagca

SEQ ID NO: 3060660 - DNA, 25 bp, Homo sapien
agcagttgccatcagcaccaagcac

SEQ ID NO: 3060661 - DNA, 25 bp, Homo sapien
tttcccatcccgctgggtctgcctc

SEQ ID NO: 3060662 - DNA, 25 bp, Homo sapien
acacttctttcccatcccgctgggt

SEQ ID NO: 3060663 - DNA, 25 bp, Homo sapien
ttctgtggtagattcttcaggcagc

SEQ ID NO: 3060664 - DNA, 25 bp, Homo sapien
gcagcatgagggagagcctggtcct

SEQ ID NO: 3060665 - DNA, 25 bp, Homo sapien
gggaaaagctcttgttcctgtcctg

SEQ ID NO: 3060666 - DNA, 25 bp, Homo sapien
gaaaagctcttgttcctgtcctggc

SEQ ID NO: 3060667 - DNA, 25 bp, Homo sapien
ggaaaagctcttgttcctgtcctgg

SEQ ID NO: 3060668 - DNA, 25 bp, Homo sapien
agctcttctggctctctgtcttctc

SEQ ID NO: 3060669 - DNA, 25 bp, Homo sapien
atggaggacccagggcttaatccca

SEQ ID NO: 3060670 - DNA, 25 bp, Homo sapien
gaggacccagggcttaatcccagct

SEQ ID NO: 3060671 - DNA, 25 bp, Homo sapien
tcttctggctctctgtcttctcccc

SEQ ID NO: 3060672 - DNA, 25 bp, Homo sapien
gctgtgtgcatggacacagttaatc

SEQ ID NO: 3060673 - DNA, 25 bp, Homo sapien
cagctgtgtgcatggacacagttaa

SEQ ID NO: 3060674 - DNA, 25 bp, Homo sapien
tgtgcatggacacagttaatctgat

SEQ ID NO: 3060675 - DNA, 25 bp, Homo sapien
tgtgtgcatggacacagttaatctg

SEQ ID NO: 3060676 - DNA, 25 bp, Homo sapien
agctatcaacactgtcctaaaacag

SEQ ID NO: 3060677 - DNA, 25 bp, Homo sapien
taccatgtccagtaagttccttaac

SEQ ID NO: 3060678 - DNA, 25 bp, Homo sapien
caattatacaccacagctatcaaca

SEQ ID NO: 3060679 - DNA, 25 bp, Homo sapien
taaaacagatatggcaagggccggg

SEQ ID NO: 3060680 - DNA, 25 bp, Homo sapien
tttttcagccataggatcttgcatc

SEQ ID NO: 3060681 - DNA, 25 bp, Homo sapien
ccatccaaagaagcttccctggaca

SEQ ID NO: 3060682 - DNA, 25 bp, Homo sapien
tcagccataggatcttgcatcctgt

SEQ ID NO: 3060683 - DNA, 25 bp, Homo sapien
gcttccctggacacctgctttttca

SEQ ID NO: 3060684 - DNA, 25 bp, Homo sapien
agcatggaccaagccaccactctga

SEQ ID NO: 3060685 - DNA, 25 bp, Homo sapien
gcatggaccaagccaccactctgaa

SEQ ID NO: 3060686 - DNA, 25 bp, Homo sapien
tgccagcatggaccaagccaccact

SEQ ID NO: 3060687 - DNA, 25 bp, Homo sapien
ccagcatggaccaagccaccactct

SEQ ID NO: 3060688 - DNA, 25 bp, Homo sapien
cccctctgaccacagtgccaactag

SEQ ID NO: 3060689 - DNA, 25 bp, Homo sapien
cagtgccaactaggccaggatcctc

SEQ ID NO: 3060690 - DNA, 25 bp, Homo sapien
acagtgccaactaggccaggatcct

SEQ ID NO: 3060691 - DNA, 25 bp, Homo sapien
tctgaccacagtgccaactaggcca

SEQ ID NO: 3060692 - DNA, 25 bp, Homo sapien
ccaaggatggttcccgacctgacat

SEQ ID NO: 3060693 - DNA, 25 bp, Homo sapien
gaagtccgcggcaggatttccaagg

SEQ ID NO: 3060694 - DNA, 25 bp, Homo sapien
caggatttccaaggatggttcccga

SEQ ID NO: 3060695 - DNA, 25 bp, Homo sapien
acagggatgctgtgcagagaagtcc

SEQ ID NO: 3060696 - DNA, 25 bp, Homo sapien
tgtctcatagatggtctgcagcatc

SEQ ID NO: 3060697 - DNA, 25 bp, Homo sapien
actgccgacgggacccacactgtag

SEQ ID NO: 3060698 - DNA, 25 bp, Homo sapien
ccacactgtagggaagtgcctcatc

SEQ ID NO: 3060699 - DNA, 25 bp, Homo sapien
gagcagaccgaagggaaggtggtcg

SEQ ID NO: 3060700 - DNA, 25 bp, Homo sapien
tctagaggggcatccgaccaccagc

SEQ ID NO: 3060701 - DNA, 25 bp, Homo sapien
tatggctgagcacttgggacaggaa

SEQ ID NO: 3060702 - DNA, 25 bp, Homo sapien
gggcagggaggccctagagctgcag

SEQ ID NO: 3060703 - DNA, 25 bp, Homo sapien
gctctgctctagaggggcatccgac

SEQ ID NO: 3060704 - DNA, 25 bp, Homo sapien
gaaaagggaccagggaacatctgct

SEQ ID NO: 3060705 - DNA, 25 bp, Homo sapien
ggtgcagtgctacgaacatcatata

SEQ ID NO: 3060706 - DNA, 25 bp, Homo sapien
ggagttctaatagccccatggaggt

SEQ ID NO: 3060707 - DNA, 25 bp, Homo sapien
tcccacagagttgagaggtgcctcc

SEQ ID NO: 3060708 - DNA, 25 bp, Homo sapien
tccattctaagccttcaatctcttt

SEQ ID NO: 3060709 - DNA, 25 bp, Homo sapien
cattctaagccttcaatctctttgg

SEQ ID NO: 3060710 - DNA, 25 bp, Homo sapien
ccattctaagccttcaatctctttg

SEQ ID NO: 3060711 - DNA, 25 bp, Homo sapien
gaaggaaatcactcacagtctccac

SEQ ID NO: 3060712 - DNA, 25 bp, Homo sapien
agaaggaaatcactcacagtctcca

SEQ ID NO: 3060713 - DNA, 25 bp, Homo sapien
gcagtgggccccagaaggaaatcac

SEQ ID NO: 3060714 - DNA, 25 bp, Homo sapien
cagaaggaaatcactcacagtctcc

SEQ ID NO: 3060715 - DNA, 25 bp, Homo sapien
gatactcagtgaggacttgccaaac

SEQ ID NO: 3060716 - DNA, 25 bp, Homo sapien
tgccaaactgaaaagctcctacgct

SEQ ID NO: 3060717 - DNA, 25 bp, Homo sapien
caggctgagcctgttggtgatactc

SEQ ID NO: 3060718 - DNA, 25 bp, Homo sapien
gaagctctgccccttacaaagccta

SEQ ID NO: 3060719 - DNA, 25 bp, Homo sapien
tgggcctgcaggaagctggcgttgg

SEQ ID NO: 3060720 - DNA, 25 bp, Homo sapien
gcctgcaggaagctggcgttggggg

SEQ ID NO: 3060721 - DNA, 25 bp, Homo sapien
ccggctctgggcctgcaggaagctg

SEQ ID NO: 3060722 - DNA, 25 bp, Homo sapien
ctctgggcctgcaggaagctggcgt

SEQ ID NO: 3060723 - DNA, 25 bp, Homo sapien
agctgcggtgatgtcaagagagaca

SEQ ID NO: 3060724 - DNA, 25 bp, Homo sapien
acgataacagacagacggacgggac

SEQ ID NO: 3060725 - DNA, 25 bp, Homo sapien
tgcggtgatgtcaagagagacagac

SEQ ID NO: 3060726 - DNA, 25 bp, Homo sapien
tcaagagagacagacgataacagac

SEQ ID NO: 3060727 - DNA, 25 bp, Homo sapien
taatgcccatccgaggccatccttc

SEQ ID NO: 3060728 - DNA, 25 bp, Homo sapien
cagtcaggcactcagaacggcatcc

SEQ ID NO: 3060729 - DNA, 25 bp, Homo sapien
atgcccatccgaggccatccttcgg

SEQ ID NO: 3060730 - DNA, 25 bp, Homo sapien
tccttcggggcgaggcagtcaggca

SEQ ID NO: 3060731 - DNA, 25 bp, Homo sapien
tcgagctccggcttcgcgggcggcg

SEQ ID NO: 3060732 - DNA, 25 bp, Homo sapien
ccgctgcggctcgagctccggcttc

SEQ ID NO: 3060733 - DNA, 25 bp, Homo sapien
gcggctcgagctccggcttcgcggg

SEQ ID NO: 3060734 - DNA, 25 bp, Homo sapien
gctgcggctcgagctccggcttcgc

SEQ ID NO: 3060735 - DNA, 25 bp, Homo sapien
ctttgcggcggctcctccggctccg

SEQ ID NO: 3060736 - DNA, 25 bp, Homo sapien
gcggcggctcctccggctccgctcg

SEQ ID NO: 3060737 - DNA, 25 bp, Homo sapien
ggcggctcctccggctccgctcgcc

SEQ ID NO: 3060738 - DNA, 25 bp, Homo sapien
ttgcggcggctcctccggctccgct

SEQ ID NO: 3060739 - DNA, 25 bp, Homo sapien
tgtgcagggtctatggcattcttct

SEQ ID NO: 3060740 - DNA, 25 bp, Homo sapien
ttcttgtgcagggtctatggcattc

SEQ ID NO: 3060741 - DNA, 25 bp, Homo sapien
gggtctatggcattcttctgtatat

SEQ ID NO: 3060742 - DNA, 25 bp, Homo sapien
tcttctgtatatgggtcctatttta

SEQ ID NO: 3060743 - DNA, 25 bp, Homo sapien
tgaaccagtgctgaaccagccgact

SEQ ID NO: 3060744 - DNA, 25 bp, Homo sapien
ccctttaagaccagagcggaagact

SEQ ID NO: 3060745 - DNA, 25 bp, Homo sapien
tgtgtcggcgggaaagaaatatgcc

SEQ ID NO: 3060746 - DNA, 25 bp, Homo sapien
tatgcctgcccctttaagaaggcgg

SEQ ID NO: 3060747 - DNA, 25 bp, Homo sapien
tgcagtgttatgaacacgcctcact

SEQ ID NO: 3060748 - DNA, 25 bp, Homo sapien
ttatgaacacgcctcactgcatcct

SEQ ID NO: 3060749 - DNA, 25 bp, Homo sapien
ggagtgcagtgttatgaacacgcct

SEQ ID NO: 3060750 - DNA, 25 bp, Homo sapien
atcctcggcctctaggctcaagcag

SEQ ID NO: 3060751 - DNA, 25 bp, Homo sapien
tgtgcccgagcccagtttgactgtg

SEQ ID NO: 3060752 - DNA, 25 bp, Homo sapien
tgctgctgaccttcggagccaaggc

SEQ ID NO: 3060753 - DNA, 25 bp, Homo sapien
cagcaaaccatgcagagggaaggcc

SEQ ID NO: 3060754 - DNA, 25 bp, Homo sapien
tacacagactgtgctcgacacctga

SEQ ID NO: 3060755 - DNA, 25 bp, Homo sapien
tctatgcttcataacgtacacagaa

SEQ ID NO: 3060756 - DNA, 25 bp, Homo sapien
taacgtacacagaagtgggttttca

SEQ ID NO: 3060757 - DNA, 25 bp, Homo sapien
gaatgattcagaaccagaccttggg

SEQ ID NO: 3060758 - DNA, 25 bp, Homo sapien
gtgagtactatttctggtgcagcca

SEQ ID NO: 3060759 - DNA, 25 bp, Homo sapien
ggcttgtatgattctcatggaggac

SEQ ID NO: 3060760 - DNA, 25 bp, Homo sapien
caattctgttgtctgtagcggggct

SEQ ID NO: 3060761 - DNA, 25 bp, Homo sapien
tctcatggaggacaccaggtaggac

SEQ ID NO: 3060762 - DNA, 25 bp, Homo sapien
tgcttctggtagctctcaggacctt

SEQ ID NO: 3060763 - DNA, 25 bp, Homo sapien
ttgtccccaggtgcgccaagttgct

SEQ ID NO: 3060764 - DNA, 25 bp, Homo sapien
gactgcgctgaacacggcgtgcgct

SEQ ID NO: 3060765 - DNA, 25 bp, Homo sapien
gctctgtacctggagcatggcgccg

SEQ ID NO: 3060766 - DNA, 25 bp, Homo sapien
tgaagtccttttcgccgcactgctg

SEQ ID NO: 3060767 - DNA, 25 bp, Homo sapien
tgtcccatcctgtgagacctgggtg

SEQ ID NO: 3060768 - DNA, 25 bp, Homo sapien
cagagggtccaagagactgaaagcc

SEQ ID NO: 3060769 - DNA, 25 bp, Homo sapien
gcttaatgcctatccttgtgtccca

SEQ ID NO: 3060770 - DNA, 25 bp, Homo sapien
gacccctagatgctgaaacactgcg

SEQ ID NO: 3060771 - DNA, 25 bp, Homo sapien
tgagccaagaccacgctattgcatt

SEQ ID NO: 3060772 - DNA, 25 bp, Homo sapien
gagccaagaccacgctattgcattc

SEQ ID NO: 3060773 - DNA, 25 bp, Homo sapien
gccaagaccacgctattgcattcca

SEQ ID NO: 3060774 - DNA, 25 bp, Homo sapien
agtgagccaagaccacgctattgca

SEQ ID NO: 3060775 - DNA, 25 bp, Homo sapien
tgactgcggaaggaggaacatccat

SEQ ID NO: 3060776 - DNA, 25 bp, Homo sapien
tggtcaaggctgatctggccctcag

SEQ ID NO: 3060777 - DNA, 25 bp, Homo sapien
taggctgagactggaactatattcc

SEQ ID NO: 3060778 - DNA, 25 bp, Homo sapien
tgcatgtgttattcctaccgcttgg

SEQ ID NO: 3060779 - DNA, 25 bp, Homo sapien
gcatgcaccacaacgggtctcacta

SEQ ID NO: 3060780 - DNA, 25 bp, Homo sapien
tccagcaagcagaggtcgcagagag

SEQ ID NO: 3060781 - DNA, 25 bp, Homo sapien
agtccagcaagcagaggtcgcagag

SEQ ID NO: 3060782 - DNA, 25 bp, Homo sapien
gctggtgcatatgatggttccagct

SEQ ID NO: 3060783 - DNA, 25 bp, Homo sapien
gtccagcaagcagaggtcgcagaga

SEQ ID NO: 3060784 - DNA, 25 bp, Homo sapien
taatcagtagttctccaaaacccca

SEQ ID NO: 3060785 - DNA, 25 bp, Homo sapien
ttgcttatgtttgcccctgtctgga

SEQ ID NO: 3060786 - DNA, 25 bp, Homo sapien
agaagctagacaccgaagaggatac

SEQ ID NO: 3060787 - DNA, 25 bp, Homo sapien
tggtagaagccaccgagctttttgc

SEQ ID NO: 3060788 - DNA, 25 bp, Homo sapien
cactggatgctgactaactggtctc

SEQ ID NO: 3060789 - DNA, 25 bp, Homo sapien
ggataagttcttgaaagctggactt

SEQ ID NO: 3060790 - DNA, 25 bp, Homo sapien
gctgagttcttactaatccccgcta

SEQ ID NO: 3060791 - DNA, 25 bp, Homo sapien
tttttgtgtcctaagcctgcgccga

SEQ ID NO: 3060792 - DNA, 25 bp, Homo sapien
taacgaatccaatcagccggggagg

SEQ ID NO: 3060793 - DNA, 25 bp, Homo sapien
agctggaaagggaaacgtcgcaccg

SEQ ID NO: 3060794 - DNA, 25 bp, Homo sapien
gcgcgttgcaaagcagtaacgaatc

SEQ ID NO: 3060795 - DNA, 25 bp, Homo sapien
agttaggtgcgcgttgcaaagcagt

SEQ ID NO: 3060796 - DNA, 25 bp, Homo sapien
cccgtagtcctcaggctgtaagcaa

SEQ ID NO: 3060797 - DNA, 25 bp, Homo sapien
ccttagcaggaatagggtgtcctcc

SEQ ID NO: 3060798 - DNA, 25 bp, Homo sapien
gcacaactccgtagggagcctggag

SEQ ID NO: 3060799 - DNA, 25 bp, Homo sapien
tcacactggcgggaatgaagattgt

SEQ ID NO: 3060800 - DNA, 25 bp, Homo sapien
aatacacagcgtttacaaagttagc

SEQ ID NO: 3060801 - DNA, 25 bp, Homo sapien
acacagcgtttacaaagttagctac

SEQ ID NO: 3060802 - DNA, 25 bp, Homo sapien
tacacagcgtttacaaagttagcta

SEQ ID NO: 3060803 - DNA, 25 bp, Homo sapien
gaatacacagcgtttacaaagttag

SEQ ID NO: 3060804 - DNA, 25 bp, Homo sapien
ctgtacagaatggattacatatgca

SEQ ID NO: 3060805 - DNA, 25 bp, Homo sapien
tacagaatggattacatatgcaaaa

SEQ ID NO: 3060806 - DNA, 25 bp, Homo sapien
ccacaggacagcgtgagccccaccc

SEQ ID NO: 3060807 - DNA, 25 bp, Homo sapien
ccccagcatgcggtaatgccaggcg

SEQ ID NO: 3060808 - DNA, 25 bp, Homo sapien
tctttaggatgtagaccaggcaggt

SEQ ID NO: 3060809 - DNA, 25 bp, Homo sapien
gccaccggccatggaaattagtaca

SEQ ID NO: 3060810 - DNA, 25 bp, Homo sapien
ggaattgaaacccacacagcctgct

SEQ ID NO: 3060811 - DNA, 25 bp, Homo sapien
tgatgcatggaaggaaaagccaccg

SEQ ID NO: 3060812 - DNA, 25 bp, Homo sapien
ctgggcgtcgggggtgccggtggct

SEQ ID NO: 3060813 - DNA, 25 bp, Homo sapien
tgtcatcatagatgctgggcgtcgg

SEQ ID NO: 3060814 - DNA, 25 bp, Homo sapien
gttgatgtcatcatagatgctgggc

SEQ ID NO: 3060815 - DNA, 25 bp, Homo sapien
tcagttgatgtcatcatagatgctg

SEQ ID NO: 3060816 - DNA, 25 bp, Homo sapien
cttgttggaacctaggccggaggca

SEQ ID NO: 3060817 - DNA, 25 bp, Homo sapien
tgttggaacctaggccggaggcagt

SEQ ID NO: 3060818 - DNA, 25 bp, Homo sapien
ttggaacctaggccggaggcagtcc

SEQ ID NO: 3060819 - DNA, 25 bp, Homo sapien
gaacctaggccggaggcagtcccta

SEQ ID NO: 3060820 - DNA, 25 bp, Homo sapien
ttggttttccgtgactcagagctgt

SEQ ID NO: 3060821 - DNA, 25 bp, Homo sapien
tttcttggttttccgtgactcagag

SEQ ID NO: 3060822 - DNA, 25 bp, Homo sapien
ttccgtgactcagagctgttggtac

SEQ ID NO: 3060823 - DNA, 25 bp, Homo sapien
gttttccgtgactcagagctgttgg

SEQ ID NO: 3060824 - DNA, 25 bp, Homo sapien
tccagggagctctcgacctctggaa

SEQ ID NO: 3060825 - DNA, 25 bp, Homo sapien
agaggagccgtcccactgaagccgg

SEQ ID NO: 3060826 - DNA, 25 bp, Homo sapien
agggagctctcgacctctggaagga

SEQ ID NO: 3060827 - DNA, 25 bp, Homo sapien
cagggagctctcgacctctggaagg

SEQ ID NO: 3060828 - DNA, 25 bp, Homo sapien
taaatccgtacggttcgcctctgct

SEQ ID NO: 3060829 - DNA, 25 bp, Homo sapien
atccgtacggttcgcctctgctcat

SEQ ID NO: 3060830 - DNA, 25 bp, Homo sapien
aataaatccgtacggttcgcctctg

SEQ ID NO: 3060831 - DNA, 25 bp, Homo sapien
cgtacggttcgcctctgctcatctg

SEQ ID NO: 3060832 - DNA, 25 bp, Homo sapien
cttgtgcacatcttcttggtgtgtt

SEQ ID NO: 3060833 - DNA, 25 bp, Homo sapien
tgcacatcttcttggtgtgttcaga

SEQ ID NO: 3060834 - DNA, 25 bp, Homo sapien
tgtgttcagaaatcaccccacattg

SEQ ID NO: 3060835 - DNA, 25 bp, Homo sapien
tgtgcacatcttcttggtgtgttca

SEQ ID NO: 3060836 - DNA, 25 bp, Homo sapien
tggcccaaaggtgtccagagcagat

SEQ ID NO: 3060837 - DNA, 25 bp, Homo sapien
tataaatgctagatagcacaagcag

SEQ ID NO: 3060838 - DNA, 25 bp, Homo sapien
gtgtccagagcagatggtcccagga

SEQ ID NO: 3060839 - DNA, 25 bp, Homo sapien
gcacaagcagagatggcccaaaggt

SEQ ID NO: 3060840 - DNA, 25 bp, Homo sapien
agctgatcccagttgaattgttata

SEQ ID NO: 3060841 - DNA, 25 bp, Homo sapien
ggtctcatagctgatcccagttgaa

SEQ ID NO: 3060842 - DNA, 25 bp, Homo sapien
agggtctcatagctgatcccagttg

SEQ ID NO: 3060843 - DNA, 25 bp, Homo sapien
catagctgatcccagttgaattgtt

SEQ ID NO: 3060844 - DNA, 25 bp, Homo sapien
taaaaggatccgaattgctaagttc

SEQ ID NO: 3060845 - DNA, 25 bp, Homo sapien
cttaaaaggatccgaattgctaagt

SEQ ID NO: 3060846 - DNA, 25 bp, Homo sapien
ggaagggtgtttgatgcagaggtac

SEQ ID NO: 3060847 - DNA, 25 bp, Homo sapien
gtttgatgcagaggtacagacagag

SEQ ID NO: 3060848 - DNA, 25 bp, Homo sapien
agaaggggaagggtgtttgatgcag

SEQ ID NO: 3060849 - DNA, 25 bp, Homo sapien
gatgcagaggtacagacagagaacc

SEQ ID NO: 3060850 - DNA, 25 bp, Homo sapien
gtgttttaatgacttggatcttcga

SEQ ID NO: 3060851 - DNA, 25 bp, Homo sapien
agcagcatcctcaaattcctactct

SEQ ID NO: 3060852 - DNA, 25 bp, Homo sapien
agatttgacaaagcagcatcctcaa

SEQ ID NO: 3060853 - DNA, 25 bp, Homo sapien
aaaagatttgacaaagcagcatcct

SEQ ID NO: 3060854 - DNA, 25 bp, Homo sapien
gacaaagcagcatcctcaaattcct

SEQ ID NO: 3060855 - DNA, 25 bp, Homo sapien
gtcactctcagacttattcatattg

SEQ ID NO: 3060856 - DNA, 25 bp, Homo sapien
gaggcggcaatgctgcgactgcaat

SEQ ID NO: 3060857 - DNA, 25 bp, Homo sapien
aacctgtccaaagatgtccaagccc

SEQ ID NO: 3060858 - DNA, 25 bp, Homo sapien
gattcggctgctgttccgacccatt

SEQ ID NO: 3060859 - DNA, 25 bp, Homo sapien
gcaattggggcaaacacactccttg

SEQ ID NO: 3060860 - DNA, 25 bp, Homo sapien
aaatccttcatgctatcagggtccg

SEQ ID NO: 3060861 - DNA, 25 bp, Homo sapien
ggtccgcgtatatctcctgagcgat

SEQ ID NO: 3060862 - DNA, 25 bp, Homo sapien
cgtgtcgtccaagaagaagtagcca

SEQ ID NO: 3060863 - DNA, 25 bp, Homo sapien
gaatcctcgaccaggtccgcgtata

SEQ ID NO: 3060864 - DNA, 25 bp, Homo sapien
gacggcgctctgactgctcatagca

SEQ ID NO: 3060865 - DNA, 25 bp, Homo sapien
tgctgttatccaggccagacaaaga

SEQ ID NO: 3060866 - DNA, 25 bp, Homo sapien
tgactgctcatagcacagcgggcgg

SEQ ID NO: 3060867 - DNA, 25 bp, Homo sapien
aactcttgtggagacggcgctctga

SEQ ID NO: 3060868 - DNA, 25 bp, Homo sapien
ctgccaatcagagtctgggtctata

SEQ ID NO: 3060869 - DNA, 25 bp, Homo sapien
ggactccactgccaatcagagtctg

SEQ ID NO: 3060870 - DNA, 25 bp, Homo sapien
aggccctggactccactgccaatca

SEQ ID NO: 3060871 - DNA, 25 bp, Homo sapien
gttgttgtgagtccaaggcacctct

SEQ ID NO: 3060872 - DNA, 25 bp, Homo sapien
gtttcaggagctgccggcctagagt

SEQ ID NO: 3060873 - DNA, 25 bp, Homo sapien
tccgggagggtgtctctattgtccc

SEQ ID NO: 3060874 - DNA, 25 bp, Homo sapien
cccagagagtgggacgcgtcccagc

SEQ ID NO: 3060875 - DNA, 25 bp, Homo sapien
ctgctgctgcatcataccgactggg

SEQ ID NO: 3060876 - DNA, 25 bp, Homo sapien
tcaccgggcggccatggccccttcc

SEQ ID NO: 3060877 - DNA, 25 bp, Homo sapien
atgtccgtcggtccgtcctcgcctc

SEQ ID NO: 3060878 - DNA, 25 bp, Homo sapien
cctggccgcctcaccgggcggccat

SEQ ID NO: 3060879 - DNA, 25 bp, Homo sapien
cggagccccatgtccgtcggtccgt

SEQ ID NO: 3060880 - DNA, 25 bp, Homo sapien
gactgctcgcgcctgctagaagggc

SEQ ID NO: 3060881 - DNA, 25 bp, Homo sapien
tcttccttctttcgctttcgcgcgc

SEQ ID NO: 3060882 - DNA, 25 bp, Homo sapien
cgcggccgcagctcggcagcatttg

SEQ ID NO: 3060883 - DNA, 25 bp, Homo sapien
cacgccgccgtccaaagtaccggcg

SEQ ID NO: 3060884 - DNA, 25 bp, Homo sapien
cttcgcggacctccccgaccaatcg

SEQ ID NO: 3060885 - DNA, 25 bp, Homo sapien
tccccgaccaatcgcagggaggcct

SEQ ID NO: 3060886 - DNA, 25 bp, Homo sapien
cgaccaatcgcagggaggcctcggc

SEQ ID NO: 3060887 - DNA, 25 bp, Homo sapien
gacctccccgaccaatcgcagggag

SEQ ID NO: 3060888 - DNA, 25 bp, Homo sapien
tggagggcctcatcaaactctttgg

SEQ ID NO: 3060889 - DNA, 25 bp, Homo sapien
cagccgagatcggtaggaaacgtct

SEQ ID NO: 3060890 - DNA, 25 bp, Homo sapien
gaaacgtctcgttgacagctcagag

SEQ ID NO: 3060891 - DNA, 25 bp, Homo sapien
tggctttaagcataggcagacacct

SEQ ID NO: 3060892 - DNA, 25 bp, Homo sapien
ggagtcagagtctgaggagtcccct

SEQ ID NO: 3060893 - DNA, 25 bp, Homo sapien
gagctgctgccctcggactcattat

SEQ ID NO: 3060894 - DNA, 25 bp, Homo sapien
cagttggagtcagagtctgaggagt

SEQ ID NO: 3060895 - DNA, 25 bp, Homo sapien
tggagctgctgccctcggactcatt

SEQ ID NO: 3060896 - DNA, 25 bp, Homo sapien
tcgtcgtcttcgtcctcgtcatcct

SEQ ID NO: 3060897 - DNA, 25 bp, Homo sapien
tcatcgtcatcctcgtcgtcgtctt

SEQ ID NO: 3060898 - DNA, 25 bp, Homo sapien
gtcgtcgtcttcgtcctcgtcatcc

SEQ ID NO: 3060899 - DNA, 25 bp, Homo sapien
tcgtcttcgtcctcgtcatcctctt

SEQ ID NO: 3060900 - DNA, 25 bp, Homo sapien
tgctggactcagaggagtcgccgcc

SEQ ID NO: 3060901 - DNA, 25 bp, Homo sapien
cgccatcttcagaggagtccccatt

SEQ ID NO: 3060902 - DNA, 25 bp, Homo sapien
ggactcagaggagtcgccgccatct

SEQ ID NO: 3060903 - DNA, 25 bp, Homo sapien
agtcgccgccatcttcagaggagtc

SEQ ID NO: 3060904 - DNA, 25 bp, Homo sapien
ctcgtcctcgtcatcctcatcctct

SEQ ID NO: 3060905 - DNA, 25 bp, Homo sapien
cctcttcatcatcctcctcggactc

SEQ ID NO: 3060906 - DNA, 25 bp, Homo sapien
ctcttcttcatcctcgtcctcgtca

SEQ ID NO: 3060907 - DNA, 25 bp, Homo sapien
ttcttcatcctcgtcctcgtcatcc

SEQ ID NO: 3060908 - DNA, 25 bp, Homo sapien
ttgggcctcgcagcttggtcatgct

SEQ ID NO: 3060909 - DNA, 25 bp, Homo sapien
cgacttggactgcagagtagtccgg

SEQ ID NO: 3060910 - DNA, 25 bp, Homo sapien
actgcagagtagtccggctggattt

SEQ ID NO: 3060911 - DNA, 25 bp, Homo sapien
gtttgggcctcgcagcttggtcatg

SEQ ID NO: 3060912 - DNA, 25 bp, Homo sapien
gagatgtactctttatatgctgcac

SEQ ID NO: 3060913 - DNA, 25 bp, Homo sapien
gatgtactctttatatgctgcacgg

SEQ ID NO: 3060914 - DNA, 25 bp, Homo sapien
tactctttatatgctgcacggtcct

SEQ ID NO: 3060915 - DNA, 25 bp, Homo sapien
attggagatgtactctttatatgct

SEQ ID NO: 3060916 - DNA, 25 bp, Homo sapien
ggttggaacatagccaactactgct

SEQ ID NO: 3060917 - DNA, 25 bp, Homo sapien
caactactgctgactgagcatgctg

SEQ ID NO: 3060918 - DNA, 25 bp, Homo sapien
ctaggcagtgggctgagcatttata

SEQ ID NO: 3060919 - DNA, 25 bp, Homo sapien
tccctagattttgggtctctgcaga

SEQ ID NO: 3060920 - DNA, 25 bp, Homo sapien
tgatagtgaccgttatcctgaagga

SEQ ID NO: 3060921 - DNA, 25 bp, Homo sapien
gctggcttagtctgatgcctctctg

SEQ ID NO: 3060922 - DNA, 25 bp, Homo sapien
gattgcgagggcatggaatgaaatc

SEQ ID NO: 3060923 - DNA, 25 bp, Homo sapien
aatcatgaatgagaccagccagcac

SEQ ID NO: 3060924 - DNA, 25 bp, Homo sapien
gagatgcgctgccagcgactgccga

SEQ ID NO: 3060925 - DNA, 25 bp, Homo sapien
ggtgcaccttgtactgcttttgctg

SEQ ID NO: 3060926 - DNA, 25 bp, Homo sapien
agatgcgctgccagcgactgccgat

SEQ ID NO: 3060927 - DNA, 25 bp, Homo sapien
tccaggtgcaccttgtactgctttt

SEQ ID NO: 3060928 - DNA, 25 bp, Homo sapien
ggaagaatttgtagcagctggaggt

SEQ ID NO: 3060929 - DNA, 25 bp, Homo sapien
aagaatttgtagcagctggaggtgc

SEQ ID NO: 3060930 - DNA, 25 bp, Homo sapien
agaatttgtagcagctggaggtgcc

SEQ ID NO: 3060931 - DNA, 25 bp, Homo sapien
gaatttgtagcagctggaggtgccc

SEQ ID NO: 3060932 - DNA, 25 bp, Homo sapien
ttcttaatccacatcagtttctcct

SEQ ID NO: 3060933 - DNA, 25 bp, Homo sapien
tcgcttttggtcttcggctgccttc

SEQ ID NO: 3060934 - DNA, 25 bp, Homo sapien
ttccatgttattccaggtcatttcc

SEQ ID NO: 3060935 - DNA, 25 bp, Homo sapien
ggctgccttcttaatccacatcagt

SEQ ID NO: 3060936 - DNA, 25 bp, Homo sapien
ttgagcgccgcctctcgggccttgt

SEQ ID NO: 3060937 - DNA, 25 bp, Homo sapien
aagcgggccaggtagtcgccgataa

SEQ ID NO: 3060938 - DNA, 25 bp, Homo sapien
gggactcgggcagcttgccccgttc

SEQ ID NO: 3060939 - DNA, 25 bp, Homo sapien
gccgggcttcctctccgactgagcc

SEQ ID NO: 3060940 - DNA, 25 bp, Homo sapien
tccgagaagatgaacatggccgaca

SEQ ID NO: 3060941 - DNA, 25 bp, Homo sapien
tgccgccgtttctcctccgagaaga

SEQ ID NO: 3060942 - DNA, 25 bp, Homo sapien
aacatggccgacacgggccgcttgg

SEQ ID NO: 3060943 - DNA, 25 bp, Homo sapien
acaggtcgttccacattcgggccag

SEQ ID NO: 3060944 - DNA, 25 bp, Homo sapien
gcagagggtcggggtccgtgggtgc

SEQ ID NO: 3060945 - DNA, 25 bp, Homo sapien
tccaggtgcagagggtcggggtccg

SEQ ID NO: 3060946 - DNA, 25 bp, Homo sapien
gtccaggtgcagagggtcggggtcc

SEQ ID NO: 3060947 - DNA, 25 bp, Homo sapien
aggtgcagagggtcggggtccgtgg

SEQ ID NO: 3060948 - DNA, 25 bp, Homo sapien
ggcctgcttcttgttgatgttcagc

SEQ ID NO: 3060949 - DNA, 25 bp, Homo sapien
ggctggcttcttggaggcggggctg

SEQ ID NO: 3060950 - DNA, 25 bp, Homo sapien
ttctcttcccccaagacccgctgct

SEQ ID NO: 3060951 - DNA, 25 bp, Homo sapien
tggtggcctgcttcttgttgatgtt

SEQ ID NO: 3060952 - DNA, 25 bp, Homo sapien
agcagctccacctcgtaatctttct

SEQ ID NO: 3060953 - DNA, 25 bp, Homo sapien
cagctccacctcgtaatctttcttt

SEQ ID NO: 3060954 - DNA, 25 bp, Homo sapien
ctcgaggaaacggagcagctccacc

SEQ ID NO: 3060955 - DNA, 25 bp, Homo sapien
tcgaggaaacggagcagctccacct

SEQ ID NO: 3060956 - DNA, 25 bp, Homo sapien
tggccatgagctctgcgcagtacag

SEQ ID NO: 3060957 - DNA, 25 bp, Homo sapien
gttggccatgagctctgcgcagtac

SEQ ID NO: 3060958 - DNA, 25 bp, Homo sapien
gccatgagctctgcgcagtacagcg

SEQ ID NO: 3060959 - DNA, 25 bp, Homo sapien
tgagctctgcgcagtacagcgagta

SEQ ID NO: 3060960 - DNA, 25 bp, Homo sapien
tctggatatagtctctcatgatctc

SEQ ID NO: 3060961 - DNA, 25 bp, Homo sapien
tggcttggtgggtcgcccgtcaaac

SEQ ID NO: 3060962 - DNA, 25 bp, Homo sapien
ccttgagctggcgttcggccttggt

SEQ ID NO: 3060963 - DNA, 25 bp, Homo sapien
tcctcactgatgttcagctctgggt

SEQ ID NO: 3060964 - DNA, 25 bp, Homo sapien
aaggcccctccctcaacagagggat

SEQ ID NO: 3060965 - DNA, 25 bp, Homo sapien
gcagaggtgaggggcccagaaggcc

SEQ ID NO: 3060966 - DNA, 25 bp, Homo sapien
gcccctccctcaacagagggatggg

SEQ ID NO: 3060967 - DNA, 25 bp, Homo sapien
cccagaaggcccctccctcaacaga

SEQ ID NO: 3060968 - DNA, 25 bp, Homo sapien
cagaggctcgtgaagagccggacgg

SEQ ID NO: 3060969 - DNA, 25 bp, Homo sapien
gagggcagaggctcgtgaagagccg

SEQ ID NO: 3060970 - DNA, 25 bp, Homo sapien
ctcccgcagagtgcggtggccacgg

SEQ ID NO: 3060971 - DNA, 25 bp, Homo sapien
gtggccacggagtcggagggcagag

SEQ ID NO: 3060972 - DNA, 25 bp, Homo sapien
ctcgtactccttccgctgctccagg

SEQ ID NO: 3060973 - DNA, 25 bp, Homo sapien
agcctctttttgtccgagagctgag

SEQ ID NO: 3060974 - DNA, 25 bp, Homo sapien
ctctttttgtccgagagctgagacc

SEQ ID NO: 3060975 - DNA, 25 bp, Homo sapien
ctttttgtccgagagctgagaccac

SEQ ID NO: 3060976 - DNA, 25 bp, Homo sapien
cattctggattaggtcggggtgatc

SEQ ID NO: 3060977 - DNA, 25 bp, Homo sapien
gttttgggcttctctgggatgtccg

SEQ ID NO: 3060978 - DNA, 25 bp, Homo sapien
tcttctcgtgggtgtaccacagctg

SEQ ID NO: 3060979 - DNA, 25 bp, Homo sapien
ggccgcactttgagatacaccttct

SEQ ID NO: 3060980 - DNA, 25 bp, Homo sapien
atcgggccaggtttcgctcgaactc

SEQ ID NO: 3060981 - DNA, 25 bp, Homo sapien
ctgaatcgggccaggtttcgctcga

SEQ ID NO: 3060982 - DNA, 25 bp, Homo sapien
gaatcgggccaggtttcgctcgaac

SEQ ID NO: 3060983 - DNA, 25 bp, Homo sapien
cgggccaggtttcgctcgaactcct

SEQ ID NO: 3060984 - DNA, 25 bp, Homo sapien
ggtcactcaggacccaagggtatct

SEQ ID NO: 3060985 - DNA, 25 bp, Homo sapien
tcactcaggacccaagggtatctca

SEQ ID NO: 3060986 - DNA, 25 bp, Homo sapien
actcaggacccaagggtatctcacc

SEQ ID NO: 3060987 - DNA, 25 bp, Homo sapien
tggggtcactcaggacccaagggta

SEQ ID NO: 3060988 - DNA, 25 bp, Homo sapien
atctgtgatggtgcctgtgcctgac

SEQ ID NO: 3060989 - DNA, 25 bp, Homo sapien
gacctattctgctgtgctgactcac

SEQ ID NO: 3060990 - DNA, 25 bp, Homo sapien
tctccaaggcctacctccaactgac

SEQ ID NO: 3060991 - DNA, 25 bp, Homo sapien
tgcccaggacctattctgctgtgct

SEQ ID NO: 3060992 - DNA, 25 bp, Homo sapien
ggtggagtttcgcatacttggcccg

SEQ ID NO: 3060993 - DNA, 25 bp, Homo sapien
tatttcttggacagaatcttggtta

SEQ ID NO: 3060994 - DNA, 25 bp, Homo sapien
tcttcttctccggaagctccttgta

SEQ ID NO: 3060995 - DNA, 25 bp, Homo sapien
cttggttaggtccaggttgctcatc

SEQ ID NO: 3060996 - DNA, 25 bp, Homo sapien
gcatcgaggatcaattctgtcaatg

SEQ ID NO: 3060997 - DNA, 25 bp, Homo sapien
caattctgtcaatgtacggaacttc

SEQ ID NO: 3060998 - DNA, 25 bp, Homo sapien
tctgtcaatgtacggaacttcctca

SEQ ID NO: 3060999 - DNA, 25 bp, Homo sapien
ttcctgagcatcgaggatcaattct

SEQ ID NO: 3061000 - DNA, 25 bp, Homo sapien
ccagtccatgtgtgattcggtggtt

SEQ ID NO: 3061001 - DNA, 25 bp, Homo sapien
ttggagctgtcattggatggaaggt

SEQ ID NO: 3061002 - DNA, 25 bp, Homo sapien
ccatgtgtgattcggtggttttgaa

SEQ ID NO: 3061003 - DNA, 25 bp, Homo sapien
tcattggatggaaggttgttcttca

SEQ ID NO: 3061004 - DNA, 25 bp, Homo sapien
ggtctgtggggcagtcggcttctcc

SEQ ID NO: 3061005 - DNA, 25 bp, Homo sapien
tggcctttgggggcggccatttcca

SEQ ID NO: 3061006 - DNA, 25 bp, Homo sapien
tggggcagtcggcttctccgttcat

SEQ ID NO: 3061007 - DNA, 25 bp, Homo sapien
gccatttccaggtctgtggggcagt

SEQ ID NO: 3061008 - DNA, 25 bp, Homo sapien
tcctcggtcgtgctggccgggcaac

SEQ ID NO: 3061009 - DNA, 25 bp, Homo sapien
tgctggccgggcaacccggggtcaa

SEQ ID NO: 3061010 - DNA, 25 bp, Homo sapien
gccacctcctcggtcgtgctggccg

SEQ ID NO: 3061011 - DNA, 25 bp, Homo sapien
gcaacccggggtcaaagccacctca

SEQ ID NO: 3061012 - DNA, 25 bp, Homo sapien
tatgggaatgggagtgcgcccctcc

SEQ ID NO: 3061013 - DNA, 25 bp, Homo sapien
acgactttctaaccgcccagagtag

SEQ ID NO: 3061014 - DNA, 25 bp, Homo sapien
gaagacataccagttcccactcagg

SEQ ID NO: 3061015 - DNA, 25 bp, Homo sapien
gctgagaggtgaacgactaacgact

SEQ ID NO: 3061016 - DNA, 25 bp, Homo sapien
gcctccgggcttcccgctccagcgg

SEQ ID NO: 3061017 - DNA, 25 bp, Homo sapien
ctggctctgagtggcggcgccctcc

SEQ ID NO: 3061018 - DNA, 25 bp, Homo sapien
tccctggctctgagtggcggcgccc

SEQ ID NO: 3061019 - DNA, 25 bp, Homo sapien
gctcggccgggcacagccgcagctc

SEQ ID NO: 3061020 - DNA, 25 bp, Homo sapien
ctgtgggagccggttcaatccagcc

SEQ ID NO: 3061021 - DNA, 25 bp, Homo sapien
ttctcccagctcagactagggcttc

SEQ ID NO: 3061022 - DNA, 25 bp, Homo sapien
tgccgaacggcacatacgaaactta

SEQ ID NO: 3061023 - DNA, 25 bp, Homo sapien
aatccagcccggcatggttctccag

SEQ ID NO: 3061024 - DNA, 25 bp, Homo sapien
ggatgggagcgcaggccgggggcac

SEQ ID NO: 3061025 - DNA, 25 bp, Homo sapien
tggatgggagcgcaggccgggggca

SEQ ID NO: 3061026 - DNA, 25 bp, Homo sapien
cgtgtggatgggagcgcaggccggg

SEQ ID NO: 3061027 - DNA, 25 bp, Homo sapien
cgagcgtgtggatgggagcgcaggc

SEQ ID NO: 3061028 - DNA, 25 bp, Homo sapien
gggccgaacagtcgagccgcagctc

SEQ ID NO: 3061029 - DNA, 25 bp, Homo sapien
gggcagcgagtcgccagacaaagcc

SEQ ID NO: 3061030 - DNA, 25 bp, Homo sapien
agcgcagcgccgctccgagcgcttg

SEQ ID NO: 3061031 - DNA, 25 bp, Homo sapien
gcagctccgctgcagccgacgccgg

SEQ ID NO: 3061032 - DNA, 25 bp, Homo sapien
cgcgggttgaaagccagccaagctc

SEQ ID NO: 3061033 - DNA, 25 bp, Homo sapien
cggcgagcgcgggttgaaagccagc

SEQ ID NO: 3061034 - DNA, 25 bp, Homo sapien
tgcagcgcccgacccgggcgtgtac

SEQ ID NO: 3061035 - DNA, 25 bp, Homo sapien
cagtccccgcagagaaatcgtcctc

SEQ ID NO: 3061036 - DNA, 25 bp, Homo sapien
gggccggcgagacggcgtgaggccg

SEQ ID NO: 3061037 - DNA, 25 bp, Homo sapien
gctgcctagagcgagctccactcct

SEQ ID NO: 3061038 - DNA, 25 bp, Homo sapien
accccgcctccatcgctctgcgttt

SEQ ID NO: 3061039 - DNA, 25 bp, Homo sapien
tctcttccaatcagccggtcgcttg

SEQ ID NO: 3061040 - DNA, 25 bp, Homo sapien
ttatccgatctccatgctccgcaag

SEQ ID NO: 3061041 - DNA, 25 bp, Homo sapien
agcttctcaatgtcccgtttcgctg

SEQ ID NO: 3061042 - DNA, 25 bp, Homo sapien
tccgggttttaggacaagcttctca

SEQ ID NO: 3061043 - DNA, 25 bp, Homo sapien
gaggagtccgagcaaaaagttctcc

SEQ ID NO: 3061044 - DNA, 25 bp, Homo sapien
gatcgtcccttggaatatacacagg

SEQ ID NO: 3061045 - DNA, 25 bp, Homo sapien
ggagaagcggatttaccactagtag

SEQ ID NO: 3061046 - DNA, 25 bp, Homo sapien
gaactgcacgtgtttctggccctac

SEQ ID NO: 3061047 - DNA, 25 bp, Homo sapien
gatcacactgcgctaaaagtgaggc

SEQ ID NO: 3061048 - DNA, 25 bp, Homo sapien
ctgcccacagagatgataggccagt

SEQ ID NO: 3061049 - DNA, 25 bp, Homo sapien
cacagagatgataggccagtgattg

SEQ ID NO: 3061050 - DNA, 25 bp, Homo sapien
tgctgtagatacagttcactgccca

SEQ ID NO: 3061051 - DNA, 25 bp, Homo sapien
cccacagagatgataggccagtgat

SEQ ID NO: 3061052 - DNA, 25 bp, Homo sapien
tctcaaagcagtgatcctttgtcca

SEQ ID NO: 3061053 - DNA, 25 bp, Homo sapien
caaagcagtgatcctttgtccaaac

SEQ ID NO: 3061054 - DNA, 25 bp, Homo sapien
actctcaaagcagtgatcctttgtc

SEQ ID NO: 3061055 - DNA, 25 bp, Homo sapien
tcaaagcagtgatcctttgtccaaa

SEQ ID NO: 3061056 - DNA, 25 bp, Homo sapien
aatagcaggtgcttaggcagcccac

SEQ ID NO: 3061057 - DNA, 25 bp, Homo sapien
agcaggtgcttaggcagcccactct

SEQ ID NO: 3061058 - DNA, 25 bp, Homo sapien
ggtccaccaatagcaggtgcttagg

SEQ ID NO: 3061059 - DNA, 25 bp, Homo sapien
agtccttcagggtccaccaatagca

SEQ ID NO: 3061060 - DNA, 25 bp, Homo sapien
tggccttggtcatgctctcccgcac

SEQ ID NO: 3061061 - DNA, 25 bp, Homo sapien
gtcgccatggagctgcagcaatgcc

SEQ ID NO: 3061062 - DNA, 25 bp, Homo sapien
ctcagcttcccgtggaaccagggct

SEQ ID NO: 3061063 - DNA, 25 bp, Homo sapien
ggaagtcgccatggagctgcagcaa

SEQ ID NO: 3061064 - DNA, 25 bp, Homo sapien
gcctctcgctggctcagcttcccgt

SEQ ID NO: 3061065 - DNA, 25 bp, Homo sapien
tggacgttgatatagggatcattga

SEQ ID NO: 3061066 - DNA, 25 bp, Homo sapien
gacgttgatatagggatcattgaag

SEQ ID NO: 3061067 - DNA, 25 bp, Homo sapien
ctggacgttgatatagggatcattg

SEQ ID NO: 3061068 - DNA, 25 bp, Homo sapien
ggttctggacgttgatatagggatc

SEQ ID NO: 3061069 - DNA, 25 bp, Homo sapien
ctggacagggtggtggaggtggcat

SEQ ID NO: 3061070 - DNA, 25 bp, Homo sapien
ctgctggacagggtggtggaggtgg

SEQ ID NO: 3061071 - DNA, 25 bp, Homo sapien
tgtttgcggacttctggatctcccc

SEQ ID NO: 3061072 - DNA, 25 bp, Homo sapien
ctgtttgcggacttctggatctccc

SEQ ID NO: 3061073 - DNA, 25 bp, Homo sapien
tgcggacttctggatctcccccagc

SEQ ID NO: 3061074 - DNA, 25 bp, Homo sapien
ggacttctggatctcccccagcagg

SEQ ID NO: 3061075 - DNA, 25 bp, Homo sapien
cccagggacgtcattatagtactaa

SEQ ID NO: 3061076 - DNA, 25 bp, Homo sapien
tgctaatgacatcctgggagggcct

SEQ ID NO: 3061077 - DNA, 25 bp, Homo sapien
tcatgtctaccaactccccaagaga

SEQ ID NO: 3061078 - DNA, 25 bp, Homo sapien
gtggagtgggtcaagcagcctctga

SEQ ID NO: 3061079 - DNA, 25 bp, Homo sapien
tggcaacgtaggcaacatcctcagc

SEQ ID NO: 3061080 - DNA, 25 bp, Homo sapien
tttggcaacgtaggcaacatcctca

SEQ ID NO: 3061081 - DNA, 25 bp, Homo sapien
tctttggcaacgtaggcaacatcct

SEQ ID NO: 3061082 - DNA, 25 bp, Homo sapien
ggtctttggcaacgtaggcaacatc

SEQ ID NO: 3061083 - DNA, 25 bp, Homo sapien
gtcaagacttccctgtgctgtcgat

SEQ ID NO: 3061084 - DNA, 25 bp, Homo sapien
agtcaagacttccctgtgctgtcga

SEQ ID NO: 3061085 - DNA, 25 bp, Homo sapien
tcaagacttccctgtgctgtcgata

SEQ ID NO: 3061086 - DNA, 25 bp, Homo sapien
caattggtcagatctgggttctccc

SEQ ID NO: 3061087 - DNA, 25 bp, Homo sapien
taacaacactgcaaggtaggtacca

SEQ ID NO: 3061088 - DNA, 25 bp, Homo sapien
ttactctatgttgggctggaacccc

SEQ ID NO: 3061089 - DNA, 25 bp, Homo sapien
gagagcctcccatggactgagctag

SEQ ID NO: 3061090 - DNA, 25 bp, Homo sapien
ttgtgtgtgaagccaaactatgttg

SEQ ID NO: 3061091 - DNA, 25 bp, Homo sapien
gttgtgtgtgaagccaaactatgtt

SEQ ID NO: 3061092 - DNA, 25 bp, Homo sapien
tgtgtgtgaagccaaactatgttga

SEQ ID NO: 3061093 - DNA, 25 bp, Homo sapien
caggcccaatccctggatcatcctt

SEQ ID NO: 3061094 - DNA, 25 bp, Homo sapien
tcagtcccctcggagtccactgatt

SEQ ID NO: 3061095 - DNA, 25 bp, Homo sapien
gagtgaactaatgagtgtttggagg

SEQ ID NO: 3061096 - DNA, 25 bp, Homo sapien
cactccctatccaaatgtagaatca

SEQ ID NO: 3061097 - DNA, 25 bp, Homo sapien
gtcctcaccaggacgcctctctctg

SEQ ID NO: 3061098 - DNA, 25 bp, Homo sapien
cttgtcctcaccaggacgcctctct

SEQ ID NO: 3061099 - DNA, 25 bp, Homo sapien
ttgtcctcaccaggacgcctctctc

SEQ ID NO: 3061100 - DNA, 25 bp, Homo sapien
tgtcctcaccaggacgcctctctct

SEQ ID NO: 3061101 - DNA, 25 bp, Homo sapien
tcagatctaagtcttccagcacggg

SEQ ID NO: 3061102 - DNA, 25 bp, Homo sapien
ttgtggaaggtctcctggacacgcc

SEQ ID NO: 3061103 - DNA, 25 bp, Homo sapien
tataggctggaaaggtcaagggact

SEQ ID NO: 3061104 - DNA, 25 bp, Homo sapien
aaagccaggctaccctttgtggaag

SEQ ID NO: 3061105 - DNA, 25 bp, Homo sapien
ggcatggccacttcgtcgtattcat

SEQ ID NO: 3061106 - DNA, 25 bp, Homo sapien
ggccacttcgtcgtattcatcccga

SEQ ID NO: 3061107 - DNA, 25 bp, Homo sapien
caggcatggccacttcgtcgtattc

SEQ ID NO: 3061108 - DNA, 25 bp, Homo sapien
catggccacttcgtcgtattcatcc

SEQ ID NO: 3061109 - DNA, 25 bp, Homo sapien
ttgccttggcatcatcagcatccag

SEQ ID NO: 3061110 - DNA, 25 bp, Homo sapien
cctcctcatcaaaggttgccttggc

SEQ ID NO: 3061111 - DNA, 25 bp, Homo sapien
ctcatcaaaggttgccttggcatca

SEQ ID NO: 3061112 - DNA, 25 bp, Homo sapien
aaaggttgccttggcatcatcagca

SEQ ID NO: 3061113 - DNA, 25 bp, Homo sapien
gaataagtgcatgcgccaggtcttc

SEQ ID NO: 3061114 - DNA, 25 bp, Homo sapien
ccaggcagatgatctggatgcccgt

SEQ ID NO: 3061115 - DNA, 25 bp, Homo sapien
tctggatgcccgtgaataagtgcat

SEQ ID NO: 3061116 - DNA, 25 bp, Homo sapien
ggaggccggcgtggacttcaccacc

SEQ ID NO: 3061117 - DNA, 25 bp, Homo sapien
ggctgggcagccagaaaagggtcct

SEQ ID NO: 3061118 - DNA, 25 bp, Homo sapien
ccaggctgggcagccagaaaagggt

SEQ ID NO: 3061119 - DNA, 25 bp, Homo sapien
gggcagccagaaaagggtcctgtac

SEQ ID NO: 3061120 - DNA, 25 bp, Homo sapien
ctgggcagccagaaaagggtcctgt

SEQ ID NO: 3061121 - DNA, 25 bp, Homo sapien
gatgccaaacagtacagccaggggg

SEQ ID NO: 3061122 - DNA, 25 bp, Homo sapien
tcaaagagctggatgccgctgagcg

SEQ ID NO: 3061123 - DNA, 25 bp, Homo sapien
ccgcttgacgtagggcacatctggg

SEQ ID NO: 3061124 - DNA, 25 bp, Homo sapien
gaacagaagcaagatgcggtcaaag

SEQ ID NO: 3061125 - DNA, 25 bp, Homo sapien
actctcagcccaggttgcccgaggc

SEQ ID NO: 3061126 - DNA, 25 bp, Homo sapien
ctgtgggggagccgcacactctcag

SEQ ID NO: 3061127 - DNA, 25 bp, Homo sapien
acactctcagcccaggttgcccgag

SEQ ID NO: 3061128 - DNA, 25 bp, Homo sapien
gtgggggagccgcacactctcagcc

SEQ ID NO: 3061129 - DNA, 25 bp, Homo sapien
gaggtaaacaacctgcctaaggcca

SEQ ID NO: 3061130 - DNA, 25 bp, Homo sapien
acagctggcaaggagtcaaagccct

SEQ ID NO: 3061131 - DNA, 25 bp, Homo sapien
cttaacctaatgagggtcacagagg

SEQ ID NO: 3061132 - DNA, 25 bp, Homo sapien
atgttggacagggtgacccacctgc

SEQ ID NO: 3061133 - DNA, 25 bp, Homo sapien
tgcgctcaggtttgctgacaatcag

SEQ ID NO: 3061134 - DNA, 25 bp, Homo sapien
ctgagccagggcatcccaaagaggg

SEQ ID NO: 3061135 - DNA, 25 bp, Homo sapien
gctttgcccatgacagtgagggcgt

SEQ ID NO: 3061136 - DNA, 25 bp, Homo sapien
caggagtccactgatccgctgctct

SEQ ID NO: 3061137 - DNA, 25 bp, Homo sapien
acctggaactgcccctggcttttca

SEQ ID NO: 3061138 - DNA, 25 bp, Homo sapien
agtcgggagggccacacacccgcag

SEQ ID NO: 3061139 - DNA, 25 bp, Homo sapien
tttcactattcctgctagtcgggag

SEQ ID NO: 3061140 - DNA, 25 bp, Homo sapien
acacccgcagggactagcttgcagt

SEQ ID NO: 3061141 - DNA, 25 bp, Homo sapien
tccagatgggaaactcggaacgcaa

SEQ ID NO: 3061142 - DNA, 25 bp, Homo sapien
aactcggaacgcaagcccagtgggt

SEQ ID NO: 3061143 - DNA, 25 bp, Homo sapien
ggcaaacatcatccagatgggaaac

SEQ ID NO: 3061144 - DNA, 25 bp, Homo sapien
agtgggtggatgacccagccccggg

SEQ ID NO: 3061145 - DNA, 25 bp, Homo sapien
tagcaggtaagaatgccaagggcag

SEQ ID NO: 3061146 - DNA, 25 bp, Homo sapien
cttgggaacttacttatattgagca

SEQ ID NO: 3061147 - DNA, 25 bp, Homo sapien
tcgggcagttaggttggaggcactt

SEQ ID NO: 3061148 - DNA, 25 bp, Homo sapien
gagcacttgctctgtacctaatcat

SEQ ID NO: 3061149 - DNA, 25 bp, Homo sapien
cgaagtccccgatgacccgacgcag

SEQ ID NO: 3061150 - DNA, 25 bp, Homo sapien
ccgaagtccccgatgacccgacgca

SEQ ID NO: 3061151 - DNA, 25 bp, Homo sapien
ctgggtgtaggtatcctgaatgaag

SEQ ID NO: 3061152 - DNA, 25 bp, Homo sapien
gggtgtaggtatcctgaatgaagaa

SEQ ID NO: 3061153 - DNA, 25 bp, Homo sapien
cacgttgtagttataagtcttctgt

SEQ ID NO: 3061154 - DNA, 25 bp, Homo sapien
tcatggcaaagaagaaggtaccggc

SEQ ID NO: 3061155 - DNA, 25 bp, Homo sapien
tgaacttgcgcagcatcatggcaaa

SEQ ID NO: 3061156 - DNA, 25 bp, Homo sapien
taccggccatgagcacaagggagag

SEQ ID NO: 3061157 - DNA, 25 bp, Homo sapien
tcagtcttatacacaacctcccgtg

SEQ ID NO: 3061158 - DNA, 25 bp, Homo sapien
acccggccactgtctcagtcttata

SEQ ID NO: 3061159 - DNA, 25 bp, Homo sapien
ccggccactgtctcagtcttataca

SEQ ID NO: 3061160 - DNA, 25 bp, Homo sapien
acaacctcccgtgtgcattaacatc

SEQ ID NO: 3061161 - DNA, 25 bp, Homo sapien
aggaagctaccctcgaaggccacca

SEQ ID NO: 3061162 - DNA, 25 bp, Homo sapien
gtatagcgggagatgaagcggacca

SEQ ID NO: 3061163 - DNA, 25 bp, Homo sapien
actctagaccgttggtctcgcagaa

SEQ ID NO: 3061164 - DNA, 25 bp, Homo sapien
aggagaagatctcctgggtatagcg

SEQ ID NO: 3061165 - DNA, 25 bp, Homo sapien
ccagcagggcgaagagaatgccctg

SEQ ID NO: 3061166 - DNA, 25 bp, Homo sapien
gacactcccatctggttccgggtct

SEQ ID NO: 3061167 - DNA, 25 bp, Homo sapien
gggtcctgagaagccgaccacaagc

SEQ ID NO: 3061168 - DNA, 25 bp, Homo sapien
cactgcagtggagatcagcagctcc

SEQ ID NO: 3061169 - DNA, 25 bp, Homo sapien
gagcccatagagcaagtcatggtca

SEQ ID NO: 3061170 - DNA, 25 bp, Homo sapien
aggtcacagtgggatcaaggtcagg

SEQ ID NO: 3061171 - DNA, 25 bp, Homo sapien
agttagggagacaggtattggcact

SEQ ID NO: 3061172 - DNA, 25 bp, Homo sapien
ggtcaggagatcatttccaggagcc

SEQ ID NO: 3061173 - DNA, 25 bp, Homo sapien
tgatggcgggtgacagtgcagcaaa

SEQ ID NO: 3061174 - DNA, 25 bp, Homo sapien
gtagcggcgccggatatcacgcacc

SEQ ID NO: 3061175 - DNA, 25 bp, Homo sapien
caggaggccgccgaaggtgatggcg

SEQ ID NO: 3061176 - DNA, 25 bp, Homo sapien
tcactcaggtaataggggtagcggc

SEQ ID NO: 3061177 - DNA, 25 bp, Homo sapien
ccatgtaggcatctatgcggaacac

SEQ ID NO: 3061178 - DNA, 25 bp, Homo sapien
ggaggcagcactaggctgcagtcca

SEQ ID NO: 3061179 - DNA, 25 bp, Homo sapien
ccttgtagaagctggagtctggctt

SEQ ID NO: 3061180 - DNA, 25 bp, Homo sapien
gatagcgccttcgaagtagctccct

SEQ ID NO: 3061181 - DNA, 25 bp, Homo sapien
aggaagcgtataggcaccggcagct

SEQ ID NO: 3061182 - DNA, 25 bp, Homo sapien
ctcctgcagcctcacgaagcccagc

SEQ ID NO: 3061183 - DNA, 25 bp, Homo sapien
ccaagctgggtgtaatcgatgtggg

SEQ ID NO: 3061184 - DNA, 25 bp, Homo sapien
cacaaagaggaagcgtataggcacc

SEQ ID NO: 3061185 - DNA, 25 bp, Homo sapien
agatggtgagtgcccttctgtgccc

SEQ ID NO: 3061186 - DNA, 25 bp, Homo sapien
tctgaatccgggggaatcttttcca

SEQ ID NO: 3061187 - DNA, 25 bp, Homo sapien
ctgaatccgggggaatcttttccag

SEQ ID NO: 3061188 - DNA, 25 bp, Homo sapien
tccagatggtgagtgcccttctgtg

SEQ ID NO: 3061189 - DNA, 25 bp, Homo sapien
gctgtgaaggatccccagagcgtgt

SEQ ID NO: 3061190 - DNA, 25 bp, Homo sapien
gagcagaggctgtgaaggatcccca

SEQ ID NO: 3061191 - DNA, 25 bp, Homo sapien
aaggatccccagagcgtgtcaggac

SEQ ID NO: 3061192 - DNA, 25 bp, Homo sapien
atccccagagcgtgtcaggactgca

SEQ ID NO: 3061193 - DNA, 25 bp, Homo sapien
aatccaggccctggcaggcaggggc

SEQ ID NO: 3061194 - DNA, 25 bp, Homo sapien
tggatatggaatccaggccctggca

SEQ ID NO: 3061195 - DNA, 25 bp, Homo sapien
tccaggccctggcaggcaggggcac

SEQ ID NO: 3061196 - DNA, 25 bp, Homo sapien
ggaatccaggccctggcaggcaggg

SEQ ID NO: 3061197 - DNA, 25 bp, Homo sapien
gtctagcagttggttggccactcca

SEQ ID NO: 3061198 - DNA, 25 bp, Homo sapien
taaacctgtctagcagttggttggc

SEQ ID NO: 3061199 - DNA, 25 bp, Homo sapien
aagataaacctgtctagcagttggt

SEQ ID NO: 3061200 - DNA, 25 bp, Homo sapien
tcttcaaagataaacctgtctagca

SEQ ID NO: 3061201 - DNA, 25 bp, Homo sapien
gaagactctacgcagctctaggagg

SEQ ID NO: 3061202 - DNA, 25 bp, Homo sapien
ttttcgtccatcaccagctcctgca

SEQ ID NO: 3061203 - DNA, 25 bp, Homo sapien
ccttggtgaagactctacgcagctc

SEQ ID NO: 3061204 - DNA, 25 bp, Homo sapien
tctacgcagctctaggaggctccag

SEQ ID NO: 3061205 - DNA, 25 bp, Homo sapien
tctgtggctgttgcctcggtgtcgt

SEQ ID NO: 3061206 - DNA, 25 bp, Homo sapien
ggtgtgatgtggtgtggtagtctgt

SEQ ID NO: 3061207 - DNA, 25 bp, Homo sapien
gtagtctgtggctgttgcctcggtg

SEQ ID NO: 3061208 - DNA, 25 bp, Homo sapien
tgtgatgtggtgtggtagtctgtgg

SEQ ID NO: 3061209 - DNA, 25 bp, Homo sapien
cctccatctgggactcggggatgtc

SEQ ID NO: 3061210 - DNA, 25 bp, Homo sapien
atctgggactcggggatgtctgggt

SEQ ID NO: 3061211 - DNA, 25 bp, Homo sapien
tccatctgggactcggggatgtctg

SEQ ID NO: 3061212 - DNA, 25 bp, Homo sapien
tcctccatctgggactcggggatgt

SEQ ID NO: 3061213 - DNA, 25 bp, Homo sapien
ggctgtgaggggctcttccaccccc

SEQ ID NO: 3061214 - DNA, 25 bp, Homo sapien
tcttccacccccaacgaagatagga

SEQ ID NO: 3061215 - DNA, 25 bp, Homo sapien
cacccccaacgaagataggagtcta

SEQ ID NO: 3061216 - DNA, 25 bp, Homo sapien
tccacccccaacgaagataggagtc

SEQ ID NO: 3061217 - DNA, 25 bp, Homo sapien
ctgagtgtccagttgtctacggtga

SEQ ID NO: 3061218 - DNA, 25 bp, Homo sapien
agttgtctacggtgatctgagcccc

SEQ ID NO: 3061219 - DNA, 25 bp, Homo sapien
tgtccagttgtctacggtgatctga

SEQ ID NO: 3061220 - DNA, 25 bp, Homo sapien
cccagcataacccgcaccgcgggtc

SEQ ID NO: 3061221 - DNA, 25 bp, Homo sapien
ggtgccctctgcgaccagctacgtt

SEQ ID NO: 3061222 - DNA, 25 bp, Homo sapien
gctacgttcccactcgttctgacag

SEQ ID NO: 3061223 - DNA, 25 bp, Homo sapien
actcgttctgacagcaccagcgccc

SEQ ID NO: 3061224 - DNA, 25 bp, Homo sapien
gcgaccagctacgttcccactcgtt

SEQ ID NO: 3061225 - DNA, 25 bp, Homo sapien
aatcccgccactgcaagaccattca

SEQ ID NO: 3061226 - DNA, 25 bp, Homo sapien
actgcaagaccattcactatctgca

SEQ ID NO: 3061227 - DNA, 25 bp, Homo sapien
acacacaggtggacaaatcccgcca

SEQ ID NO: 3061228 - DNA, 25 bp, Homo sapien
gttcagactcaagcagaagaaactc

SEQ ID NO: 3061229 - DNA, 25 bp, Homo sapien
gagcatccttccagagatacacgct

SEQ ID NO: 3061230 - DNA, 25 bp, Homo sapien
gagatacacgctgggagttctgcag

SEQ ID NO: 3061231 - DNA, 25 bp, Homo sapien
ttccagagatacacgctgggagttc

SEQ ID NO: 3061232 - DNA, 25 bp, Homo sapien
catccttccagagatacacgctggg

SEQ ID NO: 3061233 - DNA, 25 bp, Homo sapien
ttctggatctttccatgcactgttc

SEQ ID NO: 3061234 - DNA, 25 bp, Homo sapien
caaacttgctggaccaaagctttga

SEQ ID NO: 3061235 - DNA, 25 bp, Homo sapien
actgttcccttgtcctgagatgcct

SEQ ID NO: 3061236 - DNA, 25 bp, Homo sapien
tggaccaaagctttgaccttcaagg

SEQ ID NO: 3061237 - DNA, 25 bp, Homo sapien
gtgaattccttctctcccgccaacc

SEQ ID NO: 3061238 - DNA, 25 bp, Homo sapien
tgtgaattccttctctcccgccaac

SEQ ID NO: 3061239 - DNA, 25 bp, Homo sapien
ctctgctccctactgagatggtcca

SEQ ID NO: 3061240 - DNA, 25 bp, Homo sapien
tctctgctccctactgagatggtcc

SEQ ID NO: 3061241 - DNA, 25 bp, Homo sapien
tctgctccctactgagatggtccat

SEQ ID NO: 3061242 - DNA, 25 bp, Homo sapien
acaggcacctaccactaccacgcct

SEQ ID NO: 3061243 - DNA, 25 bp, Homo sapien
aggcacctaccactaccacgcctgg

SEQ ID NO: 3061244 - DNA, 25 bp, Homo sapien
caggcacctaccactaccacgcctg

SEQ ID NO: 3061245 - DNA, 25 bp, Homo sapien
gcgcactacagtccaggacgggcct

SEQ ID NO: 3061246 - DNA, 25 bp, Homo sapien
tataggctcacatcacctcacctgg

SEQ ID NO: 3061247 - DNA, 25 bp, Homo sapien
tacagtccaggacgggcctcaagca

SEQ ID NO: 3061248 - DNA, 25 bp, Homo sapien
atagcgcactacagtccaggacggg

SEQ ID NO: 3061249 - DNA, 25 bp, Homo sapien
tcacatcacacggaaagggatccca

SEQ ID NO: 3061250 - DNA, 25 bp, Homo sapien
cactacctggaagataaggctctca

SEQ ID NO: 3061251 - DNA, 25 bp, Homo sapien
tcagggagccagtcataatgtttgc

SEQ ID NO: 3061252 - DNA, 25 bp, Homo sapien
tcacgaggagatactgcaatggttc

SEQ ID NO: 3061253 - DNA, 25 bp, Homo sapien
ggaagtccaagatggaggggcccac

SEQ ID NO: 3061254 - DNA, 25 bp, Homo sapien
gaagtccaagatggaggggcccaca

SEQ ID NO: 3061255 - DNA, 25 bp, Homo sapien
agtccaagatggaggggcccacatc

SEQ ID NO: 3061256 - DNA, 25 bp, Homo sapien
tccaagatggaggggcccacatctg

SEQ ID NO: 3061257 - DNA, 25 bp, Homo sapien
gatcctcaacctcttatcaggaacc

SEQ ID NO: 3061258 - DNA, 25 bp, Homo sapien
gagaaaggggcctgatcctcaacct

SEQ ID NO: 3061259 - DNA, 25 bp, Homo sapien
catcatccaatggtggtaggtggaa

SEQ ID NO: 3061260 - DNA, 25 bp, Homo sapien
ctgatcctcaacctcttatcaggaa

SEQ ID NO: 3061261 - DNA, 25 bp, Homo sapien
tctccagggtgtcagacaaggctct

SEQ ID NO: 3061262 - DNA, 25 bp, Homo sapien
gatgtgggtgcaaatctgaatcaat

SEQ ID NO: 3061263 - DNA, 25 bp, Homo sapien
tctgaatcaatgtagagacatcagc

SEQ ID NO: 3061264 - DNA, 25 bp, Homo sapien
catcaggtgaattgagcaggtaggc

SEQ ID NO: 3061265 - DNA, 25 bp, Homo sapien
gggagatcagagacaccacggagca

SEQ ID NO: 3061266 - DNA, 25 bp, Homo sapien
aacaagggagtagagaggtcggagc

SEQ ID NO: 3061267 - DNA, 25 bp, Homo sapien
atcagagacaccacggagcacaggt

SEQ ID NO: 3061268 - DNA, 25 bp, Homo sapien
ggagtagagaggtcggagccagaga

SEQ ID NO: 3061269 - DNA, 25 bp, Homo sapien
accacactgcatctgtctcccagca

SEQ ID NO: 3061270 - DNA, 25 bp, Homo sapien
gggcacgcactccaccacactgcat

SEQ ID NO: 3061271 - DNA, 25 bp, Homo sapien
tcctggctcccatagctccttcccg

SEQ ID NO: 3061272 - DNA, 25 bp, Homo sapien
cttcccggttcctgggcacgcactc

SEQ ID NO: 3061273 - DNA, 25 bp, Homo sapien
gaacagatcagtcaacctcttggac

SEQ ID NO: 3061274 - DNA, 25 bp, Homo sapien
ccatgtgactccgaacagatcagtc

SEQ ID NO: 3061275 - DNA, 25 bp, Homo sapien
tgcttgactactcataagccatgtg

SEQ ID NO: 3061276 - DNA, 25 bp, Homo sapien
caacctcttggaccatcaatttctt

SEQ ID NO: 3061277 - DNA, 25 bp, Homo sapien
ttgcttcctgatatgaaggatctgg

SEQ ID NO: 3061278 - DNA, 25 bp, Homo sapien
caagcactaatgattaagacttgct

SEQ ID NO: 3061279 - DNA, 25 bp, Homo sapien
tctgggtaacccagtacttgatgag

SEQ ID NO: 3061280 - DNA, 25 bp, Homo sapien
aggagtcggctcagggaacacccat

SEQ ID NO: 3061281 - DNA, 25 bp, Homo sapien
atcatgctgcgggatgaagccacca

SEQ ID NO: 3061282 - DNA, 25 bp, Homo sapien
ggagaattggccttccttcaggatg

SEQ ID NO: 3061283 - DNA, 25 bp, Homo sapien
agacggttctatgactctggagcca

SEQ ID NO: 3061284 - DNA, 25 bp, Homo sapien
gaatgctgatcggactgagcgccat

SEQ ID NO: 3061285 - DNA, 25 bp, Homo sapien
aggagcggcacagcgccgagagcag

SEQ ID NO: 3061286 - DNA, 25 bp, Homo sapien
gagcgaggacaactcgcccgagcac

SEQ ID NO: 3061287 - DNA, 25 bp, Homo sapien
agcacgagcgaggacaactcgcccg

SEQ ID NO: 3061288 - DNA, 25 bp, Homo sapien
agcagcacgagcgaggacaactcgc

SEQ ID NO: 3061289 - DNA, 25 bp, Homo sapien
ctcccgctcgtcaccgatgaggaca

SEQ ID NO: 3061290 - DNA, 25 bp, Homo sapien
acagcaagtggcacaagatggagca

SEQ ID NO: 3061291 - DNA, 25 bp, Homo sapien
ccgctcgtcaccgatgaggacagct

SEQ ID NO: 3061292 - DNA, 25 bp, Homo sapien
gctcgtcaccgatgaggacagctgg

SEQ ID NO: 3061293 - DNA, 25 bp, Homo sapien
gccatgtagccccatcacactgtgt

SEQ ID NO: 3061294 - DNA, 25 bp, Homo sapien
tggatgaccctagatcttctttgag

SEQ ID NO: 3061295 - DNA, 25 bp, Homo sapien
tgcttggaacagagcgagtgctcac

SEQ ID NO: 3061296 - DNA, 25 bp, Homo sapien
gggaccgtgtcttgtccgttctctg

SEQ ID NO: 3061297 - DNA, 25 bp, Homo sapien
tgatgatccccacgactggagcagc

SEQ ID NO: 3061298 - DNA, 25 bp, Homo sapien
gacatgcccagctacagcaaacaca

SEQ ID NO: 3061299 - DNA, 25 bp, Homo sapien
tctccccatccgtgggagagacggg

SEQ ID NO: 3061300 - DNA, 25 bp, Homo sapien
tcagggagactacaccaggctgagg

SEQ ID NO: 3061301 - DNA, 25 bp, Homo sapien
gcagccttgatgatccgaggaagga

SEQ ID NO: 3061302 - DNA, 25 bp, Homo sapien
tttgccgaactcataggtgctgatc

SEQ ID NO: 3061303 - DNA, 25 bp, Homo sapien
ccagaagccggtcctggttcagcct

SEQ ID NO: 3061304 - DNA, 25 bp, Homo sapien
ggtgctgatcatgatggcacaggag

SEQ ID NO: 3061305 - DNA, 25 bp, Homo sapien
ccttggtgcccgactcggcccggat

SEQ ID NO: 3061306 - DNA, 25 bp, Homo sapien
ttggtgcccgactcggcccggatcc

SEQ ID NO: 3061307 - DNA, 25 bp, Homo sapien
cttggtgcccgactcggcccggatc

SEQ ID NO: 3061308 - DNA, 25 bp, Homo sapien
tgtcccctgccacggcaatctgggc

SEQ ID NO: 3061309 - DNA, 25 bp, Homo sapien
cctgtcccctgccacggcaatctgg

SEQ ID NO: 3061310 - DNA, 25 bp, Homo sapien
aacgcgaggccggctcagtgagacc

SEQ ID NO: 3061311 - DNA, 25 bp, Homo sapien
ctgcaaacgcgaggccggctcagtg

SEQ ID NO: 3061312 - DNA, 25 bp, Homo sapien
ccagagcgacctggcgttgggtctt

SEQ ID NO: 3061313 - DNA, 25 bp, Homo sapien
ctggcgttgggtctttaccacgtca

SEQ ID NO: 3061314 - DNA, 25 bp, Homo sapien
atcgctcccagagcgacctggcgtt

SEQ ID NO: 3061315 - DNA, 25 bp, Homo sapien
tttaccacgtcaaagggtagagtca

SEQ ID NO: 3061316 - DNA, 25 bp, Homo sapien
ctgagatgccaccagccacaaagct

SEQ ID NO: 3061317 - DNA, 25 bp, Homo sapien
ggtccttcggcctgaacccattgag

SEQ ID NO: 3061318 - DNA, 25 bp, Homo sapien
cttcggcctgaacccattgagccag

SEQ ID NO: 3061319 - DNA, 25 bp, Homo sapien
cacagaagtctggtccttcggcctg

SEQ ID NO: 3061320 - DNA, 25 bp, Homo sapien
tgattagagacgggaagggcaagga

SEQ ID NO: 3061321 - DNA, 25 bp, Homo sapien
ctgattagagacgggaagggcaagg

SEQ ID NO: 3061322 - DNA, 25 bp, Homo sapien
cctttgtgcatcaccccagggttcc

SEQ ID NO: 3061323 - DNA, 25 bp, Homo sapien
gggacttggctgtagaccctttgtg

SEQ ID NO: 3061324 - DNA, 25 bp, Homo sapien
ccctttgtgcatcaccccagggttc

SEQ ID NO: 3061325 - DNA, 25 bp, Homo sapien
acttggctgtagaccctttgtgcat

SEQ ID NO: 3061326 - DNA, 25 bp, Homo sapien
agctcccggtacgacacatgctgag

SEQ ID NO: 3061327 - DNA, 25 bp, Homo sapien
gagccactgcagttcgaacacaggc

SEQ ID NO: 3061328 - DNA, 25 bp, Homo sapien
ctgagaagggcacatctcgaagggc

SEQ ID NO: 3061329 - DNA, 25 bp, Homo sapien
agctttgtccgcataagctccaggg

SEQ ID NO: 3061330 - DNA, 25 bp, Homo sapien
cctatccctaggctggcagaggttg

SEQ ID NO: 3061331 - DNA, 25 bp, Homo sapien
agatcacaggtcttacatggcatca

SEQ ID NO: 3061332 - DNA, 25 bp, Homo sapien
cccctatccctaggctggcagaggt

SEQ ID NO: 3061333 - DNA, 25 bp, Homo sapien
ggcatcacctacctgctgtcccagg

SEQ ID NO: 3061334 - DNA, 25 bp, Homo sapien
gaaggccttcagttggtcataggca

SEQ ID NO: 3061335 - DNA, 25 bp, Homo sapien
catgggtgcgtagaggtcagaggtc

SEQ ID NO: 3061336 - DNA, 25 bp, Homo sapien
cagaggtcagggctcgaccacacag

SEQ ID NO: 3061337 - DNA, 25 bp, Homo sapien
ttggtcataggcagtgaagtagatg

SEQ ID NO: 3061338 - DNA, 25 bp, Homo sapien
ctcgtgcctcacgatcttcacgaag

SEQ ID NO: 3061339 - DNA, 25 bp, Homo sapien
gcctcacgatcttcacgaaggcatc

SEQ ID NO: 3061340 - DNA, 25 bp, Homo sapien
gccctcgtgcctcacgatcttcacg

SEQ ID NO: 3061341 - DNA, 25 bp, Homo sapien
cgtgcctcacgatcttcacgaaggc

SEQ ID NO: 3061342 - DNA, 25 bp, Homo sapien
gacgaatccctacggacccagctgc

SEQ ID NO: 3061343 - DNA, 25 bp, Homo sapien
caccgacgaatccctacggacccag

SEQ ID NO: 3061344 - DNA, 25 bp, Homo sapien
tccctacggacccagctgctcctca

SEQ ID NO: 3061345 - DNA, 25 bp, Homo sapien
aatccctacggacccagctgctcct

SEQ ID NO: 3061346 - DNA, 25 bp, Homo sapien
tgaagcgggtagggtcttgaaacca

SEQ ID NO: 3061347 - DNA, 25 bp, Homo sapien
acagcgggcaccatttgggcacagg

SEQ ID NO: 3061348 - DNA, 25 bp, Homo sapien
ccattgcaatacaggaggcacttcc

SEQ ID NO: 3061349 - DNA, 25 bp, Homo sapien
aggacaccattgcaatacaggaggc

SEQ ID NO: 3061350 - DNA, 25 bp, Homo sapien
ggcagtgggcccctatccctggaag

SEQ ID NO: 3061351 - DNA, 25 bp, Homo sapien
gacaggatcctagaaccttgcaggg

SEQ ID NO: 3061352 - DNA, 25 bp, Homo sapien
aaaggcagggggcattataatgaca

SEQ ID NO: 3061353 - DNA, 25 bp, Homo sapien
gtatatgctagtccatggctgtgga

SEQ ID NO: 3061354 - DNA, 25 bp, Homo sapien
atttggtataggagaggctccacag

SEQ ID NO: 3061355 - DNA, 25 bp, Homo sapien
tttggtataggagaggctccacagt

SEQ ID NO: 3061356 - DNA, 25 bp, Homo sapien
ctgagactgcaggcgaaccttcacc

SEQ ID NO: 3061357 - DNA, 25 bp, Homo sapien
gactgcaggcgaaccttcaccacgt

SEQ ID NO: 3061358 - DNA, 25 bp, Homo sapien
gagactgcaggcgaaccttcaccac

SEQ ID NO: 3061359 - DNA, 25 bp, Homo sapien
tgcaggcgaaccttcaccacgtcca

SEQ ID NO: 3061360 - DNA, 25 bp, Homo sapien
agggggctgatgcccgcagggtcct

SEQ ID NO: 3061361 - DNA, 25 bp, Homo sapien
gcctgaggccaccatttgctggagg

SEQ ID NO: 3061362 - DNA, 25 bp, Homo sapien
cctgaggccaccatttgctggaggg

SEQ ID NO: 3061363 - DNA, 25 bp, Homo sapien
gctgatgcccgcagggtcctggtca

SEQ ID NO: 3061364 - DNA, 25 bp, Homo sapien
cactgtgagactttaacccaaccct

SEQ ID NO: 3061365 - DNA, 25 bp, Homo sapien
tctcgctctgcgcactgttgccagg

SEQ ID NO: 3061366 - DNA, 25 bp, Homo sapien
ctggcaatgacctctaaagcaggga

SEQ ID NO: 3061367 - DNA, 25 bp, Homo sapien
ttccgaaggaagctagggtgccaga

SEQ ID NO: 3061368 - DNA, 25 bp, Homo sapien
ctatcgctcgaatgcagtaggagcc

SEQ ID NO: 3061369 - DNA, 25 bp, Homo sapien
gtccacctcgcacgtgtccactgcg

SEQ ID NO: 3061370 - DNA, 25 bp, Homo sapien
gagccagggtccttccctcgtccac

SEQ ID NO: 3061371 - DNA, 25 bp, Homo sapien
tcgctcgaatgcagtaggagccagg

SEQ ID NO: 3061372 - DNA, 25 bp, Homo sapien
aaaatcagagtacctgtgctgcccc

SEQ ID NO: 3061373 - DNA, 25 bp, Homo sapien
gcggatttggccctcgtggccccaa

SEQ ID NO: 3061374 - DNA, 25 bp, Homo sapien
ctacgtgcaggcgcggatttggccc

SEQ ID NO: 3061375 - DNA, 25 bp, Homo sapien
ccaaaatcagagtacctgtgctgcc

SEQ ID NO: 3061376 - DNA, 25 bp, Homo sapien
taggaacgtaggaccaggacgtctc

SEQ ID NO: 3061377 - DNA, 25 bp, Homo sapien
agatccggtgaccaagaagggcccg

SEQ ID NO: 3061378 - DNA, 25 bp, Homo sapien
gcatcgagggtgacgtgtaaacaga

SEQ ID NO: 3061379 - DNA, 25 bp, Homo sapien
tgagagcccaagttactgggcgtgg

SEQ ID NO: 3061380 - DNA, 25 bp, Homo sapien
ctaggctggtgctcgtgcggcgcgg

SEQ ID NO: 3061381 - DNA, 25 bp, Homo sapien
aggctggtgctcgtgcggcgcggcg

SEQ ID NO: 3061382 - DNA, 25 bp, Homo sapien
gctggtgctcgtgcggcgcggcgcc

SEQ ID NO: 3061383 - DNA, 25 bp, Homo sapien
tctaggctggtgctcgtgcggcgcg

SEQ ID NO: 3061384 - DNA, 25 bp, Homo sapien
ccggctccgccgcctgtgcgcggtc

SEQ ID NO: 3061385 - DNA, 25 bp, Homo sapien
accggctccgccgcctgtgcgcggt

SEQ ID NO: 3061386 - DNA, 25 bp, Homo sapien
ggctccgccgcctgtgcgcggtccg

SEQ ID NO: 3061387 - DNA, 25 bp, Homo sapien
cggctccgccgcctgtgcgcggtcc

SEQ ID NO: 3061388 - DNA, 25 bp, Homo sapien
aggccgacgccgaaagcagccaagg

SEQ ID NO: 3061389 - DNA, 25 bp, Homo sapien
gcgctcgcagcgcacctaggccgac

SEQ ID NO: 3061390 - DNA, 25 bp, Homo sapien
gcagcgcacctaggccgacgccgaa

SEQ ID NO: 3061391 - DNA, 25 bp, Homo sapien
gcacctaggccgacgccgaaagcag

SEQ ID NO: 3061392 - DNA, 25 bp, Homo sapien
tgtggccaggtgcttttccctatcc

SEQ ID NO: 3061393 - DNA, 25 bp, Homo sapien
cactcggagggtgccctctgctcag

SEQ ID NO: 3061394 - DNA, 25 bp, Homo sapien
ggcaaaagccacattacaagctgcc

SEQ ID NO: 3061395 - DNA, 25 bp, Homo sapien
ctccccgtttcagtggaccctgtgg

SEQ ID NO: 3061396 - DNA, 25 bp, Homo sapien
gctgggagctacgcgcgagggcccc

SEQ ID NO: 3061397 - DNA, 25 bp, Homo sapien
accaaccacggaacagctccaaggc

SEQ ID NO: 3061398 - DNA, 25 bp, Homo sapien
gggtcccttgcaagacacgacccag

SEQ ID NO: 3061399 - DNA, 25 bp, Homo sapien
acgacccagcaccaaccacggaaca

SEQ ID NO: 3061400 - DNA, 25 bp, Homo sapien
ctggtgagcgagtcgcgccgcagct

SEQ ID NO: 3061401 - DNA, 25 bp, Homo sapien
ctacttgacgttgaacaccatcagc

SEQ ID NO: 3061402 - DNA, 25 bp, Homo sapien
ccgccgctgccacgggctcttcttg

SEQ ID NO: 3061403 - DNA, 25 bp, Homo sapien
acgttgaacaccatcagcggccgct

SEQ ID NO: 3061404 - DNA, 25 bp, Homo sapien
ctgtccccgcggctgcggccccgcc

SEQ ID NO: 3061405 - DNA, 25 bp, Homo sapien
tggccgcccggccctcgggcgccgc

SEQ ID NO: 3061406 - DNA, 25 bp, Homo sapien
gccgcccggccctcgggcgccgcca

SEQ ID NO: 3061407 - DNA, 25 bp, Homo sapien
tgtccccgcggctgcggccccgccc

SEQ ID NO: 3061408 - DNA, 25 bp, Homo sapien
tcagcgagttgtcctccggagagca

SEQ ID NO: 3061409 - DNA, 25 bp, Homo sapien
aggcccgtgcggctctcgctgctgc

SEQ ID NO: 3061410 - DNA, 25 bp, Homo sapien
gcgtcagcgagttgtcctccggaga

SEQ ID NO: 3061411 - DNA, 25 bp, Homo sapien
agcgagttgtcctccggagagcaga

SEQ ID NO: 3061412 - DNA, 25 bp, Homo sapien
cgctcctccctcgcgggccggcggc

SEQ ID NO: 3061413 - DNA, 25 bp, Homo sapien
gctcccgctcctccctcgcgggccg

SEQ ID NO: 3061414 - DNA, 25 bp, Homo sapien
tcccgctcctccctcgcgggccggc

SEQ ID NO: 3061415 - DNA, 25 bp, Homo sapien
gcaggcggggcgcgctcccgctcct

SEQ ID NO: 3061416 - DNA, 25 bp, Homo sapien
gcaggtcgatgtaagagtggcgcac

SEQ ID NO: 3061417 - DNA, 25 bp, Homo sapien
gctggcgtcggtgctgcgtgccccg

SEQ ID NO: 3061418 - DNA, 25 bp, Homo sapien
gcctgcaggtcgatgtaagagtggc

SEQ ID NO: 3061419 - DNA, 25 bp, Homo sapien
aggctggcgtcggtgctgcgtgccc

SEQ ID NO: 3061420 - DNA, 25 bp, Homo sapien
agttggagcgcccgtcgagggacac

SEQ ID NO: 3061421 - DNA, 25 bp, Homo sapien
ggagcgcccgtcgagggacacgaac

SEQ ID NO: 3061422 - DNA, 25 bp, Homo sapien
ttggagcgcccgtcgagggacacga

SEQ ID NO: 3061423 - DNA, 25 bp, Homo sapien
ttgcgagttggagcgcccgtcgagg

SEQ ID NO: 3061424 - DNA, 25 bp, Homo sapien
gcgcgggtgcggcttcacgcccagt

SEQ ID NO: 3061425 - DNA, 25 bp, Homo sapien
gcgggtgcggcttcacgcccagttc

SEQ ID NO: 3061426 - DNA, 25 bp, Homo sapien
ggcgcgcgggtgcggcttcacgccc

SEQ ID NO: 3061427 - DNA, 25 bp, Homo sapien
gcgcgcgggtgcggcttcacgccca

SEQ ID NO: 3061428 - DNA, 25 bp, Homo sapien
atagcacagggatggtgactgagcc

SEQ ID NO: 3061429 - DNA, 25 bp, Homo sapien
aatagcacagggatggtgactgagc

SEQ ID NO: 3061430 - DNA, 25 bp, Homo sapien
ctcgttgaatagcacagggatggtg

SEQ ID NO: 3061431 - DNA, 25 bp, Homo sapien
gttgaatagcacagggatggtgact

SEQ ID NO: 3061432 - DNA, 25 bp, Homo sapien
cccgggcccgagtggcccggcatct

SEQ ID NO: 3061433 - DNA, 25 bp, Homo sapien
gctggggaaaagcgcgcgccgggcc

SEQ ID NO: 3061434 - DNA, 25 bp, Homo sapien
cggcggggccggctcgtcgcccacg

SEQ ID NO: 3061435 - DNA, 25 bp, Homo sapien
ccgagtggcccggcatctgcgggcg

SEQ ID NO: 3061436 - DNA, 25 bp, Homo sapien
catgacgttgcggtagacgttgtcc

SEQ ID NO: 3061437 - DNA, 25 bp, Homo sapien
gcttggtgcggaagaagtcatcccg

SEQ ID NO: 3061438 - DNA, 25 bp, Homo sapien
tctcgtttgttaccgtcagagggcc

SEQ ID NO: 3061439 - DNA, 25 bp, Homo sapien
tcgatggagccgcagaagatgagct

SEQ ID NO: 3061440 - DNA, 25 bp, Homo sapien
gatgcccgacgtgatggtgaccagc

SEQ ID NO: 3061441 - DNA, 25 bp, Homo sapien
taggtgccgatgtcctggatgcccg

SEQ ID NO: 3061442 - DNA, 25 bp, Homo sapien
gacacagcaggataagcaccagcag

SEQ ID NO: 3061443 - DNA, 25 bp, Homo sapien
cagacacagcaggataagcaccagc

SEQ ID NO: 3061444 - DNA, 25 bp, Homo sapien
tgccggccttccttccggattacac

SEQ ID NO: 3061445 - DNA, 25 bp, Homo sapien
gattacaccagtgccattgcgcacc

SEQ ID NO: 3061446 - DNA, 25 bp, Homo sapien
tccggattacaccagtgccattgcg

SEQ ID NO: 3061447 - DNA, 25 bp, Homo sapien
gccttccttccggattacaccagtg

SEQ ID NO: 3061448 - DNA, 25 bp, Homo sapien
tgcccacggtgagggcacgagtctc

SEQ ID NO: 3061449 - DNA, 25 bp, Homo sapien
tgtcagcaggtgcacgctcacagca

SEQ ID NO: 3061450 - DNA, 25 bp, Homo sapien
acgagtctcggagggcacgggcagg

SEQ ID NO: 3061451 - DNA, 25 bp, Homo sapien
ctctgtcccattacctgtcagcagg

SEQ ID NO: 3061452 - DNA, 25 bp, Homo sapien
tgctggcaggcgtaagtgacgccca

SEQ ID NO: 3061453 - DNA, 25 bp, Homo sapien
caggcgtaagtgacgcccagagctg

SEQ ID NO: 3061454 - DNA, 25 bp, Homo sapien
cggcgctggaactgcaccaagggct

SEQ ID NO: 3061455 - DNA, 25 bp, Homo sapien
cgtaagtgacgcccagagctggctg

SEQ ID NO: 3061456 - DNA, 25 bp, Homo sapien
tcttcttcctcaccgtggttcccag

SEQ ID NO: 3061457 - DNA, 25 bp, Homo sapien
caaaggcaaagagcgggtcttcttc

SEQ ID NO: 3061458 - DNA, 25 bp, Homo sapien
tgtctgtgaacgtccaaaggcaaag

SEQ ID NO: 3061459 - DNA, 25 bp, Homo sapien
tgaacgtccaaaggcaaagagcggg

SEQ ID NO: 3061460 - DNA, 25 bp, Homo sapien
tgatgtaggcactaaccttccacgt

SEQ ID NO: 3061461 - DNA, 25 bp, Homo sapien
aggaagaagagttggcgtgggtgag

SEQ ID NO: 3061462 - DNA, 25 bp, Homo sapien
cacccagctaatataggacagtgga

SEQ ID NO: 3061463 - DNA, 25 bp, Homo sapien
tctctacacctaggtcaggggaagg

SEQ ID NO: 3061464 - DNA, 25 bp, Homo sapien
ggtcctcatagaggatgagcgtggc

SEQ ID NO: 3061465 - DNA, 25 bp, Homo sapien
gaggatgagcgtggccggccgctca

SEQ ID NO: 3061466 - DNA, 25 bp, Homo sapien
tagaggatgagcgtggccggccgct

SEQ ID NO: 3061467 - DNA, 25 bp, Homo sapien
tcctcatagaggatgagcgtggccg

SEQ ID NO: 3061468 - DNA, 25 bp, Homo sapien
ccaggtgcccaagcgataactgagg

SEQ ID NO: 3061469 - DNA, 25 bp, Homo sapien
agggcagcttgtcaacacgccaggg

SEQ ID NO: 3061470 - DNA, 25 bp, Homo sapien
agcagagtccggttcccaaacacat

SEQ ID NO: 3061471 - DNA, 25 bp, Homo sapien
cagcacccaggtgcccaagcgataa

SEQ ID NO: 3061472 - DNA, 25 bp, Homo sapien
catacacctgcaccttgatcaggat

SEQ ID NO: 3061473 - DNA, 25 bp, Homo sapien
tacacctgcaccttgatcaggatct

SEQ ID NO: 3061474 - DNA, 25 bp, Homo sapien
acatacacctgcaccttgatcagga

SEQ ID NO: 3061475 - DNA, 25 bp, Homo sapien
atacacctgcaccttgatcaggatc

SEQ ID NO: 3061476 - DNA, 25 bp, Homo sapien
cccggtgagtcgctgggaagggtct

SEQ ID NO: 3061477 - DNA, 25 bp, Homo sapien
gcgcccggtgagtcgctgggaaggg

SEQ ID NO: 3061478 - DNA, 25 bp, Homo sapien
gtgagtcgctgggaagggtctcctc

SEQ ID NO: 3061479 - DNA, 25 bp, Homo sapien
ctgcgcccggtgagtcgctgggaag

SEQ ID NO: 3061480 - DNA, 25 bp, Homo sapien
ctgcgaagatgtgagatgaggaggg

SEQ ID NO: 3061481 - DNA, 25 bp, Homo sapien
gagggggtgatatgggggcgggcag

SEQ ID NO: 3061482 - DNA, 25 bp, Homo sapien
cgggcaggggacaggaatgccagga

SEQ ID NO: 3061483 - DNA, 25 bp, Homo sapien
gcaggggacaggaatgccaggaggc

SEQ ID NO: 3061484 - DNA, 25 bp, Homo sapien
ggctccggcggcgacttgccgggag

SEQ ID NO: 3061485 - DNA, 25 bp, Homo sapien
ctaggccgggccctagcggtccatg

SEQ ID NO: 3061486 - DNA, 25 bp, Homo sapien
gcgcgattgtctccgaccggagccg

SEQ ID NO: 3061487 - DNA, 25 bp, Homo sapien
tgcggcgcccgctcagcgcgattgt

SEQ ID NO: 3061488 - DNA, 25 bp, Homo sapien
aggcggcgcgccacaccgctggccc

SEQ ID NO: 3061489 - DNA, 25 bp, Homo sapien
gcgccacaccgctggccctccggca

SEQ ID NO: 3061490 - DNA, 25 bp, Homo sapien
acaccgctggccctccggcaccgcc

SEQ ID NO: 3061491 - DNA, 25 bp, Homo sapien
gcggcgcgccacaccgctggccctc

SEQ ID NO: 3061492 - DNA, 25 bp, Homo sapien
ggcgtaacaaccatgagacctcctg

SEQ ID NO: 3061493 - DNA, 25 bp, Homo sapien
tcttattccttattcctgaccttgg

SEQ ID NO: 3061494 - DNA, 25 bp, Homo sapien
gaatggtcttattccttattcctga

SEQ ID NO: 3061495 - DNA, 25 bp, Homo sapien
cactgagaggtagaaagggcgtaac

SEQ ID NO: 3061496 - DNA, 25 bp, Homo sapien
tgtccatgtttcaaaatgagttcct

SEQ ID NO: 3061497 - DNA, 25 bp, Homo sapien
gtttcaaaatgagttcctggacaga

SEQ ID NO: 3061498 - DNA, 25 bp, Homo sapien
ttcaaaatgagttcctggacagact

SEQ ID NO: 3061499 - DNA, 25 bp, Homo sapien
ccatgtttcaaaatgagttcctgga

SEQ ID NO: 3061500 - DNA, 25 bp, Homo sapien
caattctttcgatgtgtacaacaaa

SEQ ID NO: 3061501 - DNA, 25 bp, Homo sapien
gtctgagatgcactttgtcacattt

SEQ ID NO: 3061502 - DNA, 25 bp, Homo sapien
gttgtctgagatgcactttgtcaca

SEQ ID NO: 3061503 - DNA, 25 bp, Homo sapien
cgccatcaattctttcgatgtgtac

SEQ ID NO: 3061504 - DNA, 25 bp, Homo sapien
tccagttgcttaaacctgagccctt

SEQ ID NO: 3061505 - DNA, 25 bp, Homo sapien
ctgccatcaggaatcatgtaggaat

SEQ ID NO: 3061506 - DNA, 25 bp, Homo sapien
tcctctgctctttctttgacaaaag

SEQ ID NO: 3061507 - DNA, 25 bp, Homo sapien
ctttctttgacaaaagtgcctgctt

SEQ ID NO: 3061508 - DNA, 25 bp, Homo sapien
tcctcaggcaacagctgagccagcc

SEQ ID NO: 3061509 - DNA, 25 bp, Homo sapien
tagccagggagcgatgcttgctgtc

SEQ ID NO: 3061510 - DNA, 25 bp, Homo sapien
ttccacgcctcaggtcattgtaaag

SEQ ID NO: 3061511 - DNA, 25 bp, Homo sapien
gcagggagagcgtgttatttttcca

SEQ ID NO: 3061512 - DNA, 25 bp, Homo sapien
gctcagtctctttattaggcagcag

SEQ ID NO: 3061513 - DNA, 25 bp, Homo sapien
cagggctcagtctctttattaggca

SEQ ID NO: 3061514 - DNA, 25 bp, Homo sapien
tcagtctctttattaggcagcagga

SEQ ID NO: 3061515 - DNA, 25 bp, Homo sapien
gggctcagtctctttattaggcagc

SEQ ID NO: 3061516 - DNA, 25 bp, Homo sapien
ggcggtgcaggtagcacgcccaacc

SEQ ID NO: 3061517 - DNA, 25 bp, Homo sapien
ctgctagaatagtgtaggctgcacc

SEQ ID NO: 3061518 - DNA, 25 bp, Homo sapien
agaggacccaatggaacagctccaa

SEQ ID NO: 3061519 - DNA, 25 bp, Homo sapien
aaagcttggaggcaacttgttggag

SEQ ID NO: 3061520 - DNA, 25 bp, Homo sapien
ggtggccggttccgcttgaagaagc

SEQ ID NO: 3061521 - DNA, 25 bp, Homo sapien
caggggtggccggttccgcttgaag

SEQ ID NO: 3061522 - DNA, 25 bp, Homo sapien
tccaggggtggccggttccgcttga

SEQ ID NO: 3061523 - DNA, 25 bp, Homo sapien
acccaccagattggaatggccctct

SEQ ID NO: 3061524 - DNA, 25 bp, Homo sapien
accagattggaatggccctctcctc

SEQ ID NO: 3061525 - DNA, 25 bp, Homo sapien
cagcacccaccagattggaatggcc

SEQ ID NO: 3061526 - DNA, 25 bp, Homo sapien
gcacccaccagattggaatggccct

SEQ ID NO: 3061527 - DNA, 25 bp, Homo sapien
tgcgtgcgactgcagcacaaactga

SEQ ID NO: 3061528 - DNA, 25 bp, Homo sapien
gcagcacaaactgatccagaggcct

SEQ ID NO: 3061529 - DNA, 25 bp, Homo sapien
agggaggacacgttgaaccatgcgt

SEQ ID NO: 3061530 - DNA, 25 bp, Homo sapien
ttgaaccatgcgtgcgactgcagca

SEQ ID NO: 3061531 - DNA, 25 bp, Homo sapien
ttgaaagccgtttacacccacaaga

SEQ ID NO: 3061532 - DNA, 25 bp, Homo sapien
tgaaagccgtttacacccacaagag

SEQ ID NO: 3061533 - DNA, 25 bp, Homo sapien
ggaaggccagcaccgtgaccatggc

SEQ ID NO: 3061534 - DNA, 25 bp, Homo sapien
aggaaggccagcaccgtgaccatgg

SEQ ID NO: 3061535 - DNA, 25 bp, Homo sapien
cacactgcaccacagtacagggcgc

SEQ ID NO: 3061536 - DNA, 25 bp, Homo sapien
caccacagtacagggcgccgagtcg

SEQ ID NO: 3061537 - DNA, 25 bp, Homo sapien
caagtgtctttcagctcaccccaga

SEQ ID NO: 3061538 - DNA, 25 bp, Homo sapien
tatgctccttaacgtactgggaagc

SEQ ID NO: 3061539 - DNA, 25 bp, Homo sapien
agtgctcccagggaccaagcgtggc

SEQ ID NO: 3061540 - DNA, 25 bp, Homo sapien
catgttcacttgaagtgctcccagg

SEQ ID NO: 3061541 - DNA, 25 bp, Homo sapien
tcctgaagcctcgagggctgctcgg

SEQ ID NO: 3061542 - DNA, 25 bp, Homo sapien
tcgggctctggcaggaagatctgtc

SEQ ID NO: 3061543 - DNA, 25 bp, Homo sapien
ggatcctgaagcctcgagggctgct

SEQ ID NO: 3061544 - DNA, 25 bp, Homo sapien
tctgcgatcccgcttgtgatgggcc

SEQ ID NO: 3061545 - DNA, 25 bp, Homo sapien
ggctgtatatccaggatgtagagca

SEQ ID NO: 3061546 - DNA, 25 bp, Homo sapien
ctgggactgtcccggaaggtggatg

SEQ ID NO: 3061547 - DNA, 25 bp, Homo sapien
ctggggctgtatatccaggatgtag

SEQ ID NO: 3061548 - DNA, 25 bp, Homo sapien
tagagcaggtcggagggctgggact

SEQ ID NO: 3061549 - DNA, 25 bp, Homo sapien
tgaagaccattcacagtcccagggc

SEQ ID NO: 3061550 - DNA, 25 bp, Homo sapien
ctgaggtgaagaccattcacagtcc

SEQ ID NO: 3061551 - DNA, 25 bp, Homo sapien
gaggtgaagaccattcacagtccca

SEQ ID NO: 3061552 - DNA, 25 bp, Homo sapien
ggtgaagaccattcacagtcccagg

SEQ ID NO: 3061553 - DNA, 25 bp, Homo sapien
agccagggacgcgaggctccccaat

SEQ ID NO: 3061554 - DNA, 25 bp, Homo sapien
ccagggacgcgaggctccccaatac

SEQ ID NO: 3061555 - DNA, 25 bp, Homo sapien
cagccagggacgcgaggctccccaa

SEQ ID NO: 3061556 - DNA, 25 bp, Homo sapien
cccagccagggacgcgaggctcccc

SEQ ID NO: 3061557 - DNA, 25 bp, Homo sapien
ctcataggtgtgctccactttgggt

SEQ ID NO: 3061558 - DNA, 25 bp, Homo sapien
gtccaagctgttctgctccctctca

SEQ ID NO: 3061559 - DNA, 25 bp, Homo sapien
gtgctccactttgggtccccagctg

SEQ ID NO: 3061560 - DNA, 25 bp, Homo sapien
ggtccccagctgtccaagctgttct

SEQ ID NO: 3061561 - DNA, 25 bp, Homo sapien
ggcctctgcccggaccggcacgtcc

SEQ ID NO: 3061562 - DNA, 25 bp, Homo sapien
cctctgcccggaccggcacgtccag

SEQ ID NO: 3061563 - DNA, 25 bp, Homo sapien
tgcccggaccggcacgtccagcagc

SEQ ID NO: 3061564 - DNA, 25 bp, Homo sapien
tctgcccggaccggcacgtccagca

SEQ ID NO: 3061565 - DNA, 25 bp, Homo sapien
cgctcaccaacatcgcgattcctat

SEQ ID NO: 3061566 - DNA, 25 bp, Homo sapien
cccacgctcaccaacatcgcgattc

SEQ ID NO: 3061567 - DNA, 25 bp, Homo sapien
agattccccacgctcaccaacatcg

SEQ ID NO: 3061568 - DNA, 25 bp, Homo sapien
tccagattccccacgctcaccaaca

SEQ ID NO: 3061569 - DNA, 25 bp, Homo sapien
cagcaccaccctggtctcattctcc

SEQ ID NO: 3061570 - DNA, 25 bp, Homo sapien
ctgattacagatgagtctctcaaag

SEQ ID NO: 3061571 - DNA, 25 bp, Homo sapien
gattacagatgagtctctcaaagcc

SEQ ID NO: 3061572 - DNA, 25 bp, Homo sapien
accaccctggtctcattctccttct

SEQ ID NO: 3061573 - DNA, 25 bp, Homo sapien
aggacattatctgccccaactagga

SEQ ID NO: 3061574 - DNA, 25 bp, Homo sapien
ctcgacattgcttagggcccgcatg

SEQ ID NO: 3061575 - DNA, 25 bp, Homo sapien
gccctcgttggctgcgtccatctgc

SEQ ID NO: 3061576 - DNA, 25 bp, Homo sapien
ttagggcccgcatgtagtgggcgcc

SEQ ID NO: 3061577 - DNA, 25 bp, Homo sapien
ttccccacagtccaggacgattcgt

SEQ ID NO: 3061578 - DNA, 25 bp, Homo sapien
gaagctggggcacacatacgtcatc

SEQ ID NO: 3061579 - DNA, 25 bp, Homo sapien
gcacacatacgtcatcttccccaca

SEQ ID NO: 3061580 - DNA, 25 bp, Homo sapien
ccccacagtccaggacgattcgtgt

SEQ ID NO: 3061581 - DNA, 25 bp, Homo sapien
agggacacattgaggctgagcacaa

SEQ ID NO: 3061582 - DNA, 25 bp, Homo sapien
ggccattccagcctccgtgggcggt

SEQ ID NO: 3061583 - DNA, 25 bp, Homo sapien
cctccgtgggcggtagggacacatt

SEQ ID NO: 3061584 - DNA, 25 bp, Homo sapien
tcctgcacatgggtgtctccatgca

SEQ ID NO: 3061585 - DNA, 25 bp, Homo sapien
gggctgtgctttccgcccagatcca

SEQ ID NO: 3061586 - DNA, 25 bp, Homo sapien
gctgtgctttccgcccagatccagg

SEQ ID NO: 3061587 - DNA, 25 bp, Homo sapien
ggctgtgctttccgcccagatccag

SEQ ID NO: 3061588 - DNA, 25 bp, Homo sapien
tctgaggaatgttgtgcccagtggc

SEQ ID NO: 3061589 - DNA, 25 bp, Homo sapien
tggctccaacacacatctggatgtt

SEQ ID NO: 3061590 - DNA, 25 bp, Homo sapien
tgaggaatgttgtgcccagtggctc

SEQ ID NO: 3061591 - DNA, 25 bp, Homo sapien
tagcttctgaggaatgttgtgccca

SEQ ID NO: 3061592 - DNA, 25 bp, Homo sapien
tagctggacagaggccttcaccact

SEQ ID NO: 3061593 - DNA, 25 bp, Homo sapien
gtgaatcttgcaccagtagctggac

SEQ ID NO: 3061594 - DNA, 25 bp, Homo sapien
tcttcacagcaggattcagtgaatc

SEQ ID NO: 3061595 - DNA, 25 bp, Homo sapien
ctcacgggtgtcttggtctgaggta

SEQ ID NO: 3061596 - DNA, 25 bp, Homo sapien
tggccccgtaagctcccacgatcag

SEQ ID NO: 3061597 - DNA, 25 bp, Homo sapien
gccccgtaagctcccacgatcaggt

SEQ ID NO: 3061598 - DNA, 25 bp, Homo sapien
gttggccccgtaagctcccacgatc

SEQ ID NO: 3061599 - DNA, 25 bp, Homo sapien
tggttggccccgtaagctcccacga

SEQ ID NO: 3061600 - DNA, 25 bp, Homo sapien
cacttccagcgaatgtccaagggcc

SEQ ID NO: 3061601 - DNA, 25 bp, Homo sapien
gagcccctggccgtgtctcttggca

SEQ ID NO: 3061602 - DNA, 25 bp, Homo sapien
tgtccaagggcctttcttgggcatt

SEQ ID NO: 3061603 - DNA, 25 bp, Homo sapien
tggcagtccatagtgggacaccagg

SEQ ID NO: 3061604 - DNA, 25 bp, Homo sapien
tctacggcacctcgaagggagaagc

SEQ ID NO: 3061605 - DNA, 25 bp, Homo sapien
gcacctcgaagggagaagccaaagg

SEQ ID NO: 3061606 - DNA, 25 bp, Homo sapien
cgatgtctacggcacctcgaaggga

SEQ ID NO: 3061607 - DNA, 25 bp, Homo sapien
gtcatcgatgtctacggcacctcga

SEQ ID NO: 3061608 - DNA, 25 bp, Homo sapien
acctgggagggacgtgacctcagcc

SEQ ID NO: 3061609 - DNA, 25 bp, Homo sapien
ggacctgggagggacgtgacctcag

SEQ ID NO: 3061610 - DNA, 25 bp, Homo sapien
tgggagggacgtgacctcagcccct

SEQ ID NO: 3061611 - DNA, 25 bp, Homo sapien
cctgggagggacgtgacctcagccc

SEQ ID NO: 3061612 - DNA, 25 bp, Homo sapien
acaccagcacttggccccggccact

SEQ ID NO: 3061613 - DNA, 25 bp, Homo sapien
tctgacccaggaacaccagcacttg

SEQ ID NO: 3061614 - DNA, 25 bp, Homo sapien
ccccgtagggggcagccactgcaat

SEQ ID NO: 3061615 - DNA, 25 bp, Homo sapien
caggaacaccagcacttggccccgg

SEQ ID NO: 3061616 - DNA, 25 bp, Homo sapien
tccatatacagtggagcgcccacca

SEQ ID NO: 3061617 - DNA, 25 bp, Homo sapien
tgcgatggcagagccgaatcgccca

SEQ ID NO: 3061618 - DNA, 25 bp, Homo sapien
gaatcgcccatagagctgtgtgcca

SEQ ID NO: 3061619 - DNA, 25 bp, Homo sapien
cacttcggccagttttcggtctgcc

SEQ ID NO: 3061620 - DNA, 25 bp, Homo sapien
tccccgttgacgtcagtgacagcca

SEQ ID NO: 3061621 - DNA, 25 bp, Homo sapien
tgacgtcagtgacagccactgaatg

SEQ ID NO: 3061622 - DNA, 25 bp, Homo sapien
ctgaatgcccaaaatacgacgccat

SEQ ID NO: 3061623 - DNA, 25 bp, Homo sapien
ccactgaatgcccaaaatacgacgc

SEQ ID NO: 3061624 - DNA, 25 bp, Homo sapien
ccgatgcagcctctggtagtaggaa

SEQ ID NO: 3061625 - DNA, 25 bp, Homo sapien
tggtagtaggaatccaaaatttcca

SEQ ID NO: 3061626 - DNA, 25 bp, Homo sapien
cgcagccgatgcagcctctggtagt

SEQ ID NO: 3061627 - DNA, 25 bp, Homo sapien
ctgctctccgcgcagccgatgcagc

SEQ ID NO: 3061628 - DNA, 25 bp, Homo sapien
gcgcaggcgagagcatcattcttgt

SEQ ID NO: 3061629 - DNA, 25 bp, Homo sapien
agcgcaggcgagagcatcattcttg

SEQ ID NO: 3061630 - DNA, 25 bp, Homo sapien
ctccaagtgggggcaccgacgacat

SEQ ID NO: 3061631 - DNA, 25 bp, Homo sapien
ccaagtgggggcaccgacgacatat

SEQ ID NO: 3061632 - DNA, 25 bp, Homo sapien
tccaagtgggggcaccgacgacata

SEQ ID NO: 3061633 - DNA, 25 bp, Homo sapien
caagtgggggcaccgacgacatatt

SEQ ID NO: 3061634 - DNA, 25 bp, Homo sapien
tgtagtgttgagatccccgtcgaac

SEQ ID NO: 3061635 - DNA, 25 bp, Homo sapien
ctgtagtgttgagatccccgtcgaa

SEQ ID NO: 3061636 - DNA, 25 bp, Homo sapien
cgtctgcggtgggcggtgaccctcg

SEQ ID NO: 3061637 - DNA, 25 bp, Homo sapien
tctgcggtgggcggtgaccctcggg

SEQ ID NO: 3061638 - DNA, 25 bp, Homo sapien
ctgcggtgggcggtgaccctcgggg

SEQ ID NO: 3061639 - DNA, 25 bp, Homo sapien
gtctgcggtgggcggtgaccctcgg

SEQ ID NO: 3061640 - DNA, 25 bp, Homo sapien
tgccacaaaaggatgcctgggcggt

SEQ ID NO: 3061641 - DNA, 25 bp, Homo sapien
cagtagccgtcgaagtactctgggt

SEQ ID NO: 3061642 - DNA, 25 bp, Homo sapien
tactctgggttgctggagtcaaagg

SEQ ID NO: 3061643 - DNA, 25 bp, Homo sapien
tcgagaaaatatccgcaactggagc

SEQ ID NO: 3061644 - DNA, 25 bp, Homo sapien
taagaaataatagccgccaggagcc

SEQ ID NO: 3061645 - DNA, 25 bp, Homo sapien
ctaagaaataatagccgccaggagc

SEQ ID NO: 3061646 - DNA, 25 bp, Homo sapien
aataatagccgccaggagccccaag

SEQ ID NO: 3061647 - DNA, 25 bp, Homo sapien
agaaataatagccgccaggagcccc

SEQ ID NO: 3061648 - DNA, 25 bp, Homo sapien
cacggagctgaagcccgcttcacag

SEQ ID NO: 3061649 - DNA, 25 bp, Homo sapien
gcttcacagtaacgcttgtcccagc

SEQ ID NO: 3061650 - DNA, 25 bp, Homo sapien
tgagtgaccacggagctgaagcccg

SEQ ID NO: 3061651 - DNA, 25 bp, Homo sapien
gaagcccgcttcacagtaacgcttg

SEQ ID NO: 3061652 - DNA, 25 bp, Homo sapien
aaaaagcagctacctacgggcgtct

SEQ ID NO: 3061653 - DNA, 25 bp, Homo sapien
aaatcattttccacgtaaatgcggc

SEQ ID NO: 3061654 - DNA, 25 bp, Homo sapien
acgtaaatgcggctcagggtgttcc

SEQ ID NO: 3061655 - DNA, 25 bp, Homo sapien
cctcagtcttttctaggacgttcca

SEQ ID NO: 3061656 - DNA, 25 bp, Homo sapien
ggacgggcgcgagacttgggctcct

SEQ ID NO: 3061657 - DNA, 25 bp, Homo sapien
agtggggacgggcgcgagacttggg

SEQ ID NO: 3061658 - DNA, 25 bp, Homo sapien
ctgcccccgattgttccctgtgccc

SEQ ID NO: 3061659 - DNA, 25 bp, Homo sapien
tgcccccgattgttccctgtgccct

SEQ ID NO: 3061660 - DNA, 25 bp, Homo sapien
gagcctacatttcgggtctcatcac

SEQ ID NO: 3061661 - DNA, 25 bp, Homo sapien
cccagtccttggcgggccttgaagg

SEQ ID NO: 3061662 - DNA, 25 bp, Homo sapien
tgtaaagtttgggagcctacatttc

SEQ ID NO: 3061663 - DNA, 25 bp, Homo sapien
acaatgacgtcgctccagctgacga

SEQ ID NO: 3061664 - DNA, 25 bp, Homo sapien
tccctctgaccccaaccttgctctc

SEQ ID NO: 3061665 - DNA, 25 bp, Homo sapien
aaggcacaagaaggggtggggcgct

SEQ ID NO: 3061666 - DNA, 25 bp, Homo sapien
gtggggcgctgaagcccggcagtcc

SEQ ID NO: 3061667 - DNA, 25 bp, Homo sapien
agcccggcagtccacgtccctctga

SEQ ID NO: 3061668 - DNA, 25 bp, Homo sapien
ggcacaggaacacgccgcccgtctc

SEQ ID NO: 3061669 - DNA, 25 bp, Homo sapien
cacaggaacacgccgcccgtctcct

SEQ ID NO: 3061670 - DNA, 25 bp, Homo sapien
gggcacaggaacacgccgcccgtct

SEQ ID NO: 3061671 - DNA, 25 bp, Homo sapien
aggggcacaggaacacgccgcccgt

SEQ ID NO: 3061672 - DNA, 25 bp, Homo sapien
ctgcataggaaagctgggtgagcgc

SEQ ID NO: 3061673 - DNA, 25 bp, Homo sapien
tgcataggaaagctgggtgagcgcc

SEQ ID NO: 3061674 - DNA, 25 bp, Homo sapien
gggcctgcatagaaggtgagctgca

SEQ ID NO: 3061675 - DNA, 25 bp, Homo sapien
gtgagctgcactgggtccaggttca

SEQ ID NO: 3061676 - DNA, 25 bp, Homo sapien
ccattggggcctgcatagaaggtga

SEQ ID NO: 3061677 - DNA, 25 bp, Homo sapien
gaaggtgagctgcactgggtccagg

SEQ ID NO: 3061678 - DNA, 25 bp, Homo sapien
gcttgcagtggacacaaagctctgg

SEQ ID NO: 3061679 - DNA, 25 bp, Homo sapien
gggcttgcagtggacacaaagctct

SEQ ID NO: 3061680 - DNA, 25 bp, Homo sapien
ggcttgcagtggacacaaagctctg

SEQ ID NO: 3061681 - DNA, 25 bp, Homo sapien
gagggcttgcagtggacacaaagct

SEQ ID NO: 3061682 - DNA, 25 bp, Homo sapien
aacttgctgagcaacgggcagagca

SEQ ID NO: 3061683 - DNA, 25 bp, Homo sapien
gctatagcccctggactcatggtgg

SEQ ID NO: 3061684 - DNA, 25 bp, Homo sapien
aactggaaccccaagtaacttgctg

SEQ ID NO: 3061685 - DNA, 25 bp, Homo sapien
catggtggctagaattgccaggaag

SEQ ID NO: 3061686 - DNA, 25 bp, Homo sapien
tccttataccaagtagaggtgctca

SEQ ID NO: 3061687 - DNA, 25 bp, Homo sapien
tgtcatctcagtgcccttaaagtag

SEQ ID NO: 3061688 - DNA, 25 bp, Homo sapien
tggcatacagaactccacctggagg

SEQ ID NO: 3061689 - DNA, 25 bp, Homo sapien
gcagatctgagtactcaaccccagg

SEQ ID NO: 3061690 - DNA, 25 bp, Homo sapien
tcaagagttgtgtttgcctgccact

SEQ ID NO: 3061691 - DNA, 25 bp, Homo sapien
aatttgcgaaggcaggaacagagcc

SEQ ID NO: 3061692 - DNA, 25 bp, Homo sapien
ccagtgctagttatccaagaagtga

SEQ ID NO: 3061693 - DNA, 25 bp, Homo sapien
cagagtatggctcaatctacaagct

SEQ ID NO: 3061694 - DNA, 25 bp, Homo sapien
aattgttaacctcatcaaaggagat

SEQ ID NO: 3061695 - DNA, 25 bp, Homo sapien
aaccaaccaattctagccacacgaa

SEQ ID NO: 3061696 - DNA, 25 bp, Homo sapien
aatagttaggaaaatgccaaagtgg

SEQ ID NO: 3061697 - DNA, 25 bp, Homo sapien
tgttaacctcatcaaaggagatggg

SEQ ID NO: 3061698 - DNA, 25 bp, Homo sapien
gtactaggaaggcaaatggactgac

SEQ ID NO: 3061699 - DNA, 25 bp, Homo sapien
tttactgtctaaactgagctgggca

SEQ ID NO: 3061700 - DNA, 25 bp, Homo sapien
aacagcaaaagtacatgagggagac

SEQ ID NO: 3061701 - DNA, 25 bp, Homo sapien
ggagactgttaaagatgagcatccc

SEQ ID NO: 3061702 - DNA, 25 bp, Homo sapien
tgagctacaaaaagcagcatttacg

SEQ ID NO: 3061703 - DNA, 25 bp, Homo sapien
ggaaccttttttatatgagctacaa

SEQ ID NO: 3061704 - DNA, 25 bp, Homo sapien
ggatcacttaaagagctggatgtaa

SEQ ID NO: 3061705 - DNA, 25 bp, Homo sapien
tcttaattcaactagggcaaacata

SEQ ID NO: 3061706 - DNA, 25 bp, Homo sapien
tgagggataccaagataacagtgcc

SEQ ID NO: 3061707 - DNA, 25 bp, Homo sapien
caaatgtgtggctccgttgatgtgg

SEQ ID NO: 3061708 - DNA, 25 bp, Homo sapien
cactttagacacatgagctcctctc

SEQ ID NO: 3061709 - DNA, 25 bp, Homo sapien
taacagtgccaaatgtgtggctccg

SEQ ID NO: 3061710 - DNA, 25 bp, Homo sapien
ttatatcaggttccaggtgagacgc

SEQ ID NO: 3061711 - DNA, 25 bp, Homo sapien
ctgtggcgctgagaaggcaagacca

SEQ ID NO: 3061712 - DNA, 25 bp, Homo sapien
tctaaacttgacagtttggagatgt

SEQ ID NO: 3061713 - DNA, 25 bp, Homo sapien
gataacgtaacgtcaccaaagatgg

SEQ ID NO: 3061714 - DNA, 25 bp, Homo sapien
gggacaaattgagaggaggacagga

SEQ ID NO: 3061715 - DNA, 25 bp, Homo sapien
catcccagcttctacttgctggtat

SEQ ID NO: 3061716 - DNA, 25 bp, Homo sapien
gctggtattaatggctcaacacccc

SEQ ID NO: 3061717 - DNA, 25 bp, Homo sapien
cccctgcaagccaaaactcaattct

SEQ ID NO: 3061718 - DNA, 25 bp, Homo sapien
aagatggggtgaagtagtgggtgaa

SEQ ID NO: 3061719 - DNA, 25 bp, Homo sapien
tgcagcaggccgtggagcaagtagg

SEQ ID NO: 3061720 - DNA, 25 bp, Homo sapien
caggccgtggagcaagtagggtggg

SEQ ID NO: 3061721 - DNA, 25 bp, Homo sapien
tggggggatgttgcaggtcctgacc

SEQ ID NO: 3061722 - DNA, 25 bp, Homo sapien
tggatgggatggctagcgagaaagg

SEQ ID NO: 3061723 - DNA, 25 bp, Homo sapien
gagtgagtgaggtgggacaaagaaa

SEQ ID NO: 3061724 - DNA, 25 bp, Homo sapien
ctgaggcgggaatgatgtggatggg

SEQ ID NO: 3061725 - DNA, 25 bp, Homo sapien
gatggctagcgagaaaggtggcagg

SEQ ID NO: 3061726 - DNA, 25 bp, Homo sapien
tacttgagtaagaacgccgggagga

SEQ ID NO: 3061727 - DNA, 25 bp, Homo sapien
ttagaacgaatgaagtcccgacgcc

SEQ ID NO: 3061728 - DNA, 25 bp, Homo sapien
catctgagtcatgggagcgcttgga

SEQ ID NO: 3061729 - DNA, 25 bp, Homo sapien
tccccagggtagcagtcagaatgtg

SEQ ID NO: 3061730 - DNA, 25 bp, Homo sapien
tcttcttggtggtgcgggactgcca

SEQ ID NO: 3061731 - DNA, 25 bp, Homo sapien
tactgggttggctccgatggctaga

SEQ ID NO: 3061732 - DNA, 25 bp, Homo sapien
tgcgtccattctgcctcctgaggaa

SEQ ID NO: 3061733 - DNA, 25 bp, Homo sapien
tagaccggctgctccgtttggtgcc

SEQ ID NO: 3061734 - DNA, 25 bp, Homo sapien
tgatcacttacatcccctcctaagg

SEQ ID NO: 3061735 - DNA, 25 bp, Homo sapien
catcccctcctaaggccttctttgc

SEQ ID NO: 3061736 - DNA, 25 bp, Homo sapien
gagggctcggtcatgctggtttcct

SEQ ID NO: 3061737 - DNA, 25 bp, Homo sapien
tggttctgagggctcggtcatgctg

SEQ ID NO: 3061738 - DNA, 25 bp, Homo sapien
gatgcagcttttaggcttgggagaa

SEQ ID NO: 3061739 - DNA, 25 bp, Homo sapien
taggttttactttgcagtgtgctgg

SEQ ID NO: 3061740 - DNA, 25 bp, Homo sapien
cgccttgatgcagcttttaggcttg

SEQ ID NO: 3061741 - DNA, 25 bp, Homo sapien
gggatgtagtggtaatactcaggct

SEQ ID NO: 3061742 - DNA, 25 bp, Homo sapien
atcaagattactgctcccatcagag

SEQ ID NO: 3061743 - DNA, 25 bp, Homo sapien
taatttggataatgttgaggcaagg

SEQ ID NO: 3061744 - DNA, 25 bp, Homo sapien
ttgaggcaagggaccctccatcctg

SEQ ID NO: 3061745 - DNA, 25 bp, Homo sapien
taccttctgcagtccttggtcagaa

SEQ ID NO: 3061746 - DNA, 25 bp, Homo sapien
tattgattcgagtttgacaggagcc

SEQ ID NO: 3061747 - DNA, 25 bp, Homo sapien
tctcatcgggttttgttccatcttc

SEQ ID NO: 3061748 - DNA, 25 bp, Homo sapien
tggttggtttgaacatgggaccact

SEQ ID NO: 3061749 - DNA, 25 bp, Homo sapien
tgatgccttgggaggctaacccagg

SEQ ID NO: 3061750 - DNA, 25 bp, Homo sapien
gggaatcattgtaatagtgtcataa

SEQ ID NO: 3061751 - DNA, 25 bp, Homo sapien
ggtaataatcactcctcacaacaac

SEQ ID NO: 3061752 - DNA, 25 bp, Homo sapien
gatgtgctaggcatcccttcaagca

SEQ ID NO: 3061753 - DNA, 25 bp, Homo sapien
actgtaagttgttcttatctctatc

SEQ ID NO: 3061754 - DNA, 25 bp, Homo sapien
tataattatctgtacaaccctctga

SEQ ID NO: 3061755 - DNA, 25 bp, Homo sapien
ttttaaggattataattatctgtac

SEQ ID NO: 3061756 - DNA, 25 bp, Homo sapien
gattataattatctgtacaaccctc

SEQ ID NO: 3061757 - DNA, 25 bp, Homo sapien
taaggattataattatctgtacaac

SEQ ID NO: 3061758 - DNA, 25 bp, Homo sapien
ctctctctgcttcagatcttttaat

SEQ ID NO: 3061759 - DNA, 25 bp, Homo sapien
catggagccgccgaagggctttttc

SEQ ID NO: 3061760 - DNA, 25 bp, Homo sapien
catccttgcgggatcttgaagagac

SEQ ID NO: 3061761 - DNA, 25 bp, Homo sapien
tttgctctgccaactcatggagccg

SEQ ID NO: 3061762 - DNA, 25 bp, Homo sapien
gaaagtagtatgtgaggctttgcat

SEQ ID NO: 3061763 - DNA, 25 bp, Homo sapien
tgaaagtagtatgtgaggctttgca

SEQ ID NO: 3061764 - DNA, 25 bp, Homo sapien
ctggtcagcctgctgaaagtagtat

SEQ ID NO: 3061765 - DNA, 25 bp, Homo sapien
ccaaattagaaggatttgctttcaa

SEQ ID NO: 3061766 - DNA, 25 bp, Homo sapien
cttgtgatctgggctcccaaattag

SEQ ID NO: 3061767 - DNA, 25 bp, Homo sapien
gatctgggctcccaaattagaagga

SEQ ID NO: 3061768 - DNA, 25 bp, Homo sapien
tgtgatctgggctcccaaattagaa

SEQ ID NO: 3061769 - DNA, 25 bp, Homo sapien
tagtagagatgaagtttcattttct

SEQ ID NO: 3061770 - DNA, 25 bp, Homo sapien
agtcttcaattcctgacctcaggtg

SEQ ID NO: 3061771 - DNA, 25 bp, Homo sapien
gtttcattttcttggccaggctagt

SEQ ID NO: 3061772 - DNA, 25 bp, Homo sapien
gtagagatgaagtttcattttcttg

SEQ ID NO: 3061773 - DNA, 25 bp, Homo sapien
actcagcaaaccatctcaaactgag

SEQ ID NO: 3061774 - DNA, 25 bp, Homo sapien
gttcatcacatgatgcctaacttag

SEQ ID NO: 3061775 - DNA, 25 bp, Homo sapien
tttccgacctgaaccagttcacttc

SEQ ID NO: 3061776 - DNA, 25 bp, Homo sapien
ttccgacctgaaccagttcacttct

SEQ ID NO: 3061777 - DNA, 25 bp, Homo sapien
tgggagttcatcacatgatgcctaa

SEQ ID NO: 3061778 - DNA, 25 bp, Homo sapien
cactgatccttcaaaagaggtgact

SEQ ID NO: 3061779 - DNA, 25 bp, Homo sapien
aactgtccctagtggtgctttgtca

SEQ ID NO: 3061780 - DNA, 25 bp, Homo sapien
gaatgcctaactccaagtgtctcct

SEQ ID NO: 3061781 - DNA, 25 bp, Homo sapien
gctttgtcatactgctcacctagca

SEQ ID NO: 3061782 - DNA, 25 bp, Homo sapien
gatcctgcataccaaaatcacagcc

SEQ ID NO: 3061783 - DNA, 25 bp, Homo sapien
acacccagctgaacctgtctttaaa

SEQ ID NO: 3061784 - DNA, 25 bp, Homo sapien
aaaaagatgtgttgtatctcgacca

SEQ ID NO: 3061785 - DNA, 25 bp, Homo sapien
tatttctggctaagcataatctggc

SEQ ID NO: 3061786 - DNA, 25 bp, Homo sapien
gcacgtgctgccacgcccggctttt

SEQ ID NO: 3061787 - DNA, 25 bp, Homo sapien
aggcacgtgctgccacgcccggctt

SEQ ID NO: 3061788 - DNA, 25 bp, Homo sapien
acgtgctgccacgcccggctttttt

SEQ ID NO: 3061789 - DNA, 25 bp, Homo sapien
agaggggttttcaccatgttagcca

SEQ ID NO: 3061790 - DNA, 25 bp, Homo sapien
gattcataataatcctgtgtgcctt

SEQ ID NO: 3061791 - DNA, 25 bp, Homo sapien
attcataataatcctgtgtgccttc

SEQ ID NO: 3061792 - DNA, 25 bp, Homo sapien
tattctggatcacctagatgagcac

SEQ ID NO: 3061793 - DNA, 25 bp, Homo sapien
cacaaggtgtgcaggagaataaaca

SEQ ID NO: 3061794 - DNA, 25 bp, Homo sapien
cagtagtatcacacccttagttggg

SEQ ID NO: 3061795 - DNA, 25 bp, Homo sapien
tctactacattcaggttgaggacag

SEQ ID NO: 3061796 - DNA, 25 bp, Homo sapien
ctaacacctcggcttctggagtagc

SEQ ID NO: 3061797 - DNA, 25 bp, Homo sapien
ggggggcaggtcttgtacattgctc

SEQ ID NO: 3061798 - DNA, 25 bp, Homo sapien
cgattctaacacctcggcttctgga

SEQ ID NO: 3061799 - DNA, 25 bp, Homo sapien
tgtaattagcttagattggggggca

SEQ ID NO: 3061800 - DNA, 25 bp, Homo sapien
aaaagaatgtccaaaggtatgtagt

SEQ ID NO: 3061801 - DNA, 25 bp, Homo sapien
agaaaagaatgtccaaaggtatgta

SEQ ID NO: 3061802 - DNA, 25 bp, Homo sapien
gaaaagaatgtccaaaggtatgtag

SEQ ID NO: 3061803 - DNA, 25 bp, Homo sapien
aagtcacccaagatcaaatggcttg

SEQ ID NO: 3061804 - DNA, 25 bp, Homo sapien
gccatcttctgtatatcagtaacta

SEQ ID NO: 3061805 - DNA, 25 bp, Homo sapien
tagttcaacaagtccagcttaggag

SEQ ID NO: 3061806 - DNA, 25 bp, Homo sapien
taacaagccagaactgtcctatagg

SEQ ID NO: 3061807 - DNA, 25 bp, Homo sapien
gcagataaagattggcagacacaag

SEQ ID NO: 3061808 - DNA, 25 bp, Homo sapien
ataaagattggcagacacaagaaat

SEQ ID NO: 3061809 - DNA, 25 bp, Homo sapien
ttggggggtatactcataaaatcca

SEQ ID NO: 3061810 - DNA, 25 bp, Homo sapien
tggggggtatactcataaaatccaa

SEQ ID NO: 3061811 - DNA, 25 bp, Homo sapien
ctgttagcaagtaactacaactcac

SEQ ID NO: 3061812 - DNA, 25 bp, Homo sapien
ttctgttagcaagtaactacaactc

SEQ ID NO: 3061813 - DNA, 25 bp, Homo sapien
tcttctgttagcaagtaactacaac

SEQ ID NO: 3061814 - DNA, 25 bp, Homo sapien
cttcttctgttagcaagtaactaca

SEQ ID NO: 3061815 - DNA, 25 bp, Homo sapien
atgtttctgatattgcttatcacac

SEQ ID NO: 3061816 - DNA, 25 bp, Homo sapien
gtcttccaaggctttggcaattgcc

SEQ ID NO: 3061817 - DNA, 25 bp, Homo sapien
gatattgcttatcacacagttcaca

SEQ ID NO: 3061818 - DNA, 25 bp, Homo sapien
caaggctttggcaattgccttctct

SEQ ID NO: 3061819 - DNA, 25 bp, Homo sapien
taaaactttaagtgaatgttataga

SEQ ID NO: 3061820 - DNA, 25 bp, Homo sapien
aaactttaagtgaatgttatagaga

SEQ ID NO: 3061821 - DNA, 25 bp, Homo sapien
taagtgaatgttatagagaaaacag

SEQ ID NO: 3061822 - DNA, 25 bp, Homo sapien
cttcaagacccatgaaatacaaaga

SEQ ID NO: 3061823 - DNA, 25 bp, Homo sapien
cacatgagaggattaattggcagct

SEQ ID NO: 3061824 - DNA, 25 bp, Homo sapien
gaaggcattactacctgatggtcca

SEQ ID NO: 3061825 - DNA, 25 bp, Homo sapien
gagagcaggtgaaccctcgtttgat

SEQ ID NO: 3061826 - DNA, 25 bp, Homo sapien
aacatacgggaaggcagagatacga

SEQ ID NO: 3061827 - DNA, 25 bp, Homo sapien
tagcaaatagaagtgtttggtggcc

SEQ ID NO: 3061828 - DNA, 25 bp, Homo sapien
actgctaaagtcagtataaataggc

SEQ ID NO: 3061829 - DNA, 25 bp, Homo sapien
taaagtggtttggtgaaaactgcta

SEQ ID NO: 3061830 - DNA, 25 bp, Homo sapien
tcaagcgcggtgacttacgcctgaa

SEQ ID NO: 3061831 - DNA, 25 bp, Homo sapien
cggtagcatcttcagcataatcaag

SEQ ID NO: 3061832 - DNA, 25 bp, Homo sapien
ttctacttctaggacacggcgccgt

SEQ ID NO: 3061833 - DNA, 25 bp, Homo sapien
gccgttcggtagcatcttcagcata

SEQ ID NO: 3061834 - DNA, 25 bp, Homo sapien
gacacggcgccgttcggtagcatct

SEQ ID NO: 3061835 - DNA, 25 bp, Homo sapien
cttgacaaaaatagatatgattaga

SEQ ID NO: 3061836 - DNA, 25 bp, Homo sapien
tgacaaaaatagatatgattagatt

SEQ ID NO: 3061837 - DNA, 25 bp, Homo sapien
aaatagatatgattagatttaattc

SEQ ID NO: 3061838 - DNA, 25 bp, Homo sapien
caaaaatagatatgattagatttaa

SEQ ID NO: 3061839 - DNA, 25 bp, Homo sapien
tcatacttgacaacgattggaatgg

SEQ ID NO: 3061840 - DNA, 25 bp, Homo sapien
acttgacaacgattggaatgggatc

SEQ ID NO: 3061841 - DNA, 25 bp, Homo sapien
gacatcatacttgacaacgattgga

SEQ ID NO: 3061842 - DNA, 25 bp, Homo sapien
ttgacaacgattggaatgggatctg

SEQ ID NO: 3061843 - DNA, 25 bp, Homo sapien
taagcaatggcatcaggaggtttaa

SEQ ID NO: 3061844 - DNA, 25 bp, Homo sapien
cataatcaaggtaaggtgcaaagcc

SEQ ID NO: 3061845 - DNA, 25 bp, Homo sapien
tgccttggagtgcagagaccagaaa

SEQ ID NO: 3061846 - DNA, 25 bp, Homo sapien
ccttggctgacgtccagttgggatt

SEQ ID NO: 3061847 - DNA, 25 bp, Homo sapien
acagccttcttttagatacaatcaa

SEQ ID NO: 3061848 - DNA, 25 bp, Homo sapien
caaaggactgccagtaaagcaaaat

SEQ ID NO: 3061849 - DNA, 25 bp, Homo sapien
tgcattactaccctatgcccaatgg

SEQ ID NO: 3061850 - DNA, 25 bp, Homo sapien
aacaacaacttctagaatacagcct

SEQ ID NO: 3061851 - DNA, 25 bp, Homo sapien
ggatgaaggctacaacagagaaagt

SEQ ID NO: 3061852 - DNA, 25 bp, Homo sapien
caaggatcagacaagttgcataagg

SEQ ID NO: 3061853 - DNA, 25 bp, Homo sapien
ttaccatcaccacaacaagtccagg

SEQ ID NO: 3061854 - DNA, 25 bp, Homo sapien
taacatattggtgcactgatgacaa

SEQ ID NO: 3061855 - DNA, 25 bp, Homo sapien
tctcgtaaatcagtattcagggccc

SEQ ID NO: 3061856 - DNA, 25 bp, Homo sapien
gaactttgcttcctgttaaccgaga

SEQ ID NO: 3061857 - DNA, 25 bp, Homo sapien
tacatacaggaagaggctgcagcat

SEQ ID NO: 3061858 - DNA, 25 bp, Homo sapien
gagaaaccgacatcacaagagctgt

SEQ ID NO: 3061859 - DNA, 25 bp, Homo sapien
tgtttcactccaaaggaagcaactt

SEQ ID NO: 3061860 - DNA, 25 bp, Homo sapien
gcttgtttcactccaaaggaagcaa

SEQ ID NO: 3061861 - DNA, 25 bp, Homo sapien
gaagcaacttcaaccagaacactaa

SEQ ID NO: 3061862 - DNA, 25 bp, Homo sapien
aaggaagcaacttcaaccagaacac

SEQ ID NO: 3061863 - DNA, 25 bp, Homo sapien
taggcctgggaaggatatctcatcc

SEQ ID NO: 3061864 - DNA, 25 bp, Homo sapien
tgatatcctcaagcccttagaagag

SEQ ID NO: 3061865 - DNA, 25 bp, Homo sapien
gttgcccgcccagtttgttcttgaa

SEQ ID NO: 3061866 - DNA, 25 bp, Homo sapien
taaagattgcctcaagctaaccacc

SEQ ID NO: 3061867 - DNA, 25 bp, Homo sapien
caacatatatcgacaaacttttaaa

SEQ ID NO: 3061868 - DNA, 25 bp, Homo sapien
aaactgaattggaaagttgccataa

SEQ ID NO: 3061869 - DNA, 25 bp, Homo sapien
gaattggaaagttgccataaccagt

SEQ ID NO: 3061870 - DNA, 25 bp, Homo sapien
aggaaaacctcaagtcagcccccat

SEQ ID NO: 3061871 - DNA, 25 bp, Homo sapien
ctggagattagagtgcagtcacaca

SEQ ID NO: 3061872 - DNA, 25 bp, Homo sapien
cctttttaggactggcatacagacc

SEQ ID NO: 3061873 - DNA, 25 bp, Homo sapien
tcactatgcagaacgctcaagggtt

SEQ ID NO: 3061874 - DNA, 25 bp, Homo sapien
gactgggctgcaaagcttagctctc

SEQ ID NO: 3061875 - DNA, 25 bp, Homo sapien
taagtatcctactaacccagtgtca

SEQ ID NO: 3061876 - DNA, 25 bp, Homo sapien
gaagcctgttattcatatggtccaa

SEQ ID NO: 3061877 - DNA, 25 bp, Homo sapien
taacctaggtccaaaagtctatgaa

SEQ ID NO: 3061878 - DNA, 25 bp, Homo sapien
tgtaaattaggctaaggctaagact

SEQ ID NO: 3061879 - DNA, 25 bp, Homo sapien
tatatggagggtatagcaaggtcac

SEQ ID NO: 3061880 - DNA, 25 bp, Homo sapien
ggtcacagtgcttactagttgcaga

SEQ ID NO: 3061881 - DNA, 25 bp, Homo sapien
cccaaggtgattctgctgaaagcca

SEQ ID NO: 3061882 - DNA, 25 bp, Homo sapien
aacgtatgctatcatcgggccccaa

SEQ ID NO: 3061883 - DNA, 25 bp, Homo sapien
aaaataccaacgcttctcatggaag

SEQ ID NO: 3061884 - DNA, 25 bp, Homo sapien
tcttttccgagtgttttaagtgcca

SEQ ID NO: 3061885 - DNA, 25 bp, Homo sapien
gattccactaactcacagacacctg

SEQ ID NO: 3061886 - DNA, 25 bp, Homo sapien
ggagggcagaggttctatcttattc

SEQ ID NO: 3061887 - DNA, 25 bp, Homo sapien
gcaacatattggacttctctaagac

SEQ ID NO: 3061888 - DNA, 25 bp, Homo sapien
tttactggttgcttacccttgggca

SEQ ID NO: 3061889 - DNA, 25 bp, Homo sapien
gctgtaagtctatacctctgctctg

SEQ ID NO: 3061890 - DNA, 25 bp, Homo sapien
gattggaggagcattaaggccttcc

SEQ ID NO: 3061891 - DNA, 25 bp, Homo sapien
tcctcaggacttagtgaagtcaccc

SEQ ID NO: 3061892 - DNA, 25 bp, Homo sapien
taaactattcctggagacctagaac

SEQ ID NO: 3061893 - DNA, 25 bp, Homo sapien
tacaccatggacataatctgctcca

SEQ ID NO: 3061894 - DNA, 25 bp, Homo sapien
ttcaagagatgtttcgacctcagcc

SEQ ID NO: 3061895 - DNA, 25 bp, Homo sapien
gaatggcagaccctcggtagctgta

SEQ ID NO: 3061896 - DNA, 25 bp, Homo sapien
ttcagtatcagcttttcctaagaag

SEQ ID NO: 3061897 - DNA, 25 bp, Homo sapien
tagctgtatcatctttccaaaactt

SEQ ID NO: 3061898 - DNA, 25 bp, Homo sapien
tgagaccatgcaaaacatccagact

SEQ ID NO: 3061899 - DNA, 25 bp, Homo sapien
aatctagttttcagcctgtaatcct

SEQ ID NO: 3061900 - DNA, 25 bp, Homo sapien
ctttgtaagcacaaggtgggaagac

SEQ ID NO: 3061901 - DNA, 25 bp, Homo sapien
caggccttaccctacattgtattca

SEQ ID NO: 3061902 - DNA, 25 bp, Homo sapien
tatttcctaactgaaacaagactgg

SEQ ID NO: 3061903 - DNA, 25 bp, Homo sapien
ggcacactcctgtatgcccacagaa

SEQ ID NO: 3061904 - DNA, 25 bp, Homo sapien
atatttcacaataatgcctcagttt

SEQ ID NO: 3061905 - DNA, 25 bp, Homo sapien
tatctttatggtcaagtaaatacaa

SEQ ID NO: 3061906 - DNA, 25 bp, Homo sapien
ttactatacaagctacagagaatgt

SEQ ID NO: 3061907 - DNA, 25 bp, Homo sapien
catggagatggaggcaaaatatgga

SEQ ID NO: 3061908 - DNA, 25 bp, Homo sapien
tatatatacttgttaccatggagat

SEQ ID NO: 3061909 - DNA, 25 bp, Homo sapien
actgcacccggctatgttatccgtt

SEQ ID NO: 3061910 - DNA, 25 bp, Homo sapien
aatatggataaaacctaactcctct

SEQ ID NO: 3061911 - DNA, 25 bp, Homo sapien
ttccccagaagaataggttaatgct

SEQ ID NO: 3061912 - DNA, 25 bp, Homo sapien
caaaatctgtggtctatcccatacg

SEQ ID NO: 3061913 - DNA, 25 bp, Homo sapien
catccaaagtaggtgagtagccatt

SEQ ID NO: 3061914 - DNA, 25 bp, Homo sapien
gatttgctagccactatgaaccagc

SEQ ID NO: 3061915 - DNA, 25 bp, Homo sapien
tgtgttcctctcaacacacttgaat

SEQ ID NO: 3061916 - DNA, 25 bp, Homo sapien
caaagaattagtcaacagtagcaca

SEQ ID NO: 3061917 - DNA, 25 bp, Homo sapien
aataagctcccgcatgaccagatgt

SEQ ID NO: 3061918 - DNA, 25 bp, Homo sapien
tagaggcacaacgattcccgtaatt

SEQ ID NO: 3061919 - DNA, 25 bp, Homo sapien
tttctggagtaagcggtgtccaata

SEQ ID NO: 3061920 - DNA, 25 bp, Homo sapien
ggagtaagcggtgtccaatattatc

SEQ ID NO: 3061921 - DNA, 25 bp, Homo sapien
gtttctggagtaagcggtgtccaat

SEQ ID NO: 3061922 - DNA, 25 bp, Homo sapien
ctggagtaagcggtgtccaatatta

SEQ ID NO: 3061923 - DNA, 25 bp, Homo sapien
cagagagacaaaccaaaaatattcc

SEQ ID NO: 3061924 - DNA, 25 bp, Homo sapien
tattccaataatatattcttccctt

SEQ ID NO: 3061925 - DNA, 25 bp, Homo sapien
ctgacagacagaacagagagacaaa

SEQ ID NO: 3061926 - DNA, 25 bp, Homo sapien
taatatattcttcccttcctagaga

SEQ ID NO: 3061927 - DNA, 25 bp, Homo sapien
caggcatgaacccaggatacttttc

SEQ ID NO: 3061928 - DNA, 25 bp, Homo sapien
gaggtatgggcgcacaacactatgc

SEQ ID NO: 3061929 - DNA, 25 bp, Homo sapien
tatggtgcacaaaagtgtgctgcaa

SEQ ID NO: 3061930 - DNA, 25 bp, Homo sapien
gctctataccatttgaaagaattag

SEQ ID NO: 3061931 - DNA, 25 bp, Homo sapien
ggcacaagtagcttacggctcaaac

SEQ ID NO: 3061932 - DNA, 25 bp, Homo sapien
ggctcaaacaggtaatctagacaga

SEQ ID NO: 3061933 - DNA, 25 bp, Homo sapien
cacgactggtccatggatgctattt

SEQ ID NO: 3061934 - DNA, 25 bp, Homo sapien
gctatttacaacaccaagttggcac

SEQ ID NO: 3061935 - DNA, 25 bp, Homo sapien
taagcgggaagatctttgacaacaa

SEQ ID NO: 3061936 - DNA, 25 bp, Homo sapien
tccatgaagctgtatgccaccatag

SEQ ID NO: 3061937 - DNA, 25 bp, Homo sapien
acacatgtatgacgggagcctgcca

SEQ ID NO: 3061938 - DNA, 25 bp, Homo sapien
gaaacggcctattatgtctcaagag

SEQ ID NO: 3061939 - DNA, 25 bp, Homo sapien
tagtggagtccacagatctagacag

SEQ ID NO: 3061940 - DNA, 25 bp, Homo sapien
cggctgatgggtagttgcacttcca

SEQ ID NO: 3061941 - DNA, 25 bp, Homo sapien
taggtgaacccatgcaaacaagttg

SEQ ID NO: 3061942 - DNA, 25 bp, Homo sapien
gagcaaggaccgactagcggctgat

SEQ ID NO: 3061943 - DNA, 25 bp, Homo sapien
caaagcttctcgtaatagggataaa

SEQ ID NO: 3061944 - DNA, 25 bp, Homo sapien
cactaacaaatctaagcttcggaag

SEQ ID NO: 3061945 - DNA, 25 bp, Homo sapien
gattgaatcctagacggagctatgg

SEQ ID NO: 3061946 - DNA, 25 bp, Homo sapien
gaaagatatctggttggttgaagca

SEQ ID NO: 3061947 - DNA, 25 bp, Homo sapien
tgtgcagagacctccacggttacca

SEQ ID NO: 3061948 - DNA, 25 bp, Homo sapien
tgcaatgatctgtagactcccaaag

SEQ ID NO: 3061949 - DNA, 25 bp, Homo sapien
cacttttgagttgcatgctgtagca

SEQ ID NO: 3061950 - DNA, 25 bp, Homo sapien
gactagacctttagctcctgcaatg

SEQ ID NO: 3061951 - DNA, 25 bp, Homo sapien
cgtgcaatacaaaccagatcatggc

SEQ ID NO: 3061952 - DNA, 25 bp, Homo sapien
ttaacttagcaaagtgggcttggca

SEQ ID NO: 3061953 - DNA, 25 bp, Homo sapien
gctgcttagctaatatgggccaact

SEQ ID NO: 3061954 - DNA, 25 bp, Homo sapien
tgcctaagtctagcatcatgccagc

SEQ ID NO: 3061955 - DNA, 25 bp, Homo sapien
taccaataactcaccgaaatcctta

SEQ ID NO: 3061956 - DNA, 25 bp, Homo sapien
taaatctccttgttctattgcttga

SEQ ID NO: 3061957 - DNA, 25 bp, Homo sapien
gctgacaataatgacaagtttagac

SEQ ID NO: 3061958 - DNA, 25 bp, Homo sapien
tatgtacacttaagcacaaatagta

SEQ ID NO: 3061959 - DNA, 25 bp, Homo sapien
caaagtatcggtatgggccaaaaag

SEQ ID NO: 3061960 - DNA, 25 bp, Homo sapien
aattgattactgtatggcatgcaag

SEQ ID NO: 3061961 - DNA, 25 bp, Homo sapien
tgtcacacgaacactacctaactaa

SEQ ID NO: 3061962 - DNA, 25 bp, Homo sapien
gaaaggtgaagctataaaggatcaa

SEQ ID NO: 3061963 - DNA, 25 bp, Homo sapien
cgattctataggcttgtcaagtgac

SEQ ID NO: 3061964 - DNA, 25 bp, Homo sapien
ggcttgtcaagtgacgcttgttcaa

SEQ ID NO: 3061965 - DNA, 25 bp, Homo sapien
gttcaatttccaagtgtccttcctc

SEQ ID NO: 3061966 - DNA, 25 bp, Homo sapien
ccaagtgtccttcctcatactgatc

SEQ ID NO: 3061967 - DNA, 25 bp, Homo sapien
tagactgagctcatagggagaactt

SEQ ID NO: 3061968 - DNA, 25 bp, Homo sapien
tgttaaaattatgcccattaagggc

SEQ ID NO: 3061969 - DNA, 25 bp, Homo sapien
aaagtttaggccacactgtaacaag

SEQ ID NO: 3061970 - DNA, 25 bp, Homo sapien
tctagtctgatagcctggtcacagg

SEQ ID NO: 3061971 - DNA, 25 bp, Homo sapien
tatatttgcaatcattatgtagcct

SEQ ID NO: 3061972 - DNA, 25 bp, Homo sapien
atatttgcaatcattatgtagcctt

SEQ ID NO: 3061973 - DNA, 25 bp, Homo sapien
ccccacgcctgacaactattggttt

SEQ ID NO: 3061974 - DNA, 25 bp, Homo sapien
gcagcctcccctccgcagtaggtgg

SEQ ID NO: 3061975 - DNA, 25 bp, Homo sapien
tctaccagtttattaactggtacaa

SEQ ID NO: 3061976 - DNA, 25 bp, Homo sapien
agtggcagaatcctgactcacaaca

SEQ ID NO: 3061977 - DNA, 25 bp, Homo sapien
gaggattcctacaaacatactgcat

SEQ ID NO: 3061978 - DNA, 25 bp, Homo sapien
cctaagggtcacatactggttacat

SEQ ID NO: 3061979 - DNA, 25 bp, Homo sapien
tacgggagcgagacataggaaaaac

SEQ ID NO: 3061980 - DNA, 25 bp, Homo sapien
catatctggcatacctgaattacaa

SEQ ID NO: 3061981 - DNA, 25 bp, Homo sapien
gaaatagccaatctctactaaatcc

SEQ ID NO: 3061982 - DNA, 25 bp, Homo sapien
tcttcgagatttccgcggtaacaat

SEQ ID NO: 3061983 - DNA, 25 bp, Homo sapien
gatttccgcggtaacaatttcaaca

SEQ ID NO: 3061984 - DNA, 25 bp, Homo sapien
ccttttagtcttcgagatttccgcg

SEQ ID NO: 3061985 - DNA, 25 bp, Homo sapien
tattatcatcacgcttctcacaaat

SEQ ID NO: 3061986 - DNA, 25 bp, Homo sapien
ttttccatactaacatttgcaattg

SEQ ID NO: 3061987 - DNA, 25 bp, Homo sapien
ttggcactagtgaccccatgcgtgg

SEQ ID NO: 3061988 - DNA, 25 bp, Homo sapien
tcaatagagcttgccatcgtaaggg

SEQ ID NO: 3061989 - DNA, 25 bp, Homo sapien
caataaggcgtctgatagcgaaggc

SEQ ID NO: 3061990 - DNA, 25 bp, Homo sapien
gaccccaaaaggatccgtgagagca

SEQ ID NO: 3061991 - DNA, 25 bp, Homo sapien
gaggttaggctcacatcggatcata

SEQ ID NO: 3061992 - DNA, 25 bp, Homo sapien
tatgccccgcgaaatctcaatgtat

SEQ ID NO: 3061993 - DNA, 25 bp, Homo sapien
gaaatccgatgccaaacaggcggaa

SEQ ID NO: 3061994 - DNA, 25 bp, Homo sapien
gagctggttcgcaagtcggagcaaa

SEQ ID NO: 3061995 - DNA, 25 bp, Homo sapien
cctcttgagaaagcagagacgggag

SEQ ID NO: 3061996 - DNA, 25 bp, Homo sapien
cctcaagccgggaggcctcttgaga

SEQ ID NO: 3061997 - DNA, 25 bp, Homo sapien
gaggttctgggctagaccagcgcct

SEQ ID NO: 3061998 - DNA, 25 bp, Homo sapien
aggttctgggctagaccagcgcctt

SEQ ID NO: 3061999 - DNA, 25 bp, Homo sapien
aggaggttctgggctagaccagcgc

SEQ ID NO: 3062000 - DNA, 25 bp, Homo sapien
ggaggttctgggctagaccagcgcc

SEQ ID NO: 3062001 - DNA, 25 bp, Homo sapien
tgaaagtctcggtcttcgttgaagc

SEQ ID NO: 3062002 - DNA, 25 bp, Homo sapien
aagtctcggtcttcgttgaagcggg

SEQ ID NO: 3062003 - DNA, 25 bp, Homo sapien
ctcggtcttcgttgaagcgggagaa

SEQ ID NO: 3062004 - DNA, 25 bp, Homo sapien
tgaagcgggagaagcggtccgccat

SEQ ID NO: 3062005 - DNA, 25 bp, Homo sapien
tctcaggacgacgctctccggttcg

SEQ ID NO: 3062006 - DNA, 25 bp, Homo sapien
tcactcctctcaggacgacgctctc

SEQ ID NO: 3062007 - DNA, 25 bp, Homo sapien
tcaggacgacgctctccggttcgct

SEQ ID NO: 3062008 - DNA, 25 bp, Homo sapien
tcctctcaggacgacgctctccggt

SEQ ID NO: 3062009 - DNA, 25 bp, Homo sapien
cattcatcatatcttgttttaggtc

SEQ ID NO: 3062010 - DNA, 25 bp, Homo sapien
tcattcatcatatcttgttttaggt

SEQ ID NO: 3062011 - DNA, 25 bp, Homo sapien
gtccccacgtgctgccactgagtag

SEQ ID NO: 3062012 - DNA, 25 bp, Homo sapien
tcatctactgtggaagacaatacat

SEQ ID NO: 3062013 - DNA, 25 bp, Homo sapien
atacatcaattcctaagctatctga

SEQ ID NO: 3062014 - DNA, 25 bp, Homo sapien
tatctgataagtgaacaatccagga

SEQ ID NO: 3062015 - DNA, 25 bp, Homo sapien
ttctaaagatttgtgggactctgcc

SEQ ID NO: 3062016 - DNA, 25 bp, Homo sapien
tttctaaagatttgtgggactctgc

SEQ ID NO: 3062017 - DNA, 25 bp, Homo sapien
cagccttggaccctaagccccccag

SEQ ID NO: 3062018 - DNA, 25 bp, Homo sapien
caggcagccttggaccctaagcccc

SEQ ID NO: 3062019 - DNA, 25 bp, Homo sapien
gcagccttggaccctaagcccccca

SEQ ID NO: 3062020 - DNA, 25 bp, Homo sapien
cgaaaccgttcattcctagggacat

SEQ ID NO: 3062021 - DNA, 25 bp, Homo sapien
caaaatatcgaaaccgttcattcct

SEQ ID NO: 3062022 - DNA, 25 bp, Homo sapien
tccccttggcattaggttctagaag

SEQ ID NO: 3062023 - DNA, 25 bp, Homo sapien
tgattcaggcttccctattcctctc

SEQ ID NO: 3062024 - DNA, 25 bp, Homo sapien
aggtggattcaaggtcttgatggac

SEQ ID NO: 3062025 - DNA, 25 bp, Homo sapien
ggtggattcaaggtcttgatggaca

SEQ ID NO: 3062026 - DNA, 25 bp, Homo sapien
caggatgtaataaggaacattttca

SEQ ID NO: 3062027 - DNA, 25 bp, Homo sapien
cccaggatgtaataaggaacatttt

SEQ ID NO: 3062028 - DNA, 25 bp, Homo sapien
tccccaggatgtaataaggaacatt

SEQ ID NO: 3062029 - DNA, 25 bp, Homo sapien
attccccaggatgtaataaggaaca

SEQ ID NO: 3062030 - DNA, 25 bp, Homo sapien
tccatcatccagtatcaggcccagg

SEQ ID NO: 3062031 - DNA, 25 bp, Homo sapien
ggatttggcccatactgtgaagcaa

SEQ ID NO: 3062032 - DNA, 25 bp, Homo sapien
caggcccaggagatttacatgcaaa

SEQ ID NO: 3062033 - DNA, 25 bp, Homo sapien
caaacgttcgtcaggcctaagagag

SEQ ID NO: 3062034 - DNA, 25 bp, Homo sapien
tcggttttcagtggcccgagcgcct

SEQ ID NO: 3062035 - DNA, 25 bp, Homo sapien
ccgagcagatctgcgtcggccagaa

SEQ ID NO: 3062036 - DNA, 25 bp, Homo sapien
tgtgctccatgtacgcacccgtgtg

SEQ ID NO: 3062037 - DNA, 25 bp, Homo sapien
aaggtgcagtgctcgcccgaactgc

SEQ ID NO: 3062038 - DNA, 25 bp, Homo sapien
ccaagaccgaaaagctggagcggct

SEQ ID NO: 3062039 - DNA, 25 bp, Homo sapien
gcaagacgctgcactcgtggaggaa

SEQ ID NO: 3062040 - DNA, 25 bp, Homo sapien
ttctggatctggtcgggcaagacgc

SEQ ID NO: 3062041 - DNA, 25 bp, Homo sapien
ggcgtgtgcttcgtaggcctcaaca

SEQ ID NO: 3062042 - DNA, 25 bp, Homo sapien
ggaagcattcgcctttgagcacttg

SEQ ID NO: 3062043 - DNA, 25 bp, Homo sapien
aaatctctggcgttcaggttagcag

SEQ ID NO: 3062044 - DNA, 25 bp, Homo sapien
tcccaacagagatgaagacgtggaa

SEQ ID NO: 3062045 - DNA, 25 bp, Homo sapien
ttttcaattcgctgcaccaagtgct

SEQ ID NO: 3062046 - DNA, 25 bp, Homo sapien
taaaataaagattgctgggacccat

SEQ ID NO: 3062047 - DNA, 25 bp, Homo sapien
tttcaaacttaagtttgcatcagaa

SEQ ID NO: 3062048 - DNA, 25 bp, Homo sapien
tttgaataaaggagataatagcatt

SEQ ID NO: 3062049 - DNA, 25 bp, Homo sapien
atagttagaagctaccatattgaac

SEQ ID NO: 3062050 - DNA, 25 bp, Homo sapien
ttcaaaggttgaggtgagagaatcg

SEQ ID NO: 3062051 - DNA, 25 bp, Homo sapien
ctccagcctaggtgacagagcaaga

SEQ ID NO: 3062052 - DNA, 25 bp, Homo sapien
agtgagctgtgatcacaccactgca

SEQ ID NO: 3062053 - DNA, 25 bp, Homo sapien
cttgatcccaggaggtcgaggctcc

SEQ ID NO: 3062054 - DNA, 25 bp, Homo sapien
tgagaaaacctatctggcaacccag

SEQ ID NO: 3062055 - DNA, 25 bp, Homo sapien
tagtccctcaagtcagagatgcctg

SEQ ID NO: 3062056 - DNA, 25 bp, Homo sapien
aaatccaatagtagggccgggtgag

SEQ ID NO: 3062057 - DNA, 25 bp, Homo sapien
gaattgcacggtttgaatcacagca

SEQ ID NO: 3062058 - DNA, 25 bp, Homo sapien
ttttgggaggcagatggatcatctg

SEQ ID NO: 3062059 - DNA, 25 bp, Homo sapien
attttgggaggcagatggatcatct

SEQ ID NO: 3062060 - DNA, 25 bp, Homo sapien
catggtgaaaacagcatggccaaca

SEQ ID NO: 3062061 - DNA, 25 bp, Homo sapien
caacatggtgaaaacagcatggcca

SEQ ID NO: 3062062 - DNA, 25 bp, Homo sapien
gaccatgaagtcacatattaggcct

SEQ ID NO: 3062063 - DNA, 25 bp, Homo sapien
tctcttgggaaagtacagcgaagac

SEQ ID NO: 3062064 - DNA, 25 bp, Homo sapien
taaatagggaagtatgtagcacaca

SEQ ID NO: 3062065 - DNA, 25 bp, Homo sapien
gaagtgtggaagctatattacccaa

SEQ ID NO: 3062066 - DNA, 25 bp, Homo sapien
ttcggagttctcttcttcatgccag

SEQ ID NO: 3062067 - DNA, 25 bp, Homo sapien
taaaatgcttccctcaggttgtgac

SEQ ID NO: 3062068 - DNA, 25 bp, Homo sapien
cattgtacagtcacgtagaaaggat

SEQ ID NO: 3062069 - DNA, 25 bp, Homo sapien
taacaatgctgtttgcaggctggtc

SEQ ID NO: 3062070 - DNA, 25 bp, Homo sapien
tgtggctactcggaaaacacgcact

SEQ ID NO: 3062071 - DNA, 25 bp, Homo sapien
caattaaagagatgtgtgtggctac

SEQ ID NO: 3062072 - DNA, 25 bp, Homo sapien
taagtgactgtaacccaattacggc

SEQ ID NO: 3062073 - DNA, 25 bp, Homo sapien
caaaggtacagttgactactcagag

SEQ ID NO: 3062074 - DNA, 25 bp, Homo sapien
gcccacattttatctcagggaggga

SEQ ID NO: 3062075 - DNA, 25 bp, Homo sapien
tgaatactgactccaaagcaatgtg

SEQ ID NO: 3062076 - DNA, 25 bp, Homo sapien
ggcttctagacaatctgctgcctga

SEQ ID NO: 3062077 - DNA, 25 bp, Homo sapien
gatatccttgcacccaatagtgaca

SEQ ID NO: 3062078 - DNA, 25 bp, Homo sapien
tccttgcgctcctgcttggctagtt

SEQ ID NO: 3062079 - DNA, 25 bp, Homo sapien
tccacattggtgtttcggaacagaa

SEQ ID NO: 3062080 - DNA, 25 bp, Homo sapien
gttttcgggcattaaggacatcttc

SEQ ID NO: 3062081 - DNA, 25 bp, Homo sapien
gattcatcccgaagtgagtctcgct

SEQ ID NO: 3062082 - DNA, 25 bp, Homo sapien
tatccttggtctaacagagaaatcc

SEQ ID NO: 3062083 - DNA, 25 bp, Homo sapien
taagggattagggtacaggtcacac

SEQ ID NO: 3062084 - DNA, 25 bp, Homo sapien
tgctgagtcctgaatcgtctttatc

SEQ ID NO: 3062085 - DNA, 25 bp, Homo sapien
gaatctaggctagttttggtgaaca

SEQ ID NO: 3062086 - DNA, 25 bp, Homo sapien
ttgtggtagcacctgaatcatcctt

SEQ ID NO: 3062087 - DNA, 25 bp, Homo sapien
accaatgttcattgtggtagcacct

SEQ ID NO: 3062088 - DNA, 25 bp, Homo sapien
tggtagcacctgaatcatccttctc

SEQ ID NO: 3062089 - DNA, 25 bp, Homo sapien
agaaccaatgttcattgtggtagca

SEQ ID NO: 3062090 - DNA, 25 bp, Homo sapien
gaaaaatataagtccagtatcaact

SEQ ID NO: 3062091 - DNA, 25 bp, Homo sapien
tatcactccgcatatccacaaaggg

SEQ ID NO: 3062092 - DNA, 25 bp, Homo sapien
cacaaagggccatagattactgcca

SEQ ID NO: 3062093 - DNA, 25 bp, Homo sapien
ggtcactgtaaacccacaaatatgt

SEQ ID NO: 3062094 - DNA, 25 bp, Homo sapien
tgtcacatcagcatactgggccagg

SEQ ID NO: 3062095 - DNA, 25 bp, Homo sapien
tctcaattagggtggcaatggcctg

SEQ ID NO: 3062096 - DNA, 25 bp, Homo sapien
tccttggctttactacgatttgtgc

SEQ ID NO: 3062097 - DNA, 25 bp, Homo sapien
ctgcttctcaattagggtggcaatg

SEQ ID NO: 3062098 - DNA, 25 bp, Homo sapien
ttcactttggtgacaacattctgag

SEQ ID NO: 3062099 - DNA, 25 bp, Homo sapien
tgagtttctgaccatcgttccacaa

SEQ ID NO: 3062100 - DNA, 25 bp, Homo sapien
attctgagtttctgaccatcgttcc

SEQ ID NO: 3062101 - DNA, 25 bp, Homo sapien
tgcagatattaaggagggaatcttc

SEQ ID NO: 3062102 - DNA, 25 bp, Homo sapien
tcgccttcgccaggggctatcgcgg

SEQ ID NO: 3062103 - DNA, 25 bp, Homo sapien
gctatcgcggccacttcgctgggcg

SEQ ID NO: 3062104 - DNA, 25 bp, Homo sapien
ataaacggctcggtccactcccagt

SEQ ID NO: 3062105 - DNA, 25 bp, Homo sapien
ctgcaggatacccaagatgtaggct

SEQ ID NO: 3062106 - DNA, 25 bp, Homo sapien
tcctgcaagcccctagggcgcctac

SEQ ID NO: 3062107 - DNA, 25 bp, Homo sapien
tgcaagcccctagggcgcctaccgc

SEQ ID NO: 3062108 - DNA, 25 bp, Homo sapien
ctagggcgcctaccgcagtgcctga

SEQ ID NO: 3062109 - DNA, 25 bp, Homo sapien
taccgcagtgcctgacgggccgcgc

SEQ ID NO: 3062110 - DNA, 25 bp, Homo sapien
tcgcgaatgtaatacggaggcctct

SEQ ID NO: 3062111 - DNA, 25 bp, Homo sapien
gctgtagctgccctgagataaccag

SEQ ID NO: 3062112 - DNA, 25 bp, Homo sapien
catttgatgagcgaaccgggaaagg

SEQ ID NO: 3062113 - DNA, 25 bp, Homo sapien
ccgaaaacgccaagagattgatgct

SEQ ID NO: 3062114 - DNA, 25 bp, Homo sapien
gtgtttaggcttccacaccttctta

SEQ ID NO: 3062115 - DNA, 25 bp, Homo sapien
cagaggtccagtcccaagaccagct

SEQ ID NO: 3062116 - DNA, 25 bp, Homo sapien
aggtccagtcccaagaccagctgct

SEQ ID NO: 3062117 - DNA, 25 bp, Homo sapien
gaggtccagtcccaagaccagctgc

SEQ ID NO: 3062118 - DNA, 25 bp, Homo sapien
ctgtggcgcccagtggtgatgatca

SEQ ID NO: 3062119 - DNA, 25 bp, Homo sapien
tgtggcgcccagtggtgatgatcag

SEQ ID NO: 3062120 - DNA, 25 bp, Homo sapien
gtggcgcccagtggtgatgatcaga

SEQ ID NO: 3062121 - DNA, 25 bp, Homo sapien
tggcgcccagtggtgatgatcagaa

SEQ ID NO: 3062122 - DNA, 25 bp, Homo sapien
tgatgctggatcgcagttttctcac

SEQ ID NO: 3062123 - DNA, 25 bp, Homo sapien
ctggaggtgatgctggatcgcagtt

SEQ ID NO: 3062124 - DNA, 25 bp, Homo sapien
gtgatgctggatcgcagttttctca

SEQ ID NO: 3062125 - DNA, 25 bp, Homo sapien
gaggtgatgctggatcgcagttttc

SEQ ID NO: 3062126 - DNA, 25 bp, Homo sapien
ctgactgaagggtttcttttgccat

SEQ ID NO: 3062127 - DNA, 25 bp, Homo sapien
atgctgactgaagggtttcttttgc

SEQ ID NO: 3062128 - DNA, 25 bp, Homo sapien
tgaagggtttcttttgccatggctc

SEQ ID NO: 3062129 - DNA, 25 bp, Homo sapien
gaagggtttcttttgccatggctca

SEQ ID NO: 3062130 - DNA, 25 bp, Homo sapien
tagaggcacatcttcagtagggtaa

SEQ ID NO: 3062131 - DNA, 25 bp, Homo sapien
tagggtaatatctaggcattttgtg

SEQ ID NO: 3062132 - DNA, 25 bp, Homo sapien
agaggcacatcttcagtagggtaat

SEQ ID NO: 3062133 - DNA, 25 bp, Homo sapien
ctttagaggcacatcttcagtaggg

SEQ ID NO: 3062134 - DNA, 25 bp, Homo sapien
acttcttcctggacgtggtctttct

SEQ ID NO: 3062135 - DNA, 25 bp, Homo sapien
tgagtacttcttcctggacgtggtc

SEQ ID NO: 3062136 - DNA, 25 bp, Homo sapien
ctggacgtggtctttctggaataca

SEQ ID NO: 3062137 - DNA, 25 bp, Homo sapien
cttcctggacgtggtctttctggaa

SEQ ID NO: 3062138 - DNA, 25 bp, Homo sapien
acatcagctttcttggccttaggtt

SEQ ID NO: 3062139 - DNA, 25 bp, Homo sapien
aacatcagctttcttggccttaggt

SEQ ID NO: 3062140 - DNA, 25 bp, Homo sapien
catcagctttcttggccttaggttt

SEQ ID NO: 3062141 - DNA, 25 bp, Homo sapien
atcagctttcttggccttaggtttc

SEQ ID NO: 3062142 - DNA, 25 bp, Homo sapien
tctgcctgctggcaagaatctccag

SEQ ID NO: 3062143 - DNA, 25 bp, Homo sapien
actgagctgtcagtgagggccacct

SEQ ID NO: 3062144 - DNA, 25 bp, Homo sapien
tgctcttctcctgcgatgccatgtg

SEQ ID NO: 3062145 - DNA, 25 bp, Homo sapien
gaaagtccttttacttggatctgcc

SEQ ID NO: 3062146 - DNA, 25 bp, Homo sapien
catgtgagcttctggtcaccggaag

SEQ ID NO: 3062147 - DNA, 25 bp, Homo sapien
tggtgactttgaccaggagtgtcag

SEQ ID NO: 3062148 - DNA, 25 bp, Homo sapien
tagaaggatcatggtcatgtgagct

SEQ ID NO: 3062149 - DNA, 25 bp, Homo sapien
tgccatgttgatccacaaaggtggg

SEQ ID NO: 3062150 - DNA, 25 bp, Homo sapien
tctctgttagaggagtgctagcatg

SEQ ID NO: 3062151 - DNA, 25 bp, Homo sapien
cagtgagtggtttcatacccagctc

SEQ ID NO: 3062152 - DNA, 25 bp, Homo sapien
cctgagggtacagctgagtagttca

SEQ ID NO: 3062153 - DNA, 25 bp, Homo sapien
tgggacagcccataggtgctgactg

SEQ ID NO: 3062154 - DNA, 25 bp, Homo sapien
tgtactcagctaccagtgtgcagcc

SEQ ID NO: 3062155 - DNA, 25 bp, Homo sapien
tcctttctcacgagcatgtggccgc

SEQ ID NO: 3062156 - DNA, 25 bp, Homo sapien
cccaaaagagctagaaggaggcccg

SEQ ID NO: 3062157 - DNA, 25 bp, Homo sapien
agctccagattgaagggccacagat

SEQ ID NO: 3062158 - DNA, 25 bp, Homo sapien
tctgggaagaaacggtagactgaac

SEQ ID NO: 3062159 - DNA, 25 bp, Homo sapien
caggtgatctgtctcgtgattcgcc

SEQ ID NO: 3062160 - DNA, 25 bp, Homo sapien
taaaaatgcctttagatggcctaca

SEQ ID NO: 3062161 - DNA, 25 bp, Homo sapien
tcacctatgaggagtaagaagactc

SEQ ID NO: 3062162 - DNA, 25 bp, Homo sapien
cgcctggagtttacggctgtcagca

SEQ ID NO: 3062163 - DNA, 25 bp, Homo sapien
cattcgggtcactggacatgcactg

SEQ ID NO: 3062164 - DNA, 25 bp, Homo sapien
gcagacaaagatacttgtggcggtt

SEQ ID NO: 3062165 - DNA, 25 bp, Homo sapien
catgcactgaaatcgcttatgaaca

SEQ ID NO: 3062166 - DNA, 25 bp, Homo sapien
catgacattagattgctggttaacc

SEQ ID NO: 3062167 - DNA, 25 bp, Homo sapien
tatagcctggttcaacaagccaact

SEQ ID NO: 3062168 - DNA, 25 bp, Homo sapien
aaatcttcctagagacaaggccctg

SEQ ID NO: 3062169 - DNA, 25 bp, Homo sapien
taaatcttggaagcatatagcctgg

SEQ ID NO: 3062170 - DNA, 25 bp, Homo sapien
tttaagcgccaagttcaaacaagtg

SEQ ID NO: 3062171 - DNA, 25 bp, Homo sapien
tgagcacttgcagaccagctacttg

SEQ ID NO: 3062172 - DNA, 25 bp, Homo sapien
taaacacttcatgatgtggccggaa

SEQ ID NO: 3062173 - DNA, 25 bp, Homo sapien
taaagagcaccaaagcatcacagtc

SEQ ID NO: 3062174 - DNA, 25 bp, Homo sapien
aaattaagtggatgcttctggcgcc

SEQ ID NO: 3062175 - DNA, 25 bp, Homo sapien
gaagctgacgcgttatccagacaca

SEQ ID NO: 3062176 - DNA, 25 bp, Homo sapien
cagaaagacatgtactaagaaggca

SEQ ID NO: 3062177 - DNA, 25 bp, Homo sapien
caaaacaggccaagatgaaacacca

SEQ ID NO: 3062178 - DNA, 25 bp, Homo sapien
ttcttaaccagacggaagcgggcag

SEQ ID NO: 3062179 - DNA, 25 bp, Homo sapien
caagtcagaggtggcttacaacagc

SEQ ID NO: 3062180 - DNA, 25 bp, Homo sapien
tgctccctggtggaacaaagtcccc

SEQ ID NO: 3062181 - DNA, 25 bp, Homo sapien
tgaaatcgttcctgcaatatgagag

SEQ ID NO: 3062182 - DNA, 25 bp, Homo sapien
cagagtcccctgagcttggatcatg

SEQ ID NO: 3062183 - DNA, 25 bp, Homo sapien
gaagtcattattcagtgagctgctg

SEQ ID NO: 3062184 - DNA, 25 bp, Homo sapien
aaagcacaggttttaagcccgccag

SEQ ID NO: 3062185 - DNA, 25 bp, Homo sapien
gagctgctgcttaccataaactatg

SEQ ID NO: 3062186 - DNA, 25 bp, Homo sapien
tagtgagtctcgaatggtcccaaac

SEQ ID NO: 3062187 - DNA, 25 bp, Homo sapien
gataattataagcacccggatcctc

SEQ ID NO: 3062188 - DNA, 25 bp, Homo sapien
aaatgttaagcaagaggcaaaggcc

SEQ ID NO: 3062189 - DNA, 25 bp, Homo sapien
gaactgccagatccaagcgttcctg

SEQ ID NO: 3062190 - DNA, 25 bp, Homo sapien
taaagcagtctatcttatgaggaca

SEQ ID NO: 3062191 - DNA, 25 bp, Homo sapien
gcaactgcagcacatagattttcat

SEQ ID NO: 3062192 - DNA, 25 bp, Homo sapien
tctgctgcacacataaaacgggtgg

SEQ ID NO: 3062193 - DNA, 25 bp, Homo sapien
aacacggtccttgccagcaactgca

SEQ ID NO: 3062194 - DNA, 25 bp, Homo sapien
agagcccggtgttgtttccagcgca

SEQ ID NO: 3062195 - DNA, 25 bp, Homo sapien
cgaatccgtcgtcggccatcatgct

SEQ ID NO: 3062196 - DNA, 25 bp, Homo sapien
caatcttgtggatagcatagcccag

SEQ ID NO: 3062197 - DNA, 25 bp, Homo sapien
tccagcgcattgcatagggcttgct

SEQ ID NO: 3062198 - DNA, 25 bp, Homo sapien
tacagctgtaaggacgatccggaag

SEQ ID NO: 3062199 - DNA, 25 bp, Homo sapien
tctagcaggcgagtcaggaagctcc

SEQ ID NO: 3062200 - DNA, 25 bp, Homo sapien
catgggagagaggtgcaaacgcatc

SEQ ID NO: 3062201 - DNA, 25 bp, Homo sapien
gagccagatcttccccacaaatgtg

SEQ ID NO: 3062202 - DNA, 25 bp, Homo sapien
tgttgtccagaacttcggttaccca

SEQ ID NO: 3062203 - DNA, 25 bp, Homo sapien
aatatacgacaggaagatgcgtcag

SEQ ID NO: 3062204 - DNA, 25 bp, Homo sapien
ccaaagattcttaagtcaccacagt

SEQ ID NO: 3062205 - DNA, 25 bp, Homo sapien
aaccatgtaacaggtgacccaaaga

SEQ ID NO: 3062206 - DNA, 25 bp, Homo sapien
gatgaactctggcacctataggaaa

SEQ ID NO: 3062207 - DNA, 25 bp, Homo sapien
taaagatttgcacataagcctgggc

SEQ ID NO: 3062208 - DNA, 25 bp, Homo sapien
tggtagatagaacaacaccctgtct

SEQ ID NO: 3062209 - DNA, 25 bp, Homo sapien
aaaaagtgaaggcatgaagccgcat

SEQ ID NO: 3062210 - DNA, 25 bp, Homo sapien
gaaacctagtcttcaccaaacaaca

SEQ ID NO: 3062211 - DNA, 25 bp, Homo sapien
tccaaacagactcaaattaacactg

SEQ ID NO: 3062212 - DNA, 25 bp, Homo sapien
actcctgacttaactgatccctctg

SEQ ID NO: 3062213 - DNA, 25 bp, Homo sapien
caagagttttctataggttatatcc

SEQ ID NO: 3062214 - DNA, 25 bp, Homo sapien
caaataacttagacacaaatctacc

SEQ ID NO: 3062215 - DNA, 25 bp, Homo sapien
cagcggtagcgcctactcttaattt

SEQ ID NO: 3062216 - DNA, 25 bp, Homo sapien
acaatcacagcggtagcgcctactc

SEQ ID NO: 3062217 - DNA, 25 bp, Homo sapien
caactgcccacaatcacagcggtag

SEQ ID NO: 3062218 - DNA, 25 bp, Homo sapien
aacgcagccgccaaccacacaactg

SEQ ID NO: 3062219 - DNA, 25 bp, Homo sapien
tagttgtcggcaccgccggggcgcc

SEQ ID NO: 3062220 - DNA, 25 bp, Homo sapien
agtgcgcgccgcttctgtccgggct

SEQ ID NO: 3062221 - DNA, 25 bp, Homo sapien
ccgagtgcgcgccgcttctgtccgg

SEQ ID NO: 3062222 - DNA, 25 bp, Homo sapien
gcccgacacctccgcggcccaggac

SEQ ID NO: 3062223 - DNA, 25 bp, Homo sapien
cgtcccgccggtcgcggcctcatgt

SEQ ID NO: 3062224 - DNA, 25 bp, Homo sapien
gtctccagccgaggcagaagccgct

SEQ ID NO: 3062225 - DNA, 25 bp, Homo sapien
atcgccttcaccctcgcctctcctc

SEQ ID NO: 3062226 - DNA, 25 bp, Homo sapien
atgtgccccgcgtcgccatcgcctt

SEQ ID NO: 3062227 - DNA, 25 bp, Homo sapien
ggttctgctctacaattcctcgagg

SEQ ID NO: 3062228 - DNA, 25 bp, Homo sapien
tccgccgaggccttggtccattgta

SEQ ID NO: 3062229 - DNA, 25 bp, Homo sapien
cacgggatgctaatgtctcctccca

SEQ ID NO: 3062230 - DNA, 25 bp, Homo sapien
cagagttgtcttctgcgcgctccgc

SEQ ID NO: 3062231 - DNA, 25 bp, Homo sapien
catccctagaagaagaaagaccact

SEQ ID NO: 3062232 - DNA, 25 bp, Homo sapien
atccctagaagaagaaagaccactg

SEQ ID NO: 3062233 - DNA, 25 bp, Homo sapien
gccttggcgctcatgggaacactga

SEQ ID NO: 3062234 - DNA, 25 bp, Homo sapien
cagcgattacgtcaagaggatggca

SEQ ID NO: 3062235 - DNA, 25 bp, Homo sapien
ttttccttgggaatggagcccggca

SEQ ID NO: 3062236 - DNA, 25 bp, Homo sapien
tagacttctgatcgcaggaacccaa

SEQ ID NO: 3062237 - DNA, 25 bp, Homo sapien
catatgaggtctcagcttcaagtac

SEQ ID NO: 3062238 - DNA, 25 bp, Homo sapien
gagttgcagcccactgtagggagca

SEQ ID NO: 3062239 - DNA, 25 bp, Homo sapien
cagcttcaagtacaggagttgcagc

SEQ ID NO: 3062240 - DNA, 25 bp, Homo sapien
tgacaacacgaaggccacgtcatat

SEQ ID NO: 3062241 - DNA, 25 bp, Homo sapien
agcaacataggatcatcgaagaatt

SEQ ID NO: 3062242 - DNA, 25 bp, Homo sapien
gggtaattgagcacaacatcctgtt

SEQ ID NO: 3062243 - DNA, 25 bp, Homo sapien
cctgtttggcaagttccagcaacat

SEQ ID NO: 3062244 - DNA, 25 bp, Homo sapien
gtaattgagcacaacatcctgtttg

SEQ ID NO: 3062245 - DNA, 25 bp, Homo sapien
gggcggatgacaatgctcttgtcca

SEQ ID NO: 3062246 - DNA, 25 bp, Homo sapien
ttcctacggcgggttttgatcatga

SEQ ID NO: 3062247 - DNA, 25 bp, Homo sapien
tgatcatgaattcccgggccaggtg

SEQ ID NO: 3062248 - DNA, 25 bp, Homo sapien
ctccaaggggcggatgacaatgctc

SEQ ID NO: 3062249 - DNA, 25 bp, Homo sapien
aaagccaaaagagtcgatggccggg

SEQ ID NO: 3062250 - DNA, 25 bp, Homo sapien
tccctgggtgtgagtccggagatca

SEQ ID NO: 3062251 - DNA, 25 bp, Homo sapien
cgatggccgggataaaagctttgat

SEQ ID NO: 3062252 - DNA, 25 bp, Homo sapien
gatgggtgcatcctgagtcacgtgc

SEQ ID NO: 3062253 - DNA, 25 bp, Homo sapien
ctcttccctgtaggagccgaggtga

SEQ ID NO: 3062254 - DNA, 25 bp, Homo sapien
ggagggtagagaaggccaacctctc

SEQ ID NO: 3062255 - DNA, 25 bp, Homo sapien
gccgaggtgactcttgttctgctct

SEQ ID NO: 3062256 - DNA, 25 bp, Homo sapien
cagcactctccctaatacgcctggg

SEQ ID NO: 3062257 - DNA, 25 bp, Homo sapien
gcgcctggccaggacggtataaact

SEQ ID NO: 3062258 - DNA, 25 bp, Homo sapien
tctacaaagtagtaaggctccatca

SEQ ID NO: 3062259 - DNA, 25 bp, Homo sapien
aaggctccatcagacgaggagtagc

SEQ ID NO: 3062260 - DNA, 25 bp, Homo sapien
aactgcagagacgcaatctgcaggg

SEQ ID NO: 3062261 - DNA, 25 bp, Homo sapien
gggcctatagtcccacttgctcctt

SEQ ID NO: 3062262 - DNA, 25 bp, Homo sapien
gtccagtgaagcagatggtccccta

SEQ ID NO: 3062263 - DNA, 25 bp, Homo sapien
tccttcacttagtcccctgtccagt

SEQ ID NO: 3062264 - DNA, 25 bp, Homo sapien
agaaaggcccctcagcttggggaag

SEQ ID NO: 3062265 - DNA, 25 bp, Homo sapien
ggatcttaaacttgacattccgaat

SEQ ID NO: 3062266 - DNA, 25 bp, Homo sapien
atccaggatcttaaacttgacattc

SEQ ID NO: 3062267 - DNA, 25 bp, Homo sapien
atgaggaaggcagagtagacgactc

SEQ ID NO: 3062268 - DNA, 25 bp, Homo sapien
agtagacgactctcctggctgtggg

SEQ ID NO: 3062269 - DNA, 25 bp, Homo sapien
tccaggctacaccaccaggataagg

SEQ ID NO: 3062270 - DNA, 25 bp, Homo sapien
cgaatcctaaagatggtgagcccat

SEQ ID NO: 3062271 - DNA, 25 bp, Homo sapien
caaatgggaggtgggcgttctaact

SEQ ID NO: 3062272 - DNA, 25 bp, Homo sapien
cgttctaactgaataagcaaggccc

SEQ ID NO: 3062273 - DNA, 25 bp, Homo sapien
actggaaaccttgaacgatgctgtc

SEQ ID NO: 3062274 - DNA, 25 bp, Homo sapien
gaaaccttgaacgatgctgtccttc

SEQ ID NO: 3062275 - DNA, 25 bp, Homo sapien
cttgaacgatgctgtccttcactga

SEQ ID NO: 3062276 - DNA, 25 bp, Homo sapien
tcatcacagagggggccctccctgg

SEQ ID NO: 3062277 - DNA, 25 bp, Homo sapien
gcatcagggccaaaagcccagatgg

SEQ ID NO: 3062278 - DNA, 25 bp, Homo sapien
caccagaatgttggggccagtcgca

SEQ ID NO: 3062279 - DNA, 25 bp, Homo sapien
cccaatcgtacttggtctggaagaa

SEQ ID NO: 3062280 - DNA, 25 bp, Homo sapien
cagatggaacgggcagccagcagat

SEQ ID NO: 3062281 - DNA, 25 bp, Homo sapien
ctgttccacgtaatctggaccacct

SEQ ID NO: 3062282 - DNA, 25 bp, Homo sapien
tccacgtaatctggaccacctcatt

SEQ ID NO: 3062283 - DNA, 25 bp, Homo sapien
cgtaatctggaccacctcattctct

SEQ ID NO: 3062284 - DNA, 25 bp, Homo sapien
aggcccttctcaagaggctcagcaa

SEQ ID NO: 3062285 - DNA, 25 bp, Homo sapien
taggcgtttcagcaaagcacttgag

SEQ ID NO: 3062286 - DNA, 25 bp, Homo sapien
agggaggatgtttccaccaccgtct

SEQ ID NO: 3062287 - DNA, 25 bp, Homo sapien
cgtctcacaaaacgtgacaactggg

SEQ ID NO: 3062288 - DNA, 25 bp, Homo sapien
aaaacgtgacaactgggtcagccac

SEQ ID NO: 3062289 - DNA, 25 bp, Homo sapien
agtacatcttccgcaaatcatgcat

SEQ ID NO: 3062290 - DNA, 25 bp, Homo sapien
gtctatctctgagtacatcttccgc

SEQ ID NO: 3062291 - DNA, 25 bp, Homo sapien
aggatcacatgctcgccagactcct

SEQ ID NO: 3062292 - DNA, 25 bp, Homo sapien
acatcttccgcaaatcatgcatcac

SEQ ID NO: 3062293 - DNA, 25 bp, Homo sapien
cctatgagtgggtcctcaagacacc

SEQ ID NO: 3062294 - DNA, 25 bp, Homo sapien
caagaagttgcctatcagaaacagc

SEQ ID NO: 3062295 - DNA, 25 bp, Homo sapien
tacccatggacataagctagccctt

SEQ ID NO: 3062296 - DNA, 25 bp, Homo sapien
caggctcatagtgtacaaggatcag

SEQ ID NO: 3062297 - DNA, 25 bp, Homo sapien
gaacttcaagggtcggaaaatctga

SEQ ID NO: 3062298 - DNA, 25 bp, Homo sapien
tagctcttgttgaccttgcgcaggc

SEQ ID NO: 3062299 - DNA, 25 bp, Homo sapien
tgcgcaggccatcaagcatcttggg

SEQ ID NO: 3062300 - DNA, 25 bp, Homo sapien
gactggctccacagcaatcttgata

SEQ ID NO: 3062301 - DNA, 25 bp, Homo sapien
gaagaggacttgcttaggatcagac

SEQ ID NO: 3062302 - DNA, 25 bp, Homo sapien
taggatcagactatgtattccccaa

SEQ ID NO: 3062303 - DNA, 25 bp, Homo sapien
gacttgcttaggatcagactatgta

SEQ ID NO: 3062304 - DNA, 25 bp, Homo sapien
agactatgtattccccaaccaggag

SEQ ID NO: 3062305 - DNA, 25 bp, Homo sapien
tctagcttaagccaacccagttggt

SEQ ID NO: 3062306 - DNA, 25 bp, Homo sapien
gattagtcccgtttgtgctcatgtg

SEQ ID NO: 3062307 - DNA, 25 bp, Homo sapien
gaaggctaagcctgaaaccaggaca

SEQ ID NO: 3062308 - DNA, 25 bp, Homo sapien
tctgaactgagtacagggagaatcc

SEQ ID NO: 3062309 - DNA, 25 bp, Homo sapien
aatcagaacccagttgccagcagga

SEQ ID NO: 3062310 - DNA, 25 bp, Homo sapien
ggttcggttatggttgctgtcttca

SEQ ID NO: 3062311 - DNA, 25 bp, Homo sapien
ggttgatcaacaccttcaatcagaa

SEQ ID NO: 3062312 - DNA, 25 bp, Homo sapien
gctgtcttcacaattggttgatcaa

SEQ ID NO: 3062313 - DNA, 25 bp, Homo sapien
ccggccaaaggcgtgaaactggact

SEQ ID NO: 3062314 - DNA, 25 bp, Homo sapien
cacggtgcatatctgggagtcttcc

SEQ ID NO: 3062315 - DNA, 25 bp, Homo sapien
gctgtacatcttagtagtgtggcac

SEQ ID NO: 3062316 - DNA, 25 bp, Homo sapien
tccagggtgtagttctcccccagta

SEQ ID NO: 3062317 - DNA, 25 bp, Homo sapien
tatgctcgtgttatagaccaaggcc

SEQ ID NO: 3062318 - DNA, 25 bp, Homo sapien
gccaggactgacaagattagctacc

SEQ ID NO: 3062319 - DNA, 25 bp, Homo sapien
cagatttaagatagcagagaggcac

SEQ ID NO: 3062320 - DNA, 25 bp, Homo sapien
tagcactagcggtggcaacatcagg

SEQ ID NO: 3062321 - DNA, 25 bp, Homo sapien
gggtcacagtcactcatagcctcgc

SEQ ID NO: 3062322 - DNA, 25 bp, Homo sapien
tggagaagggatatgctgcacacac

SEQ ID NO: 3062323 - DNA, 25 bp, Homo sapien
tgtgctcaatcttgggcttggcgcc

SEQ ID NO: 3062324 - DNA, 25 bp, Homo sapien
tcggagtccacaccaccggtgtagg

SEQ ID NO: 3062325 - DNA, 25 bp, Homo sapien
ttcccagggagcacgagcaggagtt

SEQ ID NO: 3062326 - DNA, 25 bp, Homo sapien
caatggtcaaaaagctcaaagtgcg

SEQ ID NO: 3062327 - DNA, 25 bp, Homo sapien
gccattaatacatgccttcccaggg

SEQ ID NO: 3062328 - DNA, 25 bp, Homo sapien
gcaggagttactgagccattcacaa

SEQ ID NO: 3062329 - DNA, 25 bp, Homo sapien
ctgtgaactcgccaaagaacttttt

SEQ ID NO: 3062330 - DNA, 25 bp, Homo sapien
gaggctggtgtccacgtcacctaca

SEQ ID NO: 3062331 - DNA, 25 bp, Homo sapien
tcctccttcgtcaggtggatgccaa

SEQ ID NO: 3062332 - DNA, 25 bp, Homo sapien
ccaagctcgtctagggtccgtggga

SEQ ID NO: 3062333 - DNA, 25 bp, Homo sapien
taataacacttagagtaatgtagtg

SEQ ID NO: 3062334 - DNA, 25 bp, Homo sapien
tgaccaacaaccacccttatacttg

SEQ ID NO: 3062335 - DNA, 25 bp, Homo sapien
tgtgcttataagagcagatctgccc

SEQ ID NO: 3062336 - DNA, 25 bp, Homo sapien
tacttctggaacaattagtgaccaa

SEQ ID NO: 3062337 - DNA, 25 bp, Homo sapien
ggctccaagataaactccacgaaac

SEQ ID NO: 3062338 - DNA, 25 bp, Homo sapien
caagataaactccacgaaacttctc

SEQ ID NO: 3062339 - DNA, 25 bp, Homo sapien
taaactccacgaaacttctctggga

SEQ ID NO: 3062340 - DNA, 25 bp, Homo sapien
ctgggcgaggatcttataaagaggc

SEQ ID NO: 3062341 - DNA, 25 bp, Homo sapien
tgaagtagatgtcaccccagagtct

SEQ ID NO: 3062342 - DNA, 25 bp, Homo sapien
tcaccccagagtcttttagcaaatt

SEQ ID NO: 3062343 - DNA, 25 bp, Homo sapien
tcttagggttgaagtagatgtcacc

SEQ ID NO: 3062344 - DNA, 25 bp, Homo sapien
cagagtcttttagcaaattcttggt

SEQ ID NO: 3062345 - DNA, 25 bp, Homo sapien
ctagcaaagtgtcgttcaaaattct

SEQ ID NO: 3062346 - DNA, 25 bp, Homo sapien
aggtgccacaggtggttcatagctg

SEQ ID NO: 3062347 - DNA, 25 bp, Homo sapien
gctgagaacttctagcactttcctt

SEQ ID NO: 3062348 - DNA, 25 bp, Homo sapien
cacaggtggttcatagctgagaact

SEQ ID NO: 3062349 - DNA, 25 bp, Homo sapien
caagtgatcctcccgagctcagact

SEQ ID NO: 3062350 - DNA, 25 bp, Homo sapien
agtgatcctcccgagctcagactac

SEQ ID NO: 3062351 - DNA, 25 bp, Homo sapien
gtgatcctcccgagctcagactaca

SEQ ID NO: 3062352 - DNA, 25 bp, Homo sapien
gatcctcccgagctcagactacagg

SEQ ID NO: 3062353 - DNA, 25 bp, Homo sapien
cgcctactggtcatgagacatctca

SEQ ID NO: 3062354 - DNA, 25 bp, Homo sapien
catgctaagagtgcggcaggacaac

SEQ ID NO: 3062355 - DNA, 25 bp, Homo sapien
gcaagaatagaaacgctgatgctcc

SEQ ID NO: 3062356 - DNA, 25 bp, Homo sapien
caggacaactgactggcaagaatag

SEQ ID NO: 3062357 - DNA, 25 bp, Homo sapien
ggagaagcagacgttacccaggagt

SEQ ID NO: 3062358 - DNA, 25 bp, Homo sapien
cagcgtgaagcagatgctgtactgg

SEQ ID NO: 3062359 - DNA, 25 bp, Homo sapien
aaaggtgtcggcatagatcttggca

SEQ ID NO: 3062360 - DNA, 25 bp, Homo sapien
aaggagcccagcgtgaagcagatgc

SEQ ID NO: 3062361 - DNA, 25 bp, Homo sapien
gccaacagcctggtccaagaaagtg

SEQ ID NO: 3062362 - DNA, 25 bp, Homo sapien
ccagagctgggaacattctgcacaa

SEQ ID NO: 3062363 - DNA, 25 bp, Homo sapien
cctcggaagggacttgtgcaagaca

SEQ ID NO: 3062364 - DNA, 25 bp, Homo sapien
ggaaaagttaactgcaccagacaga

SEQ ID NO: 3062365 - DNA, 25 bp, Homo sapien
ttgaaaagtagtgctacacactggg

SEQ ID NO: 3062366 - DNA, 25 bp, Homo sapien
cacactgggctctagtcattctcag

SEQ ID NO: 3062367 - DNA, 25 bp, Homo sapien
caggttaagttcagctctatcccac

SEQ ID NO: 3062368 - DNA, 25 bp, Homo sapien
tttggactcatgatgtcacactggg

SEQ ID NO: 3062369 - DNA, 25 bp, Homo sapien
tgtgcctctagttttgcccaacaaa

SEQ ID NO: 3062370 - DNA, 25 bp, Homo sapien
taaagtatgaagtcaacccctgcag

SEQ ID NO: 3062371 - DNA, 25 bp, Homo sapien
tgcagagtcccaggatgtgcctcta

SEQ ID NO: 3062372 - DNA, 25 bp, Homo sapien
cacagttgttcccagaggtattcag

SEQ ID NO: 3062373 - DNA, 25 bp, Homo sapien
tgcaccgcatgcttgatcagccgct

SEQ ID NO: 3062374 - DNA, 25 bp, Homo sapien
taataagcatcagttggaggcagct

SEQ ID NO: 3062375 - DNA, 25 bp, Homo sapien
ttgttgatgcacacagtgactgcca

SEQ ID NO: 3062376 - DNA, 25 bp, Homo sapien
caggatcagccggtcaatcttgttg

SEQ ID NO: 3062377 - DNA, 25 bp, Homo sapien
aaaggaccactccatctgagatgcg

SEQ ID NO: 3062378 - DNA, 25 bp, Homo sapien
agatgcgcaagccagctgtgacctc

SEQ ID NO: 3062379 - DNA, 25 bp, Homo sapien
tctgagatgcgcaagccagctgtga

SEQ ID NO: 3062380 - DNA, 25 bp, Homo sapien
aatgaaaaggaccactccatctgag

SEQ ID NO: 3062381 - DNA, 25 bp, Homo sapien
aatcaaaagccaaaggatgtcctac

SEQ ID NO: 3062382 - DNA, 25 bp, Homo sapien
gacaaggttctaataatcaaaagcc

SEQ ID NO: 3062383 - DNA, 25 bp, Homo sapien
aaccaagacaaggttctaataatca

SEQ ID NO: 3062384 - DNA, 25 bp, Homo sapien
ggacacacgcaaaaccaagacaagg

SEQ ID NO: 3062385 - DNA, 25 bp, Homo sapien
tggagtgtccatgatattgaagaga

SEQ ID NO: 3062386 - DNA, 25 bp, Homo sapien
agaccactgtcacaggagtgctttt

SEQ ID NO: 3062387 - DNA, 25 bp, Homo sapien
ttggtgtctggcaagaccactgtca

SEQ ID NO: 3062388 - DNA, 25 bp, Homo sapien
tggcaagaccactgtcacaggagtg

SEQ ID NO: 3062389 - DNA, 25 bp, Homo sapien
gctctgtgaagaggatgtcagtata

SEQ ID NO: 3062390 - DNA, 25 bp, Homo sapien
tctgtgaagaggatgtcagtatagc

SEQ ID NO: 3062391 - DNA, 25 bp, Homo sapien
ctcttgctctgtgaagaggatgtca

SEQ ID NO: 3062392 - DNA, 25 bp, Homo sapien
tgaagaggatgtcagtatagcacag

SEQ ID NO: 3062393 - DNA, 25 bp, Homo sapien
ttaactgttgttaccacctgagttg

SEQ ID NO: 3062394 - DNA, 25 bp, Homo sapien
tgctctcccacaaacgaaccatcaa

SEQ ID NO: 3062395 - DNA, 25 bp, Homo sapien
attaactgttgttaccacctgagtt

SEQ ID NO: 3062396 - DNA, 25 bp, Homo sapien
aaacgaaccatcaatcactttccct

SEQ ID NO: 3062397 - DNA, 25 bp, Homo sapien
atcttggtcatagcgctttctgatt

SEQ ID NO: 3062398 - DNA, 25 bp, Homo sapien
agcgctttctgatttccgggtgagt

SEQ ID NO: 3062399 - DNA, 25 bp, Homo sapien
catagcgctttctgatttccgggtg

SEQ ID NO: 3062400 - DNA, 25 bp, Homo sapien
tggtcatagcgctttctgatttccg

SEQ ID NO: 3062401 - DNA, 25 bp, Homo sapien
ctgttcaattaaacaatccacaaaa

SEQ ID NO: 3062402 - DNA, 25 bp, Homo sapien
caattaaacaatccacaaaacatgt

SEQ ID NO: 3062403 - DNA, 25 bp, Homo sapien
tcaattaaacaatccacaaaacatg

SEQ ID NO: 3062404 - DNA, 25 bp, Homo sapien
gttcaattaaacaatccacaaaaca

SEQ ID NO: 3062405 - DNA, 25 bp, Homo sapien
tccacaaagggtcacatttctgatg

SEQ ID NO: 3062406 - DNA, 25 bp, Homo sapien
gctctgagttatccatcagatccgc

SEQ ID NO: 3062407 - DNA, 25 bp, Homo sapien
gttatccatcagatccgccaagaaa

SEQ ID NO: 3062408 - DNA, 25 bp, Homo sapien
tgtccacaaagggtcacatttctga

SEQ ID NO: 3062409 - DNA, 25 bp, Homo sapien
ccatctcatacaccgtaacaggtaa

SEQ ID NO: 3062410 - DNA, 25 bp, Homo sapien
ccgtaacaggtaatgtctgctccat

SEQ ID NO: 3062411 - DNA, 25 bp, Homo sapien
tggttttcactggcttaataatggg

SEQ ID NO: 3062412 - DNA, 25 bp, Homo sapien
gtctgctccatcagagtgaatttct

SEQ ID NO: 3062413 - DNA, 25 bp, Homo sapien
cttcctcttgaactatggtctccac

SEQ ID NO: 3062414 - DNA, 25 bp, Homo sapien
tgaactatggtctccacctcaggac

SEQ ID NO: 3062415 - DNA, 25 bp, Homo sapien
ctcttgaactatggtctccacctca

SEQ ID NO: 3062416 - DNA, 25 bp, Homo sapien
atggtctccacctcaggaccataca

SEQ ID NO: 3062417 - DNA, 25 bp, Homo sapien
tcctcggctgttgggtagtacttct

SEQ ID NO: 3062418 - DNA, 25 bp, Homo sapien
ctcctcggctgttgggtagtacttc

SEQ ID NO: 3062419 - DNA, 25 bp, Homo sapien
ctcggctgttgggtagtacttcttg

SEQ ID NO: 3062420 - DNA, 25 bp, Homo sapien
cggctgttgggtagtacttcttgtc

SEQ ID NO: 3062421 - DNA, 25 bp, Homo sapien
tcgtcatgatctcctacgtcatcgt

SEQ ID NO: 3062422 - DNA, 25 bp, Homo sapien
ggtcatcgtcatgatctcctacgtc

SEQ ID NO: 3062423 - DNA, 25 bp, Homo sapien
tgatctcctacgtcatcgtcgtcgt

SEQ ID NO: 3062424 - DNA, 25 bp, Homo sapien
cccagggtggtcatcgtcatgatct

SEQ ID NO: 3062425 - DNA, 25 bp, Homo sapien
tcaagatctttggtctctctaccca

SEQ ID NO: 3062426 - DNA, 25 bp, Homo sapien
aactcatcatataagtcggtatcca

SEQ ID NO: 3062427 - DNA, 25 bp, Homo sapien
caagctctggtccaatataattccc

SEQ ID NO: 3062428 - DNA, 25 bp, Homo sapien
ggtctctctacccaattcatcatca

SEQ ID NO: 3062429 - DNA, 25 bp, Homo sapien
aattcaaggagagaagagttagatt

SEQ ID NO: 3062430 - DNA, 25 bp, Homo sapien
aaaattcaaggagagaagagttaga

SEQ ID NO: 3062431 - DNA, 25 bp, Homo sapien
ctaaaattcaaggagagaagagtta

SEQ ID NO: 3062432 - DNA, 25 bp, Homo sapien
taaaattcaaggagagaagagttag

SEQ ID NO: 3062433 - DNA, 25 bp, Homo sapien
ttcccgctacaatgcaggagctcag

SEQ ID NO: 3062434 - DNA, 25 bp, Homo sapien
tacctagcgatacgattttacggac

SEQ ID NO: 3062435 - DNA, 25 bp, Homo sapien
tacggactgaggctatagaggcagc

SEQ ID NO: 3062436 - DNA, 25 bp, Homo sapien
gactggacagttagagcaccactcc

SEQ ID NO: 3062437 - DNA, 25 bp, Homo sapien
cacgccgaggaaacgcctgcgcccg

SEQ ID NO: 3062438 - DNA, 25 bp, Homo sapien
ctgctcagctaagagttcccaggcc

SEQ ID NO: 3062439 - DNA, 25 bp, Homo sapien
aggccgctgccggagatcgtgcttc

SEQ ID NO: 3062440 - DNA, 25 bp, Homo sapien
cagctaagagttcccaggccgctgc

SEQ ID NO: 3062441 - DNA, 25 bp, Homo sapien
caaatgctggctataccagttacag

SEQ ID NO: 3062442 - DNA, 25 bp, Homo sapien
gttacagcctccactcataaaaggg

SEQ ID NO: 3062443 - DNA, 25 bp, Homo sapien
tgagtgtgtgcccaaccaaatgctg

SEQ ID NO: 3062444 - DNA, 25 bp, Homo sapien
ctcagttcttgtgcaggttgggcct

SEQ ID NO: 3062445 - DNA, 25 bp, Homo sapien
aataaattgccttgcacttggcggc

SEQ ID NO: 3062446 - DNA, 25 bp, Homo sapien
tacctggccgacatgagctttgagc

SEQ ID NO: 3062447 - DNA, 25 bp, Homo sapien
cagatgaatactatgggcacctcca

SEQ ID NO: 3062448 - DNA, 25 bp, Homo sapien
gaagggcatcttgtacatccactgg

SEQ ID NO: 3062449 - DNA, 25 bp, Homo sapien
taccgcacacagtacctgaagggtg

SEQ ID NO: 3062450 - DNA, 25 bp, Homo sapien
ggtgttcattgaccacggcaaccag

SEQ ID NO: 3062451 - DNA, 25 bp, Homo sapien
gcttccggctgggtgtgacatctca

SEQ ID NO: 3062452 - DNA, 25 bp, Homo sapien
tatgtgtccaaagtgggcagccggc

SEQ ID NO: 3062453 - DNA, 25 bp, Homo sapien
attttcatgggcaggtctgggacct

SEQ ID NO: 3062454 - DNA, 25 bp, Homo sapien
gacttcacatttaggtcagagaagg

SEQ ID NO: 3062455 - DNA, 25 bp, Homo sapien
caggtggtaggaacatgtggacaaa

SEQ ID NO: 3062456 - DNA, 25 bp, Homo sapien
tctgggacctgatctgagaagtgga

SEQ ID NO: 3062457 - DNA, 25 bp, Homo sapien
tgatactgacggagcctagggcagc

SEQ ID NO: 3062458 - DNA, 25 bp, Homo sapien
tttcctcagcgactaaaggcagcag

SEQ ID NO: 3062459 - DNA, 25 bp, Homo sapien
ggcacagttcccagatactccgaga

SEQ ID NO: 3062460 - DNA, 25 bp, Homo sapien
tcagggtcagtctaggagaacaacc

SEQ ID NO: 3062461 - DNA, 25 bp, Homo sapien
ggggaaatgtgccagcagaggcgga

SEQ ID NO: 3062462 - DNA, 25 bp, Homo sapien
agcagaggcggagcaactatcctgc

SEQ ID NO: 3062463 - DNA, 25 bp, Homo sapien
gggaaatgtgccagcagaggcggag

SEQ ID NO: 3062464 - DNA, 25 bp, Homo sapien
gcagaggcggagcaactatcctgct

SEQ ID NO: 3062465 - DNA, 25 bp, Homo sapien
cgggcccctcatgagacggggcaga

SEQ ID NO: 3062466 - DNA, 25 bp, Homo sapien
tgctcgggcccctcatgagacgggg

SEQ ID NO: 3062467 - DNA, 25 bp, Homo sapien
ctgctcgggcccctcatgagacggg

SEQ ID NO: 3062468 - DNA, 25 bp, Homo sapien
ctcgggcccctcatgagacggggca

SEQ ID NO: 3062469 - DNA, 25 bp, Homo sapien
atcacatccttgtgctcctgcttgg

SEQ ID NO: 3062470 - DNA, 25 bp, Homo sapien
tcacatcacatccttgtgctcctgc

SEQ ID NO: 3062471 - DNA, 25 bp, Homo sapien
acatcacatccttgtgctcctgctt

SEQ ID NO: 3062472 - DNA, 25 bp, Homo sapien
tcacatccttgtgctcctgcttgga

SEQ ID NO: 3062473 - DNA, 25 bp, Homo sapien
aaagcatttagcgtcatgcctggcg

SEQ ID NO: 3062474 - DNA, 25 bp, Homo sapien
caacagttaggagttcacacagacc

SEQ ID NO: 3062475 - DNA, 25 bp, Homo sapien
ccttagaacagcctatggagggact

SEQ ID NO: 3062476 - DNA, 25 bp, Homo sapien
gacagggaacgtgcacagtgcaaca

SEQ ID NO: 3062477 - DNA, 25 bp, Homo sapien
ggtcttcaccacgatgttcctcttg

SEQ ID NO: 3062478 - DNA, 25 bp, Homo sapien
atgttcctcttgaggtggccttctg

SEQ ID NO: 3062479 - DNA, 25 bp, Homo sapien
ctccacggtcttcaccacgatgttc

SEQ ID NO: 3062480 - DNA, 25 bp, Homo sapien
gttcctcttgaggtggccttctgac

SEQ ID NO: 3062481 - DNA, 25 bp, Homo sapien
gaggcctctcatggactttcagggc

SEQ ID NO: 3062482 - DNA, 25 bp, Homo sapien
agggcatgagccatcctctcccatg

SEQ ID NO: 3062483 - DNA, 25 bp, Homo sapien
agaggaggcctctcatggactttca

SEQ ID NO: 3062484 - DNA, 25 bp, Homo sapien
gcctctcatggactttcagggcatg

SEQ ID NO: 3062485 - DNA, 25 bp, Homo sapien
gaaaacccagcacggtattgaaatc

SEQ ID NO: 3062486 - DNA, 25 bp, Homo sapien
taggctcttccaaacgggctggaga

SEQ ID NO: 3062487 - DNA, 25 bp, Homo sapien
tgagaacctatgcaaccgagcagag

SEQ ID NO: 3062488 - DNA, 25 bp, Homo sapien
taagactccgtcgaaagcaggcaag

SEQ ID NO: 3062489 - DNA, 25 bp, Homo sapien
caagaagtcccaacttagccaccaa

SEQ ID NO: 3062490 - DNA, 25 bp, Homo sapien
tgatggggcctacttctctaggtgg

SEQ ID NO: 3062491 - DNA, 25 bp, Homo sapien
tgctcaatacacataggtccctttc

SEQ ID NO: 3062492 - DNA, 25 bp, Homo sapien
taaaggctgttaaacatgtggcaca

SEQ ID NO: 3062493 - DNA, 25 bp, Homo sapien
ggaaaatgacgcagtccaggccctt

SEQ ID NO: 3062494 - DNA, 25 bp, Homo sapien
tcaagctgggcaaagcgccgtgtct

SEQ ID NO: 3062495 - DNA, 25 bp, Homo sapien
gagacatgcatatctagtggtccta

SEQ ID NO: 3062496 - DNA, 25 bp, Homo sapien
tactctgtaccacgtcctgggctgg

SEQ ID NO: 3062497 - DNA, 25 bp, Homo sapien
gagccggcggcgttccatttacaat

SEQ ID NO: 3062498 - DNA, 25 bp, Homo sapien
gaggcttttgagatatcttgtgacc

SEQ ID NO: 3062499 - DNA, 25 bp, Homo sapien
aatctggtgagcctgtattggtata

SEQ ID NO: 3062500 - DNA, 25 bp, Homo sapien
aactcgtattgtgaggcttttgaga

SEQ ID NO: 3062501 - DNA, 25 bp, Homo sapien
tatgataggctctggctaggagcgc

SEQ ID NO: 3062502 - DNA, 25 bp, Homo sapien
acagggcagatgtcaagctctcacc

SEQ ID NO: 3062503 - DNA, 25 bp, Homo sapien
gatcctcagtcccagtctggagcaa

SEQ ID NO: 3062504 - DNA, 25 bp, Homo sapien
ggagagctggatccctttgccctga

SEQ ID NO: 3062505 - DNA, 25 bp, Homo sapien
agggggcaggactccagtgcccttc

SEQ ID NO: 3062506 - DNA, 25 bp, Homo sapien
agaaggtctgcacgggaatggtgat

SEQ ID NO: 3062507 - DNA, 25 bp, Homo sapien
gagaaggtctgcacgggaatggtga

SEQ ID NO: 3062508 - DNA, 25 bp, Homo sapien
gaaggtctgcacgggaatggtgatc

SEQ ID NO: 3062509 - DNA, 25 bp, Homo sapien
caacgtgctatctggagttccaaac

SEQ ID NO: 3062510 - DNA, 25 bp, Homo sapien
tgaggtgaggagtccaatcttggct

SEQ ID NO: 3062511 - DNA, 25 bp, Homo sapien
gggccatcatgacaacttgaacgcc

SEQ ID NO: 3062512 - DNA, 25 bp, Homo sapien
tccttgccaggaaagtctaactcca

SEQ ID NO: 3062513 - DNA, 25 bp, Homo sapien
cgcgccagcgcctcctgataactgg

SEQ ID NO: 3062514 - DNA, 25 bp, Homo sapien
cgggccatctcgtccttgaggctct

SEQ ID NO: 3062515 - DNA, 25 bp, Homo sapien
caagtggcgggccatctcgtccttg

SEQ ID NO: 3062516 - DNA, 25 bp, Homo sapien
ggccatctcgtccttgaggctctgc

SEQ ID NO: 3062517 - DNA, 25 bp, Homo sapien
tggagccggccggtcccgcggagcc

SEQ ID NO: 3062518 - DNA, 25 bp, Homo sapien
atggagccggccggtcccgcggagc

SEQ ID NO: 3062519 - DNA, 25 bp, Homo sapien
ctgtgggatggagccggccggtccc

SEQ ID NO: 3062520 - DNA, 25 bp, Homo sapien
tgggatggagccggccggtcccgcg

SEQ ID NO: 3062521 - DNA, 25 bp, Homo sapien
gtccccgtcctgccctggccgcgct

SEQ ID NO: 3062522 - DNA, 25 bp, Homo sapien
ccccgtcctgccctggccgcgctca

SEQ ID NO: 3062523 - DNA, 25 bp, Homo sapien
cccgtcctgccctggccgcgctcac

SEQ ID NO: 3062524 - DNA, 25 bp, Homo sapien
ccgtccccgtcctgccctggccgcg

SEQ ID NO: 3062525 - DNA, 25 bp, Homo sapien
gccggtagtcgttggcttcgtgctt

SEQ ID NO: 3062526 - DNA, 25 bp, Homo sapien
ctccgcgttgcgggcagcagcgtct

SEQ ID NO: 3062527 - DNA, 25 bp, Homo sapien
aggtcgcaggtcaaggactgcaact

SEQ ID NO: 3062528 - DNA, 25 bp, Homo sapien
gtcaaggactgcaactggcgccggt

SEQ ID NO: 3062529 - DNA, 25 bp, Homo sapien
gccattgcctcatactgcgtgcgga

SEQ ID NO: 3062530 - DNA, 25 bp, Homo sapien
cttggagcggtaccactcttcggct

SEQ ID NO: 3062531 - DNA, 25 bp, Homo sapien
ctcttcggcttcatgcatgttgctg

SEQ ID NO: 3062532 - DNA, 25 bp, Homo sapien
tggcttggccacgtcaagctccaca

SEQ ID NO: 3062533 - DNA, 25 bp, Homo sapien
tccagacgggccagggtggcttcat

SEQ ID NO: 3062534 - DNA, 25 bp, Homo sapien
ctcctcgtggatcttcctcaagaac

SEQ ID NO: 3062535 - DNA, 25 bp, Homo sapien
tctccagatccagacgggccagggt

SEQ ID NO: 3062536 - DNA, 25 bp, Homo sapien
ttcctctccagatccagacgggcca

SEQ ID NO: 3062537 - DNA, 25 bp, Homo sapien
gagcagcacattgctctggcgggct

SEQ ID NO: 3062538 - DNA, 25 bp, Homo sapien
agccttgccttacccctccttctgg

SEQ ID NO: 3062539 - DNA, 25 bp, Homo sapien
ggtgggtggccatcaatcctttcct

SEQ ID NO: 3062540 - DNA, 25 bp, Homo sapien
gcacattgctctggcgggctgagct

SEQ ID NO: 3062541 - DNA, 25 bp, Homo sapien
tccagcctcaggttggtttcatcct

SEQ ID NO: 3062542 - DNA, 25 bp, Homo sapien
cagcctcaggttggtttcatcctgg

SEQ ID NO: 3062543 - DNA, 25 bp, Homo sapien
ccagcctcaggttggtttcatcctg

SEQ ID NO: 3062544 - DNA, 25 bp, Homo sapien
gacttctcgggcactccttcttggg

SEQ ID NO: 3062545 - DNA, 25 bp, Homo sapien
taaggtgccttatcagggttggtgc

SEQ ID NO: 3062546 - DNA, 25 bp, Homo sapien
tctgaggacacttgaatacctgcct

SEQ ID NO: 3062547 - DNA, 25 bp, Homo sapien
ggatagtgccccatcaagaggtagg

SEQ ID NO: 3062548 - DNA, 25 bp, Homo sapien
gcgctgttggcggtgagttgatcga

SEQ ID NO: 3062549 - DNA, 25 bp, Homo sapien
tgtgccagattgtccctctcaacct

SEQ ID NO: 3062550 - DNA, 25 bp, Homo sapien
gccaggtcctgtgccagattgtccc

SEQ ID NO: 3062551 - DNA, 25 bp, Homo sapien
gtgagttgatcgagccgcagccgca

SEQ ID NO: 3062552 - DNA, 25 bp, Homo sapien
tgggctccttggcccgcagctggtt

SEQ ID NO: 3062553 - DNA, 25 bp, Homo sapien
gctccttggcccgcagctggttcag

SEQ ID NO: 3062554 - DNA, 25 bp, Homo sapien
tccttggcccgcagctggttcagct

SEQ ID NO: 3062555 - DNA, 25 bp, Homo sapien
ggtgggctccttggcccgcagctgg

SEQ ID NO: 3062556 - DNA, 25 bp, Homo sapien
tccatcatctctgcccgctcactgg

SEQ ID NO: 3062557 - DNA, 25 bp, Homo sapien
cagcgccttgttttgctgttccagg

SEQ ID NO: 3062558 - DNA, 25 bp, Homo sapien
cagccagcgccttgttttgctgttc

SEQ ID NO: 3062559 - DNA, 25 bp, Homo sapien
gccagcgccttgttttgctgttcca

SEQ ID NO: 3062560 - DNA, 25 bp, Homo sapien
ggtgccaggacccagacggcggcca

SEQ ID NO: 3062561 - DNA, 25 bp, Homo sapien
cggcgagcagcggaggtgatgcgtc

SEQ ID NO: 3062562 - DNA, 25 bp, Homo sapien
ctgaggagacgtaggagcggcgagc

SEQ ID NO: 3062563 - DNA, 25 bp, Homo sapien
agcggaggtgatgcgtctcctctcc

SEQ ID NO: 3062564 - DNA, 25 bp, Homo sapien
aggagcggcgagcagcggaggtgat

SEQ ID NO: 3062565 - DNA, 25 bp, Homo sapien
ggctagactggcgatgcccgggtgc

SEQ ID NO: 3062566 - DNA, 25 bp, Homo sapien
gctttatgaaggagtgggctagact

SEQ ID NO: 3062567 - DNA, 25 bp, Homo sapien
tctgctcgctcctgggatgcgaggg

SEQ ID NO: 3062568 - DNA, 25 bp, Homo sapien
tcctgggatgcgagggctttatgaa

SEQ ID NO: 3062569 - DNA, 25 bp, Homo sapien
aaagagcatcttgaagacggggtga

SEQ ID NO: 3062570 - DNA, 25 bp, Homo sapien
gacctttgatcctgctatgaactgg

SEQ ID NO: 3062571 - DNA, 25 bp, Homo sapien
aagcagtgacataggaaagagcatc

SEQ ID NO: 3062572 - DNA, 25 bp, Homo sapien
gggtgagcgcccagtgacctttgat

SEQ ID NO: 3062573 - DNA, 25 bp, Homo sapien
gcaccacggagccacaagtgtttgc

SEQ ID NO: 3062574 - DNA, 25 bp, Homo sapien
ttgccgagtgaatgaccggctgtag

SEQ ID NO: 3062575 - DNA, 25 bp, Homo sapien
ctgtagaacattcttgtcaagagtg

SEQ ID NO: 3062576 - DNA, 25 bp, Homo sapien
agcacattttgcaccacggagccac

SEQ ID NO: 3062577 - DNA, 25 bp, Homo sapien
gccaaggccgtagaagggtggaaca

SEQ ID NO: 3062578 - DNA, 25 bp, Homo sapien
ccaaggccgtagaagggtggaacag

SEQ ID NO: 3062579 - DNA, 25 bp, Homo sapien
caaggccgtagaagggtggaacaga

SEQ ID NO: 3062580 - DNA, 25 bp, Homo sapien
tgcaattactcccaaacccacggag

SEQ ID NO: 3062581 - DNA, 25 bp, Homo sapien
cattcctccggttgctagggcacag

SEQ ID NO: 3062582 - DNA, 25 bp, Homo sapien
gacgccgttccctgctgagagtgct

SEQ ID NO: 3062583 - DNA, 25 bp, Homo sapien
tcaggacattctggcggtcaggaca

SEQ ID NO: 3062584 - DNA, 25 bp, Homo sapien
ggcactaattgctcccaggtaagga

SEQ ID NO: 3062585 - DNA, 25 bp, Homo sapien
gatgcttggcaataccctaggccct

SEQ ID NO: 3062586 - DNA, 25 bp, Homo sapien
gaggaaggaaagtgacgctctgtcc

SEQ ID NO: 3062587 - DNA, 25 bp, Homo sapien
atccctgagatgcttggcaataccc

SEQ ID NO: 3062588 - DNA, 25 bp, Homo sapien
gaaagtgacgctctgtccccgtcct

SEQ ID NO: 3062589 - DNA, 25 bp, Homo sapien
catggcccaggctatccctgtccct

SEQ ID NO: 3062590 - DNA, 25 bp, Homo sapien
ccaggctatccctgtccctagtgcc

SEQ ID NO: 3062591 - DNA, 25 bp, Homo sapien
ccatggcccaggctatccctgtccc

SEQ ID NO: 3062592 - DNA, 25 bp, Homo sapien
ggctatccctgtccctagtgccagt

SEQ ID NO: 3062593 - DNA, 25 bp, Homo sapien
ggcgatgcggctgcggccatgggag

SEQ ID NO: 3062594 - DNA, 25 bp, Homo sapien
ctgggagtacaaggggcccagctgg

SEQ ID NO: 3062595 - DNA, 25 bp, Homo sapien
ggcctcttcaaagtgctgctgggga

SEQ ID NO: 3062596 - DNA, 25 bp, Homo sapien
gggaggcgggcgatgcggctgcggc

SEQ ID NO: 3062597 - DNA, 25 bp, Homo sapien
ctcgcaacgcgcttcttcttgcagg

SEQ ID NO: 3062598 - DNA, 25 bp, Homo sapien
ctggggatgaagggctggtccagcc

SEQ ID NO: 3062599 - DNA, 25 bp, Homo sapien
atgaagggctggtccagcctgctca

SEQ ID NO: 3062600 - DNA, 25 bp, Homo sapien
tgaagggctggtccagcctgctcag

SEQ ID NO: 3062601 - DNA, 25 bp, Homo sapien
gggatgaagggctggtccagcctgc

SEQ ID NO: 3062602 - DNA, 25 bp, Homo sapien
cagagagatcaaaggtggcattgag

SEQ ID NO: 3062603 - DNA, 25 bp, Homo sapien
cattgaggtctcgagtgggcagagc

SEQ ID NO: 3062604 - DNA, 25 bp, Homo sapien
aaactgggctttgagggaggctcct

SEQ ID NO: 3062605 - DNA, 25 bp, Homo sapien
tttgtcccagccaatgcattcatgg

SEQ ID NO: 3062606 - DNA, 25 bp, Homo sapien
agagaccctctccttaggcagggca

SEQ ID NO: 3062607 - DNA, 25 bp, Homo sapien
aggcagagaccctctccttaggcag

SEQ ID NO: 3062608 - DNA, 25 bp, Homo sapien
tgggcaaacgcgaggggaatggcag

SEQ ID NO: 3062609 - DNA, 25 bp, Homo sapien
gggcccctgtgaaggttgggtgtca

SEQ ID NO: 3062610 - DNA, 25 bp, Homo sapien
cacagggccagtgtatcctggaggc

SEQ ID NO: 3062611 - DNA, 25 bp, Homo sapien
tccaggcgggattcccagggtgtgc

SEQ ID NO: 3062612 - DNA, 25 bp, Homo sapien
tcttcttctccatgggccatcggga

SEQ ID NO: 3062613 - DNA, 25 bp, Homo sapien
agtcgcctcgccatagtccgggtca

SEQ ID NO: 3062614 - DNA, 25 bp, Homo sapien
tgggcagagaggagacggcacaggg

SEQ ID NO: 3062615 - DNA, 25 bp, Homo sapien
gggcagagaggagacggcacaggga

SEQ ID NO: 3062616 - DNA, 25 bp, Homo sapien
ctgggcagagaggagacggcacagg

SEQ ID NO: 3062617 - DNA, 25 bp, Homo sapien
ctgggcaacgcacagcacctttagg

SEQ ID NO: 3062618 - DNA, 25 bp, Homo sapien
ctggccaggcctgaagtcctcaagg

SEQ ID NO: 3062619 - DNA, 25 bp, Homo sapien
caaactctgtgatcatgtcgggcgt

SEQ ID NO: 3062620 - DNA, 25 bp, Homo sapien
gctgctgtagggtctcaaactctgt

SEQ ID NO: 3062621 - DNA, 25 bp, Homo sapien
cccatccagttcccgtgctgagaag

SEQ ID NO: 3062622 - DNA, 25 bp, Homo sapien
tggcccacgactggcttgggctgca

SEQ ID NO: 3062623 - DNA, 25 bp, Homo sapien
tgcttagaacggtccccatccagtt

SEQ ID NO: 3062624 - DNA, 25 bp, Homo sapien
tgagaagtggcccacgactggcttg

SEQ ID NO: 3062625 - DNA, 25 bp, Homo sapien
tccccagactctcctcttgaagggc

SEQ ID NO: 3062626 - DNA, 25 bp, Homo sapien
atccccagactctcctcttgaaggg

SEQ ID NO: 3062627 - DNA, 25 bp, Homo sapien
tggggtggcaagggggagctgggaa

SEQ ID NO: 3062628 - DNA, 25 bp, Homo sapien
gtggggtggcaagggggagctggga

SEQ ID NO: 3062629 - DNA, 25 bp, Homo sapien
gaatagtaggccctgctcttacggg

SEQ ID NO: 3062630 - DNA, 25 bp, Homo sapien
taaccctagggattggagcagaagc

SEQ ID NO: 3062631 - DNA, 25 bp, Homo sapien
tactcattggacacagcactctagg

SEQ ID NO: 3062632 - DNA, 25 bp, Homo sapien
gacagtcagttgctgggcaggcact

SEQ ID NO: 3062633 - DNA, 25 bp, Homo sapien
tgttctggtggtggtcccgacttgg

SEQ ID NO: 3062634 - DNA, 25 bp, Homo sapien
cctcatacacttggagcttcttcct

SEQ ID NO: 3062635 - DNA, 25 bp, Homo sapien
ggcctcccccctcatacacttggag

SEQ ID NO: 3062636 - DNA, 25 bp, Homo sapien
tggtggtcccgacttgggagatcct

SEQ ID NO: 3062637 - DNA, 25 bp, Homo sapien
ctggaacagaagcagcccagcccct

SEQ ID NO: 3062638 - DNA, 25 bp, Homo sapien
agaagcagcccagcccctgagagcc

SEQ ID NO: 3062639 - DNA, 25 bp, Homo sapien
gcagcccagcccctgagagccccag

SEQ ID NO: 3062640 - DNA, 25 bp, Homo sapien
tggaacagaagcagcccagcccctg

SEQ ID NO: 3062641 - DNA, 25 bp, Homo sapien
tggcagatggtagcatactggctga

SEQ ID NO: 3062642 - DNA, 25 bp, Homo sapien
ttggcagatggtagcatactggctg

SEQ ID NO: 3062643 - DNA, 25 bp, Homo sapien
ggcagatggtagcatactggctgat

SEQ ID NO: 3062644 - DNA, 25 bp, Homo sapien
gttggcagatggtagcatactggct

SEQ ID NO: 3062645 - DNA, 25 bp, Homo sapien
cttcttgccagggttagggtgttct

SEQ ID NO: 3062646 - DNA, 25 bp, Homo sapien
cagggttagggtgttcttgcagtgg

SEQ ID NO: 3062647 - DNA, 25 bp, Homo sapien
cttgccagggttagggtgttcttgc

SEQ ID NO: 3062648 - DNA, 25 bp, Homo sapien
tagggtgttcttgcagtggtcccag

SEQ ID NO: 3062649 - DNA, 25 bp, Homo sapien
cttggggacacttggcccagggatc

SEQ ID NO: 3062650 - DNA, 25 bp, Homo sapien
ccaccatgtccaggccagaggaact

SEQ ID NO: 3062651 - DNA, 25 bp, Homo sapien
gcccagggatctattggagctgcct

SEQ ID NO: 3062652 - DNA, 25 bp, Homo sapien
ggacacttggcccagggatctattg

SEQ ID NO: 3062653 - DNA, 25 bp, Homo sapien
acgtgtcctcgtaggtcaggctgga

SEQ ID NO: 3062654 - DNA, 25 bp, Homo sapien
agcaggcgggtcagtttgctgtccc

SEQ ID NO: 3062655 - DNA, 25 bp, Homo sapien
tcccggtagggcacatgggtcttgc

SEQ ID NO: 3062656 - DNA, 25 bp, Homo sapien
gagagcctgatctccttggcccggt

SEQ ID NO: 3062657 - DNA, 25 bp, Homo sapien
agccaggtcaatcaggctcatcttg

SEQ ID NO: 3062658 - DNA, 25 bp, Homo sapien
tcagtcctggaacccggtcctgctg

SEQ ID NO: 3062659 - DNA, 25 bp, Homo sapien
tcccccttcgcatgggtgctggatg

SEQ ID NO: 3062660 - DNA, 25 bp, Homo sapien
agccgctcccccttcgcatgggtgc

SEQ ID NO: 3062661 - DNA, 25 bp, Homo sapien
atgggagcgggaggaagtcgcgttg

SEQ ID NO: 3062662 - DNA, 25 bp, Homo sapien
ctgcgtgcggttacggttccccctg

SEQ ID NO: 3062663 - DNA, 25 bp, Homo sapien
tacggttccccctggtcagtatctc

SEQ ID NO: 3062664 - DNA, 25 bp, Homo sapien
aggaagtcgcgttggcatcagtggg

SEQ ID NO: 3062665 - DNA, 25 bp, Homo sapien
cctcgcggatggcaaggggcccctt

SEQ ID NO: 3062666 - DNA, 25 bp, Homo sapien
aggtcatggatctgttcattataca

SEQ ID NO: 3062667 - DNA, 25 bp, Homo sapien
caggaggtcatggatctgttcatta

SEQ ID NO: 3062668 - DNA, 25 bp, Homo sapien
ccccttgtcggggtcctcgcggatg

SEQ ID NO: 3062669 - DNA, 25 bp, Homo sapien
tacagttccacggtggtcaggtaca

SEQ ID NO: 3062670 - DNA, 25 bp, Homo sapien
cacggtggtcaggtacatgatgccg

SEQ ID NO: 3062671 - DNA, 25 bp, Homo sapien
tgagcacctcgaagtgcttctcctg

SEQ ID NO: 3062672 - DNA, 25 bp, Homo sapien
tccaggcgcctgtacagttccacgg

SEQ ID NO: 3062673 - DNA, 25 bp, Homo sapien
ccgtaccactacttgcagcgtgctg

SEQ ID NO: 3062674 - DNA, 25 bp, Homo sapien
agacccggtcaaagacaaacgtcag

SEQ ID NO: 3062675 - DNA, 25 bp, Homo sapien
ctggaacacgtcctgttgggtggcc

SEQ ID NO: 3062676 - DNA, 25 bp, Homo sapien
ccatcgggctcctcagggttaaaca

SEQ ID NO: 3062677 - DNA, 25 bp, Homo sapien
tcctgatatcaaaccaaccatgcat

SEQ ID NO: 3062678 - DNA, 25 bp, Homo sapien
aaattctaccctggccatagtgaag

SEQ ID NO: 3062679 - DNA, 25 bp, Homo sapien
ggtaagcaattatccccaaggtcat

SEQ ID NO: 3062680 - DNA, 25 bp, Homo sapien
ccaaggtcatttatcgaatagtgca

SEQ ID NO: 3062681 - DNA, 25 bp, Homo sapien
agctcttctatgtttagctccccac

SEQ ID NO: 3062682 - DNA, 25 bp, Homo sapien
gcagatcttgtatctggccacattg

SEQ ID NO: 3062683 - DNA, 25 bp, Homo sapien
ccttctttccagaagataggaaagc

SEQ ID NO: 3062684 - DNA, 25 bp, Homo sapien
cacattgctgaactcccttattggt

SEQ ID NO: 3062685 - DNA, 25 bp, Homo sapien
tggagccccattccaatccaggcag

SEQ ID NO: 3062686 - DNA, 25 bp, Homo sapien
taagtgctcactgcatcaggaactg

SEQ ID NO: 3062687 - DNA, 25 bp, Homo sapien
ggcagtctgactacacatcgggcta

SEQ ID NO: 3062688 - DNA, 25 bp, Homo sapien
ggaactgttcaaagcaccttatgca

SEQ ID NO: 3062689 - DNA, 25 bp, Homo sapien
aatgggcagagaatgactggatacc

SEQ ID NO: 3062690 - DNA, 25 bp, Homo sapien
tcccatgacgatggaggaaccagtg

SEQ ID NO: 3062691 - DNA, 25 bp, Homo sapien
gatacctttgtacttgaagcatggg

SEQ ID NO: 3062692 - DNA, 25 bp, Homo sapien
ttcaaacccggtaagtgctcaatag

SEQ ID NO: 3062693 - DNA, 25 bp, Homo sapien
ctttcgtcggttctccgccgctggc

SEQ ID NO: 3062694 - DNA, 25 bp, Homo sapien
ttcgtcggttctccgccgctggcgt

SEQ ID NO: 3062695 - DNA, 25 bp, Homo sapien
tttcgtcggttctccgccgctggcg

SEQ ID NO: 3062696 - DNA, 25 bp, Homo sapien
gattgcgcatgagggtcggcccctt

SEQ ID NO: 3062697 - DNA, 25 bp, Homo sapien
ttggattctggtgggcccacctcat

SEQ ID NO: 3062698 - DNA, 25 bp, Homo sapien
ggtgcactgcctccatagtacaccg

SEQ ID NO: 3062699 - DNA, 25 bp, Homo sapien
ggtcggccccttgcggcagcggtgg

SEQ ID NO: 3062700 - DNA, 25 bp, Homo sapien
aggagccctcaaattttactttcat

SEQ ID NO: 3062701 - DNA, 25 bp, Homo sapien
gcaaaggcctgtgccttgaaggcct

SEQ ID NO: 3062702 - DNA, 25 bp, Homo sapien
cactgaaggagcaaaggcctgtgcc

SEQ ID NO: 3062703 - DNA, 25 bp, Homo sapien
ttgaaggcctgggaaggagccctca

SEQ ID NO: 3062704 - DNA, 25 bp, Homo sapien
gtaaatacatcaggcgtctgcaggg

SEQ ID NO: 3062705 - DNA, 25 bp, Homo sapien
cctttcctcaatgtagagccttggg

SEQ ID NO: 3062706 - DNA, 25 bp, Homo sapien
ggtctatacatgaggcctggccagg

SEQ ID NO: 3062707 - DNA, 25 bp, Homo sapien
gaaagtcattcaagtctgccagcca

SEQ ID NO: 3062708 - DNA, 25 bp, Homo sapien
aataaacctcacgaatcctcaatca

SEQ ID NO: 3062709 - DNA, 25 bp, Homo sapien
taaacctcacgaatcctcaatcaag

SEQ ID NO: 3062710 - DNA, 25 bp, Homo sapien
caataaacctcacgaatcctcaatc

SEQ ID NO: 3062711 - DNA, 25 bp, Homo sapien
aacaataaacctcacgaatcctcaa

SEQ ID NO: 3062712 - DNA, 25 bp, Homo sapien
tcaagtgcgtagacctaggttaacc

SEQ ID NO: 3062713 - DNA, 25 bp, Homo sapien
cctacgtttattgatgaggaaaccg

SEQ ID NO: 3062714 - DNA, 25 bp, Homo sapien
tggctgtcactaatcctaaattgcg

SEQ ID NO: 3062715 - DNA, 25 bp, Homo sapien
ttgcccaggatcatacacggtggcc

SEQ ID NO: 3062716 - DNA, 25 bp, Homo sapien
tacaaatatatagcgcgggctgggc

SEQ ID NO: 3062717 - DNA, 25 bp, Homo sapien
cggaggtgggcagtaaacagtccta

SEQ ID NO: 3062718 - DNA, 25 bp, Homo sapien
agggtgctgggaagctatccagccc

SEQ ID NO: 3062719 - DNA, 25 bp, Homo sapien
atctcagagcgcaggaagcaaaccc

SEQ ID NO: 3062720 - DNA, 25 bp, Homo sapien
gatgaagccagagaacgtgctgtat

SEQ ID NO: 3062721 - DNA, 25 bp, Homo sapien
cgtcgccggcgtccaggtgcaggat

SEQ ID NO: 3062722 - DNA, 25 bp, Homo sapien
tgtgctttgcctccatccagcttga

SEQ ID NO: 3062723 - DNA, 25 bp, Homo sapien
ctggtccgcgtcctgggcaatagca

SEQ ID NO: 3062724 - DNA, 25 bp, Homo sapien
gaagcctgtccttgcaaagaggaat

SEQ ID NO: 3062725 - DNA, 25 bp, Homo sapien
ggaatggagggccttccctactctc

SEQ ID NO: 3062726 - DNA, 25 bp, Homo sapien
aattctctggacctccagggaatgg

SEQ ID NO: 3062727 - DNA, 25 bp, Homo sapien
gtccttgcaaagaggaattctctgg

SEQ ID NO: 3062728 - DNA, 25 bp, Homo sapien
ctacacgcacatgcgagtcccggta

SEQ ID NO: 3062729 - DNA, 25 bp, Homo sapien
cgcacatgcgagtcccggtaccaga

SEQ ID NO: 3062730 - DNA, 25 bp, Homo sapien
gagtccccgacacactcagtgcttt

SEQ ID NO: 3062731 - DNA, 25 bp, Homo sapien
cggtaccagagtccccgacacactc

SEQ ID NO: 3062732 - DNA, 25 bp, Homo sapien
ccagccccatgcccccgcctggccc

SEQ ID NO: 3062733 - DNA, 25 bp, Homo sapien
cagccccatgcccccgcctggccca

SEQ ID NO: 3062734 - DNA, 25 bp, Homo sapien
agccccatgcccccgcctggcccac

SEQ ID NO: 3062735 - DNA, 25 bp, Homo sapien
ttgccgctggccgcgtcgtagttgt

SEQ ID NO: 3062736 - DNA, 25 bp, Homo sapien
catgaggacatggtaggtgaaaaag

SEQ ID NO: 3062737 - DNA, 25 bp, Homo sapien
gccgggaatgttgcacgtaaacttg

SEQ ID NO: 3062738 - DNA, 25 bp, Homo sapien
tcgtcaaacttgagtacctcgtaac

SEQ ID NO: 3062739 - DNA, 25 bp, Homo sapien
aaggccacgcgcggcaccgtggtgt

SEQ ID NO: 3062740 - DNA, 25 bp, Homo sapien
aggccacgcgcggcaccgtggtgta

SEQ ID NO: 3062741 - DNA, 25 bp, Homo sapien
cccggagggcccggcttgcctggct

SEQ ID NO: 3062742 - DNA, 25 bp, Homo sapien
ccggagggcccggcttgcctggctc

SEQ ID NO: 3062743 - DNA, 25 bp, Homo sapien
cggagggcccggcttgcctggctca

SEQ ID NO: 3062744 - DNA, 25 bp, Homo sapien
ccggagggccgggcttgccggtgcg

SEQ ID NO: 3062745 - DNA, 25 bp, Homo sapien
gagggccgggcttgccggtgcggcc

SEQ ID NO: 3062746 - DNA, 25 bp, Homo sapien
gccgggcttgccggtgcggcccggc

SEQ ID NO: 3062747 - DNA, 25 bp, Homo sapien
gggcttgccggtgcggcccggcttc

SEQ ID NO: 3062748 - DNA, 25 bp, Homo sapien
gccgccgtcggtccgcgcgccggcg

SEQ ID NO: 3062749 - DNA, 25 bp, Homo sapien
tcgccgccgtcggtccgcgcgccgg

SEQ ID NO: 3062750 - DNA, 25 bp, Homo sapien
gcgtcgccgccgtcggtccgcgcgc

SEQ ID NO: 3062751 - DNA, 25 bp, Homo sapien
ctcagggcgtcgccgccgtcggtcc

SEQ ID NO: 3062752 - DNA, 25 bp, Homo sapien
agcatctcatagtggccttccgggc

SEQ ID NO: 3062753 - DNA, 25 bp, Homo sapien
ctcaccagcacggggatgagcacca

SEQ ID NO: 3062754 - DNA, 25 bp, Homo sapien
ccagcatctcatagtggccttccgg

SEQ ID NO: 3062755 - DNA, 25 bp, Homo sapien
caccagcacggggatgagcaccacc

SEQ ID NO: 3062756 - DNA, 25 bp, Homo sapien
agcagcgtctttcggcccgcgcgga

SEQ ID NO: 3062757 - DNA, 25 bp, Homo sapien
cgcggcggccgctagcagcgtcttt

SEQ ID NO: 3062758 - DNA, 25 bp, Homo sapien
gcggccgctagcagcgtctttcggc

SEQ ID NO: 3062759 - DNA, 25 bp, Homo sapien
gtcggggcaatggtgccggcgggca

SEQ ID NO: 3062760 - DNA, 25 bp, Homo sapien
caaggacggtccggcggggctgcgg

SEQ ID NO: 3062761 - DNA, 25 bp, Homo sapien
cgccgcgctgcgctggctgcgctgc

SEQ ID NO: 3062762 - DNA, 25 bp, Homo sapien
ctcaaggacggtccggcggggctgc

SEQ ID NO: 3062763 - DNA, 25 bp, Homo sapien
tcaaggacggtccggcggggctgcg

SEQ ID NO: 3062764 - DNA, 25 bp, Homo sapien
tagggaccaaaatgcgaaagggaga

SEQ ID NO: 3062765 - DNA, 25 bp, Homo sapien
cgagagacccgagaggcgctccaag

SEQ ID NO: 3062766 - DNA, 25 bp, Homo sapien
aaagaagagactgagtacgcggaga

SEQ ID NO: 3062767 - DNA, 25 bp, Homo sapien
agtacgcggagaccgagattcggaa

SEQ ID NO: 3062768 - DNA, 25 bp, Homo sapien
gagtctctaggtaccgtttactgcc

SEQ ID NO: 3062769 - DNA, 25 bp, Homo sapien
ctaataagtgggagagccgggactc

SEQ ID NO: 3062770 - DNA, 25 bp, Homo sapien
tccctaggctcaggaagagtagtct

SEQ ID NO: 3062771 - DNA, 25 bp, Homo sapien
caacctcagcgcgatagagtctcta

SEQ ID NO: 3062772 - DNA, 25 bp, Homo sapien
gcctcgggtctgtctcacggtatta

SEQ ID NO: 3062773 - DNA, 25 bp, Homo sapien
ccagagagcagtgtcagagtgccca

SEQ ID NO: 3062774 - DNA, 25 bp, Homo sapien
tgcacaagaatgatgaccccacatg

SEQ ID NO: 3062775 - DNA, 25 bp, Homo sapien
aaataatcgtccttctcgcctcggg

SEQ ID NO: 3062776 - DNA, 25 bp, Homo sapien
tgtgcccaggctctgtatcgtccac

SEQ ID NO: 3062777 - DNA, 25 bp, Homo sapien
aaagctatgtgtctggctctaatct

SEQ ID NO: 3062778 - DNA, 25 bp, Homo sapien
tatgtgtctggctctaatctgagtc

SEQ ID NO: 3062779 - DNA, 25 bp, Homo sapien
atttctcctatctcaaagctatgtg

SEQ ID NO: 3062780 - DNA, 25 bp, Homo sapien
cccgagagcctcatttgaatttcta

SEQ ID NO: 3062781 - DNA, 25 bp, Homo sapien
ttcagtcggcttctccaatggggca

SEQ ID NO: 3062782 - DNA, 25 bp, Homo sapien
ctgaactgacggaaaggactgctgg

SEQ ID NO: 3062783 - DNA, 25 bp, Homo sapien
gcagctgggtgaggaaaacgcagca

SEQ ID NO: 3062784 - DNA, 25 bp, Homo sapien
gcagtttgacgctgacagaagcgaa

SEQ ID NO: 3062785 - DNA, 25 bp, Homo sapien
gaggctggctttagttaccgagtcg

SEQ ID NO: 3062786 - DNA, 25 bp, Homo sapien
tagttaccgagtcggcagggcctgc

SEQ ID NO: 3062787 - DNA, 25 bp, Homo sapien
agaagcgaatctcagcgcgctgggc

SEQ ID NO: 3062788 - DNA, 25 bp, Homo sapien
tgggagctgatccaatgggacaaga

SEQ ID NO: 3062789 - DNA, 25 bp, Homo sapien
tgatccaatgggacaagaattgggc

SEQ ID NO: 3062790 - DNA, 25 bp, Homo sapien
tgtgtgggagctgatccaatgggac

SEQ ID NO: 3062791 - DNA, 25 bp, Homo sapien
tccaatgggacaagaattgggcaga

SEQ ID NO: 3062792 - DNA, 25 bp, Homo sapien
tagagaagggggagtggagtccaga

SEQ ID NO: 3062793 - DNA, 25 bp, Homo sapien
gagaagggggagtggagtccagaga

SEQ ID NO: 3062794 - DNA, 25 bp, Homo sapien
aagggggagtggagtccagagaggg

SEQ ID NO: 3062795 - DNA, 25 bp, Homo sapien
agaagggggagtggagtccagagag

SEQ ID NO: 3062796 - DNA, 25 bp, Homo sapien
tgctgggttgagtatctccagtaat

SEQ ID NO: 3062797 - DNA, 25 bp, Homo sapien
tttgctgggttgagtatctccagta

SEQ ID NO: 3062798 - DNA, 25 bp, Homo sapien
ttgctgggttgagtatctccagtaa

SEQ ID NO: 3062799 - DNA, 25 bp, Homo sapien
actgcccagctgcactacagttggg

SEQ ID NO: 3062800 - DNA, 25 bp, Homo sapien
ccagctgcactacagttgggatggg

SEQ ID NO: 3062801 - DNA, 25 bp, Homo sapien
tgcccagctgcactacagttgggat

SEQ ID NO: 3062802 - DNA, 25 bp, Homo sapien
gtactgcccagctgcactacagttg

SEQ ID NO: 3062803 - DNA, 25 bp, Homo sapien
tcgtagagtgatgcaaggactgtcc

SEQ ID NO: 3062804 - DNA, 25 bp, Homo sapien
tcatgagaacgttctgagttggtgg

SEQ ID NO: 3062805 - DNA, 25 bp, Homo sapien
ccagacgatacggtggaaactcgta

SEQ ID NO: 3062806 - DNA, 25 bp, Homo sapien
gaggctcggagtctaatgctgacca

SEQ ID NO: 3062807 - DNA, 25 bp, Homo sapien
agatatagggcatttgcatcatccc

SEQ ID NO: 3062808 - DNA, 25 bp, Homo sapien
ttctggctgctttaactgagcagaa

SEQ ID NO: 3062809 - DNA, 25 bp, Homo sapien
gacacatataactaccactacaatg

SEQ ID NO: 3062810 - DNA, 25 bp, Homo sapien
taatatgtactcttggtttctggct

SEQ ID NO: 3062811 - DNA, 25 bp, Homo sapien
tccacagaaaggacaaagactgggt

SEQ ID NO: 3062812 - DNA, 25 bp, Homo sapien
ctcagaacttgctgaggaggcagga

SEQ ID NO: 3062813 - DNA, 25 bp, Homo sapien
gctgtgcatggagaggctcagaact

SEQ ID NO: 3062814 - DNA, 25 bp, Homo sapien
gaggaggcaggaaatccacagaaag

SEQ ID NO: 3062815 - DNA, 25 bp, Homo sapien
cctccatctacgatgaacgtggggg

SEQ ID NO: 3062816 - DNA, 25 bp, Homo sapien
tccatctacgatgaacgtggggggc

SEQ ID NO: 3062817 - DNA, 25 bp, Homo sapien
ctccatctacgatgaacgtgggggg

SEQ ID NO: 3062818 - DNA, 25 bp, Homo sapien
ccagccactgctttaatctccactt

SEQ ID NO: 3062819 - DNA, 25 bp, Homo sapien
agactgggcagccctgcttggtcct

SEQ ID NO: 3062820 - DNA, 25 bp, Homo sapien
gggctccctgcacatcaacagctga

SEQ ID NO: 3062821 - DNA, 25 bp, Homo sapien
catcaacagctgacatgaccagact

SEQ ID NO: 3062822 - DNA, 25 bp, Homo sapien
cagactgggcagccctgcttggtcc

SEQ ID NO: 3062823 - DNA, 25 bp, Homo sapien
tgactgggggctcagactatctgcc

SEQ ID NO: 3062824 - DNA, 25 bp, Homo sapien
tcagcatttgactgggggctcagac

SEQ ID NO: 3062825 - DNA, 25 bp, Homo sapien
ggggctcagactatctgccatgtgt

SEQ ID NO: 3062826 - DNA, 25 bp, Homo sapien
tccctctcagcatttgactgggggc

SEQ ID NO: 3062827 - DNA, 25 bp, Homo sapien
cacagccatatttttcgccaagatg

SEQ ID NO: 3062828 - DNA, 25 bp, Homo sapien
gtaaagagcattgtgtctgaaggta

SEQ ID NO: 3062829 - DNA, 25 bp, Homo sapien
cgccaagatgtttagtgtaaagagc

SEQ ID NO: 3062830 - DNA, 25 bp, Homo sapien
ctgaaggtaattcccgctctcccac

SEQ ID NO: 3062831 - DNA, 25 bp, Homo sapien
tttgctgttcgttgtttcaattttc

SEQ ID NO: 3062832 - DNA, 25 bp, Homo sapien
tgcatttatctttttgctgttcgtt

SEQ ID NO: 3062833 - DNA, 25 bp, Homo sapien
ttatctttttgctgttcgttgtttc

SEQ ID NO: 3062834 - DNA, 25 bp, Homo sapien
ttgctgttcgttgtttcaattttcc

SEQ ID NO: 3062835 - DNA, 25 bp, Homo sapien
gagagatttaaggtagactgtcaga

SEQ ID NO: 3062836 - DNA, 25 bp, Homo sapien
tgtcagaaggtcttcctggcttgac

SEQ ID NO: 3062837 - DNA, 25 bp, Homo sapien
caaagaggctggttgtttcgccagc

SEQ ID NO: 3062838 - DNA, 25 bp, Homo sapien
ctgagggtaccaaagagagatttaa

SEQ ID NO: 3062839 - DNA, 25 bp, Homo sapien
gagattacccaccagttcaaatagc

SEQ ID NO: 3062840 - DNA, 25 bp, Homo sapien
tctcaaagcactaagcctgaggctc

SEQ ID NO: 3062841 - DNA, 25 bp, Homo sapien
aatcaaggagtgagtttgcttccca

SEQ ID NO: 3062842 - DNA, 25 bp, Homo sapien
ctcataattactggctgtggtccca

SEQ ID NO: 3062843 - DNA, 25 bp, Homo sapien
tttcctgagcgccactgggtgctgg

SEQ ID NO: 3062844 - DNA, 25 bp, Homo sapien
tcttgggttggcaaaagagctgcca

SEQ ID NO: 3062845 - DNA, 25 bp, Homo sapien
ttgttgttcggtgcaatcactcagg

SEQ ID NO: 3062846 - DNA, 25 bp, Homo sapien
gagctgccagtgaatccatcccagg

SEQ ID NO: 3062847 - DNA, 25 bp, Homo sapien
cagctgctcggcaggagtctgaggc

SEQ ID NO: 3062848 - DNA, 25 bp, Homo sapien
tcggcaggagtctgaggccgcccgc

SEQ ID NO: 3062849 - DNA, 25 bp, Homo sapien
tgctcggcaggagtctgaggccgcc

SEQ ID NO: 3062850 - DNA, 25 bp, Homo sapien
gcaggagtctgaggccgcccgcggc

SEQ ID NO: 3062851 - DNA, 25 bp, Homo sapien
ggaggaagattaggccgctcggcga

SEQ ID NO: 3062852 - DNA, 25 bp, Homo sapien
acctgccggccgaacggcaggccgc

SEQ ID NO: 3062853 - DNA, 25 bp, Homo sapien
aggaggaagattaggccgctcggcg

SEQ ID NO: 3062854 - DNA, 25 bp, Homo sapien
ctgccacctgccggccgaacggcag

SEQ ID NO: 3062855 - DNA, 25 bp, Homo sapien
ctctgcagttgctgagcggcctcaa

SEQ ID NO: 3062856 - DNA, 25 bp, Homo sapien
ttgctgagcggcctcaacttcaagt

SEQ ID NO: 3062857 - DNA, 25 bp, Homo sapien
gctgagcggcctcaacttcaagtcc

SEQ ID NO: 3062858 - DNA, 25 bp, Homo sapien
tgcagttgctgagcggcctcaactt

SEQ ID NO: 3062859 - DNA, 25 bp, Homo sapien
ggagcactacacaaaccctacgtgg

SEQ ID NO: 3062860 - DNA, 25 bp, Homo sapien
ggctacagcgttacccacgagagaa

SEQ ID NO: 3062861 - DNA, 25 bp, Homo sapien
gaggcccagccctgattcggagagt

SEQ ID NO: 3062862 - DNA, 25 bp, Homo sapien
tacacggaataccaagaggtccagg

SEQ ID NO: 3062863 - DNA, 25 bp, Homo sapien
acaggatgtgttacctggcttcagc

SEQ ID NO: 3062864 - DNA, 25 bp, Homo sapien
ggatgtgttacctggcttcagcctc

SEQ ID NO: 3062865 - DNA, 25 bp, Homo sapien
caggatgtgttacctggcttcagcc

SEQ ID NO: 3062866 - DNA, 25 bp, Homo sapien
aacaggatgtgttacctggcttcag

SEQ ID NO: 3062867 - DNA, 25 bp, Homo sapien
gcaatggcagcgagccctgtgagga

SEQ ID NO: 3062868 - DNA, 25 bp, Homo sapien
caatggcagcgagccctgtgaggac

SEQ ID NO: 3062869 - DNA, 25 bp, Homo sapien
ggcaatggcagcgagccctgtgagg

SEQ ID NO: 3062870 - DNA, 25 bp, Homo sapien
cactcgcccgagttgtctaggacat

SEQ ID NO: 3062871 - DNA, 25 bp, Homo sapien
gggagcgctccagctcagtgtgcaa

SEQ ID NO: 3062872 - DNA, 25 bp, Homo sapien
tgtgcaagaggatgacctggcgttt

SEQ ID NO: 3062873 - DNA, 25 bp, Homo sapien
attgatgcgggcctctgcgtccttg

SEQ ID NO: 3062874 - DNA, 25 bp, Homo sapien
cctctcaccccaagttacagggata

SEQ ID NO: 3062875 - DNA, 25 bp, Homo sapien
agggcaaaagggcactgtaggtcct

SEQ ID NO: 3062876 - DNA, 25 bp, Homo sapien
ggcaaaagggcactgtaggtcctgc

SEQ ID NO: 3062877 - DNA, 25 bp, Homo sapien
gttacagggataggcagccctgcca

SEQ ID NO: 3062878 - DNA, 25 bp, Homo sapien
taagagctacttcagcccctcagtg

SEQ ID NO: 3062879 - DNA, 25 bp, Homo sapien
tgccttgggctacagtcagtcctct

SEQ ID NO: 3062880 - DNA, 25 bp, Homo sapien
tcagcactgcagattaggtcggaca

SEQ ID NO: 3062881 - DNA, 25 bp, Homo sapien
gacattccccagtcataaggtggga

SEQ ID NO: 3062882 - DNA, 25 bp, Homo sapien
caatacccacctcgctgagaacaag

SEQ ID NO: 3062883 - DNA, 25 bp, Homo sapien
tctagtgtgagattagagatggcct

SEQ ID NO: 3062884 - DNA, 25 bp, Homo sapien
cttagggattctgggaagcagacca

SEQ ID NO: 3062885 - DNA, 25 bp, Homo sapien
tgagaacaaggactaaatccagcct

SEQ ID NO: 3062886 - DNA, 25 bp, Homo sapien
ggagttttgctcactcttgtcgccc

SEQ ID NO: 3062887 - DNA, 25 bp, Homo sapien
gctggagtgcaatggtgcaatctct

SEQ ID NO: 3062888 - DNA, 25 bp, Homo sapien
tgctcactcttgtcgcccaggctgg

SEQ ID NO: 3062889 - DNA, 25 bp, Homo sapien
ttagctgggctgacagtcccttcca

SEQ ID NO: 3062890 - DNA, 25 bp, Homo sapien
gaacaaagtgccttccttagctggg

SEQ ID NO: 3062891 - DNA, 25 bp, Homo sapien
acaggtgttgccaaagggtgaccct

SEQ ID NO: 3062892 - DNA, 25 bp, Homo sapien
gagcgctccccaaacactagagaag

SEQ ID NO: 3062893 - DNA, 25 bp, Homo sapien
cttcttggtctcaaacagcaggggg

SEQ ID NO: 3062894 - DNA, 25 bp, Homo sapien
atatccagaatcacgtagcggtatc

SEQ ID NO: 3062895 - DNA, 25 bp, Homo sapien
tctcaaacagcagggggatatccag

SEQ ID NO: 3062896 - DNA, 25 bp, Homo sapien
cagtatactaccacggtgtgcttca

SEQ ID NO: 3062897 - DNA, 25 bp, Homo sapien
tgatgatatgctgggccccaccgtc

SEQ ID NO: 3062898 - DNA, 25 bp, Homo sapien
actgatgatatgctgggccccaccg

SEQ ID NO: 3062899 - DNA, 25 bp, Homo sapien
ctgatgatatgctgggccccaccgt

SEQ ID NO: 3062900 - DNA, 25 bp, Homo sapien
ccaagttcaattctgcaagcgcaca

SEQ ID NO: 3062901 - DNA, 25 bp, Homo sapien
ctgccgcctcgaagccctgcagata

SEQ ID NO: 3062902 - DNA, 25 bp, Homo sapien
gagccactgccgcctcgaagccctg

SEQ ID NO: 3062903 - DNA, 25 bp, Homo sapien
ccactgccgcctcgaagccctgcag

SEQ ID NO: 3062904 - DNA, 25 bp, Homo sapien
actgccgcctcgaagccctgcagat

SEQ ID NO: 3062905 - DNA, 25 bp, Homo sapien
agatctatggctccattattcacca

SEQ ID NO: 3062906 - DNA, 25 bp, Homo sapien
cattaaactgtcagcctccttaaga

SEQ ID NO: 3062907 - DNA, 25 bp, Homo sapien
ggctcgaaagcctcatgtgtctctt

SEQ ID NO: 3062908 - DNA, 25 bp, Homo sapien
gagctgagggaacgtgcttctttcc

SEQ ID NO: 3062909 - DNA, 25 bp, Homo sapien
tgccgccggtcaggctggttaaaga

SEQ ID NO: 3062910 - DNA, 25 bp, Homo sapien
agcaagacctcagtgccgaagacct

SEQ ID NO: 3062911 - DNA, 25 bp, Homo sapien
gaagacctctacgatgcgccggtgg

SEQ ID NO: 3062912 - DNA, 25 bp, Homo sapien
ccccaggaccttgcgatttatgtcg

SEQ ID NO: 3062913 - DNA, 25 bp, Homo sapien
atcacgtccacgtcaatcaccgcac

SEQ ID NO: 3062914 - DNA, 25 bp, Homo sapien
cgtgccgggccatcacgtccacgtc

SEQ ID NO: 3062915 - DNA, 25 bp, Homo sapien
cactgagctcttgcctgaggcaatg

SEQ ID NO: 3062916 - DNA, 25 bp, Homo sapien
acctggatcactgagctcttgcctg

SEQ ID NO: 3062917 - DNA, 25 bp, Homo sapien
tccaggaaagagagctgtccgcgag

SEQ ID NO: 3062918 - DNA, 25 bp, Homo sapien
cttccaggaaagagagctgtccgcg

SEQ ID NO: 3062919 - DNA, 25 bp, Homo sapien
ccaggaaagagagctgtccgcgaga

SEQ ID NO: 3062920 - DNA, 25 bp, Homo sapien
ttccaggaaagagagctgtccgcga

SEQ ID NO: 3062921 - DNA, 25 bp, Homo sapien
gtccaccagaggagtgccagaagga

SEQ ID NO: 3062922 - DNA, 25 bp, Homo sapien
atgggggcggtccaccagaggagtg

SEQ ID NO: 3062923 - DNA, 25 bp, Homo sapien
gggcggtccaccagaggagtgccag

SEQ ID NO: 3062924 - DNA, 25 bp, Homo sapien
aagtgtggccgatgggggcggtcca

SEQ ID NO: 3062925 - DNA, 25 bp, Homo sapien
gcgggactgatcagtttgggccaaa

SEQ ID NO: 3062926 - DNA, 25 bp, Homo sapien
agaggccagcgggactgatcagttt

SEQ ID NO: 3062927 - DNA, 25 bp, Homo sapien
tggggagggacatgtcctgagcttg

SEQ ID NO: 3062928 - DNA, 25 bp, Homo sapien
ttgggccaaaataattgggagagag

SEQ ID NO: 3062929 - DNA, 25 bp, Homo sapien
cagggctcctaacccctagtctaga

SEQ ID NO: 3062930 - DNA, 25 bp, Homo sapien
tttgtaggcaaatcgattcagagcc

SEQ ID NO: 3062931 - DNA, 25 bp, Homo sapien
tagtctagacccctgcctttaatgt

SEQ ID NO: 3062932 - DNA, 25 bp, Homo sapien
tattatcaaaggctggatgcagttc

SEQ ID NO: 3062933 - DNA, 25 bp, Homo sapien
tggctgcgcacagatctactgggat

SEQ ID NO: 3062934 - DNA, 25 bp, Homo sapien
ttggctgcgcacagatctactggga

SEQ ID NO: 3062935 - DNA, 25 bp, Homo sapien
gcccagtagccccaagaagaataaa

SEQ ID NO: 3062936 - DNA, 25 bp, Homo sapien
ttctccccaaggtagccagggtcat

SEQ ID NO: 3062937 - DNA, 25 bp, Homo sapien
ccagggtcatggcttaaaggagtca

SEQ ID NO: 3062938 - DNA, 25 bp, Homo sapien
tactgctctgggaggtctggccaag

SEQ ID NO: 3062939 - DNA, 25 bp, Homo sapien
cctcctttggactcgtcatgctttg

SEQ ID NO: 3062940 - DNA, 25 bp, Homo sapien
tcctttggactcgtcatgctttgga

SEQ ID NO: 3062941 - DNA, 25 bp, Homo sapien
tttccctcctttggactcgtcatgc

SEQ ID NO: 3062942 - DNA, 25 bp, Homo sapien
ctttggactcgtcatgctttggact

SEQ ID NO: 3062943 - DNA, 25 bp, Homo sapien
tttaatactcatgataacacaattt

SEQ ID NO: 3062944 - DNA, 25 bp, Homo sapien
aaatgtattattacatggtcaggca

SEQ ID NO: 3062945 - DNA, 25 bp, Homo sapien
atgtattattacatggtcaggcaca

SEQ ID NO: 3062946 - DNA, 25 bp, Homo sapien
tgtattattacatggtcaggcacag

SEQ ID NO: 3062947 - DNA, 25 bp, Homo sapien
tcaacattcacaattaaccagaact

SEQ ID NO: 3062948 - DNA, 25 bp, Homo sapien
gaacttttatcctctgtaatcttca

SEQ ID NO: 3062949 - DNA, 25 bp, Homo sapien
aaagctatcaatctaaaactgtgcc

SEQ ID NO: 3062950 - DNA, 25 bp, Homo sapien
gtatatttagacttcactgcaggtt

SEQ ID NO: 3062951 - DNA, 25 bp, Homo sapien
tctccttaaggtacaggcaccaaga

SEQ ID NO: 3062952 - DNA, 25 bp, Homo sapien
tcaggtaaaatgagcactctccctc

SEQ ID NO: 3062953 - DNA, 25 bp, Homo sapien
aaagctaagttcgtggcttgcctgc

SEQ ID NO: 3062954 - DNA, 25 bp, Homo sapien
gaatttagggccctgctgagacaaa

SEQ ID NO: 3062955 - DNA, 25 bp, Homo sapien
tgctgtcaagacaatgggccgtgga

SEQ ID NO: 3062956 - DNA, 25 bp, Homo sapien
ccaccctatgggacagatactgtag

SEQ ID NO: 3062957 - DNA, 25 bp, Homo sapien
caatcggcccgcaaagttctaaagg

SEQ ID NO: 3062958 - DNA, 25 bp, Homo sapien
ggatcggaaagataccccaaggtca

SEQ ID NO: 3062959 - DNA, 25 bp, Homo sapien
caggctttcaaaagaggcccgtacg

SEQ ID NO: 3062960 - DNA, 25 bp, Homo sapien
tagtgctggccgcatacgacgcgct

SEQ ID NO: 3062961 - DNA, 25 bp, Homo sapien
caatacatcgtaactcaggctttca

SEQ ID NO: 3062962 - DNA, 25 bp, Homo sapien
cactaggccgcgaaattgggtcgcc

SEQ ID NO: 3062963 - DNA, 25 bp, Homo sapien
gctcagcgggcgaggcgggacctcg

SEQ ID NO: 3062964 - DNA, 25 bp, Homo sapien
tctagcccaatctccgcagcgctta

SEQ ID NO: 3062965 - DNA, 25 bp, Homo sapien
cgcagcgcttacaggccggctcagc

SEQ ID NO: 3062966 - DNA, 25 bp, Homo sapien
gggacctcgggagcgcgcgcctgca

SEQ ID NO: 3062967 - DNA, 25 bp, Homo sapien
tgttaggaaaccgtccagatgaccc

SEQ ID NO: 3062968 - DNA, 25 bp, Homo sapien
tgtggtccgatttgccaaaagcagc

SEQ ID NO: 3062969 - DNA, 25 bp, Homo sapien
cattagagatgactcctttggctcc

SEQ ID NO: 3062970 - DNA, 25 bp, Homo sapien
catgatgcctggaatacagttctgc

SEQ ID NO: 3062971 - DNA, 25 bp, Homo sapien
taggtgcatgccacaatgccacgct

SEQ ID NO: 3062972 - DNA, 25 bp, Homo sapien
tttcctatttatatagagacggggc

SEQ ID NO: 3062973 - DNA, 25 bp, Homo sapien
ctagaaccataggtgcatgccacaa

SEQ ID NO: 3062974 - DNA, 25 bp, Homo sapien
ttcctatttatatagagacggggcc

SEQ ID NO: 3062975 - DNA, 25 bp, Homo sapien
ggattttggaacctccacgcctgaa

SEQ ID NO: 3062976 - DNA, 25 bp, Homo sapien
ggcaggctgaaatcaaacctcggat

SEQ ID NO: 3062977 - DNA, 25 bp, Homo sapien
taacggtccttaacggcagccaata

SEQ ID NO: 3062978 - DNA, 25 bp, Homo sapien
gcctgaaaccctaaaccagcatcga

SEQ ID NO: 3062979 - DNA, 25 bp, Homo sapien
tcattgagatcctggtaagcacggg

SEQ ID NO: 3062980 - DNA, 25 bp, Homo sapien
ccctgggacaggttaacatggattc

SEQ ID NO: 3062981 - DNA, 25 bp, Homo sapien
tatgctcacgctaaaattccccagc

SEQ ID NO: 3062982 - DNA, 25 bp, Homo sapien
gctgcagctagctcttggaaataag

SEQ ID NO: 3062983 - DNA, 25 bp, Homo sapien
caaggagcatccgaagtgaaggcat

SEQ ID NO: 3062984 - DNA, 25 bp, Homo sapien
tggagtaaggaagcaacacaaaccc

SEQ ID NO: 3062985 - DNA, 25 bp, Homo sapien
tgagtttcgttctcacaggaggcgc

SEQ ID NO: 3062986 - DNA, 25 bp, Homo sapien
tacatatgtgtacactctgagggac

SEQ ID NO: 3062987 - DNA, 25 bp, Homo sapien
gagaccattatcagtgtaagccctg

SEQ ID NO: 3062988 - DNA, 25 bp, Homo sapien
cagacagacgcgttggcacagttca

SEQ ID NO: 3062989 - DNA, 25 bp, Homo sapien
tctcatgggatagcacgtggagctc

SEQ ID NO: 3062990 - DNA, 25 bp, Homo sapien
agacaaagcaatggacggtccgcag

SEQ ID NO: 3062991 - DNA, 25 bp, Homo sapien
ggtgtggtttgtcagaggctaattc

SEQ ID NO: 3062992 - DNA, 25 bp, Homo sapien
tacaggaatgaagccttagccagga

SEQ ID NO: 3062993 - DNA, 25 bp, Homo sapien
ctgtgccactcaccgaagccacttt

SEQ ID NO: 3062994 - DNA, 25 bp, Homo sapien
catgacgtgtggtgtgcgggtttcc

SEQ ID NO: 3062995 - DNA, 25 bp, Homo sapien
acctttgaggatatcaaaggacaaa

SEQ ID NO: 3062996 - DNA, 25 bp, Homo sapien
agttgcacagtgcctcaagccccag

SEQ ID NO: 3062997 - DNA, 25 bp, Homo sapien
caaagtgcccaagtctttcctacct

SEQ ID NO: 3062998 - DNA, 25 bp, Homo sapien
tggctcaccctgtccagacctttga

SEQ ID NO: 3062999 - DNA, 25 bp, Homo sapien
tcactgaaaccaggtggccggctcc

SEQ ID NO: 3063000 - DNA, 25 bp, Homo sapien
aaccccttctgggacttcagctcag

SEQ ID NO: 3063001 - DNA, 25 bp, Homo sapien
gatttttgtcccagtagtccctgcg

SEQ ID NO: 3063002 - DNA, 25 bp, Homo sapien
tatgttgcggtgagaactctgccca

SEQ ID NO: 3063003 - DNA, 25 bp, Homo sapien
tatagggctcgtttccccacacatg

SEQ ID NO: 3063004 - DNA, 25 bp, Homo sapien
gctgcaaaatgaaggcgggcctgca

SEQ ID NO: 3063005 - DNA, 25 bp, Homo sapien
caggcaggtgccatgtctgggaaca

SEQ ID NO: 3063006 - DNA, 25 bp, Homo sapien
cacctacggaggctgttgaggacaa

SEQ ID NO: 3063007 - DNA, 25 bp, Homo sapien
gaaactgagaggacacaggacctgc

SEQ ID NO: 3063008 - DNA, 25 bp, Homo sapien
ggcatttctatagaggcggcccaag

SEQ ID NO: 3063009 - DNA, 25 bp, Homo sapien
gacagtcttgtgatactcgcagcag

SEQ ID NO: 3063010 - DNA, 25 bp, Homo sapien
gaggcgctgacctgctgaattggca

SEQ ID NO: 3063011 - DNA, 25 bp, Homo sapien
ctagataggctcattctactgtctt

SEQ ID NO: 3063012 - DNA, 25 bp, Homo sapien
agttacaaacctacggccaggccag

SEQ ID NO: 3063013 - DNA, 25 bp, Homo sapien
tatgaaacagttacaaacctacggc

SEQ ID NO: 3063014 - DNA, 25 bp, Homo sapien
tttaaactagataggctcattctac

SEQ ID NO: 3063015 - DNA, 25 bp, Homo sapien
gccaagtggagtgactgcgctcctc

SEQ ID NO: 3063016 - DNA, 25 bp, Homo sapien
gcttgctcctcataagtcacaatga

SEQ ID NO: 3063017 - DNA, 25 bp, Homo sapien
cgcagaaccccaaggcgagtgaggt

SEQ ID NO: 3063018 - DNA, 25 bp, Homo sapien
atgtggactggcactcgcagaaccc

SEQ ID NO: 3063019 - DNA, 25 bp, Homo sapien
tttggatgaagagcgtggctggtga

SEQ ID NO: 3063020 - DNA, 25 bp, Homo sapien
ccttggaaagcaggtgtatgtggcg

SEQ ID NO: 3063021 - DNA, 25 bp, Homo sapien
gaaagcaggtgtatgtggcggtacc

SEQ ID NO: 3063022 - DNA, 25 bp, Homo sapien
tcaggagcgctggatgcggatttgg

SEQ ID NO: 3063023 - DNA, 25 bp, Homo sapien
gggaggtggcgtcataatcttccac

SEQ ID NO: 3063024 - DNA, 25 bp, Homo sapien
cttgctttaggctgctaagaggcag

SEQ ID NO: 3063025 - DNA, 25 bp, Homo sapien
agctggaactgcagggtctgccccc

SEQ ID NO: 3063026 - DNA, 25 bp, Homo sapien
gtaaactggcccacaaagtcattgg

SEQ ID NO: 3063027 - DNA, 25 bp, Homo sapien
acagtctgcgggcaccccatggatc

SEQ ID NO: 3063028 - DNA, 25 bp, Homo sapien
cttctcggcattcagcttgggcagc

SEQ ID NO: 3063029 - DNA, 25 bp, Homo sapien
ccatggatctcaatgcgcaccaggg

SEQ ID NO: 3063030 - DNA, 25 bp, Homo sapien
agtctcctgccgggcacagtctgcg

SEQ ID NO: 3063031 - DNA, 25 bp, Homo sapien
actgcccattgactaggaagcgccc

SEQ ID NO: 3063032 - DNA, 25 bp, Homo sapien
gttttaggacgtagccacactgccc

SEQ ID NO: 3063033 - DNA, 25 bp, Homo sapien
ggaagcgcccggcattgaggtccat

SEQ ID NO: 3063034 - DNA, 25 bp, Homo sapien
tcaaaggtcgagtcaggttgccgca

SEQ ID NO: 3063035 - DNA, 25 bp, Homo sapien
agctgacagcccgagttccacatct

SEQ ID NO: 3063036 - DNA, 25 bp, Homo sapien
cccagcgggtacacgcgggtcagct

SEQ ID NO: 3063037 - DNA, 25 bp, Homo sapien
cagctggcgggcattgtgcctgaca

SEQ ID NO: 3063038 - DNA, 25 bp, Homo sapien
tgagttcatccgcagccccagcggg

SEQ ID NO: 3063039 - DNA, 25 bp, Homo sapien
ccggcctgtaacctccagggaacag

SEQ ID NO: 3063040 - DNA, 25 bp, Homo sapien
caaagccccggcctgtaacctccag

SEQ ID NO: 3063041 - DNA, 25 bp, Homo sapien
cggcctgtaacctccagggaacaga

SEQ ID NO: 3063042 - DNA, 25 bp, Homo sapien
gcctcccgaatgagtttcttggctt

SEQ ID NO: 3063043 - DNA, 25 bp, Homo sapien
cgggtggcgtggcagtacacagcca

SEQ ID NO: 3063044 - DNA, 25 bp, Homo sapien
ggtcgcaggcgggtggcgtggcagt

SEQ ID NO: 3063045 - DNA, 25 bp, Homo sapien
gtgcagggtcgcaggcgggtggcgt

SEQ ID NO: 3063046 - DNA, 25 bp, Homo sapien
acagctccggggagatctgcttggc

SEQ ID NO: 3063047 - DNA, 25 bp, Homo sapien
agagcccggccatcctcgctccgag

SEQ ID NO: 3063048 - DNA, 25 bp, Homo sapien
tcgctccgagcagcgggcaacttct

SEQ ID NO: 3063049 - DNA, 25 bp, Homo sapien
tcctcctcccgatccgacagagccc

SEQ ID NO: 3063050 - DNA, 25 bp, Homo sapien
tcccgatccgacagagcccggccat

SEQ ID NO: 3063051 - DNA, 25 bp, Homo sapien
gtgcagaggtggcgggccatggcag

SEQ ID NO: 3063052 - DNA, 25 bp, Homo sapien
ggagtccagcgcctgtgtcaccagc

SEQ ID NO: 3063053 - DNA, 25 bp, Homo sapien
ggatggcagctcctcgggatttggg

SEQ ID NO: 3063054 - DNA, 25 bp, Homo sapien
aggtggcgggccatggcagcctgct

SEQ ID NO: 3063055 - DNA, 25 bp, Homo sapien
cttggaccacgtcccggaagagaat

SEQ ID NO: 3063056 - DNA, 25 bp, Homo sapien
gcatggtcgcgcacggcttggacca

SEQ ID NO: 3063057 - DNA, 25 bp, Homo sapien
gccatgatagatgacgggctcccct

SEQ ID NO: 3063058 - DNA, 25 bp, Homo sapien
cgtgaaggcatggtcgcgcacggct

SEQ ID NO: 3063059 - DNA, 25 bp, Homo sapien
ctaacataggcctcggtgctgctgg

SEQ ID NO: 3063060 - DNA, 25 bp, Homo sapien
cagtcagataggtgttgtgggagga

SEQ ID NO: 3063061 - DNA, 25 bp, Homo sapien
gaggaagagatgaagtagtgggcaa

SEQ ID NO: 3063062 - DNA, 25 bp, Homo sapien
ctgggccccccgatctgggagtcag

SEQ ID NO: 3063063 - DNA, 25 bp, Homo sapien
gaagccatccagtgtcatcagctca

SEQ ID NO: 3063064 - DNA, 25 bp, Homo sapien
cctccggcgacaacaggtacatcat

SEQ ID NO: 3063065 - DNA, 25 bp, Homo sapien
aggtacatcatgaagccatccagtg

SEQ ID NO: 3063066 - DNA, 25 bp, Homo sapien
tccagtgtcatcagctcatgctgct

SEQ ID NO: 3063067 - DNA, 25 bp, Homo sapien
agctcaggggcactcagcacgcggt

SEQ ID NO: 3063068 - DNA, 25 bp, Homo sapien
cggtcgttgttggagtggtcacact

SEQ ID NO: 3063069 - DNA, 25 bp, Homo sapien
cggtcctcgcccgagtactgatgga

SEQ ID NO: 3063070 - DNA, 25 bp, Homo sapien
gagtactgatggaagatctcctcca

SEQ ID NO: 3063071 - DNA, 25 bp, Homo sapien
ttctcagcaggctcttgatctcctt

SEQ ID NO: 3063072 - DNA, 25 bp, Homo sapien
catgtcgttcatgtccacgttgacc

SEQ ID NO: 3063073 - DNA, 25 bp, Homo sapien
aggaggtaggcgtacatgtcgttca

SEQ ID NO: 3063074 - DNA, 25 bp, Homo sapien
tgtccacgttgaccattctcagcag

SEQ ID NO: 3063075 - DNA, 25 bp, Homo sapien
cccggtgcagataggagtggatcca

SEQ ID NO: 3063076 - DNA, 25 bp, Homo sapien
tcagcccggtgcagataggagtgga

SEQ ID NO: 3063077 - DNA, 25 bp, Homo sapien
ggagtcagcccggtgcagataggag

SEQ ID NO: 3063078 - DNA, 25 bp, Homo sapien
ctggttggagtcagcccggtgcaga

SEQ ID NO: 3063079 - DNA, 25 bp, Homo sapien
tgtgcactccccgagcacggtagca

SEQ ID NO: 3063080 - DNA, 25 bp, Homo sapien
ttggcctgtgcactccccgagcacg

SEQ ID NO: 3063081 - DNA, 25 bp, Homo sapien
cgagcacggtagcagtgtctcctcc

SEQ ID NO: 3063082 - DNA, 25 bp, Homo sapien
actccccgagcacggtagcagtgtc

SEQ ID NO: 3063083 - DNA, 25 bp, Homo sapien
gaggccctgtcttcaccctcagaag

SEQ ID NO: 3063084 - DNA, 25 bp, Homo sapien
aggaggccctgtcttcaccctcaga

SEQ ID NO: 3063085 - DNA, 25 bp, Homo sapien
cctgtcttcaccctcagaaggcctc

SEQ ID NO: 3063086 - DNA, 25 bp, Homo sapien
gccctgtcttcaccctcagaaggcc

SEQ ID NO: 3063087 - DNA, 25 bp, Homo sapien
tggtctagccgctcgcgctggctca

SEQ ID NO: 3063088 - DNA, 25 bp, Homo sapien
ggtctagccgctcgcgctggctcat

SEQ ID NO: 3063089 - DNA, 25 bp, Homo sapien
aggcgcgcgcggagcttggtcagac

SEQ ID NO: 3063090 - DNA, 25 bp, Homo sapien
ggctcatggcgtccaggcgcgcgcg

SEQ ID NO: 3063091 - DNA, 25 bp, Homo sapien
agcgctgcgcttcctcagccgtggg

SEQ ID NO: 3063092 - DNA, 25 bp, Homo sapien
aggtccaggttcttgcggcggccct

SEQ ID NO: 3063093 - DNA, 25 bp, Homo sapien
cccttgaaggcgatggtgaggcagc

SEQ ID NO: 3063094 - DNA, 25 bp, Homo sapien
caggccctcggactggtggccctcg

SEQ ID NO: 3063095 - DNA, 25 bp, Homo sapien
cgagcggatcttgcggagccgggag

SEQ ID NO: 3063096 - DNA, 25 bp, Homo sapien
agcatggcgcgcacgtcctcgtcct

SEQ ID NO: 3063097 - DNA, 25 bp, Homo sapien
gtacagccgctccttgtgccacgtg

SEQ ID NO: 3063098 - DNA, 25 bp, Homo sapien
tggaaccacacgctcaggccgtcct

SEQ ID NO: 3063099 - DNA, 25 bp, Homo sapien
aaccaggtccaggtagcctctaaat

SEQ ID NO: 3063100 - DNA, 25 bp, Homo sapien
tccaggtagcctctaaatggtccca

SEQ ID NO: 3063101 - DNA, 25 bp, Homo sapien
caggtagcctctaaatggtcccatc

SEQ ID NO: 3063102 - DNA, 25 bp, Homo sapien
caggtccaggtagcctctaaatggt

SEQ ID NO: 3063103 - DNA, 25 bp, Homo sapien
tctgtaagggtagccaagaccaggg

SEQ ID NO: 3063104 - DNA, 25 bp, Homo sapien
tggcatgcccctgcttagactggag

SEQ ID NO: 3063105 - DNA, 25 bp, Homo sapien
gaaagaggcacccacgtgttctgat

SEQ ID NO: 3063106 - DNA, 25 bp, Homo sapien
tgctgaagatagtgcaggtcgcccc

SEQ ID NO: 3063107 - DNA, 25 bp, Homo sapien
gccatgggccgagccctctcgctca

SEQ ID NO: 3063108 - DNA, 25 bp, Homo sapien
gcaggccatgggccgagccctctcg

SEQ ID NO: 3063109 - DNA, 25 bp, Homo sapien
aggccatgggccgagccctctcgct

SEQ ID NO: 3063110 - DNA, 25 bp, Homo sapien
aggcaggccatgggccgagccctct

SEQ ID NO: 3063111 - DNA, 25 bp, Homo sapien
gcagcccgggcctcttggtgccgcc

SEQ ID NO: 3063112 - DNA, 25 bp, Homo sapien
ttgggctgcgacctgggcggccacc

SEQ ID NO: 3063113 - DNA, 25 bp, Homo sapien
ggacgggagagcgaccggcgccgcg

SEQ ID NO: 3063114 - DNA, 25 bp, Homo sapien
tggtgccgccatcggagggagtcgg

SEQ ID NO: 3063115 - DNA, 25 bp, Homo sapien
cccggggtctgcacgcggggacagg

SEQ ID NO: 3063116 - DNA, 25 bp, Homo sapien
gcccggggtctgcacgcggggacag

SEQ ID NO: 3063117 - DNA, 25 bp, Homo sapien
ggcccggggtctgcacgcggggaca

SEQ ID NO: 3063118 - DNA, 25 bp, Homo sapien
tcttgagcaagttgggacttgggcc

SEQ ID NO: 3063119 - DNA, 25 bp, Homo sapien
gtcagtgtttgccttcgcacctcct

SEQ ID NO: 3063120 - DNA, 25 bp, Homo sapien
cagtctctgggtcacccgaattttc

SEQ ID NO: 3063121 - DNA, 25 bp, Homo sapien
gaggctgcagttgtggtacacgtcc

SEQ ID NO: 3063122 - DNA, 25 bp, Homo sapien
tagaattccacaacctattcgtcag

SEQ ID NO: 3063123 - DNA, 25 bp, Homo sapien
cctggccccttgacagaattctaga

SEQ ID NO: 3063124 - DNA, 25 bp, Homo sapien
ctaacagtaaggttgcctggcccct

SEQ ID NO: 3063125 - DNA, 25 bp, Homo sapien
caaagggttagaacccagctaacag

SEQ ID NO: 3063126 - DNA, 25 bp, Homo sapien
tgtcccggctcaggaaatgatctcg

SEQ ID NO: 3063127 - DNA, 25 bp, Homo sapien
ttcagctaagggtaccgaggtcagt

SEQ ID NO: 3063128 - DNA, 25 bp, Homo sapien
tcgtgtctaacttgccaggctgtgg

SEQ ID NO: 3063129 - DNA, 25 bp, Homo sapien
gaatcccctgcagcaagtttcggag

SEQ ID NO: 3063130 - DNA, 25 bp, Homo sapien
aagactcgcgagttagcagccgtgg

SEQ ID NO: 3063131 - DNA, 25 bp, Homo sapien
tgcgctcttcggtctttacaaaatg

SEQ ID NO: 3063132 - DNA, 25 bp, Homo sapien
tgctcgcgatatccttccgcaagtg

SEQ ID NO: 3063133 - DNA, 25 bp, Homo sapien
gtttacttcttcatgcgctcttcgg

SEQ ID NO: 3063134 - DNA, 25 bp, Homo sapien
aagataagaactacgactcccggcg

SEQ ID NO: 3063135 - DNA, 25 bp, Homo sapien
aagggaactccgttacgcatgcgca

SEQ ID NO: 3063136 - DNA, 25 bp, Homo sapien
tacgcgtcctgggattggctacgtc

SEQ ID NO: 3063137 - DNA, 25 bp, Homo sapien
gatttttcaccaatggccgctcgcg

SEQ ID NO: 3063138 - DNA, 25 bp, Homo sapien
aaaccgtactacaagctgacctggg

SEQ ID NO: 3063139 - DNA, 25 bp, Homo sapien
gaggactctactagccatggccgag

SEQ ID NO: 3063140 - DNA, 25 bp, Homo sapien
taaacggagctataaggtggccaaa

SEQ ID NO: 3063141 - DNA, 25 bp, Homo sapien
gatccgagccgagatgttcgccaag

SEQ ID NO: 3063142 - DNA, 25 bp, Homo sapien
gtttcagtgtgatttctagagctaa

SEQ ID NO: 3063143 - DNA, 25 bp, Homo sapien
tattttatgtgactgcatttttggg

SEQ ID NO: 3063144 - DNA, 25 bp, Homo sapien
ctagagctaattcaaaatagtattg

SEQ ID NO: 3063145 - DNA, 25 bp, Homo sapien
tgtaaatgtaacatagtttcagtgt

SEQ ID NO: 3063146 - DNA, 25 bp, Homo sapien
gctacaatatacagttcaggcaaaa

SEQ ID NO: 3063147 - DNA, 25 bp, Homo sapien
caatacttaagtgtgcttgctttct

SEQ ID NO: 3063148 - DNA, 25 bp, Homo sapien
cttgctttctagtgccttggttttc

SEQ ID NO: 3063149 - DNA, 25 bp, Homo sapien
tcaatctttaatgggagaattttca

SEQ ID NO: 3063150 - DNA, 25 bp, Homo sapien
cagtgtcttctgagggcaattgcgt

SEQ ID NO: 3063151 - DNA, 25 bp, Homo sapien
cttagaaaccattgtgggccttggg

SEQ ID NO: 3063152 - DNA, 25 bp, Homo sapien
gaggaaccctgtacatccccttgca

SEQ ID NO: 3063153 - DNA, 25 bp, Homo sapien
gctcttaaacgtagggaggccctga

SEQ ID NO: 3063154 - DNA, 25 bp, Homo sapien
agtgtcgcgatctggacttacggca

SEQ ID NO: 3063155 - DNA, 25 bp, Homo sapien
gtgtcgcgatctggacttacggcaa

SEQ ID NO: 3063156 - DNA, 25 bp, Homo sapien
tcgcgatctggacttacggcaacct

SEQ ID NO: 3063157 - DNA, 25 bp, Homo sapien
tgtcgcgatctggacttacggcaac

SEQ ID NO: 3063158 - DNA, 25 bp, Homo sapien
tactctgccctaatgactgcaaaag

SEQ ID NO: 3063159 - DNA, 25 bp, Homo sapien
aatactctacctacttaagggctgg

SEQ ID NO: 3063160 - DNA, 25 bp, Homo sapien
cattaggtaatgcatcagttcttcc

SEQ ID NO: 3063161 - DNA, 25 bp, Homo sapien
agagggactccacagacttaaacaa

SEQ ID NO: 3063162 - DNA, 25 bp, Homo sapien
tcaaaccacagtaggcatcaagtgt

SEQ ID NO: 3063163 - DNA, 25 bp, Homo sapien
cttcagttaggagtaagtggttcca

SEQ ID NO: 3063164 - DNA, 25 bp, Homo sapien
tcagtgtagagcgaacatgtcatat

SEQ ID NO: 3063165 - DNA, 25 bp, Homo sapien
catgtcatatgtaggtaaaaaatca

SEQ ID NO: 3063166 - DNA, 25 bp, Homo sapien
tacttcagcacctacctaggcataa

SEQ ID NO: 3063167 - DNA, 25 bp, Homo sapien
tgccagtcactctgctacgtcaaag

SEQ ID NO: 3063168 - DNA, 25 bp, Homo sapien
taataagactcatcacaaggtaccc

SEQ ID NO: 3063169 - DNA, 25 bp, Homo sapien
tgaagatatccttgagccacaaatc

SEQ ID NO: 3063170 - DNA, 25 bp, Homo sapien
gaagcatacgaaatgggcaactccg

SEQ ID NO: 3063171 - DNA, 25 bp, Homo sapien
gcaccgagctcgtgaaggtttccaa

SEQ ID NO: 3063172 - DNA, 25 bp, Homo sapien
catgctaggtcaggttgtccggaga

SEQ ID NO: 3063173 - DNA, 25 bp, Homo sapien
tttctatttcggagccgcagcgact

SEQ ID NO: 3063174 - DNA, 25 bp, Homo sapien
aaaccagcggcttcgtcaggagaac

SEQ ID NO: 3063175 - DNA, 25 bp, Homo sapien
tgcgccctgagaacagctaaatcgg

SEQ ID NO: 3063176 - DNA, 25 bp, Homo sapien
gagcccaacttggatgtgccccatg

SEQ ID NO: 3063177 - DNA, 25 bp, Homo sapien
catcgaagcgcaaaaggcactggcg

SEQ ID NO: 3063178 - DNA, 25 bp, Homo sapien
cagattctaggaacgcatgggtttc

SEQ ID NO: 3063179 - DNA, 25 bp, Homo sapien
tgggtcctcagacagctcagtcagg

SEQ ID NO: 3063180 - DNA, 25 bp, Homo sapien
gcagcaggaatgatcatcgccactt

SEQ ID NO: 3063181 - DNA, 25 bp, Homo sapien
ctttgcagacgggaaaccggaggct

SEQ ID NO: 3063182 - DNA, 25 bp, Homo sapien
taaggggctgtgagagcaactcctt

SEQ ID NO: 3063183 - DNA, 25 bp, Homo sapien
aaggggctgtgagagcaactccttt

SEQ ID NO: 3063184 - DNA, 25 bp, Homo sapien
ctaaggggctgtgagagcaactcct

SEQ ID NO: 3063185 - DNA, 25 bp, Homo sapien
tgtctccctggtgcaaatataagca

SEQ ID NO: 3063186 - DNA, 25 bp, Homo sapien
taacccctgagttgtctgtcaaaaa

SEQ ID NO: 3063187 - DNA, 25 bp, Homo sapien
cattctttttgaaggccactaggga

SEQ ID NO: 3063188 - DNA, 25 bp, Homo sapien
cactttaagggattcatggaacttc

SEQ ID NO: 3063189 - DNA, 25 bp, Homo sapien
gaactgactattgccaagtttgtcc

SEQ ID NO: 3063190 - DNA, 25 bp, Homo sapien
tcctttgacctcagaactgactatt

SEQ ID NO: 3063191 - DNA, 25 bp, Homo sapien
cctttgacctcagaactgactattg

SEQ ID NO: 3063192 - DNA, 25 bp, Homo sapien
attgccaagtttgtcctgcagatac

SEQ ID NO: 3063193 - DNA, 25 bp, Homo sapien
tagggcactgtgtgctcagaacttt

SEQ ID NO: 3063194 - DNA, 25 bp, Homo sapien
ttagggcactgtgtgctcagaactt

SEQ ID NO: 3063195 - DNA, 25 bp, Homo sapien
ggcactgtgtgctcagaactttata

SEQ ID NO: 3063196 - DNA, 25 bp, Homo sapien
cactgtgtgctcagaactttataca

SEQ ID NO: 3063197 - DNA, 25 bp, Homo sapien
tacctgggacatgtagcctgtactc

SEQ ID NO: 3063198 - DNA, 25 bp, Homo sapien
tcagtgagcacattggcgaggcctg

SEQ ID NO: 3063199 - DNA, 25 bp, Homo sapien
tacagtaacacgtagaatgcctcag

SEQ ID NO: 3063200 - DNA, 25 bp, Homo sapien
ccctgccgggatgctgtttgcctta

SEQ ID NO: 3063201 - DNA, 25 bp, Homo sapien
ttgaataggtaatatatgtacatgt

SEQ ID NO: 3063202 - DNA, 25 bp, Homo sapien
cactgcacctgaccttaatttaact

SEQ ID NO: 3063203 - DNA, 25 bp, Homo sapien
tttttgaataggtaatatatgtaca

SEQ ID NO: 3063204 - DNA, 25 bp, Homo sapien
ctgcacctgaccttaatttaacttt

SEQ ID NO: 3063205 - DNA, 25 bp, Homo sapien
aaaactatgttgactatctacaggc

SEQ ID NO: 3063206 - DNA, 25 bp, Homo sapien
aattgtgacacaccatacgatggaa

SEQ ID NO: 3063207 - DNA, 25 bp, Homo sapien
tgaacagtgtagagcgtgtgctatc

SEQ ID NO: 3063208 - DNA, 25 bp, Homo sapien
tagaactgttaagaggccaggcgcg

SEQ ID NO: 3063209 - DNA, 25 bp, Homo sapien
catgttggccacactagtctcaaat

SEQ ID NO: 3063210 - DNA, 25 bp, Homo sapien
tttttccctcaagacggagtcttgc

SEQ ID NO: 3063211 - DNA, 25 bp, Homo sapien
tgttggccacactagtctcaaattc

SEQ ID NO: 3063212 - DNA, 25 bp, Homo sapien
tgagatggagtctcagtcggccagg

SEQ ID NO: 3063213 - DNA, 25 bp, Homo sapien
taaggaagctcctactgagtaatgg

SEQ ID NO: 3063214 - DNA, 25 bp, Homo sapien
tcttggctgtcataccgtctacggc

SEQ ID NO: 3063215 - DNA, 25 bp, Homo sapien
caagcttcagtcatcccttctagga

SEQ ID NO: 3063216 - DNA, 25 bp, Homo sapien
ccaatgtgttagtcccaagcttcag

SEQ ID NO: 3063217 - DNA, 25 bp, Homo sapien
cttagcccagctttattccaccagg

SEQ ID NO: 3063218 - DNA, 25 bp, Homo sapien
gttaaaagtctgtccctcgctaggc

SEQ ID NO: 3063219 - DNA, 25 bp, Homo sapien
tgaacagctggtcccataggatgac

SEQ ID NO: 3063220 - DNA, 25 bp, Homo sapien
gataactactgcattcgtggctccc

SEQ ID NO: 3063221 - DNA, 25 bp, Homo sapien
gtcttccaggctggacggggtgcct

SEQ ID NO: 3063222 - DNA, 25 bp, Homo sapien
tgagactggataattgcttggacct

SEQ ID NO: 3063223 - DNA, 25 bp, Homo sapien
aaagtcttccaggctggacggggtg

SEQ ID NO: 3063224 - DNA, 25 bp, Homo sapien
gagactggataattgcttggacctg

SEQ ID NO: 3063225 - DNA, 25 bp, Homo sapien
gaagaaaggcttaaaccaggtcagc

SEQ ID NO: 3063226 - DNA, 25 bp, Homo sapien
cttggtcaggccacgaaaccagtga

SEQ ID NO: 3063227 - DNA, 25 bp, Homo sapien
tagatgttaactctccgtctcttgc

SEQ ID NO: 3063228 - DNA, 25 bp, Homo sapien
ttccagggtcttcctccagattaga

SEQ ID NO: 3063229 - DNA, 25 bp, Homo sapien
tgacctggcctagagataattcggg

SEQ ID NO: 3063230 - DNA, 25 bp, Homo sapien
aaattcaggctatagatgggacccc

SEQ ID NO: 3063231 - DNA, 25 bp, Homo sapien
cctttgttagctgagtgcccttgga

SEQ ID NO: 3063232 - DNA, 25 bp, Homo sapien
ggacactaatggctcctgacctggc

SEQ ID NO: 3063233 - DNA, 25 bp, Homo sapien
caggatgaatgaaagagctctgaaa

SEQ ID NO: 3063234 - DNA, 25 bp, Homo sapien
tcaggatgaatgaaagagctctgaa

SEQ ID NO: 3063235 - DNA, 25 bp, Homo sapien
tctggccattgtcaggatgaatgaa

SEQ ID NO: 3063236 - DNA, 25 bp, Homo sapien
tcagctcgtctctgggctaagcagg

SEQ ID NO: 3063237 - DNA, 25 bp, Homo sapien
cctggcggtgacagtgtcaagattc

SEQ ID NO: 3063238 - DNA, 25 bp, Homo sapien
tgttattctccaaggtaagaggccc

SEQ ID NO: 3063239 - DNA, 25 bp, Homo sapien
agttcctgtttggagatggctcccc

SEQ ID NO: 3063240 - DNA, 25 bp, Homo sapien
tggcctcccgctccggcaggtgaag

SEQ ID NO: 3063241 - DNA, 25 bp, Homo sapien
caggtgaagcggctcggcagcccac

SEQ ID NO: 3063242 - DNA, 25 bp, Homo sapien
cgtgggtctccgagccgtgctcgca

SEQ ID NO: 3063243 - DNA, 25 bp, Homo sapien
cagtcgctgagatcctcggtgcgga

SEQ ID NO: 3063244 - DNA, 25 bp, Homo sapien
cattcggtggagaacatgaacttcc

SEQ ID NO: 3063245 - DNA, 25 bp, Homo sapien
tacttggaggtaagccctgtactgc

SEQ ID NO: 3063246 - DNA, 25 bp, Homo sapien
tagaattaactggagaggagcctgt

SEQ ID NO: 3063247 - DNA, 25 bp, Homo sapien
gaatatttccggaatgaggacagca

SEQ ID NO: 3063248 - DNA, 25 bp, Homo sapien
gttgggattataggtgcccaccacc

SEQ ID NO: 3063249 - DNA, 25 bp, Homo sapien
ttcaagtgattttccagcctcccca

SEQ ID NO: 3063250 - DNA, 25 bp, Homo sapien
aagtgattttccagcctccccagta

SEQ ID NO: 3063251 - DNA, 25 bp, Homo sapien
tgcccaccaccacactcggttaatt

SEQ ID NO: 3063252 - DNA, 25 bp, Homo sapien
caatatttttgatgtgggggcgctg

SEQ ID NO: 3063253 - DNA, 25 bp, Homo sapien
acagagaccaagaacgctgtgctgg

SEQ ID NO: 3063254 - DNA, 25 bp, Homo sapien
ccaggcgtacctggacaatattttt

SEQ ID NO: 3063255 - DNA, 25 bp, Homo sapien
ggacagaggcttcggctcaccgaga

SEQ ID NO: 3063256 - DNA, 25 bp, Homo sapien
tatttgcttgggttcgagtgccagg

SEQ ID NO: 3063257 - DNA, 25 bp, Homo sapien
ccctcaccggcggtgccagtgccgg

SEQ ID NO: 3063258 - DNA, 25 bp, Homo sapien
atgcctgatgccgccccctcaccgg

SEQ ID NO: 3063259 - DNA, 25 bp, Homo sapien
ttgcttgggttcgagtgccaggctc

SEQ ID NO: 3063260 - DNA, 25 bp, Homo sapien
acagctgacagagcggcttcgggac

SEQ ID NO: 3063261 - DNA, 25 bp, Homo sapien
taggagcgcttcagcgaatcgaccg

SEQ ID NO: 3063262 - DNA, 25 bp, Homo sapien
tggaaaaacagctaagccaggcgcg

SEQ ID NO: 3063263 - DNA, 25 bp, Homo sapien
cttcgggacgcggagaacgaatcca

SEQ ID NO: 3063264 - DNA, 25 bp, Homo sapien
agttgcctggatcaggctgggccct

SEQ ID NO: 3063265 - DNA, 25 bp, Homo sapien
gccaagaagcccatccagactaagt

SEQ ID NO: 3063266 - DNA, 25 bp, Homo sapien
aagacgcgactcagaattgggccca

SEQ ID NO: 3063267 - DNA, 25 bp, Homo sapien
ccgaatgccactcttgaactgggtg

SEQ ID NO: 3063268 - DNA, 25 bp, Homo sapien
tcacaggtacgacctgcaggctctg

SEQ ID NO: 3063269 - DNA, 25 bp, Homo sapien
agaggaggaccgcttcatgctatgc

SEQ ID NO: 3063270 - DNA, 25 bp, Homo sapien
ggtatggatgatgcccaatctcccc

SEQ ID NO: 3063271 - DNA, 25 bp, Homo sapien
tgcccacagagtatgagcgcagcct

SEQ ID NO: 3063272 - DNA, 25 bp, Homo sapien
tgtacatgctgagaaggacaaatct

SEQ ID NO: 3063273 - DNA, 25 bp, Homo sapien
tgtagcagctcacctgggaccctgc

SEQ ID NO: 3063274 - DNA, 25 bp, Homo sapien
aaccagtagaaatggctggtggaca

SEQ ID NO: 3063275 - DNA, 25 bp, Homo sapien
ccctttagcgttgctctgtgagcaa

SEQ ID NO: 3063276 - DNA, 25 bp, Homo sapien
gtggaaaaaagaagccgctgcccag

SEQ ID NO: 3063277 - DNA, 25 bp, Homo sapien
aggcaggcgctgataccccgggcaa

SEQ ID NO: 3063278 - DNA, 25 bp, Homo sapien
caggcgctgataccccgggcaaagg

SEQ ID NO: 3063279 - DNA, 25 bp, Homo sapien
acagtggaaaaaagaagccgctgcc

SEQ ID NO: 3063280 - DNA, 25 bp, Homo sapien
tgagctgaaacggaggcagcagaag

SEQ ID NO: 3063281 - DNA, 25 bp, Homo sapien
acatcatcacaggtaagggcttggc

SEQ ID NO: 3063282 - DNA, 25 bp, Homo sapien
tcatttatgagagcgaccgtgatgg

SEQ ID NO: 3063283 - DNA, 25 bp, Homo sapien
aggcccggcggccacagatggacct

SEQ ID NO: 3063284 - DNA, 25 bp, Homo sapien
tgcacaagctcttcatagcaggcct

SEQ ID NO: 3063285 - DNA, 25 bp, Homo sapien
tgtttgcaaaagatccgcgtcggct

SEQ ID NO: 3063286 - DNA, 25 bp, Homo sapien
agcaaacgctttacttgcacaagct

SEQ ID NO: 3063287 - DNA, 25 bp, Homo sapien
gcttcttcactagagttggcggcga

SEQ ID NO: 3063288 - DNA, 25 bp, Homo sapien
cgcgcgtgccgcctccgtcaccgcc

SEQ ID NO: 3063289 - DNA, 25 bp, Homo sapien
atctccgcgcgtgccgcctccgtca

SEQ ID NO: 3063290 - DNA, 25 bp, Homo sapien
cgcgtgccgcctccgtcaccgcctg

SEQ ID NO: 3063291 - DNA, 25 bp, Homo sapien
tccgcgcgtgccgcctccgtcaccg

SEQ ID NO: 3063292 - DNA, 25 bp, Homo sapien
ctgggcgggatcttggggcggccgg

SEQ ID NO: 3063293 - DNA, 25 bp, Homo sapien
gcttcgtgtcctgcgttccgggagc

SEQ ID NO: 3063294 - DNA, 25 bp, Homo sapien
gagcgccaacccctccaggttagga

SEQ ID NO: 3063295 - DNA, 25 bp, Homo sapien
ggctgggcttcgtgtcctgcgttcc

SEQ ID NO: 3063296 - DNA, 25 bp, Homo sapien
aatctgagagtacgggctgcgcgca

SEQ ID NO: 3063297 - DNA, 25 bp, Homo sapien
ttcgtgcagtttgtgcagcgagcgc

SEQ ID NO: 3063298 - DNA, 25 bp, Homo sapien
gccgcgtggcagaaggcgagccccg

SEQ ID NO: 3063299 - DNA, 25 bp, Homo sapien
gagaggtcgctgatgcgcgccgcgt

SEQ ID NO: 3063300 - DNA, 25 bp, Homo sapien
tggcagaaggcgagccccgcgtggg

SEQ ID NO: 3063301 - DNA, 25 bp, Homo sapien
ttcagggctcccgtctctagggcag

SEQ ID NO: 3063302 - DNA, 25 bp, Homo sapien
agaattcagggctcccgtctctagg

SEQ ID NO: 3063303 - DNA, 25 bp, Homo sapien
caggagctggtatggttgtgcccac

SEQ ID NO: 3063304 - DNA, 25 bp, Homo sapien
gcaggaatatcaggggtccctgcgg

SEQ ID NO: 3063305 - DNA, 25 bp, Homo sapien
cccgtgccaacttggagggcacaaa

SEQ ID NO: 3063306 - DNA, 25 bp, Homo sapien
ttggagggcacaaagccccggccca

SEQ ID NO: 3063307 - DNA, 25 bp, Homo sapien
gtgccaacttggagggcacaaagcc

SEQ ID NO: 3063308 - DNA, 25 bp, Homo sapien
caacttggagggcacaaagccccgg

SEQ ID NO: 3063309 - DNA, 25 bp, Homo sapien
tcaatgaagcttacgattccatcac

SEQ ID NO: 3063310 - DNA, 25 bp, Homo sapien
gaagtcaatgaagcttacgattcca

SEQ ID NO: 3063311 - DNA, 25 bp, Homo sapien
ggttgtcatcgaagacacccaggaa

SEQ ID NO: 3063312 - DNA, 25 bp, Homo sapien
catgcactgagccaagcggtggttg

SEQ ID NO: 3063313 - DNA, 25 bp, Homo sapien
agctggatacccacattgcccaggg

SEQ ID NO: 3063314 - DNA, 25 bp, Homo sapien
catgtccacggtgcctgttgggctg

SEQ ID NO: 3063315 - DNA, 25 bp, Homo sapien
agggcaactttcatgctgtgcatgt

SEQ ID NO: 3063316 - DNA, 25 bp, Homo sapien
cagagcctcgaacgtctcctgtgga

SEQ ID NO: 3063317 - DNA, 25 bp, Homo sapien
ccagctgctggggtgtcttgcctgt

SEQ ID NO: 3063318 - DNA, 25 bp, Homo sapien
tgccagctgctggggtgtcttgcct

SEQ ID NO: 3063319 - DNA, 25 bp, Homo sapien
ctgctggggtgtcttgcctgtcaag

SEQ ID NO: 3063320 - DNA, 25 bp, Homo sapien
agctgctggggtgtcttgcctgtca

SEQ ID NO: 3063321 - DNA, 25 bp, Homo sapien
tcggctggatgggcagcttcacaag

SEQ ID NO: 3063322 - DNA, 25 bp, Homo sapien
ctcttgccctcctcatggtgtgtgc

SEQ ID NO: 3063323 - DNA, 25 bp, Homo sapien
gactcggctggatgggcagcttcac

SEQ ID NO: 3063324 - DNA, 25 bp, Homo sapien
ctgactcggctggatgggcagcttc

SEQ ID NO: 3063325 - DNA, 25 bp, Homo sapien
catgtgagcagcctttgagggtgct

SEQ ID NO: 3063326 - DNA, 25 bp, Homo sapien
tcctttgctggatctcatgtgagca

SEQ ID NO: 3063327 - DNA, 25 bp, Homo sapien
tgctggatctcatgtgagcagcctt

SEQ ID NO: 3063328 - DNA, 25 bp, Homo sapien
ggatctcatgtgagcagcctttgag

SEQ ID NO: 3063329 - DNA, 25 bp, Homo sapien
tctccttcccgcttctcctgctggc

SEQ ID NO: 3063330 - DNA, 25 bp, Homo sapien
ctccttgtccctccttccagtctcc

SEQ ID NO: 3063331 - DNA, 25 bp, Homo sapien
tcctccttgtccctccttccagtct

SEQ ID NO: 3063332 - DNA, 25 bp, Homo sapien
tccagtctccttcccgcttctcctg

SEQ ID NO: 3063333 - DNA, 25 bp, Homo sapien
cagcactggaggctttattggttct

SEQ ID NO: 3063334 - DNA, 25 bp, Homo sapien
ccagcactggaggctttattggttc

SEQ ID NO: 3063335 - DNA, 25 bp, Homo sapien
agcactggaggctttattggttctg

SEQ ID NO: 3063336 - DNA, 25 bp, Homo sapien
ggggctgacagcttaaaatggattt

SEQ ID NO: 3063337 - DNA, 25 bp, Homo sapien
ttcaccaataatggattctctttct

SEQ ID NO: 3063338 - DNA, 25 bp, Homo sapien
gtgggggctgacagcttaaaatgga

SEQ ID NO: 3063339 - DNA, 25 bp, Homo sapien
tcaccaataatggattctctttctc

SEQ ID NO: 3063340 - DNA, 25 bp, Homo sapien
aaagagagagtgtcacttgggcccc

SEQ ID NO: 3063341 - DNA, 25 bp, Homo sapien
caacaggctttcaacagggcagacc

SEQ ID NO: 3063342 - DNA, 25 bp, Homo sapien
agcctgagcattcccaaccttggtg

SEQ ID NO: 3063343 - DNA, 25 bp, Homo sapien
gcaaggtgtactggagagccctgca

SEQ ID NO: 3063344 - DNA, 25 bp, Homo sapien
tagctctgactccagtaaagccggc

SEQ ID NO: 3063345 - DNA, 25 bp, Homo sapien
tagctctgtcaggtcaatgggtggc

SEQ ID NO: 3063346 - DNA, 25 bp, Homo sapien
gatgagcttgtttgcccagaagagg

SEQ ID NO: 3063347 - DNA, 25 bp, Homo sapien
cagccccatgttggagtggacggac

SEQ ID NO: 3063348 - DNA, 25 bp, Homo sapien
tatctggtgttgacttaagtcatct

SEQ ID NO: 3063349 - DNA, 25 bp, Homo sapien
cctcttgtatctggtgttgacttaa

SEQ ID NO: 3063350 - DNA, 25 bp, Homo sapien
tgttcctcttgtatctggtgttgac

SEQ ID NO: 3063351 - DNA, 25 bp, Homo sapien
tcctgttcctcttgtatctggtgtt

SEQ ID NO: 3063352 - DNA, 25 bp, Homo sapien
tttgccgcagcatggaaatccatgg

SEQ ID NO: 3063353 - DNA, 25 bp, Homo sapien
cactgaccctttgccgcagcatgga

SEQ ID NO: 3063354 - DNA, 25 bp, Homo sapien
gaccctttgccgcagcatggaaatc

SEQ ID NO: 3063355 - DNA, 25 bp, Homo sapien
ccgcagcatggaaatccatgggcac

SEQ ID NO: 3063356 - DNA, 25 bp, Homo sapien
tcatgagtcgtttcctgtgcacaag

SEQ ID NO: 3063357 - DNA, 25 bp, Homo sapien
aaaaatgtgctgaagactgccgctc

SEQ ID NO: 3063358 - DNA, 25 bp, Homo sapien
gcgcatgcgtgtccgtgagagcaca

SEQ ID NO: 3063359 - DNA, 25 bp, Homo sapien
agtacaaggcatcaacgaagcgctc

SEQ ID NO: 3063360 - DNA, 25 bp, Homo sapien
cctctccgcctccagtgtgctcttt

SEQ ID NO: 3063361 - DNA, 25 bp, Homo sapien
tgtgctctttggctgagggactggt

SEQ ID NO: 3063362 - DNA, 25 bp, Homo sapien
ttggctgagggactggtgggcgctg

SEQ ID NO: 3063363 - DNA, 25 bp, Homo sapien
gggagcgggctggtggatgctgcct

SEQ ID NO: 3063364 - DNA, 25 bp, Homo sapien
tcccctgggagaagaggctaagctg

SEQ ID NO: 3063365 - DNA, 25 bp, Homo sapien
tgaggtcatcagagtgcaaagtgcc

SEQ ID NO: 3063366 - DNA, 25 bp, Homo sapien
tcaatgtggacagctggacaaaggc

SEQ ID NO: 3063367 - DNA, 25 bp, Homo sapien
aatggtcactgatccaagcgggtca

SEQ ID NO: 3063368 - DNA, 25 bp, Homo sapien
gcctgttctccagctggccatgctt

SEQ ID NO: 3063369 - DNA, 25 bp, Homo sapien
tgttctccagctggccatgcttgac

SEQ ID NO: 3063370 - DNA, 25 bp, Homo sapien
ttagggcctgttctccagctggcca

SEQ ID NO: 3063371 - DNA, 25 bp, Homo sapien
tagggcctgttctccagctggccat

SEQ ID NO: 3063372 - DNA, 25 bp, Homo sapien
tagcgaacaggctgcccgtctttgg

SEQ ID NO: 3063373 - DNA, 25 bp, Homo sapien
ggcacctccatgtcgtagcgaacag

SEQ ID NO: 3063374 - DNA, 25 bp, Homo sapien
gtgtgcactgcaggtcgatgcccga

SEQ ID NO: 3063375 - DNA, 25 bp, Homo sapien
tgcccgtctttggtgaccaagctga

SEQ ID NO: 3063376 - DNA, 25 bp, Homo sapien
gctgatgccagtggcgatgtctccc

SEQ ID NO: 3063377 - DNA, 25 bp, Homo sapien
aactcccggatgtgcaggtgttcac

SEQ ID NO: 3063378 - DNA, 25 bp, Homo sapien
tgacccggtggaactcccggatgtg

SEQ ID NO: 3063379 - DNA, 25 bp, Homo sapien
ggtgttcaccattaagagactgtat

SEQ ID NO: 3063380 - DNA, 25 bp, Homo sapien
cattgaaatagcttggggtgtcggt

SEQ ID NO: 3063381 - DNA, 25 bp, Homo sapien
tccaggagtgtacgcctgagctcag

SEQ ID NO: 3063382 - DNA, 25 bp, Homo sapien
agctcagggtgtcccgcgagctttg

SEQ ID NO: 3063383 - DNA, 25 bp, Homo sapien
agctggagcttcgagcctcggcctg

SEQ ID NO: 3063384 - DNA, 25 bp, Homo sapien
cactgtcatccgacagggagaggct

SEQ ID NO: 3063385 - DNA, 25 bp, Homo sapien
cttctcactgtcatccgacagggag

SEQ ID NO: 3063386 - DNA, 25 bp, Homo sapien
tgggacaggctgttgaggaataatt

SEQ ID NO: 3063387 - DNA, 25 bp, Homo sapien
tctcactgtcatccgacagggagag

SEQ ID NO: 3063388 - DNA, 25 bp, Homo sapien
gaagatggctgtgaaagactgggag

SEQ ID NO: 3063389 - DNA, 25 bp, Homo sapien
cacagtcggtagaagctgagctgct

SEQ ID NO: 3063390 - DNA, 25 bp, Homo sapien
aagaaagcccacaccgcaggtaaag

SEQ ID NO: 3063391 - DNA, 25 bp, Homo sapien
cccacaccgcaggtaaagagaaaca

SEQ ID NO: 3063392 - DNA, 25 bp, Homo sapien
tcctccttgctcaaagtcaagggag

SEQ ID NO: 3063393 - DNA, 25 bp, Homo sapien
gacggttgctttccgctctggtgag

SEQ ID NO: 3063394 - DNA, 25 bp, Homo sapien
ctgcagttcctgctccgggacggtt

SEQ ID NO: 3063395 - DNA, 25 bp, Homo sapien
gaggacagaggtaagggttcccaca

SEQ ID NO: 3063396 - DNA, 25 bp, Homo sapien
taattggcttgatttggcggtggat

SEQ ID NO: 3063397 - DNA, 25 bp, Homo sapien
cttggcgaaagctctctcggctggg

SEQ ID NO: 3063398 - DNA, 25 bp, Homo sapien
catggagggtctggtggtaattggc

SEQ ID NO: 3063399 - DNA, 25 bp, Homo sapien
gcttaggggctctgcctgttgtctc

SEQ ID NO: 3063400 - DNA, 25 bp, Homo sapien
tccttataactaccagctgtctttg

SEQ ID NO: 3063401 - DNA, 25 bp, Homo sapien
ccaggcaccgtttgttctggcatgg

SEQ ID NO: 3063402 - DNA, 25 bp, Homo sapien
caaagtggcatcctggacccaccat

SEQ ID NO: 3063403 - DNA, 25 bp, Homo sapien
cccaatatgacagggataggactgg

SEQ ID NO: 3063404 - DNA, 25 bp, Homo sapien
tgtagtgcgcgtcctcaggcgtgtc

SEQ ID NO: 3063405 - DNA, 25 bp, Homo sapien
caggcgtgtccccatatggatctgc

SEQ ID NO: 3063406 - DNA, 25 bp, Homo sapien
tcccacaaaggaagctgtagtgcgc

SEQ ID NO: 3063407 - DNA, 25 bp, Homo sapien
tccatgctgctctgtgaacgccgag

SEQ ID NO: 3063408 - DNA, 25 bp, Homo sapien
tggaaaaagcacttcgagtttgcgt

SEQ ID NO: 3063409 - DNA, 25 bp, Homo sapien
aaatccccacacatgtggtcacagg

SEQ ID NO: 3063410 - DNA, 25 bp, Homo sapien
gcgtggcactgtcgcaatctcccaa

SEQ ID NO: 3063411 - DNA, 25 bp, Homo sapien
gggtgccttgctctggacctgcgcc

SEQ ID NO: 3063412 - DNA, 25 bp, Homo sapien
ctcacaggcggaggctcgctggcaa

SEQ ID NO: 3063413 - DNA, 25 bp, Homo sapien
gacacgcggtggatgggctctttcc

SEQ ID NO: 3063414 - DNA, 25 bp, Homo sapien
gcaggagggtgggatctccctcaca

SEQ ID NO: 3063415 - DNA, 25 bp, Homo sapien
tcagcccctcttggatggcctgggc

SEQ ID NO: 3063416 - DNA, 25 bp, Homo sapien
ttattgctctttgcgcaactcccgc

SEQ ID NO: 3063417 - DNA, 25 bp, Homo sapien
gctggggtctaccacaaggaatgga

SEQ ID NO: 3063418 - DNA, 25 bp, Homo sapien
ccggcccctgttcccgctgtgctgg

SEQ ID NO: 3063419 - DNA, 25 bp, Homo sapien
cctcatttcctgatacccggctgtt

SEQ ID NO: 3063420 - DNA, 25 bp, Homo sapien
gagcggccctcggaagaactgagtc

SEQ ID NO: 3063421 - DNA, 25 bp, Homo sapien
agacatccaccttggcgtcgcagct

SEQ ID NO: 3063422 - DNA, 25 bp, Homo sapien
tccggagccatgtgggtctctgtgc

SEQ ID NO: 3063423 - DNA, 25 bp, Homo sapien
ttgagcatgtgcagcatcatacagc

SEQ ID NO: 3063424 - DNA, 25 bp, Homo sapien
catcgctggacaggagcacgttgtc

SEQ ID NO: 3063425 - DNA, 25 bp, Homo sapien
caggccatcaggttgaagacacaca

SEQ ID NO: 3063426 - DNA, 25 bp, Homo sapien
ccaaagtcacagagggctgcgtggc

SEQ ID NO: 3063427 - DNA, 25 bp, Homo sapien
agagggctgcgtggctcccatcgct

SEQ ID NO: 3063428 - DNA, 25 bp, Homo sapien
acagggcccggtcctctgggagaca

SEQ ID NO: 3063429 - DNA, 25 bp, Homo sapien
gcagaatccttcgtgagtggaggta

SEQ ID NO: 3063430 - DNA, 25 bp, Homo sapien
cgtgagtggaggtattccagaccct

SEQ ID NO: 3063431 - DNA, 25 bp, Homo sapien
cccatgcagaatccttcgtgagtgg

SEQ ID NO: 3063432 - DNA, 25 bp, Homo sapien
aagatgttgacccaaggcccttctc

SEQ ID NO: 3063433 - DNA, 25 bp, Homo sapien
aattctgggtgaggtcaatcctgca

SEQ ID NO: 3063434 - DNA, 25 bp, Homo sapien
agcagctccatgaagatgttgaccc

SEQ ID NO: 3063435 - DNA, 25 bp, Homo sapien
tctgcccgaaatacttccagccgca

SEQ ID NO: 3063436 - DNA, 25 bp, Homo sapien
ggaactaattcaacaacaggacttg

SEQ ID NO: 3063437 - DNA, 25 bp, Homo sapien
gctgctgatggttctcaagtaagcc

SEQ ID NO: 3063438 - DNA, 25 bp, Homo sapien
taagccttgagtagcatcgccaggg

SEQ ID NO: 3063439 - DNA, 25 bp, Homo sapien
tgacttggcaaacagccctgacact

SEQ ID NO: 3063440 - DNA, 25 bp, Homo sapien
gaaaatgtgggatatgaaggtggtg

SEQ ID NO: 3063441 - DNA, 25 bp, Homo sapien
ctatgaagctatgtttttgcaggtc

SEQ ID NO: 3063442 - DNA, 25 bp, Homo sapien
cacgcacgtgacattccctttgata

SEQ ID NO: 3063443 - DNA, 25 bp, Homo sapien
gataatgtatctctatgaagctatg

SEQ ID NO: 3063444 - DNA, 25 bp, Homo sapien
tgctttagaagtcggtgccagagga

SEQ ID NO: 3063445 - DNA, 25 bp, Homo sapien
caatagcctgtaagctggtgggatc

SEQ ID NO: 3063446 - DNA, 25 bp, Homo sapien
tatcatttcccaggcaccggtaaag

SEQ ID NO: 3063447 - DNA, 25 bp, Homo sapien
cacagcagcgcttttactcgggcaa

SEQ ID NO: 3063448 - DNA, 25 bp, Homo sapien
tgtgtgattgcccatacatgcaaca

SEQ ID NO: 3063449 - DNA, 25 bp, Homo sapien
gtgtgattgcccatacatgcaacac

SEQ ID NO: 3063450 - DNA, 25 bp, Homo sapien
gattgcccatacatgcaacacagaa

SEQ ID NO: 3063451 - DNA, 25 bp, Homo sapien
gtgattgcccatacatgcaacacag

SEQ ID NO: 3063452 - DNA, 25 bp, Homo sapien
tcagaggtaactgccctttgacaga

SEQ ID NO: 3063453 - DNA, 25 bp, Homo sapien
tcttttgtagacatgcgatctcgct

SEQ ID NO: 3063454 - DNA, 25 bp, Homo sapien
gggtctctacaaagaagtgctagga

SEQ ID NO: 3063455 - DNA, 25 bp, Homo sapien
gattataggtataagtgccgcaccg

SEQ ID NO: 3063456 - DNA, 25 bp, Homo sapien
acagacctggtctgattcagggctc

SEQ ID NO: 3063457 - DNA, 25 bp, Homo sapien
ctcctagaagcaccccacaggtgga

SEQ ID NO: 3063458 - DNA, 25 bp, Homo sapien
tctgtcttgcaggactgtggcacgc

SEQ ID NO: 3063459 - DNA, 25 bp, Homo sapien
cctgaagagtggttgaaagccgaac

SEQ ID NO: 3063460 - DNA, 25 bp, Homo sapien
gttctgttcacaagtcagacccacg

SEQ ID NO: 3063461 - DNA, 25 bp, Homo sapien
tgtgaatttcatgacgctccaacca

SEQ ID NO: 3063462 - DNA, 25 bp, Homo sapien
tattgagacaccgaggccacgtgtg

SEQ ID NO: 3063463 - DNA, 25 bp, Homo sapien
ccgacctcaggtggctagtgatagc

SEQ ID NO: 3063464 - DNA, 25 bp, Homo sapien
gtgcacctctccgaaggagcctctg

SEQ ID NO: 3063465 - DNA, 25 bp, Homo sapien
cggtactcataatccactggcttga

SEQ ID NO: 3063466 - DNA, 25 bp, Homo sapien
tggtgcgtggcccagtggacttctt

SEQ ID NO: 3063467 - DNA, 25 bp, Homo sapien
tttttgacagcgcactggaagccag

SEQ ID NO: 3063468 - DNA, 25 bp, Homo sapien
tgtgtactattaatgcagtgcccac

SEQ ID NO: 3063469 - DNA, 25 bp, Homo sapien
gcaggaggtgaccaaccagaagaac

SEQ ID NO: 3063470 - DNA, 25 bp, Homo sapien
tgggtggtgaaaacaggtcccatcc

SEQ ID NO: 3063471 - DNA, 25 bp, Homo sapien
cagaagaactcagaacagaagacgc

SEQ ID NO: 3063472 - DNA, 25 bp, Homo sapien
cttgcagagcatgcactaggtattc

SEQ ID NO: 3063473 - DNA, 25 bp, Homo sapien
gtctacacaggccagtttgctcagg

SEQ ID NO: 3063474 - DNA, 25 bp, Homo sapien
tcagtgagcaggacaccctcgttgt

SEQ ID NO: 3063475 - DNA, 25 bp, Homo sapien
ttctcatgggcaccacgagacaggc

SEQ ID NO: 3063476 - DNA, 25 bp, Homo sapien
agggatgaggcagtctgctataggg

SEQ ID NO: 3063477 - DNA, 25 bp, Homo sapien
cattgcaaggggctgatcagtttgt

SEQ ID NO: 3063478 - DNA, 25 bp, Homo sapien
gaagggatgaggcagtctgctatag

SEQ ID NO: 3063479 - DNA, 25 bp, Homo sapien
cacgtggttcagacattgcaagggg

SEQ ID NO: 3063480 - DNA, 25 bp, Homo sapien
gggcgccgagtggagactcatcctc

SEQ ID NO: 3063481 - DNA, 25 bp, Homo sapien
taggccctcgccaagctgcttaaaa

SEQ ID NO: 3063482 - DNA, 25 bp, Homo sapien
tgtttctaacatatggggcgccgag

SEQ ID NO: 3063483 - DNA, 25 bp, Homo sapien
ccttcagaggcttggtgaactgcgg

SEQ ID NO: 3063484 - DNA, 25 bp, Homo sapien
ttggccaaggccactcctgcatgag

SEQ ID NO: 3063485 - DNA, 25 bp, Homo sapien
tttggccaaggccactcctgcatga

SEQ ID NO: 3063486 - DNA, 25 bp, Homo sapien
ttccaacacacacgggccattttgc

SEQ ID NO: 3063487 - DNA, 25 bp, Homo sapien
ttcttccgggctttgctgcgacgct

SEQ ID NO: 3063488 - DNA, 25 bp, Homo sapien
gccattttgccctctgtagcatggg

SEQ ID NO: 3063489 - DNA, 25 bp, Homo sapien
gggatctgatcaagactctcggact

SEQ ID NO: 3063490 - DNA, 25 bp, Homo sapien
tgaaaatgcgttctgaaaaggtggg

SEQ ID NO: 3063491 - DNA, 25 bp, Homo sapien
ctgtactgtttggacccagcgatga

SEQ ID NO: 3063492 - DNA, 25 bp, Homo sapien
tggacccagcgatgaaaatgcgttc

SEQ ID NO: 3063493 - DNA, 25 bp, Homo sapien
tgtttggacccagcgatgaaaatgc

SEQ ID NO: 3063494 - DNA, 25 bp, Homo sapien
aaggagttggattagcagagaggag

SEQ ID NO: 3063495 - DNA, 25 bp, Homo sapien
ggagttggattagcagagaggagaa

SEQ ID NO: 3063496 - DNA, 25 bp, Homo sapien
aggagttggattagcagagaggaga

SEQ ID NO: 3063497 - DNA, 25 bp, Homo sapien
atgtatgcgtgtggagaaatgacag

SEQ ID NO: 3063498 - DNA, 25 bp, Homo sapien
caggcctcgtgggagtttctgtctc

SEQ ID NO: 3063499 - DNA, 25 bp, Homo sapien
gacgagggcaggatgtatgcgtgtg

SEQ ID NO: 3063500 - DNA, 25 bp, Homo sapien
gggttgagggaaggcgttggagaga

SEQ ID NO: 3063501 - DNA, 25 bp, Homo sapien
ctgcagcagcctgccgccccaggac

SEQ ID NO: 3063502 - DNA, 25 bp, Homo sapien
tcaagagcacggtgctcattcctgg

SEQ ID NO: 3063503 - DNA, 25 bp, Homo sapien
cagcaggctcaagagcacggtgctc

SEQ ID NO: 3063504 - DNA, 25 bp, Homo sapien
ggctcaagagcacggtgctcattcc

SEQ ID NO: 3063505 - DNA, 25 bp, Homo sapien
ctgccccgtgcccacaacaacccta

SEQ ID NO: 3063506 - DNA, 25 bp, Homo sapien
tgcccacaacaaccctaggccccta

SEQ ID NO: 3063507 - DNA, 25 bp, Homo sapien
tgccccgtgcccacaacaaccctag

SEQ ID NO: 3063508 - DNA, 25 bp, Homo sapien
cttggctgtgcccttggtaatcacg

SEQ ID NO: 3063509 - DNA, 25 bp, Homo sapien
ttctccacggcctcaagcttgtaga

SEQ ID NO: 3063510 - DNA, 25 bp, Homo sapien
taatcacgtcattcaggatctccca

SEQ ID NO: 3063511 - DNA, 25 bp, Homo sapien
tcaagcttgtagacggagctctgtt

SEQ ID NO: 3063512 - DNA, 25 bp, Homo sapien
ctgagagagaccaaacacagagcag

SEQ ID NO: 3063513 - DNA, 25 bp, Homo sapien
gagtccacctctcaacagctacacg

SEQ ID NO: 3063514 - DNA, 25 bp, Homo sapien
cacagagcaggtcacttagaatccc

SEQ ID NO: 3063515 - DNA, 25 bp, Homo sapien
catcctcaatggtaacagagtccac

SEQ ID NO: 3063516 - DNA, 25 bp, Homo sapien
gggttgaacctagactgctgcctcc

SEQ ID NO: 3063517 - DNA, 25 bp, Homo sapien
aagagtttggaaaccagcggcctag

SEQ ID NO: 3063518 - DNA, 25 bp, Homo sapien
tgtagtagcacaccaaaagttacgc

SEQ ID NO: 3063519 - DNA, 25 bp, Homo sapien
gagaatgtagcccatctgtcaggat

SEQ ID NO: 3063520 - DNA, 25 bp, Homo sapien
gggaatgtaatagccactaccgtcc

SEQ ID NO: 3063521 - DNA, 25 bp, Homo sapien
gggaaccaagggcaagtatcaggca

SEQ ID NO: 3063522 - DNA, 25 bp, Homo sapien
tgattccttcacttgcccgagcagg

SEQ ID NO: 3063523 - DNA, 25 bp, Homo sapien
caaaacagccatctggcgaggcaga

SEQ ID NO: 3063524 - DNA, 25 bp, Homo sapien
tagacaccaacaataaggaagatgg

SEQ ID NO: 3063525 - DNA, 25 bp, Homo sapien
tgtctggccagtttaaatcgtttta

SEQ ID NO: 3063526 - DNA, 25 bp, Homo sapien
taaaacatgaaaatctagacaccaa

SEQ ID NO: 3063527 - DNA, 25 bp, Homo sapien
aagatgggtgaaatgggttgttcaa

SEQ ID NO: 3063528 - DNA, 25 bp, Homo sapien
agtaaagcgtaagtcaggcagtccc

SEQ ID NO: 3063529 - DNA, 25 bp, Homo sapien
gaagttcagctatcagaccatggac

SEQ ID NO: 3063530 - DNA, 25 bp, Homo sapien
cctgggctaacaatctgacaagtga

SEQ ID NO: 3063531 - DNA, 25 bp, Homo sapien
gagtcaatgcagcaatcaccagcag

SEQ ID NO: 3063532 - DNA, 25 bp, Homo sapien
aaccttccgagttacaggcgtcagc

SEQ ID NO: 3063533 - DNA, 25 bp, Homo sapien
tgcctggcctagtttgggactattt

SEQ ID NO: 3063534 - DNA, 25 bp, Homo sapien
gaaacatggattatacacatgtaat

SEQ ID NO: 3063535 - DNA, 25 bp, Homo sapien
cttaagatactatgaatactattcc

SEQ ID NO: 3063536 - DNA, 25 bp, Homo sapien
gagtcatggtctataagtgttaagt

SEQ ID NO: 3063537 - DNA, 25 bp, Homo sapien
gcttcaaagttgctgctataaggca

SEQ ID NO: 3063538 - DNA, 25 bp, Homo sapien
tataaggcactgaagcctacctccc

SEQ ID NO: 3063539 - DNA, 25 bp, Homo sapien
gcagccctagcatcagacagaaagt

SEQ ID NO: 3063540 - DNA, 25 bp, Homo sapien
gaataaatgagtgccacaggctctg

SEQ ID NO: 3063541 - DNA, 25 bp, Homo sapien
gacgctctacgcctgacagtgctgg

SEQ ID NO: 3063542 - DNA, 25 bp, Homo sapien
gaccccagggtgagagaaataccaa

SEQ ID NO: 3063543 - DNA, 25 bp, Homo sapien
tgagatgtctgccttcgtgcccagc

SEQ ID NO: 3063544 - DNA, 25 bp, Homo sapien
tctgaaccgagctccacatgaggct

SEQ ID NO: 3063545 - DNA, 25 bp, Homo sapien
gtccttgactgcagatcgtgggccc

SEQ ID NO: 3063546 - DNA, 25 bp, Homo sapien
agtccttgctgatctacatgccata

SEQ ID NO: 3063547 - DNA, 25 bp, Homo sapien
tagaaatgactcttcggccatcaag

SEQ ID NO: 3063548 - DNA, 25 bp, Homo sapien
tagagctccctaaatccactgacat

SEQ ID NO: 3063549 - DNA, 25 bp, Homo sapien
ctgacatggaattgtccccggccca

SEQ ID NO: 3063550 - DNA, 25 bp, Homo sapien
tagtgcccataatgctcagatgttt

SEQ ID NO: 3063551 - DNA, 25 bp, Homo sapien
acactggtgccatcaatagtgccca

SEQ ID NO: 3063552 - DNA, 25 bp, Homo sapien
tctgtcagctcttcatcgaggcagg

SEQ ID NO: 3063553 - DNA, 25 bp, Homo sapien
gatggaagccattagtagaagtacg

SEQ ID NO: 3063554 - DNA, 25 bp, Homo sapien
cctttatgcgtattgggctgactta

SEQ ID NO: 3063555 - DNA, 25 bp, Homo sapien
gaaagaacatctgtcaaaccaacca

SEQ ID NO: 3063556 - DNA, 25 bp, Homo sapien
tctcagcagtaaatgatatacacat

SEQ ID NO: 3063557 - DNA, 25 bp, Homo sapien
aaaaatcacaacagttgccgagggc

SEQ ID NO: 3063558 - DNA, 25 bp, Homo sapien
gccatcttctcagcagtaaatgata

SEQ ID NO: 3063559 - DNA, 25 bp, Homo sapien
gacaaccaatcagcgcaagccatct

SEQ ID NO: 3063560 - DNA, 25 bp, Homo sapien
aataaataaggatgtccgaaaggtg

SEQ ID NO: 3063561 - DNA, 25 bp, Homo sapien
ataaataaggatgtccgaaaggtgt

SEQ ID NO: 3063562 - DNA, 25 bp, Homo sapien
ttggacggggtacgtcggactgcgc

SEQ ID NO: 3063563 - DNA, 25 bp, Homo sapien
gacggggtacgtcggactgcgctgg

SEQ ID NO: 3063564 - DNA, 25 bp, Homo sapien
tacgtcggactgcgctggcctggcc

SEQ ID NO: 3063565 - DNA, 25 bp, Homo sapien
gggtacgtcggactgcgctggcctg

SEQ ID NO: 3063566 - DNA, 25 bp, Homo sapien
ccaaccaagcgagtgttgcgctccg

SEQ ID NO: 3063567 - DNA, 25 bp, Homo sapien
ggccaagcgccgatctccccaacca

SEQ ID NO: 3063568 - DNA, 25 bp, Homo sapien
caagcgagtgttgcgctccgctcgc

SEQ ID NO: 3063569 - DNA, 25 bp, Homo sapien
atctccccaaccaagcgagtgttgc

SEQ ID NO: 3063570 - DNA, 25 bp, Homo sapien
tacgccaaccaatgagacggtcgtc

SEQ ID NO: 3063571 - DNA, 25 bp, Homo sapien
cgactagggtgttggtggaaccaca

SEQ ID NO: 3063572 - DNA, 25 bp, Homo sapien
caacgattggttaacgaggcctggt

SEQ ID NO: 3063573 - DNA, 25 bp, Homo sapien
tgggcactatttccggacgatgttt

SEQ ID NO: 3063574 - DNA, 25 bp, Homo sapien
gctgcgttctcgaggttacgggaag

SEQ ID NO: 3063575 - DNA, 25 bp, Homo sapien
tgcgttctcgaggttacgggaagga

SEQ ID NO: 3063576 - DNA, 25 bp, Homo sapien
cagctgcgttctcgaggttacggga

SEQ ID NO: 3063577 - DNA, 25 bp, Homo sapien
agctgcgttctcgaggttacgggaa

SEQ ID NO: 3063578 - DNA, 25 bp, Homo sapien
aagatcagatgagatcgggcgtgtt

SEQ ID NO: 3063579 - DNA, 25 bp, Homo sapien
tcccatccaggtaccaaccaggcct

SEQ ID NO: 3063580 - DNA, 25 bp, Homo sapien
ttctcccatccaggtaccaaccagg

SEQ ID NO: 3063581 - DNA, 25 bp, Homo sapien
tccaagatcagatgagatcgggcgt

SEQ ID NO: 3063582 - DNA, 25 bp, Homo sapien
cacacaaagaccagggacgctttcc

SEQ ID NO: 3063583 - DNA, 25 bp, Homo sapien
tgtggagcttaatcagaccccagtg

SEQ ID NO: 3063584 - DNA, 25 bp, Homo sapien
ccagatgagatccagccccttgtct

SEQ ID NO: 3063585 - DNA, 25 bp, Homo sapien
taaatcacaaacatctagcactagc

SEQ ID NO: 3063586 - DNA, 25 bp, Homo sapien
ccatcctgcaggtccaagtaggaca

SEQ ID NO: 3063587 - DNA, 25 bp, Homo sapien
gatcatggcacctgacttccaggag

SEQ ID NO: 3063588 - DNA, 25 bp, Homo sapien
tgggagcacaaaggcaagagatcat

SEQ ID NO: 3063589 - DNA, 25 bp, Homo sapien
ctttctgtgcggctggccctgtgct

SEQ ID NO: 3063590 - DNA, 25 bp, Homo sapien
agcctcccagcgtgccggggttaca

SEQ ID NO: 3063591 - DNA, 25 bp, Homo sapien
atttttaaagcatatgaaggtacta

SEQ ID NO: 3063592 - DNA, 25 bp, Homo sapien
aggcgtgtgaggcaccgctcccggc

SEQ ID NO: 3063593 - DNA, 25 bp, Homo sapien
tgtcgcccagactgccctccaactc

SEQ ID NO: 3063594 - DNA, 25 bp, Homo sapien
ccgctccccgccgattggcgaggcc

SEQ ID NO: 3063595 - DNA, 25 bp, Homo sapien
ggtccctgctgagtcacgcgcagcg

SEQ ID NO: 3063596 - DNA, 25 bp, Homo sapien
ctcgcccgcgcagggggtccctgct

SEQ ID NO: 3063597 - DNA, 25 bp, Homo sapien
tccccgccgattggcgaggccgcat

SEQ ID NO: 3063598 - DNA, 25 bp, Homo sapien
tcgcccggccacgtcctgaggcctg

SEQ ID NO: 3063599 - DNA, 25 bp, Homo sapien
gtctccgcttccaacaagctggtct

SEQ ID NO: 3063600 - DNA, 25 bp, Homo sapien
tcaggaacgcccgctcgcgggatga

SEQ ID NO: 3063601 - DNA, 25 bp, Homo sapien
tggaaactccttagacgtctccgct

SEQ ID NO: 3063602 - DNA, 25 bp, Homo sapien
aaaccacgtcagctctttttactat

SEQ ID NO: 3063603 - DNA, 25 bp, Homo sapien
tatccccccccattagagtgtgagc

SEQ ID NO: 3063604 - DNA, 25 bp, Homo sapien
ctgcgcctggtggtctgtgatgtta

SEQ ID NO: 3063605 - DNA, 25 bp, Homo sapien
tgtgatgttaaaccacgtcagctct

SEQ ID NO: 3063606 - DNA, 25 bp, Homo sapien
gtggggctgagggacgggcatggcc

SEQ ID NO: 3063607 - DNA, 25 bp, Homo sapien
gggctgagggacgggcatggccaca

SEQ ID NO: 3063608 - DNA, 25 bp, Homo sapien
gctgagggacgggcatggccacagc

SEQ ID NO: 3063609 - DNA, 25 bp, Homo sapien
tggggctgagggacgggcatggcca

SEQ ID NO: 3063610 - DNA, 25 bp, Homo sapien
cagaaccgagggtgcagaagtcaca

SEQ ID NO: 3063611 - DNA, 25 bp, Homo sapien
gaagtgatcagagctgcctcatgac

SEQ ID NO: 3063612 - DNA, 25 bp, Homo sapien
gaagaagccttgcacagaacaccag

SEQ ID NO: 3063613 - DNA, 25 bp, Homo sapien
cagtaggcgcgatgcaacagagaaa

SEQ ID NO: 3063614 - DNA, 25 bp, Homo sapien
agatgtccgcgcactgctgcaggat

SEQ ID NO: 3063615 - DNA, 25 bp, Homo sapien
ggttctgctcgccgtgctcgatcac

SEQ ID NO: 3063616 - DNA, 25 bp, Homo sapien
gaacacaatggccacgctctgcacc

SEQ ID NO: 3063617 - DNA, 25 bp, Homo sapien
aacaccatggtcatgggcatgctgg

SEQ ID NO: 3063618 - DNA, 25 bp, Homo sapien
tgggtgggttcagggctccgaactg

SEQ ID NO: 3063619 - DNA, 25 bp, Homo sapien
tgggttcagggctccgaactgcgaa

SEQ ID NO: 3063620 - DNA, 25 bp, Homo sapien
ggtgggttcagggctccgaactgcg

SEQ ID NO: 3063621 - DNA, 25 bp, Homo sapien
gtgggttcagggctccgaactgcga

SEQ ID NO: 3063622 - DNA, 25 bp, Homo sapien
tgggggcttcagccgggacctgcct

SEQ ID NO: 3063623 - DNA, 25 bp, Homo sapien
gggggcttcagccgggacctgcctc

SEQ ID NO: 3063624 - DNA, 25 bp, Homo sapien
ctgggggcttcagccgggacctgcc

SEQ ID NO: 3063625 - DNA, 25 bp, Homo sapien
cagaggtgctggaagagcatccgca

SEQ ID NO: 3063626 - DNA, 25 bp, Homo sapien
agagcatccgcagagtgtcgtggtt

SEQ ID NO: 3063627 - DNA, 25 bp, Homo sapien
agagtgtcgtggttgggagcgggca

SEQ ID NO: 3063628 - DNA, 25 bp, Homo sapien
ttgggagcgggcagcgagcgcacca

SEQ ID NO: 3063629 - DNA, 25 bp, Homo sapien
tgccccgccacgcccctaccccatc

SEQ ID NO: 3063630 - DNA, 25 bp, Homo sapien
gaggtagggggtatcggctgggcga

SEQ ID NO: 3063631 - DNA, 25 bp, Homo sapien
aggtagggggtatcggctgggcgag

SEQ ID NO: 3063632 - DNA, 25 bp, Homo sapien
ccgcaatgaactggcggaagtgcga

SEQ ID NO: 3063633 - DNA, 25 bp, Homo sapien
tgataacgtggacgtcctcccagcg

SEQ ID NO: 3063634 - DNA, 25 bp, Homo sapien
tcagggctccggtgataacgtggac

SEQ ID NO: 3063635 - DNA, 25 bp, Homo sapien
atggccgcaatgaactggcggaagt

SEQ ID NO: 3063636 - DNA, 25 bp, Homo sapien
ctgtggcggaggaagggaggaggac

SEQ ID NO: 3063637 - DNA, 25 bp, Homo sapien
gcggtacagcccgtcgatgtccagc

SEQ ID NO: 3063638 - DNA, 25 bp, Homo sapien
gtttccactgatgcggtacagcccg

SEQ ID NO: 3063639 - DNA, 25 bp, Homo sapien
cttatagcgtagcttctggatggtg

SEQ ID NO: 3063640 - DNA, 25 bp, Homo sapien
cgtggtccaccttatagcgtagctt

SEQ ID NO: 3063641 - DNA, 25 bp, Homo sapien
aggcctgcgggcaccccaatgcctg

SEQ ID NO: 3063642 - DNA, 25 bp, Homo sapien
ggaggcgctgatcccgggttcaggg

SEQ ID NO: 3063643 - DNA, 25 bp, Homo sapien
ggctacgggtccctgctatgactcc

SEQ ID NO: 3063644 - DNA, 25 bp, Homo sapien
ctccagcctgcggtcctggcaggag

SEQ ID NO: 3063645 - DNA, 25 bp, Homo sapien
actgctgcacgaagcgtggcacccg

SEQ ID NO: 3063646 - DNA, 25 bp, Homo sapien
cggcgcggatgcactgctgcacgaa

SEQ ID NO: 3063647 - DNA, 25 bp, Homo sapien
cgcgggcctcgacggcgcggatgca

SEQ ID NO: 3063648 - DNA, 25 bp, Homo sapien
gctgcacgaagcgtggcacccggct

SEQ ID NO: 3063649 - DNA, 25 bp, Homo sapien
tctggaggaacttgcggagcttgtg

SEQ ID NO: 3063650 - DNA, 25 bp, Homo sapien
tcccgcagcgactgcagtgtgggcc

SEQ ID NO: 3063651 - DNA, 25 bp, Homo sapien
ttctcccgcagcgactgcagtgtgg

SEQ ID NO: 3063652 - DNA, 25 bp, Homo sapien
tgtgccggaccttgctcaagtcgct

SEQ ID NO: 3063653 - DNA, 25 bp, Homo sapien
ctccaggcccacggggcccagggcg

SEQ ID NO: 3063654 - DNA, 25 bp, Homo sapien
cgctcgacccgaagtccactctgct

SEQ ID NO: 3063655 - DNA, 25 bp, Homo sapien
aagcgctcgctcgacccgaagtcca

SEQ ID NO: 3063656 - DNA, 25 bp, Homo sapien
tgcattcggtcgcgcgtcctcctct

SEQ ID NO: 3063657 - DNA, 25 bp, Homo sapien
tgccagcttcccaagcgctcgctcg

SEQ ID NO: 3063658 - DNA, 25 bp, Homo sapien
gaacattcacctcccttagctgcat

SEQ ID NO: 3063659 - DNA, 25 bp, Homo sapien
aacattcacctcccttagctgcatg

SEQ ID NO: 3063660 - DNA, 25 bp, Homo sapien
acattcacctcccttagctgcatgg

SEQ ID NO: 3063661 - DNA, 25 bp, Homo sapien
caggtcagtagttgtcagagggccc

SEQ ID NO: 3063662 - DNA, 25 bp, Homo sapien
cactggtaccttagagctccctgag

SEQ ID NO: 3063663 - DNA, 25 bp, Homo sapien
tagtttcagcctgccattggttggc

SEQ ID NO: 3063664 - DNA, 25 bp, Homo sapien
tgcctcccgtgaaatgggaacttcc

SEQ ID NO: 3063665 - DNA, 25 bp, Homo sapien
caatggccttatgccaggtgctgat

SEQ ID NO: 3063666 - DNA, 25 bp, Homo sapien
tgccctgagcaatggccttatgcca

SEQ ID NO: 3063667 - DNA, 25 bp, Homo sapien
gatggcctccgagtcgtgctggatc

SEQ ID NO: 3063668 - DNA, 25 bp, Homo sapien
actcagagccatctcggctccgtag

SEQ ID NO: 3063669 - DNA, 25 bp, Homo sapien
gaccccaggacacaacttctagaat

SEQ ID NO: 3063670 - DNA, 25 bp, Homo sapien
tggattggactatctttgctgtcct

SEQ ID NO: 3063671 - DNA, 25 bp, Homo sapien
gacaacagaaactgtctcagacccc

SEQ ID NO: 3063672 - DNA, 25 bp, Homo sapien
acagaaactgtctcagaccccagga

SEQ ID NO: 3063673 - DNA, 25 bp, Homo sapien
tcatatagagggcaaagctgtatca

SEQ ID NO: 3063674 - DNA, 25 bp, Homo sapien
gaggcagataacacagcctcactct

SEQ ID NO: 3063675 - DNA, 25 bp, Homo sapien
ctgctcaagattatcccagagaatg

SEQ ID NO: 3063676 - DNA, 25 bp, Homo sapien
catgatttttggcagctctctcaaa

SEQ ID NO: 3063677 - DNA, 25 bp, Homo sapien
gcacattcttcctactggatttgtc

SEQ ID NO: 3063678 - DNA, 25 bp, Homo sapien
cacattcttcctactggatttgtct

SEQ ID NO: 3063679 - DNA, 25 bp, Homo sapien
cttgaagaatgtcaggacgccaccc

SEQ ID NO: 3063680 - DNA, 25 bp, Homo sapien
agaatgtcaggacgccaccctccag

SEQ ID NO: 3063681 - DNA, 25 bp, Homo sapien
agtccaggaggcactccagtgcttc

SEQ ID NO: 3063682 - DNA, 25 bp, Homo sapien
tgcagccgaggtctttgagtccttg

SEQ ID NO: 3063683 - DNA, 25 bp, Homo sapien
gcgatggagcacccctgccttgtcc

SEQ ID NO: 3063684 - DNA, 25 bp, Homo sapien
gtgcgatggagcacccctgccttgt

SEQ ID NO: 3063685 - DNA, 25 bp, Homo sapien
tgcgatggagcacccctgccttgtc

SEQ ID NO: 3063686 - DNA, 25 bp, Homo sapien
tggcaggagagacttcctcccagct

SEQ ID NO: 3063687 - DNA, 25 bp, Homo sapien
gcaggagagacttcctcccagctcc

SEQ ID NO: 3063688 - DNA, 25 bp, Homo sapien
gtggcaggagagacttcctcccagc

SEQ ID NO: 3063689 - DNA, 25 bp, Homo sapien
tgtggcaggagagacttcctcccag

SEQ ID NO: 3063690 - DNA, 25 bp, Homo sapien
catcctggctggatttatggatgct

SEQ ID NO: 3063691 - DNA, 25 bp, Homo sapien
tggctggatttatggatgcttcgag

SEQ ID NO: 3063692 - DNA, 25 bp, Homo sapien
caccatcctggctggatttatggat

SEQ ID NO: 3063693 - DNA, 25 bp, Homo sapien
ctggctggatttatggatgcttcga

SEQ ID NO: 3063694 - DNA, 25 bp, Homo sapien
gagaaagacacagtcgtatatgatc

SEQ ID NO: 3063695 - DNA, 25 bp, Homo sapien
gtcgtatatgatctcttcctctctc

SEQ ID NO: 3063696 - DNA, 25 bp, Homo sapien
gaaagacacagtcgtatatgatctc

SEQ ID NO: 3063697 - DNA, 25 bp, Homo sapien
gacacagtcgtatatgatctcttcc

SEQ ID NO: 3063698 - DNA, 25 bp, Homo sapien
gggcagctcccatcgaacagaggag

SEQ ID NO: 3063699 - DNA, 25 bp, Homo sapien
ttgtagaagtatggcttcccgtggg

SEQ ID NO: 3063700 - DNA, 25 bp, Homo sapien
gagtcctctggattgtagaagtatg

SEQ ID NO: 3063701 - DNA, 25 bp, Homo sapien
tcccatcgaacagaggagtcctctg

SEQ ID NO: 3063702 - DNA, 25 bp, Homo sapien
actgtgtttggctggtttaggctct

SEQ ID NO: 3063703 - DNA, 25 bp, Homo sapien
cgacctattagtgaggaaggttgtg

SEQ ID NO: 3063704 - DNA, 25 bp, Homo sapien
ctgcggtttagagcactgaggcgac

SEQ ID NO: 3063705 - DNA, 25 bp, Homo sapien
ctctgaggctgtccgggtccatctg

SEQ ID NO: 3063706 - DNA, 25 bp, Homo sapien
tgacatgacaagaccagccgggggg

SEQ ID NO: 3063707 - DNA, 25 bp, Homo sapien
gaagtggttggtgtagagcatctgc

SEQ ID NO: 3063708 - DNA, 25 bp, Homo sapien
gcatctgcttgtcctggctgacatg

SEQ ID NO: 3063709 - DNA, 25 bp, Homo sapien
ctcctgagtgaagtggttggtgtag

SEQ ID NO: 3063710 - DNA, 25 bp, Homo sapien
ctcggggtaactggtcagcgactcg

SEQ ID NO: 3063711 - DNA, 25 bp, Homo sapien
ccacgggagaatagtcctcctcggg

SEQ ID NO: 3063712 - DNA, 25 bp, Homo sapien
cagcgactcggggtagtccgtctcg

SEQ ID NO: 3063713 - DNA, 25 bp, Homo sapien
gagcccacgggagaatagtcctcct

SEQ ID NO: 3063714 - DNA, 25 bp, Homo sapien
ggcgggatcagaggcgctcagaggt

SEQ ID NO: 3063715 - DNA, 25 bp, Homo sapien
caggaggcgggatcagaggcgctca

SEQ ID NO: 3063716 - DNA, 25 bp, Homo sapien
cagaggcgctcagaggtagaaccgc

SEQ ID NO: 3063717 - DNA, 25 bp, Homo sapien
tcagaggtagaaccgcccactctgg

SEQ ID NO: 3063718 - DNA, 25 bp, Homo sapien
ccgcgggtcccctgggctgccaggg

SEQ ID NO: 3063719 - DNA, 25 bp, Homo sapien
tgccagggctcaggcccggctgcat

SEQ ID NO: 3063720 - DNA, 25 bp, Homo sapien
cgcgggtcccctgggctgccagggc

SEQ ID NO: 3063721 - DNA, 25 bp, Homo sapien
ggctgccagggctcaggcccggctg

SEQ ID NO: 3063722 - DNA, 25 bp, Homo sapien
ggctgcctctctatgttcgcgtaca

SEQ ID NO: 3063723 - DNA, 25 bp, Homo sapien
ggttgtagaagaacaccctgcggct

SEQ ID NO: 3063724 - DNA, 25 bp, Homo sapien
caggtggtaactcccgtgtctgggt

SEQ ID NO: 3063725 - DNA, 25 bp, Homo sapien
tcggtctcaaggctcacgtggctgt

SEQ ID NO: 3063726 - DNA, 25 bp, Homo sapien
taacccatgcccagtttcagcaaca

SEQ ID NO: 3063727 - DNA, 25 bp, Homo sapien
atgagcttgagctttctgaggagga

SEQ ID NO: 3063728 - DNA, 25 bp, Homo sapien
aactgcttgtgtacacaagtctaac

SEQ ID NO: 3063729 - DNA, 25 bp, Homo sapien
ttcagcaacaaacatgcctgacatg

SEQ ID NO: 3063730 - DNA, 25 bp, Homo sapien
gatgagctgataaggaacaggctct

SEQ ID NO: 3063731 - DNA, 25 bp, Homo sapien
ttgaaaggctccaccaggggtggat

SEQ ID NO: 3063732 - DNA, 25 bp, Homo sapien
aggaatttctacttggcaggctgtg

SEQ ID NO: 3063733 - DNA, 25 bp, Homo sapien
ggaatttctacttggcaggctgtgg

SEQ ID NO: 3063734 - DNA, 25 bp, Homo sapien
ctgggtccacgaggagtcccaggcc

SEQ ID NO: 3063735 - DNA, 25 bp, Homo sapien
tgggtccacgaggagtcccaggcca

SEQ ID NO: 3063736 - DNA, 25 bp, Homo sapien
tgatggggtcctcacacgaaggaat

SEQ ID NO: 3063737 - DNA, 25 bp, Homo sapien
tcctcacacgaaggaatgtccccag

SEQ ID NO: 3063738 - DNA, 25 bp, Homo sapien
tcctggtcactttggcgattatgtc

SEQ ID NO: 3063739 - DNA, 25 bp, Homo sapien
gtcactttggcgattatgtccacca

SEQ ID NO: 3063740 - DNA, 25 bp, Homo sapien
ggcaaggctcgactctgcctcctgg

SEQ ID NO: 3063741 - DNA, 25 bp, Homo sapien
ctgtgccggcaaggctcgactctgc

SEQ ID NO: 3063742 - DNA, 25 bp, Homo sapien
gcccctctgaactgccgggacagag

SEQ ID NO: 3063743 - DNA, 25 bp, Homo sapien
tggcccctctgaactgccgggacag

SEQ ID NO: 3063744 - DNA, 25 bp, Homo sapien
cccctctgaactgccgggacagagc

SEQ ID NO: 3063745 - DNA, 25 bp, Homo sapien
ctggcccctctgaactgccgggaca

SEQ ID NO: 3063746 - DNA, 25 bp, Homo sapien
gagcccaggggcactaccccagtgc

SEQ ID NO: 3063747 - DNA, 25 bp, Homo sapien
agcccaggggcactaccccagtgct

SEQ ID NO: 3063748 - DNA, 25 bp, Homo sapien
cacagagagaatcacggctgagcct

SEQ ID NO: 3063749 - DNA, 25 bp, Homo sapien
gacaggaaggattctgaccacatca

SEQ ID NO: 3063750 - DNA, 25 bp, Homo sapien
gaaacaagaagttgccgagatggcg

SEQ ID NO: 3063751 - DNA, 25 bp, Homo sapien
tacgtgtacaagtatgcccgtgcct

SEQ ID NO: 3063752 - DNA, 25 bp, Homo sapien
gcttctcttccccagtaggaagctg

SEQ ID NO: 3063753 - DNA, 25 bp, Homo sapien
ctcttccccagtaggaagctgggcc

SEQ ID NO: 3063754 - DNA, 25 bp, Homo sapien
ctgcttctcttccccagtaggaagc

SEQ ID NO: 3063755 - DNA, 25 bp, Homo sapien
ttctcttccccagtaggaagctggg

SEQ ID NO: 3063756 - DNA, 25 bp, Homo sapien
ggtctcccagggggctccagcccca

SEQ ID NO: 3063757 - DNA, 25 bp, Homo sapien
gatgggggtctcccagggggctcca

SEQ ID NO: 3063758 - DNA, 25 bp, Homo sapien
tgggggtctcccagggggctccagc

SEQ ID NO: 3063759 - DNA, 25 bp, Homo sapien
tctcccagggggctccagccccaaa

SEQ ID NO: 3063760 - DNA, 25 bp, Homo sapien
ggctgtagatcaacaactcgcagca

SEQ ID NO: 3063761 - DNA, 25 bp, Homo sapien
tgtagatcaacaactcgcagcacag

SEQ ID NO: 3063762 - DNA, 25 bp, Homo sapien
tagatcaacaactcgcagcacagtc

SEQ ID NO: 3063763 - DNA, 25 bp, Homo sapien
acagtctccaggctcacatagccca

SEQ ID NO: 3063764 - DNA, 25 bp, Homo sapien
tgtagaaacctttcgaattcaactc

SEQ ID NO: 3063765 - DNA, 25 bp, Homo sapien
tagaaacctttcgaattcaactctg

SEQ ID NO: 3063766 - DNA, 25 bp, Homo sapien
gaaacctttcgaattcaactctgcc

SEQ ID NO: 3063767 - DNA, 25 bp, Homo sapien
aaacctttcgaattcaactctgcca

SEQ ID NO: 3063768 - DNA, 25 bp, Homo sapien
tgaggcctgggaagaaagtgagggg

SEQ ID NO: 3063769 - DNA, 25 bp, Homo sapien
ggcctgggaagaaagtgagggggca

SEQ ID NO: 3063770 - DNA, 25 bp, Homo sapien
aggtgggcttgtcctggggcccatc

SEQ ID NO: 3063771 - DNA, 25 bp, Homo sapien
tcctggggcccatcgcaggcccctg

SEQ ID NO: 3063772 - DNA, 25 bp, Homo sapien
tggaacttccctcccagcggccaat

SEQ ID NO: 3063773 - DNA, 25 bp, Homo sapien
atgagggccccgggctccttccagt

SEQ ID NO: 3063774 - DNA, 25 bp, Homo sapien
cgcctccggggctgcttgtataaga

SEQ ID NO: 3063775 - DNA, 25 bp, Homo sapien
ggctgcctgctcatgtgcggcgcct

SEQ ID NO: 3063776 - DNA, 25 bp, Homo sapien
aacgtgctctattttcgatttccca

SEQ ID NO: 3063777 - DNA, 25 bp, Homo sapien
acgtgctctattttcgatttcccag

SEQ ID NO: 3063778 - DNA, 25 bp, Homo sapien
agcagacgcctgactttcacatcca

SEQ ID NO: 3063779 - DNA, 25 bp, Homo sapien
ctcaaagggaagcagacgcctgact

SEQ ID NO: 3063780 - DNA, 25 bp, Homo sapien
aaatgctggaagcaccctcaaaggg

SEQ ID NO: 3063781 - DNA, 25 bp, Homo sapien
cctcacttaaccggacgtctttctg

SEQ ID NO: 3063782 - DNA, 25 bp, Homo sapien
ctgatgagggactgcgggcgtgcac

SEQ ID NO: 3063783 - DNA, 25 bp, Homo sapien
gtgcacccctcacgtttcgcggttg

SEQ ID NO: 3063784 - DNA, 25 bp, Homo sapien
acacctgcagtaggttatataacct

SEQ ID NO: 3063785 - DNA, 25 bp, Homo sapien
gcacacacctgcagtaggttatata

SEQ ID NO: 3063786 - DNA, 25 bp, Homo sapien
cgggcgcggtccctagcgcgccacc

SEQ ID NO: 3063787 - DNA, 25 bp, Homo sapien
acagaggtgggcgtcgtgcccgacg

SEQ ID NO: 3063788 - DNA, 25 bp, Homo sapien
tcatccgaagtcttcggacagaggt

SEQ ID NO: 3063789 - DNA, 25 bp, Homo sapien
tgagcggagcgggtctccttgcgcc

SEQ ID NO: 3063790 - DNA, 25 bp, Homo sapien
gacgtgcaagtcctggatgacctcg

SEQ ID NO: 3063791 - DNA, 25 bp, Homo sapien
tccggcggcgggacgtgcaagtcct

SEQ ID NO: 3063792 - DNA, 25 bp, Homo sapien
cgggacgtgcaagtcctggatgacc

SEQ ID NO: 3063793 - DNA, 25 bp, Homo sapien
gcggcgggacgtgcaagtcctggat

SEQ ID NO: 3063794 - DNA, 25 bp, Homo sapien
cgggccgcaggtacaggcaggctgg

SEQ ID NO: 3063795 - DNA, 25 bp, Homo sapien
cacaaaccggtagtcgtaggcgagc

SEQ ID NO: 3063796 - DNA, 25 bp, Homo sapien
aggtcgttcagggactgcgcgggcc

SEQ ID NO: 3063797 - DNA, 25 bp, Homo sapien
agacggcggcgcaggccaggtcgtt

SEQ ID NO: 3063798 - DNA, 25 bp, Homo sapien
cggcggcagggttgcccagcgcggg

SEQ ID NO: 3063799 - DNA, 25 bp, Homo sapien
gcggcggcggcagggttgcccagcg

SEQ ID NO: 3063800 - DNA, 25 bp, Homo sapien
ggcagctcgcgcacgtactgcgcag

SEQ ID NO: 3063801 - DNA, 25 bp, Homo sapien
cacgtactgcgcaggcaggtagaag

SEQ ID NO: 3063802 - DNA, 25 bp, Homo sapien
cggcgcccgtccttgccggtgtact

SEQ ID NO: 3063803 - DNA, 25 bp, Homo sapien
cgtccttgccggtgtactcgaaggg

SEQ ID NO: 3063804 - DNA, 25 bp, Homo sapien
gcccgtccttgccggtgtactcgaa

SEQ ID NO: 3063805 - DNA, 25 bp, Homo sapien
acgcggcgcccgtccttgccggtgt

SEQ ID NO: 3063806 - DNA, 25 bp, Homo sapien
cgggcaacaagaaggagggccgcgg

SEQ ID NO: 3063807 - DNA, 25 bp, Homo sapien
ctgcgggcaacaagaaggagggccg

SEQ ID NO: 3063808 - DNA, 25 bp, Homo sapien
gccgcggaggtcaagaccaccgagc

SEQ ID NO: 3063809 - DNA, 25 bp, Homo sapien
caacaagaaggagggccgcggaggt

SEQ ID NO: 3063810 - DNA, 25 bp, Homo sapien
gcttgcttaatagttgactgcgcct

SEQ ID NO: 3063811 - DNA, 25 bp, Homo sapien
taagatttgacccttgcttcagtcc

SEQ ID NO: 3063812 - DNA, 25 bp, Homo sapien
gaagaacaccccatttactgccgct

SEQ ID NO: 3063813 - DNA, 25 bp, Homo sapien
ttaggacagcccttcgttctgtggg

SEQ ID NO: 3063814 - DNA, 25 bp, Homo sapien
tgggggctgtcgctgccccccttag

SEQ ID NO: 3063815 - DNA, 25 bp, Homo sapien
cccccttagtccgagggccttgctg

SEQ ID NO: 3063816 - DNA, 25 bp, Homo sapien
ctgtagaggcctccgctgccaatgc

SEQ ID NO: 3063817 - DNA, 25 bp, Homo sapien
gctgccaatgcaggggaaccggttc

SEQ ID NO: 3063818 - DNA, 25 bp, Homo sapien
ggctgggcgggcctcagggagccca

SEQ ID NO: 3063819 - DNA, 25 bp, Homo sapien
gtcggctgggcgggcctcagggagc

SEQ ID NO: 3063820 - DNA, 25 bp, Homo sapien
gggcgggcctcagggagcccatggg

SEQ ID NO: 3063821 - DNA, 25 bp, Homo sapien
tgggcgggcctcagggagcccatgg

SEQ ID NO: 3063822 - DNA, 25 bp, Homo sapien
gcggtggctgcaggttaggccccta

SEQ ID NO: 3063823 - DNA, 25 bp, Homo sapien
ggcggtggctgcaggttaggcccct

SEQ ID NO: 3063824 - DNA, 25 bp, Homo sapien
cggtggctgcaggttaggcccctac

SEQ ID NO: 3063825 - DNA, 25 bp, Homo sapien
catcgccctgggcggggtttccagg

SEQ ID NO: 3063826 - DNA, 25 bp, Homo sapien
cggagctcgatgtctcgggctggat

SEQ ID NO: 3063827 - DNA, 25 bp, Homo sapien
ccaccggagctcgatgtctcgggct

SEQ ID NO: 3063828 - DNA, 25 bp, Homo sapien
gacgcccaccggagctcgatgtctc

SEQ ID NO: 3063829 - DNA, 25 bp, Homo sapien
cccaccggagctcgatgtctcgggc

SEQ ID NO: 3063830 - DNA, 25 bp, Homo sapien
gctcgccggcttcgcctccacttgc

SEQ ID NO: 3063831 - DNA, 25 bp, Homo sapien
ccctcctcgactgtgcggctcccgc

SEQ ID NO: 3063832 - DNA, 25 bp, Homo sapien
ttcgcctccacttgccccggcaggc

SEQ ID NO: 3063833 - DNA, 25 bp, Homo sapien
ctcctcgactgtgcggctcccgcgc

SEQ ID NO: 3063834 - DNA, 25 bp, Homo sapien
aacaatataaccagggaggcaccgg

SEQ ID NO: 3063835 - DNA, 25 bp, Homo sapien
tgcggttgcgagagacaatccccgg

SEQ ID NO: 3063836 - DNA, 25 bp, Homo sapien
ctgcggttgcgagagacaatccccg

SEQ ID NO: 3063837 - DNA, 25 bp, Homo sapien
ccgcaggttcgcctggccagattgc

SEQ ID NO: 3063838 - DNA, 25 bp, Homo sapien
gggccccaaggaacagttgtgcctg

SEQ ID NO: 3063839 - DNA, 25 bp, Homo sapien
cactccagacattacaagccacagc

SEQ ID NO: 3063840 - DNA, 25 bp, Homo sapien
ttgggtgggaagctgaatctggcca

SEQ ID NO: 3063841 - DNA, 25 bp, Homo sapien
aactcccttacctctatatctttgc

SEQ ID NO: 3063842 - DNA, 25 bp, Homo sapien
ctctgagaatctgtgtgtctgagcc

SEQ ID NO: 3063843 - DNA, 25 bp, Homo sapien
gagaatctgtgtgtctgagccttgg

SEQ ID NO: 3063844 - DNA, 25 bp, Homo sapien
gcccacctgtgagtccacacttcct

SEQ ID NO: 3063845 - DNA, 25 bp, Homo sapien
gaatctgtgtgtctgagccttggtg

SEQ ID NO: 3063846 - DNA, 25 bp, Homo sapien
gatttctttcctgtcaatgggatag

SEQ ID NO: 3063847 - DNA, 25 bp, Homo sapien
tctttcctgtcaatgggatagtaac

SEQ ID NO: 3063848 - DNA, 25 bp, Homo sapien
cctgtcaatgggatagtaacaccca

SEQ ID NO: 3063849 - DNA, 25 bp, Homo sapien
tttcctgtcaatgggatagtaacac

SEQ ID NO: 3063850 - DNA, 25 bp, Homo sapien
tcttctccgggcctaccatctactg

SEQ ID NO: 3063851 - DNA, 25 bp, Homo sapien
ttctccgggcctaccatctactgtc

SEQ ID NO: 3063852 - DNA, 25 bp, Homo sapien
cagcaccaggtcacgtgctgtggcc

SEQ ID NO: 3063853 - DNA, 25 bp, Homo sapien
ggcagcaccaggtcacgtgctgtgg

SEQ ID NO: 3063854 - DNA, 25 bp, Homo sapien
tctctgacagtgacatgcggctctc

SEQ ID NO: 3063855 - DNA, 25 bp, Homo sapien
aatgtgggccatggcggtgcataac

SEQ ID NO: 3063856 - DNA, 25 bp, Homo sapien
gagggtctgaccatcactttgaaaa

SEQ ID NO: 3063857 - DNA, 25 bp, Homo sapien
tcatgggtgactcacgtagggtcaa

SEQ ID NO: 3063858 - DNA, 25 bp, Homo sapien
cggaggcgccgggacgctggtgagc

SEQ ID NO: 3063859 - DNA, 25 bp, Homo sapien
gacacggtgagtatcctgggctgat

SEQ ID NO: 3063860 - DNA, 25 bp, Homo sapien
gcctggtgagtaaacggccctgcct

SEQ ID NO: 3063861 - DNA, 25 bp, Homo sapien
ttttaatcaggaatgtggaattgaa

SEQ ID NO: 3063862 - DNA, 25 bp, Homo sapien
tcaggcgaaaatgttctgttcctgg

SEQ ID NO: 3063863 - DNA, 25 bp, Homo sapien
caggcgaaaatgttctgttcctggt

SEQ ID NO: 3063864 - DNA, 25 bp, Homo sapien
ggcgaaaatgttctgttcctggtac

SEQ ID NO: 3063865 - DNA, 25 bp, Homo sapien
aggcgaaaatgttctgttcctggta

SEQ ID NO: 3063866 - DNA, 25 bp, Homo sapien
agctctggtggaagacggtcttgca

SEQ ID NO: 3063867 - DNA, 25 bp, Homo sapien
gctctggtggaagacggtcttgcac

SEQ ID NO: 3063868 - DNA, 25 bp, Homo sapien
ctctggtggaagacggtcttgcact

SEQ ID NO: 3063869 - DNA, 25 bp, Homo sapien
cagctctggtggaagacggtcttgc

SEQ ID NO: 3063870 - DNA, 25 bp, Homo sapien
gcgctgggtgcacaggtcgcagtgg

SEQ ID NO: 3063871 - DNA, 25 bp, Homo sapien
tgcacaggtcgcagtggtagacatg

SEQ ID NO: 3063872 - DNA, 25 bp, Homo sapien
gtgcacaggtcgcagtggtagacat

SEQ ID NO: 3063873 - DNA, 25 bp, Homo sapien
tgggtgcacaggtcgcagtggtaga

SEQ ID NO: 3063874 - DNA, 25 bp, Homo sapien
ggaatccttcatacaccccgtctgc

SEQ ID NO: 3063875 - DNA, 25 bp, Homo sapien
aatccttcatacaccccgtctgcga

SEQ ID NO: 3063876 - DNA, 25 bp, Homo sapien
gaggaatccttcatacaccccgtct

SEQ ID NO: 3063877 - DNA, 25 bp, Homo sapien
atccttcatacaccccgtctgcgat

SEQ ID NO: 3063878 - DNA, 25 bp, Homo sapien
tgttggaggtcagcaacactgaacc

SEQ ID NO: 3063879 - DNA, 25 bp, Homo sapien
gttggaggtcagcaacactgaacct

SEQ ID NO: 3063880 - DNA, 25 bp, Homo sapien
tcagagaggcgctctctgggccagc

SEQ ID NO: 3063881 - DNA, 25 bp, Homo sapien
tcttcagagaggcgctctctgggcc

SEQ ID NO: 3063882 - DNA, 25 bp, Homo sapien
ggccctgaggaggcccggctctggg

SEQ ID NO: 3063883 - DNA, 25 bp, Homo sapien
agtcttcagagaggcgctctctggg

SEQ ID NO: 3063884 - DNA, 25 bp, Homo sapien
gtacagagacgcgttcaccatctgc

SEQ ID NO: 3063885 - DNA, 25 bp, Homo sapien
atgctcgtacagagacgcgttcacc

SEQ ID NO: 3063886 - DNA, 25 bp, Homo sapien
gctcgtacagagacgcgttcaccat

SEQ ID NO: 3063887 - DNA, 25 bp, Homo sapien
acagagacgcgttcaccatctgcag

SEQ ID NO: 3063888 - DNA, 25 bp, Homo sapien
gcctcccaggttcaagagatcctcc

SEQ ID NO: 3063889 - DNA, 25 bp, Homo sapien
tcccaggttcaagagatcctcctac

SEQ ID NO: 3063890 - DNA, 25 bp, Homo sapien
cagctcaccacaatatccgcctccc

SEQ ID NO: 3063891 - DNA, 25 bp, Homo sapien
ctcagctcaccacaatatccgcctc

SEQ ID NO: 3063892 - DNA, 25 bp, Homo sapien
gtgcccagctaggattgtacttttc

SEQ ID NO: 3063893 - DNA, 25 bp, Homo sapien
gaaaaggaagtggcacaaggatgag

SEQ ID NO: 3063894 - DNA, 25 bp, Homo sapien
ccggattagctggattacaaacatg

SEQ ID NO: 3063895 - DNA, 25 bp, Homo sapien
gctaggattgtacttttctagttag

SEQ ID NO: 3063896 - DNA, 25 bp, Homo sapien
aaggagaagccgatctgccgggagc

SEQ ID NO: 3063897 - DNA, 25 bp, Homo sapien
tacaaaggagaagccgatctgccgg

SEQ ID NO: 3063898 - DNA, 25 bp, Homo sapien
ggagaagccgatctgccgggagcag

SEQ ID NO: 3063899 - DNA, 25 bp, Homo sapien
caaaggagaagccgatctgccggga

SEQ ID NO: 3063900 - DNA, 25 bp, Homo sapien
gaagctgtagggcaagcctgatctg

SEQ ID NO: 3063901 - DNA, 25 bp, Homo sapien
actgcctatgagcagggcactggcc

SEQ ID NO: 3063902 - DNA, 25 bp, Homo sapien
gactccctgagcagcgcagtgagta

SEQ ID NO: 3063903 - DNA, 25 bp, Homo sapien
tctgaaagaacaggacggtagagca

SEQ ID NO: 3063904 - DNA, 25 bp, Homo sapien
cagccttggccgtgatgattttgaa

SEQ ID NO: 3063905 - DNA, 25 bp, Homo sapien
gagaaaatatatagggcatccaggt

SEQ ID NO: 3063906 - DNA, 25 bp, Homo sapien
tgcgcagaagcagccttgggagtca

SEQ ID NO: 3063907 - DNA, 25 bp, Homo sapien
tctcccgggtggcaaatttcagcac

SEQ ID NO: 3063908 - DNA, 25 bp, Homo sapien
cagcttcatgagaccccggaatggg

SEQ ID NO: 3063909 - DNA, 25 bp, Homo sapien
ctccacggtgcccagcttcatgaga

SEQ ID NO: 3063910 - DNA, 25 bp, Homo sapien
catgagaccccggaatgggttggac

SEQ ID NO: 3063911 - DNA, 25 bp, Homo sapien
gtgcccagcttcatgagaccccgga

SEQ ID NO: 3063912 - DNA, 25 bp, Homo sapien
ccaactactcaaggacaaggagcag

SEQ ID NO: 3063913 - DNA, 25 bp, Homo sapien
ggcacattagttggcgggcctgtct

SEQ ID NO: 3063914 - DNA, 25 bp, Homo sapien
tatcacatgggaccctgaaagctgg

SEQ ID NO: 3063915 - DNA, 25 bp, Homo sapien
ttctttctgcgtgaggccaaaccct

SEQ ID NO: 3063916 - DNA, 25 bp, Homo sapien
tctacccacacaacccatgccaggg

SEQ ID NO: 3063917 - DNA, 25 bp, Homo sapien
tgccagggctacccacagcaaggcc

SEQ ID NO: 3063918 - DNA, 25 bp, Homo sapien
cacacaacccatgccagggctaccc

SEQ ID NO: 3063919 - DNA, 25 bp, Homo sapien
gggctctacccacacaacccatgcc

SEQ ID NO: 3063920 - DNA, 25 bp, Homo sapien
agctacaggtggaatcaagagtttt

SEQ ID NO: 3063921 - DNA, 25 bp, Homo sapien
tgagctacaggtggaatcaagagtt

SEQ ID NO: 3063922 - DNA, 25 bp, Homo sapien
ctgagctacaggtggaatcaagagt

SEQ ID NO: 3063923 - DNA, 25 bp, Homo sapien
gagctacaggtggaatcaagagttt

SEQ ID NO: 3063924 - DNA, 25 bp, Homo sapien
tgtctccggtgtaccacccggaagc

SEQ ID NO: 3063925 - DNA, 25 bp, Homo sapien
tctccggtgtaccacccggaagctc

SEQ ID NO: 3063926 - DNA, 25 bp, Homo sapien
ctgtctccggtgtaccacccggaag

SEQ ID NO: 3063927 - DNA, 25 bp, Homo sapien
caaggaatgcaaacgagcacctgca

SEQ ID NO: 3063928 - DNA, 25 bp, Homo sapien
caggagtgacatgtctacaagccaa

SEQ ID NO: 3063929 - DNA, 25 bp, Homo sapien
gacagtagaacatgtgtgacagcag

SEQ ID NO: 3063930 - DNA, 25 bp, Homo sapien
ggagcctccagaacgatcagagaat

SEQ ID NO: 3063931 - DNA, 25 bp, Homo sapien
gaatggttttcttgatatctccagc

SEQ ID NO: 3063932 - DNA, 25 bp, Homo sapien
ctagcatttataaggctgtttggaa

SEQ ID NO: 3063933 - DNA, 25 bp, Homo sapien
catttataaggctgtttggaatggt

SEQ ID NO: 3063934 - DNA, 25 bp, Homo sapien
cctcattctagcatttataaggctg

SEQ ID NO: 3063935 - DNA, 25 bp, Homo sapien
acaacaatgaagtgagtcgggaaag

SEQ ID NO: 3063936 - DNA, 25 bp, Homo sapien
gataatataggcaaataccttcaga

SEQ ID NO: 3063937 - DNA, 25 bp, Homo sapien
taaagagttcctacaaatcaacaca

SEQ ID NO: 3063938 - DNA, 25 bp, Homo sapien
taaaagtcaagccttatagactaga

SEQ ID NO: 3063939 - DNA, 25 bp, Homo sapien
cagaaataagcaccgaggttctcca

SEQ ID NO: 3063940 - DNA, 25 bp, Homo sapien
taaacataagccacccaaggaccta

SEQ ID NO: 3063941 - DNA, 25 bp, Homo sapien
accattggccaggataaagagcaac

SEQ ID NO: 3063942 - DNA, 25 bp, Homo sapien
tagaaaactgtttggtggtggtatc

SEQ ID NO: 3063943 - DNA, 25 bp, Homo sapien
agaccactcagggtcactagctggg

SEQ ID NO: 3063944 - DNA, 25 bp, Homo sapien
tattaacactatcactatgcaggga

SEQ ID NO: 3063945 - DNA, 25 bp, Homo sapien
gggaaaccctgtgtcagctgacatt

SEQ ID NO: 3063946 - DNA, 25 bp, Homo sapien
aaacagccgggcttatatctacagc

SEQ ID NO: 3063947 - DNA, 25 bp, Homo sapien
ggactggtgggtgaggaaactacca

SEQ ID NO: 3063948 - DNA, 25 bp, Homo sapien
gactggtgggtgaggaaactaccag

SEQ ID NO: 3063949 - DNA, 25 bp, Homo sapien
tgcacgtggacaccatcttgagttc

SEQ ID NO: 3063950 - DNA, 25 bp, Homo sapien
tcttggctcagtccgttggttggca

SEQ ID NO: 3063951 - DNA, 25 bp, Homo sapien
tgacagtactagaaggctgctggcc

SEQ ID NO: 3063952 - DNA, 25 bp, Homo sapien
tgctggcctgaggtgctctctacag

SEQ ID NO: 3063953 - DNA, 25 bp, Homo sapien
agctgttctaagtccactttctcca

SEQ ID NO: 3063954 - DNA, 25 bp, Homo sapien
aatgtactctgacctattagtttcc

SEQ ID NO: 3063955 - DNA, 25 bp, Homo sapien
gatgaagacaacaatattttacact

SEQ ID NO: 3063956 - DNA, 25 bp, Homo sapien
tctgtgaagtcacactcttatgcgt

SEQ ID NO: 3063957 - DNA, 25 bp, Homo sapien
gatgaactggccgtgtccaggctga

SEQ ID NO: 3063958 - DNA, 25 bp, Homo sapien
tcttatggcccgagtgatggacttc

SEQ ID NO: 3063959 - DNA, 25 bp, Homo sapien
ttcaggtagcactccatcaggccat

SEQ ID NO: 3063960 - DNA, 25 bp, Homo sapien
gattccttccgctgtagttctgcac

SEQ ID NO: 3063961 - DNA, 25 bp, Homo sapien
catggtgttggcatctccgtcttca

SEQ ID NO: 3063962 - DNA, 25 bp, Homo sapien
gttggcatctccgtcttcactagtg

SEQ ID NO: 3063963 - DNA, 25 bp, Homo sapien
gcatctccgtcttcactagtgacca

SEQ ID NO: 3063964 - DNA, 25 bp, Homo sapien
tgcacatggtgttggcatctccgtc

SEQ ID NO: 3063965 - DNA, 25 bp, Homo sapien
caggcttctgccctagctctggagg

SEQ ID NO: 3063966 - DNA, 25 bp, Homo sapien
cctcatggagtcagtttgtgcagct

SEQ ID NO: 3063967 - DNA, 25 bp, Homo sapien
tctgccctagctctggagggtcctg

SEQ ID NO: 3063968 - DNA, 25 bp, Homo sapien
gctgttgttagaaggctgggttggc

SEQ ID NO: 3063969 - DNA, 25 bp, Homo sapien
tgggggtccagtccattctccacca

SEQ ID NO: 3063970 - DNA, 25 bp, Homo sapien
cgggatggcagcctgggggtccagt

SEQ ID NO: 3063971 - DNA, 25 bp, Homo sapien
ggtccagtccattctccaccactga

SEQ ID NO: 3063972 - DNA, 25 bp, Homo sapien
gtccattctccaccactgaaagcat

SEQ ID NO: 3063973 - DNA, 25 bp, Homo sapien
gctccctcagagaatcacatgacac

SEQ ID NO: 3063974 - DNA, 25 bp, Homo sapien
tgctccctcagagaatcacatgaca

SEQ ID NO: 3063975 - DNA, 25 bp, Homo sapien
ccctaaatggtggaaggtgctctga

SEQ ID NO: 3063976 - DNA, 25 bp, Homo sapien
gggaacattaaggccagtgtggcag

SEQ ID NO: 3063977 - DNA, 25 bp, Homo sapien
aaggtgctctgattggatctctggc

SEQ ID NO: 3063978 - DNA, 25 bp, Homo sapien
ggcaggctggccctaaatggtggaa

SEQ ID NO: 3063979 - DNA, 25 bp, Homo sapien
gctttgtgtctcttgactgtgggga

SEQ ID NO: 3063980 - DNA, 25 bp, Homo sapien
gaatcagaaggaggctttgtgtctc

SEQ ID NO: 3063981 - DNA, 25 bp, Homo sapien
ctttgtgtctcttgactgtggggac

SEQ ID NO: 3063982 - DNA, 25 bp, Homo sapien
ggaatcagaaggaggctttgtgtct

SEQ ID NO: 3063983 - DNA, 25 bp, Homo sapien
tgaagagaggtgtggcttcaaggag

SEQ ID NO: 3063984 - DNA, 25 bp, Homo sapien
gattctgaatctaccatcctatgga

SEQ ID NO: 3063985 - DNA, 25 bp, Homo sapien
aaacgctcttcattgacacaaagaa

SEQ ID NO: 3063986 - DNA, 25 bp, Homo sapien
cactttctgtcctcaaaacgctctt

SEQ ID NO: 3063987 - DNA, 25 bp, Homo sapien
cgacgatgcggtctctcggccactg

SEQ ID NO: 3063988 - DNA, 25 bp, Homo sapien
agcctccgagccgacgatgcggtct

SEQ ID NO: 3063989 - DNA, 25 bp, Homo sapien
cgagccgacgatgcggtctctcggc

SEQ ID NO: 3063990 - DNA, 25 bp, Homo sapien
gatgcggtctctcggccactgacaa

SEQ ID NO: 3063991 - DNA, 25 bp, Homo sapien
aggtccctttgggtggcagtagata

SEQ ID NO: 3063992 - DNA, 25 bp, Homo sapien
gaggtccctttgggtggcagtagat

SEQ ID NO: 3063993 - DNA, 25 bp, Homo sapien
ggtccctttgggtggcagtagatac

SEQ ID NO: 3063994 - DNA, 25 bp, Homo sapien
cccatggtggagtcttcatagtgac

SEQ ID NO: 3063995 - DNA, 25 bp, Homo sapien
ggtggagtcttcatagtgacagaca

SEQ ID NO: 3063996 - DNA, 25 bp, Homo sapien
ctgatggcgacccatggtggagtct

SEQ ID NO: 3063997 - DNA, 25 bp, Homo sapien
cgacccatggtggagtcttcatagt

SEQ ID NO: 3063998 - DNA, 25 bp, Homo sapien
aacggagccccctggccgatccgca

SEQ ID NO: 3063999 - DNA, 25 bp, Homo sapien
ccttctctggtgcagccgctgcttc

SEQ ID NO: 3064000 - DNA, 25 bp, Homo sapien
tcagcctccgcccaaaaggaacgga

SEQ ID NO: 3064001 - DNA, 25 bp, Homo sapien
cacccagagggccttctctggtgca

SEQ ID NO: 3064002 - DNA, 25 bp, Homo sapien
ccaagagcagaaccacggctggctc

SEQ ID NO: 3064003 - DNA, 25 bp, Homo sapien
caagagcagaaccacggctggctcc

SEQ ID NO: 3064004 - DNA, 25 bp, Homo sapien
cgaccaagagcagaaccacggctgg

SEQ ID NO: 3064005 - DNA, 25 bp, Homo sapien
accaagagcagaaccacggctggct

SEQ ID NO: 3064006 - DNA, 25 bp, Homo sapien
tcacttaagagctggctgtctgagc

SEQ ID NO: 3064007 - DNA, 25 bp, Homo sapien
gaaactctgggcttagacaaaactg

SEQ ID NO: 3064008 - DNA, 25 bp, Homo sapien
gcagccctaggcagtcatgttttgt

SEQ ID NO: 3064009 - DNA, 25 bp, Homo sapien
gctcaattgaggacaaactgggcaa

SEQ ID NO: 3064010 - DNA, 25 bp, Homo sapien
ttaactctttgatggcaaccatggc

SEQ ID NO: 3064011 - DNA, 25 bp, Homo sapien
tagtgcttagcgctgtacctggacc

SEQ ID NO: 3064012 - DNA, 25 bp, Homo sapien
cagtggaaggatctctagtgttggc

SEQ ID NO: 3064013 - DNA, 25 bp, Homo sapien
cctacagcagggcagtagaatggtt

SEQ ID NO: 3064014 - DNA, 25 bp, Homo sapien
gagaggtagccccaccagtgtgttt

SEQ ID NO: 3064015 - DNA, 25 bp, Homo sapien
ttgtaaatggtagcgctgctctgcc

SEQ ID NO: 3064016 - DNA, 25 bp, Homo sapien
tgcagttatggatgagcgtcagccg

SEQ ID NO: 3064017 - DNA, 25 bp, Homo sapien
cccacggtttagcatcaagtaagca

SEQ ID NO: 3064018 - DNA, 25 bp, Homo sapien
gattatttactcttgtggcactgag

SEQ ID NO: 3064019 - DNA, 25 bp, Homo sapien
ccagggtccctgttgaggatctcgt

SEQ ID NO: 3064020 - DNA, 25 bp, Homo sapien
ttgaggatctcgtcctcattagatg

SEQ ID NO: 3064021 - DNA, 25 bp, Homo sapien
cagcttccatgcgtgattatttact

SEQ ID NO: 3064022 - DNA, 25 bp, Homo sapien
gagcggccgtctgaatgaaaaaagt

SEQ ID NO: 3064023 - DNA, 25 bp, Homo sapien
ctttaagccagagcggccgtctgaa

SEQ ID NO: 3064024 - DNA, 25 bp, Homo sapien
gccagagcggccgtctgaatgaaaa

SEQ ID NO: 3064025 - DNA, 25 bp, Homo sapien
cagagcggccgtctgaatgaaaaaa

SEQ ID NO: 3064026 - DNA, 25 bp, Homo sapien
cacagcaatgaatcctccaatgtac

SEQ ID NO: 3064027 - DNA, 25 bp, Homo sapien
ccttcgtgaagagcatctcctccgt

SEQ ID NO: 3064028 - DNA, 25 bp, Homo sapien
actctcccttcgtgaagagcatctc

SEQ ID NO: 3064029 - DNA, 25 bp, Homo sapien
cgtgaagagcatctcctccgtggca

SEQ ID NO: 3064030 - DNA, 25 bp, Homo sapien
catctcctccgtggcagaaacctga

SEQ ID NO: 3064031 - DNA, 25 bp, Homo sapien
cttgtaatgaccttcggtgacaaca

SEQ ID NO: 3064032 - DNA, 25 bp, Homo sapien
tcttgtaatgaccttcggtgacaac

SEQ ID NO: 3064033 - DNA, 25 bp, Homo sapien
ttcttgtaatgaccttcggtgacaa

SEQ ID NO: 3064034 - DNA, 25 bp, Homo sapien
tccttgctatcttgcgggggattgg

SEQ ID NO: 3064035 - DNA, 25 bp, Homo sapien
ggccccatgtaatttaagtcatcac

SEQ ID NO: 3064036 - DNA, 25 bp, Homo sapien
agtcatccttgctatcttgcggggg

SEQ ID NO: 3064037 - DNA, 25 bp, Homo sapien
gaattgcatactgtgtaacactgct

SEQ ID NO: 3064038 - DNA, 25 bp, Homo sapien
cagtggctatctacaaaatcaagaa

SEQ ID NO: 3064039 - DNA, 25 bp, Homo sapien
tcaatacagtggctatctacaaaat

SEQ ID NO: 3064040 - DNA, 25 bp, Homo sapien
tacagtggctatctacaaaatcaag

SEQ ID NO: 3064041 - DNA, 25 bp, Homo sapien
aattcaatacagtggctatctacaa

SEQ ID NO: 3064042 - DNA, 25 bp, Homo sapien
tagagtatgagacgttccccctcgc

SEQ ID NO: 3064043 - DNA, 25 bp, Homo sapien
ctagagtatgagacgttccccctcg

SEQ ID NO: 3064044 - DNA, 25 bp, Homo sapien
agagggtctaggctcaagagggcta

SEQ ID NO: 3064045 - DNA, 25 bp, Homo sapien
tctaggctcaagagggctagagtat

SEQ ID NO: 3064046 - DNA, 25 bp, Homo sapien
agagatctggaagcgaggatctttt

SEQ ID NO: 3064047 - DNA, 25 bp, Homo sapien
cagagatctggaagcgaggatcttt

SEQ ID NO: 3064048 - DNA, 25 bp, Homo sapien
acagagatctggaagcgaggatctt

SEQ ID NO: 3064049 - DNA, 25 bp, Homo sapien
ccacacaaaaacaggactgcattct

SEQ ID NO: 3064050 - DNA, 25 bp, Homo sapien
gaatccacacaaaaacaggactgca

SEQ ID NO: 3064051 - DNA, 25 bp, Homo sapien
ggttttcagtttgtgagctctgaat

SEQ ID NO: 3064052 - DNA, 25 bp, Homo sapien
cacaaaaacaggactgcattctgaa

SEQ ID NO: 3064053 - DNA, 25 bp, Homo sapien
cagtatagccgtatcctggaacttc

SEQ ID NO: 3064054 - DNA, 25 bp, Homo sapien
aaatcattagtatttcagtcacaat

SEQ ID NO: 3064055 - DNA, 25 bp, Homo sapien
gagtttgtcagtatagccgtatcct

SEQ ID NO: 3064056 - DNA, 25 bp, Homo sapien
tcattagtatttcagtcacaattaa

SEQ ID NO: 3064057 - DNA, 25 bp, Homo sapien
aaagtgggagatcactgtcatgacc

SEQ ID NO: 3064058 - DNA, 25 bp, Homo sapien
gcctacagttcatcttgtgccctaa

SEQ ID NO: 3064059 - DNA, 25 bp, Homo sapien
tgcaatcaccgttcactagactcga

SEQ ID NO: 3064060 - DNA, 25 bp, Homo sapien
tgtcatgaccaaagttacatggcca

SEQ ID NO: 3064061 - DNA, 25 bp, Homo sapien
gtagttctcagtcttccattggtcc

SEQ ID NO: 3064062 - DNA, 25 bp, Homo sapien
gggccccagagcagtccatcttcaa

SEQ ID NO: 3064063 - DNA, 25 bp, Homo sapien
cgtatcccattctatctcagatgcc

SEQ ID NO: 3064064 - DNA, 25 bp, Homo sapien
tgggcttccgtgctctcattaatgt

SEQ ID NO: 3064065 - DNA, 25 bp, Homo sapien
tgtgaaattggtttagaagccttca

SEQ ID NO: 3064066 - DNA, 25 bp, Homo sapien
gaaattggtttagaagccttcatat

SEQ ID NO: 3064067 - DNA, 25 bp, Homo sapien
gaatgtgaaattggtttagaagcct

SEQ ID NO: 3064068 - DNA, 25 bp, Homo sapien
tctggaatgtgaaattggtttagaa

SEQ ID NO: 3064069 - DNA, 25 bp, Homo sapien
gctggaggtagaaggcgcgcccttg

SEQ ID NO: 3064070 - DNA, 25 bp, Homo sapien
ggcagtttaatgaacggtagtaaca

SEQ ID NO: 3064071 - DNA, 25 bp, Homo sapien
ctgtggttggcagtttaatgaacgg

SEQ ID NO: 3064072 - DNA, 25 bp, Homo sapien
gttggcagtttaatgaacggtagta

SEQ ID NO: 3064073 - DNA, 25 bp, Homo sapien
tggttggcagtttaatgaacggtag

SEQ ID NO: 3064074 - DNA, 25 bp, Homo sapien
gaaatatggcaaatgtaacttagtg

SEQ ID NO: 3064075 - DNA, 25 bp, Homo sapien
gagaaatatggcaaatgtaacttag

SEQ ID NO: 3064076 - DNA, 25 bp, Homo sapien
tgagaaatatggcaaatgtaactta

SEQ ID NO: 3064077 - DNA, 25 bp, Homo sapien
aatatggcaaatgtaacttagtgca

SEQ ID NO: 3064078 - DNA, 25 bp, Homo sapien
tcgtcattggtgtctagctgctcac

SEQ ID NO: 3064079 - DNA, 25 bp, Homo sapien
ctcgtcattggtgtctagctgctca

SEQ ID NO: 3064080 - DNA, 25 bp, Homo sapien
tctcgtcattggtgtctagctgctc

SEQ ID NO: 3064081 - DNA, 25 bp, Homo sapien
tctgagggctcctccggctcaacag

SEQ ID NO: 3064082 - DNA, 25 bp, Homo sapien
cagctcagtgcttgtgtaattcttc

SEQ ID NO: 3064083 - DNA, 25 bp, Homo sapien
ctgagggctcctccggctcaacagt

SEQ ID NO: 3064084 - DNA, 25 bp, Homo sapien
ggctcaacagtcagctcagtgcttg

SEQ ID NO: 3064085 - DNA, 25 bp, Homo sapien
tgcatcagtccatagctgtacaccc

SEQ ID NO: 3064086 - DNA, 25 bp, Homo sapien
tgggatgggatgcatcagtccatag

SEQ ID NO: 3064087 - DNA, 25 bp, Homo sapien
gatgggatgcatcagtccatagctg

SEQ ID NO: 3064088 - DNA, 25 bp, Homo sapien
ggatgcatcagtccatagctgtaca

SEQ ID NO: 3064089 - DNA, 25 bp, Homo sapien
cagagatctggaagcgaggatcttt

SEQ ID NO: 3064090 - DNA, 25 bp, Homo sapien
agagatctggaagcgaggatctttt

SEQ ID NO: 3064091 - DNA, 25 bp, Homo sapien
acagagatctggaagcgaggatctt

SEQ ID NO: 3064092 - DNA, 25 bp, Homo sapien
cagtatagccgtatcctggaacttc

SEQ ID NO: 3064093 - DNA, 25 bp, Homo sapien
aaatcattagtatttcagtcacaat

SEQ ID NO: 3064094 - DNA, 25 bp, Homo sapien
gagtttgtcagtatagccgtatcct

SEQ ID NO: 3064095 - DNA, 25 bp, Homo sapien
tcattagtatttcagtcacaattaa

SEQ ID NO: 3064096 - DNA, 25 bp, Homo sapien
aaagtgggagatcactgtcatgacc

SEQ ID NO: 3064097 - DNA, 25 bp, Homo sapien
gcctacagttcatcttgtgccctaa

SEQ ID NO: 3064098 - DNA, 25 bp, Homo sapien
tgcaatcaccgttcactagactcga

SEQ ID NO: 3064099 - DNA, 25 bp, Homo sapien
tgtcatgaccaaagttacatggcca

SEQ ID NO: 3064100 - DNA, 25 bp, Homo sapien
ctgggcttccgtgctctcattaatg

SEQ ID NO: 3064101 - DNA, 25 bp, Homo sapien
tctcattaatgtagttctcagtctt

SEQ ID NO: 3064102 - DNA, 25 bp, Homo sapien
ccgtgctctcattaatgtagttctc

SEQ ID NO: 3064103 - DNA, 25 bp, Homo sapien
gcttccgtgctctcattaatgtagt

SEQ ID NO: 3064104 - DNA, 25 bp, Homo sapien
aggtcacttgcacatgggccccaga

SEQ ID NO: 3064105 - DNA, 25 bp, Homo sapien
tatctcagatgcctttacttcctgc

SEQ ID NO: 3064106 - DNA, 25 bp, Homo sapien
ccgtatcccattctatctcagatgc

SEQ ID NO: 3064107 - DNA, 25 bp, Homo sapien
gggccccagagcagtccatcttcaa

SEQ ID NO: 3064108 - DNA, 25 bp, Homo sapien
cacattgttgttggggataagggac

SEQ ID NO: 3064109 - DNA, 25 bp, Homo sapien
attgttgttggggataagggactgt

SEQ ID NO: 3064110 - DNA, 25 bp, Homo sapien
gagccttctcacattgttgttgggg

SEQ ID NO: 3064111 - DNA, 25 bp, Homo sapien
tgttggggataagggactgtagctg

SEQ ID NO: 3064112 - DNA, 25 bp, Homo sapien
gctcgggggacaggtcagtgcccac

SEQ ID NO: 3064113 - DNA, 25 bp, Homo sapien
ctgagcaatgggtaattgaagcttt

SEQ ID NO: 3064114 - DNA, 25 bp, Homo sapien
cttttgggctcgggggacaggtcag

SEQ ID NO: 3064115 - DNA, 25 bp, Homo sapien
tgggtaattgaagcttttgggctcg

SEQ ID NO: 3064116 - DNA, 25 bp, Homo sapien
agatggtgacttctggcatgttagt

SEQ ID NO: 3064117 - DNA, 25 bp, Homo sapien
tatattagtggtttctataaaatgt

SEQ ID NO: 3064118 - DNA, 25 bp, Homo sapien
cttgcagttgtgtcttttatattag

SEQ ID NO: 3064119 - DNA, 25 bp, Homo sapien
gacttctggcatgttagtgttttcc

SEQ ID NO: 3064120 - DNA, 25 bp, Homo sapien
gagcatcagtctactcagataactt

SEQ ID NO: 3064121 - DNA, 25 bp, Homo sapien
agcatcagtctactcagataacttt

SEQ ID NO: 3064122 - DNA, 25 bp, Homo sapien
gcatcagtctactcagataactttt

SEQ ID NO: 3064123 - DNA, 25 bp, Homo sapien
catcagtctactcagataacttttc

SEQ ID NO: 3064124 - DNA, 25 bp, Homo sapien
tgtgaaagcggtatttttttctgga

SEQ ID NO: 3064125 - DNA, 25 bp, Homo sapien
agcgagttttgtgaaagcggtattt

SEQ ID NO: 3064126 - DNA, 25 bp, Homo sapien
gcggagcgagttttgtgaaagcggt

SEQ ID NO: 3064127 - DNA, 25 bp, Homo sapien
gagcgagttttgtgaaagcggtatt

SEQ ID NO: 3064128 - DNA, 25 bp, Homo sapien
gctggaggtagaaggcgcgcccttg

SEQ ID NO: 3064129 - DNA, 25 bp, Homo sapien
ccctcctgatgctctgccttcccac

SEQ ID NO: 3064130 - DNA, 25 bp, Homo sapien
ttccctcctgatgctctgccttccc

SEQ ID NO: 3064131 - DNA, 25 bp, Homo sapien
tgttccctcctgatgctctgccttc

SEQ ID NO: 3064132 - DNA, 25 bp, Homo sapien
cctgttccctcctgatgctctgcct

SEQ ID NO: 3064133 - DNA, 25 bp, Homo sapien
cggttttggcctacagtttgaatct

SEQ ID NO: 3064134 - DNA, 25 bp, Homo sapien
ctctattcactttttgccggttttg

SEQ ID NO: 3064135 - DNA, 25 bp, Homo sapien
tgaggactctattcactttttgccg

SEQ ID NO: 3064136 - DNA, 25 bp, Homo sapien
gcccatgaggactctattcactttt

SEQ ID NO: 3064137 - DNA, 25 bp, Homo sapien
ctgtggttggcagtttaatgaacgg

SEQ ID NO: 3064138 - DNA, 25 bp, Homo sapien
ggcagtttaatgaacggtagtaaca

SEQ ID NO: 3064139 - DNA, 25 bp, Homo sapien
gttggcagtttaatgaacggtagta

SEQ ID NO: 3064140 - DNA, 25 bp, Homo sapien
tggttggcagtttaatgaacggtag

SEQ ID NO: 3064141 - DNA, 25 bp, Homo sapien
gaaatatggcaaatgtaacttagtg

SEQ ID NO: 3064142 - DNA, 25 bp, Homo sapien
gagaaatatggcaaatgtaacttag

SEQ ID NO: 3064143 - DNA, 25 bp, Homo sapien
tgagaaatatggcaaatgtaactta

SEQ ID NO: 3064144 - DNA, 25 bp, Homo sapien
aatatggcaaatgtaacttagtgca

SEQ ID NO: 3064145 - DNA, 25 bp, Homo sapien
ctcgtcattggtgtctagctgctca

SEQ ID NO: 3064146 - DNA, 25 bp, Homo sapien
tctcgtcattggtgtctagctgctc

SEQ ID NO: 3064147 - DNA, 25 bp, Homo sapien
tcgtcattggtgtctagctgctcac

SEQ ID NO: 3064148 - DNA, 25 bp, Homo sapien
ctgagggctcctccggctcaacagt

SEQ ID NO: 3064149 - DNA, 25 bp, Homo sapien
tctgagggctcctccggctcaacag

SEQ ID NO: 3064150 - DNA, 25 bp, Homo sapien
ggctcaacagtcagctcagtgcttg

SEQ ID NO: 3064151 - DNA, 25 bp, Homo sapien
cagctcagtgcttgtgtaattcttc

SEQ ID NO: 3064152 - DNA, 25 bp, Homo sapien
ggattccctacagattcttcttcag

SEQ ID NO: 3064153 - DNA, 25 bp, Homo sapien
ttctggattccctacagattcttct

SEQ ID NO: 3064154 - DNA, 25 bp, Homo sapien
gaatgctccttctggattccctaca

SEQ ID NO: 3064155 - DNA, 25 bp, Homo sapien
aatgctccttctggattccctacag

SEQ ID NO: 3064156 - DNA, 25 bp, Homo sapien
tgaaagatgatgggatgggatgcat

SEQ ID NO: 3064157 - DNA, 25 bp, Homo sapien
cttggaacattccatagtgtgacat

SEQ ID NO: 3064158 - DNA, 25 bp, Homo sapien
ctacttggaacattccatagtgtga

SEQ ID NO: 3064159 - DNA, 25 bp, Homo sapien
tggaacattccatagtgtgacatag

SEQ ID NO: 3064160 - DNA, 25 bp, Homo sapien
gaacattccatagtgtgacatagag

SEQ ID NO: 3064161 - DNA, 25 bp, Homo sapien
agacagcctcaatgctgtttttaag

SEQ ID NO: 3064162 - DNA, 25 bp, Homo sapien
gcactgttgcaatgcagcttgactg

SEQ ID NO: 3064163 - DNA, 25 bp, Homo sapien
ggcagcaggccatatggctaggtaa

SEQ ID NO: 3064164 - DNA, 25 bp, Homo sapien
tgtatggtgtttgtcagacatgcac

SEQ ID NO: 3064165 - DNA, 25 bp, Homo sapien
ctgggctggatgcttgtcttttatc

SEQ ID NO: 3064166 - DNA, 25 bp, Homo sapien
actatgagcgctttgagggcagaga

SEQ ID NO: 3064167 - DNA, 25 bp, Homo sapien
cacttgtgaggctcctggactatga

SEQ ID NO: 3064168 - DNA, 25 bp, Homo sapien
gcatgtaatcacctgtccacttgtg

SEQ ID NO: 3064169 - DNA, 25 bp, Homo sapien
ttcctggactcgaaggatccttctt

SEQ ID NO: 3064170 - DNA, 25 bp, Homo sapien
actcgaaggatccttcttcctttgc

SEQ ID NO: 3064171 - DNA, 25 bp, Homo sapien
tgctctattcctgaactgggctggt

SEQ ID NO: 3064172 - DNA, 25 bp, Homo sapien
tattcctgaactgggctggtacacc

SEQ ID NO: 3064173 - DNA, 25 bp, Homo sapien
tcttgcgaagttacccagggtggtc

SEQ ID NO: 3064174 - DNA, 25 bp, Homo sapien
gcgaagttacccagggtggtcttga

SEQ ID NO: 3064175 - DNA, 25 bp, Homo sapien
tgcgaagttacccagggtggtcttg

SEQ ID NO: 3064176 - DNA, 25 bp, Homo sapien
cttgcgaagttacccagggtggtct

SEQ ID NO: 3064177 - DNA, 25 bp, Homo sapien
tacagcaagccgaaggaagaatggg

SEQ ID NO: 3064178 - DNA, 25 bp, Homo sapien
cacatcatcaagcttactaacatac

SEQ ID NO: 3064179 - DNA, 25 bp, Homo sapien
tctcagagacctgtttgtggaacac

SEQ ID NO: 3064180 - DNA, 25 bp, Homo sapien
tggcacattacagcaagccgaagga

SEQ ID NO: 3064181 - DNA, 25 bp, Homo sapien
aatgtaagagccaaaacgataagac

SEQ ID NO: 3064182 - DNA, 25 bp, Homo sapien
tcatgaccttaaattagacaacagt

SEQ ID NO: 3064183 - DNA, 25 bp, Homo sapien
cacacgattataagaattgatgcaa

SEQ ID NO: 3064184 - DNA, 25 bp, Homo sapien
atgaaagggacacagcctgatttaa

SEQ ID NO: 3064185 - DNA, 25 bp, Homo sapien
ccagctgtgagcctgtatcttaatc

SEQ ID NO: 3064186 - DNA, 25 bp, Homo sapien
agtcctgagaataaccttgaagaag

SEQ ID NO: 3064187 - DNA, 25 bp, Homo sapien
tagctgggatcatagatgcccgtcc

SEQ ID NO: 3064188 - DNA, 25 bp, Homo sapien
aagaagactcccttgcaatgagcaa

SEQ ID NO: 3064189 - DNA, 25 bp, Homo sapien
gcctctccgaatcagagaagaagct

SEQ ID NO: 3064190 - DNA, 25 bp, Homo sapien
taccgctatgtaaaggaagctgatg

SEQ ID NO: 3064191 - DNA, 25 bp, Homo sapien
taccaaaacatgatgacaataccct

SEQ ID NO: 3064192 - DNA, 25 bp, Homo sapien
tgccaggattccagtacataccaaa

SEQ ID NO: 3064193 - DNA, 25 bp, Homo sapien
gccagcagaatccagttaagtccac

SEQ ID NO: 3064194 - DNA, 25 bp, Homo sapien
actttgatagttagccgcctggtcc

SEQ ID NO: 3064195 - DNA, 25 bp, Homo sapien
gtttgactttactgcgcttgggcca

SEQ ID NO: 3064196 - DNA, 25 bp, Homo sapien
tcatcatcgatcaaccacagctggg

SEQ ID NO: 3064197 - DNA, 25 bp, Homo sapien
tcagaactaggacaagcagaggagg

SEQ ID NO: 3064198 - DNA, 25 bp, Homo sapien
gcagaggaggtcatatataagctac

SEQ ID NO: 3064199 - DNA, 25 bp, Homo sapien
tataagctacgtaagtctcttggcc

SEQ ID NO: 3064200 - DNA, 25 bp, Homo sapien
tgcccatgctataggtcagaactag

SEQ ID NO: 3064201 - DNA, 25 bp, Homo sapien
gctgagttctgtaattacattgcaa

SEQ ID NO: 3064202 - DNA, 25 bp, Homo sapien
ctgagttctgtaattacattgcaac

SEQ ID NO: 3064203 - DNA, 25 bp, Homo sapien
agctgagttctgtaattacattgca

SEQ ID NO: 3064204 - DNA, 25 bp, Homo sapien
caaatgtatgtctttcaatagactg

SEQ ID NO: 3064205 - DNA, 25 bp, Homo sapien
gtagtggttcaaatgtatgtctttc

SEQ ID NO: 3064206 - DNA, 25 bp, Homo sapien
tcaatagactgtattttattgcagg

SEQ ID NO: 3064207 - DNA, 25 bp, Homo sapien
cttcaaaaatggtagtggttcaaat

SEQ ID NO: 3064208 - DNA, 25 bp, Homo sapien
aacgttgtctggctgatatctccat

SEQ ID NO: 3064209 - DNA, 25 bp, Homo sapien
gtaacgttgtctggctgatatctcc

SEQ ID NO: 3064210 - DNA, 25 bp, Homo sapien
ggtgtaacgttgtctggctgatatc

SEQ ID NO: 3064211 - DNA, 25 bp, Homo sapien
atggtgtaacgttgtctggctgata

SEQ ID NO: 3064212 - DNA, 25 bp, Homo sapien
tctcctttaggcaaccatctgaagt

SEQ ID NO: 3064213 - DNA, 25 bp, Homo sapien
ggctgagaccctatacaaacttaca

SEQ ID NO: 3064214 - DNA, 25 bp, Homo sapien
caaggttcatatgggtgtcagtcac

SEQ ID NO: 3064215 - DNA, 25 bp, Homo sapien
tatgggccacatatgatctctcgca

SEQ ID NO: 3064216 - DNA, 25 bp, Homo sapien
aatactggagggatagcaggccttc

SEQ ID NO: 3064217 - DNA, 25 bp, Homo sapien
actggagggatagcaggccttcaaa

SEQ ID NO: 3064218 - DNA, 25 bp, Homo sapien
ggccttcaaatgaatccttgtgtaa

SEQ ID NO: 3064219 - DNA, 25 bp, Homo sapien
gtgtaattcagtcaagttattttct

SEQ ID NO: 3064220 - DNA, 25 bp, Homo sapien
tctagatcacaaaatcccttttaga

SEQ ID NO: 3064221 - DNA, 25 bp, Homo sapien
tatttcatgcctcctctctagatca

SEQ ID NO: 3064222 - DNA, 25 bp, Homo sapien
tgcaagtgaagccattcaacctttt

SEQ ID NO: 3064223 - DNA, 25 bp, Homo sapien
ttattatgaaagccccacatggaac

SEQ ID NO: 3064224 - DNA, 25 bp, Homo sapien
ccatacatttccatcaatgtaagaa

SEQ ID NO: 3064225 - DNA, 25 bp, Homo sapien
agtttctcagtccaactgtatgctt

SEQ ID NO: 3064226 - DNA, 25 bp, Homo sapien
ttctcagtccaactgtatgctttcc

SEQ ID NO: 3064227 - DNA, 25 bp, Homo sapien
ctcagtccaactgtatgctttccat

SEQ ID NO: 3064228 - DNA, 25 bp, Homo sapien
gctgccatgtcaggcaggacacaga

SEQ ID NO: 3064229 - DNA, 25 bp, Homo sapien
cacagaggacaattgaggaaaagtg

SEQ ID NO: 3064230 - DNA, 25 bp, Homo sapien
aggacacagaggacaattgaggaaa

SEQ ID NO: 3064231 - DNA, 25 bp, Homo sapien
gacacagaggacaattgaggaaaag

SEQ ID NO: 3064232 - DNA, 25 bp, Homo sapien
gtaggtggacctgtgacttcagtca

SEQ ID NO: 3064233 - DNA, 25 bp, Homo sapien
taggtggacctgtgacttcagtcag

SEQ ID NO: 3064234 - DNA, 25 bp, Homo sapien
atgctttggagaaactatagtcctc

SEQ ID NO: 3064235 - DNA, 25 bp, Homo sapien
ttggagaaactatagtcctcttcgg

SEQ ID NO: 3064236 - DNA, 25 bp, Homo sapien
tggagaaactatagtcctcttcggg

SEQ ID NO: 3064237 - DNA, 25 bp, Homo sapien
caggatgctttggagaaactatagt

SEQ ID NO: 3064238 - DNA, 25 bp, Homo sapien
tcaggtgtgaatgctctggaggttg

SEQ ID NO: 3064239 - DNA, 25 bp, Homo sapien
tgagctacaactacattagggaact

SEQ ID NO: 3064240 - DNA, 25 bp, Homo sapien
tggtgttggatttgttaccccttga

SEQ ID NO: 3064241 - DNA, 25 bp, Homo sapien
taccccttgatatactcgaagttgg

SEQ ID NO: 3064242 - DNA, 25 bp, Homo sapien
ctcctgatgggttagggaagactca

SEQ ID NO: 3064243 - DNA, 25 bp, Homo sapien
cctgatgggttagggaagactcacc

SEQ ID NO: 3064244 - DNA, 25 bp, Homo sapien
gatgggttagggaagactcaccctc

SEQ ID NO: 3064245 - DNA, 25 bp, Homo sapien
ctggatggcgggaggttctacatca

SEQ ID NO: 3064246 - DNA, 25 bp, Homo sapien
gaggcttcacagagacactgggtga

SEQ ID NO: 3064247 - DNA, 25 bp, Homo sapien
ctgaccctgagagccgagctgtagc

SEQ ID NO: 3064248 - DNA, 25 bp, Homo sapien
tagcctcctggtggactagagaagt

SEQ ID NO: 3064249 - DNA, 25 bp, Homo sapien
gtgagctgcacgtctggaggcttca

SEQ ID NO: 3064250 - DNA, 25 bp, Homo sapien
acttcatgatgttctggaggctgac

SEQ ID NO: 3064251 - DNA, 25 bp, Homo sapien
gacctggaggtgaaactgtgacttc

SEQ ID NO: 3064252 - DNA, 25 bp, Homo sapien
aaatgatgagtttgatggtgacctg

SEQ ID NO: 3064253 - DNA, 25 bp, Homo sapien
ctaaatgatgagtttgatggtgacc

SEQ ID NO: 3064254 - DNA, 25 bp, Homo sapien
gaaggtccaacttgctcagagggcc

SEQ ID NO: 3064255 - DNA, 25 bp, Homo sapien
cctcatgattcggtagagttagact

SEQ ID NO: 3064256 - DNA, 25 bp, Homo sapien
gatacggtgtatctgtactggaata

SEQ ID NO: 3064257 - DNA, 25 bp, Homo sapien
ttccaataatctcagcaaggctcca

SEQ ID NO: 3064258 - DNA, 25 bp, Homo sapien
cccaggtgatcaaagtcccacgggt

SEQ ID NO: 3064259 - DNA, 25 bp, Homo sapien
gccccaggtgatcaaagtcccacgg

SEQ ID NO: 3064260 - DNA, 25 bp, Homo sapien
agggccccaggtgatcaaagtccca

SEQ ID NO: 3064261 - DNA, 25 bp, Homo sapien
gggccccaggtgatcaaagtcccac

SEQ ID NO: 3064262 - DNA, 25 bp, Homo sapien
gagagtaggcgcatggggagattcc

SEQ ID NO: 3064263 - DNA, 25 bp, Homo sapien
gctgggagagtaggcgcatggggag

SEQ ID NO: 3064264 - DNA, 25 bp, Homo sapien
ctgctgggagagtaggcgcatgggg

SEQ ID NO: 3064265 - DNA, 25 bp, Homo sapien
gggagagtaggcgcatggggagatt

SEQ ID NO: 3064266 - DNA, 25 bp, Homo sapien
tcaccagggcactcttatgtcacaa

SEQ ID NO: 3064267 - DNA, 25 bp, Homo sapien
gggcactcttatgtcacaatcccgc

SEQ ID NO: 3064268 - DNA, 25 bp, Homo sapien
atgtcaccagggcactcttatgtca

SEQ ID NO: 3064269 - DNA, 25 bp, Homo sapien
gcccaagcacgccttcccatcctgc

SEQ ID NO: 3064270 - DNA, 25 bp, Homo sapien
ctagttcagttctggcagccttcct

SEQ ID NO: 3064271 - DNA, 25 bp, Homo sapien
tgctagttcagttctggcagccttc

SEQ ID NO: 3064272 - DNA, 25 bp, Homo sapien
gctagttcagttctggcagccttcc

SEQ ID NO: 3064273 - DNA, 25 bp, Homo sapien
tgaagagccctttgcactagcctgg

SEQ ID NO: 3064274 - DNA, 25 bp, Homo sapien
gaaatgcgactgtaactagaaccca

SEQ ID NO: 3064275 - DNA, 25 bp, Homo sapien
tgccagggaataagcgaggactcca

SEQ ID NO: 3064276 - DNA, 25 bp, Homo sapien
tgggcgccaggatgcacattacagt

SEQ ID NO: 3064277 - DNA, 25 bp, Homo sapien
aagattcacctcatttagggatgga

SEQ ID NO: 3064278 - DNA, 25 bp, Homo sapien
catttcacaggaagctagacttctt

SEQ ID NO: 3064279 - DNA, 25 bp, Homo sapien
ccaagttaagttcccactgaaatga

SEQ ID NO: 3064280 - DNA, 25 bp, Homo sapien
taaagcttgaagtctccttggtggg

SEQ ID NO: 3064281 - DNA, 25 bp, Homo sapien
catgtgccaccatttctccatgttg

SEQ ID NO: 3064282 - DNA, 25 bp, Homo sapien
ggcatgtgccaccatttctccatgt

SEQ ID NO: 3064283 - DNA, 25 bp, Homo sapien
ctgtgcccggccctgttacctttga

SEQ ID NO: 3064284 - DNA, 25 bp, Homo sapien
tgttacctttgagtttttatctcca

SEQ ID NO: 3064285 - DNA, 25 bp, Homo sapien
tcttcccatctgacatctacaatct

SEQ ID NO: 3064286 - DNA, 25 bp, Homo sapien
tgtactccatagctattttaccact

SEQ ID NO: 3064287 - DNA, 25 bp, Homo sapien
tctcttcactgggtctgtactccat

SEQ ID NO: 3064288 - DNA, 25 bp, Homo sapien
tgacatctacaatctcttcactggg

SEQ ID NO: 3064289 - DNA, 25 bp, Homo sapien
ataaagttagcaaggatgaattcag

SEQ ID NO: 3064290 - DNA, 25 bp, Homo sapien
taatggtagcaacccacaatgagac

SEQ ID NO: 3064291 - DNA, 25 bp, Homo sapien
tcttcatcatacacttcgatttttg

SEQ ID NO: 3064292 - DNA, 25 bp, Homo sapien
acttcctgcatataatggtagcaac

SEQ ID NO: 3064293 - DNA, 25 bp, Homo sapien
ccaggtttcctttgggcacaggcta

SEQ ID NO: 3064294 - DNA, 25 bp, Homo sapien
ggatacctttgcatactagggaggg

SEQ ID NO: 3064295 - DNA, 25 bp, Homo sapien
gactcaaatccatgtgtccagggct

SEQ ID NO: 3064296 - DNA, 25 bp, Homo sapien
tgttcagggactcgttaaacaccag

SEQ ID NO: 3064297 - DNA, 25 bp, Homo sapien
actgaagtacttcaacgacgattaa

SEQ ID NO: 3064298 - DNA, 25 bp, Homo sapien
tgaagtacttcaacgacgattaaga

SEQ ID NO: 3064299 - DNA, 25 bp, Homo sapien
gaagtacttcaacgacgattaagaa

SEQ ID NO: 3064300 - DNA, 25 bp, Homo sapien
agtacttcaacgacgattaagaaag

SEQ ID NO: 3064301 - DNA, 25 bp, Homo sapien
taggaatgacaacggtcttaaatcc

SEQ ID NO: 3064302 - DNA, 25 bp, Homo sapien
tgagtgatcattgctacatgttggt

SEQ ID NO: 3064303 - DNA, 25 bp, Homo sapien
caatagcaatctgggctatcttccc

SEQ ID NO: 3064304 - DNA, 25 bp, Homo sapien
atcattgctacatgttggttaaaaa

SEQ ID NO: 3064305 - DNA, 25 bp, Homo sapien
ccgaggatgttaattaggcttcaaa

SEQ ID NO: 3064306 - DNA, 25 bp, Homo sapien
tgtaaatgaattgctaggtgcaacc

SEQ ID NO: 3064307 - DNA, 25 bp, Homo sapien
taaactccagtcattcaagctaaca

SEQ ID NO: 3064308 - DNA, 25 bp, Homo sapien
gaggtgttctatggcttcaaaatca

SEQ ID NO: 3064309 - DNA, 25 bp, Homo sapien
cctgaagaatagataagatgaaccc

SEQ ID NO: 3064310 - DNA, 25 bp, Homo sapien
taaaacaactagaggttcatctgca

SEQ ID NO: 3064311 - DNA, 25 bp, Homo sapien
gaggaaatacacatacctctataca

SEQ ID NO: 3064312 - DNA, 25 bp, Homo sapien
tcagtcttcccattcagtagctcct

SEQ ID NO: 3064313 - DNA, 25 bp, Homo sapien
ttggataacgttgccacagttcttg

SEQ ID NO: 3064314 - DNA, 25 bp, Homo sapien
cttggataacgttgccacagttctt

SEQ ID NO: 3064315 - DNA, 25 bp, Homo sapien
tgccacagttcttgctggcgaccat

SEQ ID NO: 3064316 - DNA, 25 bp, Homo sapien
cgttgccacagttcttgctggcgac

SEQ ID NO: 3064317 - DNA, 25 bp, Homo sapien
aaaatgataccaagtaactgtttca

SEQ ID NO: 3064318 - DNA, 25 bp, Homo sapien
tgataccaagtaactgtttcatcat

SEQ ID NO: 3064319 - DNA, 25 bp, Homo sapien
aatgataccaagtaactgtttcatc

SEQ ID NO: 3064320 - DNA, 25 bp, Homo sapien
atgataccaagtaactgtttcatca

SEQ ID NO: 3064321 - DNA, 25 bp, Homo sapien
cacataagactgagactgaaacaca

SEQ ID NO: 3064322 - DNA, 25 bp, Homo sapien
tatgaagtcatcagaggttccaagt

SEQ ID NO: 3064323 - DNA, 25 bp, Homo sapien
tatggttcattgatggcatctctgc

SEQ ID NO: 3064324 - DNA, 25 bp, Homo sapien
gcactttgtacctcacttgtaacga

SEQ ID NO: 3064325 - DNA, 25 bp, Homo sapien
tgaccatcgggcaaaagaaattacc

SEQ ID NO: 3064326 - DNA, 25 bp, Homo sapien
gggtgtatgcaatccagtctccatg

SEQ ID NO: 3064327 - DNA, 25 bp, Homo sapien
catgtttcaattaccggctctgggt

SEQ ID NO: 3064328 - DNA, 25 bp, Homo sapien
gcaagtctggcgaggattctgacca

SEQ ID NO: 3064329 - DNA, 25 bp, Homo sapien
gacactacactggtacaaattctga

SEQ ID NO: 3064330 - DNA, 25 bp, Homo sapien
cctataaatctggttttttgccact

SEQ ID NO: 3064331 - DNA, 25 bp, Homo sapien
ggagacactacactggtacaaattc

SEQ ID NO: 3064332 - DNA, 25 bp, Homo sapien
cgcctctttcctcctataaatctgg

SEQ ID NO: 3064333 - DNA, 25 bp, Homo sapien
tcaagtaatcctccatcttcacgct

SEQ ID NO: 3064334 - DNA, 25 bp, Homo sapien
tgcctggcccaattgttaaatcttt

SEQ ID NO: 3064335 - DNA, 25 bp, Homo sapien
caagtaatcctccatcttcacgctc

SEQ ID NO: 3064336 - DNA, 25 bp, Homo sapien
agtaatcctccatcttcacgctccc

SEQ ID NO: 3064337 - DNA, 25 bp, Homo sapien
agcatgaggaactttaaatggccag

SEQ ID NO: 3064338 - DNA, 25 bp, Homo sapien
gaggatgcaaacacttagcccataa

SEQ ID NO: 3064339 - DNA, 25 bp, Homo sapien
tttggggaggatgcaaacacttagc

SEQ ID NO: 3064340 - DNA, 25 bp, Homo sapien
taaatggccagcttcggctgggcaa

SEQ ID NO: 3064341 - DNA, 25 bp, Homo sapien
cttggagcagcgccctctgctggcc

SEQ ID NO: 3064342 - DNA, 25 bp, Homo sapien
tggagcagcgccctctgctggccgc

SEQ ID NO: 3064343 - DNA, 25 bp, Homo sapien
gagcagcgccctctgctggccgcct

SEQ ID NO: 3064344 - DNA, 25 bp, Homo sapien
ttggagcagcgccctctgctggccg

SEQ ID NO: 3064345 - DNA, 25 bp, Homo sapien
taagtgttgtaagtgggacttgcgt

SEQ ID NO: 3064346 - DNA, 25 bp, Homo sapien
cggtcatcatgagaatgttcttaag

SEQ ID NO: 3064347 - DNA, 25 bp, Homo sapien
tgggacttgcgttgttcccacgtct

SEQ ID NO: 3064348 - DNA, 25 bp, Homo sapien
gtttttccagttcaacggtcatcat

SEQ ID NO: 3064349 - DNA, 25 bp, Homo sapien
ttaaaataacctgcattttcaatgt

SEQ ID NO: 3064350 - DNA, 25 bp, Homo sapien
actctgccctccatagatgaatcta

SEQ ID NO: 3064351 - DNA, 25 bp, Homo sapien
tggaacggacatccttctctgccag

SEQ ID NO: 3064352 - DNA, 25 bp, Homo sapien
caggaaatggcactttaatagttgg

SEQ ID NO: 3064353 - DNA, 25 bp, Homo sapien
gccagggtgacaggaccaagatggg

SEQ ID NO: 3064354 - DNA, 25 bp, Homo sapien
tgtggggcaggtgtactccacaaac

SEQ ID NO: 3064355 - DNA, 25 bp, Homo sapien
tggggcaggtgtactccacaaactg

SEQ ID NO: 3064356 - DNA, 25 bp, Homo sapien
tctgtggggcaggtgtactccacaa

SEQ ID NO: 3064357 - DNA, 25 bp, Homo sapien
ttctgtggggcaggtgtactccaca

SEQ ID NO: 3064358 - DNA, 25 bp, Homo sapien
acgtggcaggcaaaccggtggtcgg

SEQ ID NO: 3064359 - DNA, 25 bp, Homo sapien
agacgtggcaggcaaaccggtggtc

SEQ ID NO: 3064360 - DNA, 25 bp, Homo sapien
aaagacgtggcaggcaaaccggtgg

SEQ ID NO: 3064361 - DNA, 25 bp, Homo sapien
gtggcaggcaaaccggtggtcggcg

SEQ ID NO: 3064362 - DNA, 25 bp, Homo sapien
tgatatccgcggaaagagatgtttt

SEQ ID NO: 3064363 - DNA, 25 bp, Homo sapien
tctttggatgatatccgcggaaaga

SEQ ID NO: 3064364 - DNA, 25 bp, Homo sapien
tttggatgatatccgcggaaagaga

SEQ ID NO: 3064365 - DNA, 25 bp, Homo sapien
ttgttctttggatgatatccgcgga

SEQ ID NO: 3064366 - DNA, 25 bp, Homo sapien
gcagagaggacgacatcgcccttgt

SEQ ID NO: 3064367 - DNA, 25 bp, Homo sapien
gcggcagagaggacgacatcgccct

SEQ ID NO: 3064368 - DNA, 25 bp, Homo sapien
gagaggacgacatcgcccttgtgat

SEQ ID NO: 3064369 - DNA, 25 bp, Homo sapien
cagagaggacgacatcgcccttgtg

SEQ ID NO: 3064370 - DNA, 25 bp, Homo sapien
tccactagcagagggtcatccactt

SEQ ID NO: 3064371 - DNA, 25 bp, Homo sapien
taggcctcgtaccagtagtcttcag

SEQ ID NO: 3064372 - DNA, 25 bp, Homo sapien
gttcgtcttcgtgtcgaggcacaaa

SEQ ID NO: 3064373 - DNA, 25 bp, Homo sapien
caccagtgcgcatgttgtaggcctc

SEQ ID NO: 3064374 - DNA, 25 bp, Homo sapien
aggagcgggagcggccactcatgaa

SEQ ID NO: 3064375 - DNA, 25 bp, Homo sapien
gactcatagggcgaggagacggagg

SEQ ID NO: 3064376 - DNA, 25 bp, Homo sapien
tcttggagaaatggacgtcgggttc

SEQ ID NO: 3064377 - DNA, 25 bp, Homo sapien
gagcgggagcggccactcatgaaga

SEQ ID NO: 3064378 - DNA, 25 bp, Homo sapien
gaagcacggccgcaggctcaccggc

SEQ ID NO: 3064379 - DNA, 25 bp, Homo sapien
ctccgaagcacggccgcaggctcac

SEQ ID NO: 3064380 - DNA, 25 bp, Homo sapien
agcacggccgcaggctcaccggctc

SEQ ID NO: 3064381 - DNA, 25 bp, Homo sapien
cacggccgcaggctcaccggctcca

SEQ ID NO: 3064382 - DNA, 25 bp, Homo sapien
cagcagcgtgggctgttggtggagg

SEQ ID NO: 3064383 - DNA, 25 bp, Homo sapien
gcgtgggctgttggtggaggtgcct

SEQ ID NO: 3064384 - DNA, 25 bp, Homo sapien
cgtgggctgttggtggaggtgcctc

SEQ ID NO: 3064385 - DNA, 25 bp, Homo sapien
gggctgttggtggaggtgcctcgat

SEQ ID NO: 3064386 - DNA, 25 bp, Homo sapien
ctgtggtgggggcggggctgctctg

SEQ ID NO: 3064387 - DNA, 25 bp, Homo sapien
gtggtgggggcggggctgctctggg

SEQ ID NO: 3064388 - DNA, 25 bp, Homo sapien
gggctgctctgggggggcagctcat

SEQ ID NO: 3064389 - DNA, 25 bp, Homo sapien
ggggcggggctgctctgggggggca

SEQ ID NO: 3064390 - DNA, 25 bp, Homo sapien
gctcaggcaaatgggttcatgcggt

SEQ ID NO: 3064391 - DNA, 25 bp, Homo sapien
ggcaaatgggttcatgcggtggtgt

SEQ ID NO: 3064392 - DNA, 25 bp, Homo sapien
tcaggcaaatgggttcatgcggtgg

SEQ ID NO: 3064393 - DNA, 25 bp, Homo sapien
cgctcaggcaaatgggttcatgcgg

SEQ ID NO: 3064394 - DNA, 25 bp, Homo sapien
tcttcaggggtgaggatgatcgaga

SEQ ID NO: 3064395 - DNA, 25 bp, Homo sapien
tgtcttcaggggtgaggatgatcga

SEQ ID NO: 3064396 - DNA, 25 bp, Homo sapien
cttcaggggtgaggatgatcgagac

SEQ ID NO: 3064397 - DNA, 25 bp, Homo sapien
ctgtcttcaggggtgaggatgatcg

SEQ ID NO: 3064398 - DNA, 25 bp, Homo sapien
gtgtgtcctgagacaactgcacctg

SEQ ID NO: 3064399 - DNA, 25 bp, Homo sapien
tggccctggccgcgggacgccggct

SEQ ID NO: 3064400 - DNA, 25 bp, Homo sapien
gctctggccctggccgcgggacgcc

SEQ ID NO: 3064401 - DNA, 25 bp, Homo sapien
ccctggccgcgggacgccggctcct

SEQ ID NO: 3064402 - DNA, 25 bp, Homo sapien
gcgggacgccggctcctggccggac

SEQ ID NO: 3064403 - DNA, 25 bp, Homo sapien
ccgctcccggccgccgggccgcgcg

SEQ ID NO: 3064404 - DNA, 25 bp, Homo sapien
gctcccggccgccgggccgcgcgct

SEQ ID NO: 3064405 - DNA, 25 bp, Homo sapien
cgctcccggccgccgggccgcgcgc

SEQ ID NO: 3064406 - DNA, 25 bp, Homo sapien
agtgtcccccgtcgcgtcgatcagg

SEQ ID NO: 3064407 - DNA, 25 bp, Homo sapien
ccccgtcgcgtcgatcaggtccatc

SEQ ID NO: 3064408 - DNA, 25 bp, Homo sapien
cgggagtgtcccccgtcgcgtcgat

SEQ ID NO: 3064409 - DNA, 25 bp, Homo sapien
ccgtcgcgtcgatcaggtccatctg

SEQ ID NO: 3064410 - DNA, 25 bp, Homo sapien
gccacccgcagagccctcccttttc

SEQ ID NO: 3064411 - DNA, 25 bp, Homo sapien
cgccacccgcagagccctccctttt

SEQ ID NO: 3064412 - DNA, 25 bp, Homo sapien
cacccgcagagccctcccttttctt

SEQ ID NO: 3064413 - DNA, 25 bp, Homo sapien
gccgccacccgcagagccctccctt

SEQ ID NO: 3064414 - DNA, 25 bp, Homo sapien
cagagccaggctagataggattcag

SEQ ID NO: 3064415 - DNA, 25 bp, Homo sapien
gctccagattgtgagtttcagagcc

SEQ ID NO: 3064416 - DNA, 25 bp, Homo sapien
gagtttcagagccaggctagatagg

SEQ ID NO: 3064417 - DNA, 25 bp, Homo sapien
aggctagataggattcagactcaga

SEQ ID NO: 3064418 - DNA, 25 bp, Homo sapien
gatctaaacgctactgttgaagcaa

SEQ ID NO: 3064419 - DNA, 25 bp, Homo sapien
tataagcccatggtaacctgaacct

SEQ ID NO: 3064420 - DNA, 25 bp, Homo sapien
gaatttgccctcctaatataagccc

SEQ ID NO: 3064421 - DNA, 25 bp, Homo sapien
atgcccagcccacaagatctaaacg

SEQ ID NO: 3064422 - DNA, 25 bp, Homo sapien
tactttagataccatagttcaggat

SEQ ID NO: 3064423 - DNA, 25 bp, Homo sapien
ctttagataccatagttcaggattt

SEQ ID NO: 3064424 - DNA, 25 bp, Homo sapien
gtttactttagataccatagttcag

SEQ ID NO: 3064425 - DNA, 25 bp, Homo sapien
gataccatagttcaggatttaaact

SEQ ID NO: 3064426 - DNA, 25 bp, Homo sapien
ctaggcttggttgaaccgtgcaggt

SEQ ID NO: 3064427 - DNA, 25 bp, Homo sapien
gggggagctgcctttggcactggtg

SEQ ID NO: 3064428 - DNA, 25 bp, Homo sapien
ggggagctgcctttggcactggtgc

SEQ ID NO: 3064429 - DNA, 25 bp, Homo sapien
ttggttgaaccgtgcaggtaggtcc

SEQ ID NO: 3064430 - DNA, 25 bp, Homo sapien
agtgatgccaagtcttcgaagcctc

SEQ ID NO: 3064431 - DNA, 25 bp, Homo sapien
cctgagacttgggtcaagagtcaaa

SEQ ID NO: 3064432 - DNA, 25 bp, Homo sapien
tcgaagcctcagtgacaaacgcata

SEQ ID NO: 3064433 - DNA, 25 bp, Homo sapien
tgccctccctaacaatgggaatggg

SEQ ID NO: 3064434 - DNA, 25 bp, Homo sapien
aaacatgccgaagctgcgggagctc

SEQ ID NO: 3064435 - DNA, 25 bp, Homo sapien
ggctgctctgttgccgttggttcag

SEQ ID NO: 3064436 - DNA, 25 bp, Homo sapien
ttgccgttggttcaggcagctgttg

SEQ ID NO: 3064437 - DNA, 25 bp, Homo sapien
agctctctatcagccatagtaggct

SEQ ID NO: 3064438 - DNA, 25 bp, Homo sapien
aagtccagagggcttgctggtgctc

SEQ ID NO: 3064439 - DNA, 25 bp, Homo sapien
tttttgcaattgatggagaagtcca

SEQ ID NO: 3064440 - DNA, 25 bp, Homo sapien
tccagagggcttgctggtgctcgaa

SEQ ID NO: 3064441 - DNA, 25 bp, Homo sapien
catttcagtagctttgatgatcatt

SEQ ID NO: 3064442 - DNA, 25 bp, Homo sapien
tcttcccatgaagcagacggttcac

SEQ ID NO: 3064443 - DNA, 25 bp, Homo sapien
cctggtattgccctcgagttagtgg

SEQ ID NO: 3064444 - DNA, 25 bp, Homo sapien
tcttgtcaagaccaagctccggcgc

SEQ ID NO: 3064445 - DNA, 25 bp, Homo sapien
ttcacttttgggatggcgctgtctc

SEQ ID NO: 3064446 - DNA, 25 bp, Homo sapien
gctgtgagccaaatacaggtctggg

SEQ ID NO: 3064447 - DNA, 25 bp, Homo sapien
gatatgaggaaagagccacagcaca

SEQ ID NO: 3064448 - DNA, 25 bp, Homo sapien
ggacctggatctacccttgatgcta

SEQ ID NO: 3064449 - DNA, 25 bp, Homo sapien
caggtctgggttatcagggctcaca

SEQ ID NO: 3064450 - DNA, 25 bp, Homo sapien
ctctcgaaagctgctgtgggaacac

SEQ ID NO: 3064451 - DNA, 25 bp, Homo sapien
tctcgaaagctgctgtgggaacaca

SEQ ID NO: 3064452 - DNA, 25 bp, Homo sapien
ctcgaaagctgctgtgggaacacac

SEQ ID NO: 3064453 - DNA, 25 bp, Homo sapien
cattttcagacagccgtgctggcag

SEQ ID NO: 3064454 - DNA, 25 bp, Homo sapien
acattttcagacagccgtgctggca

SEQ ID NO: 3064455 - DNA, 25 bp, Homo sapien
ggcaaagcgagctgaccatctggcc

SEQ ID NO: 3064456 - DNA, 25 bp, Homo sapien
tggcaaagcgagctgaccatctggc

SEQ ID NO: 3064457 - DNA, 25 bp, Homo sapien
cacactgtactgaacacagacctga

SEQ ID NO: 3064458 - DNA, 25 bp, Homo sapien
tttaaaaggctttctaatgaagcga

SEQ ID NO: 3064459 - DNA, 25 bp, Homo sapien
tagacaaacctctgtggtatagcca

SEQ ID NO: 3064460 - DNA, 25 bp, Homo sapien
tacaaaacaactcacacattagaca

SEQ ID NO: 3064461 - DNA, 25 bp, Homo sapien
atacaggaggaaattaagcccacaa

SEQ ID NO: 3064462 - DNA, 25 bp, Homo sapien
tacaggaggaaattaagcccacaaa

SEQ ID NO: 3064463 - DNA, 25 bp, Homo sapien
tatacaggaggaaattaagcccaca

SEQ ID NO: 3064464 - DNA, 25 bp, Homo sapien
tcagagggcaaaaacctccttggga

SEQ ID NO: 3064465 - DNA, 25 bp, Homo sapien
aaaacctccttgggaatgctgttgc

SEQ ID NO: 3064466 - DNA, 25 bp, Homo sapien
cctccttgggaatgctgttgctaaa

SEQ ID NO: 3064467 - DNA, 25 bp, Homo sapien
aacctccttgggaatgctgttgcta

SEQ ID NO: 3064468 - DNA, 25 bp, Homo sapien
actgtgccttttcggctcagtcctt

SEQ ID NO: 3064469 - DNA, 25 bp, Homo sapien
ttcggctcagtccttgcacaggtgc

SEQ ID NO: 3064470 - DNA, 25 bp, Homo sapien
ggcatctcaccccttggccctcttc

SEQ ID NO: 3064471 - DNA, 25 bp, Homo sapien
ccttttcggctcagtccttgcacag

SEQ ID NO: 3064472 - DNA, 25 bp, Homo sapien
ggatgtgcgagagagggtgagaccc

SEQ ID NO: 3064473 - DNA, 25 bp, Homo sapien
gtgcccagcacgtggaggcggcggg

SEQ ID NO: 3064474 - DNA, 25 bp, Homo sapien
ccagcacgtggaggcggcgggatct

SEQ ID NO: 3064475 - DNA, 25 bp, Homo sapien
ggcggcgggatctgggatgtgcgag

SEQ ID NO: 3064476 - DNA, 25 bp, Homo sapien
tatgggtgccttttgctcaacccca

SEQ ID NO: 3064477 - DNA, 25 bp, Homo sapien
attcagaatcgaggatgatccagcc

SEQ ID NO: 3064478 - DNA, 25 bp, Homo sapien
agctctatgggtgccttttgctcaa

SEQ ID NO: 3064479 - DNA, 25 bp, Homo sapien
catcccgcctttgcagagaccacag

SEQ ID NO: 3064480 - DNA, 25 bp, Homo sapien
tgccagaaaagtgcagaaagctgac

SEQ ID NO: 3064481 - DNA, 25 bp, Homo sapien
gtgccagaaaagtgcagaaagctga

SEQ ID NO: 3064482 - DNA, 25 bp, Homo sapien
tgacttgagactctttgggaggtga

SEQ ID NO: 3064483 - DNA, 25 bp, Homo sapien
tctttctctcagctgtagacacagg

SEQ ID NO: 3064484 - DNA, 25 bp, Homo sapien
gctccagttctcttgacttgagact

SEQ ID NO: 3064485 - DNA, 25 bp, Homo sapien
tccatgacggcatccagccagtgga

SEQ ID NO: 3064486 - DNA, 25 bp, Homo sapien
gggtacttgcttgggatatatggct

SEQ ID NO: 3064487 - DNA, 25 bp, Homo sapien
tttgttacaggggatatgatagccg

SEQ ID NO: 3064488 - DNA, 25 bp, Homo sapien
ccggtgaggtatgggtacttgcttg

SEQ ID NO: 3064489 - DNA, 25 bp, Homo sapien
ttacaggggatatgatagccggtga

SEQ ID NO: 3064490 - DNA, 25 bp, Homo sapien
cattcagcaaacgagtgtttggcac

SEQ ID NO: 3064491 - DNA, 25 bp, Homo sapien
tatgttaactctagccctagaagac

SEQ ID NO: 3064492 - DNA, 25 bp, Homo sapien
gcaggagccgttcatccattcagca

SEQ ID NO: 3064493 - DNA, 25 bp, Homo sapien
cagatccaatgatcggcaggagccg

SEQ ID NO: 3064494 - DNA, 25 bp, Homo sapien
agcagtaattggcaagtcacttgta

SEQ ID NO: 3064495 - DNA, 25 bp, Homo sapien
agaagcagtaattggcaagtcactt

SEQ ID NO: 3064496 - DNA, 25 bp, Homo sapien
taattggcaagtcacttgtatttgg

SEQ ID NO: 3064497 - DNA, 25 bp, Homo sapien
cagtaattggcaagtcacttgtatt

SEQ ID NO: 3064498 - DNA, 25 bp, Homo sapien
agagagtgagatgcatttggcgaga

SEQ ID NO: 3064499 - DNA, 25 bp, Homo sapien
caggattgtggggcgggcaaatgat

SEQ ID NO: 3064500 - DNA, 25 bp, Homo sapien
gagtgagatgcatttggcgagatgc

SEQ ID NO: 3064501 - DNA, 25 bp, Homo sapien
tttggcgagatgcaggattgtgggg

SEQ ID NO: 3064502 - DNA, 25 bp, Homo sapien
ttccaaatgtgatagttgcttttag

SEQ ID NO: 3064503 - DNA, 25 bp, Homo sapien
gcatttgccttcagggcctccaaga

SEQ ID NO: 3064504 - DNA, 25 bp, Homo sapien
tccagtctcccactggctccccctc

SEQ ID NO: 3064505 - DNA, 25 bp, Homo sapien
tagtagaaatccacaagcatttgcc

SEQ ID NO: 3064506 - DNA, 25 bp, Homo sapien
agccaaacctgggatttaccactgc

SEQ ID NO: 3064507 - DNA, 25 bp, Homo sapien
gagccaaacctgggatttaccactg

SEQ ID NO: 3064508 - DNA, 25 bp, Homo sapien
gccaaacctgggatttaccactgct

SEQ ID NO: 3064509 - DNA, 25 bp, Homo sapien
gcaggcccagctggtgcttactgat

SEQ ID NO: 3064510 - DNA, 25 bp, Homo sapien
ggaatgtggaaactcaggggacttg

SEQ ID NO: 3064511 - DNA, 25 bp, Homo sapien
caggcccagctggtgcttactgatg

SEQ ID NO: 3064512 - DNA, 25 bp, Homo sapien
cccaagggaatgtggaaactcaggg

SEQ ID NO: 3064513 - DNA, 25 bp, Homo sapien
ctgctgctctacaaggaagatgtgc

SEQ ID NO: 3064514 - DNA, 25 bp, Homo sapien
ttggcaggtggaccaaataaaagcc

SEQ ID NO: 3064515 - DNA, 25 bp, Homo sapien
aatgttttttatcagggttctgctg

SEQ ID NO: 3064516 - DNA, 25 bp, Homo sapien
caaagtgcgcatttcctgattggca

SEQ ID NO: 3064517 - DNA, 25 bp, Homo sapien
ggatctgggatgagacacccatggg

SEQ ID NO: 3064518 - DNA, 25 bp, Homo sapien
agccaggagcagtcaccacagccaa

SEQ ID NO: 3064519 - DNA, 25 bp, Homo sapien
ctggatctgggatgagacacccatg

SEQ ID NO: 3064520 - DNA, 25 bp, Homo sapien
atctgggatgagacacccatggggc

SEQ ID NO: 3064521 - DNA, 25 bp, Homo sapien
cactgagatgtagagttgtttgtca

SEQ ID NO: 3064522 - DNA, 25 bp, Homo sapien
gtaagacactgagatgtagagttgt

SEQ ID NO: 3064523 - DNA, 25 bp, Homo sapien
agacactgagatgtagagttgtttg

SEQ ID NO: 3064524 - DNA, 25 bp, Homo sapien
taagacactgagatgtagagttgtt

SEQ ID NO: 3064525 - DNA, 25 bp, Homo sapien
atcttggcaggcatcggggttctga

SEQ ID NO: 3064526 - DNA, 25 bp, Homo sapien
cgctgaacgtgccttcccaggagaa

SEQ ID NO: 3064527 - DNA, 25 bp, Homo sapien
ccaggagaagcttgaagtgtactca

SEQ ID NO: 3064528 - DNA, 25 bp, Homo sapien
taagaggggccgctagggacagggc

SEQ ID NO: 3064529 - DNA, 25 bp, Homo sapien
caggtgctagctaagagcaggactg

SEQ ID NO: 3064530 - DNA, 25 bp, Homo sapien
gccctgttcatcacatgcagctgca

SEQ ID NO: 3064531 - DNA, 25 bp, Homo sapien
gcaggactggatgggactcatccag

SEQ ID NO: 3064532 - DNA, 25 bp, Homo sapien
ctaagagcaggtgctagctaagagc

SEQ ID NO: 3064533 - DNA, 25 bp, Homo sapien
ggctctggtggtgaggtgctaggac

SEQ ID NO: 3064534 - DNA, 25 bp, Homo sapien
gggctctggtggtgaggtgctagga

SEQ ID NO: 3064535 - DNA, 25 bp, Homo sapien
ctgggctctggtggtgaggtgctag

SEQ ID NO: 3064536 - DNA, 25 bp, Homo sapien
tgggctctggtggtgaggtgctagg

SEQ ID NO: 3064537 - DNA, 25 bp, Homo sapien
gaccaatgagtccagtcgaggagcg

SEQ ID NO: 3064538 - DNA, 25 bp, Homo sapien
ggccagggaccaggatactcaataa

SEQ ID NO: 3064539 - DNA, 25 bp, Homo sapien
gggtatctggtgcagaagaccaatg

SEQ ID NO: 3064540 - DNA, 25 bp, Homo sapien
ggaccaggatactcaataaggatgt

SEQ ID NO: 3064541 - DNA, 25 bp, Homo sapien
gatccctgtctggtaacatcagtct

SEQ ID NO: 3064542 - DNA, 25 bp, Homo sapien
gcaaaaccttgctcagatccctgtc

SEQ ID NO: 3064543 - DNA, 25 bp, Homo sapien
gctgtgttgatctagttaccaagag

SEQ ID NO: 3064544 - DNA, 25 bp, Homo sapien
cataatgaaggtgcctgattgcagg

SEQ ID NO: 3064545 - DNA, 25 bp, Homo sapien
gagcttcacggctttgatctgccag

SEQ ID NO: 3064546 - DNA, 25 bp, Homo sapien
gctttgatctgccagcgaagagcaa

SEQ ID NO: 3064547 - DNA, 25 bp, Homo sapien
gacttctcgtccaacattcaacccc

SEQ ID NO: 3064548 - DNA, 25 bp, Homo sapien
gcgaagagcaatttcctccgacttc

SEQ ID NO: 3064549 - DNA, 25 bp, Homo sapien
acccagccttcactaatgtgactgt

SEQ ID NO: 3064550 - DNA, 25 bp, Homo sapien
tgtcaaggaattgcccgcagggtag

SEQ ID NO: 3064551 - DNA, 25 bp, Homo sapien
ctgtcaaggaattgcccgcagggta

SEQ ID NO: 3064552 - DNA, 25 bp, Homo sapien
cactaatgtgactgtcaaggaattg

SEQ ID NO: 3064553 - DNA, 25 bp, Homo sapien
tgtgggggacgggagccggcctgag

SEQ ID NO: 3064554 - DNA, 25 bp, Homo sapien
ctgtgggggacgggagccggcctga

SEQ ID NO: 3064555 - DNA, 25 bp, Homo sapien
cccttgccttgggactgtcccatca

SEQ ID NO: 3064556 - DNA, 25 bp, Homo sapien
gtggcctccccatccctccagtttg

SEQ ID NO: 3064557 - DNA, 25 bp, Homo sapien
tcacccccttgccttgggactgtcc

SEQ ID NO: 3064558 - DNA, 25 bp, Homo sapien
tgccttgggactgtcccatcaggcc

SEQ ID NO: 3064559 - DNA, 25 bp, Homo sapien
catgacttaggagccctctgtgctc

SEQ ID NO: 3064560 - DNA, 25 bp, Homo sapien
agctgatgaatcctcgtctcccagg

SEQ ID NO: 3064561 - DNA, 25 bp, Homo sapien
caggctgtatgcagctgatgaatcc

SEQ ID NO: 3064562 - DNA, 25 bp, Homo sapien
tcgccacatgacttaggagccctct

SEQ ID NO: 3064563 - DNA, 25 bp, Homo sapien
agacttagacttcaggtccactgag

SEQ ID NO: 3064564 - DNA, 25 bp, Homo sapien
ttcaggtccactgagtctggcaggg

SEQ ID NO: 3064565 - DNA, 25 bp, Homo sapien
tagacttcaggtccactgagtctgg

SEQ ID NO: 3064566 - DNA, 25 bp, Homo sapien
cagacttagacttcaggtccactga

SEQ ID NO: 3064567 - DNA, 25 bp, Homo sapien
aaggcaatgtggtacagagccaggg

SEQ ID NO: 3064568 - DNA, 25 bp, Homo sapien
ggaaggcaatgtggtacagagccag

SEQ ID NO: 3064569 - DNA, 25 bp, Homo sapien
ggcaatgtggtacagagccagggag

SEQ ID NO: 3064570 - DNA, 25 bp, Homo sapien
ctgggaaggcaatgtggtacagagc

SEQ ID NO: 3064571 - DNA, 25 bp, Homo sapien
tccactcccccctttagcccatcca

SEQ ID NO: 3064572 - DNA, 25 bp, Homo sapien
cctctgtcccatggcttgtctccac

SEQ ID NO: 3064573 - DNA, 25 bp, Homo sapien
gccaacctctgtcccatggcttgtc

SEQ ID NO: 3064574 - DNA, 25 bp, Homo sapien
caacctctgtcccatggcttgtctc

SEQ ID NO: 3064575 - DNA, 25 bp, Homo sapien
ctcctcctagccagccgcagggcgg

SEQ ID NO: 3064576 - DNA, 25 bp, Homo sapien
caggcacatcagtgccaaaggtgct

SEQ ID NO: 3064577 - DNA, 25 bp, Homo sapien
gcacatcagtgccaaaggtgctggg

SEQ ID NO: 3064578 - DNA, 25 bp, Homo sapien
ggcggcgaggagctcctcctagcca

SEQ ID NO: 3064579 - DNA, 25 bp, Homo sapien
gcccgaggatgggagggcacccgca

SEQ ID NO: 3064580 - DNA, 25 bp, Homo sapien
cagctccgtctcgtcaaggtaacag

SEQ ID NO: 3064581 - DNA, 25 bp, Homo sapien
attcaggacggtagccgagcgagcc

SEQ ID NO: 3064582 - DNA, 25 bp, Homo sapien
ccctctgggatgtccgtaggacccg

SEQ ID NO: 3064583 - DNA, 25 bp, Homo sapien
ctggcggacgcgggacggggctggg

SEQ ID NO: 3064584 - DNA, 25 bp, Homo sapien
ccttgatcaatatcgcagtctcggg

SEQ ID NO: 3064585 - DNA, 25 bp, Homo sapien
gacggtgcctctggcggcagttcct

SEQ ID NO: 3064586 - DNA, 25 bp, Homo sapien
gagtccggagagatgaatgccgccc

SEQ ID NO: 3064587 - DNA, 25 bp, Homo sapien
cgccctagtcttgggagcgcgtcct

SEQ ID NO: 3064588 - DNA, 25 bp, Homo sapien
tcgtgtcaggcgtcacttgcagccc

SEQ ID NO: 3064589 - DNA, 25 bp, Homo sapien
tttaggaaagtagccagaccgcacg

SEQ ID NO: 3064590 - DNA, 25 bp, Homo sapien
ttttggttttgcagggtataggcgc

SEQ ID NO: 3064591 - DNA, 25 bp, Homo sapien
agcgtctgcccgctgaagttcgtgg

SEQ ID NO: 3064592 - DNA, 25 bp, Homo sapien
gccacaaacatagacaccagcttga

SEQ ID NO: 3064593 - DNA, 25 bp, Homo sapien
gggctcgggactccgcagggtccgc

SEQ ID NO: 3064594 - DNA, 25 bp, Homo sapien
cattcagagcgattacattcaagag

SEQ ID NO: 3064595 - DNA, 25 bp, Homo sapien
agcttgacccggctcagggcattca

SEQ ID NO: 3064596 - DNA, 25 bp, Homo sapien
cctataagcacaggcaatttgtcca

SEQ ID NO: 3064597 - DNA, 25 bp, Homo sapien
ggacaaatgaagatgtttgcggctg

SEQ ID NO: 3064598 - DNA, 25 bp, Homo sapien
ctttctgccctataagcacaggcaa

SEQ ID NO: 3064599 - DNA, 25 bp, Homo sapien
taaaactgtttctgggacaaatgaa

SEQ ID NO: 3064600 - DNA, 25 bp, Homo sapien
ggcagaccttcctgcatctcctgtg

SEQ ID NO: 3064601 - DNA, 25 bp, Homo sapien
tcattcctcaactttggctgcatca

SEQ ID NO: 3064602 - DNA, 25 bp, Homo sapien
tcaactttggctgcatcagcaggca

SEQ ID NO: 3064603 - DNA, 25 bp, Homo sapien
ggctgcatcagcaggcagaccttcc

SEQ ID NO: 3064604 - DNA, 25 bp, Homo sapien
tagaaggcagtcgtttttccaggaa

SEQ ID NO: 3064605 - DNA, 25 bp, Homo sapien
ctgcccccatgcttagcaaatccat

SEQ ID NO: 3064606 - DNA, 25 bp, Homo sapien
cctgcccccatgcttagcaaatcca

SEQ ID NO: 3064607 - DNA, 25 bp, Homo sapien
tgcccccatgcttagcaaatccata

SEQ ID NO: 3064608 - DNA, 25 bp, Homo sapien
ctggatgtacactccattcctgtag

SEQ ID NO: 3064609 - DNA, 25 bp, Homo sapien
gagatgggaactggttgtggctgtc

SEQ ID NO: 3064610 - DNA, 25 bp, Homo sapien
agatgggaactggttgtggctgtca

SEQ ID NO: 3064611 - DNA, 25 bp, Homo sapien
tgactgtcggctgtctcgctgggat

SEQ ID NO: 3064612 - DNA, 25 bp, Homo sapien
gctgggataattcactgctcaggaa

SEQ ID NO: 3064613 - DNA, 25 bp, Homo sapien
aaccgcctccgtggaacaggtgact

SEQ ID NO: 3064614 - DNA, 25 bp, Homo sapien
tgacaagctgggataattcactgct

SEQ ID NO: 3064615 - DNA, 25 bp, Homo sapien
ttggaaaaggcccatgagcaggcgc

SEQ ID NO: 3064616 - DNA, 25 bp, Homo sapien
gcgtgaattactccgagtgccagga

SEQ ID NO: 3064617 - DNA, 25 bp, Homo sapien
tgtcaaggccctgctctagtgaagc

SEQ ID NO: 3064618 - DNA, 25 bp, Homo sapien
ttgcactgggcatgggactgtcctg

SEQ ID NO: 3064619 - DNA, 25 bp, Homo sapien
aagactcacgagttcttccacggtg

SEQ ID NO: 3064620 - DNA, 25 bp, Homo sapien
gcctggcaagctttggttagcccca

SEQ ID NO: 3064621 - DNA, 25 bp, Homo sapien
caggtatctggcgtgaaacaaagtt

SEQ ID NO: 3064622 - DNA, 25 bp, Homo sapien
ttttggcagttaagtcagagcccgg

SEQ ID NO: 3064623 - DNA, 25 bp, Homo sapien
gtgacaacctatgcagagactggag

SEQ ID NO: 3064624 - DNA, 25 bp, Homo sapien
taacagtccatagtgcacatcctgg

SEQ ID NO: 3064625 - DNA, 25 bp, Homo sapien
gctgtgtcaatgtgggcttctccaa

SEQ ID NO: 3064626 - DNA, 25 bp, Homo sapien
tgtgagggcatacaccacagagctg

SEQ ID NO: 3064627 - DNA, 25 bp, Homo sapien
tccattccttaggacattgtcctcc

SEQ ID NO: 3064628 - DNA, 25 bp, Homo sapien
tcacaggcccgtccttgttctgact

SEQ ID NO: 3064629 - DNA, 25 bp, Homo sapien
atcacaggcccgtccttgttctgac

SEQ ID NO: 3064630 - DNA, 25 bp, Homo sapien
tcctcgtcatagacagacacatcac

SEQ ID NO: 3064631 - DNA, 25 bp, Homo sapien
ctctcccctggtctcccagggttgg

SEQ ID NO: 3064632 - DNA, 25 bp, Homo sapien
ctggtctaaacccactagggtctgg

SEQ ID NO: 3064633 - DNA, 25 bp, Homo sapien
gcagagagcagggtccatatgacct

SEQ ID NO: 3064634 - DNA, 25 bp, Homo sapien
gggggcatcattctagagggaccct

SEQ ID NO: 3064635 - DNA, 25 bp, Homo sapien
ccttcccaatccagagtggcagctt

SEQ ID NO: 3064636 - DNA, 25 bp, Homo sapien
tctctccatgctcaggtcaaacaga

SEQ ID NO: 3064637 - DNA, 25 bp, Homo sapien
ggatttgcatccagggctcactggg

SEQ ID NO: 3064638 - DNA, 25 bp, Homo sapien
tgcacaagttcaagcggcaaggtcg

SEQ ID NO: 3064639 - DNA, 25 bp, Homo sapien
agcagacaagatgaagacataaccc

SEQ ID NO: 3064640 - DNA, 25 bp, Homo sapien
caagatgaagacataacccaaccac

SEQ ID NO: 3064641 - DNA, 25 bp, Homo sapien
tcacagagcagacaagatgaagaca

SEQ ID NO: 3064642 - DNA, 25 bp, Homo sapien
cagagcagacaagatgaagacataa

SEQ ID NO: 3064643 - DNA, 25 bp, Homo sapien
gagaactggagtcttggctgcaaca

SEQ ID NO: 3064644 - DNA, 25 bp, Homo sapien
ggctgcaacagccagtgagtgcatt

SEQ ID NO: 3064645 - DNA, 25 bp, Homo sapien
tctttccactgttattgattgcact

SEQ ID NO: 3064646 - DNA, 25 bp, Homo sapien
actgcactgggctccagggacttct

SEQ ID NO: 3064647 - DNA, 25 bp, Homo sapien
tcttgtcaaacgaaattccataccc

SEQ ID NO: 3064648 - DNA, 25 bp, Homo sapien
cagcatactgcaggattcctttcct

SEQ ID NO: 3064649 - DNA, 25 bp, Homo sapien
catttgttttccccacgcataaggg

SEQ ID NO: 3064650 - DNA, 25 bp, Homo sapien
tcaaagtgtacagctcagcaatatt

SEQ ID NO: 3064651 - DNA, 25 bp, Homo sapien
ccttcctctaattcctataaacaag

SEQ ID NO: 3064652 - DNA, 25 bp, Homo sapien
ttccaccttcctctaattcctataa

SEQ ID NO: 3064653 - DNA, 25 bp, Homo sapien
ttcctctaattcctataaacaagaa

SEQ ID NO: 3064654 - DNA, 25 bp, Homo sapien
caccttcctctaattcctataaaca

SEQ ID NO: 3064655 - DNA, 25 bp, Homo sapien
attaaagtgtaagaagcaggccggg

SEQ ID NO: 3064656 - DNA, 25 bp, Homo sapien
tgaatcatgggcagattaaagtgta

SEQ ID NO: 3064657 - DNA, 25 bp, Homo sapien
atccctgggtgaatcatgggcagat

SEQ ID NO: 3064658 - DNA, 25 bp, Homo sapien
gcccaccccaggtccaatcagctgt

SEQ ID NO: 3064659 - DNA, 25 bp, Homo sapien
cagatgcaaatggttaagtgcaact

SEQ ID NO: 3064660 - DNA, 25 bp, Homo sapien
aatggttaagtgcaactcgcttggg

SEQ ID NO: 3064661 - DNA, 25 bp, Homo sapien
tgcaaatggttaagtgcaactcgct

SEQ ID NO: 3064662 - DNA, 25 bp, Homo sapien
ttaagtgcaactcgcttgggaagag

SEQ ID NO: 3064663 - DNA, 25 bp, Homo sapien
gagtggagtgaggatttcggctgca

SEQ ID NO: 3064664 - DNA, 25 bp, Homo sapien
acagcaggatggcccagatgatagg

SEQ ID NO: 3064665 - DNA, 25 bp, Homo sapien
gcaggatggcccagatgataggagg

SEQ ID NO: 3064666 - DNA, 25 bp, Homo sapien
cagggggcgatcactggctgggagg

SEQ ID NO: 3064667 - DNA, 25 bp, Homo sapien
gcactgacactctctgcgttcattc

SEQ ID NO: 3064668 - DNA, 25 bp, Homo sapien
cagcactgacactctctgcgttcat

SEQ ID NO: 3064669 - DNA, 25 bp, Homo sapien
tgtcagcactgacactctctgcgtt

SEQ ID NO: 3064670 - DNA, 25 bp, Homo sapien
tcagcactgacactctctgcgttca

SEQ ID NO: 3064671 - DNA, 25 bp, Homo sapien
ctgcctcgccgtccgcctctgtgca

SEQ ID NO: 3064672 - DNA, 25 bp, Homo sapien
gtcctcgcctctgtcgactatcagg

SEQ ID NO: 3064673 - DNA, 25 bp, Homo sapien
tgtcgactatcaggtaagcgccgcg

SEQ ID NO: 3064674 - DNA, 25 bp, Homo sapien
taagcgccgcggctccgaaatctgc

SEQ ID NO: 3064675 - DNA, 25 bp, Homo sapien
ttcgcgggcacgcacagccgcagcc

SEQ ID NO: 3064676 - DNA, 25 bp, Homo sapien
agccgcagccacgcacggatgggcg

SEQ ID NO: 3064677 - DNA, 25 bp, Homo sapien
ccgttcgcgggcacgcacagccgca

SEQ ID NO: 3064678 - DNA, 25 bp, Homo sapien
ccgctggtccccgttcgcgggcacg

SEQ ID NO: 3064679 - DNA, 25 bp, Homo sapien
tagaggttacgtgatctgcgctccc

SEQ ID NO: 3064680 - DNA, 25 bp, Homo sapien
tattctgagggtgttcagtcaacct

SEQ ID NO: 3064681 - DNA, 25 bp, Homo sapien
caatcagcgctgaaatcttggcgtt

SEQ ID NO: 3064682 - DNA, 25 bp, Homo sapien
cgagcccattgttggatctcgaggc

SEQ ID NO: 3064683 - DNA, 25 bp, Homo sapien
gtctataacctcctgttacactggg

SEQ ID NO: 3064684 - DNA, 25 bp, Homo sapien
aacctgtccctttcatagctgctca

SEQ ID NO: 3064685 - DNA, 25 bp, Homo sapien
gtgtagtcgcatgtgaacctgtccc

SEQ ID NO: 3064686 - DNA, 25 bp, Homo sapien
gaaacatcaggaatagccatttgga

SEQ ID NO: 3064687 - DNA, 25 bp, Homo sapien
tcttccggctcacatcaagcatgaa

SEQ ID NO: 3064688 - DNA, 25 bp, Homo sapien
tgtgctagtcgtgcaggagccaaaa

SEQ ID NO: 3064689 - DNA, 25 bp, Homo sapien
tcgttaatcctcagtcccgaggtgg

SEQ ID NO: 3064690 - DNA, 25 bp, Homo sapien
gccggtgacggcagaaccaaattta

SEQ ID NO: 3064691 - DNA, 25 bp, Homo sapien
cacactgtagtcatgggggcaggag

SEQ ID NO: 3064692 - DNA, 25 bp, Homo sapien
gaagctttcatttccggaatggacc

SEQ ID NO: 3064693 - DNA, 25 bp, Homo sapien
ggaccatcaacatcccttggagaag

SEQ ID NO: 3064694 - DNA, 25 bp, Homo sapien
cagggcagaccgtgggaagctttca

SEQ ID NO: 3064695 - DNA, 25 bp, Homo sapien
gggccaagaacacttctacgcttct

SEQ ID NO: 3064696 - DNA, 25 bp, Homo sapien
atgggtcctcccatcgaggaccaca

SEQ ID NO: 3064697 - DNA, 25 bp, Homo sapien
gatttgtttattcacgtagcaaacc

SEQ ID NO: 3064698 - DNA, 25 bp, Homo sapien
caagacggtttgtgatgggtcctcc

SEQ ID NO: 3064699 - DNA, 25 bp, Homo sapien
tccagggtttacactgtgcaagacg

SEQ ID NO: 3064700 - DNA, 25 bp, Homo sapien
ttaaagccacaatgcaagactccac

SEQ ID NO: 3064701 - DNA, 25 bp, Homo sapien
ggccaattggatccaaatccctggg

SEQ ID NO: 3064702 - DNA, 25 bp, Homo sapien
tagggccagacatcagtggagttat

SEQ ID NO: 3064703 - DNA, 25 bp, Homo sapien
acaagggcaaggaccgtaccactgt

SEQ ID NO: 3064704 - DNA, 25 bp, Homo sapien
actgtggctgctgcatgaagttgtc

SEQ ID NO: 3064705 - DNA, 25 bp, Homo sapien
tcacatcctagaatttgctgtcact

SEQ ID NO: 3064706 - DNA, 25 bp, Homo sapien
acatcctagaatttgctgtcactgt

SEQ ID NO: 3064707 - DNA, 25 bp, Homo sapien
tcactgtggctgctgcatgaagttg

SEQ ID NO: 3064708 - DNA, 25 bp, Homo sapien
ggcgccagaagcaagctggaaattc

SEQ ID NO: 3064709 - DNA, 25 bp, Homo sapien
gcaggaacatgtgttctcacagaga

SEQ ID NO: 3064710 - DNA, 25 bp, Homo sapien
caaaaactccaggtggtcgcacaga

SEQ ID NO: 3064711 - DNA, 25 bp, Homo sapien
tcgcacagaatgacaggactgaagt

SEQ ID NO: 3064712 - DNA, 25 bp, Homo sapien
ccagtgccacgcgatgccatttgtt

SEQ ID NO: 3064713 - DNA, 25 bp, Homo sapien
aggtcatctgctaggtccccagtca

SEQ ID NO: 3064714 - DNA, 25 bp, Homo sapien
tcctggtggtgctaaagaatatctc

SEQ ID NO: 3064715 - DNA, 25 bp, Homo sapien
ccttattacttgtcctgaggcagct

SEQ ID NO: 3064716 - DNA, 25 bp, Homo sapien
tcaggacaatctgctttctctcttc

SEQ ID NO: 3064717 - DNA, 25 bp, Homo sapien
gacaatctgctttctctcttcttac

SEQ ID NO: 3064718 - DNA, 25 bp, Homo sapien
ggacaatctgctttctctcttctta

SEQ ID NO: 3064719 - DNA, 25 bp, Homo sapien
caggacaatctgctttctctcttct

SEQ ID NO: 3064720 - DNA, 25 bp, Homo sapien
aagccatgcgtgtggtagatcggca

SEQ ID NO: 3064721 - DNA, 25 bp, Homo sapien
catggccttggactgtgtgtacctc

SEQ ID NO: 3064722 - DNA, 25 bp, Homo sapien
ccagaccgaatatatccaagggcat

SEQ ID NO: 3064723 - DNA, 25 bp, Homo sapien
gagagcatgttgtctgtccctttgc

SEQ ID NO: 3064724 - DNA, 25 bp, Homo sapien
tacaccaggacacggttttggctct

SEQ ID NO: 3064725 - DNA, 25 bp, Homo sapien
tctgtccccagggtgtcacgggacc

SEQ ID NO: 3064726 - DNA, 25 bp, Homo sapien
tgtcgtgggtactgtcaaacaagag

SEQ ID NO: 3064727 - DNA, 25 bp, Homo sapien
caaagcagttggcttcgcccagggt

SEQ ID NO: 3064728 - DNA, 25 bp, Homo sapien
cttcccagcggagggtgccatcccc

SEQ ID NO: 3064729 - DNA, 25 bp, Homo sapien
cagacagccgccagagaagccacca

SEQ ID NO: 3064730 - DNA, 25 bp, Homo sapien
ctcagagcccgacgggcccagtgta

SEQ ID NO: 3064731 - DNA, 25 bp, Homo sapien
agaccgcgacgtcgatgagtcctcc

SEQ ID NO: 3064732 - DNA, 25 bp, Homo sapien
ggcacttcgtggatgacctccttag

SEQ ID NO: 3064733 - DNA, 25 bp, Homo sapien
gccttgttgacatggagagagccct

SEQ ID NO: 3064734 - DNA, 25 bp, Homo sapien
catgattttggccactttgcagacc

SEQ ID NO: 3064735 - DNA, 25 bp, Homo sapien
gaggtacctactccatactgagggt

SEQ ID NO: 3064736 - DNA, 25 bp, Homo sapien
ctctaagccgttggcacctctgtgc

SEQ ID NO: 3064737 - DNA, 25 bp, Homo sapien
atcatgcctccctaagaccttggca

SEQ ID NO: 3064738 - DNA, 25 bp, Homo sapien
gggtcctaagcccacaatcatgcct

SEQ ID NO: 3064739 - DNA, 25 bp, Homo sapien
tgcaggcgtaggaatatggacatct

SEQ ID NO: 3064740 - DNA, 25 bp, Homo sapien
tggtggccatcagatcaacctgcgg

SEQ ID NO: 3064741 - DNA, 25 bp, Homo sapien
taagtcaagaaaggcctggtacaca

SEQ ID NO: 3064742 - DNA, 25 bp, Homo sapien
caagtcagagtaccccaaagaacgg

SEQ ID NO: 3064743 - DNA, 25 bp, Homo sapien
tacagctgacttcactagagagaaa

SEQ ID NO: 3064744 - DNA, 25 bp, Homo sapien
gatcatacaggagacaggcacaagg

SEQ ID NO: 3064745 - DNA, 25 bp, Homo sapien
gatgttccagcacgaaaaaccaagg

SEQ ID NO: 3064746 - DNA, 25 bp, Homo sapien
gaacttctgtttgccaacgggagga

SEQ ID NO: 3064747 - DNA, 25 bp, Homo sapien
gaactaacaccgacagggatctgga

SEQ ID NO: 3064748 - DNA, 25 bp, Homo sapien
ccaatagttagtgagtctgtttaga

SEQ ID NO: 3064749 - DNA, 25 bp, Homo sapien
taatgccaatagttagtgagtctgt

SEQ ID NO: 3064750 - DNA, 25 bp, Homo sapien
gtctgtttagatggctgtctcccgc

SEQ ID NO: 3064751 - DNA, 25 bp, Homo sapien
agtctgtttagatggctgtctcccg

SEQ ID NO: 3064752 - DNA, 25 bp, Homo sapien
cagcgggctgctcgctcctgtgcat

SEQ ID NO: 3064753 - DNA, 25 bp, Homo sapien
tcatctgtgagtcgggcgctgagct

SEQ ID NO: 3064754 - DNA, 25 bp, Homo sapien
ctgccaccagatgccgactcttgag

SEQ ID NO: 3064755 - DNA, 25 bp, Homo sapien
tgctgcctgaggtgcgtcgagtgca

SEQ ID NO: 3064756 - DNA, 25 bp, Homo sapien
ccactgaacgttgaggagatcaatt

SEQ ID NO: 3064757 - DNA, 25 bp, Homo sapien
tcaatttaagtgcagccctttgtcc

SEQ ID NO: 3064758 - DNA, 25 bp, Homo sapien
tggctaggtccctcttcagcagatg

SEQ ID NO: 3064759 - DNA, 25 bp, Homo sapien
tttagcagtgatcaatacagttcca

SEQ ID NO: 3064760 - DNA, 25 bp, Homo sapien
gtggaacaacgggtatcctcactgg

SEQ ID NO: 3064761 - DNA, 25 bp, Homo sapien
tgctgagtgcagttccgggctaatg

SEQ ID NO: 3064762 - DNA, 25 bp, Homo sapien
ctaagtgtcgcggagtgtcccgagc

SEQ ID NO: 3064763 - DNA, 25 bp, Homo sapien
tctgacaaagagtggctactgctga

SEQ ID NO: 3064764 - DNA, 25 bp, Homo sapien
gctggggggttgtccggccgtctga

SEQ ID NO: 3064765 - DNA, 25 bp, Homo sapien
ctggggggttgtccggccgtctgat

SEQ ID NO: 3064766 - DNA, 25 bp, Homo sapien
ggggggttgtccggccgtctgatga

SEQ ID NO: 3064767 - DNA, 25 bp, Homo sapien
tggggggttgtccggccgtctgatg

SEQ ID NO: 3064768 - DNA, 25 bp, Homo sapien
gggcggcgaaggctgcgtcggatag

SEQ ID NO: 3064769 - DNA, 25 bp, Homo sapien
cacatttggcatgcagggcggcgaa

SEQ ID NO: 3064770 - DNA, 25 bp, Homo sapien
gggtggcacactcgtggtccacagc

SEQ ID NO: 3064771 - DNA, 25 bp, Homo sapien
aggctgcgtcggataggtcctcaat

SEQ ID NO: 3064772 - DNA, 25 bp, Homo sapien
gagactgaagatcaacctcccgcca

SEQ ID NO: 3064773 - DNA, 25 bp, Homo sapien
agactgaagatcaacctcccgccag

SEQ ID NO: 3064774 - DNA, 25 bp, Homo sapien
attctcctcatcaggactccccttc

SEQ ID NO: 3064775 - DNA, 25 bp, Homo sapien
aaaaccaagaacagacaatcatgag

SEQ ID NO: 3064776 - DNA, 25 bp, Homo sapien
caaaaccaagaacagacaatcatga

SEQ ID NO: 3064777 - DNA, 25 bp, Homo sapien
gggatgacaatgttgttaatatcaa

SEQ ID NO: 3064778 - DNA, 25 bp, Homo sapien
tctctacgcgagttgttgcagcaac

SEQ ID NO: 3064779 - DNA, 25 bp, Homo sapien
gcagcaacagacattgggatgacaa

SEQ ID NO: 3064780 - DNA, 25 bp, Homo sapien
ggatttccttgtattgcagtttctc

SEQ ID NO: 3064781 - DNA, 25 bp, Homo sapien
tgggaagcactgacaaaaacactcg

SEQ ID NO: 3064782 - DNA, 25 bp, Homo sapien
tcaaggagagctggccctttgtatc

SEQ ID NO: 3064783 - DNA, 25 bp, Homo sapien
attctgatgcagctactggcttttg

SEQ ID NO: 3064784 - DNA, 25 bp, Homo sapien
caggcatgcaatatcacagccagca

SEQ ID NO: 3064785 - DNA, 25 bp, Homo sapien
tattgaagtgctcaccaagtcctga

SEQ ID NO: 3064786 - DNA, 25 bp, Homo sapien
tgatccaggcctaagttaacattct

SEQ ID NO: 3064787 - DNA, 25 bp, Homo sapien
ggtaaaaatttcaagtgatccaggc

SEQ ID NO: 3064788 - DNA, 25 bp, Homo sapien
taactgagtatgtgagggacactac

SEQ ID NO: 3064789 - DNA, 25 bp, Homo sapien
cctcacccaggcttagcctgtgtag

SEQ ID NO: 3064790 - DNA, 25 bp, Homo sapien
aataccctcacccaggcttagcctg

SEQ ID NO: 3064791 - DNA, 25 bp, Homo sapien
gcctctgcaataccctcacccaggc

SEQ ID NO: 3064792 - DNA, 25 bp, Homo sapien
ctgcaataccctcacccaggcttag

SEQ ID NO: 3064793 - DNA, 25 bp, Homo sapien
ccaacaggattagggccacggaact

SEQ ID NO: 3064794 - DNA, 25 bp, Homo sapien
tgagatcctataaatgccctgggct

SEQ ID NO: 3064795 - DNA, 25 bp, Homo sapien
tccaacagatcttgaatagtcacag

SEQ ID NO: 3064796 - DNA, 25 bp, Homo sapien
tatgtcatgatgagctgagatccta

SEQ ID NO: 3064797 - DNA, 25 bp, Homo sapien
cgatgtgctggctgtaacctgtgag

SEQ ID NO: 3064798 - DNA, 25 bp, Homo sapien
gatgtgctggctgtaacctgtgagc

SEQ ID NO: 3064799 - DNA, 25 bp, Homo sapien
tgagctagagctggcgggtgcaggg

SEQ ID NO: 3064800 - DNA, 25 bp, Homo sapien
gtaacctgtgagctagagctggcgg

SEQ ID NO: 3064801 - DNA, 25 bp, Homo sapien
ggtggagagctgtcgcaccaaggga

SEQ ID NO: 3064802 - DNA, 25 bp, Homo sapien
tagctcgaactgctcatgtctgtgt

SEQ ID NO: 3064803 - DNA, 25 bp, Homo sapien
agctgtcgcaccaagggactgtgtg

SEQ ID NO: 3064804 - DNA, 25 bp, Homo sapien
caagtagctcgaactgctcatgtct

SEQ ID NO: 3064805 - DNA, 25 bp, Homo sapien
gcttttggcgctgtcactcgctcca

SEQ ID NO: 3064806 - DNA, 25 bp, Homo sapien
tgggttgagcaagcgctctgctttt

SEQ ID NO: 3064807 - DNA, 25 bp, Homo sapien
cttctctcagatgaatggtctcgca

SEQ ID NO: 3064808 - DNA, 25 bp, Homo sapien
catcgtctaagtgctgcctgtgggt

SEQ ID NO: 3064809 - DNA, 25 bp, Homo sapien
cagaaaaagagctgtgaaatatgtc

SEQ ID NO: 3064810 - DNA, 25 bp, Homo sapien
gggaacagaaaaagagctgtgaaat

SEQ ID NO: 3064811 - DNA, 25 bp, Homo sapien
ggaacagaaaaagagctgtgaaata

SEQ ID NO: 3064812 - DNA, 25 bp, Homo sapien
aacagaaaaagagctgtgaaatatg

SEQ ID NO: 3064813 - DNA, 25 bp, Homo sapien
ggctgttgttaggaaggagctgacc

SEQ ID NO: 3064814 - DNA, 25 bp, Homo sapien
tccttacgagctgaatctggcagac

SEQ ID NO: 3064815 - DNA, 25 bp, Homo sapien
gcatgggtgctctgtgcttaagcga

SEQ ID NO: 3064816 - DNA, 25 bp, Homo sapien
aatttgtgcctgtccttacgagctg

SEQ ID NO: 3064817 - DNA, 25 bp, Homo sapien
taaaatagactggatacgggacctg

SEQ ID NO: 3064818 - DNA, 25 bp, Homo sapien
cattgtctagaagcattcggccctg

SEQ ID NO: 3064819 - DNA, 25 bp, Homo sapien
catggtaatcaggtcttcaggtcaa

SEQ ID NO: 3064820 - DNA, 25 bp, Homo sapien
tgaggctactcactgatccagagga

SEQ ID NO: 3064821 - DNA, 25 bp, Homo sapien
tgacgaaagttgtaccttgaaagta

SEQ ID NO: 3064822 - DNA, 25 bp, Homo sapien
ttgtaccttgaaagtatctgagttg

SEQ ID NO: 3064823 - DNA, 25 bp, Homo sapien
gagttgtaactgcaccttggctgat

SEQ ID NO: 3064824 - DNA, 25 bp, Homo sapien
tctttcacctagaagtctctcaagt

SEQ ID NO: 3064825 - DNA, 25 bp, Homo sapien
tgaacacaagagtccaactgggaaa

SEQ ID NO: 3064826 - DNA, 25 bp, Homo sapien
gaaatgctagaacaggatgaacaca

SEQ ID NO: 3064827 - DNA, 25 bp, Homo sapien
cacagtgcgcaggagggattcacat

SEQ ID NO: 3064828 - DNA, 25 bp, Homo sapien
catggtgttgatgctgcctgaacca

SEQ ID NO: 3064829 - DNA, 25 bp, Homo sapien
tgatatttcaggtagagtccgagga

SEQ ID NO: 3064830 - DNA, 25 bp, Homo sapien
taccaaaactgctcaccaatgtctg

SEQ ID NO: 3064831 - DNA, 25 bp, Homo sapien
gaagaaatggtatcgcctgacagtc

SEQ ID NO: 3064832 - DNA, 25 bp, Homo sapien
gcaaatatgttgctagtggctctct

SEQ ID NO: 3064833 - DNA, 25 bp, Homo sapien
gatttaatgctataggacacactgc

SEQ ID NO: 3064834 - DNA, 25 bp, Homo sapien
cagatttagctcgttgcaggaagcc

SEQ ID NO: 3064835 - DNA, 25 bp, Homo sapien
caataacagccactttgtacgagga

SEQ ID NO: 3064836 - DNA, 25 bp, Homo sapien
gcagtgtcaacctggtgggctcaaa

SEQ ID NO: 3064837 - DNA, 25 bp, Homo sapien
cttcttggaaagaggaacgatgctg

SEQ ID NO: 3064838 - DNA, 25 bp, Homo sapien
tgtaattgttcctcagcatcagagc

SEQ ID NO: 3064839 - DNA, 25 bp, Homo sapien
tgctgttgggtcgaacaagcctccg

SEQ ID NO: 3064840 - DNA, 25 bp, Homo sapien
gcttcttacagctcagtacaggacg

SEQ ID NO: 3064841 - DNA, 25 bp, Homo sapien
tgctccacatgatttggtagacagt

SEQ ID NO: 3064842 - DNA, 25 bp, Homo sapien
gctccacatgatttggtagacagtg

SEQ ID NO: 3064843 - DNA, 25 bp, Homo sapien
gtgactctgaaatatgaccaataat

SEQ ID NO: 3064844 - DNA, 25 bp, Homo sapien
ctctgaaatatgaccaataataggg

SEQ ID NO: 3064845 - DNA, 25 bp, Homo sapien
tttccaatggctgagaaacagactc

SEQ ID NO: 3064846 - DNA, 25 bp, Homo sapien
tccaatggctgagaaacagactcaa

SEQ ID NO: 3064847 - DNA, 25 bp, Homo sapien
ccaatggctgagaaacagactcaat

SEQ ID NO: 3064848 - DNA, 25 bp, Homo sapien
ggttttccaatggctgagaaacaga

SEQ ID NO: 3064849 - DNA, 25 bp, Homo sapien
gattctcatggttattattcttgaa

SEQ ID NO: 3064850 - DNA, 25 bp, Homo sapien
cacagctcaggaataaggtcttcac

SEQ ID NO: 3064851 - DNA, 25 bp, Homo sapien
caagtagtgtgatgttaggcgttag

SEQ ID NO: 3064852 - DNA, 25 bp, Homo sapien
tttcacgatttttactacaatgttg

SEQ ID NO: 3064853 - DNA, 25 bp, Homo sapien
catagtggagtctattttggttccc

SEQ ID NO: 3064854 - DNA, 25 bp, Homo sapien
tatgcaatacattatagagactctg

SEQ ID NO: 3064855 - DNA, 25 bp, Homo sapien
tattggtttcaatcaaagccctcag

SEQ ID NO: 3064856 - DNA, 25 bp, Homo sapien
ggttccctccttaatcctatggtga

SEQ ID NO: 3064857 - DNA, 25 bp, Homo sapien
ctcagaactaagtggaagaaataag

SEQ ID NO: 3064858 - DNA, 25 bp, Homo sapien
gaggtacctccccaagaactatcaa

SEQ ID NO: 3064859 - DNA, 25 bp, Homo sapien
tcagtcccatgatctgtcttcacct

SEQ ID NO: 3064860 - DNA, 25 bp, Homo sapien
ccatgatctgtcttcacctcagaac

SEQ ID NO: 3064861 - DNA, 25 bp, Homo sapien
gctgtgtaatctcaaagagtagtca

SEQ ID NO: 3064862 - DNA, 25 bp, Homo sapien
gaaaggtgttataagcttctgcagt

SEQ ID NO: 3064863 - DNA, 25 bp, Homo sapien
cgtaagagtcaagccagtgcttctg

SEQ ID NO: 3064864 - DNA, 25 bp, Homo sapien
taacatttccatcctcagctacagc

SEQ ID NO: 3064865 - DNA, 25 bp, Homo sapien
tgggaaatcttggtgcagcatggaa

SEQ ID NO: 3064866 - DNA, 25 bp, Homo sapien
cagtgcctgacatatcacaagtgct

SEQ ID NO: 3064867 - DNA, 25 bp, Homo sapien
tcacttggatgtgtaaccatgaaca

SEQ ID NO: 3064868 - DNA, 25 bp, Homo sapien
tcaacagcctatcaccaagattcag

SEQ ID NO: 3064869 - DNA, 25 bp, Homo sapien
tgatagttttcggcagcatttaaaa

SEQ ID NO: 3064870 - DNA, 25 bp, Homo sapien
attgatagttttcggcagcatttaa

SEQ ID NO: 3064871 - DNA, 25 bp, Homo sapien
tattgatagttttcggcagcattta

SEQ ID NO: 3064872 - DNA, 25 bp, Homo sapien
gatattgatagttttcggcagcatt

SEQ ID NO: 3064873 - DNA, 25 bp, Homo sapien
ttgctgacgaattcgatattccaag

SEQ ID NO: 3064874 - DNA, 25 bp, Homo sapien
cttattagcacgtatctgtttgtaa

SEQ ID NO: 3064875 - DNA, 25 bp, Homo sapien
ggtctgcagcccatttccattctga

SEQ ID NO: 3064876 - DNA, 25 bp, Homo sapien
ttccagcggctgacaatagctgccc

SEQ ID NO: 3064877 - DNA, 25 bp, Homo sapien
agtgaaatccaagagtagcagtaat

SEQ ID NO: 3064878 - DNA, 25 bp, Homo sapien
tgaaatccaagagtagcagtaatat

SEQ ID NO: 3064879 - DNA, 25 bp, Homo sapien
gtgaaatccaagagtagcagtaata

SEQ ID NO: 3064880 - DNA, 25 bp, Homo sapien
ggagcatactacatacctggctttt

SEQ ID NO: 3064881 - DNA, 25 bp, Homo sapien
ccaagcagctaggatcaggagcata

SEQ ID NO: 3064882 - DNA, 25 bp, Homo sapien
gggtctcacactctatcattgaggc

SEQ ID NO: 3064883 - DNA, 25 bp, Homo sapien
taacctagagttcctttgcttaagc

SEQ ID NO: 3064884 - DNA, 25 bp, Homo sapien
cacctttctatcctgcaaaatcttt

SEQ ID NO: 3064885 - DNA, 25 bp, Homo sapien
tccttaaagacactgaggtttagca

SEQ ID NO: 3064886 - DNA, 25 bp, Homo sapien
gcaacagaacccatcttcaagaaaa

SEQ ID NO: 3064887 - DNA, 25 bp, Homo sapien
gagaccatattttcagaaatagtcc

SEQ ID NO: 3064888 - DNA, 25 bp, Homo sapien
cgcccagctgagaccatattttcag

SEQ ID NO: 3064889 - DNA, 25 bp, Homo sapien
cagcagtgtcactaggtatcaggca

SEQ ID NO: 3064890 - DNA, 25 bp, Homo sapien
aagctatgtcctagatacaaagcag

SEQ ID NO: 3064891 - DNA, 25 bp, Homo sapien
taagttggagcagttattttacgtc

SEQ ID NO: 3064892 - DNA, 25 bp, Homo sapien
caagtatttgtgctgagttctgaaa

SEQ ID NO: 3064893 - DNA, 25 bp, Homo sapien
tgacatctcaattctcagaggaaag

SEQ ID NO: 3064894 - DNA, 25 bp, Homo sapien
ccacagaaacgagagcaccaataca

SEQ ID NO: 3064895 - DNA, 25 bp, Homo sapien
taatcactgcattgggaggcattct

SEQ ID NO: 3064896 - DNA, 25 bp, Homo sapien
gagggaattcctatcttacactaca

SEQ ID NO: 3064897 - DNA, 25 bp, Homo sapien
taaaaactactatctgttaggcttc

SEQ ID NO: 3064898 - DNA, 25 bp, Homo sapien
aaataatccaagaatgtcttttttg

SEQ ID NO: 3064899 - DNA, 25 bp, Homo sapien
aaaactactatctgttaggcttcag

SEQ ID NO: 3064900 - DNA, 25 bp, Homo sapien
gaaatacactactaaatcaaccaaa

SEQ ID NO: 3064901 - DNA, 25 bp, Homo sapien
gccggattacttcaggcagtctctg

SEQ ID NO: 3064902 - DNA, 25 bp, Homo sapien
gctacactggtttgcttgccggatt

SEQ ID NO: 3064903 - DNA, 25 bp, Homo sapien
gagctacaatcctcacaacaggcct

SEQ ID NO: 3064904 - DNA, 25 bp, Homo sapien
tcaccacttgctgttgaagctacac

SEQ ID NO: 3064905 - DNA, 25 bp, Homo sapien
aatttgcccgccaataaggaatcct

SEQ ID NO: 3064906 - DNA, 25 bp, Homo sapien
aacagcccgcaagtttagctcctaa

SEQ ID NO: 3064907 - DNA, 25 bp, Homo sapien
taggcctaggtcttccagaacagtt

SEQ ID NO: 3064908 - DNA, 25 bp, Homo sapien
aactgtaaccagtaacatccagctg

SEQ ID NO: 3064909 - DNA, 25 bp, Homo sapien
gttaaatgctgatgactgaatagaa

SEQ ID NO: 3064910 - DNA, 25 bp, Homo sapien
aggcggacagattgcttttcagcac

SEQ ID NO: 3064911 - DNA, 25 bp, Homo sapien
gactgaatagaacacaattctctgt

SEQ ID NO: 3064912 - DNA, 25 bp, Homo sapien
ccaaggcggacagattgcttttcag

SEQ ID NO: 3064913 - DNA, 25 bp, Homo sapien
gagccaagctgacaggagatctgga

SEQ ID NO: 3064914 - DNA, 25 bp, Homo sapien
taacagtagtagagacctgaacagg

SEQ ID NO: 3064915 - DNA, 25 bp, Homo sapien
cagacagaacttggatcctctagag

SEQ ID NO: 3064916 - DNA, 25 bp, Homo sapien
tttagtctacgtgtgacaggaagcc

SEQ ID NO: 3064917 - DNA, 25 bp, Homo sapien
gaaagcaagggccatgtttgtccta

SEQ ID NO: 3064918 - DNA, 25 bp, Homo sapien
gcaagggccatgtttgtcctattca

SEQ ID NO: 3064919 - DNA, 25 bp, Homo sapien
tgaaagcaagggccatgtttgtcct

SEQ ID NO: 3064920 - DNA, 25 bp, Homo sapien
aagcaagggccatgtttgtcctatt

SEQ ID NO: 3064921 - DNA, 25 bp, Homo sapien
tttacgtataaagaacatggaggcc

SEQ ID NO: 3064922 - DNA, 25 bp, Homo sapien
gcactccaggtaattgtgatgacca

SEQ ID NO: 3064923 - DNA, 25 bp, Homo sapien
cattaatgttagagaattgctgccc

SEQ ID NO: 3064924 - DNA, 25 bp, Homo sapien
caaatctgcgcccagtaatctgtgt

SEQ ID NO: 3064925 - DNA, 25 bp, Homo sapien
tatgccaagtaccagggtgaccact

SEQ ID NO: 3064926 - DNA, 25 bp, Homo sapien
gctgggccccaattaacagaagaaa

SEQ ID NO: 3064927 - DNA, 25 bp, Homo sapien
gagtaatttgtcaaaggcggctcaa

SEQ ID NO: 3064928 - DNA, 25 bp, Homo sapien
catggagactgtttgtttagggtcc

SEQ ID NO: 3064929 - DNA, 25 bp, Homo sapien
tgatatgcactaggctgaacagctg

SEQ ID NO: 3064930 - DNA, 25 bp, Homo sapien
gaagatctctcccattagcttggga

SEQ ID NO: 3064931 - DNA, 25 bp, Homo sapien
tctatatgctaatcaaacagggtca

SEQ ID NO: 3064932 - DNA, 25 bp, Homo sapien
tccctgggtcaaaactctatatgct

SEQ ID NO: 3064933 - DNA, 25 bp, Homo sapien
tttgtccaaggtggcaaaacacaag

SEQ ID NO: 3064934 - DNA, 25 bp, Homo sapien
tagaaaatgattctcgcagcccagc

SEQ ID NO: 3064935 - DNA, 25 bp, Homo sapien
caaaaaagttccatgaagattcagg

SEQ ID NO: 3064936 - DNA, 25 bp, Homo sapien
gaaacagcaagtgcactaagagcat

SEQ ID NO: 3064937 - DNA, 25 bp, Homo sapien
tccctcaaggtgaagttactcattt

SEQ ID NO: 3064938 - DNA, 25 bp, Homo sapien
taaagtgaactcatagtattgacat

SEQ ID NO: 3064939 - DNA, 25 bp, Homo sapien
aaatgtgcacatgtgtactcaagca

SEQ ID NO: 3064940 - DNA, 25 bp, Homo sapien
cacagggcatttgaccacattttgg

SEQ ID NO: 3064941 - DNA, 25 bp, Homo sapien
taaagtcgatcaaagccctacttaa

SEQ ID NO: 3064942 - DNA, 25 bp, Homo sapien
taaaattggattcctacctcacacc

SEQ ID NO: 3064943 - DNA, 25 bp, Homo sapien
tatccactatccacaggcaaaataa

SEQ ID NO: 3064944 - DNA, 25 bp, Homo sapien
catacagaaaactaacttaaagtcg

SEQ ID NO: 3064945 - DNA, 25 bp, Homo sapien
cataagggtgcactcctgtggtccc

SEQ ID NO: 3064946 - DNA, 25 bp, Homo sapien
gctgcagcaagctacgactatgcca

SEQ ID NO: 3064947 - DNA, 25 bp, Homo sapien
cctattagtgtctggaaggatgaag

SEQ ID NO: 3064948 - DNA, 25 bp, Homo sapien
tgactccaatatttttaccaaagga

SEQ ID NO: 3064949 - DNA, 25 bp, Homo sapien
tgtgttgtttcaaatcagaatgacc

SEQ ID NO: 3064950 - DNA, 25 bp, Homo sapien
gccaatgaattgactaagaaatgtg

SEQ ID NO: 3064951 - DNA, 25 bp, Homo sapien
gaatgaccttgaaaagccatagtac

SEQ ID NO: 3064952 - DNA, 25 bp, Homo sapien
gcacatccttaggtagttccagcta

SEQ ID NO: 3064953 - DNA, 25 bp, Homo sapien
tactggtttaaaatttctgaatatg

SEQ ID NO: 3064954 - DNA, 25 bp, Homo sapien
cataaggtcatttttacgagttcac

SEQ ID NO: 3064955 - DNA, 25 bp, Homo sapien
tatctctcaagatcagcgctctgaa

SEQ ID NO: 3064956 - DNA, 25 bp, Homo sapien
gcaaatagtgtaccaaacagacatg

SEQ ID NO: 3064957 - DNA, 25 bp, Homo sapien
tatataactatcacctggttggacc

SEQ ID NO: 3064958 - DNA, 25 bp, Homo sapien
aacagctgggtacaagcacccacca

SEQ ID NO: 3064959 - DNA, 25 bp, Homo sapien
gaacagctgggtacaagcacccacc

SEQ ID NO: 3064960 - DNA, 25 bp, Homo sapien
aaaccagctgcttacaattaaatct

SEQ ID NO: 3064961 - DNA, 25 bp, Homo sapien
ccagctgcttacaattaaatctagc

SEQ ID NO: 3064962 - DNA, 25 bp, Homo sapien
agctgcttacaattaaatctagcat

SEQ ID NO: 3064963 - DNA, 25 bp, Homo sapien
ataatttcttaaaccagctgcttac

SEQ ID NO: 3064964 - DNA, 25 bp, Homo sapien
gttgaggctactcctagaacagggg

SEQ ID NO: 3064965 - DNA, 25 bp, Homo sapien
tggggctttagggaatcattaatac

SEQ ID NO: 3064966 - DNA, 25 bp, Homo sapien
gctactcctagaacaggggttctta

SEQ ID NO: 3064967 - DNA, 25 bp, Homo sapien
gctttagggaatcattaatacccat

SEQ ID NO: 3064968 - DNA, 25 bp, Homo sapien
tttattcttggctgtatggagatac

SEQ ID NO: 3064969 - DNA, 25 bp, Homo sapien
aatcacgatgaaactcattccatct

SEQ ID NO: 3064970 - DNA, 25 bp, Homo sapien
gcattttgaaatcgacctcactccc

SEQ ID NO: 3064971 - DNA, 25 bp, Homo sapien
caccagatgcctcgatatgtaaggg

SEQ ID NO: 3064972 - DNA, 25 bp, Homo sapien
ttggagtagaggttaatgaacacac

SEQ ID NO: 3064973 - DNA, 25 bp, Homo sapien
aaaacactctcctcatgagctgctg

SEQ ID NO: 3064974 - DNA, 25 bp, Homo sapien
taccagaatacaggaaaaggatatt

SEQ ID NO: 3064975 - DNA, 25 bp, Homo sapien
aacagtaccagaatacaggaaaagg

SEQ ID NO: 3064976 - DNA, 25 bp, Homo sapien
ttaaacagtaccagaatacaggaaa

SEQ ID NO: 3064977 - DNA, 25 bp, Homo sapien
cagtaccagaatacaggaaaaggat

SEQ ID NO: 3064978 - DNA, 25 bp, Homo sapien
gcccaggagtcttcggctgtagtaa

SEQ ID NO: 3064979 - DNA, 25 bp, Homo sapien
agaggccagagacgccatcaggcat

SEQ ID NO: 3064980 - DNA, 25 bp, Homo sapien
tcaactagggtgagggaaggtccta

SEQ ID NO: 3064981 - DNA, 25 bp, Homo sapien
taatggtgcctctgttaagaaaacc

SEQ ID NO: 3064982 - DNA, 25 bp, Homo sapien
ggaaggccagcctgctaggaaacac

SEQ ID NO: 3064983 - DNA, 25 bp, Homo sapien
taggaaacacccaagagcaattctg

SEQ ID NO: 3064984 - DNA, 25 bp, Homo sapien
tctaggactgccacaaggacacttc

SEQ ID NO: 3064985 - DNA, 25 bp, Homo sapien
ggaactcggcccacaatgtctaatt

SEQ ID NO: 3064986 - DNA, 25 bp, Homo sapien
tcgcccagttggaaatctagagaaa

SEQ ID NO: 3064987 - DNA, 25 bp, Homo sapien
tgaaaaattcactacgcacagggtg

SEQ ID NO: 3064988 - DNA, 25 bp, Homo sapien
gagaggtcacctgttgcactaagca

SEQ ID NO: 3064989 - DNA, 25 bp, Homo sapien
cagggtgtgcccaaagaatacttgc

SEQ ID NO: 3064990 - DNA, 25 bp, Homo sapien
tgaggaactcgagcctaggtagaca

SEQ ID NO: 3064991 - DNA, 25 bp, Homo sapien
gagtaggcctgctggagctttgcac

SEQ ID NO: 3064992 - DNA, 25 bp, Homo sapien
tcccaggttgcctcatgagaaaagc

SEQ ID NO: 3064993 - DNA, 25 bp, Homo sapien
tgcactaactctatggaccctgtgg

SEQ ID NO: 3064994 - DNA, 25 bp, Homo sapien
aacagcaaagctatgtgccttcagg

SEQ ID NO: 3064995 - DNA, 25 bp, Homo sapien
tccctcctggtcaatgctggtgtcc

SEQ ID NO: 3064996 - DNA, 25 bp, Homo sapien
actgtgtggtcagagagctgtctaa

SEQ ID NO: 3064997 - DNA, 25 bp, Homo sapien
ctggtgtccacccacgtactgtgtg

SEQ ID NO: 3064998 - DNA, 25 bp, Homo sapien
tctaatctatattccccatgagggc

SEQ ID NO: 3064999 - DNA, 25 bp, Homo sapien
gactctagtaaagaacctggactct

SEQ ID NO: 3065000 - DNA, 25 bp, Homo sapien
gaaggttttcaggtctctacagagc

SEQ ID NO: 3065001 - DNA, 25 bp, Homo sapien
ccatgagggcaagacaaggattgta

SEQ ID NO: 3065002 - DNA, 25 bp, Homo sapien
tggtgccaccaaagccctatacctt

SEQ ID NO: 3065003 - DNA, 25 bp, Homo sapien
taaaagagtacgttcacttcagaga

SEQ ID NO: 3065004 - DNA, 25 bp, Homo sapien
gctttctgcctatactgacctctca

SEQ ID NO: 3065005 - DNA, 25 bp, Homo sapien
cctctcagtaggtcacaatcaaaag

SEQ ID NO: 3065006 - DNA, 25 bp, Homo sapien
gcagttatatttccactgtaccaag

SEQ ID NO: 3065007 - DNA, 25 bp, Homo sapien
aacacaacgtactgcagaattttca

SEQ ID NO: 3065008 - DNA, 25 bp, Homo sapien
aagatatttacggaagcatgcagct

SEQ ID NO: 3065009 - DNA, 25 bp, Homo sapien
tagtgacatcatatcaaacacaacg

SEQ ID NO: 3065010 - DNA, 25 bp, Homo sapien
tctcattgtctggtcaactgctgaa

SEQ ID NO: 3065011 - DNA, 25 bp, Homo sapien
tgatcttgctcaacaagaactttaa

SEQ ID NO: 3065012 - DNA, 25 bp, Homo sapien
acacttggctaaataaataccagcc

SEQ ID NO: 3065013 - DNA, 25 bp, Homo sapien
agccttaagagtcaacccggtgatc

SEQ ID NO: 3065014 - DNA, 25 bp, Homo sapien
aaaattgaagactgggtgtgctctc

SEQ ID NO: 3065015 - DNA, 25 bp, Homo sapien
caaaggtaactaggtcaactcagca

SEQ ID NO: 3065016 - DNA, 25 bp, Homo sapien
tgaaactagactgtgcttggaggcg

SEQ ID NO: 3065017 - DNA, 25 bp, Homo sapien
cagcatttgtccctgcttactggaa

SEQ ID NO: 3065018 - DNA, 25 bp, Homo sapien
gatgaagtgagagcccgttttcccc

SEQ ID NO: 3065019 - DNA, 25 bp, Homo sapien
gagtcagcatcaactggctccgtgg

SEQ ID NO: 3065020 - DNA, 25 bp, Homo sapien
cgcttttgtaatctgcgggcacggc

SEQ ID NO: 3065021 - DNA, 25 bp, Homo sapien
ggtacatgacgctgctcgggatcag

SEQ ID NO: 3065022 - DNA, 25 bp, Homo sapien
agtccagcctctcccgatgccgagg

SEQ ID NO: 3065023 - DNA, 25 bp, Homo sapien
tccacggccccttactgcctcccca

SEQ ID NO: 3065024 - DNA, 25 bp, Homo sapien
acggccccttactgcctccccagag

SEQ ID NO: 3065025 - DNA, 25 bp, Homo sapien
agcctctcccgatgccgaggccgag

SEQ ID NO: 3065026 - DNA, 25 bp, Homo sapien
agaaaaggctacctattcaaggtca

SEQ ID NO: 3065027 - DNA, 25 bp, Homo sapien
caaatacagatggagctgctacacc

SEQ ID NO: 3065028 - DNA, 25 bp, Homo sapien
cacacaaattgagattctgcagtaa

SEQ ID NO: 3065029 - DNA, 25 bp, Homo sapien
tcatttagctataaaaggttgggct

SEQ ID NO: 3065030 - DNA, 25 bp, Homo sapien
taagccctaaatgactggactagag

SEQ ID NO: 3065031 - DNA, 25 bp, Homo sapien
cttaacagcacccttctttagcgtg

SEQ ID NO: 3065032 - DNA, 25 bp, Homo sapien
ctaactttatcgagagcttggtaca

SEQ ID NO: 3065033 - DNA, 25 bp, Homo sapien
acaacttgcatgaatcaggtggtat

SEQ ID NO: 3065034 - DNA, 25 bp, Homo sapien
taggcggagtcagaaaatgcttttc

SEQ ID NO: 3065035 - DNA, 25 bp, Homo sapien
gagtattcaaagcaccacagtaagt

SEQ ID NO: 3065036 - DNA, 25 bp, Homo sapien
taaatgatggcctaccatggtagct

SEQ ID NO: 3065037 - DNA, 25 bp, Homo sapien
gaggcaatcctcatacaggctgaga

SEQ ID NO: 3065038 - DNA, 25 bp, Homo sapien
taaggatgagtccaaattccccaca

SEQ ID NO: 3065039 - DNA, 25 bp, Homo sapien
cacggttcagctcaaggttacatgc

SEQ ID NO: 3065040 - DNA, 25 bp, Homo sapien
tattccccattactcccaggttgag

SEQ ID NO: 3065041 - DNA, 25 bp, Homo sapien
tactcatgctactctttcacggttc

SEQ ID NO: 3065042 - DNA, 25 bp, Homo sapien
aactagctacagtacttagctttga

SEQ ID NO: 3065043 - DNA, 25 bp, Homo sapien
gaaaccagaaactagctacagtact

SEQ ID NO: 3065044 - DNA, 25 bp, Homo sapien
tttctatgaagtgtctctcctatac

SEQ ID NO: 3065045 - DNA, 25 bp, Homo sapien
gaagtgtctctcctatactagaaac

SEQ ID NO: 3065046 - DNA, 25 bp, Homo sapien
cgtgcaacgcgccaagatgtgtgtt

SEQ ID NO: 3065047 - DNA, 25 bp, Homo sapien
tcttcaggccgcctttttaaataga

SEQ ID NO: 3065048 - DNA, 25 bp, Homo sapien
gaagttcaaggcgagagccagagtt

SEQ ID NO: 3065049 - DNA, 25 bp, Homo sapien
tcttttacgggaataaatcatgttc

SEQ ID NO: 3065050 - DNA, 25 bp, Homo sapien
tcccagcccggacccgcagcaggga

SEQ ID NO: 3065051 - DNA, 25 bp, Homo sapien
gggcgactcccagcccggacccgca

SEQ ID NO: 3065052 - DNA, 25 bp, Homo sapien
cccagcccggacccgcagcagggaa

SEQ ID NO: 3065053 - DNA, 25 bp, Homo sapien
cgcccttggggcgactcccagcccg

SEQ ID NO: 3065054 - DNA, 25 bp, Homo sapien
gccacagggagagcgaggagaagga

SEQ ID NO: 3065055 - DNA, 25 bp, Homo sapien
gagagaaatgggagccacagggaga

SEQ ID NO: 3065056 - DNA, 25 bp, Homo sapien
gagccacagggagagcgaggagaag

SEQ ID NO: 3065057 - DNA, 25 bp, Homo sapien
agagagagaaatgggagccacaggg

SEQ ID NO: 3065058 - DNA, 25 bp, Homo sapien
cgggcggattcagccccacaaaatg

SEQ ID NO: 3065059 - DNA, 25 bp, Homo sapien
agcgtagcccgggcggattcagccc

SEQ ID NO: 3065060 - DNA, 25 bp, Homo sapien
cacgtgatggaggagcgtagcccgg

SEQ ID NO: 3065061 - DNA, 25 bp, Homo sapien
acaaaatgggcgcagtttgcaaaca

SEQ ID NO: 3065062 - DNA, 25 bp, Homo sapien
ttcgctacggtgctcggttctcccg

SEQ ID NO: 3065063 - DNA, 25 bp, Homo sapien
gcacaaacaagcaccgccgtctgca

SEQ ID NO: 3065064 - DNA, 25 bp, Homo sapien
cggcgagacgagtcggcttcgctac

SEQ ID NO: 3065065 - DNA, 25 bp, Homo sapien
tttccagccggggagcgcgcttcag

SEQ ID NO: 3065066 - DNA, 25 bp, Homo sapien
ctcgccgtggccgatgtttttgtac

SEQ ID NO: 3065067 - DNA, 25 bp, Homo sapien
cctttaatctgaagcggagggagaa

SEQ ID NO: 3065068 - DNA, 25 bp, Homo sapien
gagggagaatggagcgagcgagcaa

SEQ ID NO: 3065069 - DNA, 25 bp, Homo sapien
aatggcggccgagctccttttccct

SEQ ID NO: 3065070 - DNA, 25 bp, Homo sapien
gtgcggcgacggcacgcagcactgc

SEQ ID NO: 3065071 - DNA, 25 bp, Homo sapien
gacggcacgcagcactgcggcaggg

SEQ ID NO: 3065072 - DNA, 25 bp, Homo sapien
tgcggcgacggcacgcagcactgcg

SEQ ID NO: 3065073 - DNA, 25 bp, Homo sapien
ggcgacggcacgcagcactgcggca

SEQ ID NO: 3065074 - DNA, 25 bp, Homo sapien
cctgacaatttgtatgacttctgga

SEQ ID NO: 3065075 - DNA, 25 bp, Homo sapien
gcaagcctgaagatgccaccaacat

SEQ ID NO: 3065076 - DNA, 25 bp, Homo sapien
gatttccagccacattacaacaatg

SEQ ID NO: 3065077 - DNA, 25 bp, Homo sapien
tccttggtgatagcattaagccact

SEQ ID NO: 3065078 - DNA, 25 bp, Homo sapien
tggatgtgcaaacatgctaaaggca

SEQ ID NO: 3065079 - DNA, 25 bp, Homo sapien
ccaaagcgtcaaagctggaatcagg

SEQ ID NO: 3065080 - DNA, 25 bp, Homo sapien
aaatggaggccttagctgattcaaa

SEQ ID NO: 3065081 - DNA, 25 bp, Homo sapien
tactcaattggtgaactggatgtgc

SEQ ID NO: 3065082 - DNA, 25 bp, Homo sapien
tatacacaagcaataagcaatctga

SEQ ID NO: 3065083 - DNA, 25 bp, Homo sapien
tattagagccaataaacacatccaa

SEQ ID NO: 3065084 - DNA, 25 bp, Homo sapien
gacttagaaagccaagcacgatggc

SEQ ID NO: 3065085 - DNA, 25 bp, Homo sapien
caacacagttacaggatacaagctc

SEQ ID NO: 3065086 - DNA, 25 bp, Homo sapien
taagcagttcccgtgtagacaaaat

SEQ ID NO: 3065087 - DNA, 25 bp, Homo sapien
ggattacctctaagagcccactgag

SEQ ID NO: 3065088 - DNA, 25 bp, Homo sapien
aaattacatgcgaggaaatggcagg

SEQ ID NO: 3065089 - DNA, 25 bp, Homo sapien
gcaattccagaagggcacgcttcaa

SEQ ID NO: 3065090 - DNA, 25 bp, Homo sapien
atagtaaacaccaatatacttggac

SEQ ID NO: 3065091 - DNA, 25 bp, Homo sapien
ttaatagtaaacaccaatatacttg

SEQ ID NO: 3065092 - DNA, 25 bp, Homo sapien
agtaaacaccaatatacttggacca

SEQ ID NO: 3065093 - DNA, 25 bp, Homo sapien
caattaatagtaaacaccaatatac

SEQ ID NO: 3065094 - DNA, 25 bp, Homo sapien
aattctctcgttttgcttgtcaaga

SEQ ID NO: 3065095 - DNA, 25 bp, Homo sapien
tccagcagccctaagaactacctga

SEQ ID NO: 3065096 - DNA, 25 bp, Homo sapien
tcagtctagcacacaaggcatccag

SEQ ID NO: 3065097 - DNA, 25 bp, Homo sapien
gccttgcagatctttctatatcata

SEQ ID NO: 3065098 - DNA, 25 bp, Homo sapien
tatgtacaagagattagaggagcca

SEQ ID NO: 3065099 - DNA, 25 bp, Homo sapien
acttggtgtaagtgctacctgctga

SEQ ID NO: 3065100 - DNA, 25 bp, Homo sapien
tgtccaaatgaggtttaccctgtga

SEQ ID NO: 3065101 - DNA, 25 bp, Homo sapien
gtcatacgtgtaaaccagcaggtct

SEQ ID NO: 3065102 - DNA, 25 bp, Homo sapien
tccctcggttaccaagtataagcag

SEQ ID NO: 3065103 - DNA, 25 bp, Homo sapien
cttaagaggcatccaagtagcattc

SEQ ID NO: 3065104 - DNA, 25 bp, Homo sapien
gtcaggatataaagacaatactcag

SEQ ID NO: 3065105 - DNA, 25 bp, Homo sapien
caagtagcattcatagtgtcaggat

SEQ ID NO: 3065106 - DNA, 25 bp, Homo sapien
atgtgttcttgctatgcgtttgtca

SEQ ID NO: 3065107 - DNA, 25 bp, Homo sapien
aggcgagagcccgagatcgcacctc

SEQ ID NO: 3065108 - DNA, 25 bp, Homo sapien
tgtcactgaggcttcgaagacttgg

SEQ ID NO: 3065109 - DNA, 25 bp, Homo sapien
gcgacagtttgactcttgacccaag

SEQ ID NO: 3065110 - DNA, 25 bp, Homo sapien
gctccctcgagctcgtcgggtcagg

SEQ ID NO: 3065111 - DNA, 25 bp, Homo sapien
agggacacctcctctacctcaccat

SEQ ID NO: 3065112 - DNA, 25 bp, Homo sapien
gctcgtcgggtcagggacacctcct

SEQ ID NO: 3065113 - DNA, 25 bp, Homo sapien
cgtcccaggcctacgagtgggcgct

SEQ ID NO: 3065114 - DNA, 25 bp, Homo sapien
aaatcctgaactatggtatctaaag

SEQ ID NO: 3065115 - DNA, 25 bp, Homo sapien
cctcagtcaatcacataagtatcta

SEQ ID NO: 3065116 - DNA, 25 bp, Homo sapien
taaggacaggagtttaaatcctgaa

SEQ ID NO: 3065117 - DNA, 25 bp, Homo sapien
cacacaatgtacagaagactaaatg

SEQ ID NO: 3065118 - DNA, 25 bp, Homo sapien
tacttgttctgacggttttgtggat

SEQ ID NO: 3065119 - DNA, 25 bp, Homo sapien
cttgttctgacggttttgtggattc

SEQ ID NO: 3065120 - DNA, 25 bp, Homo sapien
ttacttgttctgacggttttgtgga

SEQ ID NO: 3065121 - DNA, 25 bp, Homo sapien
ttgttctgacggttttgtggattcc

SEQ ID NO: 3065122 - DNA, 25 bp, Homo sapien
cacccgccggctaaccgtgcacttt

SEQ ID NO: 3065123 - DNA, 25 bp, Homo sapien
actttaacccgccctccagctgtgt

SEQ ID NO: 3065124 - DNA, 25 bp, Homo sapien
gcactttaacccgccctccagctgt

SEQ ID NO: 3065125 - DNA, 25 bp, Homo sapien
ccgtgcactttaacccgccctccag

SEQ ID NO: 3065126 - DNA, 25 bp, Homo sapien
gaaagagaacagtgttgaagaaccc

SEQ ID NO: 3065127 - DNA, 25 bp, Homo sapien
gtcaagatagccagcaggggaaaga

SEQ ID NO: 3065128 - DNA, 25 bp, Homo sapien
gtactatagtactcttgggagtcat

SEQ ID NO: 3065129 - DNA, 25 bp, Homo sapien
ggggaaagagaacagtgttgaagaa

SEQ ID NO: 3065130 - DNA, 25 bp, Homo sapien
taatcaagatgggtgaatgcaatat

SEQ ID NO: 3065131 - DNA, 25 bp, Homo sapien
aaaagagtaaataatcaagatgggt

SEQ ID NO: 3065132 - DNA, 25 bp, Homo sapien
taaataatcaagatgggtgaatgca

SEQ ID NO: 3065133 - DNA, 25 bp, Homo sapien
gaaaagagtaaataatcaagatggg

SEQ ID NO: 3065134 - DNA, 25 bp, Homo sapien
ggtccctcgtgtccctttgtagtca

SEQ ID NO: 3065135 - DNA, 25 bp, Homo sapien
tcatatagcatgtagcctcttgtat

SEQ ID NO: 3065136 - DNA, 25 bp, Homo sapien
tagcatgtagcctcttgtatttgac

SEQ ID NO: 3065137 - DNA, 25 bp, Homo sapien
ttctgtcgcctcaaaaaggtccctc

SEQ ID NO: 3065138 - DNA, 25 bp, Homo sapien
gcttgacttggccctgatgtttgaa

SEQ ID NO: 3065139 - DNA, 25 bp, Homo sapien
tagtccttgtcctgcttgacttggc

SEQ ID NO: 3065140 - DNA, 25 bp, Homo sapien
gcagagtctcctttacacttgctgt

SEQ ID NO: 3065141 - DNA, 25 bp, Homo sapien
tggaggttgcagagtctcctttaca

SEQ ID NO: 3065142 - DNA, 25 bp, Homo sapien
taaatacaaccagcatagaaagacc

SEQ ID NO: 3065143 - DNA, 25 bp, Homo sapien
cagaaaccaaaaccagaatgccatg

SEQ ID NO: 3065144 - DNA, 25 bp, Homo sapien
ataaatacaaccagcatagaaagac

SEQ ID NO: 3065145 - DNA, 25 bp, Homo sapien
ggtgggataaggaatggccatggaa

SEQ ID NO: 3065146 - DNA, 25 bp, Homo sapien
ggataaggaatggccatggaagata

SEQ ID NO: 3065147 - DNA, 25 bp, Homo sapien
taaggaatggccatggaagataact

SEQ ID NO: 3065148 - DNA, 25 bp, Homo sapien
gggtgggataaggaatggccatgga

SEQ ID NO: 3065149 - DNA, 25 bp, Homo sapien
ccaggtgccataggtccctgtccca

SEQ ID NO: 3065150 - DNA, 25 bp, Homo sapien
ggtgccataggtccctgtcccagca

SEQ ID NO: 3065151 - DNA, 25 bp, Homo sapien
ccccaggtgccataggtccctgtcc

SEQ ID NO: 3065152 - DNA, 25 bp, Homo sapien
tgcccccaggtgccataggtccctg

SEQ ID NO: 3065153 - DNA, 25 bp, Homo sapien
cagatagtggccacccaggtttgct

SEQ ID NO: 3065154 - DNA, 25 bp, Homo sapien
ggtcagatagtggccacccaggttt

SEQ ID NO: 3065155 - DNA, 25 bp, Homo sapien
tggccacccaggtttgctgggttgg

SEQ ID NO: 3065156 - DNA, 25 bp, Homo sapien
ctgatacaggctctgcatgcccatt

SEQ ID NO: 3065157 - DNA, 25 bp, Homo sapien
agcagaccacaggaggttggcccca

SEQ ID NO: 3065158 - DNA, 25 bp, Homo sapien
cccagcagaccacaggaggttggcc

SEQ ID NO: 3065159 - DNA, 25 bp, Homo sapien
accacaggaggttggccccagactc

SEQ ID NO: 3065160 - DNA, 25 bp, Homo sapien
agaccacaggaggttggccccagac

SEQ ID NO: 3065161 - DNA, 25 bp, Homo sapien
aagggcaccggatgcccaggaatca

SEQ ID NO: 3065162 - DNA, 25 bp, Homo sapien
caacccagatgaggccgctgaaggg

SEQ ID NO: 3065163 - DNA, 25 bp, Homo sapien
ccagcttcattcgttggcacagcaa

SEQ ID NO: 3065164 - DNA, 25 bp, Homo sapien
gaatcaccacctggtaccagaagcg

SEQ ID NO: 3065165 - DNA, 25 bp, Homo sapien
ctgcccgggcgcaggtccggggctg

SEQ ID NO: 3065166 - DNA, 25 bp, Homo sapien
cggggctgggcagcagccgcgcctc

SEQ ID NO: 3065167 - DNA, 25 bp, Homo sapien
ggtccggggctgggcagcagccgcg

SEQ ID NO: 3065168 - DNA, 25 bp, Homo sapien
tccggggctgggcagcagccgcgcc

SEQ ID NO: 3065169 - DNA, 25 bp, Homo sapien
cagattcggcggcaggcagtcaacg

SEQ ID NO: 3065170 - DNA, 25 bp, Homo sapien
tgcgggtcagattcggcggcaggca

SEQ ID NO: 3065171 - DNA, 25 bp, Homo sapien
cggcaggcagtcaacgctcagctca

SEQ ID NO: 3065172 - DNA, 25 bp, Homo sapien
gcagcagcgcggtgcgggtcagatt

SEQ ID NO: 3065173 - DNA, 25 bp, Homo sapien
gcagcgggtggttgtgcagcgggcg

SEQ ID NO: 3065174 - DNA, 25 bp, Homo sapien
gcgccgcgagctgcagcgggcatat

SEQ ID NO: 3065175 - DNA, 25 bp, Homo sapien
ccgcgagctgcagcgggcatatgcg

SEQ ID NO: 3065176 - DNA, 25 bp, Homo sapien
gcgggtggttgtgcagcgggcgatg

SEQ ID NO: 3065177 - DNA, 25 bp, Homo sapien
ctggaacagcaggatagctggtgct

SEQ ID NO: 3065178 - DNA, 25 bp, Homo sapien
ctgggggtggcccgccatacttcct

SEQ ID NO: 3065179 - DNA, 25 bp, Homo sapien
gcccgccatacttcctctgcccgtt

SEQ ID NO: 3065180 - DNA, 25 bp, Homo sapien
agccgcccgatgaacacctctgacc

SEQ ID NO: 3065181 - DNA, 25 bp, Homo sapien
gcagccgcccgatgaacacctctga

SEQ ID NO: 3065182 - DNA, 25 bp, Homo sapien
ctgcaccaggcgatgcctgtctccc

SEQ ID NO: 3065183 - DNA, 25 bp, Homo sapien
gcaccaggcgatgcctgtctccctg

SEQ ID NO: 3065184 - DNA, 25 bp, Homo sapien
accaggcgatgcctgtctccctgac

SEQ ID NO: 3065185 - DNA, 25 bp, Homo sapien
tgcaccaggcgatgcctgtctccct

SEQ ID NO: 3065186 - DNA, 25 bp, Homo sapien
acagctcacaatcccgcttggactg

SEQ ID NO: 3065187 - DNA, 25 bp, Homo sapien
tccagcgccgccttcaccctctcac

SEQ ID NO: 3065188 - DNA, 25 bp, Homo sapien
accacagctcacaatcccgcttgga

SEQ ID NO: 3065189 - DNA, 25 bp, Homo sapien
ccagcgccgccttcaccctctcaca

SEQ ID NO: 3065190 - DNA, 25 bp, Homo sapien
attaataattagacctctgtgccgg

SEQ ID NO: 3065191 - DNA, 25 bp, Homo sapien
ccggcctcaacaggcaaccttctga

SEQ ID NO: 3065192 - DNA, 25 bp, Homo sapien
atgcccggcctcaacaggcaacctt

SEQ ID NO: 3065193 - DNA, 25 bp, Homo sapien
tctgattaataattagacctctgtg

SEQ ID NO: 3065194 - DNA, 25 bp, Homo sapien
gcaatgtgtatcttgtcgcattacc

SEQ ID NO: 3065195 - DNA, 25 bp, Homo sapien
tgtacagatgaaggcaatgtgtatc

SEQ ID NO: 3065196 - DNA, 25 bp, Homo sapien
ggaatgataaaacgaggggccactg

SEQ ID NO: 3065197 - DNA, 25 bp, Homo sapien
tatcacagaatgtacagatgaaggc

SEQ ID NO: 3065198 - DNA, 25 bp, Homo sapien
tactcatttcaacctggtgtggagt

SEQ ID NO: 3065199 - DNA, 25 bp, Homo sapien
ttactcatttcaacctggtgtggag

SEQ ID NO: 3065200 - DNA, 25 bp, Homo sapien
catttcaacctggtgtggagtaatt

SEQ ID NO: 3065201 - DNA, 25 bp, Homo sapien
ctcatttcaacctggtgtggagtaa

SEQ ID NO: 3065202 - DNA, 25 bp, Homo sapien
atggattatatgtaaccgtggctgg

SEQ ID NO: 3065203 - DNA, 25 bp, Homo sapien
cattgataagatatggatggattat

SEQ ID NO: 3065204 - DNA, 25 bp, Homo sapien
gaatcattgataagatatggatgga

SEQ ID NO: 3065205 - DNA, 25 bp, Homo sapien
acaggaatcattgataagatatgga

SEQ ID NO: 3065206 - DNA, 25 bp, Homo sapien
tcatcagcagttgccagcagtcatc

SEQ ID NO: 3065207 - DNA, 25 bp, Homo sapien
cttcatcagcagttgccagcagtca

SEQ ID NO: 3065208 - DNA, 25 bp, Homo sapien
tccttcatcagcagttgccagcagt

SEQ ID NO: 3065209 - DNA, 25 bp, Homo sapien
ttcatcagcagttgccagcagtcat

SEQ ID NO: 3065210 - DNA, 25 bp, Homo sapien
tgaagtgtagtggtgtggtctccac

SEQ ID NO: 3065211 - DNA, 25 bp, Homo sapien
aggtgcccacccttacgcctagcta

SEQ ID NO: 3065212 - DNA, 25 bp, Homo sapien
ttacaggtgcccacccttacgccta

SEQ ID NO: 3065213 - DNA, 25 bp, Homo sapien
accatgcctggtctgggtagatttt

SEQ ID NO: 3065214 - DNA, 25 bp, Homo sapien
cattattacgacaatgtaaatattt

SEQ ID NO: 3065215 - DNA, 25 bp, Homo sapien
cctgggtagctttcttatactgctc

SEQ ID NO: 3065216 - DNA, 25 bp, Homo sapien
cagcctgggtagctttcttatactg

SEQ ID NO: 3065217 - DNA, 25 bp, Homo sapien
tcaactttcatttaagccctgtgat

SEQ ID NO: 3065218 - DNA, 25 bp, Homo sapien
agggtaccctgagtccttacatgac

SEQ ID NO: 3065219 - DNA, 25 bp, Homo sapien
taatgtttatcaactgaccccttgc

SEQ ID NO: 3065220 - DNA, 25 bp, Homo sapien
tggccaatagcacacgcttttaaaa

SEQ ID NO: 3065221 - DNA, 25 bp, Homo sapien
tgttgtagcggaaaaatctgacacc

SEQ ID NO: 3065222 - DNA, 25 bp, Homo sapien
caccagccttgctaaaagtattcta

SEQ ID NO: 3065223 - DNA, 25 bp, Homo sapien
taaccgagtatgcacaattcaactg

SEQ ID NO: 3065224 - DNA, 25 bp, Homo sapien
gatactatcaatttaccctccaaag

SEQ ID NO: 3065225 - DNA, 25 bp, Homo sapien
ttcaactgtaatagatactatcaat

SEQ ID NO: 3065226 - DNA, 25 bp, Homo sapien
taaaatatacactgagacttctgaa

SEQ ID NO: 3065227 - DNA, 25 bp, Homo sapien
acactgagacttctgaaaaaacttc

SEQ ID NO: 3065228 - DNA, 25 bp, Homo sapien
aacttcaaattcaactcatgtgtac

SEQ ID NO: 3065229 - DNA, 25 bp, Homo sapien
aaatatacactgagacttctgaaaa

SEQ ID NO: 3065230 - DNA, 25 bp, Homo sapien
taacaccataataatctggtgcatc

SEQ ID NO: 3065231 - DNA, 25 bp, Homo sapien
gctggataaacaagtgtgtgccaac

SEQ ID NO: 3065232 - DNA, 25 bp, Homo sapien
tagctggataaacaagtgtgtgcca

SEQ ID NO: 3065233 - DNA, 25 bp, Homo sapien
aagtagctggataaacaagtgtgtg

SEQ ID NO: 3065234 - DNA, 25 bp, Homo sapien
tggataaacaagtgtgtgccaacat

SEQ ID NO: 3065235 - DNA, 25 bp, Homo sapien
gggctctcatctgtaaggaacggag

SEQ ID NO: 3065236 - DNA, 25 bp, Homo sapien
ggggctctcatctgtaaggaacgga

SEQ ID NO: 3065237 - DNA, 25 bp, Homo sapien
gactggcactgtggacagacatact

SEQ ID NO: 3065238 - DNA, 25 bp, Homo sapien
gtgtgagcactgtcatgacatcctc

SEQ ID NO: 3065239 - DNA, 25 bp, Homo sapien
tcatgacatcctctgttgactggca

SEQ ID NO: 3065240 - DNA, 25 bp, Homo sapien
ccttctctgttagtggtgtgagcac

SEQ ID NO: 3065241 - DNA, 25 bp, Homo sapien
caatgcagcacccatggtaccaatt

SEQ ID NO: 3065242 - DNA, 25 bp, Homo sapien
gccaatgcagcacccatggtaccaa

SEQ ID NO: 3065243 - DNA, 25 bp, Homo sapien
atgccaatgcagcacccatggtacc

SEQ ID NO: 3065244 - DNA, 25 bp, Homo sapien
ctgcaagatgccaatgcagcaccca

SEQ ID NO: 3065245 - DNA, 25 bp, Homo sapien
acaccgatcatggccaataaaaaat

SEQ ID NO: 3065246 - DNA, 25 bp, Homo sapien
gacaccgatcatggccaataaaaaa

SEQ ID NO: 3065247 - DNA, 25 bp, Homo sapien
tgacaccgatcatggccaataaaaa

SEQ ID NO: 3065248 - DNA, 25 bp, Homo sapien
ctgacaccgatcatggccaataaaa

SEQ ID NO: 3065249 - DNA, 25 bp, Homo sapien
tcaaagcttatacccaaattagtgt

SEQ ID NO: 3065250 - DNA, 25 bp, Homo sapien
taccatgtgggagttcaaaatccta

SEQ ID NO: 3065251 - DNA, 25 bp, Homo sapien
cctataaggtaataacagagtctca

SEQ ID NO: 3065252 - DNA, 25 bp, Homo sapien
ttttctaacctataataaagcacca

SEQ ID NO: 3065253 - DNA, 25 bp, Homo sapien
tacagtacaattcctcactgctgcc

SEQ ID NO: 3065254 - DNA, 25 bp, Homo sapien
ttctgcagatacagtacaattcctc

SEQ ID NO: 3065255 - DNA, 25 bp, Homo sapien
gatacagtacaattcctcactgctg

SEQ ID NO: 3065256 - DNA, 25 bp, Homo sapien
tgcagatacagtacaattcctcact

SEQ ID NO: 3065257 - DNA, 25 bp, Homo sapien
ttcttagcctccttttctgcgatgc

SEQ ID NO: 3065258 - DNA, 25 bp, Homo sapien
gatgtacacatccattttcttagcc

SEQ ID NO: 3065259 - DNA, 25 bp, Homo sapien
tagcctccttttctgcgatgccaac

SEQ ID NO: 3065260 - DNA, 25 bp, Homo sapien
cttttctgcgatgccaacacattct

SEQ ID NO: 3065261 - DNA, 25 bp, Homo sapien
aatagcagttagtacaaagatcaca

SEQ ID NO: 3065262 - DNA, 25 bp, Homo sapien
acaaagatcacagccaatatagaac

SEQ ID NO: 3065263 - DNA, 25 bp, Homo sapien
tagcagttagtacaaagatcacagc

SEQ ID NO: 3065264 - DNA, 25 bp, Homo sapien
gcagttagtacaaagatcacagcca

SEQ ID NO: 3065265 - DNA, 25 bp, Homo sapien
ttttgagctgcatggtacttaaatc

SEQ ID NO: 3065266 - DNA, 25 bp, Homo sapien
caagcttcaaattgacctgcttcat

SEQ ID NO: 3065267 - DNA, 25 bp, Homo sapien
ctcaagcttcaaattgacctgcttc

SEQ ID NO: 3065268 - DNA, 25 bp, Homo sapien
gaatggaagtcgtcctcaagcttca

SEQ ID NO: 3065269 - DNA, 25 bp, Homo sapien
ctagaggaatggaagtcgtcctcaa

SEQ ID NO: 3065270 - DNA, 25 bp, Homo sapien
ttttgacggagccttgctctgtctc

SEQ ID NO: 3065271 - DNA, 25 bp, Homo sapien
caacctctgtctcctggcttcaagc

SEQ ID NO: 3065272 - DNA, 25 bp, Homo sapien
ccaggctggagtacagtggcatgat

SEQ ID NO: 3065273 - DNA, 25 bp, Homo sapien
aattctcttgcctcagcttcccaag

SEQ ID NO: 3065274 - DNA, 25 bp, Homo sapien
ccttcaaatagctacaggtgctcac

SEQ ID NO: 3065275 - DNA, 25 bp, Homo sapien
actgcagtgacataaacacggcttg

SEQ ID NO: 3065276 - DNA, 25 bp, Homo sapien
taccctagggacaaacccattgtga

SEQ ID NO: 3065277 - DNA, 25 bp, Homo sapien
gattggcatccacgaacaaatttgg

SEQ ID NO: 3065278 - DNA, 25 bp, Homo sapien
taaaccatctccaaccacggaggag

SEQ ID NO: 3065279 - DNA, 25 bp, Homo sapien
cagacctgggacttgccatcattcc

SEQ ID NO: 3065280 - DNA, 25 bp, Homo sapien
gagaagactacagctcctcgtccag

SEQ ID NO: 3065281 - DNA, 25 bp, Homo sapien
cacggaggagacctcaactcagcct

SEQ ID NO: 3065282 - DNA, 25 bp, Homo sapien
tctagcaaaatctaggagtgaagtg

SEQ ID NO: 3065283 - DNA, 25 bp, Homo sapien
aggtctagcaaaatctaggagtgaa

SEQ ID NO: 3065284 - DNA, 25 bp, Homo sapien
gatttgtagaagtctgtttagacac

SEQ ID NO: 3065285 - DNA, 25 bp, Homo sapien
atttctgtggaattatttaccattt

SEQ ID NO: 3065286 - DNA, 25 bp, Homo sapien
tttcttgatgaattgtgcaaactgg

SEQ ID NO: 3065287 - DNA, 25 bp, Homo sapien
ttcttgatgaattgtgcaaactggg

SEQ ID NO: 3065288 - DNA, 25 bp, Homo sapien
gcctcttaaagtgttcatattacag

SEQ ID NO: 3065289 - DNA, 25 bp, Homo sapien
agggtcttcctatgctgcttaggct

SEQ ID NO: 3065290 - DNA, 25 bp, Homo sapien
acagggtcttcctatgctgcttagg

SEQ ID NO: 3065291 - DNA, 25 bp, Homo sapien
tggcctcttaaagtgttcatattac

SEQ ID NO: 3065292 - DNA, 25 bp, Homo sapien
ataaacatatgctaggcgcggtggc

SEQ ID NO: 3065293 - DNA, 25 bp, Homo sapien
aaataaacatatgctaggcgcggtg

SEQ ID NO: 3065294 - DNA, 25 bp, Homo sapien
caagccacgatgagttctaaattaa

SEQ ID NO: 3065295 - DNA, 25 bp, Homo sapien
tgtatatagacaagccacgatgagt

SEQ ID NO: 3065296 - DNA, 25 bp, Homo sapien
ggcaaattgagcttcggtcacaaac

SEQ ID NO: 3065297 - DNA, 25 bp, Homo sapien
tgtctatggcacatcgatatcatgc

SEQ ID NO: 3065298 - DNA, 25 bp, Homo sapien
gaatgtaagcactaagagagaataa

SEQ ID NO: 3065299 - DNA, 25 bp, Homo sapien
aaatccaggctttatccctattgaa

SEQ ID NO: 3065300 - DNA, 25 bp, Homo sapien
ttacatagcggtagatgcacaaaag

SEQ ID NO: 3065301 - DNA, 25 bp, Homo sapien
tgttttggtatgtactggaatcctg

SEQ ID NO: 3065302 - DNA, 25 bp, Homo sapien
cagttgagggtattgtcatcatgtt

SEQ ID NO: 3065303 - DNA, 25 bp, Homo sapien
catcatgttttggtatgtactggaa

SEQ ID NO: 3065304 - DNA, 25 bp, Homo sapien
gtcttgagattgtcacacctagcaa

SEQ ID NO: 3065305 - DNA, 25 bp, Homo sapien
gtaggcacctaagtacttatacaag

SEQ ID NO: 3065306 - DNA, 25 bp, Homo sapien
tacaagtgagataacatgtccgaag

SEQ ID NO: 3065307 - DNA, 25 bp, Homo sapien
ggtgctgtttatgttgtaggcacct

SEQ ID NO: 3065308 - DNA, 25 bp, Homo sapien
tgttgctcattgcaagggagtcttc

SEQ ID NO: 3065309 - DNA, 25 bp, Homo sapien
cttcttcaaggttattctcaggact

SEQ ID NO: 3065310 - DNA, 25 bp, Homo sapien
tgattaagatacaggctcacagctg

SEQ ID NO: 3065311 - DNA, 25 bp, Homo sapien
tctcaggactttgattaagatacag

SEQ ID NO: 3065312 - DNA, 25 bp, Homo sapien
tttcagattctctagattttgcccc

SEQ ID NO: 3065313 - DNA, 25 bp, Homo sapien
agattctctagattttgcccctgaa

SEQ ID NO: 3065314 - DNA, 25 bp, Homo sapien
cagattctctagattttgcccctga

SEQ ID NO: 3065315 - DNA, 25 bp, Homo sapien
tcagattctctagattttgcccctg

SEQ ID NO: 3065316 - DNA, 25 bp, Homo sapien
gtcttgtatggaggagcttggtgtg

SEQ ID NO: 3065317 - DNA, 25 bp, Homo sapien
agtccgaggtcttgtatggaggagc

SEQ ID NO: 3065318 - DNA, 25 bp, Homo sapien
tccgaggtcttgtatggaggagctt

SEQ ID NO: 3065319 - DNA, 25 bp, Homo sapien
cttgtatggaggagcttggtgtggg

SEQ ID NO: 3065320 - DNA, 25 bp, Homo sapien
ttctccccaagtacatcgcgcatag

SEQ ID NO: 3065321 - DNA, 25 bp, Homo sapien
ccaagtacatcgcgcatagtgggtg

SEQ ID NO: 3065322 - DNA, 25 bp, Homo sapien
tctccccaagtacatcgcgcatagt

SEQ ID NO: 3065323 - DNA, 25 bp, Homo sapien
tccccaagtacatcgcgcatagtgg

SEQ ID NO: 3065324 - DNA, 25 bp, Homo sapien
agggagagtgaatcttcactcctct

SEQ ID NO: 3065325 - DNA, 25 bp, Homo sapien
tatatgtcatgtgttcccactaaag

SEQ ID NO: 3065326 - DNA, 25 bp, Homo sapien
tctctagtctacagaactgaatcgt

SEQ ID NO: 3065327 - DNA, 25 bp, Homo sapien
tctaacatctggtccttctcaggga

SEQ ID NO: 3065328 - DNA, 25 bp, Homo sapien
ccagggtttggtgttactcctgctt

SEQ ID NO: 3065329 - DNA, 25 bp, Homo sapien
tacctacaagttccatatcaaaaaa

SEQ ID NO: 3065330 - DNA, 25 bp, Homo sapien
ctttacggagtctaatggtgatttc

SEQ ID NO: 3065331 - DNA, 25 bp, Homo sapien
tgagtcaagagatgatttatgcttt

SEQ ID NO: 3065332 - DNA, 25 bp, Homo sapien
gagtaaataagatggtgagtgcaat

SEQ ID NO: 3065333 - DNA, 25 bp, Homo sapien
tgtccctttgtaggcaatcccatcc

SEQ ID NO: 3065334 - DNA, 25 bp, Homo sapien
tcatatagcacatagcctcttgtgt

SEQ ID NO: 3065335 - DNA, 25 bp, Homo sapien
tgatgcctcaaaaaggcccctactg

SEQ ID NO: 3065336 - DNA, 25 bp, Homo sapien
cccctactgtccctttgtaggcaat

SEQ ID NO: 3065337 - DNA, 25 bp, Homo sapien
taattttgaccagctttaagttagc

SEQ ID NO: 3065338 - DNA, 25 bp, Homo sapien
tgaccagctttaagttagcattttt

SEQ ID NO: 3065339 - DNA, 25 bp, Homo sapien
tttgaccagctttaagttagcattt

SEQ ID NO: 3065340 - DNA, 25 bp, Homo sapien
tcttaaatggcttgtgattttttgt

SEQ ID NO: 3065341 - DNA, 25 bp, Homo sapien
tactattataatgacaaggccaagg

SEQ ID NO: 3065342 - DNA, 25 bp, Homo sapien
taatatggccccaataaagccatcc

SEQ ID NO: 3065343 - DNA, 25 bp, Homo sapien
gctgagattgaagcatagtctggct

SEQ ID NO: 3065344 - DNA, 25 bp, Homo sapien
gacttcttgtatccatgaaaccctc

SEQ ID NO: 3065345 - DNA, 25 bp, Homo sapien
gctttaccgctaatttattgctctc

SEQ ID NO: 3065346 - DNA, 25 bp, Homo sapien
ctttaccgctaatttattgctctct

SEQ ID NO: 3065347 - DNA, 25 bp, Homo sapien
ctcaagtaaccgctttaccgctaat

SEQ ID NO: 3065348 - DNA, 25 bp, Homo sapien
accgctttaccgctaatttattgct

SEQ ID NO: 3065349 - DNA, 25 bp, Homo sapien
tatcagtacactaagttacatcttg

SEQ ID NO: 3065350 - DNA, 25 bp, Homo sapien
caaaaccggcagagagtgaagagag

SEQ ID NO: 3065351 - DNA, 25 bp, Homo sapien
gccaaaaccggcagagagtgaagag

SEQ ID NO: 3065352 - DNA, 25 bp, Homo sapien
cagtacactaagttacatcttgcct

SEQ ID NO: 3065353 - DNA, 25 bp, Homo sapien
atagaatgggatacggaccaatgga

SEQ ID NO: 3065354 - DNA, 25 bp, Homo sapien
gatagaatgggatacggaccaatgg

SEQ ID NO: 3065355 - DNA, 25 bp, Homo sapien
agctacagtcccttatccccaacaa

SEQ ID NO: 3065356 - DNA, 25 bp, Homo sapien
agatagaatgggatacggaccaatg

SEQ ID NO: 3065357 - DNA, 25 bp, Homo sapien
agaacctgtcagctactcacctgga

SEQ ID NO: 3065358 - DNA, 25 bp, Homo sapien
taattgttactggaatactaacgat

SEQ ID NO: 3065359 - DNA, 25 bp, Homo sapien
tcctgagcctataccctctgtgaga

SEQ ID NO: 3065360 - DNA, 25 bp, Homo sapien
actggtgaggaggaacgtctcatac

SEQ ID NO: 3065361 - DNA, 25 bp, Homo sapien
gtcctatgcatctctcaaaagccaa

SEQ ID NO: 3065362 - DNA, 25 bp, Homo sapien
cctgtgggagtcctatgcatctctc

SEQ ID NO: 3065363 - DNA, 25 bp, Homo sapien
tttccattattgtggcagccctcca

SEQ ID NO: 3065364 - DNA, 25 bp, Homo sapien
taaaatgcccttatttcactctgcc

SEQ ID NO: 3065365 - DNA, 25 bp, Homo sapien
tatttgaggtttgtgtgctgatttc

SEQ ID NO: 3065366 - DNA, 25 bp, Homo sapien
gattttgtagatagccactgtattg

SEQ ID NO: 3065367 - DNA, 25 bp, Homo sapien
gctttagtgtttccatatatagatc

SEQ ID NO: 3065368 - DNA, 25 bp, Homo sapien
cttctcagggccttgttgtcaccca

SEQ ID NO: 3065369 - DNA, 25 bp, Homo sapien
gcaacagagggcaatcctgtcgcta

SEQ ID NO: 3065370 - DNA, 25 bp, Homo sapien
gagggcaatcctgtcgctaagtaaa

SEQ ID NO: 3065371 - DNA, 25 bp, Homo sapien
gggcaatcctgtcgctaagtaaata

SEQ ID NO: 3065372 - DNA, 25 bp, Homo sapien
cagagggcaatcctgtcgctaagta

SEQ ID NO: 3065373 - DNA, 25 bp, Homo sapien
gaactatggaagaatcaaagcagtg

SEQ ID NO: 3065374 - DNA, 25 bp, Homo sapien
ctgaactatggaagaatcaaagcag

SEQ ID NO: 3065375 - DNA, 25 bp, Homo sapien
accaatcccccgcaagatagcaagg

SEQ ID NO: 3065376 - DNA, 25 bp, Homo sapien
ccccgcaagatagcaaggatgactg

SEQ ID NO: 3065377 - DNA, 25 bp, Homo sapien
gaaggattctcaaggtaaatattag

SEQ ID NO: 3065378 - DNA, 25 bp, Homo sapien
gaagaaggattctcaaggtaaatat

SEQ ID NO: 3065379 - DNA, 25 bp, Homo sapien
tgaagaaggattctcaaggtaaata

SEQ ID NO: 3065380 - DNA, 25 bp, Homo sapien
gattctcaaggtaaatattagtctg

SEQ ID NO: 3065381 - DNA, 25 bp, Homo sapien
cagaattttaaccagaaaggccagg

SEQ ID NO: 3065382 - DNA, 25 bp, Homo sapien
tatgcaaacctcacagaattttaac

SEQ ID NO: 3065383 - DNA, 25 bp, Homo sapien
ctagaactgaggaaacactattttc

SEQ ID NO: 3065384 - DNA, 25 bp, Homo sapien
ggcccctactctattccttttatgc

SEQ ID NO: 3065385 - DNA, 25 bp, Homo sapien
gcatttgcttgaggtgatccaactt

SEQ ID NO: 3065386 - DNA, 25 bp, Homo sapien
tgatgcctgtgagactaagtccgaa

SEQ ID NO: 3065387 - DNA, 25 bp, Homo sapien
gagatagagaacttggctagctgca

SEQ ID NO: 3065388 - DNA, 25 bp, Homo sapien
catggtcacacaatgcactctgcct

SEQ ID NO: 3065389 - DNA, 25 bp, Homo sapien
gaaaaagatggaacgtgccagatgc

SEQ ID NO: 3065390 - DNA, 25 bp, Homo sapien
tagggcaaacatgatgcagacaaga

SEQ ID NO: 3065391 - DNA, 25 bp, Homo sapien
tgattccgatgaagcctgccagaga

SEQ ID NO: 3065392 - DNA, 25 bp, Homo sapien
aaatgcaccggttcagaggagggaa

SEQ ID NO: 3065393 - DNA, 25 bp, Homo sapien
gcacaacgcttccaaccataggtct

SEQ ID NO: 3065394 - DNA, 25 bp, Homo sapien
tcttagcaccgccatcattcaggaa

SEQ ID NO: 3065395 - DNA, 25 bp, Homo sapien
gaacaaaggacgcttctatcaccca

SEQ ID NO: 3065396 - DNA, 25 bp, Homo sapien
tgcttatcactggaggtgctagagg

SEQ ID NO: 3065397 - DNA, 25 bp, Homo sapien
cagctgatttccagaggatggaaga

SEQ ID NO: 3065398 - DNA, 25 bp, Homo sapien
agctgatttccagaggatggaagaa

SEQ ID NO: 3065399 - DNA, 25 bp, Homo sapien
acagctgatttccagaggatggaag

SEQ ID NO: 3065400 - DNA, 25 bp, Homo sapien
gctgatttccagaggatggaagaag

SEQ ID NO: 3065401 - DNA, 25 bp, Homo sapien
gcaagtgagccttgatgtgtgcttc

SEQ ID NO: 3065402 - DNA, 25 bp, Homo sapien
ctacattttattggcagcaccccgc

SEQ ID NO: 3065403 - DNA, 25 bp, Homo sapien
tccaaattccacgtgactacatttt

SEQ ID NO: 3065404 - DNA, 25 bp, Homo sapien
ccccgctggcaagtgagccttgatg

SEQ ID NO: 3065405 - DNA, 25 bp, Homo sapien
cagcagcgtgatctcggttgactgc

SEQ ID NO: 3065406 - DNA, 25 bp, Homo sapien
cgcgcctggcttgttttgggttttg

SEQ ID NO: 3065407 - DNA, 25 bp, Homo sapien
gtgcagcagcgtgatctcggttgac

SEQ ID NO: 3065408 - DNA, 25 bp, Homo sapien
gctaccgcgcctggcttgttttggg

SEQ ID NO: 3065409 - DNA, 25 bp, Homo sapien
aggctttagaggatggcgttcgaaa

SEQ ID NO: 3065410 - DNA, 25 bp, Homo sapien
agggagatgctgttgcgactcagaa

SEQ ID NO: 3065411 - DNA, 25 bp, Homo sapien
tcgagaagagtgaaaatcctgagcc

SEQ ID NO: 3065412 - DNA, 25 bp, Homo sapien
cagggccgaaggctccgaagactga

SEQ ID NO: 3065413 - DNA, 25 bp, Homo sapien
tccgttccttttgggcggaggctga

SEQ ID NO: 3065414 - DNA, 25 bp, Homo sapien
ctccgttccttttgggcggaggctg

SEQ ID NO: 3065415 - DNA, 25 bp, Homo sapien
ggaaccacaggctcgtgccatgatg

SEQ ID NO: 3065416 - DNA, 25 bp, Homo sapien
atgaggttcaccgtcagagcccctg

SEQ ID NO: 3065417 - DNA, 25 bp, Homo sapien
gtctccccgtgttgctcagtctaat

SEQ ID NO: 3065418 - DNA, 25 bp, Homo sapien
agtagcgggaaccacaggctcgtgc

SEQ ID NO: 3065419 - DNA, 25 bp, Homo sapien
gtcagctgctaagacacactagcca

SEQ ID NO: 3065420 - DNA, 25 bp, Homo sapien
catatcaagtgctcaactgccccgt

SEQ ID NO: 3065421 - DNA, 25 bp, Homo sapien
tcaactgccccgtgtggctaatggc

SEQ ID NO: 3065422 - DNA, 25 bp, Homo sapien
cagagcaagacgctgagtctttaac

SEQ ID NO: 3065423 - DNA, 25 bp, Homo sapien
ctgcatccaactttggttcttgttt

SEQ ID NO: 3065424 - DNA, 25 bp, Homo sapien
ccaactttggttcttgtttgtctgt

SEQ ID NO: 3065425 - DNA, 25 bp, Homo sapien
gccactgcatccaactttggttctt

SEQ ID NO: 3065426 - DNA, 25 bp, Homo sapien
catccaactttggttcttgtttgtc

SEQ ID NO: 3065427 - DNA, 25 bp, Homo sapien
cagaagttatagtttatgggcacaa

SEQ ID NO: 3065428 - DNA, 25 bp, Homo sapien
aaaataatgggtctaggcaacagtt

SEQ ID NO: 3065429 - DNA, 25 bp, Homo sapien
aattaggctgataccatctgaaacc

SEQ ID NO: 3065430 - DNA, 25 bp, Homo sapien
aatgtttaagatagagctgggtgca

SEQ ID NO: 3065431 - DNA, 25 bp, Homo sapien
accacactcagccaggatacatttg

SEQ ID NO: 3065432 - DNA, 25 bp, Homo sapien
gactaggtgctagatattaaagaat

SEQ ID NO: 3065433 - DNA, 25 bp, Homo sapien
ttagaataaggactaggtgctagat

SEQ ID NO: 3065434 - DNA, 25 bp, Homo sapien
catttgatacaactggagaaattag

SEQ ID NO: 3065435 - DNA, 25 bp, Homo sapien
tgaataaaaggcatcatgtctggga

SEQ ID NO: 3065436 - DNA, 25 bp, Homo sapien
aaagtaataacgcaggccggacacg

SEQ ID NO: 3065437 - DNA, 25 bp, Homo sapien
tctatagcctggaaaagataactgc

SEQ ID NO: 3065438 - DNA, 25 bp, Homo sapien
gacagtcgacttgggtatttcatct

SEQ ID NO: 3065439 - DNA, 25 bp, Homo sapien
ccagtaagtataaagagaccctaag

SEQ ID NO: 3065440 - DNA, 25 bp, Homo sapien
taaatagagcagagcaccagaaggt

SEQ ID NO: 3065441 - DNA, 25 bp, Homo sapien
gaaggtatcacttcaagcatccgtc

SEQ ID NO: 3065442 - DNA, 25 bp, Homo sapien
aagagaccctaagagaggaaatggc

SEQ ID NO: 3065443 - DNA, 25 bp, Homo sapien
cagaaacagtatcgaggctacaaac

SEQ ID NO: 3065444 - DNA, 25 bp, Homo sapien
gaaacagtatcgaggctacaaaccg

SEQ ID NO: 3065445 - DNA, 25 bp, Homo sapien
cgaggctacaaaccgaataatcttt

SEQ ID NO: 3065446 - DNA, 25 bp, Homo sapien
cagtatcgaggctacaaaccgaata

SEQ ID NO: 3065447 - DNA, 25 bp, Homo sapien
atcccagacagcgaaggtgttattt

SEQ ID NO: 3065448 - DNA, 25 bp, Homo sapien
acatcccagacagcgaaggtgttat

SEQ ID NO: 3065449 - DNA, 25 bp, Homo sapien
aacatcccagacagcgaaggtgtta

SEQ ID NO: 3065450 - DNA, 25 bp, Homo sapien
ccagacagcgaaggtgttattttta

SEQ ID NO: 3065451 - DNA, 25 bp, Homo sapien
ggtcaagcaacctgtccactaagct

SEQ ID NO: 3065452 - DNA, 25 bp, Homo sapien
tcagtaaggtcagcagtgatcacca

SEQ ID NO: 3065453 - DNA, 25 bp, Homo sapien
tttcttcggtcctctcacgcaacag

SEQ ID NO: 3065454 - DNA, 25 bp, Homo sapien
agctctgctccaccattgggtagct

SEQ ID NO: 3065455 - DNA, 25 bp, Homo sapien
acagtagtaatgttcacatgccacc

SEQ ID NO: 3065456 - DNA, 25 bp, Homo sapien
taattcaatattcagaacagaacag

SEQ ID NO: 3065457 - DNA, 25 bp, Homo sapien
gttgatcatttgagtcctgtgccta

SEQ ID NO: 3065458 - DNA, 25 bp, Homo sapien
ttagccttgcatggtggtgaacgtc

SEQ ID NO: 3065459 - DNA, 25 bp, Homo sapien
ttatacaagatggtggtttttccag

SEQ ID NO: 3065460 - DNA, 25 bp, Homo sapien
tttatacaagatggtggtttttcca

SEQ ID NO: 3065461 - DNA, 25 bp, Homo sapien
tccaaactcaatataagaatccgca

SEQ ID NO: 3065462 - DNA, 25 bp, Homo sapien
ccaaactcaatataagaatccgcat

SEQ ID NO: 3065463 - DNA, 25 bp, Homo sapien
agagcttttcaaaaatgtttcccat

SEQ ID NO: 3065464 - DNA, 25 bp, Homo sapien
gagatccagccaggtcttgagtgct

SEQ ID NO: 3065465 - DNA, 25 bp, Homo sapien
tgtgcgcccctggaagagcaaagag

SEQ ID NO: 3065466 - DNA, 25 bp, Homo sapien
gccctgcgtggaacctatgaagcct

SEQ ID NO: 3065467 - DNA, 25 bp, Homo sapien
tctggcccgcagacgaagtggagat

SEQ ID NO: 3065468 - DNA, 25 bp, Homo sapien
gacgacatatctggccaatgcaaag

SEQ ID NO: 3065469 - DNA, 25 bp, Homo sapien
tggccaatgcaaagaagagtaaggg

SEQ ID NO: 3065470 - DNA, 25 bp, Homo sapien
gctcgaagttttgtgagtgacgaca

SEQ ID NO: 3065471 - DNA, 25 bp, Homo sapien
tcagctaaaccacgacaggcgtggg

SEQ ID NO: 3065472 - DNA, 25 bp, Homo sapien
aacgatgacaattccagcaactagg

SEQ ID NO: 3065473 - DNA, 25 bp, Homo sapien
acaagtacgcctacaaagaaaagtg

SEQ ID NO: 3065474 - DNA, 25 bp, Homo sapien
gttggtcgaagatgcaagttgcctt

SEQ ID NO: 3065475 - DNA, 25 bp, Homo sapien
tttgaactcagaaccaactcctcgg

SEQ ID NO: 3065476 - DNA, 25 bp, Homo sapien
taagtgatccgaagcattaaagccc

SEQ ID NO: 3065477 - DNA, 25 bp, Homo sapien
atggacattcgagggcgaacagcag

SEQ ID NO: 3065478 - DNA, 25 bp, Homo sapien
taaagcccttgagacaaattccggc

SEQ ID NO: 3065479 - DNA, 25 bp, Homo sapien
gcacgttggaaacggagtcacccac

SEQ ID NO: 3065480 - DNA, 25 bp, Homo sapien
tcacggcggttgcacgcctgcgcga

SEQ ID NO: 3065481 - DNA, 25 bp, Homo sapien
ccgagccggacgtgtccgcgaagat

SEQ ID NO: 3065482 - DNA, 25 bp, Homo sapien
ccagagcgggacttgagggtagcag

SEQ ID NO: 3065483 - DNA, 25 bp, Homo sapien
ggagatgacccctcgttacacgcgt

SEQ ID NO: 3065484 - DNA, 25 bp, Homo sapien
tattctgtcaccgttgtggaggccg

SEQ ID NO: 3065485 - DNA, 25 bp, Homo sapien
agtagagctattccctctctgaagg

SEQ ID NO: 3065486 - DNA, 25 bp, Homo sapien
cagtcatatcggcttagggttcacc

SEQ ID NO: 3065487 - DNA, 25 bp, Homo sapien
tgttgccggcaatcctttggtgttc

SEQ ID NO: 3065488 - DNA, 25 bp, Homo sapien
aatggatggtcaaagtcccgactgc

SEQ ID NO: 3065489 - DNA, 25 bp, Homo sapien
ggagtagtggtcttggtcttaagta

SEQ ID NO: 3065490 - DNA, 25 bp, Homo sapien
tgcccagatggtatcaggagtagtg

SEQ ID NO: 3065491 - DNA, 25 bp, Homo sapien
cagacagaatagtgccacgaaaatg

SEQ ID NO: 3065492 - DNA, 25 bp, Homo sapien
tcaccagttgggagtctaattccat

SEQ ID NO: 3065493 - DNA, 25 bp, Homo sapien
cctttaacctgagattgtgtctacc

SEQ ID NO: 3065494 - DNA, 25 bp, Homo sapien
aacaacccaatgacagcactgctct

SEQ ID NO: 3065495 - DNA, 25 bp, Homo sapien
tttgaatccaggcaaactgactgca

SEQ ID NO: 3065496 - DNA, 25 bp, Homo sapien
ctttaatatcctagagaagctcagg

SEQ ID NO: 3065497 - DNA, 25 bp, Homo sapien
agaggctcctcaatatcagatccag

SEQ ID NO: 3065498 - DNA, 25 bp, Homo sapien
ccatggatggacctcaaaggattaa

SEQ ID NO: 3065499 - DNA, 25 bp, Homo sapien
cagcagcattagtcagtccagctgg

SEQ ID NO: 3065500 - DNA, 25 bp, Homo sapien
tatcccaaggaattggctaaaacga

SEQ ID NO: 3065501 - DNA, 25 bp, Homo sapien
ggcaggccccattcaatcagtttaa

SEQ ID NO: 3065502 - DNA, 25 bp, Homo sapien
cctttgggctggaactaaataatgc

SEQ ID NO: 3065503 - DNA, 25 bp, Homo sapien
ggacattggtttggatgcacaccga

SEQ ID NO: 3065504 - DNA, 25 bp, Homo sapien
agtttgtggcagctatgaataaagc

SEQ ID NO: 3065505 - DNA, 25 bp, Homo sapien
caaatgtatgaagagttccggttgc

SEQ ID NO: 3065506 - DNA, 25 bp, Homo sapien
taaagctgccgtaaacatttccata

SEQ ID NO: 3065507 - DNA, 25 bp, Homo sapien
cctccctagcacttgatattttcag

SEQ ID NO: 3065508 - DNA, 25 bp, Homo sapien
tatgcccatgaatcaacttgtcttc

SEQ ID NO: 3065509 - DNA, 25 bp, Homo sapien
gaataatatcctcttgtgcatgtat

SEQ ID NO: 3065510 - DNA, 25 bp, Homo sapien
atcttgctgagtttttatgcccatg

SEQ ID NO: 3065511 - DNA, 25 bp, Homo sapien
tccaaaccttaagctttatagatga

SEQ ID NO: 3065512 - DNA, 25 bp, Homo sapien
accactgtgctcctttatgcgtttt

SEQ ID NO: 3065513 - DNA, 25 bp, Homo sapien
gaggcactgttattagatgcagaaa

SEQ ID NO: 3065514 - DNA, 25 bp, Homo sapien
ttcaaacatttagggatttcccaga

SEQ ID NO: 3065515 - DNA, 25 bp, Homo sapien
tggttagggaacatactcgttatga

SEQ ID NO: 3065516 - DNA, 25 bp, Homo sapien
taaggtatgatgagtgccgttgacc

SEQ ID NO: 3065517 - DNA, 25 bp, Homo sapien
gaccggttcatccagacagttcaga

SEQ ID NO: 3065518 - DNA, 25 bp, Homo sapien
tcctgttgtaatcgtgcctcctgag

SEQ ID NO: 3065519 - DNA, 25 bp, Homo sapien
aaaattttgcctcagtaactgccag

SEQ ID NO: 3065520 - DNA, 25 bp, Homo sapien
cagatgatttttgtggcacctccac

SEQ ID NO: 3065521 - DNA, 25 bp, Homo sapien
ggactgtttcgaggcagcttttcaa

SEQ ID NO: 3065522 - DNA, 25 bp, Homo sapien
atacagattactgagcttcacctgg

SEQ ID NO: 3065523 - DNA, 25 bp, Homo sapien
taatgaccatagaaatcacctgaag

SEQ ID NO: 3065524 - DNA, 25 bp, Homo sapien
tcaacatgctcatcatcagtcacaa

SEQ ID NO: 3065525 - DNA, 25 bp, Homo sapien
tttaaaatgtgtgggcgtgaccaag

SEQ ID NO: 3065526 - DNA, 25 bp, Homo sapien
gaccaagtcgtctgccggctgttat

SEQ ID NO: 3065527 - DNA, 25 bp, Homo sapien
ccggctgttatataaaggagacttt

SEQ ID NO: 3065528 - DNA, 25 bp, Homo sapien
ttgaagccatagaacacctcaactg

SEQ ID NO: 3065529 - DNA, 25 bp, Homo sapien
gcacctagcaattcatttacaaatc

SEQ ID NO: 3065530 - DNA, 25 bp, Homo sapien
gattttgaagccatagaacacctca

SEQ ID NO: 3065531 - DNA, 25 bp, Homo sapien
gcatataataagtaatggttgcacc

SEQ ID NO: 3065532 - DNA, 25 bp, Homo sapien
cctatgattgcaggagtctggcctt

SEQ ID NO: 3065533 - DNA, 25 bp, Homo sapien
tatgattgcaggagtctggccttgg

SEQ ID NO: 3065534 - DNA, 25 bp, Homo sapien
atgattgcaggagtctggccttggc

SEQ ID NO: 3065535 - DNA, 25 bp, Homo sapien
catcctatgattgcaggagtctggc

SEQ ID NO: 3065536 - DNA, 25 bp, Homo sapien
aaaattgtacagtgtacttcctgcc

SEQ ID NO: 3065537 - DNA, 25 bp, Homo sapien
aaattgtacagtgtacttcctgcca

SEQ ID NO: 3065538 - DNA, 25 bp, Homo sapien
aattgtacagtgtacttcctgccaa

SEQ ID NO: 3065539 - DNA, 25 bp, Homo sapien
tgtttaacgagtccctgaacagagt

SEQ ID NO: 3065540 - DNA, 25 bp, Homo sapien
aatgtcatagcctgtgcccaaagga

SEQ ID NO: 3065541 - DNA, 25 bp, Homo sapien
catttctggcactgacatattggcc

SEQ ID NO: 3065542 - DNA, 25 bp, Homo sapien
taagaggtggccctgattgctctca

SEQ ID NO: 3065543 - DNA, 25 bp, Homo sapien
agtcctttgaaccaaacacagttga

SEQ ID NO: 3065544 - DNA, 25 bp, Homo sapien
catgatgactcacgcttgaaatctc

SEQ ID NO: 3065545 - DNA, 25 bp, Homo sapien
gagctgtgagaccagacatgatgac

SEQ ID NO: 3065546 - DNA, 25 bp, Homo sapien
tcctatctgtaagatcataaagtcc

SEQ ID NO: 3065547 - DNA, 25 bp, Homo sapien
tcagcctcctaagaaagttgtaccc

SEQ ID NO: 3065548 - DNA, 25 bp, Homo sapien
gactcaagccacagttcaacctttg

SEQ ID NO: 3065549 - DNA, 25 bp, Homo sapien
gggtttaccatcactccagaatcca

SEQ ID NO: 3065550 - DNA, 25 bp, Homo sapien
tccaaccatgaaggagaccccaact

SEQ ID NO: 3065551 - DNA, 25 bp, Homo sapien
gccaagtatgctactgtctccagaa

SEQ ID NO: 3065552 - DNA, 25 bp, Homo sapien
agaactagttttatgtcaaacccag

SEQ ID NO: 3065553 - DNA, 25 bp, Homo sapien
gtctccagaacacgaaaatgatagg

SEQ ID NO: 3065554 - DNA, 25 bp, Homo sapien
tcagtcctttagttttgtccagaac

SEQ ID NO: 3065555 - DNA, 25 bp, Homo sapien
aaaagcctaggatgtttcaacagag

SEQ ID NO: 3065556 - DNA, 25 bp, Homo sapien
caagtgtagacatgcagaggattgt

SEQ ID NO: 3065557 - DNA, 25 bp, Homo sapien
cagatcagttgtaataggagtggaa

SEQ ID NO: 3065558 - DNA, 25 bp, Homo sapien
tagaaaggtctagcaaaatctagga

SEQ ID NO: 3065559 - DNA, 25 bp, Homo sapien
tttcttgatgaattgtgcaaactgg

SEQ ID NO: 3065560 - DNA, 25 bp, Homo sapien
ttcttgatgaattgtgcaaactggg

SEQ ID NO: 3065561 - DNA, 25 bp, Homo sapien
catagtatggatgcatcatggttta

SEQ ID NO: 3065562 - DNA, 25 bp, Homo sapien
gcattgctgcaatgaaatccctgta

SEQ ID NO: 3065563 - DNA, 25 bp, Homo sapien
tattcctgtagcatagatatctgga

SEQ ID NO: 3065564 - DNA, 25 bp, Homo sapien
tcttcgcataaagggtaacatcttg

SEQ ID NO: 3065565 - DNA, 25 bp, Homo sapien
acgccaggccagaactacattttaa

SEQ ID NO: 3065566 - DNA, 25 bp, Homo sapien
tcttgcgatgcggttattattatca

SEQ ID NO: 3065567 - DNA, 25 bp, Homo sapien
agaacagtgcttggcctatggtaaa

SEQ ID NO: 3065568 - DNA, 25 bp, Homo sapien
ttttccaacaactcttgcgatgcgg

SEQ ID NO: 3065569 - DNA, 25 bp, Homo sapien
gataacatgtccgaagttcttagaa

SEQ ID NO: 3065570 - DNA, 25 bp, Homo sapien
tgttgctcattgcaagggagtcttc

SEQ ID NO: 3065571 - DNA, 25 bp, Homo sapien
cttcttcaaggttattctcaggact

SEQ ID NO: 3065572 - DNA, 25 bp, Homo sapien
tgattaagatacaggctcacagctg

SEQ ID NO: 3065573 - DNA, 25 bp, Homo sapien
tctcaggactttgattaagatacag

SEQ ID NO: 3065574 - DNA, 25 bp, Homo sapien
tttcagattctctagattttgcccc

SEQ ID NO: 3065575 - DNA, 25 bp, Homo sapien
agattctctagattttgcccctgaa

SEQ ID NO: 3065576 - DNA, 25 bp, Homo sapien
cagattctctagattttgcccctga

SEQ ID NO: 3065577 - DNA, 25 bp, Homo sapien
tcagattctctagattttgcccctg

SEQ ID NO: 3065578 - DNA, 25 bp, Homo sapien
tctccccaagtacatcgcgcatatt

SEQ ID NO: 3065579 - DNA, 25 bp, Homo sapien
caagtacatcgcgcatattgggtga

SEQ ID NO: 3065580 - DNA, 25 bp, Homo sapien
ttctccccaagtacatcgcgcatat

SEQ ID NO: 3065581 - DNA, 25 bp, Homo sapien
ccccaagtacatcgcgcatattggg

SEQ ID NO: 3065582 - DNA, 25 bp, Homo sapien
ggtagccgactttgtacagagccca

SEQ ID NO: 3065583 - DNA, 25 bp, Homo sapien
caagttgtttggctacatactgcct

SEQ ID NO: 3065584 - DNA, 25 bp, Homo sapien
gagaagagcttcctagttcagaggt

SEQ ID NO: 3065585 - DNA, 25 bp, Homo sapien
gagaatccatacttaaccagtcatg

SEQ ID NO: 3065586 - DNA, 25 bp, Homo sapien
tctcatagccatcccagtgagtgta

SEQ ID NO: 3065587 - DNA, 25 bp, Homo sapien
tgtaaagtagtatctcgctgcagtt

SEQ ID NO: 3065588 - DNA, 25 bp, Homo sapien
caatttctccgggtctttgtcaaca

SEQ ID NO: 3065589 - DNA, 25 bp, Homo sapien
aacactgtcgttgtctgtctcttct

SEQ ID NO: 3065590 - DNA, 25 bp, Homo sapien
cctgctgtaatgtgccattgagaac

SEQ ID NO: 3065591 - DNA, 25 bp, Homo sapien
tagtaagcttgatgatgtgttccac

SEQ ID NO: 3065592 - DNA, 25 bp, Homo sapien
tctcctgggacgctcattatgtgta

SEQ ID NO: 3065593 - DNA, 25 bp, Homo sapien
cagggttttactctattgccagtgc

SEQ ID NO: 3065594 - DNA, 25 bp, Homo sapien
ccagcctggtcaatggagcaagacc

SEQ ID NO: 3065595 - DNA, 25 bp, Homo sapien
cagtgagccaagatcacgccactgc

SEQ ID NO: 3065596 - DNA, 25 bp, Homo sapien
ctgagcttgggaagaggacgttgca

SEQ ID NO: 3065597 - DNA, 25 bp, Homo sapien
agcttgggaagaggacgttgcagtg

SEQ ID NO: 3065598 - DNA, 25 bp, Homo sapien
ctttacggagtctaatggtgatttc

SEQ ID NO: 3065599 - DNA, 25 bp, Homo sapien
tgagtcaagagatgatttatgcttt

SEQ ID NO: 3065600 - DNA, 25 bp, Homo sapien
tacctacaagttccatatcaaaaaa

SEQ ID NO: 3065601 - DNA, 25 bp, Homo sapien
gagtaaataagatggtgagtgcaat

SEQ ID NO: 3065602 - DNA, 25 bp, Homo sapien
ttattggggctcatatcatgaatgt

SEQ ID NO: 3065603 - DNA, 25 bp, Homo sapien
cagagacatgggaacaacgctagtc

SEQ ID NO: 3065604 - DNA, 25 bp, Homo sapien
agacatgggaacaacgctagtccca

SEQ ID NO: 3065605 - DNA, 25 bp, Homo sapien
cttcagagacatgggaacaacgcta

SEQ ID NO: 3065606 - DNA, 25 bp, Homo sapien
tcatatagcacatagcctcttgtgt

SEQ ID NO: 3065607 - DNA, 25 bp, Homo sapien
tgatgcctcaaaaaggcccctactg

SEQ ID NO: 3065608 - DNA, 25 bp, Homo sapien
tgtccctttgtaggcaatcccatcc

SEQ ID NO: 3065609 - DNA, 25 bp, Homo sapien
cccctactgtccctttgtaggcaat

SEQ ID NO: 3065610 - DNA, 25 bp, Homo sapien
tgaccagctttaagttagcattttt

SEQ ID NO: 3065611 - DNA, 25 bp, Homo sapien
taattttgaccagctttaagttagc

SEQ ID NO: 3065612 - DNA, 25 bp, Homo sapien
tttgaccagctttaagttagcattt

SEQ ID NO: 3065613 - DNA, 25 bp, Homo sapien
tcttaaatggcttgtgattttttgt

SEQ ID NO: 3065614 - DNA, 25 bp, Homo sapien
tatgtatatgtatgcctgcggggcc

SEQ ID NO: 3065615 - DNA, 25 bp, Homo sapien
actgcaacttcaattgtgccaccag

SEQ ID NO: 3065616 - DNA, 25 bp, Homo sapien
cctgcggggccctattgtgagtttg

SEQ ID NO: 3065617 - DNA, 25 bp, Homo sapien
tatggcaagctaaatagagactcag

SEQ ID NO: 3065618 - DNA, 25 bp, Homo sapien
tactattataatgacaaggccaagg

SEQ ID NO: 3065619 - DNA, 25 bp, Homo sapien
gacttcttgtatccatgaaaccctc

SEQ ID NO: 3065620 - DNA, 25 bp, Homo sapien
taatatggccccaataaagccatcc

SEQ ID NO: 3065621 - DNA, 25 bp, Homo sapien
gctgagattgaagcatagtctggct

SEQ ID NO: 3065622 - DNA, 25 bp, Homo sapien
cactgacggttgcaaagtgacactt

SEQ ID NO: 3065623 - DNA, 25 bp, Homo sapien
gcatcaatgataatccttgtctgaa

SEQ ID NO: 3065624 - DNA, 25 bp, Homo sapien
tctgtgggttgttactttgagttca

SEQ ID NO: 3065625 - DNA, 25 bp, Homo sapien
gagttcagtgaagatcctgttctca

SEQ ID NO: 3065626 - DNA, 25 bp, Homo sapien
gccttataggacagatgtagatacg

SEQ ID NO: 3065627 - DNA, 25 bp, Homo sapien
ctgccttataggacagatgtagata

SEQ ID NO: 3065628 - DNA, 25 bp, Homo sapien
cttataggacagatgtagatacggt

SEQ ID NO: 3065629 - DNA, 25 bp, Homo sapien
tataggacagatgtagatacggttt

SEQ ID NO: 3065630 - DNA, 25 bp, Homo sapien
tcagtacactaagttacatcttgcc

SEQ ID NO: 3065631 - DNA, 25 bp, Homo sapien
tatcagtacactaagttacatcttg

SEQ ID NO: 3065632 - DNA, 25 bp, Homo sapien
caaaaccggcagagagtgaagagag

SEQ ID NO: 3065633 - DNA, 25 bp, Homo sapien
ggccaaaaccggcagagagtgaaga

SEQ ID NO: 3065634 - DNA, 25 bp, Homo sapien
taaaccaatcgtacatgccagaaaa

SEQ ID NO: 3065635 - DNA, 25 bp, Homo sapien
ctagagttacaaatacgaagacgtc

SEQ ID NO: 3065636 - DNA, 25 bp, Homo sapien
gatggaaagacttaacccacgctat

SEQ ID NO: 3065637 - DNA, 25 bp, Homo sapien
aagacttaacccacgctatttccat

SEQ ID NO: 3065638 - DNA, 25 bp, Homo sapien
agaacctgtcagctactcacctgga

SEQ ID NO: 3065639 - DNA, 25 bp, Homo sapien
ggatatggctatactgacaaactca

SEQ ID NO: 3065640 - DNA, 25 bp, Homo sapien
tctagtgaacggtgattgcaccacg

SEQ ID NO: 3065641 - DNA, 25 bp, Homo sapien
tagatttacacagtatcgtcctcca

SEQ ID NO: 3065642 - DNA, 25 bp, Homo sapien
gacattctaggaacgtgctatctca

SEQ ID NO: 3065643 - DNA, 25 bp, Homo sapien
tacgacattctaggaacgtgctatc

SEQ ID NO: 3065644 - DNA, 25 bp, Homo sapien
tctaggaacgtgctatctcatgtca

SEQ ID NO: 3065645 - DNA, 25 bp, Homo sapien
tgtacgacattctaggaacgtgcta

SEQ ID NO: 3065646 - DNA, 25 bp, Homo sapien
gaaaggccgcctagaaggacactaa

SEQ ID NO: 3065647 - DNA, 25 bp, Homo sapien
tattcttatcccagggacagcgaag

SEQ ID NO: 3065648 - DNA, 25 bp, Homo sapien
aaagagttgactaggccagcatccc

SEQ ID NO: 3065649 - DNA, 25 bp, Homo sapien
gagaagccctaagcagagtgagcac

SEQ ID NO: 3065650 - DNA, 25 bp, Homo sapien
gaacaaaggacgcttctatcaccca

SEQ ID NO: 3065651 - DNA, 25 bp, Homo sapien
gcacaacgcttccaaccataggtct

SEQ ID NO: 3065652 - DNA, 25 bp, Homo sapien
tcttagcaccgccatcattcaggaa

SEQ ID NO: 3065653 - DNA, 25 bp, Homo sapien
tgcttatcactggaggtgctagagg

SEQ ID NO: 3065654 - DNA, 25 bp, Homo sapien
cagctgatttccagaggatggaaga

SEQ ID NO: 3065655 - DNA, 25 bp, Homo sapien
acagctgatttccagaggatggaag

SEQ ID NO: 3065656 - DNA, 25 bp, Homo sapien
agctgatttccagaggatggaagaa

SEQ ID NO: 3065657 - DNA, 25 bp, Homo sapien
gctgatttccagaggatggaagaag

SEQ ID NO: 3065658 - DNA, 25 bp, Homo sapien
ctacattttattggcagcaccccgc

SEQ ID NO: 3065659 - DNA, 25 bp, Homo sapien
gcaagtgagccttgatgtgtgcttc

SEQ ID NO: 3065660 - DNA, 25 bp, Homo sapien
tccaaattccacgtgactacatttt

SEQ ID NO: 3065661 - DNA, 25 bp, Homo sapien
ccccgctggcaagtgagccttgatg

SEQ ID NO: 3065662 - DNA, 25 bp, Homo sapien
cagcagcgtgatctcggttgactgc

SEQ ID NO: 3065663 - DNA, 25 bp, Homo sapien
gctaccgcgcctggcttgttttggg

SEQ ID NO: 3065664 - DNA, 25 bp, Homo sapien
cgcgcctggcttgttttgggttttg

SEQ ID NO: 3065665 - DNA, 25 bp, Homo sapien
gtgcagcagcgtgatctcggttgac

SEQ ID NO: 3065666 - DNA, 25 bp, Homo sapien
tacacctgtggatctctagccttga

SEQ ID NO: 3065667 - DNA, 25 bp, Homo sapien
tgaaaatacacctgtggatctctag

SEQ ID NO: 3065668 - DNA, 25 bp, Homo sapien
aaaatacacctgtggatctctagcc

SEQ ID NO: 3065669 - DNA, 25 bp, Homo sapien
acctgtggatctctagccttgaaca

SEQ ID NO: 3065670 - DNA, 25 bp, Homo sapien
aaacccttttatgcacactcggcgg

SEQ ID NO: 3065671 - DNA, 25 bp, Homo sapien
ccgcgcccggcaaagcctatattaa

SEQ ID NO: 3065672 - DNA, 25 bp, Homo sapien
gcgcccggcaaagcctatattaaac

SEQ ID NO: 3065673 - DNA, 25 bp, Homo sapien
tattaaacccttttatgcacactcg

SEQ ID NO: 3065674 - DNA, 25 bp, Homo sapien
tccgttccttttgggcggaggctga

SEQ ID NO: 3065675 - DNA, 25 bp, Homo sapien
ctccgttccttttgggcggaggctg

SEQ ID NO: 3065676 - DNA, 25 bp, Homo sapien
ccaaggcaggttagtgaaatttctc

SEQ ID NO: 3065677 - DNA, 25 bp, Homo sapien
tgcaggtacggccaatagtctatct

SEQ ID NO: 3065678 - DNA, 25 bp, Homo sapien
taaggcgacttcagacgtgggctcg

SEQ ID NO: 3065679 - DNA, 25 bp, Homo sapien
tatgaagactccaccatgggtcgcc

SEQ ID NO: 3065680 - DNA, 25 bp, Homo sapien
ggaaccacaggctcgtgccatgatg

SEQ ID NO: 3065681 - DNA, 25 bp, Homo sapien
atgaggttcaccgtcagagcccctg

SEQ ID NO: 3065682 - DNA, 25 bp, Homo sapien
gtctccccgtgttgctcagtctaat

SEQ ID NO: 3065683 - DNA, 25 bp, Homo sapien
agtagcgggaaccacaggctcgtgc

SEQ ID NO: 3065684 - DNA, 25 bp, Homo sapien
catatcatgcgtttgtactaggtgt

SEQ ID NO: 3065685 - DNA, 25 bp, Homo sapien
acatactgggaattaggaatcccca

SEQ ID NO: 3065686 - DNA, 25 bp, Homo sapien
gaattagtaagtagcaggagaacat

SEQ ID NO: 3065687 - DNA, 25 bp, Homo sapien
ggaatccccatatggaatcactgca

SEQ ID NO: 3065688 - DNA, 25 bp, Homo sapien
ctgcatccaactttggttcttgttt

SEQ ID NO: 3065689 - DNA, 25 bp, Homo sapien
ccaactttggttcttgtttgtctgt

SEQ ID NO: 3065690 - DNA, 25 bp, Homo sapien
gccactgcatccaactttggttctt

SEQ ID NO: 3065691 - DNA, 25 bp, Homo sapien
catccaactttggttcttgtttgtc

SEQ ID NO: 3065692 - DNA, 25 bp, Homo sapien
agaacgagggcacgataatggcaga

SEQ ID NO: 3065693 - DNA, 25 bp, Homo sapien
aacgagggcacgataatggcagatg

SEQ ID NO: 3065694 - DNA, 25 bp, Homo sapien
actggaagagaacgagggcacgata

SEQ ID NO: 3065695 - DNA, 25 bp, Homo sapien
tggaagagaacgagggcacgataat

SEQ ID NO: 3065696 - DNA, 25 bp, Homo sapien
cagaagttatagtttatgggcacaa

SEQ ID NO: 3065697 - DNA, 25 bp, Homo sapien
aatgtttaagatagagctgggtgca

SEQ ID NO: 3065698 - DNA, 25 bp, Homo sapien
aattaggctgataccatctgaaacc

SEQ ID NO: 3065699 - DNA, 25 bp, Homo sapien
aatgggtctaggcaacagttttcaa

SEQ ID NO: 3065700 - DNA, 25 bp, Homo sapien
agaggccaggcagctaaacttccaa

SEQ ID NO: 3065701 - DNA, 25 bp, Homo sapien
taagtgtgacaaccgaacttctgtg

SEQ ID NO: 3065702 - DNA, 25 bp, Homo sapien
tcaaacagatacttggacatgaatc

SEQ ID NO: 3065703 - DNA, 25 bp, Homo sapien
gaaaaaattgtggaactggacagtg

SEQ ID NO: 3065704 - DNA, 25 bp, Homo sapien
ttagaataaggactaggtgctagat

SEQ ID NO: 3065705 - DNA, 25 bp, Homo sapien
accacactcagccaggatacatttg

SEQ ID NO: 3065706 - DNA, 25 bp, Homo sapien
gactaggtgctagatattaaagaat

SEQ ID NO: 3065707 - DNA, 25 bp, Homo sapien
catttgatacaactggagaaattag

SEQ ID NO: 3065708 - DNA, 25 bp, Homo sapien
cagaaacagtatcgaggctacaaac

SEQ ID NO: 3065709 - DNA, 25 bp, Homo sapien
cagaaggtatcacttcaagcatccg

SEQ ID NO: 3065710 - DNA, 25 bp, Homo sapien
ccagtaagtataaagagaccctaag

SEQ ID NO: 3065711 - DNA, 25 bp, Homo sapien
taaatagagcagagcaccagaaggt

SEQ ID NO: 3065712 - DNA, 25 bp, Homo sapien
acatcccagacagcgaaggtgttat

SEQ ID NO: 3065713 - DNA, 25 bp, Homo sapien
aacatcccagacagcgaaggtgtta

SEQ ID NO: 3065714 - DNA, 25 bp, Homo sapien
atcccagacagcgaaggtgttattt

SEQ ID NO: 3065715 - DNA, 25 bp, Homo sapien
ccagacagcgaaggtgttattttta

SEQ ID NO: 3065716 - DNA, 25 bp, Homo sapien
ggtcaagcaacctgtccactaagct

SEQ ID NO: 3065717 - DNA, 25 bp, Homo sapien
agctctgctccaccattgggtagct

SEQ ID NO: 3065718 - DNA, 25 bp, Homo sapien
tcagtaaggtcagcagtgatcacca

SEQ ID NO: 3065719 - DNA, 25 bp, Homo sapien
tttcttcggtcctctcacgcaacag

SEQ ID NO: 3065720 - DNA, 25 bp, Homo sapien
acagtagtaatgttcacatgccacc

SEQ ID NO: 3065721 - DNA, 25 bp, Homo sapien
taattcaatattcagaacagaacag

SEQ ID NO: 3065722 - DNA, 25 bp, Homo sapien
gttgatcatttgagtcctgtgccta

SEQ ID NO: 3065723 - DNA, 25 bp, Homo sapien
ttagccttgcatggtggtgaacgtc

SEQ ID NO: 3065724 - DNA, 25 bp, Homo sapien
ttatacaagatggtggtttttccag

SEQ ID NO: 3065725 - DNA, 25 bp, Homo sapien
tttatacaagatggtggtttttcca

SEQ ID NO: 3065726 - DNA, 25 bp, Homo sapien
tccaaactcaatataagaatccgca

SEQ ID NO: 3065727 - DNA, 25 bp, Homo sapien
ccaaactcaatataagaatccgcat

SEQ ID NO: 3065728 - DNA, 25 bp, Homo sapien
agagcttttcaaaaatgtttcccat

SEQ ID NO: 3065729 - DNA, 25 bp, Homo sapien
gactccgcggcctttaggatttcag

SEQ ID NO: 3065730 - DNA, 25 bp, Homo sapien
gttcagctaaaccacgacaggcgtg

SEQ ID NO: 3065731 - DNA, 25 bp, Homo sapien
aggatttcagctcagttcagctaaa

SEQ ID NO: 3065732 - DNA, 25 bp, Homo sapien
tgttgccactcaaggtaccgctacc

SEQ ID NO: 3065733 - DNA, 25 bp, Homo sapien
aacgatgacaattccagcaactagg

SEQ ID NO: 3065734 - DNA, 25 bp, Homo sapien
acaagtacgcctacaaagaaaagtg

SEQ ID NO: 3065735 - DNA, 25 bp, Homo sapien
gttggtcgaagatgcaagttgcctt

SEQ ID NO: 3065736 - DNA, 25 bp, Homo sapien
tttgaactcagaaccaactcctcgg

SEQ ID NO: 3065737 - DNA, 25 bp, Homo sapien
atggacattcgagggcgaacagcag

SEQ ID NO: 3065738 - DNA, 25 bp, Homo sapien
taaagcccttgagacaaattccggc

SEQ ID NO: 3065739 - DNA, 25 bp, Homo sapien
taagtgatccgaagcattaaagccc

SEQ ID NO: 3065740 - DNA, 25 bp, Homo sapien
gcacgttggaaacggagtcacccac

SEQ ID NO: 3065741 - DNA, 25 bp, Homo sapien
tcacggcggttgcacgcctgcgcga

SEQ ID NO: 3065742 - DNA, 25 bp, Homo sapien
ccgagccggacgtgtccgcgaagat

SEQ ID NO: 3065743 - DNA, 25 bp, Homo sapien
ccagagcgggacttgagggtagcag

SEQ ID NO: 3065744 - DNA, 25 bp, Homo sapien
ggagatgacccctcgttacacgcgt

SEQ ID NO: 3065745 - DNA, 25 bp, Homo sapien
tatgtgtgggtctaagtgtcgactc

SEQ ID NO: 3065746 - DNA, 25 bp, Homo sapien
caggaaatctttctccaccctgaag

SEQ ID NO: 3065747 - DNA, 25 bp, Homo sapien
tatccagttcccatatatgtgtggg

SEQ ID NO: 3065748 - DNA, 25 bp, Homo sapien
tgttatttcatagggcgtactttca

SEQ ID NO: 3065749 - DNA, 25 bp, Homo sapien
tattctgtcaccgttgtggaggccg

SEQ ID NO: 3065750 - DNA, 25 bp, Homo sapien
agtagagctattccctctctgaagg

SEQ ID NO: 3065751 - DNA, 25 bp, Homo sapien
cagtcatatcggcttagggttcacc

SEQ ID NO: 3065752 - DNA, 25 bp, Homo sapien
tgttgccggcaatcctttggtgttc

SEQ ID NO: 3065753 - DNA, 25 bp, Homo sapien
accagtcggatggtagacagcttgc

SEQ ID NO: 3065754 - DNA, 25 bp, Homo sapien
ccaggcaacaccctatgagggaatg

SEQ ID NO: 3065755 - DNA, 25 bp, Homo sapien
catttggcagcaaggcagacctgct

SEQ ID NO: 3065756 - DNA, 25 bp, Homo sapien
gggacaacagcaagtctctaccaga

SEQ ID NO: 3065757 - DNA, 25 bp, Homo sapien
ctttaatatcctagagaagctcagg

SEQ ID NO: 3065758 - DNA, 25 bp, Homo sapien
ccatggatggacctcaaaggattaa

SEQ ID NO: 3065759 - DNA, 25 bp, Homo sapien
agaggctcctcaatatcagatccag

SEQ ID NO: 3065760 - DNA, 25 bp, Homo sapien
cagcagcattagtcagtccagctgg

SEQ ID NO: 3065761 - DNA, 25 bp, Homo sapien
ggacattggtttggatgcacaccga

SEQ ID NO: 3065762 - DNA, 25 bp, Homo sapien
tatcccaaggaattggctaaaacga

SEQ ID NO: 3065763 - DNA, 25 bp, Homo sapien
cctttgggctggaactaaataatgc

SEQ ID NO: 3065764 - DNA, 25 bp, Homo sapien
ggcaggccccattcaatcagtttaa

SEQ ID NO: 3065765 - DNA, 25 bp, Homo sapien
aatatatactttttatttagccatt

SEQ ID NO: 3065766 - DNA, 25 bp, Homo sapien
tcagagtacggctcctgggacactt

SEQ ID NO: 3065767 - DNA, 25 bp, Homo sapien
agccggctgctatctagtttgacgg

SEQ ID NO: 3065768 - DNA, 25 bp, Homo sapien
ctatctagtttgacggggattctct

SEQ ID NO: 3065769 - DNA, 25 bp, Homo sapien
ctgctatctagtttgacggggattc

SEQ ID NO: 3065770 - DNA, 25 bp, Homo sapien
cgtccggcttctcgccattgggctt

SEQ ID NO: 3065771 - DNA, 25 bp, Homo sapien
gaactcgtccggcttctcgccattg

SEQ ID NO: 3065772 - DNA, 25 bp, Homo sapien
actcgtccggcttctcgccattggg

SEQ ID NO: 3065773 - DNA, 25 bp, Homo sapien
cgatcttggcgctcgaactgaacat

SEQ ID NO: 3065774 - DNA, 25 bp, Homo sapien
ggagaacttgcagcgcctgcttagg

SEQ ID NO: 3065775 - DNA, 25 bp, Homo sapien
aacttgcagcgcctgcttaggaaga

SEQ ID NO: 3065776 - DNA, 25 bp, Homo sapien
cctgggagaacttgcagcgcctgct

SEQ ID NO: 3065777 - DNA, 25 bp, Homo sapien
tgggagaacttgcagcgcctgctta

SEQ ID NO: 3065778 - DNA, 25 bp, Homo sapien
gaaggcagactttctacatgcaaat

SEQ ID NO: 3065779 - DNA, 25 bp, Homo sapien
gagctaacactaaaagtcactgggt

SEQ ID NO: 3065780 - DNA, 25 bp, Homo sapien
caacagttggccgattagaaggcag

SEQ ID NO: 3065781 - DNA, 25 bp, Homo sapien
taaaggtctcccacaagactggtat

SEQ ID NO: 3065782 - DNA, 25 bp, Homo sapien
cctcatgtgagaaagcagatcatct

SEQ ID NO: 3065783 - DNA, 25 bp, Homo sapien
gaagcacccgttgagtccttttgag

SEQ ID NO: 3065784 - DNA, 25 bp, Homo sapien
cacacgccacccatgaggcttgtgg

SEQ ID NO: 3065785 - DNA, 25 bp, Homo sapien
caattagaagccatcctaaggtgct

SEQ ID NO: 3065786 - DNA, 25 bp, Homo sapien
atcagctggcaagccgtactgagac

SEQ ID NO: 3065787 - DNA, 25 bp, Homo sapien
tggcaagccgtactgagactgggtc

SEQ ID NO: 3065788 - DNA, 25 bp, Homo sapien
tcagctggcaagccgtactgagact

SEQ ID NO: 3065789 - DNA, 25 bp, Homo sapien
gcccgcctccaccataggcggctca

SEQ ID NO: 3065790 - DNA, 25 bp, Homo sapien
ctcaggtcacaggtctgaatacagc

SEQ ID NO: 3065791 - DNA, 25 bp, Homo sapien
agcagcccgcctccaccataggcgg

SEQ ID NO: 3065792 - DNA, 25 bp, Homo sapien
ggtctgaatacagcgcagagcagcc

SEQ ID NO: 3065793 - DNA, 25 bp, Homo sapien
ggctcctggacgaccatcttggcaa

SEQ ID NO: 3065794 - DNA, 25 bp, Homo sapien
gatactattacctgactacggcgag

SEQ ID NO: 3065795 - DNA, 25 bp, Homo sapien
gatttagaagtgaaggcgggctcct

SEQ ID NO: 3065796 - DNA, 25 bp, Homo sapien
tcagctggaccagtatgcctcaggg

SEQ ID NO: 3065797 - DNA, 25 bp, Homo sapien
acatggctgctcttcaaacggctga

SEQ ID NO: 3065798 - DNA, 25 bp, Homo sapien
catttgagctagagaagacttgccc

SEQ ID NO: 3065799 - DNA, 25 bp, Homo sapien
gattttgagatctgactgcccctcg

SEQ ID NO: 3065800 - DNA, 25 bp, Homo sapien
gaattgatggctactccctcacgga

SEQ ID NO: 3065801 - DNA, 25 bp, Homo sapien
tctaggtcctgcttcccatgagact

SEQ ID NO: 3065802 - DNA, 25 bp, Homo sapien
atgagacttcgctgaatccgcccag

SEQ ID NO: 3065803 - DNA, 25 bp, Homo sapien
cgcgtgcggctggtgacagttcctt

SEQ ID NO: 3065804 - DNA, 25 bp, Homo sapien
acatgtgcaaagataagcctcaggt

SEQ ID NO: 3065805 - DNA, 25 bp, Homo sapien
tagatgcgaatacactcctggcagc

SEQ ID NO: 3065806 - DNA, 25 bp, Homo sapien
tcaccgatggcacggaagtcaggct

SEQ ID NO: 3065807 - DNA, 25 bp, Homo sapien
tgtgccaaaggaacccgtctctggg

SEQ ID NO: 3065808 - DNA, 25 bp, Homo sapien
gaggtgacattgcaagtccggtccc

SEQ ID NO: 3065809 - DNA, 25 bp, Homo sapien
agtcacagccgcaaatggtggaggt

SEQ ID NO: 3065810 - DNA, 25 bp, Homo sapien
tggacactaacacgccgaagtcagc

SEQ ID NO: 3065811 - DNA, 25 bp, Homo sapien
ccaggcggccccttatgatgcgagt

SEQ ID NO: 3065812 - DNA, 25 bp, Homo sapien
gaagtcagcgtcctcgctgcagccg

SEQ ID NO: 3065813 - DNA, 25 bp, Homo sapien
agggccgaccgaggacggcggcaag

SEQ ID NO: 3065814 - DNA, 25 bp, Homo sapien
cgagggcgggttcacagggcgggcg

SEQ ID NO: 3065815 - DNA, 25 bp, Homo sapien
ccgacgtcccgcgtccagttgtgct

SEQ ID NO: 3065816 - DNA, 25 bp, Homo sapien
gctcactcgccccaatcctagacgc

SEQ ID NO: 3065817 - DNA, 25 bp, Homo sapien
caacccaaacctgtcctcgggccat

SEQ ID NO: 3065818 - DNA, 25 bp, Homo sapien
gcgcgtatgcgctcgcggcgtcttc

SEQ ID NO: 3065819 - DNA, 25 bp, Homo sapien
ggcgtcttccgggatgctctcctcg

SEQ ID NO: 3065820 - DNA, 25 bp, Homo sapien
aattcccaaactctcgggcacacat

SEQ ID NO: 3065821 - DNA, 25 bp, Homo sapien
tctatggtggtgcagttccagcggc

SEQ ID NO: 3065822 - DNA, 25 bp, Homo sapien
gatggccaggctgtcatctatggtg

SEQ ID NO: 3065823 - DNA, 25 bp, Homo sapien
taattgcggcagaagcgcagttgct

SEQ ID NO: 3065824 - DNA, 25 bp, Homo sapien
ctttgtcgaggacgggcccaaagat

SEQ ID NO: 3065825 - DNA, 25 bp, Homo sapien
gagcccagagatgtgtactgctggc

SEQ ID NO: 3065826 - DNA, 25 bp, Homo sapien
tgagcccagagatgtgtactgctgg

SEQ ID NO: 3065827 - DNA, 25 bp, Homo sapien
tgtgagcccagagatgtgtactgct

SEQ ID NO: 3065828 - DNA, 25 bp, Homo sapien
gctgtgagcccagagatgtgtactg

SEQ ID NO: 3065829 - DNA, 25 bp, Homo sapien
ctgcaggcagacagagggtagtaac

SEQ ID NO: 3065830 - DNA, 25 bp, Homo sapien
tgcaggcagacagagggtagtaaca

SEQ ID NO: 3065831 - DNA, 25 bp, Homo sapien
agggggatgggaccgcagaagccgc

SEQ ID NO: 3065832 - DNA, 25 bp, Homo sapien
tgaaaagaggtttggactagaaaga

SEQ ID NO: 3065833 - DNA, 25 bp, Homo sapien
gccatgaaaagaggtttggactaga

SEQ ID NO: 3065834 - DNA, 25 bp, Homo sapien
agaggtttggactagaaagatggta

SEQ ID NO: 3065835 - DNA, 25 bp, Homo sapien
tcctttgtctaccagggcctccatg

SEQ ID NO: 3065836 - DNA, 25 bp, Homo sapien
gcaccaagtcctttgtctaccaggg

SEQ ID NO: 3065837 - DNA, 25 bp, Homo sapien
agcctcccagtatctccccaaggaa

SEQ ID NO: 3065838 - DNA, 25 bp, Homo sapien
ccaaggaattgctggcttgcaccaa

SEQ ID NO: 3065839 - DNA, 25 bp, Homo sapien
cagcgaggaccctggtgccaccgag

SEQ ID NO: 3065840 - DNA, 25 bp, Homo sapien
caaattgggtagccagcgaggaccc

SEQ ID NO: 3065841 - DNA, 25 bp, Homo sapien
aattgggtagccagcgaggaccctg

SEQ ID NO: 3065842 - DNA, 25 bp, Homo sapien
gtagccagcgaggaccctggtgcca

SEQ ID NO: 3065843 - DNA, 25 bp, Homo sapien
aagtttgcccgcgaccatgaagagg

SEQ ID NO: 3065844 - DNA, 25 bp, Homo sapien
gactttcgggcttgtcagaagcgca

SEQ ID NO: 3065845 - DNA, 25 bp, Homo sapien
aggatgtcagcgagcagccaatcag

SEQ ID NO: 3065846 - DNA, 25 bp, Homo sapien
gcccgcggcctaaggtaagagatga

SEQ ID NO: 3065847 - DNA, 25 bp, Homo sapien
aaggtgaggcatgggttaaaccact

SEQ ID NO: 3065848 - DNA, 25 bp, Homo sapien
ggttggtcctaatacgacttcagca

SEQ ID NO: 3065849 - DNA, 25 bp, Homo sapien
aaaccactttgaatcacacatggag

SEQ ID NO: 3065850 - DNA, 25 bp, Homo sapien
gtcaaaggttggacttttgggagca

SEQ ID NO: 3065851 - DNA, 25 bp, Homo sapien
ggtgcgctgtaagtgcctgaccata

SEQ ID NO: 3065852 - DNA, 25 bp, Homo sapien
tgcgctgtaagtgcctgaccataca

SEQ ID NO: 3065853 - DNA, 25 bp, Homo sapien
gctgtaagtgcctgaccatacagtc

SEQ ID NO: 3065854 - DNA, 25 bp, Homo sapien
tcagggtgcgctgtaagtgcctgac

SEQ ID NO: 3065855 - DNA, 25 bp, Homo sapien
gagaggtggaggacgaagcgtaact

SEQ ID NO: 3065856 - DNA, 25 bp, Homo sapien
gaggacgaagcgtaactgtcttcca

SEQ ID NO: 3065857 - DNA, 25 bp, Homo sapien
gttctaggcccatcagaggctttct

SEQ ID NO: 3065858 - DNA, 25 bp, Homo sapien
taggcccatcagaggctttcttcag

SEQ ID NO: 3065859 - DNA, 25 bp, Homo sapien
ggcctggttgttggctgcgaagtgg

SEQ ID NO: 3065860 - DNA, 25 bp, Homo sapien
agctgcccggagggaactagcccca

SEQ ID NO: 3065861 - DNA, 25 bp, Homo sapien
tgcccggagggaactagccccagaa

SEQ ID NO: 3065862 - DNA, 25 bp, Homo sapien
gggcctggttgttggctgcgaagtg

SEQ ID NO: 3065863 - DNA, 25 bp, Homo sapien
cacagaaaagtattcctattggctc

SEQ ID NO: 3065864 - DNA, 25 bp, Homo sapien
tctgcgtggtccatccaggttaggg

SEQ ID NO: 3065865 - DNA, 25 bp, Homo sapien
tctaggaatcctcaacagggcactc

SEQ ID NO: 3065866 - DNA, 25 bp, Homo sapien
gagatctgggattccaacatggcac

SEQ ID NO: 3065867 - DNA, 25 bp, Homo sapien
ggctgcccaggaatgtagacaccca

SEQ ID NO: 3065868 - DNA, 25 bp, Homo sapien
gctgcccaggaatgtagacacccat

SEQ ID NO: 3065869 - DNA, 25 bp, Homo sapien
aacgtgtggacccaggaccagctgt

SEQ ID NO: 3065870 - DNA, 25 bp, Homo sapien
ctgtgtgaacgtgtggacccaggac

SEQ ID NO: 3065871 - DNA, 25 bp, Homo sapien
ctaaagtgctccacgagggacaagg

SEQ ID NO: 3065872 - DNA, 25 bp, Homo sapien
ttcaggaggaagaattcgggtctgt

SEQ ID NO: 3065873 - DNA, 25 bp, Homo sapien
catccagctggagggtgcttcagga

SEQ ID NO: 3065874 - DNA, 25 bp, Homo sapien
gaagaattcgggtctgtgagtcccc

SEQ ID NO: 3065875 - DNA, 25 bp, Homo sapien
cacccgagaggcagcatagagtagg

SEQ ID NO: 3065876 - DNA, 25 bp, Homo sapien
tctagaatgtctctgtctgcagggc

SEQ ID NO: 3065877 - DNA, 25 bp, Homo sapien
ggtcaggacattcaggttccagctg

SEQ ID NO: 3065878 - DNA, 25 bp, Homo sapien
caatctagctgagagtatggctcct

SEQ ID NO: 3065879 - DNA, 25 bp, Homo sapien
cttacatgcccaaggtaggagtcag

SEQ ID NO: 3065880 - DNA, 25 bp, Homo sapien
tctgatccaactggtgcttacatgc

SEQ ID NO: 3065881 - DNA, 25 bp, Homo sapien
tggtgcttacatgcccaaggtagga

SEQ ID NO: 3065882 - DNA, 25 bp, Homo sapien
caactggtgcttacatgcccaaggt

SEQ ID NO: 3065883 - DNA, 25 bp, Homo sapien
ttatggcattgaacaatactgggcc

SEQ ID NO: 3065884 - DNA, 25 bp, Homo sapien
taggcaagcagggtccctagctcag

SEQ ID NO: 3065885 - DNA, 25 bp, Homo sapien
tactgggccactagaatggtactga

SEQ ID NO: 3065886 - DNA, 25 bp, Homo sapien
tggccaaatgccctgaggcggttca

SEQ ID NO: 3065887 - DNA, 25 bp, Homo sapien
ggaggttggtaagtccaagagcatg

SEQ ID NO: 3065888 - DNA, 25 bp, Homo sapien
ctggaggttggtaagtccaagagca

SEQ ID NO: 3065889 - DNA, 25 bp, Homo sapien
aagtccaagagcatggcaccgtcat

SEQ ID NO: 3065890 - DNA, 25 bp, Homo sapien
ttctggaggttggtaagtccaagag

SEQ ID NO: 3065891 - DNA, 25 bp, Homo sapien
aggcatgattcatcccaaggcaaat

SEQ ID NO: 3065892 - DNA, 25 bp, Homo sapien
aaggcatgattcatcccaaggcaaa

SEQ ID NO: 3065893 - DNA, 25 bp, Homo sapien
ccttcacgtgaagccgagcctgtga

SEQ ID NO: 3065894 - DNA, 25 bp, Homo sapien
gaacagcagatgatagcggctcgcc

SEQ ID NO: 3065895 - DNA, 25 bp, Homo sapien
tagccttcagcgaacatgtacaccg

SEQ ID NO: 3065896 - DNA, 25 bp, Homo sapien
gaggacctctcgttagtatcccgcg

SEQ ID NO: 3065897 - DNA, 25 bp, Homo sapien
tctagagcttctaaagcccgtgctg

SEQ ID NO: 3065898 - DNA, 25 bp, Homo sapien
tagaagccctgaccagttggcactg

SEQ ID NO: 3065899 - DNA, 25 bp, Homo sapien
cccactgtgcagtgttagggctgcc

SEQ ID NO: 3065900 - DNA, 25 bp, Homo sapien
gacccctactgtggactgccttata

SEQ ID NO: 3065901 - DNA, 25 bp, Homo sapien
tagagcgtcctgttaaggcacatgc

SEQ ID NO: 3065902 - DNA, 25 bp, Homo sapien
gacagttgcagtgtctcagatggcc

SEQ ID NO: 3065903 - DNA, 25 bp, Homo sapien
gtacgtttctgaacagtccctgcca

SEQ ID NO: 3065904 - DNA, 25 bp, Homo sapien
ggcacatgctaacttcccactcaag

SEQ ID NO: 3065905 - DNA, 25 bp, Homo sapien
ggattcctgtccatgatgcctaatg

SEQ ID NO: 3065906 - DNA, 25 bp, Homo sapien
gacccacccattgtactcagaagaa

SEQ ID NO: 3065907 - DNA, 25 bp, Homo sapien
gaaggttgatccttagcctcataca

SEQ ID NO: 3065908 - DNA, 25 bp, Homo sapien
gaccctcttgtaaatatggacttga

SEQ ID NO: 3065909 - DNA, 25 bp, Homo sapien
aatatattagcacctgccagccagg

SEQ ID NO: 3065910 - DNA, 25 bp, Homo sapien
tgccccttagaaagtagctgtaggc

SEQ ID NO: 3065911 - DNA, 25 bp, Homo sapien
gatcccaccgtggagacatctgtag

SEQ ID NO: 3065912 - DNA, 25 bp, Homo sapien
ggattcaggctgtactaataccagg

SEQ ID NO: 3065913 - DNA, 25 bp, Homo sapien
ttctgagactgcgacggcaaggctg

SEQ ID NO: 3065914 - DNA, 25 bp, Homo sapien
gggacctagcgcaggacttttggta

SEQ ID NO: 3065915 - DNA, 25 bp, Homo sapien
aatggattctgagactgcgacggca

SEQ ID NO: 3065916 - DNA, 25 bp, Homo sapien
gcgcaggacttttggtaatccataa

SEQ ID NO: 3065917 - DNA, 25 bp, Homo sapien
tcagtgcctggtgaaaaatagacct

SEQ ID NO: 3065918 - DNA, 25 bp, Homo sapien
ggctttgatgaaccctcatgctgca

SEQ ID NO: 3065919 - DNA, 25 bp, Homo sapien
tcatgcgtggactgataggacatct

SEQ ID NO: 3065920 - DNA, 25 bp, Homo sapien
gagcagctgagccatttgttcttga

SEQ ID NO: 3065921 - DNA, 25 bp, Homo sapien
caaatcaagtcagtgtagaatgtcg

SEQ ID NO: 3065922 - DNA, 25 bp, Homo sapien
gacaaggaactcaaacgttgtaaca

SEQ ID NO: 3065923 - DNA, 25 bp, Homo sapien
tagaatgtcgacatcaggacaagga

SEQ ID NO: 3065924 - DNA, 25 bp, Homo sapien
agatgatcacattggtgtaaagagc

SEQ ID NO: 3065925 - DNA, 25 bp, Homo sapien
cctcattatgcagacaaggggctga

SEQ ID NO: 3065926 - DNA, 25 bp, Homo sapien
tcctcattatgcagacaaggggctg

SEQ ID NO: 3065927 - DNA, 25 bp, Homo sapien
ctcattatgcagacaaggggctgag

SEQ ID NO: 3065928 - DNA, 25 bp, Homo sapien
tatcctcattatgcagacaaggggc

SEQ ID NO: 3065929 - DNA, 25 bp, Homo sapien
cagcttggaaccatgggcccactta

SEQ ID NO: 3065930 - DNA, 25 bp, Homo sapien
gcttggaaccatgggcccacttaat

SEQ ID NO: 3065931 - DNA, 25 bp, Homo sapien
tgggcccacttaatctcccacactt

SEQ ID NO: 3065932 - DNA, 25 bp, Homo sapien
catgggcccacttaatctcccacac

SEQ ID NO: 3065933 - DNA, 25 bp, Homo sapien
cctttgtgcatcccgggcacgtagt

SEQ ID NO: 3065934 - DNA, 25 bp, Homo sapien
tcgggtaagcggctgcaggagagca

SEQ ID NO: 3065935 - DNA, 25 bp, Homo sapien
aggcgcaggcgccatcgggtaagcg

SEQ ID NO: 3065936 - DNA, 25 bp, Homo sapien
gcacgtagtaggcgcaggcgccatc

SEQ ID NO: 3065937 - DNA, 25 bp, Homo sapien
ccaggcatgtgcagggactgaggca

SEQ ID NO: 3065938 - DNA, 25 bp, Homo sapien
gcctcctctaagagtttcttgtgcc

SEQ ID NO: 3065939 - DNA, 25 bp, Homo sapien
ccccaggcatgtgcagggactgagg

SEQ ID NO: 3065940 - DNA, 25 bp, Homo sapien
cctctaagagtttcttgtgccccag

SEQ ID NO: 3065941 - DNA, 25 bp, Homo sapien
ccagaaaattcttatagtgggtgga

SEQ ID NO: 3065942 - DNA, 25 bp, Homo sapien
tccagaaaattcttatagtgggtgg

SEQ ID NO: 3065943 - DNA, 25 bp, Homo sapien
ttccagaaaattcttatagtgggtg

SEQ ID NO: 3065944 - DNA, 25 bp, Homo sapien
ctacaaatccttatccccttctgct

SEQ ID NO: 3065945 - DNA, 25 bp, Homo sapien
aatccttatccccttctgctggtgc

SEQ ID NO: 3065946 - DNA, 25 bp, Homo sapien
acaaatccttatccccttctgctgg

SEQ ID NO: 3065947 - DNA, 25 bp, Homo sapien
ttatccccttctgctggtgccattg

SEQ ID NO: 3065948 - DNA, 25 bp, Homo sapien
gtcagcagcccaaagcagtcggttt

SEQ ID NO: 3065949 - DNA, 25 bp, Homo sapien
cagggtcagcgcctgaagcaggcct

SEQ ID NO: 3065950 - DNA, 25 bp, Homo sapien
tgaccacatgactgcgcggtgggcc

SEQ ID NO: 3065951 - DNA, 25 bp, Homo sapien
tgtgccacgggactcagcgagggct

SEQ ID NO: 3065952 - DNA, 25 bp, Homo sapien
cacgccacttttgttgatctagcaa

SEQ ID NO: 3065953 - DNA, 25 bp, Homo sapien
gcaagaagtccagttgaagatattt

SEQ ID NO: 3065954 - DNA, 25 bp, Homo sapien
tattctcactagctacacgccactt

SEQ ID NO: 3065955 - DNA, 25 bp, Homo sapien
gctggtttcctgaccaacatccatt

SEQ ID NO: 3065956 - DNA, 25 bp, Homo sapien
cacggacagcttcgctggcctattg

SEQ ID NO: 3065957 - DNA, 25 bp, Homo sapien
ctaggagcgcaacagccaagtgttc

SEQ ID NO: 3065958 - DNA, 25 bp, Homo sapien
taggagcgcaacagccaagtgttca

SEQ ID NO: 3065959 - DNA, 25 bp, Homo sapien
gcaccacggacagcttcgctggcct

SEQ ID NO: 3065960 - DNA, 25 bp, Homo sapien
tagagcaccctgcaccagtcaggca

SEQ ID NO: 3065961 - DNA, 25 bp, Homo sapien
gccccatagagcaccctgcaccagt

SEQ ID NO: 3065962 - DNA, 25 bp, Homo sapien
tccaacaagccccatagagcaccct

SEQ ID NO: 3065963 - DNA, 25 bp, Homo sapien
aacaagccccatagagcaccctgca

SEQ ID NO: 3065964 - DNA, 25 bp, Homo sapien
aggaggcgtccagagacctccctgc

SEQ ID NO: 3065965 - DNA, 25 bp, Homo sapien
ggaggcgtccagagacctccctgct

SEQ ID NO: 3065966 - DNA, 25 bp, Homo sapien
gaggcgtccagagacctccctgctc

SEQ ID NO: 3065967 - DNA, 25 bp, Homo sapien
ccaaaactggaatgccggatgaggg

SEQ ID NO: 3065968 - DNA, 25 bp, Homo sapien
ccccaaaactggaatgccggatgag

SEQ ID NO: 3065969 - DNA, 25 bp, Homo sapien
caaaactggaatgccggatgagggc

SEQ ID NO: 3065970 - DNA, 25 bp, Homo sapien
gcccccaaaactggaatgccggatg

SEQ ID NO: 3065971 - DNA, 25 bp, Homo sapien
caaacgcaagatcaggccaacaagc

SEQ ID NO: 3065972 - DNA, 25 bp, Homo sapien
gagcgaccgcagtcccaaattgcat

SEQ ID NO: 3065973 - DNA, 25 bp, Homo sapien
ccttcttgcagcagcgctggcgagg

SEQ ID NO: 3065974 - DNA, 25 bp, Homo sapien
gccaacaagctcagcgactctgacg

SEQ ID NO: 3065975 - DNA, 25 bp, Homo sapien
atggctgcgcccacgtccttggagg

SEQ ID NO: 3065976 - DNA, 25 bp, Homo sapien
cacggtaagcgacagcacgcagagc

SEQ ID NO: 3065977 - DNA, 25 bp, Homo sapien
ggcgctcctgcaccagaaagttgat

SEQ ID NO: 3065978 - DNA, 25 bp, Homo sapien
aagacgccgaagaccacggtaagcg

SEQ ID NO: 3065979 - DNA, 25 bp, Homo sapien
cgccacccgcgacacccacaggctg

SEQ ID NO: 3065980 - DNA, 25 bp, Homo sapien
gcggggaccccgtcgctggcggcca

SEQ ID NO: 3065981 - DNA, 25 bp, Homo sapien
ccacaggctgcgctcgtcgggcgcc

SEQ ID NO: 3065982 - DNA, 25 bp, Homo sapien
acaggctgcgctcgtcgggcgccag

SEQ ID NO: 3065983 - DNA, 25 bp, Homo sapien
ccagcccgtgggtgcggtttcccag

SEQ ID NO: 3065984 - DNA, 25 bp, Homo sapien
cagcccgtgggtgcggtttcccagg

SEQ ID NO: 3065985 - DNA, 25 bp, Homo sapien
tgtggttcaggaaggtcgcgttcat

SEQ ID NO: 3065986 - DNA, 25 bp, Homo sapien
ctcctccaagccgctgtggttcagg

SEQ ID NO: 3065987 - DNA, 25 bp, Homo sapien
cctccaagccgctgtggttcaggaa

SEQ ID NO: 3065988 - DNA, 25 bp, Homo sapien
tcctccaagccgctgtggttcagga

SEQ ID NO: 3065989 - DNA, 25 bp, Homo sapien
tctcggcgcgcagtcccgggtgcac

SEQ ID NO: 3065990 - DNA, 25 bp, Homo sapien
gggtctcggcgcgcagtcccgggtg

SEQ ID NO: 3065991 - DNA, 25 bp, Homo sapien
gcggcgccgggggtctcggcgcgca

SEQ ID NO: 3065992 - DNA, 25 bp, Homo sapien
gcgccgggggtctcggcgcgcagtc

SEQ ID NO: 3065993 - DNA, 25 bp, Homo sapien
ggtccgcgctctcagggacgctccg

SEQ ID NO: 3065994 - DNA, 25 bp, Homo sapien
gtccgcgctctcagggacgctccgg

SEQ ID NO: 3065995 - DNA, 25 bp, Homo sapien
ccgcgctctcagggacgctccggac

SEQ ID NO: 3065996 - DNA, 25 bp, Homo sapien
ggggtccgcgctctcagggacgctc

SEQ ID NO: 3065997 - DNA, 25 bp, Homo sapien
cgagcaacaggcggcgcaggagctg

SEQ ID NO: 3065998 - DNA, 25 bp, Homo sapien
tctcgggccgcctacccctgggcac

SEQ ID NO: 3065999 - DNA, 25 bp, Homo sapien
ctctcgggccgcctacccctgggca

SEQ ID NO: 3066000 - DNA, 25 bp, Homo sapien
gctctcgggccgcctacccctgggc

SEQ ID NO: 3066001 - DNA, 25 bp, Homo sapien
cttgttacagtaagggaggcagcca

SEQ ID NO: 3066002 - DNA, 25 bp, Homo sapien
cagccactgtcacttgcttttcatg

SEQ ID NO: 3066003 - DNA, 25 bp, Homo sapien
aaggagaaggcttcaggtacgtcct

SEQ ID NO: 3066004 - DNA, 25 bp, Homo sapien
catatttggctttctccggtttgtc

SEQ ID NO: 3066005 - DNA, 25 bp, Homo sapien
tatttgcatatttggtctcccagaa

SEQ ID NO: 3066006 - DNA, 25 bp, Homo sapien
aaattagggaagctgtcagttacca

SEQ ID NO: 3066007 - DNA, 25 bp, Homo sapien
agaaccatccacgtcaggagcagga

SEQ ID NO: 3066008 - DNA, 25 bp, Homo sapien
ggtctggccattgtctatttgcata

SEQ ID NO: 3066009 - DNA, 25 bp, Homo sapien
caggactgcagtcatgtaaaagcct

SEQ ID NO: 3066010 - DNA, 25 bp, Homo sapien
cattggcttccaaggtgacccctta

SEQ ID NO: 3066011 - DNA, 25 bp, Homo sapien
ggccaggaacctataagcagcttag

SEQ ID NO: 3066012 - DNA, 25 bp, Homo sapien
tctgagggccaggaacctataagca

SEQ ID NO: 3066013 - DNA, 25 bp, Homo sapien
tcttgaagaatgtgctagaaggtga

SEQ ID NO: 3066014 - DNA, 25 bp, Homo sapien
cctcagagtaactcttgaagaatgt

SEQ ID NO: 3066015 - DNA, 25 bp, Homo sapien
gcaggaggcctgttcctcattggct

SEQ ID NO: 3066016 - DNA, 25 bp, Homo sapien
ggatcctctgttcctcgccatcgga

SEQ ID NO: 3066017 - DNA, 25 bp, Homo sapien
acaagaacaggtagtgggccagatg

SEQ ID NO: 3066018 - DNA, 25 bp, Homo sapien
gtgggccagatgggccctcctctgt

SEQ ID NO: 3066019 - DNA, 25 bp, Homo sapien
tcctctgtcttcttctgctctatgc

SEQ ID NO: 3066020 - DNA, 25 bp, Homo sapien
tttacaagaacaggtagtgggccag

SEQ ID NO: 3066021 - DNA, 25 bp, Homo sapien
cactgtggacgcaggtcaacagaac

SEQ ID NO: 3066022 - DNA, 25 bp, Homo sapien
gggacactgtggacgcaggtcaaca

SEQ ID NO: 3066023 - DNA, 25 bp, Homo sapien
aaactagataatgataaacggtgag

SEQ ID NO: 3066024 - DNA, 25 bp, Homo sapien
taaacggtgagaaggtgcgaataga

SEQ ID NO: 3066025 - DNA, 25 bp, Homo sapien
caggatgcttcgaccttgttctgat

SEQ ID NO: 3066026 - DNA, 25 bp, Homo sapien
aggatgcttcgaccttgttctgatg

SEQ ID NO: 3066027 - DNA, 25 bp, Homo sapien
ggatgcttcgaccttgttctgatgc

SEQ ID NO: 3066028 - DNA, 25 bp, Homo sapien
cttctcaggactccagttgagttgg

SEQ ID NO: 3066029 - DNA, 25 bp, Homo sapien
caccttctcaggactccagttgagt

SEQ ID NO: 3066030 - DNA, 25 bp, Homo sapien
ccttctcaggactccagttgagttg

SEQ ID NO: 3066031 - DNA, 25 bp, Homo sapien
accttctcaggactccagttgagtt

SEQ ID NO: 3066032 - DNA, 25 bp, Homo sapien
cagcacgccggcctgaaaaagcgga

SEQ ID NO: 3066033 - DNA, 25 bp, Homo sapien
aaagcggaagtgagagatgcttttc

SEQ ID NO: 3066034 - DNA, 25 bp, Homo sapien
gaatctaccagatgctggggggttc

SEQ ID NO: 3066035 - DNA, 25 bp, Homo sapien
ccggcctgaaaaagcggaagtgaga

SEQ ID NO: 3066036 - DNA, 25 bp, Homo sapien
gggacatagcatagaatagctatta

SEQ ID NO: 3066037 - DNA, 25 bp, Homo sapien
taatgtcacagtgcacgagctgaga

SEQ ID NO: 3066038 - DNA, 25 bp, Homo sapien
taagttgccaggaataagacgggga

SEQ ID NO: 3066039 - DNA, 25 bp, Homo sapien
attagtacttcttgctgtaatgtca

SEQ ID NO: 3066040 - DNA, 25 bp, Homo sapien
ggaaaacgccgcagctgcaggtgcc

SEQ ID NO: 3066041 - DNA, 25 bp, Homo sapien
gggaaaacgccgcagctgcaggtgc

SEQ ID NO: 3066042 - DNA, 25 bp, Homo sapien
ccaaaggtggtgctgttcccagaaa

SEQ ID NO: 3066043 - DNA, 25 bp, Homo sapien
gccagtttgcatggttaaaaccagc

SEQ ID NO: 3066044 - DNA, 25 bp, Homo sapien
tcttcacagaagcttagcgcctcag

SEQ ID NO: 3066045 - DNA, 25 bp, Homo sapien
tagcgactggtgcacaagtgttcct

SEQ ID NO: 3066046 - DNA, 25 bp, Homo sapien
ttttccaggatgggtgtagtggctt

SEQ ID NO: 3066047 - DNA, 25 bp, Homo sapien
aagcccacaagggtagccatcctgt

SEQ ID NO: 3066048 - DNA, 25 bp, Homo sapien
gttgtttgtccgaaattctgggatc

SEQ ID NO: 3066049 - DNA, 25 bp, Homo sapien
taaattttatcagctctaggggtag

SEQ ID NO: 3066050 - DNA, 25 bp, Homo sapien
gatcaaaaaatgtctggttatccat

SEQ ID NO: 3066051 - DNA, 25 bp, Homo sapien
gtgagttcaactctgatgtttcctc

SEQ ID NO: 3066052 - DNA, 25 bp, Homo sapien
tgagcaatacagaccagtaatttta

SEQ ID NO: 3066053 - DNA, 25 bp, Homo sapien
caggattagacacaggctatgcatc

SEQ ID NO: 3066054 - DNA, 25 bp, Homo sapien
aacttatacgtgaatgtccatggca

SEQ ID NO: 3066055 - DNA, 25 bp, Homo sapien
aaactcaagagtaacagggctgggc

SEQ ID NO: 3066056 - DNA, 25 bp, Homo sapien
ggaaatctggtaggcctcaaaagct

SEQ ID NO: 3066057 - DNA, 25 bp, Homo sapien
taaagtatcattatgcgctccagcc

SEQ ID NO: 3066058 - DNA, 25 bp, Homo sapien
gctatgatgttagcacaatggtgaa

SEQ ID NO: 3066059 - DNA, 25 bp, Homo sapien
gtcctaagccataccgtgtacccta

SEQ ID NO: 3066060 - DNA, 25 bp, Homo sapien
ggtatggtggctacaccacctaggt

SEQ ID NO: 3066061 - DNA, 25 bp, Homo sapien
gccattgtgtgacagttgcctttag

SEQ ID NO: 3066062 - DNA, 25 bp, Homo sapien
tagagcccgaaactcaaaatccaga

SEQ ID NO: 3066063 - DNA, 25 bp, Homo sapien
cagagacccttgaagacatccagtc

SEQ ID NO: 3066064 - DNA, 25 bp, Homo sapien
ggaagaaccttcttcaatgcagcag

SEQ ID NO: 3066065 - DNA, 25 bp, Homo sapien
gagtctaactctaccgaatcatgag

SEQ ID NO: 3066066 - DNA, 25 bp, Homo sapien
tctagcaaaatctaggagtgaagtg

SEQ ID NO: 3066067 - DNA, 25 bp, Homo sapien
aaaagcctaggatgtttcaacagag

SEQ ID NO: 3066068 - DNA, 25 bp, Homo sapien
caagtgtagacatgcagaggattgt

SEQ ID NO: 3066069 - DNA, 25 bp, Homo sapien
cagatcagttgtaataggagtggaa

SEQ ID NO: 3066070 - DNA, 25 bp, Homo sapien
tgccagtgaccccgcataatttctt

SEQ ID NO: 3066071 - DNA, 25 bp, Homo sapien
agtgaccccgcataatttcttgatg

SEQ ID NO: 3066072 - DNA, 25 bp, Homo sapien
tgtgccagtgaccccgcataatttc

SEQ ID NO: 3066073 - DNA, 25 bp, Homo sapien
ccagtgaccccgcataatttcttga

SEQ ID NO: 3066074 - DNA, 25 bp, Homo sapien
ccttttcctagagatttatcctgca

SEQ ID NO: 3066075 - DNA, 25 bp, Homo sapien
cttttcctagagatttatcctgcaa

SEQ ID NO: 3066076 - DNA, 25 bp, Homo sapien
tccttttcctagagatttatcctgc

SEQ ID NO: 3066077 - DNA, 25 bp, Homo sapien
ggcaaattgagcttcggtcacaaac

SEQ ID NO: 3066078 - DNA, 25 bp, Homo sapien
tgtctatggcacatcgatatcatgc

SEQ ID NO: 3066079 - DNA, 25 bp, Homo sapien
gaatgtaagcactaagagagaataa

SEQ ID NO: 3066080 - DNA, 25 bp, Homo sapien
aaatccaggctttatccctattgaa

SEQ ID NO: 3066081 - DNA, 25 bp, Homo sapien
cagttgagggtattgtcatcatgtt

SEQ ID NO: 3066082 - DNA, 25 bp, Homo sapien
ttacatagcggtagatgcacaaaag

SEQ ID NO: 3066083 - DNA, 25 bp, Homo sapien
tgttttggtatgtactggaatcctg

SEQ ID NO: 3066084 - DNA, 25 bp, Homo sapien
catcatgttttggtatgtactggaa

SEQ ID NO: 3066085 - DNA, 25 bp, Homo sapien
ccagggtttatgctcaccggtcagt

SEQ ID NO: 3066086 - DNA, 25 bp, Homo sapien
taatttgctaaggttcacacggcta

SEQ ID NO: 3066087 - DNA, 25 bp, Homo sapien
ggcactgtgtccagcgcattgctag

SEQ ID NO: 3066088 - DNA, 25 bp, Homo sapien
gaagttgaaactcagagacgctagg

SEQ ID NO: 3066089 - DNA, 25 bp, Homo sapien
tttcagattctctagattttgcccc

SEQ ID NO: 3066090 - DNA, 25 bp, Homo sapien
agattctctagattttgcccctgaa

SEQ ID NO: 3066091 - DNA, 25 bp, Homo sapien
tcagattctctagattttgcccctg

SEQ ID NO: 3066092 - DNA, 25 bp, Homo sapien
cagattctctagattttgcccctga

SEQ ID NO: 3066093 - DNA, 25 bp, Homo sapien
gactgggagtcagtgcaccttagtt

SEQ ID NO: 3066094 - DNA, 25 bp, Homo sapien
taaaattatttagagcagtacttct

SEQ ID NO: 3066095 - DNA, 25 bp, Homo sapien
tggaaatgatcatctactgtgaatc

SEQ ID NO: 3066096 - DNA, 25 bp, Homo sapien
agataccaaaaaggcgatggactgg

SEQ ID NO: 3066097 - DNA, 25 bp, Homo sapien
agggagagtgaatcttcactcctct

SEQ ID NO: 3066098 - DNA, 25 bp, Homo sapien
gataaaagacaagcatccagcccag

SEQ ID NO: 3066099 - DNA, 25 bp, Homo sapien
caagtggacaggtgattacatgcaa

SEQ ID NO: 3066100 - DNA, 25 bp, Homo sapien
caatgtaagaaaggctgtgatgtca

SEQ ID NO: 3066101 - DNA, 25 bp, Homo sapien
tggctcaagctggtaatcctatcag

SEQ ID NO: 3066102 - DNA, 25 bp, Homo sapien
ggcttattcagacttcttaaaagtc

SEQ ID NO: 3066103 - DNA, 25 bp, Homo sapien
ttattcagacttcttaaaagtctac

SEQ ID NO: 3066104 - DNA, 25 bp, Homo sapien
tattcagacttcttaaaagtctacc

SEQ ID NO: 3066105 - DNA, 25 bp, Homo sapien
gcttattcagacttcttaaaagtct

SEQ ID NO: 3066106 - DNA, 25 bp, Homo sapien
tataggacagatgtagatacggttt

SEQ ID NO: 3066107 - DNA, 25 bp, Homo sapien
gccttataggacagatgtagatacg

SEQ ID NO: 3066108 - DNA, 25 bp, Homo sapien
ctgccttataggacagatgtagata

SEQ ID NO: 3066109 - DNA, 25 bp, Homo sapien
cttataggacagatgtagatacggt

SEQ ID NO: 3066110 - DNA, 25 bp, Homo sapien
tatgaaggcttctaaaccaatttca

SEQ ID NO: 3066111 - DNA, 25 bp, Homo sapien
ccagcaaaaagtgaatagagtcctc

SEQ ID NO: 3066112 - DNA, 25 bp, Homo sapien
gagagtgaaatatagattagggcac

SEQ ID NO: 3066113 - DNA, 25 bp, Homo sapien
gcacaagatgaactgtaggccaggg

SEQ ID NO: 3066114 - DNA, 25 bp, Homo sapien
cctgtgattatggactgagatactc

SEQ ID NO: 3066115 - DNA, 25 bp, Homo sapien
gagatagagaacttggctagctgca

SEQ ID NO: 3066116 - DNA, 25 bp, Homo sapien
aaatgatgcctgtgagactaagtcc

SEQ ID NO: 3066117 - DNA, 25 bp, Homo sapien
gatacgtgggaaacggctgcatcac

SEQ ID NO: 3066118 - DNA, 25 bp, Homo sapien
acggagatgctcttcgcaaagggag

SEQ ID NO: 3066119 - DNA, 25 bp, Homo sapien
ccacggagatgctcttcgcaaaggg

SEQ ID NO: 3066120 - DNA, 25 bp, Homo sapien
tcagatttctgccacggagatgctc

SEQ ID NO: 3066121 - DNA, 25 bp, Homo sapien
cacggagatgctcttcgcaaaggga

SEQ ID NO: 3066122 - DNA, 25 bp, Homo sapien
aagccgctctggcttaaagacatgt

SEQ ID NO: 3066123 - DNA, 25 bp, Homo sapien
gagtaaagaatcacgcatggaagct

SEQ ID NO: 3066124 - DNA, 25 bp, Homo sapien
cagtgccacaagagtaaagaatcac

SEQ ID NO: 3066125 - DNA, 25 bp, Homo sapien
ttcattcagaaagccgctctggctt

SEQ ID NO: 3066126 - DNA, 25 bp, Homo sapien
tgggttcatcaagcaccagtcatat

SEQ ID NO: 3066127 - DNA, 25 bp, Homo sapien
tataggatcactgggcctacctgca

SEQ ID NO: 3066128 - DNA, 25 bp, Homo sapien
aagccctcaagcacacgcatgaatg

SEQ ID NO: 3066129 - DNA, 25 bp, Homo sapien
tttcccagtctaattagtcacccag

SEQ ID NO: 3066130 - DNA, 25 bp, Homo sapien
gaaccgcgctaattgcagaacagca

SEQ ID NO: 3066131 - DNA, 25 bp, Homo sapien
catgttgcagaaagcgctaggattc

SEQ ID NO: 3066132 - DNA, 25 bp, Homo sapien
aactctggcagttcggtaataggag

SEQ ID NO: 3066133 - DNA, 25 bp, Homo sapien
ccataacagcagtagcatgttgcag

SEQ ID NO: 3066134 - DNA, 25 bp, Homo sapien
gcttacttgatgctaaaccatgggt

SEQ ID NO: 3066135 - DNA, 25 bp, Homo sapien
gactaaatagtcataggcagagcag

SEQ ID NO: 3066136 - DNA, 25 bp, Homo sapien
tcatctagcccagcaagtcatggaa

SEQ ID NO: 3066137 - DNA, 25 bp, Homo sapien
cctgctgtagggcatagggagataa

SEQ ID NO: 3066138 - DNA, 25 bp, Homo sapien
tccgttctgatgttgagatgtgttc

SEQ ID NO: 3066139 - DNA, 25 bp, Homo sapien
ccgttctgatgttgagatgtgttcg

SEQ ID NO: 3066140 - DNA, 25 bp, Homo sapien
tgcgtctggagtctgtccgttctga

SEQ ID NO: 3066141 - DNA, 25 bp, Homo sapien
tggtgcgtctggagtctgtccgttc

SEQ ID NO: 3066142 - DNA, 25 bp, Homo sapien
gcaccctgctggcaagtgagccttg

SEQ ID NO: 3066143 - DNA, 25 bp, Homo sapien
cattttattggcagcaccctgctgg

SEQ ID NO: 3066144 - DNA, 25 bp, Homo sapien
gactacattttattggcagcaccct

SEQ ID NO: 3066145 - DNA, 25 bp, Homo sapien
gcaagtgagccttgatgtgtgcttc

SEQ ID NO: 3066146 - DNA, 25 bp, Homo sapien
gaggttacagtgaggcgataccatg

SEQ ID NO: 3066147 - DNA, 25 bp, Homo sapien
gaaatagcacttgaaggccaggtgt

SEQ ID NO: 3066148 - DNA, 25 bp, Homo sapien
tacagtgaggcgataccatgccatt

SEQ ID NO: 3066149 - DNA, 25 bp, Homo sapien
ctggtactgcaaagaaatagcactt

SEQ ID NO: 3066150 - DNA, 25 bp, Homo sapien
tattgtgtctccgttggctggagcc

SEQ ID NO: 3066151 - DNA, 25 bp, Homo sapien
tgaccatgtttaacagctacatagg

SEQ ID NO: 3066152 - DNA, 25 bp, Homo sapien
catatctaaataaaggagggatgca

SEQ ID NO: 3066153 - DNA, 25 bp, Homo sapien
tgcgagcacgtccagtacagatatt

SEQ ID NO: 3066154 - DNA, 25 bp, Homo sapien
ttcttagaactttgtacatcttggg

SEQ ID NO: 3066155 - DNA, 25 bp, Homo sapien
gcctggctccccttaaggtcttggc

SEQ ID NO: 3066156 - DNA, 25 bp, Homo sapien
tccctgtggcctttattgctccctt

SEQ ID NO: 3066157 - DNA, 25 bp, Homo sapien
ggcttgaggccccatagtgacacct

SEQ ID NO: 3066158 - DNA, 25 bp, Homo sapien
taggtcccccaccagatggctcatg

SEQ ID NO: 3066159 - DNA, 25 bp, Homo sapien
aagtgtctgttggcggctaggtccc

SEQ ID NO: 3066160 - DNA, 25 bp, Homo sapien
cctcccctgtacaggaagtgtctgt

SEQ ID NO: 3066161 - DNA, 25 bp, Homo sapien
tcggttgtgctgtctaacggctgcc

SEQ ID NO: 3066162 - DNA, 25 bp, Homo sapien
ggtgccctgttgagctcaccgcttt

SEQ ID NO: 3066163 - DNA, 25 bp, Homo sapien
tttccgtctcctgccgtcctgagga

SEQ ID NO: 3066164 - DNA, 25 bp, Homo sapien
tgggatttgcgcagccgtagtccag

SEQ ID NO: 3066165 - DNA, 25 bp, Homo sapien
cagccccaggaagttggtgccctgt

SEQ ID NO: 3066166 - DNA, 25 bp, Homo sapien
tgggaagttctgtgtggtgttggct

SEQ ID NO: 3066167 - DNA, 25 bp, Homo sapien
atttgtaagggcctctccctgccag

SEQ ID NO: 3066168 - DNA, 25 bp, Homo sapien
gctgtggtcacagaatattgttcat

SEQ ID NO: 3066169 - DNA, 25 bp, Homo sapien
gatggcagatcaatcctgatgccaa

SEQ ID NO: 3066170 - DNA, 25 bp, Homo sapien
tgacctgggtcagctgccatttcct

SEQ ID NO: 3066171 - DNA, 25 bp, Homo sapien
ggtggtggagtcaggccacttatta

SEQ ID NO: 3066172 - DNA, 25 bp, Homo sapien
ttgacctgggtcagctgccatttcc

SEQ ID NO: 3066173 - DNA, 25 bp, Homo sapien
ggccacttattagccctgggacctc

SEQ ID NO: 3066174 - DNA, 25 bp, Homo sapien
tagtggcaaactgcgatgagacctc

SEQ ID NO: 3066175 - DNA, 25 bp, Homo sapien
tcccggttagacacgtccctgtctg

SEQ ID NO: 3066176 - DNA, 25 bp, Homo sapien
ctggttagtggcaaactgcgatgag

SEQ ID NO: 3066177 - DNA, 25 bp, Homo sapien
gatgagacctcatggtcatcccggt

SEQ ID NO: 3066178 - DNA, 25 bp, Homo sapien
ctaaaggagaagcagaagtgtttcc

SEQ ID NO: 3066179 - DNA, 25 bp, Homo sapien
gagaagcagaagtgtttccctttca

SEQ ID NO: 3066180 - DNA, 25 bp, Homo sapien
aggagaagcagaagtgtttcccttt

SEQ ID NO: 3066181 - DNA, 25 bp, Homo sapien
agcagaagtgtttccctttcaaagt

SEQ ID NO: 3066182 - DNA, 25 bp, Homo sapien
tctcttcagatgtcatgtgattctc

SEQ ID NO: 3066183 - DNA, 25 bp, Homo sapien
ctgtctcttcagatgtcatgtgatt

SEQ ID NO: 3066184 - DNA, 25 bp, Homo sapien
cgtgagtggagatgctctcagtggt

SEQ ID NO: 3066185 - DNA, 25 bp, Homo sapien
tgagtggagatgctctcagtggtgg

SEQ ID NO: 3066186 - DNA, 25 bp, Homo sapien
ggccctgttaacaccattatttcag

SEQ ID NO: 3066187 - DNA, 25 bp, Homo sapien
catgtaagcatctggtagtaaagcc

SEQ ID NO: 3066188 - DNA, 25 bp, Homo sapien
caaggactggcacaacaccagaagc

SEQ ID NO: 3066189 - DNA, 25 bp, Homo sapien
taaagccatgactagaagcaaaact

SEQ ID NO: 3066190 - DNA, 25 bp, Homo sapien
gacgaatttgatattccaagtcaga

SEQ ID NO: 3066191 - DNA, 25 bp, Homo sapien
tcagaaacatgagcctgaagccagt

SEQ ID NO: 3066192 - DNA, 25 bp, Homo sapien
cagcagctgacaatagctgcccggt

SEQ ID NO: 3066193 - DNA, 25 bp, Homo sapien
agcccatctccattctgacctgtgt

SEQ ID NO: 3066194 - DNA, 25 bp, Homo sapien
tcaatagtactaaactggccagttc

SEQ ID NO: 3066195 - DNA, 25 bp, Homo sapien
tcacatgacataaaggaccaacagc

SEQ ID NO: 3066196 - DNA, 25 bp, Homo sapien
gtagagagcctcaaaacgtagaact

SEQ ID NO: 3066197 - DNA, 25 bp, Homo sapien
caaatacacattaccagatagccag

SEQ ID NO: 3066198 - DNA, 25 bp, Homo sapien
tatatctagactgccagttcatcct

SEQ ID NO: 3066199 - DNA, 25 bp, Homo sapien
tatctagactgccagttcatcctga

SEQ ID NO: 3066200 - DNA, 25 bp, Homo sapien
ttatatctagactgccagttcatcc

SEQ ID NO: 3066201 - DNA, 25 bp, Homo sapien
attatatctagactgccagttcatc

SEQ ID NO: 3066202 - DNA, 25 bp, Homo sapien
ccctaaattgatctacagaaccacc

SEQ ID NO: 3066203 - DNA, 25 bp, Homo sapien
aattgatctacagaaccaccaatgg

SEQ ID NO: 3066204 - DNA, 25 bp, Homo sapien
atgagaatggattagaagatgtaac

SEQ ID NO: 3066205 - DNA, 25 bp, Homo sapien
tctacagaaccaccaatgggatccc

SEQ ID NO: 3066206 - DNA, 25 bp, Homo sapien
tactaaattcctcaaactgacatgt

SEQ ID NO: 3066207 - DNA, 25 bp, Homo sapien
gcaagacagctggtatatataattc

SEQ ID NO: 3066208 - DNA, 25 bp, Homo sapien
gaagacccaaaatagtctctatggg

SEQ ID NO: 3066209 - DNA, 25 bp, Homo sapien
catgtcagatgtcaggtagtcatga

SEQ ID NO: 3066210 - DNA, 25 bp, Homo sapien
tccgtcccacctcggctcggcctgg

SEQ ID NO: 3066211 - DNA, 25 bp, Homo sapien
tcggtccgtcccacctcggctcggc

SEQ ID NO: 3066212 - DNA, 25 bp, Homo sapien
gtccgtcccacctcggctcggcctg

SEQ ID NO: 3066213 - DNA, 25 bp, Homo sapien
gcgtcggtccgtcccacctcggctc

SEQ ID NO: 3066214 - DNA, 25 bp, Homo sapien
aggggcaccagagccaacggctgct

SEQ ID NO: 3066215 - DNA, 25 bp, Homo sapien
cagcctcggaccttcctgcgcggct

SEQ ID NO: 3066216 - DNA, 25 bp, Homo sapien
ccaggggcaccagagccaacggctg

SEQ ID NO: 3066217 - DNA, 25 bp, Homo sapien
tcggaccttcctgcgcggctcaacc

SEQ ID NO: 3066218 - DNA, 25 bp, Homo sapien
tacaaaaatcacccggctgcaatgg

SEQ ID NO: 3066219 - DNA, 25 bp, Homo sapien
acaaaaatcacccggctgcaatggt

SEQ ID NO: 3066220 - DNA, 25 bp, Homo sapien
gaataataggatcttgcctctgaag

SEQ ID NO: 3066221 - DNA, 25 bp, Homo sapien
aagctcctttccatggtcatgggtg

SEQ ID NO: 3066222 - DNA, 25 bp, Homo sapien
cacacacgtaataccacactttggg

SEQ ID NO: 3066223 - DNA, 25 bp, Homo sapien
ggagctaggatttcagtcatggagc

SEQ ID NO: 3066224 - DNA, 25 bp, Homo sapien
ttttagtaatgattattctggcctg

SEQ ID NO: 3066225 - DNA, 25 bp, Homo sapien
ttgagactacgtacaaatcttgttt

SEQ ID NO: 3066226 - DNA, 25 bp, Homo sapien
taatgattattctggcctgaaacaa

SEQ ID NO: 3066227 - DNA, 25 bp, Homo sapien
gggaggcacttttgagactacgtac

SEQ ID NO: 3066228 - DNA, 25 bp, Homo sapien
gataatggcttaaacagaaactctg

SEQ ID NO: 3066229 - DNA, 25 bp, Homo sapien
tgatcctggcatggcaataaataaa

SEQ ID NO: 3066230 - DNA, 25 bp, Homo sapien
ataagaaagttcaggccgggtgtag

SEQ ID NO: 3066231 - DNA, 25 bp, Homo sapien
tagtttttatgctgctactgctcaa

SEQ ID NO: 3066232 - DNA, 25 bp, Homo sapien
attagataaacattgctctagtttt

SEQ ID NO: 3066233 - DNA, 25 bp, Homo sapien
ttaacaacttgattataaattgctt

SEQ ID NO: 3066234 - DNA, 25 bp, Homo sapien
taacaacttgattataaattgcttt

SEQ ID NO: 3066235 - DNA, 25 bp, Homo sapien
tttcatatagctttaacaacttgat

SEQ ID NO: 3066236 - DNA, 25 bp, Homo sapien
cacaaaattacattgtttcaatgca

SEQ ID NO: 3066237 - DNA, 25 bp, Homo sapien
tccatatcctttaatgaattgcaaa

SEQ ID NO: 3066238 - DNA, 25 bp, Homo sapien
gtgaagactcatactatactctggc

SEQ ID NO: 3066239 - DNA, 25 bp, Homo sapien
ttgtttcaatgcaaacagaacacac

SEQ ID NO: 3066240 - DNA, 25 bp, Homo sapien
gaaagactctcacctctggcacata

SEQ ID NO: 3066241 - DNA, 25 bp, Homo sapien
tagaatccaagtgctagcctctggg

SEQ ID NO: 3066242 - DNA, 25 bp, Homo sapien
tggcacctgatacctaaagaccctg

SEQ ID NO: 3066243 - DNA, 25 bp, Homo sapien
taaaataggccaagcttgggcggaa

SEQ ID NO: 3066244 - DNA, 25 bp, Homo sapien
aggtaatttacattccttggcaatc

SEQ ID NO: 3066245 - DNA, 25 bp, Homo sapien
aaggtaatttacattccttggcaat

SEQ ID NO: 3066246 - DNA, 25 bp, Homo sapien
ataggcaacgtcttttattgttcca

SEQ ID NO: 3066247 - DNA, 25 bp, Homo sapien
tattgttccatctggcacttgcaaa

SEQ ID NO: 3066248 - DNA, 25 bp, Homo sapien
tgttccatctggcacttgcaaacac

SEQ ID NO: 3066249 - DNA, 25 bp, Homo sapien
ccatctggcacttgcaaacaccatt

SEQ ID NO: 3066250 - DNA, 25 bp, Homo sapien
gaaacacgtcagcactagtcacaca

SEQ ID NO: 3066251 - DNA, 25 bp, Homo sapien
tataagtgacggacgatgacaccgc

SEQ ID NO: 3066252 - DNA, 25 bp, Homo sapien
gacaccgccagctcaagagtaaaga

SEQ ID NO: 3066253 - DNA, 25 bp, Homo sapien
tgaaaaagcaaccaagaaactctgg

SEQ ID NO: 3066254 - DNA, 25 bp, Homo sapien
aagttgtgtgtcatccgcatctgtc

SEQ ID NO: 3066255 - DNA, 25 bp, Homo sapien
tgaagttgtgtgtcatccgcatctg

SEQ ID NO: 3066256 - DNA, 25 bp, Homo sapien
gaagttgtgtgtcatccgcatctgt

SEQ ID NO: 3066257 - DNA, 25 bp, Homo sapien
atgaagttgtgtgtcatccgcatct

SEQ ID NO: 3066258 - DNA, 25 bp, Homo sapien
aatactcaaaatcatatgtatgata

SEQ ID NO: 3066259 - DNA, 25 bp, Homo sapien
tcaaaatcatatgtatgatacttac

SEQ ID NO: 3066260 - DNA, 25 bp, Homo sapien
tactcaaaatcatatgtatgatact

SEQ ID NO: 3066261 - DNA, 25 bp, Homo sapien
gtaactttctaaatactcaaaatca

SEQ ID NO: 3066262 - DNA, 25 bp, Homo sapien
tctgttcttcttgggttattggctc

SEQ ID NO: 3066263 - DNA, 25 bp, Homo sapien
tatcaattgcctctttaatctggtt

SEQ ID NO: 3066264 - DNA, 25 bp, Homo sapien
tcatctggaagataacgcttatcaa

SEQ ID NO: 3066265 - DNA, 25 bp, Homo sapien
taatctggttattggctcctttagg

SEQ ID NO: 3066266 - DNA, 25 bp, Homo sapien
ggtgcgtttgacctaacttcttgta

SEQ ID NO: 3066267 - DNA, 25 bp, Homo sapien
ggcgaggtgcgtttgacctaacttc

SEQ ID NO: 3066268 - DNA, 25 bp, Homo sapien
tcatcagggcgaggtgcgtttgacc

SEQ ID NO: 3066269 - DNA, 25 bp, Homo sapien
caagagaaattcatcagggcgaggt

SEQ ID NO: 3066270 - DNA, 25 bp, Homo sapien
aattaggctcctgatttatgtgctc

SEQ ID NO: 3066271 - DNA, 25 bp, Homo sapien
tatgtgctctaaactcattctaagg

SEQ ID NO: 3066272 - DNA, 25 bp, Homo sapien
tctgactggagcaatgataatggga

SEQ ID NO: 3066273 - DNA, 25 bp, Homo sapien
cagatgaactcataccagcttttga

SEQ ID NO: 3066274 - DNA, 25 bp, Homo sapien
ccattcatgttcttctacttttttt

SEQ ID NO: 3066275 - DNA, 25 bp, Homo sapien
tctgagacagaatcttgttctcttg

SEQ ID NO: 3066276 - DNA, 25 bp, Homo sapien
cattcatgttcttctactttttttt

SEQ ID NO: 3066277 - DNA, 25 bp, Homo sapien
tctttctgagacagaatcttgttct

SEQ ID NO: 3066278 - DNA, 25 bp, Homo sapien
cgagggattctttgggaacaatttg

SEQ ID NO: 3066279 - DNA, 25 bp, Homo sapien
taaatcttaatcaatatacttcctt

SEQ ID NO: 3066280 - DNA, 25 bp, Homo sapien
tcacaaaagctaactaaatcttaat

SEQ ID NO: 3066281 - DNA, 25 bp, Homo sapien
gctaactaaatcttaatcaatatac

SEQ ID NO: 3066282 - DNA, 25 bp, Homo sapien
tgaccaagcgtttttacttatttga

SEQ ID NO: 3066283 - DNA, 25 bp, Homo sapien
ttgctctgtcgtccagcctgaaatg

SEQ ID NO: 3066284 - DNA, 25 bp, Homo sapien
tgcaactcccacctcccaggttgaa

SEQ ID NO: 3066285 - DNA, 25 bp, Homo sapien
tcgtccagcctgaaatgcagtggct

SEQ ID NO: 3066286 - DNA, 25 bp, Homo sapien
aggttgaagcgattctcctgcttca

SEQ ID NO: 3066287 - DNA, 25 bp, Homo sapien
tacaaggaattcagcctaggaattt

SEQ ID NO: 3066288 - DNA, 25 bp, Homo sapien
acccgtgtcttcataaagaagatag

SEQ ID NO: 3066289 - DNA, 25 bp, Homo sapien
gggtacaaggaattcagcctaggaa

SEQ ID NO: 3066290 - DNA, 25 bp, Homo sapien
aacccgtgtcttcataaagaagata

SEQ ID NO: 3066291 - DNA, 25 bp, Homo sapien
agcaatacaacactgaagaccctta

SEQ ID NO: 3066292 - DNA, 25 bp, Homo sapien
tacaacactgaagacccttaagata

SEQ ID NO: 3066293 - DNA, 25 bp, Homo sapien
acactgaagacccttaagatattta

SEQ ID NO: 3066294 - DNA, 25 bp, Homo sapien
aatacaacactgaagacccttaaga

SEQ ID NO: 3066295 - DNA, 25 bp, Homo sapien
ttgcatagagggttcttgggatcaa

SEQ ID NO: 3066296 - DNA, 25 bp, Homo sapien
aaatttgcatagagggttcttggga

SEQ ID NO: 3066297 - DNA, 25 bp, Homo sapien
tttgcatagagggttcttgggatca

SEQ ID NO: 3066298 - DNA, 25 bp, Homo sapien
tgtttagggtatccaaagccttctc

SEQ ID NO: 3066299 - DNA, 25 bp, Homo sapien
ccactgcattaagtggatttagtaa

SEQ ID NO: 3066300 - DNA, 25 bp, Homo sapien
gttcaactgcttcactaaagatgag

SEQ ID NO: 3066301 - DNA, 25 bp, Homo sapien
aaaggtgagaaccaacgtgactcaa

SEQ ID NO: 3066302 - DNA, 25 bp, Homo sapien
tgtagggtctaactggattgtccac

SEQ ID NO: 3066303 - DNA, 25 bp, Homo sapien
tgcccacaggactgagaccctaaat

SEQ ID NO: 3066304 - DNA, 25 bp, Homo sapien
tcttgccctgtcttacggtgctgga

SEQ ID NO: 3066305 - DNA, 25 bp, Homo sapien
gagaataggtagtgccaacgtctgc

SEQ ID NO: 3066306 - DNA, 25 bp, Homo sapien
tctaatggtggccaaatattctgcc

SEQ ID NO: 3066307 - DNA, 25 bp, Homo sapien
aaactgaactttgagggttgatatc

SEQ ID NO: 3066308 - DNA, 25 bp, Homo sapien
actccaatgtggcaaagtaaaactg

SEQ ID NO: 3066309 - DNA, 25 bp, Homo sapien
ccaatgtggcaaagtaaaactgaac

SEQ ID NO: 3066310 - DNA, 25 bp, Homo sapien
tatcaagcgctttttggaaatgcat

SEQ ID NO: 3066311 - DNA, 25 bp, Homo sapien
tagaggaatcataggtaccattatc

SEQ ID NO: 3066312 - DNA, 25 bp, Homo sapien
tagttattacatgtgtgccaagacc

SEQ ID NO: 3066313 - DNA, 25 bp, Homo sapien
tctaaaggctgaactcctaacaatg

SEQ ID NO: 3066314 - DNA, 25 bp, Homo sapien
tatattacggagacttctcatggcc

SEQ ID NO: 3066315 - DNA, 25 bp, Homo sapien
catagctatcggaagagacagcagc

SEQ ID NO: 3066316 - DNA, 25 bp, Homo sapien
gtaactcaataaaccagaacactgt

SEQ ID NO: 3066317 - DNA, 25 bp, Homo sapien
catttcggtgttcgaagaaaaagca

SEQ ID NO: 3066318 - DNA, 25 bp, Homo sapien
tacattggtcagcaaaagctagcac

SEQ ID NO: 3066319 - DNA, 25 bp, Homo sapien
catgttcccgttgcagactgaaaca

SEQ ID NO: 3066320 - DNA, 25 bp, Homo sapien
gcattataatgtctaggattgactc

SEQ ID NO: 3066321 - DNA, 25 bp, Homo sapien
gattgactctgatagcatttcgaaa

SEQ ID NO: 3066322 - DNA, 25 bp, Homo sapien
ttcgaaaacaagctaatgctttgtc

SEQ ID NO: 3066323 - DNA, 25 bp, Homo sapien
gtcaaatctcgataaatcctgaatg

SEQ ID NO: 3066324 - DNA, 25 bp, Homo sapien
tgcaccacacattctaggactttct

SEQ ID NO: 3066325 - DNA, 25 bp, Homo sapien
ggtgacaacagcaaatttaacgtag

SEQ ID NO: 3066326 - DNA, 25 bp, Homo sapien
gatttttctatttgtgaatctgcac

SEQ ID NO: 3066327 - DNA, 25 bp, Homo sapien
gatgccaaagtgttgtagagtagat

SEQ ID NO: 3066328 - DNA, 25 bp, Homo sapien
tgaagatgccaaagtgttgtagagt

SEQ ID NO: 3066329 - DNA, 25 bp, Homo sapien
aagatgccaaagtgttgtagagtag

SEQ ID NO: 3066330 - DNA, 25 bp, Homo sapien
ttgaagatgccaaagtgttgtagag

SEQ ID NO: 3066331 - DNA, 25 bp, Homo sapien
tataattctcaatccttctaacctc

SEQ ID NO: 3066332 - DNA, 25 bp, Homo sapien
aattctcaatccttctaacctctga

SEQ ID NO: 3066333 - DNA, 25 bp, Homo sapien
taattctcaatccttctaacctctg

SEQ ID NO: 3066334 - DNA, 25 bp, Homo sapien
attctcaatccttctaacctctgag

SEQ ID NO: 3066335 - DNA, 25 bp, Homo sapien
caatttttaccgagaggttgtgcca

SEQ ID NO: 3066336 - DNA, 25 bp, Homo sapien
ggctatcaatcctatggttataaat

SEQ ID NO: 3066337 - DNA, 25 bp, Homo sapien
ggttgtgccagaaaatttagaggga

SEQ ID NO: 3066338 - DNA, 25 bp, Homo sapien
ggaagaaacaggttaagctggctat

SEQ ID NO: 3066339 - DNA, 25 bp, Homo sapien
gagagtccaggatatcatatgcaca

SEQ ID NO: 3066340 - DNA, 25 bp, Homo sapien
taaaggaccataatcgaaacatggg

SEQ ID NO: 3066341 - DNA, 25 bp, Homo sapien
cctctgtatgtattccctgtgggaa

SEQ ID NO: 3066342 - DNA, 25 bp, Homo sapien
gctccacagaggcaagaaattgtct

SEQ ID NO: 3066343 - DNA, 25 bp, Homo sapien
tggtgagaaggtagatggctcaaaa

SEQ ID NO: 3066344 - DNA, 25 bp, Homo sapien
gaaggtagatggctcaaaatattta

SEQ ID NO: 3066345 - DNA, 25 bp, Homo sapien
tagtggtgagaaggtagatggctca

SEQ ID NO: 3066346 - DNA, 25 bp, Homo sapien
tgagaaggtagatggctcaaaatat

SEQ ID NO: 3066347 - DNA, 25 bp, Homo sapien
catttatgttaggttgagttattcc

SEQ ID NO: 3066348 - DNA, 25 bp, Homo sapien
caggctatcatttatgttaggttga

SEQ ID NO: 3066349 - DNA, 25 bp, Homo sapien
ttccaggctatcatttatgttaggt

SEQ ID NO: 3066350 - DNA, 25 bp, Homo sapien
tatgttaggttgagttattcctcct

SEQ ID NO: 3066351 - DNA, 25 bp, Homo sapien
gaaatgttagcaggcgaagcattaa

SEQ ID NO: 3066352 - DNA, 25 bp, Homo sapien
taccaaaggactaattaacttcaca

SEQ ID NO: 3066353 - DNA, 25 bp, Homo sapien
caaaaatcatagatggccctctaaa

SEQ ID NO: 3066354 - DNA, 25 bp, Homo sapien
aacttattaggaatggagtcatcaa

SEQ ID NO: 3066355 - DNA, 25 bp, Homo sapien
tagtaaagagtcgtgaacttcttcg

SEQ ID NO: 3066356 - DNA, 25 bp, Homo sapien
tcgtgaacttcttcgaggcagtgcg

SEQ ID NO: 3066357 - DNA, 25 bp, Homo sapien
acttcttcgaggcagtgcgtttggg

SEQ ID NO: 3066358 - DNA, 25 bp, Homo sapien
aaagagtcgtgaacttcttcgaggc

SEQ ID NO: 3066359 - DNA, 25 bp, Homo sapien
tactgtcacatgctaaagaacacct

SEQ ID NO: 3066360 - DNA, 25 bp, Homo sapien
ccataaagactaagagaggagcacg

SEQ ID NO: 3066361 - DNA, 25 bp, Homo sapien
ggatatctgggttgaccctaatcca

SEQ ID NO: 3066362 - DNA, 25 bp, Homo sapien
gccctaagccccagtacatgtcaat

SEQ ID NO: 3066363 - DNA, 25 bp, Homo sapien
aattggagttacctctcggctattt

SEQ ID NO: 3066364 - DNA, 25 bp, Homo sapien
aagaattggagttacctctcggcta

SEQ ID NO: 3066365 - DNA, 25 bp, Homo sapien
gaattggagttacctctcggctatt

SEQ ID NO: 3066366 - DNA, 25 bp, Homo sapien
agaattggagttacctctcggctat

SEQ ID NO: 3066367 - DNA, 25 bp, Homo sapien
tcttcattaattggtttctgttccc

SEQ ID NO: 3066368 - DNA, 25 bp, Homo sapien
aaaacaaccatctgattactttcca

SEQ ID NO: 3066369 - DNA, 25 bp, Homo sapien
taacagttctaaaggagttcagagg

SEQ ID NO: 3066370 - DNA, 25 bp, Homo sapien
ttatactcctttggcacttggtaac

SEQ ID NO: 3066371 - DNA, 25 bp, Homo sapien
caggaggtgtattagtgtagttttg

SEQ ID NO: 3066372 - DNA, 25 bp, Homo sapien
tttgtaaataggatccatctccagg

SEQ ID NO: 3066373 - DNA, 25 bp, Homo sapien
tgtaaataggatccatctccaggac

SEQ ID NO: 3066374 - DNA, 25 bp, Homo sapien
tccggtggatggcacatcaattaca

SEQ ID NO: 3066375 - DNA, 25 bp, Homo sapien
ggaagattctaaattcaatctgttt

SEQ ID NO: 3066376 - DNA, 25 bp, Homo sapien
gaattggaagattctaaattcaatc

SEQ ID NO: 3066377 - DNA, 25 bp, Homo sapien
taatggactaagagctgctggtcct

SEQ ID NO: 3066378 - DNA, 25 bp, Homo sapien
tggggttaatggactaagagctgct

SEQ ID NO: 3066379 - DNA, 25 bp, Homo sapien
agagttgggcagacagttgctaaag

SEQ ID NO: 3066380 - DNA, 25 bp, Homo sapien
agttgggcagacagttgctaaagtt

SEQ ID NO: 3066381 - DNA, 25 bp, Homo sapien
aagagttgggcagacagttgctaaa

SEQ ID NO: 3066382 - DNA, 25 bp, Homo sapien
caagagttgggcagacagttgctaa

SEQ ID NO: 3066383 - DNA, 25 bp, Homo sapien
gaagaggagatgggaacccacccac

SEQ ID NO: 3066384 - DNA, 25 bp, Homo sapien
ttttcttgggggtagatgatctgta

SEQ ID NO: 3066385 - DNA, 25 bp, Homo sapien
agaggagatgggaacccacccacct

SEQ ID NO: 3066386 - DNA, 25 bp, Homo sapien
gatgatctgtattgctctccaaaaa

SEQ ID NO: 3066387 - DNA, 25 bp, Homo sapien
gattcaaagggagaccagaggaaag

SEQ ID NO: 3066388 - DNA, 25 bp, Homo sapien
atttcacataatgattcaaagggag

SEQ ID NO: 3066389 - DNA, 25 bp, Homo sapien
gtaacattctgatcctttggcaagc

SEQ ID NO: 3066390 - DNA, 25 bp, Homo sapien
atcctttggcaagccgatctgtctt

SEQ ID NO: 3066391 - DNA, 25 bp, Homo sapien
caaaacctgtatcataaacttttag

SEQ ID NO: 3066392 - DNA, 25 bp, Homo sapien
taggtaaaagttacagaagttcaga

SEQ ID NO: 3066393 - DNA, 25 bp, Homo sapien
gctacaaaccccaaaacctgtatca

SEQ ID NO: 3066394 - DNA, 25 bp, Homo sapien
tgtggagagaaacaagtagattaaa

SEQ ID NO: 3066395 - DNA, 25 bp, Homo sapien
atttctcccatctgctaatctccaa

SEQ ID NO: 3066396 - DNA, 25 bp, Homo sapien
caatttctcccatctgctaatctcc

SEQ ID NO: 3066397 - DNA, 25 bp, Homo sapien
aatttctcccatctgctaatctcca

SEQ ID NO: 3066398 - DNA, 25 bp, Homo sapien
tttctcccatctgctaatctccaaa

SEQ ID NO: 3066399 - DNA, 25 bp, Homo sapien
gcataaatgaccaggtttttatttg

SEQ ID NO: 3066400 - DNA, 25 bp, Homo sapien
tgcaacccctacttcctacgctaaa

SEQ ID NO: 3066401 - DNA, 25 bp, Homo sapien
accaggcttcaccattgatgcccag

SEQ ID NO: 3066402 - DNA, 25 bp, Homo sapien
cattcccagtggtaattctgaaagt

SEQ ID NO: 3066403 - DNA, 25 bp, Homo sapien
ctccttccagaggtccggggtcagg

SEQ ID NO: 3066404 - DNA, 25 bp, Homo sapien
gaattcccgatagggagacttggtg

SEQ ID NO: 3066405 - DNA, 25 bp, Homo sapien
cagaggtccggggtcaggtagttgt

SEQ ID NO: 3066406 - DNA, 25 bp, Homo sapien
agactctagtgtgggtcttgacgag

SEQ ID NO: 3066407 - DNA, 25 bp, Homo sapien
acgtgccaagacgatgcccgtgctc

SEQ ID NO: 3066408 - DNA, 25 bp, Homo sapien
ggcacacgtgccaagacgatgcccg

SEQ ID NO: 3066409 - DNA, 25 bp, Homo sapien
cacacgtgccaagacgatgcccgtg

SEQ ID NO: 3066410 - DNA, 25 bp, Homo sapien
cttgggcacacgtgccaagacgatg

SEQ ID NO: 3066411 - DNA, 25 bp, Homo sapien
cagcacagagccgcagtggcctgtc

SEQ ID NO: 3066412 - DNA, 25 bp, Homo sapien
agcacagagccgcagtggcctgtca

SEQ ID NO: 3066413 - DNA, 25 bp, Homo sapien
gcacagagccgcagtggcctgtcac

SEQ ID NO: 3066414 - DNA, 25 bp, Homo sapien
agggacggcgtagggcttgccaatc

SEQ ID NO: 3066415 - DNA, 25 bp, Homo sapien
caagggacggcgtagggcttgccaa

SEQ ID NO: 3066416 - DNA, 25 bp, Homo sapien
acggcgtagggcttgccaatcttgt

SEQ ID NO: 3066417 - DNA, 25 bp, Homo sapien
ggacggcgtagggcttgccaatctt

SEQ ID NO: 3066418 - DNA, 25 bp, Homo sapien
caatcgagagtttggccaggatgtt

SEQ ID NO: 3066419 - DNA, 25 bp, Homo sapien
caggatgttgatggccctgcagatg

SEQ ID NO: 3066420 - DNA, 25 bp, Homo sapien
agtttggccaggatgttgatggccc

SEQ ID NO: 3066421 - DNA, 25 bp, Homo sapien
acaatcgagagtttggccaggatgt

SEQ ID NO: 3066422 - DNA, 25 bp, Homo sapien
acgcctcgaacctggtgccctggct

SEQ ID NO: 3066423 - DNA, 25 bp, Homo sapien
cttcaaaaccttgtgcttgagagag

SEQ ID NO: 3066424 - DNA, 25 bp, Homo sapien
ctcgaacctggtgccctggctggca

SEQ ID NO: 3066425 - DNA, 25 bp, Homo sapien
gtcctcgatggcaacaaacgcctcg

SEQ ID NO: 3066426 - DNA, 25 bp, Homo sapien
tccacgagctccgtggcctcggtcc

SEQ ID NO: 3066427 - DNA, 25 bp, Homo sapien
tggcctcggtcccggccccatccac

SEQ ID NO: 3066428 - DNA, 25 bp, Homo sapien
gtcccggccccatccacggctgcga

SEQ ID NO: 3066429 - DNA, 25 bp, Homo sapien
ccacggctgcgaccccagccctgga

SEQ ID NO: 3066430 - DNA, 25 bp, Homo sapien
ggattatcagaacagcattgctgcc

SEQ ID NO: 3066431 - DNA, 25 bp, Homo sapien
tatccctgggaacatatatacttgg

SEQ ID NO: 3066432 - DNA, 25 bp, Homo sapien
ctaaatcaggtgtataaacgcttac

SEQ ID NO: 3066433 - DNA, 25 bp, Homo sapien
aacgcttacatatggaatctggaca

SEQ ID NO: 3066434 - DNA, 25 bp, Homo sapien
cccaggctggactcctggccttaag

SEQ ID NO: 3066435 - DNA, 25 bp, Homo sapien
gttgcccaggctggactcctggcct

SEQ ID NO: 3066436 - DNA, 25 bp, Homo sapien
ggactcctggccttaagtgattctc

SEQ ID NO: 3066437 - DNA, 25 bp, Homo sapien
tgcccaggctggactcctggcctta

SEQ ID NO: 3066438 - DNA, 25 bp, Homo sapien
tgtctggtgagaatcccttctacag

SEQ ID NO: 3066439 - DNA, 25 bp, Homo sapien
taagcttcaaataggtcaatgacca

SEQ ID NO: 3066440 - DNA, 25 bp, Homo sapien
tgcctgatgggcaatttcatctagg

SEQ ID NO: 3066441 - DNA, 25 bp, Homo sapien
tgtagttcctaagtaaagccattcc

SEQ ID NO: 3066442 - DNA, 25 bp, Homo sapien
tgtattcttaaggaatagtggccta

SEQ ID NO: 3066443 - DNA, 25 bp, Homo sapien
caaggaaatgtggcctcatgagtag

SEQ ID NO: 3066444 - DNA, 25 bp, Homo sapien
cattttggaatcaaggaaatgtggc

SEQ ID NO: 3066445 - DNA, 25 bp, Homo sapien
caaatagtaattctagtttcaattt

SEQ ID NO: 3066446 - DNA, 25 bp, Homo sapien
caaacgccagctgaatgtccgctaa

SEQ ID NO: 3066447 - DNA, 25 bp, Homo sapien
agtctgggcctaaggaacttctgat

SEQ ID NO: 3066448 - DNA, 25 bp, Homo sapien
gataccatctacctgtagacagcct

SEQ ID NO: 3066449 - DNA, 25 bp, Homo sapien
tctgatcaactagctataaattggg

SEQ ID NO: 3066450 - DNA, 25 bp, Homo sapien
gagtagctggaactacaggtatgtg

SEQ ID NO: 3066451 - DNA, 25 bp, Homo sapien
ccaccacacccagctaattttttat

SEQ ID NO: 3066452 - DNA, 25 bp, Homo sapien
aagagatcctccacctcagtctcct

SEQ ID NO: 3066453 - DNA, 25 bp, Homo sapien
aatcacagctcacagcagctccaac

SEQ ID NO: 3066454 - DNA, 25 bp, Homo sapien
agtaaagcaagctgaatcaccaaac

SEQ ID NO: 3066455 - DNA, 25 bp, Homo sapien
atatacatgtcccaacaatgaaaga

SEQ ID NO: 3066456 - DNA, 25 bp, Homo sapien
taagatttgttccccttctgcaagc

SEQ ID NO: 3066457 - DNA, 25 bp, Homo sapien
tattaaacactccaccagataagat

SEQ ID NO: 3066458 - DNA, 25 bp, Homo sapien
tatgcctttcctgagcggtaataac

SEQ ID NO: 3066459 - DNA, 25 bp, Homo sapien
tcctgagcggtaataacaggttgcc

SEQ ID NO: 3066460 - DNA, 25 bp, Homo sapien
ctgagcggtaataacaggttgccag

SEQ ID NO: 3066461 - DNA, 25 bp, Homo sapien
atatgctttatatgcctttcctgag

SEQ ID NO: 3066462 - DNA, 25 bp, Homo sapien
agaaatcaatcgtgtactagttaaa

SEQ ID NO: 3066463 - DNA, 25 bp, Homo sapien
tgagaaatcaatcgtgtactagtta

SEQ ID NO: 3066464 - DNA, 25 bp, Homo sapien
gagaaatcaatcgtgtactagttaa

SEQ ID NO: 3066465 - DNA, 25 bp, Homo sapien
cagaatgtactgctaaagtgaaaaa

SEQ ID NO: 3066466 - DNA, 25 bp, Homo sapien
tctcatagagttccataggtagcaa

SEQ ID NO: 3066467 - DNA, 25 bp, Homo sapien
catagggagatcttgacttaaaaaa

SEQ ID NO: 3066468 - DNA, 25 bp, Homo sapien
tgaactctgggctaggaccctcaaa

SEQ ID NO: 3066469 - DNA, 25 bp, Homo sapien
tggccgcaggcgcttataatcccag

SEQ ID NO: 3066470 - DNA, 25 bp, Homo sapien
tctgcgaggaaaaccgcatctcggt

SEQ ID NO: 3066471 - DNA, 25 bp, Homo sapien
ctcggtaagcatagtggtttagtgc

SEQ ID NO: 3066472 - DNA, 25 bp, Homo sapien
aaggcgttctgcgaggaaaaccgca

SEQ ID NO: 3066473 - DNA, 25 bp, Homo sapien
gaggaaaaccgcatctcggtaagca

SEQ ID NO: 3066474 - DNA, 25 bp, Homo sapien
gatgaacagggctaaaatcagcacc

SEQ ID NO: 3066475 - DNA, 25 bp, Homo sapien
gaacacccagtgcattaccgctaga

SEQ ID NO: 3066476 - DNA, 25 bp, Homo sapien
ctaacagtgtctcttgtgccgggat

SEQ ID NO: 3066477 - DNA, 25 bp, Homo sapien
taatgggttagtccccaggtgcact

SEQ ID NO: 3066478 - DNA, 25 bp, Homo sapien
gggtgcattttcggcccctcatctc

SEQ ID NO: 3066479 - DNA, 25 bp, Homo sapien
gctccgatcaaatgtgcttctcgat

SEQ ID NO: 3066480 - DNA, 25 bp, Homo sapien
gcttctcgatcatcttttaggcaag

SEQ ID NO: 3066481 - DNA, 25 bp, Homo sapien
cgtcacgaagatcacacaagctccg

SEQ ID NO: 3066482 - DNA, 25 bp, Homo sapien
ctggacgggttcctgcagcaccgtc

SEQ ID NO: 3066483 - DNA, 25 bp, Homo sapien
tggacgggttcctgcagcaccgtca

SEQ ID NO: 3066484 - DNA, 25 bp, Homo sapien
ggacgggttcctgcagcaccgtcat

SEQ ID NO: 3066485 - DNA, 25 bp, Homo sapien
gccagcccctgctcatttaaactca

SEQ ID NO: 3066486 - DNA, 25 bp, Homo sapien
gtgcctcaggccccccctgtagcgg

SEQ ID NO: 3066487 - DNA, 25 bp, Homo sapien
ggctcaggcccactttctgcagtgc

SEQ ID NO: 3066488 - DNA, 25 bp, Homo sapien
ggcccactttctgcagtgcctcagg

SEQ ID NO: 3066489 - DNA, 25 bp, Homo sapien
gggaggccgagcgattgccgagtgc

SEQ ID NO: 3066490 - DNA, 25 bp, Homo sapien
atacccgaagtggagaaagccgagc

SEQ ID NO: 3066491 - DNA, 25 bp, Homo sapien
attgccgagtgcttccgagcgggac

SEQ ID NO: 3066492 - DNA, 25 bp, Homo sapien
gcttccgagcgggacacgggaatac

SEQ ID NO: 3066493 - DNA, 25 bp, Homo sapien
taggctgaaagttttaccatgtaca

SEQ ID NO: 3066494 - DNA, 25 bp, Homo sapien
ttaggctgaaagttttaccatgtac

SEQ ID NO: 3066495 - DNA, 25 bp, Homo sapien
tgaaagttttaccatgtacagaatc

SEQ ID NO: 3066496 - DNA, 25 bp, Homo sapien
ggctgaaagttttaccatgtacaga

SEQ ID NO: 3066497 - DNA, 25 bp, Homo sapien
ttaagggatcggtgtgcaggcaaag

SEQ ID NO: 3066498 - DNA, 25 bp, Homo sapien
cccaggtgtaggtgagagtgaggag

SEQ ID NO: 3066499 - DNA, 25 bp, Homo sapien
gagccagccagtgtaggccccaggt

SEQ ID NO: 3066500 - DNA, 25 bp, Homo sapien
ccaggtgtaggtgagagtgaggagg

SEQ ID NO: 3066501 - DNA, 25 bp, Homo sapien
ccagccagtgtaggccccaggtgta

SEQ ID NO: 3066502 - DNA, 25 bp, Homo sapien
gatcagcaactcatccatcacagtg

SEQ ID NO: 3066503 - DNA, 25 bp, Homo sapien
tgaggaggcagttgaccgcccagca

SEQ ID NO: 3066504 - DNA, 25 bp, Homo sapien
tcacagtgtgggcatagccacgctg

SEQ ID NO: 3066505 - DNA, 25 bp, Homo sapien
gctcaggaggtacatgcggaagtcc

SEQ ID NO: 3066506 - DNA, 25 bp, Homo sapien
tcaagttgcggacttggagccggca

SEQ ID NO: 3066507 - DNA, 25 bp, Homo sapien
ggagccggcaaacgcggagggctgg

SEQ ID NO: 3066508 - DNA, 25 bp, Homo sapien
ctggctggcgcggtcggagccggga

SEQ ID NO: 3066509 - DNA, 25 bp, Homo sapien
tctgcgctgggaatgcgcgtgtcct

SEQ ID NO: 3066510 - DNA, 25 bp, Homo sapien
cgcgcgtcgcgggtggtcctggtcg

SEQ ID NO: 3066511 - DNA, 25 bp, Homo sapien
gttgttcccgcgccttggcagaggg

SEQ ID NO: 3066512 - DNA, 25 bp, Homo sapien
aaggacgactggcccaggagccaag

SEQ ID NO: 3066513 - DNA, 25 bp, Homo sapien
gagccaaggcgaggtggggcttccg

SEQ ID NO: 3066514 - DNA, 25 bp, Homo sapien
cgtcagccgtcagggcaattggcat

SEQ ID NO: 3066515 - DNA, 25 bp, Homo sapien
gccggtgggatccttggctttgtct

SEQ ID NO: 3066516 - DNA, 25 bp, Homo sapien
gagcaggatgagggctttgcctcct

SEQ ID NO: 3066517 - DNA, 25 bp, Homo sapien
gaccctgcacccgaaaaatctctag

SEQ ID NO: 3066518 - DNA, 25 bp, Homo sapien
tgcctggctgtgagccccatgtgtg

SEQ ID NO: 3066519 - DNA, 25 bp, Homo sapien
gtgcctggctgtgagccccatgtgt

SEQ ID NO: 3066520 - DNA, 25 bp, Homo sapien
gcctggctgtgagccccatgtgtgc

SEQ ID NO: 3066521 - DNA, 25 bp, Homo sapien
taggactgtcagcacatcttagcgc

SEQ ID NO: 3066522 - DNA, 25 bp, Homo sapien
aggtcattccgtcctcagccagagc

SEQ ID NO: 3066523 - DNA, 25 bp, Homo sapien
tgaagtgcccaagttctccccaggt

SEQ ID NO: 3066524 - DNA, 25 bp, Homo sapien
gagtcaggaaactcccgtctaatgc

SEQ ID NO: 3066525 - DNA, 25 bp, Homo sapien
ccatcgagttcccagtgagtgaggc

SEQ ID NO: 3066526 - DNA, 25 bp, Homo sapien
acctcgctgtgacctgaaggagaat

SEQ ID NO: 3066527 - DNA, 25 bp, Homo sapien
taactgtgccccagaatccatcgag

SEQ ID NO: 3066528 - DNA, 25 bp, Homo sapien
agtgaggcccgagtactagaggaca

SEQ ID NO: 3066529 - DNA, 25 bp, Homo sapien
gccattgctcctagtggagacccct

SEQ ID NO: 3066530 - DNA, 25 bp, Homo sapien
taaaaggcatggtgaacaggtccta

SEQ ID NO: 3066531 - DNA, 25 bp, Homo sapien
tcttggctcacaagcttcaccacct

SEQ ID NO: 3066532 - DNA, 25 bp, Homo sapien
caggtcctacgaggaaagattaaag

SEQ ID NO: 3066533 - DNA, 25 bp, Homo sapien
tcctccatggcctgatggttcctgg

SEQ ID NO: 3066534 - DNA, 25 bp, Homo sapien
ttcctggtctggtgtgaggcactgc

SEQ ID NO: 3066535 - DNA, 25 bp, Homo sapien
tgaagtgggagacccctgggaagaa

SEQ ID NO: 3066536 - DNA, 25 bp, Homo sapien
ccaggagaggagtacggctggacca

SEQ ID NO: 3066537 - DNA, 25 bp, Homo sapien
tagcccatggcctgtaagcatggcg

SEQ ID NO: 3066538 - DNA, 25 bp, Homo sapien
tgttctgtgactcggccatttccct

SEQ ID NO: 3066539 - DNA, 25 bp, Homo sapien
gggcctggtcttcatggttgctcat

SEQ ID NO: 3066540 - DNA, 25 bp, Homo sapien
tcctgcctcaaacatcaagaagtgc

SEQ ID NO: 3066541 - DNA, 25 bp, Homo sapien
ctgtgtctgtatccagccgggctcc

SEQ ID NO: 3066542 - DNA, 25 bp, Homo sapien
gctaaaccagtctgaggaacaatcc

SEQ ID NO: 3066543 - DNA, 25 bp, Homo sapien
gtaggagaggatcccctgactagaa

SEQ ID NO: 3066544 - DNA, 25 bp, Homo sapien
cgattgagaatgtcctctcctaggg

SEQ ID NO: 3066545 - DNA, 25 bp, Homo sapien
tttgaggcactaaggcaaggctgcc

SEQ ID NO: 3066546 - DNA, 25 bp, Homo sapien
aaggctgccctgaacactgaaagta

SEQ ID NO: 3066547 - DNA, 25 bp, Homo sapien
taggactttacagcacatggcatct

SEQ ID NO: 3066548 - DNA, 25 bp, Homo sapien
caaccaatgctgtcgatcgcttgct

SEQ ID NO: 3066549 - DNA, 25 bp, Homo sapien
gtgacatgcctctgttttagttgtt

SEQ ID NO: 3066550 - DNA, 25 bp, Homo sapien
gggttgaacaggaaggcagctttca

SEQ ID NO: 3066551 - DNA, 25 bp, Homo sapien
cagagctctgcagagtatactcagc

SEQ ID NO: 3066552 - DNA, 25 bp, Homo sapien
tgacatttgtgggaagcagagctct

SEQ ID NO: 3066553 - DNA, 25 bp, Homo sapien
tgtcagtatgtggaagtgtgggtct

SEQ ID NO: 3066554 - DNA, 25 bp, Homo sapien
agtggggtaggttgggagaatgtca

SEQ ID NO: 3066555 - DNA, 25 bp, Homo sapien
ctcagagtggggtaggttgggagaa

SEQ ID NO: 3066556 - DNA, 25 bp, Homo sapien
tatgtggaagtgtgggtctgtgtgt

SEQ ID NO: 3066557 - DNA, 25 bp, Homo sapien
ccttattggcagctctactctggag

SEQ ID NO: 3066558 - DNA, 25 bp, Homo sapien
gggatgtctctcatgaccaaatgct

SEQ ID NO: 3066559 - DNA, 25 bp, Homo sapien
tgccttggtgtgctgtatccatcca

SEQ ID NO: 3066560 - DNA, 25 bp, Homo sapien
agaagtgtgtcacccttaggccagc

SEQ ID NO: 3066561 - DNA, 25 bp, Homo sapien
tttagcagccagtcttgaaggtctc

SEQ ID NO: 3066562 - DNA, 25 bp, Homo sapien
tgtggacacattggacctttcctga

SEQ ID NO: 3066563 - DNA, 25 bp, Homo sapien
tcaaatgtgcggttaagattctctg

SEQ ID NO: 3066564 - DNA, 25 bp, Homo sapien
taagatgctgggacttactgtgtca

SEQ ID NO: 3066565 - DNA, 25 bp, Homo sapien
catagactgagaccttttatggtga

SEQ ID NO: 3066566 - DNA, 25 bp, Homo sapien
taagagattacgtgaacatagactg

SEQ ID NO: 3066567 - DNA, 25 bp, Homo sapien
ggtaactgctgactaaatgtctgga

SEQ ID NO: 3066568 - DNA, 25 bp, Homo sapien
aatgtctggatgaaaatagaggatc

SEQ ID NO: 3066569 - DNA, 25 bp, Homo sapien
ccattatagcatcaattcaaagttc

SEQ ID NO: 3066570 - DNA, 25 bp, Homo sapien
cctctacgtaagtccagggaagatg

SEQ ID NO: 3066571 - DNA, 25 bp, Homo sapien
gatgagacttcttgggtgtaattcc

SEQ ID NO: 3066572 - DNA, 25 bp, Homo sapien
gctactcaagtacatgcttttcaat

SEQ ID NO: 3066573 - DNA, 25 bp, Homo sapien
gaaacgacagtctccttaaaggcaa

SEQ ID NO: 3066574 - DNA, 25 bp, Homo sapien
ggacacatggccttcgagctgctgt

SEQ ID NO: 3066575 - DNA, 25 bp, Homo sapien
ggcaacccgagacaaatttcagcaa

SEQ ID NO: 3066576 - DNA, 25 bp, Homo sapien
ttcagcaaagccgtgggacacatgg

SEQ ID NO: 3066577 - DNA, 25 bp, Homo sapien
agaggtggaggttcgttcactcgac

SEQ ID NO: 3066578 - DNA, 25 bp, Homo sapien
cctcctcagcgtgggttcttggaag

SEQ ID NO: 3066579 - DNA, 25 bp, Homo sapien
aagtcgttggcttcgtaagagcagg

SEQ ID NO: 3066580 - DNA, 25 bp, Homo sapien
taagagcagggtctatgggaagcct

SEQ ID NO: 3066581 - DNA, 25 bp, Homo sapien
gacgttttcagtccctctggcgaga

SEQ ID NO: 3066582 - DNA, 25 bp, Homo sapien
tccctctggcgagagaaaagcgagc

SEQ ID NO: 3066583 - DNA, 25 bp, Homo sapien
gagttgtgtatgcagttggtattaa

SEQ ID NO: 3066584 - DNA, 25 bp, Homo sapien
cgagtcgggcggcttgtgagggaaa

SEQ ID NO: 3066585 - DNA, 25 bp, Homo sapien
gcaaattcatagagtaatagttata

SEQ ID NO: 3066586 - DNA, 25 bp, Homo sapien
ctcatattcataatcagtaagcaaa

SEQ ID NO: 3066587 - DNA, 25 bp, Homo sapien
tcataatcagtaagcaaattcatag

SEQ ID NO: 3066588 - DNA, 25 bp, Homo sapien
gagtaatagttataaggaacctggc

SEQ ID NO: 3066589 - DNA, 25 bp, Homo sapien
caaggtacttgctaaagaaagggag

SEQ ID NO: 3066590 - DNA, 25 bp, Homo sapien
taagtctaccctagattacttgaag

SEQ ID NO: 3066591 - DNA, 25 bp, Homo sapien
tagggctgagttcacctgaagctgt

SEQ ID NO: 3066592 - DNA, 25 bp, Homo sapien
ctgaagctgttgtagatataatcta

SEQ ID NO: 3066593 - DNA, 25 bp, Homo sapien
tcttaaatatcactacctggtcttg

SEQ ID NO: 3066594 - DNA, 25 bp, Homo sapien
tttagtccaagtgttgaaatgtcac

SEQ ID NO: 3066595 - DNA, 25 bp, Homo sapien
taggattgaccactgttgaaactgg

SEQ ID NO: 3066596 - DNA, 25 bp, Homo sapien
gtttacaagtacaacagcacagtaa

SEQ ID NO: 3066597 - DNA, 25 bp, Homo sapien
tcttagtgtccaaatgggtgactca

SEQ ID NO: 3066598 - DNA, 25 bp, Homo sapien
gacctctccatttggtgccactatg

SEQ ID NO: 3066599 - DNA, 25 bp, Homo sapien
tgacactgacctctcccgtatcttg

SEQ ID NO: 3066600 - DNA, 25 bp, Homo sapien
tcagctgcccttagcaccagttggt

SEQ ID NO: 3066601 - DNA, 25 bp, Homo sapien
ttgtgctttcgagttcttagtcatg

SEQ ID NO: 3066602 - DNA, 25 bp, Homo sapien
gcctagaccaatgtcagtaagagtt

SEQ ID NO: 3066603 - DNA, 25 bp, Homo sapien
tggatatcagtccttgttggatgca

SEQ ID NO: 3066604 - DNA, 25 bp, Homo sapien
attttttcataatgctcgtttggcc

SEQ ID NO: 3066605 - DNA, 25 bp, Homo sapien
agatcaggtggctatagatatgaag

SEQ ID NO: 3066606 - DNA, 25 bp, Homo sapien
tcttttgtttaggattacattggct

SEQ ID NO: 3066607 - DNA, 25 bp, Homo sapien
ttctgtgaatggcaatccaattttc

SEQ ID NO: 3066608 - DNA, 25 bp, Homo sapien
ggtggctatagatatgaagcttcat

SEQ ID NO: 3066609 - DNA, 25 bp, Homo sapien
tagtgcagtttttgctagaggaggc

SEQ ID NO: 3066610 - DNA, 25 bp, Homo sapien
tgattgccttagtttcaaccaggaa

SEQ ID NO: 3066611 - DNA, 25 bp, Homo sapien
cgaacgcgtctttggccactaggga

SEQ ID NO: 3066612 - DNA, 25 bp, Homo sapien
tagtcatttcagattctcgaacgcg

SEQ ID NO: 3066613 - DNA, 25 bp, Homo sapien
taagctgatagcaagttagctttgc

SEQ ID NO: 3066614 - DNA, 25 bp, Homo sapien
catactatgtaagtgaagtgcacac

SEQ ID NO: 3066615 - DNA, 25 bp, Homo sapien
aaaatatcttgtagttatgacaggc

SEQ ID NO: 3066616 - DNA, 25 bp, Homo sapien
gatttgtggctactctgaagcttac

SEQ ID NO: 3066617 - DNA, 25 bp, Homo sapien
cctagttaatagtccaatcttttga

SEQ ID NO: 3066618 - DNA, 25 bp, Homo sapien
aagcagcacattacatttgacctag

SEQ ID NO: 3066619 - DNA, 25 bp, Homo sapien
tttagcaattacagaaggatcacct

SEQ ID NO: 3066620 - DNA, 25 bp, Homo sapien
gaatagttttcatgaggacttagtt

SEQ ID NO: 3066621 - DNA, 25 bp, Homo sapien
aaatttttgcttagagtgctgtaat

SEQ ID NO: 3066622 - DNA, 25 bp, Homo sapien
tactatatatctagggctccaagtc

SEQ ID NO: 3066623 - DNA, 25 bp, Homo sapien
tatataatattcatagtacttcagg

SEQ ID NO: 3066624 - DNA, 25 bp, Homo sapien
tcaggtattatctcttatggaagga

SEQ ID NO: 3066625 - DNA, 25 bp, Homo sapien
ccacaatacgcttttgttgcttgca

SEQ ID NO: 3066626 - DNA, 25 bp, Homo sapien
aatgagaaacgaaagatattaaggc

SEQ ID NO: 3066627 - DNA, 25 bp, Homo sapien
tgagttgtagaactattaccacaat

SEQ ID NO: 3066628 - DNA, 25 bp, Homo sapien
atactggtttggttcacctttgatt

SEQ ID NO: 3066629 - DNA, 25 bp, Homo sapien
agcactgcaataaacatacatgtgc

SEQ ID NO: 3066630 - DNA, 25 bp, Homo sapien
gcactgcaataaacatacatgtgca

SEQ ID NO: 3066631 - DNA, 25 bp, Homo sapien
tggtgctatttgagacctctgttct

SEQ ID NO: 3066632 - DNA, 25 bp, Homo sapien
tgctgtggggagaacttccaatact

SEQ ID NO: 3066633 - DNA, 25 bp, Homo sapien
ctgcctgcccgttttcgatgtatag

SEQ ID NO: 3066634 - DNA, 25 bp, Homo sapien
gcccgttttcgatgtataggaatgc

SEQ ID NO: 3066635 - DNA, 25 bp, Homo sapien
cgtggagagtctgatgattttgtgc

SEQ ID NO: 3066636 - DNA, 25 bp, Homo sapien
tttcagggaccctaatcaatcgtag

SEQ ID NO: 3066637 - DNA, 25 bp, Homo sapien
cacgctcagccaacttttattcctc

SEQ ID NO: 3066638 - DNA, 25 bp, Homo sapien
tcctccatttcaaccgtggagagtc

SEQ ID NO: 3066639 - DNA, 25 bp, Homo sapien
tcctgcatgaggtgtctgacaatcg

SEQ ID NO: 3066640 - DNA, 25 bp, Homo sapien
ctgacaatcgctgttgggaggtctc

SEQ ID NO: 3066641 - DNA, 25 bp, Homo sapien
tagttttgtgcccttgctagagagg

SEQ ID NO: 3066642 - DNA, 25 bp, Homo sapien
tttaaagtccgctgaagttgtgccc

SEQ ID NO: 3066643 - DNA, 25 bp, Homo sapien
gagctactgtgtgtggcctagaata

SEQ ID NO: 3066644 - DNA, 25 bp, Homo sapien
aattggtgcttccttaggttcagag

SEQ ID NO: 3066645 - DNA, 25 bp, Homo sapien
tcagttatggtactatcagtgcaat

SEQ ID NO: 3066646 - DNA, 25 bp, Homo sapien
tgttcctatgtatttcagttatggt

SEQ ID NO: 3066647 - DNA, 25 bp, Homo sapien
taggagtgcatcaaatggtttacat

SEQ ID NO: 3066648 - DNA, 25 bp, Homo sapien
cagcctgacttctatagtcttaata

SEQ ID NO: 3066649 - DNA, 25 bp, Homo sapien
tataggttgctttattggatctgac

SEQ ID NO: 3066650 - DNA, 25 bp, Homo sapien
ggatctgacttttgcgtaatgaggt

SEQ ID NO: 3066651 - DNA, 25 bp, Homo sapien
ccaagtagtaagcaaagagtgagga

SEQ ID NO: 3066652 - DNA, 25 bp, Homo sapien
gaagtattcaatctatccattggtt

SEQ ID NO: 3066653 - DNA, 25 bp, Homo sapien
gattttattgaatagaccggctggg

SEQ ID NO: 3066654 - DNA, 25 bp, Homo sapien
agagaatggatattttgggagccag

SEQ ID NO: 3066655 - DNA, 25 bp, Homo sapien
tactgaggatagtatgcaatagtta

SEQ ID NO: 3066656 - DNA, 25 bp, Homo sapien
tggtagtccccactttcaattgttg

SEQ ID NO: 3066657 - DNA, 25 bp, Homo sapien
catgaattagtacaattgactcttg

SEQ ID NO: 3066658 - DNA, 25 bp, Homo sapien
gatagtatgcaatagttagttttac

SEQ ID NO: 3066659 - DNA, 25 bp, Homo sapien
taagaatgtttctctatgataccaa

SEQ ID NO: 3066660 - DNA, 25 bp, Homo sapien
tgtttcttacaataacacagctaga

SEQ ID NO: 3066661 - DNA, 25 bp, Homo sapien
tcttgtctgacgttattggcttttc

SEQ ID NO: 3066662 - DNA, 25 bp, Homo sapien
taagggagatagaatatgttgactc

SEQ ID NO: 3066663 - DNA, 25 bp, Homo sapien
tcagttctcaccaatttgagctata

SEQ ID NO: 3066664 - DNA, 25 bp, Homo sapien
aatatgagaataaatgcaaagggcc

SEQ ID NO: 3066665 - DNA, 25 bp, Homo sapien
tatcagagctgcttgacacatgatc

SEQ ID NO: 3066666 - DNA, 25 bp, Homo sapien
agaagacaaagttgtaaaactcacg

SEQ ID NO: 3066667 - DNA, 25 bp, Homo sapien
tctgagggtttgagattgtttaaaa

SEQ ID NO: 3066668 - DNA, 25 bp, Homo sapien
cggccgggcgaacgggctcggcgcg

SEQ ID NO: 3066669 - DNA, 25 bp, Homo sapien
gggcggagttggccaccgcgcctgg

SEQ ID NO: 3066670 - DNA, 25 bp, Homo sapien
gcgtgttcccgtcggctgcgcccgc

SEQ ID NO: 3066671 - DNA, 25 bp, Homo sapien
tctgaacctttttcgtggcctggga

SEQ ID NO: 3066672 - DNA, 25 bp, Homo sapien
ggccctccggttgacaatcttatga

SEQ ID NO: 3066673 - DNA, 25 bp, Homo sapien
cattcaaatggcatagttgggtcca

SEQ ID NO: 3066674 - DNA, 25 bp, Homo sapien
gaaacttgaacgtgatgaacggcgt

SEQ ID NO: 3066675 - DNA, 25 bp, Homo sapien
gaggaattcgttcattagatctgcc

SEQ ID NO: 3066676 - DNA, 25 bp, Homo sapien
tgagtagaattcataggtgaagcca

SEQ ID NO: 3066677 - DNA, 25 bp, Homo sapien
ttttactctcgattgaactccacag

SEQ ID NO: 3066678 - DNA, 25 bp, Homo sapien
ttgacatctgacatagctgtaatgc

SEQ ID NO: 3066679 - DNA, 25 bp, Homo sapien
taagctattcttctagagggaggag

SEQ ID NO: 3066680 - DNA, 25 bp, Homo sapien
tcataaagtttagccccatgctcaa

SEQ ID NO: 3066681 - DNA, 25 bp, Homo sapien
aaattaagctattcttctagaggga

SEQ ID NO: 3066682 - DNA, 25 bp, Homo sapien
tttgttagatgcaagtcataaagtt

SEQ ID NO: 3066683 - DNA, 25 bp, Homo sapien
gcaaactgtcacttttcatcgatga

SEQ ID NO: 3066684 - DNA, 25 bp, Homo sapien
catgtggttaacttacacttatgag

SEQ ID NO: 3066685 - DNA, 25 bp, Homo sapien
ctgttgtgatccagagcaatcagac

SEQ ID NO: 3066686 - DNA, 25 bp, Homo sapien
tccttttggtgtgataagtatgttc

SEQ ID NO: 3066687 - DNA, 25 bp, Homo sapien
gaaaatattcacaaactctacatct

SEQ ID NO: 3066688 - DNA, 25 bp, Homo sapien
aaagaactcaaacaagtcagcaaga

SEQ ID NO: 3066689 - DNA, 25 bp, Homo sapien
atattcacaaactctacatctgaca

SEQ ID NO: 3066690 - DNA, 25 bp, Homo sapien
aatattcacaaactctacatctgac

SEQ ID NO: 3066691 - DNA, 25 bp, Homo sapien
tctttaccagtttcgatgcctttct

SEQ ID NO: 3066692 - DNA, 25 bp, Homo sapien
ctctttaccagtttcgatgcctttc

SEQ ID NO: 3066693 - DNA, 25 bp, Homo sapien
taccagtttcgatgcctttctttct

SEQ ID NO: 3066694 - DNA, 25 bp, Homo sapien
ttaccagtttcgatgcctttctttc

SEQ ID NO: 3066695 - DNA, 25 bp, Homo sapien
caggatacctaattcctcctgattt

SEQ ID NO: 3066696 - DNA, 25 bp, Homo sapien
tctgttcaggatacctaattcctcc

SEQ ID NO: 3066697 - DNA, 25 bp, Homo sapien
tgttcaggatacctaattcctcctg

SEQ ID NO: 3066698 - DNA, 25 bp, Homo sapien
tggtctgttcaggatacctaattcc

SEQ ID NO: 3066699 - DNA, 25 bp, Homo sapien
ttccattgtggccagagagagtgct

SEQ ID NO: 3066700 - DNA, 25 bp, Homo sapien
gagcaggttattcaaattttcttgt

SEQ ID NO: 3066701 - DNA, 25 bp, Homo sapien
ttcaaattttcttgtatttgcatgg

SEQ ID NO: 3066702 - DNA, 25 bp, Homo sapien
ctttttgatgtaggctatgaacttt

SEQ ID NO: 3066703 - DNA, 25 bp, Homo sapien
tctccccagaggttaaggctttcat

SEQ ID NO: 3066704 - DNA, 25 bp, Homo sapien
tcagaatctgtcctgtacccaggtt

SEQ ID NO: 3066705 - DNA, 25 bp, Homo sapien
aacctccgccttgaaggtgcaagcg

SEQ ID NO: 3066706 - DNA, 25 bp, Homo sapien
tactggtgaactagtgcgattttcc

SEQ ID NO: 3066707 - DNA, 25 bp, Homo sapien
agtactatggccagaaactattgta

SEQ ID NO: 3066708 - DNA, 25 bp, Homo sapien
taccccttgagagcagtatcactct

SEQ ID NO: 3066709 - DNA, 25 bp, Homo sapien
tgtatgttctgaaagtatcttgaat

SEQ ID NO: 3066710 - DNA, 25 bp, Homo sapien
gagaatgtatgttctgaaagtatct

SEQ ID NO: 3066711 - DNA, 25 bp, Homo sapien
gcgactctcttgatcacacttttta

SEQ ID NO: 3066712 - DNA, 25 bp, Homo sapien
cattcatgctttttgaggtataatg

SEQ ID NO: 3066713 - DNA, 25 bp, Homo sapien
tataatgtacatatggcaaaattca

SEQ ID NO: 3066714 - DNA, 25 bp, Homo sapien
taggtagtcttacttgatagtgcta

SEQ ID NO: 3066715 - DNA, 25 bp, Homo sapien
caaattcacctcttacatggcggca

SEQ ID NO: 3066716 - DNA, 25 bp, Homo sapien
atgattcgattatgtccactggccc

SEQ ID NO: 3066717 - DNA, 25 bp, Homo sapien
tgtttgtaaccagtcttgctaggga

SEQ ID NO: 3066718 - DNA, 25 bp, Homo sapien
caatggatatatagctctttagagc

SEQ ID NO: 3066719 - DNA, 25 bp, Homo sapien
cttttttgcagaggtgggttctcag

SEQ ID NO: 3066720 - DNA, 25 bp, Homo sapien
tgcagaggtgggttctcagaatgtt

SEQ ID NO: 3066721 - DNA, 25 bp, Homo sapien
ggtgggttctcagaatgttgcccag

SEQ ID NO: 3066722 - DNA, 25 bp, Homo sapien
ttcttttttgcagaggtgggttctc

SEQ ID NO: 3066723 - DNA, 25 bp, Homo sapien
acagacacatgtgcctccccacacc

SEQ ID NO: 3066724 - DNA, 25 bp, Homo sapien
ggtgcagggcacagtcacggttcac

SEQ ID NO: 3066725 - DNA, 25 bp, Homo sapien
gactacagacacatgtgcctcccca

SEQ ID NO: 3066726 - DNA, 25 bp, Homo sapien
ctacagacacatgtgcctccccaca

SEQ ID NO: 3066727 - DNA, 25 bp, Homo sapien
ggaaagttgggcacgtatcttacca

SEQ ID NO: 3066728 - DNA, 25 bp, Homo sapien
aacactttagtcttaaagccatgag

SEQ ID NO: 3066729 - DNA, 25 bp, Homo sapien
ttcagcaatagtgttgaaaaagttg

SEQ ID NO: 3066730 - DNA, 25 bp, Homo sapien
aacaagatttcaaatcacaatggaa

SEQ ID NO: 3066731 - DNA, 25 bp, Homo sapien
tctgtattacagaccaagtatctat

SEQ ID NO: 3066732 - DNA, 25 bp, Homo sapien
tccacagttggaatgtgtaccttca

SEQ ID NO: 3066733 - DNA, 25 bp, Homo sapien
aatgccagacaccaaactaggccct

SEQ ID NO: 3066734 - DNA, 25 bp, Homo sapien
aaggcacattgggtaatggtgaaac

SEQ ID NO: 3066735 - DNA, 25 bp, Homo sapien
gtaacattctaatataggactgttt

SEQ ID NO: 3066736 - DNA, 25 bp, Homo sapien
attaattcaaatttaccagactctt

SEQ ID NO: 3066737 - DNA, 25 bp, Homo sapien
gggacaagtaacattctaatatagg

SEQ ID NO: 3066738 - DNA, 25 bp, Homo sapien
ttcaaatttaccagactcttgatac

SEQ ID NO: 3066739 - DNA, 25 bp, Homo sapien
cgtattagccaggttggggagaact

SEQ ID NO: 3066740 - DNA, 25 bp, Homo sapien
agccaggttggggagaactataatt

SEQ ID NO: 3066741 - DNA, 25 bp, Homo sapien
tattagccaggttggggagaactat

SEQ ID NO: 3066742 - DNA, 25 bp, Homo sapien
attagccaggttggggagaactata

SEQ ID NO: 3066743 - DNA, 25 bp, Homo sapien
tacctccggaatatacagagcacac

SEQ ID NO: 3066744 - DNA, 25 bp, Homo sapien
cttattacaatgatcatgtggaaca

SEQ ID NO: 3066745 - DNA, 25 bp, Homo sapien
acctccggaatatacagagcacaca

SEQ ID NO: 3066746 - DNA, 25 bp, Homo sapien
taaagctagttcctatggcagacac

SEQ ID NO: 3066747 - DNA, 25 bp, Homo sapien
cagacaccgctagttgcctaaccaa

SEQ ID NO: 3066748 - DNA, 25 bp, Homo sapien
cagcaaggtgcccagacaaatctat

SEQ ID NO: 3066749 - DNA, 25 bp, Homo sapien
tctaatgggtagagcttccaggaaa

SEQ ID NO: 3066750 - DNA, 25 bp, Homo sapien
gataaagatatggaaggtaacaaca

SEQ ID NO: 3066751 - DNA, 25 bp, Homo sapien
gaggctgaagtacaagaacctcttg

SEQ ID NO: 3066752 - DNA, 25 bp, Homo sapien
tctttagtgtgaaaaagtatcctat

SEQ ID NO: 3066753 - DNA, 25 bp, Homo sapien
cagaggacagtttgtatacacatag

SEQ ID NO: 3066754 - DNA, 25 bp, Homo sapien
ctgggcaacatcgcgacatcccatc

SEQ ID NO: 3066755 - DNA, 25 bp, Homo sapien
gcaacatcgcgacatcccatctcta

SEQ ID NO: 3066756 - DNA, 25 bp, Homo sapien
tgggcaacatcgcgacatcccatct

SEQ ID NO: 3066757 - DNA, 25 bp, Homo sapien
gggcaacatcgcgacatcccatctc

SEQ ID NO: 3066758 - DNA, 25 bp, Homo sapien
cccaacacttgcaggtggaactgag

SEQ ID NO: 3066759 - DNA, 25 bp, Homo sapien
gctattctggcacaaggtcccaaca

SEQ ID NO: 3066760 - DNA, 25 bp, Homo sapien
gaactgagacagaccaaatggtaga

SEQ ID NO: 3066761 - DNA, 25 bp, Homo sapien
actctagatctcttacctgaaggca

SEQ ID NO: 3066762 - DNA, 25 bp, Homo sapien
taaagttggcatcatagtcttttat

SEQ ID NO: 3066763 - DNA, 25 bp, Homo sapien
aaagttggcatcatagtcttttatc

SEQ ID NO: 3066764 - DNA, 25 bp, Homo sapien
agttggcatcatagtcttttatcct

SEQ ID NO: 3066765 - DNA, 25 bp, Homo sapien
aagttggcatcatagtcttttatcc

SEQ ID NO: 3066766 - DNA, 25 bp, Homo sapien
gcctgggtaacagagcaagactcca

SEQ ID NO: 3066767 - DNA, 25 bp, Homo sapien
cctgggtaacagagcaagactccat

SEQ ID NO: 3066768 - DNA, 25 bp, Homo sapien
aggctgcagtgggccgagatggagc

SEQ ID NO: 3066769 - DNA, 25 bp, Homo sapien
ctgcagtgggccgagatggagccac

SEQ ID NO: 3066770 - DNA, 25 bp, Homo sapien
tgcccacctcagcctcccaaagtgc

SEQ ID NO: 3066771 - DNA, 25 bp, Homo sapien
gagccaccgcacccagccaataaaa

SEQ ID NO: 3066772 - DNA, 25 bp, Homo sapien
tggtcaggctggttttcgattcctg

SEQ ID NO: 3066773 - DNA, 25 bp, Homo sapien
ctcaggtgatctgcccacctcagcc

SEQ ID NO: 3066774 - DNA, 25 bp, Homo sapien
cctttgaaagagatgatatgcgtgc

SEQ ID NO: 3066775 - DNA, 25 bp, Homo sapien
gaaagagatgatatgcgtgcatcac

SEQ ID NO: 3066776 - DNA, 25 bp, Homo sapien
cattcgttcagttctctctatcagt

SEQ ID NO: 3066777 - DNA, 25 bp, Homo sapien
tcattcgttcagttctctctatcag

SEQ ID NO: 3066778 - DNA, 25 bp, Homo sapien
cctcaggaggaacataggcatcaaa

SEQ ID NO: 3066779 - DNA, 25 bp, Homo sapien
caatcctgctttccgggcatgttgc

SEQ ID NO: 3066780 - DNA, 25 bp, Homo sapien
atggaacggtccgatttttctggag

SEQ ID NO: 3066781 - DNA, 25 bp, Homo sapien
ctgtacaggccagatgtatggaacg

SEQ ID NO: 3066782 - DNA, 25 bp, Homo sapien
ccaatcctgctttccgggcatgttg

SEQ ID NO: 3066783 - DNA, 25 bp, Homo sapien
cagacagacccaaaccaatccggaa

SEQ ID NO: 3066784 - DNA, 25 bp, Homo sapien
ctttaatatctcctcgccagacaga

SEQ ID NO: 3066785 - DNA, 25 bp, Homo sapien
ttaatatctcctcgccagacagacc

SEQ ID NO: 3066786 - DNA, 25 bp, Homo sapien
tcctttaatatctcctcgccagaca

SEQ ID NO: 3066787 - DNA, 25 bp, Homo sapien
cagcccaaaaccctcgataaacaag

SEQ ID NO: 3066788 - DNA, 25 bp, Homo sapien
ctgccgagaccaccagcccaaaacc

SEQ ID NO: 3066789 - DNA, 25 bp, Homo sapien
ccctcgataaacaagagaacccttg

SEQ ID NO: 3066790 - DNA, 25 bp, Homo sapien
gataaacaagagaacccttgaggta

SEQ ID NO: 3066791 - DNA, 25 bp, Homo sapien
agtgaagagcgtcgggtaggagaaa

SEQ ID NO: 3066792 - DNA, 25 bp, Homo sapien
tgagagtgaagagcgtcgggtagga

SEQ ID NO: 3066793 - DNA, 25 bp, Homo sapien
agagtgaagagcgtcgggtaggaga

SEQ ID NO: 3066794 - DNA, 25 bp, Homo sapien
gctgagagtgaagagcgtcgggtag

SEQ ID NO: 3066795 - DNA, 25 bp, Homo sapien
cagaagtagttgtgaaaagggaagc

SEQ ID NO: 3066796 - DNA, 25 bp, Homo sapien
cagtttgaagatcatcaacaaaggg

SEQ ID NO: 3066797 - DNA, 25 bp, Homo sapien
tgtagttgtcactcccttgggattg

SEQ ID NO: 3066798 - DNA, 25 bp, Homo sapien
ggttaggtttgctcttgtagttgtc

SEQ ID NO: 3066799 - DNA, 25 bp, Homo sapien
ggctgcctgccgatgtctcccccat

SEQ ID NO: 3066800 - DNA, 25 bp, Homo sapien
tgtctcccccatcaactacagcctt

SEQ ID NO: 3066801 - DNA, 25 bp, Homo sapien
gggcctcgccgcgatgccggagaag

SEQ ID NO: 3066802 - DNA, 25 bp, Homo sapien
agaagaggcccttcgagcggctgcc

SEQ ID NO: 3066803 - DNA, 25 bp, Homo sapien
tcagttgacaccactctagaggata

SEQ ID NO: 3066804 - DNA, 25 bp, Homo sapien
gaaagtgggatttcttcattctttg

SEQ ID NO: 3066805 - DNA, 25 bp, Homo sapien
cactattaggttcctttccatggaa

SEQ ID NO: 3066806 - DNA, 25 bp, Homo sapien
ttatgtccaacaatccagaaagtcc

SEQ ID NO: 3066807 - DNA, 25 bp, Homo sapien
gtatctcaatgtaatgcctaggcag

SEQ ID NO: 3066808 - DNA, 25 bp, Homo sapien
ggcacttctgatattgaaattttag

SEQ ID NO: 3066809 - DNA, 25 bp, Homo sapien
gtggcctcagaataccatcttgtac

SEQ ID NO: 3066810 - DNA, 25 bp, Homo sapien
ccactagatgcttgtatagatggta

SEQ ID NO: 3066811 - DNA, 25 bp, Homo sapien
tctaatggatgtgtagtgatatgtc

SEQ ID NO: 3066812 - DNA, 25 bp, Homo sapien
tgtcagtcatttaatagcctagtct

SEQ ID NO: 3066813 - DNA, 25 bp, Homo sapien
catttaatagcctagtctaatggat

SEQ ID NO: 3066814 - DNA, 25 bp, Homo sapien
gcctagtctaatggatgtgtagtga

SEQ ID NO: 3066815 - DNA, 25 bp, Homo sapien
tacaaatcaattggtgaagtactaa

SEQ ID NO: 3066816 - DNA, 25 bp, Homo sapien
gaaaagcattctggcagtatatcaa

SEQ ID NO: 3066817 - DNA, 25 bp, Homo sapien
aaaattcccaatgatatggctgcct

SEQ ID NO: 3066818 - DNA, 25 bp, Homo sapien
tctgagcttagtgtatgtggaagaa

SEQ ID NO: 3066819 - DNA, 25 bp, Homo sapien
gaggaccatcgttatacattatgag

SEQ ID NO: 3066820 - DNA, 25 bp, Homo sapien
gacaggaatcatgttctattcaact

SEQ ID NO: 3066821 - DNA, 25 bp, Homo sapien
cagaaccatagtggcttctttccca

SEQ ID NO: 3066822 - DNA, 25 bp, Homo sapien
caacatatttaattaggctcccata

SEQ ID NO: 3066823 - DNA, 25 bp, Homo sapien
gtgcccagccatagaattactcttt

SEQ ID NO: 3066824 - DNA, 25 bp, Homo sapien
gcccagccatagaattactctttta

SEQ ID NO: 3066825 - DNA, 25 bp, Homo sapien
ccagccatagaattactcttttaat

SEQ ID NO: 3066826 - DNA, 25 bp, Homo sapien
tgcccagccatagaattactctttt

SEQ ID NO: 3066827 - DNA, 25 bp, Homo sapien
tttatcggacccagtacagctctgc

SEQ ID NO: 3066828 - DNA, 25 bp, Homo sapien
ggtgagcatctgtgacttaagtaat

SEQ ID NO: 3066829 - DNA, 25 bp, Homo sapien
tgcagttaaacttaggaacagttgg

SEQ ID NO: 3066830 - DNA, 25 bp, Homo sapien
cccctgtggatcgacttggattaca

SEQ ID NO: 3066831 - DNA, 25 bp, Homo sapien
accgcagccggccaacatttacaat

SEQ ID NO: 3066832 - DNA, 25 bp, Homo sapien
caccgcagccggccaacatttacaa

SEQ ID NO: 3066833 - DNA, 25 bp, Homo sapien
ccgcagccggccaacatttacaata

SEQ ID NO: 3066834 - DNA, 25 bp, Homo sapien
tcaccgcagccggccaacatttaca

SEQ ID NO: 3066835 - DNA, 25 bp, Homo sapien
cacaagagagttcacgataatcagc

SEQ ID NO: 3066836 - DNA, 25 bp, Homo sapien
ggccgaatcatggttcttcaagaag

SEQ ID NO: 3066837 - DNA, 25 bp, Homo sapien
ccagagggatgaaggacttagtcaa

SEQ ID NO: 3066838 - DNA, 25 bp, Homo sapien
ggaaaacgcttcctgaaagccagag

SEQ ID NO: 3066839 - DNA, 25 bp, Homo sapien
tacttactgtaacagcagatgacaa

SEQ ID NO: 3066840 - DNA, 25 bp, Homo sapien
taaactggtctgaactaatgacagg

SEQ ID NO: 3066841 - DNA, 25 bp, Homo sapien
aatgacaggctgttcatctggtagc

SEQ ID NO: 3066842 - DNA, 25 bp, Homo sapien
gaacattagccagatatcaatgatg

SEQ ID NO: 3066843 - DNA, 25 bp, Homo sapien
tgagcgtaccatccagcagtgttgt

SEQ ID NO: 3066844 - DNA, 25 bp, Homo sapien
gataaggtggagctaccgaacagct

SEQ ID NO: 3066845 - DNA, 25 bp, Homo sapien
tgtgaatcctgaggtgccgccattg

SEQ ID NO: 3066846 - DNA, 25 bp, Homo sapien
taccaggctttcttcgagagtcacc

SEQ ID NO: 3066847 - DNA, 25 bp, Homo sapien
caaagactgtaagcctgtgtgtgcc

SEQ ID NO: 3066848 - DNA, 25 bp, Homo sapien
cattttatgcgtgcgagaagtcagt

SEQ ID NO: 3066849 - DNA, 25 bp, Homo sapien
aagtcagtggtaactgctgcagggc

SEQ ID NO: 3066850 - DNA, 25 bp, Homo sapien
agtatcaacactggcttctcccggt

SEQ ID NO: 3066851 - DNA, 25 bp, Homo sapien
agaagactcaagctgggtgcggtca

SEQ ID NO: 3066852 - DNA, 25 bp, Homo sapien
aaaagaagactcaagctgggtgcgg

SEQ ID NO: 3066853 - DNA, 25 bp, Homo sapien
ctcaagctgggtgcggtcactcaca

SEQ ID NO: 3066854 - DNA, 25 bp, Homo sapien
aagactcaagctgggtgcggtcact

SEQ ID NO: 3066855 - DNA, 25 bp, Homo sapien
gatttgggcacaatagccctgctgc

SEQ ID NO: 3066856 - DNA, 25 bp, Homo sapien
aaggacttagttaccagccctggat

SEQ ID NO: 3066857 - DNA, 25 bp, Homo sapien
tgcactctgtccatgtctctgtaaa

SEQ ID NO: 3066858 - DNA, 25 bp, Homo sapien
tgtgttctttcctaccaataccttg

SEQ ID NO: 3066859 - DNA, 25 bp, Homo sapien
tagctttcactactgggcttctgtt

SEQ ID NO: 3066860 - DNA, 25 bp, Homo sapien
gctcctgtgattccactgcaagtat

SEQ ID NO: 3066861 - DNA, 25 bp, Homo sapien
actgcaagtatatggcagctgtagc

SEQ ID NO: 3066862 - DNA, 25 bp, Homo sapien
ggcagctgtagctttcactactggg

SEQ ID NO: 3066863 - DNA, 25 bp, Homo sapien
gaccataaagaggaaagcccatgtt

SEQ ID NO: 3066864 - DNA, 25 bp, Homo sapien
ggatatattattcaccgctgggcaa

SEQ ID NO: 3066865 - DNA, 25 bp, Homo sapien
gcaggacggctggaaagtagccatc

SEQ ID NO: 3066866 - DNA, 25 bp, Homo sapien
gacacactttgtttatgcctctgga

SEQ ID NO: 3066867 - DNA, 25 bp, Homo sapien
ccttactgattgctccctaggcctg

SEQ ID NO: 3066868 - DNA, 25 bp, Homo sapien
gctatcaccctaggatttcccttca

SEQ ID NO: 3066869 - DNA, 25 bp, Homo sapien
atttcccttcattatcatcttggag

SEQ ID NO: 3066870 - DNA, 25 bp, Homo sapien
tcttgggtacctccctcctggaggc

SEQ ID NO: 3066871 - DNA, 25 bp, Homo sapien
tatactggaatatcctgttgcctgg

SEQ ID NO: 3066872 - DNA, 25 bp, Homo sapien
gcctggatcacgtcttcctgtttct

SEQ ID NO: 3066873 - DNA, 25 bp, Homo sapien
tcctgttgcctggatcacgtcttcc

SEQ ID NO: 3066874 - DNA, 25 bp, Homo sapien
gaatatcctgttgcctggatcacgt

SEQ ID NO: 3066875 - DNA, 25 bp, Homo sapien
cagcaactctactcctagctatttt

SEQ ID NO: 3066876 - DNA, 25 bp, Homo sapien
ggttagcagctccttatataaaaat

SEQ ID NO: 3066877 - DNA, 25 bp, Homo sapien
aaatataagcttaacatatgaccca

SEQ ID NO: 3066878 - DNA, 25 bp, Homo sapien
ccatccaatgactggcacataaata

SEQ ID NO: 3066879 - DNA, 25 bp, Homo sapien
attgtatgggttgggcgtggtggct

SEQ ID NO: 3066880 - DNA, 25 bp, Homo sapien
aaaattgtatgggttgggcgtggtg

SEQ ID NO: 3066881 - DNA, 25 bp, Homo sapien
ttcaaaattgtatgggttgggcgtg

SEQ ID NO: 3066882 - DNA, 25 bp, Homo sapien
aattgtatgggttgggcgtggtggc

SEQ ID NO: 3066883 - DNA, 25 bp, Homo sapien
caagggattgagtcgagctagtgct

SEQ ID NO: 3066884 - DNA, 25 bp, Homo sapien
gatgttgagacagaggtagcccagc

SEQ ID NO: 3066885 - DNA, 25 bp, Homo sapien
taggtaactcaggtaaggacaattc

SEQ ID NO: 3066886 - DNA, 25 bp, Homo sapien
tagtgctgagcggaggcaagatcat

SEQ ID NO: 3066887 - DNA, 25 bp, Homo sapien
caggatctcgctaagttgtccaggt

SEQ ID NO: 3066888 - DNA, 25 bp, Homo sapien
gccacatactgtatgcacatttttt

SEQ ID NO: 3066889 - DNA, 25 bp, Homo sapien
cgctaagttgtccaggttagtcttg

SEQ ID NO: 3066890 - DNA, 25 bp, Homo sapien
gcaggcctgagccacatactgtatg

SEQ ID NO: 3066891 - DNA, 25 bp, Homo sapien
cattctttctggttcgaggttgggc

SEQ ID NO: 3066892 - DNA, 25 bp, Homo sapien
ggtctcaagccccatataagcaggc

SEQ ID NO: 3066893 - DNA, 25 bp, Homo sapien
caagtacctggtagctatggatggg

SEQ ID NO: 3066894 - DNA, 25 bp, Homo sapien
taagaggaggaatcccttagctcac

SEQ ID NO: 3066895 - DNA, 25 bp, Homo sapien
gcagccccagcgctcgaacccagct

SEQ ID NO: 3066896 - DNA, 25 bp, Homo sapien
cgtggagaacctggtgcgtgctacc

SEQ ID NO: 3066897 - DNA, 25 bp, Homo sapien
tggagctgatcaccattctcgagaa

SEQ ID NO: 3066898 - DNA, 25 bp, Homo sapien
cccctagatcggctggagctggaag

SEQ ID NO: 3066899 - DNA, 25 bp, Homo sapien
ttctcgagaagaccgtgtctcccgg

SEQ ID NO: 3066900 - DNA, 25 bp, Homo sapien
agggaagttaggttgcgcggcgctg

SEQ ID NO: 3066901 - DNA, 25 bp, Homo sapien
cgccatcgggaagccggtgggtgtg

SEQ ID NO: 3066902 - DNA, 25 bp, Homo sapien
actggccaatggcttggcgcgccga

SEQ ID NO: 3066903 - DNA, 25 bp, Homo sapien
cgcccaatcgttgcgcggcctgagg

SEQ ID NO: 3066904 - DNA, 25 bp, Homo sapien
gctttggactaagattgacacatca

SEQ ID NO: 3066905 - DNA, 25 bp, Homo sapien
gaaacattgagcgagttctaggaat

SEQ ID NO: 3066906 - DNA, 25 bp, Homo sapien
cgaagcactttaggaatctgatatg

SEQ ID NO: 3066907 - DNA, 25 bp, Homo sapien
catggtgcctggtatgggatgaaat

SEQ ID NO: 3066908 - DNA, 25 bp, Homo sapien
gagtgaggcggtatccacattttca

SEQ ID NO: 3066909 - DNA, 25 bp, Homo sapien
caggagaggctagaagtagcttttc

SEQ ID NO: 3066910 - DNA, 25 bp, Homo sapien
gaaaaccataacatcggccatcttg

SEQ ID NO: 3066911 - DNA, 25 bp, Homo sapien
aaagaaagttatctcttcccaggag

SEQ ID NO: 3066912 - DNA, 25 bp, Homo sapien
tgtattgtggcagtctgaacgcccc

SEQ ID NO: 3066913 - DNA, 25 bp, Homo sapien
gatcttttcatcaaggcgcctttcc

SEQ ID NO: 3066914 - DNA, 25 bp, Homo sapien
gacgaatggtcagagctcctatcct

SEQ ID NO: 3066915 - DNA, 25 bp, Homo sapien
tctagggaaaacactgacgaatggt

SEQ ID NO: 3066916 - DNA, 25 bp, Homo sapien
tttccactctagcaaaaactgggct

SEQ ID NO: 3066917 - DNA, 25 bp, Homo sapien
aatggtgtcaaacgtcccctggtca

SEQ ID NO: 3066918 - DNA, 25 bp, Homo sapien
caagtgccgatctatgaaccagtgt

SEQ ID NO: 3066919 - DNA, 25 bp, Homo sapien
ccaggtatttgaaggagagacgctc

SEQ ID NO: 3066920 - DNA, 25 bp, Homo sapien
gaagataatgggcatcggactaggc

SEQ ID NO: 3066921 - DNA, 25 bp, Homo sapien
ggcatcggactaggctttggtttgc

SEQ ID NO: 3066922 - DNA, 25 bp, Homo sapien
taatgggcatcggactaggctttgg

SEQ ID NO: 3066923 - DNA, 25 bp, Homo sapien
atgtgaagataatgggcatcggact

SEQ ID NO: 3066924 - DNA, 25 bp, Homo sapien
atttaagaagtgtgttagtccaact

SEQ ID NO: 3066925 - DNA, 25 bp, Homo sapien
caactgtaatattgccttagggact

SEQ ID NO: 3066926 - DNA, 25 bp, Homo sapien
tgagcccaactcgattaaccaaaac

SEQ ID NO: 3066927 - DNA, 25 bp, Homo sapien
ccttggcatgccagtctgtgatggc

SEQ ID NO: 3066928 - DNA, 25 bp, Homo sapien
gcctctcgccacgtggtggtggcag

SEQ ID NO: 3066929 - DNA, 25 bp, Homo sapien
cctctcgccacgtggtggtggcagc

SEQ ID NO: 3066930 - DNA, 25 bp, Homo sapien
ccgcctctcgccacgtggtggtggc

SEQ ID NO: 3066931 - DNA, 25 bp, Homo sapien
cgcctctcgccacgtggtggtggca

SEQ ID NO: 3066932 - DNA, 25 bp, Homo sapien
tctcaggatgcagagggagtctccc

SEQ ID NO: 3066933 - DNA, 25 bp, Homo sapien
tgaatttggcgctggcctacaccga

SEQ ID NO: 3066934 - DNA, 25 bp, Homo sapien
tgtgttcagaccacggacagtgcct

SEQ ID NO: 3066935 - DNA, 25 bp, Homo sapien
ctccacagctgggacggtagaccca

SEQ ID NO: 3066936 - DNA, 25 bp, Homo sapien
agcccggaggtgggcaccatccgct

SEQ ID NO: 3066937 - DNA, 25 bp, Homo sapien
tgcgcttcgagaagcagccgtcgga

SEQ ID NO: 3066938 - DNA, 25 bp, Homo sapien
gaggtgggcaccatccgctgcgcct

SEQ ID NO: 3066939 - DNA, 25 bp, Homo sapien
gccttcgagggcatccggctgcgct

SEQ ID NO: 3066940 - DNA, 25 bp, Homo sapien
tctctggccaagaggtcctggcacc

SEQ ID NO: 3066941 - DNA, 25 bp, Homo sapien
cagggaaaccaggtcgtgagagaca

SEQ ID NO: 3066942 - DNA, 25 bp, Homo sapien
ccaggagatttggagctggcctctt

SEQ ID NO: 3066943 - DNA, 25 bp, Homo sapien
tcttctttggccctgggacacctaa

SEQ ID NO: 3066944 - DNA, 25 bp, Homo sapien
aggtggggagatgggagacatccct

SEQ ID NO: 3066945 - DNA, 25 bp, Homo sapien
tgaggtggggagatgggagacatcc

SEQ ID NO: 3066946 - DNA, 25 bp, Homo sapien
tggggagatgggagacatccctgtg

SEQ ID NO: 3066947 - DNA, 25 bp, Homo sapien
gggagatgggagacatccctgtgtc

SEQ ID NO: 3066948 - DNA, 25 bp, Homo sapien
agaacagggtggtgattaggcccac

SEQ ID NO: 3066949 - DNA, 25 bp, Homo sapien
gggacgccactgctctggcgtgtac

SEQ ID NO: 3066950 - DNA, 25 bp, Homo sapien
agggtggtgattaggcccactgccc

SEQ ID NO: 3066951 - DNA, 25 bp, Homo sapien
gaactcatgagtgacaagggacgcc

SEQ ID NO: 3066952 - DNA, 25 bp, Homo sapien
ggacccgcagagagagcaggtccct

SEQ ID NO: 3066953 - DNA, 25 bp, Homo sapien
caacagtgacgaggggcgcggcggg

SEQ ID NO: 3066954 - DNA, 25 bp, Homo sapien
agagcaggtccctggcagccgtcat

SEQ ID NO: 3066955 - DNA, 25 bp, Homo sapien
ggcgggacccgcagagagagcaggt

SEQ ID NO: 3066956 - DNA, 25 bp, Homo sapien
ccccactccaaaattctgcgcctcc

SEQ ID NO: 3066957 - DNA, 25 bp, Homo sapien
cccactccaaaattctgcgcctccc

SEQ ID NO: 3066958 - DNA, 25 bp, Homo sapien
cccccactccaaaattctgcgcctc

SEQ ID NO: 3066959 - DNA, 25 bp, Homo sapien
tctttgttccgtccaggcatcttca

SEQ ID NO: 3066960 - DNA, 25 bp, Homo sapien
ccctctggacgctgccgaggaaata

SEQ ID NO: 3066961 - DNA, 25 bp, Homo sapien
agcagccggcgcgtctttgttccgt

SEQ ID NO: 3066962 - DNA, 25 bp, Homo sapien
aggcatcttcaacgcgtccctccct

SEQ ID NO: 3066963 - DNA, 25 bp, Homo sapien
gaggccgtccaagagtggaggtgtc

SEQ ID NO: 3066964 - DNA, 25 bp, Homo sapien
ggaggccgtccaagagtggaggtgt

SEQ ID NO: 3066965 - DNA, 25 bp, Homo sapien
tgtgcactcaaagaccgccagctct

SEQ ID NO: 3066966 - DNA, 25 bp, Homo sapien
caggagaccgagtctgagcgcagcc

SEQ ID NO: 3066967 - DNA, 25 bp, Homo sapien
cggacacggtgatgcggctgcccct

SEQ ID NO: 3066968 - DNA, 25 bp, Homo sapien
gggtctctccagttccggcgtcttc

SEQ ID NO: 3066969 - DNA, 25 bp, Homo sapien
catcggaccagagcaggactggggt

SEQ ID NO: 3066970 - DNA, 25 bp, Homo sapien
ggaccagagcaggactggggtcgct

SEQ ID NO: 3066971 - DNA, 25 bp, Homo sapien
cagagcaggactggggtcgctgttg

SEQ ID NO: 3066972 - DNA, 25 bp, Homo sapien
tcatcggaccagagcaggactgggg

SEQ ID NO: 3066973 - DNA, 25 bp, Homo sapien
aagagtttggattttcctctaggca

SEQ ID NO: 3066974 - DNA, 25 bp, Homo sapien
tgaagagtttggattttcctctagg

SEQ ID NO: 3066975 - DNA, 25 bp, Homo sapien
gaagagtttggattttcctctaggc

SEQ ID NO: 3066976 - DNA, 25 bp, Homo sapien
gttgaagagtttggattttcctcta

SEQ ID NO: 3066977 - DNA, 25 bp, Homo sapien
gaaccgcttgaggatcagggacgaa

SEQ ID NO: 3066978 - DNA, 25 bp, Homo sapien
tggccagggactaaccaaagggagc

SEQ ID NO: 3066979 - DNA, 25 bp, Homo sapien
aaagagcagcgatgtggtggacccc

SEQ ID NO: 3066980 - DNA, 25 bp, Homo sapien
cttggaatgtcatagcaattcgccc

SEQ ID NO: 3066981 - DNA, 25 bp, Homo sapien
tcggaatggtgaagcgggaagggtc

SEQ ID NO: 3066982 - DNA, 25 bp, Homo sapien
cactgaaatagggaacagatcctgg

SEQ ID NO: 3066983 - DNA, 25 bp, Homo sapien
ggagggagaacagatcacctcctct

SEQ ID NO: 3066984 - DNA, 25 bp, Homo sapien
gagcgtcaaggagtcccctgtgtcc

SEQ ID NO: 3066985 - DNA, 25 bp, Homo sapien
gactggggaagcacagattctgctt

SEQ ID NO: 3066986 - DNA, 25 bp, Homo sapien
tggggaagcacagattctgcttctc

SEQ ID NO: 3066987 - DNA, 25 bp, Homo sapien
agactggggaagcacagattctgct

SEQ ID NO: 3066988 - DNA, 25 bp, Homo sapien
ctggccagcagaggggagggagggc

SEQ ID NO: 3066989 - DNA, 25 bp, Homo sapien
agggagggccagggctgcccctttg

SEQ ID NO: 3066990 - DNA, 25 bp, Homo sapien
gggccagggctgcccctttggtctc

SEQ ID NO: 3066991 - DNA, 25 bp, Homo sapien
gaggggagggagggccagggctgcc

SEQ ID NO: 3066992 - DNA, 25 bp, Homo sapien
ggagcccggcctcacccatgtgtcc

SEQ ID NO: 3066993 - DNA, 25 bp, Homo sapien
catgtgtccatggtagggggtggag

SEQ ID NO: 3066994 - DNA, 25 bp, Homo sapien
gagcccggcctcacccatgtgtcca

SEQ ID NO: 3066995 - DNA, 25 bp, Homo sapien
acccatgtgtccatggtagggggtg

SEQ ID NO: 3066996 - DNA, 25 bp, Homo sapien
agagcacggccccatccatgttccc

SEQ ID NO: 3066997 - DNA, 25 bp, Homo sapien
ggtattgttggtcacccaccactct

SEQ ID NO: 3066998 - DNA, 25 bp, Homo sapien
actctttcccgctgctatccgtctg

SEQ ID NO: 3066999 - DNA, 25 bp, Homo sapien
tccatgttcccatagcctggctcgg

SEQ ID NO: 3067000 - DNA, 25 bp, Homo sapien
tcctccatgactttgcgcctgtctc

SEQ ID NO: 3067001 - DNA, 25 bp, Homo sapien
agctgctcgatccttctcttctggg

SEQ ID NO: 3067002 - DNA, 25 bp, Homo sapien
ccatgactttgcgcctgtctcgctg

SEQ ID NO: 3067003 - DNA, 25 bp, Homo sapien
gcctcagcggcctgtatgttcccct

SEQ ID NO: 3067004 - DNA, 25 bp, Homo sapien
gaggatccagatcaaactcagggga

SEQ ID NO: 3067005 - DNA, 25 bp, Homo sapien
aggatccagatcaaactcaggggaa

SEQ ID NO: 3067006 - DNA, 25 bp, Homo sapien
ctgaggatccagatcaaactcaggg

SEQ ID NO: 3067007 - DNA, 25 bp, Homo sapien
tgaggatccagatcaaactcagggg

SEQ ID NO: 3067008 - DNA, 25 bp, Homo sapien
cggagtctcgtgtcggtggaaggca

SEQ ID NO: 3067009 - DNA, 25 bp, Homo sapien
gcagcgaccgtttcagctctgctgt

SEQ ID NO: 3067010 - DNA, 25 bp, Homo sapien
tctgctgtcagctcattcagctcca

SEQ ID NO: 3067011 - DNA, 25 bp, Homo sapien
tgctgtcagctcattcagctccaag

SEQ ID NO: 3067012 - DNA, 25 bp, Homo sapien
ggtgaagccgaagtttcgctcatgg

SEQ ID NO: 3067013 - DNA, 25 bp, Homo sapien
aagccgaagtttcgctcatggtcgg

SEQ ID NO: 3067014 - DNA, 25 bp, Homo sapien
ctgggtgaagccgaagtttcgctca

SEQ ID NO: 3067015 - DNA, 25 bp, Homo sapien
tgaagccgaagtttcgctcatggtc

SEQ ID NO: 3067016 - DNA, 25 bp, Homo sapien
cagccctctgtgacccctccactta

SEQ ID NO: 3067017 - DNA, 25 bp, Homo sapien
agccctctgtgacccctccacttac

SEQ ID NO: 3067018 - DNA, 25 bp, Homo sapien
ccagccctctgtgacccctccactt

SEQ ID NO: 3067019 - DNA, 25 bp, Homo sapien
actggccacctggcgtgggtccccg

SEQ ID NO: 3067020 - DNA, 25 bp, Homo sapien
tgggtttccagatgcactggccacc

SEQ ID NO: 3067021 - DNA, 25 bp, Homo sapien
ggtttccagatgcactggccacctg

SEQ ID NO: 3067022 - DNA, 25 bp, Homo sapien
gcactggccacctggcgtgggtccc

SEQ ID NO: 3067023 - DNA, 25 bp, Homo sapien
cctcgtggacattggaactccagta

SEQ ID NO: 3067024 - DNA, 25 bp, Homo sapien
tgagcacagcgccctgcacctcgtg

SEQ ID NO: 3067025 - DNA, 25 bp, Homo sapien
agcacagcgccctgcacctcgtgga

SEQ ID NO: 3067026 - DNA, 25 bp, Homo sapien
ctcgtggacattggaactccagtac

SEQ ID NO: 3067027 - DNA, 25 bp, Homo sapien
gtttcggatgagcacctccccatag

SEQ ID NO: 3067028 - DNA, 25 bp, Homo sapien
tgtcaccttgttccactcaaagtgg

SEQ ID NO: 3067029 - DNA, 25 bp, Homo sapien
gctgaccactcaggacattgtgaat

SEQ ID NO: 3067030 - DNA, 25 bp, Homo sapien
atagtgctcgatccagcgctgacca

SEQ ID NO: 3067031 - DNA, 25 bp, Homo sapien
tgtaaaacctacagacactgacgcc

SEQ ID NO: 3067032 - DNA, 25 bp, Homo sapien
aaaagtgtgaaaaccgctgagtcag

SEQ ID NO: 3067033 - DNA, 25 bp, Homo sapien
ctgtgacccctgagtcctgagatca

SEQ ID NO: 3067034 - DNA, 25 bp, Homo sapien
tgagtcagatgacctcgatgggccc

SEQ ID NO: 3067035 - DNA, 25 bp, Homo sapien
ggcaggctgacgttgactgttccca

SEQ ID NO: 3067036 - DNA, 25 bp, Homo sapien
gctgacgttgactgttcccacaggc

SEQ ID NO: 3067037 - DNA, 25 bp, Homo sapien
ctgggcaggctgacgttgactgttc

SEQ ID NO: 3067038 - DNA, 25 bp, Homo sapien
caggctgacgttgactgttcccaca

SEQ ID NO: 3067039 - DNA, 25 bp, Homo sapien
cttgccagaaggcgaagttctcaga

SEQ ID NO: 3067040 - DNA, 25 bp, Homo sapien
tgccagaaggcgaagttctcagact

SEQ ID NO: 3067041 - DNA, 25 bp, Homo sapien
ttgccagaaggcgaagttctcagac

SEQ ID NO: 3067042 - DNA, 25 bp, Homo sapien
tggcaggccgagataggggggtggt

SEQ ID NO: 3067043 - DNA, 25 bp, Homo sapien
gcatggcaggccgagataggggggt

SEQ ID NO: 3067044 - DNA, 25 bp, Homo sapien
caggccgagataggggggtggtggg

SEQ ID NO: 3067045 - DNA, 25 bp, Homo sapien
ctgcatggcaggccgagataggggg

SEQ ID NO: 3067046 - DNA, 25 bp, Homo sapien
tctcgggaaccttcctcacgcagga

SEQ ID NO: 3067047 - DNA, 25 bp, Homo sapien
tctttgacctgttagtgccacctgg

SEQ ID NO: 3067048 - DNA, 25 bp, Homo sapien
tcctggccatctcctgtggaagtcg

SEQ ID NO: 3067049 - DNA, 25 bp, Homo sapien
tagacactgcgagcagtcctcccga

SEQ ID NO: 3067050 - DNA, 25 bp, Homo sapien
tcggtcaggccgctcacactcgtag

SEQ ID NO: 3067051 - DNA, 25 bp, Homo sapien
gccgctcacactcgtaggtctcccc

SEQ ID NO: 3067052 - DNA, 25 bp, Homo sapien
tgatgaagcggaagcctcggtcagg

SEQ ID NO: 3067053 - DNA, 25 bp, Homo sapien
ggtcaggccgctcacactcgtaggt

SEQ ID NO: 3067054 - DNA, 25 bp, Homo sapien
tcggtggtatgtggaggagtaggcc

SEQ ID NO: 3067055 - DNA, 25 bp, Homo sapien
cagccggctcggtggtatgtggagg

SEQ ID NO: 3067056 - DNA, 25 bp, Homo sapien
tgtggaggagtaggccgagacagca

SEQ ID NO: 3067057 - DNA, 25 bp, Homo sapien
gagtaggccgagacagcaaaggctg

SEQ ID NO: 3067058 - DNA, 25 bp, Homo sapien
tgttgttgcgcagaatgttccacag

SEQ ID NO: 3067059 - DNA, 25 bp, Homo sapien
caggtctttgccgatgttgttgcgc

SEQ ID NO: 3067060 - DNA, 25 bp, Homo sapien
gctgcacaggcattgacaccttgga

SEQ ID NO: 3067061 - DNA, 25 bp, Homo sapien
tcgcagagccgctgcagagtgttga

SEQ ID NO: 3067062 - DNA, 25 bp, Homo sapien
agcgacggcggggtggccccatggg

SEQ ID NO: 3067063 - DNA, 25 bp, Homo sapien
aggcagcgacggcggggtggcccca

SEQ ID NO: 3067064 - DNA, 25 bp, Homo sapien
ctggccgccggcaggcagcgacggc

SEQ ID NO: 3067065 - DNA, 25 bp, Homo sapien
tggccgccggcaggcagcgacggcg

SEQ ID NO: 3067066 - DNA, 25 bp, Homo sapien
tctgacagcgctcagctcccctgag

SEQ ID NO: 3067067 - DNA, 25 bp, Homo sapien
tggtgatttcactggtacaggactc

SEQ ID NO: 3067068 - DNA, 25 bp, Homo sapien
gatttcactggtacaggactcctcc

SEQ ID NO: 3067069 - DNA, 25 bp, Homo sapien
tggtggtgatttcactggtacagga

SEQ ID NO: 3067070 - DNA, 25 bp, Homo sapien
agagctggcggagaggagaacctcg

SEQ ID NO: 3067071 - DNA, 25 bp, Homo sapien
ggagaacctcgcaggcatcgaagaa

SEQ ID NO: 3067072 - DNA, 25 bp, Homo sapien
aggatgctggtctgcgatagctggg

SEQ ID NO: 3067073 - DNA, 25 bp, Homo sapien
agaactccgtgtgggaatcagcaag

SEQ ID NO: 3067074 - DNA, 25 bp, Homo sapien
ccgcttgcctgacagttcccttgag

SEQ ID NO: 3067075 - DNA, 25 bp, Homo sapien
agagggaggcataaccgggcacttt

SEQ ID NO: 3067076 - DNA, 25 bp, Homo sapien
cataaccgggcacttttgctgagtc

SEQ ID NO: 3067077 - DNA, 25 bp, Homo sapien
gatcaagcagggcacccgcttgcct

SEQ ID NO: 3067078 - DNA, 25 bp, Homo sapien
agtggaggcgcctctggccagtgga

SEQ ID NO: 3067079 - DNA, 25 bp, Homo sapien
gagctgaaagagtccgccgtggtgt

SEQ ID NO: 3067080 - DNA, 25 bp, Homo sapien
aagagtccgccgtggtgtcggagga

SEQ ID NO: 3067081 - DNA, 25 bp, Homo sapien
tggacagtgagtggaggcgcctctg

SEQ ID NO: 3067082 - DNA, 25 bp, Homo sapien
ccagatctgctatcggaccccaggc

SEQ ID NO: 3067083 - DNA, 25 bp, Homo sapien
ggacacggtgccaggaggatgaggt

SEQ ID NO: 3067084 - DNA, 25 bp, Homo sapien
gggacacggtgccaggaggatgagg

SEQ ID NO: 3067085 - DNA, 25 bp, Homo sapien
gatctgctatcggaccccaggctgg

SEQ ID NO: 3067086 - DNA, 25 bp, Homo sapien
ctccccgcaccagtcaccctgtccc

SEQ ID NO: 3067087 - DNA, 25 bp, Homo sapien
tctccccgcaccagtcaccctgtcc

SEQ ID NO: 3067088 - DNA, 25 bp, Homo sapien
cccgcaccagtcaccctgtccccca

SEQ ID NO: 3067089 - DNA, 25 bp, Homo sapien
tccccgcaccagtcaccctgtcccc

SEQ ID NO: 3067090 - DNA, 25 bp, Homo sapien
ttcttgacaactctgagccctggtg

SEQ ID NO: 3067091 - DNA, 25 bp, Homo sapien
ccctcagttggtcccgttccatggt

SEQ ID NO: 3067092 - DNA, 25 bp, Homo sapien
tggtgcatgtccctcagttggtccc

SEQ ID NO: 3067093 - DNA, 25 bp, Homo sapien
tgacaactctgagccctggtgcatg

SEQ ID NO: 3067094 - DNA, 25 bp, Homo sapien
gagactccaggtagcgagacaggtt

SEQ ID NO: 3067095 - DNA, 25 bp, Homo sapien
tgcccgaggagtcccgagactccag

SEQ ID NO: 3067096 - DNA, 25 bp, Homo sapien
tgggaacagagccatggagacgacc

SEQ ID NO: 3067097 - DNA, 25 bp, Homo sapien
ggaacagagccatggagacgaccaa

SEQ ID NO: 3067098 - DNA, 25 bp, Homo sapien
acatgcggcttgtccgtttcccctt

SEQ ID NO: 3067099 - DNA, 25 bp, Homo sapien
gcaccacatgcggcttgtccgtttc

SEQ ID NO: 3067100 - DNA, 25 bp, Homo sapien
cttcttgggtctttcggttgtcact

SEQ ID NO: 3067101 - DNA, 25 bp, Homo sapien
tgggtctttcggttgtcactgaggc

SEQ ID NO: 3067102 - DNA, 25 bp, Homo sapien
tgggggcaattttactcacagggtg

SEQ ID NO: 3067103 - DNA, 25 bp, Homo sapien
cagcctgggagaggtagacggcctc

SEQ ID NO: 3067104 - DNA, 25 bp, Homo sapien
acagcctgggagaggtagacggcct

SEQ ID NO: 3067105 - DNA, 25 bp, Homo sapien
ctggcaagtcaaggtgggggcaatt

SEQ ID NO: 3067106 - DNA, 25 bp, Homo sapien
ctggtgtgtggggataacaggggct

SEQ ID NO: 3067107 - DNA, 25 bp, Homo sapien
ctctggaggagcctgtgtagttcct

SEQ ID NO: 3067108 - DNA, 25 bp, Homo sapien
gtagttcctggagcttcccctgaca

SEQ ID NO: 3067109 - DNA, 25 bp, Homo sapien
gctgaggggattcggtgcagggact

SEQ ID NO: 3067110 - DNA, 25 bp, Homo sapien
aagacactttctcccgcggtccaag

SEQ ID NO: 3067111 - DNA, 25 bp, Homo sapien
actgtccctcagccaggaagacact

SEQ ID NO: 3067112 - DNA, 25 bp, Homo sapien
atgagagcagcggtccagcccatca

SEQ ID NO: 3067113 - DNA, 25 bp, Homo sapien
ccgcggtccaagcccaggtagggct

SEQ ID NO: 3067114 - DNA, 25 bp, Homo sapien
ctgttggaagctgggcaccaggaac

SEQ ID NO: 3067115 - DNA, 25 bp, Homo sapien
ctctggaataggtcctgggatttga

SEQ ID NO: 3067116 - DNA, 25 bp, Homo sapien
tgtccaggcggtgggctaggcggtg

SEQ ID NO: 3067117 - DNA, 25 bp, Homo sapien
cggggcatgtccaggcggtgggcta

SEQ ID NO: 3067118 - DNA, 25 bp, Homo sapien
tctggaataggtcctgggatttgat

SEQ ID NO: 3067119 - DNA, 25 bp, Homo sapien
ttgatggacatgaccgacagccgga

SEQ ID NO: 3067120 - DNA, 25 bp, Homo sapien
agtgtcaaggtcaatgcgctgggcc

SEQ ID NO: 3067121 - DNA, 25 bp, Homo sapien
gacagccggacatcgatggagccat

SEQ ID NO: 3067122 - DNA, 25 bp, Homo sapien
cttgaggtggtagatgttgtcttca

SEQ ID NO: 3067123 - DNA, 25 bp, Homo sapien
gagatcctgggtacccaggccttca

SEQ ID NO: 3067124 - DNA, 25 bp, Homo sapien
tggtcgattccagataccccatgcc

SEQ ID NO: 3067125 - DNA, 25 bp, Homo sapien
tgccctgtccagagagccttgtacg

SEQ ID NO: 3067126 - DNA, 25 bp, Homo sapien
ttgttcccagcctgagaatgggacc

SEQ ID NO: 3067127 - DNA, 25 bp, Homo sapien
gtcttgccgggttgttgcataatga

SEQ ID NO: 3067128 - DNA, 25 bp, Homo sapien
ccgggttgttgcataatgaaggatc

SEQ ID NO: 3067129 - DNA, 25 bp, Homo sapien
tgcataatgaaggatcccgtcctcg

SEQ ID NO: 3067130 - DNA, 25 bp, Homo sapien
gaaggatcccgtcctcgagcacaaa

SEQ ID NO: 3067131 - DNA, 25 bp, Homo sapien
tcttcttgagcaggtgaccttcctg

SEQ ID NO: 3067132 - DNA, 25 bp, Homo sapien
tccaccacctcccacagctcagagg

SEQ ID NO: 3067133 - DNA, 25 bp, Homo sapien
ctgtccccagcctgacccgaggctc

SEQ ID NO: 3067134 - DNA, 25 bp, Homo sapien
agcctgacccgaggctcctccacca

SEQ ID NO: 3067135 - DNA, 25 bp, Homo sapien
tccccagcctgacccgaggctcctc

SEQ ID NO: 3067136 - DNA, 25 bp, Homo sapien
aggactgagcgctctcaggcaggaa

SEQ ID NO: 3067137 - DNA, 25 bp, Homo sapien
gggctttgaggactgagcgctctca

SEQ ID NO: 3067138 - DNA, 25 bp, Homo sapien
gctttgaggactgagcgctctcagg

SEQ ID NO: 3067139 - DNA, 25 bp, Homo sapien
tttgaggactgagcgctctcaggca

SEQ ID NO: 3067140 - DNA, 25 bp, Homo sapien
gaaggatgtcacctgctcctgacgg

SEQ ID NO: 3067141 - DNA, 25 bp, Homo sapien
gggaaggatgtcacctgctcctgac

SEQ ID NO: 3067142 - DNA, 25 bp, Homo sapien
aggatgtcacctgctcctgacgggg

SEQ ID NO: 3067143 - DNA, 25 bp, Homo sapien
aggggaaggatgtcacctgctcctg

SEQ ID NO: 3067144 - DNA, 25 bp, Homo sapien
tgagtcaccgtctccgagtcaccgg

SEQ ID NO: 3067145 - DNA, 25 bp, Homo sapien
ccagtactccttggcccttgcgccg

SEQ ID NO: 3067146 - DNA, 25 bp, Homo sapien
ctgcctctgagtcaccgtctccgag

SEQ ID NO: 3067147 - DNA, 25 bp, Homo sapien
tccttggcccttgcgccgctctgcc

SEQ ID NO: 3067148 - DNA, 25 bp, Homo sapien
agagcctcccctctagccggatctc

SEQ ID NO: 3067149 - DNA, 25 bp, Homo sapien
agcctcccctctagccggatctccc

SEQ ID NO: 3067150 - DNA, 25 bp, Homo sapien
gtcagagcctcccctctagccggat

SEQ ID NO: 3067151 - DNA, 25 bp, Homo sapien
cagagcctcccctctagccggatct

SEQ ID NO: 3067152 - DNA, 25 bp, Homo sapien
tccctgggcatacagcacaggatga

SEQ ID NO: 3067153 - DNA, 25 bp, Homo sapien
atccctgccagacagtgcctgtcca

SEQ ID NO: 3067154 - DNA, 25 bp, Homo sapien
tccaggagcctcaagggccttttaa

SEQ ID NO: 3067155 - DNA, 25 bp, Homo sapien
gaacatccctgggcatacagcacag

SEQ ID NO: 3067156 - DNA, 25 bp, Homo sapien
cctttaatagggcaagcatgcgcgg

SEQ ID NO: 3067157 - DNA, 25 bp, Homo sapien
ttcctaggaagggaagcaagagtga

SEQ ID NO: 3067158 - DNA, 25 bp, Homo sapien
caagagtgaggaaagtcagatgaca

SEQ ID NO: 3067159 - DNA, 25 bp, Homo sapien
ggatgccatttgtgggaacaggtat

SEQ ID NO: 3067160 - DNA, 25 bp, Homo sapien
tctgggtaacctgatgaggaagctc

SEQ ID NO: 3067161 - DNA, 25 bp, Homo sapien
ttcaggacgcggtcttcagagcaga

SEQ ID NO: 3067162 - DNA, 25 bp, Homo sapien
actaaggacgaagccggtgactgac

SEQ ID NO: 3067163 - DNA, 25 bp, Homo sapien
ttttcacagcgtacacctcgagggt

SEQ ID NO: 3067164 - DNA, 25 bp, Homo sapien
ggaacagtgtcaggatctggcttcc

SEQ ID NO: 3067165 - DNA, 25 bp, Homo sapien
actggtccaacagggtggtcagctg

SEQ ID NO: 3067166 - DNA, 25 bp, Homo sapien
aggatggtgtcatcaatgcagccac

SEQ ID NO: 3067167 - DNA, 25 bp, Homo sapien
gtccggaacagtgtcaggatctggc

SEQ ID NO: 3067168 - DNA, 25 bp, Homo sapien
ccagcagcatgttgtgccccacaaa

SEQ ID NO: 3067169 - DNA, 25 bp, Homo sapien
gctggtgtcgcataagaagcttgtc

SEQ ID NO: 3067170 - DNA, 25 bp, Homo sapien
catcaggatcttgtgtttccgcagc

SEQ ID NO: 3067171 - DNA, 25 bp, Homo sapien
atcaggatcttgtgtttccgcagct

SEQ ID NO: 3067172 - DNA, 25 bp, Homo sapien
ctgaaagtgcatcacacgacggtgg

SEQ ID NO: 3067173 - DNA, 25 bp, Homo sapien
cgctgaaagtgcatcacacgacggt

SEQ ID NO: 3067174 - DNA, 25 bp, Homo sapien
gctgaaagtgcatcacacgacggtg

SEQ ID NO: 3067175 - DNA, 25 bp, Homo sapien
caacccctggtctaatctagtggct

SEQ ID NO: 3067176 - DNA, 25 bp, Homo sapien
ccaagacgggtcacaaatagtgttc

SEQ ID NO: 3067177 - DNA, 25 bp, Homo sapien
tagtggctctcaaggtatgccccac

SEQ ID NO: 3067178 - DNA, 25 bp, Homo sapien
taaaacacagtgactggccctgcca

SEQ ID NO: 3067179 - DNA, 25 bp, Homo sapien
tggccacccaactggtctgaacttc

SEQ ID NO: 3067180 - DNA, 25 bp, Homo sapien
tctctcttccgccaattactagctg

SEQ ID NO: 3067181 - DNA, 25 bp, Homo sapien
cgcgcccagccgaaactggatttta

SEQ ID NO: 3067182 - DNA, 25 bp, Homo sapien
tggattttaatctctcttccgccaa

SEQ ID NO: 3067183 - DNA, 25 bp, Homo sapien
agagcggccgcaagacacgccgtga

SEQ ID NO: 3067184 - DNA, 25 bp, Homo sapien
gggtaaggaggccagcgatctagct

SEQ ID NO: 3067185 - DNA, 25 bp, Homo sapien
gggtcagagattatgggaagaatca

SEQ ID NO: 3067186 - DNA, 25 bp, Homo sapien
tatgggaagaatcagtagtagagga

SEQ ID NO: 3067187 - DNA, 25 bp, Homo sapien
caggagaccccctcgcagcatcccc

SEQ ID NO: 3067188 - DNA, 25 bp, Homo sapien
agaccccctcgcagcatccccgcca

SEQ ID NO: 3067189 - DNA, 25 bp, Homo sapien
ctcgcagcatccccgccacggccgc

SEQ ID NO: 3067190 - DNA, 25 bp, Homo sapien
gggcaggagaccccctcgcagcatc

SEQ ID NO: 3067191 - DNA, 25 bp, Homo sapien
ctccaccggaagaatggacggaagc

SEQ ID NO: 3067192 - DNA, 25 bp, Homo sapien
tccaccggaagaatggacggaagcc

SEQ ID NO: 3067193 - DNA, 25 bp, Homo sapien
ccaaggagcgtgaagggattgctcc

SEQ ID NO: 3067194 - DNA, 25 bp, Homo sapien
caagctggccgctcagaacatggcc

SEQ ID NO: 3067195 - DNA, 25 bp, Homo sapien
gggattgctccactttaccaccact

SEQ ID NO: 3067196 - DNA, 25 bp, Homo sapien
gctggccgctcagaacatggccaag

SEQ ID NO: 3067197 - DNA, 25 bp, Homo sapien
tctccctcttcacgaaggcctggaa

SEQ ID NO: 3067198 - DNA, 25 bp, Homo sapien
ccctcttcacgaaggcctggaagag

SEQ ID NO: 3067199 - DNA, 25 bp, Homo sapien
gtggggcccactcgccggccagcag

SEQ ID NO: 3067200 - DNA, 25 bp, Homo sapien
ggtggggcccactcgccggccagca

SEQ ID NO: 3067201 - DNA, 25 bp, Homo sapien
gaggtctatcatcccctcaaggtag

SEQ ID NO: 3067202 - DNA, 25 bp, Homo sapien
tgtaccacctcacacaagcaggaga

SEQ ID NO: 3067203 - DNA, 25 bp, Homo sapien
ccaagggaaagctgagatgagtctg

SEQ ID NO: 3067204 - DNA, 25 bp, Homo sapien
tgaagggaggaactcctctccccag

SEQ ID NO: 3067205 - DNA, 25 bp, Homo sapien
gcctggtgtccacggtagagggtat

SEQ ID NO: 3067206 - DNA, 25 bp, Homo sapien
ggtagagggtatgccgacgatctac

SEQ ID NO: 3067207 - DNA, 25 bp, Homo sapien
cacggtagagggtatgccgacgatc

SEQ ID NO: 3067208 - DNA, 25 bp, Homo sapien
tgtccacggtagagggtatgccgac

SEQ ID NO: 3067209 - DNA, 25 bp, Homo sapien
tgagtctggaatcggggcagggtcc

SEQ ID NO: 3067210 - DNA, 25 bp, Homo sapien
cagggtccgaacagggtcttgtgct

SEQ ID NO: 3067211 - DNA, 25 bp, Homo sapien
ccccatcccgaagatgaaaggtttg

SEQ ID NO: 3067212 - DNA, 25 bp, Homo sapien
tcccgaagatgaaaggtttgaacac

SEQ ID NO: 3067213 - DNA, 25 bp, Homo sapien
cggagatatatcagatcctctcttc

SEQ ID NO: 3067214 - DNA, 25 bp, Homo sapien
gaagcacggagatatatcagatcct

SEQ ID NO: 3067215 - DNA, 25 bp, Homo sapien
ggcacagatggaagcacggagatat

SEQ ID NO: 3067216 - DNA, 25 bp, Homo sapien
cagatggaagcacggagatatatca

SEQ ID NO: 3067217 - DNA, 25 bp, Homo sapien
gaaagcctcccgagtccatacagat

SEQ ID NO: 3067218 - DNA, 25 bp, Homo sapien
atgctggccgtggtgcgaaagcctc

SEQ ID NO: 3067219 - DNA, 25 bp, Homo sapien
tctggcgtggcggtaagaaagtgca

SEQ ID NO: 3067220 - DNA, 25 bp, Homo sapien
tgaggatgcccatcatcacctctgc

SEQ ID NO: 3067221 - DNA, 25 bp, Homo sapien
gctggttggagatgttgcgggcccc

SEQ ID NO: 3067222 - DNA, 25 bp, Homo sapien
ccttggcctgggcatgagtccgcag

SEQ ID NO: 3067223 - DNA, 25 bp, Homo sapien
gcagctccgggtgttgggccgagat

SEQ ID NO: 3067224 - DNA, 25 bp, Homo sapien
tgtccgtgccaatgctcagctggtt

SEQ ID NO: 3067225 - DNA, 25 bp, Homo sapien
ggcactgggcgaggtgctgagaaca

SEQ ID NO: 3067226 - DNA, 25 bp, Homo sapien
gatcggggagtggttcatttaccat

SEQ ID NO: 3067227 - DNA, 25 bp, Homo sapien
aggcactgggcgaggtgctgagaac

SEQ ID NO: 3067228 - DNA, 25 bp, Homo sapien
gaggagatcggggagtggttcattt

SEQ ID NO: 3067229 - DNA, 25 bp, Homo sapien
tgggcagagctgctccgttccaaag

SEQ ID NO: 3067230 - DNA, 25 bp, Homo sapien
taaccctgtgatcacatgcaaggcc

SEQ ID NO: 3067231 - DNA, 25 bp, Homo sapien
tgcccatagtgctccagtaaccctg

SEQ ID NO: 3067232 - DNA, 25 bp, Homo sapien
aggagaatggcgcagcatcctccag

SEQ ID NO: 3067233 - DNA, 25 bp, Homo sapien
caggtcaaaactcagcccctagatt

SEQ ID NO: 3067234 - DNA, 25 bp, Homo sapien
tgctggcactgatcgtatcaaatgc

SEQ ID NO: 3067235 - DNA, 25 bp, Homo sapien
tccatgtgctatgctttgagggttc

SEQ ID NO: 3067236 - DNA, 25 bp, Homo sapien
ccctagatttctggtgtgtcaggca

SEQ ID NO: 3067237 - DNA, 25 bp, Homo sapien
agacaccatgctcgttggcgcccat

SEQ ID NO: 3067238 - DNA, 25 bp, Homo sapien
gtcttcgacacctgttccacttcaa

SEQ ID NO: 3067239 - DNA, 25 bp, Homo sapien
cctcgttgccaatgcagacaccatg

SEQ ID NO: 3067240 - DNA, 25 bp, Homo sapien
gaaggacggctcagaatcacagcgt

SEQ ID NO: 3067241 - DNA, 25 bp, Homo sapien
gtgcctgcggggacaaacaccacct

SEQ ID NO: 3067242 - DNA, 25 bp, Homo sapien
gagacaaagcagtcgcaggaacatg

SEQ ID NO: 3067243 - DNA, 25 bp, Homo sapien
gcacggagacaaagcagtcgcagga

SEQ ID NO: 3067244 - DNA, 25 bp, Homo sapien
gggagtcagggctcgacgacgccat

SEQ ID NO: 3067245 - DNA, 25 bp, Homo sapien
aaaagacgcgcaaggaagacaccgc

SEQ ID NO: 3067246 - DNA, 25 bp, Homo sapien
cttcggagcagtcgtgggaccgtcc

SEQ ID NO: 3067247 - DNA, 25 bp, Homo sapien
ctccaggcttgggagtccgcaggcg

SEQ ID NO: 3067248 - DNA, 25 bp, Homo sapien
tcggcgcacacaccatggacgggtg

SEQ ID NO: 3067249 - DNA, 25 bp, Homo sapien
ccagggccgccccattgggcggaga

SEQ ID NO: 3067250 - DNA, 25 bp, Homo sapien
ggccgccccattgggcggagactct

SEQ ID NO: 3067251 - DNA, 25 bp, Homo sapien
gagactctcaggtgacctggaaggc

SEQ ID NO: 3067252 - DNA, 25 bp, Homo sapien
ccagctcggtcccgggtgccacctc

SEQ ID NO: 3067253 - DNA, 25 bp, Homo sapien
tccttcatggctccaacagactggg

SEQ ID NO: 3067254 - DNA, 25 bp, Homo sapien
gaaaggcatcttacacccacggtgc

SEQ ID NO: 3067255 - DNA, 25 bp, Homo sapien
ttcccaggcgctaaggacgtgtcca

SEQ ID NO: 3067256 - DNA, 25 bp, Homo sapien
tacatggattctaccgctggctgcc

SEQ ID NO: 3067257 - DNA, 25 bp, Homo sapien
ccctggtaagtttggagaggctgca

SEQ ID NO: 3067258 - DNA, 25 bp, Homo sapien
gagtcggcctgaaccacgattcata

SEQ ID NO: 3067259 - DNA, 25 bp, Homo sapien
taatggtgtgacatgtccggctgca

SEQ ID NO: 3067260 - DNA, 25 bp, Homo sapien
gctcatagccctgcgagaagtccac

SEQ ID NO: 3067261 - DNA, 25 bp, Homo sapien
ggcagggacggtcaggggcacctca

SEQ ID NO: 3067262 - DNA, 25 bp, Homo sapien
gcagggacggtcaggggcacctcag

SEQ ID NO: 3067263 - DNA, 25 bp, Homo sapien
cagggacggtcaggggcacctcaga

SEQ ID NO: 3067264 - DNA, 25 bp, Homo sapien
ggaccagggaggtggcactgatagc

SEQ ID NO: 3067265 - DNA, 25 bp, Homo sapien
tgggaccagggaggtggcactgata

SEQ ID NO: 3067266 - DNA, 25 bp, Homo sapien
gggaccagggaggtggcactgatag

SEQ ID NO: 3067267 - DNA, 25 bp, Homo sapien
cacggctggctggtgcgctactgac

SEQ ID NO: 3067268 - DNA, 25 bp, Homo sapien
ggtgcgctactgacggtcgctcata

SEQ ID NO: 3067269 - DNA, 25 bp, Homo sapien
gctggtgcgctactgacggtcgctc

SEQ ID NO: 3067270 - DNA, 25 bp, Homo sapien
cgctactgacggtcgctcataggcc

SEQ ID NO: 3067271 - DNA, 25 bp, Homo sapien
gggcgagccagacccggcggctggc

SEQ ID NO: 3067272 - DNA, 25 bp, Homo sapien
cagggcgagccagacccggcggctg

SEQ ID NO: 3067273 - DNA, 25 bp, Homo sapien
cgccggcgagctctccagcggtaag

SEQ ID NO: 3067274 - DNA, 25 bp, Homo sapien
ctgtgcgccggcgagctctccagcg

SEQ ID NO: 3067275 - DNA, 25 bp, Homo sapien
gtgactcacccgcgctctctgcctt

SEQ ID NO: 3067276 - DNA, 25 bp, Homo sapien
agccagcgagcgaacaaggccagct

SEQ ID NO: 3067277 - DNA, 25 bp, Homo sapien
caggagccagcgagcgaacaaggcc

SEQ ID NO: 3067278 - DNA, 25 bp, Homo sapien
agcgagcgaacaaggccagctccgc

SEQ ID NO: 3067279 - DNA, 25 bp, Homo sapien
aaaacttccctcaagatctggatgg

SEQ ID NO: 3067280 - DNA, 25 bp, Homo sapien
gtcgacatttccgagacccgcaaag

SEQ ID NO: 3067281 - DNA, 25 bp, Homo sapien
agacccgcaaagcaccggtgggtag

SEQ ID NO: 3067282 - DNA, 25 bp, Homo sapien
cgcgctcgcggagctcacaaaaact

SEQ ID NO: 3067283 - DNA, 25 bp, Homo sapien
tgccaagtcctcacggcctcagaag

SEQ ID NO: 3067284 - DNA, 25 bp, Homo sapien
aaaggaggtgacaggcagtgccaaa

SEQ ID NO: 3067285 - DNA, 25 bp, Homo sapien
gctttataaaggaggtgacaggcag

SEQ ID NO: 3067286 - DNA, 25 bp, Homo sapien
gccaagtggcggtgataaaagagcc

SEQ ID NO: 3067287 - DNA, 25 bp, Homo sapien
agcattatcactagggcatttcctc

SEQ ID NO: 3067288 - DNA, 25 bp, Homo sapien
tgttaatacgggagcattatcacta

SEQ ID NO: 3067289 - DNA, 25 bp, Homo sapien
gtaaataatgttaatacgggagcat

SEQ ID NO: 3067290 - DNA, 25 bp, Homo sapien
aggagaccacacaggtggagtaaat

SEQ ID NO: 3067291 - DNA, 25 bp, Homo sapien
gtcattatctgctgccggtggctca

SEQ ID NO: 3067292 - DNA, 25 bp, Homo sapien
tgtggcccgtaggttattacctgga

SEQ ID NO: 3067293 - DNA, 25 bp, Homo sapien
gatcccaggcggacttcaatgtcta

SEQ ID NO: 3067294 - DNA, 25 bp, Homo sapien
ggacacattcacttggttccaagag

SEQ ID NO: 3067295 - DNA, 25 bp, Homo sapien
ttagagggcgcccagcgccaagcag

SEQ ID NO: 3067296 - DNA, 25 bp, Homo sapien
gcggtgccaggttggcagtcctgga

SEQ ID NO: 3067297 - DNA, 25 bp, Homo sapien
gtgccaggttggcagtcctggagcc

SEQ ID NO: 3067298 - DNA, 25 bp, Homo sapien
gcagcggtgccaggttggcagtcct

SEQ ID NO: 3067299 - DNA, 25 bp, Homo sapien
catggtccagttccttgcccagatg

SEQ ID NO: 3067300 - DNA, 25 bp, Homo sapien
gaaggctgttcgagaaatatgggca

SEQ ID NO: 3067301 - DNA, 25 bp, Homo sapien
gcgccatcatagcttgcagaagcct

SEQ ID NO: 3067302 - DNA, 25 bp, Homo sapien
cctgccgaatctttgagtctggaca

SEQ ID NO: 3067303 - DNA, 25 bp, Homo sapien
ctcccctgataattgccctcctcct

SEQ ID NO: 3067304 - DNA, 25 bp, Homo sapien
tcccctgataattgccctcctcctc

SEQ ID NO: 3067305 - DNA, 25 bp, Homo sapien
atctcccctgataattgccctcctc

SEQ ID NO: 3067306 - DNA, 25 bp, Homo sapien
cccctgataattgccctcctcctct

SEQ ID NO: 3067307 - DNA, 25 bp, Homo sapien
gggaggggatacagacctgacattc

SEQ ID NO: 3067308 - DNA, 25 bp, Homo sapien
aagagaagagaaacgggaagactct

SEQ ID NO: 3067309 - DNA, 25 bp, Homo sapien
gaaatataaaggttcctgtccctga

SEQ ID NO: 3067310 - DNA, 25 bp, Homo sapien
tgtccctgaggagcacctaactggg

SEQ ID NO: 3067311 - DNA, 25 bp, Homo sapien
ccaagttcccgcttggcaacatccc

SEQ ID NO: 3067312 - DNA, 25 bp, Homo sapien
tcccttgtgtccaatcacaattcct

SEQ ID NO: 3067313 - DNA, 25 bp, Homo sapien
atggaaagcgactgcccctctgaaa

SEQ ID NO: 3067314 - DNA, 25 bp, Homo sapien
gcttggcaacatccccaaatgttct

SEQ ID NO: 3067315 - DNA, 25 bp, Homo sapien
cagtgaccactggagcaggcacacc

SEQ ID NO: 3067316 - DNA, 25 bp, Homo sapien
agtgcaggcatacactgtggccgca

SEQ ID NO: 3067317 - DNA, 25 bp, Homo sapien
agtgaccactggagcaggcacaccc

SEQ ID NO: 3067318 - DNA, 25 bp, Homo sapien
ccccagtgcaggcatacactgtggc

SEQ ID NO: 3067319 - DNA, 25 bp, Homo sapien
tcacacactttcgatctttttcctt

SEQ ID NO: 3067320 - DNA, 25 bp, Homo sapien
taactgtggctcttctttcacacac

SEQ ID NO: 3067321 - DNA, 25 bp, Homo sapien
cctcctttaactgtggctcttcttt

SEQ ID NO: 3067322 - DNA, 25 bp, Homo sapien
cactccttgccctcagcacaggagc

SEQ ID NO: 3067323 - DNA, 25 bp, Homo sapien
caccttcagcatgaaggccactctc

SEQ ID NO: 3067324 - DNA, 25 bp, Homo sapien
cccaccttcagcatgaaggccactc

SEQ ID NO: 3067325 - DNA, 25 bp, Homo sapien
ccaccttcagcatgaaggccactct

SEQ ID NO: 3067326 - DNA, 25 bp, Homo sapien
ccccaccttcagcatgaaggccact

SEQ ID NO: 3067327 - DNA, 25 bp, Homo sapien
cagaggctgtagttccacatccttc

SEQ ID NO: 3067328 - DNA, 25 bp, Homo sapien
ggtactgacggattagatgaggaca

SEQ ID NO: 3067329 - DNA, 25 bp, Homo sapien
gagcagaggctgtagttccacatcc

SEQ ID NO: 3067330 - DNA, 25 bp, Homo sapien
ctggtactgacggattagatgagga

SEQ ID NO: 3067331 - DNA, 25 bp, Homo sapien
ctcaatccttctaccacagctcagt

SEQ ID NO: 3067332 - DNA, 25 bp, Homo sapien
tggcctcaatccttctaccacagct

SEQ ID NO: 3067333 - DNA, 25 bp, Homo sapien
cttacatttcctgctgatcctcctc

SEQ ID NO: 3067334 - DNA, 25 bp, Homo sapien
tttcctgctgatcctcctctgtgct

SEQ ID NO: 3067335 - DNA, 25 bp, Homo sapien
tgcataggggtttaccagaagggaa

SEQ ID NO: 3067336 - DNA, 25 bp, Homo sapien
caactagtggaaaaaagcgtaagtg

SEQ ID NO: 3067337 - DNA, 25 bp, Homo sapien
gctagaactaaaagtgcgcaccacc

SEQ ID NO: 3067338 - DNA, 25 bp, Homo sapien
acacatccggccatggatgcatagg

SEQ ID NO: 3067339 - DNA, 25 bp, Homo sapien
gaatggattccctcactaagctagg

SEQ ID NO: 3067340 - DNA, 25 bp, Homo sapien
tagaagtgtcgcgtaaacaacccca

SEQ ID NO: 3067341 - DNA, 25 bp, Homo sapien
attcagatgcacacgtttgggaccg

SEQ ID NO: 3067342 - DNA, 25 bp, Homo sapien
caggcgacaacgagagagggactaa

SEQ ID NO: 3067343 - DNA, 25 bp, Homo sapien
tggcttcagggcagatctatcattc

SEQ ID NO: 3067344 - DNA, 25 bp, Homo sapien
caattggctgatgcacatgtcactc

SEQ ID NO: 3067345 - DNA, 25 bp, Homo sapien
tgctgtacatcaaccacccagcggg

SEQ ID NO: 3067346 - DNA, 25 bp, Homo sapien
tgggcctcaccctaaggacttctga

SEQ ID NO: 3067347 - DNA, 25 bp, Homo sapien
cctctggttgattggttaatagtgc

SEQ ID NO: 3067348 - DNA, 25 bp, Homo sapien
tcaacgtcgctctagacgcctctgg

SEQ ID NO: 3067349 - DNA, 25 bp, Homo sapien
tcggtccccaatgttccaagcgctt

SEQ ID NO: 3067350 - DNA, 25 bp, Homo sapien
tattggtgaaggctgccgtcgctcg

SEQ ID NO: 3067351 - DNA, 25 bp, Homo sapien
gctcaggcgcaaacaatcttaagga

SEQ ID NO: 3067352 - DNA, 25 bp, Homo sapien
agcctgttacttgacgccccgtagg

SEQ ID NO: 3067353 - DNA, 25 bp, Homo sapien
caagctcttagcagaattgtgagaa

SEQ ID NO: 3067354 - DNA, 25 bp, Homo sapien
tcttatgtttccttgccagcggctt

SEQ ID NO: 3067355 - DNA, 25 bp, Homo sapien
aaggtgcactggcatgcactgtcta

SEQ ID NO: 3067356 - DNA, 25 bp, Homo sapien
ggcattcagtttcacagtggagggc

SEQ ID NO: 3067357 - DNA, 25 bp, Homo sapien
gaaataatggtggagtccagaccac

SEQ ID NO: 3067358 - DNA, 25 bp, Homo sapien
gcatgcactgtctaaaacggtttca

SEQ ID NO: 3067359 - DNA, 25 bp, Homo sapien
cttggttgtacagaggcttaacctc

SEQ ID NO: 3067360 - DNA, 25 bp, Homo sapien
ctgttggaaatggattatcattggc

SEQ ID NO: 3067361 - DNA, 25 bp, Homo sapien
aaatggattatcattggctgggacg

SEQ ID NO: 3067362 - DNA, 25 bp, Homo sapien
gctgggacgattggtaagttttcta

SEQ ID NO: 3067363 - DNA, 25 bp, Homo sapien
ggacagcagatagactggccacttt

SEQ ID NO: 3067364 - DNA, 25 bp, Homo sapien
gtttggcatcactctggacagcaga

SEQ ID NO: 3067365 - DNA, 25 bp, Homo sapien
tctattaaagtttgggcctctggag

SEQ ID NO: 3067366 - DNA, 25 bp, Homo sapien
gatagactggccacttttttctctc

SEQ ID NO: 3067367 - DNA, 25 bp, Homo sapien
tttgctataggtctgtggcagatcc

SEQ ID NO: 3067368 - DNA, 25 bp, Homo sapien
ttggagaagttgaacagtcctttgc

SEQ ID NO: 3067369 - DNA, 25 bp, Homo sapien
caagtactgtcagcaagtatagtat

SEQ ID NO: 3067370 - DNA, 25 bp, Homo sapien
gtggttaataccagctttttggaga

SEQ ID NO: 3067371 - DNA, 25 bp, Homo sapien
catggccccatcttaaatcttgcgg

SEQ ID NO: 3067372 - DNA, 25 bp, Homo sapien
gatgcagtagcgtgaacacttctga

SEQ ID NO: 3067373 - DNA, 25 bp, Homo sapien
tgcgggctgcaaacctggagtaaaa

SEQ ID NO: 3067374 - DNA, 25 bp, Homo sapien
gatcaggtggacaatggctatggaa

SEQ ID NO: 3067375 - DNA, 25 bp, Homo sapien
tggatttgtcggaatttcttcccag

SEQ ID NO: 3067376 - DNA, 25 bp, Homo sapien
ttggatttgtcggaatttcttccca

SEQ ID NO: 3067377 - DNA, 25 bp, Homo sapien
gaactaaaccagtatccagtacatt

SEQ ID NO: 3067378 - DNA, 25 bp, Homo sapien
tttgttttggatatgcgtgcaactc

SEQ ID NO: 3067379 - DNA, 25 bp, Homo sapien
actccttgtatgacgttgtctagac

SEQ ID NO: 3067380 - DNA, 25 bp, Homo sapien
tctgggctgataaatggacatcatt

SEQ ID NO: 3067381 - DNA, 25 bp, Homo sapien
ccttgtagagccaacacttagatct

SEQ ID NO: 3067382 - DNA, 25 bp, Homo sapien
gctcttcctcaattatcagcagatc

SEQ ID NO: 3067383 - DNA, 25 bp, Homo sapien
cagcattctcttaggagaccttggg

SEQ ID NO: 3067384 - DNA, 25 bp, Homo sapien
tgtttctgaaatgtagttgagtgtc

SEQ ID NO: 3067385 - DNA, 25 bp, Homo sapien
catggcttccactgcgtgtctagga

SEQ ID NO: 3067386 - DNA, 25 bp, Homo sapien
tctaactcgagggtattgtcaggcc

SEQ ID NO: 3067387 - DNA, 25 bp, Homo sapien
gatgtctaggccgtttgtgtcacag

SEQ ID NO: 3067388 - DNA, 25 bp, Homo sapien
tctaggaagcgctctttcaggatgc

SEQ ID NO: 3067389 - DNA, 25 bp, Homo sapien
cctggacctaggtgatgacagagga

SEQ ID NO: 3067390 - DNA, 25 bp, Homo sapien
atccgtgggagacatgatagaaacc

SEQ ID NO: 3067391 - DNA, 25 bp, Homo sapien
gattaggacaatatcgggagcactg

SEQ ID NO: 3067392 - DNA, 25 bp, Homo sapien
cccaaggttttaaggctgaggagct

SEQ ID NO: 3067393 - DNA, 25 bp, Homo sapien
cttcttgcttacttcggcctgtggc

SEQ ID NO: 3067394 - DNA, 25 bp, Homo sapien
tgtggcattagcaagccacggccca

SEQ ID NO: 3067395 - DNA, 25 bp, Homo sapien
gaaatgaaagccattgaaatttgtt

SEQ ID NO: 3067396 - DNA, 25 bp, Homo sapien
ggcccagagttgttctcattgaaat

SEQ ID NO: 3067397 - DNA, 25 bp, Homo sapien
catgtcctgcctctggttaagtgat

SEQ ID NO: 3067398 - DNA, 25 bp, Homo sapien
tgtcttctgaacaagctccagctga

SEQ ID NO: 3067399 - DNA, 25 bp, Homo sapien
gatgtggcccaagtgtgtaaactac

SEQ ID NO: 3067400 - DNA, 25 bp, Homo sapien
tcagcttaaagtcaaaacctctggg

SEQ ID NO: 3067401 - DNA, 25 bp, Homo sapien
ggtgaagaattgtggcacctgctca

SEQ ID NO: 3067402 - DNA, 25 bp, Homo sapien
tgatggagacaggactaaaacccag

SEQ ID NO: 3067403 - DNA, 25 bp, Homo sapien
tccatgaggtcccatttcttgaggt

SEQ ID NO: 3067404 - DNA, 25 bp, Homo sapien
tcaggagcacatcctcggcattgcc

SEQ ID NO: 3067405 - DNA, 25 bp, Homo sapien
ggagctagctcagtacatgtgttta

SEQ ID NO: 3067406 - DNA, 25 bp, Homo sapien
agagcatccggcctgaagagacagg

SEQ ID NO: 3067407 - DNA, 25 bp, Homo sapien
ttagagccagtcaaccctcaaatgg

SEQ ID NO: 3067408 - DNA, 25 bp, Homo sapien
ggcaagtccgcctcaagcatgtaaa

SEQ ID NO: 3067409 - DNA, 25 bp, Homo sapien
taggggtttggggtgacacaattca

SEQ ID NO: 3067410 - DNA, 25 bp, Homo sapien
tactttttaccatgtcctcacactg

SEQ ID NO: 3067411 - DNA, 25 bp, Homo sapien
aggtggttctgaagtgtctcttctc

SEQ ID NO: 3067412 - DNA, 25 bp, Homo sapien
gtggtttctgatgaggcctctgctt

SEQ ID NO: 3067413 - DNA, 25 bp, Homo sapien
tgggagccacttaaccgtcaggtga

SEQ ID NO: 3067414 - DNA, 25 bp, Homo sapien
aaaatagccctcagttagttggagc

SEQ ID NO: 3067415 - DNA, 25 bp, Homo sapien
gcagccgatcgaacagagaggaacg

SEQ ID NO: 3067416 - DNA, 25 bp, Homo sapien
tggctacgtctagcgaaggtcccca

SEQ ID NO: 3067417 - DNA, 25 bp, Homo sapien
tggaacagctctaccaggatcaaga

SEQ ID NO: 3067418 - DNA, 25 bp, Homo sapien
cagctctaccaggatcaagaggtgc

SEQ ID NO: 3067419 - DNA, 25 bp, Homo sapien
taccaggatcaagaggtgcccaagc

SEQ ID NO: 3067420 - DNA, 25 bp, Homo sapien
ggaactggaacagctctaccaggat

SEQ ID NO: 3067421 - DNA, 25 bp, Homo sapien
gagacttgcaccttaactctgggac

SEQ ID NO: 3067422 - DNA, 25 bp, Homo sapien
tagcatatgcacctgagccaacctg

SEQ ID NO: 3067423 - DNA, 25 bp, Homo sapien
cagaaccttgggagtcattaaagcc

SEQ ID NO: 3067424 - DNA, 25 bp, Homo sapien
gtgagtcatactggccaaagcttag

SEQ ID NO: 3067425 - DNA, 25 bp, Homo sapien
gaagggcttcatgtgctggtaccaa

SEQ ID NO: 3067426 - DNA, 25 bp, Homo sapien
tagaccccaggtgatcagctgcact

SEQ ID NO: 3067427 - DNA, 25 bp, Homo sapien
agcgccttagagattcagaccccag

SEQ ID NO: 3067428 - DNA, 25 bp, Homo sapien
gctttgctatacacagggtggtcca

SEQ ID NO: 3067429 - DNA, 25 bp, Homo sapien
gcaatagagctatctcggctcaccg

SEQ ID NO: 3067430 - DNA, 25 bp, Homo sapien
caggtgatctgcctgcctcagcctc

SEQ ID NO: 3067431 - DNA, 25 bp, Homo sapien
atttttgagacggagttttgctctt

SEQ ID NO: 3067432 - DNA, 25 bp, Homo sapien
tttttgagacggagttttgctcttg

SEQ ID NO: 3067433 - DNA, 25 bp, Homo sapien
gagataagacctagttctgtcaccc

SEQ ID NO: 3067434 - DNA, 25 bp, Homo sapien
tactatgggacctctcataggccac

SEQ ID NO: 3067435 - DNA, 25 bp, Homo sapien
actgaccactccctatgagataggt

SEQ ID NO: 3067436 - DNA, 25 bp, Homo sapien
cataggccacttaatactgaccact

SEQ ID NO: 3067437 - DNA, 25 bp, Homo sapien
gagcagcaattgaaactcgcccttg

SEQ ID NO: 3067438 - DNA, 25 bp, Homo sapien
gatctcccaggccttacaaaagtgg

SEQ ID NO: 3067439 - DNA, 25 bp, Homo sapien
tgaccactgaggtgtaactagctcc

SEQ ID NO: 3067440 - DNA, 25 bp, Homo sapien
cagcttcagctatggccaaagaggc

SEQ ID NO: 3067441 - DNA, 25 bp, Homo sapien
tctccaggcgggtgttaaagtcgct

SEQ ID NO: 3067442 - DNA, 25 bp, Homo sapien
ccttgaagcgtcctgagttggagac

SEQ ID NO: 3067443 - DNA, 25 bp, Homo sapien
gatcatcaaagaggttagggttctc

SEQ ID NO: 3067444 - DNA, 25 bp, Homo sapien
ggtgtcagggatctcatacagcact

SEQ ID NO: 3067445 - DNA, 25 bp, Homo sapien
ctccctaagccaaggatggggcttt

SEQ ID NO: 3067446 - DNA, 25 bp, Homo sapien
gctccctaagccaaggatggggctt

SEQ ID NO: 3067447 - DNA, 25 bp, Homo sapien
cgctccctaagccaaggatggggct

SEQ ID NO: 3067448 - DNA, 25 bp, Homo sapien
ggcgctccctaagccaaggatgggg

SEQ ID NO: 3067449 - DNA, 25 bp, Homo sapien
tagactttacgatgagctgaatgcc

SEQ ID NO: 3067450 - DNA, 25 bp, Homo sapien
tgggctcaagtagcaagagaagctg

SEQ ID NO: 3067451 - DNA, 25 bp, Homo sapien
tgcagctcccgctcagaaagtgaag

SEQ ID NO: 3067452 - DNA, 25 bp, Homo sapien
agagcacgacgcaggcctagacttt

SEQ ID NO: 3067453 - DNA, 25 bp, Homo sapien
ctgtaatcccgactgctccaggctg

SEQ ID NO: 3067454 - DNA, 25 bp, Homo sapien
tggaggtgagacctttcctagagaa

SEQ ID NO: 3067455 - DNA, 25 bp, Homo sapien
gactcgggaagcaagtggtgcctcc

SEQ ID NO: 3067456 - DNA, 25 bp, Homo sapien
taggagcagctgcacgtcaggtgca

SEQ ID NO: 3067457 - DNA, 25 bp, Homo sapien
tctgtaccaaactcgtgaagctgac

SEQ ID NO: 3067458 - DNA, 25 bp, Homo sapien
tcttagcagattagattcccaccgc

SEQ ID NO: 3067459 - DNA, 25 bp, Homo sapien
cagactgaaaaacgcaacatgccgg

SEQ ID NO: 3067460 - DNA, 25 bp, Homo sapien
catgagttgccagagttaagggtaa

SEQ ID NO: 3067461 - DNA, 25 bp, Homo sapien
gtgcccatcgacatccagaccagca

SEQ ID NO: 3067462 - DNA, 25 bp, Homo sapien
tgtctccggtctccctccggaagcg

SEQ ID NO: 3067463 - DNA, 25 bp, Homo sapien
ggttgggacgttgaaatgagcgcgc

SEQ ID NO: 3067464 - DNA, 25 bp, Homo sapien
gagtggtacgtcctctctccgcgct

SEQ ID NO: 3067465 - DNA, 25 bp, Homo sapien
cagagtctggtgctgacgatccgcg

SEQ ID NO: 3067466 - DNA, 25 bp, Homo sapien
tatacatgaatcagccacctgcagt

SEQ ID NO: 3067467 - DNA, 25 bp, Homo sapien
tccaggacatgccagagagcgaaga

SEQ ID NO: 3067468 - DNA, 25 bp, Homo sapien
tctcttgttatttagccaccagggc

SEQ ID NO: 3067469 - DNA, 25 bp, Homo sapien
agctggacctgctactggagaagac

SEQ ID NO: 3067470 - DNA, 25 bp, Homo sapien
cctaagctggacctgctactggaga

SEQ ID NO: 3067471 - DNA, 25 bp, Homo sapien
taagctggacctgctactggagaag

SEQ ID NO: 3067472 - DNA, 25 bp, Homo sapien
gcctaagctggacctgctactggag

SEQ ID NO: 3067473 - DNA, 25 bp, Homo sapien
acatctccaagaggtacagcgggcg

SEQ ID NO: 3067474 - DNA, 25 bp, Homo sapien
tgtgaacctgatgggaacctctctg

SEQ ID NO: 3067475 - DNA, 25 bp, Homo sapien
tctatcaggcgaaaaccacagattc

SEQ ID NO: 3067476 - DNA, 25 bp, Homo sapien
tgattggccctgtggtctatcaggc

SEQ ID NO: 3067477 - DNA, 25 bp, Homo sapien
caaaccacgagcatggcaaagccat

SEQ ID NO: 3067478 - DNA, 25 bp, Homo sapien
cctctcgcccaaaccacgagcatgg

SEQ ID NO: 3067479 - DNA, 25 bp, Homo sapien
aaagccatttgtcaaaccgctcccg

SEQ ID NO: 3067480 - DNA, 25 bp, Homo sapien
tcgcccaaaccacgagcatggcaaa

SEQ ID NO: 3067481 - DNA, 25 bp, Homo sapien
aggaccgaggagcatccgcactgcc

SEQ ID NO: 3067482 - DNA, 25 bp, Homo sapien
accaggaccgaggagcatccgcact

SEQ ID NO: 3067483 - DNA, 25 bp, Homo sapien
gaggagcatccgcactgccccttaa

SEQ ID NO: 3067484 - DNA, 25 bp, Homo sapien
ggaccaggaccgaggagcatccgca

SEQ ID NO: 3067485 - DNA, 25 bp, Homo sapien
tcgtggagtcgatcagtaggtctgt

SEQ ID NO: 3067486 - DNA, 25 bp, Homo sapien
cgaggagagacacggccccgtattt

SEQ ID NO: 3067487 - DNA, 25 bp, Homo sapien
taagcttgagcgattaggaggtgaa

SEQ ID NO: 3067488 - DNA, 25 bp, Homo sapien
ggtctgtcatagaaactagccctga

SEQ ID NO: 3067489 - DNA, 25 bp, Homo sapien
gctgcagggtagtgggcaaaccctt

SEQ ID NO: 3067490 - DNA, 25 bp, Homo sapien
tctttgccccggtagcccccaggca

SEQ ID NO: 3067491 - DNA, 25 bp, Homo sapien
tgcagggtagtgggcaaacccttct

SEQ ID NO: 3067492 - DNA, 25 bp, Homo sapien
ctgcagggtagtgggcaaacccttc

SEQ ID NO: 3067493 - DNA, 25 bp, Homo sapien
gtattctgctcaggcaccgctgcat

SEQ ID NO: 3067494 - DNA, 25 bp, Homo sapien
tggtattctgctcaggcaccgctgc

SEQ ID NO: 3067495 - DNA, 25 bp, Homo sapien
ggtattctgctcaggcaccgctgca

SEQ ID NO: 3067496 - DNA, 25 bp, Homo sapien
gtgggagccgggcttccactgccca

SEQ ID NO: 3067497 - DNA, 25 bp, Homo sapien
tgggagccgggcttccactgcccat

SEQ ID NO: 3067498 - DNA, 25 bp, Homo sapien
ttaatgagatctggcgggggagggc

SEQ ID NO: 3067499 - DNA, 25 bp, Homo sapien
aacaggctcttgtggagcgtgaccc

SEQ ID NO: 3067500 - DNA, 25 bp, Homo sapien
gcgataacaggctcttgtggagcgt

SEQ ID NO: 3067501 - DNA, 25 bp, Homo sapien
gttggcgataacaggctcttgtgga

SEQ ID NO: 3067502 - DNA, 25 bp, Homo sapien
gaggagaagacagtcgggtgagaag

SEQ ID NO: 3067503 - DNA, 25 bp, Homo sapien
ggaggagaagacagtcgggtgagaa

SEQ ID NO: 3067504 - DNA, 25 bp, Homo sapien
tggaggagaagacagtcgggtgaga

SEQ ID NO: 3067505 - DNA, 25 bp, Homo sapien
aaccagactcggtagatgggcagag

SEQ ID NO: 3067506 - DNA, 25 bp, Homo sapien
tctggcaaaccagactcggtagatg

SEQ ID NO: 3067507 - DNA, 25 bp, Homo sapien
ctcctctttggcacggtgaccccag

SEQ ID NO: 3067508 - DNA, 25 bp, Homo sapien
gaggctatggaaaacagatgacccc

SEQ ID NO: 3067509 - DNA, 25 bp, Homo sapien
aaggctaccaccagctgaccagtca

SEQ ID NO: 3067510 - DNA, 25 bp, Homo sapien
taccaccagctgaccagtcataaga

SEQ ID NO: 3067511 - DNA, 25 bp, Homo sapien
ccagctgaccagtcataagactttg

SEQ ID NO: 3067512 - DNA, 25 bp, Homo sapien
gctgaccagtcataagactttgtct

SEQ ID NO: 3067513 - DNA, 25 bp, Homo sapien
tccccagtcctctgagaaagtaaaa

SEQ ID NO: 3067514 - DNA, 25 bp, Homo sapien
ctagtttactacagtgttgaagaag

SEQ ID NO: 3067515 - DNA, 25 bp, Homo sapien
actacagtgttgaagaagttcccca

SEQ ID NO: 3067516 - DNA, 25 bp, Homo sapien
agaagttccccagtcctctgagaaa

SEQ ID NO: 3067517 - DNA, 25 bp, Homo sapien
tatatccagaaagtatggagacccc

SEQ ID NO: 3067518 - DNA, 25 bp, Homo sapien
agcttctcgcctctttctatatcca

SEQ ID NO: 3067519 - DNA, 25 bp, Homo sapien
tccgacctcggtgctatctccaggg

SEQ ID NO: 3067520 - DNA, 25 bp, Homo sapien
ctaacacacggatgagagcttctcg

SEQ ID NO: 3067521 - DNA, 25 bp, Homo sapien
caggctccagcggtcccctctcttc

SEQ ID NO: 3067522 - DNA, 25 bp, Homo sapien
ccaggctccagcggtcccctctctt

SEQ ID NO: 3067523 - DNA, 25 bp, Homo sapien
ccagccaggctccagcggtcccctc

SEQ ID NO: 3067524 - DNA, 25 bp, Homo sapien
agccaggctccagcggtcccctctc

SEQ ID NO: 3067525 - DNA, 25 bp, Homo sapien
aggggcttgcgtctccctgatgcgc

SEQ ID NO: 3067526 - DNA, 25 bp, Homo sapien
tgtctgtctgagccatccatcaagg

SEQ ID NO: 3067527 - DNA, 25 bp, Homo sapien
gtctgagccatccatcaaggatggc

SEQ ID NO: 3067528 - DNA, 25 bp, Homo sapien
ctctgaggggcttgcgtctccctga

SEQ ID NO: 3067529 - DNA, 25 bp, Homo sapien
tccactagagtgacagctcctgttg

SEQ ID NO: 3067530 - DNA, 25 bp, Homo sapien
ggcagctccactagagtgacagctc

SEQ ID NO: 3067531 - DNA, 25 bp, Homo sapien
actagagtgacagctcctgttggcc

SEQ ID NO: 3067532 - DNA, 25 bp, Homo sapien
ctgaaggcagctccactagagtgac

SEQ ID NO: 3067533 - DNA, 25 bp, Homo sapien
gagagcatcctcaatcacctcacaa

SEQ ID NO: 3067534 - DNA, 25 bp, Homo sapien
cctcacaagtgggaatgacaacgcc

SEQ ID NO: 3067535 - DNA, 25 bp, Homo sapien
gggttcaggccgcattgcttctgct

SEQ ID NO: 3067536 - DNA, 25 bp, Homo sapien
cagcacccgagagcatcctcaatca

SEQ ID NO: 3067537 - DNA, 25 bp, Homo sapien
tctgggtttcagacgtgccccggtg

SEQ ID NO: 3067538 - DNA, 25 bp, Homo sapien
ggctctgcttgttgctggcgtcctg

SEQ ID NO: 3067539 - DNA, 25 bp, Homo sapien
tggcgtcctgttccgtgccagagcc

SEQ ID NO: 3067540 - DNA, 25 bp, Homo sapien
tgtttctgtgcgtgccgtctggctg

SEQ ID NO: 3067541 - DNA, 25 bp, Homo sapien
gcagtgctgcgcagcccgctctgcg

SEQ ID NO: 3067542 - DNA, 25 bp, Homo sapien
tgggtccgtcggctgcttcgcagcc

SEQ ID NO: 3067543 - DNA, 25 bp, Homo sapien
tgcaaactcagggtcctctggaagg

SEQ ID NO: 3067544 - DNA, 25 bp, Homo sapien
cttgccggccctcccgggtcctctg

SEQ ID NO: 3067545 - DNA, 25 bp, Homo sapien
tcctgaccctgggatctttgggctt

SEQ ID NO: 3067546 - DNA, 25 bp, Homo sapien
ggccaaacctttgcatctcagaagc

SEQ ID NO: 3067547 - DNA, 25 bp, Homo sapien
agatatgagttaaggccagggccgt

SEQ ID NO: 3067548 - DNA, 25 bp, Homo sapien
gcagggagccttgaatccacagcct

SEQ ID NO: 3067549 - DNA, 25 bp, Homo sapien
tcaataacgaccatttaatttgttc

SEQ ID NO: 3067550 - DNA, 25 bp, Homo sapien
gatgcctggtggaaagtctcagccc

SEQ ID NO: 3067551 - DNA, 25 bp, Homo sapien
cgtgcatgcacaataccaaagcagg

SEQ ID NO: 3067552 - DNA, 25 bp, Homo sapien
agtcagaaagcgcagaccaaaccgg

SEQ ID NO: 3067553 - DNA, 25 bp, Homo sapien
caaatccatataagtgcacacgtgc

SEQ ID NO: 3067554 - DNA, 25 bp, Homo sapien
cacaggctcatctcggtagggccac

SEQ ID NO: 3067555 - DNA, 25 bp, Homo sapien
ctgggactccacacgagacagcaca

SEQ ID NO: 3067556 - DNA, 25 bp, Homo sapien
aggctcatctcggtagggccaccac

SEQ ID NO: 3067557 - DNA, 25 bp, Homo sapien
gctcatctcggtagggccaccacag

SEQ ID NO: 3067558 - DNA, 25 bp, Homo sapien
catacaagcaggattagtctgagca

SEQ ID NO: 3067559 - DNA, 25 bp, Homo sapien
gcaggattagtctgagcagagagac

SEQ ID NO: 3067560 - DNA, 25 bp, Homo sapien
gcgccagggcgggaagttccataca

SEQ ID NO: 3067561 - DNA, 25 bp, Homo sapien
gcgggaagttccatacaagcaggat

SEQ ID NO: 3067562 - DNA, 25 bp, Homo sapien
actctgttcagtcaagccgccatca

SEQ ID NO: 3067563 - DNA, 25 bp, Homo sapien
gttcagtcaagccgccatcatctgc

SEQ ID NO: 3067564 - DNA, 25 bp, Homo sapien
tctgttcagtcaagccgccatcatc

SEQ ID NO: 3067565 - DNA, 25 bp, Homo sapien
cactctgttcagtcaagccgccatc

SEQ ID NO: 3067566 - DNA, 25 bp, Homo sapien
taaggaagcagagtcaaggggtggg

SEQ ID NO: 3067567 - DNA, 25 bp, Homo sapien
tgtaaggaagcagagtcaaggggtg

SEQ ID NO: 3067568 - DNA, 25 bp, Homo sapien
gtaaggaagcagagtcaaggggtgg

SEQ ID NO: 3067569 - DNA, 25 bp, Homo sapien
ggaaagaggtgaggtacttgtgctc

SEQ ID NO: 3067570 - DNA, 25 bp, Homo sapien
aggaaagaggtgaggtacttgtgct

SEQ ID NO: 3067571 - DNA, 25 bp, Homo sapien
caggaaagaggtgaggtacttgtgc

SEQ ID NO: 3067572 - DNA, 25 bp, Homo sapien
ctgggggtcactctccagaatcaca

SEQ ID NO: 3067573 - DNA, 25 bp, Homo sapien
gctgggggtcactctccagaatcac

SEQ ID NO: 3067574 - DNA, 25 bp, Homo sapien
cctctccgaaggcatcctgcaacat

SEQ ID NO: 3067575 - DNA, 25 bp, Homo sapien
gcttcaacccagtggtccacatgct

SEQ ID NO: 3067576 - DNA, 25 bp, Homo sapien
gatagccctcaagtcagaactctcc

SEQ ID NO: 3067577 - DNA, 25 bp, Homo sapien
gaactctccctcagcatggagagcc

SEQ ID NO: 3067578 - DNA, 25 bp, Homo sapien
ttgacccaggtcacgcatctagctt

SEQ ID NO: 3067579 - DNA, 25 bp, Homo sapien
tgatgattatcaaaggcactcctgc

SEQ ID NO: 3067580 - DNA, 25 bp, Homo sapien
cagagttctagccatgctgggtgcc

SEQ ID NO: 3067581 - DNA, 25 bp, Homo sapien
cagtctcccatagtttgacatcagg

SEQ ID NO: 3067582 - DNA, 25 bp, Homo sapien
tctccagcaaccagcgcttctccac

SEQ ID NO: 3067583 - DNA, 25 bp, Homo sapien
caagaaggctccgtccatgttctcc

SEQ ID NO: 3067584 - DNA, 25 bp, Homo sapien
caccaagaaggctccgtccatgttc

SEQ ID NO: 3067585 - DNA, 25 bp, Homo sapien
agaaggctccgtccatgttctccag

SEQ ID NO: 3067586 - DNA, 25 bp, Homo sapien
aaggtggacacaagctcctgagcct

SEQ ID NO: 3067587 - DNA, 25 bp, Homo sapien
ggtggacacaagctcctgagcctcc

SEQ ID NO: 3067588 - DNA, 25 bp, Homo sapien
ctgaaggtggacacaagctcctgag

SEQ ID NO: 3067589 - DNA, 25 bp, Homo sapien
tgaaggtggacacaagctcctgagc

SEQ ID NO: 3067590 - DNA, 25 bp, Homo sapien
cttaacatgtggttcagagactcaa

SEQ ID NO: 3067591 - DNA, 25 bp, Homo sapien
tggttcagagactcaaacaggcagg

SEQ ID NO: 3067592 - DNA, 25 bp, Homo sapien
catgtggttcagagactcaaacagg

SEQ ID NO: 3067593 - DNA, 25 bp, Homo sapien
gttcagagactcaaacaggcaggtg

SEQ ID NO: 3067594 - DNA, 25 bp, Homo sapien
cccaccacgtataggaagaggtcaa

SEQ ID NO: 3067595 - DNA, 25 bp, Homo sapien
tcattctcgtaggatgagcccacca

SEQ ID NO: 3067596 - DNA, 25 bp, Homo sapien
tagacgatggtcatacccccaaaaa

SEQ ID NO: 3067597 - DNA, 25 bp, Homo sapien
gtcaatgctgttcttgtagacgatg

SEQ ID NO: 3067598 - DNA, 25 bp, Homo sapien
gacatttttctcgaaaaccatctgc

SEQ ID NO: 3067599 - DNA, 25 bp, Homo sapien
gaagacatttttctcgaaaaccatc

SEQ ID NO: 3067600 - DNA, 25 bp, Homo sapien
ttttctcgaaaaccatctgctcctt

SEQ ID NO: 3067601 - DNA, 25 bp, Homo sapien
catttttctcgaaaaccatctgctc

SEQ ID NO: 3067602 - DNA, 25 bp, Homo sapien
cagccttgatggtgtagagggaagg

SEQ ID NO: 3067603 - DNA, 25 bp, Homo sapien
ccggcgcccgtcattatctaggatg

SEQ ID NO: 3067604 - DNA, 25 bp, Homo sapien
cagccggcgcccgtcattatctagg

SEQ ID NO: 3067605 - DNA, 25 bp, Homo sapien
agcagccggcgcccgtcattatcta

SEQ ID NO: 3067606 - DNA, 25 bp, Homo sapien
tctgctggccctaggatacatcctc

SEQ ID NO: 3067607 - DNA, 25 bp, Homo sapien
ctgacaccggagaggagagttccgt

SEQ ID NO: 3067608 - DNA, 25 bp, Homo sapien
tttggcccctgactcgaggtggaca

SEQ ID NO: 3067609 - DNA, 25 bp, Homo sapien
gacaccctgtgtctatgggatctgc

SEQ ID NO: 3067610 - DNA, 25 bp, Homo sapien
ggcccaagttctgtcatgcactgac

SEQ ID NO: 3067611 - DNA, 25 bp, Homo sapien
cgggcccaagttctgtcatgcactg

SEQ ID NO: 3067612 - DNA, 25 bp, Homo sapien
gtccttccgggcccaagttctgtca

SEQ ID NO: 3067613 - DNA, 25 bp, Homo sapien
ttccgggcccaagttctgtcatgca

SEQ ID NO: 3067614 - DNA, 25 bp, Homo sapien
gcccgagtcggagtgtatcacagaa

SEQ ID NO: 3067615 - DNA, 25 bp, Homo sapien
cagagcccgagtcggagtgtatcac

SEQ ID NO: 3067616 - DNA, 25 bp, Homo sapien
ccgagtcggagtgtatcacagaacc

SEQ ID NO: 3067617 - DNA, 25 bp, Homo sapien
gctccagagcccgagtcggagtgta

SEQ ID NO: 3067618 - DNA, 25 bp, Homo sapien
tggccgggctggacctgcgctatca

SEQ ID NO: 3067619 - DNA, 25 bp, Homo sapien
cctggccgggctggacctgcgctat

SEQ ID NO: 3067620 - DNA, 25 bp, Homo sapien
tcttccagctgatccctggccgggc

SEQ ID NO: 3067621 - DNA, 25 bp, Homo sapien
ccgggctggacctgcgctatcagcg

SEQ ID NO: 3067622 - DNA, 25 bp, Homo sapien
tcggcgctgggacgaacttttcctc

SEQ ID NO: 3067623 - DNA, 25 bp, Homo sapien
ggacaggcctcctctccggtcggcg

SEQ ID NO: 3067624 - DNA, 25 bp, Homo sapien
actccaaacggacccagaacttcag

SEQ ID NO: 3067625 - DNA, 25 bp, Homo sapien
cccgcgccgacggactcaggacagg

SEQ ID NO: 3067626 - DNA, 25 bp, Homo sapien
agggctccccggctcgagcaggcgg

SEQ ID NO: 3067627 - DNA, 25 bp, Homo sapien
cccgagggctccccggctcgagcag

SEQ ID NO: 3067628 - DNA, 25 bp, Homo sapien
cgagggctccccggctcgagcaggc

SEQ ID NO: 3067629 - DNA, 25 bp, Homo sapien
gccccgagggctccccggctcgagc

SEQ ID NO: 3067630 - DNA, 25 bp, Homo sapien
gagtgcttagtatgtaccagatatt

SEQ ID NO: 3067631 - DNA, 25 bp, Homo sapien
cctatatgatgacttagaaggcaca

SEQ ID NO: 3067632 - DNA, 25 bp, Homo sapien
tacatgcgtgcgtttctgtgcaaga

SEQ ID NO: 3067633 - DNA, 25 bp, Homo sapien
tagccactgggacacaatagtagac

SEQ ID NO: 3067634 - DNA, 25 bp, Homo sapien
caggctatcagttataatagggaac

SEQ ID NO: 3067635 - DNA, 25 bp, Homo sapien
gcagccagggaaaagacccagcatt

SEQ ID NO: 3067636 - DNA, 25 bp, Homo sapien
tagggaacataatgacactatttga

SEQ ID NO: 3067637 - DNA, 25 bp, Homo sapien
gcattttatttcttcggattccaga

SEQ ID NO: 3067638 - DNA, 25 bp, Homo sapien
ctccccagctcgaggaagccaagtt

SEQ ID NO: 3067639 - DNA, 25 bp, Homo sapien
ccaagttgggttcaaaaagaatgca

SEQ ID NO: 3067640 - DNA, 25 bp, Homo sapien
tcgaggaagccaagttgggttcaaa

SEQ ID NO: 3067641 - DNA, 25 bp, Homo sapien
cagctcgaggaagccaagttgggtt

SEQ ID NO: 3067642 - DNA, 25 bp, Homo sapien
cacatgcatgcgctcactttttcca

SEQ ID NO: 3067643 - DNA, 25 bp, Homo sapien
gatataccgggactgatgacacatc

SEQ ID NO: 3067644 - DNA, 25 bp, Homo sapien
tcttttgcttcttgggtaactgtcc

SEQ ID NO: 3067645 - DNA, 25 bp, Homo sapien
tgacacatcagcatgggatccttct

SEQ ID NO: 3067646 - DNA, 25 bp, Homo sapien
tatactcaggtatttattgggagac

SEQ ID NO: 3067647 - DNA, 25 bp, Homo sapien
cgtcagtagtccctgataaatggaa

SEQ ID NO: 3067648 - DNA, 25 bp, Homo sapien
gagacacgcgtcagtagtccctgat

SEQ ID NO: 3067649 - DNA, 25 bp, Homo sapien
tttattgggagacacgcgtcagtag

SEQ ID NO: 3067650 - DNA, 25 bp, Homo sapien
gttgtacagggactaatgactcacc

SEQ ID NO: 3067651 - DNA, 25 bp, Homo sapien
ccagtgggacctcggaattcgtagc

SEQ ID NO: 3067652 - DNA, 25 bp, Homo sapien
ggccgccactccagggtcattaaat

SEQ ID NO: 3067653 - DNA, 25 bp, Homo sapien
ctatagctgggaggaacgcattgca

SEQ ID NO: 3067654 - DNA, 25 bp, Homo sapien
tcacaccgccaacgttccgccaacg

SEQ ID NO: 3067655 - DNA, 25 bp, Homo sapien
ctctcacaccgccaacgttccgcca

SEQ ID NO: 3067656 - DNA, 25 bp, Homo sapien
cacaccgccaacgttccgccaacgt

SEQ ID NO: 3067657 - DNA, 25 bp, Homo sapien
tctcacaccgccaacgttccgccaa

SEQ ID NO: 3067658 - DNA, 25 bp, Homo sapien
catgatatccgtccgcggtactgct

SEQ ID NO: 3067659 - DNA, 25 bp, Homo sapien
agcgaaggtacccttgcctgggcca

SEQ ID NO: 3067660 - DNA, 25 bp, Homo sapien
actgctccagcgaaggtacccttgc

SEQ ID NO: 3067661 - DNA, 25 bp, Homo sapien
tgggccatgaggcgcaaccgtccct

SEQ ID NO: 3067662 - DNA, 25 bp, Homo sapien
ctccaggttcgcaccgaggggaagt

SEQ ID NO: 3067663 - DNA, 25 bp, Homo sapien
tctccaggttcgcaccgaggggaag

SEQ ID NO: 3067664 - DNA, 25 bp, Homo sapien
ggcttctccaggttcgcaccgaggg

SEQ ID NO: 3067665 - DNA, 25 bp, Homo sapien
cttctccaggttcgcaccgagggga

SEQ ID NO: 3067666 - DNA, 25 bp, Homo sapien
agcacccaagatggcggcacgagcg

SEQ ID NO: 3067667 - DNA, 25 bp, Homo sapien
ggtttccgccgccagcacccaagat

SEQ ID NO: 3067668 - DNA, 25 bp, Homo sapien
aagaaccacatgcttcgtgtcccgc

SEQ ID NO: 3067669 - DNA, 25 bp, Homo sapien
acgagcgtcgcaaccacaagaacca

SEQ ID NO: 3067670 - DNA, 25 bp, Homo sapien
ctcattggtgggtccataccgcggg

SEQ ID NO: 3067671 - DNA, 25 bp, Homo sapien
ggaggtacactcagccattgggccc

SEQ ID NO: 3067672 - DNA, 25 bp, Homo sapien
cctaggtactcattgggccgggaat

SEQ ID NO: 3067673 - DNA, 25 bp, Homo sapien
tcaaggcgagggtgttccgcactct

SEQ ID NO: 3067674 - DNA, 25 bp, Homo sapien
gacccaagacgaaaggcctgtagct

SEQ ID NO: 3067675 - DNA, 25 bp, Homo sapien
tggagaaagtaagtcacgtgggccc

SEQ ID NO: 3067676 - DNA, 25 bp, Homo sapien
aacagttgtactttcagaggtgagg

SEQ ID NO: 3067677 - DNA, 25 bp, Homo sapien
cagcctgcattggaatctacagaga

SEQ ID NO: 3067678 - DNA, 25 bp, Homo sapien
ggttccttgcggcagcttctccagc

SEQ ID NO: 3067679 - DNA, 25 bp, Homo sapien
cgtctgcagctaggtaacaggcggt

SEQ ID NO: 3067680 - DNA, 25 bp, Homo sapien
tctcctcaaggagacggaggcggcc

SEQ ID NO: 3067681 - DNA, 25 bp, Homo sapien
gcagagattggctcccgtctgcagc

SEQ ID NO: 3067682 - DNA, 25 bp, Homo sapien
gctatgttggatgagatcagcctta

SEQ ID NO: 3067683 - DNA, 25 bp, Homo sapien
tagatgaagctatgttggatgagat

SEQ ID NO: 3067684 - DNA, 25 bp, Homo sapien
gggtctgttagatgaagctatgttg

SEQ ID NO: 3067685 - DNA, 25 bp, Homo sapien
gttggatgagatcagccttatggac

SEQ ID NO: 3067686 - DNA, 25 bp, Homo sapien
gctggaggaggaatttgactctgac

SEQ ID NO: 3067687 - DNA, 25 bp, Homo sapien
ttccttagactcgagccatagccct

SEQ ID NO: 3067688 - DNA, 25 bp, Homo sapien
actcaggcctttccttagactcgag

SEQ ID NO: 3067689 - DNA, 25 bp, Homo sapien
cattgaagaaggctttaaccctgtg

SEQ ID NO: 3067690 - DNA, 25 bp, Homo sapien
gcagttcttcctcttcttcctcctc

SEQ ID NO: 3067691 - DNA, 25 bp, Homo sapien
gaaggcagttcttcctcttcttcct

SEQ ID NO: 3067692 - DNA, 25 bp, Homo sapien
ctgaaggcagttcttcctcttcttc

SEQ ID NO: 3067693 - DNA, 25 bp, Homo sapien
aggcagttcttcctcttcttcctcc

SEQ ID NO: 3067694 - DNA, 25 bp, Homo sapien
gggatgagcaccgagcccgagccat

SEQ ID NO: 3067695 - DNA, 25 bp, Homo sapien
cctggacaagcagatgagccgggat

SEQ ID NO: 3067696 - DNA, 25 bp, Homo sapien
acaagcagatgagccgggatgagca

SEQ ID NO: 3067697 - DNA, 25 bp, Homo sapien
tgaagatccctttcaccaatgacaa

SEQ ID NO: 3067698 - DNA, 25 bp, Homo sapien
aagggtcacgtggtcccatgttgca

SEQ ID NO: 3067699 - DNA, 25 bp, Homo sapien
ttcaatcgaatggagccactgggcc

SEQ ID NO: 3067700 - DNA, 25 bp, Homo sapien
tcaaagcgggaagaaaatcagaggg

SEQ ID NO: 3067701 - DNA, 25 bp, Homo sapien
tcagagcctgcatgtgtatgccgtc

SEQ ID NO: 3067702 - DNA, 25 bp, Homo sapien
cagtgctccgggaactgggcctgca

SEQ ID NO: 3067703 - DNA, 25 bp, Homo sapien
gcagtgctccgggaactgggcctgc

SEQ ID NO: 3067704 - DNA, 25 bp, Homo sapien
tggcagtgctccgggaactgggcct

SEQ ID NO: 3067705 - DNA, 25 bp, Homo sapien
ggcagtgctccgggaactgggcctg

SEQ ID NO: 3067706 - DNA, 25 bp, Homo sapien
gatggagaatctagtgtagcagcct

SEQ ID NO: 3067707 - DNA, 25 bp, Homo sapien
tccaggcaggattcagcacaacact

SEQ ID NO: 3067708 - DNA, 25 bp, Homo sapien
ctctgcctaccaacaactgggctta

SEQ ID NO: 3067709 - DNA, 25 bp, Homo sapien
gaatctagtgtagcagcctccaggc

SEQ ID NO: 3067710 - DNA, 25 bp, Homo sapien
tggagtaccgtctgccccagacaag

SEQ ID NO: 3067711 - DNA, 25 bp, Homo sapien
gattgagaagtgcatatgacaggct

SEQ ID NO: 3067712 - DNA, 25 bp, Homo sapien
ggccagatggttccaggactacaat

SEQ ID NO: 3067713 - DNA, 25 bp, Homo sapien
aaagactccgtgtaactgtgtgaac

SEQ ID NO: 3067714 - DNA, 25 bp, Homo sapien
tatggccaccacagaattgagagtt

SEQ ID NO: 3067715 - DNA, 25 bp, Homo sapien
caaggccaaggtcaattaagtcatc

SEQ ID NO: 3067716 - DNA, 25 bp, Homo sapien
gttgaacgctaatactgagcctgga

SEQ ID NO: 3067717 - DNA, 25 bp, Homo sapien
gaaaaaacctcagtgctggacatcg

SEQ ID NO: 3067718 - DNA, 25 bp, Homo sapien
ggaacaattattcctcagcactgtc

SEQ ID NO: 3067719 - DNA, 25 bp, Homo sapien
gtcacaatattaacaagctcccctt

SEQ ID NO: 3067720 - DNA, 25 bp, Homo sapien
gtttctgtggtcattattccatcca

SEQ ID NO: 3067721 - DNA, 25 bp, Homo sapien
ggctctaccagtacaggacacctca

SEQ ID NO: 3067722 - DNA, 25 bp, Homo sapien
tctgtgacccagaccttcagtaagg

SEQ ID NO: 3067723 - DNA, 25 bp, Homo sapien
ctcagacctctgtgcgggaaggcct

SEQ ID NO: 3067724 - DNA, 25 bp, Homo sapien
tttacaacagctcaggaatgccaca

SEQ ID NO: 3067725 - DNA, 25 bp, Homo sapien
ggttaagaccaaagctgactagcag

SEQ ID NO: 3067726 - DNA, 25 bp, Homo sapien
tgcagagttaacactattgggaaga

SEQ ID NO: 3067727 - DNA, 25 bp, Homo sapien
gctcaaagtaaacggctccaagagt

SEQ ID NO: 3067728 - DNA, 25 bp, Homo sapien
aactacacacatgctacgctgtaaa

SEQ ID NO: 3067729 - DNA, 25 bp, Homo sapien
caaataatacaccagtaatagccaa

SEQ ID NO: 3067730 - DNA, 25 bp, Homo sapien
cctgtgggcacttgacattggcttc

SEQ ID NO: 3067731 - DNA, 25 bp, Homo sapien
aggggtaggaatgccacgtcagcct

SEQ ID NO: 3067732 - DNA, 25 bp, Homo sapien
gaatgccacgtcagcctttcctcat

SEQ ID NO: 3067733 - DNA, 25 bp, Homo sapien
cattggcttccttggcagggaccag

SEQ ID NO: 3067734 - DNA, 25 bp, Homo sapien
ccaaacctcgagcaaagcctcgtgg

SEQ ID NO: 3067735 - DNA, 25 bp, Homo sapien
caataatccgctccggctccaaacc

SEQ ID NO: 3067736 - DNA, 25 bp, Homo sapien
cggctccaaacctcgagcaaagcct

SEQ ID NO: 3067737 - DNA, 25 bp, Homo sapien
tagctccaataatccgctccggctc

SEQ ID NO: 3067738 - DNA, 25 bp, Homo sapien
tatatgggactattatccagactgg

SEQ ID NO: 3067739 - DNA, 25 bp, Homo sapien
tatttcaccaataccttggctcaag

SEQ ID NO: 3067740 - DNA, 25 bp, Homo sapien
taagagagctgttagaatcctttgg

SEQ ID NO: 3067741 - DNA, 25 bp, Homo sapien
tccagactggaaccattcctgtgtc

SEQ ID NO: 3067742 - DNA, 25 bp, Homo sapien
agaatcagaatcagctttgcgcttg

SEQ ID NO: 3067743 - DNA, 25 bp, Homo sapien
ttctggctcccatgtgttgtcctca

SEQ ID NO: 3067744 - DNA, 25 bp, Homo sapien
tcagcaatgaggtcggggcaatcca

SEQ ID NO: 3067745 - DNA, 25 bp, Homo sapien
ttatctgtctcatgtgctgttttct

SEQ ID NO: 3067746 - DNA, 25 bp, Homo sapien
tgagaatcccttccactttaggagg

SEQ ID NO: 3067747 - DNA, 25 bp, Homo sapien
tctgagaatcccttccactttagga

SEQ ID NO: 3067748 - DNA, 25 bp, Homo sapien
cttccactttaggaggtactccact

SEQ ID NO: 3067749 - DNA, 25 bp, Homo sapien
cactttaggaggtactccactttgc

SEQ ID NO: 3067750 - DNA, 25 bp, Homo sapien
ctcctcttctagcacctcctccact

SEQ ID NO: 3067751 - DNA, 25 bp, Homo sapien
tcttctagcacctcctccactttct

SEQ ID NO: 3067752 - DNA, 25 bp, Homo sapien
cggtcgagaactttttccaccacat

SEQ ID NO: 3067753 - DNA, 25 bp, Homo sapien
tttccaccacatattcctcttcctc

SEQ ID NO: 3067754 - DNA, 25 bp, Homo sapien
gccagctttctggtgtaaagggtga

SEQ ID NO: 3067755 - DNA, 25 bp, Homo sapien
agtgcccgccagctttctggtgtaa

SEQ ID NO: 3067756 - DNA, 25 bp, Homo sapien
ccgccagctttctggtgtaaagggt

SEQ ID NO: 3067757 - DNA, 25 bp, Homo sapien
cagctttctggtgtaaagggtgacg

SEQ ID NO: 3067758 - DNA, 25 bp, Homo sapien
gtacatgtgctgcttaagcaagcac

SEQ ID NO: 3067759 - DNA, 25 bp, Homo sapien
tgaatttgtgtgtcgtctttgcata

SEQ ID NO: 3067760 - DNA, 25 bp, Homo sapien
ggggccatgctaatcttctctgtat

SEQ ID NO: 3067761 - DNA, 25 bp, Homo sapien
tagtacatgtgctgcttaagcaagc

SEQ ID NO: 3067762 - DNA, 25 bp, Homo sapien
agtcctaaggtgagaatgagcttgc

SEQ ID NO: 3067763 - DNA, 25 bp, Homo sapien
cagaaacccgaactacaaggagaca

SEQ ID NO: 3067764 - DNA, 25 bp, Homo sapien
cacatgtgtttgcaaagcatggcac

SEQ ID NO: 3067765 - DNA, 25 bp, Homo sapien
ggtggaaagacctcgactagactga

SEQ ID NO: 3067766 - DNA, 25 bp, Homo sapien
aagcaacattgttccagaccacccg

SEQ ID NO: 3067767 - DNA, 25 bp, Homo sapien
ggttgtgcggtcgtatgcgcctcct

SEQ ID NO: 3067768 - DNA, 25 bp, Homo sapien
gttactcctccgtagtcctgcaaag

SEQ ID NO: 3067769 - DNA, 25 bp, Homo sapien
tacagttacaaacctcgggttgtgc

SEQ ID NO: 3067770 - DNA, 25 bp, Homo sapien
gtgctgcgctgctggcgcgtcgcgt

SEQ ID NO: 3067771 - DNA, 25 bp, Homo sapien
gctgcgctgctggcgcgtcgcgtcg

SEQ ID NO: 3067772 - DNA, 25 bp, Homo sapien
ctgctggcgcgtcgcgtcgggtcgc

SEQ ID NO: 3067773 - DNA, 25 bp, Homo sapien
tgctgcgctgctggcgcgtcgcgtc

SEQ ID NO: 3067774 - DNA, 25 bp, Homo sapien
aggcagcaagccgggtggccgcagt

SEQ ID NO: 3067775 - DNA, 25 bp, Homo sapien
tgggggagtggcgcccaggaaggca

SEQ ID NO: 3067776 - DNA, 25 bp, Homo sapien
tggcgtccctcactgaagcggcgta

SEQ ID NO: 3067777 - DNA, 25 bp, Homo sapien
ggtggccgcagtggcgtccctcact

SEQ ID NO: 3067778 - DNA, 25 bp, Homo sapien
aaagagcctcgcagtctgcgctgcc

SEQ ID NO: 3067779 - DNA, 25 bp, Homo sapien
tcccctcagccgaacaaaagagcct

SEQ ID NO: 3067780 - DNA, 25 bp, Homo sapien
gaacaaaagagcctcgcagtctgcg

SEQ ID NO: 3067781 - DNA, 25 bp, Homo sapien
tcagccgaacaaaagagcctcgcag

SEQ ID NO: 3067782 - DNA, 25 bp, Homo sapien
cggtccgtggctttacgaatctgaa

SEQ ID NO: 3067783 - DNA, 25 bp, Homo sapien
tcactctgacaatcggtccgtggct

SEQ ID NO: 3067784 - DNA, 25 bp, Homo sapien
aatcggagtccccttgatagctccg

SEQ ID NO: 3067785 - DNA, 25 bp, Homo sapien
tttacgaatctgaatcggagtcccc

SEQ ID NO: 3067786 - DNA, 25 bp, Homo sapien
cgcgctattcggaagcgggaatccc

SEQ ID NO: 3067787 - DNA, 25 bp, Homo sapien
aacgcggccccggattggatatcca

SEQ ID NO: 3067788 - DNA, 25 bp, Homo sapien
gctgattggcttcccctgacagtgg

SEQ ID NO: 3067789 - DNA, 25 bp, Homo sapien
tctccggcgtcccaagtgagtggag

SEQ ID NO: 3067790 - DNA, 25 bp, Homo sapien
ccaagggtatgatgatcatttcgtt

SEQ ID NO: 3067791 - DNA, 25 bp, Homo sapien
tcatgaaggtagtgcagggccctat

SEQ ID NO: 3067792 - DNA, 25 bp, Homo sapien
cctaaattatggtcctgaatttgac

SEQ ID NO: 3067793 - DNA, 25 bp, Homo sapien
gggccctatacaaacttcctgagac

SEQ ID NO: 3067794 - DNA, 25 bp, Homo sapien
tggatgactgtgatttccttgtcat

SEQ ID NO: 3067795 - DNA, 25 bp, Homo sapien
tgtcatcgtctttcccgttgttagt

SEQ ID NO: 3067796 - DNA, 25 bp, Homo sapien
ttgtcatcgtctttcccgttgttag

SEQ ID NO: 3067797 - DNA, 25 bp, Homo sapien
gactgtgatttccttgtcatcgtct

SEQ ID NO: 3067798 - DNA, 25 bp, Homo sapien
tagtgctgtattttaacagaaggtg

SEQ ID NO: 3067799 - DNA, 25 bp, Homo sapien
ggacttgagtaaccccgtgctgcag

SEQ ID NO: 3067800 - DNA, 25 bp, Homo sapien
gaaggtgacatcatgggccccattg

SEQ ID NO: 3067801 - DNA, 25 bp, Homo sapien
cccattggacttgagtaaccccgtg

SEQ ID NO: 3067802 - DNA, 25 bp, Homo sapien
ttggtgtaggatgtcggagaaccaa

SEQ ID NO: 3067803 - DNA, 25 bp, Homo sapien
ttccttccaatgggcttttggtgta

SEQ ID NO: 3067804 - DNA, 25 bp, Homo sapien
cttttggtgtaggatgtcggagaac

SEQ ID NO: 3067805 - DNA, 25 bp, Homo sapien
ggcttttggtgtaggatgtcggaga

SEQ ID NO: 3067806 - DNA, 25 bp, Homo sapien
gatcaggtctgtggcctgatggcat

SEQ ID NO: 3067807 - DNA, 25 bp, Homo sapien
ctgatcaggtctgtggcctgatggc

SEQ ID NO: 3067808 - DNA, 25 bp, Homo sapien
tgatcaggtctgtggcctgatggca

SEQ ID NO: 3067809 - DNA, 25 bp, Homo sapien
tgcgcccagcctgggcaggctggtc

SEQ ID NO: 3067810 - DNA, 25 bp, Homo sapien
agccaccatgctccgccttttttct

SEQ ID NO: 3067811 - DNA, 25 bp, Homo sapien
caccatgctccgccttttttctttt

SEQ ID NO: 3067812 - DNA, 25 bp, Homo sapien
gagtgcagtgacaccctccacctcc

SEQ ID NO: 3067813 - DNA, 25 bp, Homo sapien
cactcttcagtctgtgaggagggct

SEQ ID NO: 3067814 - DNA, 25 bp, Homo sapien
tgggctccagttgttgactctgagg

SEQ ID NO: 3067815 - DNA, 25 bp, Homo sapien
gctgtgattttggaagacccaaaga

SEQ ID NO: 3067816 - DNA, 25 bp, Homo sapien
ttggaccctggtcagttagaaacag

SEQ ID NO: 3067817 - DNA, 25 bp, Homo sapien
tcttctagtcacctctgcttgggct

SEQ ID NO: 3067818 - DNA, 25 bp, Homo sapien
gcacagggcaggtatgtgggaggct

SEQ ID NO: 3067819 - DNA, 25 bp, Homo sapien
gaggctgggctgcttagtgtcttct

SEQ ID NO: 3067820 - DNA, 25 bp, Homo sapien
ggtcagtcattacagccccttatgc

SEQ ID NO: 3067821 - DNA, 25 bp, Homo sapien
actggaggaaggattgtcttccaaa

SEQ ID NO: 3067822 - DNA, 25 bp, Homo sapien
tctgtagccctcctgcattgtgtgt

SEQ ID NO: 3067823 - DNA, 25 bp, Homo sapien
tgtgtctaacaagctgtagcagaga

SEQ ID NO: 3067824 - DNA, 25 bp, Homo sapien
aaatcatgaatttatcagtgtggaa

SEQ ID NO: 3067825 - DNA, 25 bp, Homo sapien
tctgtctgaggtgccaggtgctgaa

SEQ ID NO: 3067826 - DNA, 25 bp, Homo sapien
gccctggctggtattcatccctctt

SEQ ID NO: 3067827 - DNA, 25 bp, Homo sapien
tgcttccatcctcgcagtctgtctg

SEQ ID NO: 3067828 - DNA, 25 bp, Homo sapien
cctgggtctctcctttatatgatgc

SEQ ID NO: 3067829 - DNA, 25 bp, Homo sapien
aatctctggattatgggaagccacc

SEQ ID NO: 3067830 - DNA, 25 bp, Homo sapien
taccgtcagttcagaaagggccagc

SEQ ID NO: 3067831 - DNA, 25 bp, Homo sapien
caaaacgctgaaaggcgggcactgt

SEQ ID NO: 3067832 - DNA, 25 bp, Homo sapien
catacgaaaagcatgttgcccggcc

SEQ ID NO: 3067833 - DNA, 25 bp, Homo sapien
gcatttgacttggtcctaagtggga

SEQ ID NO: 3067834 - DNA, 25 bp, Homo sapien
tcctaagtgggagtttcaagcactc

SEQ ID NO: 3067835 - DNA, 25 bp, Homo sapien
tgtttcttgatctgaagtacacagc

SEQ ID NO: 3067836 - DNA, 25 bp, Homo sapien
agagccgaaccctttcatctgcagc

SEQ ID NO: 3067837 - DNA, 25 bp, Homo sapien
gaaccggcgaatatggtcttgctca

SEQ ID NO: 3067838 - DNA, 25 bp, Homo sapien
ctgtaatgcgtctctgaaccggcga

SEQ ID NO: 3067839 - DNA, 25 bp, Homo sapien
caagggatagtaatcacagggctca

SEQ ID NO: 3067840 - DNA, 25 bp, Homo sapien
tatcacataatccagcggctcaagc

SEQ ID NO: 3067841 - DNA, 25 bp, Homo sapien
gagtgaagtaatctgctccaagttc

SEQ ID NO: 3067842 - DNA, 25 bp, Homo sapien
ccaagttctggtaccctaaatgtgg

SEQ ID NO: 3067843 - DNA, 25 bp, Homo sapien
ccctaaatgtggagatgttgaagaa

SEQ ID NO: 3067844 - DNA, 25 bp, Homo sapien
tctggtaccctaaatgtggagatgt

SEQ ID NO: 3067845 - DNA, 25 bp, Homo sapien
gaacagttcatgacacgtccagagg

SEQ ID NO: 3067846 - DNA, 25 bp, Homo sapien
ggtggaacagttcatgacacgtcca

SEQ ID NO: 3067847 - DNA, 25 bp, Homo sapien
tgtgcatatgccaccttggtgactc

SEQ ID NO: 3067848 - DNA, 25 bp, Homo sapien
cagagggctggtggtgtgcatatgc

SEQ ID NO: 3067849 - DNA, 25 bp, Homo sapien
agcacagcaatgcgggcatgtctga

SEQ ID NO: 3067850 - DNA, 25 bp, Homo sapien
gggatgtggaggataaaaggtgacc

SEQ ID NO: 3067851 - DNA, 25 bp, Homo sapien
gatgtggaggataaaaggtgaccag

SEQ ID NO: 3067852 - DNA, 25 bp, Homo sapien
catgtctgatggtgtggaaaaggga

SEQ ID NO: 3067853 - DNA, 25 bp, Homo sapien
tctacagtggaaccagatgtcctct

SEQ ID NO: 3067854 - DNA, 25 bp, Homo sapien
gcactagaagcctcttggaacactt

SEQ ID NO: 3067855 - DNA, 25 bp, Homo sapien
tttgaggaccagcactagaagcctc

SEQ ID NO: 3067856 - DNA, 25 bp, Homo sapien
catcaggctgcaagtgtctacagtg

SEQ ID NO: 3067857 - DNA, 25 bp, Homo sapien
caggtttgatgaacgtgcctcttcc

SEQ ID NO: 3067858 - DNA, 25 bp, Homo sapien
cagtcactctgaggtgtcaagagac

SEQ ID NO: 3067859 - DNA, 25 bp, Homo sapien
gatgagctatgactaggctggttta

SEQ ID NO: 3067860 - DNA, 25 bp, Homo sapien
tctcttcagcaaagagaggagtcca

SEQ ID NO: 3067861 - DNA, 25 bp, Homo sapien
caggatggctggagattgagcatct

SEQ ID NO: 3067862 - DNA, 25 bp, Homo sapien
tgctgtgctgtgtaggttgcagaca

SEQ ID NO: 3067863 - DNA, 25 bp, Homo sapien
tcctgctgtgctgtgtaggttgcag

SEQ ID NO: 3067864 - DNA, 25 bp, Homo sapien
tgcagacaggatggctggagattga

SEQ ID NO: 3067865 - DNA, 25 bp, Homo sapien
cctaagtgacactgtccccaaattt

SEQ ID NO: 3067866 - DNA, 25 bp, Homo sapien
tcctaagtgacactgtccccaaatt

SEQ ID NO: 3067867 - DNA, 25 bp, Homo sapien
attttatgttgctattagttgaacc

SEQ ID NO: 3067868 - DNA, 25 bp, Homo sapien
tattagttgaaccttatcctaagtg

SEQ ID NO: 3067869 - DNA, 25 bp, Homo sapien
cctttggaacaatcccaacgaggct

SEQ ID NO: 3067870 - DNA, 25 bp, Homo sapien
acttcaaaggcagtggtgagatact

SEQ ID NO: 3067871 - DNA, 25 bp, Homo sapien
aaggcagtggtgagatactcctttg

SEQ ID NO: 3067872 - DNA, 25 bp, Homo sapien
ctttggaacaatcccaacgaggctg

SEQ ID NO: 3067873 - DNA, 25 bp, Homo sapien
tggtttaagactacccctcacaaca

SEQ ID NO: 3067874 - DNA, 25 bp, Homo sapien
tcctttccgagagatgaggttctgt

SEQ ID NO: 3067875 - DNA, 25 bp, Homo sapien
acaacacgcacttgcaaccctcctc

SEQ ID NO: 3067876 - DNA, 25 bp, Homo sapien
cctcacaacacgcacttgcaaccct

SEQ ID NO: 3067877 - DNA, 25 bp, Homo sapien
cattttccgacactgaaattagggc

SEQ ID NO: 3067878 - DNA, 25 bp, Homo sapien
gggaaatacatactctgtctacctc

SEQ ID NO: 3067879 - DNA, 25 bp, Homo sapien
ttcactcccttcacctaggctgaag

SEQ ID NO: 3067880 - DNA, 25 bp, Homo sapien
taagctcctcttggtacaagatatg

SEQ ID NO: 3067881 - DNA, 25 bp, Homo sapien
tgggcagtgttgtctgagagtcttt

SEQ ID NO: 3067882 - DNA, 25 bp, Homo sapien
caagtcaacttgctgaaatgtgtga

SEQ ID NO: 3067883 - DNA, 25 bp, Homo sapien
tcttctgctatctcacaggcagaga

SEQ ID NO: 3067884 - DNA, 25 bp, Homo sapien
taaaaactagctttagctcttctgc

SEQ ID NO: 3067885 - DNA, 25 bp, Homo sapien
gctgtatacccgaaaagggctgcag

SEQ ID NO: 3067886 - DNA, 25 bp, Homo sapien
tctctgccaactcgaagagggtgcg

SEQ ID NO: 3067887 - DNA, 25 bp, Homo sapien
taatcaaagcacctacaggtcccgg

SEQ ID NO: 3067888 - DNA, 25 bp, Homo sapien
tgcaaatgagatccggccgagaact

SEQ ID NO: 3067889 - DNA, 25 bp, Homo sapien
catgtttaagccctcgtttccaagt

SEQ ID NO: 3067890 - DNA, 25 bp, Homo sapien
tacagatgttcgttaattatgctaa

SEQ ID NO: 3067891 - DNA, 25 bp, Homo sapien
tgcaccactctggatcatacagatg

SEQ ID NO: 3067892 - DNA, 25 bp, Homo sapien
caagtgccaaattgcaccactctgg

SEQ ID NO: 3067893 - DNA, 25 bp, Homo sapien
gagagtactggctcagtcaggcaga

SEQ ID NO: 3067894 - DNA, 25 bp, Homo sapien
gggatgcacatctacaagtgactgt

SEQ ID NO: 3067895 - DNA, 25 bp, Homo sapien
gaatgaaccctgctcctgtctaaag

SEQ ID NO: 3067896 - DNA, 25 bp, Homo sapien
tatattctcaatggtagggctaaga

SEQ ID NO: 3067897 - DNA, 25 bp, Homo sapien
aattaagggctccaaatcagcatcc

SEQ ID NO: 3067898 - DNA, 25 bp, Homo sapien
gtaacttgtactattccagggtcag

SEQ ID NO: 3067899 - DNA, 25 bp, Homo sapien
caagagaacagtctatcagccccta

SEQ ID NO: 3067900 - DNA, 25 bp, Homo sapien
tctaactgccgagaaaaacaaggct

SEQ ID NO: 3067901 - DNA, 25 bp, Homo sapien
gctcctgtgaacctcgcaagccttt

SEQ ID NO: 3067902 - DNA, 25 bp, Homo sapien
cctaagatgtcccacacttgctgtg

SEQ ID NO: 3067903 - DNA, 25 bp, Homo sapien
ccacgtccaagttctgcctaagatg

SEQ ID NO: 3067904 - DNA, 25 bp, Homo sapien
cctggaatccacgtccaagttctgc

SEQ ID NO: 3067905 - DNA, 25 bp, Homo sapien
gagtctggctcccaacactcttagc

SEQ ID NO: 3067906 - DNA, 25 bp, Homo sapien
tagcttatgagccacatcacaaaga

SEQ ID NO: 3067907 - DNA, 25 bp, Homo sapien
tcctcttgactataatgtgaaatgc

SEQ ID NO: 3067908 - DNA, 25 bp, Homo sapien
tacagatggagcaggattgtcgtcg

SEQ ID NO: 3067909 - DNA, 25 bp, Homo sapien
aattaaactaccatctttaacagtg

SEQ ID NO: 3067910 - DNA, 25 bp, Homo sapien
tctgtgcagtattggaggtataagg

SEQ ID NO: 3067911 - DNA, 25 bp, Homo sapien
ctaccatctttaacagtgaatttat

SEQ ID NO: 3067912 - DNA, 25 bp, Homo sapien
tactcagtgatgaatatggtttatt

SEQ ID NO: 3067913 - DNA, 25 bp, Homo sapien
aaaggaatggcctctactgaatttg

SEQ ID NO: 3067914 - DNA, 25 bp, Homo sapien
aatttgaccggtatatgaccgttgc

SEQ ID NO: 3067915 - DNA, 25 bp, Homo sapien
tctagacgattggttcctgtctggg

SEQ ID NO: 3067916 - DNA, 25 bp, Homo sapien
tatatgaccgttgccttccagctga

SEQ ID NO: 3067917 - DNA, 25 bp, Homo sapien
cagcagccggcgtgtatttcaaaca

SEQ ID NO: 3067918 - DNA, 25 bp, Homo sapien
ttgaacccctgccaagtactgatgg

SEQ ID NO: 3067919 - DNA, 25 bp, Homo sapien
ggtgcccaggccgaatggatttttg

SEQ ID NO: 3067920 - DNA, 25 bp, Homo sapien
atttcatgttcaggcagagcgaccg

SEQ ID NO: 3067921 - DNA, 25 bp, Homo sapien
gcacagatctgcttcgttattaaaa

SEQ ID NO: 3067922 - DNA, 25 bp, Homo sapien
aatatctgagtccaaaaggaacaca

SEQ ID NO: 3067923 - DNA, 25 bp, Homo sapien
aacacaggaacatccgctggatgca

SEQ ID NO: 3067924 - DNA, 25 bp, Homo sapien
gaacatccgctggatgcacagatct

SEQ ID NO: 3067925 - DNA, 25 bp, Homo sapien
tgctttcgggcatttgaaataccaa

SEQ ID NO: 3067926 - DNA, 25 bp, Homo sapien
tacccctgtaatgccagtgtggtaa

SEQ ID NO: 3067927 - DNA, 25 bp, Homo sapien
gagtggataactcgattacccctgt

SEQ ID NO: 3067928 - DNA, 25 bp, Homo sapien
cacaaattctattacacggcaaacc

SEQ ID NO: 3067929 - DNA, 25 bp, Homo sapien
tgtgatctcactcaacaaggcctgc

SEQ ID NO: 3067930 - DNA, 25 bp, Homo sapien
ctagaagattgtgatctcactcaac

SEQ ID NO: 3067931 - DNA, 25 bp, Homo sapien
tgcaaacaaagggttggatttgaat

SEQ ID NO: 3067932 - DNA, 25 bp, Homo sapien
gggttggatttgaattgggtccata

SEQ ID NO: 3067933 - DNA, 25 bp, Homo sapien
tggtcaccatggcaatcccataggc

SEQ ID NO: 3067934 - DNA, 25 bp, Homo sapien
gtcaccccgttggaaggacagttca

SEQ ID NO: 3067935 - DNA, 25 bp, Homo sapien
cttgctcagaatacggatgaggtca

SEQ ID NO: 3067936 - DNA, 25 bp, Homo sapien
ggcaatcccataggccctggtagta

SEQ ID NO: 3067937 - DNA, 25 bp, Homo sapien
ccgaggtacccatgtttttgctgca

SEQ ID NO: 3067938 - DNA, 25 bp, Homo sapien
cgaggtacccatgtttttgctgcaa

SEQ ID NO: 3067939 - DNA, 25 bp, Homo sapien
ctctattttttccgaggtacccatg

SEQ ID NO: 3067940 - DNA, 25 bp, Homo sapien
ttccgaggtacccatgtttttgctg

SEQ ID NO: 3067941 - DNA, 25 bp, Homo sapien
agcccagtctttaagtggaaccaag

SEQ ID NO: 3067942 - DNA, 25 bp, Homo sapien
catttgtagaccttgaacatgtctg

SEQ ID NO: 3067943 - DNA, 25 bp, Homo sapien
cattacaactaaattctgggtgggc

SEQ ID NO: 3067944 - DNA, 25 bp, Homo sapien
aatactgaaacgaatagcccagtct

SEQ ID NO: 3067945 - DNA, 25 bp, Homo sapien
tatgggctggatttagattccttta

SEQ ID NO: 3067946 - DNA, 25 bp, Homo sapien
tgcctctatgggctggatttagatt

SEQ ID NO: 3067947 - DNA, 25 bp, Homo sapien
cctctatgggctggatttagattcc

SEQ ID NO: 3067948 - DNA, 25 bp, Homo sapien
tctatgggctggatttagattcctt

SEQ ID NO: 3067949 - DNA, 25 bp, Homo sapien
aataaccctgttactaacagtcatg

SEQ ID NO: 3067950 - DNA, 25 bp, Homo sapien
taaactgagctctttatagattgag

SEQ ID NO: 3067951 - DNA, 25 bp, Homo sapien
ctctgaggtgttgaagagtcactca

SEQ ID NO: 3067952 - DNA, 25 bp, Homo sapien
tgagcaatcaatactacaaggctgt

SEQ ID NO: 3067953 - DNA, 25 bp, Homo sapien
cagtctgggatgaataagatgtaat

SEQ ID NO: 3067954 - DNA, 25 bp, Homo sapien
ggttaacagtctgggatgaataaga

SEQ ID NO: 3067955 - DNA, 25 bp, Homo sapien
ttaacagtctgggatgaataagatg

SEQ ID NO: 3067956 - DNA, 25 bp, Homo sapien
aacagtctgggatgaataagatgta

SEQ ID NO: 3067957 - DNA, 25 bp, Homo sapien
ttcccacccgctctaggataaatct

SEQ ID NO: 3067958 - DNA, 25 bp, Homo sapien
ggcaattctattttcactgtactga

SEQ ID NO: 3067959 - DNA, 25 bp, Homo sapien
tcctctgatctcttagagatgaggc

SEQ ID NO: 3067960 - DNA, 25 bp, Homo sapien
cccgctctaggataaatcttggctg

SEQ ID NO: 3067961 - DNA, 25 bp, Homo sapien
ccagtgcctgtgcatttagaagctc

SEQ ID NO: 3067962 - DNA, 25 bp, Homo sapien
gtgcctgtgcatttagaagctctta

SEQ ID NO: 3067963 - DNA, 25 bp, Homo sapien
cctgtgcatttagaagctcttatac

SEQ ID NO: 3067964 - DNA, 25 bp, Homo sapien
cagtgcctgtgcatttagaagctct

SEQ ID NO: 3067965 - DNA, 25 bp, Homo sapien
ttttcgtcgagtgccactctcatcc

SEQ ID NO: 3067966 - DNA, 25 bp, Homo sapien
atcctcttctagatcatgctcttca

SEQ ID NO: 3067967 - DNA, 25 bp, Homo sapien
ctcatcctcttctagatcatgctct

SEQ ID NO: 3067968 - DNA, 25 bp, Homo sapien
tccttttcgtcgagtgccactctca

SEQ ID NO: 3067969 - DNA, 25 bp, Homo sapien
tgtctgtgcgcagctgtctcttcct

SEQ ID NO: 3067970 - DNA, 25 bp, Homo sapien
gagggtcacagtgctgctactccac

SEQ ID NO: 3067971 - DNA, 25 bp, Homo sapien
ccaccattagatgggaagcttcacc

SEQ ID NO: 3067972 - DNA, 25 bp, Homo sapien
tcaatgtaaattgggtcagatctcc

SEQ ID NO: 3067973 - DNA, 25 bp, Homo sapien
ccatcactgctcgttgctttctaac

SEQ ID NO: 3067974 - DNA, 25 bp, Homo sapien
ctgctcgttgctttctaacagacac

SEQ ID NO: 3067975 - DNA, 25 bp, Homo sapien
tcactgctcgttgctttctaacaga

SEQ ID NO: 3067976 - DNA, 25 bp, Homo sapien
cgttgctttctaacagacaccttca

SEQ ID NO: 3067977 - DNA, 25 bp, Homo sapien
gaaatggctcgacctcaaccaagat

SEQ ID NO: 3067978 - DNA, 25 bp, Homo sapien
gcaaagacgtagcttcttccccagg

SEQ ID NO: 3067979 - DNA, 25 bp, Homo sapien
gagggttggacgctcttcttaggaa

SEQ ID NO: 3067980 - DNA, 25 bp, Homo sapien
cattaacgacgatgacttgctgagg

SEQ ID NO: 3067981 - DNA, 25 bp, Homo sapien
cacactcccaggcaagatagtgggt

SEQ ID NO: 3067982 - DNA, 25 bp, Homo sapien
tcccaggcaagatagtgggtctgca

SEQ ID NO: 3067983 - DNA, 25 bp, Homo sapien
cccacactcccaggcaagatagtgg

SEQ ID NO: 3067984 - DNA, 25 bp, Homo sapien
cactcccaggcaagatagtgggtct

SEQ ID NO: 3067985 - DNA, 25 bp, Homo sapien
cttcatatggaatggttaaggagct

SEQ ID NO: 3067986 - DNA, 25 bp, Homo sapien
catatggaatggttaaggagctcag

SEQ ID NO: 3067987 - DNA, 25 bp, Homo sapien
tcatatggaatggttaaggagctca

SEQ ID NO: 3067988 - DNA, 25 bp, Homo sapien
tatggaatggttaaggagctcagat

SEQ ID NO: 3067989 - DNA, 25 bp, Homo sapien
agaaacttatttgatccacccagtc

SEQ ID NO: 3067990 - DNA, 25 bp, Homo sapien
aacttatttgatccacccagtctct

SEQ ID NO: 3067991 - DNA, 25 bp, Homo sapien
ttatttgatccacccagtctctggc

SEQ ID NO: 3067992 - DNA, 25 bp, Homo sapien
gaaacttatttgatccacccagtct

SEQ ID NO: 3067993 - DNA, 25 bp, Homo sapien
tgcaacaccaagaaggatcaccatc

SEQ ID NO: 3067994 - DNA, 25 bp, Homo sapien
atcaccatctccttgatgcgtccta

SEQ ID NO: 3067995 - DNA, 25 bp, Homo sapien
atgcaatacagaaggaaactgcaac

SEQ ID NO: 3067996 - DNA, 25 bp, Homo sapien
gaaactgcaacaccaagaaggatca

SEQ ID NO: 3067997 - DNA, 25 bp, Homo sapien
ccgtacaccgtagcccttaatgagg

SEQ ID NO: 3067998 - DNA, 25 bp, Homo sapien
ttcttggaatctcttcgcaggtggg

SEQ ID NO: 3067999 - DNA, 25 bp, Homo sapien
ggaggtcagttcaaagcaggattct

SEQ ID NO: 3068000 - DNA, 25 bp, Homo sapien
tagctgcgcctatcctgggaggtca

SEQ ID NO: 3068001 - DNA, 25 bp, Homo sapien
tctcattagcatagtagtagaagag

SEQ ID NO: 3068002 - DNA, 25 bp, Homo sapien
cactccgatccaaagaaactatgat

SEQ ID NO: 3068003 - DNA, 25 bp, Homo sapien
ttctgccactccgatccaaagaaac

SEQ ID NO: 3068004 - DNA, 25 bp, Homo sapien
cttctcattagcatagtagtagaag

SEQ ID NO: 3068005 - DNA, 25 bp, Homo sapien
cataaattcaggtaactaccatcat

SEQ ID NO: 3068006 - DNA, 25 bp, Homo sapien
ttcaggtaactaccatcattgaaga

SEQ ID NO: 3068007 - DNA, 25 bp, Homo sapien
caggtaactaccatcattgaagagt

SEQ ID NO: 3068008 - DNA, 25 bp, Homo sapien
taaattcaggtaactaccatcattg

SEQ ID NO: 3068009 - DNA, 25 bp, Homo sapien
tgttctgaaatctgtgggtctgacc

SEQ ID NO: 3068010 - DNA, 25 bp, Homo sapien
atgttctgaaatctgtgggtctgac

SEQ ID NO: 3068011 - DNA, 25 bp, Homo sapien
tctgaaatctgtgggtctgaccaat

SEQ ID NO: 3068012 - DNA, 25 bp, Homo sapien
tgaaatctgtgggtctgaccaatac

SEQ ID NO: 3068013 - DNA, 25 bp, Homo sapien
tcttctccaagtatccttgcttgat

SEQ ID NO: 3068014 - DNA, 25 bp, Homo sapien
ttttcttctccaagtatccttgctt

SEQ ID NO: 3068015 - DNA, 25 bp, Homo sapien
cgttatcaagttcttgagctccttt

SEQ ID NO: 3068016 - DNA, 25 bp, Homo sapien
tccttgcttgattacgttatcaagt

SEQ ID NO: 3068017 - DNA, 25 bp, Homo sapien
catgctaatcttctctgtatcattc

SEQ ID NO: 3068018 - DNA, 25 bp, Homo sapien
caattttagtatatatgctgccaaa

SEQ ID NO: 3068019 - DNA, 25 bp, Homo sapien
ttgcatgtcatctttgcacaggggc

SEQ ID NO: 3068020 - DNA, 25 bp, Homo sapien
caaaaacatggaatgcttcacaaat

SEQ ID NO: 3068021 - DNA, 25 bp, Homo sapien
taaaatggggaaacgaagttgcata

SEQ ID NO: 3068022 - DNA, 25 bp, Homo sapien
ttggtgcatatagccgtgcacgtag

SEQ ID NO: 3068023 - DNA, 25 bp, Homo sapien
gaaacgaagttgcatattagattct

SEQ ID NO: 3068024 - DNA, 25 bp, Homo sapien
ctttggtgcatatagccgtgcacgt

SEQ ID NO: 3068025 - DNA, 25 bp, Homo sapien
ttagaagacatgcagctcggtattg

SEQ ID NO: 3068026 - DNA, 25 bp, Homo sapien
cacggcacttggtatagacggatga

SEQ ID NO: 3068027 - DNA, 25 bp, Homo sapien
gtagaaagctgaaggcacatccatt

SEQ ID NO: 3068028 - DNA, 25 bp, Homo sapien
catttattgttaggtggactagctc

SEQ ID NO: 3068029 - DNA, 25 bp, Homo sapien
gctttgattccaccttgcccaaggg

SEQ ID NO: 3068030 - DNA, 25 bp, Homo sapien
actgaaggtataaatcagctttccc

SEQ ID NO: 3068031 - DNA, 25 bp, Homo sapien
gggatgaaggatgcctatgcctgac

SEQ ID NO: 3068032 - DNA, 25 bp, Homo sapien
gacctcacctttacattgtctaacg

SEQ ID NO: 3068033 - DNA, 25 bp, Homo sapien
agatgttagtgaaagctttgtgtat

SEQ ID NO: 3068034 - DNA, 25 bp, Homo sapien
tatgagatattgttggataaactga

SEQ ID NO: 3068035 - DNA, 25 bp, Homo sapien
tgaaagctttgtgtatggcttgttt

SEQ ID NO: 3068036 - DNA, 25 bp, Homo sapien
ttgtatgagatattgttggataaac

SEQ ID NO: 3068037 - DNA, 25 bp, Homo sapien
gaaccacaggttcaattcccagctg

SEQ ID NO: 3068038 - DNA, 25 bp, Homo sapien
tgtattaaagatatctaagtctact

SEQ ID NO: 3068039 - DNA, 25 bp, Homo sapien
gactaagtatgaggtttgaaatatc

SEQ ID NO: 3068040 - DNA, 25 bp, Homo sapien
taagtctactttaactacattatgt

SEQ ID NO: 3068041 - DNA, 25 bp, Homo sapien
ttctctatactctcctattcattct

SEQ ID NO: 3068042 - DNA, 25 bp, Homo sapien
ctgatggataagttggctttatctt

SEQ ID NO: 3068043 - DNA, 25 bp, Homo sapien
tttctctatactctcctattcattc

SEQ ID NO: 3068044 - DNA, 25 bp, Homo sapien
ggctttatcttctataattcctatt

SEQ ID NO: 3068045 - DNA, 25 bp, Homo sapien
gatgaaattggtacagggctagaca

SEQ ID NO: 3068046 - DNA, 25 bp, Homo sapien
catctggcatgaggtaaatggcatc

SEQ ID NO: 3068047 - DNA, 25 bp, Homo sapien
ggctagacatggacacctgtgaaga

SEQ ID NO: 3068048 - DNA, 25 bp, Homo sapien
gatgcaatccaaccctggaaacctt

SEQ ID NO: 3068049 - DNA, 25 bp, Homo sapien
ttctgtcctggcgaacatcagcctg

SEQ ID NO: 3068050 - DNA, 25 bp, Homo sapien
aggggattgggcagtaaattctgtc

SEQ ID NO: 3068051 - DNA, 25 bp, Homo sapien
gcctggcagtaaatcggaatcctct

SEQ ID NO: 3068052 - DNA, 25 bp, Homo sapien
ttcacagcatgaagttatgagcttc

SEQ ID NO: 3068053 - DNA, 25 bp, Homo sapien
tagcctctagcaatgctggaacacc

SEQ ID NO: 3068054 - DNA, 25 bp, Homo sapien
gggctcctcaaacaggaagtcaaag

SEQ ID NO: 3068055 - DNA, 25 bp, Homo sapien
gatgaactctgcattttcgggcaag

SEQ ID NO: 3068056 - DNA, 25 bp, Homo sapien
ggcaagaggcctgatgaatctccag

SEQ ID NO: 3068057 - DNA, 25 bp, Homo sapien
gctagcttaactcctaagacaaggg

SEQ ID NO: 3068058 - DNA, 25 bp, Homo sapien
tactgtaagtgtgataggatctccc

SEQ ID NO: 3068059 - DNA, 25 bp, Homo sapien
tccggcagtaatggtctaacacagc

SEQ ID NO: 3068060 - DNA, 25 bp, Homo sapien
tgatggctcgcataaaagcaatgtc

SEQ ID NO: 3068061 - DNA, 25 bp, Homo sapien
aacatttaattaggccggcgcggtg

SEQ ID NO: 3068062 - DNA, 25 bp, Homo sapien
caagaatagatagtcttgtgatgca

SEQ ID NO: 3068063 - DNA, 25 bp, Homo sapien
taaacaagaatagatagtcttgtga

SEQ ID NO: 3068064 - DNA, 25 bp, Homo sapien
ttctaaacaagaatagatagtcttg

SEQ ID NO: 3068065 - DNA, 25 bp, Homo sapien
acaagaatagatagtcttgtgatgc

SEQ ID NO: 3068066 - DNA, 25 bp, Homo sapien
catgagtgttataggacaggaagac

SEQ ID NO: 3068067 - DNA, 25 bp, Homo sapien
tgattctttctgagcgattatgact

SEQ ID NO: 3068068 - DNA, 25 bp, Homo sapien
gctgctctcacctgataaaattgtg

SEQ ID NO: 3068069 - DNA, 25 bp, Homo sapien
cccaaagggttggtatagactcttg

SEQ ID NO: 3068070 - DNA, 25 bp, Homo sapien
tatcagtgctgagaaagtcttgtaa

SEQ ID NO: 3068071 - DNA, 25 bp, Homo sapien
gctgagaaagtcttgtaaaggacat

SEQ ID NO: 3068072 - DNA, 25 bp, Homo sapien
cagtgctgagaaagtcttgtaaagg

SEQ ID NO: 3068073 - DNA, 25 bp, Homo sapien
ctgtttatcagtgctgagaaagtct

SEQ ID NO: 3068074 - DNA, 25 bp, Homo sapien
cactatgttgtccacctggtcttga

SEQ ID NO: 3068075 - DNA, 25 bp, Homo sapien
acttctggcctcaagtgattttcct

SEQ ID NO: 3068076 - DNA, 25 bp, Homo sapien
ttcttttaaagagacaggggtctca

SEQ ID NO: 3068077 - DNA, 25 bp, Homo sapien
ctcaagtgattttcctgcctcagcc

SEQ ID NO: 3068078 - DNA, 25 bp, Homo sapien
caacactctgttcttgggtctttct

SEQ ID NO: 3068079 - DNA, 25 bp, Homo sapien
tttcctgtgctcacagttccttcta

SEQ ID NO: 3068080 - DNA, 25 bp, Homo sapien
ggtctttctctcttcgtagcctggg

SEQ ID NO: 3068081 - DNA, 25 bp, Homo sapien
tgtgctcacagttccttctaagagc

SEQ ID NO: 3068082 - DNA, 25 bp, Homo sapien
tgactatgtggaaggggttaccctg

SEQ ID NO: 3068083 - DNA, 25 bp, Homo sapien
gctctccttggactgattctgattg

SEQ ID NO: 3068084 - DNA, 25 bp, Homo sapien
gcatggataactcaggctctccttg

SEQ ID NO: 3068085 - DNA, 25 bp, Homo sapien
tgcgggcaaagcagttttggtagca

SEQ ID NO: 3068086 - DNA, 25 bp, Homo sapien
gcaatatgaaatgcccaaggaagtc

SEQ ID NO: 3068087 - DNA, 25 bp, Homo sapien
tatgctgaagttactccgccaattc

SEQ ID NO: 3068088 - DNA, 25 bp, Homo sapien
tttaggtcaacaaacactctgggag

SEQ ID NO: 3068089 - DNA, 25 bp, Homo sapien
tgtactactatgttgctcttgcgtg

SEQ ID NO: 3068090 - DNA, 25 bp, Homo sapien
gagaccccaggatctgaaaagatgg

SEQ ID NO: 3068091 - DNA, 25 bp, Homo sapien
tgtagttgcccaaagacaagttgtg

SEQ ID NO: 3068092 - DNA, 25 bp, Homo sapien
taactgaagtatgtatagagacccc

SEQ ID NO: 3068093 - DNA, 25 bp, Homo sapien
ggcagattagtccatgagcattcaa

SEQ ID NO: 3068094 - DNA, 25 bp, Homo sapien
tttgaacatagcaagtcctggaggc

SEQ ID NO: 3068095 - DNA, 25 bp, Homo sapien
taccactttccgcaaatatttagtg

SEQ ID NO: 3068096 - DNA, 25 bp, Homo sapien
tacagcttcagtgttattgtagtta

SEQ ID NO: 3068097 - DNA, 25 bp, Homo sapien
tgtcatattaaagaggataatgtat

SEQ ID NO: 3068098 - DNA, 25 bp, Homo sapien
cattcgtttccttgatgaacaaggg

SEQ ID NO: 3068099 - DNA, 25 bp, Homo sapien
gcacattcgtttccttgatgaacaa

SEQ ID NO: 3068100 - DNA, 25 bp, Homo sapien
gagcagtgggtgaagaacatgtcac

SEQ ID NO: 3068101 - DNA, 25 bp, Homo sapien
acctccgtgcacattcgtttccttg

SEQ ID NO: 3068102 - DNA, 25 bp, Homo sapien
tacctcatatcaagatgccacattt

SEQ ID NO: 3068103 - DNA, 25 bp, Homo sapien
gctttcatggagacatttatgagcg

SEQ ID NO: 3068104 - DNA, 25 bp, Homo sapien
tccttttctaactctgcagatatag

SEQ ID NO: 3068105 - DNA, 25 bp, Homo sapien
tcaatacctcatatcaagatgccac

SEQ ID NO: 3068106 - DNA, 25 bp, Homo sapien
ccgcgcctgaccacttaccatcttt

SEQ ID NO: 3068107 - DNA, 25 bp, Homo sapien
accgcgcctgaccacttaccatctt

SEQ ID NO: 3068108 - DNA, 25 bp, Homo sapien
cactgtatatttggacgctgaaaac

SEQ ID NO: 3068109 - DNA, 25 bp, Homo sapien
cagaaggagtcactatatcctgctt

SEQ ID NO: 3068110 - DNA, 25 bp, Homo sapien
agttgcctggctcttgtactaagta

SEQ ID NO: 3068111 - DNA, 25 bp, Homo sapien
actaagtattgtggtcagtgtttcc

SEQ ID NO: 3068112 - DNA, 25 bp, Homo sapien
agtatggtagtcacccaaaatccag

SEQ ID NO: 3068113 - DNA, 25 bp, Homo sapien
agataatgaagtatggtagtcaccc

SEQ ID NO: 3068114 - DNA, 25 bp, Homo sapien
caaaatccagaaggataacactcac

SEQ ID NO: 3068115 - DNA, 25 bp, Homo sapien
ggtagtcacccaaaatccagaagga

SEQ ID NO: 3068116 - DNA, 25 bp, Homo sapien
aatctgacaaaaagggtgcatcgga

SEQ ID NO: 3068117 - DNA, 25 bp, Homo sapien
acaaaaagggtgcatcggatgtgag

SEQ ID NO: 3068118 - DNA, 25 bp, Homo sapien
ataatctgacaaaaagggtgcatcg

SEQ ID NO: 3068119 - DNA, 25 bp, Homo sapien
ctgacaaaaagggtgcatcggatgt

SEQ ID NO: 3068120 - DNA, 25 bp, Homo sapien
ccttgacatctatgtgaagacgaaa

SEQ ID NO: 3068121 - DNA, 25 bp, Homo sapien
atgtgaagacgaaaatctgaagttc

SEQ ID NO: 3068122 - DNA, 25 bp, Homo sapien
gacatctatgtgaagacgaaaatct

SEQ ID NO: 3068123 - DNA, 25 bp, Homo sapien
cttgattttccttgacatctatgtg

SEQ ID NO: 3068124 - DNA, 25 bp, Homo sapien
ttggggctgaaaatcccaatagtac

SEQ ID NO: 3068125 - DNA, 25 bp, Homo sapien
cttggggctgaaaatcccaatagta

SEQ ID NO: 3068126 - DNA, 25 bp, Homo sapien
tggccaccacgaagaattttccata

SEQ ID NO: 3068127 - DNA, 25 bp, Homo sapien
ggccaccacgaagaattttccataa

SEQ ID NO: 3068128 - DNA, 25 bp, Homo sapien
gccaggatggagactcatgcctata

SEQ ID NO: 3068129 - DNA, 25 bp, Homo sapien
agccaggatggagactcatgcctat

SEQ ID NO: 3068130 - DNA, 25 bp, Homo sapien
ccaggatggagactcatgcctataa

SEQ ID NO: 3068131 - DNA, 25 bp, Homo sapien
tctgtctcactttgagggattctcc

SEQ ID NO: 3068132 - DNA, 25 bp, Homo sapien
ggctcatcttgggaccagggctttc

SEQ ID NO: 3068133 - DNA, 25 bp, Homo sapien
gagggattctccagcatcagaaaca

SEQ ID NO: 3068134 - DNA, 25 bp, Homo sapien
agatgttgccagttcacaaggaagc

SEQ ID NO: 3068135 - DNA, 25 bp, Homo sapien
catgctccggagagaacactacatc

SEQ ID NO: 3068136 - DNA, 25 bp, Homo sapien
gctccggagagaacactacatctcc

SEQ ID NO: 3068137 - DNA, 25 bp, Homo sapien
ccggagagaacactacatctccttc

SEQ ID NO: 3068138 - DNA, 25 bp, Homo sapien
tgctccggagagaacactacatctc

SEQ ID NO: 3068139 - DNA, 25 bp, Homo sapien
cggcttttagttgattccatttctc

SEQ ID NO: 3068140 - DNA, 25 bp, Homo sapien
ccggcttttagttgattccatttct

SEQ ID NO: 3068141 - DNA, 25 bp, Homo sapien
ttattaccaacataaaaatcaatca

SEQ ID NO: 3068142 - DNA, 25 bp, Homo sapien
catttctctttattaccaacataaa

SEQ ID NO: 3068143 - DNA, 25 bp, Homo sapien
tatggatgtctagcactcgagaagt

SEQ ID NO: 3068144 - DNA, 25 bp, Homo sapien
caggtcagcagttggtctctaaaat

SEQ ID NO: 3068145 - DNA, 25 bp, Homo sapien
tgagatcttcccaaacaggtcagca

SEQ ID NO: 3068146 - DNA, 25 bp, Homo sapien
tatgaagaaactacatcacgcctgg

SEQ ID NO: 3068147 - DNA, 25 bp, Homo sapien
gataattacacagtccccagttgct

SEQ ID NO: 3068148 - DNA, 25 bp, Homo sapien
gatccagcagggcatctcatgaggt

SEQ ID NO: 3068149 - DNA, 25 bp, Homo sapien
cccagttgctgagtaaaagtgatgc

SEQ ID NO: 3068150 - DNA, 25 bp, Homo sapien
gccagcaggaaagatcgattaagat

SEQ ID NO: 3068151 - DNA, 25 bp, Homo sapien
gaatatggtctctgtgatcccttgc

SEQ ID NO: 3068152 - DNA, 25 bp, Homo sapien
tcattccgcaaaccttctgccagaa

SEQ ID NO: 3068153 - DNA, 25 bp, Homo sapien
tgcaacagcgctgaggttctcattc

SEQ ID NO: 3068154 - DNA, 25 bp, Homo sapien
gctgaaagccccgtagaatatggtc

SEQ ID NO: 3068155 - DNA, 25 bp, Homo sapien
cctgatcctgaggagagctgtgaac

SEQ ID NO: 3068156 - DNA, 25 bp, Homo sapien
gatcctgaggagagctgtgaacttc

SEQ ID NO: 3068157 - DNA, 25 bp, Homo sapien
tcctgaggagagctgtgaacttcca

SEQ ID NO: 3068158 - DNA, 25 bp, Homo sapien
cctgaggagagctgtgaacttccat

SEQ ID NO: 3068159 - DNA, 25 bp, Homo sapien
aagaaagcctggccgtgggaggcct

SEQ ID NO: 3068160 - DNA, 25 bp, Homo sapien
ttcggccttcggctcagcactggag

SEQ ID NO: 3068161 - DNA, 25 bp, Homo sapien
tcccctttcggccttcggctcagca

SEQ ID NO: 3068162 - DNA, 25 bp, Homo sapien
aaggaggtgagtgacgaagccgtaa

SEQ ID NO: 3068163 - DNA, 25 bp, Homo sapien
caggagccaacggatctcctcaggg

SEQ ID NO: 3068164 - DNA, 25 bp, Homo sapien
cggctgcaccgcgaggcacctgtac

SEQ ID NO: 3068165 - DNA, 25 bp, Homo sapien
gaggcacctgtacctcagccgcggt

SEQ ID NO: 3068166 - DNA, 25 bp, Homo sapien
aaggcgacccggctgcaccgcgagg

SEQ ID NO: 3068167 - DNA, 25 bp, Homo sapien
gcaccgcgaggcacctgtacctcag

SEQ ID NO: 3068168 - DNA, 25 bp, Homo sapien
taaggagtacagtgcatcctgccat

SEQ ID NO: 3068169 - DNA, 25 bp, Homo sapien
taagaagaaaccatcgagaaggatg

SEQ ID NO: 3068170 - DNA, 25 bp, Homo sapien
gagatacagcctcaaagatgagggt

SEQ ID NO: 3068171 - DNA, 25 bp, Homo sapien
gatgagtgtgataaaagtgcctgcc

SEQ ID NO: 3068172 - DNA, 25 bp, Homo sapien
cgggacccttcacgcactgtcagca

SEQ ID NO: 3068173 - DNA, 25 bp, Homo sapien
gggacccttcacgcactgtcagcag

SEQ ID NO: 3068174 - DNA, 25 bp, Homo sapien
accgggacccttcacgcactgtcag

SEQ ID NO: 3068175 - DNA, 25 bp, Homo sapien
tccaccgggacccttcacgcactgt

SEQ ID NO: 3068176 - DNA, 25 bp, Homo sapien
caggagctgtgcattagaatcaggt

SEQ ID NO: 3068177 - DNA, 25 bp, Homo sapien
gaatcaggtacaaagctcttgtaga

SEQ ID NO: 3068178 - DNA, 25 bp, Homo sapien
ggtacaaagctcttgtagaactgaa

SEQ ID NO: 3068179 - DNA, 25 bp, Homo sapien
gctgtgcattagaatcaggtacaaa

SEQ ID NO: 3068180 - DNA, 25 bp, Homo sapien
ctatttggggaccttcctgtccctg

SEQ ID NO: 3068181 - DNA, 25 bp, Homo sapien
tatttggggaccttcctgtccctga

SEQ ID NO: 3068182 - DNA, 25 bp, Homo sapien
taggaatgcgggaatgcagatggcc

SEQ ID NO: 3068183 - DNA, 25 bp, Homo sapien
ttttctgatctccaaggaggtttcc

SEQ ID NO: 3068184 - DNA, 25 bp, Homo sapien
gctgtcagctcggagaggcgatttt

SEQ ID NO: 3068185 - DNA, 25 bp, Homo sapien
tccaaggaggtttccagcatctttc

SEQ ID NO: 3068186 - DNA, 25 bp, Homo sapien
cgctttctcgaagcgctccaggacg

SEQ ID NO: 3068187 - DNA, 25 bp, Homo sapien
gcaggtggcacgctcaacgcgggga

SEQ ID NO: 3068188 - DNA, 25 bp, Homo sapien
tccgctttctcgaagcgctccagga

SEQ ID NO: 3068189 - DNA, 25 bp, Homo sapien
tctttccgctttctcgaagcgctcc

SEQ ID NO: 3068190 - DNA, 25 bp, Homo sapien
cacacgcatggggaaccattgggtg

SEQ ID NO: 3068191 - DNA, 25 bp, Homo sapien
catgaccagattttgtagaggggaa

SEQ ID NO: 3068192 - DNA, 25 bp, Homo sapien
tcaactcgaatgggccccagatgtg

SEQ ID NO: 3068193 - DNA, 25 bp, Homo sapien
tattgttattaaacatgaccagatt

SEQ ID NO: 3068194 - DNA, 25 bp, Homo sapien
catgctggtcgtgcttcctcactct

SEQ ID NO: 3068195 - DNA, 25 bp, Homo sapien
acagcatgctggtcgtgcttcctca

SEQ ID NO: 3068196 - DNA, 25 bp, Homo sapien
ctcacagcatgctggtcgtgcttcc

SEQ ID NO: 3068197 - DNA, 25 bp, Homo sapien
tgctggtcgtgcttcctcactcttc

SEQ ID NO: 3068198 - DNA, 25 bp, Homo sapien
ctagccagaggagctagaggccagt

SEQ ID NO: 3068199 - DNA, 25 bp, Homo sapien
ccagaggagctagaggccagtggga

SEQ ID NO: 3068200 - DNA, 25 bp, Homo sapien
acctgcctcataggagaggactttg

SEQ ID NO: 3068201 - DNA, 25 bp, Homo sapien
cctgcctcataggagaggactttgt

SEQ ID NO: 3068202 - DNA, 25 bp, Homo sapien
cagccataggccgagtagttcaatt

SEQ ID NO: 3068203 - DNA, 25 bp, Homo sapien
tcgagtaatggaacatgtcccaggg

SEQ ID NO: 3068204 - DNA, 25 bp, Homo sapien
caacctagatgtgacccagatacca

SEQ ID NO: 3068205 - DNA, 25 bp, Homo sapien
gataccaccaagtagaggctcttca

SEQ ID NO: 3068206 - DNA, 25 bp, Homo sapien
cacttcgtgctgccagggctagagc

SEQ ID NO: 3068207 - DNA, 25 bp, Homo sapien
tcacttcgtgctgccagggctagag

SEQ ID NO: 3068208 - DNA, 25 bp, Homo sapien
ctcacttcgtgctgccagggctaga

SEQ ID NO: 3068209 - DNA, 25 bp, Homo sapien
tctgcacaggatcaaccaaggaagt

SEQ ID NO: 3068210 - DNA, 25 bp, Homo sapien
tgctgcgtggagataagctatcgac

SEQ ID NO: 3068211 - DNA, 25 bp, Homo sapien
taagctatcgacttctgcacaggat

SEQ ID NO: 3068212 - DNA, 25 bp, Homo sapien
actttctggttgctgcgtggagata

SEQ ID NO: 3068213 - DNA, 25 bp, Homo sapien
catgagcttttacatcctcattcat

SEQ ID NO: 3068214 - DNA, 25 bp, Homo sapien
atgagcttttacatcctcattcatt

SEQ ID NO: 3068215 - DNA, 25 bp, Homo sapien
tcaagggtcctctccagccccagcc

SEQ ID NO: 3068216 - DNA, 25 bp, Homo sapien
gggtcctctccagccccagccccca

SEQ ID NO: 3068217 - DNA, 25 bp, Homo sapien
caagggtcctctccagccccagccc

SEQ ID NO: 3068218 - DNA, 25 bp, Homo sapien
ggtcctctccagccccagcccccac

SEQ ID NO: 3068219 - DNA, 25 bp, Homo sapien
agatggtgcctctgttcttgaccga

SEQ ID NO: 3068220 - DNA, 25 bp, Homo sapien
caggatggagatggtgcctctgttc

SEQ ID NO: 3068221 - DNA, 25 bp, Homo sapien
gcctctgttcttgaccgaaattgtt

SEQ ID NO: 3068222 - DNA, 25 bp, Homo sapien
gaccgaaattgttttcaggactgta

SEQ ID NO: 3068223 - DNA, 25 bp, Homo sapien
tcttcccgcatcgaatgtgtgcgta

SEQ ID NO: 3068224 - DNA, 25 bp, Homo sapien
catcgaatgtgtgcgtattgatacg

SEQ ID NO: 3068225 - DNA, 25 bp, Homo sapien
agagagcagagccatcttcccgcat

SEQ ID NO: 3068226 - DNA, 25 bp, Homo sapien
tgcgtattgatacgtaaggcaccat

SEQ ID NO: 3068227 - DNA, 25 bp, Homo sapien
gcccatagctgatgcaaagcggagt

SEQ ID NO: 3068228 - DNA, 25 bp, Homo sapien
gaggaatcaaggttctcatcagagt

SEQ ID NO: 3068229 - DNA, 25 bp, Homo sapien
gccagcactgagatctcagcttctg

SEQ ID NO: 3068230 - DNA, 25 bp, Homo sapien
tagctgatgcaaagcggagtctttc

SEQ ID NO: 3068231 - DNA, 25 bp, Homo sapien
gccgccttgccttgaatgtaggtga

SEQ ID NO: 3068232 - DNA, 25 bp, Homo sapien
aagccgccttgccttgaatgtaggt

SEQ ID NO: 3068233 - DNA, 25 bp, Homo sapien
caaagccgccttgccttgaatgtag

SEQ ID NO: 3068234 - DNA, 25 bp, Homo sapien
agccgccttgccttgaatgtaggtg

SEQ ID NO: 3068235 - DNA, 25 bp, Homo sapien
acagaaaccaggtgcgaggcagtga

SEQ ID NO: 3068236 - DNA, 25 bp, Homo sapien
ataaatgaagtatccttcatcccca

SEQ ID NO: 3068237 - DNA, 25 bp, Homo sapien
tgtaaacaatcttccatcgcccact

SEQ ID NO: 3068238 - DNA, 25 bp, Homo sapien
gagatgaggattagaagaacagctt

SEQ ID NO: 3068239 - DNA, 25 bp, Homo sapien
tgatatcgcctccagcttattgaaa

SEQ ID NO: 3068240 - DNA, 25 bp, Homo sapien
tcgccatgacactccctgaaagctt

SEQ ID NO: 3068241 - DNA, 25 bp, Homo sapien
ctttaatgggcttatcttggctctc

SEQ ID NO: 3068242 - DNA, 25 bp, Homo sapien
cttattgaaattccgtgggcctcca

SEQ ID NO: 3068243 - DNA, 25 bp, Homo sapien
cctcccccttcttgtgcatgccttg

SEQ ID NO: 3068244 - DNA, 25 bp, Homo sapien
cccttcttgtgcatgccttgctcat

SEQ ID NO: 3068245 - DNA, 25 bp, Homo sapien
tcccccttcttgtgcatgccttgct

SEQ ID NO: 3068246 - DNA, 25 bp, Homo sapien
cacctcccccttcttgtgcatgcct

SEQ ID NO: 3068247 - DNA, 25 bp, Homo sapien
gggagtgacctaagacgctaaacaa

SEQ ID NO: 3068248 - DNA, 25 bp, Homo sapien
ccatggactattagaggttttcgca

SEQ ID NO: 3068249 - DNA, 25 bp, Homo sapien
gcggaagatccctaaagcaaaacta

SEQ ID NO: 3068250 - DNA, 25 bp, Homo sapien
tcttgctgaacctgatgatcttggc

SEQ ID NO: 3068251 - DNA, 25 bp, Homo sapien
gcccaaccagccaatggccactctt

SEQ ID NO: 3068252 - DNA, 25 bp, Homo sapien
ccaaccagccaatggccactctttc

SEQ ID NO: 3068253 - DNA, 25 bp, Homo sapien
cagcccaaccagccaatggccactc

SEQ ID NO: 3068254 - DNA, 25 bp, Homo sapien
agcccaaccagccaatggccactct

SEQ ID NO: 3068255 - DNA, 25 bp, Homo sapien
cacggagtatgaggcctcttctacc

SEQ ID NO: 3068256 - DNA, 25 bp, Homo sapien
ccacggtgcacggagtatgaggcct

SEQ ID NO: 3068257 - DNA, 25 bp, Homo sapien
cacggtgcacggagtatgaggcctc

SEQ ID NO: 3068258 - DNA, 25 bp, Homo sapien
ggtgcacggagtatgaggcctcttc

SEQ ID NO: 3068259 - DNA, 25 bp, Homo sapien
ttgcacggcgttccagaagtctctg

SEQ ID NO: 3068260 - DNA, 25 bp, Homo sapien
gttgcaggtacagagagaacccggg

SEQ ID NO: 3068261 - DNA, 25 bp, Homo sapien
tccagaaacttagatggctcctcct

SEQ ID NO: 3068262 - DNA, 25 bp, Homo sapien
ggcaggccttgcacggcgttccaga

SEQ ID NO: 3068263 - DNA, 25 bp, Homo sapien
gaagccccattggtggctaggttca

SEQ ID NO: 3068264 - DNA, 25 bp, Homo sapien
ctgggatagggctggactggggcgc

SEQ ID NO: 3068265 - DNA, 25 bp, Homo sapien
agccccattggtggctaggttcagt

SEQ ID NO: 3068266 - DNA, 25 bp, Homo sapien
aagccccattggtggctaggttcag

SEQ ID NO: 3068267 - DNA, 25 bp, Homo sapien
gggaggtgcatgtcgactggtctga

SEQ ID NO: 3068268 - DNA, 25 bp, Homo sapien
catgtcgactggtctgaggcatctc

SEQ ID NO: 3068269 - DNA, 25 bp, Homo sapien
gtgcatgtcgactggtctgaggcat

SEQ ID NO: 3068270 - DNA, 25 bp, Homo sapien
gtcgactggtctgaggcatctccag

SEQ ID NO: 3068271 - DNA, 25 bp, Homo sapien
cgggcccggctcaggtacttgttga

SEQ ID NO: 3068272 - DNA, 25 bp, Homo sapien
tctgcttcattcgtcggttctggaa

SEQ ID NO: 3068273 - DNA, 25 bp, Homo sapien
cagggtggcggcaatctccaccctc

SEQ ID NO: 3068274 - DNA, 25 bp, Homo sapien
ttgacctgtgtttcattgagctcca

SEQ ID NO: 3068275 - DNA, 25 bp, Homo sapien
aaaggccaggtcaattctctcacct

SEQ ID NO: 3068276 - DNA, 25 bp, Homo sapien
gaaaggccaggtcaattctctcacc

SEQ ID NO: 3068277 - DNA, 25 bp, Homo sapien
cccagcccagacccaggacatgtca

SEQ ID NO: 3068278 - DNA, 25 bp, Homo sapien
ctgaaagagaagaacccagcccaga

SEQ ID NO: 3068279 - DNA, 25 bp, Homo sapien
gaaagagaagaacccagcccagacc

SEQ ID NO: 3068280 - DNA, 25 bp, Homo sapien
aacccagcccagacccaggacatgt

SEQ ID NO: 3068281 - DNA, 25 bp, Homo sapien
ggagatcagcataggccggtgcaaa

SEQ ID NO: 3068282 - DNA, 25 bp, Homo sapien
cgcggtctgctcgttcccataaggg

SEQ ID NO: 3068283 - DNA, 25 bp, Homo sapien
cgtagctcgagggatgaaaatagcc

SEQ ID NO: 3068284 - DNA, 25 bp, Homo sapien
gcttgcatagctgtcaaccgcctga

SEQ ID NO: 3068285 - DNA, 25 bp, Homo sapien
ttttatgagggaaaataagatacat

SEQ ID NO: 3068286 - DNA, 25 bp, Homo sapien
tatgagggaaaataagatacatgac

SEQ ID NO: 3068287 - DNA, 25 bp, Homo sapien
agggaaaataagatacatgacatta

SEQ ID NO: 3068288 - DNA, 25 bp, Homo sapien
tttcatacctatatattttatgagg

SEQ ID NO: 3068289 - DNA, 25 bp, Homo sapien
gatagccccgtagtgtctgtttctg

SEQ ID NO: 3068290 - DNA, 25 bp, Homo sapien
gagatcgatccttgcttcccgctta

SEQ ID NO: 3068291 - DNA, 25 bp, Homo sapien
aagtcagactggatgaggcacaccc

SEQ ID NO: 3068292 - DNA, 25 bp, Homo sapien
tatgcaaagggcctgtctagtcctc

SEQ ID NO: 3068293 - DNA, 25 bp, Homo sapien
taaagacatttatttaatctatgaa

SEQ ID NO: 3068294 - DNA, 25 bp, Homo sapien
agacatttatttaatctatgaaaat

SEQ ID NO: 3068295 - DNA, 25 bp, Homo sapien
aaagacatttatttaatctatgaaa

SEQ ID NO: 3068296 - DNA, 25 bp, Homo sapien
tataaagacatttatttaatctatg

SEQ ID NO: 3068297 - DNA, 25 bp, Homo sapien
tcctgagatttcattggaaggagtc

SEQ ID NO: 3068298 - DNA, 25 bp, Homo sapien
taaaagataaccgagtgcccaatat

SEQ ID NO: 3068299 - DNA, 25 bp, Homo sapien
cattggaaggagtctaccaaacgga

SEQ ID NO: 3068300 - DNA, 25 bp, Homo sapien
agggagtggattaaacgctaattca

SEQ ID NO: 3068301 - DNA, 25 bp, Homo sapien
tgggagaggctcgatttttccagta

SEQ ID NO: 3068302 - DNA, 25 bp, Homo sapien
cacataagtctatgcgactgagggt

SEQ ID NO: 3068303 - DNA, 25 bp, Homo sapien
gaggctcgatttttccagtagacgg

SEQ ID NO: 3068304 - DNA, 25 bp, Homo sapien
gatttttccagtagacggccaagga

SEQ ID NO: 3068305 - DNA, 25 bp, Homo sapien
gagcgtactggtgaaaaaatccagc

SEQ ID NO: 3068306 - DNA, 25 bp, Homo sapien
tagggaaactgcaggtcgatggcac

SEQ ID NO: 3068307 - DNA, 25 bp, Homo sapien
gaccgggctgtcgagagaaccctgt

SEQ ID NO: 3068308 - DNA, 25 bp, Homo sapien
gctgtcgagagaaccctgtaggcta

SEQ ID NO: 3068309 - DNA, 25 bp, Homo sapien
ctggagacaggagtcggccgcgaag

SEQ ID NO: 3068310 - DNA, 25 bp, Homo sapien
agtcggccgcgaagaagttgaggtc

SEQ ID NO: 3068311 - DNA, 25 bp, Homo sapien
aaaggtgaatcctggcgccccgaga

SEQ ID NO: 3068312 - DNA, 25 bp, Homo sapien
aagacgtcttctggcaatggcccgg

SEQ ID NO: 3068313 - DNA, 25 bp, Homo sapien
ctctaagcgaacggctaaaggccgg

SEQ ID NO: 3068314 - DNA, 25 bp, Homo sapien
gtctgccgcttgtgcttcatgcgcc

SEQ ID NO: 3068315 - DNA, 25 bp, Homo sapien
ctggccgcgggttcctcggcagggt

SEQ ID NO: 3068316 - DNA, 25 bp, Homo sapien
tcggtgctgcgtctgccgcttgtgc

SEQ ID NO: 3068317 - DNA, 25 bp, Homo sapien
agggtcgcagatgtcctccagggct

SEQ ID NO: 3068318 - DNA, 25 bp, Homo sapien
cagcaaggccgcgatctcgacgcgg

SEQ ID NO: 3068319 - DNA, 25 bp, Homo sapien
tcgacgcggcgtggccggcacaggt

SEQ ID NO: 3068320 - DNA, 25 bp, Homo sapien
cagcagctgcgtgttggtgtaagcc

SEQ ID NO: 3068321 - DNA, 25 bp, Homo sapien
tgcctttcggtgaggtccagcaagg

SEQ ID NO: 3068322 - DNA, 25 bp, Homo sapien
caaaaccagtatcacctctcccctt

SEQ ID NO: 3068323 - DNA, 25 bp, Homo sapien
agggaaaacaggctcggcgtcatag

SEQ ID NO: 3068324 - DNA, 25 bp, Homo sapien
cagcccaacctcagttcggactacc

SEQ ID NO: 3068325 - DNA, 25 bp, Homo sapien
ctcggcgtcatagcgggccgtgtac

SEQ ID NO: 3068326 - DNA, 25 bp, Homo sapien
ccgggtcagggcaaagcattcagag

SEQ ID NO: 3068327 - DNA, 25 bp, Homo sapien
tcaattcggaactttccaactcaac

SEQ ID NO: 3068328 - DNA, 25 bp, Homo sapien
agagcggctcccttcggcgccggaa

SEQ ID NO: 3068329 - DNA, 25 bp, Homo sapien
caaccggagcgagggtcagaaagat

SEQ ID NO: 3068330 - DNA, 25 bp, Homo sapien
aaggaagtcagacactcggcgagcg

SEQ ID NO: 3068331 - DNA, 25 bp, Homo sapien
cttcggctcgcttttggctcctggg

SEQ ID NO: 3068332 - DNA, 25 bp, Homo sapien
taatgtcgactccttgattgatgaa

SEQ ID NO: 3068333 - DNA, 25 bp, Homo sapien
agagcaggcccatcttcggctcgct

SEQ ID NO: 3068334 - DNA, 25 bp, Homo sapien
tttataaacccaatctccctctcaa

SEQ ID NO: 3068335 - DNA, 25 bp, Homo sapien
tgtttataaacccaatctccctctc

SEQ ID NO: 3068336 - DNA, 25 bp, Homo sapien
gtttataaacccaatctccctctca

SEQ ID NO: 3068337 - DNA, 25 bp, Homo sapien
ctgtttataaacccaatctccctct

SEQ ID NO: 3068338 - DNA, 25 bp, Homo sapien
cctcctgcaccccccccgatttatg

SEQ ID NO: 3068339 - DNA, 25 bp, Homo sapien
tttatgtaatggagcgattttggga

SEQ ID NO: 3068340 - DNA, 25 bp, Homo sapien
tgcaccccccccgatttatgtaatg

SEQ ID NO: 3068341 - DNA, 25 bp, Homo sapien
taatggagcgattttgggaggggga

SEQ ID NO: 3068342 - DNA, 25 bp, Homo sapien
tgtcttctcgctcttatcggctcca

SEQ ID NO: 3068343 - DNA, 25 bp, Homo sapien
tcaacgaattagctccatatttcag

SEQ ID NO: 3068344 - DNA, 25 bp, Homo sapien
tagaattatgcagctcttcagcaag

SEQ ID NO: 3068345 - DNA, 25 bp, Homo sapien
gcagccatcgcttctctttcaacga

SEQ ID NO: 3068346 - DNA, 25 bp, Homo sapien
atgaagttttcccaaggatgatgga

SEQ ID NO: 3068347 - DNA, 25 bp, Homo sapien
aaggatgatggaaacagagccgcac

SEQ ID NO: 3068348 - DNA, 25 bp, Homo sapien
gatggaaacagagccgcacattagc

SEQ ID NO: 3068349 - DNA, 25 bp, Homo sapien
tgaagttttcccaaggatgatggaa

SEQ ID NO: 3068350 - DNA, 25 bp, Homo sapien
tcgtggaagaaaccgtaatcggcca

SEQ ID NO: 3068351 - DNA, 25 bp, Homo sapien
catggacgctgtggccaaaggagct

SEQ ID NO: 3068352 - DNA, 25 bp, Homo sapien
caaaggagctaacagacgaaaggtc

SEQ ID NO: 3068353 - DNA, 25 bp, Homo sapien
tccggaagaggattgtgaagtttag

SEQ ID NO: 3068354 - DNA, 25 bp, Homo sapien
gaatgggcaaaccttcagtcctaac

SEQ ID NO: 3068355 - DNA, 25 bp, Homo sapien
caacaaaagtgtcctgtcaggaggc

SEQ ID NO: 3068356 - DNA, 25 bp, Homo sapien
tcacgttaagtcaagagagcaacag

SEQ ID NO: 3068357 - DNA, 25 bp, Homo sapien
gaaaagtatagaacctcgtgtcacc

SEQ ID NO: 3068358 - DNA, 25 bp, Homo sapien
ttaaaagcaacctctcaggccaggg

SEQ ID NO: 3068359 - DNA, 25 bp, Homo sapien
ctccaggccggttctgaccaggaag

SEQ ID NO: 3068360 - DNA, 25 bp, Homo sapien
cctttccgatgggttggcaggcaga

SEQ ID NO: 3068361 - DNA, 25 bp, Homo sapien
ccaacttggtagtgctggagccctg

SEQ ID NO: 3068362 - DNA, 25 bp, Homo sapien
gtgtgttaatttgggcgcttcttgg

SEQ ID NO: 3068363 - DNA, 25 bp, Homo sapien
cacaggtgtgttaatttgggcgctt

SEQ ID NO: 3068364 - DNA, 25 bp, Homo sapien
tcacaggtgtgttaatttgggcgct

SEQ ID NO: 3068365 - DNA, 25 bp, Homo sapien
caggtgtgttaatttgggcgcttct

SEQ ID NO: 3068366 - DNA, 25 bp, Homo sapien
cattctggtgggctttaccgaaggc

SEQ ID NO: 3068367 - DNA, 25 bp, Homo sapien
tgtaaggcgttcatgaagccggccg

SEQ ID NO: 3068368 - DNA, 25 bp, Homo sapien
acgtgcggctcatactcgggcgccg

SEQ ID NO: 3068369 - DNA, 25 bp, Homo sapien
tgccctgcatggtgggcgtcccgta

SEQ ID NO: 3068370 - DNA, 25 bp, Homo sapien
cacaggtagcggttaaaatggaact

SEQ ID NO: 3068371 - DNA, 25 bp, Homo sapien
gcgctcgtgtacgccgtccgcgccc

SEQ ID NO: 3068372 - DNA, 25 bp, Homo sapien
tgcgcgctcgtgtacgccgtccgcg

SEQ ID NO: 3068373 - DNA, 25 bp, Homo sapien
ctacacggcgaggccggcacaggta

SEQ ID NO: 3068374 - DNA, 25 bp, Homo sapien
accgcccccgctgccaccactgcct

SEQ ID NO: 3068375 - DNA, 25 bp, Homo sapien
ccgccaccgcccccgctgccaccac

SEQ ID NO: 3068376 - DNA, 25 bp, Homo sapien
gccaccgcccccgctgccaccactg

SEQ ID NO: 3068377 - DNA, 25 bp, Homo sapien
caccgcccccgctgccaccactgcc

SEQ ID NO: 3068378 - DNA, 25 bp, Homo sapien
tcagcttggacgtttgcctcgactc

SEQ ID NO: 3068379 - DNA, 25 bp, Homo sapien
tgctgccagggtacgaggaatagcc

SEQ ID NO: 3068380 - DNA, 25 bp, Homo sapien
gactgcagcgagcaagctgagcgct

SEQ ID NO: 3068381 - DNA, 25 bp, Homo sapien
ccattactgctgttgctagtggcac

SEQ ID NO: 3068382 - DNA, 25 bp, Homo sapien
tgataccctcaggaccggacattgg

SEQ ID NO: 3068383 - DNA, 25 bp, Homo sapien
aggaccggacattggcaaccctggg

SEQ ID NO: 3068384 - DNA, 25 bp, Homo sapien
acttggaaaggcctgataccctcag

SEQ ID NO: 3068385 - DNA, 25 bp, Homo sapien
tccggggtctgttccaagcggctga

SEQ ID NO: 3068386 - DNA, 25 bp, Homo sapien
cggtttaggtctcttgcccaagcaa

SEQ ID NO: 3068387 - DNA, 25 bp, Homo sapien
taaaacctccatactgccatgtgtg

SEQ ID NO: 3068388 - DNA, 25 bp, Homo sapien
gattgtttcaatttcctgggccacg

SEQ ID NO: 3068389 - DNA, 25 bp, Homo sapien
ttgctcagccaaacctgggatcggg

SEQ ID NO: 3068390 - DNA, 25 bp, Homo sapien
aagagcaagcgatcaggacaccaaa

SEQ ID NO: 3068391 - DNA, 25 bp, Homo sapien
gcttcgggactttgctcagcagggc

SEQ ID NO: 3068392 - DNA, 25 bp, Homo sapien
ataggaaagaatggagactccgccg

SEQ ID NO: 3068393 - DNA, 25 bp, Homo sapien
ggttatcggaggcaggttcccagca

SEQ ID NO: 3068394 - DNA, 25 bp, Homo sapien
gagagaaaggtgctaaggggaccca

SEQ ID NO: 3068395 - DNA, 25 bp, Homo sapien
ctggcggacgggacagtgggaagag

SEQ ID NO: 3068396 - DNA, 25 bp, Homo sapien
tgggaagagagaaaggtgctaaggg

SEQ ID NO: 3068397 - DNA, 25 bp, Homo sapien
tggcggacgggacagtgggaagaga

SEQ ID NO: 3068398 - DNA, 25 bp, Homo sapien
ttcacaaactgatagcctatttcag

SEQ ID NO: 3068399 - DNA, 25 bp, Homo sapien
tcattgagacatactctccgccatt

SEQ ID NO: 3068400 - DNA, 25 bp, Homo sapien
aagcttgtgaactcttcttgaaccg

SEQ ID NO: 3068401 - DNA, 25 bp, Homo sapien
gtcatatgggccataaatcattgag

SEQ ID NO: 3068402 - DNA, 25 bp, Homo sapien
taatatatattcacatcgagcccca

SEQ ID NO: 3068403 - DNA, 25 bp, Homo sapien
cttagccaccgacgaggggagaaca

SEQ ID NO: 3068404 - DNA, 25 bp, Homo sapien
agcgagcggcaggcgacaaatctcc

SEQ ID NO: 3068405 - DNA, 25 bp, Homo sapien
acatcgagccccagagcgagcggca

SEQ ID NO: 3068406 - DNA, 25 bp, Homo sapien
ccagtctctaaccaagggagaggga

SEQ ID NO: 3068407 - DNA, 25 bp, Homo sapien
tttaaatctagattggagggacagg

SEQ ID NO: 3068408 - DNA, 25 bp, Homo sapien
cattcgcaattggaacaccaggact

SEQ ID NO: 3068409 - DNA, 25 bp, Homo sapien
taccccactagtgaactattatgct

SEQ ID NO: 3068410 - DNA, 25 bp, Homo sapien
aagaggtgataaggacatttgtact

SEQ ID NO: 3068411 - DNA, 25 bp, Homo sapien
gctaagaggtgataaggacatttgt

SEQ ID NO: 3068412 - DNA, 25 bp, Homo sapien
ctccgaataggcagaaggggctaag

SEQ ID NO: 3068413 - DNA, 25 bp, Homo sapien
gggctaagaggtgataaggacattt

SEQ ID NO: 3068414 - DNA, 25 bp, Homo sapien
gcatgtggctgcaaaaagtctgtcc

SEQ ID NO: 3068415 - DNA, 25 bp, Homo sapien
caactctttgtggtccctcgggcta

SEQ ID NO: 3068416 - DNA, 25 bp, Homo sapien
ggagaacctgatcgcttttgggact

SEQ ID NO: 3068417 - DNA, 25 bp, Homo sapien
gactgcgcagctttgcctctaggaa

SEQ ID NO: 3068418 - DNA, 25 bp, Homo sapien
gaggtctctggcgagcaggcgggct

SEQ ID NO: 3068419 - DNA, 25 bp, Homo sapien
aggtctctggcgagcaggcgggctg

SEQ ID NO: 3068420 - DNA, 25 bp, Homo sapien
tctctggcgagcaggcgggctgccc

SEQ ID NO: 3068421 - DNA, 25 bp, Homo sapien
gtctctggcgagcaggcgggctgcc

SEQ ID NO: 3068422 - DNA, 25 bp, Homo sapien
ttgggagctaggacctgtaagcctg

SEQ ID NO: 3068423 - DNA, 25 bp, Homo sapien
agatgtttggcgatgtgtttcttcc

SEQ ID NO: 3068424 - DNA, 25 bp, Homo sapien
agcttcactgcccaactttgtagcc

SEQ ID NO: 3068425 - DNA, 25 bp, Homo sapien
caaaatttgcctggcccaaaggcta

SEQ ID NO: 3068426 - DNA, 25 bp, Homo sapien
agtgggagtcttccaccatgcaggc

SEQ ID NO: 3068427 - DNA, 25 bp, Homo sapien
tgagaagggaggcacctgctatcac

SEQ ID NO: 3068428 - DNA, 25 bp, Homo sapien
tgagaagccaccactcctttggaac

SEQ ID NO: 3068429 - DNA, 25 bp, Homo sapien
tggctaccctagaggagacccggta

SEQ ID NO: 3068430 - DNA, 25 bp, Homo sapien
acattcctccacactcgtcctccac

SEQ ID NO: 3068431 - DNA, 25 bp, Homo sapien
cattcctccacactcgtcctccacc

SEQ ID NO: 3068432 - DNA, 25 bp, Homo sapien
cacattcctccacactcgtcctcca

SEQ ID NO: 3068433 - DNA, 25 bp, Homo sapien
atcttcgtcttcaattcggatcccg

SEQ ID NO: 3068434 - DNA, 25 bp, Homo sapien
tcatcttcgtcttcaattcggatcc

SEQ ID NO: 3068435 - DNA, 25 bp, Homo sapien
cttcgtcttcaattcggatcccggc

SEQ ID NO: 3068436 - DNA, 25 bp, Homo sapien
tcttcgtcttcaattcggatcccgg

SEQ ID NO: 3068437 - DNA, 25 bp, Homo sapien
gtgcgcgcgggggccgactgccagg

SEQ ID NO: 3068438 - DNA, 25 bp, Homo sapien
ctgtgcggtcttccgctagggcgcg

SEQ ID NO: 3068439 - DNA, 25 bp, Homo sapien
tgcggtcttccgctagggcgcgggc

SEQ ID NO: 3068440 - DNA, 25 bp, Homo sapien
ggtcttccgctagggcgcgggcaac

SEQ ID NO: 3068441 - DNA, 25 bp, Homo sapien
cttctgcttagttcgtggaggtgca

SEQ ID NO: 3068442 - DNA, 25 bp, Homo sapien
gggctctggcagaactgggcaaccc

SEQ ID NO: 3068443 - DNA, 25 bp, Homo sapien
cgctggggccgccttcaagggctct

SEQ ID NO: 3068444 - DNA, 25 bp, Homo sapien
tgccgcttcccagggagacccactg

SEQ ID NO: 3068445 - DNA, 25 bp, Homo sapien
gctgccgcttcccagggagacccac

SEQ ID NO: 3068446 - DNA, 25 bp, Homo sapien
agaatagcctgcactgatcctcctc

SEQ ID NO: 3068447 - DNA, 25 bp, Homo sapien
aaagtactcagaatagcctgcactg

SEQ ID NO: 3068448 - DNA, 25 bp, Homo sapien
ccctggaaagtactcagaatagcct

SEQ ID NO: 3068449 - DNA, 25 bp, Homo sapien
caggccctggaaagtactcagaata

SEQ ID NO: 3068450 - DNA, 25 bp, Homo sapien
ccccttgcagatccgggagagacgg

SEQ ID NO: 3068451 - DNA, 25 bp, Homo sapien
ccaacagccggtccaaggagatttg

SEQ ID NO: 3068452 - DNA, 25 bp, Homo sapien
gcagatccgggagagacggctaaca

SEQ ID NO: 3068453 - DNA, 25 bp, Homo sapien
ccattcatgacgaagggcttcttcc

SEQ ID NO: 3068454 - DNA, 25 bp, Homo sapien
atccccttgcagctaaaccaccaca

SEQ ID NO: 3068455 - DNA, 25 bp, Homo sapien
tagagacattccttaggggggcata

SEQ ID NO: 3068456 - DNA, 25 bp, Homo sapien
tttagagacattccttaggggggca

SEQ ID NO: 3068457 - DNA, 25 bp, Homo sapien
tcaactggggctgcggcatcccctt

SEQ ID NO: 3068458 - DNA, 25 bp, Homo sapien
ttttttacgagtctcccagcagcat

SEQ ID NO: 3068459 - DNA, 25 bp, Homo sapien
catttaaacggacagttcagcagct

SEQ ID NO: 3068460 - DNA, 25 bp, Homo sapien
ccaggtccacgatgatttttttacg

SEQ ID NO: 3068461 - DNA, 25 bp, Homo sapien
caatccgaccgaaataaagctcgcc

SEQ ID NO: 3068462 - DNA, 25 bp, Homo sapien
ccagcctccaactaccggagctgca

SEQ ID NO: 3068463 - DNA, 25 bp, Homo sapien
tacccagcctccaactaccggagct

SEQ ID NO: 3068464 - DNA, 25 bp, Homo sapien
agcctccaactaccggagctgcaag

SEQ ID NO: 3068465 - DNA, 25 bp, Homo sapien
acccagcctccaactaccggagctg

SEQ ID NO: 3068466 - DNA, 25 bp, Homo sapien
cactggctagcttctttgtaatata

SEQ ID NO: 3068467 - DNA, 25 bp, Homo sapien
gagtttgagctatggcactggctag

SEQ ID NO: 3068468 - DNA, 25 bp, Homo sapien
ttgagctatggcactggctagcttc

SEQ ID NO: 3068469 - DNA, 25 bp, Homo sapien
ttgtcagagtttgagctatggcact

SEQ ID NO: 3068470 - DNA, 25 bp, Homo sapien
agaggaaagcgataccttcttatgc

SEQ ID NO: 3068471 - DNA, 25 bp, Homo sapien
taccttcttatgctgcgaggaaaga

SEQ ID NO: 3068472 - DNA, 25 bp, Homo sapien
cacctcagaggaaagcgataccttc

SEQ ID NO: 3068473 - DNA, 25 bp, Homo sapien
gaaagcgataccttcttatgctgcg

SEQ ID NO: 3068474 - DNA, 25 bp, Homo sapien
gaaacgtggatccatcttcgccaaa

SEQ ID NO: 3068475 - DNA, 25 bp, Homo sapien
ttttcagtctaggagagaggcttct

SEQ ID NO: 3068476 - DNA, 25 bp, Homo sapien
tgtcgaggtaatggtcgccaccgag

SEQ ID NO: 3068477 - DNA, 25 bp, Homo sapien
tattcacacatacgaagggttctag

SEQ ID NO: 3068478 - DNA, 25 bp, Homo sapien
ccgtggccctctattgtcatttcta

SEQ ID NO: 3068479 - DNA, 25 bp, Homo sapien
cagatagatttttccggggcccagg

SEQ ID NO: 3068480 - DNA, 25 bp, Homo sapien
tttgaatcttgcttctgggggggcc

SEQ ID NO: 3068481 - DNA, 25 bp, Homo sapien
cccctcttctgcgtttattcgtata

SEQ ID NO: 3068482 - DNA, 25 bp, Homo sapien
gccggccagggggccctccggctga

SEQ ID NO: 3068483 - DNA, 25 bp, Homo sapien
gcgcgggggcctccattgggccggc

SEQ ID NO: 3068484 - DNA, 25 bp, Homo sapien
ccggccagggggccctccggctgag

SEQ ID NO: 3068485 - DNA, 25 bp, Homo sapien
cgggggcctccattgggccggccag

SEQ ID NO: 3068486 - DNA, 25 bp, Homo sapien
gcgtgggcgatctccaccctccggc

SEQ ID NO: 3068487 - DNA, 25 bp, Homo sapien
gagcgcgtgggcgatctccaccctc

SEQ ID NO: 3068488 - DNA, 25 bp, Homo sapien
acctgctggcgcgtgtaggcggtcc

SEQ ID NO: 3068489 - DNA, 25 bp, Homo sapien
ggtccgagagcgcttgggctccccg

SEQ ID NO: 3068490 - DNA, 25 bp, Homo sapien
ccgtgctcacgtgaactttgcgcat

SEQ ID NO: 3068491 - DNA, 25 bp, Homo sapien
acgacgggctctttgcacgcggagt

SEQ ID NO: 3068492 - DNA, 25 bp, Homo sapien
atccaggggtagacgacgggctctt

SEQ ID NO: 3068493 - DNA, 25 bp, Homo sapien
tcacgtgaactttgcgcatccaggg

SEQ ID NO: 3068494 - DNA, 25 bp, Homo sapien
ctgctgctgaccgcctcgcagcgct

SEQ ID NO: 3068495 - DNA, 25 bp, Homo sapien
gctgctgctgaccgcctcgcagcgc

SEQ ID NO: 3068496 - DNA, 25 bp, Homo sapien
ggctgctgctgaccgcctcgcagcg

SEQ ID NO: 3068497 - DNA, 25 bp, Homo sapien
agggtcccggcaggccgcgtagcgc

SEQ ID NO: 3068498 - DNA, 25 bp, Homo sapien
ctggaagctgctctctcgcctctgg

SEQ ID NO: 3068499 - DNA, 25 bp, Homo sapien
tcgcctctggccgccggcgtagtac

SEQ ID NO: 3068500 - DNA, 25 bp, Homo sapien
gctctctcgcctctggccgccggcg

SEQ ID NO: 3068501 - DNA, 25 bp, Homo sapien
tggaagctgctctctcgcctctggc

SEQ ID NO: 3068502 - DNA, 25 bp, Homo sapien
taatcgctctgtgaatattcctcgc

SEQ ID NO: 3068503 - DNA, 25 bp, Homo sapien
tggtcgctgggtaggtaatcgctct

SEQ ID NO: 3068504 - DNA, 25 bp, Homo sapien
tttgagttgatcaaaaaagaactca

SEQ ID NO: 3068505 - DNA, 25 bp, Homo sapien
gaatattcctcgcatggagggaact

SEQ ID NO: 3068506 - DNA, 25 bp, Homo sapien
taatttctgggaattgcccacaaaa

SEQ ID NO: 3068507 - DNA, 25 bp, Homo sapien
atttctgggaattgcccacaaaata

SEQ ID NO: 3068508 - DNA, 25 bp, Homo sapien
ctgggaattgcccacaaaatatact

SEQ ID NO: 3068509 - DNA, 25 bp, Homo sapien
ggaattgcccacaaaatatactaaa

SEQ ID NO: 3068510 - DNA, 25 bp, Homo sapien
acgtgatcctccgagccaatggccg

SEQ ID NO: 3068511 - DNA, 25 bp, Homo sapien
cccacgtgatcctccgagccaatgg

SEQ ID NO: 3068512 - DNA, 25 bp, Homo sapien
tgaacaaagttaggcgcccacgtga

SEQ ID NO: 3068513 - DNA, 25 bp, Homo sapien
gtgaacaaagttaggcgcccacgtg

SEQ ID NO: 3068514 - DNA, 25 bp, Homo sapien
gggccagagcacagagcttggggct

SEQ ID NO: 3068515 - DNA, 25 bp, Homo sapien
agagcacagagcttggggcttttct

SEQ ID NO: 3068516 - DNA, 25 bp, Homo sapien
gccagagcacagagcttggggcttt

SEQ ID NO: 3068517 - DNA, 25 bp, Homo sapien
cagagcacagagcttggggcttttc

SEQ ID NO: 3068518 - DNA, 25 bp, Homo sapien
tgggtccgagacgttctaattgtcg

SEQ ID NO: 3068519 - DNA, 25 bp, Homo sapien
catgggtccgagacgttctaattgt

SEQ ID NO: 3068520 - DNA, 25 bp, Homo sapien
gacgttctaattgtcgccgcctccg

SEQ ID NO: 3068521 - DNA, 25 bp, Homo sapien
tccgagacgttctaattgtcgccgc

SEQ ID NO: 3068522 - DNA, 25 bp, Homo sapien
tctgaactgaaacggaaaggcggcc

SEQ ID NO: 3068523 - DNA, 25 bp, Homo sapien
ggcggcctcagcatccgtttgttaa

SEQ ID NO: 3068524 - DNA, 25 bp, Homo sapien
gatacagccatagaggtgacccaca

SEQ ID NO: 3068525 - DNA, 25 bp, Homo sapien
gacaataacactccttggtaatcga

SEQ ID NO: 3068526 - DNA, 25 bp, Homo sapien
cctagatacgaatttgtgaccacaa

SEQ ID NO: 3068527 - DNA, 25 bp, Homo sapien
gatctacagggtatatacagaagac

SEQ ID NO: 3068528 - DNA, 25 bp, Homo sapien
gagcggagtgtttatgtcaactaca

SEQ ID NO: 3068529 - DNA, 25 bp, Homo sapien
tcaactacatattcccctagatacg

SEQ ID NO: 3068530 - DNA, 25 bp, Homo sapien
cataggccacttagggtctccagga

SEQ ID NO: 3068531 - DNA, 25 bp, Homo sapien
gaacagggtttatgggcgactccca

SEQ ID NO: 3068532 - DNA, 25 bp, Homo sapien
ggtatccttgatcctggcgcccaag

SEQ ID NO: 3068533 - DNA, 25 bp, Homo sapien
gacaaaatgcgctgctaggatcccc

SEQ ID NO: 3068534 - DNA, 25 bp, Homo sapien
aagggactcagcgagggagcgaaac

SEQ ID NO: 3068535 - DNA, 25 bp, Homo sapien
gggagaagggactcagcgagggagc

SEQ ID NO: 3068536 - DNA, 25 bp, Homo sapien
actcagcgagggagcgaaaccgaag

SEQ ID NO: 3068537 - DNA, 25 bp, Homo sapien
accgaaggcccgagcggaggcgagt

SEQ ID NO: 3068538 - DNA, 25 bp, Homo sapien
ttctattgggatgcctggaagggct

SEQ ID NO: 3068539 - DNA, 25 bp, Homo sapien
tcttctattgggatgcctggaaggg

SEQ ID NO: 3068540 - DNA, 25 bp, Homo sapien
cttctattgggatgcctggaagggc

SEQ ID NO: 3068541 - DNA, 25 bp, Homo sapien
cgagtggggccgaggttgccggatg

SEQ ID NO: 3068542 - DNA, 25 bp, Homo sapien
ggccgaggttgccggatgaggagac

SEQ ID NO: 3068543 - DNA, 25 bp, Homo sapien
ttcttcatttttgacacccgagtgg

SEQ ID NO: 3068544 - DNA, 25 bp, Homo sapien
tcttcatttttgacacccgagtggg

SEQ ID NO: 3068545 - DNA, 25 bp, Homo sapien
atggcgagcagtagaatgggctgac

SEQ ID NO: 3068546 - DNA, 25 bp, Homo sapien
ctatggcgagcagtagaatgggctg

SEQ ID NO: 3068547 - DNA, 25 bp, Homo sapien
tatggcgagcagtagaatgggctga

SEQ ID NO: 3068548 - DNA, 25 bp, Homo sapien
tgcggacaacccgtgcgctttcggt

SEQ ID NO: 3068549 - DNA, 25 bp, Homo sapien
gatgcatgcacctaaggacaagcct

SEQ ID NO: 3068550 - DNA, 25 bp, Homo sapien
ctaaggcggactctactggcagctc

SEQ ID NO: 3068551 - DNA, 25 bp, Homo sapien
gcagctccgggatgttacagcctct

SEQ ID NO: 3068552 - DNA, 25 bp, Homo sapien
cagggatccagggatcgttgcgacc

SEQ ID NO: 3068553 - DNA, 25 bp, Homo sapien
gggatcgttgcgaccaaaaccagcc

SEQ ID NO: 3068554 - DNA, 25 bp, Homo sapien
ctgtgctccgaagccgcaaggctca

SEQ ID NO: 3068555 - DNA, 25 bp, Homo sapien
tgcgaccaaaaccagccgctgtgct

SEQ ID NO: 3068556 - DNA, 25 bp, Homo sapien
ggttggtcccccaagctgagaagtc

SEQ ID NO: 3068557 - DNA, 25 bp, Homo sapien
gttggtcccccaagctgagaagtcc

SEQ ID NO: 3068558 - DNA, 25 bp, Homo sapien
tggtcccccaagctgagaagtccat

SEQ ID NO: 3068559 - DNA, 25 bp, Homo sapien
caggttggtcccccaagctgagaag

SEQ ID NO: 3068560 - DNA, 25 bp, Homo sapien
tatagctcaagaggttgaagcctgg

SEQ ID NO: 3068561 - DNA, 25 bp, Homo sapien
cagagggtaccggcttggcttatag

SEQ ID NO: 3068562 - DNA, 25 bp, Homo sapien
cttggcttatagctcaagaggttga

SEQ ID NO: 3068563 - DNA, 25 bp, Homo sapien
ctgccccaggttgaagatttggcca

SEQ ID NO: 3068564 - DNA, 25 bp, Homo sapien
aagatatccagcagtgaagtggccc

SEQ ID NO: 3068565 - DNA, 25 bp, Homo sapien
atgtcataaagtttctttccggagg

SEQ ID NO: 3068566 - DNA, 25 bp, Homo sapien
gaagatatccagcagtgaagtggcc

SEQ ID NO: 3068567 - DNA, 25 bp, Homo sapien
cataaagtttctttccggaggatgg

SEQ ID NO: 3068568 - DNA, 25 bp, Homo sapien
ctaaatttccgctggcactgaggga

SEQ ID NO: 3068569 - DNA, 25 bp, Homo sapien
cttcctggtccctaaatttccgctg

SEQ ID NO: 3068570 - DNA, 25 bp, Homo sapien
tcctggtccctaaatttccgctggc

SEQ ID NO: 3068571 - DNA, 25 bp, Homo sapien
gtccctaaatttccgctggcactga

SEQ ID NO: 3068572 - DNA, 25 bp, Homo sapien
cttttccccacaaagtcagacactc

SEQ ID NO: 3068573 - DNA, 25 bp, Homo sapien
ccttttccccacaaagtcagacact

SEQ ID NO: 3068574 - DNA, 25 bp, Homo sapien
gaaatatcgtaacacaaggcgaggc

SEQ ID NO: 3068575 - DNA, 25 bp, Homo sapien
tgtttccgtatactcccagaccagg

SEQ ID NO: 3068576 - DNA, 25 bp, Homo sapien
aaacactggcggatttgggacaagc

SEQ ID NO: 3068577 - DNA, 25 bp, Homo sapien
gacagatttcacacgtagcacagca

SEQ ID NO: 3068578 - DNA, 25 bp, Homo sapien
tcagggctggaaggcgctgccagct

SEQ ID NO: 3068579 - DNA, 25 bp, Homo sapien
ctggaaggcgctgccagctgtagcc

SEQ ID NO: 3068580 - DNA, 25 bp, Homo sapien
ggctggaaggcgctgccagctgtag

SEQ ID NO: 3068581 - DNA, 25 bp, Homo sapien
agggctggaaggcgctgccagctgt

SEQ ID NO: 3068582 - DNA, 25 bp, Homo sapien
cagggtctggtagcgggtatacgcg

SEQ ID NO: 3068583 - DNA, 25 bp, Homo sapien
gcgccgtcgccgggtcaggtagcgg

SEQ ID NO: 3068584 - DNA, 25 bp, Homo sapien
caggcagagtgcgtgggcgatctcg

SEQ ID NO: 3068585 - DNA, 25 bp, Homo sapien
ctggtagcgggtatacgcggtccgg

SEQ ID NO: 3068586 - DNA, 25 bp, Homo sapien
gaggaaagccgcaaggcaacattat

SEQ ID NO: 3068587 - DNA, 25 bp, Homo sapien
caaggcaacattattccggttaagg

SEQ ID NO: 3068588 - DNA, 25 bp, Homo sapien
agcagatagaggaaagccgcaaggc

SEQ ID NO: 3068589 - DNA, 25 bp, Homo sapien
aaagccgcaaggcaacattattccg

SEQ ID NO: 3068590 - DNA, 25 bp, Homo sapien
gagcggttgcacttttgccccggaa

SEQ ID NO: 3068591 - DNA, 25 bp, Homo sapien
tagcgacagtctcaaaatttcaggg

SEQ ID NO: 3068592 - DNA, 25 bp, Homo sapien
tatttagggtaaagccaagctctcc

SEQ ID NO: 3068593 - DNA, 25 bp, Homo sapien
tgtctacgaagctatgaggcccctc

SEQ ID NO: 3068594 - DNA, 25 bp, Homo sapien
gggatccctgtaagagccgctcaga

SEQ ID NO: 3068595 - DNA, 25 bp, Homo sapien
cattgtaattgtagccgtaagagcc

SEQ ID NO: 3068596 - DNA, 25 bp, Homo sapien
taatttagcaactgatagtccgggc

SEQ ID NO: 3068597 - DNA, 25 bp, Homo sapien
gccatttggataacgccccgagaag

SEQ ID NO: 3068598 - DNA, 25 bp, Homo sapien
tgattttggagggcttgatttgtgg

SEQ ID NO: 3068599 - DNA, 25 bp, Homo sapien
tgatttgtggatcgtggtcgttata

SEQ ID NO: 3068600 - DNA, 25 bp, Homo sapien
ggtgattttggagggcttgatttgt

SEQ ID NO: 3068601 - DNA, 25 bp, Homo sapien
cttgatttgtggatcgtggtcgtta

SEQ ID NO: 3068602 - DNA, 25 bp, Homo sapien
cttcacgatttatgatgtattaatg

SEQ ID NO: 3068603 - DNA, 25 bp, Homo sapien
tattaatgaattatagcgatgcact

SEQ ID NO: 3068604 - DNA, 25 bp, Homo sapien
tagcgatgcactgtacttcgttttg

SEQ ID NO: 3068605 - DNA, 25 bp, Homo sapien
tttgctatgtatgcggccaaatatg

SEQ ID NO: 3068606 - DNA, 25 bp, Homo sapien
tgacctcaagaggtaattcatgctc

SEQ ID NO: 3068607 - DNA, 25 bp, Homo sapien
tatggttacaaataatgacgatccg

SEQ ID NO: 3068608 - DNA, 25 bp, Homo sapien
gtaaattctcgctgatgacctcaag

SEQ ID NO: 3068609 - DNA, 25 bp, Homo sapien
tgacgatccgagaatcgttagggcc

SEQ ID NO: 3068610 - DNA, 25 bp, Homo sapien
ccggcgaccgacgggagcgcgggcg

SEQ ID NO: 3068611 - DNA, 25 bp, Homo sapien
ggcgaccgacgggagcgcgggcgtg

SEQ ID NO: 3068612 - DNA, 25 bp, Homo sapien
cgaccgacgggagcgcgggcgtgag

SEQ ID NO: 3068613 - DNA, 25 bp, Homo sapien
cacctcccggcgaccgacgggagcg

SEQ ID NO: 3068614 - DNA, 25 bp, Homo sapien
tgagagtttgtaaagcgggatccct

SEQ ID NO: 3068615 - DNA, 25 bp, Homo sapien
tagttgccgaaaagactgcagcggc

SEQ ID NO: 3068616 - DNA, 25 bp, Homo sapien
ggctattgcattcggaggccccact

SEQ ID NO: 3068617 - DNA, 25 bp, Homo sapien
tgcagtcgccgggagagaaagaaac

SEQ ID NO: 3068618 - DNA, 25 bp, Homo sapien
catgctttgctgagcacgctgggcg

SEQ ID NO: 3068619 - DNA, 25 bp, Homo sapien
agagaccgccgcagctggtctccta

SEQ ID NO: 3068620 - DNA, 25 bp, Homo sapien
cagctaggcagtttgagaatttgcc

SEQ ID NO: 3068621 - DNA, 25 bp, Homo sapien
cgccgcagctggtctcctattagga

SEQ ID NO: 3068622 - DNA, 25 bp, Homo sapien
cagtgaccgcagcttgccttctggg

SEQ ID NO: 3068623 - DNA, 25 bp, Homo sapien
tgaccgcagcttgccttctgggtgc

SEQ ID NO: 3068624 - DNA, 25 bp, Homo sapien
ggtgccggtgcaagcagagagagaa

SEQ ID NO: 3068625 - DNA, 25 bp, Homo sapien
cgcagcttgccttctgggtgccggt

SEQ ID NO: 3068626 - DNA, 25 bp, Homo sapien
cccagtcgaacagggctcgcttcgg

SEQ ID NO: 3068627 - DNA, 25 bp, Homo sapien
ggactgatcgctccagcctttatct

SEQ ID NO: 3068628 - DNA, 25 bp, Homo sapien
ccccaagtctgcacggggagaagcg

SEQ ID NO: 3068629 - DNA, 25 bp, Homo sapien
tgggcaggactgatcgctccagcct

SEQ ID NO: 3068630 - DNA, 25 bp, Homo sapien
tcatcatcatcgaagtatttcacgt

SEQ ID NO: 3068631 - DNA, 25 bp, Homo sapien
gaagtatttcacgtccagagctaag

SEQ ID NO: 3068632 - DNA, 25 bp, Homo sapien
catcgaagtatttcacgtccagagc

SEQ ID NO: 3068633 - DNA, 25 bp, Homo sapien
cgtccagagctaagacaagactaca

SEQ ID NO: 3068634 - DNA, 25 bp, Homo sapien
ggtagtatgtgctccttccagtggc

SEQ ID NO: 3068635 - DNA, 25 bp, Homo sapien
tgatcaggctgaggcgagttcctcg

SEQ ID NO: 3068636 - DNA, 25 bp, Homo sapien
gaatctaccattgaaccgtgcacgg

SEQ ID NO: 3068637 - DNA, 25 bp, Homo sapien
gacgcgacagggacaagagcatttt

SEQ ID NO: 3068638 - DNA, 25 bp, Homo sapien
tccagcgtctggtaacgtgtgtatg

SEQ ID NO: 3068639 - DNA, 25 bp, Homo sapien
cgtgtgtatgtctggcggcctcgcc

SEQ ID NO: 3068640 - DNA, 25 bp, Homo sapien
tgcctctccgtcaggcacagggcgt

SEQ ID NO: 3068641 - DNA, 25 bp, Homo sapien
ctgagacgcgctgagcagtttgctc

SEQ ID NO: 3068642 - DNA, 25 bp, Homo sapien
ttacgcagagtggagatgctgaggc

SEQ ID NO: 3068643 - DNA, 25 bp, Homo sapien
gttacgcagagtggagatgctgagg

SEQ ID NO: 3068644 - DNA, 25 bp, Homo sapien
ctgttacgcagagtggagatgctga

SEQ ID NO: 3068645 - DNA, 25 bp, Homo sapien
tgttacgcagagtggagatgctgag

SEQ ID NO: 3068646 - DNA, 25 bp, Homo sapien
tcctagtctcctaggcctgtgccgt

SEQ ID NO: 3068647 - DNA, 25 bp, Homo sapien
gccgtctgtctagactctagatggg

SEQ ID NO: 3068648 - DNA, 25 bp, Homo sapien
acagactccagccagtaccgggatg

SEQ ID NO: 3068649 - DNA, 25 bp, Homo sapien
gggatgccctctattctgccggctc

SEQ ID NO: 3068650 - DNA, 25 bp, Homo sapien
tccgtaatgacgtagatcgatccat

SEQ ID NO: 3068651 - DNA, 25 bp, Homo sapien
aaatccaggccgttaatccgtaatg

SEQ ID NO: 3068652 - DNA, 25 bp, Homo sapien
aaagtaaagccaagccagtgactgc

SEQ ID NO: 3068653 - DNA, 25 bp, Homo sapien
gacatcagttgggacttaaggccaa

SEQ ID NO: 3068654 - DNA, 25 bp, Homo sapien
aggccgactctttctcgcggtagaa

SEQ ID NO: 3068655 - DNA, 25 bp, Homo sapien
acgaatagagcggtagctggcccag

SEQ ID NO: 3068656 - DNA, 25 bp, Homo sapien
aacacgctcttgtcctgcgcgcagt

SEQ ID NO: 3068657 - DNA, 25 bp, Homo sapien
gggtaatgtctcagcgggtccgcat

SEQ ID NO: 3068658 - DNA, 25 bp, Homo sapien
ctgctgctccgccgggtttatgatt

SEQ ID NO: 3068659 - DNA, 25 bp, Homo sapien
tgtgttttatagtccgagcgccgcg

SEQ ID NO: 3068660 - DNA, 25 bp, Homo sapien
tgttgtgttttatagtccgagcgcc

SEQ ID NO: 3068661 - DNA, 25 bp, Homo sapien
ctgctccgccgggtttatgatttgt

SEQ ID NO: 3068662 - DNA, 25 bp, Homo sapien
ctattagtagtatatccgagattgg

SEQ ID NO: 3068663 - DNA, 25 bp, Homo sapien
tagtatatccgagattgggttttag

SEQ ID NO: 3068664 - DNA, 25 bp, Homo sapien
agtagtatatccgagattgggtttt

SEQ ID NO: 3068665 - DNA, 25 bp, Homo sapien
ttagtagtatatccgagattgggtt

SEQ ID NO: 3068666 - DNA, 25 bp, Homo sapien
tccgaatcgccttgagagagaacta

SEQ ID NO: 3068667 - DNA, 25 bp, Homo sapien
ttgtcaaatagcacccaggaggagc

SEQ ID NO: 3068668 - DNA, 25 bp, Homo sapien
aacgcgtcctgttccacctacgtag

SEQ ID NO: 3068669 - DNA, 25 bp, Homo sapien
tcagaaaagttaacccctgcgttgc

SEQ ID NO: 3068670 - DNA, 25 bp, Homo sapien
tttgtgtcggtagaaggtgagaaga

SEQ ID NO: 3068671 - DNA, 25 bp, Homo sapien
ggttttgtgtcggtagaaggtgaga

SEQ ID NO: 3068672 - DNA, 25 bp, Homo sapien
ttgtgtcggtagaaggtgagaagag

SEQ ID NO: 3068673 - DNA, 25 bp, Homo sapien
ttttgtgtcggtagaaggtgagaag

SEQ ID NO: 3068674 - DNA, 25 bp, Homo sapien
tccaagcctcggcttattgttcctg

SEQ ID NO: 3068675 - DNA, 25 bp, Homo sapien
gcctcggcttattgttcctgcttct

SEQ ID NO: 3068676 - DNA, 25 bp, Homo sapien
caagcctcggcttattgttcctgct

SEQ ID NO: 3068677 - DNA, 25 bp, Homo sapien
tctcctccaagcctcggcttattgt

SEQ ID NO: 3068678 - DNA, 25 bp, Homo sapien
gaaaataagcattgagcccaggctg

SEQ ID NO: 3068679 - DNA, 25 bp, Homo sapien
ggccaagtagtgaagggtgacaacc

SEQ ID NO: 3068680 - DNA, 25 bp, Homo sapien
ggctttgaaccctcctgatagttga

SEQ ID NO: 3068681 - DNA, 25 bp, Homo sapien
taaatctgggcacaaggaagaaatc

SEQ ID NO: 3068682 - DNA, 25 bp, Homo sapien
aacaaagtcagatgtcaggccaggc

SEQ ID NO: 3068683 - DNA, 25 bp, Homo sapien
gaacaaagtcagatgtcaggccagg

SEQ ID NO: 3068684 - DNA, 25 bp, Homo sapien
cctggagtcgggcatgaaagaaaat

SEQ ID NO: 3068685 - DNA, 25 bp, Homo sapien
gaatctgtctgtggttcggtccacc

SEQ ID NO: 3068686 - DNA, 25 bp, Homo sapien
taagcccagaggtatttatgagcgt

SEQ ID NO: 3068687 - DNA, 25 bp, Homo sapien
tatgtaaatacacagcgggctcagc

SEQ ID NO: 3068688 - DNA, 25 bp, Homo sapien
cctcaggagggatatttgcgtgtgt

SEQ ID NO: 3068689 - DNA, 25 bp, Homo sapien
aactcaattctcgtcctggactctg

SEQ ID NO: 3068690 - DNA, 25 bp, Homo sapien
cctaagttgtgttcagttcgggagt

SEQ ID NO: 3068691 - DNA, 25 bp, Homo sapien
aaaattcttgataggtaacctcagg

SEQ ID NO: 3068692 - DNA, 25 bp, Homo sapien
gaggaagccgcttcccttgccagcc

SEQ ID NO: 3068693 - DNA, 25 bp, Homo sapien
cgcttcccttgccagccgccaggtt

SEQ ID NO: 3068694 - DNA, 25 bp, Homo sapien
aggaagccgcttcccttgccagccg

SEQ ID NO: 3068695 - DNA, 25 bp, Homo sapien
tcccttgccagccgccaggtttggg

SEQ ID NO: 3068696 - DNA, 25 bp, Homo sapien
caagatctagctgagagcgtcggtg

SEQ ID NO: 3068697 - DNA, 25 bp, Homo sapien
gagcgtcggtgtgggcccgaaatcc

SEQ ID NO: 3068698 - DNA, 25 bp, Homo sapien
gaatcccgtggaccctgcgaggccg

SEQ ID NO: 3068699 - DNA, 25 bp, Homo sapien
gggaaccaagatctagctgagagcg

SEQ ID NO: 3068700 - DNA, 25 bp, Homo sapien
gccgaagccgcgtgtctccgaacgg

SEQ ID NO: 3068701 - DNA, 25 bp, Homo sapien
cataatttgggtcacagcgaactgt

SEQ ID NO: 3068702 - DNA, 25 bp, Homo sapien
tccgaacggacggtagatggcagca

SEQ ID NO: 3068703 - DNA, 25 bp, Homo sapien
gatggcagcagaccgcataatttgg

SEQ ID NO: 3068704 - DNA, 25 bp, Homo sapien
aggcacttaacagcttcttcacaat

SEQ ID NO: 3068705 - DNA, 25 bp, Homo sapien
caccatgtctggacccaggaaagtt

SEQ ID NO: 3068706 - DNA, 25 bp, Homo sapien
catcccataccaatacaacgcaagt

SEQ ID NO: 3068707 - DNA, 25 bp, Homo sapien
cagtatcacgcagaaaccaacagct

SEQ ID NO: 3068708 - DNA, 25 bp, Homo sapien
tagaaaccaggacgtcccttagcgc

SEQ ID NO: 3068709 - DNA, 25 bp, Homo sapien
ggcattctcgggcaggcttcctggt

SEQ ID NO: 3068710 - DNA, 25 bp, Homo sapien
cctcctgcgggagtggcgagatact

SEQ ID NO: 3068711 - DNA, 25 bp, Homo sapien
ctgtctccctgtagagcgaggctcc

SEQ ID NO: 3068712 - DNA, 25 bp, Homo sapien
atccgcaccaggcaagagaactgcg

SEQ ID NO: 3068713 - DNA, 25 bp, Homo sapien
agcgatatccgcaccaggcaagaga

SEQ ID NO: 3068714 - DNA, 25 bp, Homo sapien
ggaacccagcgatatccgcaccagg

SEQ ID NO: 3068715 - DNA, 25 bp, Homo sapien
agtgctgccgggaacccagcgatat

SEQ ID NO: 3068716 - DNA, 25 bp, Homo sapien
tggcttctttgggtgccactgaagc

SEQ ID NO: 3068717 - DNA, 25 bp, Homo sapien
gagtctctcctccaagcttaaaaag

SEQ ID NO: 3068718 - DNA, 25 bp, Homo sapien
aaaaggcgacttagagctggtctcc

SEQ ID NO: 3068719 - DNA, 25 bp, Homo sapien
gggcaatagccagaggccgagacaa

SEQ ID NO: 3068720 - DNA, 25 bp, Homo sapien
aacgtgagagccgttgcttcccctt

SEQ ID NO: 3068721 - DNA, 25 bp, Homo sapien
tattgtcccaacgtgagagccgttg

SEQ ID NO: 3068722 - DNA, 25 bp, Homo sapien
cagcttccagataatattgtcccaa

SEQ ID NO: 3068723 - DNA, 25 bp, Homo sapien
cagataatattgtcccaacgtgaga

SEQ ID NO: 3068724 - DNA, 25 bp, Homo sapien
taaaatcccagatcagtgagcaaat

SEQ ID NO: 3068725 - DNA, 25 bp, Homo sapien
cagtcctgggcagattgtccattta

SEQ ID NO: 3068726 - DNA, 25 bp, Homo sapien
aatagtatcgggctgcagtcctggg

SEQ ID NO: 3068727 - DNA, 25 bp, Homo sapien
aatggagtaagttctggctttgaaa

SEQ ID NO: 3068728 - DNA, 25 bp, Homo sapien
ctggagccctgaaggacgacagtgc

SEQ ID NO: 3068729 - DNA, 25 bp, Homo sapien
tgatactgaagtacaaaaatatcaa

SEQ ID NO: 3068730 - DNA, 25 bp, Homo sapien
tcttttgctctatcgagctgatact

SEQ ID NO: 3068731 - DNA, 25 bp, Homo sapien
gacagtgctccgacctaggtgtggt

SEQ ID NO: 3068732 - DNA, 25 bp, Homo sapien
tgaggcttgcagcattgcaggcgtg

SEQ ID NO: 3068733 - DNA, 25 bp, Homo sapien
ctgtgaggcttgcagcattgcaggc

SEQ ID NO: 3068734 - DNA, 25 bp, Homo sapien
aggcttgcagcattgcaggcgtggg

SEQ ID NO: 3068735 - DNA, 25 bp, Homo sapien
caggcgtgggggccttagattccct

SEQ ID NO: 3068736 - DNA, 25 bp, Homo sapien
cagaatgtaaaagggagcatggggc

SEQ ID NO: 3068737 - DNA, 25 bp, Homo sapien
aatgtaaaagggagcatggggctgg

SEQ ID NO: 3068738 - DNA, 25 bp, Homo sapien
caggcgcttggggaacacgcgagtg

SEQ ID NO: 3068739 - DNA, 25 bp, Homo sapien
cacgcgagtggtaggttttggggct

SEQ ID NO: 3068740 - DNA, 25 bp, Homo sapien
agggcaggcaaccacagggttagtc

SEQ ID NO: 3068741 - DNA, 25 bp, Homo sapien
tttacaaagaccttacaatagcaac

SEQ ID NO: 3068742 - DNA, 25 bp, Homo sapien
ccacagggttagtccagacccacag

SEQ ID NO: 3068743 - DNA, 25 bp, Homo sapien
aaagacagcattaaagagggcttac

SEQ ID NO: 3068744 - DNA, 25 bp, Homo sapien
cagactttcctataggtagtatttt

SEQ ID NO: 3068745 - DNA, 25 bp, Homo sapien
tgacagactttcctataggtagtat

SEQ ID NO: 3068746 - DNA, 25 bp, Homo sapien
ctgacagactttcctataggtagta

SEQ ID NO: 3068747 - DNA, 25 bp, Homo sapien
gacagactttcctataggtagtatt

SEQ ID NO: 3068748 - DNA, 25 bp, Homo sapien
cctgattcagttcccagagctgggc

SEQ ID NO: 3068749 - DNA, 25 bp, Homo sapien
cgatttgagtttcctgattcagttc

SEQ ID NO: 3068750 - DNA, 25 bp, Homo sapien
ccctattcgatttgagtttcctgat

SEQ ID NO: 3068751 - DNA, 25 bp, Homo sapien
tacttccctattcgatttgagtttc

SEQ ID NO: 3068752 - DNA, 25 bp, Homo sapien
tcagccctgtcttggccggtggtcc

SEQ ID NO: 3068753 - DNA, 25 bp, Homo sapien
ctcctctgcttcagccctgtcttgg

SEQ ID NO: 3068754 - DNA, 25 bp, Homo sapien
gcttcagccctgtcttggccggtgg

SEQ ID NO: 3068755 - DNA, 25 bp, Homo sapien
ctctgcttcagccctgtcttggccg

SEQ ID NO: 3068756 - DNA, 25 bp, Homo sapien
tgtctttccgtgaggcagagcgtgt

SEQ ID NO: 3068757 - DNA, 25 bp, Homo sapien
ggcagagcgtgtgcgcgatctcgat

SEQ ID NO: 3068758 - DNA, 25 bp, Homo sapien
ttgatctgtctttccgtgaggcaga

SEQ ID NO: 3068759 - DNA, 25 bp, Homo sapien
tctgtctttccgtgaggcagagcgt

SEQ ID NO: 3068760 - DNA, 25 bp, Homo sapien
cagtgagtaaagaaaacgccggccg

SEQ ID NO: 3068761 - DNA, 25 bp, Homo sapien
gttctgctcaaagggcgcgcagtgc

SEQ ID NO: 3068762 - DNA, 25 bp, Homo sapien
tagatccggaagttactctcggccg

SEQ ID NO: 3068763 - DNA, 25 bp, Homo sapien
ccttggcggagtcgccgggacacac

SEQ ID NO: 3068764 - DNA, 25 bp, Homo sapien
tgcatgttgaaggaactcggctcga

SEQ ID NO: 3068765 - DNA, 25 bp, Homo sapien
ccccgccggggtacaagccctgcat

SEQ ID NO: 3068766 - DNA, 25 bp, Homo sapien
cgaggcggcgaaggaagcgcccgaa

SEQ ID NO: 3068767 - DNA, 25 bp, Homo sapien
gaggcggcgaaggaagcgcccgaac

SEQ ID NO: 3068768 - DNA, 25 bp, Homo sapien
ccgaacccgctccatagcccgggcg

SEQ ID NO: 3068769 - DNA, 25 bp, Homo sapien
aaggaagcgcccgaacccgctccat

SEQ ID NO: 3068770 - DNA, 25 bp, Homo sapien
gggttggaagcaaacgcacaagaag

SEQ ID NO: 3068771 - DNA, 25 bp, Homo sapien
ctgggggttggaagcaaacgcacaa

SEQ ID NO: 3068772 - DNA, 25 bp, Homo sapien
tggaagcaaacgcacaagaagtttg

SEQ ID NO: 3068773 - DNA, 25 bp, Homo sapien
aacgcacaagaagtttgttctggga

SEQ ID NO: 3068774 - DNA, 25 bp, Homo sapien
taaagtattcgcataatacaatgaa

SEQ ID NO: 3068775 - DNA, 25 bp, Homo sapien
gtattcgcataatacaatgaactca

SEQ ID NO: 3068776 - DNA, 25 bp, Homo sapien
aagtattcgcataatacaatgaact

SEQ ID NO: 3068777 - DNA, 25 bp, Homo sapien
aataaagtattcgcataatacaatg

SEQ ID NO: 3068778 - DNA, 25 bp, Homo sapien
ttgtaggcagggacgttttagtgtc

SEQ ID NO: 3068779 - DNA, 25 bp, Homo sapien
tcggttttacgagattccttgatat

SEQ ID NO: 3068780 - DNA, 25 bp, Homo sapien
aatttggccggatgatttgtaggca

SEQ ID NO: 3068781 - DNA, 25 bp, Homo sapien
tgtcggttttacgagattccttgat

SEQ ID NO: 3068782 - DNA, 25 bp, Homo sapien
taggtgctcctagggcacaggatcc

SEQ ID NO: 3068783 - DNA, 25 bp, Homo sapien
aattctgcacggcaaggccttttgg

SEQ ID NO: 3068784 - DNA, 25 bp, Homo sapien
tcttggtgccccagatatgcgggcg

SEQ ID NO: 3068785 - DNA, 25 bp, Homo sapien
ggcggagatggagcaagtcttccta

SEQ ID NO: 3068786 - DNA, 25 bp, Homo sapien
ccgagggactcgcaccacctgcctc

SEQ ID NO: 3068787 - DNA, 25 bp, Homo sapien
agcaggcgcaggagcccggtgacag

SEQ ID NO: 3068788 - DNA, 25 bp, Homo sapien
gagggactcgcaccacctgcctcca

SEQ ID NO: 3068789 - DNA, 25 bp, Homo sapien
tcagcaggcgcaggagcccggtgac

SEQ ID NO: 3068790 - DNA, 25 bp, Homo sapien
tgcacaaggaggctttttacacggg

SEQ ID NO: 3068791 - DNA, 25 bp, Homo sapien
tattacgagatactaccactagcgg

SEQ ID NO: 3068792 - DNA, 25 bp, Homo sapien
ggaaggagatccacggtagctcaca

SEQ ID NO: 3068793 - DNA, 25 bp, Homo sapien
gaacttagcagaaatcggtaccttg

SEQ ID NO: 3068794 - DNA, 25 bp, Homo sapien
cagtcccagggcgtgcgatacctcg

SEQ ID NO: 3068795 - DNA, 25 bp, Homo sapien
cctcctgctcgcatttgctgctggg

SEQ ID NO: 3068796 - DNA, 25 bp, Homo sapien
cgattcgccgcttacgagtcagata

SEQ ID NO: 3068797 - DNA, 25 bp, Homo sapien
ttcttgtcgcccttctgcgcgtcgc

SEQ ID NO: 3068798 - DNA, 25 bp, Homo sapien
gcgaagccgcagtcataataattgg

SEQ ID NO: 3068799 - DNA, 25 bp, Homo sapien
gcagcgggtcgtagccgtagaaatt

SEQ ID NO: 3068800 - DNA, 25 bp, Homo sapien
gaactcctggatttgcgacgggtgc

SEQ ID NO: 3068801 - DNA, 25 bp, Homo sapien
caccgaataggctctggcgttgcag

SEQ ID NO: 3068802 - DNA, 25 bp, Homo sapien
tattgaattttgaggcggcggcggc

SEQ ID NO: 3068803 - DNA, 25 bp, Homo sapien
attgaattttgaggcggcggcggcg

SEQ ID NO: 3068804 - DNA, 25 bp, Homo sapien
tgaattttgaggcggcggcggcggc

SEQ ID NO: 3068805 - DNA, 25 bp, Homo sapien
ttattgaattttgaggcggcggcgg

SEQ ID NO: 3068806 - DNA, 25 bp, Homo sapien
gtcaccctcgccaggaaaggagagg

SEQ ID NO: 3068807 - DNA, 25 bp, Homo sapien
aaaacgcggattcgccggctcctag

SEQ ID NO: 3068808 - DNA, 25 bp, Homo sapien
gagagagaaaaaaacgcggattcgc

SEQ ID NO: 3068809 - DNA, 25 bp, Homo sapien
gatctcgaagccgacacactttttg

SEQ ID NO: 3068810 - DNA, 25 bp, Homo sapien
cagttttcggtgatttacttccctg

SEQ ID NO: 3068811 - DNA, 25 bp, Homo sapien
tcataaacagttttcggtgatttac

SEQ ID NO: 3068812 - DNA, 25 bp, Homo sapien
cataaacagttttcggtgatttact

SEQ ID NO: 3068813 - DNA, 25 bp, Homo sapien
tatattcaatccattgtttattcag

SEQ ID NO: 3068814 - DNA, 25 bp, Homo sapien
tgaaactatcacttttccaaaggga

SEQ ID NO: 3068815 - DNA, 25 bp, Homo sapien
tgtttattcaggaaacagtggtttg

SEQ ID NO: 3068816 - DNA, 25 bp, Homo sapien
aatgaaactatcacttttccaaagg

SEQ ID NO: 3068817 - DNA, 25 bp, Homo sapien
aggtcatttggttcttcaaaagtga

SEQ ID NO: 3068818 - DNA, 25 bp, Homo sapien
gtgaggtcatttggttcttcaaaag

SEQ ID NO: 3068819 - DNA, 25 bp, Homo sapien
gtcatttggttcttcaaaagtgaac

SEQ ID NO: 3068820 - DNA, 25 bp, Homo sapien
cagtgaggtcatttggttcttcaaa

SEQ ID NO: 3068821 - DNA, 25 bp, Homo sapien
caagtgcagaggattttatggtcat

SEQ ID NO: 3068822 - DNA, 25 bp, Homo sapien
accgtgaggcaacggagggccgagt

SEQ ID NO: 3068823 - DNA, 25 bp, Homo sapien
gctttgaattttcagcgcgtggctg

SEQ ID NO: 3068824 - DNA, 25 bp, Homo sapien
attgttgccgaagcaaacattttta

SEQ ID NO: 3068825 - DNA, 25 bp, Homo sapien
cggcgaggtacaaattcaatggctt

SEQ ID NO: 3068826 - DNA, 25 bp, Homo sapien
tctacaccgtgccagaaattcctga

SEQ ID NO: 3068827 - DNA, 25 bp, Homo sapien
taaatcatctctacaccgtgccaga

SEQ ID NO: 3068828 - DNA, 25 bp, Homo sapien
caatggcttgttctaaatcatctct

SEQ ID NO: 3068829 - DNA, 25 bp, Homo sapien
aaacgaaagagcgaggagacaattt

SEQ ID NO: 3068830 - DNA, 25 bp, Homo sapien
gaggagacaatttataaacacccag

SEQ ID NO: 3068831 - DNA, 25 bp, Homo sapien
caagttgaggagaaactccgcttac

SEQ ID NO: 3068832 - DNA, 25 bp, Homo sapien
ccagcggagcgcagatttattagag

SEQ ID NO: 3068833 - DNA, 25 bp, Homo sapien
gggtgggagtatctattgctggcgc

SEQ ID NO: 3068834 - DNA, 25 bp, Homo sapien
gacacaggagatttggaatgcaagg

SEQ ID NO: 3068835 - DNA, 25 bp, Homo sapien
caggtttgtcggatggaaggcaggg

SEQ ID NO: 3068836 - DNA, 25 bp, Homo sapien
gaggacacaggagatttggaatgca

SEQ ID NO: 3068837 - DNA, 25 bp, Homo sapien
gggaaaacgcgcattctttgggagc

SEQ ID NO: 3068838 - DNA, 25 bp, Homo sapien
tctcagaacgaaagtgcccggagtc

SEQ ID NO: 3068839 - DNA, 25 bp, Homo sapien
aacaaccagggtgcgggtctcagaa

SEQ ID NO: 3068840 - DNA, 25 bp, Homo sapien
tttgggagcgcgcaaagcatccaga

SEQ ID NO: 3068841 - DNA, 25 bp, Homo sapien
tagcactcagttcctggattcaggg

SEQ ID NO: 3068842 - DNA, 25 bp, Homo sapien
gggaacactactataactgaaatct

SEQ ID NO: 3068843 - DNA, 25 bp, Homo sapien
tttgttgccccaccgaacacagcaa

SEQ ID NO: 3068844 - DNA, 25 bp, Homo sapien
tcgcctcctttcacggaaaatctcg

SEQ ID NO: 3068845 - DNA, 25 bp, Homo sapien
tagcggctgctctgcgaaaaggcgc

SEQ ID NO: 3068846 - DNA, 25 bp, Homo sapien
ggagaaactttcataactagcagta

SEQ ID NO: 3068847 - DNA, 25 bp, Homo sapien
caccggctccaccagttttctggga

SEQ ID NO: 3068848 - DNA, 25 bp, Homo sapien
catcggaatcaggaaacggttcatg

SEQ ID NO: 3068849 - DNA, 25 bp, Homo sapien
ccctaatttctagcggagaccgcaa

SEQ ID NO: 3068850 - DNA, 25 bp, Homo sapien
cagttttcaaactccacgcgattgt

SEQ ID NO: 3068851 - DNA, 25 bp, Homo sapien
tgcgccctttatggcctgtaaaaag

SEQ ID NO: 3068852 - DNA, 25 bp, Homo sapien
gagaccgcaaagcagtgcgcccttt

SEQ ID NO: 3068853 - DNA, 25 bp, Homo sapien
gcatccctaatgaaaccctctttgg

SEQ ID NO: 3068854 - DNA, 25 bp, Homo sapien
tttattgctgcgcacacggcattga

SEQ ID NO: 3068855 - DNA, 25 bp, Homo sapien
tgctttaggcagaaaccgaccttct

SEQ ID NO: 3068856 - DNA, 25 bp, Homo sapien
tttgctgtcagcaccggctgggcct

SEQ ID NO: 3068857 - DNA, 25 bp, Homo sapien
aacaattagagctctaggcccctcg

SEQ ID NO: 3068858 - DNA, 25 bp, Homo sapien
gaaccctcccatataatcgacaact

SEQ ID NO: 3068859 - DNA, 25 bp, Homo sapien
tgaaaacaagcgagacaatcacccc

SEQ ID NO: 3068860 - DNA, 25 bp, Homo sapien
aagcacaatttcacgacagccaccg

SEQ ID NO: 3068861 - DNA, 25 bp, Homo sapien
ctttgcacgcgggactgtttcccag

SEQ ID NO: 3068862 - DNA, 25 bp, Homo sapien
agcaggagcaagagtctacaaattg

SEQ ID NO: 3068863 - DNA, 25 bp, Homo sapien
tgtttcccagaagcgcgcgcacgca

SEQ ID NO: 3068864 - DNA, 25 bp, Homo sapien
gggactgtttcccagaagcgcgcgc

SEQ ID NO: 3068865 - DNA, 25 bp, Homo sapien
gcttctctgcgtgggtcgagaagcc

SEQ ID NO: 3068866 - DNA, 25 bp, Homo sapien
cgggtctcctttggcgctggggcta

SEQ ID NO: 3068867 - DNA, 25 bp, Homo sapien
cgggattcggaggaacgcgcagagc

SEQ ID NO: 3068868 - DNA, 25 bp, Homo sapien
aacgcgcagagcgttgcgcgctggg

SEQ ID NO: 3068869 - DNA, 25 bp, Homo sapien
aagggagcttgggaatcgattcaca

SEQ ID NO: 3068870 - DNA, 25 bp, Homo sapien
tgtcccagaccacttgtcccggaag

SEQ ID NO: 3068871 - DNA, 25 bp, Homo sapien
taaattctcattcggactctcctgg

SEQ ID NO: 3068872 - DNA, 25 bp, Homo sapien
tgcaaggtggatacgaccgaagaga

SEQ ID NO: 3068873 - DNA, 25 bp, Homo sapien
gctacagtctgtcaagtggtgcaca

SEQ ID NO: 3068874 - DNA, 25 bp, Homo sapien
ccggtcgagagcaagagaagctaca

SEQ ID NO: 3068875 - DNA, 25 bp, Homo sapien
cctctagacatctccctggtgggta

SEQ ID NO: 3068876 - DNA, 25 bp, Homo sapien
gcttcataaaaccacgtgctgcctt

SEQ ID NO: 3068877 - DNA, 25 bp, Homo sapien
tggtggttgtgagctcaccccatta

SEQ ID NO: 3068878 - DNA, 25 bp, Homo sapien
cgatggtctgcaactggagtgtcac

SEQ ID NO: 3068879 - DNA, 25 bp, Homo sapien
ttgccaaatttggtgtgcgatggtc

SEQ ID NO: 3068880 - DNA, 25 bp, Homo sapien
tcacctcacttgactgaatggtggt

SEQ ID NO: 3068881 - DNA, 25 bp, Homo sapien
gctgtgtagagttggagtgtccctg

SEQ ID NO: 3068882 - DNA, 25 bp, Homo sapien
gacttcccagaaaaattacagggca

SEQ ID NO: 3068883 - DNA, 25 bp, Homo sapien
ggtctctctttccttgtggcccatc

SEQ ID NO: 3068884 - DNA, 25 bp, Homo sapien
gtggcccatcacattcttaggaacc

SEQ ID NO: 3068885 - DNA, 25 bp, Homo sapien
cagcactggctttgcagtcgtcaca

SEQ ID NO: 3068886 - DNA, 25 bp, Homo sapien
cattcacttgaatacatcccagaca

SEQ ID NO: 3068887 - DNA, 25 bp, Homo sapien
gtcacataactaagagtgagatggg

SEQ ID NO: 3068888 - DNA, 25 bp, Homo sapien
tgaatacatcccagacagcactggc

SEQ ID NO: 3068889 - DNA, 25 bp, Homo sapien
ttcgtgcctacggtccctggtgagg

SEQ ID NO: 3068890 - DNA, 25 bp, Homo sapien
agcgagcgtgcagccagttggcgga

SEQ ID NO: 3068891 - DNA, 25 bp, Homo sapien
tctctcactcagattgaggagtctg

SEQ ID NO: 3068892 - DNA, 25 bp, Homo sapien
tttttccgggaagagcgagcgtgca

SEQ ID NO: 3068893 - DNA, 25 bp, Homo sapien
caatttgcagcgctatttccttaat

SEQ ID NO: 3068894 - DNA, 25 bp, Homo sapien
atttgcagcgctatttccttaatgt

SEQ ID NO: 3068895 - DNA, 25 bp, Homo sapien
aatttgcagcgctatttccttaatg

SEQ ID NO: 3068896 - DNA, 25 bp, Homo sapien
gatgctctaaagggccctggggcca

SEQ ID NO: 3068897 - DNA, 25 bp, Homo sapien
gccctggggccactccgtcaatggg

SEQ ID NO: 3068898 - DNA, 25 bp, Homo sapien
tccagcaggcaaggatgctctaaag

SEQ ID NO: 3068899 - DNA, 25 bp, Homo sapien
tggggccactccgtcaatgggaaat

SEQ ID NO: 3068900 - DNA, 25 bp, Homo sapien
caccagcctgcgagtcattgtttga

SEQ ID NO: 3068901 - DNA, 25 bp, Homo sapien
gggtcccttcgagatgccccgatat

SEQ ID NO: 3068902 - DNA, 25 bp, Homo sapien
taagaaacgaggacctgatccacca

SEQ ID NO: 3068903 - DNA, 25 bp, Homo sapien
cgatattcggaagcgattccccgac

SEQ ID NO: 3068904 - DNA, 25 bp, Homo sapien
tcgcaaattttattgtccccgtagc

SEQ ID NO: 3068905 - DNA, 25 bp, Homo sapien
tgcccgccgaagtttccaaactgta

SEQ ID NO: 3068906 - DNA, 25 bp, Homo sapien
tctttgattagacagcacggcctcc

SEQ ID NO: 3068907 - DNA, 25 bp, Homo sapien
tcgggcgtgccctgtttgagcagct

SEQ ID NO: 3068908 - DNA, 25 bp, Homo sapien
cttcaccgccgcctggccctgcccc

SEQ ID NO: 3068909 - DNA, 25 bp, Homo sapien
ccagcagcggctccgccttcaccgc

SEQ ID NO: 3068910 - DNA, 25 bp, Homo sapien
gcccagcagcggctccgccttcacc

SEQ ID NO: 3068911 - DNA, 25 bp, Homo sapien
tcaccgccgcctggccctgccccgg

SEQ ID NO: 3068912 - DNA, 25 bp, Homo sapien
cgaacaccggcgctttgggctggaa

SEQ ID NO: 3068913 - DNA, 25 bp, Homo sapien
cgtgacttatgatcgagtcgacata

SEQ ID NO: 3068914 - DNA, 25 bp, Homo sapien
cagccaggtgcggaggtacctgctc

SEQ ID NO: 3068915 - DNA, 25 bp, Homo sapien
ggcgcgtcctcactctcgtgactta

SEQ ID NO: 3068916 - DNA, 25 bp, Homo sapien
agacattatccgggcgcttgcaggg

SEQ ID NO: 3068917 - DNA, 25 bp, Homo sapien
tcagacattatccgggcgcttgcag

SEQ ID NO: 3068918 - DNA, 25 bp, Homo sapien
cggcggcgcccaagcagggagaggt

SEQ ID NO: 3068919 - DNA, 25 bp, Homo sapien
tctcagacattatccgggcgcttgc

SEQ ID NO: 3068920 - DNA, 25 bp, Homo sapien
tccaaacaccgatataggggccagt

SEQ ID NO: 3068921 - DNA, 25 bp, Homo sapien
gagatttccaaacaccgatataggg

SEQ ID NO: 3068922 - DNA, 25 bp, Homo sapien
tggagatttccaaacaccgatatag

SEQ ID NO: 3068923 - DNA, 25 bp, Homo sapien
aacaccgatataggggccagtgtgg

SEQ ID NO: 3068924 - DNA, 25 bp, Homo sapien
tgggaaaggacacaagatcgcaaaa

SEQ ID NO: 3068925 - DNA, 25 bp, Homo sapien
tgcaaaacggcctccaaaacaggta

SEQ ID NO: 3068926 - DNA, 25 bp, Homo sapien
aaaacaggtatcacatcgaatctgc

SEQ ID NO: 3068927 - DNA, 25 bp, Homo sapien
tttcttcagactcaagatcacagtc

SEQ ID NO: 3068928 - DNA, 25 bp, Homo sapien
agaaacccaggcccaacaacatgaa

SEQ ID NO: 3068929 - DNA, 25 bp, Homo sapien
gaaacccaggcccaacaacatgaaa

SEQ ID NO: 3068930 - DNA, 25 bp, Homo sapien
gagccggtcctgatagctcagattc

SEQ ID NO: 3068931 - DNA, 25 bp, Homo sapien
tggagccggtcctgatagctcagat

SEQ ID NO: 3068932 - DNA, 25 bp, Homo sapien
aaaccattttggagccggtcctgat

SEQ ID NO: 3068933 - DNA, 25 bp, Homo sapien
attttggagccggtcctgatagctc

SEQ ID NO: 3068934 - DNA, 25 bp, Homo sapien
aaagccggttgatctgaacagttgc

SEQ ID NO: 3068935 - DNA, 25 bp, Homo sapien
gatacgaaggtgcatctatactcag

SEQ ID NO: 3068936 - DNA, 25 bp, Homo sapien
tgtgaaggcaccctgcccaaaatgt

SEQ ID NO: 3068937 - DNA, 25 bp, Homo sapien
tcgggaattctagggaacaaacaga

SEQ ID NO: 3068938 - DNA, 25 bp, Homo sapien
tccgaggtagcgagggagtccacct

SEQ ID NO: 3068939 - DNA, 25 bp, Homo sapien
gtggccacgtgtccggcagggaagt

SEQ ID NO: 3068940 - DNA, 25 bp, Homo sapien
tcaccgtgttgatgaacttcaaacg

SEQ ID NO: 3068941 - DNA, 25 bp, Homo sapien
cctcgcccagaagcgagggtccgag

SEQ ID NO: 3068942 - DNA, 25 bp, Homo sapien
atttacgagcggcagaagcacccgc

SEQ ID NO: 3068943 - DNA, 25 bp, Homo sapien
gcctcggcccctttctttgcccgca

SEQ ID NO: 3068944 - DNA, 25 bp, Homo sapien
acaaatttacgagcggcagaagcac

SEQ ID NO: 3068945 - DNA, 25 bp, Homo sapien
gggaaacaaatttacgagcggcaga

SEQ ID NO: 3068946 - DNA, 25 bp, Homo sapien
ggcgcgctcttctctcggaggagtc

SEQ ID NO: 3068947 - DNA, 25 bp, Homo sapien
agtcggcgctgacccagcccgcgcc

SEQ ID NO: 3068948 - DNA, 25 bp, Homo sapien
ctcttctctcggaggagtcggcgct

SEQ ID NO: 3068949 - DNA, 25 bp, Homo sapien
gccaggcgcgctcttctctcggagg

SEQ ID NO: 3068950 - DNA, 25 bp, Homo sapien
acggaaaatccacagagccccgcgc

SEQ ID NO: 3068951 - DNA, 25 bp, Homo sapien
ggaaaatccacagagccccgcgcag

SEQ ID NO: 3068952 - DNA, 25 bp, Homo sapien
ctacacggaaaatccacagagcccc

SEQ ID NO: 3068953 - DNA, 25 bp, Homo sapien
tacacggaaaatccacagagccccg

SEQ ID NO: 3068954 - DNA, 25 bp, Homo sapien
tctggatgggagagcaaaaggttct

SEQ ID NO: 3068955 - DNA, 25 bp, Homo sapien
tgaagggttaactctgctgcaggca

SEQ ID NO: 3068956 - DNA, 25 bp, Homo sapien
tgggcttcagagaactgggatcgaa

SEQ ID NO: 3068957 - DNA, 25 bp, Homo sapien
caggctcaggcagagtgttcaggta

SEQ ID NO: 3068958 - DNA, 25 bp, Homo sapien
cactaactagctgagatgatggtca

SEQ ID NO: 3068959 - DNA, 25 bp, Homo sapien
tttccaatttctggcggcgggcggc

SEQ ID NO: 3068960 - DNA, 25 bp, Homo sapien
gatggtcactccgtgagtaaaggcc

SEQ ID NO: 3068961 - DNA, 25 bp, Homo sapien
gccattcccatagataccagctgtg

SEQ ID NO: 3068962 - DNA, 25 bp, Homo sapien
ttgagtccgcgctgaacaagattct

SEQ ID NO: 3068963 - DNA, 25 bp, Homo sapien
cgccctggcgttgagtccgcgctga

SEQ ID NO: 3068964 - DNA, 25 bp, Homo sapien
tggcggccggcacgtcgcctttggc

SEQ ID NO: 3068965 - DNA, 25 bp, Homo sapien
ctgaacaagattctctcgcagctct

SEQ ID NO: 3068966 - DNA, 25 bp, Homo sapien
caagagaaacacggttaaatgagtg

SEQ ID NO: 3068967 - DNA, 25 bp, Homo sapien
agagaaacacggttaaatgagtgcg

SEQ ID NO: 3068968 - DNA, 25 bp, Homo sapien
aagagaaacacggttaaatgagtgc

SEQ ID NO: 3068969 - DNA, 25 bp, Homo sapien
tccgacgctagggagccttccacag

SEQ ID NO: 3068970 - DNA, 25 bp, Homo sapien
ggctagagggcagcgccagcatctt

SEQ ID NO: 3068971 - DNA, 25 bp, Homo sapien
ctaactccatctccgacgctaggga

SEQ ID NO: 3068972 - DNA, 25 bp, Homo sapien
acagcccgaatctcctttgatgtcc

SEQ ID NO: 3068973 - DNA, 25 bp, Homo sapien
atacactcgccccagaggaccacca

SEQ ID NO: 3068974 - DNA, 25 bp, Homo sapien
gccttttgcctgctggggactttca

SEQ ID NO: 3068975 - DNA, 25 bp, Homo sapien
ccttgaagttctccatacactcgcc

SEQ ID NO: 3068976 - DNA, 25 bp, Homo sapien
accaccccactaacagaagtcacag

SEQ ID NO: 3068977 - DNA, 25 bp, Homo sapien
caaaaaggttgctgcggggagccac

SEQ ID NO: 3068978 - DNA, 25 bp, Homo sapien
aagcccaggagctccggtccctgga

SEQ ID NO: 3068979 - DNA, 25 bp, Homo sapien
cggtccctggaccaaggagtgaaca

SEQ ID NO: 3068980 - DNA, 25 bp, Homo sapien
acgttccctctggttcacctcgaag

SEQ ID NO: 3068981 - DNA, 25 bp, Homo sapien
cagttctaaaaggaagtcagctgtc

SEQ ID NO: 3068982 - DNA, 25 bp, Homo sapien
gtcagctgtcactttctgagaagcc

SEQ ID NO: 3068983 - DNA, 25 bp, Homo sapien
tcacagttctaaaaggaagtcagct

SEQ ID NO: 3068984 - DNA, 25 bp, Homo sapien
tctaaaaggaagtcagctgtcactt

SEQ ID NO: 3068985 - DNA, 25 bp, Homo sapien
tgttctaaaccaccgcagaaggtga

SEQ ID NO: 3068986 - DNA, 25 bp, Homo sapien
tcccagcgagccaaaggctatatgt

SEQ ID NO: 3068987 - DNA, 25 bp, Homo sapien
gatcctcctgttgtcacgggctctg

SEQ ID NO: 3068988 - DNA, 25 bp, Homo sapien
cagctggtgagaaccctgtctgtcc

SEQ ID NO: 3068989 - DNA, 25 bp, Homo sapien
agctgcctcggtctggagatcaagg

SEQ ID NO: 3068990 - DNA, 25 bp, Homo sapien
gagatcaaggttaagccggtggccc

SEQ ID NO: 3068991 - DNA, 25 bp, Homo sapien
tggagaggtagggtcgggtgccagc

SEQ ID NO: 3068992 - DNA, 25 bp, Homo sapien
gaggccaaggcgttttcgggtgcgc

SEQ ID NO: 3068993 - DNA, 25 bp, Homo sapien
tggcggctctgggtcgccgccttct

SEQ ID NO: 3068994 - DNA, 25 bp, Homo sapien
cccgcgcgtcttcgtagactgcagg

SEQ ID NO: 3068995 - DNA, 25 bp, Homo sapien
ctgtgaggcctctcgaggcagtgtc

SEQ ID NO: 3068996 - DNA, 25 bp, Homo sapien
tcttcgtagactgcaggagtccagg

SEQ ID NO: 3068997 - DNA, 25 bp, Homo sapien
cgaaggggctcacgctcctgcgttc

SEQ ID NO: 3068998 - DNA, 25 bp, Homo sapien
ctgggggcgcgaaggggctcacgct

SEQ ID NO: 3068999 - DNA, 25 bp, Homo sapien
tgggggcgcgaaggggctcacgctc

SEQ ID NO: 3069000 - DNA, 25 bp, Homo sapien
ggcgcgaaggggctcacgctcctgc

SEQ ID NO: 3069001 - DNA, 25 bp, Homo sapien
acggcgccgtcggatcccagagcgg

SEQ ID NO: 3069002 - DNA, 25 bp, Homo sapien
cgggagggggataggcgagagcgct

SEQ ID NO: 3069003 - DNA, 25 bp, Homo sapien
acccacggcgccgtcggatcccaga

SEQ ID NO: 3069004 - DNA, 25 bp, Homo sapien
taggcgagagcgcttcctgcctccg

SEQ ID NO: 3069005 - DNA, 25 bp, Homo sapien
cagccgcagcccagcgacttcccgc

SEQ ID NO: 3069006 - DNA, 25 bp, Homo sapien
agccgcagcccagcgacttcccgcc

SEQ ID NO: 3069007 - DNA, 25 bp, Homo sapien
ccgcagcccagcgacttcccgccat

SEQ ID NO: 3069008 - DNA, 25 bp, Homo sapien
ccagccgcagcccagcgacttcccg

SEQ ID NO: 3069009 - DNA, 25 bp, Homo sapien
tgtcaatgttgttgtcttacagcgg

SEQ ID NO: 3069010 - DNA, 25 bp, Homo sapien
aatgttgttgtcttacagcggagac

SEQ ID NO: 3069011 - DNA, 25 bp, Homo sapien
tcaatgttgttgtcttacagcggag

SEQ ID NO: 3069012 - DNA, 25 bp, Homo sapien
caatgttgttgtcttacagcggaga

SEQ ID NO: 3069013 - DNA, 25 bp, Homo sapien
tgccaggaagcgcttcgactgccgg

SEQ ID NO: 3069014 - DNA, 25 bp, Homo sapien
tctctttgggtctggtaatttactg

SEQ ID NO: 3069015 - DNA, 25 bp, Homo sapien
tcgactgccggttctgaaactctct

SEQ ID NO: 3069016 - DNA, 25 bp, Homo sapien
gctcctcgctcagaaagccgagtgt

SEQ ID NO: 3069017 - DNA, 25 bp, Homo sapien
catcccttggaggtaaggactgtat

SEQ ID NO: 3069018 - DNA, 25 bp, Homo sapien
aaatatgcttatcatcccttggagg

SEQ ID NO: 3069019 - DNA, 25 bp, Homo sapien
tcatcccttggaggtaaggactgta

SEQ ID NO: 3069020 - DNA, 25 bp, Homo sapien
atcccttggaggtaaggactgtatc

SEQ ID NO: 3069021 - DNA, 25 bp, Homo sapien
acagttcccttttcagagacgtaga

SEQ ID NO: 3069022 - DNA, 25 bp, Homo sapien
gaacagttcccttttcagagacgta

SEQ ID NO: 3069023 - DNA, 25 bp, Homo sapien
atcagcctgctgaacagttcccttt

SEQ ID NO: 3069024 - DNA, 25 bp, Homo sapien
gttcccttttcagagacgtagatac

SEQ ID NO: 3069025 - DNA, 25 bp, Homo sapien
caaggatgaattcatctttctgggc

SEQ ID NO: 3069026 - DNA, 25 bp, Homo sapien
cctgatatccttgtttttaactgtt

SEQ ID NO: 3069027 - DNA, 25 bp, Homo sapien
gtcatttccttcaaggatgaattca

SEQ ID NO: 3069028 - DNA, 25 bp, Homo sapien
aatgtcatttccttcaaggatgaat

SEQ ID NO: 3069029 - DNA, 25 bp, Homo sapien
ataaattttggatttcaacaacaga

SEQ ID NO: 3069030 - DNA, 25 bp, Homo sapien
catctgaaccccgtggatgtatttt

SEQ ID NO: 3069031 - DNA, 25 bp, Homo sapien
ctggtctcatctgaaccccgtggat

SEQ ID NO: 3069032 - DNA, 25 bp, Homo sapien
taaattttggatttcaacaacagac

SEQ ID NO: 3069033 - DNA, 25 bp, Homo sapien
tgtaactgaggcccagtgtaacacc

SEQ ID NO: 3069034 - DNA, 25 bp, Homo sapien
atcttgtaactgaggcccagtgtaa

SEQ ID NO: 3069035 - DNA, 25 bp, Homo sapien
tcatcttgtaactgaggcccagtgt

SEQ ID NO: 3069036 - DNA, 25 bp, Homo sapien
acctcatcttgtaactgaggcccag

SEQ ID NO: 3069037 - DNA, 25 bp, Homo sapien
caaatattctgaacggcagccagtt

SEQ ID NO: 3069038 - DNA, 25 bp, Homo sapien
atgactacaaatattctgaacggca

SEQ ID NO: 3069039 - DNA, 25 bp, Homo sapien
actacaaatattctgaacggcagcc

SEQ ID NO: 3069040 - DNA, 25 bp, Homo sapien
acaaatattctgaacggcagccagt

SEQ ID NO: 3069041 - DNA, 25 bp, Homo sapien
gagttctatatggatgtgactgaag

SEQ ID NO: 3069042 - DNA, 25 bp, Homo sapien
gaagactgagttctatatggatgtg

SEQ ID NO: 3069043 - DNA, 25 bp, Homo sapien
agactgagttctatatggatgtgac

SEQ ID NO: 3069044 - DNA, 25 bp, Homo sapien
ccaagaagactgagttctatatgga

SEQ ID NO: 3069045 - DNA, 25 bp, Homo sapien
cttcatgctacatctcggcaaatac

SEQ ID NO: 3069046 - DNA, 25 bp, Homo sapien
tatccaggcacggtgcagcccttga

SEQ ID NO: 3069047 - DNA, 25 bp, Homo sapien
aaatacagctcatatccaggcacgg

SEQ ID NO: 3069048 - DNA, 25 bp, Homo sapien
tacatctcggcaaatacagctcata

SEQ ID NO: 3069049 - DNA, 25 bp, Homo sapien
gtccgcaaaggcagatcgggtatat

SEQ ID NO: 3069050 - DNA, 25 bp, Homo sapien
tgggtccgcaaaggcagatcgggta

SEQ ID NO: 3069051 - DNA, 25 bp, Homo sapien
ctgggtccgcaaaggcagatcgggt

SEQ ID NO: 3069052 - DNA, 25 bp, Homo sapien
ggtccgcaaaggcagatcgggtata

SEQ ID NO: 3069053 - DNA, 25 bp, Homo sapien
tgagttccacaactctcagtcttgc

SEQ ID NO: 3069054 - DNA, 25 bp, Homo sapien
tgaagagggtctgctgagttccaca

SEQ ID NO: 3069055 - DNA, 25 bp, Homo sapien
ttagaagaagtcaaccacggcaggg

SEQ ID NO: 3069056 - DNA, 25 bp, Homo sapien
gcctctttggaacatcatggcacag

SEQ ID NO: 3069057 - DNA, 25 bp, Homo sapien
tgtgatctcgtttgctctgaatcga

SEQ ID NO: 3069058 - DNA, 25 bp, Homo sapien
tcaaaggcttcccttcggatctaat

SEQ ID NO: 3069059 - DNA, 25 bp, Homo sapien
taactttcataaacgccggcaccga

SEQ ID NO: 3069060 - DNA, 25 bp, Homo sapien
agaaaccgctgtgccgaatactgca

SEQ ID NO: 3069061 - DNA, 25 bp, Homo sapien
tcgcctggaaagacgcgccggtttc

SEQ ID NO: 3069062 - DNA, 25 bp, Homo sapien
tttcccgggtcggatggctctccag

SEQ ID NO: 3069063 - DNA, 25 bp, Homo sapien
gagacgccccatttgcgaagtttaa

SEQ ID NO: 3069064 - DNA, 25 bp, Homo sapien
tatttcctccgccaccgagtaggga

SEQ ID NO: 3069065 - DNA, 25 bp, Homo sapien
ccggagtaaggatccgcaccgtcct

SEQ ID NO: 3069066 - DNA, 25 bp, Homo sapien
agtaaggatccgcaccgtccttcta

SEQ ID NO: 3069067 - DNA, 25 bp, Homo sapien
taaggatccgcaccgtccttctatc

SEQ ID NO: 3069068 - DNA, 25 bp, Homo sapien
tccttctatccaccgcgacctgcat

SEQ ID NO: 3069069 - DNA, 25 bp, Homo sapien
ttttattgtataaatagagacagcg

SEQ ID NO: 3069070 - DNA, 25 bp, Homo sapien
aattttattgtataaatagagacag

SEQ ID NO: 3069071 - DNA, 25 bp, Homo sapien
ttattgtataaatagagacagcgtc

SEQ ID NO: 3069072 - DNA, 25 bp, Homo sapien
tattgtataaatagagacagcgtct

SEQ ID NO: 3069073 - DNA, 25 bp, Homo sapien
atcactcctggtctcgcccagtaga

SEQ ID NO: 3069074 - DNA, 25 bp, Homo sapien
tcggcctcccgaaattccagaatta

SEQ ID NO: 3069075 - DNA, 25 bp, Homo sapien
ccgaaattccagaattacaggctga

SEQ ID NO: 3069076 - DNA, 25 bp, Homo sapien
ctggtctcgcccagtagatgtttca

SEQ ID NO: 3069077 - DNA, 25 bp, Homo sapien
gatctgagaaatgggcgcacaacat

SEQ ID NO: 3069078 - DNA, 25 bp, Homo sapien
agcactcttggaggtagtaagatgg

SEQ ID NO: 3069079 - DNA, 25 bp, Homo sapien
ccttgatctgagaaatgggcgcaca

SEQ ID NO: 3069080 - DNA, 25 bp, Homo sapien
gtaagatgggccggtccttgatctg

SEQ ID NO: 3069081 - DNA, 25 bp, Homo sapien
tcccagtggcgctctgtttgcacgc

SEQ ID NO: 3069082 - DNA, 25 bp, Homo sapien
ccagcttgcctgaccttgcaagcaa

SEQ ID NO: 3069083 - DNA, 25 bp, Homo sapien
cttgcctgaccttgcaagcaagcat

SEQ ID NO: 3069084 - DNA, 25 bp, Homo sapien
cgccttaggctaggagaggaaggac

SEQ ID NO: 3069085 - DNA, 25 bp, Homo sapien
tagaaattatttcgggcctggagcc

SEQ ID NO: 3069086 - DNA, 25 bp, Homo sapien
tagcttgctgagagattcgctgcgg

SEQ ID NO: 3069087 - DNA, 25 bp, Homo sapien
gtagacgcgaccctgtgatcccatt

SEQ ID NO: 3069088 - DNA, 25 bp, Homo sapien
tcccatttcgtagcttgctgagaga

SEQ ID NO: 3069089 - DNA, 25 bp, Homo sapien
gcggacgatgaaagcctgcccgcag

SEQ ID NO: 3069090 - DNA, 25 bp, Homo sapien
tagctccgcggacgatgaaagcctg

SEQ ID NO: 3069091 - DNA, 25 bp, Homo sapien
gacgatgaaagcctgcccgcaggtt

SEQ ID NO: 3069092 - DNA, 25 bp, Homo sapien
ggaagcctgtagctccgcggacgat

SEQ ID NO: 3069093 - DNA, 25 bp, Homo sapien
caagtttaagtttctgatagcagag

SEQ ID NO: 3069094 - DNA, 25 bp, Homo sapien
ccatctccgttagtggcggtggcag

SEQ ID NO: 3069095 - DNA, 25 bp, Homo sapien
tctgaatttattgcgagtgaaaaac

SEQ ID NO: 3069096 - DNA, 25 bp, Homo sapien
ccagggccatctccgttagtggcgg

SEQ ID NO: 3069097 - DNA, 25 bp, Homo sapien
cagaggagtaagaacctgcgatatt

SEQ ID NO: 3069098 - DNA, 25 bp, Homo sapien
cgatattgaaagctacccacatggg

SEQ ID NO: 3069099 - DNA, 25 bp, Homo sapien
aactctcgccagttccgaagtcggc

SEQ ID NO: 3069100 - DNA, 25 bp, Homo sapien
ccgatcgttggtgggtttgagctta

SEQ ID NO: 3069101 - DNA, 25 bp, Homo sapien
accgaggaccttaagctggaccacg

SEQ ID NO: 3069102 - DNA, 25 bp, Homo sapien
tctgagcggcgcatgtaaccgagga

SEQ ID NO: 3069103 - DNA, 25 bp, Homo sapien
gaaagtgacctgctctgagcggcgc

SEQ ID NO: 3069104 - DNA, 25 bp, Homo sapien
tgaaggaggacgtggaaggcagaaa

SEQ ID NO: 3069105 - DNA, 25 bp, Homo sapien
aactgctcgccaccgaccccactac

SEQ ID NO: 3069106 - DNA, 25 bp, Homo sapien
accaccaactgctcgccaccgaccc

SEQ ID NO: 3069107 - DNA, 25 bp, Homo sapien
caccgaccccactactcgccaccga

SEQ ID NO: 3069108 - DNA, 25 bp, Homo sapien
cgcggcccaccaccaactgctcgcc

SEQ ID NO: 3069109 - DNA, 25 bp, Homo sapien
cgctgctcggagcttcggttctgcg

SEQ ID NO: 3069110 - DNA, 25 bp, Homo sapien
gggttgtccagacttcaggcctgtg

SEQ ID NO: 3069111 - DNA, 25 bp, Homo sapien
ctcaatcgtggagaatgcgccggca

SEQ ID NO: 3069112 - DNA, 25 bp, Homo sapien
caggcctgtgcgctcaatcgtggag

SEQ ID NO: 3069113 - DNA, 25 bp, Homo sapien
ttaaggatgggtgcttccaagacca

SEQ ID NO: 3069114 - DNA, 25 bp, Homo sapien
tctgtctacgtggactgggaaaaca

SEQ ID NO: 3069115 - DNA, 25 bp, Homo sapien
tgagcccaggtacaggacatcagag

SEQ ID NO: 3069116 - DNA, 25 bp, Homo sapien
tgccactccgtttgtgcctgggaag

SEQ ID NO: 3069117 - DNA, 25 bp, Homo sapien
taattagctcaattcatgaaagcgg

SEQ ID NO: 3069118 - DNA, 25 bp, Homo sapien
tgaggctaacgatcatggcagctag

SEQ ID NO: 3069119 - DNA, 25 bp, Homo sapien
gaaagcggtttctaaagtgctctac

SEQ ID NO: 3069120 - DNA, 25 bp, Homo sapien
gttccgtctccctgcacatactggg

SEQ ID NO: 3069121 - DNA, 25 bp, Homo sapien
ggaatgcgtttcttgcggccgcgac

SEQ ID NO: 3069122 - DNA, 25 bp, Homo sapien
gatgaacttgttagccgcatactcc

SEQ ID NO: 3069123 - DNA, 25 bp, Homo sapien
tgccccttgctgtacggaatgcgtt

SEQ ID NO: 3069124 - DNA, 25 bp, Homo sapien
agatggtaatctggcgctccgagag

SEQ ID NO: 3069125 - DNA, 25 bp, Homo sapien
tacaggcgcacgtgcaatcctgttc

SEQ ID NO: 3069126 - DNA, 25 bp, Homo sapien
caagctaagtcatctcacaggtgca

SEQ ID NO: 3069127 - DNA, 25 bp, Homo sapien
cacacacatatgtcacggctgcagg

SEQ ID NO: 3069128 - DNA, 25 bp, Homo sapien
gaaaaggcatggtcagatacccacc

SEQ ID NO: 3069129 - DNA, 25 bp, Homo sapien
gtcatgtcgcggttctccaggagca

SEQ ID NO: 3069130 - DNA, 25 bp, Homo sapien
caaagtaaccataaggcacgggagc

SEQ ID NO: 3069131 - DNA, 25 bp, Homo sapien
tccacaggcaacagggagtcatgtc

SEQ ID NO: 3069132 - DNA, 25 bp, Homo sapien
ccataggctggtaggttcccggata

SEQ ID NO: 3069133 - DNA, 25 bp, Homo sapien
tgcattcgctcagcacggccgtctt

SEQ ID NO: 3069134 - DNA, 25 bp, Homo sapien
ttaaatcgctcccagctcgcaagtc

SEQ ID NO: 3069135 - DNA, 25 bp, Homo sapien
gaatccaaagcgttttaaatcgctc

SEQ ID NO: 3069136 - DNA, 25 bp, Homo sapien
ccgtcttgacgcaagagacgcaggg

SEQ ID NO: 3069137 - DNA, 25 bp, Homo sapien
ttttgtaaagtgagcgcccgctgcc

SEQ ID NO: 3069138 - DNA, 25 bp, Homo sapien
actggagcaaactctgtggcggcga

SEQ ID NO: 3069139 - DNA, 25 bp, Homo sapien
cacccgtcgcactagtgggcatttg

SEQ ID NO: 3069140 - DNA, 25 bp, Homo sapien
gcccggctcctctcgattttatgaa

SEQ ID NO: 3069141 - DNA, 25 bp, Homo sapien
tctcgtgctctggagaagcaccgca

SEQ ID NO: 3069142 - DNA, 25 bp, Homo sapien
ctggtgtgaaaaggcgccatcgcca

SEQ ID NO: 3069143 - DNA, 25 bp, Homo sapien
gggctccgcattaccagtcttggtc

SEQ ID NO: 3069144 - DNA, 25 bp, Homo sapien
gtcttggtcgcaaaagcagcccttt

SEQ ID NO: 3069145 - DNA, 25 bp, Homo sapien
tatctgtggacccgccttcctccac

SEQ ID NO: 3069146 - DNA, 25 bp, Homo sapien
gttatctgtggacccgccttcctcc

SEQ ID NO: 3069147 - DNA, 25 bp, Homo sapien
tagttatctgtggacccgccttcct

SEQ ID NO: 3069148 - DNA, 25 bp, Homo sapien
ctagttatctgtggacccgccttcc

SEQ ID NO: 3069149 - DNA, 25 bp, Homo sapien
tggaaatccataaggcaaagccagg

SEQ ID NO: 3069150 - DNA, 25 bp, Homo sapien
ccagaaattcgttctattggaaatc

SEQ ID NO: 3069151 - DNA, 25 bp, Homo sapien
tcccctgacattcttgaggccagaa

SEQ ID NO: 3069152 - DNA, 25 bp, Homo sapien
caggtcaacactgtgaagcaagcac

SEQ ID NO: 3069153 - DNA, 25 bp, Homo sapien
ccacctctgcctcatatgccccaaa

SEQ ID NO: 3069154 - DNA, 25 bp, Homo sapien
cctctgcctcatatgccccaaaggt

SEQ ID NO: 3069155 - DNA, 25 bp, Homo sapien
tctgcctcatatgccccaaaggtct

SEQ ID NO: 3069156 - DNA, 25 bp, Homo sapien
acctctgcctcatatgccccaaagg

SEQ ID NO: 3069157 - DNA, 25 bp, Homo sapien
gtcaccagaggatgctcgggcactg

SEQ ID NO: 3069158 - DNA, 25 bp, Homo sapien
gctcagagttatgcaccatgcccat

SEQ ID NO: 3069159 - DNA, 25 bp, Homo sapien
gaccttgtgaagttgcagctgcctc

SEQ ID NO: 3069160 - DNA, 25 bp, Homo sapien
cactgaggtggcaagtctttgggct

SEQ ID NO: 3069161 - DNA, 25 bp, Homo sapien
aacactactcccgaagttgctttat

SEQ ID NO: 3069162 - DNA, 25 bp, Homo sapien
tggcatagttctgttggtggactga

SEQ ID NO: 3069163 - DNA, 25 bp, Homo sapien
tcttggagacgaagaccaactggca

SEQ ID NO: 3069164 - DNA, 25 bp, Homo sapien
gcttttgactcctggaaatcatgag

SEQ ID NO: 3069165 - DNA, 25 bp, Homo sapien
agaacccagagaagtgccactggta

SEQ ID NO: 3069166 - DNA, 25 bp, Homo sapien
gaagtgccactggtacggcaactgg

SEQ ID NO: 3069167 - DNA, 25 bp, Homo sapien
gtgccactggtacggcaactggagt

SEQ ID NO: 3069168 - DNA, 25 bp, Homo sapien
cagagaagtgccactggtacggcaa

SEQ ID NO: 3069169 - DNA, 25 bp, Homo sapien
cactgtaagctaactgggagggaac

SEQ ID NO: 3069170 - DNA, 25 bp, Homo sapien
cactggagacactgtcggaagagac

SEQ ID NO: 3069171 - DNA, 25 bp, Homo sapien
tggccccattgctgctactaggaac

SEQ ID NO: 3069172 - DNA, 25 bp, Homo sapien
gaagaccagtatatctagatgagca

SEQ ID NO: 3069173 - DNA, 25 bp, Homo sapien
tcagggtagcgcattacagcccaga

SEQ ID NO: 3069174 - DNA, 25 bp, Homo sapien
attcaccagcgtgatcccactattg

SEQ ID NO: 3069175 - DNA, 25 bp, Homo sapien
cagatacttgatcagggtagcgcat

SEQ ID NO: 3069176 - DNA, 25 bp, Homo sapien
tggagagcagtggatattcaccagc

SEQ ID NO: 3069177 - DNA, 25 bp, Homo sapien
gtatgtctttatcaatccatccatc

SEQ ID NO: 3069178 - DNA, 25 bp, Homo sapien
atgtctttatcaatccatccatcct

SEQ ID NO: 3069179 - DNA, 25 bp, Homo sapien
ctgtatgtctttatcaatccatcca

SEQ ID NO: 3069180 - DNA, 25 bp, Homo sapien
tgtatgtctttatcaatccatccat

SEQ ID NO: 3069181 - DNA, 25 bp, Homo sapien
tacaaggccttggatccagttgggc

SEQ ID NO: 3069182 - DNA, 25 bp, Homo sapien
tcctttttggccagagatcaggcaa

SEQ ID NO: 3069183 - DNA, 25 bp, Homo sapien
tcttgatcctgcatacatgggtccc

SEQ ID NO: 3069184 - DNA, 25 bp, Homo sapien
catagcacttgcgtggcttctacaa

SEQ ID NO: 3069185 - DNA, 25 bp, Homo sapien
tcactgcgggagtggcactccccag

SEQ ID NO: 3069186 - DNA, 25 bp, Homo sapien
tgtcactgcgggagtggcactcccc

SEQ ID NO: 3069187 - DNA, 25 bp, Homo sapien
agctgtcactgcgggagtggcactc

SEQ ID NO: 3069188 - DNA, 25 bp, Homo sapien
ccagagctgtcactgcgggagtggc

SEQ ID NO: 3069189 - DNA, 25 bp, Homo sapien
aaagtcagaagcatcagcgatttgt

SEQ ID NO: 3069190 - DNA, 25 bp, Homo sapien
catcagcgatttgtgctgctggatt

SEQ ID NO: 3069191 - DNA, 25 bp, Homo sapien
gaagcatcagcgatttgtgctgctg

SEQ ID NO: 3069192 - DNA, 25 bp, Homo sapien
tcagaagcatcagcgatttgtgctg

SEQ ID NO: 3069193 - DNA, 25 bp, Homo sapien
cagttgaagcttggtgagtagctcg

SEQ ID NO: 3069194 - DNA, 25 bp, Homo sapien
gacaggttattcatccccagcttgg

SEQ ID NO: 3069195 - DNA, 25 bp, Homo sapien
ccagtttgtgttcggactctcccag

SEQ ID NO: 3069196 - DNA, 25 bp, Homo sapien
gagtagctcggatatcaaatgtggc

SEQ ID NO: 3069197 - DNA, 25 bp, Homo sapien
gtgtggaggggtctgctgcttcttg

SEQ ID NO: 3069198 - DNA, 25 bp, Homo sapien
attttcttctgggttaagtgtggag

SEQ ID NO: 3069199 - DNA, 25 bp, Homo sapien
tgtgggcagaaaagattttaacatt

SEQ ID NO: 3069200 - DNA, 25 bp, Homo sapien
gctgcttcttgcatttaaaggatac

SEQ ID NO: 3069201 - DNA, 25 bp, Homo sapien
tctgggccactgtactcagagctgg

SEQ ID NO: 3069202 - DNA, 25 bp, Homo sapien
cacagccagggttggcggagacttt

SEQ ID NO: 3069203 - DNA, 25 bp, Homo sapien
tcacagccagggttggcggagactt

SEQ ID NO: 3069204 - DNA, 25 bp, Homo sapien
gtactcagagctggcggtcacagcc

SEQ ID NO: 3069205 - DNA, 25 bp, Homo sapien
gcaagtcaggtgtgtaggatactaa

SEQ ID NO: 3069206 - DNA, 25 bp, Homo sapien
gattgatattcctcagatcgggtag

SEQ ID NO: 3069207 - DNA, 25 bp, Homo sapien
gctgaagttgggtttactgggctcc

SEQ ID NO: 3069208 - DNA, 25 bp, Homo sapien
tgaagggcttcgcagacgtcagctt

SEQ ID NO: 3069209 - DNA, 25 bp, Homo sapien
acagccaggactggtccacgctttg

SEQ ID NO: 3069210 - DNA, 25 bp, Homo sapien
cccatgtaatgttctgagagtcctg

SEQ ID NO: 3069211 - DNA, 25 bp, Homo sapien
cacgctttgcatagaggaggagaga

SEQ ID NO: 3069212 - DNA, 25 bp, Homo sapien
ctaagcagagaaggcgtagacagac

SEQ ID NO: 3069213 - DNA, 25 bp, Homo sapien
tctcccgttttagtctcagctcctg

SEQ ID NO: 3069214 - DNA, 25 bp, Homo sapien
tttctcacttgctcgcctgccgatt

SEQ ID NO: 3069215 - DNA, 25 bp, Homo sapien
tgtttctgttgccagcccctcatgc

SEQ ID NO: 3069216 - DNA, 25 bp, Homo sapien
ttgggtggcggccttgtctttctgc

SEQ ID NO: 3069217 - DNA, 25 bp, Homo sapien
aatgcgctgcgcaggcaggcattct

SEQ ID NO: 3069218 - DNA, 25 bp, Homo sapien
ttagaaatgcgctgcgcaggcaggc

SEQ ID NO: 3069219 - DNA, 25 bp, Homo sapien
gaagaacaagtgaacatcatggggg

SEQ ID NO: 3069220 - DNA, 25 bp, Homo sapien
atcatgggggttagaaatgcgctgc

SEQ ID NO: 3069221 - DNA, 25 bp, Homo sapien
catacttctccgaattcagactggg

SEQ ID NO: 3069222 - DNA, 25 bp, Homo sapien
ctgcacggcccggaaacccttggct

SEQ ID NO: 3069223 - DNA, 25 bp, Homo sapien
gagccctggaagcaacagtattctg

SEQ ID NO: 3069224 - DNA, 25 bp, Homo sapien
tcagtcggaaccctccacagttttc

SEQ ID NO: 3069225 - DNA, 25 bp, Homo sapien
cagctttccaggttgatcaggacta

SEQ ID NO: 3069226 - DNA, 25 bp, Homo sapien
tcatctcccgagaacaacactgctg

SEQ ID NO: 3069227 - DNA, 25 bp, Homo sapien
ctctttatccaaccgagagtcggtg

SEQ ID NO: 3069228 - DNA, 25 bp, Homo sapien
taaggtgtcatacagcagaccatct

SEQ ID NO: 3069229 - DNA, 25 bp, Homo sapien
tgtggtccaacaaaatgtcaaagcc

SEQ ID NO: 3069230 - DNA, 25 bp, Homo sapien
caagtatgcactgaaggtggagagc

SEQ ID NO: 3069231 - DNA, 25 bp, Homo sapien
tatctgctccacgttgtagctgtgg

SEQ ID NO: 3069232 - DNA, 25 bp, Homo sapien
tgatgatgacgtcctcaatatccct

SEQ ID NO: 3069233 - DNA, 25 bp, Homo sapien
ttctgctaccccgagacacccctcc

SEQ ID NO: 3069234 - DNA, 25 bp, Homo sapien
agttctgctaccccgagacacccct

SEQ ID NO: 3069235 - DNA, 25 bp, Homo sapien
cttagttctgctaccccgagacacc

SEQ ID NO: 3069236 - DNA, 25 bp, Homo sapien
ctgctaccccgagacacccctccat

SEQ ID NO: 3069237 - DNA, 25 bp, Homo sapien
tggggtgccaattctcattggagga

SEQ ID NO: 3069238 - DNA, 25 bp, Homo sapien
aacctttccattctgtgcccttaga

SEQ ID NO: 3069239 - DNA, 25 bp, Homo sapien
cctttccattctgtgcccttagact

SEQ ID NO: 3069240 - DNA, 25 bp, Homo sapien
gggcctgctgttggggtgccaattc

SEQ ID NO: 3069241 - DNA, 25 bp, Homo sapien
atttgaactgtgcttattaatggaa

SEQ ID NO: 3069242 - DNA, 25 bp, Homo sapien
ggaataattagtcaggtgcatgcag

SEQ ID NO: 3069243 - DNA, 25 bp, Homo sapien
gtgtgcatctcgactgaaatttgaa

SEQ ID NO: 3069244 - DNA, 25 bp, Homo sapien
tactgccagagtgtgcatctcgact

SEQ ID NO: 3069245 - DNA, 25 bp, Homo sapien
aggtcgtcgcaaagcgggccagtcc

SEQ ID NO: 3069246 - DNA, 25 bp, Homo sapien
tacataaatccgtaggtcaaactta

SEQ ID NO: 3069247 - DNA, 25 bp, Homo sapien
gcgggccagtccttcattgtacaca

SEQ ID NO: 3069248 - DNA, 25 bp, Homo sapien
caggatgtcaccagtacataaatcc

SEQ ID NO: 3069249 - DNA, 25 bp, Homo sapien
cagatcatatcctcccctggtttga

SEQ ID NO: 3069250 - DNA, 25 bp, Homo sapien
gcccgaatccggcttacaaatgtat

SEQ ID NO: 3069251 - DNA, 25 bp, Homo sapien
atttctttcactgtccgggtgatga

SEQ ID NO: 3069252 - DNA, 25 bp, Homo sapien
cactgtccgggtgatgaatatacct

SEQ ID NO: 3069253 - DNA, 25 bp, Homo sapien
gctttggagttctggacctggctca

SEQ ID NO: 3069254 - DNA, 25 bp, Homo sapien
tggctcaagccctgacaagtgatgt

SEQ ID NO: 3069255 - DNA, 25 bp, Homo sapien
gattttggatccgtcagtctctcac

SEQ ID NO: 3069256 - DNA, 25 bp, Homo sapien
tcctgtggtgcctagttgcatgaca

SEQ ID NO: 3069257 - DNA, 25 bp, Homo sapien
catctttaacatgcggctcatgttc

SEQ ID NO: 3069258 - DNA, 25 bp, Homo sapien
caggaagacaccaggtcctagggaa

SEQ ID NO: 3069259 - DNA, 25 bp, Homo sapien
aagcggaaatctttagggaacatct

SEQ ID NO: 3069260 - DNA, 25 bp, Homo sapien
aagtccttccggcagatttcactca

SEQ ID NO: 3069261 - DNA, 25 bp, Homo sapien
gagagtccagtcatcgtcttcccct

SEQ ID NO: 3069262 - DNA, 25 bp, Homo sapien
tctaaagccgtactgttgggcagcc

SEQ ID NO: 3069263 - DNA, 25 bp, Homo sapien
tccatcacccgctccagtgacactg

SEQ ID NO: 3069264 - DNA, 25 bp, Homo sapien
cactgagtaatctgtccaatagaga

SEQ ID NO: 3069265 - DNA, 25 bp, Homo sapien
ggcagctggatagattgatcaccaa

SEQ ID NO: 3069266 - DNA, 25 bp, Homo sapien
cggcagctggatagattgatcacca

SEQ ID NO: 3069267 - DNA, 25 bp, Homo sapien
gcagctggatagattgatcaccaat

SEQ ID NO: 3069268 - DNA, 25 bp, Homo sapien
catgctaagcctggtttgaccgtcc

SEQ ID NO: 3069269 - DNA, 25 bp, Homo sapien
tgcacaagctgcagttggatcctga

SEQ ID NO: 3069270 - DNA, 25 bp, Homo sapien
gaaggcgtactaaatttccaggaca

SEQ ID NO: 3069271 - DNA, 25 bp, Homo sapien
ccctgttgctgaggacacgagtcca

SEQ ID NO: 3069272 - DNA, 25 bp, Homo sapien
cagcacacagtttctcctttactct

SEQ ID NO: 3069273 - DNA, 25 bp, Homo sapien
aaacagatcatcgaaagtagattct

SEQ ID NO: 3069274 - DNA, 25 bp, Homo sapien
caaaagtggtgagatgttgacagtc

SEQ ID NO: 3069275 - DNA, 25 bp, Homo sapien
attaggacaaggcatggttttttag

SEQ ID NO: 3069276 - DNA, 25 bp, Homo sapien
tccccattccccagctttcaatcct

SEQ ID NO: 3069277 - DNA, 25 bp, Homo sapien
ccattccccagctttcaatcctaac

SEQ ID NO: 3069278 - DNA, 25 bp, Homo sapien
aacatggctccccattccccagctt

SEQ ID NO: 3069279 - DNA, 25 bp, Homo sapien
ctccccattccccagctttcaatcc

SEQ ID NO: 3069280 - DNA, 25 bp, Homo sapien
tcttcttcttgccttgctgctgggc

SEQ ID NO: 3069281 - DNA, 25 bp, Homo sapien
ttcttcttgccttgctgctgggcat

SEQ ID NO: 3069282 - DNA, 25 bp, Homo sapien
cttcctcttcttcttgccttgctgc

SEQ ID NO: 3069283 - DNA, 25 bp, Homo sapien
tcctcttcttcttgccttgctgctg

SEQ ID NO: 3069284 - DNA, 25 bp, Homo sapien
ctgaagtccgttttgtgcccctggg

SEQ ID NO: 3069285 - DNA, 25 bp, Homo sapien
tccaaagtcgggcactgtggcatct

SEQ ID NO: 3069286 - DNA, 25 bp, Homo sapien
ctggctttccaaagtcgggcactgt

SEQ ID NO: 3069287 - DNA, 25 bp, Homo sapien
cagcgcgacggtttcttttggatct

SEQ ID NO: 3069288 - DNA, 25 bp, Homo sapien
tgcagggggaccccctccctcgctc

SEQ ID NO: 3069289 - DNA, 25 bp, Homo sapien
cagggggaccccctccctcgctcat

SEQ ID NO: 3069290 - DNA, 25 bp, Homo sapien
ctgcagggggaccccctccctcgct

SEQ ID NO: 3069291 - DNA, 25 bp, Homo sapien
gcagggggaccccctccctcgctca

SEQ ID NO: 3069292 - DNA, 25 bp, Homo sapien
ccttgctacttattacctgttcctc

SEQ ID NO: 3069293 - DNA, 25 bp, Homo sapien
tccacagtccccttgctacttatta

SEQ ID NO: 3069294 - DNA, 25 bp, Homo sapien
tcttcacctccgaaaatcctgcaaa

SEQ ID NO: 3069295 - DNA, 25 bp, Homo sapien
aacccctctcctccgatgtccacag

SEQ ID NO: 3069296 - DNA, 25 bp, Homo sapien
tgttggtgccaacaccaaaagcagt

SEQ ID NO: 3069297 - DNA, 25 bp, Homo sapien
ggtagttcccacctattgtcttgcg

SEQ ID NO: 3069298 - DNA, 25 bp, Homo sapien
caaaagcagtcttgtagccttgagg

SEQ ID NO: 3069299 - DNA, 25 bp, Homo sapien
gcgtaacaattttgttggtgccaac

SEQ ID NO: 3069300 - DNA, 25 bp, Homo sapien
tgctagtccagcttgcaaccacacc

SEQ ID NO: 3069301 - DNA, 25 bp, Homo sapien
cctcgaaggatgaaggagtaacgct

SEQ ID NO: 3069302 - DNA, 25 bp, Homo sapien
ccgcaattcctactcccccgtctcg

SEQ ID NO: 3069303 - DNA, 25 bp, Homo sapien
gcaattcctactcccccgtctcgcc

SEQ ID NO: 3069304 - DNA, 25 bp, Homo sapien
gggcgccaggggctggaccgccgct

SEQ ID NO: 3069305 - DNA, 25 bp, Homo sapien
ccaggggctggaccgccgctcgctc

SEQ ID NO: 3069306 - DNA, 25 bp, Homo sapien
gcgccaggggctggaccgccgctcg

SEQ ID NO: 3069307 - DNA, 25 bp, Homo sapien
ccgggcgccaggggctggaccgccg

SEQ ID NO: 3069308 - DNA, 25 bp, Homo sapien
gtcgggcgccgtgcgcgggcgcggc

SEQ ID NO: 3069309 - DNA, 25 bp, Homo sapien
cttgcccagcgagccaagccgcagt

SEQ ID NO: 3069310 - DNA, 25 bp, Homo sapien
ctggctccagaggtccagctgcgcg

SEQ ID NO: 3069311 - DNA, 25 bp, Homo sapien
ggcgcggccagaacgtctggctcca

SEQ ID NO: 3069312 - DNA, 25 bp, Homo sapien
ttatgtactgtttttgactccaaaa

SEQ ID NO: 3069313 - DNA, 25 bp, Homo sapien
gaggatcagggttcatattcccgca

SEQ ID NO: 3069314 - DNA, 25 bp, Homo sapien
gaagaggcctttacgactaccagat

SEQ ID NO: 3069315 - DNA, 25 bp, Homo sapien
aattggacacaatagaggacacacc

SEQ ID NO: 3069316 - DNA, 25 bp, Homo sapien
ctctgaggcgtgttttgctgcatcc

SEQ ID NO: 3069317 - DNA, 25 bp, Homo sapien
caggttggagtgcgctgacctgatc

SEQ ID NO: 3069318 - DNA, 25 bp, Homo sapien
ccaggttggagtgcgctgacctgat

SEQ ID NO: 3069319 - DNA, 25 bp, Homo sapien
caagaggtgcaaaggttagtggttc

SEQ ID NO: 3069320 - DNA, 25 bp, Homo sapien
cagcagtttgggcaccagcattcaa

SEQ ID NO: 3069321 - DNA, 25 bp, Homo sapien
aagtccagaaaatggtacacccttg

SEQ ID NO: 3069322 - DNA, 25 bp, Homo sapien
tctggcattactacctcagggtcgg

SEQ ID NO: 3069323 - DNA, 25 bp, Homo sapien
tagttttccaagttgtcccactgcc

SEQ ID NO: 3069324 - DNA, 25 bp, Homo sapien
ttagactagccaaaaatgccgtggc

SEQ ID NO: 3069325 - DNA, 25 bp, Homo sapien
caggcctgacttgatactaagtgat

SEQ ID NO: 3069326 - DNA, 25 bp, Homo sapien
gattggtccgaggttgagaattcct

SEQ ID NO: 3069327 - DNA, 25 bp, Homo sapien
gaactaagttcaatgcgctctatcc

SEQ ID NO: 3069328 - DNA, 25 bp, Homo sapien
tgtggattttcgcaccctttgtgaa

SEQ ID NO: 3069329 - DNA, 25 bp, Homo sapien
aatggcgcagttgactcactacagc

SEQ ID NO: 3069330 - DNA, 25 bp, Homo sapien
tcccaggcagtatcaggtggtcact

SEQ ID NO: 3069331 - DNA, 25 bp, Homo sapien
tgttccctgggatgttgtgcactgc

SEQ ID NO: 3069332 - DNA, 25 bp, Homo sapien
cacatccgttgtcagggtctaatcc

SEQ ID NO: 3069333 - DNA, 25 bp, Homo sapien
gaggatctctacaaggtccccaggg

SEQ ID NO: 3069334 - DNA, 25 bp, Homo sapien
catgcccgtgaatgcctgccttgat

SEQ ID NO: 3069335 - DNA, 25 bp, Homo sapien
caagacgcttgacttgaagggaaaa

SEQ ID NO: 3069336 - DNA, 25 bp, Homo sapien
cggccatggcgagcactgaagtctc

SEQ ID NO: 3069337 - DNA, 25 bp, Homo sapien
tcggccatggcgagcactgaagtct

SEQ ID NO: 3069338 - DNA, 25 bp, Homo sapien
ggccatggcgagcactgaagtctcc

SEQ ID NO: 3069339 - DNA, 25 bp, Homo sapien
atacaaagagaaacaccacacgtcc

SEQ ID NO: 3069340 - DNA, 25 bp, Homo sapien
gagaaacaccacacgtccctgttct

SEQ ID NO: 3069341 - DNA, 25 bp, Homo sapien
tgttctgggaacaaaagacaaatac

SEQ ID NO: 3069342 - DNA, 25 bp, Homo sapien
ctgttctgggaacaaaagacaaata

SEQ ID NO: 3069343 - DNA, 25 bp, Homo sapien
tcccgttttctgcagaccgagacgc

SEQ ID NO: 3069344 - DNA, 25 bp, Homo sapien
gttttctgcagaccgagacgcgggc

SEQ ID NO: 3069345 - DNA, 25 bp, Homo sapien
gccctctcccgttttctgcagaccg

SEQ ID NO: 3069346 - DNA, 25 bp, Homo sapien
tttctgcagaccgagacgcgggcac

SEQ ID NO: 3069347 - DNA, 25 bp, Homo sapien
actccaaggttgagttcctgctgcc

SEQ ID NO: 3069348 - DNA, 25 bp, Homo sapien
gcaagtgcaactggccagcagtcac

SEQ ID NO: 3069349 - DNA, 25 bp, Homo sapien
agccagcaagtgcaactggccagca

SEQ ID NO: 3069350 - DNA, 25 bp, Homo sapien
tgggcccacttcatccagatcatga

SEQ ID NO: 3069351 - DNA, 25 bp, Homo sapien
gacggaatcctgctcagttgcccag

SEQ ID NO: 3069352 - DNA, 25 bp, Homo sapien
atcctgctcagttgcccaggctgga

SEQ ID NO: 3069353 - DNA, 25 bp, Homo sapien
gcctttactctccatggaaagcggt

SEQ ID NO: 3069354 - DNA, 25 bp, Homo sapien
cgcttggggactttccagccggcct

SEQ ID NO: 3069355 - DNA, 25 bp, Homo sapien
gactttccagccggcctttactctc

SEQ ID NO: 3069356 - DNA, 25 bp, Homo sapien
catggaaagcggtctttccacaaac

SEQ ID NO: 3069357 - DNA, 25 bp, Homo sapien
gttatggaacctctgagtcccgcca

SEQ ID NO: 3069358 - DNA, 25 bp, Homo sapien
atccagatctcgtaggaaagccccg

SEQ ID NO: 3069359 - DNA, 25 bp, Homo sapien
cgtttcagggatcggccaatcgtaa

SEQ ID NO: 3069360 - DNA, 25 bp, Homo sapien
catcttgtgcgcgaggttatggaac

SEQ ID NO: 3069361 - DNA, 25 bp, Homo sapien
ggatggagtgcagtgactcagtctc

SEQ ID NO: 3069362 - DNA, 25 bp, Homo sapien
ggttcaagtgattcttctgtctcag

SEQ ID NO: 3069363 - DNA, 25 bp, Homo sapien
ggctcactgcaacttctccttcccg

SEQ ID NO: 3069364 - DNA, 25 bp, Homo sapien
caccgtgcccggcccagacttcttt

SEQ ID NO: 3069365 - DNA, 25 bp, Homo sapien
gggtcgccgccattaacgggaatga

SEQ ID NO: 3069366 - DNA, 25 bp, Homo sapien
ggatcaatcgcagagcctttccgag

SEQ ID NO: 3069367 - DNA, 25 bp, Homo sapien
gcaatggtaccctgccctaggtgca

SEQ ID NO: 3069368 - DNA, 25 bp, Homo sapien
gaatcctcagggtttacactcacag

SEQ ID NO: 3069369 - DNA, 25 bp, Homo sapien
cctttcctgccggatgtgtgggcgg

SEQ ID NO: 3069370 - DNA, 25 bp, Homo sapien
gtagtcccggaagcgaagcagcgat

SEQ ID NO: 3069371 - DNA, 25 bp, Homo sapien
tgttgttggcgttagcggcagcggc

SEQ ID NO: 3069372 - DNA, 25 bp, Homo sapien
cagcgatggcggagagtccgactga

SEQ ID NO: 3069373 - DNA, 25 bp, Homo sapien
ccttcgtgccacataaatgtagggt

SEQ ID NO: 3069374 - DNA, 25 bp, Homo sapien
tctgggactggtctaatggctctga

SEQ ID NO: 3069375 - DNA, 25 bp, Homo sapien
cacaataggtttgatcctctgcaga

SEQ ID NO: 3069376 - DNA, 25 bp, Homo sapien
tgcagaggaagcaagcagataccct

SEQ ID NO: 3069377 - DNA, 25 bp, Homo sapien
tagccaagtcggttgttagcagata

SEQ ID NO: 3069378 - DNA, 25 bp, Homo sapien
taggtcagcctttatcaaccggagt

SEQ ID NO: 3069379 - DNA, 25 bp, Homo sapien
caaccggagtccctcatctgaacta

SEQ ID NO: 3069380 - DNA, 25 bp, Homo sapien
catctgggaacttgtagccgagcag

SEQ ID NO: 3069381 - DNA, 25 bp, Homo sapien
agtagtagaagtgtgttaggtagaa

SEQ ID NO: 3069382 - DNA, 25 bp, Homo sapien
aattgaaaatttgccataaagaatc

SEQ ID NO: 3069383 - DNA, 25 bp, Homo sapien
ttgaaaatttgccataaagaatcac

SEQ ID NO: 3069384 - DNA, 25 bp, Homo sapien
tagaagtgtgttaggtagaaaagga

SEQ ID NO: 3069385 - DNA, 25 bp, Homo sapien
ttaggtgttcctagttgactgtatt

SEQ ID NO: 3069386 - DNA, 25 bp, Homo sapien
ctgtattagctttatcagccatgtt

SEQ ID NO: 3069387 - DNA, 25 bp, Homo sapien
aattcttaggtgttcctagttgact

SEQ ID NO: 3069388 - DNA, 25 bp, Homo sapien
actgtattagctttatcagccatgt

SEQ ID NO: 3069389 - DNA, 25 bp, Homo sapien
tgtgactgggacttaaccaaggtct

SEQ ID NO: 3069390 - DNA, 25 bp, Homo sapien
taaagcctgcatggcaccgtaagaa

SEQ ID NO: 3069391 - DNA, 25 bp, Homo sapien
taagctttacctagcacctgagcac

SEQ ID NO: 3069392 - DNA, 25 bp, Homo sapien
tctgtgacacttaagcagtctgggt

SEQ ID NO: 3069393 - DNA, 25 bp, Homo sapien
catgaagatcgaaaagggaccctgc

SEQ ID NO: 3069394 - DNA, 25 bp, Homo sapien
cagtgtccagccatgcataagggag

SEQ ID NO: 3069395 - DNA, 25 bp, Homo sapien
tactccagggcttagaagaatgctc

SEQ ID NO: 3069396 - DNA, 25 bp, Homo sapien
gcgattcttgtgatgcagggcctca

SEQ ID NO: 3069397 - DNA, 25 bp, Homo sapien
taatctatgtctcacagctacaaag

SEQ ID NO: 3069398 - DNA, 25 bp, Homo sapien
gctacaaagactagacaggccagga

SEQ ID NO: 3069399 - DNA, 25 bp, Homo sapien
tactgaacgagcgaggttttcctcc

SEQ ID NO: 3069400 - DNA, 25 bp, Homo sapien
gaaacaacccacattctaggcccag

SEQ ID NO: 3069401 - DNA, 25 bp, Homo sapien
ccaggtttatttgccacctccgcct

SEQ ID NO: 3069402 - DNA, 25 bp, Homo sapien
cctggggcctgtaagtccagccacg

SEQ ID NO: 3069403 - DNA, 25 bp, Homo sapien
cctcagctgtaatctcctgggagta

SEQ ID NO: 3069404 - DNA, 25 bp, Homo sapien
gccacgccaacccttccttcagcag

SEQ ID NO: 3069405 - DNA, 25 bp, Homo sapien
cagctgtaatctcctgggagtagag

SEQ ID NO: 3069406 - DNA, 25 bp, Homo sapien
caaccaactaaacgagctgtttggc

SEQ ID NO: 3069407 - DNA, 25 bp, Homo sapien
tgagaacagggaggttccatagaca

SEQ ID NO: 3069408 - DNA, 25 bp, Homo sapien
tacgaagtcatttaacttgtgctgc

SEQ ID NO: 3069409 - DNA, 25 bp, Homo sapien
catagacaaagggtaggtaagcaac

SEQ ID NO: 3069410 - DNA, 25 bp, Homo sapien
cgctcggtctcccatttaagactgg

SEQ ID NO: 3069411 - DNA, 25 bp, Homo sapien
gatctcactgacagtcacgtagcca

SEQ ID NO: 3069412 - DNA, 25 bp, Homo sapien
taagactggctttgatctcactgac

SEQ ID NO: 3069413 - DNA, 25 bp, Homo sapien
ggtctcccatttaagactggctttg

SEQ ID NO: 3069414 - DNA, 25 bp, Homo sapien
gcactctagagcatgacaagggaag

SEQ ID NO: 3069415 - DNA, 25 bp, Homo sapien
tctgcccaggaacaagagacttacc

SEQ ID NO: 3069416 - DNA, 25 bp, Homo sapien
catcaaagagtctggctacccaaag

SEQ ID NO: 3069417 - DNA, 25 bp, Homo sapien
gaagtgactttcagcatgacagagg

SEQ ID NO: 3069418 - DNA, 25 bp, Homo sapien
aatgaggtaagtgccgcccacaggg

SEQ ID NO: 3069419 - DNA, 25 bp, Homo sapien
tcttgatggctctgatcaggtcatc

SEQ ID NO: 3069420 - DNA, 25 bp, Homo sapien
cacagggatgatgccgaagccagtg

SEQ ID NO: 3069421 - DNA, 25 bp, Homo sapien
aagtgccgcccacagggatgatgcc

SEQ ID NO: 3069422 - DNA, 25 bp, Homo sapien
cctaacaacacagtttcagctctgc

SEQ ID NO: 3069423 - DNA, 25 bp, Homo sapien
gcagaatcagacctaacaacacagt

SEQ ID NO: 3069424 - DNA, 25 bp, Homo sapien
ctgaggtaaggaagagttgcttaac

SEQ ID NO: 3069425 - DNA, 25 bp, Homo sapien
ttaacgacccttggcagaatcagac

SEQ ID NO: 3069426 - DNA, 25 bp, Homo sapien
aaaatacaagaactagcagggcgcc

SEQ ID NO: 3069427 - DNA, 25 bp, Homo sapien
acaagaactagcagggcgccagtgg

SEQ ID NO: 3069428 - DNA, 25 bp, Homo sapien
gcagggcgccagtggcaggtacctg

SEQ ID NO: 3069429 - DNA, 25 bp, Homo sapien
aatacaagaactagcagggcgccag

SEQ ID NO: 3069430 - DNA, 25 bp, Homo sapien
ttctaagctagcctagacatgagga

SEQ ID NO: 3069431 - DNA, 25 bp, Homo sapien
gatttctaagctagcctagacatga

SEQ ID NO: 3069432 - DNA, 25 bp, Homo sapien
cagatttctaagctagcctagacat

SEQ ID NO: 3069433 - DNA, 25 bp, Homo sapien
tacagatttctaagctagcctagac

SEQ ID NO: 3069434 - DNA, 25 bp, Homo sapien
caagggattggaagacaagacctac

SEQ ID NO: 3069435 - DNA, 25 bp, Homo sapien
gtactccaagggattggaagacaag

SEQ ID NO: 3069436 - DNA, 25 bp, Homo sapien
ctctttctgtactccaagggattgg

SEQ ID NO: 3069437 - DNA, 25 bp, Homo sapien
tctgtactccaagggattggaagac

SEQ ID NO: 3069438 - DNA, 25 bp, Homo sapien
gatgtagttcctccaaagttatcag

SEQ ID NO: 3069439 - DNA, 25 bp, Homo sapien
taaggtcacattttagggaacacag

SEQ ID NO: 3069440 - DNA, 25 bp, Homo sapien
gactagggactagaccttcctggcc

SEQ ID NO: 3069441 - DNA, 25 bp, Homo sapien
aattccagtggcctacaagtagcaa

SEQ ID NO: 3069442 - DNA, 25 bp, Homo sapien
tggcattcccatacgtcggagagac

SEQ ID NO: 3069443 - DNA, 25 bp, Homo sapien
tgcatgaaacagctaagatgtctct

SEQ ID NO: 3069444 - DNA, 25 bp, Homo sapien
gattcaactgcatgaaacagctaag

SEQ ID NO: 3069445 - DNA, 25 bp, Homo sapien
ccatggagacttgccatggattcaa

SEQ ID NO: 3069446 - DNA, 25 bp, Homo sapien
taagatgtctctcaagtccttagag

SEQ ID NO: 3069447 - DNA, 25 bp, Homo sapien
caggatggaaacgataatcttttac

SEQ ID NO: 3069448 - DNA, 25 bp, Homo sapien
gagtccagttcacaggacctagcca

SEQ ID NO: 3069449 - DNA, 25 bp, Homo sapien
tttctccctctcagagaagtccaga

SEQ ID NO: 3069450 - DNA, 25 bp, Homo sapien
ctgcaggatggaaacgataatcttt

SEQ ID NO: 3069451 - DNA, 25 bp, Homo sapien
gacacctagttcgtaatagaagtcc

SEQ ID NO: 3069452 - DNA, 25 bp, Homo sapien
gataatttggacacctagttcgtaa

SEQ ID NO: 3069453 - DNA, 25 bp, Homo sapien
caggcacacttcgataatttggaca

SEQ ID NO: 3069454 - DNA, 25 bp, Homo sapien
attccgatgcttcagcgccaggcac

SEQ ID NO: 3069455 - DNA, 25 bp, Homo sapien
gctactcaggaaacaatcggactca

SEQ ID NO: 3069456 - DNA, 25 bp, Homo sapien
aacaaaatctcggttattgattaat

SEQ ID NO: 3069457 - DNA, 25 bp, Homo sapien
aacatctatcatatgggaagtcttc

SEQ ID NO: 3069458 - DNA, 25 bp, Homo sapien
catctatcatatgggaagtcttccc

SEQ ID NO: 3069459 - DNA, 25 bp, Homo sapien
gagggcaggcaatctaaaagtcatt

SEQ ID NO: 3069460 - DNA, 25 bp, Homo sapien
ctgaagaacagggtcagacggctcc

SEQ ID NO: 3069461 - DNA, 25 bp, Homo sapien
agaacagggtcagacggctccagag

SEQ ID NO: 3069462 - DNA, 25 bp, Homo sapien
cagagggcaggcaatctaaaagtca

SEQ ID NO: 3069463 - DNA, 25 bp, Homo sapien
ggatccacgccaatggttgcacaca

SEQ ID NO: 3069464 - DNA, 25 bp, Homo sapien
agcggatccacgccaatggttgcac

SEQ ID NO: 3069465 - DNA, 25 bp, Homo sapien
gcggatccacgccaatggttgcaca

SEQ ID NO: 3069466 - DNA, 25 bp, Homo sapien
atccacgccaatggttgcacacatg

SEQ ID NO: 3069467 - DNA, 25 bp, Homo sapien
tcttccccaatcacaatcactgggt

SEQ ID NO: 3069468 - DNA, 25 bp, Homo sapien
aatcactgggtaaactcggagcacg

SEQ ID NO: 3069469 - DNA, 25 bp, Homo sapien
ctcggagcacgtacagagaagggaa

SEQ ID NO: 3069470 - DNA, 25 bp, Homo sapien
cctgcttaacggcttcctccacttc

SEQ ID NO: 3069471 - DNA, 25 bp, Homo sapien
ctgggctagctggtcctcagccaag

SEQ ID NO: 3069472 - DNA, 25 bp, Homo sapien
agccaagaccgtccctcgctcctta

SEQ ID NO: 3069473 - DNA, 25 bp, Homo sapien
ggtcctcagccaagaccgtccctcg

SEQ ID NO: 3069474 - DNA, 25 bp, Homo sapien
ccgtccctcgctccttatacttggc

SEQ ID NO: 3069475 - DNA, 25 bp, Homo sapien
gcaagtttcttcttggcgatggcgc

SEQ ID NO: 3069476 - DNA, 25 bp, Homo sapien
tttcttcttggcgatggcgccagct

SEQ ID NO: 3069477 - DNA, 25 bp, Homo sapien
ctctgcaagtttcttcttggcgatg

SEQ ID NO: 3069478 - DNA, 25 bp, Homo sapien
aagtttcttcttggcgatggcgcca

SEQ ID NO: 3069479 - DNA, 25 bp, Homo sapien
gtctccacgtcccggactccgccgc

SEQ ID NO: 3069480 - DNA, 25 bp, Homo sapien
cacgtcccggactccgccgccggct

SEQ ID NO: 3069481 - DNA, 25 bp, Homo sapien
cctgggcccgcgggccgcccggctg

SEQ ID NO: 3069482 - DNA, 25 bp, Homo sapien
tgggcccgcgggccgcccggctgcc

SEQ ID NO: 3069483 - DNA, 25 bp, Homo sapien
atttggggaaatcgcgagtcggcac

SEQ ID NO: 3069484 - DNA, 25 bp, Homo sapien
gggaaatcgcgagtcggcacatccg

SEQ ID NO: 3069485 - DNA, 25 bp, Homo sapien
tcgcgagtcggcacatccggagtgc

SEQ ID NO: 3069486 - DNA, 25 bp, Homo sapien
agagcgcaaacgcagtccaccgcta

SEQ ID NO: 3069487 - DNA, 25 bp, Homo sapien
gaagggtaatgagccaacattgtaa

SEQ ID NO: 3069488 - DNA, 25 bp, Homo sapien
agggtaatgagccaacattgtaaca

SEQ ID NO: 3069489 - DNA, 25 bp, Homo sapien
catgcccgttaacacccaatcatca

SEQ ID NO: 3069490 - DNA, 25 bp, Homo sapien
gtcagaagggtaatgagccaacatt

SEQ ID NO: 3069491 - DNA, 25 bp, Homo sapien
taaattttcacaatgggctcgactt

SEQ ID NO: 3069492 - DNA, 25 bp, Homo sapien
ggtgctaagtgaagggcagaatcca

SEQ ID NO: 3069493 - DNA, 25 bp, Homo sapien
gctcgacttagcataaactttattg

SEQ ID NO: 3069494 - DNA, 25 bp, Homo sapien
gttctcttggctattctggagtggg

SEQ ID NO: 3069495 - DNA, 25 bp, Homo sapien
cccgcagcaaatcttcatcgctggg

SEQ ID NO: 3069496 - DNA, 25 bp, Homo sapien
gtttgtctgatccagcaagcaggcc

SEQ ID NO: 3069497 - DNA, 25 bp, Homo sapien
tcttgaatcagcaagtcccgcagca

SEQ ID NO: 3069498 - DNA, 25 bp, Homo sapien
gagcctgcagaggtttgtctgatcc

SEQ ID NO: 3069499 - DNA, 25 bp, Homo sapien
gcttatctcaggtccttgctctgct

SEQ ID NO: 3069500 - DNA, 25 bp, Homo sapien
atgcttatctcaggtccttgctctg

SEQ ID NO: 3069501 - DNA, 25 bp, Homo sapien
tttgctcaatgaagacccctctttg

SEQ ID NO: 3069502 - DNA, 25 bp, Homo sapien
aggagtttgctcaatgaagacccct

SEQ ID NO: 3069503 - DNA, 25 bp, Homo sapien
tcctccttcctattagcttgactgg

SEQ ID NO: 3069504 - DNA, 25 bp, Homo sapien
ttcctattagcttgactggccagct

SEQ ID NO: 3069505 - DNA, 25 bp, Homo sapien
tccttcctattagcttgactggcca

SEQ ID NO: 3069506 - DNA, 25 bp, Homo sapien
tattagcttgactggccagctccag

SEQ ID NO: 3069507 - DNA, 25 bp, Homo sapien
ttgttggtgaatcttgtccatggca

SEQ ID NO: 3069508 - DNA, 25 bp, Homo sapien
atgaaagtcccttccgcgtacctgg

SEQ ID NO: 3069509 - DNA, 25 bp, Homo sapien
catggcaatactgtagtcactgatg

SEQ ID NO: 3069510 - DNA, 25 bp, Homo sapien
gttcacaaagtcttgttggtgaatc

SEQ ID NO: 3069511 - DNA, 25 bp, Homo sapien
tccaacaggcagggaggggagagcg

SEQ ID NO: 3069512 - DNA, 25 bp, Homo sapien
agcatgagatccaacaggcagggag

SEQ ID NO: 3069513 - DNA, 25 bp, Homo sapien
cttagcatgagatccaacaggcagg

SEQ ID NO: 3069514 - DNA, 25 bp, Homo sapien
atccaacaggcagggaggggagagc

SEQ ID NO: 3069515 - DNA, 25 bp, Homo sapien
ccaggaggcgctgcttgcagtaatc

SEQ ID NO: 3069516 - DNA, 25 bp, Homo sapien
cccaggaggcgctgcttgcagtaat

SEQ ID NO: 3069517 - DNA, 25 bp, Homo sapien
caggaggcgctgcttgcagtaatcg

SEQ ID NO: 3069518 - DNA, 25 bp, Homo sapien
agagcaaaggtcttcgtggccacca

SEQ ID NO: 3069519 - DNA, 25 bp, Homo sapien
ttctctcctagtcccactgccagga

SEQ ID NO: 3069520 - DNA, 25 bp, Homo sapien
cagcagcagagcaaaggtcttcgtg

SEQ ID NO: 3069521 - DNA, 25 bp, Homo sapien
cagcagagcaaaggtcttcgtggcc

SEQ ID NO: 3069522 - DNA, 25 bp, Homo sapien
ttcccctgatttctggaccttctga

SEQ ID NO: 3069523 - DNA, 25 bp, Homo sapien
gaagaaggacagataggggtctcct

SEQ ID NO: 3069524 - DNA, 25 bp, Homo sapien
agaagaaggacagataggggtctcc

SEQ ID NO: 3069525 - DNA, 25 bp, Homo sapien
agaaggacagataggggtctccttc

SEQ ID NO: 3069526 - DNA, 25 bp, Homo sapien
tcatagctgtattgacaggtaggac

SEQ ID NO: 3069527 - DNA, 25 bp, Homo sapien
cattaggtgaacatctgctctggct

SEQ ID NO: 3069528 - DNA, 25 bp, Homo sapien
tcttgttgccttaaaattgtcctcc

SEQ ID NO: 3069529 - DNA, 25 bp, Homo sapien
gcaaccttactattttcatgaactg

SEQ ID NO: 3069530 - DNA, 25 bp, Homo sapien
tgaatggcatacaatcgtccggccg

SEQ ID NO: 3069531 - DNA, 25 bp, Homo sapien
tatagagaaaccgagttggaagccc

SEQ ID NO: 3069532 - DNA, 25 bp, Homo sapien
aaaaatccgacaaacacgtggctgg

SEQ ID NO: 3069533 - DNA, 25 bp, Homo sapien
ccatttcttttcagcgcgccgggaa

SEQ ID NO: 3069534 - DNA, 25 bp, Homo sapien
agggcctagagagctgccagcagtg

SEQ ID NO: 3069535 - DNA, 25 bp, Homo sapien
gctctggaaactccacctgtctgtc

SEQ ID NO: 3069536 - DNA, 25 bp, Homo sapien
tctggaaactccacctgtctgtccc

SEQ ID NO: 3069537 - DNA, 25 bp, Homo sapien
ctagggcctagagagctgccagcag

SEQ ID NO: 3069538 - DNA, 25 bp, Homo sapien
tcaaaggtgtacatgtagagtaggg

SEQ ID NO: 3069539 - DNA, 25 bp, Homo sapien
tataaggtaggtgttgtaagaattc

SEQ ID NO: 3069540 - DNA, 25 bp, Homo sapien
gagaggggaactaactctgcatata

SEQ ID NO: 3069541 - DNA, 25 bp, Homo sapien
gaaggggactgtaagaatcctcctg

SEQ ID NO: 3069542 - DNA, 25 bp, Homo sapien
taatatttctgtgagataatctttg

SEQ ID NO: 3069543 - DNA, 25 bp, Homo sapien
ttctgtgagataatctttgttccac

SEQ ID NO: 3069544 - DNA, 25 bp, Homo sapien
ctctaatatttctgtgagataatct

SEQ ID NO: 3069545 - DNA, 25 bp, Homo sapien
tatttctgtgagataatctttgttc

SEQ ID NO: 3069546 - DNA, 25 bp, Homo sapien
gctagggggagacgcggatccctga

SEQ ID NO: 3069547 - DNA, 25 bp, Homo sapien
tggttggcagctagggggagacgcg

SEQ ID NO: 3069548 - DNA, 25 bp, Homo sapien
tcatggttggcagctagggggagac

SEQ ID NO: 3069549 - DNA, 25 bp, Homo sapien
ggagacgcggatccctgagggctac

SEQ ID NO: 3069550 - DNA, 25 bp, Homo sapien
ttatggacacgcagacgcttgcggg

SEQ ID NO: 3069551 - DNA, 25 bp, Homo sapien
gatgtttgcccatcgtcatcagggg

SEQ ID NO: 3069552 - DNA, 25 bp, Homo sapien
gggcactaaggaccccgaggagcac

SEQ ID NO: 3069553 - DNA, 25 bp, Homo sapien
agcggccgccacttatggacacgca

SEQ ID NO: 3069554 - DNA, 25 bp, Homo sapien
gaaaccaccagcttcttgacttctg

SEQ ID NO: 3069555 - DNA, 25 bp, Homo sapien
gacttctgattagaaatctggtacc

SEQ ID NO: 3069556 - DNA, 25 bp, Homo sapien
ggtacctgttagatgacgtgagcat

SEQ ID NO: 3069557 - DNA, 25 bp, Homo sapien
gattagaaatctggtacctgttaga

SEQ ID NO: 3069558 - DNA, 25 bp, Homo sapien
cgggctgctcgccttctagaagttc

SEQ ID NO: 3069559 - DNA, 25 bp, Homo sapien
tggtaatttgacacggccagccggt

SEQ ID NO: 3069560 - DNA, 25 bp, Homo sapien
agccccaactggctggaaggcaacc

SEQ ID NO: 3069561 - DNA, 25 bp, Homo sapien
taacttaatcctcacggtgaccgca

SEQ ID NO: 3069562 - DNA, 25 bp, Homo sapien
gataaagtctcggttccatggagga

SEQ ID NO: 3069563 - DNA, 25 bp, Homo sapien
cactgttaccttggtggtgggactt

SEQ ID NO: 3069564 - DNA, 25 bp, Homo sapien
tgggacttggaacccaaccctgagc

SEQ ID NO: 3069565 - DNA, 25 bp, Homo sapien
gcttaattaagatcccatggagtgt

SEQ ID NO: 3069566 - DNA, 25 bp, Homo sapien
tacatatggaaaagcccatgcgtgg

SEQ ID NO: 3069567 - DNA, 25 bp, Homo sapien
catgagccagtaaccctttaggaac

SEQ ID NO: 3069568 - DNA, 25 bp, Homo sapien
caacatgtgggcgtagtcaggcaat

SEQ ID NO: 3069569 - DNA, 25 bp, Homo sapien
taatgcactttagctaccctggaca

SEQ ID NO: 3069570 - DNA, 25 bp, Homo sapien
caagtgagttgaggcttgtgccaca

SEQ ID NO: 3069571 - DNA, 25 bp, Homo sapien
taagggtatgaatcccagccaggac

SEQ ID NO: 3069572 - DNA, 25 bp, Homo sapien
taaccgcaggtgatggatgctacga

SEQ ID NO: 3069573 - DNA, 25 bp, Homo sapien
gattggaactaagggcagggactca

SEQ ID NO: 3069574 - DNA, 25 bp, Homo sapien
tgcttagggcatcagaaaacacttc

SEQ ID NO: 3069575 - DNA, 25 bp, Homo sapien
gtgattatgggtgagatcttgtcct

SEQ ID NO: 3069576 - DNA, 25 bp, Homo sapien
aaacacttctggtgttctctcaaag

SEQ ID NO: 3069577 - DNA, 25 bp, Homo sapien
cttggattgcaaaatgcttagggca

SEQ ID NO: 3069578 - DNA, 25 bp, Homo sapien
tagaggtgagagtatttgccaggca

SEQ ID NO: 3069579 - DNA, 25 bp, Homo sapien
gtatttgccaggcatcagaaggtct

SEQ ID NO: 3069580 - DNA, 25 bp, Homo sapien
attctactagaccagacttcacagg

SEQ ID NO: 3069581 - DNA, 25 bp, Homo sapien
aattctactagaccagacttcacag

SEQ ID NO: 3069582 - DNA, 25 bp, Homo sapien
atcaattccctcatccttttcacaa

SEQ ID NO: 3069583 - DNA, 25 bp, Homo sapien
gcggtgtggttattccctgagtcca

SEQ ID NO: 3069584 - DNA, 25 bp, Homo sapien
aatgaacttagaggtgacatcaatt

SEQ ID NO: 3069585 - DNA, 25 bp, Homo sapien
atccttttcacaagcggtgtggtta

SEQ ID NO: 3069586 - DNA, 25 bp, Homo sapien
gctctgccattctcactagtgtttc

SEQ ID NO: 3069587 - DNA, 25 bp, Homo sapien
tgaggacctaagctcatcctctttt

SEQ ID NO: 3069588 - DNA, 25 bp, Homo sapien
ctctgccattctcactagtgtttct

SEQ ID NO: 3069589 - DNA, 25 bp, Homo sapien
tctgccattctcactagtgtttctc

SEQ ID NO: 3069590 - DNA, 25 bp, Homo sapien
cctgcacaaagcctccggacttgag

SEQ ID NO: 3069591 - DNA, 25 bp, Homo sapien
caggcaaaccgttcctgcacaaagc

SEQ ID NO: 3069592 - DNA, 25 bp, Homo sapien
tccaggcaaaccgttcctgcacaaa

SEQ ID NO: 3069593 - DNA, 25 bp, Homo sapien
tgcacaaagcctccggacttgagag

SEQ ID NO: 3069594 - DNA, 25 bp, Homo sapien
gataatttccttcttctatgctggt

SEQ ID NO: 3069595 - DNA, 25 bp, Homo sapien
aatttccttcttctatgctggtcat

SEQ ID NO: 3069596 - DNA, 25 bp, Homo sapien
gtctgataatttccttcttctatgc

SEQ ID NO: 3069597 - DNA, 25 bp, Homo sapien
cgtctgataatttccttcttctatg

SEQ ID NO: 3069598 - DNA, 25 bp, Homo sapien
caaggtcagacatgagcccaaggag

SEQ ID NO: 3069599 - DNA, 25 bp, Homo sapien
gaccacactgaagaatgggacccac

SEQ ID NO: 3069600 - DNA, 25 bp, Homo sapien
agcggccactacagccatgggctct

SEQ ID NO: 3069601 - DNA, 25 bp, Homo sapien
acttaacttctagccttgggagtgg

SEQ ID NO: 3069602 - DNA, 25 bp, Homo sapien
cctgctgcgcgtagttccatgctta

SEQ ID NO: 3069603 - DNA, 25 bp, Homo sapien
tccacgctggaatacaagcttcacg

SEQ ID NO: 3069604 - DNA, 25 bp, Homo sapien
tagtatcaacagtgtcgggagtgac

SEQ ID NO: 3069605 - DNA, 25 bp, Homo sapien
gataactgcgatgactcacagaagg

SEQ ID NO: 3069606 - DNA, 25 bp, Homo sapien
taagacctcctctacatgtccgtct

SEQ ID NO: 3069607 - DNA, 25 bp, Homo sapien
ccaatggttttattctggtgaaggg

SEQ ID NO: 3069608 - DNA, 25 bp, Homo sapien
tgtccgtctctttctatgcccagta

SEQ ID NO: 3069609 - DNA, 25 bp, Homo sapien
taaaacacttagacactcactacca

SEQ ID NO: 3069610 - DNA, 25 bp, Homo sapien
ggttagctccaaccaagaagctctt

SEQ ID NO: 3069611 - DNA, 25 bp, Homo sapien
tgtcttctaggcagctacggtgtcc

SEQ ID NO: 3069612 - DNA, 25 bp, Homo sapien
aattgagtttgtattccctgccaac

SEQ ID NO: 3069613 - DNA, 25 bp, Homo sapien
tccagttctctggtggcaggtcaat

SEQ ID NO: 3069614 - DNA, 25 bp, Homo sapien
tagagttgccgctctggatccagaa

SEQ ID NO: 3069615 - DNA, 25 bp, Homo sapien
taatcagagtcccaccaagggttga

SEQ ID NO: 3069616 - DNA, 25 bp, Homo sapien
caagtggctgagtgataggctgtcc

SEQ ID NO: 3069617 - DNA, 25 bp, Homo sapien
gagatttctaccgtgccatttgagg

SEQ ID NO: 3069618 - DNA, 25 bp, Homo sapien
tattgtgagtgctggtttgtctgcg

SEQ ID NO: 3069619 - DNA, 25 bp, Homo sapien
gaatctgcttaaataccgtcctagg

SEQ ID NO: 3069620 - DNA, 25 bp, Homo sapien
cagacctctccgctgttgcactgag

SEQ ID NO: 3069621 - DNA, 25 bp, Homo sapien
ctattgcccttaggataaagaagaa

SEQ ID NO: 3069622 - DNA, 25 bp, Homo sapien
aacaggaccatagggtaggacatga

SEQ ID NO: 3069623 - DNA, 25 bp, Homo sapien
ccatctggggtgatctaaatgacta

SEQ ID NO: 3069624 - DNA, 25 bp, Homo sapien
ccatagggtaggacatgatatggag

SEQ ID NO: 3069625 - DNA, 25 bp, Homo sapien
caaactcttgttgtcatcaggccat

SEQ ID NO: 3069626 - DNA, 25 bp, Homo sapien
agtgcttcctaaggactgccctctg

SEQ ID NO: 3069627 - DNA, 25 bp, Homo sapien
gggttcacaatgcatttgttcaggg

SEQ ID NO: 3069628 - DNA, 25 bp, Homo sapien
tcagggatctttactcattctgtga

SEQ ID NO: 3069629 - DNA, 25 bp, Homo sapien
gttcccaggtggtgtaagtgcttcc

SEQ ID NO: 3069630 - DNA, 25 bp, Homo sapien
gagaaaaggatcgtttcctgcttgg

SEQ ID NO: 3069631 - DNA, 25 bp, Homo sapien
ctgcttgggcctccacgtactcctt

SEQ ID NO: 3069632 - DNA, 25 bp, Homo sapien
tttgagaaaaggatcgtttcctgct

SEQ ID NO: 3069633 - DNA, 25 bp, Homo sapien
cctttgagaaaaggatcgtttcctg

SEQ ID NO: 3069634 - DNA, 25 bp, Homo sapien
tccttctcgctgagatcctgggcca

SEQ ID NO: 3069635 - DNA, 25 bp, Homo sapien
catcttcaacaggtccttctcgctg

SEQ ID NO: 3069636 - DNA, 25 bp, Homo sapien
tcaacaggtccttctcgctgagatc

SEQ ID NO: 3069637 - DNA, 25 bp, Homo sapien
cggaattcttgtgtttttcacttct

SEQ ID NO: 3069638 - DNA, 25 bp, Homo sapien
gactcaggtaagatagtgtttgagc

SEQ ID NO: 3069639 - DNA, 25 bp, Homo sapien
tgagcctcctagttcttcatcagct

SEQ ID NO: 3069640 - DNA, 25 bp, Homo sapien
taagatagtgtttgagcctcctagt

SEQ ID NO: 3069641 - DNA, 25 bp, Homo sapien
agtgtttgagcctcctagttcttca

SEQ ID NO: 3069642 - DNA, 25 bp, Homo sapien
ttggtgacctcactagcttagagcc

SEQ ID NO: 3069643 - DNA, 25 bp, Homo sapien
gttctaagcccatcacccgcttgag

SEQ ID NO: 3069644 - DNA, 25 bp, Homo sapien
tgatcataggctcaaagttctaagc

SEQ ID NO: 3069645 - DNA, 25 bp, Homo sapien
gcttagagcccgcagcgcttctatt

SEQ ID NO: 3069646 - DNA, 25 bp, Homo sapien
tgaggcaagtcctagaccggcccct

SEQ ID NO: 3069647 - DNA, 25 bp, Homo sapien
ccctaacctccttaaccaagatgct

SEQ ID NO: 3069648 - DNA, 25 bp, Homo sapien
ttcctcctgaggcaagtcctagacc

SEQ ID NO: 3069649 - DNA, 25 bp, Homo sapien
tgtccttcctcctgaggcaagtcct

SEQ ID NO: 3069650 - DNA, 25 bp, Homo sapien
cttacgaagttctcctagctcactc

SEQ ID NO: 3069651 - DNA, 25 bp, Homo sapien
cgaagttctcctagctcactcttca

SEQ ID NO: 3069652 - DNA, 25 bp, Homo sapien
tacgaagttctcctagctcactctt

SEQ ID NO: 3069653 - DNA, 25 bp, Homo sapien
ttacgaagttctcctagctcactct

SEQ ID NO: 3069654 - DNA, 25 bp, Homo sapien
cagccagaaggacaatgagctctcc

SEQ ID NO: 3069655 - DNA, 25 bp, Homo sapien
gaatttatccagaggcctgctgcag

SEQ ID NO: 3069656 - DNA, 25 bp, Homo sapien
ccaggagggattgaaaggcatccca

SEQ ID NO: 3069657 - DNA, 25 bp, Homo sapien
gaactatgtggagcccagctgctga

SEQ ID NO: 3069658 - DNA, 25 bp, Homo sapien
gcaacaagttacagcggcgggagat

SEQ ID NO: 3069659 - DNA, 25 bp, Homo sapien
ttaactgaatagatagggacggctc

SEQ ID NO: 3069660 - DNA, 25 bp, Homo sapien
taaagctgtctttgccgaatctccc

SEQ ID NO: 3069661 - DNA, 25 bp, Homo sapien
tctgcgaggttactggctgtccgga

SEQ ID NO: 3069662 - DNA, 25 bp, Homo sapien
cccacgtagaagaggcgctcgaagt

SEQ ID NO: 3069663 - DNA, 25 bp, Homo sapien
gaagcaggcgccctgttttgccaca

SEQ ID NO: 3069664 - DNA, 25 bp, Homo sapien
ccacgatagtctcgtcgaagtcgaa

SEQ ID NO: 3069665 - DNA, 25 bp, Homo sapien
tggcttcgtagatggcgctcaggtc

SEQ ID NO: 3069666 - DNA, 25 bp, Homo sapien
gagaggctggttagcgggccacggc

SEQ ID NO: 3069667 - DNA, 25 bp, Homo sapien
gttagcgggccacggccagaggcgc

SEQ ID NO: 3069668 - DNA, 25 bp, Homo sapien
gagcccgcccgggagaggctggtta

SEQ ID NO: 3069669 - DNA, 25 bp, Homo sapien
tggttagcgggccacggccagaggc

SEQ ID NO: 3069670 - DNA, 25 bp, Homo sapien
ctgccagagtccgaagcaagcgggc

SEQ ID NO: 3069671 - DNA, 25 bp, Homo sapien
ggaggtaagagcctcccgcaccagg

SEQ ID NO: 3069672 - DNA, 25 bp, Homo sapien
cagagtccgaagcaagcgggcagca

SEQ ID NO: 3069673 - DNA, 25 bp, Homo sapien
attccccaggaggaacgtgtcagca

SEQ ID NO: 3069674 - DNA, 25 bp, Homo sapien
cagaaactggaaaacagccactcat

SEQ ID NO: 3069675 - DNA, 25 bp, Homo sapien
gccagaaactggaaaacagccactc

SEQ ID NO: 3069676 - DNA, 25 bp, Homo sapien
cctagataggcagcggaggccagaa

SEQ ID NO: 3069677 - DNA, 25 bp, Homo sapien
aggccagaaactggaaaacagccac

SEQ ID NO: 3069678 - DNA, 25 bp, Homo sapien
tgtcggtgcattaccgtgagcacca

SEQ ID NO: 3069679 - DNA, 25 bp, Homo sapien
gtcggtgcattaccgtgagcaccac

SEQ ID NO: 3069680 - DNA, 25 bp, Homo sapien
tcggtgcattaccgtgagcaccacc

SEQ ID NO: 3069681 - DNA, 25 bp, Homo sapien
gtttctttcagtctccaaggcagaa

SEQ ID NO: 3069682 - DNA, 25 bp, Homo sapien
tgtttggtgagttgcccttgtttct

SEQ ID NO: 3069683 - DNA, 25 bp, Homo sapien
tggtgagttgcccttgtttctttca

SEQ ID NO: 3069684 - DNA, 25 bp, Homo sapien
tttcagtctccaaggcagaaagtca

SEQ ID NO: 3069685 - DNA, 25 bp, Homo sapien
tgtcccggctgagtttggagtgtaa

SEQ ID NO: 3069686 - DNA, 25 bp, Homo sapien
tagctgaggtattggggcgcaggat

SEQ ID NO: 3069687 - DNA, 25 bp, Homo sapien
cccggctgagtttggagtgtaagaa

SEQ ID NO: 3069688 - DNA, 25 bp, Homo sapien
tctgtcccggctgagtttggagtgt

SEQ ID NO: 3069689 - DNA, 25 bp, Homo sapien
tatccacccccggatttctgggctc

SEQ ID NO: 3069690 - DNA, 25 bp, Homo sapien
tgggctccggctcacgagtccctcc

SEQ ID NO: 3069691 - DNA, 25 bp, Homo sapien
cacgagtccctccagtcccgaggga

SEQ ID NO: 3069692 - DNA, 25 bp, Homo sapien
actgaggatgatgtgcgtctgagcc

SEQ ID NO: 3069693 - DNA, 25 bp, Homo sapien
tcacttagcagcaataatgggggga

SEQ ID NO: 3069694 - DNA, 25 bp, Homo sapien
acttagcagcaataatggggggacc

SEQ ID NO: 3069695 - DNA, 25 bp, Homo sapien
cctcacttagcagcaataatggggg

SEQ ID NO: 3069696 - DNA, 25 bp, Homo sapien
cttagcagcaataatggggggacca

SEQ ID NO: 3069697 - DNA, 25 bp, Homo sapien
caggcccaggaggcgataccaggcc

SEQ ID NO: 3069698 - DNA, 25 bp, Homo sapien
cccaggaggcgataccaggccagca

SEQ ID NO: 3069699 - DNA, 25 bp, Homo sapien
gcccaggaggcgataccaggccagc

SEQ ID NO: 3069700 - DNA, 25 bp, Homo sapien
caggccagcagtttcactgatgctc

SEQ ID NO: 3069701 - DNA, 25 bp, Homo sapien
ttcctgtcacttctaggatgtcacc

SEQ ID NO: 3069702 - DNA, 25 bp, Homo sapien
tctaggatgtcacctaagatgagac

SEQ ID NO: 3069703 - DNA, 25 bp, Homo sapien
agatgagactgtggtctttccactc

SEQ ID NO: 3069704 - DNA, 25 bp, Homo sapien
cttggatttgaccatctgaatacca

SEQ ID NO: 3069705 - DNA, 25 bp, Homo sapien
gcgacggtcccgtcacattctgagc

SEQ ID NO: 3069706 - DNA, 25 bp, Homo sapien
gtcacctcgcaaaaggaagccaggg

SEQ ID NO: 3069707 - DNA, 25 bp, Homo sapien
tctgctggacgtatctcccctcagt

SEQ ID NO: 3069708 - DNA, 25 bp, Homo sapien
cattctgagcccagcaacggagggc

SEQ ID NO: 3069709 - DNA, 25 bp, Homo sapien
ctattcatgctccttgcggaagcca

SEQ ID NO: 3069710 - DNA, 25 bp, Homo sapien
acaaggatgagccatactgcccggc

SEQ ID NO: 3069711 - DNA, 25 bp, Homo sapien
ggtctcatcctactacaacataaat

SEQ ID NO: 3069712 - DNA, 25 bp, Homo sapien
caaaatacatttacctcctctgaag

SEQ ID NO: 3069713 - DNA, 25 bp, Homo sapien
tctaaatatcgtcagctcaaaagcc

SEQ ID NO: 3069714 - DNA, 25 bp, Homo sapien
cacctgtaccagagtctcacaagaa

SEQ ID NO: 3069715 - DNA, 25 bp, Homo sapien
tagcattaagttggttaccgtacac

SEQ ID NO: 3069716 - DNA, 25 bp, Homo sapien
cattgagggatctgacaggatgctg

SEQ ID NO: 3069717 - DNA, 25 bp, Homo sapien
cagaaaaatcattaggcggcacacc

SEQ ID NO: 3069718 - DNA, 25 bp, Homo sapien
aacttctttgcagcatgacagctgc

SEQ ID NO: 3069719 - DNA, 25 bp, Homo sapien
gtcctacctacctgtcacctcccca

SEQ ID NO: 3069720 - DNA, 25 bp, Homo sapien
ctgtcctacctacctgtcacctccc

SEQ ID NO: 3069721 - DNA, 25 bp, Homo sapien
aagactcctctaaacttctttgcag

SEQ ID NO: 3069722 - DNA, 25 bp, Homo sapien
ggacactgccccattctggacttga

SEQ ID NO: 3069723 - DNA, 25 bp, Homo sapien
taacgctaaacaagtcatggcaagc

SEQ ID NO: 3069724 - DNA, 25 bp, Homo sapien
tcaattgcgtctccgcagagaggta

SEQ ID NO: 3069725 - DNA, 25 bp, Homo sapien
cattccaggtgtaaatgcctcccgg

SEQ ID NO: 3069726 - DNA, 25 bp, Homo sapien
tgctgctgcaataagcacaaacaga

SEQ ID NO: 3069727 - DNA, 25 bp, Homo sapien
gatgaccacggataggagcccttag

SEQ ID NO: 3069728 - DNA, 25 bp, Homo sapien
gagcccttagacaagtaactgacag

SEQ ID NO: 3069729 - DNA, 25 bp, Homo sapien
caaacagaactcatggccagagagc

SEQ ID NO: 3069730 - DNA, 25 bp, Homo sapien
cactggtcaggaggaagtgcctgac

SEQ ID NO: 3069731 - DNA, 25 bp, Homo sapien
tgcactggtcaggaggaagtgcctg

SEQ ID NO: 3069732 - DNA, 25 bp, Homo sapien
gcactggtcaggaggaagtgcctga

SEQ ID NO: 3069733 - DNA, 25 bp, Homo sapien
tgttccctgatgtaacagatatctc

SEQ ID NO: 3069734 - DNA, 25 bp, Homo sapien
tccctgatgtaacagatatctcttt

SEQ ID NO: 3069735 - DNA, 25 bp, Homo sapien
aggacttgttccctgatgtaacaga

SEQ ID NO: 3069736 - DNA, 25 bp, Homo sapien
gacttgttccctgatgtaacagata

SEQ ID NO: 3069737 - DNA, 25 bp, Homo sapien
cttgttcctcctatagatgtgatgg

SEQ ID NO: 3069738 - DNA, 25 bp, Homo sapien
ctcctatagatgtgatggtggtggc

SEQ ID NO: 3069739 - DNA, 25 bp, Homo sapien
tgttcctcctatagatgtgatggtg

SEQ ID NO: 3069740 - DNA, 25 bp, Homo sapien
tcctcctatagatgtgatggtggtg

SEQ ID NO: 3069741 - DNA, 25 bp, Homo sapien
taacctgcgactggaaagctatggg

SEQ ID NO: 3069742 - DNA, 25 bp, Homo sapien
cagcaggctgtctcaaggatgtggt

SEQ ID NO: 3069743 - DNA, 25 bp, Homo sapien
catgagggatgaacgacgactggac

SEQ ID NO: 3069744 - DNA, 25 bp, Homo sapien
tagccaaggcaagtatcagatttcc

SEQ ID NO: 3069745 - DNA, 25 bp, Homo sapien
ggaaaaatgctgactaaggcccaaa

SEQ ID NO: 3069746 - DNA, 25 bp, Homo sapien
aaatgtttcatcacggaggtgctcg

SEQ ID NO: 3069747 - DNA, 25 bp, Homo sapien
ttccactctggctgtgaaggactag

SEQ ID NO: 3069748 - DNA, 25 bp, Homo sapien
gctttatcgaggtagtgtccagggt

SEQ ID NO: 3069749 - DNA, 25 bp, Homo sapien
aaaaggatacttcgaacaaatgtgg

SEQ ID NO: 3069750 - DNA, 25 bp, Homo sapien
tatttatcatgtggaccagcaatgc

SEQ ID NO: 3069751 - DNA, 25 bp, Homo sapien
tcaaattatagggacagttctaacc

SEQ ID NO: 3069752 - DNA, 25 bp, Homo sapien
gctttcggttagtatatgagggaca

SEQ ID NO: 3069753 - DNA, 25 bp, Homo sapien
ggcgatctcccctcttgctaaaaat

SEQ ID NO: 3069754 - DNA, 25 bp, Homo sapien
tctcccctcttgctaaaaataagaa

SEQ ID NO: 3069755 - DNA, 25 bp, Homo sapien
gtggcgatctcccctcttgctaaaa

SEQ ID NO: 3069756 - DNA, 25 bp, Homo sapien
cgatctcccctcttgctaaaaataa

SEQ ID NO: 3069757 - DNA, 25 bp, Homo sapien
tgcaagctttaggtgacttccctgg

SEQ ID NO: 3069758 - DNA, 25 bp, Homo sapien
cctaaaggtactagaggtgctgctc

SEQ ID NO: 3069759 - DNA, 25 bp, Homo sapien
taaaactaagtaacgagagacagcc

SEQ ID NO: 3069760 - DNA, 25 bp, Homo sapien
tcaactctgtagctggcaccaaaag

SEQ ID NO: 3069761 - DNA, 25 bp, Homo sapien
caggcctatcccctctttgaggaga

SEQ ID NO: 3069762 - DNA, 25 bp, Homo sapien
gaaaccaggcctatcccctctttga

SEQ ID NO: 3069763 - DNA, 25 bp, Homo sapien
ggagaagtctgggatataaaagcaa

SEQ ID NO: 3069764 - DNA, 25 bp, Homo sapien
gtctgggatataaaagcaagcatac

SEQ ID NO: 3069765 - DNA, 25 bp, Homo sapien
cattcccttggatctgttgattcag

SEQ ID NO: 3069766 - DNA, 25 bp, Homo sapien
cagtggttcccctggtttagatgac

SEQ ID NO: 3069767 - DNA, 25 bp, Homo sapien
gagtctgagaactaaggaaatgctc

SEQ ID NO: 3069768 - DNA, 25 bp, Homo sapien
gacactggcgaagctcttggtagag

SEQ ID NO: 3069769 - DNA, 25 bp, Homo sapien
cttctctgccaggtgccgcagaaag

SEQ ID NO: 3069770 - DNA, 25 bp, Homo sapien
tctggcctctatgatttaaaggctc

SEQ ID NO: 3069771 - DNA, 25 bp, Homo sapien
gcagaaagttgtcctcactctggcc

SEQ ID NO: 3069772 - DNA, 25 bp, Homo sapien
ggcctctatgatttaaaggctcact

SEQ ID NO: 3069773 - DNA, 25 bp, Homo sapien
ggtggcgggaggtgagggactggag

SEQ ID NO: 3069774 - DNA, 25 bp, Homo sapien
ttaaagagagctggaggtggcggga

SEQ ID NO: 3069775 - DNA, 25 bp, Homo sapien
gggatgggccgagggggaagagtgc

SEQ ID NO: 3069776 - DNA, 25 bp, Homo sapien
ggtggatgtgcaggtgtgagaaggg

SEQ ID NO: 3069777 - DNA, 25 bp, Homo sapien
ggctggtcacccgaaagcacttctc

SEQ ID NO: 3069778 - DNA, 25 bp, Homo sapien
agttgtaagtgggatctggacagca

SEQ ID NO: 3069779 - DNA, 25 bp, Homo sapien
tgagttctgcggtgtctcttcatgt

SEQ ID NO: 3069780 - DNA, 25 bp, Homo sapien
taagcatgttcgagaagcggaaccg

SEQ ID NO: 3069781 - DNA, 25 bp, Homo sapien
tctactcatgtgtattgggtcttac

SEQ ID NO: 3069782 - DNA, 25 bp, Homo sapien
tataagagcgttgctgtcacttccc

SEQ ID NO: 3069783 - DNA, 25 bp, Homo sapien
tcacagtgactgtatgaggcaggta

SEQ ID NO: 3069784 - DNA, 25 bp, Homo sapien
gctttacatctattaaccttggtga

SEQ ID NO: 3069785 - DNA, 25 bp, Homo sapien
tgtctccagcttttcattatagtag

SEQ ID NO: 3069786 - DNA, 25 bp, Homo sapien
ttctcatctactttgggactccttt

SEQ ID NO: 3069787 - DNA, 25 bp, Homo sapien
ttatagtagaaaactgacatcccct

SEQ ID NO: 3069788 - DNA, 25 bp, Homo sapien
tcttatacctaagagaaaacacctc

SEQ ID NO: 3069789 - DNA, 25 bp, Homo sapien
cagccaaaggccctaatctttgaat

SEQ ID NO: 3069790 - DNA, 25 bp, Homo sapien
tcttcacacctagcagccatatgga

SEQ ID NO: 3069791 - DNA, 25 bp, Homo sapien
gtatgagcaaatcctctccacatta

SEQ ID NO: 3069792 - DNA, 25 bp, Homo sapien
taggcacactagacactactcacag

SEQ ID NO: 3069793 - DNA, 25 bp, Homo sapien
gaactagcctactacaaatgcctgg

SEQ ID NO: 3069794 - DNA, 25 bp, Homo sapien
tccagtctgcttagggtgaatatcc

SEQ ID NO: 3069795 - DNA, 25 bp, Homo sapien
taaaccctgactgatggctggtcac

SEQ ID NO: 3069796 - DNA, 25 bp, Homo sapien
gcttacgtgaatgccccagagatat

SEQ ID NO: 3069797 - DNA, 25 bp, Homo sapien
actgtttgtgcccaatatgaatgct

SEQ ID NO: 3069798 - DNA, 25 bp, Homo sapien
tcatgtgggagcgtagctggtactt

SEQ ID NO: 3069799 - DNA, 25 bp, Homo sapien
gtgttttcatgtgttcgtcgaagta

SEQ ID NO: 3069800 - DNA, 25 bp, Homo sapien
tgaatgctcatgtgggagcgtagct

SEQ ID NO: 3069801 - DNA, 25 bp, Homo sapien
tgcaaggagtgcaccttgagtgaca

SEQ ID NO: 3069802 - DNA, 25 bp, Homo sapien
accttgagtgacatactgcgtttga

SEQ ID NO: 3069803 - DNA, 25 bp, Homo sapien
aggagtgcaccttgagtgacatact

SEQ ID NO: 3069804 - DNA, 25 bp, Homo sapien
gtgcaccttgagtgacatactgcgt

SEQ ID NO: 3069805 - DNA, 25 bp, Homo sapien
tggacgatcttgatatgttcatgaa

SEQ ID NO: 3069806 - DNA, 25 bp, Homo sapien
ccatggacgatcttgatatgttcat

SEQ ID NO: 3069807 - DNA, 25 bp, Homo sapien
gacgatcttgatatgttcatgaagg

SEQ ID NO: 3069808 - DNA, 25 bp, Homo sapien
catatccatggacgatcttgatatg

SEQ ID NO: 3069809 - DNA, 25 bp, Homo sapien
cacagtctgtttgctggtgaaggga

SEQ ID NO: 3069810 - DNA, 25 bp, Homo sapien
taacgttcatgtgcttctccaggta

SEQ ID NO: 3069811 - DNA, 25 bp, Homo sapien
tctggactggtgctttgggctcctt

SEQ ID NO: 3069812 - DNA, 25 bp, Homo sapien
tgcatgcgcctatgagtaacgttca

SEQ ID NO: 3069813 - DNA, 25 bp, Homo sapien
tgtacactttggtggacaggtcaag

SEQ ID NO: 3069814 - DNA, 25 bp, Homo sapien
taacagcatgcacgtcagacactgc

SEQ ID NO: 3069815 - DNA, 25 bp, Homo sapien
agatggcacttgaccacgacggcta

SEQ ID NO: 3069816 - DNA, 25 bp, Homo sapien
tgcacagcacagttttcaaccagct

SEQ ID NO: 3069817 - DNA, 25 bp, Homo sapien
gtggcccaatttattaaacagttca

SEQ ID NO: 3069818 - DNA, 25 bp, Homo sapien
ggcccaatttattaaacagttcaga

SEQ ID NO: 3069819 - DNA, 25 bp, Homo sapien
tggcccaatttattaaacagttcag

SEQ ID NO: 3069820 - DNA, 25 bp, Homo sapien
caaaaaggtttggtattatggcaag

SEQ ID NO: 3069821 - DNA, 25 bp, Homo sapien
tgcaagggacttgggagcatcttat

SEQ ID NO: 3069822 - DNA, 25 bp, Homo sapien
tatggcaagagcagagcactagtga

SEQ ID NO: 3069823 - DNA, 25 bp, Homo sapien
caccaaagcatgagtcaaaaaggtt

SEQ ID NO: 3069824 - DNA, 25 bp, Homo sapien
tgtgccaaaacttctaacccatgga

SEQ ID NO: 3069825 - DNA, 25 bp, Homo sapien
taaaattacggctcagagaggcaac

SEQ ID NO: 3069826 - DNA, 25 bp, Homo sapien
tctaagatcacaagtcgctcaaacg

SEQ ID NO: 3069827 - DNA, 25 bp, Homo sapien
ctttctgggcacatggtaggctatt

SEQ ID NO: 3069828 - DNA, 25 bp, Homo sapien
agccactgagaccttgcattgttta

SEQ ID NO: 3069829 - DNA, 25 bp, Homo sapien
gtttattaccacagcataatttggc

SEQ ID NO: 3069830 - DNA, 25 bp, Homo sapien
gggtgctgccttaccaaaaagccta

SEQ ID NO: 3069831 - DNA, 25 bp, Homo sapien
gcttatccaagctgctacgagtaga

SEQ ID NO: 3069832 - DNA, 25 bp, Homo sapien
caatcactgattaagatggtactca

SEQ ID NO: 3069833 - DNA, 25 bp, Homo sapien
gccttagcaatacacgaagacctca

SEQ ID NO: 3069834 - DNA, 25 bp, Homo sapien
tgtctgaagtgatcaggagcaagct

SEQ ID NO: 3069835 - DNA, 25 bp, Homo sapien
cagggatttgcagagtaagaacagg

SEQ ID NO: 3069836 - DNA, 25 bp, Homo sapien
cctcagagatattgccggttcggct

SEQ ID NO: 3069837 - DNA, 25 bp, Homo sapien
cctttaaggcaagcaatggttcatt

SEQ ID NO: 3069838 - DNA, 25 bp, Homo sapien
ggcttcatgaacaaaactctttcca

SEQ ID NO: 3069839 - DNA, 25 bp, Homo sapien
agcaatggttcattcagtggcttca

SEQ ID NO: 3069840 - DNA, 25 bp, Homo sapien
gcaataaagcaaatacctcaataaa

SEQ ID NO: 3069841 - DNA, 25 bp, Homo sapien
ctgcaataaagcaaatacctcaata

SEQ ID NO: 3069842 - DNA, 25 bp, Homo sapien
aataaagcaaatacctcaataaagc

SEQ ID NO: 3069843 - DNA, 25 bp, Homo sapien
taaagcaaatacctcaataaagcaa

SEQ ID NO: 3069844 - DNA, 25 bp, Homo sapien
caagcttaaaattaggttgagaagc

SEQ ID NO: 3069845 - DNA, 25 bp, Homo sapien
cttcacaagcttaaaattaggttga

SEQ ID NO: 3069846 - DNA, 25 bp, Homo sapien
cacaagcttaaaattaggttgagaa

SEQ ID NO: 3069847 - DNA, 25 bp, Homo sapien
agcttaaaattaggttgagaagcaa

SEQ ID NO: 3069848 - DNA, 25 bp, Homo sapien
tcgcgaaggccgatgtaaaagccaa

SEQ ID NO: 3069849 - DNA, 25 bp, Homo sapien
cagagccattgttcctgccacacga

SEQ ID NO: 3069850 - DNA, 25 bp, Homo sapien
tgacatccgacattatcttcactgg

SEQ ID NO: 3069851 - DNA, 25 bp, Homo sapien
cactcagaatgctgtgaagagtgtc

SEQ ID NO: 3069852 - DNA, 25 bp, Homo sapien
aaaaaagatggatggcctgacaagg

SEQ ID NO: 3069853 - DNA, 25 bp, Homo sapien
atttcagagcacatcaactgaaaaa

SEQ ID NO: 3069854 - DNA, 25 bp, Homo sapien
aactatgacaaatcttaaactctgc

SEQ ID NO: 3069855 - DNA, 25 bp, Homo sapien
gaaaaactatgacaaaactatgtca

SEQ ID NO: 3069856 - DNA, 25 bp, Homo sapien
accaaggatgtgaccgagcaggctg

SEQ ID NO: 3069857 - DNA, 25 bp, Homo sapien
ccaaaccaaggatgtgaccgagcag

SEQ ID NO: 3069858 - DNA, 25 bp, Homo sapien
aaggatgtgaccgagcaggctgccc

SEQ ID NO: 3069859 - DNA, 25 bp, Homo sapien
ataaccaaaccaaggatgtgaccga

SEQ ID NO: 3069860 - DNA, 25 bp, Homo sapien
gattataggtatgttccactaggcc

SEQ ID NO: 3069861 - DNA, 25 bp, Homo sapien
agtcgagaaatcctgatctaaagtg

SEQ ID NO: 3069862 - DNA, 25 bp, Homo sapien
taggtatgttccactaggcccagct

SEQ ID NO: 3069863 - DNA, 25 bp, Homo sapien
catgttggccagctagtcgagaaat

SEQ ID NO: 3069864 - DNA, 25 bp, Homo sapien
ctatagggccacatgtttgtaaaat

SEQ ID NO: 3069865 - DNA, 25 bp, Homo sapien
tttagcttcaaacttattttagaca

SEQ ID NO: 3069866 - DNA, 25 bp, Homo sapien
gggccacatgtttgtaaaatgcata

SEQ ID NO: 3069867 - DNA, 25 bp, Homo sapien
caaactactattcctatagggccac

SEQ ID NO: 3069868 - DNA, 25 bp, Homo sapien
tctttgattcaaaaaggcaggctgc

SEQ ID NO: 3069869 - DNA, 25 bp, Homo sapien
ggagtttatgagtacagagttgcac

SEQ ID NO: 3069870 - DNA, 25 bp, Homo sapien
tgtgaaaagaacttattgcaatagc

SEQ ID NO: 3069871 - DNA, 25 bp, Homo sapien
gcataaactatgttataatcacttc

SEQ ID NO: 3069872 - DNA, 25 bp, Homo sapien
gagctgagcctagtacccagattct

SEQ ID NO: 3069873 - DNA, 25 bp, Homo sapien
aaatctctcgtcttcttgccaagga

SEQ ID NO: 3069874 - DNA, 25 bp, Homo sapien
gaactgttccgtgtcctggctgtgg

SEQ ID NO: 3069875 - DNA, 25 bp, Homo sapien
caacagatcgatagttgcccagggt

SEQ ID NO: 3069876 - DNA, 25 bp, Homo sapien
tactgctagagggaattaaataaac

SEQ ID NO: 3069877 - DNA, 25 bp, Homo sapien
tgtattagtacacagtgcaccacct

SEQ ID NO: 3069878 - DNA, 25 bp, Homo sapien
tgtgtgggcacgcatgcactgcttc

SEQ ID NO: 3069879 - DNA, 25 bp, Homo sapien
ttctaacagattgcctcacagtaag

SEQ ID NO: 3069880 - DNA, 25 bp, Homo sapien
taagaccagtaaacagtggagcggg

SEQ ID NO: 3069881 - DNA, 25 bp, Homo sapien
cctgcaagacttaggtatgctccaa

SEQ ID NO: 3069882 - DNA, 25 bp, Homo sapien
aaaaatgcagatcgcagtgccagac

SEQ ID NO: 3069883 - DNA, 25 bp, Homo sapien
taaagtcactaaacgcagcaccagt

SEQ ID NO: 3069884 - DNA, 25 bp, Homo sapien
tactaaatcaaggaagcacactgtc

SEQ ID NO: 3069885 - DNA, 25 bp, Homo sapien
cacgaatcagatcttgagaccacag

SEQ ID NO: 3069886 - DNA, 25 bp, Homo sapien
caacagttctgggtgtcacgaatca

SEQ ID NO: 3069887 - DNA, 25 bp, Homo sapien
tgctgatctgaaacctcctaaggga

SEQ ID NO: 3069888 - DNA, 25 bp, Homo sapien
ctactggcggcacaatactcccggg

SEQ ID NO: 3069889 - DNA, 25 bp, Homo sapien
tgccggtggcgggtgtacatcagac

SEQ ID NO: 3069890 - DNA, 25 bp, Homo sapien
tacatcagacgcattttatctactg

SEQ ID NO: 3069891 - DNA, 25 bp, Homo sapien
gaggtttgggtgcaaccgcaaggcg

SEQ ID NO: 3069892 - DNA, 25 bp, Homo sapien
cctcggcggtccatccctgcggcgg

SEQ ID NO: 3069893 - DNA, 25 bp, Homo sapien
ccgccgcctcggcggtccatccctg

SEQ ID NO: 3069894 - DNA, 25 bp, Homo sapien
ggcggtccatccctgcggcgggggc

SEQ ID NO: 3069895 - DNA, 25 bp, Homo sapien
ccgcctcggcggtccatccctgcgg

SEQ ID NO: 3069896 - DNA, 25 bp, Homo sapien
gctccgccgcccagataaccgccgg

SEQ ID NO: 3069897 - DNA, 25 bp, Homo sapien
acattgtgagcgctccgccgcccag

SEQ ID NO: 3069898 - DNA, 25 bp, Homo sapien
gtctcctgccacattgtgagcgctc

SEQ ID NO: 3069899 - DNA, 25 bp, Homo sapien
gccgcccagataaccgccggctccc

SEQ ID NO: 3069900 - DNA, 25 bp, Homo sapien
gaggtcgttaacaatgctgtggcag

SEQ ID NO: 3069901 - DNA, 25 bp, Homo sapien
ggtcgttaacaatgctgtggcagct

SEQ ID NO: 3069902 - DNA, 25 bp, Homo sapien
cgttaacaatgctgtggcagctttt

SEQ ID NO: 3069903 - DNA, 25 bp, Homo sapien
ctgaggtcgttaacaatgctgtggc

SEQ ID NO: 3069904 - DNA, 25 bp, Homo sapien
ctgcaggttcttcaggtcaccagta

SEQ ID NO: 3069905 - DNA, 25 bp, Homo sapien
tcaggtcaccagtaggcaagcaggt

SEQ ID NO: 3069906 - DNA, 25 bp, Homo sapien
caggttcttcaggtcaccagtaggc

SEQ ID NO: 3069907 - DNA, 25 bp, Homo sapien
tcttcaggtcaccagtaggcaagca

SEQ ID NO: 3069908 - DNA, 25 bp, Homo sapien
ctcctgttcagctgccccatggtcc

SEQ ID NO: 3069909 - DNA, 25 bp, Homo sapien
cctcctgttcagctgccccatggtc

SEQ ID NO: 3069910 - DNA, 25 bp, Homo sapien
cggctagtaacaggcaggttgctgc

SEQ ID NO: 3069911 - DNA, 25 bp, Homo sapien
tggcacggctagtaacaggcaggtt

SEQ ID NO: 3069912 - DNA, 25 bp, Homo sapien
acacaggctggcacggctagtaaca

SEQ ID NO: 3069913 - DNA, 25 bp, Homo sapien
tttctgaacatcttgtgctggttga

SEQ ID NO: 3069914 - DNA, 25 bp, Homo sapien
tgctttggaaagacagtccagcagc

SEQ ID NO: 3069915 - DNA, 25 bp, Homo sapien
gctttggaaagacagtccagcagca

SEQ ID NO: 3069916 - DNA, 25 bp, Homo sapien
ctttggaaagacagtccagcagcaa

SEQ ID NO: 3069917 - DNA, 25 bp, Homo sapien
ttatgctatgaattcatagggaaca

SEQ ID NO: 3069918 - DNA, 25 bp, Homo sapien
tgctatgaattcatagggaacaggt

SEQ ID NO: 3069919 - DNA, 25 bp, Homo sapien
ctatgaattcatagggaacaggttc

SEQ ID NO: 3069920 - DNA, 25 bp, Homo sapien
tatgaattcatagggaacaggttcc

SEQ ID NO: 3069921 - DNA, 25 bp, Homo sapien
atgtttcaggaagcgattccagctc

SEQ ID NO: 3069922 - DNA, 25 bp, Homo sapien
tatgtttcaggaagcgattccagct

SEQ ID NO: 3069923 - DNA, 25 bp, Homo sapien
acactgtagactcttttgagttttg

SEQ ID NO: 3069924 - DNA, 25 bp, Homo sapien
tgtagactcttttgagttttgccat

SEQ ID NO: 3069925 - DNA, 25 bp, Homo sapien
catggaaatgtttgtggggaattcc

SEQ ID NO: 3069926 - DNA, 25 bp, Homo sapien
tcttttgagttttgccatggaaatg

SEQ ID NO: 3069927 - DNA, 25 bp, Homo sapien
taccacagagattcccttcgggttg

SEQ ID NO: 3069928 - DNA, 25 bp, Homo sapien
accacagagattcccttcgggttgg

SEQ ID NO: 3069929 - DNA, 25 bp, Homo sapien
gctaccacagagattcccttcgggt

SEQ ID NO: 3069930 - DNA, 25 bp, Homo sapien
ctgctaccacagagattcccttcgg

SEQ ID NO: 3069931 - DNA, 25 bp, Homo sapien
catagagcccgtgagaagggcagtc

SEQ ID NO: 3069932 - DNA, 25 bp, Homo sapien
agtgcaggcatagagcccgtgagaa

SEQ ID NO: 3069933 - DNA, 25 bp, Homo sapien
atagagcccgtgagaagggcagtct

SEQ ID NO: 3069934 - DNA, 25 bp, Homo sapien
cccagtgcaggcatagagcccgtga

SEQ ID NO: 3069935 - DNA, 25 bp, Homo sapien
ccacacgtggatctaggcagacacc

SEQ ID NO: 3069936 - DNA, 25 bp, Homo sapien
cagcaggccccgaattgggacctaa

SEQ ID NO: 3069937 - DNA, 25 bp, Homo sapien
agctggtttgcataggcacttggca

SEQ ID NO: 3069938 - DNA, 25 bp, Homo sapien
tgcgtgctgccaaatgctggtgccc

SEQ ID NO: 3069939 - DNA, 25 bp, Homo sapien
ggaaggctgtgttaagaatcatcgg

SEQ ID NO: 3069940 - DNA, 25 bp, Homo sapien
gcccagtcagcccgcggaggtgcag

SEQ ID NO: 3069941 - DNA, 25 bp, Homo sapien
gaaggctgtgttaagaatcatcggg

SEQ ID NO: 3069942 - DNA, 25 bp, Homo sapien
ggctgtggcccagtcagcccgcgga

SEQ ID NO: 3069943 - DNA, 25 bp, Homo sapien
cagcttgcgcagctcgatcaggcca

SEQ ID NO: 3069944 - DNA, 25 bp, Homo sapien
gagctggtacgcgatgtcctctgca

SEQ ID NO: 3069945 - DNA, 25 bp, Homo sapien
tcgatcaggccatcccctgcagtgg

SEQ ID NO: 3069946 - DNA, 25 bp, Homo sapien
ggactgccccgctggcaggtaggtg

SEQ ID NO: 3069947 - DNA, 25 bp, Homo sapien
actccttcccgaaggtcagatgtgt

SEQ ID NO: 3069948 - DNA, 25 bp, Homo sapien
cttttccaccacaaatctggccctc

SEQ ID NO: 3069949 - DNA, 25 bp, Homo sapien
tggcttccaccgcttctgtgaactc

SEQ ID NO: 3069950 - DNA, 25 bp, Homo sapien
cgcttctgtgaactccttcccgaag

SEQ ID NO: 3069951 - DNA, 25 bp, Homo sapien
tccatggccgctggaagaagaggcc

SEQ ID NO: 3069952 - DNA, 25 bp, Homo sapien
cgagggacggtggaacgcaaatcat

SEQ ID NO: 3069953 - DNA, 25 bp, Homo sapien
gacctcatgtagcaaatggcaccgg

SEQ ID NO: 3069954 - DNA, 25 bp, Homo sapien
aaagcaggtaaagtcattggtcggc

SEQ ID NO: 3069955 - DNA, 25 bp, Homo sapien
tttaacctcctaactctaactgcag

SEQ ID NO: 3069956 - DNA, 25 bp, Homo sapien
taactgcagctgttgtacttcgcct

SEQ ID NO: 3069957 - DNA, 25 bp, Homo sapien
tcctgaagagtaaatcctggtctca

SEQ ID NO: 3069958 - DNA, 25 bp, Homo sapien
tgcccagcctagagcaatttactta

SEQ ID NO: 3069959 - DNA, 25 bp, Homo sapien
tggagccaggcacctaaacgagaac

SEQ ID NO: 3069960 - DNA, 25 bp, Homo sapien
ctcacatctagcaaagcagaaggga

SEQ ID NO: 3069961 - DNA, 25 bp, Homo sapien
taatagcgtctacccagaaatggag

SEQ ID NO: 3069962 - DNA, 25 bp, Homo sapien
cagcatgtttccgtgttttcaagtc

SEQ ID NO: 3069963 - DNA, 25 bp, Homo sapien
ggtggcggctcgctctgtaaggtcg

SEQ ID NO: 3069964 - DNA, 25 bp, Homo sapien
gagcccaaaggtggcggctcgctct

SEQ ID NO: 3069965 - DNA, 25 bp, Homo sapien
caaaggtggcggctcgctctgtaag

SEQ ID NO: 3069966 - DNA, 25 bp, Homo sapien
tggcggctcgctctgtaaggtcgtc

SEQ ID NO: 3069967 - DNA, 25 bp, Homo sapien
aggatctcagttgtgatggacggca

SEQ ID NO: 3069968 - DNA, 25 bp, Homo sapien
ctgacttgaggatctcagttgtgat

SEQ ID NO: 3069969 - DNA, 25 bp, Homo sapien
gatctcagttgtgatggacggcagc

SEQ ID NO: 3069970 - DNA, 25 bp, Homo sapien
ttgaggatctcagttgtgatggacg

SEQ ID NO: 3069971 - DNA, 25 bp, Homo sapien
agctggctggcgacaggccggaaga

SEQ ID NO: 3069972 - DNA, 25 bp, Homo sapien
aagctggctggcgacaggccggaag

SEQ ID NO: 3069973 - DNA, 25 bp, Homo sapien
ggaagctggctggcgacaggccgga

SEQ ID NO: 3069974 - DNA, 25 bp, Homo sapien
gctggctggcgacaggccggaagag

SEQ ID NO: 3069975 - DNA, 25 bp, Homo sapien
actggcacattacgtggtcgagaac

SEQ ID NO: 3069976 - DNA, 25 bp, Homo sapien
gcacattacgtggtcgagaacggca

SEQ ID NO: 3069977 - DNA, 25 bp, Homo sapien
tgatgactggcacattacgtggtcg

SEQ ID NO: 3069978 - DNA, 25 bp, Homo sapien
tggcacattacgtggtcgagaacgg

SEQ ID NO: 3069979 - DNA, 25 bp, Homo sapien
tgtacccacgggatgagaaaatgag

SEQ ID NO: 3069980 - DNA, 25 bp, Homo sapien
ccacgggatgagaaaatgagtccct

SEQ ID NO: 3069981 - DNA, 25 bp, Homo sapien
tacccacgggatgagaaaatgagtc

SEQ ID NO: 3069982 - DNA, 25 bp, Homo sapien
ctgtacccacgggatgagaaaatga

SEQ ID NO: 3069983 - DNA, 25 bp, Homo sapien
gaaatccagacactgtgcggcagca

SEQ ID NO: 3069984 - DNA, 25 bp, Homo sapien
tcacatgggctatgcagaccaacag

SEQ ID NO: 3069985 - DNA, 25 bp, Homo sapien
cagcatttgggtggtgcggcttcac

SEQ ID NO: 3069986 - DNA, 25 bp, Homo sapien
gagatctccatttcagatagccagg

SEQ ID NO: 3069987 - DNA, 25 bp, Homo sapien
taaggccaggccaaacttgccaatg

SEQ ID NO: 3069988 - DNA, 25 bp, Homo sapien
cacgcctcctgcaacagctaaggcc

SEQ ID NO: 3069989 - DNA, 25 bp, Homo sapien
acgcctcctgcaacagctaaggcca

SEQ ID NO: 3069990 - DNA, 25 bp, Homo sapien
agctaaggccaggccaaacttgcca

SEQ ID NO: 3069991 - DNA, 25 bp, Homo sapien
gtttccttctgctggaccctctcac

SEQ ID NO: 3069992 - DNA, 25 bp, Homo sapien
ttccttctgctggaccctctcacac

SEQ ID NO: 3069993 - DNA, 25 bp, Homo sapien
tttccttctgctggaccctctcaca

SEQ ID NO: 3069994 - DNA, 25 bp, Homo sapien
gctggatgacatcctggggccaaga

SEQ ID NO: 3069995 - DNA, 25 bp, Homo sapien
cgtgtattaagaacgacatgcttct

SEQ ID NO: 3069996 - DNA, 25 bp, Homo sapien
catactgcttgtcaacatcgtgtat

SEQ ID NO: 3069997 - DNA, 25 bp, Homo sapien
cgacatgcttcttatggaagcagga

SEQ ID NO: 3069998 - DNA, 25 bp, Homo sapien
actctcctcgcccaaagtgcacatc

SEQ ID NO: 3069999 - DNA, 25 bp, Homo sapien
atgcccagaaacgagcctttgccgc

SEQ ID NO: 3070000 - DNA, 25 bp, Homo sapien
agagatgcccagaaacgagcctttg

SEQ ID NO: 3070001 - DNA, 25 bp, Homo sapien
acgcactctcctcgcccaaagtgca

SEQ ID NO: 3070002 - DNA, 25 bp, Homo sapien
acatgaattccccaaccacacatac

SEQ ID NO: 3070003 - DNA, 25 bp, Homo sapien
catgaattccccaaccacacatact

SEQ ID NO: 3070004 - DNA, 25 bp, Homo sapien
tgtaacttactgtgagattgagata

SEQ ID NO: 3070005 - DNA, 25 bp, Homo sapien
caattatgtttaggaaatcacacaa

SEQ ID NO: 3070006 - DNA, 25 bp, Homo sapien
cacacaaacatagatcactgatttg

SEQ ID NO: 3070007 - DNA, 25 bp, Homo sapien
gaaatgcataaatttgtagcaaagc

SEQ ID NO: 3070008 - DNA, 25 bp, Homo sapien
cagacatactaattctagttaggaa

SEQ ID NO: 3070009 - DNA, 25 bp, Homo sapien
ctattacagagtgggccaggaacac

SEQ ID NO: 3070010 - DNA, 25 bp, Homo sapien
gattgcttgacgcagtctcctatga

SEQ ID NO: 3070011 - DNA, 25 bp, Homo sapien
taaattaaaatctagcagccatcag

SEQ ID NO: 3070012 - DNA, 25 bp, Homo sapien
tcctggatccttcaccaatgttaca

SEQ ID NO: 3070013 - DNA, 25 bp, Homo sapien
taacaacagcgccacatacatcatc

SEQ ID NO: 3070014 - DNA, 25 bp, Homo sapien
tggtggagccgctcttagtagctgt

SEQ ID NO: 3070015 - DNA, 25 bp, Homo sapien
gcgatcgaggtcacttcgtctctgc

SEQ ID NO: 3070016 - DNA, 25 bp, Homo sapien
tgtctctagccaaaagcgatcgagg

SEQ ID NO: 3070017 - DNA, 25 bp, Homo sapien
gacagaggatcaggggaggctgcct

SEQ ID NO: 3070018 - DNA, 25 bp, Homo sapien
cagtgcctgccgcaccagtctcctt

SEQ ID NO: 3070019 - DNA, 25 bp, Homo sapien
cctgccgcaccagtctccttccctt

SEQ ID NO: 3070020 - DNA, 25 bp, Homo sapien
gtttggggacagaggatcaggggag

SEQ ID NO: 3070021 - DNA, 25 bp, Homo sapien
caagaatgacggctggattcctgcc

SEQ ID NO: 3070022 - DNA, 25 bp, Homo sapien
tgctggctggaactagcagttggca

SEQ ID NO: 3070023 - DNA, 25 bp, Homo sapien
taaacccttgatccaagaacagagg

SEQ ID NO: 3070024 - DNA, 25 bp, Homo sapien
aatcctgttaggaggtagtggcagt

SEQ ID NO: 3070025 - DNA, 25 bp, Homo sapien
tcaggatctggtgaagctggcagtg

SEQ ID NO: 3070026 - DNA, 25 bp, Homo sapien
caggatctggtgaagctggcagtgg

SEQ ID NO: 3070027 - DNA, 25 bp, Homo sapien
aggatctggtgaagctggcagtggc

SEQ ID NO: 3070028 - DNA, 25 bp, Homo sapien
caaaggtgatgctcttcaaaaacct

SEQ ID NO: 3070029 - DNA, 25 bp, Homo sapien
ggtgatgctcttcaaaaacctcaac

SEQ ID NO: 3070030 - DNA, 25 bp, Homo sapien
ctgcaaaggtgatgctcttcaaaaa

SEQ ID NO: 3070031 - DNA, 25 bp, Homo sapien
gctcttcaaaaacctcaacctgggc

SEQ ID NO: 3070032 - DNA, 25 bp, Homo sapien
ggtggagatgacttgaggggccttc

SEQ ID NO: 3070033 - DNA, 25 bp, Homo sapien
tgggggtggagatgacttgaggggc

SEQ ID NO: 3070034 - DNA, 25 bp, Homo sapien
ctgtgggggtggagatgacttgagg

SEQ ID NO: 3070035 - DNA, 25 bp, Homo sapien
ggggtggagatgacttgaggggcct

SEQ ID NO: 3070036 - DNA, 25 bp, Homo sapien
ctcctccctggccaaggcccagagt

SEQ ID NO: 3070037 - DNA, 25 bp, Homo sapien
cctggccaaggcccagagtagcccc

SEQ ID NO: 3070038 - DNA, 25 bp, Homo sapien
ctccctggccaaggcccagagtagc

SEQ ID NO: 3070039 - DNA, 25 bp, Homo sapien
ggccaaggcccagagtagcccccat

SEQ ID NO: 3070040 - DNA, 25 bp, Homo sapien
taagtgctgcaaatggagccgcatc

SEQ ID NO: 3070041 - DNA, 25 bp, Homo sapien
cagcagagtcagaggatccgatcag

SEQ ID NO: 3070042 - DNA, 25 bp, Homo sapien
tgccaggtctagaaacacacacgtg

SEQ ID NO: 3070043 - DNA, 25 bp, Homo sapien
ttaggaggctgcatcaacagtctgc

SEQ ID NO: 3070044 - DNA, 25 bp, Homo sapien
atggcctctcgcaggcaggaagctg

SEQ ID NO: 3070045 - DNA, 25 bp, Homo sapien
catggcctctcgcaggcaggaagct

SEQ ID NO: 3070046 - DNA, 25 bp, Homo sapien
cccatggcctctcgcaggcaggaag

SEQ ID NO: 3070047 - DNA, 25 bp, Homo sapien
tggcctctcgcaggcaggaagctga

SEQ ID NO: 3070048 - DNA, 25 bp, Homo sapien
tgcagcatccaggagtctagcagct

SEQ ID NO: 3070049 - DNA, 25 bp, Homo sapien
tgtggctttgtaagaggacaggtgg

SEQ ID NO: 3070050 - DNA, 25 bp, Homo sapien
aggagtctagcagctgcccacatct

SEQ ID NO: 3070051 - DNA, 25 bp, Homo sapien
gctttgtaagaggacaggtggcttt

SEQ ID NO: 3070052 - DNA, 25 bp, Homo sapien
gaataacagaggataaattgactca

SEQ ID NO: 3070053 - DNA, 25 bp, Homo sapien
taacagaggataaattgactcacag

SEQ ID NO: 3070054 - DNA, 25 bp, Homo sapien
aataacagaggataaattgactcac

SEQ ID NO: 3070055 - DNA, 25 bp, Homo sapien
aacagaggataaattgactcacagt

SEQ ID NO: 3070056 - DNA, 25 bp, Homo sapien
ggctgtcagtccgtgactccctgcc

SEQ ID NO: 3070057 - DNA, 25 bp, Homo sapien
gctgtcagtccgtgactccctgcct

SEQ ID NO: 3070058 - DNA, 25 bp, Homo sapien
ccggctgtcagtccgtgactccctg

SEQ ID NO: 3070059 - DNA, 25 bp, Homo sapien
tgtcagtccgtgactccctgcctcc

SEQ ID NO: 3070060 - DNA, 25 bp, Homo sapien
aatgggagagcttctcggagaagca

SEQ ID NO: 3070061 - DNA, 25 bp, Homo sapien
gagcgaggctggaccaaccagggtg

SEQ ID NO: 3070062 - DNA, 25 bp, Homo sapien
gctgccaggtttgaaaggagagagg

SEQ ID NO: 3070063 - DNA, 25 bp, Homo sapien
tcattctaccaaagcagccaggagg

SEQ ID NO: 3070064 - DNA, 25 bp, Homo sapien
ccaaactgatagctcagcatttcca

SEQ ID NO: 3070065 - DNA, 25 bp, Homo sapien
gccaccaaactgatagctcagcatt

SEQ ID NO: 3070066 - DNA, 25 bp, Homo sapien
atccacaccactccctttcgcaagc

SEQ ID NO: 3070067 - DNA, 25 bp, Homo sapien
actgatagctcagcatttccatcca

SEQ ID NO: 3070068 - DNA, 25 bp, Homo sapien
gccgcctgcccggggcagatgggat

SEQ ID NO: 3070069 - DNA, 25 bp, Homo sapien
ctggccgcctgcccggggcagatgg

SEQ ID NO: 3070070 - DNA, 25 bp, Homo sapien
tggccgcctgcccggggcagatggg

SEQ ID NO: 3070071 - DNA, 25 bp, Homo sapien
cctggccgcctgcccggggcagatg

SEQ ID NO: 3070072 - DNA, 25 bp, Homo sapien
caaatgatgtcggaatggactccac

SEQ ID NO: 3070073 - DNA, 25 bp, Homo sapien
atgtgcccgtgtgcatgcctggaga

SEQ ID NO: 3070074 - DNA, 25 bp, Homo sapien
tgcgcgtttgaatgtccggatcaca

SEQ ID NO: 3070075 - DNA, 25 bp, Homo sapien
catgtgagggcttatgcagacacga

SEQ ID NO: 3070076 - DNA, 25 bp, Homo sapien
acaggaaccgcagtggggacgccct

SEQ ID NO: 3070077 - DNA, 25 bp, Homo sapien
gaagatgggtaagagagtgaaccct

SEQ ID NO: 3070078 - DNA, 25 bp, Homo sapien
agtgaaccctgtggcgggccgcagc

SEQ ID NO: 3070079 - DNA, 25 bp, Homo sapien
ggacgcgcagtagcgcgggccggga

SEQ ID NO: 3070080 - DNA, 25 bp, Homo sapien
ctttcccgggatcagaactccgaga

SEQ ID NO: 3070081 - DNA, 25 bp, Homo sapien
ggttcttcggaagaggacactcgaa

SEQ ID NO: 3070082 - DNA, 25 bp, Homo sapien
tctggagagtcgtgggacagaacca

SEQ ID NO: 3070083 - DNA, 25 bp, Homo sapien
tgttctcacggcttgaagcagcgca

SEQ ID NO: 3070084 - DNA, 25 bp, Homo sapien
ccatgaaccgaatgccctggaaggt

SEQ ID NO: 3070085 - DNA, 25 bp, Homo sapien
tccgggtggtccgacgagattgtca

SEQ ID NO: 3070086 - DNA, 25 bp, Homo sapien
ttctgtagcgcggtatcccgggcca

SEQ ID NO: 3070087 - DNA, 25 bp, Homo sapien
gcccggacgcctcggattctgtagc

SEQ ID NO: 3070088 - DNA, 25 bp, Homo sapien
cccaaattccggctttacagatacg

SEQ ID NO: 3070089 - DNA, 25 bp, Homo sapien
tggcaacggaggaggcgtcttcact

SEQ ID NO: 3070090 - DNA, 25 bp, Homo sapien
gagagtttaaacgacttggccaaga

SEQ ID NO: 3070091 - DNA, 25 bp, Homo sapien
gatctcacagcaagttgggccagag

SEQ ID NO: 3070092 - DNA, 25 bp, Homo sapien
tcggggtcacggctgcgtttcccag

SEQ ID NO: 3070093 - DNA, 25 bp, Homo sapien
gctgtcccagctcggggtcacggct

SEQ ID NO: 3070094 - DNA, 25 bp, Homo sapien
tccccagagtccgtcggcggtagag

SEQ ID NO: 3070095 - DNA, 25 bp, Homo sapien
ccccagagtccgtcggcggtagagc

SEQ ID NO: 3070096 - DNA, 25 bp, Homo sapien
tgggcgagcgtagaccaggagagcg

SEQ ID NO: 3070097 - DNA, 25 bp, Homo sapien
acgacttgggctccgggtctgggca

SEQ ID NO: 3070098 - DNA, 25 bp, Homo sapien
gaccgcgggcacgtctgctgactaa

SEQ ID NO: 3070099 - DNA, 25 bp, Homo sapien
ccgctggttagagacgctgctcaga

SEQ ID NO: 3070100 - DNA, 25 bp, Homo sapien
gcgcttgggaaggtgtaccccgaca

SEQ ID NO: 3070101 - DNA, 25 bp, Homo sapien
ggctgtgcgcggtccgagtttcttc

SEQ ID NO: 3070102 - DNA, 25 bp, Homo sapien
cgcttgggaaggtgtaccccgacag

SEQ ID NO: 3070103 - DNA, 25 bp, Homo sapien
ggcactttgtcattcagacgtctgt

SEQ ID NO: 3070104 - DNA, 25 bp, Homo sapien
acgtctgtaaccagagccgccgggc

SEQ ID NO: 3070105 - DNA, 25 bp, Homo sapien
ccgggctggctaatgcgcctaatag

SEQ ID NO: 3070106 - DNA, 25 bp, Homo sapien
gccgcgccggtaatggaggcacttt

SEQ ID NO: 3070107 - DNA, 25 bp, Homo sapien
gctctgagagattaaatcgtgccct

SEQ ID NO: 3070108 - DNA, 25 bp, Homo sapien
tctagatcatggaaggagtcgtggc

SEQ ID NO: 3070109 - DNA, 25 bp, Homo sapien
taaatcgtgccctatgcctttggcc

SEQ ID NO: 3070110 - DNA, 25 bp, Homo sapien
cttctagatcatggaaggagtcgtg

SEQ ID NO: 3070111 - DNA, 25 bp, Homo sapien
cacccgtggagatgggatgcttgcc

SEQ ID NO: 3070112 - DNA, 25 bp, Homo sapien
cctaagatgaagaggatcggaggct

SEQ ID NO: 3070113 - DNA, 25 bp, Homo sapien
gctggcaccgccttctctaaatgag

SEQ ID NO: 3070114 - DNA, 25 bp, Homo sapien
ttttggatataggtcagtgaggccc

SEQ ID NO: 3070115 - DNA, 25 bp, Homo sapien
gaattgacttcgactgtgacctgtg

SEQ ID NO: 3070116 - DNA, 25 bp, Homo sapien
tcaggcatgcctgtgtgacatcagt

SEQ ID NO: 3070117 - DNA, 25 bp, Homo sapien
caagggcttacacgtggaggaatgc

SEQ ID NO: 3070118 - DNA, 25 bp, Homo sapien
tctagacaaccctgcaaaggactgt

SEQ ID NO: 3070119 - DNA, 25 bp, Homo sapien
tcatccagggcagtgaagcagcgat

SEQ ID NO: 3070120 - DNA, 25 bp, Homo sapien
acaatgtgaaatgcctcttcatcca

SEQ ID NO: 3070121 - DNA, 25 bp, Homo sapien
ggaacaatgtgaaatgcctcttcat

SEQ ID NO: 3070122 - DNA, 25 bp, Homo sapien
tgggggtccgctgagcctgtaaccc

SEQ ID NO: 3070123 - DNA, 25 bp, Homo sapien
tccagatggttcaccttctaccctg

SEQ ID NO: 3070124 - DNA, 25 bp, Homo sapien
ttctaccctgcggaccttgggatgc

SEQ ID NO: 3070125 - DNA, 25 bp, Homo sapien
aacagtagtccagatggttcacctt

SEQ ID NO: 3070126 - DNA, 25 bp, Homo sapien
ttggagtccacattctgaagcccca

SEQ ID NO: 3070127 - DNA, 25 bp, Homo sapien
cgaagagggaggaagttttctggct

SEQ ID NO: 3070128 - DNA, 25 bp, Homo sapien
cagggacccaggaagaattctgcag

SEQ ID NO: 3070129 - DNA, 25 bp, Homo sapien
ttctgcaggggagccgtttgaatcc

SEQ ID NO: 3070130 - DNA, 25 bp, Homo sapien
gggacccaggaagaattctgcaggg

SEQ ID NO: 3070131 - DNA, 25 bp, Homo sapien
tgcaggaggctggtgccgccaggag

SEQ ID NO: 3070132 - DNA, 25 bp, Homo sapien
gcctggcacagggccacataggcta

SEQ ID NO: 3070133 - DNA, 25 bp, Homo sapien
caggaggctggtgccgccaggagcc

SEQ ID NO: 3070134 - DNA, 25 bp, Homo sapien
tggcacagggccacataggctaggc

SEQ ID NO: 3070135 - DNA, 25 bp, Homo sapien
ctggtggagaggggcagaacagcat

SEQ ID NO: 3070136 - DNA, 25 bp, Homo sapien
gagaggggcagaacagcatgggcat

SEQ ID NO: 3070137 - DNA, 25 bp, Homo sapien
ggtggagaggggcagaacagcatgg

SEQ ID NO: 3070138 - DNA, 25 bp, Homo sapien
tggagaggggcagaacagcatgggc

SEQ ID NO: 3070139 - DNA, 25 bp, Homo sapien
gggccaatcgttcagtgctctaaga

SEQ ID NO: 3070140 - DNA, 25 bp, Homo sapien
tcttttcccaaagagccgctgggaa

SEQ ID NO: 3070141 - DNA, 25 bp, Homo sapien
atcttttcccaaagagccgctggga

SEQ ID NO: 3070142 - DNA, 25 bp, Homo sapien
aaggtggagggccaatcgttcagtg

SEQ ID NO: 3070143 - DNA, 25 bp, Homo sapien
cctccgggaaagctgaacagccact

SEQ ID NO: 3070144 - DNA, 25 bp, Homo sapien
gtgtaacaccatccccaagcttggg

SEQ ID NO: 3070145 - DNA, 25 bp, Homo sapien
tccgggaaagctgaacagccacttg

SEQ ID NO: 3070146 - DNA, 25 bp, Homo sapien
acagccacttgggtgtaacaccatc

SEQ ID NO: 3070147 - DNA, 25 bp, Homo sapien
ggtcacaacaacaggagaagagccg

SEQ ID NO: 3070148 - DNA, 25 bp, Homo sapien
tggtcacaacaacaggagaagagcc

SEQ ID NO: 3070149 - DNA, 25 bp, Homo sapien
gacactcgagtcctgtggacactct

SEQ ID NO: 3070150 - DNA, 25 bp, Homo sapien
cctgagaaccggacactcgagtcct

SEQ ID NO: 3070151 - DNA, 25 bp, Homo sapien
gaaccggacactcgagtcctgtgga

SEQ ID NO: 3070152 - DNA, 25 bp, Homo sapien
gggccctgagaaccggacactcgag

SEQ ID NO: 3070153 - DNA, 25 bp, Homo sapien
ctgcgcggagaaggacacgtggacg

SEQ ID NO: 3070154 - DNA, 25 bp, Homo sapien
cgcggagaaggacacgtggacgagg

SEQ ID NO: 3070155 - DNA, 25 bp, Homo sapien
acacgtggacgaggaggtaccggat

SEQ ID NO: 3070156 - DNA, 25 bp, Homo sapien
gaaggacacgtggacgaggaggtac

SEQ ID NO: 3070157 - DNA, 25 bp, Homo sapien
gggctacagggacccgctctgccat

SEQ ID NO: 3070158 - DNA, 25 bp, Homo sapien
ccgctctgccatgcgccgagcctgc

SEQ ID NO: 3070159 - DNA, 25 bp, Homo sapien
gcctgggctacagggacccgctctg

SEQ ID NO: 3070160 - DNA, 25 bp, Homo sapien
cagggcctgggctacagggacccgc

SEQ ID NO: 3070161 - DNA, 25 bp, Homo sapien
ctctgatggaaacggggactggagc

SEQ ID NO: 3070162 - DNA, 25 bp, Homo sapien
ccagaggcggaggccgcctgttcag

SEQ ID NO: 3070163 - DNA, 25 bp, Homo sapien
ggcggaggccgcctgttcagggcct

SEQ ID NO: 3070164 - DNA, 25 bp, Homo sapien
gttcagggcctctgatggaaacggg

SEQ ID NO: 3070165 - DNA, 25 bp, Homo sapien
gaacgttattctgagggcgtcggaa

SEQ ID NO: 3070166 - DNA, 25 bp, Homo sapien
caatagagggcactgtaggccacca

SEQ ID NO: 3070167 - DNA, 25 bp, Homo sapien
taggccaccataaggagcttgaacg

SEQ ID NO: 3070168 - DNA, 25 bp, Homo sapien
gacctgatgtgatgtgcgttgccca

SEQ ID NO: 3070169 - DNA, 25 bp, Homo sapien
ttcctggaaaggagtggaggtcgcg

SEQ ID NO: 3070170 - DNA, 25 bp, Homo sapien
cgccaccattcactggcgcccagag

SEQ ID NO: 3070171 - DNA, 25 bp, Homo sapien
accattcactggcgcccagaggtgc

SEQ ID NO: 3070172 - DNA, 25 bp, Homo sapien
tggaggtcgcggttatccctcccgc

SEQ ID NO: 3070173 - DNA, 25 bp, Homo sapien
tgaaaggcacagtcaggccggtctg

SEQ ID NO: 3070174 - DNA, 25 bp, Homo sapien
ggaactgtcagcctcgggactggct

SEQ ID NO: 3070175 - DNA, 25 bp, Homo sapien
aaggacgtccggagatggctgccac

SEQ ID NO: 3070176 - DNA, 25 bp, Homo sapien
tggacgccaggggaactgtcagcct

SEQ ID NO: 3070177 - DNA, 25 bp, Homo sapien
tgtccatcgggagtccagagaggca

SEQ ID NO: 3070178 - DNA, 25 bp, Homo sapien
cagagaggcacacgcccctgaattc

SEQ ID NO: 3070179 - DNA, 25 bp, Homo sapien
cctgaattcaggccgctgtggccgc

SEQ ID NO: 3070180 - DNA, 25 bp, Homo sapien
tgcagagagggtccagaccctggac

SEQ ID NO: 3070181 - DNA, 25 bp, Homo sapien
gaacttctcgccgtacgcgttatat

SEQ ID NO: 3070182 - DNA, 25 bp, Homo sapien
cttctcgccgtacgcgttatataga

SEQ ID NO: 3070183 - DNA, 25 bp, Homo sapien
gaagcgggaacttctcgccgtacgc

SEQ ID NO: 3070184 - DNA, 25 bp, Homo sapien
cctgggccgcttgagtgtaaaggaa

SEQ ID NO: 3070185 - DNA, 25 bp, Homo sapien
tttcgccatcttggccagactggtc

SEQ ID NO: 3070186 - DNA, 25 bp, Homo sapien
cagcgtctcgctctgtaacccagga

SEQ ID NO: 3070187 - DNA, 25 bp, Homo sapien
taacccaggatggagtgcaatggcg

SEQ ID NO: 3070188 - DNA, 25 bp, Homo sapien
cgccatcttggccagactggtcccg

SEQ ID NO: 3070189 - DNA, 25 bp, Homo sapien
ccgggccaagcgcccacaggaggcg

SEQ ID NO: 3070190 - DNA, 25 bp, Homo sapien
tcccgggccaagcgcccacaggagg

SEQ ID NO: 3070191 - DNA, 25 bp, Homo sapien
ctcccgggccaagcgcccacaggag

SEQ ID NO: 3070192 - DNA, 25 bp, Homo sapien
tctcccgggccaagcgcccacagga

SEQ ID NO: 3070193 - DNA, 25 bp, Homo sapien
acgcgccacacccgcttggtctctt

SEQ ID NO: 3070194 - DNA, 25 bp, Homo sapien
ccacgcgccacacccgcttggtctc

SEQ ID NO: 3070195 - DNA, 25 bp, Homo sapien
ctcccacgcgccacacccgcttggt

SEQ ID NO: 3070196 - DNA, 25 bp, Homo sapien
gctgacgccactcgcctcccacgcg

SEQ ID NO: 3070197 - DNA, 25 bp, Homo sapien
catcaccttcgcctggcagatcagt

SEQ ID NO: 3070198 - DNA, 25 bp, Homo sapien
tcagtttctctaggcttggatggcc

SEQ ID NO: 3070199 - DNA, 25 bp, Homo sapien
tgtcttggactgtatccttgagggt

SEQ ID NO: 3070200 - DNA, 25 bp, Homo sapien
atcccttgctggtaccccctgtgaa

SEQ ID NO: 3070201 - DNA, 25 bp, Homo sapien
tacacgtacataaagagcagcccaa

SEQ ID NO: 3070202 - DNA, 25 bp, Homo sapien
taaaggaaacatacagggctcaggc

SEQ ID NO: 3070203 - DNA, 25 bp, Homo sapien
tgtccatctattgggtcaaaggccc

SEQ ID NO: 3070204 - DNA, 25 bp, Homo sapien
tgcaggtattggagctacatcccca

SEQ ID NO: 3070205 - DNA, 25 bp, Homo sapien
gcgaaactacttgcccgaaatactg

SEQ ID NO: 3070206 - DNA, 25 bp, Homo sapien
tatgtggaactgaaactgcaactcc

SEQ ID NO: 3070207 - DNA, 25 bp, Homo sapien
aactccaatggttctgcgaaactac

SEQ ID NO: 3070208 - DNA, 25 bp, Homo sapien
taaataagccatatcctcgtggaat

SEQ ID NO: 3070209 - DNA, 25 bp, Homo sapien
tgacagaagctaggtgccaggactg

SEQ ID NO: 3070210 - DNA, 25 bp, Homo sapien
gaactgggtacttcctcacacaggg

SEQ ID NO: 3070211 - DNA, 25 bp, Homo sapien
gaggaaagcaaatctgaagcctggt

SEQ ID NO: 3070212 - DNA, 25 bp, Homo sapien
tagaggagactttgagttcgcccgg

SEQ ID NO: 3070213 - DNA, 25 bp, Homo sapien
caaatccctgcgactcattaggcat

SEQ ID NO: 3070214 - DNA, 25 bp, Homo sapien
gactcagacccaagagacaaggcag

SEQ ID NO: 3070215 - DNA, 25 bp, Homo sapien
tctctgcaagctgaaaactaggact

SEQ ID NO: 3070216 - DNA, 25 bp, Homo sapien
gactggcagatgctgatagctcaca

SEQ ID NO: 3070217 - DNA, 25 bp, Homo sapien
gaaggaacagaactggctcctatgc

SEQ ID NO: 3070218 - DNA, 25 bp, Homo sapien
gcaatctgggctgggattttatcac

SEQ ID NO: 3070219 - DNA, 25 bp, Homo sapien
caggcggcaagtcaggtacaaacag

SEQ ID NO: 3070220 - DNA, 25 bp, Homo sapien
caaacagctgagcaatctgggctgg

SEQ ID NO: 3070221 - DNA, 25 bp, Homo sapien
cacagtgacgcagcaacagggtttt

SEQ ID NO: 3070222 - DNA, 25 bp, Homo sapien
gattgcgctgtctacctggtggtca

SEQ ID NO: 3070223 - DNA, 25 bp, Homo sapien
gagtaaaagctccacagattgcgct

SEQ ID NO: 3070224 - DNA, 25 bp, Homo sapien
taaacggagtcttacaacaagcagg

SEQ ID NO: 3070225 - DNA, 25 bp, Homo sapien
cagaggtctccaagacatccgaagc

SEQ ID NO: 3070226 - DNA, 25 bp, Homo sapien
ctgaagccagagagcggtatgcctc

SEQ ID NO: 3070227 - DNA, 25 bp, Homo sapien
ccaccaagtggggatgtgacaccac

SEQ ID NO: 3070228 - DNA, 25 bp, Homo sapien
aggattgcttcaggcgtttgcgtgg

SEQ ID NO: 3070229 - DNA, 25 bp, Homo sapien
tcaaaagcaccaagcaagtgtccag

SEQ ID NO: 3070230 - DNA, 25 bp, Homo sapien
tgcctgtggctgtcgtcatctgaaa

SEQ ID NO: 3070231 - DNA, 25 bp, Homo sapien
tagaacatgtcccactgagaagatg

SEQ ID NO: 3070232 - DNA, 25 bp, Homo sapien
taaaaaggagcatgggctccctcgg

SEQ ID NO: 3070233 - DNA, 25 bp, Homo sapien
gaagtcaattccatacggtcaactg

SEQ ID NO: 3070234 - DNA, 25 bp, Homo sapien
caaaaggttaatgaagctacttgcc

SEQ ID NO: 3070235 - DNA, 25 bp, Homo sapien
caataggattcaacccatgaagtca

SEQ ID NO: 3070236 - DNA, 25 bp, Homo sapien
gctacttgcctgctttacccactaa

SEQ ID NO: 3070237 - DNA, 25 bp, Homo sapien
tgcactgtggaggtcggccaggatg

SEQ ID NO: 3070238 - DNA, 25 bp, Homo sapien
cacacatgacctttaagcgctccag

SEQ ID NO: 3070239 - DNA, 25 bp, Homo sapien
tgcagcgttctccacggacaggtta

SEQ ID NO: 3070240 - DNA, 25 bp, Homo sapien
gtcggccaggatgagaatttctgca

SEQ ID NO: 3070241 - DNA, 25 bp, Homo sapien
tagatacttgaatagaactgcacag

SEQ ID NO: 3070242 - DNA, 25 bp, Homo sapien
tagttctgggctgaccactactgaa

SEQ ID NO: 3070243 - DNA, 25 bp, Homo sapien
tacaattacagtgaggcatcagtct

SEQ ID NO: 3070244 - DNA, 25 bp, Homo sapien
caattacagggtagatctgcatcct

SEQ ID NO: 3070245 - DNA, 25 bp, Homo sapien
tgaggaggcatatctgctggcactg

SEQ ID NO: 3070246 - DNA, 25 bp, Homo sapien
gaaagcctaggttaatgctgggcac

SEQ ID NO: 3070247 - DNA, 25 bp, Homo sapien
tgcacagtctccttataggccccag

SEQ ID NO: 3070248 - DNA, 25 bp, Homo sapien
gctgggcacatctgatctacttgat

SEQ ID NO: 3070249 - DNA, 25 bp, Homo sapien
cctagaagggcagaccattgagttc

SEQ ID NO: 3070250 - DNA, 25 bp, Homo sapien
tacttgtccgccaacacaggaaaag

SEQ ID NO: 3070251 - DNA, 25 bp, Homo sapien
tactgctggcaggatctacgccctt

SEQ ID NO: 3070252 - DNA, 25 bp, Homo sapien
tgaaagtccgtttcccaatgtgcgt

SEQ ID NO: 3070253 - DNA, 25 bp, Homo sapien
tgaaaatgctaaccaggacactagg

SEQ ID NO: 3070254 - DNA, 25 bp, Homo sapien
tacggccatgcctcactatccttgg

SEQ ID NO: 3070255 - DNA, 25 bp, Homo sapien
gacactaggtaaaagattacggcca

SEQ ID NO: 3070256 - DNA, 25 bp, Homo sapien
cagggccccgcaaataccaaaatct

SEQ ID NO: 3070257 - DNA, 25 bp, Homo sapien
tatgtgtaaaccaggaccgtcttgg

SEQ ID NO: 3070258 - DNA, 25 bp, Homo sapien
gaagtcacaataactcctagtcctg

SEQ ID NO: 3070259 - DNA, 25 bp, Homo sapien
ggccaaaccaagatatatgctcatt

SEQ ID NO: 3070260 - DNA, 25 bp, Homo sapien
ccacatggatacaaagggctgtttt

SEQ ID NO: 3070261 - DNA, 25 bp, Homo sapien
ggagccttccccgtgtaaatgaagc

SEQ ID NO: 3070262 - DNA, 25 bp, Homo sapien
cattttgtcgaggtttggagccttc

SEQ ID NO: 3070263 - DNA, 25 bp, Homo sapien
ttcaggctccacatcattgatttca

SEQ ID NO: 3070264 - DNA, 25 bp, Homo sapien
caaatcatcagccattttgtcgagg

SEQ ID NO: 3070265 - DNA, 25 bp, Homo sapien
ctggctaaacagacatgtcttcatc

SEQ ID NO: 3070266 - DNA, 25 bp, Homo sapien
taaacagacatgtcttcatcttgtt

SEQ ID NO: 3070267 - DNA, 25 bp, Homo sapien
gacatgtcttcatcttgttacatac

SEQ ID NO: 3070268 - DNA, 25 bp, Homo sapien
agacatgtcttcatcttgttacata

SEQ ID NO: 3070269 - DNA, 25 bp, Homo sapien
ctccatttcatgttcaaacatggca

SEQ ID NO: 3070270 - DNA, 25 bp, Homo sapien
gctctcctccatttcatgttcaaac

SEQ ID NO: 3070271 - DNA, 25 bp, Homo sapien
tcctccatttcatgttcaaacatgg

SEQ ID NO: 3070272 - DNA, 25 bp, Homo sapien
tctcctccatttcatgttcaaacat

SEQ ID NO: 3070273 - DNA, 25 bp, Homo sapien
taacagccagttgtgagagggaaca

SEQ ID NO: 3070274 - DNA, 25 bp, Homo sapien
tccctgggcggtgaagtcagtcctt

SEQ ID NO: 3070275 - DNA, 25 bp, Homo sapien
tgagggtcctcggtaaataggcagc

SEQ ID NO: 3070276 - DNA, 25 bp, Homo sapien
gctttgtccacgaggaagaacacct

SEQ ID NO: 3070277 - DNA, 25 bp, Homo sapien
ccttgaaaatgatggcctaggtcca

SEQ ID NO: 3070278 - DNA, 25 bp, Homo sapien
tttgtacatcatcatccatgccttg

SEQ ID NO: 3070279 - DNA, 25 bp, Homo sapien
catcatccatgccttgaaaatgatg

SEQ ID NO: 3070280 - DNA, 25 bp, Homo sapien
catgccttgaaaatgatggcctagg

SEQ ID NO: 3070281 - DNA, 25 bp, Homo sapien
gagttcaaaaagttgaagttgttca

SEQ ID NO: 3070282 - DNA, 25 bp, Homo sapien
tgagcattgttaccggaatacaaag

SEQ ID NO: 3070283 - DNA, 25 bp, Homo sapien
caaaaggtgattatgcaatcacttg

SEQ ID NO: 3070284 - DNA, 25 bp, Homo sapien
ttttagagagcagcttttttggttc

SEQ ID NO: 3070285 - DNA, 25 bp, Homo sapien
ttcctggccggcaacacacaagcag

SEQ ID NO: 3070286 - DNA, 25 bp, Homo sapien
caagcagcagtctgtgaaccgggaa

SEQ ID NO: 3070287 - DNA, 25 bp, Homo sapien
agccggcactcaggaacctttacca

SEQ ID NO: 3070288 - DNA, 25 bp, Homo sapien
tgacagaatcttgcacaacactcac

SEQ ID NO: 3070289 - DNA, 25 bp, Homo sapien
tgcccaactgtagataggacactgc

SEQ ID NO: 3070290 - DNA, 25 bp, Homo sapien
taaacgcagtcataagcccagaggc

SEQ ID NO: 3070291 - DNA, 25 bp, Homo sapien
ctcaggacaataggaagagagcccc

SEQ ID NO: 3070292 - DNA, 25 bp, Homo sapien
tatggtcttgggcaatgaaacagcc

SEQ ID NO: 3070293 - DNA, 25 bp, Homo sapien
gagaatgcttttggcactgggttcc

SEQ ID NO: 3070294 - DNA, 25 bp, Homo sapien
cataatcaaaccatagttaccagtg

SEQ ID NO: 3070295 - DNA, 25 bp, Homo sapien
taaaccaggttgacaggagcccaaa

SEQ ID NO: 3070296 - DNA, 25 bp, Homo sapien
cttgatggcaatttagtagactggg

SEQ ID NO: 3070297 - DNA, 25 bp, Homo sapien
tccaaaagaaaatctctacggatga

SEQ ID NO: 3070298 - DNA, 25 bp, Homo sapien
gatgaatttcttgaatccccagtct

SEQ ID NO: 3070299 - DNA, 25 bp, Homo sapien
aagcccgttggcctcatccaaaaga

SEQ ID NO: 3070300 - DNA, 25 bp, Homo sapien
acaaacctatatgcccgttgactct

SEQ ID NO: 3070301 - DNA, 25 bp, Homo sapien
ttggacagctgaccagtaacaggta

SEQ ID NO: 3070302 - DNA, 25 bp, Homo sapien
tggcattcaggatggagaatttgaa

SEQ ID NO: 3070303 - DNA, 25 bp, Homo sapien
ctctttggacagctgaccagtaaca

SEQ ID NO: 3070304 - DNA, 25 bp, Homo sapien
aagtgacaggtaatctttgctttct

SEQ ID NO: 3070305 - DNA, 25 bp, Homo sapien
cacatgtaggagaatttcactacct

SEQ ID NO: 3070306 - DNA, 25 bp, Homo sapien
tattgatggtccacatgtaggagaa

SEQ ID NO: 3070307 - DNA, 25 bp, Homo sapien
aaagctaaagttattgatggtccac

SEQ ID NO: 3070308 - DNA, 25 bp, Homo sapien
tgtaggagaatttcactaccttgat

SEQ ID NO: 3070309 - DNA, 25 bp, Homo sapien
agcaattaaataggaagtggacaac

SEQ ID NO: 3070310 - DNA, 25 bp, Homo sapien
gaagcaattaaataggaagtggaca

SEQ ID NO: 3070311 - DNA, 25 bp, Homo sapien
caggaagcaattaaataggaagtgg

SEQ ID NO: 3070312 - DNA, 25 bp, Homo sapien
aaacaggaagcaattaaataggaag

SEQ ID NO: 3070313 - DNA, 25 bp, Homo sapien
tgtagcaccaactctcagctacggg

SEQ ID NO: 3070314 - DNA, 25 bp, Homo sapien
gctacggggccactcgacatttctg

SEQ ID NO: 3070315 - DNA, 25 bp, Homo sapien
ccactcgacatttctgccggaggtg

SEQ ID NO: 3070316 - DNA, 25 bp, Homo sapien
gggccactcgacatttctgccggag

SEQ ID NO: 3070317 - DNA, 25 bp, Homo sapien
gagatttccaaagtcagggggcaaa

SEQ ID NO: 3070318 - DNA, 25 bp, Homo sapien
cgagatttccaaagtcagggggcaa

SEQ ID NO: 3070319 - DNA, 25 bp, Homo sapien
cgccagtttgaaggttaaacgagat

SEQ ID NO: 3070320 - DNA, 25 bp, Homo sapien
acgagatttccaaagtcagggggca

SEQ ID NO: 3070321 - DNA, 25 bp, Homo sapien
aacatcagagaagactatctaatgt

SEQ ID NO: 3070322 - DNA, 25 bp, Homo sapien
atgttaacatcagagaagactatct

SEQ ID NO: 3070323 - DNA, 25 bp, Homo sapien
aatgttaacatcagagaagactatc

SEQ ID NO: 3070324 - DNA, 25 bp, Homo sapien
acatcagagaagactatctaatgta

SEQ ID NO: 3070325 - DNA, 25 bp, Homo sapien
tgggcaaagaacaaccaacggtgta

SEQ ID NO: 3070326 - DNA, 25 bp, Homo sapien
aaattcttacactgcacctataggg

SEQ ID NO: 3070327 - DNA, 25 bp, Homo sapien
tgtttgataacacttacccagggta

SEQ ID NO: 3070328 - DNA, 25 bp, Homo sapien
tccacagccttacagaaaaatgggc

SEQ ID NO: 3070329 - DNA, 25 bp, Homo sapien
tgaagaggcttatacatcgagaccc

SEQ ID NO: 3070330 - DNA, 25 bp, Homo sapien
gacacaaggctctagggatgctggt

SEQ ID NO: 3070331 - DNA, 25 bp, Homo sapien
gatgctggttactcccatgggagga

SEQ ID NO: 3070332 - DNA, 25 bp, Homo sapien
gtacacctgagtgggaagaagtccc

SEQ ID NO: 3070333 - DNA, 25 bp, Homo sapien
catgcccgaccttcctgaagaactt

SEQ ID NO: 3070334 - DNA, 25 bp, Homo sapien
accatgcccgaccttcctgaagaac

SEQ ID NO: 3070335 - DNA, 25 bp, Homo sapien
ccatgcccgaccttcctgaagaact

SEQ ID NO: 3070336 - DNA, 25 bp, Homo sapien
gtcagtaggaaaactctaatttgtc

SEQ ID NO: 3070337 - DNA, 25 bp, Homo sapien
aagtcagtaggaaaactctaatttg

SEQ ID NO: 3070338 - DNA, 25 bp, Homo sapien
caagttaagtcagtaggaaaactct

SEQ ID NO: 3070339 - DNA, 25 bp, Homo sapien
agtaggaaaactctaatttgtcttg

SEQ ID NO: 3070340 - DNA, 25 bp, Homo sapien
tctgaatctcatacaagtctttact

SEQ ID NO: 3070341 - DNA, 25 bp, Homo sapien
gattccggtgacctcaaaatcatgc

SEQ ID NO: 3070342 - DNA, 25 bp, Homo sapien
caaaagcaggtgatatatgaaagaa

SEQ ID NO: 3070343 - DNA, 25 bp, Homo sapien
caaaattaccattcttaggccaagg

SEQ ID NO: 3070344 - DNA, 25 bp, Homo sapien
tttcaacagctctgtgaggcacaca

SEQ ID NO: 3070345 - DNA, 25 bp, Homo sapien
tcacagtagaggaacaacctaggcc

SEQ ID NO: 3070346 - DNA, 25 bp, Homo sapien
gtctagtggaaaccataacctcaag

SEQ ID NO: 3070347 - DNA, 25 bp, Homo sapien
tagccctgcatgatggcgcaagcct

SEQ ID NO: 3070348 - DNA, 25 bp, Homo sapien
aacatcctgtattgtgcctagcaca

SEQ ID NO: 3070349 - DNA, 25 bp, Homo sapien
tctttgtgggcaagaagtttgtacc

SEQ ID NO: 3070350 - DNA, 25 bp, Homo sapien
ttgctaatactaaatttttccagag

SEQ ID NO: 3070351 - DNA, 25 bp, Homo sapien
tagctctggagatataaaaggactt

SEQ ID NO: 3070352 - DNA, 25 bp, Homo sapien
caaataaagtatgattaatccataa

SEQ ID NO: 3070353 - DNA, 25 bp, Homo sapien
agaggtctacaatatgctgaatttt

SEQ ID NO: 3070354 - DNA, 25 bp, Homo sapien
gtatgattaatccataaaacagaat

SEQ ID NO: 3070355 - DNA, 25 bp, Homo sapien
taaaagaggtctacaatatgctgaa

SEQ ID NO: 3070356 - DNA, 25 bp, Homo sapien
tcagacaaccaagcggagaagaact

SEQ ID NO: 3070357 - DNA, 25 bp, Homo sapien
tcaaagtggactgcaaggaacttcc

SEQ ID NO: 3070358 - DNA, 25 bp, Homo sapien
gaagatgtttccatcggcggtggca

SEQ ID NO: 3070359 - DNA, 25 bp, Homo sapien
ccaaatgtcaacgtcaagggctccc

SEQ ID NO: 3070360 - DNA, 25 bp, Homo sapien
tgggctatgcgaaacaagccagtca

SEQ ID NO: 3070361 - DNA, 25 bp, Homo sapien
gaaccttaaggacactgggctatgc

SEQ ID NO: 3070362 - DNA, 25 bp, Homo sapien
gcattactcccaatagccgaaaggt

SEQ ID NO: 3070363 - DNA, 25 bp, Homo sapien
cacttttgtgaactgttggtggcaa

SEQ ID NO: 3070364 - DNA, 25 bp, Homo sapien
cagaaagtagaagggtggttcccag

SEQ ID NO: 3070365 - DNA, 25 bp, Homo sapien
tagagacagaaagtagaagggtggt

SEQ ID NO: 3070366 - DNA, 25 bp, Homo sapien
tagagtagtgaaattcctagagaca

SEQ ID NO: 3070367 - DNA, 25 bp, Homo sapien
ctagagtagtgaaattcctagagac

SEQ ID NO: 3070368 - DNA, 25 bp, Homo sapien
aacaagaaggtgtttagtgagtaca

SEQ ID NO: 3070369 - DNA, 25 bp, Homo sapien
gataaaccgtggtacagcatattca

SEQ ID NO: 3070370 - DNA, 25 bp, Homo sapien
gagtacagagtttccgtattgcaag

SEQ ID NO: 3070371 - DNA, 25 bp, Homo sapien
tactaaacaccactaactgtatcct

SEQ ID NO: 3070372 - DNA, 25 bp, Homo sapien
tcagaatagcctttcggagagattc

SEQ ID NO: 3070373 - DNA, 25 bp, Homo sapien
agcctttcggagagattcactatgc

SEQ ID NO: 3070374 - DNA, 25 bp, Homo sapien
aatagcctttcggagagattcacta

SEQ ID NO: 3070375 - DNA, 25 bp, Homo sapien
agaatagcctttcggagagattcac

SEQ ID NO: 3070376 - DNA, 25 bp, Homo sapien
tgggagtctctagggcaacaccaga

SEQ ID NO: 3070377 - DNA, 25 bp, Homo sapien
atctggcagcaagtctagcccacag

SEQ ID NO: 3070378 - DNA, 25 bp, Homo sapien
gactcgtgctccaccggctctttat

SEQ ID NO: 3070379 - DNA, 25 bp, Homo sapien
ccagatgagaatagtgctttgtccg

SEQ ID NO: 3070380 - DNA, 25 bp, Homo sapien
gctggtccccgtccccctgcgcttg

SEQ ID NO: 3070381 - DNA, 25 bp, Homo sapien
ctgctggtccccgtccccctgcgct

SEQ ID NO: 3070382 - DNA, 25 bp, Homo sapien
tgctggtccccgtccccctgcgctt

SEQ ID NO: 3070383 - DNA, 25 bp, Homo sapien
ctggtccccgtccccctgcgcttgc

SEQ ID NO: 3070384 - DNA, 25 bp, Homo sapien
cacacactcggagcgcgcacactca

SEQ ID NO: 3070385 - DNA, 25 bp, Homo sapien
ggcgtcagcacgtcgacgcagccag

SEQ ID NO: 3070386 - DNA, 25 bp, Homo sapien
ggcgtcatggcgtcagcacgtcgac

SEQ ID NO: 3070387 - DNA, 25 bp, Homo sapien
tgcgggaccgccgatacacaaatac

SEQ ID NO: 3070388 - DNA, 25 bp, Homo sapien
gctctgagatgccaacgaggatctt

SEQ ID NO: 3070389 - DNA, 25 bp, Homo sapien
ttcggctccattttacagtccagca

SEQ ID NO: 3070390 - DNA, 25 bp, Homo sapien
tgggtgcgggatcttccccaaaggc

SEQ ID NO: 3070391 - DNA, 25 bp, Homo sapien
tcattggctgttatgagccaggtct

SEQ ID NO: 3070392 - DNA, 25 bp, Homo sapien
atgatcaacttttcagttgggcagt

SEQ ID NO: 3070393 - DNA, 25 bp, Homo sapien
tccgttgagtggtcaatgatcaact

SEQ ID NO: 3070394 - DNA, 25 bp, Homo sapien
gatcaacttttcagttgggcagttg

SEQ ID NO: 3070395 - DNA, 25 bp, Homo sapien
tggacagctcttccgttgagtggtc

SEQ ID NO: 3070396 - DNA, 25 bp, Homo sapien
aggcactgaatgaagtcacgcttca

SEQ ID NO: 3070397 - DNA, 25 bp, Homo sapien
tactgccacagagtggaaggcactg

SEQ ID NO: 3070398 - DNA, 25 bp, Homo sapien
tgtcctcgcaggctcatactgccac

SEQ ID NO: 3070399 - DNA, 25 bp, Homo sapien
ggcactgaatgaagtcacgcttcat

SEQ ID NO: 3070400 - DNA, 25 bp, Homo sapien
tggtgacaccttggcacagcaaagg

SEQ ID NO: 3070401 - DNA, 25 bp, Homo sapien
tcagacaactcgacagtggctgtgc

SEQ ID NO: 3070402 - DNA, 25 bp, Homo sapien
ggtccttggaggattgcgatttcca

SEQ ID NO: 3070403 - DNA, 25 bp, Homo sapien
gaataggagggattaacccagcctc

SEQ ID NO: 3070404 - DNA, 25 bp, Homo sapien
ggacagccacccgtcctctaatggg

SEQ ID NO: 3070405 - DNA, 25 bp, Homo sapien
tatttaccatagactgctccagggc

SEQ ID NO: 3070406 - DNA, 25 bp, Homo sapien
taatgggaccagctctaacgggaca

SEQ ID NO: 3070407 - DNA, 25 bp, Homo sapien
catgctaaccacacccgtgagagga

SEQ ID NO: 3070408 - DNA, 25 bp, Homo sapien
tattcttgatgtggaggtagtctct

SEQ ID NO: 3070409 - DNA, 25 bp, Homo sapien
ggaactcagtcccatattcctatta

SEQ ID NO: 3070410 - DNA, 25 bp, Homo sapien
cagtcccatattcctattaagtcca

SEQ ID NO: 3070411 - DNA, 25 bp, Homo sapien
tgatgtggaggtagtctctctcttc

SEQ ID NO: 3070412 - DNA, 25 bp, Homo sapien
tagtgggatgtcttcttagctcctt

SEQ ID NO: 3070413 - DNA, 25 bp, Homo sapien
agtgggatgtcttcttagctccttt

SEQ ID NO: 3070414 - DNA, 25 bp, Homo sapien
ctagtgggatgtcttcttagctcct

SEQ ID NO: 3070415 - DNA, 25 bp, Homo sapien
ggcaccaggatactagttattacag

SEQ ID NO: 3070416 - DNA, 25 bp, Homo sapien
ggtagtcggccttgtatctccaaaa

SEQ ID NO: 3070417 - DNA, 25 bp, Homo sapien
tgaaacttaccaatgattgtggtgg

SEQ ID NO: 3070418 - DNA, 25 bp, Homo sapien
cactggttttatgtaacttcctcag

SEQ ID NO: 3070419 - DNA, 25 bp, Homo sapien
ggagtttaaggccagcctaggcaac

SEQ ID NO: 3070420 - DNA, 25 bp, Homo sapien
caggagtttaaggccagcctaggca

SEQ ID NO: 3070421 - DNA, 25 bp, Homo sapien
ttaaggccagcctaggcaacacagc

SEQ ID NO: 3070422 - DNA, 25 bp, Homo sapien
agtttaaggccagcctaggcaacac

SEQ ID NO: 3070423 - DNA, 25 bp, Homo sapien
ggtcaggtattgtggtacatgccta

SEQ ID NO: 3070424 - DNA, 25 bp, Homo sapien
gctcacccgattggtgagctgagat

SEQ ID NO: 3070425 - DNA, 25 bp, Homo sapien
ttggatacagattttcactctgtca

SEQ ID NO: 3070426 - DNA, 25 bp, Homo sapien
gagaccctaggaaggctggattaga

SEQ ID NO: 3070427 - DNA, 25 bp, Homo sapien
attggcgaagaggatcacagaggcc

SEQ ID NO: 3070428 - DNA, 25 bp, Homo sapien
gggaccaaaatacacaaccgtcata

SEQ ID NO: 3070429 - DNA, 25 bp, Homo sapien
gaactttcgagttgtagtgatgatg

SEQ ID NO: 3070430 - DNA, 25 bp, Homo sapien
cacagaggccaaaattgtgaagaac

SEQ ID NO: 3070431 - DNA, 25 bp, Homo sapien
tctgccattggtctaaagtctataa

SEQ ID NO: 3070432 - DNA, 25 bp, Homo sapien
gtgaggtccggtgggcttctgggta

SEQ ID NO: 3070433 - DNA, 25 bp, Homo sapien
tcagggctaatcttgccaccctctt

SEQ ID NO: 3070434 - DNA, 25 bp, Homo sapien
agagaaagataaaggtgaggtccgg

SEQ ID NO: 3070435 - DNA, 25 bp, Homo sapien
gcccaaagagcaggatgttatagat

SEQ ID NO: 3070436 - DNA, 25 bp, Homo sapien
cccaaagagcaggatgttatagatg

SEQ ID NO: 3070437 - DNA, 25 bp, Homo sapien
caaagagcaggatgttatagatgat

SEQ ID NO: 3070438 - DNA, 25 bp, Homo sapien
aagagcaggatgttatagatgatgg

SEQ ID NO: 3070439 - DNA, 25 bp, Homo sapien
tgtacggcgcattttgtgcacacaa

SEQ ID NO: 3070440 - DNA, 25 bp, Homo sapien
gcagaaatcctcagatgctgtagag

SEQ ID NO: 3070441 - DNA, 25 bp, Homo sapien
cacatggcctgttaaagaactgcaa

SEQ ID NO: 3070442 - DNA, 25 bp, Homo sapien
aaggaagcccctcgcattagtcacc

SEQ ID NO: 3070443 - DNA, 25 bp, Homo sapien
tgacaactgacacacgactctcctt

SEQ ID NO: 3070444 - DNA, 25 bp, Homo sapien
ccaggaaggtttctcaagggcttga

SEQ ID NO: 3070445 - DNA, 25 bp, Homo sapien
aaagggcatcttggaactaattcag

SEQ ID NO: 3070446 - DNA, 25 bp, Homo sapien
tgttttactactgagtgtcttccca

SEQ ID NO: 3070447 - DNA, 25 bp, Homo sapien
ctggtgatacatgggaagaacagca

SEQ ID NO: 3070448 - DNA, 25 bp, Homo sapien
ctagagggatcaaaaggatgagggc

SEQ ID NO: 3070449 - DNA, 25 bp, Homo sapien
ccctctggtgatacatgggaagaac

SEQ ID NO: 3070450 - DNA, 25 bp, Homo sapien
cctctggtgatacatgggaagaaca

SEQ ID NO: 3070451 - DNA, 25 bp, Homo sapien
tcgaccaaaggttgatgttcagcat

SEQ ID NO: 3070452 - DNA, 25 bp, Homo sapien
gtttggtaatgagcccgcatgtggt

SEQ ID NO: 3070453 - DNA, 25 bp, Homo sapien
gttggagcctgtttggtaatgagcc

SEQ ID NO: 3070454 - DNA, 25 bp, Homo sapien
tcccagcagcaatgtcgaccaaagg

SEQ ID NO: 3070455 - DNA, 25 bp, Homo sapien
caccagtcagtccatccagggtcag

SEQ ID NO: 3070456 - DNA, 25 bp, Homo sapien
agtcagtccatccagggtcagcgat

SEQ ID NO: 3070457 - DNA, 25 bp, Homo sapien
gtccatccagggtcagcgataatag

SEQ ID NO: 3070458 - DNA, 25 bp, Homo sapien
gggaaacaccagtcagtccatccag

SEQ ID NO: 3070459 - DNA, 25 bp, Homo sapien
aagagggtcaccccaaggagcatga

SEQ ID NO: 3070460 - DNA, 25 bp, Homo sapien
caagagtagctctccatagccgact

SEQ ID NO: 3070461 - DNA, 25 bp, Homo sapien
tgtacatgaaaagggccactccagc

SEQ ID NO: 3070462 - DNA, 25 bp, Homo sapien
gactgtgtgttcttctatcccaaca

SEQ ID NO: 3070463 - DNA, 25 bp, Homo sapien
taaggattaccagcctatgaacatc

SEQ ID NO: 3070464 - DNA, 25 bp, Homo sapien
gcacctagataaggattgagcaaca

SEQ ID NO: 3070465 - DNA, 25 bp, Homo sapien
aagccgagagggacacagttgtagc

SEQ ID NO: 3070466 - DNA, 25 bp, Homo sapien
tgcaacacagaaatggctgaccaag

SEQ ID NO: 3070467 - DNA, 25 bp, Homo sapien
gggattggcttgcaggatttaccaa

SEQ ID NO: 3070468 - DNA, 25 bp, Homo sapien
ttggcttgcaggatttaccaaggac

SEQ ID NO: 3070469 - DNA, 25 bp, Homo sapien
gattggcttgcaggatttaccaagg

SEQ ID NO: 3070470 - DNA, 25 bp, Homo sapien
ctgggattggcttgcaggatttacc

SEQ ID NO: 3070471 - DNA, 25 bp, Homo sapien
taagatgagtaagcacagggcctgc

SEQ ID NO: 3070472 - DNA, 25 bp, Homo sapien
ttttaactcacagacctgagggaag

SEQ ID NO: 3070473 - DNA, 25 bp, Homo sapien
tactatgctaggtaccgcactgatt

SEQ ID NO: 3070474 - DNA, 25 bp, Homo sapien
cccaatgtcttacaggaccgttatc

SEQ ID NO: 3070475 - DNA, 25 bp, Homo sapien
tagaacaggcagcatagagccagct

SEQ ID NO: 3070476 - DNA, 25 bp, Homo sapien
ggtagttgacaaactgtagtgctga

SEQ ID NO: 3070477 - DNA, 25 bp, Homo sapien
cacccagataggagatagaacaggc

SEQ ID NO: 3070478 - DNA, 25 bp, Homo sapien
tagtgctgaattgctggagaccatg

SEQ ID NO: 3070479 - DNA, 25 bp, Homo sapien
ctggcagtgtcaaaaaactggatca

SEQ ID NO: 3070480 - DNA, 25 bp, Homo sapien
ggatttggaatatagaagacccatt

SEQ ID NO: 3070481 - DNA, 25 bp, Homo sapien
acagagaggctgtgtaagtacaaaa

SEQ ID NO: 3070482 - DNA, 25 bp, Homo sapien
tttggaatatagaagacccattctc

SEQ ID NO: 3070483 - DNA, 25 bp, Homo sapien
taagtattttcaatggggatttgga

SEQ ID NO: 3070484 - DNA, 25 bp, Homo sapien
tgaatgaagaccaaagttaaggcaa

SEQ ID NO: 3070485 - DNA, 25 bp, Homo sapien
ggcaaacacagcattgatcacacat

SEQ ID NO: 3070486 - DNA, 25 bp, Homo sapien
gatcttggcaaacacagcattgatc

SEQ ID NO: 3070487 - DNA, 25 bp, Homo sapien
taaggcaaaggtgaacgtctcctgc

SEQ ID NO: 3070488 - DNA, 25 bp, Homo sapien
taatatatcccgagccactgaaaac

SEQ ID NO: 3070489 - DNA, 25 bp, Homo sapien
gaccactaggctcatttgcaaaagg

SEQ ID NO: 3070490 - DNA, 25 bp, Homo sapien
gggagaaattagtgtatttcactca

SEQ ID NO: 3070491 - DNA, 25 bp, Homo sapien
gtcatctaatatatcccgagccact

SEQ ID NO: 3070492 - DNA, 25 bp, Homo sapien
caagcatctgggagtaccaaaaggg

SEQ ID NO: 3070493 - DNA, 25 bp, Homo sapien
caccaaggccgaggacgaataggtt

SEQ ID NO: 3070494 - DNA, 25 bp, Homo sapien
gacgaataggttgtttgcaagcatc

SEQ ID NO: 3070495 - DNA, 25 bp, Homo sapien
gtatttcggctatggcaccaaggcc

SEQ ID NO: 3070496 - DNA, 25 bp, Homo sapien
gaatagaagtctcagcctgtaaaac

SEQ ID NO: 3070497 - DNA, 25 bp, Homo sapien
gctgcaaaagtagtagggtgctaag

SEQ ID NO: 3070498 - DNA, 25 bp, Homo sapien
gaattctgggtaggctcagccatag

SEQ ID NO: 3070499 - DNA, 25 bp, Homo sapien
taaccaagtccgaagaatccagaaa

SEQ ID NO: 3070500 - DNA, 25 bp, Homo sapien
cttttcctgcaggatcccatagtaa

SEQ ID NO: 3070501 - DNA, 25 bp, Homo sapien
ttcctgcaggatcccatagtaaaaa

SEQ ID NO: 3070502 - DNA, 25 bp, Homo sapien
tttcctgcaggatcccatagtaaaa

SEQ ID NO: 3070503 - DNA, 25 bp, Homo sapien
atcttttcctgcaggatcccatagt

SEQ ID NO: 3070504 - DNA, 25 bp, Homo sapien
aggcgacagctccagccggacatcg

SEQ ID NO: 3070505 - DNA, 25 bp, Homo sapien
aggagccgactggagacccgctcac

SEQ ID NO: 3070506 - DNA, 25 bp, Homo sapien
cggacatcgccgaccggcggcaggg

SEQ ID NO: 3070507 - DNA, 25 bp, Homo sapien
acccgctcacaaccggcaccggcag

SEQ ID NO: 3070508 - DNA, 25 bp, Homo sapien
gaaccggcagcctcgagactgatcc

SEQ ID NO: 3070509 - DNA, 25 bp, Homo sapien
tcgagactgatccctcgccctggag

SEQ ID NO: 3070510 - DNA, 25 bp, Homo sapien
ggaaccggcagcctcgagactgatc

SEQ ID NO: 3070511 - DNA, 25 bp, Homo sapien
agactgatccctcgccctggagatt

SEQ ID NO: 3070512 - DNA, 25 bp, Homo sapien
tgagctcctcgttggatcccttcct

SEQ ID NO: 3070513 - DNA, 25 bp, Homo sapien
gctgctctctaggtcgaggctcctc

SEQ ID NO: 3070514 - DNA, 25 bp, Homo sapien
cctcatgcaagtgttgggtcttcac

SEQ ID NO: 3070515 - DNA, 25 bp, Homo sapien
tgccagggcaagactgacctcaggt

SEQ ID NO: 3070516 - DNA, 25 bp, Homo sapien
gcgggctgggctgctacttaagaca

SEQ ID NO: 3070517 - DNA, 25 bp, Homo sapien
tatagagtcgccatttgccacctgg

SEQ ID NO: 3070518 - DNA, 25 bp, Homo sapien
taagggcctcctatacagtcatttg

SEQ ID NO: 3070519 - DNA, 25 bp, Homo sapien
gaattggtcaagtgttatggcccgt

SEQ ID NO: 3070520 - DNA, 25 bp, Homo sapien
aatggactttgttcttgtcaggaca

SEQ ID NO: 3070521 - DNA, 25 bp, Homo sapien
gaggccttggaggcttccggatcct

SEQ ID NO: 3070522 - DNA, 25 bp, Homo sapien
aaggctgagccagtcgggttgaaat

SEQ ID NO: 3070523 - DNA, 25 bp, Homo sapien
gtgcgctgccatggctcgaatggca

SEQ ID NO: 3070524 - DNA, 25 bp, Homo sapien
tactagaccccagtagtaccacgac

SEQ ID NO: 3070525 - DNA, 25 bp, Homo sapien
ttgaaatctactggcctaaagaatc

SEQ ID NO: 3070526 - DNA, 25 bp, Homo sapien
taagatgcttaacagtgtccctggc

SEQ ID NO: 3070527 - DNA, 25 bp, Homo sapien
tgttccctagttgaaatctactggc

SEQ ID NO: 3070528 - DNA, 25 bp, Homo sapien
taatgtgagaggaatcatccttcct

SEQ ID NO: 3070529 - DNA, 25 bp, Homo sapien
catgtggtccttgtcatatctgtct

SEQ ID NO: 3070530 - DNA, 25 bp, Homo sapien
cagcctgtctcacctttataatgtg

SEQ ID NO: 3070531 - DNA, 25 bp, Homo sapien
ttgtttaggaagatgggatgataaa

SEQ ID NO: 3070532 - DNA, 25 bp, Homo sapien
gccaattaccatcttaattccggaa

SEQ ID NO: 3070533 - DNA, 25 bp, Homo sapien
ctggcgtcctagagactccacagtg

SEQ ID NO: 3070534 - DNA, 25 bp, Homo sapien
tgaagctctgccaccaatggttctc

SEQ ID NO: 3070535 - DNA, 25 bp, Homo sapien
aataattctagagcccaggaagagc

SEQ ID NO: 3070536 - DNA, 25 bp, Homo sapien
tgccctgactactgaagtgtagtgg

SEQ ID NO: 3070537 - DNA, 25 bp, Homo sapien
ttgccctgactactgaagtgtagtg

SEQ ID NO: 3070538 - DNA, 25 bp, Homo sapien
tacaagagtctagagcctgctgaag

SEQ ID NO: 3070539 - DNA, 25 bp, Homo sapien
gtaacaaaacctctagtggcaatgg

SEQ ID NO: 3070540 - DNA, 25 bp, Homo sapien
tctgtatgtaccttcggctgccacc

SEQ ID NO: 3070541 - DNA, 25 bp, Homo sapien
caacttggtgtgaatctgccctggt

SEQ ID NO: 3070542 - DNA, 25 bp, Homo sapien
tgccatcttcaagaaaggctgggtg

SEQ ID NO: 3070543 - DNA, 25 bp, Homo sapien
aaaggcaaggactggagatgggctg

SEQ ID NO: 3070544 - DNA, 25 bp, Homo sapien
tgattaggtcgaggggaggcagcaa

SEQ ID NO: 3070545 - DNA, 25 bp, Homo sapien
agcaaaggcaaggactggagatggg

SEQ ID NO: 3070546 - DNA, 25 bp, Homo sapien
ggcggcaccccgatgttcctcatga

SEQ ID NO: 3070547 - DNA, 25 bp, Homo sapien
gagatgccaaggacatggaaggaga

SEQ ID NO: 3070548 - DNA, 25 bp, Homo sapien
gatgttcctcatgactggccaggcc

SEQ ID NO: 3070549 - DNA, 25 bp, Homo sapien
cggtgcccatcagggatatcaagga

SEQ ID NO: 3070550 - DNA, 25 bp, Homo sapien
ggaggctatggaaggggaattgctt

SEQ ID NO: 3070551 - DNA, 25 bp, Homo sapien
cttgaacccgggaggcggagattgc

SEQ ID NO: 3070552 - DNA, 25 bp, Homo sapien
gaggctatggaaggggaattgcttg

SEQ ID NO: 3070553 - DNA, 25 bp, Homo sapien
gaacccgggaggcggagattgcagt

SEQ ID NO: 3070554 - DNA, 25 bp, Homo sapien
ctccagctcttggttgagcccttcc

SEQ ID NO: 3070555 - DNA, 25 bp, Homo sapien
gggctgagtcgcaagacaggggacc

SEQ ID NO: 3070556 - DNA, 25 bp, Homo sapien
tccagctcttggttgagcccttcca

SEQ ID NO: 3070557 - DNA, 25 bp, Homo sapien
aggcaggggctgagtcgcaagacag

SEQ ID NO: 3070558 - DNA, 25 bp, Homo sapien
ctgaggggaagctgggaggggacgc

SEQ ID NO: 3070559 - DNA, 25 bp, Homo sapien
agtgctccccgcactgcgtggtccc

SEQ ID NO: 3070560 - DNA, 25 bp, Homo sapien
tggtcccctaggagtggtgaacctc

SEQ ID NO: 3070561 - DNA, 25 bp, Homo sapien
ttcccactgcggctcagcttcgtcc

SEQ ID NO: 3070562 - DNA, 25 bp, Homo sapien
gagtggtgaacctcgctccttctct

SEQ ID NO: 3070563 - DNA, 25 bp, Homo sapien
cctaggcagggagtcaaagtgggta

SEQ ID NO: 3070564 - DNA, 25 bp, Homo sapien
taggcagggagtcaaagtgggtagc

SEQ ID NO: 3070565 - DNA, 25 bp, Homo sapien
gcagggagtcaaagtgggtagctac

SEQ ID NO: 3070566 - DNA, 25 bp, Homo sapien
ggcagggagtcaaagtgggtagcta

SEQ ID NO: 3070567 - DNA, 25 bp, Homo sapien
tcttttcggtggtctgtgctgcccc

SEQ ID NO: 3070568 - DNA, 25 bp, Homo sapien
ccttctagctcttgccaggacaggg

SEQ ID NO: 3070569 - DNA, 25 bp, Homo sapien
cttgtgtgcacaggaactggcacgc

SEQ ID NO: 3070570 - DNA, 25 bp, Homo sapien
tgtgcacaggaactggcacgctcac

SEQ ID NO: 3070571 - DNA, 25 bp, Homo sapien
gagaaacacagtgagacacagcagc

SEQ ID NO: 3070572 - DNA, 25 bp, Homo sapien
aacacagtgagacacagcagcttct

SEQ ID NO: 3070573 - DNA, 25 bp, Homo sapien
gaaacacagtgagacacagcagctt

SEQ ID NO: 3070574 - DNA, 25 bp, Homo sapien
ggagagaaacacagtgagacacagc

SEQ ID NO: 3070575 - DNA, 25 bp, Homo sapien
tctcttgcaaactcttcaagtacct

SEQ ID NO: 3070576 - DNA, 25 bp, Homo sapien
attcaggccgccacgggtactacta

SEQ ID NO: 3070577 - DNA, 25 bp, Homo sapien
gcaaactcttcaagtacctctttct

SEQ ID NO: 3070578 - DNA, 25 bp, Homo sapien
cgggtactactaatatctcttgcaa

SEQ ID NO: 3070579 - DNA, 25 bp, Homo sapien
tcagcagaccaaaaagtcatgtttg

SEQ ID NO: 3070580 - DNA, 25 bp, Homo sapien
gatgaccctttggaagcagggtaga

SEQ ID NO: 3070581 - DNA, 25 bp, Homo sapien
gaccaaaaagtcatgtttgtctcca

SEQ ID NO: 3070582 - DNA, 25 bp, Homo sapien
agcagaccaaaaagtcatgtttgtc

SEQ ID NO: 3070583 - DNA, 25 bp, Homo sapien
aaaaatatcctatcatagaagcttc

SEQ ID NO: 3070584 - DNA, 25 bp, Homo sapien
aaatatcctatcatagaagcttccc

SEQ ID NO: 3070585 - DNA, 25 bp, Homo sapien
tatcctatcatagaagcttccccat

SEQ ID NO: 3070586 - DNA, 25 bp, Homo sapien
ctatcatagaagcttccccatctta

SEQ ID NO: 3070587 - DNA, 25 bp, Homo sapien
gagtcctgtccgtcagcaggatgag

SEQ ID NO: 3070588 - DNA, 25 bp, Homo sapien
cctgggcccagccactagaagtggg

SEQ ID NO: 3070589 - DNA, 25 bp, Homo sapien
tacacgaagactcaaaggtttgcac

SEQ ID NO: 3070590 - DNA, 25 bp, Homo sapien
tgggcaacacaaagcaatcggtggc

SEQ ID NO: 3070591 - DNA, 25 bp, Homo sapien
agtggctgaggcctacacactgact

SEQ ID NO: 3070592 - DNA, 25 bp, Homo sapien
gaatgtacgccggacctgaagtggc

SEQ ID NO: 3070593 - DNA, 25 bp, Homo sapien
aggcctacacactgacttttctggg

SEQ ID NO: 3070594 - DNA, 25 bp, Homo sapien
ccttgtcattggtgcagcaggtgaa

SEQ ID NO: 3070595 - DNA, 25 bp, Homo sapien
cgcacgccttgccatcagcatggag

SEQ ID NO: 3070596 - DNA, 25 bp, Homo sapien
aagagaacacagcccgcacgccttg

SEQ ID NO: 3070597 - DNA, 25 bp, Homo sapien
gagacgtggcaatcaccttcctctt

SEQ ID NO: 3070598 - DNA, 25 bp, Homo sapien
tcttctaagagatgtggcctgcctg

SEQ ID NO: 3070599 - DNA, 25 bp, Homo sapien
atttgagggattcctctccaatttg

SEQ ID NO: 3070600 - DNA, 25 bp, Homo sapien
accacacccgacccattcctatatt

SEQ ID NO: 3070601 - DNA, 25 bp, Homo sapien
gagggattcctctccaatttggaca

SEQ ID NO: 3070602 - DNA, 25 bp, Homo sapien
ttgagggattcctctccaatttgga

SEQ ID NO: 3070603 - DNA, 25 bp, Homo sapien
aaaccctcaactctcaacacccaga

SEQ ID NO: 3070604 - DNA, 25 bp, Homo sapien
atataaacttacaggtcttacctct

SEQ ID NO: 3070605 - DNA, 25 bp, Homo sapien
acccagagataaccaatgttatgag

SEQ ID NO: 3070606 - DNA, 25 bp, Homo sapien
tactgtacgtattgttttgttatgt

SEQ ID NO: 3070607 - DNA, 25 bp, Homo sapien
ggaccctaaagctatctcgtgttta

SEQ ID NO: 3070608 - DNA, 25 bp, Homo sapien
aagctatctcgtgtttacgttgtgc

SEQ ID NO: 3070609 - DNA, 25 bp, Homo sapien
tgggaccctaaagctatctcgtgtt

SEQ ID NO: 3070610 - DNA, 25 bp, Homo sapien
cgtgtttacgttgtgctttcaagtt

SEQ ID NO: 3070611 - DNA, 25 bp, Homo sapien
tgatgtgagaatccaaccaacgcat

SEQ ID NO: 3070612 - DNA, 25 bp, Homo sapien
ggctggggagcacccaaattcctgg

SEQ ID NO: 3070613 - DNA, 25 bp, Homo sapien
agggctggggagcacccaaattcct

SEQ ID NO: 3070614 - DNA, 25 bp, Homo sapien
ggagcacccaaattcctggaatgtg

SEQ ID NO: 3070615 - DNA, 25 bp, Homo sapien
caggaacactagtatacccattggg

SEQ ID NO: 3070616 - DNA, 25 bp, Homo sapien
aggaacactagtatacccattgggc

SEQ ID NO: 3070617 - DNA, 25 bp, Homo sapien
ggaacactagtatacccattgggca

SEQ ID NO: 3070618 - DNA, 25 bp, Homo sapien
gaacactagtatacccattgggcat

SEQ ID NO: 3070619 - DNA, 25 bp, Homo sapien
tactgtcaaattgtgcacccaaaaa

SEQ ID NO: 3070620 - DNA, 25 bp, Homo sapien
aaagagagataagaccattgtggca

SEQ ID NO: 3070621 - DNA, 25 bp, Homo sapien
caggagatgccactgttatgaagtg

SEQ ID NO: 3070622 - DNA, 25 bp, Homo sapien
catatgtgggtatgtctagacacac

SEQ ID NO: 3070623 - DNA, 25 bp, Homo sapien
gcagggcagggtaaatgtctgtaca

SEQ ID NO: 3070624 - DNA, 25 bp, Homo sapien
cacagtaagggtcgatcaaggcata

SEQ ID NO: 3070625 - DNA, 25 bp, Homo sapien
taaagccacccttgattagctgcag

SEQ ID NO: 3070626 - DNA, 25 bp, Homo sapien
ctgcagtgctcccacacagtaaggg

SEQ ID NO: 3070627 - DNA, 25 bp, Homo sapien
tgcagctggaaggggatcgtggccc

SEQ ID NO: 3070628 - DNA, 25 bp, Homo sapien
cagctggaaggggatcgtggccctg

SEQ ID NO: 3070629 - DNA, 25 bp, Homo sapien
gaaggggatcgtggccctgagcggc

SEQ ID NO: 3070630 - DNA, 25 bp, Homo sapien
ctggaaggggatcgtggccctgagc

SEQ ID NO: 3070631 - DNA, 25 bp, Homo sapien
agccccactgcgagactcacacagc

SEQ ID NO: 3070632 - DNA, 25 bp, Homo sapien
tcttctctatcactgatagcttctc

SEQ ID NO: 3070633 - DNA, 25 bp, Homo sapien
tctctatcactgatagcttctcctg

SEQ ID NO: 3070634 - DNA, 25 bp, Homo sapien
gtccaaccagctgtctcttattctc

SEQ ID NO: 3070635 - DNA, 25 bp, Homo sapien
tatcactgatagcttctcctggcat

SEQ ID NO: 3070636 - DNA, 25 bp, Homo sapien
tgaatagccctaatgtccctgaaac

SEQ ID NO: 3070637 - DNA, 25 bp, Homo sapien
tacttctgattgaagggcaccacct

SEQ ID NO: 3070638 - DNA, 25 bp, Homo sapien
aatatgccaagggaccaacagggtc

SEQ ID NO: 3070639 - DNA, 25 bp, Homo sapien
tctcaaaaggtcaacggatgggcct

SEQ ID NO: 3070640 - DNA, 25 bp, Homo sapien
tctttgttctttagccctgctcctg

SEQ ID NO: 3070641 - DNA, 25 bp, Homo sapien
ccctgctcctgggggaaatctccat

SEQ ID NO: 3070642 - DNA, 25 bp, Homo sapien
ctttgttctttagccctgctcctgg

SEQ ID NO: 3070643 - DNA, 25 bp, Homo sapien
tcacctgacgttacgggccagagag

SEQ ID NO: 3070644 - DNA, 25 bp, Homo sapien
tagatttaaccccttcgtagcctga

SEQ ID NO: 3070645 - DNA, 25 bp, Homo sapien
cagaaagtgactccagtggtggaac

SEQ ID NO: 3070646 - DNA, 25 bp, Homo sapien
caatcgactgtccttagaaacccgc

SEQ ID NO: 3070647 - DNA, 25 bp, Homo sapien
caagcactgtgaggcgtggccaact

SEQ ID NO: 3070648 - DNA, 25 bp, Homo sapien
aactgcgtcacggtgctcaatcgac

SEQ ID NO: 3070649 - DNA, 25 bp, Homo sapien
gattgggactgatacagaggccgcc

SEQ ID NO: 3070650 - DNA, 25 bp, Homo sapien
tctggcccgtaacgtcaggtgacgc

SEQ ID NO: 3070651 - DNA, 25 bp, Homo sapien
agttggccacgcctcacagtgcttg

SEQ ID NO: 3070652 - DNA, 25 bp, Homo sapien
taaggacagtcgattgagcaccgtg

SEQ ID NO: 3070653 - DNA, 25 bp, Homo sapien
ggcactagggatcgtccgcaggatt

SEQ ID NO: 3070654 - DNA, 25 bp, Homo sapien
tcaccaaaaggatcgaacttcccag

SEQ ID NO: 3070655 - DNA, 25 bp, Homo sapien
gaccaattaataagaacgcctccga

SEQ ID NO: 3070656 - DNA, 25 bp, Homo sapien
caattaataagaacgcctccgatcc

SEQ ID NO: 3070657 - DNA, 25 bp, Homo sapien
gcttccagacgtttcagcgaccaat

SEQ ID NO: 3070658 - DNA, 25 bp, Homo sapien
tttcagcgaccaattaataagaacg

SEQ ID NO: 3070659 - DNA, 25 bp, Homo sapien
gacgtttcagcgaccaattaataag

SEQ ID NO: 3070660 - DNA, 25 bp, Homo sapien
tccagacgtttcagcgaccaattaa

SEQ ID NO: 3070661 - DNA, 25 bp, Homo sapien
attaattggtcgctgaaacgtctgg

SEQ ID NO: 3070662 - DNA, 25 bp, Homo sapien
cttattaattggtcgctgaaacgtc

SEQ ID NO: 3070663 - DNA, 25 bp, Homo sapien
gatcggaggcgttcttattaattgg

SEQ ID NO: 3070664 - DNA, 25 bp, Homo sapien
taattggtcgctgaaacgtctggaa

SEQ ID NO: 3070665 - DNA, 25 bp, Homo sapien
cgttcttattaattggtcgctgaaa

SEQ ID NO: 3070666 - DNA, 25 bp, Homo sapien
attggtcgctgaaacgtctggaagc

SEQ ID NO: 3070667 - DNA, 25 bp, Homo sapien
gcaacatactcatataaaagtgacc

SEQ ID NO: 3070668 - DNA, 25 bp, Homo sapien
gctatttatccatagtctcattgtg

SEQ ID NO: 3070669 - DNA, 25 bp, Homo sapien
tttctctcattgtgcaacatactca

SEQ ID NO: 3070670 - DNA, 25 bp, Homo sapien
catactgcttgagttatagtagcta

SEQ ID NO: 3070671 - DNA, 25 bp, Homo sapien
gagacaatagcaatactttagctga

SEQ ID NO: 3070672 - DNA, 25 bp, Homo sapien
taaagaggatattcccactttcttg

SEQ ID NO: 3070673 - DNA, 25 bp, Homo sapien
gctaaagtattgctattgtctcttg

SEQ ID NO: 3070674 - DNA, 25 bp, Homo sapien
tttaggatttcagctaaagtattgc

SEQ ID NO: 3070675 - DNA, 25 bp, Homo sapien
tagctactataactcaagcagtatg

SEQ ID NO: 3070676 - DNA, 25 bp, Homo sapien
tatgagtatgttgcacaatgagaga

SEQ ID NO: 3070677 - DNA, 25 bp, Homo sapien
cacaatgagactatggataaatagc

SEQ ID NO: 3070678 - DNA, 25 bp, Homo sapien
aagcaagaaagtgggaatatcctct

SEQ ID NO: 3070679 - DNA, 25 bp, Homo sapien
acctatcactatgttcactacttgg

SEQ ID NO: 3070680 - DNA, 25 bp, Homo sapien
aagcctaaatctgagcatcacacaa

SEQ ID NO: 3070681 - DNA, 25 bp, Homo sapien
cacatgtacacccttatctaaaatt

SEQ ID NO: 3070682 - DNA, 25 bp, Homo sapien
ctaaatctgagcatcacacaataga

SEQ ID NO: 3070683 - DNA, 25 bp, Homo sapien
catgtacacccttatctaaaattta

SEQ ID NO: 3070684 - DNA, 25 bp, Homo sapien
tgggagctaaccactgggtacagag

SEQ ID NO: 3070685 - DNA, 25 bp, Homo sapien
tattgtgtgatgctcagatttaggc

SEQ ID NO: 3070686 - DNA, 25 bp, Homo sapien
ctctgtacccagtggttagctccca

SEQ ID NO: 3070687 - DNA, 25 bp, Homo sapien
ccaagtagtgaacatagtgataggt

SEQ ID NO: 3070688 - DNA, 25 bp, Homo sapien
aattttagataagggtgtacatgtg

SEQ ID NO: 3070689 - DNA, 25 bp, Homo sapien
tctattgtgtgatgctcagatttag

SEQ ID NO: 3070690 - DNA, 25 bp, Homo sapien
taaattttagataagggtgtacatg

SEQ ID NO: 3070691 - DNA, 25 bp, Homo sapien
ggcaagcaaacaatctggtacccta

SEQ ID NO: 3070692 - DNA, 25 bp, Homo sapien
tggtaccctatagcccactactaaa

SEQ ID NO: 3070693 - DNA, 25 bp, Homo sapien
cacagtctggtgtaaaggtctaact

SEQ ID NO: 3070694 - DNA, 25 bp, Homo sapien
tgttaaaagatcaaaggaacgtcac

SEQ ID NO: 3070695 - DNA, 25 bp, Homo sapien
ggaacgtcacaatcacagtgcctag

SEQ ID NO: 3070696 - DNA, 25 bp, Homo sapien
cactgtacaaaccaacacagtctgg

SEQ ID NO: 3070697 - DNA, 25 bp, Homo sapien
ctaggcactgtgattgtgacgttcc

SEQ ID NO: 3070698 - DNA, 25 bp, Homo sapien
ccatctgcaaacttgttagaagggt

SEQ ID NO: 3070699 - DNA, 25 bp, Homo sapien
gtagttagacctttacaccagactg

SEQ ID NO: 3070700 - DNA, 25 bp, Homo sapien
caccagactgtgttggtttgtacag

SEQ ID NO: 3070701 - DNA, 25 bp, Homo sapien
tagtagtgggctatagggtaccaga

SEQ ID NO: 3070702 - DNA, 25 bp, Homo sapien
tagggtaccagattgtttgcttgcc

SEQ ID NO: 3070703 - DNA, 25 bp, Homo sapien
taaaatcacccactacataaaggcc

SEQ ID NO: 3070704 - DNA, 25 bp, Homo sapien
tgagctaccggacagttggacaagc

SEQ ID NO: 3070705 - DNA, 25 bp, Homo sapien
cattctggcactactttagcccagg

SEQ ID NO: 3070706 - DNA, 25 bp, Homo sapien
tcaaatgtggttaactgagctaccg

SEQ ID NO: 3070707 - DNA, 25 bp, Homo sapien
gcagcttatttccagcagcttaggg

SEQ ID NO: 3070708 - DNA, 25 bp, Homo sapien
cattaccacctaaccatgatggcct

SEQ ID NO: 3070709 - DNA, 25 bp, Homo sapien
cctaagctgctggaaataagctgct

SEQ ID NO: 3070710 - DNA, 25 bp, Homo sapien
gaaggccatcatggttaggtggtaa

SEQ ID NO: 3070711 - DNA, 25 bp, Homo sapien
gcttgtccaactgtccggtagctca

SEQ ID NO: 3070712 - DNA, 25 bp, Homo sapien
cggtagctcagttaaccacatttga

SEQ ID NO: 3070713 - DNA, 25 bp, Homo sapien
tcctgggctaaagtagtgccagaat

SEQ ID NO: 3070714 - DNA, 25 bp, Homo sapien
aaagtacttagccaccctaagctgc

SEQ ID NO: 3070715 - DNA, 25 bp, Homo sapien
tactgtatcagactagtggaggtga

SEQ ID NO: 3070716 - DNA, 25 bp, Homo sapien
tggcacctgcaaacgtaaaaagtgg

SEQ ID NO: 3070717 - DNA, 25 bp, Homo sapien
aagtggacattactttggcacctgc

SEQ ID NO: 3070718 - DNA, 25 bp, Homo sapien
ctagtgagtactttacggtgaggca

SEQ ID NO: 3070719 - DNA, 25 bp, Homo sapien
gctattaccatgactagtccctggg

SEQ ID NO: 3070720 - DNA, 25 bp, Homo sapien
tcagtgcaaggtatatggaagtaca

SEQ ID NO: 3070721 - DNA, 25 bp, Homo sapien
tgcaggtgccaaagtaatgtccact

SEQ ID NO: 3070722 - DNA, 25 bp, Homo sapien
tgtacttccatataccttgcactga

SEQ ID NO: 3070723 - DNA, 25 bp, Homo sapien
ccagggactagtcatggtaatagca

SEQ ID NO: 3070724 - DNA, 25 bp, Homo sapien
tcacctccactagtctgatacagta

SEQ ID NO: 3070725 - DNA, 25 bp, Homo sapien
tgcctcaccgtaaagtactcactag

SEQ ID NO: 3070726 - DNA, 25 bp, Homo sapien
cactttttacgtttgcaggtgccaa

SEQ ID NO: 3070727 - DNA, 25 bp, Homo sapien
cttttggcattgttatgaggtctgg

SEQ ID NO: 3070728 - DNA, 25 bp, Homo sapien
ttccctgagtccaaatcccatactt

SEQ ID NO: 3070729 - DNA, 25 bp, Homo sapien
aatagaatgagagagccttgcttcc

SEQ ID NO: 3070730 - DNA, 25 bp, Homo sapien
gatgcttccatgctattttcccatt

SEQ ID NO: 3070731 - DNA, 25 bp, Homo sapien
agttgggttattgcagtgaaccacc

SEQ ID NO: 3070732 - DNA, 25 bp, Homo sapien
gttgggttattgcagtgaaccacct

SEQ ID NO: 3070733 - DNA, 25 bp, Homo sapien
ctcttggcacctcgccggtggctgg

SEQ ID NO: 3070734 - DNA, 25 bp, Homo sapien
agtgaaccacctcttggcacctcgc

SEQ ID NO: 3070735 - DNA, 25 bp, Homo sapien
tacggcgaagctgtgcatttatgca

SEQ ID NO: 3070736 - DNA, 25 bp, Homo sapien
tgagagtccaggaagaagcccagtg

SEQ ID NO: 3070737 - DNA, 25 bp, Homo sapien
gagtcagtgcagcttgctacggcga

SEQ ID NO: 3070738 - DNA, 25 bp, Homo sapien
gatacagagtgtgcgagtctcctca

SEQ ID NO: 3070739 - DNA, 25 bp, Homo sapien
tgaaccttgggcctcatcctctctg

SEQ ID NO: 3070740 - DNA, 25 bp, Homo sapien
ttactctgaaccttgggcctcatcc

SEQ ID NO: 3070741 - DNA, 25 bp, Homo sapien
tactctgaaccttgggcctcatcct

SEQ ID NO: 3070742 - DNA, 25 bp, Homo sapien
ctctgaaccttgggcctcatcctct

SEQ ID NO: 3070743 - DNA, 25 bp, Homo sapien
gctattgaatggaatgagtcgagca

SEQ ID NO: 3070744 - DNA, 25 bp, Homo sapien
tggctattgaatggaatgagtcgag

SEQ ID NO: 3070745 - DNA, 25 bp, Homo sapien
tgttattgaggtgacttccatggct

SEQ ID NO: 3070746 - DNA, 25 bp, Homo sapien
tttgttattgaggtgacttccatgg

SEQ ID NO: 3070747 - DNA, 25 bp, Homo sapien
catcagtccctgtggtttcagctgg

SEQ ID NO: 3070748 - DNA, 25 bp, Homo sapien
ggcatcagtccctgtggtttcagct

SEQ ID NO: 3070749 - DNA, 25 bp, Homo sapien
ctaggcatcagtccctgtggtttca

SEQ ID NO: 3070750 - DNA, 25 bp, Homo sapien
tcagtccctgtggtttcagctggcc

SEQ ID NO: 3070751 - DNA, 25 bp, Homo sapien
caggaggccctggaacgtgtgttcc

SEQ ID NO: 3070752 - DNA, 25 bp, Homo sapien
tgtgaacaggcttctcttgcccagg

SEQ ID NO: 3070753 - DNA, 25 bp, Homo sapien
gtgaacaggcttctcttgcccagga

SEQ ID NO: 3070754 - DNA, 25 bp, Homo sapien
tggaacgtgtgttccagctgatatg

SEQ ID NO: 3070755 - DNA, 25 bp, Homo sapien
ctccttggctggatcagaggtcttc

SEQ ID NO: 3070756 - DNA, 25 bp, Homo sapien
tctccttggctggatcagaggtctt

SEQ ID NO: 3070757 - DNA, 25 bp, Homo sapien
ttctccttggctggatcagaggtct

SEQ ID NO: 3070758 - DNA, 25 bp, Homo sapien
ccaaagaactggcttgccttgcccg

SEQ ID NO: 3070759 - DNA, 25 bp, Homo sapien
cttgccttgcccgtcttcacctcct

SEQ ID NO: 3070760 - DNA, 25 bp, Homo sapien
aagaactggcttgccttgcccgtct

SEQ ID NO: 3070761 - DNA, 25 bp, Homo sapien
ttgccttgcccgtcttcacctcctg

SEQ ID NO: 3070762 - DNA, 25 bp, Homo sapien
ccaggtctctgcttcagtgctgagt

SEQ ID NO: 3070763 - DNA, 25 bp, Homo sapien
acagtgcacacggacagctccatca

SEQ ID NO: 3070764 - DNA, 25 bp, Homo sapien
ctctccaccatcacctgccacagtg

SEQ ID NO: 3070765 - DNA, 25 bp, Homo sapien
gtgctgagtgtctgttcctctccac

SEQ ID NO: 3070766 - DNA, 25 bp, Homo sapien
ctcgccagcgccagagccatcctgc

SEQ ID NO: 3070767 - DNA, 25 bp, Homo sapien
tcgccagcgccagagccatcctgca

SEQ ID NO: 3070768 - DNA, 25 bp, Homo sapien
cgccagcgccagagccatcctgcat

SEQ ID NO: 3070769 - DNA, 25 bp, Homo sapien
gatgggcccattttacaggccggcg

SEQ ID NO: 3070770 - DNA, 25 bp, Homo sapien
tccagccaaagtcggtgcgtgatgg

SEQ ID NO: 3070771 - DNA, 25 bp, Homo sapien
aacgctgcggtttggctaagattgc

SEQ ID NO: 3070772 - DNA, 25 bp, Homo sapien
gattcgaacctagacctatctgctg

SEQ ID NO: 3070773 - DNA, 25 bp, Homo sapien
acattgcagaaggcatcaggcacca

SEQ ID NO: 3070774 - DNA, 25 bp, Homo sapien
catcaggcaccagtagatctgagac

SEQ ID NO: 3070775 - DNA, 25 bp, Homo sapien
gaagaaatgggtcggcctcgaaggc

SEQ ID NO: 3070776 - DNA, 25 bp, Homo sapien
atgggtcggcctcgaaggcagacct

SEQ ID NO: 3070777 - DNA, 25 bp, Homo sapien
catgtgcggcttttccttgaggctg

SEQ ID NO: 3070778 - DNA, 25 bp, Homo sapien
ggtggcacggagtataccttctccg

SEQ ID NO: 3070779 - DNA, 25 bp, Homo sapien
tgtgagcatctgttggtggcacgga

SEQ ID NO: 3070780 - DNA, 25 bp, Homo sapien
tttcatgtgcggcttttccttgagg

SEQ ID NO: 3070781 - DNA, 25 bp, Homo sapien
gggcttgggtttgatccattataac

SEQ ID NO: 3070782 - DNA, 25 bp, Homo sapien
ggggcttgggtttgatccattataa

SEQ ID NO: 3070783 - DNA, 25 bp, Homo sapien
gcttgggtttgatccattataaccc

SEQ ID NO: 3070784 - DNA, 25 bp, Homo sapien
ttgggtttgatccattataacccac

SEQ ID NO: 3070785 - DNA, 25 bp, Homo sapien
gagcacccgctctggaccagcatca

SEQ ID NO: 3070786 - DNA, 25 bp, Homo sapien
agcacccgctctggaccagcatcac

SEQ ID NO: 3070787 - DNA, 25 bp, Homo sapien
gcacccgctctggaccagcatcaca

SEQ ID NO: 3070788 - DNA, 25 bp, Homo sapien
cacccgctctggaccagcatcacag

SEQ ID NO: 3070789 - DNA, 25 bp, Homo sapien
ggatatggctcattggtaccctgct

SEQ ID NO: 3070790 - DNA, 25 bp, Homo sapien
tggctcattggtaccctgctcgtcc

SEQ ID NO: 3070791 - DNA, 25 bp, Homo sapien
gcacggatatggctcattggtaccc

SEQ ID NO: 3070792 - DNA, 25 bp, Homo sapien
ctgcatcccgcacggatatggctca

SEQ ID NO: 3070793 - DNA, 25 bp, Homo sapien
cctctgcgaggctttcctggaacct

SEQ ID NO: 3070794 - DNA, 25 bp, Homo sapien
acccaggatacacagaaccactgcc

SEQ ID NO: 3070795 - DNA, 25 bp, Homo sapien
ttcctggaacctgattggcgaagac

SEQ ID NO: 3070796 - DNA, 25 bp, Homo sapien
ggcgaagaccgtttctcctgagctc

SEQ ID NO: 3070797 - DNA, 25 bp, Homo sapien
cgccctttgaagtcatccagcctgg

SEQ ID NO: 3070798 - DNA, 25 bp, Homo sapien
cctttgaagtcatccagcctggtcc

SEQ ID NO: 3070799 - DNA, 25 bp, Homo sapien
tgaagtcatccagcctggtccagcc

SEQ ID NO: 3070800 - DNA, 25 bp, Homo sapien
gtccagcccctcttctgggtcacct

SEQ ID NO: 3070801 - DNA, 25 bp, Homo sapien
ccctgagcatatgggatgtcccggg

SEQ ID NO: 3070802 - DNA, 25 bp, Homo sapien
ttttgtactctgtccaccctagacc

SEQ ID NO: 3070803 - DNA, 25 bp, Homo sapien
atgtcccgggggatgaccaaagcca

SEQ ID NO: 3070804 - DNA, 25 bp, Homo sapien
aggcattaatgtgccctgagcatat

SEQ ID NO: 3070805 - DNA, 25 bp, Homo sapien
catggtccttgtccctatgccaggg

SEQ ID NO: 3070806 - DNA, 25 bp, Homo sapien
cagtcatgggttccgggtaaccatt

SEQ ID NO: 3070807 - DNA, 25 bp, Homo sapien
gccagtcatgggttccgggtaacca

SEQ ID NO: 3070808 - DNA, 25 bp, Homo sapien
ccttgtccctatgccaggggtcaca

SEQ ID NO: 3070809 - DNA, 25 bp, Homo sapien
gggcaccgcggtgccgcgtttgagc

SEQ ID NO: 3070810 - DNA, 25 bp, Homo sapien
gtttgagccggtcagctccctgcgg

SEQ ID NO: 3070811 - DNA, 25 bp, Homo sapien
cctgcggaaattacaggggcgctcg

SEQ ID NO: 3070812 - DNA, 25 bp, Homo sapien
agtctgggcgccgtctccggtctcg

SEQ ID NO: 3070813 - DNA, 25 bp, Homo sapien
ggtgcagggatcttggttttattgt

SEQ ID NO: 3070814 - DNA, 25 bp, Homo sapien
cttgtctcctcaacaggtctttcag

SEQ ID NO: 3070815 - DNA, 25 bp, Homo sapien
gccaggggcacatgatgtgactcag

SEQ ID NO: 3070816 - DNA, 25 bp, Homo sapien
gatctggctgtagcaggacttagtg

SEQ ID NO: 3070817 - DNA, 25 bp, Homo sapien
taggcctggtgactccttgtcagtg

SEQ ID NO: 3070818 - DNA, 25 bp, Homo sapien
tcaggccaggcccaactatctgtgc

SEQ ID NO: 3070819 - DNA, 25 bp, Homo sapien
aaaggcgcctggctgtaattggcag

SEQ ID NO: 3070820 - DNA, 25 bp, Homo sapien
tgggtagtgccttccaacactgtgg

SEQ ID NO: 3070821 - DNA, 25 bp, Homo sapien
ggtttctggacaaagcctctgccct

SEQ ID NO: 3070822 - DNA, 25 bp, Homo sapien
acaacagctcgcatgaaggcaggga

SEQ ID NO: 3070823 - DNA, 25 bp, Homo sapien
tgcaaaacaacagctcgcatgaagg

SEQ ID NO: 3070824 - DNA, 25 bp, Homo sapien
ccctaagaggtctcagatgcaaaac

SEQ ID NO: 3070825 - DNA, 25 bp, Homo sapien
agtgctatttcaggcaccttgtccc

SEQ ID NO: 3070826 - DNA, 25 bp, Homo sapien
ccttctgtctcggacctctggctgc

SEQ ID NO: 3070827 - DNA, 25 bp, Homo sapien
agcccagctctagcacctgggtctc

SEQ ID NO: 3070828 - DNA, 25 bp, Homo sapien
gtctccttctgtctcggacctctgg

SEQ ID NO: 3070829 - DNA, 25 bp, Homo sapien
gcccagctctagcacctgggtctcc

SEQ ID NO: 3070830 - DNA, 25 bp, Homo sapien
gggaccaggcttccccgtcatcctg

SEQ ID NO: 3070831 - DNA, 25 bp, Homo sapien
ccacagacccctccctgtgcagtga

SEQ ID NO: 3070832 - DNA, 25 bp, Homo sapien
tccctgtgcagtgaccggggaccag

SEQ ID NO: 3070833 - DNA, 25 bp, Homo sapien
tgggcctctccttcgtataaagcag

SEQ ID NO: 3070834 - DNA, 25 bp, Homo sapien
cgatgaagacgtcggcgaaacgcct

SEQ ID NO: 3070835 - DNA, 25 bp, Homo sapien
gaaacgcctactttccatgcctagg

SEQ ID NO: 3070836 - DNA, 25 bp, Homo sapien
agatcccggcggagctgccttcgtt

SEQ ID NO: 3070837 - DNA, 25 bp, Homo sapien
caaattcgttgcagccgggttggcc

SEQ ID NO: 3070838 - DNA, 25 bp, Homo sapien
ggccaccgagcctggaagttacgcg

SEQ ID NO: 3070839 - DNA, 25 bp, Homo sapien
cagcccacgcgtccccaatcccggg

SEQ ID NO: 3070840 - DNA, 25 bp, Homo sapien
ctgggacaccgagggaaaacttcag

SEQ ID NO: 3070841 - DNA, 25 bp, Homo sapien
caccgagcctggaagttacgcgtcc

SEQ ID NO: 3070842 - DNA, 25 bp, Homo sapien
atcgtctctgtattggttcaacttt

SEQ ID NO: 3070843 - DNA, 25 bp, Homo sapien
taatcgtctctgtattggttcaact

SEQ ID NO: 3070844 - DNA, 25 bp, Homo sapien
tgctaatcgtctctgtattggttca

SEQ ID NO: 3070845 - DNA, 25 bp, Homo sapien
gctaatcgtctctgtattggttcaa

SEQ ID NO: 3070846 - DNA, 25 bp, Homo sapien
gaacccacgggcacacacttttgga

SEQ ID NO: 3070847 - DNA, 25 bp, Homo sapien
ggattagtgcgggtatagacacccc

SEQ ID NO: 3070848 - DNA, 25 bp, Homo sapien
tgggtaggcccattgattcagctcc

SEQ ID NO: 3070849 - DNA, 25 bp, Homo sapien
tagaacgaattggagcttgagcttc

SEQ ID NO: 3070850 - DNA, 25 bp, Homo sapien
tggtcaccaccatccgagagctgga

SEQ ID NO: 3070851 - DNA, 25 bp, Homo sapien
gcacagtgcatctgaagtcagctga

SEQ ID NO: 3070852 - DNA, 25 bp, Homo sapien
gagaactcaaaacatccctggtcac

SEQ ID NO: 3070853 - DNA, 25 bp, Homo sapien
gctggatacaggcaaggtcccaaat

SEQ ID NO: 3070854 - DNA, 25 bp, Homo sapien
tggagccgccgggaattctttgctc

SEQ ID NO: 3070855 - DNA, 25 bp, Homo sapien
tctctgtctctgcaagctcgggcct

SEQ ID NO: 3070856 - DNA, 25 bp, Homo sapien
gccacgtggtacttgccaggccacg

SEQ ID NO: 3070857 - DNA, 25 bp, Homo sapien
gccgggaattctttgctccaacaga

SEQ ID NO: 3070858 - DNA, 25 bp, Homo sapien
catgggtgtagtcaagaagcacctg

SEQ ID NO: 3070859 - DNA, 25 bp, Homo sapien
gtcacgaggccatgggtgtagtcaa

SEQ ID NO: 3070860 - DNA, 25 bp, Homo sapien
gggtgtagtcaagaagcacctggta

SEQ ID NO: 3070861 - DNA, 25 bp, Homo sapien
aggccatgggtgtagtcaagaagca

SEQ ID NO: 3070862 - DNA, 25 bp, Homo sapien
tgcttgtggggggcccccatcaggg

SEQ ID NO: 3070863 - DNA, 25 bp, Homo sapien
tgtgcttgtggggggcccccatcag

SEQ ID NO: 3070864 - DNA, 25 bp, Homo sapien
ctgtgcttgtggggggcccccatca

SEQ ID NO: 3070865 - DNA, 25 bp, Homo sapien
gtgcttgtggggggcccccatcagg

SEQ ID NO: 3070866 - DNA, 25 bp, Homo sapien
gctgggtctccccagctctggagcc

SEQ ID NO: 3070867 - DNA, 25 bp, Homo sapien
agggaggggactggatgagggctgg

SEQ ID NO: 3070868 - DNA, 25 bp, Homo sapien
tgagggctgggtctccccagctctg

SEQ ID NO: 3070869 - DNA, 25 bp, Homo sapien
ctctggagccctgctggaggacccc

SEQ ID NO: 3070870 - DNA, 25 bp, Homo sapien
cataaataggaaaccgcagcaggga

SEQ ID NO: 3070871 - DNA, 25 bp, Homo sapien
ttttcaatgttttactgcatcaggg

SEQ ID NO: 3070872 - DNA, 25 bp, Homo sapien
atctctcagcttgaaacacacaggg

SEQ ID NO: 3070873 - DNA, 25 bp, Homo sapien
tgggactcttggagacctaccacgt

SEQ ID NO: 3070874 - DNA, 25 bp, Homo sapien
ggtttgtcttgcctggtatgtctct

SEQ ID NO: 3070875 - DNA, 25 bp, Homo sapien
tcttgcctggtatgtctctttggag

SEQ ID NO: 3070876 - DNA, 25 bp, Homo sapien
ctccagctcggagcaatctgtttcc

SEQ ID NO: 3070877 - DNA, 25 bp, Homo sapien
ctcggagcaatctgtttccaaggcc

SEQ ID NO: 3070878 - DNA, 25 bp, Homo sapien
cctttgtcaagggtgcaggccagat

SEQ ID NO: 3070879 - DNA, 25 bp, Homo sapien
caagttttaagatccacggtgccag

SEQ ID NO: 3070880 - DNA, 25 bp, Homo sapien
tgtccactgtcttattggccgaggg

SEQ ID NO: 3070881 - DNA, 25 bp, Homo sapien
ccataggaaaaacgtctgagaccca

SEQ ID NO: 3070882 - DNA, 25 bp, Homo sapien
tgtaagtggggtccactcaggttct

SEQ ID NO: 3070883 - DNA, 25 bp, Homo sapien
gctgtaagtggggtccactcaggtt

SEQ ID NO: 3070884 - DNA, 25 bp, Homo sapien
gctgctgtaagtggggtccactcag

SEQ ID NO: 3070885 - DNA, 25 bp, Homo sapien
aagtggggtccactcaggttctgtg

SEQ ID NO: 3070886 - DNA, 25 bp, Homo sapien
cggcacctccccgttcttgtagagt

SEQ ID NO: 3070887 - DNA, 25 bp, Homo sapien
cactgttattgggactgtgctccag

SEQ ID NO: 3070888 - DNA, 25 bp, Homo sapien
gggaggcactgtatgggagcggcgg

SEQ ID NO: 3070889 - DNA, 25 bp, Homo sapien
tgagttgcaggccatggaatcactg

SEQ ID NO: 3070890 - DNA, 25 bp, Homo sapien
cgtacgcggctttcggaccttcttg

SEQ ID NO: 3070891 - DNA, 25 bp, Homo sapien
gtgtctgcgtgaggcccagctgcgc

SEQ ID NO: 3070892 - DNA, 25 bp, Homo sapien
cagctggtagctggagtagatcgta

SEQ ID NO: 3070893 - DNA, 25 bp, Homo sapien
ttcaccatgcgcacctctgcttccg

SEQ ID NO: 3070894 - DNA, 25 bp, Homo sapien
cggcctgcgactcctgcgaccctcc

SEQ ID NO: 3070895 - DNA, 25 bp, Homo sapien
ctcggcctgcgactcctgcgaccct

SEQ ID NO: 3070896 - DNA, 25 bp, Homo sapien
tcggcctgcgactcctgcgaccctc

SEQ ID NO: 3070897 - DNA, 25 bp, Homo sapien
gatacgccccgtattgccggtagga

SEQ ID NO: 3070898 - DNA, 25 bp, Homo sapien
gcttgcgatcgaaggagccactcat

SEQ ID NO: 3070899 - DNA, 25 bp, Homo sapien
tagggctggcccgagtagtaatcgt

SEQ ID NO: 3070900 - DNA, 25 bp, Homo sapien
tatattccgacttgggcgagtaagc

SEQ ID NO: 3070901 - DNA, 25 bp, Homo sapien
gccgagaggcgcttacaccattgcc

SEQ ID NO: 3070902 - DNA, 25 bp, Homo sapien
ctccgcagaggacaggaacggaccg

SEQ ID NO: 3070903 - DNA, 25 bp, Homo sapien
cattgcctgccgtcaggcggtcgct

SEQ ID NO: 3070904 - DNA, 25 bp, Homo sapien
gcgtcccaagccacaatcaaatgct

SEQ ID NO: 3070905 - DNA, 25 bp, Homo sapien
tggcggggcgagttgccacccgctc

SEQ ID NO: 3070906 - DNA, 25 bp, Homo sapien
cgccaagagagcctgcggcgttggg

SEQ ID NO: 3070907 - DNA, 25 bp, Homo sapien
ccaagagggcgccaagagagcctgc

SEQ ID NO: 3070908 - DNA, 25 bp, Homo sapien
tgggagcgggggaggcgttcagggc

SEQ ID NO: 3070909 - DNA, 25 bp, Homo sapien
ttatctcagtcatcagttaatggcc

SEQ ID NO: 3070910 - DNA, 25 bp, Homo sapien
cctactctgctattttccataatgt

SEQ ID NO: 3070911 - DNA, 25 bp, Homo sapien
tccataatgtcatccctgatatgtt

SEQ ID NO: 3070912 - DNA, 25 bp, Homo sapien
tcagttgcttcagtaaatagaccaa

SEQ ID NO: 3070913 - DNA, 25 bp, Homo sapien
tgagagaggtttggctggcctccca

SEQ ID NO: 3070914 - DNA, 25 bp, Homo sapien
gggtgccgggaccagagtgggccat

SEQ ID NO: 3070915 - DNA, 25 bp, Homo sapien
ggccaggtacctgtgggtcagtcct

SEQ ID NO: 3070916 - DNA, 25 bp, Homo sapien
gggcctgcctggatcggatcccacg

SEQ ID NO: 3070917 - DNA, 25 bp, Homo sapien
tattttcaaccatagcctgggaggc

SEQ ID NO: 3070918 - DNA, 25 bp, Homo sapien
tctgtgctgatctgcccgagaggtg

SEQ ID NO: 3070919 - DNA, 25 bp, Homo sapien
gctctggaggaaagcccatcactgt

SEQ ID NO: 3070920 - DNA, 25 bp, Homo sapien
tacccgaccagaagtatgtgccatg

SEQ ID NO: 3070921 - DNA, 25 bp, Homo sapien
cagcttcctgttccttgaccccaca

SEQ ID NO: 3070922 - DNA, 25 bp, Homo sapien
gtcagcttcctgttccttgacccca

SEQ ID NO: 3070923 - DNA, 25 bp, Homo sapien
tccaggaacatggcagaggactcag

SEQ ID NO: 3070924 - DNA, 25 bp, Homo sapien
ccaggaacatggcagaggactcagg

SEQ ID NO: 3070925 - DNA, 25 bp, Homo sapien
tgtgacctctgccaaattgcctaac

SEQ ID NO: 3070926 - DNA, 25 bp, Homo sapien
cttggacacgcccaaagtagtgtat

SEQ ID NO: 3070927 - DNA, 25 bp, Homo sapien
gcataagtagttaagggctccaggg

SEQ ID NO: 3070928 - DNA, 25 bp, Homo sapien
taaagacacggttgtggtcagcggc

SEQ ID NO: 3070929 - DNA, 25 bp, Homo sapien
gcgcacggacgtcggttcccagatg

SEQ ID NO: 3070930 - DNA, 25 bp, Homo sapien
agatgcgccaatgccaggtctctcc

SEQ ID NO: 3070931 - DNA, 25 bp, Homo sapien
agcattctagccagccgcgcacgga

SEQ ID NO: 3070932 - DNA, 25 bp, Homo sapien
cgctgcggaggcgagtccagcattc

SEQ ID NO: 3070933 - DNA, 25 bp, Homo sapien
tggttcgtggtcttggacaggctct

SEQ ID NO: 3070934 - DNA, 25 bp, Homo sapien
cctgaaagtgtacccaaaatcgtag

SEQ ID NO: 3070935 - DNA, 25 bp, Homo sapien
ggttttcaagagatgcagggactcc

SEQ ID NO: 3070936 - DNA, 25 bp, Homo sapien
gcagcctcatattctgttagcctga

SEQ ID NO: 3070937 - DNA, 25 bp, Homo sapien
tgtcctaaggcccatttgagaagct

SEQ ID NO: 3070938 - DNA, 25 bp, Homo sapien
gtatataggcttctcacggcgacca

SEQ ID NO: 3070939 - DNA, 25 bp, Homo sapien
ggcctagaggtggagttcttagcta

SEQ ID NO: 3070940 - DNA, 25 bp, Homo sapien
ccttgtgccttctttgtatataggc

SEQ ID NO: 3070941 - DNA, 25 bp, Homo sapien
gggcgcccaagtacatagagcactt

SEQ ID NO: 3070942 - DNA, 25 bp, Homo sapien
ttgtttggaaaggtacaggcaggaa

SEQ ID NO: 3070943 - DNA, 25 bp, Homo sapien
cagtttctggacttcggtacggagt

SEQ ID NO: 3070944 - DNA, 25 bp, Homo sapien
gctgctgaagaatgcgtccctggca

SEQ ID NO: 3070945 - DNA, 25 bp, Homo sapien
agatcaacctgcttcccgaccgagt

SEQ ID NO: 3070946 - DNA, 25 bp, Homo sapien
acctgcttcccgaccgagtgctgag

SEQ ID NO: 3070947 - DNA, 25 bp, Homo sapien
gccaacatcatgaaagagatcaacc

SEQ ID NO: 3070948 - DNA, 25 bp, Homo sapien
tcatgaaagagatcaacctgcttcc

SEQ ID NO: 3070949 - DNA, 25 bp, Homo sapien
caaacgtttattgcgcactgcagca

SEQ ID NO: 3070950 - DNA, 25 bp, Homo sapien
tccctgtagactgaggagcacgtgc

SEQ ID NO: 3070951 - DNA, 25 bp, Homo sapien
ggtggcacccttgcagaaatcttgg

SEQ ID NO: 3070952 - DNA, 25 bp, Homo sapien
gaaattagccaaaggccagtcacgt

SEQ ID NO: 3070953 - DNA, 25 bp, Homo sapien
tgttttctatgcatggacctgtgga

SEQ ID NO: 3070954 - DNA, 25 bp, Homo sapien
cactggaccttacagggtacctagg

SEQ ID NO: 3070955 - DNA, 25 bp, Homo sapien
cagtttcgtcagatgtagtggtgcc

SEQ ID NO: 3070956 - DNA, 25 bp, Homo sapien
tagtggtgcctttccagcgctgttt

SEQ ID NO: 3070957 - DNA, 25 bp, Homo sapien
ggattcgaacccagctgttggattt

SEQ ID NO: 3070958 - DNA, 25 bp, Homo sapien
tcctctccaggcgtggagtctgtgg

SEQ ID NO: 3070959 - DNA, 25 bp, Homo sapien
tcacccagggactaggtggtggaat

SEQ ID NO: 3070960 - DNA, 25 bp, Homo sapien
caaaattgttgacagccggtgttgt

SEQ ID NO: 3070961 - DNA, 25 bp, Homo sapien
ttgggagctccggatctcaccaagg

SEQ ID NO: 3070962 - DNA, 25 bp, Homo sapien
ctgggcttgggagctccggatctca

SEQ ID NO: 3070963 - DNA, 25 bp, Homo sapien
gggagctccggatctcaccaaggga

SEQ ID NO: 3070964 - DNA, 25 bp, Homo sapien
ggcttgggagctccggatctcacca

SEQ ID NO: 3070965 - DNA, 25 bp, Homo sapien
tcttcagaaccccacaaagggagtc

SEQ ID NO: 3070966 - DNA, 25 bp, Homo sapien
cccaccatggcacaaggcgtgcttg

SEQ ID NO: 3070967 - DNA, 25 bp, Homo sapien
cggaaccggcacaacgacgtggtgc

SEQ ID NO: 3070968 - DNA, 25 bp, Homo sapien
gagtacaaggacacctacggcgatg

SEQ ID NO: 3070969 - DNA, 25 bp, Homo sapien
tggtccctaagtgccagtccatctc

SEQ ID NO: 3070970 - DNA, 25 bp, Homo sapien
gcctgagggttagggatgtctccac

SEQ ID NO: 3070971 - DNA, 25 bp, Homo sapien
ggtgggttctccctgatgaccaggt

SEQ ID NO: 3070972 - DNA, 25 bp, Homo sapien
tcactgcggtgataggtctgtgatg

SEQ ID NO: 3070973 - DNA, 25 bp, Homo sapien
ccctaggaccttctgtgtatatagt

SEQ ID NO: 3070974 - DNA, 25 bp, Homo sapien
tagttagttttataaccctgaatgc

SEQ ID NO: 3070975 - DNA, 25 bp, Homo sapien
tcctccacaagcctagtccatcctg

SEQ ID NO: 3070976 - DNA, 25 bp, Homo sapien
tcctcacatgctcatgcccacccgc

SEQ ID NO: 3070977 - DNA, 25 bp, Homo sapien
aaagaccaggtcttgaatgggccct

SEQ ID NO: 3070978 - DNA, 25 bp, Homo sapien
ggtgggcacccactatagctactga

SEQ ID NO: 3070979 - DNA, 25 bp, Homo sapien
tgagcccactgattccctgacaatg

SEQ ID NO: 3070980 - DNA, 25 bp, Homo sapien
taccctgagtgcgacttgctgcagc

SEQ ID NO: 3070981 - DNA, 25 bp, Homo sapien
gatttattactaggccctctccctg

SEQ ID NO: 3070982 - DNA, 25 bp, Homo sapien
tctctgggtctagaccaagtgacag

SEQ ID NO: 3070983 - DNA, 25 bp, Homo sapien
agagcgtgggaccaggctagcccaa

SEQ ID NO: 3070984 - DNA, 25 bp, Homo sapien
gctagcccaagtgcagcgcccaggt

SEQ ID NO: 3070985 - DNA, 25 bp, Homo sapien
cggtcatgagagttgctgagcccca

SEQ ID NO: 3070986 - DNA, 25 bp, Homo sapien
tctccttcaacttgcgcttcaccag

SEQ ID NO: 3070987 - DNA, 25 bp, Homo sapien
ccagtgcccggtcatgagagttgct

SEQ ID NO: 3070988 - DNA, 25 bp, Homo sapien
ttctcctgggccttgcgctccttct

SEQ ID NO: 3070989 - DNA, 25 bp, Homo sapien
tttagtttgcttccgtccagctgca

SEQ ID NO: 3070990 - DNA, 25 bp, Homo sapien
cagctgcggcccgtctacctgccgt

SEQ ID NO: 3070991 - DNA, 25 bp, Homo sapien
tctacctgccgtgcagcaaactcag

SEQ ID NO: 3070992 - DNA, 25 bp, Homo sapien
agcatactgttccaggttgaggctc

SEQ ID NO: 3070993 - DNA, 25 bp, Homo sapien
tggacaggggggaggggttcatcca

SEQ ID NO: 3070994 - DNA, 25 bp, Homo sapien
tggtccagtggtggacaggggggag

SEQ ID NO: 3070995 - DNA, 25 bp, Homo sapien
ctggtccagtggtggacagggggga

SEQ ID NO: 3070996 - DNA, 25 bp, Homo sapien
tggagtcatcactcagagtggattc

SEQ ID NO: 3070997 - DNA, 25 bp, Homo sapien
gacagcgtgtggtaggggtaagaac

SEQ ID NO: 3070998 - DNA, 25 bp, Homo sapien
gggcgtggagtcatcactcagagtg

SEQ ID NO: 3070999 - DNA, 25 bp, Homo sapien
ctggggggcgtggagtcatcactca

SEQ ID NO: 3071000 - DNA, 25 bp, Homo sapien
aggagttgctcagtgcctcctgtgc

SEQ ID NO: 3071001 - DNA, 25 bp, Homo sapien
ctatctgggtggagccgaagtcctg

SEQ ID NO: 3071002 - DNA, 25 bp, Homo sapien
ttgctcagtgcctcctgtgcatgag

SEQ ID NO: 3071003 - DNA, 25 bp, Homo sapien
gccgaagtcctggactaggcaccag

SEQ ID NO: 3071004 - DNA, 25 bp, Homo sapien
gccgctgtccgtgaaccaggaaaaa

SEQ ID NO: 3071005 - DNA, 25 bp, Homo sapien
gctgacttcttagggctgaagccct

SEQ ID NO: 3071006 - DNA, 25 bp, Homo sapien
tggtgctacccgaggatgctgagcc

SEQ ID NO: 3071007 - DNA, 25 bp, Homo sapien
atgctgagcccttgccgctgtccgt

SEQ ID NO: 3071008 - DNA, 25 bp, Homo sapien
atggacagtcggttgctgcctttct

SEQ ID NO: 3071009 - DNA, 25 bp, Homo sapien
tccttccggctcttgcccgtggatg

SEQ ID NO: 3071010 - DNA, 25 bp, Homo sapien
ggacagtcggttgctgcctttctcc

SEQ ID NO: 3071011 - DNA, 25 bp, Homo sapien
tcttgcccgtggatgctcggcgcag

SEQ ID NO: 3071012 - DNA, 25 bp, Homo sapien
ggaggactggcgtcacggctgtcat

SEQ ID NO: 3071013 - DNA, 25 bp, Homo sapien
tcttcttatcgaggccgatggtggg

SEQ ID NO: 3071014 - DNA, 25 bp, Homo sapien
gtccaggaactttcggcgagtcttc

SEQ ID NO: 3071015 - DNA, 25 bp, Homo sapien
gctcaggaggactggcgtcacggct

SEQ ID NO: 3071016 - DNA, 25 bp, Homo sapien
cctccttcggctgccagtgtggggt

SEQ ID NO: 3071017 - DNA, 25 bp, Homo sapien
ttgacttagaatcaggcatcctggc

SEQ ID NO: 3071018 - DNA, 25 bp, Homo sapien
gctgggtgtcctaggataagccact

SEQ ID NO: 3071019 - DNA, 25 bp, Homo sapien
cagtgtggggtggtagaaattctct

SEQ ID NO: 3071020 - DNA, 25 bp, Homo sapien
caaccccggaggatccaggcagaaa

SEQ ID NO: 3071021 - DNA, 25 bp, Homo sapien
ccggtagcgtgtgagcggcgagggc

SEQ ID NO: 3071022 - DNA, 25 bp, Homo sapien
cctcgtgcgacgcagcgttgtgcag

SEQ ID NO: 3071023 - DNA, 25 bp, Homo sapien
cctgagtgcaaaggcgagcgcagcc

SEQ ID NO: 3071024 - DNA, 25 bp, Homo sapien
agggggcagccgctcaccgagaacc

SEQ ID NO: 3071025 - DNA, 25 bp, Homo sapien
gggcagccgctcaccgagaaccctc

SEQ ID NO: 3071026 - DNA, 25 bp, Homo sapien
gacgagggggcagccgctcaccgag

SEQ ID NO: 3071027 - DNA, 25 bp, Homo sapien
tggacgagggggcagccgctcaccg

SEQ ID NO: 3071028 - DNA, 25 bp, Homo sapien
ggagactttcaccctgtaaactgcg

SEQ ID NO: 3071029 - DNA, 25 bp, Homo sapien
gagactttcaccctgtaaactgcgg

SEQ ID NO: 3071030 - DNA, 25 bp, Homo sapien
tgcctccgggcccatccgagccttc

SEQ ID NO: 3071031 - DNA, 25 bp, Homo sapien
cttgcctccgggcccatccgagcct

SEQ ID NO: 3071032 - DNA, 25 bp, Homo sapien
gcctccgggcccatccgagccttca

SEQ ID NO: 3071033 - DNA, 25 bp, Homo sapien
cctccgggcccatccgagccttcac

SEQ ID NO: 3071034 - DNA, 25 bp, Homo sapien
cgcggagctggcactgtcccgaagc

SEQ ID NO: 3071035 - DNA, 25 bp, Homo sapien
catcctccgcggagctggcactgtc

SEQ ID NO: 3071036 - DNA, 25 bp, Homo sapien
cctccgcggagctggcactgtcccg

SEQ ID NO: 3071037 - DNA, 25 bp, Homo sapien
tccgcggagctggcactgtcccgaa

SEQ ID NO: 3071038 - DNA, 25 bp, Homo sapien
aactgctgtccagtctggccgtctc

SEQ ID NO: 3071039 - DNA, 25 bp, Homo sapien
ctggagcgggatggccggtgtctcc

SEQ ID NO: 3071040 - DNA, 25 bp, Homo sapien
cgtctctggcacagccaagtccagg

SEQ ID NO: 3071041 - DNA, 25 bp, Homo sapien
atggccggtgtctccggcccttggc

SEQ ID NO: 3071042 - DNA, 25 bp, Homo sapien
agttcctttgctcaggactcctcct

SEQ ID NO: 3071043 - DNA, 25 bp, Homo sapien
caagttcctttgctcaggactcctc

SEQ ID NO: 3071044 - DNA, 25 bp, Homo sapien
ccaagttcctttgctcaggactcct

SEQ ID NO: 3071045 - DNA, 25 bp, Homo sapien
aagttcctttgctcaggactcctcc

SEQ ID NO: 3071046 - DNA, 25 bp, Homo sapien
cgggttctcggagctttgaagaagc

SEQ ID NO: 3071047 - DNA, 25 bp, Homo sapien
gttctcggagctttgaagaagccat

SEQ ID NO: 3071048 - DNA, 25 bp, Homo sapien
catccacgggttctcggagctttga

SEQ ID NO: 3071049 - DNA, 25 bp, Homo sapien
cacgggttctcggagctttgaagaa

SEQ ID NO: 3071050 - DNA, 25 bp, Homo sapien
ccacgggaactggcactgggaacaa

SEQ ID NO: 3071051 - DNA, 25 bp, Homo sapien
cacgggaactggcactgggaacaag

SEQ ID NO: 3071052 - DNA, 25 bp, Homo sapien
acgggaactggcactgggaacaagg

SEQ ID NO: 3071053 - DNA, 25 bp, Homo sapien
tcgggcaggcgataggaaagggccc

SEQ ID NO: 3071054 - DNA, 25 bp, Homo sapien
ggagaagcccttcgggcaggcgata

SEQ ID NO: 3071055 - DNA, 25 bp, Homo sapien
gagagaagggagaagcccttcgggc

SEQ ID NO: 3071056 - DNA, 25 bp, Homo sapien
agcccttcgggcaggcgataggaaa

SEQ ID NO: 3071057 - DNA, 25 bp, Homo sapien
catcggtcatcttcagcgtctggcg

SEQ ID NO: 3071058 - DNA, 25 bp, Homo sapien
ggcatcggtcatcttcagcgtctgg

SEQ ID NO: 3071059 - DNA, 25 bp, Homo sapien
tcggtcatcttcagcgtctggcgcc

SEQ ID NO: 3071060 - DNA, 25 bp, Homo sapien
ctccggcatcggtcatcttcagcgt

SEQ ID NO: 3071061 - DNA, 25 bp, Homo sapien
ctggaccaggagacctgacgggagg

SEQ ID NO: 3071062 - DNA, 25 bp, Homo sapien
ggaacaggttcgctggaagcaggag

SEQ ID NO: 3071063 - DNA, 25 bp, Homo sapien
agacctgacgggaggatgctccgtg

SEQ ID NO: 3071064 - DNA, 25 bp, Homo sapien
tccgggcgggctcgagccgctccat

SEQ ID NO: 3071065 - DNA, 25 bp, Homo sapien
tgaagaagctgacaccgaagaagct

SEQ ID NO: 3071066 - DNA, 25 bp, Homo sapien
agaagctgacaccgaagaagctgac

SEQ ID NO: 3071067 - DNA, 25 bp, Homo sapien
gaagaagctgacaccgaagaagctg

SEQ ID NO: 3071068 - DNA, 25 bp, Homo sapien
gctgacaccgaagaagctgacagga

SEQ ID NO: 3071069 - DNA, 25 bp, Homo sapien
cctcttgagagtgtccccacagttt

SEQ ID NO: 3071070 - DNA, 25 bp, Homo sapien
gagagtgtccccacagtttaaaggc

SEQ ID NO: 3071071 - DNA, 25 bp, Homo sapien
ctgtatttagcccatcctttgaact

SEQ ID NO: 3071072 - DNA, 25 bp, Homo sapien
ccttgctgtatttagcccatccttt

SEQ ID NO: 3071073 - DNA, 25 bp, Homo sapien
acagagggcatggtccgtacaaaac

SEQ ID NO: 3071074 - DNA, 25 bp, Homo sapien
aatgttccccttgcctaagaccagg

SEQ ID NO: 3071075 - DNA, 25 bp, Homo sapien
gagtcgatttcacttagaaggcagg

SEQ ID NO: 3071076 - DNA, 25 bp, Homo sapien
tatattatatacagagatgcggccc

SEQ ID NO: 3071077 - DNA, 25 bp, Homo sapien
ttccaagacgaggttatggctattt

SEQ ID NO: 3071078 - DNA, 25 bp, Homo sapien
gttccaagacgaggttatggctatt

SEQ ID NO: 3071079 - DNA, 25 bp, Homo sapien
agttccaagacgaggttatggctat

SEQ ID NO: 3071080 - DNA, 25 bp, Homo sapien
aagggccgagaaggtagaatctcaa

SEQ ID NO: 3071081 - DNA, 25 bp, Homo sapien
ccttttcccgaaggacacatgagaa

SEQ ID NO: 3071082 - DNA, 25 bp, Homo sapien
gcctgtgatatgagccctctggtcc

SEQ ID NO: 3071083 - DNA, 25 bp, Homo sapien
tgatctgcaggtgcttgtgtccgtc

SEQ ID NO: 3071084 - DNA, 25 bp, Homo sapien
ttcctcagtgtttgcaagtttcctt

SEQ ID NO: 3071085 - DNA, 25 bp, Homo sapien
attcctcagtgtttgcaagtttcct

SEQ ID NO: 3071086 - DNA, 25 bp, Homo sapien
agaacccgacgctgtgcagtctcct

SEQ ID NO: 3071087 - DNA, 25 bp, Homo sapien
acccgacgctgtgcagtctcctttt

SEQ ID NO: 3071088 - DNA, 25 bp, Homo sapien
ctcctccagaacccgacgctgtgca

SEQ ID NO: 3071089 - DNA, 25 bp, Homo sapien
tccagaacccgacgctgtgcagtct

SEQ ID NO: 3071090 - DNA, 25 bp, Homo sapien
actctgctccaactgcgccttctcc

SEQ ID NO: 3071091 - DNA, 25 bp, Homo sapien
ttctccacccgccagcgccccttct

SEQ ID NO: 3071092 - DNA, 25 bp, Homo sapien
tggtactgcgcctgagtctcccgca

SEQ ID NO: 3071093 - DNA, 25 bp, Homo sapien
agtttctccatgcgctccttgttct

SEQ ID NO: 3071094 - DNA, 25 bp, Homo sapien
tctgcctcagtgaccgcatgcttga

SEQ ID NO: 3071095 - DNA, 25 bp, Homo sapien
cagtgaccgcatgcttgatctggag

SEQ ID NO: 3071096 - DNA, 25 bp, Homo sapien
ctgcctcagtgaccgcatgcttgat

SEQ ID NO: 3071097 - DNA, 25 bp, Homo sapien
cctcagtgaccgcatgcttgatctg

SEQ ID NO: 3071098 - DNA, 25 bp, Homo sapien
gttctccgctagctcaaacacctcg

SEQ ID NO: 3071099 - DNA, 25 bp, Homo sapien
gccatctcaccacccgggaacgtgg

SEQ ID NO: 3071100 - DNA, 25 bp, Homo sapien
ccacaggggacagtgcatcctcgtt

SEQ ID NO: 3071101 - DNA, 25 bp, Homo sapien
aaacacctcgatggccatctcacca

SEQ ID NO: 3071102 - DNA, 25 bp, Homo sapien
atactgggcgtatctctgctccatc

SEQ ID NO: 3071103 - DNA, 25 bp, Homo sapien
aattagctgggccacttcgctctgc

SEQ ID NO: 3071104 - DNA, 25 bp, Homo sapien
gtcatcctccccatactgggcgtat

SEQ ID NO: 3071105 - DNA, 25 bp, Homo sapien
ctgttccaaagtctgctgaattagc

SEQ ID NO: 3071106 - DNA, 25 bp, Homo sapien
tgtcctcagccaggtaatgcatcat

SEQ ID NO: 3071107 - DNA, 25 bp, Homo sapien
ctgtcctcagccaggtaatgcatca

SEQ ID NO: 3071108 - DNA, 25 bp, Homo sapien
taagccaaaggtagagtggacacag

SEQ ID NO: 3071109 - DNA, 25 bp, Homo sapien
ttagcattcaccctggacgtcctgg

SEQ ID NO: 3071110 - DNA, 25 bp, Homo sapien
tgcagccaaggagtcagcagaacct

SEQ ID NO: 3071111 - DNA, 25 bp, Homo sapien
tcttcccaggatgacatagggctgg

SEQ ID NO: 3071112 - DNA, 25 bp, Homo sapien
agacgccgcgaagctctgggtcact

SEQ ID NO: 3071113 - DNA, 25 bp, Homo sapien
ttggtgttccggagcacagacgccg

SEQ ID NO: 3071114 - DNA, 25 bp, Homo sapien
ctcccaccagacttgttccatccac

SEQ ID NO: 3071115 - DNA, 25 bp, Homo sapien
caccaggagatcattcacctggatc

SEQ ID NO: 3071116 - DNA, 25 bp, Homo sapien
aaaaacctcacagatactttgtcct

SEQ ID NO: 3071117 - DNA, 25 bp, Homo sapien
ttgacgaagatacccagcttctcca

SEQ ID NO: 3071118 - DNA, 25 bp, Homo sapien
ctgccatcccgatgggccgcaccac

SEQ ID NO: 3071119 - DNA, 25 bp, Homo sapien
tcacggtcttgacgaagatacccag

SEQ ID NO: 3071120 - DNA, 25 bp, Homo sapien
ccctccgtcacggtcttgacgaaga

SEQ ID NO: 3071121 - DNA, 25 bp, Homo sapien
ctcgttgcgacgatcgtaatcctcg

SEQ ID NO: 3071122 - DNA, 25 bp, Homo sapien
catgggatccacatcctcgttgcga

SEQ ID NO: 3071123 - DNA, 25 bp, Homo sapien
gcgacgatcgtaatcctcgttggag

SEQ ID NO: 3071124 - DNA, 25 bp, Homo sapien
aatcctcgttggagtaagtgctgaa

SEQ ID NO: 3071125 - DNA, 25 bp, Homo sapien
tcaaggaccacacaaagtgcccctc

SEQ ID NO: 3071126 - DNA, 25 bp, Homo sapien
cctgcagaaggcctctccccatcaa

SEQ ID NO: 3071127 - DNA, 25 bp, Homo sapien
gcagaaggcctctccccatcaagga

SEQ ID NO: 3071128 - DNA, 25 bp, Homo sapien
tcctccatgcctgcagaaggcctct

SEQ ID NO: 3071129 - DNA, 25 bp, Homo sapien
ctgtgcaaggaggaccgggcagctg

SEQ ID NO: 3071130 - DNA, 25 bp, Homo sapien
gtgcaaggaggaccgggcagctggc

SEQ ID NO: 3071131 - DNA, 25 bp, Homo sapien
tgtgcaaggaggaccgggcagctgg

SEQ ID NO: 3071132 - DNA, 25 bp, Homo sapien
cttggattcatctacctcctcaggg

SEQ ID NO: 3071133 - DNA, 25 bp, Homo sapien
gagcccactgtaggcgctcacgtcc

SEQ ID NO: 3071134 - DNA, 25 bp, Homo sapien
accaagtccgcctccgagaagtcct

SEQ ID NO: 3071135 - DNA, 25 bp, Homo sapien
tgggcgccgtgctgaaatggatctt

SEQ ID NO: 3071136 - DNA, 25 bp, Homo sapien
tggaccgtaacctcggcctggatca

SEQ ID NO: 3071137 - DNA, 25 bp, Homo sapien
ggctgcagttgccacggtgctgcca

SEQ ID NO: 3071138 - DNA, 25 bp, Homo sapien
cagggccgcgtggaccgtaacctcg

SEQ ID NO: 3071139 - DNA, 25 bp, Homo sapien
tccaccggcttaatcttgcgcacct

SEQ ID NO: 3071140 - DNA, 25 bp, Homo sapien
ccgggcaggggccactcggtgctgc

SEQ ID NO: 3071141 - DNA, 25 bp, Homo sapien
ggccactcggtgctgcgggggctgc

SEQ ID NO: 3071142 - DNA, 25 bp, Homo sapien
ggggccactcggtgctgcgggggct

SEQ ID NO: 3071143 - DNA, 25 bp, Homo sapien
gggcaggggccactcggtgctgcgg

SEQ ID NO: 3071144 - DNA, 25 bp, Homo sapien
cggtcctcgagtcggccttctcgaa

SEQ ID NO: 3071145 - DNA, 25 bp, Homo sapien
gcccgcggtggaggccggtcctcga

SEQ ID NO: 3071146 - DNA, 25 bp, Homo sapien
cagcttcgagttgacctggggaacc

SEQ ID NO: 3071147 - DNA, 25 bp, Homo sapien
tcgagttgacctggggaacccctgc

SEQ ID NO: 3071148 - DNA, 25 bp, Homo sapien
tgaccgtgggggacacggcgtcagc

SEQ ID NO: 3071149 - DNA, 25 bp, Homo sapien
gctggctgaccgtgggggacacggc

SEQ ID NO: 3071150 - DNA, 25 bp, Homo sapien
gacacggcgtcagcgtccagcttgt

SEQ ID NO: 3071151 - DNA, 25 bp, Homo sapien
ccgtgggggacacggcgtcagcgtc

SEQ ID NO: 3071152 - DNA, 25 bp, Homo sapien
ctgccgttgaagcgcaccacgacgt

SEQ ID NO: 3071153 - DNA, 25 bp, Homo sapien
cacgacgtccagcttccggtcctgc

SEQ ID NO: 3071154 - DNA, 25 bp, Homo sapien
cgctggggcgctccgttcgaacagc

SEQ ID NO: 3071155 - DNA, 25 bp, Homo sapien
gggcgctccgttcgaacagcttccg

SEQ ID NO: 3071156 - DNA, 25 bp, Homo sapien
agtcgaagcggctcacgcgctccga

SEQ ID NO: 3071157 - DNA, 25 bp, Homo sapien
gagggcgcgggcttggagtcgaagc

SEQ ID NO: 3071158 - DNA, 25 bp, Homo sapien
gctccgacacgctggtgcccagctt

SEQ ID NO: 3071159 - DNA, 25 bp, Homo sapien
ttctcgttcaggctgctggcccgcg

SEQ ID NO: 3071160 - DNA, 25 bp, Homo sapien
ggccccgccgtcgtgcccatctgca

SEQ ID NO: 3071161 - DNA, 25 bp, Homo sapien
gagggccccgccgtcgtgcccatct

SEQ ID NO: 3071162 - DNA, 25 bp, Homo sapien
cgccgtcgtgcccatctgcaggaac

SEQ ID NO: 3071163 - DNA, 25 bp, Homo sapien
ccccgccgtcgtgcccatctgcagg

SEQ ID NO: 3071164 - DNA, 25 bp, Homo sapien
atgcccgcctcgtaggcgctgcggt

SEQ ID NO: 3071165 - DNA, 25 bp, Homo sapien
ggacgttggagccatatttcttgtg

SEQ ID NO: 3071166 - DNA, 25 bp, Homo sapien
ttttgatgcggtggacgttggagcc

SEQ ID NO: 3071167 - DNA, 25 bp, Homo sapien
cgcgtcgggcggcttcagcgcctgg

SEQ ID NO: 3071168 - DNA, 25 bp, Homo sapien
aagcgccctgtgtgtgggtcgcctc

SEQ ID NO: 3071169 - DNA, 25 bp, Homo sapien
gtgtgggtcgcctcccccaatcaag

SEQ ID NO: 3071170 - DNA, 25 bp, Homo sapien
tccaagcgccctgtgtgtgggtcgc

SEQ ID NO: 3071171 - DNA, 25 bp, Homo sapien
aaaaaatctccaagcgccctgtgtg

SEQ ID NO: 3071172 - DNA, 25 bp, Homo sapien
tgtgcagacaacaacgtcagagacc

SEQ ID NO: 3071173 - DNA, 25 bp, Homo sapien
tcagagaccgaagaaactggatgct

SEQ ID NO: 3071174 - DNA, 25 bp, Homo sapien
gaggcctggctgtgacatcaaggac

SEQ ID NO: 3071175 - DNA, 25 bp, Homo sapien
tagctcacgtaacaagaagtcctgg

SEQ ID NO: 3071176 - DNA, 25 bp, Homo sapien
tgtgcagccatagtgccgaggcacc

SEQ ID NO: 3071177 - DNA, 25 bp, Homo sapien
tttggccgggaatggtccctggcat

SEQ ID NO: 3071178 - DNA, 25 bp, Homo sapien
tactcctgtaatctaacgtttggcc

SEQ ID NO: 3071179 - DNA, 25 bp, Homo sapien
tcacggaacgctttgagggctgaaa

SEQ ID NO: 3071180 - DNA, 25 bp, Homo sapien
tgcctgccctaagtgagagacctgg

SEQ ID NO: 3071181 - DNA, 25 bp, Homo sapien
tagacctccacgctgaagtgcttgg

SEQ ID NO: 3071182 - DNA, 25 bp, Homo sapien
tctatgcgccgaatgaaccctgact

SEQ ID NO: 3071183 - DNA, 25 bp, Homo sapien
taatacctgcctcatggaactgctg

SEQ ID NO: 3071184 - DNA, 25 bp, Homo sapien
tgagccaatggcggtcttggcaccc

SEQ ID NO: 3071185 - DNA, 25 bp, Homo sapien
actgagccaatggcggtcttggcac

SEQ ID NO: 3071186 - DNA, 25 bp, Homo sapien
agccaatggcggtcttggcacccct

SEQ ID NO: 3071187 - DNA, 25 bp, Homo sapien
cactgagccaatggcggtcttggca

SEQ ID NO: 3071188 - DNA, 25 bp, Homo sapien
gcccagtagtgacctgtgctgtcca

SEQ ID NO: 3071189 - DNA, 25 bp, Homo sapien
gtgctgtccaaaggggcgctgccca

SEQ ID NO: 3071190 - DNA, 25 bp, Homo sapien
gaacccccttgataagccgcttgtg

SEQ ID NO: 3071191 - DNA, 25 bp, Homo sapien
tgtgcccctgtttggagcccagtag

SEQ ID NO: 3071192 - DNA, 25 bp, Homo sapien
gctgtcttgctagggacacgctgcc

SEQ ID NO: 3071193 - DNA, 25 bp, Homo sapien
caggatcaccttggacgtgctgggc

SEQ ID NO: 3071194 - DNA, 25 bp, Homo sapien
cccatggcagtatttgagttcaaca

SEQ ID NO: 3071195 - DNA, 25 bp, Homo sapien
tgtcgtagcccgtggtggaaacagc

SEQ ID NO: 3071196 - DNA, 25 bp, Homo sapien
aagtgtcttgggtgcaaggacctcc

SEQ ID NO: 3071197 - DNA, 25 bp, Homo sapien
gtgtcttgggtgcaaggacctccag

SEQ ID NO: 3071198 - DNA, 25 bp, Homo sapien
tgtcttgggtgcaaggacctccagg

SEQ ID NO: 3071199 - DNA, 25 bp, Homo sapien
tgtgtcccggttcctggtcctcgct

SEQ ID NO: 3071200 - DNA, 25 bp, Homo sapien
gccagatggtggaggcatgtaacat

SEQ ID NO: 3071201 - DNA, 25 bp, Homo sapien
tgacctcagaggctaccagaattct

SEQ ID NO: 3071202 - DNA, 25 bp, Homo sapien
gctggcctccacagacttgtgctct

SEQ ID NO: 3071203 - DNA, 25 bp, Homo sapien
aagaggatcaaggacggtcacccac

SEQ ID NO: 3071204 - DNA, 25 bp, Homo sapien
gggaggagggctgcgcttgtgggcc

SEQ ID NO: 3071205 - DNA, 25 bp, Homo sapien
ggaggagggctgcgcttgtgggcca

SEQ ID NO: 3071206 - DNA, 25 bp, Homo sapien
gacagcgggcctgcacggtgcgtgc

SEQ ID NO: 3071207 - DNA, 25 bp, Homo sapien
acagcgggcctgcacggtgcgtgca

SEQ ID NO: 3071208 - DNA, 25 bp, Homo sapien
agcactgacagcctagccaggtagg

SEQ ID NO: 3071209 - DNA, 25 bp, Homo sapien
tgggaacaagatggcctttatcaca

SEQ ID NO: 3071210 - DNA, 25 bp, Homo sapien
tctggtgggtgatgccagccttatt

SEQ ID NO: 3071211 - DNA, 25 bp, Homo sapien
agcatccagatggtccaccactgca

SEQ ID NO: 3071212 - DNA, 25 bp, Homo sapien
tgctggcagcctctcccgtcctcac

SEQ ID NO: 3071213 - DNA, 25 bp, Homo sapien
cggcctgccctttggactcttggca

SEQ ID NO: 3071214 - DNA, 25 bp, Homo sapien
tgccggcctgccctttggactcttg

SEQ ID NO: 3071215 - DNA, 25 bp, Homo sapien
ctcccgtcctcactggctctgtttc

SEQ ID NO: 3071216 - DNA, 25 bp, Homo sapien
agctccaaagagcacacgggagcct

SEQ ID NO: 3071217 - DNA, 25 bp, Homo sapien
cagctccaaagagcacacgggagcc

SEQ ID NO: 3071218 - DNA, 25 bp, Homo sapien
caaagagcacacgggagcctggctg

SEQ ID NO: 3071219 - DNA, 25 bp, Homo sapien
tgggcttgacggcagcctcgcattc

SEQ ID NO: 3071220 - DNA, 25 bp, Homo sapien
ttgctccctcagacgccatcgcagg

SEQ ID NO: 3071221 - DNA, 25 bp, Homo sapien
tcctcgtgtggacgctgggcttgac

SEQ ID NO: 3071222 - DNA, 25 bp, Homo sapien
ccccagccggcaagctttcttgcaa

SEQ ID NO: 3071223 - DNA, 25 bp, Homo sapien
ctgtattccggtgatagaaaatcct

SEQ ID NO: 3071224 - DNA, 25 bp, Homo sapien
gagcggcaggctctgtgacaccctg

SEQ ID NO: 3071225 - DNA, 25 bp, Homo sapien
tgacaccctgcaggagatagtgagg

SEQ ID NO: 3071226 - DNA, 25 bp, Homo sapien
caaaggtgagtctgacagagcggca

SEQ ID NO: 3071227 - DNA, 25 bp, Homo sapien
cccacaccacgtgatgcaggctcag

SEQ ID NO: 3071228 - DNA, 25 bp, Homo sapien
ccacagtgcgtgtgtccacatacat

SEQ ID NO: 3071229 - DNA, 25 bp, Homo sapien
cagccctgacccacagtgcgtgtgt

SEQ ID NO: 3071230 - DNA, 25 bp, Homo sapien
tggggcactgccacacaaggctgcc

SEQ ID NO: 3071231 - DNA, 25 bp, Homo sapien
tccttcccaagagcacggtgcgagt

SEQ ID NO: 3071232 - DNA, 25 bp, Homo sapien
tcatgtcagttcaaggagaggcccc

SEQ ID NO: 3071233 - DNA, 25 bp, Homo sapien
gaggtttggacaaccccagatgtga

SEQ ID NO: 3071234 - DNA, 25 bp, Homo sapien
aaggaaattaggaggccactgcgga

SEQ ID NO: 3071235 - DNA, 25 bp, Homo sapien
ccacatgctttattccagcaatcaa

SEQ ID NO: 3071236 - DNA, 25 bp, Homo sapien
catgctttattccagcaatcaaaat

SEQ ID NO: 3071237 - DNA, 25 bp, Homo sapien
gctttattccagcaatcaaaataat

SEQ ID NO: 3071238 - DNA, 25 bp, Homo sapien
cacatgctttattccagcaatcaaa

SEQ ID NO: 3071239 - DNA, 25 bp, Homo sapien
gggctggagccgcacacgctctcct

SEQ ID NO: 3071240 - DNA, 25 bp, Homo sapien
tttcagaggagagaggtcggagagc

SEQ ID NO: 3071241 - DNA, 25 bp, Homo sapien
cccatgttaaatagcacctttagaa

SEQ ID NO: 3071242 - DNA, 25 bp, Homo sapien
acagaggacgcaggacagactagga

SEQ ID NO: 3071243 - DNA, 25 bp, Homo sapien
ccgcatgggtcttcaagcaagtgga

SEQ ID NO: 3071244 - DNA, 25 bp, Homo sapien
gttgccccggtgacacatcaagaca

SEQ ID NO: 3071245 - DNA, 25 bp, Homo sapien
tctttggcagtctgagaaccccagg

SEQ ID NO: 3071246 - DNA, 25 bp, Homo sapien
cggcacaagggattgacacgcgttc

SEQ ID NO: 3071247 - DNA, 25 bp, Homo sapien
tttccaaagtccatgtgaaattgtc

SEQ ID NO: 3071248 - DNA, 25 bp, Homo sapien
aggttgaatgcacttttggtttttg

SEQ ID NO: 3071249 - DNA, 25 bp, Homo sapien
catgttcggttggtcaaagataaaa

SEQ ID NO: 3071250 - DNA, 25 bp, Homo sapien
aagataaaaactaagtttgagagat

SEQ ID NO: 3071251 - DNA, 25 bp, Homo sapien
tttgtattcaatcactgtcttgccc

SEQ ID NO: 3071252 - DNA, 25 bp, Homo sapien
gccaacgtcgaagccgaattcctgg

SEQ ID NO: 3071253 - DNA, 25 bp, Homo sapien
ccacatcgatgatgggcaggcggga

SEQ ID NO: 3071254 - DNA, 25 bp, Homo sapien
tcttgccccaggctccggtgtgact

SEQ ID NO: 3071255 - DNA, 25 bp, Homo sapien
tgggagtgatggagagagggcacta

SEQ ID NO: 3071256 - DNA, 25 bp, Homo sapien
cattaccacgtgggagtgatggaga

SEQ ID NO: 3071257 - DNA, 25 bp, Homo sapien
ggcattaccacgtgggagtgatgga

SEQ ID NO: 3071258 - DNA, 25 bp, Homo sapien
acgtgggagtgatggagagagggca

SEQ ID NO: 3071259 - DNA, 25 bp, Homo sapien
tctgctggtccatgtaggccacgct

SEQ ID NO: 3071260 - DNA, 25 bp, Homo sapien
tcgacagtgacgctgtaggtgaagc

SEQ ID NO: 3071261 - DNA, 25 bp, Homo sapien
gacatcaggcgcaggaaggtcagct

SEQ ID NO: 3071262 - DNA, 25 bp, Homo sapien
gatctcgatctcgttggagccctgg

SEQ ID NO: 3071263 - DNA, 25 bp, Homo sapien
gggtacacgcaggtctcaccagtct

SEQ ID NO: 3071264 - DNA, 25 bp, Homo sapien
tggaatccatcggtcatgctctcgc

SEQ ID NO: 3071265 - DNA, 25 bp, Homo sapien
atcggtcatgctctcgccgaaccag

SEQ ID NO: 3071266 - DNA, 25 bp, Homo sapien
cgaaccagacatgcctcttgtcctt

SEQ ID NO: 3071267 - DNA, 25 bp, Homo sapien
atcatcagcccggtagtagcggcca

SEQ ID NO: 3071268 - DNA, 25 bp, Homo sapien
gaggtcacggtcacgaaccacattg

SEQ ID NO: 3071269 - DNA, 25 bp, Homo sapien
tgggctccggatgttctcgatctgc

SEQ ID NO: 3071270 - DNA, 25 bp, Homo sapien
ggaagctgaagtcgaaaccagcgct

SEQ ID NO: 3071271 - DNA, 25 bp, Homo sapien
gggattaccggcatccaagtgcttt

SEQ ID NO: 3071272 - DNA, 25 bp, Homo sapien
aagagagtggggattaccggcatcc

SEQ ID NO: 3071273 - DNA, 25 bp, Homo sapien
gattaccggcatccaagtgctttgg

SEQ ID NO: 3071274 - DNA, 25 bp, Homo sapien
gagtggggattaccggcatccaagt

SEQ ID NO: 3071275 - DNA, 25 bp, Homo sapien
gccagggagaccgttgagtccatct

SEQ ID NO: 3071276 - DNA, 25 bp, Homo sapien
cagcatcaccagtgcgaccgcgagg

SEQ ID NO: 3071277 - DNA, 25 bp, Homo sapien
gaccgttgagtccatctttgccagg

SEQ ID NO: 3071278 - DNA, 25 bp, Homo sapien
atcaccagtgcgaccgcgaggacca

SEQ ID NO: 3071279 - DNA, 25 bp, Homo sapien
ggctccagagggaccttgttcacca

SEQ ID NO: 3071280 - DNA, 25 bp, Homo sapien
gaggctccagagggaccttgttcac

SEQ ID NO: 3071281 - DNA, 25 bp, Homo sapien
aggctccagagggaccttgttcacc

SEQ ID NO: 3071282 - DNA, 25 bp, Homo sapien
ccacggtgaccctttatgcctctgt

SEQ ID NO: 3071283 - DNA, 25 bp, Homo sapien
ccagagaagccacggtgacccttta

SEQ ID NO: 3071284 - DNA, 25 bp, Homo sapien
tctgtcgccctgttcgcctgtctca

SEQ ID NO: 3071285 - DNA, 25 bp, Homo sapien
ctttatgcctctgtcgccctgttcg

SEQ ID NO: 3071286 - DNA, 25 bp, Homo sapien
ccacgggcgccaacagggccgacag

SEQ ID NO: 3071287 - DNA, 25 bp, Homo sapien
cgggcgccaacagggccgacaggac

SEQ ID NO: 3071288 - DNA, 25 bp, Homo sapien
gccgacaggaccggtgggaccagca

SEQ ID NO: 3071289 - DNA, 25 bp, Homo sapien
ggccgacaggaccggtgggaccagc

SEQ ID NO: 3071290 - DNA, 25 bp, Homo sapien
agcggggccggtctcaccacggtca

SEQ ID NO: 3071291 - DNA, 25 bp, Homo sapien
agtctcaccacgatcaccactcttg

SEQ ID NO: 3071292 - DNA, 25 bp, Homo sapien
acgatcaccactcttgccagcaggg

SEQ ID NO: 3071293 - DNA, 25 bp, Homo sapien
ccagcagggccaacggggccagggg

SEQ ID NO: 3071294 - DNA, 25 bp, Homo sapien
cttggcgccaggagaaccgtctcgt

SEQ ID NO: 3071295 - DNA, 25 bp, Homo sapien
tcgtccaggggaaccttcggcacca

SEQ ID NO: 3071296 - DNA, 25 bp, Homo sapien
caggggaaccttcggcaccaggagc

SEQ ID NO: 3071297 - DNA, 25 bp, Homo sapien
gccaggagaaccgtctcgtccaggg

SEQ ID NO: 3071298 - DNA, 25 bp, Homo sapien
tccagattcaccagggggtccagcc

SEQ ID NO: 3071299 - DNA, 25 bp, Homo sapien
agggggaccacgttcaccacttgct

SEQ ID NO: 3071300 - DNA, 25 bp, Homo sapien
ttgctccagagggaccttgtttgcc

SEQ ID NO: 3071301 - DNA, 25 bp, Homo sapien
accacttgctccagagggaccttgt

SEQ ID NO: 3071302 - DNA, 25 bp, Homo sapien
gcaataccttgaggcccgggagtac

SEQ ID NO: 3071303 - DNA, 25 bp, Homo sapien
gaccacaccacgctgtccagcaata

SEQ ID NO: 3071304 - DNA, 25 bp, Homo sapien
tccagcaataccttgaggcccggga

SEQ ID NO: 3071305 - DNA, 25 bp, Homo sapien
tctctgaccaggcaggccgaccaca

SEQ ID NO: 3071306 - DNA, 25 bp, Homo sapien
gggacctttgccgccttctttgcca

SEQ ID NO: 3071307 - DNA, 25 bp, Homo sapien
gacctttgccgccttctttgccagc

SEQ ID NO: 3071308 - DNA, 25 bp, Homo sapien
ctcaccacggggacctttgccgcct

SEQ ID NO: 3071309 - DNA, 25 bp, Homo sapien
gccagtctcaccacggggacctttg

SEQ ID NO: 3071310 - DNA, 25 bp, Homo sapien
tagagcagtggactctgctgcagag

SEQ ID NO: 3071311 - DNA, 25 bp, Homo sapien
ggctctggtgcatcattgggtcctc

SEQ ID NO: 3071312 - DNA, 25 bp, Homo sapien
gggctctggtgcatcattgggtcct

SEQ ID NO: 3071313 - DNA, 25 bp, Homo sapien
gcacccccaacctagagcagtggac

SEQ ID NO: 3071314 - DNA, 25 bp, Homo sapien
gccaggaggaccgactcggccagca

SEQ ID NO: 3071315 - DNA, 25 bp, Homo sapien
agaggggccaggaggaccgactcgg

SEQ ID NO: 3071316 - DNA, 25 bp, Homo sapien
gcagcaccagggaaaccagtagcac

SEQ ID NO: 3071317 - DNA, 25 bp, Homo sapien
gggccaggaggaccgactcggccag

SEQ ID NO: 3071318 - DNA, 25 bp, Homo sapien
gcgctgccgcgagcacctttggctc

SEQ ID NO: 3071319 - DNA, 25 bp, Homo sapien
agcgctgccgcgagcacctttggct

SEQ ID NO: 3071320 - DNA, 25 bp, Homo sapien
ctgccgcgagcacctttggctccag

SEQ ID NO: 3071321 - DNA, 25 bp, Homo sapien
gctgccgcgagcacctttggctcca

SEQ ID NO: 3071322 - DNA, 25 bp, Homo sapien
tttagcaccaggttggccgtcagca

SEQ ID NO: 3071323 - DNA, 25 bp, Homo sapien
gcatcaccaggttcgcctttagcac

SEQ ID NO: 3071324 - DNA, 25 bp, Homo sapien
ccagggggaccagcatcgcctttag

SEQ ID NO: 3071325 - DNA, 25 bp, Homo sapien
gggaccagcatcgcctttagcacca

SEQ ID NO: 3071326 - DNA, 25 bp, Homo sapien
ggccagcaaagccagcagggccggg

SEQ ID NO: 3071327 - DNA, 25 bp, Homo sapien
gggggaccaggctcaccacggtctc

SEQ ID NO: 3071328 - DNA, 25 bp, Homo sapien
ggggccagcaaagccagcagggccg

SEQ ID NO: 3071329 - DNA, 25 bp, Homo sapien
aggggggccagcaaagccagcaggg

SEQ ID NO: 3071330 - DNA, 25 bp, Homo sapien
ccaagtatggggtcttaacaggtct

SEQ ID NO: 3071331 - DNA, 25 bp, Homo sapien
gtcttaacaggtcttctgtacttac

SEQ ID NO: 3071332 - DNA, 25 bp, Homo sapien
agaaaaggagtcagattggagagat

SEQ ID NO: 3071333 - DNA, 25 bp, Homo sapien
tcagattggagagatgcgctgacag

SEQ ID NO: 3071334 - DNA, 25 bp, Homo sapien
ccagcagggccgctgggaccacttt

SEQ ID NO: 3071335 - DNA, 25 bp, Homo sapien
gggcaccacgagctccagtgggacc

SEQ ID NO: 3071336 - DNA, 25 bp, Homo sapien
accacgagctccagtgggaccagca

SEQ ID NO: 3071337 - DNA, 25 bp, Homo sapien
cagggccgctgggaccactttcacc

SEQ ID NO: 3071338 - DNA, 25 bp, Homo sapien
gacgccatctttgccaggagagcca

SEQ ID NO: 3071339 - DNA, 25 bp, Homo sapien
aatggggccagtcagaccacggacg

SEQ ID NO: 3071340 - DNA, 25 bp, Homo sapien
gccatcagcacctttgggaccagca

SEQ ID NO: 3071341 - DNA, 25 bp, Homo sapien
gggccagtcagaccacggacgccat

SEQ ID NO: 3071342 - DNA, 25 bp, Homo sapien
ctgtcacccttaggccctggaagac

SEQ ID NO: 3071343 - DNA, 25 bp, Homo sapien
aggggcgccctggctaccgggagct

SEQ ID NO: 3071344 - DNA, 25 bp, Homo sapien
tgtcacccttaggccctggaagacc

SEQ ID NO: 3071345 - DNA, 25 bp, Homo sapien
tcgttgccgggagcaccgttggccc

SEQ ID NO: 3071346 - DNA, 25 bp, Homo sapien
cttagcaccatcgttgccgggagca

SEQ ID NO: 3071347 - DNA, 25 bp, Homo sapien
catcgttgccgggagcaccgttggc

SEQ ID NO: 3071348 - DNA, 25 bp, Homo sapien
agggggaccttgcacaccacgctcg

SEQ ID NO: 3071349 - DNA, 25 bp, Homo sapien
ccaggggcgccaaggtctccaggaa

SEQ ID NO: 3071350 - DNA, 25 bp, Homo sapien
gggcgccaaggtctccaggaacacc

SEQ ID NO: 3071351 - DNA, 25 bp, Homo sapien
aggggcgccaaggtctccaggaaca

SEQ ID NO: 3071352 - DNA, 25 bp, Homo sapien
ggccaggggcgccaaggtctccagg

SEQ ID NO: 3071353 - DNA, 25 bp, Homo sapien
tctggccgtgattagagaggaaccc

SEQ ID NO: 3071354 - DNA, 25 bp, Homo sapien
agacagtgagcaaaacccacctggg

SEQ ID NO: 3071355 - DNA, 25 bp, Homo sapien
ggaaagtcacagcatattccagcag

SEQ ID NO: 3071356 - DNA, 25 bp, Homo sapien
gggccactctgctggaaagcacggt

SEQ ID NO: 3071357 - DNA, 25 bp, Homo sapien
tgttcaccaggtttgcctgcttcac

SEQ ID NO: 3071358 - DNA, 25 bp, Homo sapien
ctgttcaccaggtttgcctgcttca

SEQ ID NO: 3071359 - DNA, 25 bp, Homo sapien
ggaggaccagcaggaccagggagac

SEQ ID NO: 3071360 - DNA, 25 bp, Homo sapien
tggaggaccagcaggaccagggaga

SEQ ID NO: 3071361 - DNA, 25 bp, Homo sapien
ctggaggaccagcaggaccagggag

SEQ ID NO: 3071362 - DNA, 25 bp, Homo sapien
gaggaccagcaggaccagggagacc

SEQ ID NO: 3071363 - DNA, 25 bp, Homo sapien
ctcccagcatcctgacagccatgag

SEQ ID NO: 3071364 - DNA, 25 bp, Homo sapien
tcccagcatcctgacagccatgagg

SEQ ID NO: 3071365 - DNA, 25 bp, Homo sapien
catcctgacagccatgaggcctcac

SEQ ID NO: 3071366 - DNA, 25 bp, Homo sapien
cagcatcctgacagccatgaggcct

SEQ ID NO: 3071367 - DNA, 25 bp, Homo sapien
ttgttcacctctctcgccagcggga

SEQ ID NO: 3071368 - DNA, 25 bp, Homo sapien
gttcacctctctcgccagcgggacc

SEQ ID NO: 3071369 - DNA, 25 bp, Homo sapien
tgttcacctctctcgccagcgggac

SEQ ID NO: 3071370 - DNA, 25 bp, Homo sapien
tccagcctctccatctttgccagca

SEQ ID NO: 3071371 - DNA, 25 bp, Homo sapien
cctctccatctttgccagcaggacc

SEQ ID NO: 3071372 - DNA, 25 bp, Homo sapien
agcctctccatctttgccagcagga

SEQ ID NO: 3071373 - DNA, 25 bp, Homo sapien
gagctccagcctctccatctttgcc

SEQ ID NO: 3071374 - DNA, 25 bp, Homo sapien
ggtccgggaacacctcgctctccag

SEQ ID NO: 3071375 - DNA, 25 bp, Homo sapien
gggtccgggaacacctcgctctcca

SEQ ID NO: 3071376 - DNA, 25 bp, Homo sapien
actccttcaagtctcaggtgtgttt

SEQ ID NO: 3071377 - DNA, 25 bp, Homo sapien
cacacggcaggtcagcggcacagct

SEQ ID NO: 3071378 - DNA, 25 bp, Homo sapien
ctcaggtgtgtttgtccctggctct

SEQ ID NO: 3071379 - DNA, 25 bp, Homo sapien
ggtcagcggcacagctgagcccaga

SEQ ID NO: 3071380 - DNA, 25 bp, Homo sapien
gcagcacctttaggtccagggaatc

SEQ ID NO: 3071381 - DNA, 25 bp, Homo sapien
gcacctttaggtccagggaatccca

SEQ ID NO: 3071382 - DNA, 25 bp, Homo sapien
cagcacctttaggtccagggaatcc

SEQ ID NO: 3071383 - DNA, 25 bp, Homo sapien
agcagcacctttaggtccagggaat

SEQ ID NO: 3071384 - DNA, 25 bp, Homo sapien
tgggggtccggggcgaccatcttga

SEQ ID NO: 3071385 - DNA, 25 bp, Homo sapien
gaggcacgaaagcagcagtgaggac

SEQ ID NO: 3071386 - DNA, 25 bp, Homo sapien
atgggaggcacgaaagcagcagtga

SEQ ID NO: 3071387 - DNA, 25 bp, Homo sapien
gggccagttttgccatcaggaccag

SEQ ID NO: 3071388 - DNA, 25 bp, Homo sapien
agcttcaccgggacgaccagcttca

SEQ ID NO: 3071389 - DNA, 25 bp, Homo sapien
accaggcagaccagcttcaccggga

SEQ ID NO: 3071390 - DNA, 25 bp, Homo sapien
agaccagcttcaccgggacgaccag

SEQ ID NO: 3071391 - DNA, 25 bp, Homo sapien
ggcagaccagcttcaccgggacgac

SEQ ID NO: 3071392 - DNA, 25 bp, Homo sapien
caggagaaccacgttcaccagcggg

SEQ ID NO: 3071393 - DNA, 25 bp, Homo sapien
gccaggagaaccacgttcaccagcg

SEQ ID NO: 3071394 - DNA, 25 bp, Homo sapien
ggagaaccacgttcaccagcgggac

SEQ ID NO: 3071395 - DNA, 25 bp, Homo sapien
cagggccaggagaaccacgttcacc

SEQ ID NO: 3071396 - DNA, 25 bp, Homo sapien
agcaacaccatctgcgccagggaaa

SEQ ID NO: 3071397 - DNA, 25 bp, Homo sapien
gcaacaccatctgcgccagggaaac

SEQ ID NO: 3071398 - DNA, 25 bp, Homo sapien
tgggtccgggttcacctcgagctcc

SEQ ID NO: 3071399 - DNA, 25 bp, Homo sapien
agtgggtccgggttcacctcgagct

SEQ ID NO: 3071400 - DNA, 25 bp, Homo sapien
ccagtgggtccgggttcacctcgag

SEQ ID NO: 3071401 - DNA, 25 bp, Homo sapien
cagggggtccgggcaggccagtggg

SEQ ID NO: 3071402 - DNA, 25 bp, Homo sapien
ccttagcaccagtgtctcctttgct

SEQ ID NO: 3071403 - DNA, 25 bp, Homo sapien
tagcaccagtgtctcctttgctgcc

SEQ ID NO: 3071404 - DNA, 25 bp, Homo sapien
tcccttagcaccagtgtctcctttg

SEQ ID NO: 3071405 - DNA, 25 bp, Homo sapien
aggctctcccttagcaccagtgtct

SEQ ID NO: 3071406 - DNA, 25 bp, Homo sapien
ctggggtccagaggggcctcgggca

SEQ ID NO: 3071407 - DNA, 25 bp, Homo sapien
ggggcctcgggcaccagggaagcca

SEQ ID NO: 3071408 - DNA, 25 bp, Homo sapien
aggagcaccagcaataccaggagca

SEQ ID NO: 3071409 - DNA, 25 bp, Homo sapien
ccaggagcaccagcaataccaggag

SEQ ID NO: 3071410 - DNA, 25 bp, Homo sapien
ctgtgggaggcagacagccagggcg

SEQ ID NO: 3071411 - DNA, 25 bp, Homo sapien
tgggaggcagacagccagggcgtga

SEQ ID NO: 3071412 - DNA, 25 bp, Homo sapien
tgtgggaggcagacagccagggcgt

SEQ ID NO: 3071413 - DNA, 25 bp, Homo sapien
ggaggcagacagccagggcgtgagc

SEQ ID NO: 3071414 - DNA, 25 bp, Homo sapien
ttagcaccaggctgtccatcagcac

SEQ ID NO: 3071415 - DNA, 25 bp, Homo sapien
gctgtccatcagcaccagggtttcc

SEQ ID NO: 3071416 - DNA, 25 bp, Homo sapien
ctttagcaccaggctgtccatcagc

SEQ ID NO: 3071417 - DNA, 25 bp, Homo sapien
caggctgtccatcagcaccagggtt

SEQ ID NO: 3071418 - DNA, 25 bp, Homo sapien
ctggggaccttcagagcctcggggc

SEQ ID NO: 3071419 - DNA, 25 bp, Homo sapien
cctggggaccttcagagcctcgggg

SEQ ID NO: 3071420 - DNA, 25 bp, Homo sapien
tggggaccttcagagcctcggggcc

SEQ ID NO: 3071421 - DNA, 25 bp, Homo sapien
gggccaggctcaccacgcacaccct

SEQ ID NO: 3071422 - DNA, 25 bp, Homo sapien
aagccaggaggaccagcggggccgg

SEQ ID NO: 3071423 - DNA, 25 bp, Homo sapien
cttagcaccaacagcaccagggaag

SEQ ID NO: 3071424 - DNA, 25 bp, Homo sapien
caggaggaccagcggggccggtggg

SEQ ID NO: 3071425 - DNA, 25 bp, Homo sapien
ggaagccaggaggaccagcggggcc

SEQ ID NO: 3071426 - DNA, 25 bp, Homo sapien
agggggcccggcagcaccagtagca

SEQ ID NO: 3071427 - DNA, 25 bp, Homo sapien
agcaccagtagcaccatcatttcca

SEQ ID NO: 3071428 - DNA, 25 bp, Homo sapien
gtagcaccatcatttccacgagcac

SEQ ID NO: 3071429 - DNA, 25 bp, Homo sapien
ggcccggcagcaccagtagcaccat

SEQ ID NO: 3071430 - DNA, 25 bp, Homo sapien
gggctccagggcgacctctctcacc

SEQ ID NO: 3071431 - DNA, 25 bp, Homo sapien
ccagggcgacctctctcaccaggca

SEQ ID NO: 3071432 - DNA, 25 bp, Homo sapien
tctcaccaggcaggccacgggggcc

SEQ ID NO: 3071433 - DNA, 25 bp, Homo sapien
ctccagggcgacctctctcaccagg

SEQ ID NO: 3071434 - DNA, 25 bp, Homo sapien
ggagctccattttcaccagggctgc

SEQ ID NO: 3071435 - DNA, 25 bp, Homo sapien
caggagctccattttcaccagggct

SEQ ID NO: 3071436 - DNA, 25 bp, Homo sapien
catctgaccaggagctccattttca

SEQ ID NO: 3071437 - DNA, 25 bp, Homo sapien
tctgaccaggagctccattttcacc

SEQ ID NO: 3071438 - DNA, 25 bp, Homo sapien
ctgtagatcagagaataatgagtga

SEQ ID NO: 3071439 - DNA, 25 bp, Homo sapien
atctcccttggcaccatccaaacca

SEQ ID NO: 3071440 - DNA, 25 bp, Homo sapien
accagcatctcccttggcaccatcc

SEQ ID NO: 3071441 - DNA, 25 bp, Homo sapien
aggaccagcatctcccttggcacca

SEQ ID NO: 3071442 - DNA, 25 bp, Homo sapien
agcatctcccttggcaccatccaaa

SEQ ID NO: 3071443 - DNA, 25 bp, Homo sapien
gccagctgttccgggcaatcctcga

SEQ ID NO: 3071444 - DNA, 25 bp, Homo sapien
ctgttccgggcaatcctcgagcacc

SEQ ID NO: 3071445 - DNA, 25 bp, Homo sapien
agctgttccgggcaatcctcgagca

SEQ ID NO: 3071446 - DNA, 25 bp, Homo sapien
cagctgttccgggcaatcctcgagc

SEQ ID NO: 3071447 - DNA, 25 bp, Homo sapien
cacgctcaccaggacgaccaggttt

SEQ ID NO: 3071448 - DNA, 25 bp, Homo sapien
aggaggcccacgctcaccaggacga

SEQ ID NO: 3071449 - DNA, 25 bp, Homo sapien
accaggacgaccaggttttccagct

SEQ ID NO: 3071450 - DNA, 25 bp, Homo sapien
gctcaccaggacgaccaggttttcc

SEQ ID NO: 3071451 - DNA, 25 bp, Homo sapien
tctccattctttccagggggacctg

SEQ ID NO: 3071452 - DNA, 25 bp, Homo sapien
catctccattctttccagggggacc

SEQ ID NO: 3071453 - DNA, 25 bp, Homo sapien
ctccattctttccagggggacctgg

SEQ ID NO: 3071454 - DNA, 25 bp, Homo sapien
atcatctccattctttccaggggga

SEQ ID NO: 3071455 - DNA, 25 bp, Homo sapien
ctcaccagggggaccttggaagcct

SEQ ID NO: 3071456 - DNA, 25 bp, Homo sapien
caccagggggaccttggaagccttg

SEQ ID NO: 3071457 - DNA, 25 bp, Homo sapien
catatgaagacgtcctggatactca

SEQ ID NO: 3071458 - DNA, 25 bp, Homo sapien
ccaaggaggcatatgaagacgtcct

SEQ ID NO: 3071459 - DNA, 25 bp, Homo sapien
aaggaggcatatgaagacgtcctgg

SEQ ID NO: 3071460 - DNA, 25 bp, Homo sapien
gaggcatatgaagacgtcctggata

SEQ ID NO: 3071461 - DNA, 25 bp, Homo sapien
ggagaccacgaggaccagagggacc

SEQ ID NO: 3071462 - DNA, 25 bp, Homo sapien
gggagaccacgaggaccagagggac

SEQ ID NO: 3071463 - DNA, 25 bp, Homo sapien
ccaggcacggaaattcctccggttg

SEQ ID NO: 3071464 - DNA, 25 bp, Homo sapien
aattcctccggttgatttctcatca

SEQ ID NO: 3071465 - DNA, 25 bp, Homo sapien
tcatcatagccataagacagctggg

SEQ ID NO: 3071466 - DNA, 25 bp, Homo sapien
tctcatcatagccataagacagctg

SEQ ID NO: 3071467 - DNA, 25 bp, Homo sapien
gggtccgggaagtccaggctgtcca

SEQ ID NO: 3071468 - DNA, 25 bp, Homo sapien
gatgccatctcggccaggggggcct

SEQ ID NO: 3071469 - DNA, 25 bp, Homo sapien
gggatgccatctcggccaggggggc

SEQ ID NO: 3071470 - DNA, 25 bp, Homo sapien
ggatgccatctcggccaggggggcc

SEQ ID NO: 3071471 - DNA, 25 bp, Homo sapien
gcctcgggggccagtgtctcccttg

SEQ ID NO: 3071472 - DNA, 25 bp, Homo sapien
tgggcctcgggggccagtgtctccc

SEQ ID NO: 3071473 - DNA, 25 bp, Homo sapien
ccttgggcctcgggggccagtgtct

SEQ ID NO: 3071474 - DNA, 25 bp, Homo sapien
cctcgggggccagtgtctcccttgg

SEQ ID NO: 3071475 - DNA, 25 bp, Homo sapien
ctcgacgccggtggtttcttggtcg

SEQ ID NO: 3071476 - DNA, 25 bp, Homo sapien
cacacgtctcggtcatggtacctga

SEQ ID NO: 3071477 - DNA, 25 bp, Homo sapien
ttgccgttgtcgcagacgcagatcc

SEQ ID NO: 3071478 - DNA, 25 bp, Homo sapien
ggtctcgtcacagatcacgtcatcg

SEQ ID NO: 3071479 - DNA, 25 bp, Homo sapien
tacctgaggccgttctgtacgcagg

SEQ ID NO: 3071480 - DNA, 25 bp, Homo sapien
aggagccggaggtccacaaagctga

SEQ ID NO: 3071481 - DNA, 25 bp, Homo sapien
ggcggtggccgctaagaggagcagg

SEQ ID NO: 3071482 - DNA, 25 bp, Homo sapien
ttcctcttggccgtgcgtcaggagg

SEQ ID NO: 3071483 - DNA, 25 bp, Homo sapien
tgtcttcgtcttggccctcgacttg

SEQ ID NO: 3071484 - DNA, 25 bp, Homo sapien
ctcctgctccgaccccgaggagaaa

SEQ ID NO: 3071485 - DNA, 25 bp, Homo sapien
ccccgaggagaaactcccgtctgct

SEQ ID NO: 3071486 - DNA, 25 bp, Homo sapien
atgcgtggcctcacactccgcgtgc

SEQ ID NO: 3071487 - DNA, 25 bp, Homo sapien
agacatgtagactctttgtggctgg

SEQ ID NO: 3071488 - DNA, 25 bp, Homo sapien
aaagctttggtggttgggtgatgga

SEQ ID NO: 3071489 - DNA, 25 bp, Homo sapien
ttggtggttgggtgatggagcagcc

SEQ ID NO: 3071490 - DNA, 25 bp, Homo sapien
gtggttgggtgatggagcagccaag

SEQ ID NO: 3071491 - DNA, 25 bp, Homo sapien
gtggcctctgcagaagaaagctttg

SEQ ID NO: 3071492 - DNA, 25 bp, Homo sapien
agccccttctccagttgtacctgga

SEQ ID NO: 3071493 - DNA, 25 bp, Homo sapien
agttgtacctggactcagtgttggg

SEQ ID NO: 3071494 - DNA, 25 bp, Homo sapien
tctccagttgtacctggactcagtg

SEQ ID NO: 3071495 - DNA, 25 bp, Homo sapien
ccttctccagttgtacctggactca

SEQ ID NO: 3071496 - DNA, 25 bp, Homo sapien
ggtagcccaggtgttgtgcacctgg

SEQ ID NO: 3071497 - DNA, 25 bp, Homo sapien
aggtagcccaggtgttgtgcacctg

SEQ ID NO: 3071498 - DNA, 25 bp, Homo sapien
gtagcccaggtgttgtgcacctggt

SEQ ID NO: 3071499 - DNA, 25 bp, Homo sapien
tccaattctccagaacgcttctctg

SEQ ID NO: 3071500 - DNA, 25 bp, Homo sapien
tgctcccacctctagccctagactg

SEQ ID NO: 3071501 - DNA, 25 bp, Homo sapien
acctctagccctagactgatgataa

SEQ ID NO: 3071502 - DNA, 25 bp, Homo sapien
ccacctctagccctagactgatgat

SEQ ID NO: 3071503 - DNA, 25 bp, Homo sapien
cttgcctgccacgtagactggaggc

SEQ ID NO: 3071504 - DNA, 25 bp, Homo sapien
agatgccttcgcagccatggcctgg

SEQ ID NO: 3071505 - DNA, 25 bp, Homo sapien
caacccgctgacctcattcccagct

SEQ ID NO: 3071506 - DNA, 25 bp, Homo sapien
tagactggaggcttagctgcatctt

SEQ ID NO: 3071507 - DNA, 25 bp, Homo sapien
ccacaagctggcacatgtggatatt

SEQ ID NO: 3071508 - DNA, 25 bp, Homo sapien
cacaagctggcacatgtggatattg

SEQ ID NO: 3071509 - DNA, 25 bp, Homo sapien
tgtggatattggctctgttttgcct

SEQ ID NO: 3071510 - DNA, 25 bp, Homo sapien
tactgtcacacagggcgcagacgta

SEQ ID NO: 3071511 - DNA, 25 bp, Homo sapien
gaaaactccttatggctcctactgt

SEQ ID NO: 3071512 - DNA, 25 bp, Homo sapien
gacgtactggcggaaattttcagaa

SEQ ID NO: 3071513 - DNA, 25 bp, Homo sapien
ttatggctcctactgtcacacaggg

SEQ ID NO: 3071514 - DNA, 25 bp, Homo sapien
ggtccctggccgtcccgctctgctg

SEQ ID NO: 3071515 - DNA, 25 bp, Homo sapien
tgcagggtctctcccagcgccccgc

SEQ ID NO: 3071516 - DNA, 25 bp, Homo sapien
ccccgctctcccctaggcgtttctg

SEQ ID NO: 3071517 - DNA, 25 bp, Homo sapien
tcccctaggcgtttctggctacact

SEQ ID NO: 3071518 - DNA, 25 bp, Homo sapien
tggaaaaatcgaagcgctccccctg

SEQ ID NO: 3071519 - DNA, 25 bp, Homo sapien
ctctggtggaaaaatcgaagcgctc

SEQ ID NO: 3071520 - DNA, 25 bp, Homo sapien
tggtggaaaaatcgaagcgctcccc

SEQ ID NO: 3071521 - DNA, 25 bp, Homo sapien
aaatcgaagcgctccccctggtact

SEQ ID NO: 3071522 - DNA, 25 bp, Homo sapien
tccatcccggtggaaagaggagccc

SEQ ID NO: 3071523 - DNA, 25 bp, Homo sapien
cgctgcctcggctctccgatggaga

SEQ ID NO: 3071524 - DNA, 25 bp, Homo sapien
ccatctggagtgcattatgggcaga

SEQ ID NO: 3071525 - DNA, 25 bp, Homo sapien
aggagaaagccgagagcaggaaaat

SEQ ID NO: 3071526 - DNA, 25 bp, Homo sapien
gctgcacttgcatttggtacacctg

SEQ ID NO: 3071527 - DNA, 25 bp, Homo sapien
gagatggctggacgcatggaggtgc

SEQ ID NO: 3071528 - DNA, 25 bp, Homo sapien
gcatccaagtggaggtgcccatgag

SEQ ID NO: 3071529 - DNA, 25 bp, Homo sapien
caggtttcagcttgatcgtcgggct

SEQ ID NO: 3071530 - DNA, 25 bp, Homo sapien
ctcctccctgtgaggttgcgctggg

SEQ ID NO: 3071531 - DNA, 25 bp, Homo sapien
caaaggggtggagctagggctcctc

SEQ ID NO: 3071532 - DNA, 25 bp, Homo sapien
gtccccttgagggggctttgcttca

SEQ ID NO: 3071533 - DNA, 25 bp, Homo sapien
cctcctccctgtgaggttgcgctgg

SEQ ID NO: 3071534 - DNA, 25 bp, Homo sapien
tctgcatccaaaggcacatgtaact

SEQ ID NO: 3071535 - DNA, 25 bp, Homo sapien
cttctctatcacacagatggtatag

SEQ ID NO: 3071536 - DNA, 25 bp, Homo sapien
actacacagtcgctgtacccacagt

SEQ ID NO: 3071537 - DNA, 25 bp, Homo sapien
atcacagcccatcactacacagtcg

SEQ ID NO: 3071538 - DNA, 25 bp, Homo sapien
cgggtgtgggttcccagtgagatag

SEQ ID NO: 3071539 - DNA, 25 bp, Homo sapien
ccgggtgtgggttcccagtgagata

SEQ ID NO: 3071540 - DNA, 25 bp, Homo sapien
gtccgggtgtgggttcccagtgaga

SEQ ID NO: 3071541 - DNA, 25 bp, Homo sapien
ggtgtgggttcccagtgagataggg

SEQ ID NO: 3071542 - DNA, 25 bp, Homo sapien
ggtagcaaattgcaagcgggtcttc

SEQ ID NO: 3071543 - DNA, 25 bp, Homo sapien
tccaatagttgttggccccaagagt

SEQ ID NO: 3071544 - DNA, 25 bp, Homo sapien
tgtttacgggaaactgtaggcagct

SEQ ID NO: 3071545 - DNA, 25 bp, Homo sapien
gaaggatgtaagtcaatcactcacc

SEQ ID NO: 3071546 - DNA, 25 bp, Homo sapien
caaggactttagactgtggtaccca

SEQ ID NO: 3071547 - DNA, 25 bp, Homo sapien
tggatgcctgccagacatacatgaa

SEQ ID NO: 3071548 - DNA, 25 bp, Homo sapien
cacctgacatggatgtgacccaggg

SEQ ID NO: 3071549 - DNA, 25 bp, Homo sapien
tatgtggaagagaatacaaggactt

SEQ ID NO: 3071550 - DNA, 25 bp, Homo sapien
cagctgagatgcaggactccagctt

SEQ ID NO: 3071551 - DNA, 25 bp, Homo sapien
ctgacatttcgccttctgcatccaa

SEQ ID NO: 3071552 - DNA, 25 bp, Homo sapien
ctgcatccaacatctccaggcgttg

SEQ ID NO: 3071553 - DNA, 25 bp, Homo sapien
actccagcttctgacatttcgcctt

SEQ ID NO: 3071554 - DNA, 25 bp, Homo sapien
tagtggctgtcatcctgatctgcgg

SEQ ID NO: 3071555 - DNA, 25 bp, Homo sapien
tcaagacttaatctcccgccgagac

SEQ ID NO: 3071556 - DNA, 25 bp, Homo sapien
tcagtgatggctgccccggaggtct

SEQ ID NO: 3071557 - DNA, 25 bp, Homo sapien
gggtctccggtcttcatctttgttc

SEQ ID NO: 3071558 - DNA, 25 bp, Homo sapien
ttcttctgtgtctatgcgtgtcccc

SEQ ID NO: 3071559 - DNA, 25 bp, Homo sapien
tgtgtctatgcgtgtcccccttttc

SEQ ID NO: 3071560 - DNA, 25 bp, Homo sapien
gtctatgcgtgtcccccttttctgt

SEQ ID NO: 3071561 - DNA, 25 bp, Homo sapien
ttttcttctgtgtctatgcgtgtcc

SEQ ID NO: 3071562 - DNA, 25 bp, Homo sapien
cagctcaggggctgggactatggga

SEQ ID NO: 3071563 - DNA, 25 bp, Homo sapien
ggctgggactatgggactacttggg

SEQ ID NO: 3071564 - DNA, 25 bp, Homo sapien
gggctgggactatgggactacttgg

SEQ ID NO: 3071565 - DNA, 25 bp, Homo sapien
tgggactatgggactacttgggagg

SEQ ID NO: 3071566 - DNA, 25 bp, Homo sapien
agcccagagagccacaatcgctgac

SEQ ID NO: 3071567 - DNA, 25 bp, Homo sapien
acctccacagccaaatggtatttca

SEQ ID NO: 3071568 - DNA, 25 bp, Homo sapien
tccaggacaggcagaagcttttggc

SEQ ID NO: 3071569 - DNA, 25 bp, Homo sapien
atcgctgacatcatccagcccgttg

SEQ ID NO: 3071570 - DNA, 25 bp, Homo sapien
cggagtcggtgggtggccgccctct

SEQ ID NO: 3071571 - DNA, 25 bp, Homo sapien
tcacccggagtcggtgggtggccgc

SEQ ID NO: 3071572 - DNA, 25 bp, Homo sapien
ctgtcacccggagtcggtgggtggc

SEQ ID NO: 3071573 - DNA, 25 bp, Homo sapien
tgtcacccggagtcggtgggtggcc

SEQ ID NO: 3071574 - DNA, 25 bp, Homo sapien
ccattgggggattctaccatcttag

SEQ ID NO: 3071575 - DNA, 25 bp, Homo sapien
cagaagtgggctccccagacattac

SEQ ID NO: 3071576 - DNA, 25 bp, Homo sapien
gggattctaccatcttagtgtcaga

SEQ ID NO: 3071577 - DNA, 25 bp, Homo sapien
taccatcttagtgtcagaagtgggc

SEQ ID NO: 3071578 - DNA, 25 bp, Homo sapien
ccctgggccgtgaaacaactttctg

SEQ ID NO: 3071579 - DNA, 25 bp, Homo sapien
actcgaggcctctgctgatgccgtg

SEQ ID NO: 3071580 - DNA, 25 bp, Homo sapien
tggaaccatgcagcactcgaggcct

SEQ ID NO: 3071581 - DNA, 25 bp, Homo sapien
cagcactgccgtggattctggaacc

SEQ ID NO: 3071582 - DNA, 25 bp, Homo sapien
cctactgacctgttcccttgggtca

SEQ ID NO: 3071583 - DNA, 25 bp, Homo sapien
aggaagcccagccttccgcagtact

SEQ ID NO: 3071584 - DNA, 25 bp, Homo sapien
ccaatgggcacaagtctgagggctc

SEQ ID NO: 3071585 - DNA, 25 bp, Homo sapien
cctgggacccactgggccctactga

SEQ ID NO: 3071586 - DNA, 25 bp, Homo sapien
caaccctggtactgctggaagagaa

SEQ ID NO: 3071587 - DNA, 25 bp, Homo sapien
cagtaaaacttagagtatcagattg

SEQ ID NO: 3071588 - DNA, 25 bp, Homo sapien
ttaatggcactaaatgtaaactgat

SEQ ID NO: 3071589 - DNA, 25 bp, Homo sapien
gaatagaagattttaccaatccaac

SEQ ID NO: 3071590 - DNA, 25 bp, Homo sapien
gggctcaaatgattctcctgcctca

SEQ ID NO: 3071591 - DNA, 25 bp, Homo sapien
catagctcactacactctcaacctt

SEQ ID NO: 3071592 - DNA, 25 bp, Homo sapien
tagctcactacactctcaaccttct

SEQ ID NO: 3071593 - DNA, 25 bp, Homo sapien
ggtgtgagtcaccatgcctggccct

SEQ ID NO: 3071594 - DNA, 25 bp, Homo sapien
ttctctcatcaacccaaccttgtgg

SEQ ID NO: 3071595 - DNA, 25 bp, Homo sapien
tgtacacatcagtttagaattctct

SEQ ID NO: 3071596 - DNA, 25 bp, Homo sapien
tctgtagtggttcctaacgtcttcc

SEQ ID NO: 3071597 - DNA, 25 bp, Homo sapien
caaatgcttgtgtatcctgtacaca

SEQ ID NO: 3071598 - DNA, 25 bp, Homo sapien
ggagcagcatgtgtcgaggtctact

SEQ ID NO: 3071599 - DNA, 25 bp, Homo sapien
gtgtcgaggtctactggttctccaa

SEQ ID NO: 3071600 - DNA, 25 bp, Homo sapien
tcactaccgacctaccaaagcagac

SEQ ID NO: 3071601 - DNA, 25 bp, Homo sapien
aaaattctaatgcttaggcctcact

SEQ ID NO: 3071602 - DNA, 25 bp, Homo sapien
gactttgaacctcatccctgccgta

SEQ ID NO: 3071603 - DNA, 25 bp, Homo sapien
cctgagattacacagtgagaggcag

SEQ ID NO: 3071604 - DNA, 25 bp, Homo sapien
cctagaacgaatctcagagctggga

SEQ ID NO: 3071605 - DNA, 25 bp, Homo sapien
cagtcagaatggaagcctagaacga

SEQ ID NO: 3071606 - DNA, 25 bp, Homo sapien
gctctaaggcccgaagaacaggtga

SEQ ID NO: 3071607 - DNA, 25 bp, Homo sapien
cactgagacccatgcagagtttcca

SEQ ID NO: 3071608 - DNA, 25 bp, Homo sapien
gaagatgtgcaatagggctcagagc

SEQ ID NO: 3071609 - DNA, 25 bp, Homo sapien
agcaggacagttcttttgtagccag

SEQ ID NO: 3071610 - DNA, 25 bp, Homo sapien
tctgatttaacggtctgaggtggca

SEQ ID NO: 3071611 - DNA, 25 bp, Homo sapien
caagtgagtcgtgatcctgacagag

SEQ ID NO: 3071612 - DNA, 25 bp, Homo sapien
gcagaactagggaagcgtaacccca

SEQ ID NO: 3071613 - DNA, 25 bp, Homo sapien
tattagatcaggtcgtagttcccca

SEQ ID NO: 3071614 - DNA, 25 bp, Homo sapien
caacccttgacttctggtatcacca

SEQ ID NO: 3071615 - DNA, 25 bp, Homo sapien
ccatcaagcagacctcttcctcggg

SEQ ID NO: 3071616 - DNA, 25 bp, Homo sapien
ggtttcccagcagtcacttcagagt

SEQ ID NO: 3071617 - DNA, 25 bp, Homo sapien
tctctgtccgatggcctcaacagga

SEQ ID NO: 3071618 - DNA, 25 bp, Homo sapien
gcatagctaccagtttgaaggtgcc

SEQ ID NO: 3071619 - DNA, 25 bp, Homo sapien
cacagcctccgtgtttctgggatga

SEQ ID NO: 3071620 - DNA, 25 bp, Homo sapien
gcttggcaggaaccacgtggacaaa

SEQ ID NO: 3071621 - DNA, 25 bp, Homo sapien
tgggatgaggcacgtagacctcctt

SEQ ID NO: 3071622 - DNA, 25 bp, Homo sapien
gaaaggagaaccaagaataccaggc

SEQ ID NO: 3071623 - DNA, 25 bp, Homo sapien
tggtatgaacctaactcctggcaca

SEQ ID NO: 3071624 - DNA, 25 bp, Homo sapien
tgaaagggtgatcagagagctccat

SEQ ID NO: 3071625 - DNA, 25 bp, Homo sapien
tgctcaacaatcataaagggcctag

SEQ ID NO: 3071626 - DNA, 25 bp, Homo sapien
ggggggcagcaacggagcaactcac

SEQ ID NO: 3071627 - DNA, 25 bp, Homo sapien
aggggggcagcaacggagcaactca

SEQ ID NO: 3071628 - DNA, 25 bp, Homo sapien
aaaggggggcagcaacggagcaact

SEQ ID NO: 3071629 - DNA, 25 bp, Homo sapien
aaggggggcagcaacggagcaactc

SEQ ID NO: 3071630 - DNA, 25 bp, Homo sapien
ccagcggaaatggcgctgtgttgca

SEQ ID NO: 3071631 - DNA, 25 bp, Homo sapien
ggaaatggcgctgtgttgcaatgat

SEQ ID NO: 3071632 - DNA, 25 bp, Homo sapien
atgggcacctgggtgccagcggaaa

SEQ ID NO: 3071633 - DNA, 25 bp, Homo sapien
tgggtgccagcggaaatggcgctgt

SEQ ID NO: 3071634 - DNA, 25 bp, Homo sapien
tttggagctaccacccgacttcttg

SEQ ID NO: 3071635 - DNA, 25 bp, Homo sapien
ttggatgcgtatctgacagcaagag

SEQ ID NO: 3071636 - DNA, 25 bp, Homo sapien
gctaccacccgacttcttggatgcg

SEQ ID NO: 3071637 - DNA, 25 bp, Homo sapien
tccaccgaggtttttggagctacca

SEQ ID NO: 3071638 - DNA, 25 bp, Homo sapien
ggagtggggcttagcaaggatgtaa

SEQ ID NO: 3071639 - DNA, 25 bp, Homo sapien
gccggagtggggcttagcaaggatg

SEQ ID NO: 3071640 - DNA, 25 bp, Homo sapien
ctgtagccggagtggggcttagcaa

SEQ ID NO: 3071641 - DNA, 25 bp, Homo sapien
tgtagccggagtggggcttagcaag

SEQ ID NO: 3071642 - DNA, 25 bp, Homo sapien
gctgcctgcttcagaggctcactca

SEQ ID NO: 3071643 - DNA, 25 bp, Homo sapien
tgacacattcagtctaaatgtgctg

SEQ ID NO: 3071644 - DNA, 25 bp, Homo sapien
gaaatggacaccagagagctgcctg

SEQ ID NO: 3071645 - DNA, 25 bp, Homo sapien
catcatgtgttctgggttctgacac

SEQ ID NO: 3071646 - DNA, 25 bp, Homo sapien
acttggggagcccagtacatccaga

SEQ ID NO: 3071647 - DNA, 25 bp, Homo sapien
gggagcccagtacatccagaaaggc

SEQ ID NO: 3071648 - DNA, 25 bp, Homo sapien
cacggaggggccagaacagacttgg

SEQ ID NO: 3071649 - DNA, 25 bp, Homo sapien
gagcccagtacatccagaaaggctt

SEQ ID NO: 3071650 - DNA, 25 bp, Homo sapien
gaacccgtccgtgctgctgaggcag

SEQ ID NO: 3071651 - DNA, 25 bp, Homo sapien
gccaaggaacccgtccgtgctgctg

SEQ ID NO: 3071652 - DNA, 25 bp, Homo sapien
aaagacaagtgctcttcaaacgccc

SEQ ID NO: 3071653 - DNA, 25 bp, Homo sapien
caggagaaagacaagtgctcttcaa

SEQ ID NO: 3071654 - DNA, 25 bp, Homo sapien
cgggtcctcagcgccaacaccaccg

SEQ ID NO: 3071655 - DNA, 25 bp, Homo sapien
tcagcgccaacaccaccgacgccat

SEQ ID NO: 3071656 - DNA, 25 bp, Homo sapien
ggtcctcagcgccaacaccaccgac

SEQ ID NO: 3071657 - DNA, 25 bp, Homo sapien
tcctcagcgccaacaccaccgacgc

SEQ ID NO: 3071658 - DNA, 25 bp, Homo sapien
gatcactcacttccggtctcgaaaa

SEQ ID NO: 3071659 - DNA, 25 bp, Homo sapien
gctttcgatcactcacttccggtct

SEQ ID NO: 3071660 - DNA, 25 bp, Homo sapien
tttcgatcactcacttccggtctcg

SEQ ID NO: 3071661 - DNA, 25 bp, Homo sapien
tcgatcactcacttccggtctcgaa

SEQ ID NO: 3071662 - DNA, 25 bp, Homo sapien
tggaggtgttaaatcttgttaccac

SEQ ID NO: 3071663 - DNA, 25 bp, Homo sapien
catttcaaacgtgaagataaacaag

SEQ ID NO: 3071664 - DNA, 25 bp, Homo sapien
ttgtttatacttcagcttgacctgg

SEQ ID NO: 3071665 - DNA, 25 bp, Homo sapien
tgtaatggtaactctactttgttta

SEQ ID NO: 3071666 - DNA, 25 bp, Homo sapien
gctagtggactgaattgaatgctcc

SEQ ID NO: 3071667 - DNA, 25 bp, Homo sapien
tgctccagtctgtgtcatatgtctc

SEQ ID NO: 3071668 - DNA, 25 bp, Homo sapien
ggagttgccaacatttgcctttctg

SEQ ID NO: 3071669 - DNA, 25 bp, Homo sapien
ttatttgatagcacatactgatggc

SEQ ID NO: 3071670 - DNA, 25 bp, Homo sapien
gaagaggctcacacggatgccggca

SEQ ID NO: 3071671 - DNA, 25 bp, Homo sapien
agagcagcagcttggcagtaaccaa

SEQ ID NO: 3071672 - DNA, 25 bp, Homo sapien
aaccaagccgagtcagaaggtccag

SEQ ID NO: 3071673 - DNA, 25 bp, Homo sapien
gctcacacggatgccggcagcagag

SEQ ID NO: 3071674 - DNA, 25 bp, Homo sapien
gccagccctcaaaacacaaaggaac

SEQ ID NO: 3071675 - DNA, 25 bp, Homo sapien
aaaattcactgccacagacaaacca

SEQ ID NO: 3071676 - DNA, 25 bp, Homo sapien
ggcaaaaattcactgccacagacaa

SEQ ID NO: 3071677 - DNA, 25 bp, Homo sapien
ttaatgttcctctcctggcaaaaat

SEQ ID NO: 3071678 - DNA, 25 bp, Homo sapien
gatgtagacctacgcagcagagcta

SEQ ID NO: 3071679 - DNA, 25 bp, Homo sapien
gactaggcaagtcatggaagacctc

SEQ ID NO: 3071680 - DNA, 25 bp, Homo sapien
ggagctgcccgtgacctgatgatag

SEQ ID NO: 3071681 - DNA, 25 bp, Homo sapien
catttagtagaaacgagccttgcct

SEQ ID NO: 3071682 - DNA, 25 bp, Homo sapien
caaagaggaggtctcatgtaccaat

SEQ ID NO: 3071683 - DNA, 25 bp, Homo sapien
cctacaaagaggaggtctcatgtac

SEQ ID NO: 3071684 - DNA, 25 bp, Homo sapien
gaggaggtctcatgtaccaatctgc

SEQ ID NO: 3071685 - DNA, 25 bp, Homo sapien
aagtcctacaaagaggaggtctcat

SEQ ID NO: 3071686 - DNA, 25 bp, Homo sapien
ctgggaggcagcaggtgctggggac

SEQ ID NO: 3071687 - DNA, 25 bp, Homo sapien
tgggaggcagcaggtgctggggaca

SEQ ID NO: 3071688 - DNA, 25 bp, Homo sapien
gggaggcagcaggtgctggggacaa

SEQ ID NO: 3071689 - DNA, 25 bp, Homo sapien
gaggcagcaggtgctggggacaagc

SEQ ID NO: 3071690 - DNA, 25 bp, Homo sapien
tggaggatctcatggcggcgtagac

SEQ ID NO: 3071691 - DNA, 25 bp, Homo sapien
ggcgtagaccctggaccgcattgtc

SEQ ID NO: 3071692 - DNA, 25 bp, Homo sapien
tctcatggcggcgtagaccctggac

SEQ ID NO: 3071693 - DNA, 25 bp, Homo sapien
atggcggcgtagaccctggaccgca

SEQ ID NO: 3071694 - DNA, 25 bp, Homo sapien
tgtcacccgacaagcaaccagccct

SEQ ID NO: 3071695 - DNA, 25 bp, Homo sapien
tggcttgcggggacgggagccagac

SEQ ID NO: 3071696 - DNA, 25 bp, Homo sapien
gccctcccgccacaccaaatagcag

SEQ ID NO: 3071697 - DNA, 25 bp, Homo sapien
gcggggacgggagccagacttagat

SEQ ID NO: 3071698 - DNA, 25 bp, Homo sapien
cattctgcgtgtctcatgtagctca

SEQ ID NO: 3071699 - DNA, 25 bp, Homo sapien
taatctctgctagtctcctccgtgc

SEQ ID NO: 3071700 - DNA, 25 bp, Homo sapien
acatggtgatccacgcctcttggga

SEQ ID NO: 3071701 - DNA, 25 bp, Homo sapien
gacaaagcaagttcagtcagaggag

SEQ ID NO: 3071702 - DNA, 25 bp, Homo sapien
ttggctgctttgagggcatcatact

SEQ ID NO: 3071703 - DNA, 25 bp, Homo sapien
tggctgctttgagggcatcatactc

SEQ ID NO: 3071704 - DNA, 25 bp, Homo sapien
aggaagaaagaaatctctaactggt

SEQ ID NO: 3071705 - DNA, 25 bp, Homo sapien
ttagttgtaaacaccactgcactag

SEQ ID NO: 3071706 - DNA, 25 bp, Homo sapien
gaaatctctaactggttgtgatgaa

SEQ ID NO: 3071707 - DNA, 25 bp, Homo sapien
aaacaccactgcactaggaccagcc

SEQ ID NO: 3071708 - DNA, 25 bp, Homo sapien
acgttctacttccagccgccgctgc

SEQ ID NO: 3071709 - DNA, 25 bp, Homo sapien
gcacggccttcatgtgctgtaacac

SEQ ID NO: 3071710 - DNA, 25 bp, Homo sapien
gcctgcacggccttcatgtgctgta

SEQ ID NO: 3071711 - DNA, 25 bp, Homo sapien
cctgcacggccttcatgtgctgtaa

SEQ ID NO: 3071712 - DNA, 25 bp, Homo sapien
tccagggggttatccttcaggtcca

SEQ ID NO: 3071713 - DNA, 25 bp, Homo sapien
tgtttgcacactgcttacactgctt

SEQ ID NO: 3071714 - DNA, 25 bp, Homo sapien
aggacaggatccagggggttatcct

SEQ ID NO: 3071715 - DNA, 25 bp, Homo sapien
tgcttctcatccaagcagtcacctg

SEQ ID NO: 3071716 - DNA, 25 bp, Homo sapien
cagcttgttcttactcaggtctagc

SEQ ID NO: 3071717 - DNA, 25 bp, Homo sapien
caggcaaggtgaccagcttgttgtt

SEQ ID NO: 3071718 - DNA, 25 bp, Homo sapien
agctgacaggcaaggtgaccagctt

SEQ ID NO: 3071719 - DNA, 25 bp, Homo sapien
tgacaggcaaggtgaccagcttgtt

SEQ ID NO: 3071720 - DNA, 25 bp, Homo sapien
ttagcagccgttcttcctcaaatga

SEQ ID NO: 3071721 - DNA, 25 bp, Homo sapien
tcaagtcagaggtaccccatgtaaa

SEQ ID NO: 3071722 - DNA, 25 bp, Homo sapien
cacacttcggtgtaacagtctggaa

SEQ ID NO: 3071723 - DNA, 25 bp, Homo sapien
gggcttagcacaaagtaggcacaaa

SEQ ID NO: 3071724 - DNA, 25 bp, Homo sapien
ggtagagtagtcagtttattacaag

SEQ ID NO: 3071725 - DNA, 25 bp, Homo sapien
tagagtagtcagtttattacaagac

SEQ ID NO: 3071726 - DNA, 25 bp, Homo sapien
cggtagagtagtcagtttattacaa

SEQ ID NO: 3071727 - DNA, 25 bp, Homo sapien
gagtagtcagtttattacaagacag

SEQ ID NO: 3071728 - DNA, 25 bp, Homo sapien
tccacggtggaagaaagactgggcc

SEQ ID NO: 3071729 - DNA, 25 bp, Homo sapien
tgacacgtgtacatcccgggaagaa

SEQ ID NO: 3071730 - DNA, 25 bp, Homo sapien
tgaaagccccgcaaaggtgacagat

SEQ ID NO: 3071731 - DNA, 25 bp, Homo sapien
tggaactgcgccaaagtgacacgtg

SEQ ID NO: 3071732 - DNA, 25 bp, Homo sapien
tccttcaccgggacctcattcaggt

SEQ ID NO: 3071733 - DNA, 25 bp, Homo sapien
agcttgtcgcggaggttcccgccct

SEQ ID NO: 3071734 - DNA, 25 bp, Homo sapien
ccgcccttgctaccggccttggtca

SEQ ID NO: 3071735 - DNA, 25 bp, Homo sapien
tcaggtccagttcgttgccgtccag

SEQ ID NO: 3071736 - DNA, 25 bp, Homo sapien
gaaatgtcgcttgtcagttcagcgg

SEQ ID NO: 3071737 - DNA, 25 bp, Homo sapien
gcttgtcagttcagcggccccccac

SEQ ID NO: 3071738 - DNA, 25 bp, Homo sapien
tgtcgcttgtcagttcagcggcccc

SEQ ID NO: 3071739 - DNA, 25 bp, Homo sapien
aatgtcgcttgtcagttcagcggcc

SEQ ID NO: 3071740 - DNA, 25 bp, Homo sapien
aaacgacgacgcctgagccctccgt

SEQ ID NO: 3071741 - DNA, 25 bp, Homo sapien
tccgtcgccgccgatgcgagaccgc

SEQ ID NO: 3071742 - DNA, 25 bp, Homo sapien
gccgatgcgagaccgcctccgcccg

SEQ ID NO: 3071743 - DNA, 25 bp, Homo sapien
ccgctggccgcactccgagcctcgc

SEQ ID NO: 3071744 - DNA, 25 bp, Homo sapien
ttccgtgtccacgtcaccttccgcg

SEQ ID NO: 3071745 - DNA, 25 bp, Homo sapien
acgaccacttccgtgtccacgtcac

SEQ ID NO: 3071746 - DNA, 25 bp, Homo sapien
cacttccgtgtccacgtcaccttcc

SEQ ID NO: 3071747 - DNA, 25 bp, Homo sapien
gtgtccacgtcaccttccgcgacca

SEQ ID NO: 3071748 - DNA, 25 bp, Homo sapien
ccagagcggcccgagcgtgtgcggg

SEQ ID NO: 3071749 - DNA, 25 bp, Homo sapien
agagcggcccgagcgtgtgcgggca

SEQ ID NO: 3071750 - DNA, 25 bp, Homo sapien
ggccagagcggcccgagcgtgtgcg

SEQ ID NO: 3071751 - DNA, 25 bp, Homo sapien
gcccgagcgtgtgcgggcacgcccc

SEQ ID NO: 3071752 - DNA, 25 bp, Homo sapien
gatctattatgttgtcgtagaccca

SEQ ID NO: 3071753 - DNA, 25 bp, Homo sapien
tgttaacgtactgggtcatcagttc

SEQ ID NO: 3071754 - DNA, 25 bp, Homo sapien
ccagttgttaacgtactgggtcatc

SEQ ID NO: 3071755 - DNA, 25 bp, Homo sapien
aaggagccaaggcttggagattgca

SEQ ID NO: 3071756 - DNA, 25 bp, Homo sapien
cagagggataagctgggtagaaatt

SEQ ID NO: 3071757 - DNA, 25 bp, Homo sapien
gagggataagctgggtagaaattgg

SEQ ID NO: 3071758 - DNA, 25 bp, Homo sapien
tgcagagggataagctgggtagaaa

SEQ ID NO: 3071759 - DNA, 25 bp, Homo sapien
ggtagaaattgggggaggagagcat

SEQ ID NO: 3071760 - DNA, 25 bp, Homo sapien
cacccagcgctcagtgagtgttttt

SEQ ID NO: 3071761 - DNA, 25 bp, Homo sapien
actgcacccagcgctcagtgagtgt

SEQ ID NO: 3071762 - DNA, 25 bp, Homo sapien
tgcacccagcgctcagtgagtgttt

SEQ ID NO: 3071763 - DNA, 25 bp, Homo sapien
ctgcacccagcgctcagtgagtgtt

SEQ ID NO: 3071764 - DNA, 25 bp, Homo sapien
aggggctccccatggactggaggca

SEQ ID NO: 3071765 - DNA, 25 bp, Homo sapien
ggcagctgctgaaggggccatcccg

SEQ ID NO: 3071766 - DNA, 25 bp, Homo sapien
ccatggactggaggcactcagacgg

SEQ ID NO: 3071767 - DNA, 25 bp, Homo sapien
tggaggcactcagacggctccccgt

SEQ ID NO: 3071768 - DNA, 25 bp, Homo sapien
ctcttcagagaagcgctcagagtgt

SEQ ID NO: 3071769 - DNA, 25 bp, Homo sapien
ttcagagaagcgctcagagtgtagc

SEQ ID NO: 3071770 - DNA, 25 bp, Homo sapien
tcagagaagcgctcagagtgtagcc

SEQ ID NO: 3071771 - DNA, 25 bp, Homo sapien
tcactcttcagagaagcgctcagag

SEQ ID NO: 3071772 - DNA, 25 bp, Homo sapien
tgtccctggaggcatgagctcctct

SEQ ID NO: 3071773 - DNA, 25 bp, Homo sapien
ccagggactcccacattgaggaagt

SEQ ID NO: 3071774 - DNA, 25 bp, Homo sapien
cccatggggttgactgctgtccctg

SEQ ID NO: 3071775 - DNA, 25 bp, Homo sapien
gggactcccacattgaggaagttcc

SEQ ID NO: 3071776 - DNA, 25 bp, Homo sapien
tcctcgagtccctggcctggtgcat

SEQ ID NO: 3071777 - DNA, 25 bp, Homo sapien
gcagcacacctgcattgagacctcg

SEQ ID NO: 3071778 - DNA, 25 bp, Homo sapien
gtcctcgagtccctggcctggtgca

SEQ ID NO: 3071779 - DNA, 25 bp, Homo sapien
cctgcattgagacctcgggtcctcg

SEQ ID NO: 3071780 - DNA, 25 bp, Homo sapien
gatgtcctgctagaacgtcctggca

SEQ ID NO: 3071781 - DNA, 25 bp, Homo sapien
catcctgatgaccaacctgttgtgg

SEQ ID NO: 3071782 - DNA, 25 bp, Homo sapien
gaagatggacagcaaagcaccgatg

SEQ ID NO: 3071783 - DNA, 25 bp, Homo sapien
acgtgtctaggtgtaggcagctctg

SEQ ID NO: 3071784 - DNA, 25 bp, Homo sapien
tggaggtgagaaggtcagtagtctc

SEQ ID NO: 3071785 - DNA, 25 bp, Homo sapien
tcagtagtctctccggtggaaggca

SEQ ID NO: 3071786 - DNA, 25 bp, Homo sapien
gagaaggtatgggtggaggtgagaa

SEQ ID NO: 3071787 - DNA, 25 bp, Homo sapien
agaggccagtcaccaggactggctg

SEQ ID NO: 3071788 - DNA, 25 bp, Homo sapien
gtgtcacggatgtgctggcccttga

SEQ ID NO: 3071789 - DNA, 25 bp, Homo sapien
ggcggccagctttcttggacctctt

SEQ ID NO: 3071790 - DNA, 25 bp, Homo sapien
aatggcggccagctttcttggacct

SEQ ID NO: 3071791 - DNA, 25 bp, Homo sapien
ctgcggaaggcgtccgtgtcacgga

SEQ ID NO: 3071792 - DNA, 25 bp, Homo sapien
ggttcaagcggttgttctccaaatg

SEQ ID NO: 3071793 - DNA, 25 bp, Homo sapien
tctccaaatggacgtgtttcagcgt

SEQ ID NO: 3071794 - DNA, 25 bp, Homo sapien
tggcaggtacacttccaggggttat

SEQ ID NO: 3071795 - DNA, 25 bp, Homo sapien
cagcgtggttacacccaggaaggca

SEQ ID NO: 3071796 - DNA, 25 bp, Homo sapien
aaaggaatgagtgaggatgcagaca

SEQ ID NO: 3071797 - DNA, 25 bp, Homo sapien
gtgaggatgcagacaggagatgggt

SEQ ID NO: 3071798 - DNA, 25 bp, Homo sapien
gggagaaaggaatgagtgaggatgc

SEQ ID NO: 3071799 - DNA, 25 bp, Homo sapien
tggccagacactgggcaccccaggg

SEQ ID NO: 3071800 - DNA, 25 bp, Homo sapien
ggagatagccagagggacagggaac

SEQ ID NO: 3071801 - DNA, 25 bp, Homo sapien
cttggagatagccagagggacaggg

SEQ ID NO: 3071802 - DNA, 25 bp, Homo sapien
tggagatagccagagggacagggaa

SEQ ID NO: 3071803 - DNA, 25 bp, Homo sapien
ttggagatagccagagggacaggga

SEQ ID NO: 3071804 - DNA, 25 bp, Homo sapien
aaggaaccagggcagagcccacagc

SEQ ID NO: 3071805 - DNA, 25 bp, Homo sapien
agggaagaaggaaccagggcagagc

SEQ ID NO: 3071806 - DNA, 25 bp, Homo sapien
ctggggacgggggatggtgccagct

SEQ ID NO: 3071807 - DNA, 25 bp, Homo sapien
gggacgggggatggtgccagctgtg

SEQ ID NO: 3071808 - DNA, 25 bp, Homo sapien
taggtcagctcggtcaggtcgtcga

SEQ ID NO: 3071809 - DNA, 25 bp, Homo sapien
caggtgcaatgacacgaggttcggc

SEQ ID NO: 3071810 - DNA, 25 bp, Homo sapien
tagataagttgcttgaggccgcgga

SEQ ID NO: 3071811 - DNA, 25 bp, Homo sapien
gttttccgacaggtagagccagcgc

SEQ ID NO: 3071812 - DNA, 25 bp, Homo sapien
ctctttatacggtggccctgaccgc

SEQ ID NO: 3071813 - DNA, 25 bp, Homo sapien
gagccagctcctacgtggagcatcg

SEQ ID NO: 3071814 - DNA, 25 bp, Homo sapien
agtcctaggcgctcgggtctgccgc

SEQ ID NO: 3071815 - DNA, 25 bp, Homo sapien
ggtctgccgccctctttatacggtg

SEQ ID NO: 3071816 - DNA, 25 bp, Homo sapien
aaatctgtgaataaagcagcaggcc

SEQ ID NO: 3071817 - DNA, 25 bp, Homo sapien
gatggaacgacatctaaatctgtga

SEQ ID NO: 3071818 - DNA, 25 bp, Homo sapien
tctcctgtcagaatgcaacctggct

SEQ ID NO: 3071819 - DNA, 25 bp, Homo sapien
tgagccaggcacatcaaatgtcaag

SEQ ID NO: 3071820 - DNA, 25 bp, Homo sapien
catactctttaactattatctccca

SEQ ID NO: 3071821 - DNA, 25 bp, Homo sapien
ggcacatagattcccagttcacagg

SEQ ID NO: 3071822 - DNA, 25 bp, Homo sapien
gcaggttgtaccttgacccaagaaa

SEQ ID NO: 3071823 - DNA, 25 bp, Homo sapien
caggaatggaaacttgcctcctgcc

SEQ ID NO: 3071824 - DNA, 25 bp, Homo sapien
tgagtccagcgaggcaaacacaagt

SEQ ID NO: 3071825 - DNA, 25 bp, Homo sapien
caagttacataacgctgagtccagc

SEQ ID NO: 3071826 - DNA, 25 bp, Homo sapien
tggaccgttgtctgtgcatgcctga

SEQ ID NO: 3071827 - DNA, 25 bp, Homo sapien
agatcccgtgcatagccctggtggt

SEQ ID NO: 3071828 - DNA, 25 bp, Homo sapien
tggctactacctatcatattggaca

SEQ ID NO: 3071829 - DNA, 25 bp, Homo sapien
tgattcagcataataacaggtatgt

SEQ ID NO: 3071830 - DNA, 25 bp, Homo sapien
tggacagtgctggtttataatttac

SEQ ID NO: 3071831 - DNA, 25 bp, Homo sapien
caaatggtgaatcaagatgaaggtt

SEQ ID NO: 3071832 - DNA, 25 bp, Homo sapien
tgggaaagatcagagcaagccttgc

SEQ ID NO: 3071833 - DNA, 25 bp, Homo sapien
gtaggagccacacagactcttctga

SEQ ID NO: 3071834 - DNA, 25 bp, Homo sapien
caagccttgcctcttatcttcggga

SEQ ID NO: 3071835 - DNA, 25 bp, Homo sapien
ggactgatgtatgttggtggatcca

SEQ ID NO: 3071836 - DNA, 25 bp, Homo sapien
tccctgctgccgaattgtgtgaggt

SEQ ID NO: 3071837 - DNA, 25 bp, Homo sapien
cctgctctacatggatgcaagtaaa

SEQ ID NO: 3071838 - DNA, 25 bp, Homo sapien
gggacatatagtacatgtgggtatg

SEQ ID NO: 3071839 - DNA, 25 bp, Homo sapien
gggtatgtggttacagcttgaagca

SEQ ID NO: 3071840 - DNA, 25 bp, Homo sapien
tgtccccactctaaagcagacagcc

SEQ ID NO: 3071841 - DNA, 25 bp, Homo sapien
tcctaagaaggtcccagagtctctg

SEQ ID NO: 3071842 - DNA, 25 bp, Homo sapien
caaagcctctgaaaatccctccttg

SEQ ID NO: 3071843 - DNA, 25 bp, Homo sapien
caccatgcctagttcactgtcccca

SEQ ID NO: 3071844 - DNA, 25 bp, Homo sapien
gagtcagatagcattctatattctg

SEQ ID NO: 3071845 - DNA, 25 bp, Homo sapien
gattcattatcattcgttagctgcc

SEQ ID NO: 3071846 - DNA, 25 bp, Homo sapien
gggataagctcacctacctccattg

SEQ ID NO: 3071847 - DNA, 25 bp, Homo sapien
ctgcctgataggatggcgcgatagt

SEQ ID NO: 3071848 - DNA, 25 bp, Homo sapien
gctatacctccgacctggagcaggc

SEQ ID NO: 3071849 - DNA, 25 bp, Homo sapien
taatcgtgtggtcacagagacatga

SEQ ID NO: 3071850 - DNA, 25 bp, Homo sapien
gcctggcacactgcttggcccacgg

SEQ ID NO: 3071851 - DNA, 25 bp, Homo sapien
cctcagacgtcaggggaagaggaac

SEQ ID NO: 3071852 - DNA, 25 bp, Homo sapien
ccctcgccatgagccgtgaggaggc

SEQ ID NO: 3071853 - DNA, 25 bp, Homo sapien
tctctgtcggtttgtcgcaggcagg

SEQ ID NO: 3071854 - DNA, 25 bp, Homo sapien
gcacaagacccattatctctgtcgg

SEQ ID NO: 3071855 - DNA, 25 bp, Homo sapien
cctggaaagggtggcgagtgtacaa

SEQ ID NO: 3071856 - DNA, 25 bp, Homo sapien
ttcagaagcgaaagatcagtcttcc

SEQ ID NO: 3071857 - DNA, 25 bp, Homo sapien
gaagcgaaagatcagtcttcctgac

SEQ ID NO: 3071858 - DNA, 25 bp, Homo sapien
gaggattcagaagcgaaagatcagt

SEQ ID NO: 3071859 - DNA, 25 bp, Homo sapien
gaaagatcagtcttcctgaccttta

SEQ ID NO: 3071860 - DNA, 25 bp, Homo sapien
gcaaagtgggatgcaaaaggttcct

SEQ ID NO: 3071861 - DNA, 25 bp, Homo sapien
tagggttggcctaagcacatggtgc

SEQ ID NO: 3071862 - DNA, 25 bp, Homo sapien
tgctgaaaacacctcgggctcatgg

SEQ ID NO: 3071863 - DNA, 25 bp, Homo sapien
gattcgggttctggatttgctgcca

SEQ ID NO: 3071864 - DNA, 25 bp, Homo sapien
ccggtgctagtggaacgccgagcca

SEQ ID NO: 3071865 - DNA, 25 bp, Homo sapien
gctagaaactgaacgcccgcataat

SEQ ID NO: 3071866 - DNA, 25 bp, Homo sapien
ctctggaagctggacgcggaccacg

SEQ ID NO: 3071867 - DNA, 25 bp, Homo sapien
cgccgagccagtggcggctggtatc

SEQ ID NO: 3071868 - DNA, 25 bp, Homo sapien
tcactgatccctgcgaattacgaaa

SEQ ID NO: 3071869 - DNA, 25 bp, Homo sapien
gaccaggccactgcatatgtgtgtg

SEQ ID NO: 3071870 - DNA, 25 bp, Homo sapien
tgtgtgtgagaatcaagcctgctca

SEQ ID NO: 3071871 - DNA, 25 bp, Homo sapien
cctgcagggccctatagaacctgtg

SEQ ID NO: 3071872 - DNA, 25 bp, Homo sapien
tagccccagcctcgaaaggatggaa

SEQ ID NO: 3071873 - DNA, 25 bp, Homo sapien
gctactagagacaagaaggccttca

SEQ ID NO: 3071874 - DNA, 25 bp, Homo sapien
gataaatattcgaggcccagagagg

SEQ ID NO: 3071875 - DNA, 25 bp, Homo sapien
tcagagagctggacaagtggagccc

SEQ ID NO: 3071876 - DNA, 25 bp, Homo sapien
gtgtctacctctcgcagatgttggg

SEQ ID NO: 3071877 - DNA, 25 bp, Homo sapien
taggttccgccgtgtctacctctcg

SEQ ID NO: 3071878 - DNA, 25 bp, Homo sapien
ttcccggcgtctaatcctcgctgtt

SEQ ID NO: 3071879 - DNA, 25 bp, Homo sapien
gaagtgcttcccggcgtctaatcct

SEQ ID NO: 3071880 - DNA, 25 bp, Homo sapien
gtactctgcccgcgccggttagcga

SEQ ID NO: 3071881 - DNA, 25 bp, Homo sapien
gggaagcttcgggagcctgggagct

SEQ ID NO: 3071882 - DNA, 25 bp, Homo sapien
gctggacgccctccagatgtggtca

SEQ ID NO: 3071883 - DNA, 25 bp, Homo sapien
gggagggtcgtcatcctccagatgt

SEQ ID NO: 3071884 - DNA, 25 bp, Homo sapien
tcagcggagagcgagaaccattttg

SEQ ID NO: 3071885 - DNA, 25 bp, Homo sapien
tatttttgaggcgaaggcgtctgtc

SEQ ID NO: 3071886 - DNA, 25 bp, Homo sapien
tacgacattttgtgactgaagagac

SEQ ID NO: 3071887 - DNA, 25 bp, Homo sapien
gaatctagtatatgcgggatgtacg

SEQ ID NO: 3071888 - DNA, 25 bp, Homo sapien
gctgggcgtccagaggcaacctcct

SEQ ID NO: 3071889 - DNA, 25 bp, Homo sapien
taaaccgtgtcaacggagtgggctg

SEQ ID NO: 3071890 - DNA, 25 bp, Homo sapien
tgggcgtccagaggcaacctcctgg

SEQ ID NO: 3071891 - DNA, 25 bp, Homo sapien
tgggcggtgatgagcgagcgctcaa

SEQ ID NO: 3071892 - DNA, 25 bp, Homo sapien
tcttttggacagaactcataccgct

SEQ ID NO: 3071893 - DNA, 25 bp, Homo sapien
tttagggtgtgcaataatgtcaaac

SEQ ID NO: 3071894 - DNA, 25 bp, Homo sapien
taccgctccttgaagccaaagcctg

SEQ ID NO: 3071895 - DNA, 25 bp, Homo sapien
tatccttttagggtgtgcaataatg

SEQ ID NO: 3071896 - DNA, 25 bp, Homo sapien
tgggtggggagagggagtgcttgta

SEQ ID NO: 3071897 - DNA, 25 bp, Homo sapien
tggggagagggagtgcttgtaggag

SEQ ID NO: 3071898 - DNA, 25 bp, Homo sapien
cttgggtggggagagggagtgcttg

SEQ ID NO: 3071899 - DNA, 25 bp, Homo sapien
ggtggggagagggagtgcttgtagg

SEQ ID NO: 3071900 - DNA, 25 bp, Homo sapien
ctcctatctccaccctagtccccac

SEQ ID NO: 3071901 - DNA, 25 bp, Homo sapien
aacagctttcactcctatctccacc

SEQ ID NO: 3071902 - DNA, 25 bp, Homo sapien
tttccaaacagctttcactcctatc

SEQ ID NO: 3071903 - DNA, 25 bp, Homo sapien
ccaaacagctttcactcctatctcc

SEQ ID NO: 3071904 - DNA, 25 bp, Homo sapien
atgagggcatcagacaccaggtggc

SEQ ID NO: 3071905 - DNA, 25 bp, Homo sapien
ggctggcaacagcagtgcaatgagg

SEQ ID NO: 3071906 - DNA, 25 bp, Homo sapien
ggtggcggcacagggcaccctcacc

SEQ ID NO: 3071907 - DNA, 25 bp, Homo sapien
cagcctggtgccccatggcctattt

SEQ ID NO: 3071908 - DNA, 25 bp, Homo sapien
ggggaggcaccgcacatgctccatc

SEQ ID NO: 3071909 - DNA, 25 bp, Homo sapien
acaaggccgttactgcttctccgga

SEQ ID NO: 3071910 - DNA, 25 bp, Homo sapien
gaggcaccgcacatgctccatccat

SEQ ID NO: 3071911 - DNA, 25 bp, Homo sapien
tgcagcccaacccacaaggccgtta

SEQ ID NO: 3071912 - DNA, 25 bp, Homo sapien
aacaccttctcttgagaacaagggc

SEQ ID NO: 3071913 - DNA, 25 bp, Homo sapien
caccttctcttgagaacaagggcca

SEQ ID NO: 3071914 - DNA, 25 bp, Homo sapien
ggaaacaccttctcttgagaacaag

SEQ ID NO: 3071915 - DNA, 25 bp, Homo sapien
accttctcttgagaacaagggccag

SEQ ID NO: 3071916 - DNA, 25 bp, Homo sapien
gggaagtggttcagggcagcccgga

SEQ ID NO: 3071917 - DNA, 25 bp, Homo sapien
ttgtgggaagtggttcagggcagcc

SEQ ID NO: 3071918 - DNA, 25 bp, Homo sapien
tgtgggaagtggttcagggcagccc

SEQ ID NO: 3071919 - DNA, 25 bp, Homo sapien
tgggaagtggttcagggcagcccgg

SEQ ID NO: 3071920 - DNA, 25 bp, Homo sapien
gtagacactcctccgcttagcagac

SEQ ID NO: 3071921 - DNA, 25 bp, Homo sapien
aagacagtgtcctgcacatccatgg

SEQ ID NO: 3071922 - DNA, 25 bp, Homo sapien
agacagtgtcctgcacatccatggg

SEQ ID NO: 3071923 - DNA, 25 bp, Homo sapien
ctgagtgggaggtagacactcctcc

SEQ ID NO: 3071924 - DNA, 25 bp, Homo sapien
gagagccttgagtagggatcgtcat

SEQ ID NO: 3071925 - DNA, 25 bp, Homo sapien
gctcttcagagcgggaatgagagga

SEQ ID NO: 3071926 - DNA, 25 bp, Homo sapien
gaggagagccttgagtagggatcgt

SEQ ID NO: 3071927 - DNA, 25 bp, Homo sapien
cttcagagcgggaatgagaggagag

SEQ ID NO: 3071928 - DNA, 25 bp, Homo sapien
ggacaatcactatatacaggcactg

SEQ ID NO: 3071929 - DNA, 25 bp, Homo sapien
tacatacagccaacgtgccttgagc

SEQ ID NO: 3071930 - DNA, 25 bp, Homo sapien
tgttccagacactaagctatagcag

SEQ ID NO: 3071931 - DNA, 25 bp, Homo sapien
gcttgttgacgtctctgggctcaca

SEQ ID NO: 3071932 - DNA, 25 bp, Homo sapien
ggtcaacccgtgtctctgattctgc

SEQ ID NO: 3071933 - DNA, 25 bp, Homo sapien
gctcagtgcctggacaaatgatgcc

SEQ ID NO: 3071934 - DNA, 25 bp, Homo sapien
gcagccattggcactgtgagtcggt

SEQ ID NO: 3071935 - DNA, 25 bp, Homo sapien
gaggctgggcgtctatgctgcttta

SEQ ID NO: 3071936 - DNA, 25 bp, Homo sapien
gccttgtaccaggtgcactcggtga

SEQ ID NO: 3071937 - DNA, 25 bp, Homo sapien
gattccagtgtcagcctcgctgcag

SEQ ID NO: 3071938 - DNA, 25 bp, Homo sapien
ccagtaggctgagaaccagaatgca

SEQ ID NO: 3071939 - DNA, 25 bp, Homo sapien
gagagcattcagtccttacccaaga

SEQ ID NO: 3071940 - DNA, 25 bp, Homo sapien
gcttgcctctgtcgctaagcccaga

SEQ ID NO: 3071941 - DNA, 25 bp, Homo sapien
tgcgatacgcagtagtcagttgacc

SEQ ID NO: 3071942 - DNA, 25 bp, Homo sapien
gaccagcataggacagagatacatc

SEQ ID NO: 3071943 - DNA, 25 bp, Homo sapien
tgctatgcaaacactgtacaagggt

SEQ ID NO: 3071944 - DNA, 25 bp, Homo sapien
tggctagaaataggctccgctctct

SEQ ID NO: 3071945 - DNA, 25 bp, Homo sapien
tatatactatgcagtggcaccagag

SEQ ID NO: 3071946 - DNA, 25 bp, Homo sapien
ggtttactgtgcaccaagaggcttg

SEQ ID NO: 3071947 - DNA, 25 bp, Homo sapien
tcttttagaaggcatcagagagccc

SEQ ID NO: 3071948 - DNA, 25 bp, Homo sapien
ctcctgttatagcaaggcctttcag

SEQ ID NO: 3071949 - DNA, 25 bp, Homo sapien
tggatgcagcatttctgaacagaaa

SEQ ID NO: 3071950 - DNA, 25 bp, Homo sapien
aaggcctttcagtcagtgtggatgc

SEQ ID NO: 3071951 - DNA, 25 bp, Homo sapien
ttatagcaaggcctttcagtcagtg

SEQ ID NO: 3071952 - DNA, 25 bp, Homo sapien
ttccagctcctggaaatcttggagt

SEQ ID NO: 3071953 - DNA, 25 bp, Homo sapien
cctggaaatcttggagtcgagcaac

SEQ ID NO: 3071954 - DNA, 25 bp, Homo sapien
agttccagctcctggaaatcttgga

SEQ ID NO: 3071955 - DNA, 25 bp, Homo sapien
gctcctggaaatcttggagtcgagc

SEQ ID NO: 3071956 - DNA, 25 bp, Homo sapien
cagcagctgcgacagcatgagcaca

SEQ ID NO: 3071957 - DNA, 25 bp, Homo sapien
ctcagcagctgcgacagcatgagca

SEQ ID NO: 3071958 - DNA, 25 bp, Homo sapien
cagctcagcagctgcgacagcatga

SEQ ID NO: 3071959 - DNA, 25 bp, Homo sapien
agcagctgcgacagcatgagcacac

SEQ ID NO: 3071960 - DNA, 25 bp, Homo sapien
gtaggtgagctcctgtcggtccagt

SEQ ID NO: 3071961 - DNA, 25 bp, Homo sapien
atgaaatcattttctcgaagagatg

SEQ ID NO: 3071962 - DNA, 25 bp, Homo sapien
tctgagcaactcttggtaggtgagc

SEQ ID NO: 3071963 - DNA, 25 bp, Homo sapien
tggattaacacccagctcacagcaa

SEQ ID NO: 3071964 - DNA, 25 bp, Homo sapien
atacgtcccattttgaggctccaga

SEQ ID NO: 3071965 - DNA, 25 bp, Homo sapien
caggacccggttttgtgctttctgg

SEQ ID NO: 3071966 - DNA, 25 bp, Homo sapien
tggcgctggtcctgcatacgtccca

SEQ ID NO: 3071967 - DNA, 25 bp, Homo sapien
tggcttggacgggacagaagaaaac

SEQ ID NO: 3071968 - DNA, 25 bp, Homo sapien
accattctgaactagtgccaaagag

SEQ ID NO: 3071969 - DNA, 25 bp, Homo sapien
caccattctgaactagtgccaaaga

SEQ ID NO: 3071970 - DNA, 25 bp, Homo sapien
tgagtatggcagagggggccgacac

SEQ ID NO: 3071971 - DNA, 25 bp, Homo sapien
atcaccattctgaactagtgccaaa

SEQ ID NO: 3071972 - DNA, 25 bp, Homo sapien
ggaagcaatggaggtgagccatctg

SEQ ID NO: 3071973 - DNA, 25 bp, Homo sapien
caaagggcagttctgactccttctt

SEQ ID NO: 3071974 - DNA, 25 bp, Homo sapien
acaaagggcagttctgactccttct

SEQ ID NO: 3071975 - DNA, 25 bp, Homo sapien
aggctgggttggccaaatagttggg

SEQ ID NO: 3071976 - DNA, 25 bp, Homo sapien
aaagggcagttctgactccttcttc

SEQ ID NO: 3071977 - DNA, 25 bp, Homo sapien
tcatcatcatcatcttcttcttcca

SEQ ID NO: 3071978 - DNA, 25 bp, Homo sapien
ggggaggttgtcatcatcatcatca

SEQ ID NO: 3071979 - DNA, 25 bp, Homo sapien
atcatcatcatcatcttcttcttcc

SEQ ID NO: 3071980 - DNA, 25 bp, Homo sapien
ctgggggaggttgtcatcatcatca

SEQ ID NO: 3071981 - DNA, 25 bp, Homo sapien
ctctccttgatgttaactggactgg

SEQ ID NO: 3071982 - DNA, 25 bp, Homo sapien
ctcccataatcttcctgatttctct

SEQ ID NO: 3071983 - DNA, 25 bp, Homo sapien
tccttgatgttaactggactggcat

SEQ ID NO: 3071984 - DNA, 25 bp, Homo sapien
cttgatgttaactggactggcattt

SEQ ID NO: 3071985 - DNA, 25 bp, Homo sapien
ccatggtttcgtttacatgcccagt

SEQ ID NO: 3071986 - DNA, 25 bp, Homo sapien
taagagaccacctgaccatggtttc

SEQ ID NO: 3071987 - DNA, 25 bp, Homo sapien
tctttgtcagctcctgattttaaca

SEQ ID NO: 3071988 - DNA, 25 bp, Homo sapien
tgtcagctcctgattttaacaggta

SEQ ID NO: 3071989 - DNA, 25 bp, Homo sapien
taaataatgtataaacaagcctgtt

SEQ ID NO: 3071990 - DNA, 25 bp, Homo sapien
tggatttcagattctaaacattagt

SEQ ID NO: 3071991 - DNA, 25 bp, Homo sapien
tgaaaaagaggagaagtgattttgg

SEQ ID NO: 3071992 - DNA, 25 bp, Homo sapien
gattctaaacattagtaaataatgt

SEQ ID NO: 3071993 - DNA, 25 bp, Homo sapien
gtctggaaaccatggttctggtgct

SEQ ID NO: 3071994 - DNA, 25 bp, Homo sapien
gtagacttttgaggcagtctggaaa

SEQ ID NO: 3071995 - DNA, 25 bp, Homo sapien
cagtctggaaaccatggttctggtg

SEQ ID NO: 3071996 - DNA, 25 bp, Homo sapien
ccaggtccaggtaggtagacttttg

SEQ ID NO: 3071997 - DNA, 25 bp, Homo sapien
ggagttcacatccaccccgctctcc

SEQ ID NO: 3071998 - DNA, 25 bp, Homo sapien
tgcacctcccgaatgtcccctaagg

SEQ ID NO: 3071999 - DNA, 25 bp, Homo sapien
gggagttcacatccaccccgctctc

SEQ ID NO: 3072000 - DNA, 25 bp, Homo sapien
gaatgtcccctaaggccgcggcctc

SEQ ID NO: 3072001 - DNA, 25 bp, Homo sapien
tcccacagccccaggcccccgccca

SEQ ID NO: 3072002 - DNA, 25 bp, Homo sapien
cacagccccaggcccccgcccaggc

SEQ ID NO: 3072003 - DNA, 25 bp, Homo sapien
caggcccccgcccaggcccgcctgc

SEQ ID NO: 3072004 - DNA, 25 bp, Homo sapien
ccaggcccccgcccaggcccgcctg

SEQ ID NO: 3072005 - DNA, 25 bp, Homo sapien
cggccatggggagggagcgcggaac

SEQ ID NO: 3072006 - DNA, 25 bp, Homo sapien
catggggagggagcgcggaactcgc

SEQ ID NO: 3072007 - DNA, 25 bp, Homo sapien
gccgcggcccgctcccggccatggg

SEQ ID NO: 3072008 - DNA, 25 bp, Homo sapien
gggagcgcggaactcgcccgccctg

SEQ ID NO: 3072009 - DNA, 25 bp, Homo sapien
ccctgctgctcccggcccgcaggcc

SEQ ID NO: 3072010 - DNA, 25 bp, Homo sapien
gcgggccgcccctgctgctcccggc

SEQ ID NO: 3072011 - DNA, 25 bp, Homo sapien
cctcccgcgggccgcccctgctgct

SEQ ID NO: 3072012 - DNA, 25 bp, Homo sapien
tcccgcgggccgcccctgctgctcc

SEQ ID NO: 3072013 - DNA, 25 bp, Homo sapien
ctgttaatcaggagactcagggcgg

SEQ ID NO: 3072014 - DNA, 25 bp, Homo sapien
tctccattttgaagcggtgtccagg

SEQ ID NO: 3072015 - DNA, 25 bp, Homo sapien
tgaatccccgtattttagaagccgc

SEQ ID NO: 3072016 - DNA, 25 bp, Homo sapien
catttggtgtaggactgaatccccg

SEQ ID NO: 3072017 - DNA, 25 bp, Homo sapien
gccgcgcagttgttggatgagttaa

SEQ ID NO: 3072018 - DNA, 25 bp, Homo sapien
tgggaccacgagagcgtaagtcccg

SEQ ID NO: 3072019 - DNA, 25 bp, Homo sapien
aggaagcaccatgatttcggccgcg

SEQ ID NO: 3072020 - DNA, 25 bp, Homo sapien
tgtcttgtcggctcctgtgtgtagg

SEQ ID NO: 3072021 - DNA, 25 bp, Homo sapien
attacagccgtgtaccaccatgtct

SEQ ID NO: 3072022 - DNA, 25 bp, Homo sapien
gggctcgaactcctggccttaagtg

SEQ ID NO: 3072023 - DNA, 25 bp, Homo sapien
tgtctggctaagttttgtattttta

SEQ ID NO: 3072024 - DNA, 25 bp, Homo sapien
gtagagatggggttttgtcatgttg

SEQ ID NO: 3072025 - DNA, 25 bp, Homo sapien
gagttagggtcagtaactctcttag

SEQ ID NO: 3072026 - DNA, 25 bp, Homo sapien
ccaactgttagtgttattgtaaggc

SEQ ID NO: 3072027 - DNA, 25 bp, Homo sapien
cagtggtaggcttttgatagttagg

SEQ ID NO: 3072028 - DNA, 25 bp, Homo sapien
gcttccagtcagtggtaggcttttg

SEQ ID NO: 3072029 - DNA, 25 bp, Homo sapien
cagaagcgagtgtttgatcagcaga

SEQ ID NO: 3072030 - DNA, 25 bp, Homo sapien
caggctcaggatttggaggcaccag

SEQ ID NO: 3072031 - DNA, 25 bp, Homo sapien
gagcaacctgtaccctaaaagcctg

SEQ ID NO: 3072032 - DNA, 25 bp, Homo sapien
caaacgcaacagagcagagcaacct

SEQ ID NO: 3072033 - DNA, 25 bp, Homo sapien
tattgggcagtacgacagaaggatt

SEQ ID NO: 3072034 - DNA, 25 bp, Homo sapien
tgagcaggtcctacaagtgatcagg

SEQ ID NO: 3072035 - DNA, 25 bp, Homo sapien
tcagaatggcctaagactggtcagt

SEQ ID NO: 3072036 - DNA, 25 bp, Homo sapien
catacctaggcatacccctgtgaaa

SEQ ID NO: 3072037 - DNA, 25 bp, Homo sapien
ctattttgtagcagactcgtgcccc

SEQ ID NO: 3072038 - DNA, 25 bp, Homo sapien
gcctctttggaaattatcgcccaca

SEQ ID NO: 3072039 - DNA, 25 bp, Homo sapien
tgataagacctcagatcagacagag

SEQ ID NO: 3072040 - DNA, 25 bp, Homo sapien
cagatgaagatggaactaagccgag

SEQ ID NO: 3072041 - DNA, 25 bp, Homo sapien
gtttgttctgtaactcgagagccag

SEQ ID NO: 3072042 - DNA, 25 bp, Homo sapien
tttcggaggcacatgttggactact

SEQ ID NO: 3072043 - DNA, 25 bp, Homo sapien
gactaccatacctcacacagcgttg

SEQ ID NO: 3072044 - DNA, 25 bp, Homo sapien
cagtcaaactaagcaggtactcatg

SEQ ID NO: 3072045 - DNA, 25 bp, Homo sapien
taaacttcattctgtgggctagtgg

SEQ ID NO: 3072046 - DNA, 25 bp, Homo sapien
ggagaatttgcagtcagccataggt

SEQ ID NO: 3072047 - DNA, 25 bp, Homo sapien
tgtgaatagcaaggacagacacctt

SEQ ID NO: 3072048 - DNA, 25 bp, Homo sapien
acttaggcaagcatacacaggcaca

SEQ ID NO: 3072049 - DNA, 25 bp, Homo sapien
tcaaaatatatgacggtatacccgt

SEQ ID NO: 3072050 - DNA, 25 bp, Homo sapien
caggagcttgctgctgttaacagtt

SEQ ID NO: 3072051 - DNA, 25 bp, Homo sapien
tatacccgtatgttctgagtcttgc

SEQ ID NO: 3072052 - DNA, 25 bp, Homo sapien
agtgttcagtgatctatgtctccta

SEQ ID NO: 3072053 - DNA, 25 bp, Homo sapien
cctcagtatgagcatagggcttggc

SEQ ID NO: 3072054 - DNA, 25 bp, Homo sapien
cctatgtgctgtggagtgactgata

SEQ ID NO: 3072055 - DNA, 25 bp, Homo sapien
agttcatccaacacatccccgagtg

SEQ ID NO: 3072056 - DNA, 25 bp, Homo sapien
tccaggtgagacttggatcccctca

SEQ ID NO: 3072057 - DNA, 25 bp, Homo sapien
cattttggtacgtgattaatttcac

SEQ ID NO: 3072058 - DNA, 25 bp, Homo sapien
ggatggcattttggtacgtgattaa

SEQ ID NO: 3072059 - DNA, 25 bp, Homo sapien
ttagaatcagtggaattggccgggc

SEQ ID NO: 3072060 - DNA, 25 bp, Homo sapien
ttaggatggcattttggtacgtgat

SEQ ID NO: 3072061 - DNA, 25 bp, Homo sapien
gatggtcccacatgacgtttctgaa

SEQ ID NO: 3072062 - DNA, 25 bp, Homo sapien
tgtccgctgcccttcatcaaagttg

SEQ ID NO: 3072063 - DNA, 25 bp, Homo sapien
taagggaagtcttgacgtgctgcct

SEQ ID NO: 3072064 - DNA, 25 bp, Homo sapien
tgtcaccttgttacaggaggccgca

SEQ ID NO: 3072065 - DNA, 25 bp, Homo sapien
gatgacagctcactttagatgttag

SEQ ID NO: 3072066 - DNA, 25 bp, Homo sapien
agctgacccggaaggatcctaggga

SEQ ID NO: 3072067 - DNA, 25 bp, Homo sapien
ggtattaatcgttattggctgggca

SEQ ID NO: 3072068 - DNA, 25 bp, Homo sapien
tagatgttagtgagggcaccagctg

SEQ ID NO: 3072069 - DNA, 25 bp, Homo sapien
catagcagggcctttctgtcagaga

SEQ ID NO: 3072070 - DNA, 25 bp, Homo sapien
catgcgcggccattcctgggagtat

SEQ ID NO: 3072071 - DNA, 25 bp, Homo sapien
gaaagtcccgcagtcttcgaatgtc

SEQ ID NO: 3072072 - DNA, 25 bp, Homo sapien
tttgcagctttgctatcatagcagg

SEQ ID NO: 3072073 - DNA, 25 bp, Homo sapien
cacagcaactcacgtttagtaggtt

SEQ ID NO: 3072074 - DNA, 25 bp, Homo sapien
gttttggtaactcagttcttgtctc

SEQ ID NO: 3072075 - DNA, 25 bp, Homo sapien
tctgatcttctccactcgttctggt

SEQ ID NO: 3072076 - DNA, 25 bp, Homo sapien
ggtttaatccccagttcacagcaac

SEQ ID NO: 3072077 - DNA, 25 bp, Homo sapien
tcaaatacagtttgtaaaggaaaca

SEQ ID NO: 3072078 - DNA, 25 bp, Homo sapien
aatcacccataaattcaaatacagt

SEQ ID NO: 3072079 - DNA, 25 bp, Homo sapien
cacccataaattcaaatacagtttg

SEQ ID NO: 3072080 - DNA, 25 bp, Homo sapien
ctaaatcacccataaattcaaatac

SEQ ID NO: 3072081 - DNA, 25 bp, Homo sapien
tatccactgaagacagaaagcttgc

SEQ ID NO: 3072082 - DNA, 25 bp, Homo sapien
catggagctttcatgggcacataca

SEQ ID NO: 3072083 - DNA, 25 bp, Homo sapien
gcagctttaagccagccaaggattt

SEQ ID NO: 3072084 - DNA, 25 bp, Homo sapien
tattgtgcagaggagcaaatcgctc

SEQ ID NO: 3072085 - DNA, 25 bp, Homo sapien
tcttgttatcacttgggtccgttgt

SEQ ID NO: 3072086 - DNA, 25 bp, Homo sapien
acttgggtccgttgttggcaagtgt

SEQ ID NO: 3072087 - DNA, 25 bp, Homo sapien
acaggtgtcactgggtttcttgtta

SEQ ID NO: 3072088 - DNA, 25 bp, Homo sapien
ctagacaggtgtcactgggtttctt

SEQ ID NO: 3072089 - DNA, 25 bp, Homo sapien
gaaggagcagtacctgaccagttgg

SEQ ID NO: 3072090 - DNA, 25 bp, Homo sapien
tcctggagtttgcaggccagcagaa

SEQ ID NO: 3072091 - DNA, 25 bp, Homo sapien
tagagtgctttgcatatgccaggcc

SEQ ID NO: 3072092 - DNA, 25 bp, Homo sapien
taggcttcactagatccagagggca

SEQ ID NO: 3072093 - DNA, 25 bp, Homo sapien
tgctggcttctccccgatgtcctgt

SEQ ID NO: 3072094 - DNA, 25 bp, Homo sapien
tgtcctgttccggttcagccatgag

SEQ ID NO: 3072095 - DNA, 25 bp, Homo sapien
tccccgatgtcctgttccggttcag

SEQ ID NO: 3072096 - DNA, 25 bp, Homo sapien
tgttccggttcagccatgagtcacc

SEQ ID NO: 3072097 - DNA, 25 bp, Homo sapien
gatgtgcagcccctctcgcatttat

SEQ ID NO: 3072098 - DNA, 25 bp, Homo sapien
agcccctctcgcatttatgcacaag

SEQ ID NO: 3072099 - DNA, 25 bp, Homo sapien
tatgcacaagctcccaaccaaataa

SEQ ID NO: 3072100 - DNA, 25 bp, Homo sapien
ctagtccgtcagatgtgcagcccct

SEQ ID NO: 3072101 - DNA, 25 bp, Homo sapien
taaggctccagactctcttctcagg

SEQ ID NO: 3072102 - DNA, 25 bp, Homo sapien
cagtgtgttcttgccagcccagtga

SEQ ID NO: 3072103 - DNA, 25 bp, Homo sapien
cccagtgagatagagcagggtcatt

SEQ ID NO: 3072104 - DNA, 25 bp, Homo sapien
gtccccactggaagacggtgcaggc

SEQ ID NO: 3072105 - DNA, 25 bp, Homo sapien
tgcccttcggaggggaggccagaga

SEQ ID NO: 3072106 - DNA, 25 bp, Homo sapien
gtgcccttcggaggggaggccagag

SEQ ID NO: 3072107 - DNA, 25 bp, Homo sapien
gaatggtgcccttcggaggggaggc

SEQ ID NO: 3072108 - DNA, 25 bp, Homo sapien
tttctcggtttgaatggactcctcc

SEQ ID NO: 3072109 - DNA, 25 bp, Homo sapien
aagaagcagaaagacccctccatac

SEQ ID NO: 3072110 - DNA, 25 bp, Homo sapien
ttcactgtctttactcccagcccct

SEQ ID NO: 3072111 - DNA, 25 bp, Homo sapien
tcagcagctgtgcatgacaagaaag

SEQ ID NO: 3072112 - DNA, 25 bp, Homo sapien
tcactgtctttactcccagcccctt

SEQ ID NO: 3072113 - DNA, 25 bp, Homo sapien
gaccttggtgatgatcctggatccc

SEQ ID NO: 3072114 - DNA, 25 bp, Homo sapien
accttggtgatgatcctggatcccc

SEQ ID NO: 3072115 - DNA, 25 bp, Homo sapien
cgacggtcttcttggcggccaggct

SEQ ID NO: 3072116 - DNA, 25 bp, Homo sapien
tgcgtatgcgtcacgaggaagcctc

SEQ ID NO: 3072117 - DNA, 25 bp, Homo sapien
cagcgcagtggcgaattcgatcttc

SEQ ID NO: 3072118 - DNA, 25 bp, Homo sapien
gctgtcccaggcaggcgacggtctt

SEQ ID NO: 3072119 - DNA, 25 bp, Homo sapien
ggctctgatcttggtcgttctcgtt

SEQ ID NO: 3072120 - DNA, 25 bp, Homo sapien
tctgtaaagatggtctctggcccta

SEQ ID NO: 3072121 - DNA, 25 bp, Homo sapien
ggccctatcgggcatcatttgctga

SEQ ID NO: 3072122 - DNA, 25 bp, Homo sapien
tgatcttggtcgttctcgttttctc

SEQ ID NO: 3072123 - DNA, 25 bp, Homo sapien
tgcccgtgtccatcccatcagcatt

SEQ ID NO: 3072124 - DNA, 25 bp, Homo sapien
tggattcattactgcccgtgtccat

SEQ ID NO: 3072125 - DNA, 25 bp, Homo sapien
ggattcattactgcccgtgtccatc

SEQ ID NO: 3072126 - DNA, 25 bp, Homo sapien
ttactgcccgtgtccatcccatcag

SEQ ID NO: 3072127 - DNA, 25 bp, Homo sapien
ggaagcaggaggccgtcagagtctc

SEQ ID NO: 3072128 - DNA, 25 bp, Homo sapien
gcaggaggccgtcagagtctcacta

SEQ ID NO: 3072129 - DNA, 25 bp, Homo sapien
aagcaggaggccgtcagagtctcac

SEQ ID NO: 3072130 - DNA, 25 bp, Homo sapien
agcaggaggccgtcagagtctcact

SEQ ID NO: 3072131 - DNA, 25 bp, Homo sapien
tgtcctgtgcttgccctatctgcac

SEQ ID NO: 3072132 - DNA, 25 bp, Homo sapien
tgttgtcctgtgcttgccctatctg

SEQ ID NO: 3072133 - DNA, 25 bp, Homo sapien
ccactggatccggaagtgtgttgtg

SEQ ID NO: 3072134 - DNA, 25 bp, Homo sapien
tcatcgctgtcatcagagcctgctt

SEQ ID NO: 3072135 - DNA, 25 bp, Homo sapien
tttcccatgagtactttcaggccct

SEQ ID NO: 3072136 - DNA, 25 bp, Homo sapien
tccttcattgttatgtctgcagcca

SEQ ID NO: 3072137 - DNA, 25 bp, Homo sapien
tgagtaattgcttagttctgcctgc

SEQ ID NO: 3072138 - DNA, 25 bp, Homo sapien
ttcaggccctccttcattaagtagc

SEQ ID NO: 3072139 - DNA, 25 bp, Homo sapien
ttccatggtgtgttccattggactg

SEQ ID NO: 3072140 - DNA, 25 bp, Homo sapien
gtttccatggtgtgttccattggac

SEQ ID NO: 3072141 - DNA, 25 bp, Homo sapien
tttccatggtgtgttccattggact

SEQ ID NO: 3072142 - DNA, 25 bp, Homo sapien
cggtttccatggtgtgttccattgg

SEQ ID NO: 3072143 - DNA, 25 bp, Homo sapien
tgctccaccaacattcacccagtac

SEQ ID NO: 3072144 - DNA, 25 bp, Homo sapien
caccaacattcacccagtacttatt

SEQ ID NO: 3072145 - DNA, 25 bp, Homo sapien
cattcacccagtacttattacatag

SEQ ID NO: 3072146 - DNA, 25 bp, Homo sapien
acccagtacttattacatagcaggg

SEQ ID NO: 3072147 - DNA, 25 bp, Homo sapien
tcacaggccaccgttagagacccag

SEQ ID NO: 3072148 - DNA, 25 bp, Homo sapien
aggccccgattggaaggacaccagg

SEQ ID NO: 3072149 - DNA, 25 bp, Homo sapien
actggggtgtctctgaagacctcac

SEQ ID NO: 3072150 - DNA, 25 bp, Homo sapien
gtatactcaaacgagtcaaaaccaa

SEQ ID NO: 3072151 - DNA, 25 bp, Homo sapien
agtccggagaaagagatccaaaggg

SEQ ID NO: 3072152 - DNA, 25 bp, Homo sapien
tggcagaaaagtccggagaaagaga

SEQ ID NO: 3072153 - DNA, 25 bp, Homo sapien
ggcaagcttggcagaaaagtccgga

SEQ ID NO: 3072154 - DNA, 25 bp, Homo sapien
gaaaagtccggagaaagagatccaa

SEQ ID NO: 3072155 - DNA, 25 bp, Homo sapien
cctgcatcaggtagggttccgggat

SEQ ID NO: 3072156 - DNA, 25 bp, Homo sapien
cccactagggccacgtggttggaat

SEQ ID NO: 3072157 - DNA, 25 bp, Homo sapien
ttggccgctccgcatgtgggaaagg

SEQ ID NO: 3072158 - DNA, 25 bp, Homo sapien
gcagccccactagggccacgtggtt

SEQ ID NO: 3072159 - DNA, 25 bp, Homo sapien
agtgtatagacctggtgacactgtt

SEQ ID NO: 3072160 - DNA, 25 bp, Homo sapien
gtgtatagacctggtgacactgttc

SEQ ID NO: 3072161 - DNA, 25 bp, Homo sapien
ttgatggtcaatggctgggagggac

SEQ ID NO: 3072162 - DNA, 25 bp, Homo sapien
gttcaacgtggtttgttgatggtca

SEQ ID NO: 3072163 - DNA, 25 bp, Homo sapien
tgggagggacagtggtacttcctgt

SEQ ID NO: 3072164 - DNA, 25 bp, Homo sapien
gagcagcacggaatgggtgttcaac

SEQ ID NO: 3072165 - DNA, 25 bp, Homo sapien
aaggcttgaggtgagtgctgtaggg

SEQ ID NO: 3072166 - DNA, 25 bp, Homo sapien
ggtgagtgctgtagggctgacagcc

SEQ ID NO: 3072167 - DNA, 25 bp, Homo sapien
tgaggtgagtgctgtagggctgaca

SEQ ID NO: 3072168 - DNA, 25 bp, Homo sapien
cttgaggtgagtgctgtagggctga

SEQ ID NO: 3072169 - DNA, 25 bp, Homo sapien
gtacatcataggtcagaatgttgca

SEQ ID NO: 3072170 - DNA, 25 bp, Homo sapien
gtgaccagagatgaattataatgtg

SEQ ID NO: 3072171 - DNA, 25 bp, Homo sapien
atcagaagtacatcataggtcagaa

SEQ ID NO: 3072172 - DNA, 25 bp, Homo sapien
ccagagatgaattataatgtggaaa

SEQ ID NO: 3072173 - DNA, 25 bp, Homo sapien
agtaagtactcataatgccagacgg

SEQ ID NO: 3072174 - DNA, 25 bp, Homo sapien
gccagacggaatgtgtttttccttc

SEQ ID NO: 3072175 - DNA, 25 bp, Homo sapien
tactcataatgccagacggaatgtg

SEQ ID NO: 3072176 - DNA, 25 bp, Homo sapien
taatgccagacggaatgtgtttttc

SEQ ID NO: 3072177 - DNA, 25 bp, Homo sapien
ccaatacttcttcatagcctcgttc

SEQ ID NO: 3072178 - DNA, 25 bp, Homo sapien
taagtgttggcagaccagatctctg

SEQ ID NO: 3072179 - DNA, 25 bp, Homo sapien
gctgcttgcacccattattccaata

SEQ ID NO: 3072180 - DNA, 25 bp, Homo sapien
taagtggtaagtgttggcagaccag

SEQ ID NO: 3072181 - DNA, 25 bp, Homo sapien
taccgtttttttcaagtattgcaca

SEQ ID NO: 3072182 - DNA, 25 bp, Homo sapien
gcaagtattcgtacattttaattcc

SEQ ID NO: 3072183 - DNA, 25 bp, Homo sapien
tagttgatgtctttaagatggatat

SEQ ID NO: 3072184 - DNA, 25 bp, Homo sapien
caccactaaaggaatatcctgtaca

SEQ ID NO: 3072185 - DNA, 25 bp, Homo sapien
actttgtgcttggttggcaaatgaa

SEQ ID NO: 3072186 - DNA, 25 bp, Homo sapien
taaatactgtaagaggccatatctg

SEQ ID NO: 3072187 - DNA, 25 bp, Homo sapien
gcaataccatgtcgtagaaacaata

SEQ ID NO: 3072188 - DNA, 25 bp, Homo sapien
ccttgggcccgtgcattttaacttg

SEQ ID NO: 3072189 - DNA, 25 bp, Homo sapien
tccataggctgcaaacacatcaaag

SEQ ID NO: 3072190 - DNA, 25 bp, Homo sapien
caaaagatttctcattgaggcctcc

SEQ ID NO: 3072191 - DNA, 25 bp, Homo sapien
cattactgtactggagaggactgag

SEQ ID NO: 3072192 - DNA, 25 bp, Homo sapien
gaattgctggttagaatactgcatg

SEQ ID NO: 3072193 - DNA, 25 bp, Homo sapien
gaaagagcagaggttttctgctgtt

SEQ ID NO: 3072194 - DNA, 25 bp, Homo sapien
cttggcattaggagaaagagcagag

SEQ ID NO: 3072195 - DNA, 25 bp, Homo sapien
attaggagaaagagcagaggttttc

SEQ ID NO: 3072196 - DNA, 25 bp, Homo sapien
gagaaagagcagaggttttctgctg

SEQ ID NO: 3072197 - DNA, 25 bp, Homo sapien
gctttctgcttcaagaggtcattca

SEQ ID NO: 3072198 - DNA, 25 bp, Homo sapien
ggaagagatggctttctgcttcaag

SEQ ID NO: 3072199 - DNA, 25 bp, Homo sapien
ctttctgcttcaagaggtcattcac

SEQ ID NO: 3072200 - DNA, 25 bp, Homo sapien
agagatggctttctgcttcaagagg

SEQ ID NO: 3072201 - DNA, 25 bp, Homo sapien
attcaagccgaggttgatgggagaa

SEQ ID NO: 3072202 - DNA, 25 bp, Homo sapien
caagccgaggttgatgggagaagta

SEQ ID NO: 3072203 - DNA, 25 bp, Homo sapien
aagccgaggttgatgggagaagtac

SEQ ID NO: 3072204 - DNA, 25 bp, Homo sapien
tcaagccgaggttgatgggagaagt

SEQ ID NO: 3072205 - DNA, 25 bp, Homo sapien
gttgctacggccactattcttcatt

SEQ ID NO: 3072206 - DNA, 25 bp, Homo sapien
gtgcaaccttgttgctacggccact

SEQ ID NO: 3072207 - DNA, 25 bp, Homo sapien
tcattttggtagagccgaacttggt

SEQ ID NO: 3072208 - DNA, 25 bp, Homo sapien
cattttggtagagccgaacttggtg

SEQ ID NO: 3072209 - DNA, 25 bp, Homo sapien
ctgagtggaccggggcatgaaggta

SEQ ID NO: 3072210 - DNA, 25 bp, Homo sapien
agtggaccggggcatgaaggtaggg

SEQ ID NO: 3072211 - DNA, 25 bp, Homo sapien
tggaccggggcatgaaggtagggct

SEQ ID NO: 3072212 - DNA, 25 bp, Homo sapien
gaccggggcatgaaggtagggctta

SEQ ID NO: 3072213 - DNA, 25 bp, Homo sapien
taagaaacctcaaatgggtcgatcc

SEQ ID NO: 3072214 - DNA, 25 bp, Homo sapien
gatgcttgttcaatcactgggtcca

SEQ ID NO: 3072215 - DNA, 25 bp, Homo sapien
tgggcataaaaacctgggcctctgg

SEQ ID NO: 3072216 - DNA, 25 bp, Homo sapien
gaggctgggtcacttatgggcataa

SEQ ID NO: 3072217 - DNA, 25 bp, Homo sapien
aaaatttagtgctacttggatttca

SEQ ID NO: 3072218 - DNA, 25 bp, Homo sapien
cttattgtacaaatacgaaataata

SEQ ID NO: 3072219 - DNA, 25 bp, Homo sapien
gtgctacttggatttcaagctgcat

SEQ ID NO: 3072220 - DNA, 25 bp, Homo sapien
ttagtgctacttggatttcaagctg

SEQ ID NO: 3072221 - DNA, 25 bp, Homo sapien
ttagtagattatccttcaccttgag

SEQ ID NO: 3072222 - DNA, 25 bp, Homo sapien
tagtagattatccttcaccttgagt

SEQ ID NO: 3072223 - DNA, 25 bp, Homo sapien
gtattagtagattatccttcacctt

SEQ ID NO: 3072224 - DNA, 25 bp, Homo sapien
tattagtagattatccttcaccttg

SEQ ID NO: 3072225 - DNA, 25 bp, Homo sapien
tctcacggtaacagccggagaggca

SEQ ID NO: 3072226 - DNA, 25 bp, Homo sapien
cctttaaacgtttgctggatcagca

SEQ ID NO: 3072227 - DNA, 25 bp, Homo sapien
gaaagggatctatttgcacactgaa

SEQ ID NO: 3072228 - DNA, 25 bp, Homo sapien
tgaaaatacctattcggcagcaagt

SEQ ID NO: 3072229 - DNA, 25 bp, Homo sapien
ggcgcgggagggtcgggagcggcga

SEQ ID NO: 3072230 - DNA, 25 bp, Homo sapien
ccgagtgcaagacgttgccgctgcg

SEQ ID NO: 3072231 - DNA, 25 bp, Homo sapien
gggagcggcgagctcgccgagtgca

SEQ ID NO: 3072232 - DNA, 25 bp, Homo sapien
ttggaccacagacccgcggctgggc

SEQ ID NO: 3072233 - DNA, 25 bp, Homo sapien
cctcgggcaggccttgggagatcgc

SEQ ID NO: 3072234 - DNA, 25 bp, Homo sapien
gggagatcgccgttagtggctcggg

SEQ ID NO: 3072235 - DNA, 25 bp, Homo sapien
agcgtccccgtagtgcgcccgctac

SEQ ID NO: 3072236 - DNA, 25 bp, Homo sapien
gggtcagacgagcgcgctcacttct

SEQ ID NO: 3072237 - DNA, 25 bp, Homo sapien
gagggccaatgaaccgacgatcgga

SEQ ID NO: 3072238 - DNA, 25 bp, Homo sapien
atgaaccgacgatcggagcactggg

SEQ ID NO: 3072239 - DNA, 25 bp, Homo sapien
gacggaatgaagagaacgtctggaa

SEQ ID NO: 3072240 - DNA, 25 bp, Homo sapien
aatgaagagaacgtctggaaaggga

SEQ ID NO: 3072241 - DNA, 25 bp, Homo sapien
caacgaggcgattggctgcctggta

SEQ ID NO: 3072242 - DNA, 25 bp, Homo sapien
cctggtatccaggagaccgacgtca

SEQ ID NO: 3072243 - DNA, 25 bp, Homo sapien
ggctgcgctggtcccttcgcaacga

SEQ ID NO: 3072244 - DNA, 25 bp, Homo sapien
tagcaacgacgcctgattggctgcg

SEQ ID NO: 3072245 - DNA, 25 bp, Homo sapien
tcacgtgttctagaagcacaacttc

SEQ ID NO: 3072246 - DNA, 25 bp, Homo sapien
ttctagaagcacaacttcttttacc

SEQ ID NO: 3072247 - DNA, 25 bp, Homo sapien
cacttcatttttcacgtgttctaga

SEQ ID NO: 3072248 - DNA, 25 bp, Homo sapien
catttttcacgtgttctagaagcac

SEQ ID NO: 3072249 - DNA, 25 bp, Homo sapien
atggaggttgcagtgcgccgcgatc

SEQ ID NO: 3072250 - DNA, 25 bp, Homo sapien
gtgccactgcactcctgctggccga

SEQ ID NO: 3072251 - DNA, 25 bp, Homo sapien
gccactgcactcctgctggccgaca

SEQ ID NO: 3072252 - DNA, 25 bp, Homo sapien
tcgtgccactgcactcctgctggcc

SEQ ID NO: 3072253 - DNA, 25 bp, Homo sapien
tagggcagagctagagttgtagaaa

SEQ ID NO: 3072254 - DNA, 25 bp, Homo sapien
tgtatagggcagagctagagttgta

SEQ ID NO: 3072255 - DNA, 25 bp, Homo sapien
ccctgtccccagatgtatagggcag

SEQ ID NO: 3072256 - DNA, 25 bp, Homo sapien
cccagatgtatagggcagagctaga

SEQ ID NO: 3072257 - DNA, 25 bp, Homo sapien
gacaggttccattttgcccaaagcc

SEQ ID NO: 3072258 - DNA, 25 bp, Homo sapien
gagcaggcacccatcagtgagaatg

SEQ ID NO: 3072259 - DNA, 25 bp, Homo sapien
agagctccaggtttgaggcacagac

SEQ ID NO: 3072260 - DNA, 25 bp, Homo sapien
gaatgacgagttgacggcacagctg

SEQ ID NO: 3072261 - DNA, 25 bp, Homo sapien
gggtcactcagatggctacagtcat

SEQ ID NO: 3072262 - DNA, 25 bp, Homo sapien
tcatcaatgtgcagtggtctcaagg

SEQ ID NO: 3072263 - DNA, 25 bp, Homo sapien
ttatgagaaggtgatcacagaagca

SEQ ID NO: 3072264 - DNA, 25 bp, Homo sapien
gccttgtcttgccatgggaggagaa

SEQ ID NO: 3072265 - DNA, 25 bp, Homo sapien
caaaggtgcccactgtgatggcgtg

SEQ ID NO: 3072266 - DNA, 25 bp, Homo sapien
tatcaccctcactagtgactgggag

SEQ ID NO: 3072267 - DNA, 25 bp, Homo sapien
gagccctgggcatgaatgcatccta

SEQ ID NO: 3072268 - DNA, 25 bp, Homo sapien
tgctcaggccaggacagatacttcg

SEQ ID NO: 3072269 - DNA, 25 bp, Homo sapien
caatggctcccttgctacaggtttc

SEQ ID NO: 3072270 - DNA, 25 bp, Homo sapien
tcatgaaagtgcttctccgctaagg

SEQ ID NO: 3072271 - DNA, 25 bp, Homo sapien
ccgctaaggtagaaggaaactccat

SEQ ID NO: 3072272 - DNA, 25 bp, Homo sapien
caggtttctgcaggtcgtatcatga

SEQ ID NO: 3072273 - DNA, 25 bp, Homo sapien
tatgcgcatggtactcgggttatag

SEQ ID NO: 3072274 - DNA, 25 bp, Homo sapien
ctgatggctggtatgcgcatggtac

SEQ ID NO: 3072275 - DNA, 25 bp, Homo sapien
ccagggaactcgctgttttctctga

SEQ ID NO: 3072276 - DNA, 25 bp, Homo sapien
ggcaaagagggtcagaagtagccct

SEQ ID NO: 3072277 - DNA, 25 bp, Homo sapien
tttccatcctcccagataacccgca

SEQ ID NO: 3072278 - DNA, 25 bp, Homo sapien
gattgcaaggcatgaagattgacta

SEQ ID NO: 3072279 - DNA, 25 bp, Homo sapien
tgtgctgtggattgcaaggcatgaa

SEQ ID NO: 3072280 - DNA, 25 bp, Homo sapien
caaggcatgaagattgactatctgt

SEQ ID NO: 3072281 - DNA, 25 bp, Homo sapien
cactggcgatactgccaagctggaa

SEQ ID NO: 3072282 - DNA, 25 bp, Homo sapien
ggctcttgatccttaaaaggctgga

SEQ ID NO: 3072283 - DNA, 25 bp, Homo sapien
gaaaaggccgttctctggctcttga

SEQ ID NO: 3072284 - DNA, 25 bp, Homo sapien
tggaaaaacggctcgctggcagcct

SEQ ID NO: 3072285 - DNA, 25 bp, Homo sapien
gagcgctcgcatctaaaggtcttga

SEQ ID NO: 3072286 - DNA, 25 bp, Homo sapien
caaaaatattatggccgcgtttcct

SEQ ID NO: 3072287 - DNA, 25 bp, Homo sapien
gatgaagtctatattctgggctaca

SEQ ID NO: 3072288 - DNA, 25 bp, Homo sapien
taaccgggcggctaatgctgtttta

SEQ ID NO: 3072289 - DNA, 25 bp, Homo sapien
gaccgttctggtcgcagctgcctgg

SEQ ID NO: 3072290 - DNA, 25 bp, Homo sapien
tctgattcctgtgtgctgaatccag

SEQ ID NO: 3072291 - DNA, 25 bp, Homo sapien
gagagagaaataagggagacatcaa

SEQ ID NO: 3072292 - DNA, 25 bp, Homo sapien
gacatcaacaccctggaatattgtg

SEQ ID NO: 3072293 - DNA, 25 bp, Homo sapien
cctgcggccactctgggtcttgaga

SEQ ID NO: 3072294 - DNA, 25 bp, Homo sapien
catcaggaggccactggaagtctta

SEQ ID NO: 3072295 - DNA, 25 bp, Homo sapien
tctgaatcatctgaagagacgctgt

SEQ ID NO: 3072296 - DNA, 25 bp, Homo sapien
caggatgcccgaccacagtgttctg

SEQ ID NO: 3072297 - DNA, 25 bp, Homo sapien
tctgcagctgcctcgaatgtgtgca

SEQ ID NO: 3072298 - DNA, 25 bp, Homo sapien
gacaagccgatggatttcgaaagct

SEQ ID NO: 3072299 - DNA, 25 bp, Homo sapien
tctagtgcccacaatctgatgtcag

SEQ ID NO: 3072300 - DNA, 25 bp, Homo sapien
ggtggctccatattgctaccaggaa

SEQ ID NO: 3072301 - DNA, 25 bp, Homo sapien
agagccttcgcctcttgaatcacaa

SEQ ID NO: 3072302 - DNA, 25 bp, Homo sapien
gaatcacaaccatttgttaggctcg

SEQ ID NO: 3072303 - DNA, 25 bp, Homo sapien
catttgttaggctcgcaaacaccag

SEQ ID NO: 3072304 - DNA, 25 bp, Homo sapien
ttaggctcgcaaacaccagcatggc

SEQ ID NO: 3072305 - DNA, 25 bp, Homo sapien
gatgcattgtgttactgccatccag

SEQ ID NO: 3072306 - DNA, 25 bp, Homo sapien
gattgtgatgcattgtgttactgcc

SEQ ID NO: 3072307 - DNA, 25 bp, Homo sapien
tgtgatgcattgtgttactgccatc

SEQ ID NO: 3072308 - DNA, 25 bp, Homo sapien
ttgattgtgatgcattgtgttactg

SEQ ID NO: 3072309 - DNA, 25 bp, Homo sapien
aatgggtacgaacagcccttgactg

SEQ ID NO: 3072310 - DNA, 25 bp, Homo sapien
caatggcaagccaccagcaatgggt

SEQ ID NO: 3072311 - DNA, 25 bp, Homo sapien
gactgcctgtgagagtactgacaaa

SEQ ID NO: 3072312 - DNA, 25 bp, Homo sapien
tcatgggtgctaccagagtccctcc

SEQ ID NO: 3072313 - DNA, 25 bp, Homo sapien
tgagaaatccgaaaggctgagaccc

SEQ ID NO: 3072314 - DNA, 25 bp, Homo sapien
aaacctggcacaggggggcaatgtt

SEQ ID NO: 3072315 - DNA, 25 bp, Homo sapien
cttgtacgtggctctgggtgaaacc

SEQ ID NO: 3072316 - DNA, 25 bp, Homo sapien
agacccactgggctagcttgtacgt

SEQ ID NO: 3072317 - DNA, 25 bp, Homo sapien
gcagaaggaacattcacgtaactgt

SEQ ID NO: 3072318 - DNA, 25 bp, Homo sapien
gaacattcacgtaactgtactggga

SEQ ID NO: 3072319 - DNA, 25 bp, Homo sapien
cattcacgtaactgtactgggaatt

SEQ ID NO: 3072320 - DNA, 25 bp, Homo sapien
ccagcctaggcatccccaggaaacc

SEQ ID NO: 3072321 - DNA, 25 bp, Homo sapien
gagccctaaatctggttgagtcctt

SEQ ID NO: 3072322 - DNA, 25 bp, Homo sapien
ggtaacggtcataatactcacaagg

SEQ ID NO: 3072323 - DNA, 25 bp, Homo sapien
gaacatgatcaattaagaagagccc

SEQ ID NO: 3072324 - DNA, 25 bp, Homo sapien
gaagctcagcctctaagagacagca

SEQ ID NO: 3072325 - DNA, 25 bp, Homo sapien
gagatcaacccaaagtacgcaagcc

SEQ ID NO: 3072326 - DNA, 25 bp, Homo sapien
gcctatgttaaagggtctcgtctca

SEQ ID NO: 3072327 - DNA, 25 bp, Homo sapien
gatcagcaatggttgaacactggca

SEQ ID NO: 3072328 - DNA, 25 bp, Homo sapien
tagcctacattttggtgccctgcaa

SEQ ID NO: 3072329 - DNA, 25 bp, Homo sapien
tagacaatttgacatctacgtttgc

SEQ ID NO: 3072330 - DNA, 25 bp, Homo sapien
cagtggtacttaagaatgtttagac

SEQ ID NO: 3072331 - DNA, 25 bp, Homo sapien
aagccactggtatactttttacaga

SEQ ID NO: 3072332 - DNA, 25 bp, Homo sapien
aatctagcctaatcgtgtatatgca

SEQ ID NO: 3072333 - DNA, 25 bp, Homo sapien
ttgcttcggaccggcgcgggggctc

SEQ ID NO: 3072334 - DNA, 25 bp, Homo sapien
ctgaggtcaggagtttgagaccagc

SEQ ID NO: 3072335 - DNA, 25 bp, Homo sapien
gccaaggcgggtagatcatctgagg

SEQ ID NO: 3072336 - DNA, 25 bp, Homo sapien
gcctgtaattcaagcacttcgggag

SEQ ID NO: 3072337 - DNA, 25 bp, Homo sapien
cctgggcaacagagccagactccgt

SEQ ID NO: 3072338 - DNA, 25 bp, Homo sapien
ctgagatcgcaccactgcattccag

SEQ ID NO: 3072339 - DNA, 25 bp, Homo sapien
ggagaactacttgaacctgagaggt

SEQ ID NO: 3072340 - DNA, 25 bp, Homo sapien
cctgagaggtggaggttgcagtgag

SEQ ID NO: 3072341 - DNA, 25 bp, Homo sapien
aattgcagcatcgtggttttaaaaa

SEQ ID NO: 3072342 - DNA, 25 bp, Homo sapien
ttgcagcatcgtggttttaaaaaac

SEQ ID NO: 3072343 - DNA, 25 bp, Homo sapien
ctttgcctagagtaatagataaaaa

SEQ ID NO: 3072344 - DNA, 25 bp, Homo sapien
tgcctagagtaatagataaaaaagg

SEQ ID NO: 3072345 - DNA, 25 bp, Homo sapien
tgaaatccagactttaatctatttt

SEQ ID NO: 3072346 - DNA, 25 bp, Homo sapien
aatccagactttaatctattttttg

SEQ ID NO: 3072347 - DNA, 25 bp, Homo sapien
tcagtgaaatccagactttaatcta

SEQ ID NO: 3072348 - DNA, 25 bp, Homo sapien
agtgaaatccagactttaatctatt

SEQ ID NO: 3072349 - DNA, 25 bp, Homo sapien
gcaatctaggaacatttggcaaaca

SEQ ID NO: 3072350 - DNA, 25 bp, Homo sapien
gaggataacccttcaagctcaaaag

SEQ ID NO: 3072351 - DNA, 25 bp, Homo sapien
cccagagtatgtcctaagctttata

SEQ ID NO: 3072352 - DNA, 25 bp, Homo sapien
taccaagtatatagctgttctgcag

SEQ ID NO: 3072353 - DNA, 25 bp, Homo sapien
gaagttacctataacactggtgcag

SEQ ID NO: 3072354 - DNA, 25 bp, Homo sapien
aaccctctcgggacatttagataca

SEQ ID NO: 3072355 - DNA, 25 bp, Homo sapien
tgaatgacattagactgtggcagag

SEQ ID NO: 3072356 - DNA, 25 bp, Homo sapien
gacagctaacaagtgaccccatcaa

SEQ ID NO: 3072357 - DNA, 25 bp, Homo sapien
gccacactatcaagtgactcctttc

SEQ ID NO: 3072358 - DNA, 25 bp, Homo sapien
aggttcaagtggaagatcctctcca

SEQ ID NO: 3072359 - DNA, 25 bp, Homo sapien
caagaagttctgattctccaccttc

SEQ ID NO: 3072360 - DNA, 25 bp, Homo sapien
acagaaggttcaagtggaagatcct

SEQ ID NO: 3072361 - DNA, 25 bp, Homo sapien
tactgctactttgtgggctgatgac

SEQ ID NO: 3072362 - DNA, 25 bp, Homo sapien
tgatgacaagcatagacttcaaggg

SEQ ID NO: 3072363 - DNA, 25 bp, Homo sapien
ggccctgctttgtcacccgtcagat

SEQ ID NO: 3072364 - DNA, 25 bp, Homo sapien
cgtcagatccgtgccactactgcta

SEQ ID NO: 3072365 - DNA, 25 bp, Homo sapien
gaagcctagaggtccatcaacagaa

SEQ ID NO: 3072366 - DNA, 25 bp, Homo sapien
gatttgcatcgacttcaagatagtg

SEQ ID NO: 3072367 - DNA, 25 bp, Homo sapien
ttatgtatgaacattgataaatctc

SEQ ID NO: 3072368 - DNA, 25 bp, Homo sapien
tgagaagcaagttgtagaagcatac

SEQ ID NO: 3072369 - DNA, 25 bp, Homo sapien
catatacacggattacacttccagg

SEQ ID NO: 3072370 - DNA, 25 bp, Homo sapien
actgttttcatcaccatatacacgg

SEQ ID NO: 3072371 - DNA, 25 bp, Homo sapien
tccctggagtcactttatcactgtt

SEQ ID NO: 3072372 - DNA, 25 bp, Homo sapien
caatagggtataaatgtccctggag

SEQ ID NO: 3072373 - DNA, 25 bp, Homo sapien
ccagactgatggtgtgctgcgtact

SEQ ID NO: 3072374 - DNA, 25 bp, Homo sapien
gccagtctagcaataagtaagctta

SEQ ID NO: 3072375 - DNA, 25 bp, Homo sapien
gaatccagccactacaatagagcag

SEQ ID NO: 3072376 - DNA, 25 bp, Homo sapien
gcagcttttattgataccagactga

SEQ ID NO: 3072377 - DNA, 25 bp, Homo sapien
aaaaaagacacctgctgcgatgcag

SEQ ID NO: 3072378 - DNA, 25 bp, Homo sapien
gactgcaagtggataacatttagga

SEQ ID NO: 3072379 - DNA, 25 bp, Homo sapien
gaagagtttggttcagaatctgcac

SEQ ID NO: 3072380 - DNA, 25 bp, Homo sapien
tattctagaggagtggtaacagcct

SEQ ID NO: 3072381 - DNA, 25 bp, Homo sapien
taggactgtgattcctgaactgtga

SEQ ID NO: 3072382 - DNA, 25 bp, Homo sapien
tggtaaacctggtgctcaaagcccc

SEQ ID NO: 3072383 - DNA, 25 bp, Homo sapien
tatactaaactatctgctaaggaga

SEQ ID NO: 3072384 - DNA, 25 bp, Homo sapien
caggtgggattgaaaccttgctttc

SEQ ID NO: 3072385 - DNA, 25 bp, Homo sapien
tgtccccacccacaaacgattacaa

SEQ ID NO: 3072386 - DNA, 25 bp, Homo sapien
gattacaagacaccataagagctgt

SEQ ID NO: 3072387 - DNA, 25 bp, Homo sapien
acccacaaacgattacaagacacca

SEQ ID NO: 3072388 - DNA, 25 bp, Homo sapien
aagagctgtaattctcacaaaagag

SEQ ID NO: 3072389 - DNA, 25 bp, Homo sapien
gcaagctgtcgcacttggctctcct

SEQ ID NO: 3072390 - DNA, 25 bp, Homo sapien
tagagacggagcgtagaatccaagc

SEQ ID NO: 3072391 - DNA, 25 bp, Homo sapien
gcttacataaggctcaatgtccaca

SEQ ID NO: 3072392 - DNA, 25 bp, Homo sapien
gaatccaagcgaatggagacccaca

SEQ ID NO: 3072393 - DNA, 25 bp, Homo sapien
ccgtccaaggtctaagaggtgatag

SEQ ID NO: 3072394 - DNA, 25 bp, Homo sapien
gatagtttgacaaatcccactgccc

SEQ ID NO: 3072395 - DNA, 25 bp, Homo sapien
gtaccacagtcatgcaacggatgga

SEQ ID NO: 3072396 - DNA, 25 bp, Homo sapien
ttttgttcctatagccacaccagac

SEQ ID NO: 3072397 - DNA, 25 bp, Homo sapien
ggctactaacacgattcccttcacg

SEQ ID NO: 3072398 - DNA, 25 bp, Homo sapien
ccactcctctgtgaaagattgcaag

SEQ ID NO: 3072399 - DNA, 25 bp, Homo sapien
aagattgcaagggtgccgtcagcca

SEQ ID NO: 3072400 - DNA, 25 bp, Homo sapien
cgtcagccagggctactaacacgat

SEQ ID NO: 3072401 - DNA, 25 bp, Homo sapien
ctttaagtttaatggaatggagaca

SEQ ID NO: 3072402 - DNA, 25 bp, Homo sapien
ggctacagatgaatggacatacaaa

SEQ ID NO: 3072403 - DNA, 25 bp, Homo sapien
gaatcgaatctttaagtttaatgga

SEQ ID NO: 3072404 - DNA, 25 bp, Homo sapien
cactgggctacagatgaatggacat

SEQ ID NO: 3072405 - DNA, 25 bp, Homo sapien
catttggcagtactgatatttgatc

SEQ ID NO: 3072406 - DNA, 25 bp, Homo sapien
gttcatttggcagtactgatatttg

SEQ ID NO: 3072407 - DNA, 25 bp, Homo sapien
tttgatctttatatgcatctgagtc

SEQ ID NO: 3072408 - DNA, 25 bp, Homo sapien
tggcagtactgatatttgatcttta

SEQ ID NO: 3072409 - DNA, 25 bp, Homo sapien
cactaattagtggaaatcttttgac

SEQ ID NO: 3072410 - DNA, 25 bp, Homo sapien
gttccttttatttgtgcacttcacc

SEQ ID NO: 3072411 - DNA, 25 bp, Homo sapien
ggttccttttatttgtgcacttcac

SEQ ID NO: 3072412 - DNA, 25 bp, Homo sapien
gacactaattagtggaaatcttttg

SEQ ID NO: 3072413 - DNA, 25 bp, Homo sapien
ctaagttgatgacccattattatac

SEQ ID NO: 3072414 - DNA, 25 bp, Homo sapien
ggagaggtcttctgggatctgaact

SEQ ID NO: 3072415 - DNA, 25 bp, Homo sapien
taaagacatgctctgtgtagacgcc

SEQ ID NO: 3072416 - DNA, 25 bp, Homo sapien
tgaccccgcattcccttctgtagct

SEQ ID NO: 3072417 - DNA, 25 bp, Homo sapien
tgtagacgccagtttgggagatgtc

SEQ ID NO: 3072418 - DNA, 25 bp, Homo sapien
tagccttagactctatacagatggc

SEQ ID NO: 3072419 - DNA, 25 bp, Homo sapien
gactctatacagatggcaggtaaag

SEQ ID NO: 3072420 - DNA, 25 bp, Homo sapien
tggcaggtaaagagaatggatatac

SEQ ID NO: 3072421 - DNA, 25 bp, Homo sapien
tcaaccttgttacttaagatctaaa

SEQ ID NO: 3072422 - DNA, 25 bp, Homo sapien
caccatttgtactaggggaagtggc

SEQ ID NO: 3072423 - DNA, 25 bp, Homo sapien
ctgcagaacaaccaaccactgtgat

SEQ ID NO: 3072424 - DNA, 25 bp, Homo sapien
gaagtggcagctcccgtcacacctt

SEQ ID NO: 3072425 - DNA, 25 bp, Homo sapien
ccatcactggagaagcaccatttgt

SEQ ID NO: 3072426 - DNA, 25 bp, Homo sapien
agattctgaaagatcttctcctgca

SEQ ID NO: 3072427 - DNA, 25 bp, Homo sapien
cataaagatgctttgtctacctgac

SEQ ID NO: 3072428 - DNA, 25 bp, Homo sapien
gcagggtagtctgtttctcgtgcac

SEQ ID NO: 3072429 - DNA, 25 bp, Homo sapien
tgtctacctgaccagattctgaaag

SEQ ID NO: 3072430 - DNA, 25 bp, Homo sapien
aaatcttcttgtaacagcaaagtaa

SEQ ID NO: 3072431 - DNA, 25 bp, Homo sapien
aataaatcttcttgtaacagcaaag

SEQ ID NO: 3072432 - DNA, 25 bp, Homo sapien
aatcttcttgtaacagcaaagtaaa

SEQ ID NO: 3072433 - DNA, 25 bp, Homo sapien
taaatcttcttgtaacagcaaagta

SEQ ID NO: 3072434 - DNA, 25 bp, Homo sapien
agcttcatgacagcaaggtgcagaa

SEQ ID NO: 3072435 - DNA, 25 bp, Homo sapien
tttaatcttccctaactagaacata

SEQ ID NO: 3072436 - DNA, 25 bp, Homo sapien
tcagctgctacatcagtgcccagca

SEQ ID NO: 3072437 - DNA, 25 bp, Homo sapien
ggcagagaaacgcatgactcactct

SEQ ID NO: 3072438 - DNA, 25 bp, Homo sapien
ataagaacttttgtagccgaatgag

SEQ ID NO: 3072439 - DNA, 25 bp, Homo sapien
gccgaatgagtgctggtacagatcc

SEQ ID NO: 3072440 - DNA, 25 bp, Homo sapien
catgagagttgcaaacagtgaaact

SEQ ID NO: 3072441 - DNA, 25 bp, Homo sapien
cagtgaaactgtctaggatgttgcc

SEQ ID NO: 3072442 - DNA, 25 bp, Homo sapien
attcataaggtggtgctgttacagt

SEQ ID NO: 3072443 - DNA, 25 bp, Homo sapien
tgtatccaaaccagcaacatccttg

SEQ ID NO: 3072444 - DNA, 25 bp, Homo sapien
tgagaggcacttcgctgtttactgc

SEQ ID NO: 3072445 - DNA, 25 bp, Homo sapien
taaaatacacttgctccaacaacag

SEQ ID NO: 3072446 - DNA, 25 bp, Homo sapien
ttatctaaactactctgagaggcac

SEQ ID NO: 3072447 - DNA, 25 bp, Homo sapien
cagaggtctgagatagacaggcaca

SEQ ID NO: 3072448 - DNA, 25 bp, Homo sapien
ggtctgagatagacaggcacaggta

SEQ ID NO: 3072449 - DNA, 25 bp, Homo sapien
catccagaggtctgagatagacagg

SEQ ID NO: 3072450 - DNA, 25 bp, Homo sapien
tttcatccagaggtctgagatagac

SEQ ID NO: 3072451 - DNA, 25 bp, Homo sapien
ggcacattagtaagcctcatcaaaa

SEQ ID NO: 3072452 - DNA, 25 bp, Homo sapien
gaacttattacagatccactgagac

SEQ ID NO: 3072453 - DNA, 25 bp, Homo sapien
gcaagcactgctgttatttactcct

SEQ ID NO: 3072454 - DNA, 25 bp, Homo sapien
ctcaatctgtcaggcttaagcggtc

SEQ ID NO: 3072455 - DNA, 25 bp, Homo sapien
gctggatgctcttaccacatgtgca

SEQ ID NO: 3072456 - DNA, 25 bp, Homo sapien
aatgtgtgcccagtccatgcggctg

SEQ ID NO: 3072457 - DNA, 25 bp, Homo sapien
ggttacagcagagcgggtacctcaa

SEQ ID NO: 3072458 - DNA, 25 bp, Homo sapien
gctgggatgcgtacagtgaatcctt

SEQ ID NO: 3072459 - DNA, 25 bp, Homo sapien
ccaaaagcctgcactctaccgtctt

SEQ ID NO: 3072460 - DNA, 25 bp, Homo sapien
ccagccaaaagcctgcactctaccg

SEQ ID NO: 3072461 - DNA, 25 bp, Homo sapien
cactctaccgtcttccttctgaaca

SEQ ID NO: 3072462 - DNA, 25 bp, Homo sapien
cagccaaaagcctgcactctaccgt

SEQ ID NO: 3072463 - DNA, 25 bp, Homo sapien
tgcgtgaggctaaactagcttcagt

SEQ ID NO: 3072464 - DNA, 25 bp, Homo sapien
gcgtgaggctaaactagcttcagtt

SEQ ID NO: 3072465 - DNA, 25 bp, Homo sapien
aagattttcctaattacatgaatac

SEQ ID NO: 3072466 - DNA, 25 bp, Homo sapien
gattttcctaattacatgaatacgt

SEQ ID NO: 3072467 - DNA, 25 bp, Homo sapien
aaaagattttcctaattacatgaat

SEQ ID NO: 3072468 - DNA, 25 bp, Homo sapien
catgaatacgtttaattacgtttat

SEQ ID NO: 3072469 - DNA, 25 bp, Homo sapien
gaatattctgaaccactaacttaat

SEQ ID NO: 3072470 - DNA, 25 bp, Homo sapien
acctgaatccttagagctgataaga

SEQ ID NO: 3072471 - DNA, 25 bp, Homo sapien
ataagaggccaagaatattctgaac

SEQ ID NO: 3072472 - DNA, 25 bp, Homo sapien
tccttagagctgataagaggccaag

SEQ ID NO: 3072473 - DNA, 25 bp, Homo sapien
tcttcactaaggaaatcaaaggctt

SEQ ID NO: 3072474 - DNA, 25 bp, Homo sapien
aggctttggacttatccccagggag

SEQ ID NO: 3072475 - DNA, 25 bp, Homo sapien
tcttagtcgtgttacttgaggagct

SEQ ID NO: 3072476 - DNA, 25 bp, Homo sapien
cttttcttgacggacggagtaacat

SEQ ID NO: 3072477 - DNA, 25 bp, Homo sapien
aacatgagacgtgggtgcattgtac

SEQ ID NO: 3072478 - DNA, 25 bp, Homo sapien
gcattgtacttcagattaacaggtg

SEQ ID NO: 3072479 - DNA, 25 bp, Homo sapien
catggctggattttctcgtgatgcc

SEQ ID NO: 3072480 - DNA, 25 bp, Homo sapien
caagaagttcatgggatacacagag

SEQ ID NO: 3072481 - DNA, 25 bp, Homo sapien
gcttgaaactttggcatcctgaggg

SEQ ID NO: 3072482 - DNA, 25 bp, Homo sapien
aagagcttagtctaccgacagagga

SEQ ID NO: 3072483 - DNA, 25 bp, Homo sapien
cagaggactgtaatatgtgctagac

SEQ ID NO: 3072484 - DNA, 25 bp, Homo sapien
ggcagctcatttacaaacttttcag

SEQ ID NO: 3072485 - DNA, 25 bp, Homo sapien
tatgggcagttataagcaattacta

SEQ ID NO: 3072486 - DNA, 25 bp, Homo sapien
tcgatatccactaaatactgcagtt

SEQ ID NO: 3072487 - DNA, 25 bp, Homo sapien
gaatactgatcttccttatgggcag

SEQ ID NO: 3072488 - DNA, 25 bp, Homo sapien
tttatactggtttcgctccatgaga

SEQ ID NO: 3072489 - DNA, 25 bp, Homo sapien
cacgggccatttctactctagtaaa

SEQ ID NO: 3072490 - DNA, 25 bp, Homo sapien
gaatcatctctgtccatcgaacagc

SEQ ID NO: 3072491 - DNA, 25 bp, Homo sapien
tcctgaagctccatcaatctctctt

SEQ ID NO: 3072492 - DNA, 25 bp, Homo sapien
taggaagatcttcccgaaacaccaa

SEQ ID NO: 3072493 - DNA, 25 bp, Homo sapien
gtaggaagatcttcccgaaacacca

SEQ ID NO: 3072494 - DNA, 25 bp, Homo sapien
ctttttgccttgcatcttcagcttc

SEQ ID NO: 3072495 - DNA, 25 bp, Homo sapien
tttgctttttgccttgcatcttcag

SEQ ID NO: 3072496 - DNA, 25 bp, Homo sapien
tgctttttgccttgcatcttcagct

SEQ ID NO: 3072497 - DNA, 25 bp, Homo sapien
tgcatcttcagcttctgcccgagct

SEQ ID NO: 3072498 - DNA, 25 bp, Homo sapien
gttcatccacttttgctatcaaatc

SEQ ID NO: 3072499 - DNA, 25 bp, Homo sapien
cctctagtttcagtttggcttgctt

SEQ ID NO: 3072500 - DNA, 25 bp, Homo sapien
tagtttcagtttggcttgcttcaca

SEQ ID NO: 3072501 - DNA, 25 bp, Homo sapien
gcagcacatctttctcacaggtcag

SEQ ID NO: 3072502 - DNA, 25 bp, Homo sapien
ctaagaaacacatatttcaagtgca

SEQ ID NO: 3072503 - DNA, 25 bp, Homo sapien
taatataagattctcaacttcccga

SEQ ID NO: 3072504 - DNA, 25 bp, Homo sapien
tataagattctcaacttcccgaccc

SEQ ID NO: 3072505 - DNA, 25 bp, Homo sapien
taagattctcaacttcccgacccat

SEQ ID NO: 3072506 - DNA, 25 bp, Homo sapien
aatataagattctcaacttcccgac

SEQ ID NO: 3072507 - DNA, 25 bp, Homo sapien
cacatctcctattaggcctgagcca

SEQ ID NO: 3072508 - DNA, 25 bp, Homo sapien
tcatccacatctcctattaggcctg

SEQ ID NO: 3072509 - DNA, 25 bp, Homo sapien
catctcctattaggcctgagccagc

SEQ ID NO: 3072510 - DNA, 25 bp, Homo sapien
tccacatctcctattaggcctgagc

SEQ ID NO: 3072511 - DNA, 25 bp, Homo sapien
tctgtattgcgatcaaaagctttgt

SEQ ID NO: 3072512 - DNA, 25 bp, Homo sapien
tgcgatcaaaagctttgttctctat

SEQ ID NO: 3072513 - DNA, 25 bp, Homo sapien
agagattctgtattgcgatcaaaag

SEQ ID NO: 3072514 - DNA, 25 bp, Homo sapien
tattgcgatcaaaagctttgttctc

SEQ ID NO: 3072515 - DNA, 25 bp, Homo sapien
cactgagatctttgtccatatccag

SEQ ID NO: 3072516 - DNA, 25 bp, Homo sapien
tgagatctttgtccatatccagctc

SEQ ID NO: 3072517 - DNA, 25 bp, Homo sapien
tagattcgatgattgcttgaacttc

SEQ ID NO: 3072518 - DNA, 25 bp, Homo sapien
gctcaggagtagattcgatgattgc

SEQ ID NO: 3072519 - DNA, 25 bp, Homo sapien
ccacattatccaggtttactgaata

SEQ ID NO: 3072520 - DNA, 25 bp, Homo sapien
ttatccaggtttactgaatactttc

SEQ ID NO: 3072521 - DNA, 25 bp, Homo sapien
cacattatccaggtttactgaatac

SEQ ID NO: 3072522 - DNA, 25 bp, Homo sapien
cattatccaggtttactgaatactt

SEQ ID NO: 3072523 - DNA, 25 bp, Homo sapien
gctacctgtacttcaatgtgtttgc

SEQ ID NO: 3072524 - DNA, 25 bp, Homo sapien
ttatttggcgcatctgtaaccttca

SEQ ID NO: 3072525 - DNA, 25 bp, Homo sapien
ttctagtttcctgggctacctgtac

SEQ ID NO: 3072526 - DNA, 25 bp, Homo sapien
ctctgatttatttggcgcatctgta

SEQ ID NO: 3072527 - DNA, 25 bp, Homo sapien
tgccacatctgaattagctgttgat

SEQ ID NO: 3072528 - DNA, 25 bp, Homo sapien
atgctggagtggtagctttagatcc

SEQ ID NO: 3072529 - DNA, 25 bp, Homo sapien
ttagatccgccttggctaacatcag

SEQ ID NO: 3072530 - DNA, 25 bp, Homo sapien
tggtagctttagatccgccttggct

SEQ ID NO: 3072531 - DNA, 25 bp, Homo sapien
cactgattaccggtaagtactctct

SEQ ID NO: 3072532 - DNA, 25 bp, Homo sapien
cagtcacttggtaataaagacctac

SEQ ID NO: 3072533 - DNA, 25 bp, Homo sapien
gcaattgcaatattgtacagtcact

SEQ ID NO: 3072534 - DNA, 25 bp, Homo sapien
gaccctctgcaaataatcgggaaat

SEQ ID NO: 3072535 - DNA, 25 bp, Homo sapien
caaactttgggcagtgagaataggt

SEQ ID NO: 3072536 - DNA, 25 bp, Homo sapien
tataaacaattgtccagtggctatc

SEQ ID NO: 3072537 - DNA, 25 bp, Homo sapien
gacagagtctaagtccaactccaga

SEQ ID NO: 3072538 - DNA, 25 bp, Homo sapien
caagcaatccaggtgagttacatac

SEQ ID NO: 3072539 - DNA, 25 bp, Homo sapien
tgtatactcgattaaaaaataagtg

SEQ ID NO: 3072540 - DNA, 25 bp, Homo sapien
tctggagccaaagagattgatagtg

SEQ ID NO: 3072541 - DNA, 25 bp, Homo sapien
tatttggctggacacggtcggctca

SEQ ID NO: 3072542 - DNA, 25 bp, Homo sapien
tgtctttgctttgatgtatactcga

SEQ ID NO: 3072543 - DNA, 25 bp, Homo sapien
tatcctaggctatccaaataaaatg

SEQ ID NO: 3072544 - DNA, 25 bp, Homo sapien
gagagagctgaacctaaaacaggaa

SEQ ID NO: 3072545 - DNA, 25 bp, Homo sapien
caggaaagggaccatgatacctcag

SEQ ID NO: 3072546 - DNA, 25 bp, Homo sapien
aaggtttcaggctacaaggaagtgg

SEQ ID NO: 3072547 - DNA, 25 bp, Homo sapien
ctagatcccagagatacagcatgag

SEQ ID NO: 3072548 - DNA, 25 bp, Homo sapien
tatatttctgacaactagatcccag

SEQ ID NO: 3072549 - DNA, 25 bp, Homo sapien
tgacaactagatcccagagatacag

SEQ ID NO: 3072550 - DNA, 25 bp, Homo sapien
taaaatagcccaatgtgtgggctat

SEQ ID NO: 3072551 - DNA, 25 bp, Homo sapien
tatcaggctaaaagtctataagctc

SEQ ID NO: 3072552 - DNA, 25 bp, Homo sapien
tactgcagtaaaagcaatctggtct

SEQ ID NO: 3072553 - DNA, 25 bp, Homo sapien
acatgccaatgtagtgttttcctga

SEQ ID NO: 3072554 - DNA, 25 bp, Homo sapien
tcatggattatctggcattgcagca

SEQ ID NO: 3072555 - DNA, 25 bp, Homo sapien
tgtaagatgacacactaggccacat

SEQ ID NO: 3072556 - DNA, 25 bp, Homo sapien
gaaagtataccattacatagagctg

SEQ ID NO: 3072557 - DNA, 25 bp, Homo sapien
tgatgaataaagctggatggtgccc

SEQ ID NO: 3072558 - DNA, 25 bp, Homo sapien
ttgaactcctactcctgaccaagtg

SEQ ID NO: 3072559 - DNA, 25 bp, Homo sapien
ctgacaaccactacagtggaaataa

SEQ ID NO: 3072560 - DNA, 25 bp, Homo sapien
gacaaccactacagtggaaataatt

SEQ ID NO: 3072561 - DNA, 25 bp, Homo sapien
tgacaaccactacagtggaaataat

SEQ ID NO: 3072562 - DNA, 25 bp, Homo sapien
tttgcaaaatgttaagaagcaccat

SEQ ID NO: 3072563 - DNA, 25 bp, Homo sapien
agtatactttttgcaaaatgttaag

SEQ ID NO: 3072564 - DNA, 25 bp, Homo sapien
caaaatgttaagaagcaccattctc

SEQ ID NO: 3072565 - DNA, 25 bp, Homo sapien
ctttttgcaaaatgttaagaagcac

SEQ ID NO: 3072566 - DNA, 25 bp, Homo sapien
tctgaggttcaggactattgctgac

SEQ ID NO: 3072567 - DNA, 25 bp, Homo sapien
ttctgaggttcaggactattgctga

SEQ ID NO: 3072568 - DNA, 25 bp, Homo sapien
cttctgaggttcaggactattgctg

SEQ ID NO: 3072569 - DNA, 25 bp, Homo sapien
ctttggtaagagctcatttccaatt

SEQ ID NO: 3072570 - DNA, 25 bp, Homo sapien
tcaattaggataagaaagtttatga

SEQ ID NO: 3072571 - DNA, 25 bp, Homo sapien
tatactaatcaagatgatataatgc

SEQ ID NO: 3072572 - DNA, 25 bp, Homo sapien
tactatactgtggtcgtctagcact

SEQ ID NO: 3072573 - DNA, 25 bp, Homo sapien
tatgagaacgtggttgacttaattc

SEQ ID NO: 3072574 - DNA, 25 bp, Homo sapien
gaacgtggttgacttaattcctgaa

SEQ ID NO: 3072575 - DNA, 25 bp, Homo sapien
cttcaggctggtatgagaacgtggt

SEQ ID NO: 3072576 - DNA, 25 bp, Homo sapien
gctggtatgagaacgtggttgactt

SEQ ID NO: 3072577 - DNA, 25 bp, Homo sapien
tcctaatgatatagggcgttctttt

SEQ ID NO: 3072578 - DNA, 25 bp, Homo sapien
attcctaatgatatagggcgttctt

SEQ ID NO: 3072579 - DNA, 25 bp, Homo sapien
ttcctaatgatatagggcgttcttt

SEQ ID NO: 3072580 - DNA, 25 bp, Homo sapien
gaacttgcaacctccttctttggaa

SEQ ID NO: 3072581 - DNA, 25 bp, Homo sapien
taaccatacgtagcttagccctagg

SEQ ID NO: 3072582 - DNA, 25 bp, Homo sapien
gttactgacgagttccttgcccaag

SEQ ID NO: 3072583 - DNA, 25 bp, Homo sapien
cagtctcagtttagttagcctcagg

SEQ ID NO: 3072584 - DNA, 25 bp, Homo sapien
tagcagaattaatgaccaccgcccc

SEQ ID NO: 3072585 - DNA, 25 bp, Homo sapien
tagaaaagtgcacaagcagcaaaac

SEQ ID NO: 3072586 - DNA, 25 bp, Homo sapien
agagagagatactaagatagcagaa

SEQ ID NO: 3072587 - DNA, 25 bp, Homo sapien
agagctggcacaccggtagaaatag

SEQ ID NO: 3072588 - DNA, 25 bp, Homo sapien
ccaagcgacagccagcctattaact

SEQ ID NO: 3072589 - DNA, 25 bp, Homo sapien
cagctcccaagcgatgacgtcattc

SEQ ID NO: 3072590 - DNA, 25 bp, Homo sapien
atttatgcagcaaccccaagcgaca

SEQ ID NO: 3072591 - DNA, 25 bp, Homo sapien
ggatctgtcattcagcttgctgcca

SEQ ID NO: 3072592 - DNA, 25 bp, Homo sapien
gctgtggattctagttgatcactcc

SEQ ID NO: 3072593 - DNA, 25 bp, Homo sapien
tggattctagttgatcactccctga

SEQ ID NO: 3072594 - DNA, 25 bp, Homo sapien
tgagctgtggattctagttgatcac

SEQ ID NO: 3072595 - DNA, 25 bp, Homo sapien
ctgagagctgatgaagttttgttct

SEQ ID NO: 3072596 - DNA, 25 bp, Homo sapien
ctcagtgtgtctttgatgtaatgca

SEQ ID NO: 3072597 - DNA, 25 bp, Homo sapien
tgatgtaatgcattatattccttct

SEQ ID NO: 3072598 - DNA, 25 bp, Homo sapien
gtgtgtctttgatgtaatgcattat

SEQ ID NO: 3072599 - DNA, 25 bp, Homo sapien
gatgtaatgcattatattccttctt

SEQ ID NO: 3072600 - DNA, 25 bp, Homo sapien
cctgagattgatggcctttgccaag

SEQ ID NO: 3072601 - DNA, 25 bp, Homo sapien
gagattgatggcctttgccaagttt

SEQ ID NO: 3072602 - DNA, 25 bp, Homo sapien
ctcctgagattgatggcctttgcca

SEQ ID NO: 3072603 - DNA, 25 bp, Homo sapien
attgatggcctttgccaagtttgga

SEQ ID NO: 3072604 - DNA, 25 bp, Homo sapien
agccatgagccatcatacccagcaa

SEQ ID NO: 3072605 - DNA, 25 bp, Homo sapien
gccatgagccatcatacccagcaaa

SEQ ID NO: 3072606 - DNA, 25 bp, Homo sapien
cagccatgagccatcatacccagca

SEQ ID NO: 3072607 - DNA, 25 bp, Homo sapien
catgagccatcatacccagcaaacc

SEQ ID NO: 3072608 - DNA, 25 bp, Homo sapien
ttccagagtactagagagaacagtc

SEQ ID NO: 3072609 - DNA, 25 bp, Homo sapien
tgcttgaactccagatttccagtgg

SEQ ID NO: 3072610 - DNA, 25 bp, Homo sapien
caactctgggtatccacaaggctaa

SEQ ID NO: 3072611 - DNA, 25 bp, Homo sapien
gagtgctggcgaaggcattccatca

SEQ ID NO: 3072612 - DNA, 25 bp, Homo sapien
ttttcctgttcttgagagtcttcaa

SEQ ID NO: 3072613 - DNA, 25 bp, Homo sapien
catagtttttcgctttcagctcaag

SEQ ID NO: 3072614 - DNA, 25 bp, Homo sapien
taaagattccactcgggtctgtaag

SEQ ID NO: 3072615 - DNA, 25 bp, Homo sapien
cttgtttgagattctaaagattcca

SEQ ID NO: 3072616 - DNA, 25 bp, Homo sapien
tagatctcagaattatgaccttggg

SEQ ID NO: 3072617 - DNA, 25 bp, Homo sapien
tcacaattaggtattaactacttag

SEQ ID NO: 3072618 - DNA, 25 bp, Homo sapien
tacttgcatatgcatcttgacttcc

SEQ ID NO: 3072619 - DNA, 25 bp, Homo sapien
tccacttcatgttataggcattcca

SEQ ID NO: 3072620 - DNA, 25 bp, Homo sapien
gctggagtgcgctggtaccatctca

SEQ ID NO: 3072621 - DNA, 25 bp, Homo sapien
gagtgcgctggtaccatctcagctc

SEQ ID NO: 3072622 - DNA, 25 bp, Homo sapien
tggagtgcgctggtaccatctcagc

SEQ ID NO: 3072623 - DNA, 25 bp, Homo sapien
tcagcttcccgcacagctgggatta

SEQ ID NO: 3072624 - DNA, 25 bp, Homo sapien
gagtagctgaatcaccatagctgaa

SEQ ID NO: 3072625 - DNA, 25 bp, Homo sapien
tctggagtagctgaatcaccatagc

SEQ ID NO: 3072626 - DNA, 25 bp, Homo sapien
gtagctgaatcaccatagctgaatc

SEQ ID NO: 3072627 - DNA, 25 bp, Homo sapien
tggagtagctgaatcaccatagctg

SEQ ID NO: 3072628 - DNA, 25 bp, Homo sapien
tacttcaaagaaacatgtctgcctt

SEQ ID NO: 3072629 - DNA, 25 bp, Homo sapien
atgtctatcaacagacagtggataa

SEQ ID NO: 3072630 - DNA, 25 bp, Homo sapien
taagaaaattataatagatctggcc

SEQ ID NO: 3072631 - DNA, 25 bp, Homo sapien
gaaaattataatagatctggccagg

SEQ ID NO: 3072632 - DNA, 25 bp, Homo sapien
tatcaacagacagtggataagaaaa

SEQ ID NO: 3072633 - DNA, 25 bp, Homo sapien
ggtggcatatctcacacacctgcat

SEQ ID NO: 3072634 - DNA, 25 bp, Homo sapien
gagaatgtgccagtgttgtaacaag

SEQ ID NO: 3072635 - DNA, 25 bp, Homo sapien
caagggtggcatatctcacacacct

SEQ ID NO: 3072636 - DNA, 25 bp, Homo sapien
catatctcacacacctgcatgaaca

SEQ ID NO: 3072637 - DNA, 25 bp, Homo sapien
cacttcttccaaccagtctcacaag

SEQ ID NO: 3072638 - DNA, 25 bp, Homo sapien
gcacttcttccaaccagtctcacaa

SEQ ID NO: 3072639 - DNA, 25 bp, Homo sapien
cacaagcctgtgggggtaaatgggt

SEQ ID NO: 3072640 - DNA, 25 bp, Homo sapien
cttcttccaaccagtctcacaagcc

SEQ ID NO: 3072641 - DNA, 25 bp, Homo sapien
gtaatctggtactttgggacgccaa

SEQ ID NO: 3072642 - DNA, 25 bp, Homo sapien
agccaaaaatgagtgtgtaatttct

SEQ ID NO: 3072643 - DNA, 25 bp, Homo sapien
aacaaagccaaaaatgagtgtgtaa

SEQ ID NO: 3072644 - DNA, 25 bp, Homo sapien
aaaatgagtgtgtaatttctgccaa

SEQ ID NO: 3072645 - DNA, 25 bp, Homo sapien
caaagccaaaaatgagtgtgtaatt

SEQ ID NO: 3072646 - DNA, 25 bp, Homo sapien
cataggcaatcgtctttttaaaagt

SEQ ID NO: 3072647 - DNA, 25 bp, Homo sapien
gaaaccataggcaatcgtcttttta

SEQ ID NO: 3072648 - DNA, 25 bp, Homo sapien
ccataggcaatcgtctttttaaaag

SEQ ID NO: 3072649 - DNA, 25 bp, Homo sapien
acagagaaaccataggcaatcgtct

SEQ ID NO: 3072650 - DNA, 25 bp, Homo sapien
tttgatgctacactttgaaaaaact

SEQ ID NO: 3072651 - DNA, 25 bp, Homo sapien
gtttgatgctacactttgaaaaaac

SEQ ID NO: 3072652 - DNA, 25 bp, Homo sapien
taaaaaggtatttgttttgccatca

SEQ ID NO: 3072653 - DNA, 25 bp, Homo sapien
ggtatttgttttgccatcatctgat

SEQ ID NO: 3072654 - DNA, 25 bp, Homo sapien
tatttgttttgccatcatctgatgc

SEQ ID NO: 3072655 - DNA, 25 bp, Homo sapien
aaggtatttgttttgccatcatctg

SEQ ID NO: 3072656 - DNA, 25 bp, Homo sapien
tggcatgaacacatcttacctcagc

SEQ ID NO: 3072657 - DNA, 25 bp, Homo sapien
tactacactcggccttggaaatgtt

SEQ ID NO: 3072658 - DNA, 25 bp, Homo sapien
ttctcaaacgtaaataatatggtgg

SEQ ID NO: 3072659 - DNA, 25 bp, Homo sapien
gtggttatatggcagaatattctca

SEQ ID NO: 3072660 - DNA, 25 bp, Homo sapien
tgatgagctgctcgttgtcgtcccg

SEQ ID NO: 3072661 - DNA, 25 bp, Homo sapien
cctgcgcgaacaccgagtccaggtt

SEQ ID NO: 3072662 - DNA, 25 bp, Homo sapien
tcagcgtgcttgcgcagcgccttct

SEQ ID NO: 3072663 - DNA, 25 bp, Homo sapien
gtcatagcgcccgataagccgctcg

SEQ ID NO: 3072664 - DNA, 25 bp, Homo sapien
cggcccggggcgtcgccggcagagg

SEQ ID NO: 3072665 - DNA, 25 bp, Homo sapien
tgcccgcacgggacggacccgactc

SEQ ID NO: 3072666 - DNA, 25 bp, Homo sapien
tgggacgggtactagggctggagcc

SEQ ID NO: 3072667 - DNA, 25 bp, Homo sapien
gggtggcgtaggcgctctcacccca

SEQ ID NO: 3072668 - DNA, 25 bp, Homo sapien
ctgtagatttctggcaatgggcgca

SEQ ID NO: 3072669 - DNA, 25 bp, Homo sapien
aggagatcggcttgtggtttcaccc

SEQ ID NO: 3072670 - DNA, 25 bp, Homo sapien
cgagctgtgctcagaactggatcta

SEQ ID NO: 3072671 - DNA, 25 bp, Homo sapien
ggtttcaccctgaggaactggtaga

SEQ ID NO: 3072672 - DNA, 25 bp, Homo sapien
ccggctgggcgtggacactgttctc

SEQ ID NO: 3072673 - DNA, 25 bp, Homo sapien
ctcgatctctgcctggcgagggcgc

SEQ ID NO: 3072674 - DNA, 25 bp, Homo sapien
tgaactcataggacgtccaggtgga

SEQ ID NO: 3072675 - DNA, 25 bp, Homo sapien
tgggacgtgcgtagttgaactcata

SEQ ID NO: 3072676 - DNA, 25 bp, Homo sapien
gttacataactagccgtggaggagg

SEQ ID NO: 3072677 - DNA, 25 bp, Homo sapien
tatgcatgctggtggaggtacctcg

SEQ ID NO: 3072678 - DNA, 25 bp, Homo sapien
catcttcatgactcttgggtggctg

SEQ ID NO: 3072679 - DNA, 25 bp, Homo sapien
gagcatgggcttactctgccagggc

SEQ ID NO: 3072680 - DNA, 25 bp, Homo sapien
cacttcatgagaaagtttcaaacac

SEQ ID NO: 3072681 - DNA, 25 bp, Homo sapien
ttttcacgccattatatatacactt

SEQ ID NO: 3072682 - DNA, 25 bp, Homo sapien
cacatccatgctgaaaatttgcaat

SEQ ID NO: 3072683 - DNA, 25 bp, Homo sapien
tccaaaggaatttttcacgccatta

SEQ ID NO: 3072684 - DNA, 25 bp, Homo sapien
tgaacctcactggtaaacgctagag

SEQ ID NO: 3072685 - DNA, 25 bp, Homo sapien
caactgttggtcacgggatcaagac

SEQ ID NO: 3072686 - DNA, 25 bp, Homo sapien
tgggagagggtattcacatcacgca

SEQ ID NO: 3072687 - DNA, 25 bp, Homo sapien
ctcaaaagatttgcccagggacaga

SEQ ID NO: 3072688 - DNA, 25 bp, Homo sapien
tgatcagacgctccttgaaggaaat

SEQ ID NO: 3072689 - DNA, 25 bp, Homo sapien
ttgctttcctgatcagacgctcctt

SEQ ID NO: 3072690 - DNA, 25 bp, Homo sapien
taatcctctccatccagcaactcct

SEQ ID NO: 3072691 - DNA, 25 bp, Homo sapien
ttcctgatcagacgctccttgaagg

SEQ ID NO: 3072692 - DNA, 25 bp, Homo sapien
aaaaagtaaatctgggctggatgtg

SEQ ID NO: 3072693 - DNA, 25 bp, Homo sapien
ttaaaaagtaaatctgggctggatg

SEQ ID NO: 3072694 - DNA, 25 bp, Homo sapien
cataaggatgtaacatatattttta

SEQ ID NO: 3072695 - DNA, 25 bp, Homo sapien
attataaattacataaggatgtaac

SEQ ID NO: 3072696 - DNA, 25 bp, Homo sapien
tagtcccgtgttgagcaatgctacc

SEQ ID NO: 3072697 - DNA, 25 bp, Homo sapien
caatgggaactgactggctacttac

SEQ ID NO: 3072698 - DNA, 25 bp, Homo sapien
cagtatagccatgtttccgtaggtc

SEQ ID NO: 3072699 - DNA, 25 bp, Homo sapien
taccgtctaaccaaagttgagctca

SEQ ID NO: 3072700 - DNA, 25 bp, Homo sapien
tttcattaaaggtgcagtacccaca

SEQ ID NO: 3072701 - DNA, 25 bp, Homo sapien
tcaaatctagccagcatgcagtcat

SEQ ID NO: 3072702 - DNA, 25 bp, Homo sapien
aaggtacagcaaacaagactgtgca

SEQ ID NO: 3072703 - DNA, 25 bp, Homo sapien
cagtcattcagcgtgagggccattt

SEQ ID NO: 3072704 - DNA, 25 bp, Homo sapien
tgccaggtagtttccatctagttcg

SEQ ID NO: 3072705 - DNA, 25 bp, Homo sapien
gaaggaagtcacataggatgccagg

SEQ ID NO: 3072706 - DNA, 25 bp, Homo sapien
caagttgtgccccagctcagaatat

SEQ ID NO: 3072707 - DNA, 25 bp, Homo sapien
tactatagacatcggtggaagaagg

SEQ ID NO: 3072708 - DNA, 25 bp, Homo sapien
gggactgaactctcggctagtgctg

SEQ ID NO: 3072709 - DNA, 25 bp, Homo sapien
ttttgaggctgggactgaactctcg

SEQ ID NO: 3072710 - DNA, 25 bp, Homo sapien
tctgtgctggaagggttcgatatgg

SEQ ID NO: 3072711 - DNA, 25 bp, Homo sapien
tatggaggaggagtcaactcttcgt

SEQ ID NO: 3072712 - DNA, 25 bp, Homo sapien
catgggcaggctcgacaaactgaca

SEQ ID NO: 3072713 - DNA, 25 bp, Homo sapien
gggcaggctcgacaaactgacaggc

SEQ ID NO: 3072714 - DNA, 25 bp, Homo sapien
ctgtcatgggcaggctcgacaaact

SEQ ID NO: 3072715 - DNA, 25 bp, Homo sapien
gtcatgggcaggctcgacaaactga

SEQ ID NO: 3072716 - DNA, 25 bp, Homo sapien
cagagagctttaagaacagctgggc

SEQ ID NO: 3072717 - DNA, 25 bp, Homo sapien
taggaaagctgtgctgcacaggaca

SEQ ID NO: 3072718 - DNA, 25 bp, Homo sapien
ggtaataactagttctgactctcaa

SEQ ID NO: 3072719 - DNA, 25 bp, Homo sapien
gagattgtttctactctccgagagt

SEQ ID NO: 3072720 - DNA, 25 bp, Homo sapien
catcaggctggtttggcaatgctcc

SEQ ID NO: 3072721 - DNA, 25 bp, Homo sapien
tatcagacctggcaagcagctggtg

SEQ ID NO: 3072722 - DNA, 25 bp, Homo sapien
caaatcctacaagagtcacgctgag

SEQ ID NO: 3072723 - DNA, 25 bp, Homo sapien
gcttgtgcctataaacgagaggtca

SEQ ID NO: 3072724 - DNA, 25 bp, Homo sapien
tatgtgaacaccacgtggtgaccca

SEQ ID NO: 3072725 - DNA, 25 bp, Homo sapien
tctactgtaagcatcaagcatctgc

SEQ ID NO: 3072726 - DNA, 25 bp, Homo sapien
tatggcatactgcacctttaagcat

SEQ ID NO: 3072727 - DNA, 25 bp, Homo sapien
ccaagaatactgtgactccaattag

SEQ ID NO: 3072728 - DNA, 25 bp, Homo sapien
tcttatgtcctttgtattgctggga

SEQ ID NO: 3072729 - DNA, 25 bp, Homo sapien
cttatgtcctttgtattgctgggac

SEQ ID NO: 3072730 - DNA, 25 bp, Homo sapien
ctttgtattgctgggacttagcctt

SEQ ID NO: 3072731 - DNA, 25 bp, Homo sapien
tgtcctttgtattgctgggacttag

SEQ ID NO: 3072732 - DNA, 25 bp, Homo sapien
gatgctctgaaaataagggtacttg

SEQ ID NO: 3072733 - DNA, 25 bp, Homo sapien
gactattggattcacattgccatgg

SEQ ID NO: 3072734 - DNA, 25 bp, Homo sapien
aatgtcttacctggcaaccaatcag

SEQ ID NO: 3072735 - DNA, 25 bp, Homo sapien
tgtcctgtgagctcataagatgact

SEQ ID NO: 3072736 - DNA, 25 bp, Homo sapien
atgctggaggctgtagttgatatcc

SEQ ID NO: 3072737 - DNA, 25 bp, Homo sapien
ttaactgacaccaccctacaggata

SEQ ID NO: 3072738 - DNA, 25 bp, Homo sapien
gacaccaccctacaggatagaggtc

SEQ ID NO: 3072739 - DNA, 25 bp, Homo sapien
tgctggaggctgtagttgatatcca

SEQ ID NO: 3072740 - DNA, 25 bp, Homo sapien
tcctcaagagacgatgaataattcg

SEQ ID NO: 3072741 - DNA, 25 bp, Homo sapien
cacatattaaacgtggctccatgag

SEQ ID NO: 3072742 - DNA, 25 bp, Homo sapien
cacgaaatccgtgatttggaacatc

SEQ ID NO: 3072743 - DNA, 25 bp, Homo sapien
gaataattcgagttactgtggctac

SEQ ID NO: 3072744 - DNA, 25 bp, Homo sapien
cagtttccctgaggtagtcaaacca

SEQ ID NO: 3072745 - DNA, 25 bp, Homo sapien
ggtgctgcaatggagccagtttccc

SEQ ID NO: 3072746 - DNA, 25 bp, Homo sapien
actggtgctgcaatggagccagttt

SEQ ID NO: 3072747 - DNA, 25 bp, Homo sapien
tgctgcaatggagccagtttccctg

SEQ ID NO: 3072748 - DNA, 25 bp, Homo sapien
ggtaacagaaccagtcagatccgtc

SEQ ID NO: 3072749 - DNA, 25 bp, Homo sapien
tgcttctgagccatcgatcccaatc

SEQ ID NO: 3072750 - DNA, 25 bp, Homo sapien
aatcatcaggaatccgtcagctagc

SEQ ID NO: 3072751 - DNA, 25 bp, Homo sapien
taatttcacagaaaccgacagggaa

SEQ ID NO: 3072752 - DNA, 25 bp, Homo sapien
ggattacctataactgacctcagag

SEQ ID NO: 3072753 - DNA, 25 bp, Homo sapien
tctatggcagatgctaaggctggtc

SEQ ID NO: 3072754 - DNA, 25 bp, Homo sapien
gaaaagcagtgcgtttgaccatagc

SEQ ID NO: 3072755 - DNA, 25 bp, Homo sapien
tgtcacggcatcatgaaactgggct

SEQ ID NO: 3072756 - DNA, 25 bp, Homo sapien
agtctcttatcaccttctggtctac

SEQ ID NO: 3072757 - DNA, 25 bp, Homo sapien
ggtctaccaatcaatcttctcatct

SEQ ID NO: 3072758 - DNA, 25 bp, Homo sapien
tctcctagtctcttatcaccttctg

SEQ ID NO: 3072759 - DNA, 25 bp, Homo sapien
cttctggtctaccaatcaatcttct

SEQ ID NO: 3072760 - DNA, 25 bp, Homo sapien
agatttaatgggtctatagcttcca

SEQ ID NO: 3072761 - DNA, 25 bp, Homo sapien
aatggttgcgacacatattgtagaa

SEQ ID NO: 3072762 - DNA, 25 bp, Homo sapien
gaaagatttaatgggtctatagctt

SEQ ID NO: 3072763 - DNA, 25 bp, Homo sapien
ctttctaatggttgcgacacatatt

SEQ ID NO: 3072764 - DNA, 25 bp, Homo sapien
tccttgaaccattccccactctggt

SEQ ID NO: 3072765 - DNA, 25 bp, Homo sapien
ccttccttgaaccattccccactct

SEQ ID NO: 3072766 - DNA, 25 bp, Homo sapien
ttgaaccattccccactctggtcta

SEQ ID NO: 3072767 - DNA, 25 bp, Homo sapien
gaaccattccccactctggtctact

SEQ ID NO: 3072768 - DNA, 25 bp, Homo sapien
ggtgtatcaaaatgtccatcctgtt

SEQ ID NO: 3072769 - DNA, 25 bp, Homo sapien
agcaaataaatgtggtggtgtatca

SEQ ID NO: 3072770 - DNA, 25 bp, Homo sapien
cttagcaaataaatgtggtggtgta

SEQ ID NO: 3072771 - DNA, 25 bp, Homo sapien
aatgtggtggtgtatcaaaatgtcc

SEQ ID NO: 3072772 - DNA, 25 bp, Homo sapien
tactcgtgttcgacacaaatgcctc

SEQ ID NO: 3072773 - DNA, 25 bp, Homo sapien
catgcaaggtttgaaaggatactgc

SEQ ID NO: 3072774 - DNA, 25 bp, Homo sapien
tatgcttcgagaccaaccaatatga

SEQ ID NO: 3072775 - DNA, 25 bp, Homo sapien
tattaatgggctgtgcatatggcac

SEQ ID NO: 3072776 - DNA, 25 bp, Homo sapien
caccagtaagtcgtttcactagaaa

SEQ ID NO: 3072777 - DNA, 25 bp, Homo sapien
tggcaccagtaagtcgtttcactag

SEQ ID NO: 3072778 - DNA, 25 bp, Homo sapien
cagtaagtcgtttcactagaaaagc

SEQ ID NO: 3072779 - DNA, 25 bp, Homo sapien
gttttggcaccagtaagtcgtttca

SEQ ID NO: 3072780 - DNA, 25 bp, Homo sapien
gaggaacaagaggttttccgctggc

SEQ ID NO: 3072781 - DNA, 25 bp, Homo sapien
aggttttccgctggctgcacaccaa

SEQ ID NO: 3072782 - DNA, 25 bp, Homo sapien
tatattgcaccagaagtccagacca

SEQ ID NO: 3072783 - DNA, 25 bp, Homo sapien
aactggatggatatcagaaccacat

SEQ ID NO: 3072784 - DNA, 25 bp, Homo sapien
tactcctgggtaatttgaatgtggc

SEQ ID NO: 3072785 - DNA, 25 bp, Homo sapien
gcttaggtggccaattactcctggg

SEQ ID NO: 3072786 - DNA, 25 bp, Homo sapien
aatttttctgtcgtatgtatttgga

SEQ ID NO: 3072787 - DNA, 25 bp, Homo sapien
caaagaaattgctttatccagctgc

SEQ ID NO: 3072788 - DNA, 25 bp, Homo sapien
agttctactggaacacaatcatgtc

SEQ ID NO: 3072789 - DNA, 25 bp, Homo sapien
tattgctaagggtgctttcatgcta

SEQ ID NO: 3072790 - DNA, 25 bp, Homo sapien
tagagacggatagctgtgacagaga

SEQ ID NO: 3072791 - DNA, 25 bp, Homo sapien
cctatatatctggtctattgctgga

SEQ ID NO: 3072792 - DNA, 25 bp, Homo sapien
gcaatccagaagactttggtaggta

SEQ ID NO: 3072793 - DNA, 25 bp, Homo sapien
gcagtctgtattgggaacttctact

SEQ ID NO: 3072794 - DNA, 25 bp, Homo sapien
caattccagcaatccagaagacttt

SEQ ID NO: 3072795 - DNA, 25 bp, Homo sapien
tggtaggtaggctgcagtctgtatt

SEQ ID NO: 3072796 - DNA, 25 bp, Homo sapien
aaaacaattccaatcagcagtgtgg

SEQ ID NO: 3072797 - DNA, 25 bp, Homo sapien
gatctggcctaagagcagaaagaaa

SEQ ID NO: 3072798 - DNA, 25 bp, Homo sapien
cctaatatgagatttaagcagcgat

SEQ ID NO: 3072799 - DNA, 25 bp, Homo sapien
catagatggacgtgagggaaaagca

SEQ ID NO: 3072800 - DNA, 25 bp, Homo sapien
tcctcccaaacaaggaagatctgct

SEQ ID NO: 3072801 - DNA, 25 bp, Homo sapien
ggctatctgggagcgactctccttc

SEQ ID NO: 3072802 - DNA, 25 bp, Homo sapien
ttccagactcaggacgcgaggtcca

SEQ ID NO: 3072803 - DNA, 25 bp, Homo sapien
tccagggccactcgtgagggctatc

SEQ ID NO: 3072804 - DNA, 25 bp, Homo sapien
ctgcaaggtaagctgtcatcaggtc

SEQ ID NO: 3072805 - DNA, 25 bp, Homo sapien
aataatgggaaatagaagtgcttca

SEQ ID NO: 3072806 - DNA, 25 bp, Homo sapien
tttagcccgtgctacaatacccagg

SEQ ID NO: 3072807 - DNA, 25 bp, Homo sapien
tacttgatttcacatggcaaataat

SEQ ID NO: 3072808 - DNA, 25 bp, Homo sapien
tctgatcttagtaaagacagcatca

SEQ ID NO: 3072809 - DNA, 25 bp, Homo sapien
taggtcaaatcgtatgacattgtca

SEQ ID NO: 3072810 - DNA, 25 bp, Homo sapien
tctgaattatcagttcaaattgcag

SEQ ID NO: 3072811 - DNA, 25 bp, Homo sapien
acaatgaatggtttgttaggtcaaa

SEQ ID NO: 3072812 - DNA, 25 bp, Homo sapien
taaatgctctgtaacaatccacttg

SEQ ID NO: 3072813 - DNA, 25 bp, Homo sapien
atgtagttaccccagctgaaacctt

SEQ ID NO: 3072814 - DNA, 25 bp, Homo sapien
ttaaaacaggtaaccggagctgcta

SEQ ID NO: 3072815 - DNA, 25 bp, Homo sapien
tataaagctattgctattgatgtag

SEQ ID NO: 3072816 - DNA, 25 bp, Homo sapien
caggtaaccggagctgctataaagc

SEQ ID NO: 3072817 - DNA, 25 bp, Homo sapien
taagaaggttatcattgttaaaatg

SEQ ID NO: 3072818 - DNA, 25 bp, Homo sapien
aacttctctaaatagcatgagcttt

SEQ ID NO: 3072819 - DNA, 25 bp, Homo sapien
agcatgagctttggcttatatcata

SEQ ID NO: 3072820 - DNA, 25 bp, Homo sapien
aggttatcattgttaaaatgtgtga

SEQ ID NO: 3072821 - DNA, 25 bp, Homo sapien
gcttgattttgcaaggtagcttgat

SEQ ID NO: 3072822 - DNA, 25 bp, Homo sapien
tgatactgagcatatgcggctagct

SEQ ID NO: 3072823 - DNA, 25 bp, Homo sapien
catatgcggctagcttagcaactaa

SEQ ID NO: 3072824 - DNA, 25 bp, Homo sapien
gcaactaaaggttgtttctgaagaa

SEQ ID NO: 3072825 - DNA, 25 bp, Homo sapien
acttcttgaacatgaaacgctacag

SEQ ID NO: 3072826 - DNA, 25 bp, Homo sapien
ttcttggagtttgacgagtaacttc

SEQ ID NO: 3072827 - DNA, 25 bp, Homo sapien
tgaaacgctacagaaacgctttgtt

SEQ ID NO: 3072828 - DNA, 25 bp, Homo sapien
gagtaaaaagcatctcggacgccaa

SEQ ID NO: 3072829 - DNA, 25 bp, Homo sapien
tctgggtatgtgtagacttgcccat

SEQ ID NO: 3072830 - DNA, 25 bp, Homo sapien
taaaggagcgacttcttcctcactc

SEQ ID NO: 3072831 - DNA, 25 bp, Homo sapien
tcctcactctcttcggagctggagc

SEQ ID NO: 3072832 - DNA, 25 bp, Homo sapien
cactgcagctatcataaccgtcaaa

SEQ ID NO: 3072833 - DNA, 25 bp, Homo sapien
tttcctttcagatcgtgaagaatgt

SEQ ID NO: 3072834 - DNA, 25 bp, Homo sapien
cttttcctttcagatcgtgaagaat

SEQ ID NO: 3072835 - DNA, 25 bp, Homo sapien
cctttcagatcgtgaagaatgttca

SEQ ID NO: 3072836 - DNA, 25 bp, Homo sapien
tttcagatcgtgaagaatgttcagt

SEQ ID NO: 3072837 - DNA, 25 bp, Homo sapien
gaataaacccctggatgcacccagc

SEQ ID NO: 3072838 - DNA, 25 bp, Homo sapien
tttcctcacgtcaaggtcttctgga

SEQ ID NO: 3072839 - DNA, 25 bp, Homo sapien
tttccatggtcctagcacacacaga

SEQ ID NO: 3072840 - DNA, 25 bp, Homo sapien
taaggcctctgactgtcctaagtat

SEQ ID NO: 3072841 - DNA, 25 bp, Homo sapien
taaagtggttccaggctaccagtgc

SEQ ID NO: 3072842 - DNA, 25 bp, Homo sapien
cattggaattgacagagacagaaca

SEQ ID NO: 3072843 - DNA, 25 bp, Homo sapien
caattttatcaagtatgagcgcacg

SEQ ID NO: 3072844 - DNA, 25 bp, Homo sapien
caggtccacgctctcggtgaagagg

SEQ ID NO: 3072845 - DNA, 25 bp, Homo sapien
cacttttctctagactgactactga

SEQ ID NO: 3072846 - DNA, 25 bp, Homo sapien
aacagccttggtatcttttagtggg

SEQ ID NO: 3072847 - DNA, 25 bp, Homo sapien
cactggacaaagtatacacacatgt

SEQ ID NO: 3072848 - DNA, 25 bp, Homo sapien
tcttgcataataagatactccaggc

SEQ ID NO: 3072849 - DNA, 25 bp, Homo sapien
acattttcttataactggagcacag

SEQ ID NO: 3072850 - DNA, 25 bp, Homo sapien
caatgaagtcctgtgtactctactc

SEQ ID NO: 3072851 - DNA, 25 bp, Homo sapien
ggagcacagttatcagttttaggaa

SEQ ID NO: 3072852 - DNA, 25 bp, Homo sapien
aagtcgtatctatctctttagtgtc

SEQ ID NO: 3072853 - DNA, 25 bp, Homo sapien
taaggtttgtgtactctgaaccagc

SEQ ID NO: 3072854 - DNA, 25 bp, Homo sapien
ctcaaggacagtggatgtctttcca

SEQ ID NO: 3072855 - DNA, 25 bp, Homo sapien
tatctgtggtgtcatgtccatgctc

SEQ ID NO: 3072856 - DNA, 25 bp, Homo sapien
gtcactatctcagttgcctatgtgg

SEQ ID NO: 3072857 - DNA, 25 bp, Homo sapien
gattggttcatcaactagacgtata

SEQ ID NO: 3072858 - DNA, 25 bp, Homo sapien
tccctcaagggtccaagattggttc

SEQ ID NO: 3072859 - DNA, 25 bp, Homo sapien
tagcatcgggagtatctggtcaggc

SEQ ID NO: 3072860 - DNA, 25 bp, Homo sapien
ccagtcctgagttctattagctttg

SEQ ID NO: 3072861 - DNA, 25 bp, Homo sapien
ccttttttacccactacatcttgtg

SEQ ID NO: 3072862 - DNA, 25 bp, Homo sapien
ttgtgctaagtgtcaaagtccccta

SEQ ID NO: 3072863 - DNA, 25 bp, Homo sapien
tggggggaagcagtatattcttgat

SEQ ID NO: 3072864 - DNA, 25 bp, Homo sapien
ttagggatatacttgaagattcaca

SEQ ID NO: 3072865 - DNA, 25 bp, Homo sapien
taaacgagtacagtattccctgagt

SEQ ID NO: 3072866 - DNA, 25 bp, Homo sapien
taaaatccttggctagcagtcactt

SEQ ID NO: 3072867 - DNA, 25 bp, Homo sapien
aagtcatccttttcgagtgtcctca

SEQ ID NO: 3072868 - DNA, 25 bp, Homo sapien
taatacctggacaacagttagctgg

SEQ ID NO: 3072869 - DNA, 25 bp, Homo sapien
tcagcacttaaatctgtagcagcgc

SEQ ID NO: 3072870 - DNA, 25 bp, Homo sapien
caatactggttctgtcagctagcct

SEQ ID NO: 3072871 - DNA, 25 bp, Homo sapien
gcagtggcccaaataggctaagcaa

SEQ ID NO: 3072872 - DNA, 25 bp, Homo sapien
tgtttcaggtaacgtgccttcatga

SEQ ID NO: 3072873 - DNA, 25 bp, Homo sapien
gaacttcattgtcctactgtaactg

SEQ ID NO: 3072874 - DNA, 25 bp, Homo sapien
tgcaggtgtcaataaacatggagcc

SEQ ID NO: 3072875 - DNA, 25 bp, Homo sapien
taactgtcacttaggtaaaccatcc

SEQ ID NO: 3072876 - DNA, 25 bp, Homo sapien
gaagagatcacaaatcacaacagaa

SEQ ID NO: 3072877 - DNA, 25 bp, Homo sapien
aacattcctgtcctacaattaagac

SEQ ID NO: 3072878 - DNA, 25 bp, Homo sapien
aattaagactgcaaacggtggccaa

SEQ ID NO: 3072879 - DNA, 25 bp, Homo sapien
taattgggccacaacgttgaacaaa

SEQ ID NO: 3072880 - DNA, 25 bp, Homo sapien
ggaaagcctgggaacacatcttaac

SEQ ID NO: 3072881 - DNA, 25 bp, Homo sapien
gctgctttggatgacctctaatgtc

SEQ ID NO: 3072882 - DNA, 25 bp, Homo sapien
ggctgcagaggggacggctgctttg

SEQ ID NO: 3072883 - DNA, 25 bp, Homo sapien
gatgacctctaatgtctcttccgac

SEQ ID NO: 3072884 - DNA, 25 bp, Homo sapien
gaggggacggctgctttggatgacc

SEQ ID NO: 3072885 - DNA, 25 bp, Homo sapien
caaagcggctgccgcgctcggctct

SEQ ID NO: 3072886 - DNA, 25 bp, Homo sapien
aaagcggctgccgcgctcggctctc

SEQ ID NO: 3072887 - DNA, 25 bp, Homo sapien
acaaagcggctgccgcgctcggctc

SEQ ID NO: 3072888 - DNA, 25 bp, Homo sapien
agcggctgccgcgctcggctctcac

SEQ ID NO: 3072889 - DNA, 25 bp, Homo sapien
tcatgggtaggggttgtccgtgctc

SEQ ID NO: 3072890 - DNA, 25 bp, Homo sapien
gctgggcccagaccggtggcgggtg

SEQ ID NO: 3072891 - DNA, 25 bp, Homo sapien
gggactgcggcgactacagggggcc

SEQ ID NO: 3072892 - DNA, 25 bp, Homo sapien
gttgtccgtgctccccgagcccgcg

SEQ ID NO: 3072893 - DNA, 25 bp, Homo sapien
tctgctttgcgaactgtggtcgtga

SEQ ID NO: 3072894 - DNA, 25 bp, Homo sapien
tcgagaacgacgaggacgcgttgct

SEQ ID NO: 3072895 - DNA, 25 bp, Homo sapien
tttcgctgctgctcgactccgctag

SEQ ID NO: 3072896 - DNA, 25 bp, Homo sapien
ggcgccgctgctcgggtatctgctt

SEQ ID NO: 3072897 - DNA, 25 bp, Homo sapien
ggagtgtagcggcacctattagtct

SEQ ID NO: 3072898 - DNA, 25 bp, Homo sapien
agagatacggtctaactttgtcacc

SEQ ID NO: 3072899 - DNA, 25 bp, Homo sapien
tgttggtcacagataaattacacct

SEQ ID NO: 3072900 - DNA, 25 bp, Homo sapien
tccgaacactttaaactcagaagtc

SEQ ID NO: 3072901 - DNA, 25 bp, Homo sapien
ccatgggcagtttggaacctacatt

SEQ ID NO: 3072902 - DNA, 25 bp, Homo sapien
gctaaaaagaaggtagctcacacca

SEQ ID NO: 3072903 - DNA, 25 bp, Homo sapien
aaatgggcacaatgatagtaactac

SEQ ID NO: 3072904 - DNA, 25 bp, Homo sapien
cataggaactgtcatggatgagaat

SEQ ID NO: 3072905 - DNA, 25 bp, Homo sapien
tagggaagactagggtgcaataacc

SEQ ID NO: 3072906 - DNA, 25 bp, Homo sapien
tttaagaccagaccgggtgacatgg

SEQ ID NO: 3072907 - DNA, 25 bp, Homo sapien
cctgcctgggcagagactactaagc

SEQ ID NO: 3072908 - DNA, 25 bp, Homo sapien
taagtgataagtgccaccgtactcc

SEQ ID NO: 3072909 - DNA, 25 bp, Homo sapien
tatacgcctcttcgggtaagacaac

SEQ ID NO: 3072910 - DNA, 25 bp, Homo sapien
cactagtgtagggatagtcttgcac

SEQ ID NO: 3072911 - DNA, 25 bp, Homo sapien
tctccaagtagaggagcacaggtgg

SEQ ID NO: 3072912 - DNA, 25 bp, Homo sapien
gagctttgaagtctccccagatggg

SEQ ID NO: 3072913 - DNA, 25 bp, Homo sapien
tataaagtctgacctagaagtgtgg

SEQ ID NO: 3072914 - DNA, 25 bp, Homo sapien
taactgcccagctgaatgataacgg

SEQ ID NO: 3072915 - DNA, 25 bp, Homo sapien
tcacattgatgccacgctgtgcagg

SEQ ID NO: 3072916 - DNA, 25 bp, Homo sapien
cctaatatgtgactgactgaaacca

SEQ ID NO: 3072917 - DNA, 25 bp, Homo sapien
tgtgccgctgaattccagccttggt

SEQ ID NO: 3072918 - DNA, 25 bp, Homo sapien
gtgccgctgaattccagccttggtg

SEQ ID NO: 3072919 - DNA, 25 bp, Homo sapien
gccagcagccggcaaatgcattttc

SEQ ID NO: 3072920 - DNA, 25 bp, Homo sapien
acctaagcagtgataaaattccctc

SEQ ID NO: 3072921 - DNA, 25 bp, Homo sapien
tccctcattgtagatcctacctctt

SEQ ID NO: 3072922 - DNA, 25 bp, Homo sapien
ttctcattgacacctaagcagtgat

SEQ ID NO: 3072923 - DNA, 25 bp, Homo sapien
aagatgcaatgagccgtggtcctgt

SEQ ID NO: 3072924 - DNA, 25 bp, Homo sapien
aggtcaaagatgcaatgagccgtgg

SEQ ID NO: 3072925 - DNA, 25 bp, Homo sapien
tgcaatgagccgtggtcctgtcact

SEQ ID NO: 3072926 - DNA, 25 bp, Homo sapien
aatgagccgtggtcctgtcactgca

SEQ ID NO: 3072927 - DNA, 25 bp, Homo sapien
cttctgaaatgaaggggtgtttcac

SEQ ID NO: 3072928 - DNA, 25 bp, Homo sapien
tgaaggggtgtttcacttgtggact

SEQ ID NO: 3072929 - DNA, 25 bp, Homo sapien
gatgctgggtaagttgctgaacgtc

SEQ ID NO: 3072930 - DNA, 25 bp, Homo sapien
gtttcacttgtggactgggtgatgc

SEQ ID NO: 3072931 - DNA, 25 bp, Homo sapien
atcttggctcctccgcccctgtatt

SEQ ID NO: 3072932 - DNA, 25 bp, Homo sapien
catcttggctcctccgcccctgtat

SEQ ID NO: 3072933 - DNA, 25 bp, Homo sapien
cctgtatttttttatatatatctgt

SEQ ID NO: 3072934 - DNA, 25 bp, Homo sapien
tgcaagtaagtacaagagccaggac

SEQ ID NO: 3072935 - DNA, 25 bp, Homo sapien
tacgaggaatgtgcttcggatcaac

SEQ ID NO: 3072936 - DNA, 25 bp, Homo sapien
tagtgagcacttatcagtgtaccgg

SEQ ID NO: 3072937 - DNA, 25 bp, Homo sapien
gccttggaccatgcaatattgatga

SEQ ID NO: 3072938 - DNA, 25 bp, Homo sapien
gatcagggccacaacaactttctgg

SEQ ID NO: 3072939 - DNA, 25 bp, Homo sapien
gaacacagtcttacgggtgctcaga

SEQ ID NO: 3072940 - DNA, 25 bp, Homo sapien
cattcattcagtgtgccagattcgg

SEQ ID NO: 3072941 - DNA, 25 bp, Homo sapien
gagatgtgcacagggttccatgaga

SEQ ID NO: 3072942 - DNA, 25 bp, Homo sapien
ctctcttggagaggccagtcttgag

SEQ ID NO: 3072943 - DNA, 25 bp, Homo sapien
tatgctggctgtcctctatggagca

SEQ ID NO: 3072944 - DNA, 25 bp, Homo sapien
cacagttttctcttggcgatgggct

SEQ ID NO: 3072945 - DNA, 25 bp, Homo sapien
atgccagtgactgggcactcagacc

SEQ ID NO: 3072946 - DNA, 25 bp, Homo sapien
tccattccaaaggatgccggtgaag

SEQ ID NO: 3072947 - DNA, 25 bp, Homo sapien
tgttttggaataagaagtaatcatc

SEQ ID NO: 3072948 - DNA, 25 bp, Homo sapien
catccaggactgaccaacttgcttt

SEQ ID NO: 3072949 - DNA, 25 bp, Homo sapien
aaagcccggctcaatcatgcaggat

SEQ ID NO: 3072950 - DNA, 25 bp, Homo sapien
agcagcagcatctgaaccgaaggct

SEQ ID NO: 3072951 - DNA, 25 bp, Homo sapien
gcagcatctgaaccgaaggctgcat

SEQ ID NO: 3072952 - DNA, 25 bp, Homo sapien
ttcttcccacaggactgccagcagc

SEQ ID NO: 3072953 - DNA, 25 bp, Homo sapien
cttcttcccacaggactgccagcag

SEQ ID NO: 3072954 - DNA, 25 bp, Homo sapien
tttcggaggagggttgtgaatacat

SEQ ID NO: 3072955 - DNA, 25 bp, Homo sapien
cggaggagggttgtgaatacatcat

SEQ ID NO: 3072956 - DNA, 25 bp, Homo sapien
tgaaagccaaatcagtcctttgtgt

SEQ ID NO: 3072957 - DNA, 25 bp, Homo sapien
gccaaatcagtcctttgtgttgctt

SEQ ID NO: 3072958 - DNA, 25 bp, Homo sapien
ttcagagtgtggacgctgaccacgt

SEQ ID NO: 3072959 - DNA, 25 bp, Homo sapien
gatctgagagacatggccatgacca

SEQ ID NO: 3072960 - DNA, 25 bp, Homo sapien
cccatggactggctggatctgagag

SEQ ID NO: 3072961 - DNA, 25 bp, Homo sapien
tcatccgggtctagggaggcgccga

SEQ ID NO: 3072962 - DNA, 25 bp, Homo sapien
ggccgtagtcaatttgggcacacag

SEQ ID NO: 3072963 - DNA, 25 bp, Homo sapien
ggtaaggccagtcaagaatcagcat

SEQ ID NO: 3072964 - DNA, 25 bp, Homo sapien
tggttggtgtatttggccgtagtca

SEQ ID NO: 3072965 - DNA, 25 bp, Homo sapien
tcagggtaaggccagtcaagaatca

SEQ ID NO: 3072966 - DNA, 25 bp, Homo sapien
tttaaagagaaggtgtcaatttgtc

SEQ ID NO: 3072967 - DNA, 25 bp, Homo sapien
atttgtctgagctcaaaggatggga

SEQ ID NO: 3072968 - DNA, 25 bp, Homo sapien
ttactcatccgtcctcacaaaaaac

SEQ ID NO: 3072969 - DNA, 25 bp, Homo sapien
gaggttatcctcattcggccaataa

SEQ ID NO: 3072970 - DNA, 25 bp, Homo sapien
tttttgggagaacagccaatgaggt

SEQ ID NO: 3072971 - DNA, 25 bp, Homo sapien
aaagtccagagggtataagccattt

SEQ ID NO: 3072972 - DNA, 25 bp, Homo sapien
acaaagtccagagggtataagccat

SEQ ID NO: 3072973 - DNA, 25 bp, Homo sapien
tcctgcttcgtttgaccaactttct

SEQ ID NO: 3072974 - DNA, 25 bp, Homo sapien
gcttcgtttgaccaactttctgtcc

SEQ ID NO: 3072975 - DNA, 25 bp, Homo sapien
gaccttgactcaggaagaagtgagt

SEQ ID NO: 3072976 - DNA, 25 bp, Homo sapien
aaagaccttgactcaggaagaagtg

SEQ ID NO: 3072977 - DNA, 25 bp, Homo sapien
tgtttcatagagctcaggaagatca

SEQ ID NO: 3072978 - DNA, 25 bp, Homo sapien
ttctgtttcatagagctcaggaaga

SEQ ID NO: 3072979 - DNA, 25 bp, Homo sapien
gaaccaacagcatcttgaaagggag

SEQ ID NO: 3072980 - DNA, 25 bp, Homo sapien
tgaaaggtcaggaggacaccagaac

SEQ ID NO: 3072981 - DNA, 25 bp, Homo sapien
gcatttgatatcgtgaccaccctgg

SEQ ID NO: 3072982 - DNA, 25 bp, Homo sapien
ggccgtggctcaggattcttcagag

SEQ ID NO: 3072983 - DNA, 25 bp, Homo sapien
caggcaagaaagatgtgggctttct

SEQ ID NO: 3072984 - DNA, 25 bp, Homo sapien
tctcatcctgtggagatagccccat

SEQ ID NO: 3072985 - DNA, 25 bp, Homo sapien
ttgcatcttcgttttaatactgaag

SEQ ID NO: 3072986 - DNA, 25 bp, Homo sapien
tgaatgaatgatagtacttctcatc

SEQ ID NO: 3072987 - DNA, 25 bp, Homo sapien
tatattgaatgaatgatagtacttc

SEQ ID NO: 3072988 - DNA, 25 bp, Homo sapien
tactgggaagtctggttacagtgaa

SEQ ID NO: 3072989 - DNA, 25 bp, Homo sapien
ccccacatcagaatactgggaagtc

SEQ ID NO: 3072990 - DNA, 25 bp, Homo sapien
ggttacagtgaatgatgaggacccc

SEQ ID NO: 3072991 - DNA, 25 bp, Homo sapien
cagaatactgggaagtctggttaca

SEQ ID NO: 3072992 - DNA, 25 bp, Homo sapien
catccatacgatgtgaagttgggct

SEQ ID NO: 3072993 - DNA, 25 bp, Homo sapien
gaggactggctttcctactggagag

SEQ ID NO: 3072994 - DNA, 25 bp, Homo sapien
gcttaattgcttcgtgttggtggca

SEQ ID NO: 3072995 - DNA, 25 bp, Homo sapien
gcaagtagtgaattccccagaagct

SEQ ID NO: 3072996 - DNA, 25 bp, Homo sapien
tgaggccagatgaaaatgggccagg

SEQ ID NO: 3072997 - DNA, 25 bp, Homo sapien
ctgaggccagatgaaaatgggccag

SEQ ID NO: 3072998 - DNA, 25 bp, Homo sapien
gccagatgaaaatgggccagggcct

SEQ ID NO: 3072999 - DNA, 25 bp, Homo sapien
aggccagatgaaaatgggccagggc

SEQ ID NO: 3073000 - DNA, 25 bp, Homo sapien
cttgatgaagaggtggttctggtct

SEQ ID NO: 3073001 - DNA, 25 bp, Homo sapien
ccttgatgaagaggtggttctggtc

SEQ ID NO: 3073002 - DNA, 25 bp, Homo sapien
aatgttgttaggtaggcagccagcc

SEQ ID NO: 3073003 - DNA, 25 bp, Homo sapien
ttgaagctccaaggcagttgctgac

SEQ ID NO: 3073004 - DNA, 25 bp, Homo sapien
tgggagactgactatcagttcccgc

SEQ ID NO: 3073005 - DNA, 25 bp, Homo sapien
cagccacagggaccgaggcatttga

SEQ ID NO: 3073006 - DNA, 25 bp, Homo sapien
ccacgctcttcttgaggtcagtctt

SEQ ID NO: 3073007 - DNA, 25 bp, Homo sapien
accacgctcttcttgaggtcagtct

SEQ ID NO: 3073008 - DNA, 25 bp, Homo sapien
cacgctcttcttgaggtcagtcttg

SEQ ID NO: 3073009 - DNA, 25 bp, Homo sapien
cccgcctcgcttttaaaagcttcat

SEQ ID NO: 3073010 - DNA, 25 bp, Homo sapien
cacgccctcccctccccgcctcgct

SEQ ID NO: 3073011 - DNA, 25 bp, Homo sapien
ggttaagtccatcacgttagaagat

SEQ ID NO: 3073012 - DNA, 25 bp, Homo sapien
tatcagaggccatggaatttctgcc

SEQ ID NO: 3073013 - DNA, 25 bp, Homo sapien
tgtcccaggtgtcaaatatgctaag

SEQ ID NO: 3073014 - DNA, 25 bp, Homo sapien
cagttcggtgcgtctctggtagtta

SEQ ID NO: 3073015 - DNA, 25 bp, Homo sapien
cagtcttctagtaagcctgttgatc

SEQ ID NO: 3073016 - DNA, 25 bp, Homo sapien
agttcagtcttctagtaagcctgtt

SEQ ID NO: 3073017 - DNA, 25 bp, Homo sapien
ttcagtcttctagtaagcctgttga

SEQ ID NO: 3073018 - DNA, 25 bp, Homo sapien
ttagttcagtcttctagtaagcctg

SEQ ID NO: 3073019 - DNA, 25 bp, Homo sapien
tgttatctgtcgaagcaactccctt

SEQ ID NO: 3073020 - DNA, 25 bp, Homo sapien
aagtgttatctgtcgaagcaactcc

SEQ ID NO: 3073021 - DNA, 25 bp, Homo sapien
gtgttatctgtcgaagcaactccct

SEQ ID NO: 3073022 - DNA, 25 bp, Homo sapien
ttatctgtcgaagcaactcccttct

SEQ ID NO: 3073023 - DNA, 25 bp, Homo sapien
cattgacacctctgatcctgatgac

SEQ ID NO: 3073024 - DNA, 25 bp, Homo sapien
gggcttacaccattgacacctctga

SEQ ID NO: 3073025 - DNA, 25 bp, Homo sapien
tgggcttacaccattgacacctctg

SEQ ID NO: 3073026 - DNA, 25 bp, Homo sapien
ctttgggcttacaccattgacacct

SEQ ID NO: 3073027 - DNA, 25 bp, Homo sapien
gcttttcttgctatccttggcattt

SEQ ID NO: 3073028 - DNA, 25 bp, Homo sapien
ccagcttttcttgctatccttggca

SEQ ID NO: 3073029 - DNA, 25 bp, Homo sapien
ttcttgctatccttggcatttgaat

SEQ ID NO: 3073030 - DNA, 25 bp, Homo sapien
cttgctatccttggcatttgaattt

SEQ ID NO: 3073031 - DNA, 25 bp, Homo sapien
cttttgaagcatcttttgggcaaac

SEQ ID NO: 3073032 - DNA, 25 bp, Homo sapien
tcttcggctctgcgaaattccttct

SEQ ID NO: 3073033 - DNA, 25 bp, Homo sapien
tcggctctgcgaaattccttctctt

SEQ ID NO: 3073034 - DNA, 25 bp, Homo sapien
ttcggctctgcgaaattccttctct

SEQ ID NO: 3073035 - DNA, 25 bp, Homo sapien
ggctctgcgaaattccttctctttt

SEQ ID NO: 3073036 - DNA, 25 bp, Homo sapien
ttctacaccctccatggttctagcc

SEQ ID NO: 3073037 - DNA, 25 bp, Homo sapien
ctacaccctccatggttctagcctg

SEQ ID NO: 3073038 - DNA, 25 bp, Homo sapien
tcttctacaccctccatggttctag

SEQ ID NO: 3073039 - DNA, 25 bp, Homo sapien
ctcttctacaccctccatggttcta

SEQ ID NO: 3073040 - DNA, 25 bp, Homo sapien
tgtgaaagtgccaacgtctggtttt

SEQ ID NO: 3073041 - DNA, 25 bp, Homo sapien
tctggttttattggctgccggctgc

SEQ ID NO: 3073042 - DNA, 25 bp, Homo sapien
gtcttgaaccttgtgaaagtgccaa

SEQ ID NO: 3073043 - DNA, 25 bp, Homo sapien
accacaggggtcttgaaccttgtga

SEQ ID NO: 3073044 - DNA, 25 bp, Homo sapien
gatgtctgtccctcttaatttttgg

SEQ ID NO: 3073045 - DNA, 25 bp, Homo sapien
tttggctcttatggtttggaggctc

SEQ ID NO: 3073046 - DNA, 25 bp, Homo sapien
ttttggctcttatggtttggaggct

SEQ ID NO: 3073047 - DNA, 25 bp, Homo sapien
taatggtgcggtacacaggagaacc

SEQ ID NO: 3073048 - DNA, 25 bp, Homo sapien
ttgtggtcctcagggttaatggtgc

SEQ ID NO: 3073049 - DNA, 25 bp, Homo sapien
tgcaggtagctttttctgcaaataa

SEQ ID NO: 3073050 - DNA, 25 bp, Homo sapien
cagaccaatggctgatttgtggtcc

SEQ ID NO: 3073051 - DNA, 25 bp, Homo sapien
tcagatgagactcgttgcttggctc

SEQ ID NO: 3073052 - DNA, 25 bp, Homo sapien
cccatttagggactagttctgatgc

SEQ ID NO: 3073053 - DNA, 25 bp, Homo sapien
tagttttcgtccctttgatcctggc

SEQ ID NO: 3073054 - DNA, 25 bp, Homo sapien
cctgctggatgatgggttttggact

SEQ ID NO: 3073055 - DNA, 25 bp, Homo sapien
cgtatagatctatgtggtagccact

SEQ ID NO: 3073056 - DNA, 25 bp, Homo sapien
tgttaatccccaaccaatagcctag

SEQ ID NO: 3073057 - DNA, 25 bp, Homo sapien
gcctgtctgtatggaagcacccgta

SEQ ID NO: 3073058 - DNA, 25 bp, Homo sapien
aatagcctagaattgcccacatcag

SEQ ID NO: 3073059 - DNA, 25 bp, Homo sapien
aaggaaatgatcttgatgttggtca

SEQ ID NO: 3073060 - DNA, 25 bp, Homo sapien
ttggctttgtcattgatacctttca

SEQ ID NO: 3073061 - DNA, 25 bp, Homo sapien
gctcctggtttcagccactcttttg

SEQ ID NO: 3073062 - DNA, 25 bp, Homo sapien
tgtcattgatacctttcaaggaaat

SEQ ID NO: 3073063 - DNA, 25 bp, Homo sapien
ttagttacaatgaaggaccattggg

SEQ ID NO: 3073064 - DNA, 25 bp, Homo sapien
caggtccgaacagtctcttcttgct

SEQ ID NO: 3073065 - DNA, 25 bp, Homo sapien
catatacctatgacacaggagctga

SEQ ID NO: 3073066 - DNA, 25 bp, Homo sapien
gctgagggtcctttgaattagttac

SEQ ID NO: 3073067 - DNA, 25 bp, Homo sapien
gcttgccagcattggactgtagcac

SEQ ID NO: 3073068 - DNA, 25 bp, Homo sapien
tgccagcattggactgtagcaccat

SEQ ID NO: 3073069 - DNA, 25 bp, Homo sapien
cagcttgccagcattggactgtagc

SEQ ID NO: 3073070 - DNA, 25 bp, Homo sapien
tccagcttgccagcattggactgta

SEQ ID NO: 3073071 - DNA, 25 bp, Homo sapien
gagaaatccagatagaccttttaca

SEQ ID NO: 3073072 - DNA, 25 bp, Homo sapien
gcaattaagtaagaagatgttgttg

SEQ ID NO: 3073073 - DNA, 25 bp, Homo sapien
agaccttttacatcaggtaaggcac

SEQ ID NO: 3073074 - DNA, 25 bp, Homo sapien
tatctgtgcaactgaaaaagcagcc

SEQ ID NO: 3073075 - DNA, 25 bp, Homo sapien
tctttgatctcaaatgtgggccgaa

SEQ ID NO: 3073076 - DNA, 25 bp, Homo sapien
gaatgtgctcaaggagagcccaact

SEQ ID NO: 3073077 - DNA, 25 bp, Homo sapien
aagcccgggttgtatgccacttgag

SEQ ID NO: 3073078 - DNA, 25 bp, Homo sapien
ccacttgagtgagggttaagcagtc

SEQ ID NO: 3073079 - DNA, 25 bp, Homo sapien
ggcaaagctggccgatcggcacaca

SEQ ID NO: 3073080 - DNA, 25 bp, Homo sapien
aggcaaagctggccgatcggcacac

SEQ ID NO: 3073081 - DNA, 25 bp, Homo sapien
acaggcaaagctggccgatcggcac

SEQ ID NO: 3073082 - DNA, 25 bp, Homo sapien
caacaggcaaagctggccgatcggc

SEQ ID NO: 3073083 - DNA, 25 bp, Homo sapien
tgacagtaaccaaacacagtgagtg

SEQ ID NO: 3073084 - DNA, 25 bp, Homo sapien
tgaaacgcaagaagtctgtcgcctg

SEQ ID NO: 3073085 - DNA, 25 bp, Homo sapien
caaagtgcattccttcacgggagca

SEQ ID NO: 3073086 - DNA, 25 bp, Homo sapien
gctgaagctcacctcatgtgaatga

SEQ ID NO: 3073087 - DNA, 25 bp, Homo sapien
ggaaggagaacagaccaaagccaga

SEQ ID NO: 3073088 - DNA, 25 bp, Homo sapien
taaggaaggagaacagaccaaagcc

SEQ ID NO: 3073089 - DNA, 25 bp, Homo sapien
gtaaggaaggagaacagaccaaagc

SEQ ID NO: 3073090 - DNA, 25 bp, Homo sapien
ctgtaaggaaggagaacagaccaaa

SEQ ID NO: 3073091 - DNA, 25 bp, Homo sapien
tgatcttggcaaatcctactacaga

SEQ ID NO: 3073092 - DNA, 25 bp, Homo sapien
gaaacttgacttcccatgatggagg

SEQ ID NO: 3073093 - DNA, 25 bp, Homo sapien
taagtgtccttggtcaactttgtcc

SEQ ID NO: 3073094 - DNA, 25 bp, Homo sapien
cattctaggttacgtcaattcacag

SEQ ID NO: 3073095 - DNA, 25 bp, Homo sapien
aaagatctgagatggctggttctgg

SEQ ID NO: 3073096 - DNA, 25 bp, Homo sapien
cggatgcagcggttgttgagtggct

SEQ ID NO: 3073097 - DNA, 25 bp, Homo sapien
agttgatattggtgcggatgcagcg

SEQ ID NO: 3073098 - DNA, 25 bp, Homo sapien
tgggctcggttgtttggacagtcct

SEQ ID NO: 3073099 - DNA, 25 bp, Homo sapien
gatagtcatcgacccatcgtaagtg

SEQ ID NO: 3073100 - DNA, 25 bp, Homo sapien
gttcattatgatccaacttgctgtc

SEQ ID NO: 3073101 - DNA, 25 bp, Homo sapien
cgtaagtgatgaaactagaggtctc

SEQ ID NO: 3073102 - DNA, 25 bp, Homo sapien
tgctgtctcatagcagggtgggata

SEQ ID NO: 3073103 - DNA, 25 bp, Homo sapien
gacctggagaacacatggcagggtc

SEQ ID NO: 3073104 - DNA, 25 bp, Homo sapien
ctggccgagggatgagactgactct

SEQ ID NO: 3073105 - DNA, 25 bp, Homo sapien
ctggctggccgagggatgagactga

SEQ ID NO: 3073106 - DNA, 25 bp, Homo sapien
ggccgagggatgagactgactctcc

SEQ ID NO: 3073107 - DNA, 25 bp, Homo sapien
tttatcttgctttggctcccctttc

SEQ ID NO: 3073108 - DNA, 25 bp, Homo sapien
ttatcttgctttggctcccctttct

SEQ ID NO: 3073109 - DNA, 25 bp, Homo sapien
tctttatcttgctttggctcccctt

SEQ ID NO: 3073110 - DNA, 25 bp, Homo sapien
ctttatcttgctttggctccccttt

SEQ ID NO: 3073111 - DNA, 25 bp, Homo sapien
ctctcttttctgcataatgagtctg

SEQ ID NO: 3073112 - DNA, 25 bp, Homo sapien
ttctgcataatgagtctggggataa

SEQ ID NO: 3073113 - DNA, 25 bp, Homo sapien
ctcttttctgcataatgagtctggg

SEQ ID NO: 3073114 - DNA, 25 bp, Homo sapien
ctgcataatgagtctggggataaaa

SEQ ID NO: 3073115 - DNA, 25 bp, Homo sapien
aaactggacagagtcctctacatcc

SEQ ID NO: 3073116 - DNA, 25 bp, Homo sapien
gaaactggacagagtcctctacatc

SEQ ID NO: 3073117 - DNA, 25 bp, Homo sapien
ggctttctcaatcccgtaattggca

SEQ ID NO: 3073118 - DNA, 25 bp, Homo sapien
tcaatcccgtaattggcaaagcccc

SEQ ID NO: 3073119 - DNA, 25 bp, Homo sapien
atgagggctttctcaatcccgtaat

SEQ ID NO: 3073120 - DNA, 25 bp, Homo sapien
cccgtaattggcaaagccccaactg

SEQ ID NO: 3073121 - DNA, 25 bp, Homo sapien
tgagcattcgattaagaaatgggtt

SEQ ID NO: 3073122 - DNA, 25 bp, Homo sapien
gatagtatctctgttgagcattcga

SEQ ID NO: 3073123 - DNA, 25 bp, Homo sapien
ctctgttgagcattcgattaagaaa

SEQ ID NO: 3073124 - DNA, 25 bp, Homo sapien
tatctctgttgagcattcgattaag

SEQ ID NO: 3073125 - DNA, 25 bp, Homo sapien
ggaaggagctatttagtgcagtgcc

SEQ ID NO: 3073126 - DNA, 25 bp, Homo sapien
tgatttcactgcattaggtgggtcc

SEQ ID NO: 3073127 - DNA, 25 bp, Homo sapien
caaaatgtcataaagtcagtgtggg

SEQ ID NO: 3073128 - DNA, 25 bp, Homo sapien
taatcttattaccagggaggcttat

SEQ ID NO: 3073129 - DNA, 25 bp, Homo sapien
cagcttctgtgacattcgtatatag

SEQ ID NO: 3073130 - DNA, 25 bp, Homo sapien
gacattcgtatatagctcatggtta

SEQ ID NO: 3073131 - DNA, 25 bp, Homo sapien
agaaactaccaccaatccatttgga

SEQ ID NO: 3073132 - DNA, 25 bp, Homo sapien
tagctcatggttatagtggatgagc

SEQ ID NO: 3073133 - DNA, 25 bp, Homo sapien
gccagtaaatcttccttgcagcctc

SEQ ID NO: 3073134 - DNA, 25 bp, Homo sapien
caaacagggagctgttaggtcctga

SEQ ID NO: 3073135 - DNA, 25 bp, Homo sapien
cttgcagcctcggagcaaacaggga

SEQ ID NO: 3073136 - DNA, 25 bp, Homo sapien
ggagctgttaggtcctgagtcagcc

SEQ ID NO: 3073137 - DNA, 25 bp, Homo sapien
aacttcttcccactgatacaggtga

SEQ ID NO: 3073138 - DNA, 25 bp, Homo sapien
ctgccaggggatgtgccagtgcttc

SEQ ID NO: 3073139 - DNA, 25 bp, Homo sapien
gccagtgcttccagacatgccttga

SEQ ID NO: 3073140 - DNA, 25 bp, Homo sapien
cttcttcccactgatacaggtgacc

SEQ ID NO: 3073141 - DNA, 25 bp, Homo sapien
ctcctaccatgactttgggcttggg

SEQ ID NO: 3073142 - DNA, 25 bp, Homo sapien
cactgcttctcctaccatgactttg

SEQ ID NO: 3073143 - DNA, 25 bp, Homo sapien
ggagcagcaatgtgcaaaccacatc

SEQ ID NO: 3073144 - DNA, 25 bp, Homo sapien
gggagcagcaatgtgcaaaccacat

SEQ ID NO: 3073145 - DNA, 25 bp, Homo sapien
tatgcaagcaatagataatacagcc

SEQ ID NO: 3073146 - DNA, 25 bp, Homo sapien
gacattgagtctgttctcccaagga

SEQ ID NO: 3073147 - DNA, 25 bp, Homo sapien
tgcattccgaatggctcatactgta

SEQ ID NO: 3073148 - DNA, 25 bp, Homo sapien
gaaacttgaggaaggtgtcacctat

SEQ ID NO: 3073149 - DNA, 25 bp, Homo sapien
tctcttttaggattgttgctatttc

SEQ ID NO: 3073150 - DNA, 25 bp, Homo sapien
tatttctgtggaagagtttgtccca

SEQ ID NO: 3073151 - DNA, 25 bp, Homo sapien
gtttgtcccatgagaaccactgtac

SEQ ID NO: 3073152 - DNA, 25 bp, Homo sapien
ccactgtactggtatgtgtagggca

SEQ ID NO: 3073153 - DNA, 25 bp, Homo sapien
taaaatatgggcttgactgtgcttt

SEQ ID NO: 3073154 - DNA, 25 bp, Homo sapien
ttctctgcttgtagcagttcctcca

SEQ ID NO: 3073155 - DNA, 25 bp, Homo sapien
aaaatatgggcttgactgtgctttc

SEQ ID NO: 3073156 - DNA, 25 bp, Homo sapien
ctgcttgtagcagttcctccatagc

SEQ ID NO: 3073157 - DNA, 25 bp, Homo sapien
ctgagttgaacagtcttgtggcctt

SEQ ID NO: 3073158 - DNA, 25 bp, Homo sapien
gcctatcacattggatggtttcagg

SEQ ID NO: 3073159 - DNA, 25 bp, Homo sapien
tcaggaaagggccattctttgcttt

SEQ ID NO: 3073160 - DNA, 25 bp, Homo sapien
tcttgtggccttaatgcctatcaca

SEQ ID NO: 3073161 - DNA, 25 bp, Homo sapien
tgagaaaatgaaccccctagcccca

SEQ ID NO: 3073162 - DNA, 25 bp, Homo sapien
agtgatgagaaaatgaaccccctag

SEQ ID NO: 3073163 - DNA, 25 bp, Homo sapien
aatgaaccccctagccccagccagc

SEQ ID NO: 3073164 - DNA, 25 bp, Homo sapien
tgatgagaaaatgaaccccctagcc

SEQ ID NO: 3073165 - DNA, 25 bp, Homo sapien
tagcttacatcgctgacacatctgg

SEQ ID NO: 3073166 - DNA, 25 bp, Homo sapien
tttaactacccaaaacgtgccatgc

SEQ ID NO: 3073167 - DNA, 25 bp, Homo sapien
gattaagtactaagtgccagcctcc

SEQ ID NO: 3073168 - DNA, 25 bp, Homo sapien
tggtttctagcatagcagggcacct

SEQ ID NO: 3073169 - DNA, 25 bp, Homo sapien
cttccgtctggctggctcatctgga

SEQ ID NO: 3073170 - DNA, 25 bp, Homo sapien
ttccgtctggctggctcatctggac

SEQ ID NO: 3073171 - DNA, 25 bp, Homo sapien
tccgtctggctggctcatctggacc

SEQ ID NO: 3073172 - DNA, 25 bp, Homo sapien
tccctttgacagtccagttctgcat

SEQ ID NO: 3073173 - DNA, 25 bp, Homo sapien
aattctccccagcagatgtgtatac

SEQ ID NO: 3073174 - DNA, 25 bp, Homo sapien
gacaagtctacttgcatgtcccgac

SEQ ID NO: 3073175 - DNA, 25 bp, Homo sapien
ccccatgtgggtatcaatctcttta

SEQ ID NO: 3073176 - DNA, 25 bp, Homo sapien
gatctagtttagcagccgacgtttt

SEQ ID NO: 3073177 - DNA, 25 bp, Homo sapien
gagggcggtttgatctagtttagca

SEQ ID NO: 3073178 - DNA, 25 bp, Homo sapien
ggtttgatctagtttagcagccgac

SEQ ID NO: 3073179 - DNA, 25 bp, Homo sapien
aactggagggcggtttgatctagtt

SEQ ID NO: 3073180 - DNA, 25 bp, Homo sapien
ctttcacagagcagttggcatttgt

SEQ ID NO: 3073181 - DNA, 25 bp, Homo sapien
taattcttcaggaggaaaggtcttc

SEQ ID NO: 3073182 - DNA, 25 bp, Homo sapien
tgagtgttttcagagtaataatcac

SEQ ID NO: 3073183 - DNA, 25 bp, Homo sapien
ggatgtaatctcctgctttcacttt

SEQ ID NO: 3073184 - DNA, 25 bp, Homo sapien
gcatcagaggtacccaatatccaca

SEQ ID NO: 3073185 - DNA, 25 bp, Homo sapien
tcacgatcttcacacttttgacggg

SEQ ID NO: 3073186 - DNA, 25 bp, Homo sapien
gatgctctcttacaattattctggg

SEQ ID NO: 3073187 - DNA, 25 bp, Homo sapien
tccaatctgtgatagatcctcagtc

SEQ ID NO: 3073188 - DNA, 25 bp, Homo sapien
cagactgtaatgtaggaatctattt

SEQ ID NO: 3073189 - DNA, 25 bp, Homo sapien
tccttagttggattccttttctaca

SEQ ID NO: 3073190 - DNA, 25 bp, Homo sapien
tcataattgaacctagagattggca

SEQ ID NO: 3073191 - DNA, 25 bp, Homo sapien
gggcaagaattatgaattactcata

SEQ ID NO: 3073192 - DNA, 25 bp, Homo sapien
tcgcctcactgttgttccgtctcgt

SEQ ID NO: 3073193 - DNA, 25 bp, Homo sapien
gctggctccattgaaagccacgctt

SEQ ID NO: 3073194 - DNA, 25 bp, Homo sapien
ttgccacacgctccagggaattaga

SEQ ID NO: 3073195 - DNA, 25 bp, Homo sapien
tagatgaattaaagccaagggctgg

SEQ ID NO: 3073196 - DNA, 25 bp, Homo sapien
aacttgtgcaagaagattttacttc

SEQ ID NO: 3073197 - DNA, 25 bp, Homo sapien
tatacgtgatggcaaacttgtgcaa

SEQ ID NO: 3073198 - DNA, 25 bp, Homo sapien
ttttacttccataggcctcttggtg

SEQ ID NO: 3073199 - DNA, 25 bp, Homo sapien
gactccttaatcaatggtttatacg

SEQ ID NO: 3073200 - DNA, 25 bp, Homo sapien
tagacatcgaatgatttaatttagc

SEQ ID NO: 3073201 - DNA, 25 bp, Homo sapien
ttattttgaattgtagagcagcaca

SEQ ID NO: 3073202 - DNA, 25 bp, Homo sapien
acatccatggagcagctagacatcg

SEQ ID NO: 3073203 - DNA, 25 bp, Homo sapien
gaattgtagagcagcacatccatgg

SEQ ID NO: 3073204 - DNA, 25 bp, Homo sapien
ttgtccaggcgaagggatacgtgtc

SEQ ID NO: 3073205 - DNA, 25 bp, Homo sapien
cattgaggaggtgctccgacccttg

SEQ ID NO: 3073206 - DNA, 25 bp, Homo sapien
ccaaagtgtagtcggatctcctcca

SEQ ID NO: 3073207 - DNA, 25 bp, Homo sapien
catgggccctccagatatgttgacc

SEQ ID NO: 3073208 - DNA, 25 bp, Homo sapien
aggcaattagcaacaggtcaagcaa

SEQ ID NO: 3073209 - DNA, 25 bp, Homo sapien
ggccctccttcttctatgcctcccc

SEQ ID NO: 3073210 - DNA, 25 bp, Homo sapien
acaggtcaagcaaggccctccttct

SEQ ID NO: 3073211 - DNA, 25 bp, Homo sapien
ttagcaacaggtcaagcaaggccct

SEQ ID NO: 3073212 - DNA, 25 bp, Homo sapien
ctcttgatgggaagatgggctaaat

SEQ ID NO: 3073213 - DNA, 25 bp, Homo sapien
tgccccagagggtatatgtgggatc

SEQ ID NO: 3073214 - DNA, 25 bp, Homo sapien
taaatccacatgtggagtagggcgt

SEQ ID NO: 3073215 - DNA, 25 bp, Homo sapien
gatctatggtaatttctgtgaggca

SEQ ID NO: 3073216 - DNA, 25 bp, Homo sapien
tccttattcctgattccatcttgct

SEQ ID NO: 3073217 - DNA, 25 bp, Homo sapien
gccccttcaaactgctaacatgact

SEQ ID NO: 3073218 - DNA, 25 bp, Homo sapien
tcttttcttgctgggacttgatgtt

SEQ ID NO: 3073219 - DNA, 25 bp, Homo sapien
gctaacatgactgcttggcattcct

SEQ ID NO: 3073220 - DNA, 25 bp, Homo sapien
tctatggcactttccatagaagcaa

SEQ ID NO: 3073221 - DNA, 25 bp, Homo sapien
tatggcactttccatagaagcaaac

SEQ ID NO: 3073222 - DNA, 25 bp, Homo sapien
actttccatagaagcaaactgccat

SEQ ID NO: 3073223 - DNA, 25 bp, Homo sapien
ggcactttccatagaagcaaactgc

SEQ ID NO: 3073224 - DNA, 25 bp, Homo sapien
catctcttggatgtctttggggcag

SEQ ID NO: 3073225 - DNA, 25 bp, Homo sapien
cagcagacagggtaaatcagtgaga

SEQ ID NO: 3073226 - DNA, 25 bp, Homo sapien
ggcagtattcaggacactgggagat

SEQ ID NO: 3073227 - DNA, 25 bp, Homo sapien
tatggaggagcatcatctctcatct

SEQ ID NO: 3073228 - DNA, 25 bp, Homo sapien
agttccagccaagggcgacggcttt

SEQ ID NO: 3073229 - DNA, 25 bp, Homo sapien
tctcctctgttctctcgggaaggaa

SEQ ID NO: 3073230 - DNA, 25 bp, Homo sapien
tactcgtggttggacgctgctttgg

SEQ ID NO: 3073231 - DNA, 25 bp, Homo sapien
cactttggataccaactgccaaggg

SEQ ID NO: 3073232 - DNA, 25 bp, Homo sapien
ccacccttaagccttcattcatagt

SEQ ID NO: 3073233 - DNA, 25 bp, Homo sapien
ccacaccacccttaagccttcattc

SEQ ID NO: 3073234 - DNA, 25 bp, Homo sapien
cccacaccacccttaagccttcatt

SEQ ID NO: 3073235 - DNA, 25 bp, Homo sapien
ctcccacaccacccttaagccttca

SEQ ID NO: 3073236 - DNA, 25 bp, Homo sapien
catttcacggatgggaggaccgaca

SEQ ID NO: 3073237 - DNA, 25 bp, Homo sapien
tataaagtagaggaacacggagatc

SEQ ID NO: 3073238 - DNA, 25 bp, Homo sapien
gaacagcgcccaacacttagtaagt

SEQ ID NO: 3073239 - DNA, 25 bp, Homo sapien
gcaagggccttgcacaccactgtat

SEQ ID NO: 3073240 - DNA, 25 bp, Homo sapien
ttctgctgccttgcgaagaaggtgt

SEQ ID NO: 3073241 - DNA, 25 bp, Homo sapien
tatggcctgcccatattgggaatgc

SEQ ID NO: 3073242 - DNA, 25 bp, Homo sapien
tgtcccagtgattcctttaagcaga

SEQ ID NO: 3073243 - DNA, 25 bp, Homo sapien
ggtaattagaatgtctgtcccagtg

SEQ ID NO: 3073244 - DNA, 25 bp, Homo sapien
catgcaaagagaatggatgtgatgt

SEQ ID NO: 3073245 - DNA, 25 bp, Homo sapien
taatgtgaacctcctatggctgtgc

SEQ ID NO: 3073246 - DNA, 25 bp, Homo sapien
tccatcaaggtgctataaaatatgc

SEQ ID NO: 3073247 - DNA, 25 bp, Homo sapien
aacactgggtcaaatcaaataagtc

SEQ ID NO: 3073248 - DNA, 25 bp, Homo sapien
ccctctgatcaatggctttgccaag

SEQ ID NO: 3073249 - DNA, 25 bp, Homo sapien
cacagggactgaaacaatcctttgc

SEQ ID NO: 3073250 - DNA, 25 bp, Homo sapien
tctcactggtgaacacttcttgtgg

SEQ ID NO: 3073251 - DNA, 25 bp, Homo sapien
tcaaggaagcattggcacagggact

SEQ ID NO: 3073252 - DNA, 25 bp, Homo sapien
tcccttggagctagcattcataagc

SEQ ID NO: 3073253 - DNA, 25 bp, Homo sapien
aggttccaccaatacaacgtacttg

SEQ ID NO: 3073254 - DNA, 25 bp, Homo sapien
caccaatacaacgtacttgtttgaa

SEQ ID NO: 3073255 - DNA, 25 bp, Homo sapien
ttcataagcaaattaggttccacca

SEQ ID NO: 3073256 - DNA, 25 bp, Homo sapien
caaaatgtcttttccgtggcaatta

SEQ ID NO: 3073257 - DNA, 25 bp, Homo sapien
tagatgggacggcatgtgccaatgc

SEQ ID NO: 3073258 - DNA, 25 bp, Homo sapien
gtagatgggacggcatgtgccaatg

SEQ ID NO: 3073259 - DNA, 25 bp, Homo sapien
tttggttgtgattgctttgcatatt

SEQ ID NO: 3073260 - DNA, 25 bp, Homo sapien
ggtaatttgacaggagtagcattga

SEQ ID NO: 3073261 - DNA, 25 bp, Homo sapien
gtaatttgacaggagtagcattgaa

SEQ ID NO: 3073262 - DNA, 25 bp, Homo sapien
gttgtgattgctttgcatattcagg

SEQ ID NO: 3073263 - DNA, 25 bp, Homo sapien
gcggtataaagtgggttcagtcaac

SEQ ID NO: 3073264 - DNA, 25 bp, Homo sapien
taaaaaccactgctggagaaccagt

SEQ ID NO: 3073265 - DNA, 25 bp, Homo sapien
cctggttctttcttatctgtatggg

SEQ ID NO: 3073266 - DNA, 25 bp, Homo sapien
aaggctcagcttagtatttctgggc

SEQ ID NO: 3073267 - DNA, 25 bp, Homo sapien
tggaggcaccatagcagaattcagc

SEQ ID NO: 3073268 - DNA, 25 bp, Homo sapien
ttgctcagagatagaaagatgtctc

SEQ ID NO: 3073269 - DNA, 25 bp, Homo sapien
gaaacatggttatagattgctcaga

SEQ ID NO: 3073270 - DNA, 25 bp, Homo sapien
tagtactaatagctgctggttctca

SEQ ID NO: 3073271 - DNA, 25 bp, Homo sapien
aagcatgtgatctagggtgagtttc

SEQ ID NO: 3073272 - DNA, 25 bp, Homo sapien
tacagccctctactagaacatgaga

SEQ ID NO: 3073273 - DNA, 25 bp, Homo sapien
tatggcaaaggatagttagtggtgt

SEQ ID NO: 3073274 - DNA, 25 bp, Homo sapien
tcttctgattcaagggtgagtttct

SEQ ID NO: 3073275 - DNA, 25 bp, Homo sapien
cttccttttcctccttcacagccct

SEQ ID NO: 3073276 - DNA, 25 bp, Homo sapien
tccttttcctccttcacagccctgc

SEQ ID NO: 3073277 - DNA, 25 bp, Homo sapien
cacactgccgcttccttttcctcct

SEQ ID NO: 3073278 - DNA, 25 bp, Homo sapien
cttttcctccttcacagccctgcat

SEQ ID NO: 3073279 - DNA, 25 bp, Homo sapien
gcctatgttagaagtaatgcaaacc

SEQ ID NO: 3073280 - DNA, 25 bp, Homo sapien
gcccaatgagccaggcaaacactaa

SEQ ID NO: 3073281 - DNA, 25 bp, Homo sapien
gagaaaactgcaatcatatccacag

SEQ ID NO: 3073282 - DNA, 25 bp, Homo sapien
taaaacattagatcccaacctgaag

SEQ ID NO: 3073283 - DNA, 25 bp, Homo sapien
atttttcttttcctcaggcccagct

SEQ ID NO: 3073284 - DNA, 25 bp, Homo sapien
tttttcttttcctcaggcccagctc

SEQ ID NO: 3073285 - DNA, 25 bp, Homo sapien
cagctccttgcctcttaatggtcat

SEQ ID NO: 3073286 - DNA, 25 bp, Homo sapien
ggcccagctccttgcctcttaatgg

SEQ ID NO: 3073287 - DNA, 25 bp, Homo sapien
tatcttgcgtggaggaggacttgac

SEQ ID NO: 3073288 - DNA, 25 bp, Homo sapien
tgataagagcccctgtgcaagatcg

SEQ ID NO: 3073289 - DNA, 25 bp, Homo sapien
gtttcagagctttccacgaggtcag

SEQ ID NO: 3073290 - DNA, 25 bp, Homo sapien
tcatattgacacatcaggagagccc

SEQ ID NO: 3073291 - DNA, 25 bp, Homo sapien
ctcaaagggaaatggacaacgtagt

SEQ ID NO: 3073292 - DNA, 25 bp, Homo sapien
gaaaatttggttctgaaggccttga

SEQ ID NO: 3073293 - DNA, 25 bp, Homo sapien
tattacaagtgaaaatttggttctg

SEQ ID NO: 3073294 - DNA, 25 bp, Homo sapien
ttgacactcaaagggaaatggacaa

SEQ ID NO: 3073295 - DNA, 25 bp, Homo sapien
tatactccatgcagtacaatgtata

SEQ ID NO: 3073296 - DNA, 25 bp, Homo sapien
catccattataagaggctgtcagag

SEQ ID NO: 3073297 - DNA, 25 bp, Homo sapien
gatatcatacccaagagaacagcat

SEQ ID NO: 3073298 - DNA, 25 bp, Homo sapien
gaacagcatgtgaagcaacactatc

SEQ ID NO: 3073299 - DNA, 25 bp, Homo sapien
tccaaactccaatgcatttgaaaat

SEQ ID NO: 3073300 - DNA, 25 bp, Homo sapien
aaagtaaatgttgccaagattccaa

SEQ ID NO: 3073301 - DNA, 25 bp, Homo sapien
tgacaacaaaaattgtgccagatat

SEQ ID NO: 3073302 - DNA, 25 bp, Homo sapien
tcagacagttctcagctcttcaaac

SEQ ID NO: 3073303 - DNA, 25 bp, Homo sapien
ttccatctcaatcccaatctgtact

SEQ ID NO: 3073304 - DNA, 25 bp, Homo sapien
taggcgaaggattcagctcccgaac

SEQ ID NO: 3073305 - DNA, 25 bp, Homo sapien
ccataactcgtaggcgaaggattca

SEQ ID NO: 3073306 - DNA, 25 bp, Homo sapien
aaaaccccttcaaatgcttgccata

SEQ ID NO: 3073307 - DNA, 25 bp, Homo sapien
taatggcggcaggtctgaagtctgt

SEQ ID NO: 3073308 - DNA, 25 bp, Homo sapien
ctaatggcggcaggtctgaagtctg

SEQ ID NO: 3073309 - DNA, 25 bp, Homo sapien
ggcggcaggtctgaagtctgtggta

SEQ ID NO: 3073310 - DNA, 25 bp, Homo sapien
ggcaggtctgaagtctgtggtattc

SEQ ID NO: 3073311 - DNA, 25 bp, Homo sapien
ccccgtgttgatgcgaagaggtgtc

SEQ ID NO: 3073312 - DNA, 25 bp, Homo sapien
gactggtctctatgttgactggcga

SEQ ID NO: 3073313 - DNA, 25 bp, Homo sapien
ggtcgaagatcatgtgactggtctc

SEQ ID NO: 3073314 - DNA, 25 bp, Homo sapien
caaagattccaagctgagttcacca

SEQ ID NO: 3073315 - DNA, 25 bp, Homo sapien
tctatgatgcttgcagggctctccc

SEQ ID NO: 3073316 - DNA, 25 bp, Homo sapien
taaaactctgtgagacaataacctc

SEQ ID NO: 3073317 - DNA, 25 bp, Homo sapien
tagttacagctggtgcacattgcat

SEQ ID NO: 3073318 - DNA, 25 bp, Homo sapien
tgcatgattaaagtagttacagctg

SEQ ID NO: 3073319 - DNA, 25 bp, Homo sapien
ggaataacatgcaggtggtacaccc

SEQ ID NO: 3073320 - DNA, 25 bp, Homo sapien
caactgggatgatccgggtagaccc

SEQ ID NO: 3073321 - DNA, 25 bp, Homo sapien
gacccaggaataacatgcaggtggt

SEQ ID NO: 3073322 - DNA, 25 bp, Homo sapien
aatttctgggtcaactgggatgatc

SEQ ID NO: 3073323 - DNA, 25 bp, Homo sapien
tcctcattgccactggtgcactgaa

SEQ ID NO: 3073324 - DNA, 25 bp, Homo sapien
tgatcagatgcttgtagtatctctg

SEQ ID NO: 3073325 - DNA, 25 bp, Homo sapien
gattaagaacactcaatggctcctc

SEQ ID NO: 3073326 - DNA, 25 bp, Homo sapien
tatctctggggattaagaacactca

SEQ ID NO: 3073327 - DNA, 25 bp, Homo sapien
gcagcaatccatcccgtgggacctg

SEQ ID NO: 3073328 - DNA, 25 bp, Homo sapien
cagcaatccatcccgtgggacctgt

SEQ ID NO: 3073329 - DNA, 25 bp, Homo sapien
ggcagcaatccatcccgtgggacct

SEQ ID NO: 3073330 - DNA, 25 bp, Homo sapien
gcaatccatcccgtgggacctgttt

SEQ ID NO: 3073331 - DNA, 25 bp, Homo sapien
gagtagttcacatcttaaaggcaat

SEQ ID NO: 3073332 - DNA, 25 bp, Homo sapien
gaaactggaggcaacaaatggtgaa

SEQ ID NO: 3073333 - DNA, 25 bp, Homo sapien
cccagtggaagatgcactcaagttt

SEQ ID NO: 3073334 - DNA, 25 bp, Homo sapien
tatatggcacgtaacagagatacac

SEQ ID NO: 3073335 - DNA, 25 bp, Homo sapien
gcaatcctgggcttcatagccctat

SEQ ID NO: 3073336 - DNA, 25 bp, Homo sapien
tcagacttgcaaattagaacttgag

SEQ ID NO: 3073337 - DNA, 25 bp, Homo sapien
tgagtttctgctgcgatcaggtaaa

SEQ ID NO: 3073338 - DNA, 25 bp, Homo sapien
agggtcatgatcatgacagtatgct

SEQ ID NO: 3073339 - DNA, 25 bp, Homo sapien
taatctggcatatagccttttattt

SEQ ID NO: 3073340 - DNA, 25 bp, Homo sapien
ttaatctggcatatagccttttatt

SEQ ID NO: 3073341 - DNA, 25 bp, Homo sapien
cagagctcttcttgcactagtgaac

SEQ ID NO: 3073342 - DNA, 25 bp, Homo sapien
cactagtgaacattctcttccaagc

SEQ ID NO: 3073343 - DNA, 25 bp, Homo sapien
tggtatggccctccataatcaggcc

SEQ ID NO: 3073344 - DNA, 25 bp, Homo sapien
ctcccagttggtatggccctccata

SEQ ID NO: 3073345 - DNA, 25 bp, Homo sapien
ctggaacaaagcttccctggaccac

SEQ ID NO: 3073346 - DNA, 25 bp, Homo sapien
cttgtatgcccaccagccttcatgg

SEQ ID NO: 3073347 - DNA, 25 bp, Homo sapien
cccaccagccttcatggatttttgg

SEQ ID NO: 3073348 - DNA, 25 bp, Homo sapien
ccagccttcatggatttttggtgaa

SEQ ID NO: 3073349 - DNA, 25 bp, Homo sapien
tccaggatcaactccctgccagtca

SEQ ID NO: 3073350 - DNA, 25 bp, Homo sapien
gtcactctcccagtcgtccacagca

SEQ ID NO: 3073351 - DNA, 25 bp, Homo sapien
ttgctccaggatcaactccctgcca

SEQ ID NO: 3073352 - DNA, 25 bp, Homo sapien
agtcgtccacagcacaatccacagt

SEQ ID NO: 3073353 - DNA, 25 bp, Homo sapien
tggactccacggcacaacaagtgaa

SEQ ID NO: 3073354 - DNA, 25 bp, Homo sapien
gcactgactccttgaattgtgggcc

SEQ ID NO: 3073355 - DNA, 25 bp, Homo sapien
cctgctagggctttccgtcgattca

SEQ ID NO: 3073356 - DNA, 25 bp, Homo sapien
cctgggtgcctctcgctagtcttgg

SEQ ID NO: 3073357 - DNA, 25 bp, Homo sapien
gggaacgaaagccaagctgccattc

SEQ ID NO: 3073358 - DNA, 25 bp, Homo sapien
ctttggtgaaatcaggcatggaaca

SEQ ID NO: 3073359 - DNA, 25 bp, Homo sapien
caggcatggaacaggtgactgacct

SEQ ID NO: 3073360 - DNA, 25 bp, Homo sapien
gcaagcaatctggtaccatgccctt

SEQ ID NO: 3073361 - DNA, 25 bp, Homo sapien
aatatttatcttcgctctggagctg

SEQ ID NO: 3073362 - DNA, 25 bp, Homo sapien
gagaggtaattcagccaacagcagc

SEQ ID NO: 3073363 - DNA, 25 bp, Homo sapien
catctgtcaacaggacggctgagag

SEQ ID NO: 3073364 - DNA, 25 bp, Homo sapien
gagctgcagaccattagcattagaa

SEQ ID NO: 3073365 - DNA, 25 bp, Homo sapien
tacagcagacaaatgcatctacaca

SEQ ID NO: 3073366 - DNA, 25 bp, Homo sapien
aattacagcagacaaatgcatctac

SEQ ID NO: 3073367 - DNA, 25 bp, Homo sapien
aaattacagcagacaaatgcatcta

SEQ ID NO: 3073368 - DNA, 25 bp, Homo sapien
cagcagacaaatgcatctacacaaa

SEQ ID NO: 3073369 - DNA, 25 bp, Homo sapien
tggaaaatgatcagtggtctgggcc

SEQ ID NO: 3073370 - DNA, 25 bp, Homo sapien
gaaccagggacaacagtggaaaatg

SEQ ID NO: 3073371 - DNA, 25 bp, Homo sapien
aatgatcagtggtctgggccaagta

SEQ ID NO: 3073372 - DNA, 25 bp, Homo sapien
aaaatgatcagtggtctgggccaag

SEQ ID NO: 3073373 - DNA, 25 bp, Homo sapien
cagacaggcccaagtagactgagag

SEQ ID NO: 3073374 - DNA, 25 bp, Homo sapien
tgccaaggctcggatttcggcgcca

SEQ ID NO: 3073375 - DNA, 25 bp, Homo sapien
tcctcccgcagtctcttgaaagtgg

SEQ ID NO: 3073376 - DNA, 25 bp, Homo sapien
caccgagtctgggaactttgaaagc

SEQ ID NO: 3073377 - DNA, 25 bp, Homo sapien
gatatgcagacgatgaaattggctt

SEQ ID NO: 3073378 - DNA, 25 bp, Homo sapien
tgatatgcagacgatgaaattggct

SEQ ID NO: 3073379 - DNA, 25 bp, Homo sapien
tatgcagacgatgaaattggcttga

SEQ ID NO: 3073380 - DNA, 25 bp, Homo sapien
ctgatatgcagacgatgaaattggc

SEQ ID NO: 3073381 - DNA, 25 bp, Homo sapien
actcgcacacacttccgagcgagtg

SEQ ID NO: 3073382 - DNA, 25 bp, Homo sapien
tgattctcattccaagtgcatcact

SEQ ID NO: 3073383 - DNA, 25 bp, Homo sapien
gtgcatcactcgacgggaaaacggg

SEQ ID NO: 3073384 - DNA, 25 bp, Homo sapien
gcacacacttccgagcgagtgcaca

SEQ ID NO: 3073385 - DNA, 25 bp, Homo sapien
gatgtgctgacacatgtccgatgcc

SEQ ID NO: 3073386 - DNA, 25 bp, Homo sapien
cgatgcctcgctgccttggaggtct

SEQ ID NO: 3073387 - DNA, 25 bp, Homo sapien
aattgttccggcaaatctcccctcg

SEQ ID NO: 3073388 - DNA, 25 bp, Homo sapien
ctcgacggatgtgcgccccagatgt

SEQ ID NO: 3073389 - DNA, 25 bp, Homo sapien
tcttcgcaccagcggcggaaaccgc

SEQ ID NO: 3073390 - DNA, 25 bp, Homo sapien
ctcttcgcaccagcggcggaaaccg

SEQ ID NO: 3073391 - DNA, 25 bp, Homo sapien
cttcgcaccagcggcggaaaccgca

SEQ ID NO: 3073392 - DNA, 25 bp, Homo sapien
ctgaagccaccaacactgggctctt

SEQ ID NO: 3073393 - DNA, 25 bp, Homo sapien
tgggctcttccagcaaaaacgagac

SEQ ID NO: 3073394 - DNA, 25 bp, Homo sapien
actgggctcttccagcaaaaacgag

SEQ ID NO: 3073395 - DNA, 25 bp, Homo sapien
accaacactgggctcttccagcaaa

SEQ ID NO: 3073396 - DNA, 25 bp, Homo sapien
cgtctggcgccccaagaagacatag

SEQ ID NO: 3073397 - DNA, 25 bp, Homo sapien
ccaagaagacatagacgatagcccc

SEQ ID NO: 3073398 - DNA, 25 bp, Homo sapien
ggcgccccaagaagacatagacgat

SEQ ID NO: 3073399 - DNA, 25 bp, Homo sapien
ccgggctgcgccgtgcaattccggg

SEQ ID NO: 3073400 - DNA, 25 bp, Homo sapien
tcccgggagcgcgtagctcgctggc

SEQ ID NO: 3073401 - DNA, 25 bp, Homo sapien
taagcccaggcagtccgcggcaagt

SEQ ID NO: 3073402 - DNA, 25 bp, Homo sapien
gcgcgtagctcgctggctaagccca

SEQ ID NO: 3073403 - DNA, 25 bp, Homo sapien
tccgcggcaagttgccctcgaagtc

SEQ ID NO: 3073404 - DNA, 25 bp, Homo sapien
actagcgccgctgtcgagattttcc

SEQ ID NO: 3073405 - DNA, 25 bp, Homo sapien
gattttccgcaatacaactgcaggg

SEQ ID NO: 3073406 - DNA, 25 bp, Homo sapien
gcagggattattgcccgaaaccgcc

SEQ ID NO: 3073407 - DNA, 25 bp, Homo sapien
gccgggttccggcagtgcgtccagg

SEQ ID NO: 3073408 - DNA, 25 bp, Homo sapien
ctgctgccaactgcgccttcgccca

SEQ ID NO: 3073409 - DNA, 25 bp, Homo sapien
ggtgcaactcttgcctgcaagtccc

SEQ ID NO: 3073410 - DNA, 25 bp, Homo sapien
gcctttccaagtccgggtgccagca

SEQ ID NO: 3073411 - DNA, 25 bp, Homo sapien
ggttcctagaccaggtgcaactctt

SEQ ID NO: 3073412 - DNA, 25 bp, Homo sapien
tccaggatactttccgccaacgaca

SEQ ID NO: 3073413 - DNA, 25 bp, Homo sapien
ccaacgacactcagcagcttccact

SEQ ID NO: 3073414 - DNA, 25 bp, Homo sapien
ctgggctccaggatactttccgcca

SEQ ID NO: 3073415 - DNA, 25 bp, Homo sapien
gatactttccgccaacgacactcag

SEQ ID NO: 3073416 - DNA, 25 bp, Homo sapien
aagatccaggatttctcggcgcgct

SEQ ID NO: 3073417 - DNA, 25 bp, Homo sapien
tccaggatttctcggcgcgcttgtc

SEQ ID NO: 3073418 - DNA, 25 bp, Homo sapien
tctttggggttattgaagaagagga

SEQ ID NO: 3073419 - DNA, 25 bp, Homo sapien
tcggcgcgcttgtcccgattgggaa

SEQ ID NO: 3073420 - DNA, 25 bp, Homo sapien
gtctctcctctggaagcagaagcat

SEQ ID NO: 3073421 - DNA, 25 bp, Homo sapien
gaggtctctcctctggaagcagaag

SEQ ID NO: 3073422 - DNA, 25 bp, Homo sapien
agaggtctctcctctggaagcagaa

SEQ ID NO: 3073423 - DNA, 25 bp, Homo sapien
gctggcagaagaggtctctcctctg

SEQ ID NO: 3073424 - DNA, 25 bp, Homo sapien
tgcagcattgattaaggtcttcatt

SEQ ID NO: 3073425 - DNA, 25 bp, Homo sapien
ctttggtggggcctggaattttgca

SEQ ID NO: 3073426 - DNA, 25 bp, Homo sapien
gggcctggaattttgcagcattgat

SEQ ID NO: 3073427 - DNA, 25 bp, Homo sapien
gaattttgcagcattgattaaggtc

SEQ ID NO: 3073428 - DNA, 25 bp, Homo sapien
gtccctttctcttggcgacggcaaa

SEQ ID NO: 3073429 - DNA, 25 bp, Homo sapien
cctttctcttggcgacggcaaaggg

SEQ ID NO: 3073430 - DNA, 25 bp, Homo sapien
ttctcttggcgacggcaaagggcat

SEQ ID NO: 3073431 - DNA, 25 bp, Homo sapien
tttctcttggcgacggcaaagggca

SEQ ID NO: 3073432 - DNA, 25 bp, Homo sapien
tttattctgatgtaaccaatccggc

SEQ ID NO: 3073433 - DNA, 25 bp, Homo sapien
cataaaactaacagggagattgctc

SEQ ID NO: 3073434 - DNA, 25 bp, Homo sapien
ccaaaaggggacttaatgtgccata

SEQ ID NO: 3073435 - DNA, 25 bp, Homo sapien
taacagggagattgctctcaaggtg

SEQ ID NO: 3073436 - DNA, 25 bp, Homo sapien
tgctaaggggttgctaaaccaggcc

SEQ ID NO: 3073437 - DNA, 25 bp, Homo sapien
ttgctaaggggttgctaaaccaggc

SEQ ID NO: 3073438 - DNA, 25 bp, Homo sapien
cttgctaaggggttgctaaaccagg

SEQ ID NO: 3073439 - DNA, 25 bp, Homo sapien
gtgacaagagcctggcggctttcaa

SEQ ID NO: 3073440 - DNA, 25 bp, Homo sapien
tggcggctttcaagacaagatccct

SEQ ID NO: 3073441 - DNA, 25 bp, Homo sapien
ttcccctttctaggctctgactgaa

SEQ ID NO: 3073442 - DNA, 25 bp, Homo sapien
ttctaggctctgactgaattgttgc

SEQ ID NO: 3073443 - DNA, 25 bp, Homo sapien
tgcaaaatttcactctgtggcatac

SEQ ID NO: 3073444 - DNA, 25 bp, Homo sapien
gtctttgtcacaagtgcaaaatttc

SEQ ID NO: 3073445 - DNA, 25 bp, Homo sapien
agtgcaaaatttcactctgtggcat

SEQ ID NO: 3073446 - DNA, 25 bp, Homo sapien
ctggtctttgtcacaagtgcaaaat

SEQ ID NO: 3073447 - DNA, 25 bp, Homo sapien
ctcttcctgaaatagcactgcacat

SEQ ID NO: 3073448 - DNA, 25 bp, Homo sapien
aaaacctgggttgcagatgttttca

SEQ ID NO: 3073449 - DNA, 25 bp, Homo sapien
accttgaaaacctgggttgcagatg

SEQ ID NO: 3073450 - DNA, 25 bp, Homo sapien
ctgaaatagcactgcacatagtcct

SEQ ID NO: 3073451 - DNA, 25 bp, Homo sapien
tgatgagcttccatagttgcttgta

SEQ ID NO: 3073452 - DNA, 25 bp, Homo sapien
cactgatgagcttccatagttgctt

SEQ ID NO: 3073453 - DNA, 25 bp, Homo sapien
actgatgagcttccatagttgcttg

SEQ ID NO: 3073454 - DNA, 25 bp, Homo sapien
tcactgatgagcttccatagttgct

SEQ ID NO: 3073455 - DNA, 25 bp, Homo sapien
tcacaagcccagggatgctagtctt

SEQ ID NO: 3073456 - DNA, 25 bp, Homo sapien
cacaagcccagggatgctagtcttc

SEQ ID NO: 3073457 - DNA, 25 bp, Homo sapien
tgatttgccagaatctattactgac

SEQ ID NO: 3073458 - DNA, 25 bp, Homo sapien
ccattacctgttgaattccatatgc

SEQ ID NO: 3073459 - DNA, 25 bp, Homo sapien
gactgagctgtttggtaaggacttg

SEQ ID NO: 3073460 - DNA, 25 bp, Homo sapien
cagccttgacggctcagactgagct

SEQ ID NO: 3073461 - DNA, 25 bp, Homo sapien
tgagaccgccatactgccatactca

SEQ ID NO: 3073462 - DNA, 25 bp, Homo sapien
catactgccatactcactttcccta

SEQ ID NO: 3073463 - DNA, 25 bp, Homo sapien
ctggcatcctgagaccgccatactg

SEQ ID NO: 3073464 - DNA, 25 bp, Homo sapien
atcctgagaccgccatactgccata

SEQ ID NO: 3073465 - DNA, 25 bp, Homo sapien
aaatggacgttagaagagctgcagc

SEQ ID NO: 3073466 - DNA, 25 bp, Homo sapien
taacacaagatgaactgaagcaggt

SEQ ID NO: 3073467 - DNA, 25 bp, Homo sapien
tgaagtttgcccatagaaatggacg

SEQ ID NO: 3073468 - DNA, 25 bp, Homo sapien
cagggcttgcggaaaaaatggaatc

SEQ ID NO: 3073469 - DNA, 25 bp, Homo sapien
tacaggacctgtgactttctaggca

SEQ ID NO: 3073470 - DNA, 25 bp, Homo sapien
gacttggtcaggctattaggactgc

SEQ ID NO: 3073471 - DNA, 25 bp, Homo sapien
ggactgccattcaacccggaacaaa

SEQ ID NO: 3073472 - DNA, 25 bp, Homo sapien
gacactggatttggactacaggacc

SEQ ID NO: 3073473 - DNA, 25 bp, Homo sapien
gagaactttctttgaatcacgtggc

SEQ ID NO: 3073474 - DNA, 25 bp, Homo sapien
gcaggaatgatagagagaactttct

SEQ ID NO: 3073475 - DNA, 25 bp, Homo sapien
acgtggcttaattttccatgatgcc

SEQ ID NO: 3073476 - DNA, 25 bp, Homo sapien
ttctacaccccctgcaggaatgata

SEQ ID NO: 3073477 - DNA, 25 bp, Homo sapien
cactcctcaattgaattcttgtcag

SEQ ID NO: 3073478 - DNA, 25 bp, Homo sapien
cataagttgatgagtccagacgttt

SEQ ID NO: 3073479 - DNA, 25 bp, Homo sapien
ccttgcatttggctgaacccggaaa

SEQ ID NO: 3073480 - DNA, 25 bp, Homo sapien
tagtttactcgtcgctttgactgac

SEQ ID NO: 3073481 - DNA, 25 bp, Homo sapien
caattgacgttagagtgaccacatc

SEQ ID NO: 3073482 - DNA, 25 bp, Homo sapien
cagggttatagggaaattggcaatc

SEQ ID NO: 3073483 - DNA, 25 bp, Homo sapien
cactctgaaaaggtcccagtttgga

SEQ ID NO: 3073484 - DNA, 25 bp, Homo sapien
gaaaacagtacacgagcatgtcacc

SEQ ID NO: 3073485 - DNA, 25 bp, Homo sapien
ctccttcaccgccagtggaaccctg

SEQ ID NO: 3073486 - DNA, 25 bp, Homo sapien
cagaatggtgttgtctgggtctcct

SEQ ID NO: 3073487 - DNA, 25 bp, Homo sapien
cagtggaaccctgcaactggtccat

SEQ ID NO: 3073488 - DNA, 25 bp, Homo sapien
ccagaatggtgttgtctgggtctcc

SEQ ID NO: 3073489 - DNA, 25 bp, Homo sapien
tgcccctcgggattcacttttgatt

SEQ ID NO: 3073490 - DNA, 25 bp, Homo sapien
gcagttttccattatagcgcccaag

SEQ ID NO: 3073491 - DNA, 25 bp, Homo sapien
tagtcatagctattgccctcataag

SEQ ID NO: 3073492 - DNA, 25 bp, Homo sapien
cataagaaacatccgtaccacctgg

SEQ ID NO: 3073493 - DNA, 25 bp, Homo sapien
cacttacctcttcactaatggtttt

SEQ ID NO: 3073494 - DNA, 25 bp, Homo sapien
caaaccaattgtcttactggcattt

SEQ ID NO: 3073495 - DNA, 25 bp, Homo sapien
ccaaaccaattgtcttactggcatt

SEQ ID NO: 3073496 - DNA, 25 bp, Homo sapien
taatggttttgaatgccaaaaccaa

SEQ ID NO: 3073497 - DNA, 25 bp, Homo sapien
tggccccacccatgaattcttcaga

SEQ ID NO: 3073498 - DNA, 25 bp, Homo sapien
aatgaccaatgtccaaaagggttct

SEQ ID NO: 3073499 - DNA, 25 bp, Homo sapien
gttctacagtaaacaaggagttgcc

SEQ ID NO: 3073500 - DNA, 25 bp, Homo sapien
cataaccgtgaagcacctggttcta

SEQ ID NO: 3073501 - DNA, 25 bp, Homo sapien
catgacccaaattttcttgccattt

SEQ ID NO: 3073502 - DNA, 25 bp, Homo sapien
caaaagaaactattgctttcatttt

SEQ ID NO: 3073503 - DNA, 25 bp, Homo sapien
ttcaaaagaaactattgctttcatt

SEQ ID NO: 3073504 - DNA, 25 bp, Homo sapien
tgtaacatgacccaaattttcttgc

SEQ ID NO: 3073505 - DNA, 25 bp, Homo sapien
tcaaggtgccaactctggaacccac

SEQ ID NO: 3073506 - DNA, 25 bp, Homo sapien
catcaagggtcttcagtgtggctgc

SEQ ID NO: 3073507 - DNA, 25 bp, Homo sapien
gagggagtgatcatcaagggtcttc

SEQ ID NO: 3073508 - DNA, 25 bp, Homo sapien
gaccttggactttaatgatggctgc

SEQ ID NO: 3073509 - DNA, 25 bp, Homo sapien
cttgaagctgcatgagggagtgatc

SEQ ID NO: 3073510 - DNA, 25 bp, Homo sapien
ttggcgattgtgagcaccctgcagt

SEQ ID NO: 3073511 - DNA, 25 bp, Homo sapien
gtttggcgattgtgagcaccctgca

SEQ ID NO: 3073512 - DNA, 25 bp, Homo sapien
tgaattctgtttggcgattgtgagc

SEQ ID NO: 3073513 - DNA, 25 bp, Homo sapien
tctgtttggcgattgtgagcaccct

SEQ ID NO: 3073514 - DNA, 25 bp, Homo sapien
tgagtagctgcagacaaaagaggcc

SEQ ID NO: 3073515 - DNA, 25 bp, Homo sapien
tctcatggaccagtgatagaccagg

SEQ ID NO: 3073516 - DNA, 25 bp, Homo sapien
tgtatgagccagagggttgcctgaa

SEQ ID NO: 3073517 - DNA, 25 bp, Homo sapien
tataagatagagctgtgtatgagcc

SEQ ID NO: 3073518 - DNA, 25 bp, Homo sapien
tagttcctccagttcaggcttgagc

SEQ ID NO: 3073519 - DNA, 25 bp, Homo sapien
tcatgatagttcctccagttcaggc

SEQ ID NO: 3073520 - DNA, 25 bp, Homo sapien
tttcatctctgatatgtggctttgc

SEQ ID NO: 3073521 - DNA, 25 bp, Homo sapien
cttttcatctctgatatgtggcttt

SEQ ID NO: 3073522 - DNA, 25 bp, Homo sapien
atcttgacagctcatgtagactgtc

SEQ ID NO: 3073523 - DNA, 25 bp, Homo sapien
tgcagataccagatcaattctaagc

SEQ ID NO: 3073524 - DNA, 25 bp, Homo sapien
ctgcagataccagatcaattctaag

SEQ ID NO: 3073525 - DNA, 25 bp, Homo sapien
tcccctttctggttagctgttcgtg

SEQ ID NO: 3073526 - DNA, 25 bp, Homo sapien
tgttaatcctcctaaagcacacttc

SEQ ID NO: 3073527 - DNA, 25 bp, Homo sapien
ccatcatttcatttgcctggtcaaa

SEQ ID NO: 3073528 - DNA, 25 bp, Homo sapien
aattgtatgcaaaccattttgaagc

SEQ ID NO: 3073529 - DNA, 25 bp, Homo sapien
gaggcagtcagtcgttcagtatccc

SEQ ID NO: 3073530 - DNA, 25 bp, Homo sapien
tgtattcctgctgcgtcattgagca

SEQ ID NO: 3073531 - DNA, 25 bp, Homo sapien
tgagcattgaggcagtcagtcgttc

SEQ ID NO: 3073532 - DNA, 25 bp, Homo sapien
caccaagtacttgttcccagtacgt

SEQ ID NO: 3073533 - DNA, 25 bp, Homo sapien
cccacttgtcttctcgagagtcact

SEQ ID NO: 3073534 - DNA, 25 bp, Homo sapien
caagtatttccgttcccacttgtct

SEQ ID NO: 3073535 - DNA, 25 bp, Homo sapien
tcttctcgagagtcacttattccaa

SEQ ID NO: 3073536 - DNA, 25 bp, Homo sapien
cttcaagtatttccgttcccacttg

SEQ ID NO: 3073537 - DNA, 25 bp, Homo sapien
agagccatccatgggctaagctgcc

SEQ ID NO: 3073538 - DNA, 25 bp, Homo sapien
tgtgacctcagtatcccccaataac

SEQ ID NO: 3073539 - DNA, 25 bp, Homo sapien
gccatgcatctctatcctccatttt

SEQ ID NO: 3073540 - DNA, 25 bp, Homo sapien
tttcttggtgtattcggttggtgca

SEQ ID NO: 3073541 - DNA, 25 bp, Homo sapien
ccaccttgcaaattaatgttgaggg

SEQ ID NO: 3073542 - DNA, 25 bp, Homo sapien
tgagggaaagacctgagagcctagc

SEQ ID NO: 3073543 - DNA, 25 bp, Homo sapien
gacctgagagcctagcatctcatcc

SEQ ID NO: 3073544 - DNA, 25 bp, Homo sapien
tcttgaaagatacagcgtagatgtc

SEQ ID NO: 3073545 - DNA, 25 bp, Homo sapien
atggagctgatcattcagatttgaa

SEQ ID NO: 3073546 - DNA, 25 bp, Homo sapien
tttgaaggtagcagaaacattctgg

SEQ ID NO: 3073547 - DNA, 25 bp, Homo sapien
ggaggtagagcatggagctgatcat

SEQ ID NO: 3073548 - DNA, 25 bp, Homo sapien
taaaaccccaagtggaggtagagca

SEQ ID NO: 3073549 - DNA, 25 bp, Homo sapien
gctggtagatctggcatgggtccca

SEQ ID NO: 3073550 - DNA, 25 bp, Homo sapien
agctggtagatctggcatgggtccc

SEQ ID NO: 3073551 - DNA, 25 bp, Homo sapien
caagcccgtgaatgactccgggcaa

SEQ ID NO: 3073552 - DNA, 25 bp, Homo sapien
ccgtgaatgactccgggcaattggt

SEQ ID NO: 3073553 - DNA, 25 bp, Homo sapien
atttagcacaagcccgtgaatgact

SEQ ID NO: 3073554 - DNA, 25 bp, Homo sapien
tggtgtgaagactcaatttggtaaa

SEQ ID NO: 3073555 - DNA, 25 bp, Homo sapien
ggacttgcacttttctgggcctttg

SEQ ID NO: 3073556 - DNA, 25 bp, Homo sapien
ggactatgcttctatcaatgggcag

SEQ ID NO: 3073557 - DNA, 25 bp, Homo sapien
gccctaagtgttcatctatactcag

SEQ ID NO: 3073558 - DNA, 25 bp, Homo sapien
gattacctggcctgtggactatgct

SEQ ID NO: 3073559 - DNA, 25 bp, Homo sapien
tgaactagccttgcaccctggggat

SEQ ID NO: 3073560 - DNA, 25 bp, Homo sapien
actgtgaataagctttttcatgggc

SEQ ID NO: 3073561 - DNA, 25 bp, Homo sapien
gaactagccttgcaccctggggatg

SEQ ID NO: 3073562 - DNA, 25 bp, Homo sapien
aagcctacttgatcactgtgaataa

SEQ ID NO: 3073563 - DNA, 25 bp, Homo sapien
cagatgttacgaatccctaataagg

SEQ ID NO: 3073564 - DNA, 25 bp, Homo sapien
agatgttacgaatccctaataaggc

SEQ ID NO: 3073565 - DNA, 25 bp, Homo sapien
atgttacgaatccctaataaggctt

SEQ ID NO: 3073566 - DNA, 25 bp, Homo sapien
gatgttacgaatccctaataaggct

SEQ ID NO: 3073567 - DNA, 25 bp, Homo sapien
ttagagagagacaccacttccgtgg

SEQ ID NO: 3073568 - DNA, 25 bp, Homo sapien
tcttttgaacaggtcttagagagag

SEQ ID NO: 3073569 - DNA, 25 bp, Homo sapien
gagacaccacttccgtggatggcat

SEQ ID NO: 3073570 - DNA, 25 bp, Homo sapien
gaaagagataccttcacctcttttg

SEQ ID NO: 3073571 - DNA, 25 bp, Homo sapien
actccaacaactatctttgaagtag

SEQ ID NO: 3073572 - DNA, 25 bp, Homo sapien
atccacactccaacaactatctttg

SEQ ID NO: 3073573 - DNA, 25 bp, Homo sapien
cacactccaacaactatctttgaag

SEQ ID NO: 3073574 - DNA, 25 bp, Homo sapien
tccaacaactatctttgaagtagtt

SEQ ID NO: 3073575 - DNA, 25 bp, Homo sapien
ctacagttacagtatgggcaaaacc

SEQ ID NO: 3073576 - DNA, 25 bp, Homo sapien
gcttggcagccaatatacattatcc

SEQ ID NO: 3073577 - DNA, 25 bp, Homo sapien
tccgaagatggactcaagctttagt

SEQ ID NO: 3073578 - DNA, 25 bp, Homo sapien
tcagtgcaagaggaatcaagtccat

SEQ ID NO: 3073579 - DNA, 25 bp, Homo sapien
tcatgcaatggcaaaacatttggca

SEQ ID NO: 3073580 - DNA, 25 bp, Homo sapien
catgcaatggcaaaacatttggcaa

SEQ ID NO: 3073581 - DNA, 25 bp, Homo sapien
tcactcatgatttctttgatttcca

SEQ ID NO: 3073582 - DNA, 25 bp, Homo sapien
tgttcactcatgatttctttgattt

SEQ ID NO: 3073583 - DNA, 25 bp, Homo sapien
cttgttcactcatgatttctttgat

SEQ ID NO: 3073584 - DNA, 25 bp, Homo sapien
ttcactcatgatttctttgatttcc

SEQ ID NO: 3073585 - DNA, 25 bp, Homo sapien
ttctgaagttcaaccttagctccta

SEQ ID NO: 3073586 - DNA, 25 bp, Homo sapien
aaccttagctcctagatcccatggt

SEQ ID NO: 3073587 - DNA, 25 bp, Homo sapien
acctttctgaagttcaaccttagct

SEQ ID NO: 3073588 - DNA, 25 bp, Homo sapien
ttagctcctagatcccatggttctc

SEQ ID NO: 3073589 - DNA, 25 bp, Homo sapien
agcttcagccatcaactccctgtgg

SEQ ID NO: 3073590 - DNA, 25 bp, Homo sapien
gaactaggtctatactggtgcagcc

SEQ ID NO: 3073591 - DNA, 25 bp, Homo sapien
caggtggtatgagaagaactaggtc

SEQ ID NO: 3073592 - DNA, 25 bp, Homo sapien
tctgccttagtgagagcttcaggtg

SEQ ID NO: 3073593 - DNA, 25 bp, Homo sapien
cttcagacaacattgcatccagtgg

SEQ ID NO: 3073594 - DNA, 25 bp, Homo sapien
ttcagacaacattgcatccagtggt

SEQ ID NO: 3073595 - DNA, 25 bp, Homo sapien
cagacaacattgcatccagtggtac

SEQ ID NO: 3073596 - DNA, 25 bp, Homo sapien
tcagacaacattgcatccagtggta

SEQ ID NO: 3073597 - DNA, 25 bp, Homo sapien
gtaccactggatgtatccttcagac

SEQ ID NO: 3073598 - DNA, 25 bp, Homo sapien
tggtaccactggatgtatccttcag

SEQ ID NO: 3073599 - DNA, 25 bp, Homo sapien
ggtaccactggatgtatccttcaga

SEQ ID NO: 3073600 - DNA, 25 bp, Homo sapien
taccactggatgtatccttcagacc

SEQ ID NO: 3073601 - DNA, 25 bp, Homo sapien
ccttggacacttaaaccacttgcca

SEQ ID NO: 3073602 - DNA, 25 bp, Homo sapien
ctgaagatttcccttggacacttaa

SEQ ID NO: 3073603 - DNA, 25 bp, Homo sapien
tgtggctaattgcttcaatctgaag

SEQ ID NO: 3073604 - DNA, 25 bp, Homo sapien
tttttgtggctaattgcttcaatct

SEQ ID NO: 3073605 - DNA, 25 bp, Homo sapien
agtaaatattctttgatgtttcaga

SEQ ID NO: 3073606 - DNA, 25 bp, Homo sapien
gccttttgagtaaatattctttgat

SEQ ID NO: 3073607 - DNA, 25 bp, Homo sapien
aaatattctttgatgtttcagacat

SEQ ID NO: 3073608 - DNA, 25 bp, Homo sapien
aggccttttgagtaaatattctttg

SEQ ID NO: 3073609 - DNA, 25 bp, Homo sapien
aaaacaatttcagtacactcattag

SEQ ID NO: 3073610 - DNA, 25 bp, Homo sapien
acagtctgaatgtcttaatcattct

SEQ ID NO: 3073611 - DNA, 25 bp, Homo sapien
gctctgttccttgctaaggcagtat

SEQ ID NO: 3073612 - DNA, 25 bp, Homo sapien
ggagcagttacctctaccacataca

SEQ ID NO: 3073613 - DNA, 25 bp, Homo sapien
tattagggcacaacacaagcccatg

SEQ ID NO: 3073614 - DNA, 25 bp, Homo sapien
tctcaggtaagatctgggataattc

SEQ ID NO: 3073615 - DNA, 25 bp, Homo sapien
tattacttgtagtcgtcacagtctg

SEQ ID NO: 3073616 - DNA, 25 bp, Homo sapien
taggtactgcctaggtgatctcagg

SEQ ID NO: 3073617 - DNA, 25 bp, Homo sapien
ctccgcattcgttctgaattaatgt

SEQ ID NO: 3073618 - DNA, 25 bp, Homo sapien
aactccttgtcctcctcgccttctt

SEQ ID NO: 3073619 - DNA, 25 bp, Homo sapien
tcaaactccttgtcctcctcgcctt

SEQ ID NO: 3073620 - DNA, 25 bp, Homo sapien
tcaatcaaactccttgtcctcctcg

SEQ ID NO: 3073621 - DNA, 25 bp, Homo sapien
aatcaaactccttgtcctcctcgcc

SEQ ID NO: 3073622 - DNA, 25 bp, Homo sapien
tgaacagctcctgggtaacgggtga

SEQ ID NO: 3073623 - DNA, 25 bp, Homo sapien
gagtggtactcaaatgctagggata

SEQ ID NO: 3073624 - DNA, 25 bp, Homo sapien
tagatgcagccaggaaatgccgctc

SEQ ID NO: 3073625 - DNA, 25 bp, Homo sapien
tagggatagtttccagtcctgaaca

SEQ ID NO: 3073626 - DNA, 25 bp, Homo sapien
ggtactgatggggagtttactttgc

SEQ ID NO: 3073627 - DNA, 25 bp, Homo sapien
aggatgttgaaatctttaaacctgg

SEQ ID NO: 3073628 - DNA, 25 bp, Homo sapien
tgcaacctgcaagcagttactttcc

SEQ ID NO: 3073629 - DNA, 25 bp, Homo sapien
cattgtaggagatgggtactgatgg

SEQ ID NO: 3073630 - DNA, 25 bp, Homo sapien
ggtatgtctacctgtaacctgtgaa

SEQ ID NO: 3073631 - DNA, 25 bp, Homo sapien
gcaccagggattgccaatagttgca

SEQ ID NO: 3073632 - DNA, 25 bp, Homo sapien
gccctgcatcctaggaaattccaga

SEQ ID NO: 3073633 - DNA, 25 bp, Homo sapien
tgcaagaaactagcagaaaggcatg

SEQ ID NO: 3073634 - DNA, 25 bp, Homo sapien
tctctaccttttctggtgccttctc

SEQ ID NO: 3073635 - DNA, 25 bp, Homo sapien
ctggtgccttctcccttgaggacat

SEQ ID NO: 3073636 - DNA, 25 bp, Homo sapien
tactttcctctactctctctacctt

SEQ ID NO: 3073637 - DNA, 25 bp, Homo sapien
tcatcctctttactttcctctactc

SEQ ID NO: 3073638 - DNA, 25 bp, Homo sapien
tgtagactccattctaaccagcacc

SEQ ID NO: 3073639 - DNA, 25 bp, Homo sapien
gctcatcgtgtataaatctcttagg

SEQ ID NO: 3073640 - DNA, 25 bp, Homo sapien
ttttcacgctgctgtatcagtggtt

SEQ ID NO: 3073641 - DNA, 25 bp, Homo sapien
cattcccctgtttaagagcattcta

SEQ ID NO: 3073642 - DNA, 25 bp, Homo sapien
catgagtctgttcaaaagatttcaa

SEQ ID NO: 3073643 - DNA, 25 bp, Homo sapien
ctcatgagtctgttcaaaagatttc

SEQ ID NO: 3073644 - DNA, 25 bp, Homo sapien
cttagcccaaagtcacaagagagct

SEQ ID NO: 3073645 - DNA, 25 bp, Homo sapien
ccaaagtcacaagagagcttagctc

SEQ ID NO: 3073646 - DNA, 25 bp, Homo sapien
gtgacatggatgctgtcagctggca

SEQ ID NO: 3073647 - DNA, 25 bp, Homo sapien
tcagacctgatccttagcttgggtg

SEQ ID NO: 3073648 - DNA, 25 bp, Homo sapien
cagacctgatccttagcttgggtgc

SEQ ID NO: 3073649 - DNA, 25 bp, Homo sapien
tcactgttgacgcttcataagggct

SEQ ID NO: 3073650 - DNA, 25 bp, Homo sapien
tgttgacgcttcataagggcttgga

SEQ ID NO: 3073651 - DNA, 25 bp, Homo sapien
gacgcttcataagggcttggaggat

SEQ ID NO: 3073652 - DNA, 25 bp, Homo sapien
tgttagtctcactgttgacgcttca

SEQ ID NO: 3073653 - DNA, 25 bp, Homo sapien
gaggtgcactctccacttgatccct

SEQ ID NO: 3073654 - DNA, 25 bp, Homo sapien
gcactctccacttgatcccttttat

SEQ ID NO: 3073655 - DNA, 25 bp, Homo sapien
tgagaggtgcactctccacttgatc

SEQ ID NO: 3073656 - DNA, 25 bp, Homo sapien
gatgagaggtgcactctccacttga

SEQ ID NO: 3073657 - DNA, 25 bp, Homo sapien
gggcacgtcaacagaccacagcttg

SEQ ID NO: 3073658 - DNA, 25 bp, Homo sapien
tgatgtcgccaagtcagcagaggcc

SEQ ID NO: 3073659 - DNA, 25 bp, Homo sapien
tcatagcaaagatctcagtcacggg

SEQ ID NO: 3073660 - DNA, 25 bp, Homo sapien
tacgagttgatgagagttcccaggg

SEQ ID NO: 3073661 - DNA, 25 bp, Homo sapien
atgatgtcctccagtgaatatacgg

SEQ ID NO: 3073662 - DNA, 25 bp, Homo sapien
tgatgtcctccagtgaatatacgga

SEQ ID NO: 3073663 - DNA, 25 bp, Homo sapien
tgatgatgtcctccagtgaatatac

SEQ ID NO: 3073664 - DNA, 25 bp, Homo sapien
gatgatgtcctccagtgaatatacg

SEQ ID NO: 3073665 - DNA, 25 bp, Homo sapien
tgagttaccctcagtttccgtgctt

SEQ ID NO: 3073666 - DNA, 25 bp, Homo sapien
tgcaacctagagaggcaatcggcct

SEQ ID NO: 3073667 - DNA, 25 bp, Homo sapien
tgctccactagcagcgagaatttca

SEQ ID NO: 3073668 - DNA, 25 bp, Homo sapien
caggaggcagtctgttcattatcag

SEQ ID NO: 3073669 - DNA, 25 bp, Homo sapien
tgcaaaggttggactttcccacttg

SEQ ID NO: 3073670 - DNA, 25 bp, Homo sapien
ggcattaatatctgaaccaaccata

SEQ ID NO: 3073671 - DNA, 25 bp, Homo sapien
caagcgttgtttacttgcttcctgg

SEQ ID NO: 3073672 - DNA, 25 bp, Homo sapien
gacatcaggaggtttccagacctgg

SEQ ID NO: 3073673 - DNA, 25 bp, Homo sapien
ggcaataagatacactcctgtttca

SEQ ID NO: 3073674 - DNA, 25 bp, Homo sapien
tatcctaaaggcaataagatacact

SEQ ID NO: 3073675 - DNA, 25 bp, Homo sapien
taaaggcaataagatacactcctgt

SEQ ID NO: 3073676 - DNA, 25 bp, Homo sapien
taagatacactcctgtttcagacat

SEQ ID NO: 3073677 - DNA, 25 bp, Homo sapien
cagcataatcagtagcttgaccaca

SEQ ID NO: 3073678 - DNA, 25 bp, Homo sapien
tcagtagcttgaccacaagtctcgt

SEQ ID NO: 3073679 - DNA, 25 bp, Homo sapien
tcactcggagcaccaatcctttccc

SEQ ID NO: 3073680 - DNA, 25 bp, Homo sapien
gaccacaagtctcgtgttgcagcag

SEQ ID NO: 3073681 - DNA, 25 bp, Homo sapien
tcttccagctggtagactatggcag

SEQ ID NO: 3073682 - DNA, 25 bp, Homo sapien
taatttatcttccagctggtagact

SEQ ID NO: 3073683 - DNA, 25 bp, Homo sapien
ttccagctggtagactatggcagac

SEQ ID NO: 3073684 - DNA, 25 bp, Homo sapien
ttatcttccagctggtagactatgg

SEQ ID NO: 3073685 - DNA, 25 bp, Homo sapien
gtcattgccagacgccaagttttgg

SEQ ID NO: 3073686 - DNA, 25 bp, Homo sapien
tcacttatcatcgtcattgccagac

SEQ ID NO: 3073687 - DNA, 25 bp, Homo sapien
caagttttggttcattggctggatg

SEQ ID NO: 3073688 - DNA, 25 bp, Homo sapien
gccagacgccaagttttggttcatt

SEQ ID NO: 3073689 - DNA, 25 bp, Homo sapien
ccaagtccagttaggcctgatgagt

SEQ ID NO: 3073690 - DNA, 25 bp, Homo sapien
atcccaagtccagttaggcctgatg

SEQ ID NO: 3073691 - DNA, 25 bp, Homo sapien
gcctgatgagtctttgcttgccaca

SEQ ID NO: 3073692 - DNA, 25 bp, Homo sapien
gatgagtctttgcttgccacaatct

SEQ ID NO: 3073693 - DNA, 25 bp, Homo sapien
taatttctttgctcccgtatctggt

SEQ ID NO: 3073694 - DNA, 25 bp, Homo sapien
gtatctggttgccagtcttctttcc

SEQ ID NO: 3073695 - DNA, 25 bp, Homo sapien
tctttcctattgagtctttctagtt

SEQ ID NO: 3073696 - DNA, 25 bp, Homo sapien
ctattgagtctttctagtttcgaca

SEQ ID NO: 3073697 - DNA, 25 bp, Homo sapien
tgtgcatgtcaataatgtctcctca

SEQ ID NO: 3073698 - DNA, 25 bp, Homo sapien
tcatccttacaatatcttctttccc

SEQ ID NO: 3073699 - DNA, 25 bp, Homo sapien
tcaactgcacatattttggtgtgac

SEQ ID NO: 3073700 - DNA, 25 bp, Homo sapien
cattatcagctacctcaactgcaca

SEQ ID NO: 3073701 - DNA, 25 bp, Homo sapien
tctcctactgagataataccatcat

SEQ ID NO: 3073702 - DNA, 25 bp, Homo sapien
aaattctattctgaggatctgggag

SEQ ID NO: 3073703 - DNA, 25 bp, Homo sapien
gctcactatagttccggatcctgct

SEQ ID NO: 3073704 - DNA, 25 bp, Homo sapien
tatgaaatgaaactgggtcctgggt

SEQ ID NO: 3073705 - DNA, 25 bp, Homo sapien
gatagagttgcctgatgcattctga

SEQ ID NO: 3073706 - DNA, 25 bp, Homo sapien
cagtgatttgcgttgattgaaaaga

SEQ ID NO: 3073707 - DNA, 25 bp, Homo sapien
gagttgcctgatgcattctgagacc

SEQ ID NO: 3073708 - DNA, 25 bp, Homo sapien
tgcctgatgcattctgagacccatg

SEQ ID NO: 3073709 - DNA, 25 bp, Homo sapien
gagttcccggagccttcactgtctt

SEQ ID NO: 3073710 - DNA, 25 bp, Homo sapien
agttcccggagccttcactgtcttc

SEQ ID NO: 3073711 - DNA, 25 bp, Homo sapien
agagttcccggagccttcactgtct

SEQ ID NO: 3073712 - DNA, 25 bp, Homo sapien
tgtagctaccaggttagcagcaaag

SEQ ID NO: 3073713 - DNA, 25 bp, Homo sapien
gagttgctgcctgtgtagctaccag

SEQ ID NO: 3073714 - DNA, 25 bp, Homo sapien
gcagcaaagaaaccatatctggtct

SEQ ID NO: 3073715 - DNA, 25 bp, Homo sapien
tggagtctcttccaaaggagttgct

SEQ ID NO: 3073716 - DNA, 25 bp, Homo sapien
aatgatgtggactccatcaagggga

SEQ ID NO: 3073717 - DNA, 25 bp, Homo sapien
gggacatttccagcgagagggacgg

SEQ ID NO: 3073718 - DNA, 25 bp, Homo sapien
acatttccagcgagagggacggcag

SEQ ID NO: 3073719 - DNA, 25 bp, Homo sapien
ggggagaactgctcatccatatcat

SEQ ID NO: 3073720 - DNA, 25 bp, Homo sapien
ggtgatgcaccttgatgatgcataa

SEQ ID NO: 3073721 - DNA, 25 bp, Homo sapien
gatgcataagtactgagcctgaatc

SEQ ID NO: 3073722 - DNA, 25 bp, Homo sapien
taatgttgccagctgttacagatgg

SEQ ID NO: 3073723 - DNA, 25 bp, Homo sapien
cagatacttaatgttgccagctgtt

SEQ ID NO: 3073724 - DNA, 25 bp, Homo sapien
ttctcctgctttcccataaacacca

SEQ ID NO: 3073725 - DNA, 25 bp, Homo sapien
cttctcctgctttcccataaacacc

SEQ ID NO: 3073726 - DNA, 25 bp, Homo sapien
tctcctgctttcccataaacaccat

SEQ ID NO: 3073727 - DNA, 25 bp, Homo sapien
gttctaaacactagtgccatttctc

SEQ ID NO: 3073728 - DNA, 25 bp, Homo sapien
ttagccatagatgcctactgcttgg

SEQ ID NO: 3073729 - DNA, 25 bp, Homo sapien
tcctgagtatctgcacctctggagg

SEQ ID NO: 3073730 - DNA, 25 bp, Homo sapien
ggtacttgatataagttctaaacac

SEQ ID NO: 3073731 - DNA, 25 bp, Homo sapien
tccgcaatgagacattctgcccaca

SEQ ID NO: 3073732 - DNA, 25 bp, Homo sapien
taggtctatagcttccgcaatgaga

SEQ ID NO: 3073733 - DNA, 25 bp, Homo sapien
tcagctcaattaggtctatagcttc

SEQ ID NO: 3073734 - DNA, 25 bp, Homo sapien
cccacatctgtccagatatgtattc

SEQ ID NO: 3073735 - DNA, 25 bp, Homo sapien
agtgttgagcagccaactatgatct

SEQ ID NO: 3073736 - DNA, 25 bp, Homo sapien
cagtgttgagcagccaactatgatc

SEQ ID NO: 3073737 - DNA, 25 bp, Homo sapien
gtgttgagcagccaactatgatctt

SEQ ID NO: 3073738 - DNA, 25 bp, Homo sapien
cagaagcactcttagctaaatcaag

SEQ ID NO: 3073739 - DNA, 25 bp, Homo sapien
caggctcagaagcactcttagctaa

SEQ ID NO: 3073740 - DNA, 25 bp, Homo sapien
taaatcaagctctggcgttaactcc

SEQ ID NO: 3073741 - DNA, 25 bp, Homo sapien
tcttagctaaatcaagctctggcgt

SEQ ID NO: 3073742 - DNA, 25 bp, Homo sapien
ctcttcactgtaggcggcctaactg

SEQ ID NO: 3073743 - DNA, 25 bp, Homo sapien
cactgtaggcggcctaactggcatt

SEQ ID NO: 3073744 - DNA, 25 bp, Homo sapien
tgtaggcggcctaactggcattgta

SEQ ID NO: 3073745 - DNA, 25 bp, Homo sapien
tctcttcactgtaggcggcctaact

SEQ ID NO: 3073746 - DNA, 25 bp, Homo sapien
cataattatcttttaaactggtatt

SEQ ID NO: 3073747 - DNA, 25 bp, Homo sapien
tcataattatcttttaaactggtat

SEQ ID NO: 3073748 - DNA, 25 bp, Homo sapien
gaataatcctctttcctggactgga

SEQ ID NO: 3073749 - DNA, 25 bp, Homo sapien
cttctaagagaataatcctctttcc

SEQ ID NO: 3073750 - DNA, 25 bp, Homo sapien
taatcctctttcctggactggaccc

SEQ ID NO: 3073751 - DNA, 25 bp, Homo sapien
cctctttcctggactggacccagtg

SEQ ID NO: 3073752 - DNA, 25 bp, Homo sapien
cctgtgttgctgaatacaccaatta

SEQ ID NO: 3073753 - DNA, 25 bp, Homo sapien
gactccaaatgtgtcctgtgttgct

SEQ ID NO: 3073754 - DNA, 25 bp, Homo sapien
tgctgaatacaccaattaagaccat

SEQ ID NO: 3073755 - DNA, 25 bp, Homo sapien
aatattaactgactccaaatgtgtc

SEQ ID NO: 3073756 - DNA, 25 bp, Homo sapien
cttgcaaatcttttgtgctatcctt

SEQ ID NO: 3073757 - DNA, 25 bp, Homo sapien
cttcttgcaaatcttttgtgctatc

SEQ ID NO: 3073758 - DNA, 25 bp, Homo sapien
tgcaaatcttttgtgctatcctttg

SEQ ID NO: 3073759 - DNA, 25 bp, Homo sapien
tcttgcaaatcttttgtgctatcct

SEQ ID NO: 3073760 - DNA, 25 bp, Homo sapien
taattgatttgatagtgggtgattc

SEQ ID NO: 3073761 - DNA, 25 bp, Homo sapien
tctccattgagtagcatagttatca

SEQ ID NO: 3073762 - DNA, 25 bp, Homo sapien
gaaatcgttcctcatatactaatga

SEQ ID NO: 3073763 - DNA, 25 bp, Homo sapien
ggtgattctgttgaatcctccagga

SEQ ID NO: 3073764 - DNA, 25 bp, Homo sapien
ccactaaatggagcagtcctgtaag

SEQ ID NO: 3073765 - DNA, 25 bp, Homo sapien
taaatggagcagtcctgtaagtctg

SEQ ID NO: 3073766 - DNA, 25 bp, Homo sapien
tggagcagtcctgtaagtctgagtc

SEQ ID NO: 3073767 - DNA, 25 bp, Homo sapien
agtccaagtagctacttttcttaga

SEQ ID NO: 3073768 - DNA, 25 bp, Homo sapien
ccagacctctcgacatgcacagata

SEQ ID NO: 3073769 - DNA, 25 bp, Homo sapien
ttttcagaactgctacaccagacct

SEQ ID NO: 3073770 - DNA, 25 bp, Homo sapien
gcacagatacacctgaatctgcaag

SEQ ID NO: 3073771 - DNA, 25 bp, Homo sapien
ggataacctggtctgtctctcaaat

SEQ ID NO: 3073772 - DNA, 25 bp, Homo sapien
tactggctaccgctaaaccatataa

SEQ ID NO: 3073773 - DNA, 25 bp, Homo sapien
catcaacactctggaaatctgcgta

SEQ ID NO: 3073774 - DNA, 25 bp, Homo sapien
ctgcctggacccttttgaccattta

SEQ ID NO: 3073775 - DNA, 25 bp, Homo sapien
tttatacctggagtttttatgctta

SEQ ID NO: 3073776 - DNA, 25 bp, Homo sapien
atccctttgcagagcttatttttat

SEQ ID NO: 3073777 - DNA, 25 bp, Homo sapien
catgctggacctcgttgtttaacta

SEQ ID NO: 3073778 - DNA, 25 bp, Homo sapien
taactaatacgtctatcattgtgga

SEQ ID NO: 3073779 - DNA, 25 bp, Homo sapien
gaatgagaatatctctaatgttaca

SEQ ID NO: 3073780 - DNA, 25 bp, Homo sapien
tatcaaggacaaagtctgattctcc

SEQ ID NO: 3073781 - DNA, 25 bp, Homo sapien
ttaaatttatcaaggacaaagtctg

SEQ ID NO: 3073782 - DNA, 25 bp, Homo sapien
tctccaaattgtagattcaaagact

SEQ ID NO: 3073783 - DNA, 25 bp, Homo sapien
cacagtataactctatgatgttaaa

SEQ ID NO: 3073784 - DNA, 25 bp, Homo sapien
aagagtgatcttcgtgatttagtgc

SEQ ID NO: 3073785 - DNA, 25 bp, Homo sapien
cattcaggaaagagtgatcttcgtg

SEQ ID NO: 3073786 - DNA, 25 bp, Homo sapien
aagaaagaactcttctcagcaggtc

SEQ ID NO: 3073787 - DNA, 25 bp, Homo sapien
cctgaaaaagtagggcacattcagg

SEQ ID NO: 3073788 - DNA, 25 bp, Homo sapien
ctttatcctcggatggagccctggc

SEQ ID NO: 3073789 - DNA, 25 bp, Homo sapien
taatctttatcctcggatggagccc

SEQ ID NO: 3073790 - DNA, 25 bp, Homo sapien
actataatctttatcctcggatgga

SEQ ID NO: 3073791 - DNA, 25 bp, Homo sapien
tctttatcctcggatggagccctgg

SEQ ID NO: 3073792 - DNA, 25 bp, Homo sapien
cttcatctcacttttattgatatat

SEQ ID NO: 3073793 - DNA, 25 bp, Homo sapien
cctgaattggcattccagtacttca

SEQ ID NO: 3073794 - DNA, 25 bp, Homo sapien
cctgagaagatgttcctgaattggc

SEQ ID NO: 3073795 - DNA, 25 bp, Homo sapien
tgagaagatgttcctgaattggcat

SEQ ID NO: 3073796 - DNA, 25 bp, Homo sapien
tgagggtaatctacaggctcctggc

SEQ ID NO: 3073797 - DNA, 25 bp, Homo sapien
tcctggtgtaggatatgcttctgca

SEQ ID NO: 3073798 - DNA, 25 bp, Homo sapien
catcggtggagatctagaaggtcct

SEQ ID NO: 3073799 - DNA, 25 bp, Homo sapien
ggctcctggcaaaacagtatcctgt

SEQ ID NO: 3073800 - DNA, 25 bp, Homo sapien
gacatatatgatgtagaatatggtc

SEQ ID NO: 3073801 - DNA, 25 bp, Homo sapien
gaagggacatatatgatgtagaata

SEQ ID NO: 3073802 - DNA, 25 bp, Homo sapien
gggacatatatgatgtagaatatgg

SEQ ID NO: 3073803 - DNA, 25 bp, Homo sapien
aagggacatatatgatgtagaatat

SEQ ID NO: 3073804 - DNA, 25 bp, Homo sapien
cagatttcacgtctttaaactttgc

SEQ ID NO: 3073805 - DNA, 25 bp, Homo sapien
gtgcagatttcacgtctttaaactt

SEQ ID NO: 3073806 - DNA, 25 bp, Homo sapien
ttcacgtctttaaactttgctctca

SEQ ID NO: 3073807 - DNA, 25 bp, Homo sapien
tcacgtctttaaactttgctctcat

SEQ ID NO: 3073808 - DNA, 25 bp, Homo sapien
gggcttttcacaagaggcttgtgag

SEQ ID NO: 3073809 - DNA, 25 bp, Homo sapien
ggcttttcacaagaggcttgtgaga

SEQ ID NO: 3073810 - DNA, 25 bp, Homo sapien
taggataaaagacctggcagcccat

SEQ ID NO: 3073811 - DNA, 25 bp, Homo sapien
caaattgactggttcaatgcaggta

SEQ ID NO: 3073812 - DNA, 25 bp, Homo sapien
tcaatgcaggtaggataaaagacct

SEQ ID NO: 3073813 - DNA, 25 bp, Homo sapien
ctcagttctcaaattgactggttca

SEQ ID NO: 3073814 - DNA, 25 bp, Homo sapien
ataatgatacttcttcatactccac

SEQ ID NO: 3073815 - DNA, 25 bp, Homo sapien
ctcacttcttgaaataatgatactt

SEQ ID NO: 3073816 - DNA, 25 bp, Homo sapien
gaaataatgatacttcttcatactc

SEQ ID NO: 3073817 - DNA, 25 bp, Homo sapien
cacttcttgaaataatgatacttct

SEQ ID NO: 3073818 - DNA, 25 bp, Homo sapien
ctaacagcagttaggtttatgtctc

SEQ ID NO: 3073819 - DNA, 25 bp, Homo sapien
ttgtccccaccacacgatgcctctt

SEQ ID NO: 3073820 - DNA, 25 bp, Homo sapien
ccacacgatgcctcttttcaacagg

SEQ ID NO: 3073821 - DNA, 25 bp, Homo sapien
atgctttatcaacttcaagaggagg

SEQ ID NO: 3073822 - DNA, 25 bp, Homo sapien
gcagcaaccaatgtgttacttattc

SEQ ID NO: 3073823 - DNA, 25 bp, Homo sapien
agcaaccaatgtgttacttattctc

SEQ ID NO: 3073824 - DNA, 25 bp, Homo sapien
ttttgcagcaaccaatgtgttactt

SEQ ID NO: 3073825 - DNA, 25 bp, Homo sapien
tttgcagcaaccaatgtgttactta

SEQ ID NO: 3073826 - DNA, 25 bp, Homo sapien
ttagctccagcaattgcctcatgac

SEQ ID NO: 3073827 - DNA, 25 bp, Homo sapien
cagaactgccctcatttggaacttg

SEQ ID NO: 3073828 - DNA, 25 bp, Homo sapien
tggctatgattaactgggacatgac

SEQ ID NO: 3073829 - DNA, 25 bp, Homo sapien
tctaatccaggcatagactgagcat

SEQ ID NO: 3073830 - DNA, 25 bp, Homo sapien
ggaatggggatttttgctccactcc

SEQ ID NO: 3073831 - DNA, 25 bp, Homo sapien
gaatggggatttttgctccactcct

SEQ ID NO: 3073832 - DNA, 25 bp, Homo sapien
tttaggtctctgtagttagtcactt

SEQ ID NO: 3073833 - DNA, 25 bp, Homo sapien
gatttaggtctctgtagttagtcac

SEQ ID NO: 3073834 - DNA, 25 bp, Homo sapien
ggatttaggtctctgtagttagtca

SEQ ID NO: 3073835 - DNA, 25 bp, Homo sapien
ttggatttaggtctctgtagttagt

SEQ ID NO: 3073836 - DNA, 25 bp, Homo sapien
gtgggcagaagtaatgcaagatcct

SEQ ID NO: 3073837 - DNA, 25 bp, Homo sapien
agatcctagtagtttgccaaagtat

SEQ ID NO: 3073838 - DNA, 25 bp, Homo sapien
caagaggtcaagttgtgcacttggt

SEQ ID NO: 3073839 - DNA, 25 bp, Homo sapien
aataagatttgaagagtgggcagaa

SEQ ID NO: 3073840 - DNA, 25 bp, Homo sapien
tactctcagaaaaccgatagctacc

SEQ ID NO: 3073841 - DNA, 25 bp, Homo sapien
caccatggtttgaaatgggatccac

SEQ ID NO: 3073842 - DNA, 25 bp, Homo sapien
cagcaaagcaggatctaggaaatct

SEQ ID NO: 3073843 - DNA, 25 bp, Homo sapien
tctctctgtcaggtgaattactctc

SEQ ID NO: 3073844 - DNA, 25 bp, Homo sapien
gtagcgtctttgtctacagtgtaaa

SEQ ID NO: 3073845 - DNA, 25 bp, Homo sapien
tttcaacctcatgcacatacttcac

SEQ ID NO: 3073846 - DNA, 25 bp, Homo sapien
agtgtaaatttcaacctcatgcaca

SEQ ID NO: 3073847 - DNA, 25 bp, Homo sapien
atttttgaagtagcgtctttgtcta

SEQ ID NO: 3073848 - DNA, 25 bp, Homo sapien
atcttctaatgccctcttcagctca

SEQ ID NO: 3073849 - DNA, 25 bp, Homo sapien
tccaagacgcatacctcatccaaat

SEQ ID NO: 3073850 - DNA, 25 bp, Homo sapien
gcatacctcatccaaatttttctct

SEQ ID NO: 3073851 - DNA, 25 bp, Homo sapien
tggccttccaagacgcatacctcat

SEQ ID NO: 3073852 - DNA, 25 bp, Homo sapien
gaaggctgatctaaatggtggtccc

SEQ ID NO: 3073853 - DNA, 25 bp, Homo sapien
gctgatctaaatggtggtcccaggt

SEQ ID NO: 3073854 - DNA, 25 bp, Homo sapien
tcccatttgtgcaacgtgcgtgaag

SEQ ID NO: 3073855 - DNA, 25 bp, Homo sapien
caacgtgcgtgaaggctgatctaaa

SEQ ID NO: 3073856 - DNA, 25 bp, Homo sapien
ctagatctgaactagagccaaaagc

SEQ ID NO: 3073857 - DNA, 25 bp, Homo sapien
ctgaactagagccaaaagcagaaga

SEQ ID NO: 3073858 - DNA, 25 bp, Homo sapien
gaactagagccaaaagcagaagagg

SEQ ID NO: 3073859 - DNA, 25 bp, Homo sapien
agatctgaactagagccaaaagcag

SEQ ID NO: 3073860 - DNA, 25 bp, Homo sapien
cattttcattaaatcttgggctttt

SEQ ID NO: 3073861 - DNA, 25 bp, Homo sapien
taggaatataaagcacactcaactt

SEQ ID NO: 3073862 - DNA, 25 bp, Homo sapien
aatgtgcttgtagctcatacctgaa

SEQ ID NO: 3073863 - DNA, 25 bp, Homo sapien
tccttaatgtgcttgtagctcatac

SEQ ID NO: 3073864 - DNA, 25 bp, Homo sapien
tgggtctgctgcacgaagactctgg

SEQ ID NO: 3073865 - DNA, 25 bp, Homo sapien
gagcctgggtctgctgcacgaagac

SEQ ID NO: 3073866 - DNA, 25 bp, Homo sapien
cctgggtctgctgcacgaagactct

SEQ ID NO: 3073867 - DNA, 25 bp, Homo sapien
ggtctgctgcacgaagactctggtg

SEQ ID NO: 3073868 - DNA, 25 bp, Homo sapien
ttgggcacaggtgcggagacaatgc

SEQ ID NO: 3073869 - DNA, 25 bp, Homo sapien
gcacaggtgcggagacaatgccagt

SEQ ID NO: 3073870 - DNA, 25 bp, Homo sapien
tcatcgataccagctatcatgagca

SEQ ID NO: 3073871 - DNA, 25 bp, Homo sapien
cttcttgggcacaggtgcggagaca

SEQ ID NO: 3073872 - DNA, 25 bp, Homo sapien
gcacagagccgcagcggcctgtcgc

SEQ ID NO: 3073873 - DNA, 25 bp, Homo sapien
cagcacagagccgcagcggcctgtc

SEQ ID NO: 3073874 - DNA, 25 bp, Homo sapien
agcacagagccgcagcggcctgtcg

SEQ ID NO: 3073875 - DNA, 25 bp, Homo sapien
caagggacggtgtggggcttgccga

SEQ ID NO: 3073876 - DNA, 25 bp, Homo sapien
tgcaagggacggtgtggggcttgcc

SEQ ID NO: 3073877 - DNA, 25 bp, Homo sapien
aagggacggtgtggggcttgccgat

SEQ ID NO: 3073878 - DNA, 25 bp, Homo sapien
cttgcaagggacggtgtggggcttg

SEQ ID NO: 3073879 - DNA, 25 bp, Homo sapien
atgatggccccacggatggcggtgg

SEQ ID NO: 3073880 - DNA, 25 bp, Homo sapien
gatggccccacggatggcggtggcc

SEQ ID NO: 3073881 - DNA, 25 bp, Homo sapien
aggatgatggccccacggatggcgg

SEQ ID NO: 3073882 - DNA, 25 bp, Homo sapien
gatgatggccccacggatggcggtg

SEQ ID NO: 3073883 - DNA, 25 bp, Homo sapien
ctcgtccttaagagaggcccccagg

SEQ ID NO: 3073884 - DNA, 25 bp, Homo sapien
tcaaaacctcgtccttaagagaggc

SEQ ID NO: 3073885 - DNA, 25 bp, Homo sapien
tggtgcgctggccagcacgggtctg

SEQ ID NO: 3073886 - DNA, 25 bp, Homo sapien
ttgtagtccccgatagcaacaaacg

SEQ ID NO: 3073887 - DNA, 25 bp, Homo sapien
ctcggccccggccccgtccactgct

SEQ ID NO: 3073888 - DNA, 25 bp, Homo sapien
ggccccggccccgtccactgctgct

SEQ ID NO: 3073889 - DNA, 25 bp, Homo sapien
tcggccccggccccgtccactgctg

SEQ ID NO: 3073890 - DNA, 25 bp, Homo sapien
ccccggccccgtccactgctgctac

SEQ ID NO: 3073891 - DNA, 25 bp, Homo sapien
atcccagggccccgacggccaccag

SEQ ID NO: 3073892 - DNA, 25 bp, Homo sapien
ggtataaggtaagagccgccaccac

SEQ ID NO: 3073893 - DNA, 25 bp, Homo sapien
tatttagccatatacacaagggttt

SEQ ID NO: 3073894 - DNA, 25 bp, Homo sapien
cattgactggtcttagcactgttgt

SEQ ID NO: 3073895 - DNA, 25 bp, Homo sapien
gatgtgtgagacctatacgtttgtt

SEQ ID NO: 3073896 - DNA, 25 bp, Homo sapien
aatggatggagcaaagcatgttgcc

SEQ ID NO: 3073897 - DNA, 25 bp, Homo sapien
cacgagcatccatccagtgtacatg

SEQ ID NO: 3073898 - DNA, 25 bp, Homo sapien
caaataccatgtcaggactatgtaa

SEQ ID NO: 3073899 - DNA, 25 bp, Homo sapien
ttaaaaatgccagttgccgggccag

SEQ ID NO: 3073900 - DNA, 25 bp, Homo sapien
cttactgttaccattcaagcccttg

SEQ ID NO: 3073901 - DNA, 25 bp, Homo sapien
tgtgttccttcttactgttaccatt

SEQ ID NO: 3073902 - DNA, 25 bp, Homo sapien
ccttcttacttgttaccttactgtg

SEQ ID NO: 3073903 - DNA, 25 bp, Homo sapien
tccttcttactgttaccattcaagc

SEQ ID NO: 3073904 - DNA, 25 bp, Homo sapien
atgcaactctctcaacacccgtgaa

SEQ ID NO: 3073905 - DNA, 25 bp, Homo sapien
gcttgaccacatgcaactctctcaa

SEQ ID NO: 3073906 - DNA, 25 bp, Homo sapien
aactctctcaacacccgtgaagaac

SEQ ID NO: 3073907 - DNA, 25 bp, Homo sapien
tcatcgcttgaccacatgcaactct

SEQ ID NO: 3073908 - DNA, 25 bp, Homo sapien
ggtattggacaatcaggaatctcat

SEQ ID NO: 3073909 - DNA, 25 bp, Homo sapien
ggcaccacggtatggtattggacaa

SEQ ID NO: 3073910 - DNA, 25 bp, Homo sapien
ccgtttctcagtaaaaggcaccacg

SEQ ID NO: 3073911 - DNA, 25 bp, Homo sapien
catattcgtaactgcttctcctaga

SEQ ID NO: 3073912 - DNA, 25 bp, Homo sapien
gcagaaccattaaggcagatggccc

SEQ ID NO: 3073913 - DNA, 25 bp, Homo sapien
cagatggcccgggttgtaaagagaa

SEQ ID NO: 3073914 - DNA, 25 bp, Homo sapien
tcccatccatttagaggtaagcgtc

SEQ ID NO: 3073915 - DNA, 25 bp, Homo sapien
tcaagactgagtgcggatctgggaa

SEQ ID NO: 3073916 - DNA, 25 bp, Homo sapien
tagcattagctcaaaagtaccaagt

SEQ ID NO: 3073917 - DNA, 25 bp, Homo sapien
aagccatgttattccacccctggga

SEQ ID NO: 3073918 - DNA, 25 bp, Homo sapien
gggaggtgccgtgatcttttaaaca

SEQ ID NO: 3073919 - DNA, 25 bp, Homo sapien
tgcaaaaacacaatcctccgaagtc

SEQ ID NO: 3073920 - DNA, 25 bp, Homo sapien
tatgtacttacacacatctatggtg

SEQ ID NO: 3073921 - DNA, 25 bp, Homo sapien
tacttaatgtgccaagcaggaaact

SEQ ID NO: 3073922 - DNA, 25 bp, Homo sapien
gctctttgagttccacaaggacaaa

SEQ ID NO: 3073923 - DNA, 25 bp, Homo sapien
gatctcaggttaaatagccaaacag

SEQ ID NO: 3073924 - DNA, 25 bp, Homo sapien
cactcggacattgctgggtcagact

SEQ ID NO: 3073925 - DNA, 25 bp, Homo sapien
taatgtacacctaatgtccaagggc

SEQ ID NO: 3073926 - DNA, 25 bp, Homo sapien
tggtccaaagccagtccgggaatac

SEQ ID NO: 3073927 - DNA, 25 bp, Homo sapien
tagaactgggacacacccttcaggg

SEQ ID NO: 3073928 - DNA, 25 bp, Homo sapien
tgtctactacacagactatcgtgta

SEQ ID NO: 3073929 - DNA, 25 bp, Homo sapien
gcatcggcttgccagaagtttctga

SEQ ID NO: 3073930 - DNA, 25 bp, Homo sapien
catttttataacgagactgcagaac

SEQ ID NO: 3073931 - DNA, 25 bp, Homo sapien
tatcgtgtaactctggcatcggctt

SEQ ID NO: 3073932 - DNA, 25 bp, Homo sapien
aatgtgcaaaatcaccattgacatt

SEQ ID NO: 3073933 - DNA, 25 bp, Homo sapien
tgtgcaaaatcaccattgacattca

SEQ ID NO: 3073934 - DNA, 25 bp, Homo sapien
atgtgcaaaatcaccattgacattc

SEQ ID NO: 3073935 - DNA, 25 bp, Homo sapien
tcataaattgacccttctttcctga

SEQ ID NO: 3073936 - DNA, 25 bp, Homo sapien
cataaattgacccttctttcctgat

SEQ ID NO: 3073937 - DNA, 25 bp, Homo sapien
aattgacccttctttcctgatcaca

SEQ ID NO: 3073938 - DNA, 25 bp, Homo sapien
taaattgacccttctttcctgatca

SEQ ID NO: 3073939 - DNA, 25 bp, Homo sapien
cacgtgtttgtagtaaccctcttct

SEQ ID NO: 3073940 - DNA, 25 bp, Homo sapien
agtagagcacgtgtttgtagtaacc

SEQ ID NO: 3073941 - DNA, 25 bp, Homo sapien
tcagcagaagtagagcacgtgtttg

SEQ ID NO: 3073942 - DNA, 25 bp, Homo sapien
cagaagtagagcacgtgtttgtagt

SEQ ID NO: 3073943 - DNA, 25 bp, Homo sapien
gcaggtctgttcctgcggctgccat

SEQ ID NO: 3073944 - DNA, 25 bp, Homo sapien
tgttacaattatgcaggtctgttcc

SEQ ID NO: 3073945 - DNA, 25 bp, Homo sapien
aattatgcaggtctgttcctgcggc

SEQ ID NO: 3073946 - DNA, 25 bp, Homo sapien
aaatgctgttacaattatgcaggtc

SEQ ID NO: 3073947 - DNA, 25 bp, Homo sapien
catcaacccgtactgtagcttccat

SEQ ID NO: 3073948 - DNA, 25 bp, Homo sapien
ctgaattccatcaacccgtactgta

SEQ ID NO: 3073949 - DNA, 25 bp, Homo sapien
ttccatcaacccgtactgtagcttc

SEQ ID NO: 3073950 - DNA, 25 bp, Homo sapien
gaattccatcaacccgtactgtagc

SEQ ID NO: 3073951 - DNA, 25 bp, Homo sapien
tccaaactggacctacgatgctggc

SEQ ID NO: 3073952 - DNA, 25 bp, Homo sapien
gcttccaaactggacctacgatgct

SEQ ID NO: 3073953 - DNA, 25 bp, Homo sapien
cagcttccaaactggacctacgatg

SEQ ID NO: 3073954 - DNA, 25 bp, Homo sapien
aaactggacctacgatgctggcttc

SEQ ID NO: 3073955 - DNA, 25 bp, Homo sapien
tatcacagaaaatgccaaaggcttg

SEQ ID NO: 3073956 - DNA, 25 bp, Homo sapien
cacagaaaatgccaaaggcttgcaa

SEQ ID NO: 3073957 - DNA, 25 bp, Homo sapien
cagaaaatgccaaaggcttgcaagg

SEQ ID NO: 3073958 - DNA, 25 bp, Homo sapien
atcacagaaaatgccaaaggcttgc

SEQ ID NO: 3073959 - DNA, 25 bp, Homo sapien
tagtcgtggaatgcagtggtcttag

SEQ ID NO: 3073960 - DNA, 25 bp, Homo sapien
tgttgcacaacttcacgctgcccaa

SEQ ID NO: 3073961 - DNA, 25 bp, Homo sapien
taccagaatgccacatccatagggc

SEQ ID NO: 3073962 - DNA, 25 bp, Homo sapien
tcacggtgtattgaagtaccagaat

SEQ ID NO: 3073963 - DNA, 25 bp, Homo sapien
tgtttttgtggggctgcccaaaata

SEQ ID NO: 3073964 - DNA, 25 bp, Homo sapien
ttgtggggctgcccaaaataagtag

SEQ ID NO: 3073965 - DNA, 25 bp, Homo sapien
tttgtggggctgcccaaaataagta

SEQ ID NO: 3073966 - DNA, 25 bp, Homo sapien
tgtggggctgcccaaaataagtagc

SEQ ID NO: 3073967 - DNA, 25 bp, Homo sapien
atatgtcacaaaagaagagagtccc

SEQ ID NO: 3073968 - DNA, 25 bp, Homo sapien
taagggaacagatctcactaggcca

SEQ ID NO: 3073969 - DNA, 25 bp, Homo sapien
tgatgaaatctagcccaaaaggttg

SEQ ID NO: 3073970 - DNA, 25 bp, Homo sapien
gaatttgaatgtgtaaaaccagcag

SEQ ID NO: 3073971 - DNA, 25 bp, Homo sapien
tattctcttcttattgtggaagcca

SEQ ID NO: 3073972 - DNA, 25 bp, Homo sapien
tgctggtggcgccaggtgttgcttg

SEQ ID NO: 3073973 - DNA, 25 bp, Homo sapien
gcaacatcgatttattctcttctta

SEQ ID NO: 3073974 - DNA, 25 bp, Homo sapien
tggactaaggcaacatcgatttatt

SEQ ID NO: 3073975 - DNA, 25 bp, Homo sapien
gattttgtggttgtaaatatcctgg

SEQ ID NO: 3073976 - DNA, 25 bp, Homo sapien
tttcttagcaaacatgcagtcatag

SEQ ID NO: 3073977 - DNA, 25 bp, Homo sapien
tatatggaagtttccctcttgatgc

SEQ ID NO: 3073978 - DNA, 25 bp, Homo sapien
cagtcatagaaattactgaggaatt

SEQ ID NO: 3073979 - DNA, 25 bp, Homo sapien
tacttcccgtgtatttaaattcaga

SEQ ID NO: 3073980 - DNA, 25 bp, Homo sapien
tcctccaattcctgcaattacagca

SEQ ID NO: 3073981 - DNA, 25 bp, Homo sapien
ctccaattcctgcaattacagcagc

SEQ ID NO: 3073982 - DNA, 25 bp, Homo sapien
cctccaattcctgcaattacagcag

SEQ ID NO: 3073983 - DNA, 25 bp, Homo sapien
tccaattcctgcaattacagcagca

SEQ ID NO: 3073984 - DNA, 25 bp, Homo sapien
gaactgcttgaaccaaggcaccact

SEQ ID NO: 3073985 - DNA, 25 bp, Homo sapien
agtgccaggctcacaggaaaaatat

SEQ ID NO: 3073986 - DNA, 25 bp, Homo sapien
aagaggtgttgatatgttccgctga

SEQ ID NO: 3073987 - DNA, 25 bp, Homo sapien
aagtgaagtactcccagctgtgaac

SEQ ID NO: 3073988 - DNA, 25 bp, Homo sapien
gctttggtcaacagtcccagtgggt

SEQ ID NO: 3073989 - DNA, 25 bp, Homo sapien
taagtcatccttgctattctctggc

SEQ ID NO: 3073990 - DNA, 25 bp, Homo sapien
gacatagtggagcagagataagtca

SEQ ID NO: 3073991 - DNA, 25 bp, Homo sapien
caagttttcccagtccaggtgccag

SEQ ID NO: 3073992 - DNA, 25 bp, Homo sapien
gcataagtccatgatagtatccact

SEQ ID NO: 3073993 - DNA, 25 bp, Homo sapien
ccatgatagtatccactgcagtaca

SEQ ID NO: 3073994 - DNA, 25 bp, Homo sapien
ttagagctctagtagcataagtcca

SEQ ID NO: 3073995 - DNA, 25 bp, Homo sapien
tatccactgcagtacacagtagaaa

SEQ ID NO: 3073996 - DNA, 25 bp, Homo sapien
tgctgccccaaacgtttcattgttc

SEQ ID NO: 3073997 - DNA, 25 bp, Homo sapien
gctgccccaaacgtttcattgttcc

SEQ ID NO: 3073998 - DNA, 25 bp, Homo sapien
ttctgctgccccaaacgtttcattg

SEQ ID NO: 3073999 - DNA, 25 bp, Homo sapien
gccccaaacgtttcattgttcctca

SEQ ID NO: 3074000 - DNA, 25 bp, Homo sapien
cctgaagagcactggtgccctagtt

SEQ ID NO: 3074001 - DNA, 25 bp, Homo sapien
gaagagcactggtgccctagttttt

SEQ ID NO: 3074002 - DNA, 25 bp, Homo sapien
cgctatcctgaagagcactggtgcc

SEQ ID NO: 3074003 - DNA, 25 bp, Homo sapien
gcactggtgccctagtttttgttgt

SEQ ID NO: 3074004 - DNA, 25 bp, Homo sapien
cataaattttcgtggcttgctcaga

SEQ ID NO: 3074005 - DNA, 25 bp, Homo sapien
ttggtgggatgaactctaagcctgt

SEQ ID NO: 3074006 - DNA, 25 bp, Homo sapien
ccgcagaaatggtccagggtaagtt

SEQ ID NO: 3074007 - DNA, 25 bp, Homo sapien
tggtccagggtaagttcaccataaa

SEQ ID NO: 3074008 - DNA, 25 bp, Homo sapien
ctgtctttgtgatccagtcttcaca

SEQ ID NO: 3074009 - DNA, 25 bp, Homo sapien
cagtctcagcatgacctgtctttgt

SEQ ID NO: 3074010 - DNA, 25 bp, Homo sapien
tccttctgttactaaccgggactca

SEQ ID NO: 3074011 - DNA, 25 bp, Homo sapien
ctccccagtctcagcatgacctgtc

SEQ ID NO: 3074012 - DNA, 25 bp, Homo sapien
tcacggctgtctcatgctaacaatg

SEQ ID NO: 3074013 - DNA, 25 bp, Homo sapien
cacggctgtctcatgctaacaatga

SEQ ID NO: 3074014 - DNA, 25 bp, Homo sapien
acggctgtctcatgctaacaatgaa

SEQ ID NO: 3074015 - DNA, 25 bp, Homo sapien
cggctgtctcatgctaacaatgaat

SEQ ID NO: 3074016 - DNA, 25 bp, Homo sapien
ggcttcaaagttgatatctgaaaca

SEQ ID NO: 3074017 - DNA, 25 bp, Homo sapien
tgaaacactgtcaagtgccagatct

SEQ ID NO: 3074018 - DNA, 25 bp, Homo sapien
ttagcaaattcatgaggcttcaaag

SEQ ID NO: 3074019 - DNA, 25 bp, Homo sapien
aatgtaacagatggtttgcaaacat

SEQ ID NO: 3074020 - DNA, 25 bp, Homo sapien
tgcttggtgaaaagttcaaaggacc

SEQ ID NO: 3074021 - DNA, 25 bp, Homo sapien
tgttttcactctgatcccccatgcc

SEQ ID NO: 3074022 - DNA, 25 bp, Homo sapien
ctgttttcactctgatcccccatgc

SEQ ID NO: 3074023 - DNA, 25 bp, Homo sapien
gttttcactctgatcccccatgcca

SEQ ID NO: 3074024 - DNA, 25 bp, Homo sapien
ttctccccacagagcaacattttca

SEQ ID NO: 3074025 - DNA, 25 bp, Homo sapien
tctccccacagagcaacattttcat

SEQ ID NO: 3074026 - DNA, 25 bp, Homo sapien
cttctccccacagagcaacattttc

SEQ ID NO: 3074027 - DNA, 25 bp, Homo sapien
tccccacagagcaacattttcatca

SEQ ID NO: 3074028 - DNA, 25 bp, Homo sapien
gaaagtcatctgaatctaccttccg

SEQ ID NO: 3074029 - DNA, 25 bp, Homo sapien
tccggcactctgttatcactgctgt

SEQ ID NO: 3074030 - DNA, 25 bp, Homo sapien
caggagggccaagcagaaagtcatc

SEQ ID NO: 3074031 - DNA, 25 bp, Homo sapien
aaacaggagggccaagcagaaagtc

SEQ ID NO: 3074032 - DNA, 25 bp, Homo sapien
gaaagagaagctcctatagctgtct

SEQ ID NO: 3074033 - DNA, 25 bp, Homo sapien
aatccaacatgttctggagggaccc

SEQ ID NO: 3074034 - DNA, 25 bp, Homo sapien
tcatcttgcttaacctactagtggc

SEQ ID NO: 3074035 - DNA, 25 bp, Homo sapien
taagcacatgccactagtgtcagag

SEQ ID NO: 3074036 - DNA, 25 bp, Homo sapien
ggtttgtgatgtcttacttgtagca

SEQ ID NO: 3074037 - DNA, 25 bp, Homo sapien
gatgtcttacttgtagcattgaatg

SEQ ID NO: 3074038 - DNA, 25 bp, Homo sapien
ttgtgatgtcttacttgtagcattg

SEQ ID NO: 3074039 - DNA, 25 bp, Homo sapien
gaatgaatggaccacaatgtctttt

SEQ ID NO: 3074040 - DNA, 25 bp, Homo sapien
ttcttgaacttcagcagacccatcc

SEQ ID NO: 3074041 - DNA, 25 bp, Homo sapien
tgaatacaaaaaagaactatgatct

SEQ ID NO: 3074042 - DNA, 25 bp, Homo sapien
tgtagtcaaaggcaggtgaagtcta

SEQ ID NO: 3074043 - DNA, 25 bp, Homo sapien
ttggagttcatgtacttccttttca

SEQ ID NO: 3074044 - DNA, 25 bp, Homo sapien
gaagtctagaatattggagttcatg

SEQ ID NO: 3074045 - DNA, 25 bp, Homo sapien
ctttcttatgagtgtcagaggaggc

SEQ ID NO: 3074046 - DNA, 25 bp, Homo sapien
aacatgtgcaaacagaacactttct

SEQ ID NO: 3074047 - DNA, 25 bp, Homo sapien
gcttagtgaaggagacattgatgca

SEQ ID NO: 3074048 - DNA, 25 bp, Homo sapien
ggcctgacagtcaaataggatcatg

SEQ ID NO: 3074049 - DNA, 25 bp, Homo sapien
tttccagtgccagacggcagggcct

SEQ ID NO: 3074050 - DNA, 25 bp, Homo sapien
gaaggtcttgatatggcatttccag

SEQ ID NO: 3074051 - DNA, 25 bp, Homo sapien
agggccagaacagggtatggagatc

SEQ ID NO: 3074052 - DNA, 25 bp, Homo sapien
gcctggaatggatcataaagggcca

SEQ ID NO: 3074053 - DNA, 25 bp, Homo sapien
cattcaagaaagtagtggttatatt

SEQ ID NO: 3074054 - DNA, 25 bp, Homo sapien
catcattcaagaaagtagtggttat

SEQ ID NO: 3074055 - DNA, 25 bp, Homo sapien
ttttcatcattcaagaaagtagtgg

SEQ ID NO: 3074056 - DNA, 25 bp, Homo sapien
tcaagaaagtagtggttatattcat

SEQ ID NO: 3074057 - DNA, 25 bp, Homo sapien
gaaatgtgctaatgttttctcttca

SEQ ID NO: 3074058 - DNA, 25 bp, Homo sapien
atgttttctcttcaaaagcacaaca

SEQ ID NO: 3074059 - DNA, 25 bp, Homo sapien
gttttctcttcaaaagcacaacaca

SEQ ID NO: 3074060 - DNA, 25 bp, Homo sapien
gctagtgaaatgtgctaatgttttc

SEQ ID NO: 3074061 - DNA, 25 bp, Homo sapien
agagcccaggtattccggcttctca

SEQ ID NO: 3074062 - DNA, 25 bp, Homo sapien
tattccggcttctcaggtaaccaga

SEQ ID NO: 3074063 - DNA, 25 bp, Homo sapien
agcccaggtattccggcttctcagg

SEQ ID NO: 3074064 - DNA, 25 bp, Homo sapien
caggtattccggcttctcaggtaac

SEQ ID NO: 3074065 - DNA, 25 bp, Homo sapien
ttggacccatggccaacactcatgc

SEQ ID NO: 3074066 - DNA, 25 bp, Homo sapien
cattctgaaagtggagtgcttggac

SEQ ID NO: 3074067 - DNA, 25 bp, Homo sapien
gccagtaaccttcatagttgttgtg

SEQ ID NO: 3074068 - DNA, 25 bp, Homo sapien
ggccaacactcatgccagtaacctt

SEQ ID NO: 3074069 - DNA, 25 bp, Homo sapien
gtgaacaggggctgggggccgtatc

SEQ ID NO: 3074070 - DNA, 25 bp, Homo sapien
cagtgaacaggggctgggggccgta

SEQ ID NO: 3074071 - DNA, 25 bp, Homo sapien
agcagtgaacaggggctgggggccg

SEQ ID NO: 3074072 - DNA, 25 bp, Homo sapien
tcagagcagtgaacaggggctgggg

SEQ ID NO: 3074073 - DNA, 25 bp, Homo sapien
cctgctgccattgagagattttctg

SEQ ID NO: 3074074 - DNA, 25 bp, Homo sapien
aaaccatatttgcagtggctccctg

SEQ ID NO: 3074075 - DNA, 25 bp, Homo sapien
cctgaccatggttcccacgggtact

SEQ ID NO: 3074076 - DNA, 25 bp, Homo sapien
cttaatctggtctctgctgcatcaa

SEQ ID NO: 3074077 - DNA, 25 bp, Homo sapien
tggtagaagtgaaagcaaacacatc

SEQ ID NO: 3074078 - DNA, 25 bp, Homo sapien
tgaaagcaaacacatccctcttcac

SEQ ID NO: 3074079 - DNA, 25 bp, Homo sapien
aagtgaaagcaaacacatccctctt

SEQ ID NO: 3074080 - DNA, 25 bp, Homo sapien
atggtagaagtgaaagcaaacacat

SEQ ID NO: 3074081 - DNA, 25 bp, Homo sapien
cagcgacggtagaagacaaaaacca

SEQ ID NO: 3074082 - DNA, 25 bp, Homo sapien
tctgaacagcgacggtagaagacaa

SEQ ID NO: 3074083 - DNA, 25 bp, Homo sapien
gaacagcgacggtagaagacaaaaa

SEQ ID NO: 3074084 - DNA, 25 bp, Homo sapien
tgaacagcgacggtagaagacaaaa

SEQ ID NO: 3074085 - DNA, 25 bp, Homo sapien
gagcttcagatcacagactgttttt

SEQ ID NO: 3074086 - DNA, 25 bp, Homo sapien
ttgtattcatcacaggcaattgaac

SEQ ID NO: 3074087 - DNA, 25 bp, Homo sapien
tgctggggagcttcagatcacagac

SEQ ID NO: 3074088 - DNA, 25 bp, Homo sapien
tgagaaatgcaatttttgtgctggg

SEQ ID NO: 3074089 - DNA, 25 bp, Homo sapien
ttatgagaagactcgccaaacatgc

SEQ ID NO: 3074090 - DNA, 25 bp, Homo sapien
aacatgcccatgcttgggtgcaccc

SEQ ID NO: 3074091 - DNA, 25 bp, Homo sapien
gccaaacatgcccatgcttgggtgc

SEQ ID NO: 3074092 - DNA, 25 bp, Homo sapien
tcagagataacaactgttctctctc

SEQ ID NO: 3074093 - DNA, 25 bp, Homo sapien
ctagtactagtcctctggtttcctg

SEQ ID NO: 3074094 - DNA, 25 bp, Homo sapien
tggtttcctgcacaacgtccactgc

SEQ ID NO: 3074095 - DNA, 25 bp, Homo sapien
aacgtccactgctctggctttcagg

SEQ ID NO: 3074096 - DNA, 25 bp, Homo sapien
acttaaacttatagtctcctttcag

SEQ ID NO: 3074097 - DNA, 25 bp, Homo sapien
ggtgagtaatcaaagatgttattca

SEQ ID NO: 3074098 - DNA, 25 bp, Homo sapien
ctaggggtgagtaatcaaagatgtt

SEQ ID NO: 3074099 - DNA, 25 bp, Homo sapien
taggggtgagtaatcaaagatgtta

SEQ ID NO: 3074100 - DNA, 25 bp, Homo sapien
ggggtgagtaatcaaagatgttatt

SEQ ID NO: 3074101 - DNA, 25 bp, Homo sapien
ggccttaattttgctcatcgggttg

SEQ ID NO: 3074102 - DNA, 25 bp, Homo sapien
gggctggcagaatagctgtactaat

SEQ ID NO: 3074103 - DNA, 25 bp, Homo sapien
taccgaaggtgcaaattcaacatgc

SEQ ID NO: 3074104 - DNA, 25 bp, Homo sapien
tcttgcacgacataatgagcctgtg

SEQ ID NO: 3074105 - DNA, 25 bp, Homo sapien
tcttcatgtattgtccccaccaggg

SEQ ID NO: 3074106 - DNA, 25 bp, Homo sapien
tgaatggatagcttgggactgatgc

SEQ ID NO: 3074107 - DNA, 25 bp, Homo sapien
agagagctccacacccctaagctag

SEQ ID NO: 3074108 - DNA, 25 bp, Homo sapien
tgtattcggcctcacagtctcttct

SEQ ID NO: 3074109 - DNA, 25 bp, Homo sapien
gctttgacaatttgaacctgttctt

SEQ ID NO: 3074110 - DNA, 25 bp, Homo sapien
aatagctttgacaatttgaacctgt

SEQ ID NO: 3074111 - DNA, 25 bp, Homo sapien
tagctttgacaatttgaacctgttc

SEQ ID NO: 3074112 - DNA, 25 bp, Homo sapien
ctttgacaatttgaacctgttcttc

SEQ ID NO: 3074113 - DNA, 25 bp, Homo sapien
tattttgaggcagggcaatattatc

SEQ ID NO: 3074114 - DNA, 25 bp, Homo sapien
ggcagggcaatattatctataactt

SEQ ID NO: 3074115 - DNA, 25 bp, Homo sapien
tcttcgctgtattttgaggcagggc

SEQ ID NO: 3074116 - DNA, 25 bp, Homo sapien
tctcccagttctttcttcgctgtat

SEQ ID NO: 3074117 - DNA, 25 bp, Homo sapien
taaacattggtgtcacaccccgatg

SEQ ID NO: 3074118 - DNA, 25 bp, Homo sapien
tgtactcacattgggctggtgtgtc

SEQ ID NO: 3074119 - DNA, 25 bp, Homo sapien
tttttctcaaaaggtgtactcacat

SEQ ID NO: 3074120 - DNA, 25 bp, Homo sapien
cccgatgatctcttgtcctgactct

SEQ ID NO: 3074121 - DNA, 25 bp, Homo sapien
tcaattgttgtaaatatggggcagt

SEQ ID NO: 3074122 - DNA, 25 bp, Homo sapien
ttgttgtaaatatggggcagttcac

SEQ ID NO: 3074123 - DNA, 25 bp, Homo sapien
tattgtcaattgttgtaaatatggg

SEQ ID NO: 3074124 - DNA, 25 bp, Homo sapien
tctattgtcaattgttgtaaatatg

SEQ ID NO: 3074125 - DNA, 25 bp, Homo sapien
gtgatggaatcaggtcccactgacc

SEQ ID NO: 3074126 - DNA, 25 bp, Homo sapien
gggttacacatgtgtgatggaatca

SEQ ID NO: 3074127 - DNA, 25 bp, Homo sapien
aatatttgttttatgcgtattagcc

SEQ ID NO: 3074128 - DNA, 25 bp, Homo sapien
ttatgcgtattagcctctcccacac

SEQ ID NO: 3074129 - DNA, 25 bp, Homo sapien
ttcccatactttgaggagaacctgt

SEQ ID NO: 3074130 - DNA, 25 bp, Homo sapien
gaggagaacctgttgtgttttgtgt

SEQ ID NO: 3074131 - DNA, 25 bp, Homo sapien
gaagagaaagatgaaaccgtactca

SEQ ID NO: 3074132 - DNA, 25 bp, Homo sapien
gaaaccgtactcagaataattttga

SEQ ID NO: 3074133 - DNA, 25 bp, Homo sapien
gagaaagatgaaaccgtactcagaa

SEQ ID NO: 3074134 - DNA, 25 bp, Homo sapien
gatgaaaccgtactcagaataattt

SEQ ID NO: 3074135 - DNA, 25 bp, Homo sapien
tttgtctcgtgctggttttcaaaag

SEQ ID NO: 3074136 - DNA, 25 bp, Homo sapien
agagtggtgagagagcgtatctttg

SEQ ID NO: 3074137 - DNA, 25 bp, Homo sapien
gagcgtatctttgtctcgtgctggt

SEQ ID NO: 3074138 - DNA, 25 bp, Homo sapien
tcttcatagcaattgcgaaagagag

SEQ ID NO: 3074139 - DNA, 25 bp, Homo sapien
tgggcatgtctgaaatggaactgtc

SEQ ID NO: 3074140 - DNA, 25 bp, Homo sapien
tggaactgtcaagcttagaaggtct

SEQ ID NO: 3074141 - DNA, 25 bp, Homo sapien
cctgccccaggttgcttaaagctga

SEQ ID NO: 3074142 - DNA, 25 bp, Homo sapien
aaagctgaagtgtggtaaattgggc

SEQ ID NO: 3074143 - DNA, 25 bp, Homo sapien
ttttgtgcagcaaccagaaattttg

SEQ ID NO: 3074144 - DNA, 25 bp, Homo sapien
gttttgtgcagcaaccagaaatttt

SEQ ID NO: 3074145 - DNA, 25 bp, Homo sapien
tttgtgcagcaaccagaaattttgt

SEQ ID NO: 3074146 - DNA, 25 bp, Homo sapien
ttccccagttgccttgttggcagag

SEQ ID NO: 3074147 - DNA, 25 bp, Homo sapien
gaggttctgggcttataaatttcac

SEQ ID NO: 3074148 - DNA, 25 bp, Homo sapien
caagatgctgtaaggagtgaggttc

SEQ ID NO: 3074149 - DNA, 25 bp, Homo sapien
ccaactgatgtataccaagatgctg

SEQ ID NO: 3074150 - DNA, 25 bp, Homo sapien
cacattggactaggcacagattcag

SEQ ID NO: 3074151 - DNA, 25 bp, Homo sapien
gatgagatcccaactcagtatagca

SEQ ID NO: 3074152 - DNA, 25 bp, Homo sapien
tatagcaagaccaaaccagataaat

SEQ ID NO: 3074153 - DNA, 25 bp, Homo sapien
atactttattgtgaacagctgctgg

SEQ ID NO: 3074154 - DNA, 25 bp, Homo sapien
tggaaggtgtgcacatcaaactgtc

SEQ ID NO: 3074155 - DNA, 25 bp, Homo sapien
tcttctaaagtacccatggccgcct

SEQ ID NO: 3074156 - DNA, 25 bp, Homo sapien
ttcttctaaagtacccatggccgcc

SEQ ID NO: 3074157 - DNA, 25 bp, Homo sapien
ttctaaagtacccatggccgcctct

SEQ ID NO: 3074158 - DNA, 25 bp, Homo sapien
ctaaagtacccatggccgcctctgc

SEQ ID NO: 3074159 - DNA, 25 bp, Homo sapien
ggatagctttccttctcccactcat

SEQ ID NO: 3074160 - DNA, 25 bp, Homo sapien
ctccaggatagctttccttctccca

SEQ ID NO: 3074161 - DNA, 25 bp, Homo sapien
caggatagctttccttctcccactc

SEQ ID NO: 3074162 - DNA, 25 bp, Homo sapien
tccaggatagctttccttctcccac

SEQ ID NO: 3074163 - DNA, 25 bp, Homo sapien
tcatcttttgcatctgggtaaatac

SEQ ID NO: 3074164 - DNA, 25 bp, Homo sapien
ttttcatcttttgcatctgggtaaa

SEQ ID NO: 3074165 - DNA, 25 bp, Homo sapien
ttcatcttttgcatctgggtaaata

SEQ ID NO: 3074166 - DNA, 25 bp, Homo sapien
atcttttgcatctgggtaaatactc

SEQ ID NO: 3074167 - DNA, 25 bp, Homo sapien
ataaagcacaatacacattgaagac

SEQ ID NO: 3074168 - DNA, 25 bp, Homo sapien
tagccataggactggtgtctggatc

SEQ ID NO: 3074169 - DNA, 25 bp, Homo sapien
cattgaagaccatgtgaatatgaca

SEQ ID NO: 3074170 - DNA, 25 bp, Homo sapien
gctgttcggtattctgcaaattata

SEQ ID NO: 3074171 - DNA, 25 bp, Homo sapien
tgcgaactgagaagagctgccaagc

SEQ ID NO: 3074172 - DNA, 25 bp, Homo sapien
gaaaaacgaaggttgcttgtgccaa

SEQ ID NO: 3074173 - DNA, 25 bp, Homo sapien
tgcaccgccgttacccatatggtgg

SEQ ID NO: 3074174 - DNA, 25 bp, Homo sapien
cttggaaaggttgctccattatcac

SEQ ID NO: 3074175 - DNA, 25 bp, Homo sapien
tgttaacattagtatggacatgggc

SEQ ID NO: 3074176 - DNA, 25 bp, Homo sapien
ctgttaacattagtatggacatggg

SEQ ID NO: 3074177 - DNA, 25 bp, Homo sapien
gttaacattagtatggacatgggca

SEQ ID NO: 3074178 - DNA, 25 bp, Homo sapien
ttaacattagtatggacatgggcat

SEQ ID NO: 3074179 - DNA, 25 bp, Homo sapien
gcaaaggaatgaccactgcagtcat

SEQ ID NO: 3074180 - DNA, 25 bp, Homo sapien
ccttcataggcaccaccagagaaaa

SEQ ID NO: 3074181 - DNA, 25 bp, Homo sapien
aagagggtagggcagctcatcattt

SEQ ID NO: 3074182 - DNA, 25 bp, Homo sapien
gggtagggcagctcatcattttctg

SEQ ID NO: 3074183 - DNA, 25 bp, Homo sapien
tctgatggccctgaaacctggttgt

SEQ ID NO: 3074184 - DNA, 25 bp, Homo sapien
ccagccaagcccaaaagatcagtga

SEQ ID NO: 3074185 - DNA, 25 bp, Homo sapien
tagttgccatgtattgaggtcctgc

SEQ ID NO: 3074186 - DNA, 25 bp, Homo sapien
tattcacggcccaggtgtagctctg

SEQ ID NO: 3074187 - DNA, 25 bp, Homo sapien
tgagaatactactcatggccaaatt

SEQ ID NO: 3074188 - DNA, 25 bp, Homo sapien
gggatcaacttgtttatagagactg

SEQ ID NO: 3074189 - DNA, 25 bp, Homo sapien
tagtgacatataaagatctggtgtg

SEQ ID NO: 3074190 - DNA, 25 bp, Homo sapien
tcaaattgaataggttctggcaggg

SEQ ID NO: 3074191 - DNA, 25 bp, Homo sapien
cgtcaatacagttagaacgcccaga

SEQ ID NO: 3074192 - DNA, 25 bp, Homo sapien
gggcccacgggcatactctgatgga

SEQ ID NO: 3074193 - DNA, 25 bp, Homo sapien
taagcctagggagtcatcagcaggg

SEQ ID NO: 3074194 - DNA, 25 bp, Homo sapien
catctgaaggagtcacgtcaataca

SEQ ID NO: 3074195 - DNA, 25 bp, Homo sapien
cctccaaataactgctggtttccaa

SEQ ID NO: 3074196 - DNA, 25 bp, Homo sapien
gagcagggaacttccagggtggctg

SEQ ID NO: 3074197 - DNA, 25 bp, Homo sapien
tctgctgtctgagccgctaagtcag

SEQ ID NO: 3074198 - DNA, 25 bp, Homo sapien
aagtcaggagcagggaacttccagg

SEQ ID NO: 3074199 - DNA, 25 bp, Homo sapien
cagccctgcaagtgcctgctatggg

SEQ ID NO: 3074200 - DNA, 25 bp, Homo sapien
tatcccttttgtccatggtgcttga

SEQ ID NO: 3074201 - DNA, 25 bp, Homo sapien
tttgaagacgtttttcacattctgg

SEQ ID NO: 3074202 - DNA, 25 bp, Homo sapien
gatggacatatgcaccagcagctgt

SEQ ID NO: 3074203 - DNA, 25 bp, Homo sapien
ttttcataacagaaagaatccttaa

SEQ ID NO: 3074204 - DNA, 25 bp, Homo sapien
gaggcaaaatcagccattaaaatgt

SEQ ID NO: 3074205 - DNA, 25 bp, Homo sapien
gccgtagttcgattttggccaactg

SEQ ID NO: 3074206 - DNA, 25 bp, Homo sapien
tatgcctaagatcacttgtgagagg

SEQ ID NO: 3074207 - DNA, 25 bp, Homo sapien
ttctatgggcggtggctccaatgtc

SEQ ID NO: 3074208 - DNA, 25 bp, Homo sapien
catcctgtggtcagtctaaggtggc

SEQ ID NO: 3074209 - DNA, 25 bp, Homo sapien
cttatgtctgactaaatggcaggac

SEQ ID NO: 3074210 - DNA, 25 bp, Homo sapien
actgagatgggatccatgcatgccc

SEQ ID NO: 3074211 - DNA, 25 bp, Homo sapien
gcattaggcataaaatcagacaaaa

SEQ ID NO: 3074212 - DNA, 25 bp, Homo sapien
gggtgcattaggcataaaatcagac

SEQ ID NO: 3074213 - DNA, 25 bp, Homo sapien
gaatatatagcatgatcatatgatc

SEQ ID NO: 3074214 - DNA, 25 bp, Homo sapien
acctaggctagaatatatagcatga

SEQ ID NO: 3074215 - DNA, 25 bp, Homo sapien
ccagggacactgtatccagagatgt

SEQ ID NO: 3074216 - DNA, 25 bp, Homo sapien
taacttcttcatgttgaccagggac

SEQ ID NO: 3074217 - DNA, 25 bp, Homo sapien
tctcccaggataggttgcaaaggca

SEQ ID NO: 3074218 - DNA, 25 bp, Homo sapien
gccaggatcagaaagcgttcttctg

SEQ ID NO: 3074219 - DNA, 25 bp, Homo sapien
cagtaagcatattgtttgggcccca

SEQ ID NO: 3074220 - DNA, 25 bp, Homo sapien
gccctgacagcataacgagaccttg

SEQ ID NO: 3074221 - DNA, 25 bp, Homo sapien
caaggagtcatatgaggccccaagt

SEQ ID NO: 3074222 - DNA, 25 bp, Homo sapien
tctagtaccgcattagccaaggagt

SEQ ID NO: 3074223 - DNA, 25 bp, Homo sapien
tcttccttttcatcagatgccacat

SEQ ID NO: 3074224 - DNA, 25 bp, Homo sapien
ctgtagggctgccgcatcttcttgt

SEQ ID NO: 3074225 - DNA, 25 bp, Homo sapien
ttccttttcatcagatgccacatct

SEQ ID NO: 3074226 - DNA, 25 bp, Homo sapien
gggctgccgcatcttcttgtcttcc

SEQ ID NO: 3074227 - DNA, 25 bp, Homo sapien
tcagcttttgggtcatctgggtccc

SEQ ID NO: 3074228 - DNA, 25 bp, Homo sapien
aagtgagattaaagtactactcagc

SEQ ID NO: 3074229 - DNA, 25 bp, Homo sapien
taaaggagatgtctaccagttggaa

SEQ ID NO: 3074230 - DNA, 25 bp, Homo sapien
gggagtatgtggatttattgccact

SEQ ID NO: 3074231 - DNA, 25 bp, Homo sapien
tcaatttaggaatgctgatggattt

SEQ ID NO: 3074232 - DNA, 25 bp, Homo sapien
ttgggactgacacctcaacgggcca

SEQ ID NO: 3074233 - DNA, 25 bp, Homo sapien
gccaggtcaccaggttatcagcaca

SEQ ID NO: 3074234 - DNA, 25 bp, Homo sapien
ccagtttgggttggctattgggact

SEQ ID NO: 3074235 - DNA, 25 bp, Homo sapien
cactcttgattcttgttatcactgg

SEQ ID NO: 3074236 - DNA, 25 bp, Homo sapien
caagaaggtggactatgcccctgta

SEQ ID NO: 3074237 - DNA, 25 bp, Homo sapien
catgctctgagtggcaacagtcacc

SEQ ID NO: 3074238 - DNA, 25 bp, Homo sapien
tatgagtggtgctccctggcaaaga

SEQ ID NO: 3074239 - DNA, 25 bp, Homo sapien
tccagtccccgagtagagttagagg

SEQ ID NO: 3074240 - DNA, 25 bp, Homo sapien
tattgagccctacagttataccacg

SEQ ID NO: 3074241 - DNA, 25 bp, Homo sapien
caatgaagtagttctggatccagct

SEQ ID NO: 3074242 - DNA, 25 bp, Homo sapien
cacagactaagggtagaagaatcca

SEQ ID NO: 3074243 - DNA, 25 bp, Homo sapien
cctggatcatgttcggtccgggcag

SEQ ID NO: 3074244 - DNA, 25 bp, Homo sapien
ttcaaagcagcaccgagcaaaaggt

SEQ ID NO: 3074245 - DNA, 25 bp, Homo sapien
caactgaggtgagttggcccacgca

SEQ ID NO: 3074246 - DNA, 25 bp, Homo sapien
ggaggtcaagtcagggctcaaccct

SEQ ID NO: 3074247 - DNA, 25 bp, Homo sapien
tgccaggagcctataagggaggtca

SEQ ID NO: 3074248 - DNA, 25 bp, Homo sapien
atagttttattacttgtcacaaata

SEQ ID NO: 3074249 - DNA, 25 bp, Homo sapien
ttttattacttgtcacaaataaagc

SEQ ID NO: 3074250 - DNA, 25 bp, Homo sapien
tgattgtactcctatagtccctgga

SEQ ID NO: 3074251 - DNA, 25 bp, Homo sapien
taatgaagctatagcatctcccagg

SEQ ID NO: 3074252 - DNA, 25 bp, Homo sapien
gagtcgttatttcagcacacaggtc

SEQ ID NO: 3074253 - DNA, 25 bp, Homo sapien
cccagggtgaagatactagcatggt

SEQ ID NO: 3074254 - DNA, 25 bp, Homo sapien
ggttgtccatgaatcccaggttgac

SEQ ID NO: 3074255 - DNA, 25 bp, Homo sapien
tgacaatttttgctctaccaggaca

SEQ ID NO: 3074256 - DNA, 25 bp, Homo sapien
gtttctccatccaaacaggtagtgg

SEQ ID NO: 3074257 - DNA, 25 bp, Homo sapien
tattgtaggcccaaggaacaacctg

SEQ ID NO: 3074258 - DNA, 25 bp, Homo sapien
ttggtagctagaggatactaaggca

SEQ ID NO: 3074259 - DNA, 25 bp, Homo sapien
gagatcccactattgcactctagcg

SEQ ID NO: 3074260 - DNA, 25 bp, Homo sapien
gaataactgaatgggtcaagtgctt

SEQ ID NO: 3074261 - DNA, 25 bp, Homo sapien
gctactttgatggactgatgaagac

SEQ ID NO: 3074262 - DNA, 25 bp, Homo sapien
tgaagaaattgatgctcaccagcac

SEQ ID NO: 3074263 - DNA, 25 bp, Homo sapien
caaaggagctcaaaatgatggtgac

SEQ ID NO: 3074264 - DNA, 25 bp, Homo sapien
tagatgagcaataggagtagcactg

SEQ ID NO: 3074265 - DNA, 25 bp, Homo sapien
tctaagggccatctgagtctgacac

SEQ ID NO: 3074266 - DNA, 25 bp, Homo sapien
cttcccagtaaagacaagagagtta

SEQ ID NO: 3074267 - DNA, 25 bp, Homo sapien
cattttcttctctttattttagaag

SEQ ID NO: 3074268 - DNA, 25 bp, Homo sapien
cttctctttattttagaagaaagtg

SEQ ID NO: 3074269 - DNA, 25 bp, Homo sapien
ctttattttagaagaaagtggatga

SEQ ID NO: 3074270 - DNA, 25 bp, Homo sapien
tctctttattttagaagaaagtgga

SEQ ID NO: 3074271 - DNA, 25 bp, Homo sapien
ctctaaaacgtagactctgtgcagc

SEQ ID NO: 3074272 - DNA, 25 bp, Homo sapien
tctctaaaacgtagactctgtgcag

SEQ ID NO: 3074273 - DNA, 25 bp, Homo sapien
aaggtgccaactctctaaaacgtag

SEQ ID NO: 3074274 - DNA, 25 bp, Homo sapien
tctaaaacgtagactctgtgcagct

SEQ ID NO: 3074275 - DNA, 25 bp, Homo sapien
cactgattcctgacaacagcgtgag

SEQ ID NO: 3074276 - DNA, 25 bp, Homo sapien
tcactagactctacattgggcagcc

SEQ ID NO: 3074277 - DNA, 25 bp, Homo sapien
atttagaaatcgtcacacagctgtg

SEQ ID NO: 3074278 - DNA, 25 bp, Homo sapien
actgcagtgtcatgtttcacaggcc

SEQ ID NO: 3074279 - DNA, 25 bp, Homo sapien
aaatctttggacaagctgttagggc

SEQ ID NO: 3074280 - DNA, 25 bp, Homo sapien
gacttgaaacaaataaccctgagca

SEQ ID NO: 3074281 - DNA, 25 bp, Homo sapien
gaattaagctgaacccatgcctgca

SEQ ID NO: 3074282 - DNA, 25 bp, Homo sapien
tggtgatgctttggctaacagccta

SEQ ID NO: 3074283 - DNA, 25 bp, Homo sapien
actttaatcattcttggatcttcag

SEQ ID NO: 3074284 - DNA, 25 bp, Homo sapien
aactttaatcattcttggatcttca

SEQ ID NO: 3074285 - DNA, 25 bp, Homo sapien
tcacaagatctactaaaacactaag

SEQ ID NO: 3074286 - DNA, 25 bp, Homo sapien
tctgcatagcaggtatagatagtga

SEQ ID NO: 3074287 - DNA, 25 bp, Homo sapien
gatatccatttggtttggttctcaa

SEQ ID NO: 3074288 - DNA, 25 bp, Homo sapien
caatgagttctgctttaaggatgaa

SEQ ID NO: 3074289 - DNA, 25 bp, Homo sapien
gaaattccaattactggtttgtcag

SEQ ID NO: 3074290 - DNA, 25 bp, Homo sapien
ctgtccagcttcaaatggaacaata

SEQ ID NO: 3074291 - DNA, 25 bp, Homo sapien
ggtttgtcagtaggattcttagctc

SEQ ID NO: 3074292 - DNA, 25 bp, Homo sapien
tcttagctctgtaaaacgccagtgc

SEQ ID NO: 3074293 - DNA, 25 bp, Homo sapien
attctgtcacttgtaccaattcagc

SEQ ID NO: 3074294 - DNA, 25 bp, Homo sapien
ggatattctgtcacttgtaccaatt

SEQ ID NO: 3074295 - DNA, 25 bp, Homo sapien
aattcagccactaatacctttgtat

SEQ ID NO: 3074296 - DNA, 25 bp, Homo sapien
tattctgtcacttgtaccaattcag

SEQ ID NO: 3074297 - DNA, 25 bp, Homo sapien
tgcaactgctgatcctccaagtcca

SEQ ID NO: 3074298 - DNA, 25 bp, Homo sapien
gctgaggtctaaagttccactggag

SEQ ID NO: 3074299 - DNA, 25 bp, Homo sapien
tgtctgaggcatgacctgcaactgc

SEQ ID NO: 3074300 - DNA, 25 bp, Homo sapien
cgatctttaacaggcaccatgtttt

SEQ ID NO: 3074301 - DNA, 25 bp, Homo sapien
cttgtcccgggatttgtcttgcacc

SEQ ID NO: 3074302 - DNA, 25 bp, Homo sapien
tacgacccgcagagcgagggcttgt

SEQ ID NO: 3074303 - DNA, 25 bp, Homo sapien
gatgctacttgcagttttgtcacca

SEQ ID NO: 3074304 - DNA, 25 bp, Homo sapien
gcagcatggtataagcacaatcact

SEQ ID NO: 3074305 - DNA, 25 bp, Homo sapien
ctctcgcgtctgcgccaccctgcgg

SEQ ID NO: 3074306 - DNA, 25 bp, Homo sapien
tcgcgtctgcgccaccctgcgggcg

SEQ ID NO: 3074307 - DNA, 25 bp, Homo sapien
gtctgcgccaccctgcgggcggcgc

SEQ ID NO: 3074308 - DNA, 25 bp, Homo sapien
gcgtctgcgccaccctgcgggcggc

SEQ ID NO: 3074309 - DNA, 25 bp, Homo sapien
gcaatagagccgataaaggggtacg

SEQ ID NO: 3074310 - DNA, 25 bp, Homo sapien
cgacagcggccacgtaagtgagggt

SEQ ID NO: 3074311 - DNA, 25 bp, Homo sapien
tgagggtcgtcttgttctgccgccg

SEQ ID NO: 3074312 - DNA, 25 bp, Homo sapien
ggtacggcagcgtaggacgccccca

SEQ ID NO: 3074313 - DNA, 25 bp, Homo sapien
tgcaatgctggatgccgggctcgaa

SEQ ID NO: 3074314 - DNA, 25 bp, Homo sapien
gtgaaagggttcgagctcttaggcc

SEQ ID NO: 3074315 - DNA, 25 bp, Homo sapien
tgcgcgcgtgtgaaagggttcgagc

SEQ ID NO: 3074316 - DNA, 25 bp, Homo sapien
catgtcccaagccacctcagtcctc

SEQ ID NO: 3074317 - DNA, 25 bp, Homo sapien
agaaacggctctaccctctctgcag

SEQ ID NO: 3074318 - DNA, 25 bp, Homo sapien
ctaagaaacggctctaccctctctg

SEQ ID NO: 3074319 - DNA, 25 bp, Homo sapien
aaacggctctaccctctctgcagcc

SEQ ID NO: 3074320 - DNA, 25 bp, Homo sapien
taagaaacggctctaccctctctgc

SEQ ID NO: 3074321 - DNA, 25 bp, Homo sapien
ccagggtggatccagcgccagccac

SEQ ID NO: 3074322 - DNA, 25 bp, Homo sapien
tccatccaggacgccagagccctcc

SEQ ID NO: 3074323 - DNA, 25 bp, Homo sapien
atccaggacgccagagccctcccat

SEQ ID NO: 3074324 - DNA, 25 bp, Homo sapien
ctccatccaggacgccagagccctc

SEQ ID NO: 3074325 - DNA, 25 bp, Homo sapien
catccaggacgccagagccctccca

SEQ ID NO: 3074326 - DNA, 25 bp, Homo sapien
gcgtgctccgtctcgcgagatctgg

SEQ ID NO: 3074327 - DNA, 25 bp, Homo sapien
tctcagggacgagaggtcaaatctc

SEQ ID NO: 3074328 - DNA, 25 bp, Homo sapien
gtcaaatctcgcgaggcgtgctccg

SEQ ID NO: 3074329 - DNA, 25 bp, Homo sapien
agatctgggttgagcctgccgctgc

SEQ ID NO: 3074330 - DNA, 25 bp, Homo sapien
gatgccccttacaacttgcccagtg

SEQ ID NO: 3074331 - DNA, 25 bp, Homo sapien
ttgtcccacaggacgaactcgaggg

SEQ ID NO: 3074332 - DNA, 25 bp, Homo sapien
ttttctcagcccgtgggcagtcggc

SEQ ID NO: 3074333 - DNA, 25 bp, Homo sapien
ccccgtgggaggatgtaatagcttt

SEQ ID NO: 3074334 - DNA, 25 bp, Homo sapien
taattttcttacagcatagactgaa

SEQ ID NO: 3074335 - DNA, 25 bp, Homo sapien
ttctcagctcttctaggatgagatt

SEQ ID NO: 3074336 - DNA, 25 bp, Homo sapien
ccttgataccaacagtacatttcca

SEQ ID NO: 3074337 - DNA, 25 bp, Homo sapien
cagctcttctaggatgagatttctc

SEQ ID NO: 3074338 - DNA, 25 bp, Homo sapien
gtcattggacttttgctactgacat

SEQ ID NO: 3074339 - DNA, 25 bp, Homo sapien
tactgacattgtggcttggtggctt

SEQ ID NO: 3074340 - DNA, 25 bp, Homo sapien
tgacattgtggcttggtggcttcat

SEQ ID NO: 3074341 - DNA, 25 bp, Homo sapien
ctgacattgtggcttggtggcttca

SEQ ID NO: 3074342 - DNA, 25 bp, Homo sapien
ggccagatgaggagcagtcaggacg

SEQ ID NO: 3074343 - DNA, 25 bp, Homo sapien
tatcattttatctgtcattctcttg

SEQ ID NO: 3074344 - DNA, 25 bp, Homo sapien
cattctcttgatgtcctgtagttct

SEQ ID NO: 3074345 - DNA, 25 bp, Homo sapien
tctcttgatgtcctgtagttctgtc

SEQ ID NO: 3074346 - DNA, 25 bp, Homo sapien
tgtcattctcttgatgtcctgtagt

SEQ ID NO: 3074347 - DNA, 25 bp, Homo sapien
gaggggcttgtcagtgatgaatgaa

SEQ ID NO: 3074348 - DNA, 25 bp, Homo sapien
ggtgaggggcttgtcagtgatgaat

SEQ ID NO: 3074349 - DNA, 25 bp, Homo sapien
tgaggggcttgtcagtgatgaatga

SEQ ID NO: 3074350 - DNA, 25 bp, Homo sapien
caggtgaggggcttgtcagtgatga

SEQ ID NO: 3074351 - DNA, 25 bp, Homo sapien
cctcaggtaattgctcctgtttttc

SEQ ID NO: 3074352 - DNA, 25 bp, Homo sapien
tcagatgcacttgatctaagacatg

SEQ ID NO: 3074353 - DNA, 25 bp, Homo sapien
cgttgtaagtactggccttcagatg

SEQ ID NO: 3074354 - DNA, 25 bp, Homo sapien
tgatctaagacatgatgctgcttct

SEQ ID NO: 3074355 - DNA, 25 bp, Homo sapien
tcagatccacaatcttaagtaatcg

SEQ ID NO: 3074356 - DNA, 25 bp, Homo sapien
ttttcagtagggaaatagcagttca

SEQ ID NO: 3074357 - DNA, 25 bp, Homo sapien
gggctgatgaatacagctggtatct

SEQ ID NO: 3074358 - DNA, 25 bp, Homo sapien
tcacatttagacatctcatgggctg

SEQ ID NO: 3074359 - DNA, 25 bp, Homo sapien
tcagagagaggaagctctctgtccc

SEQ ID NO: 3074360 - DNA, 25 bp, Homo sapien
aatgcatcttcgagttctttgggcc

SEQ ID NO: 3074361 - DNA, 25 bp, Homo sapien
tgcgaggaccaactttcaaatgagc

SEQ ID NO: 3074362 - DNA, 25 bp, Homo sapien
gagctaacttgggtgagacgttcac

SEQ ID NO: 3074363 - DNA, 25 bp, Homo sapien
ggaacatgccgtatgaagagcctct

SEQ ID NO: 3074364 - DNA, 25 bp, Homo sapien
ttgaagagctccttgacacatgctg

SEQ ID NO: 3074365 - DNA, 25 bp, Homo sapien
tgaagagctccttgacacatgctgc

SEQ ID NO: 3074366 - DNA, 25 bp, Homo sapien
tttgaagagctccttgacacatgct

SEQ ID NO: 3074367 - DNA, 25 bp, Homo sapien
gaatgattttggtatagaagggtag

SEQ ID NO: 3074368 - DNA, 25 bp, Homo sapien
taaagcacatactcacacattgttg

SEQ ID NO: 3074369 - DNA, 25 bp, Homo sapien
agtatgatcgcagtaaaaggattgt

SEQ ID NO: 3074370 - DNA, 25 bp, Homo sapien
tttggtatagaagggtagataaagc

SEQ ID NO: 3074371 - DNA, 25 bp, Homo sapien
tgtccctggacattcaagcaattga

SEQ ID NO: 3074372 - DNA, 25 bp, Homo sapien
gaagagatcaagtggtttgtccctg

SEQ ID NO: 3074373 - DNA, 25 bp, Homo sapien
gaacctttaaggctgtggacaatgc

SEQ ID NO: 3074374 - DNA, 25 bp, Homo sapien
gaaatgccttaacaagtgaaatggg

SEQ ID NO: 3074375 - DNA, 25 bp, Homo sapien
attgtgtggtcagattcactgcatt

SEQ ID NO: 3074376 - DNA, 25 bp, Homo sapien
ttttcctgctagaaatgctagagtt

SEQ ID NO: 3074377 - DNA, 25 bp, Homo sapien
gctagagttgtcacagatgtgatat

SEQ ID NO: 3074378 - DNA, 25 bp, Homo sapien
ggtcagattcactgcatttgatgct

SEQ ID NO: 3074379 - DNA, 25 bp, Homo sapien
gattccagtccgttttgaccatacc

SEQ ID NO: 3074380 - DNA, 25 bp, Homo sapien
taggccagattccagtccgttttga

SEQ ID NO: 3074381 - DNA, 25 bp, Homo sapien
ggaatacctccccattgaagcctag

SEQ ID NO: 3074382 - DNA, 25 bp, Homo sapien
ccattgaagcctaggccagattcca

SEQ ID NO: 3074383 - DNA, 25 bp, Homo sapien
ggctgaaagatagcttcggctttct

SEQ ID NO: 3074384 - DNA, 25 bp, Homo sapien
ccaagaggcaggctgagtgtgcaag

SEQ ID NO: 3074385 - DNA, 25 bp, Homo sapien
atcatgggctgaaagatagcttcgg

SEQ ID NO: 3074386 - DNA, 25 bp, Homo sapien
gatagcttcggctttctgagaacat

SEQ ID NO: 3074387 - DNA, 25 bp, Homo sapien
ctattctagtttcctgagcctaagg

SEQ ID NO: 3074388 - DNA, 25 bp, Homo sapien
agtgatggagatcagccatgacaga

SEQ ID NO: 3074389 - DNA, 25 bp, Homo sapien
tctagtttcctgagcctaagggtag

SEQ ID NO: 3074390 - DNA, 25 bp, Homo sapien
aaaagtacacttcaaagcaaactga

SEQ ID NO: 3074391 - DNA, 25 bp, Homo sapien
tcagagtggtaacagctgagaagag

SEQ ID NO: 3074392 - DNA, 25 bp, Homo sapien
gtggtaacagctgagaagaggacat

SEQ ID NO: 3074393 - DNA, 25 bp, Homo sapien
cagagtggtaacagctgagaagagg

SEQ ID NO: 3074394 - DNA, 25 bp, Homo sapien
gagtggtaacagctgagaagaggac

SEQ ID NO: 3074395 - DNA, 25 bp, Homo sapien
ttgacttctggcttacactccctgc

SEQ ID NO: 3074396 - DNA, 25 bp, Homo sapien
tgccactgcgatcctcttgttcttg

SEQ ID NO: 3074397 - DNA, 25 bp, Homo sapien
ttgggacccatactggcaccttctc

SEQ ID NO: 3074398 - DNA, 25 bp, Homo sapien
cagatagctcaaggacagaacgctt

SEQ ID NO: 3074399 - DNA, 25 bp, Homo sapien
ataactacgttttcatcctggtttg

SEQ ID NO: 3074400 - DNA, 25 bp, Homo sapien
ggcccccataggtcatcagctctta

SEQ ID NO: 3074401 - DNA, 25 bp, Homo sapien
ctcacaggcccccataggtcatcag

SEQ ID NO: 3074402 - DNA, 25 bp, Homo sapien
atagctcacaggcccccataggtca

SEQ ID NO: 3074403 - DNA, 25 bp, Homo sapien
ccttcccagaccccatagctcacag

SEQ ID NO: 3074404 - DNA, 25 bp, Homo sapien
tgatgagagccccttggaacttttg

SEQ ID NO: 3074405 - DNA, 25 bp, Homo sapien
gctgccctgatgagagccccttgga

SEQ ID NO: 3074406 - DNA, 25 bp, Homo sapien
cagctgccctgatgagagccccttg

SEQ ID NO: 3074407 - DNA, 25 bp, Homo sapien
tgagagccccttggaacttttggga

SEQ ID NO: 3074408 - DNA, 25 bp, Homo sapien
gtgcgattccacgtgagcctcccgg

SEQ ID NO: 3074409 - DNA, 25 bp, Homo sapien
ccggccggagcgcagatgggaagtg

SEQ ID NO: 3074410 - DNA, 25 bp, Homo sapien
cggagcgcagatgggaagtgcgcat

SEQ ID NO: 3074411 - DNA, 25 bp, Homo sapien
gccggagcgcagatgggaagtgcgc

SEQ ID NO: 3074412 - DNA, 25 bp, Homo sapien
caggtgagagcatcctgcacgtcgc

SEQ ID NO: 3074413 - DNA, 25 bp, Homo sapien
tttctccaccgccttgagagcgagt

SEQ ID NO: 3074414 - DNA, 25 bp, Homo sapien
gcatcgcgatggagaaaatgtcccg

SEQ ID NO: 3074415 - DNA, 25 bp, Homo sapien
gagagcgagtacttttggcaaagga

SEQ ID NO: 3074416 - DNA, 25 bp, Homo sapien
gcctttagcaccctgtagtaccaaa

SEQ ID NO: 3074417 - DNA, 25 bp, Homo sapien
aatcatccggaaggtcacagagctg

SEQ ID NO: 3074418 - DNA, 25 bp, Homo sapien
gaaagacgatttcatgtgcacaggt

SEQ ID NO: 3074419 - DNA, 25 bp, Homo sapien
ggagctttgaattcatgcctttagc

SEQ ID NO: 3074420 - DNA, 25 bp, Homo sapien
tctcctggagggacgaatatgtgct

SEQ ID NO: 3074421 - DNA, 25 bp, Homo sapien
tccgctgagaattaagaaggctgtc

SEQ ID NO: 3074422 - DNA, 25 bp, Homo sapien
ctgttaggcccatattccgctgaga

SEQ ID NO: 3074423 - DNA, 25 bp, Homo sapien
tcttggaggccagagctaactgcag

SEQ ID NO: 3074424 - DNA, 25 bp, Homo sapien
ttttcccaatattatgaggtgaagc

SEQ ID NO: 3074425 - DNA, 25 bp, Homo sapien
tgaagctccgcttaagggcgtgcag

SEQ ID NO: 3074426 - DNA, 25 bp, Homo sapien
gggcgtgcagttcgtgtatctttcc

SEQ ID NO: 3074427 - DNA, 25 bp, Homo sapien
tccagtccagcagactgataatgtc

SEQ ID NO: 3074428 - DNA, 25 bp, Homo sapien
gactgatagtagctgtgcccggtgt

SEQ ID NO: 3074429 - DNA, 25 bp, Homo sapien
tgtgcccggtgtctcaagcatcttg

SEQ ID NO: 3074430 - DNA, 25 bp, Homo sapien
gatagtagctgtgcccggtgtctca

SEQ ID NO: 3074431 - DNA, 25 bp, Homo sapien
tagctgtgcccggtgtctcaagcat

SEQ ID NO: 3074432 - DNA, 25 bp, Homo sapien
tggttctggagacaggtagacattt

SEQ ID NO: 3074433 - DNA, 25 bp, Homo sapien
catggttctggagacaggtagacat

SEQ ID NO: 3074434 - DNA, 25 bp, Homo sapien
tcatcaggggctaggagatcctgaa

SEQ ID NO: 3074435 - DNA, 25 bp, Homo sapien
tcattcatcaggggctaggagatcc

SEQ ID NO: 3074436 - DNA, 25 bp, Homo sapien
gtagtcccaagcctgtggcaaaagg

SEQ ID NO: 3074437 - DNA, 25 bp, Homo sapien
gacaggcttgctgacattcacagga

SEQ ID NO: 3074438 - DNA, 25 bp, Homo sapien
ggatagtagtcccaagcctgtggca

SEQ ID NO: 3074439 - DNA, 25 bp, Homo sapien
gacattcacaggatagtagtcccaa

SEQ ID NO: 3074440 - DNA, 25 bp, Homo sapien
gttgggacgaatcggttccctgatg

SEQ ID NO: 3074441 - DNA, 25 bp, Homo sapien
gttaaccccgcagcatggcttctgg

SEQ ID NO: 3074442 - DNA, 25 bp, Homo sapien
ccctgatgttaaccccgcagcatgg

SEQ ID NO: 3074443 - DNA, 25 bp, Homo sapien
tcggttccctgatgttaaccccgca

SEQ ID NO: 3074444 - DNA, 25 bp, Homo sapien
cgtgctttgcgtttttgtgctgttg

SEQ ID NO: 3074445 - DNA, 25 bp, Homo sapien
ttgcgtttttgtgctgttgatctgc

SEQ ID NO: 3074446 - DNA, 25 bp, Homo sapien
tggaacgtgctttgcgtttttgtgc

SEQ ID NO: 3074447 - DNA, 25 bp, Homo sapien
tgtggaacgtgctttgcgtttttgt

SEQ ID NO: 3074448 - DNA, 25 bp, Homo sapien
tcagctgctccataattagctggtg

SEQ ID NO: 3074449 - DNA, 25 bp, Homo sapien
tgccccatggttgggaagcctgggc

SEQ ID NO: 3074450 - DNA, 25 bp, Homo sapien
gtgatggctgattgcctgccccatg

SEQ ID NO: 3074451 - DNA, 25 bp, Homo sapien
tgggagtcgctcatcaactcagctg

SEQ ID NO: 3074452 - DNA, 25 bp, Homo sapien
agaggtgccctctagccctgtaaac

SEQ ID NO: 3074453 - DNA, 25 bp, Homo sapien
gtgccctctagccctgtaaacttct

SEQ ID NO: 3074454 - DNA, 25 bp, Homo sapien
tctctccaaccagaggtgccctcta

SEQ ID NO: 3074455 - DNA, 25 bp, Homo sapien
aggtgccctctagccctgtaaactt

SEQ ID NO: 3074456 - DNA, 25 bp, Homo sapien
aagtcttgagagtgtccattgagga

SEQ ID NO: 3074457 - DNA, 25 bp, Homo sapien
cccaggtatatccaaagtcttgaga

SEQ ID NO: 3074458 - DNA, 25 bp, Homo sapien
actttggtctgtagccaccaagaaa

SEQ ID NO: 3074459 - DNA, 25 bp, Homo sapien
aagagtaaacatttgtgcaggatca

SEQ ID NO: 3074460 - DNA, 25 bp, Homo sapien
cctgagcctttgacatgtctttcca

SEQ ID NO: 3074461 - DNA, 25 bp, Homo sapien
ttcatttcttaagcagcattcccct

SEQ ID NO: 3074462 - DNA, 25 bp, Homo sapien
gtttgatgggattccatggattgtt

SEQ ID NO: 3074463 - DNA, 25 bp, Homo sapien
gatgggattccatggattgttttca

SEQ ID NO: 3074464 - DNA, 25 bp, Homo sapien
aatcattagggttagcatgcatgcg

SEQ ID NO: 3074465 - DNA, 25 bp, Homo sapien
taaaaatgatcttccctgtagctgc

SEQ ID NO: 3074466 - DNA, 25 bp, Homo sapien
cagttcaatgaaatggccccactaa

SEQ ID NO: 3074467 - DNA, 25 bp, Homo sapien
ccccagcattggacaagtaaaccag

SEQ ID NO: 3074468 - DNA, 25 bp, Homo sapien
gataggaggtatctacacagtttct

SEQ ID NO: 3074469 - DNA, 25 bp, Homo sapien
caaatgcctgttgagggtaatgggc

SEQ ID NO: 3074470 - DNA, 25 bp, Homo sapien
tatcccacactttctgtatttgtgc

SEQ ID NO: 3074471 - DNA, 25 bp, Homo sapien
cacagtttctatcccacactttctg

SEQ ID NO: 3074472 - DNA, 25 bp, Homo sapien
tattctgggtggcatgtaactgcag

SEQ ID NO: 3074473 - DNA, 25 bp, Homo sapien
cattgctaggactgagggatttgct

SEQ ID NO: 3074474 - DNA, 25 bp, Homo sapien
tgtgacctccttcaatgccaactgc

SEQ ID NO: 3074475 - DNA, 25 bp, Homo sapien
caggtgccaccatcagtgaattggg

SEQ ID NO: 3074476 - DNA, 25 bp, Homo sapien
tgttgggacagatcggtgggtcctt

SEQ ID NO: 3074477 - DNA, 25 bp, Homo sapien
ggaagtgtggctcatgggccacact

SEQ ID NO: 3074478 - DNA, 25 bp, Homo sapien
actgagcacgcctctgctgggcaaa

SEQ ID NO: 3074479 - DNA, 25 bp, Homo sapien
caaagagtaggagcctgttgggaca

SEQ ID NO: 3074480 - DNA, 25 bp, Homo sapien
tgctgaaatctaatatcttgtttct

SEQ ID NO: 3074481 - DNA, 25 bp, Homo sapien
tgggcaaggcgcagaaagaacaaca

SEQ ID NO: 3074482 - DNA, 25 bp, Homo sapien
ggctgaaagagaaccagatcgccat

SEQ ID NO: 3074483 - DNA, 25 bp, Homo sapien
ttcccttctgtaactaatgagcagg

SEQ ID NO: 3074484 - DNA, 25 bp, Homo sapien
tttaccagaggcataaacacaactg

SEQ ID NO: 3074485 - DNA, 25 bp, Homo sapien
tgtctgatagcaccacacgcaaacc

SEQ ID NO: 3074486 - DNA, 25 bp, Homo sapien
caggctggctttggaatagatggac

SEQ ID NO: 3074487 - DNA, 25 bp, Homo sapien
cacgggcccctgtaggatggcattt

SEQ ID NO: 3074488 - DNA, 25 bp, Homo sapien
tgcgggcccgcacgttttatgaggt

SEQ ID NO: 3074489 - DNA, 25 bp, Homo sapien
gcttgtgatgacgaatcctgctcta

SEQ ID NO: 3074490 - DNA, 25 bp, Homo sapien
gagttcctggaatggcacgttgctg

SEQ ID NO: 3074491 - DNA, 25 bp, Homo sapien
cacaggtggacgtagagttggcctt

SEQ ID NO: 3074492 - DNA, 25 bp, Homo sapien
gaattcccctgctcatatgccagag

SEQ ID NO: 3074493 - DNA, 25 bp, Homo sapien
tatgaagccaagctgcgtagactcc

SEQ ID NO: 3074494 - DNA, 25 bp, Homo sapien
cagactattcgttccttcagagagg

SEQ ID NO: 3074495 - DNA, 25 bp, Homo sapien
tgatgcaaggcggaataaaacccct

SEQ ID NO: 3074496 - DNA, 25 bp, Homo sapien
taagcagaagtaaccccaggtgtca

SEQ ID NO: 3074497 - DNA, 25 bp, Homo sapien
caggtccctgagtatatggcaaacg

SEQ ID NO: 3074498 - DNA, 25 bp, Homo sapien
gtatatggcaaacgcacctgacagc

SEQ ID NO: 3074499 - DNA, 25 bp, Homo sapien
catgaaaggcccataaacagtgcca

SEQ ID NO: 3074500 - DNA, 25 bp, Homo sapien
ttctgaaggatcttgaagccctatg

SEQ ID NO: 3074501 - DNA, 25 bp, Homo sapien
gaagccctatgaaactgttacctaa

SEQ ID NO: 3074502 - DNA, 25 bp, Homo sapien
cttcttctgtatcattgatgaaaca

SEQ ID NO: 3074503 - DNA, 25 bp, Homo sapien
tgatgaaacagctaaccattgattc

SEQ ID NO: 3074504 - DNA, 25 bp, Homo sapien
ttgttcacgtatctccacttactag

SEQ ID NO: 3074505 - DNA, 25 bp, Homo sapien
tactagagataagctgctcaaatct

SEQ ID NO: 3074506 - DNA, 25 bp, Homo sapien
tcacgtatctccacttactagagat

SEQ ID NO: 3074507 - DNA, 25 bp, Homo sapien
gctgctcaaatcttgtggtactcat

SEQ ID NO: 3074508 - DNA, 25 bp, Homo sapien
gaagacatcgactgcccctctgtcc

SEQ ID NO: 3074509 - DNA, 25 bp, Homo sapien
gaatgtggtccctgatgaagacatc

SEQ ID NO: 3074510 - DNA, 25 bp, Homo sapien
tgaatgtggtccctgatgaagacat

SEQ ID NO: 3074511 - DNA, 25 bp, Homo sapien
atgaagacatcgactgcccctctgt

SEQ ID NO: 3074512 - DNA, 25 bp, Homo sapien
cctgagcacgttacccacacttttt

SEQ ID NO: 3074513 - DNA, 25 bp, Homo sapien
ttcctgagcacgttacccacacttt

SEQ ID NO: 3074514 - DNA, 25 bp, Homo sapien
tcctgagcacgttacccacactttt

SEQ ID NO: 3074515 - DNA, 25 bp, Homo sapien
attcctgagcacgttacccacactt

SEQ ID NO: 3074516 - DNA, 25 bp, Homo sapien
ggaaacaggcaatatcagcacccga

SEQ ID NO: 3074517 - DNA, 25 bp, Homo sapien
aagtatatgtcccaaagcagcactg

SEQ ID NO: 3074518 - DNA, 25 bp, Homo sapien
gatcagcccattactaggaaacagg

SEQ ID NO: 3074519 - DNA, 25 bp, Homo sapien
gagaccctgaagagaatgtggcaaa

SEQ ID NO: 3074520 - DNA, 25 bp, Homo sapien
taaatgccgcataaagtccgtagga

SEQ ID NO: 3074521 - DNA, 25 bp, Homo sapien
tttccaaatggcgtagtaatgcact

SEQ ID NO: 3074522 - DNA, 25 bp, Homo sapien
aagcaataaattaagcccccacagg

SEQ ID NO: 3074523 - DNA, 25 bp, Homo sapien
tcactcttgaagaacacaactccca

SEQ ID NO: 3074524 - DNA, 25 bp, Homo sapien
gagagaatcccattgtgagatagaa

SEQ ID NO: 3074525 - DNA, 25 bp, Homo sapien
ctggagagaatcccattgtgagata

SEQ ID NO: 3074526 - DNA, 25 bp, Homo sapien
gaatcccattgtgagatagaaaaag

SEQ ID NO: 3074527 - DNA, 25 bp, Homo sapien
gagaatcccattgtgagatagaaaa

SEQ ID NO: 3074528 - DNA, 25 bp, Homo sapien
ctgccatgagccagataaaccaacg

SEQ ID NO: 3074529 - DNA, 25 bp, Homo sapien
tgagccagataaaccaacgcatatg

SEQ ID NO: 3074530 - DNA, 25 bp, Homo sapien
cagataaaccaacgcatatgagatg

SEQ ID NO: 3074531 - DNA, 25 bp, Homo sapien
gccatgagccagataaaccaacgca

SEQ ID NO: 3074532 - DNA, 25 bp, Homo sapien
agataaccattctatcacacatgtg

SEQ ID NO: 3074533 - DNA, 25 bp, Homo sapien
gaaatagataaccattctatcacac

SEQ ID NO: 3074534 - DNA, 25 bp, Homo sapien
aagaaatagataaccattctatcac

SEQ ID NO: 3074535 - DNA, 25 bp, Homo sapien
atagataaccattctatcacacatg

SEQ ID NO: 3074536 - DNA, 25 bp, Homo sapien
ggcacagagtcccattccataaatc

SEQ ID NO: 3074537 - DNA, 25 bp, Homo sapien
gacagccgatggaggagggcactgc

SEQ ID NO: 3074538 - DNA, 25 bp, Homo sapien
acagagtcccattccataaatccat

SEQ ID NO: 3074539 - DNA, 25 bp, Homo sapien
gaaatactgtagaaacgatgaagag

SEQ ID NO: 3074540 - DNA, 25 bp, Homo sapien
agttggcttgtagcggccattggct

SEQ ID NO: 3074541 - DNA, 25 bp, Homo sapien
ggctggagctcgatggttcatgaac

SEQ ID NO: 3074542 - DNA, 25 bp, Homo sapien
taacagttagcagcatgttcatagc

SEQ ID NO: 3074543 - DNA, 25 bp, Homo sapien
tagcagcatgttcatagcaagttgg

SEQ ID NO: 3074544 - DNA, 25 bp, Homo sapien
cattttgcccttagacacaccggta

SEQ ID NO: 3074545 - DNA, 25 bp, Homo sapien
tctaaagtcagaacactacggttcc

SEQ ID NO: 3074546 - DNA, 25 bp, Homo sapien
gggcttcactgatcatgactggagt

SEQ ID NO: 3074547 - DNA, 25 bp, Homo sapien
cacagacgtgtagagaagtaaaacc

SEQ ID NO: 3074548 - DNA, 25 bp, Homo sapien
tgaaggtccgggaattcacacaaag

SEQ ID NO: 3074549 - DNA, 25 bp, Homo sapien
aaactcaacaaccttcttggaagat

SEQ ID NO: 3074550 - DNA, 25 bp, Homo sapien
cttaaaatttcccctgtcactgcac

SEQ ID NO: 3074551 - DNA, 25 bp, Homo sapien
tcacacaaagggatgcagttaccat

SEQ ID NO: 3074552 - DNA, 25 bp, Homo sapien
tgccccttcgcagagcccaaaaata

SEQ ID NO: 3074553 - DNA, 25 bp, Homo sapien
tccattgttagacggtggagcccca

SEQ ID NO: 3074554 - DNA, 25 bp, Homo sapien
gtctcgccacccgaaagctaacatg

SEQ ID NO: 3074555 - DNA, 25 bp, Homo sapien
tctacagtgaatgagcagtcggcca

SEQ ID NO: 3074556 - DNA, 25 bp, Homo sapien
ggccgggaatccatctgaggtccgc

SEQ ID NO: 3074557 - DNA, 25 bp, Homo sapien
cacccaggatgaatccaggtgagga

SEQ ID NO: 3074558 - DNA, 25 bp, Homo sapien
gggatttgggaacccgcttctgaca

SEQ ID NO: 3074559 - DNA, 25 bp, Homo sapien
ttacgacaaatctctccgcagggcg

SEQ ID NO: 3074560 - DNA, 25 bp, Homo sapien
gctggaatcgattcttgaaccgcat

SEQ ID NO: 3074561 - DNA, 25 bp, Homo sapien
cgctggaatcgattcttgaaccgca

SEQ ID NO: 3074562 - DNA, 25 bp, Homo sapien
ccaggagctccgtctcgtcagcacc

SEQ ID NO: 3074563 - DNA, 25 bp, Homo sapien
aggagctccgtctcgtcagcaccgg

SEQ ID NO: 3074564 - DNA, 25 bp, Homo sapien
ccgtctcgtcagcaccggcggccgg

SEQ ID NO: 3074565 - DNA, 25 bp, Homo sapien
ctccgtctcgtcagcaccggcggcc

SEQ ID NO: 3074566 - DNA, 25 bp, Homo sapien
ccgcctgcgtgtccagcggaaccct

SEQ ID NO: 3074567 - DNA, 25 bp, Homo sapien
gagggaggccgcttcaacggcccca

SEQ ID NO: 3074568 - DNA, 25 bp, Homo sapien
ctgcgtgtccagcggaacccttcgg

SEQ ID NO: 3074569 - DNA, 25 bp, Homo sapien
cgtgtccagcggaacccttcggccg

SEQ ID NO: 3074570 - DNA, 25 bp, Homo sapien
gcccacagtcgctgacctttgagta

SEQ ID NO: 3074571 - DNA, 25 bp, Homo sapien
ttctgcccacagtcgctgacctttg

SEQ ID NO: 3074572 - DNA, 25 bp, Homo sapien
tctgcccacagtcgctgacctttga

SEQ ID NO: 3074573 - DNA, 25 bp, Homo sapien
ttttctgcccacagtcgctgacctt

SEQ ID NO: 3074574 - DNA, 25 bp, Homo sapien
tgttgtaagagtcagaattggacat

SEQ ID NO: 3074575 - DNA, 25 bp, Homo sapien
ctgttgtaagagtcagaattggaca

SEQ ID NO: 3074576 - DNA, 25 bp, Homo sapien
gtgccccatctttgagtccttgaga

SEQ ID NO: 3074577 - DNA, 25 bp, Homo sapien
cgtctgtagactgacttcctttgct

SEQ ID NO: 3074578 - DNA, 25 bp, Homo sapien
ttcctttgcttactccttggcttgt

SEQ ID NO: 3074579 - DNA, 25 bp, Homo sapien
cccatagttgtttttacgtctgtag

SEQ ID NO: 3074580 - DNA, 25 bp, Homo sapien
taattctggatataatctctgagga

SEQ ID NO: 3074581 - DNA, 25 bp, Homo sapien
cacttgactaatgcaatattgtgat

SEQ ID NO: 3074582 - DNA, 25 bp, Homo sapien
aacagacgggctggcacaagtccac

SEQ ID NO: 3074583 - DNA, 25 bp, Homo sapien
gtccaccctcagaatcatgctcaga

SEQ ID NO: 3074584 - DNA, 25 bp, Homo sapien
agaagcgggttagcctctgagcaag

SEQ ID NO: 3074585 - DNA, 25 bp, Homo sapien
gcaagccttgcactatcatgctggt

SEQ ID NO: 3074586 - DNA, 25 bp, Homo sapien
gaaataaccagtgcaggatgtcctg

SEQ ID NO: 3074587 - DNA, 25 bp, Homo sapien
tcatgctggtataaggaggcctttc

SEQ ID NO: 3074588 - DNA, 25 bp, Homo sapien
tcaggtcaggaaattagctcagggt

SEQ ID NO: 3074589 - DNA, 25 bp, Homo sapien
tggcttcccctaatagtggctatga

SEQ ID NO: 3074590 - DNA, 25 bp, Homo sapien
taaaacagcagataaggccatctac

SEQ ID NO: 3074591 - DNA, 25 bp, Homo sapien
tacagaagggacttacgaggatgtg

SEQ ID NO: 3074592 - DNA, 25 bp, Homo sapien
ttcttctagggcagctacttcatgc

SEQ ID NO: 3074593 - DNA, 25 bp, Homo sapien
cttcatgccaatatgcagtaggata

SEQ ID NO: 3074594 - DNA, 25 bp, Homo sapien
catgccaatatgcagtaggataggg

SEQ ID NO: 3074595 - DNA, 25 bp, Homo sapien
gctacttcatgccaatatgcagtag

SEQ ID NO: 3074596 - DNA, 25 bp, Homo sapien
gagtacccagatggaccctaaatgc

SEQ ID NO: 3074597 - DNA, 25 bp, Homo sapien
tgcaatcacaagtatgaagagaggc

SEQ ID NO: 3074598 - DNA, 25 bp, Homo sapien
acgcccatgtccttatctccagaaa

SEQ ID NO: 3074599 - DNA, 25 bp, Homo sapien
tgcagccttcggagggagtacagcc

SEQ ID NO: 3074600 - DNA, 25 bp, Homo sapien
tagttctctgtgcatagaaatgtca

SEQ ID NO: 3074601 - DNA, 25 bp, Homo sapien
tgcagtctggtctgactccattagt

SEQ ID NO: 3074602 - DNA, 25 bp, Homo sapien
tttgcagtctggtctgactccatta

SEQ ID NO: 3074603 - DNA, 25 bp, Homo sapien
tgactccattagttctctgtgcata

SEQ ID NO: 3074604 - DNA, 25 bp, Homo sapien
gttagtcaatagaacaattcagggc

SEQ ID NO: 3074605 - DNA, 25 bp, Homo sapien
tcttacggaagaaggctgcaaatgt

SEQ ID NO: 3074606 - DNA, 25 bp, Homo sapien
tggacagattttagggcaagcagtt

SEQ ID NO: 3074607 - DNA, 25 bp, Homo sapien
tacattagggatccactgagccact

SEQ ID NO: 3074608 - DNA, 25 bp, Homo sapien
gggtatgttctaagacttccagtgg

SEQ ID NO: 3074609 - DNA, 25 bp, Homo sapien
caatctaaaataggtcaggcccaga

SEQ ID NO: 3074610 - DNA, 25 bp, Homo sapien
taagggactagcacttgttaggtgc

SEQ ID NO: 3074611 - DNA, 25 bp, Homo sapien
tgaaggccaattactgtgtctgagg

SEQ ID NO: 3074612 - DNA, 25 bp, Homo sapien
tggtgatgatccacaacgttcctgt

SEQ ID NO: 3074613 - DNA, 25 bp, Homo sapien
gaaaagccacagttcatggacttgg

SEQ ID NO: 3074614 - DNA, 25 bp, Homo sapien
cctttccaggccgagagagtgggca

SEQ ID NO: 3074615 - DNA, 25 bp, Homo sapien
tctcagctgtataggaagcaccccg

SEQ ID NO: 3074616 - DNA, 25 bp, Homo sapien
gacacgtgtaacatttggtgccaaa

SEQ ID NO: 3074617 - DNA, 25 bp, Homo sapien
tacccttcaatctcactgtccttcc

SEQ ID NO: 3074618 - DNA, 25 bp, Homo sapien
tcacacggacacgtgtaacatttgg

SEQ ID NO: 3074619 - DNA, 25 bp, Homo sapien
gaccggtcccctgtcttcgccctca

SEQ ID NO: 3074620 - DNA, 25 bp, Homo sapien
ccagcttgggcgatggagctagact

SEQ ID NO: 3074621 - DNA, 25 bp, Homo sapien
ctccagcttgggcgatggagctaga

SEQ ID NO: 3074622 - DNA, 25 bp, Homo sapien
tccagcttgggcgatggagctagac

SEQ ID NO: 3074623 - DNA, 25 bp, Homo sapien
tcctagttaccaaggaagctgggaa

SEQ ID NO: 3074624 - DNA, 25 bp, Homo sapien
ccagcctaaacaaagggagataagg

SEQ ID NO: 3074625 - DNA, 25 bp, Homo sapien
gctgggaaagtgaatatttgacatt

SEQ ID NO: 3074626 - DNA, 25 bp, Homo sapien
ccatgtcctagttaccaaggaagct

SEQ ID NO: 3074627 - DNA, 25 bp, Homo sapien
tctttgcagtgtctcttaagacacc

SEQ ID NO: 3074628 - DNA, 25 bp, Homo sapien
ttgcagtgtctcttaagacaccttt

SEQ ID NO: 3074629 - DNA, 25 bp, Homo sapien
tttgcagtgtctcttaagacacctt

SEQ ID NO: 3074630 - DNA, 25 bp, Homo sapien
ctttgcagtgtctcttaagacacct

SEQ ID NO: 3074631 - DNA, 25 bp, Homo sapien
cattggtgaagatgctatttatacc

SEQ ID NO: 3074632 - DNA, 25 bp, Homo sapien
cctagatctgtcatattggtgttta

SEQ ID NO: 3074633 - DNA, 25 bp, Homo sapien
gatgctatttatacctagatctgtc

SEQ ID NO: 3074634 - DNA, 25 bp, Homo sapien
aatgttcattggtgaagatgctatt

SEQ ID NO: 3074635 - DNA, 25 bp, Homo sapien
tagtgctctatctttctgatggaga

SEQ ID NO: 3074636 - DNA, 25 bp, Homo sapien
agcagcagggatcccaaagtcctgt

SEQ ID NO: 3074637 - DNA, 25 bp, Homo sapien
aaagtcctgtagacccatgggaagg

SEQ ID NO: 3074638 - DNA, 25 bp, Homo sapien
tggtttcttgtgagctccatagtgc

SEQ ID NO: 3074639 - DNA, 25 bp, Homo sapien
tccattgagctgaccaaccaggtgt

SEQ ID NO: 3074640 - DNA, 25 bp, Homo sapien
gaaagaactcgttggttgccacaca

SEQ ID NO: 3074641 - DNA, 25 bp, Homo sapien
caattgaagttggtgagctagacag

SEQ ID NO: 3074642 - DNA, 25 bp, Homo sapien
tgtttcaaacctgtagactcaagcg

SEQ ID NO: 3074643 - DNA, 25 bp, Homo sapien
ctccccgcccagtaagagctttctt

SEQ ID NO: 3074644 - DNA, 25 bp, Homo sapien
cgtgagctatggctccccgcccagt

SEQ ID NO: 3074645 - DNA, 25 bp, Homo sapien
tgagctatggctccccgcccagtaa

SEQ ID NO: 3074646 - DNA, 25 bp, Homo sapien
tatggctccccgcccagtaagagct

SEQ ID NO: 3074647 - DNA, 25 bp, Homo sapien
tccttgtgagtaaatgggaagttca

SEQ ID NO: 3074648 - DNA, 25 bp, Homo sapien
cagtccttgtgagtaaatgggaagt

SEQ ID NO: 3074649 - DNA, 25 bp, Homo sapien
tgggaagttcagctcacttggggct

SEQ ID NO: 3074650 - DNA, 25 bp, Homo sapien
tcagtccttgtgagtaaatgggaag

SEQ ID NO: 3074651 - DNA, 25 bp, Homo sapien
ggccaggacagtagtcccatgtctg

SEQ ID NO: 3074652 - DNA, 25 bp, Homo sapien
aggccaggacagtagtcccatgtct

SEQ ID NO: 3074653 - DNA, 25 bp, Homo sapien
gactggaaaaatgtgcccacttggt

SEQ ID NO: 3074654 - DNA, 25 bp, Homo sapien
caggacagtagtcccatgtctgctg

SEQ ID NO: 3074655 - DNA, 25 bp, Homo sapien
tccccttgatatttcaatcactgta

SEQ ID NO: 3074656 - DNA, 25 bp, Homo sapien
atacgttctttctcgtgatctgccc

SEQ ID NO: 3074657 - DNA, 25 bp, Homo sapien
agctgttagtcatagctgagcacaa

SEQ ID NO: 3074658 - DNA, 25 bp, Homo sapien
gttagtcatagctgagcacaatttc

SEQ ID NO: 3074659 - DNA, 25 bp, Homo sapien
tcaacaacaatgctgtagccacggg

SEQ ID NO: 3074660 - DNA, 25 bp, Homo sapien
tgacttgtagaatcaccaacgcggg

SEQ ID NO: 3074661 - DNA, 25 bp, Homo sapien
tagccacgggcagtttttcaggaca

SEQ ID NO: 3074662 - DNA, 25 bp, Homo sapien
caaacatgccatagccaaaaggtcc

SEQ ID NO: 3074663 - DNA, 25 bp, Homo sapien
cagaagagatgtagattaaatacag

SEQ ID NO: 3074664 - DNA, 25 bp, Homo sapien
cttgatcgtgagagttgtcaaatcc

SEQ ID NO: 3074665 - DNA, 25 bp, Homo sapien
gatcatgtgtataatgactgctgcg

SEQ ID NO: 3074666 - DNA, 25 bp, Homo sapien
gactgctgcgtatacatttttgtct

SEQ ID NO: 3074667 - DNA, 25 bp, Homo sapien
tcaaattgcagttgaggccaccagg

SEQ ID NO: 3074668 - DNA, 25 bp, Homo sapien
cacgtttccgctgagccactcttgg

SEQ ID NO: 3074669 - DNA, 25 bp, Homo sapien
cttgggcaaaccctcccttggagcg

SEQ ID NO: 3074670 - DNA, 25 bp, Homo sapien
agctttgtattgtacgcctgtcaac

SEQ ID NO: 3074671 - DNA, 25 bp, Homo sapien
cagcatatggctggtgtttaattaa

SEQ ID NO: 3074672 - DNA, 25 bp, Homo sapien
aaatatgcgcagacaacttcctact

SEQ ID NO: 3074673 - DNA, 25 bp, Homo sapien
tggcaatgcgtcaagcagagaacca

SEQ ID NO: 3074674 - DNA, 25 bp, Homo sapien
gacaacttcctactatcttgggagg

SEQ ID NO: 3074675 - DNA, 25 bp, Homo sapien
taggcatgcaattctagcagaggag

SEQ ID NO: 3074676 - DNA, 25 bp, Homo sapien
tgatagggcatcttattcagaggag

SEQ ID NO: 3074677 - DNA, 25 bp, Homo sapien
agatgcttacggagcaacttcctag

SEQ ID NO: 3074678 - DNA, 25 bp, Homo sapien
gttcaggcttagtccaactctgtcc

SEQ ID NO: 3074679 - DNA, 25 bp, Homo sapien
tctttctgccttaccctgctgagta

SEQ ID NO: 3074680 - DNA, 25 bp, Homo sapien
gatctttctgccttaccctgctgag

SEQ ID NO: 3074681 - DNA, 25 bp, Homo sapien
atctttctgccttaccctgctgagt

SEQ ID NO: 3074682 - DNA, 25 bp, Homo sapien
cgatctttctgccttaccctgctga

SEQ ID NO: 3074683 - DNA, 25 bp, Homo sapien
ttgtcacaaagaaggtgacgagaaa

SEQ ID NO: 3074684 - DNA, 25 bp, Homo sapien
acttttgtcacaaagaaggtgacga

SEQ ID NO: 3074685 - DNA, 25 bp, Homo sapien
taaacagttacttttgtcacaaaga

SEQ ID NO: 3074686 - DNA, 25 bp, Homo sapien
aacagttacttttgtcacaaagaag

SEQ ID NO: 3074687 - DNA, 25 bp, Homo sapien
gatgacgtagctcgcaactaggatg

SEQ ID NO: 3074688 - DNA, 25 bp, Homo sapien
tcggcagtcgtatagcacgcaggag

SEQ ID NO: 3074689 - DNA, 25 bp, Homo sapien
ggtgcatcaccaccaaccggatgga

SEQ ID NO: 3074690 - DNA, 25 bp, Homo sapien
caaggtaacagggtcgatctccaag

SEQ ID NO: 3074691 - DNA, 25 bp, Homo sapien
acttctcccacggtggagaagtggg

SEQ ID NO: 3074692 - DNA, 25 bp, Homo sapien
cacttctcccacggtggagaagtgg

SEQ ID NO: 3074693 - DNA, 25 bp, Homo sapien
cttctcccacggtggagaagtgggt

SEQ ID NO: 3074694 - DNA, 25 bp, Homo sapien
ctgtctttaaggaactttcctctgg

SEQ ID NO: 3074695 - DNA, 25 bp, Homo sapien
ttgctgtctttaaggaactttcctc

SEQ ID NO: 3074696 - DNA, 25 bp, Homo sapien
tctttaaggaactttcctctggtgc

SEQ ID NO: 3074697 - DNA, 25 bp, Homo sapien
ttaaggaactttcctctggtgccat

SEQ ID NO: 3074698 - DNA, 25 bp, Homo sapien
gaggcattctgcattccttttggct

SEQ ID NO: 3074699 - DNA, 25 bp, Homo sapien
catctggaggcattctgcattcctt

SEQ ID NO: 3074700 - DNA, 25 bp, Homo sapien
ctgcattccttttggctttggactt

SEQ ID NO: 3074701 - DNA, 25 bp, Homo sapien
attctgcattccttttggctttgga

SEQ ID NO: 3074702 - DNA, 25 bp, Homo sapien
gatcaggaaatggacaataatggct

SEQ ID NO: 3074703 - DNA, 25 bp, Homo sapien
caggaaatggacaataatggctttt

SEQ ID NO: 3074704 - DNA, 25 bp, Homo sapien
gaaatggacaataatggcttttgga

SEQ ID NO: 3074705 - DNA, 25 bp, Homo sapien
tcaggaaatggacaataatggcttt

SEQ ID NO: 3074706 - DNA, 25 bp, Homo sapien
tgtttggcagatttgtagtttaaaa

SEQ ID NO: 3074707 - DNA, 25 bp, Homo sapien
gaagaagataccctcccagttctgc

SEQ ID NO: 3074708 - DNA, 25 bp, Homo sapien
atgaaattacttcggaagaagatac

SEQ ID NO: 3074709 - DNA, 25 bp, Homo sapien
tatgtcctcatgttattgaccatct

SEQ ID NO: 3074710 - DNA, 25 bp, Homo sapien
agggcaccctctgagcaggaatttt

SEQ ID NO: 3074711 - DNA, 25 bp, Homo sapien
gagggcaccctctgagcaggaattt

SEQ ID NO: 3074712 - DNA, 25 bp, Homo sapien
cagagtcttaggttgcacccttcac

SEQ ID NO: 3074713 - DNA, 25 bp, Homo sapien
cgtgttcatgctggccttttcctga

SEQ ID NO: 3074714 - DNA, 25 bp, Homo sapien
aaaactcctagtcactggtcagagt

SEQ ID NO: 3074715 - DNA, 25 bp, Homo sapien
ttttctgcacctgcgtgcagcttca

SEQ ID NO: 3074716 - DNA, 25 bp, Homo sapien
gctgccactggtcagatctcggact

SEQ ID NO: 3074717 - DNA, 25 bp, Homo sapien
gtcagatctcggactatgctaggca

SEQ ID NO: 3074718 - DNA, 25 bp, Homo sapien
cattggcccatatgatgctgccact

SEQ ID NO: 3074719 - DNA, 25 bp, Homo sapien
tggccaccacattggcccatatgat

SEQ ID NO: 3074720 - DNA, 25 bp, Homo sapien
ttccacacagagtgttctctggaat

SEQ ID NO: 3074721 - DNA, 25 bp, Homo sapien
cttccacacagagtgttctctggaa

SEQ ID NO: 3074722 - DNA, 25 bp, Homo sapien
atgtaacattcatcacaattggcga

SEQ ID NO: 3074723 - DNA, 25 bp, Homo sapien
ttcatcacaattggcgagatactcc

SEQ ID NO: 3074724 - DNA, 25 bp, Homo sapien
catcttttgttagccgaaatgtttt

SEQ ID NO: 3074725 - DNA, 25 bp, Homo sapien
gccacatcttttgttagccgaaatg

SEQ ID NO: 3074726 - DNA, 25 bp, Homo sapien
tacgccttaccaactgctcccttat

SEQ ID NO: 3074727 - DNA, 25 bp, Homo sapien
catgcttcttatacgccttaccaac

SEQ ID NO: 3074728 - DNA, 25 bp, Homo sapien
gcttcttatacgccttaccaactgc

SEQ ID NO: 3074729 - DNA, 25 bp, Homo sapien
cttattgggtattaggtagacagct

SEQ ID NO: 3074730 - DNA, 25 bp, Homo sapien
ggcttgacacaaggatgtatccact

SEQ ID NO: 3074731 - DNA, 25 bp, Homo sapien
gccatgccaatatgacagtgttcta

SEQ ID NO: 3074732 - DNA, 25 bp, Homo sapien
gatgcttagtcaggcaaatcctact

SEQ ID NO: 3074733 - DNA, 25 bp, Homo sapien
tgtgtccttactttcaggcctgtcc

SEQ ID NO: 3074734 - DNA, 25 bp, Homo sapien
ctcttgtccctacggtttttgccag

SEQ ID NO: 3074735 - DNA, 25 bp, Homo sapien
gatccttctgggagttctttggctt

SEQ ID NO: 3074736 - DNA, 25 bp, Homo sapien
tgaagtacaggaatgcctcttgtcc

SEQ ID NO: 3074737 - DNA, 25 bp, Homo sapien
gccagtttctgatccttctgggagt

SEQ ID NO: 3074738 - DNA, 25 bp, Homo sapien
ccactcggtcccttcaggaacagat

SEQ ID NO: 3074739 - DNA, 25 bp, Homo sapien
tctccccactcggtcccttcaggaa

SEQ ID NO: 3074740 - DNA, 25 bp, Homo sapien
ctctctccccactcggtcccttcag

SEQ ID NO: 3074741 - DNA, 25 bp, Homo sapien
tcggtcccttcaggaacagattcca

SEQ ID NO: 3074742 - DNA, 25 bp, Homo sapien
tccagctctatgtccgtcttaaaca

SEQ ID NO: 3074743 - DNA, 25 bp, Homo sapien
tctatgtccgtcttaaacactcggc

SEQ ID NO: 3074744 - DNA, 25 bp, Homo sapien
ttttattggtgtagtgcagaacctc

SEQ ID NO: 3074745 - DNA, 25 bp, Homo sapien
tcacagtgggtctcactggagattt

SEQ ID NO: 3074746 - DNA, 25 bp, Homo sapien
acgatctctgggtgaagaatggtgt

SEQ ID NO: 3074747 - DNA, 25 bp, Homo sapien
ctgggtgaagaatggtgttgttgac

SEQ ID NO: 3074748 - DNA, 25 bp, Homo sapien
gtgaagaatggtgttgttgactttg

SEQ ID NO: 3074749 - DNA, 25 bp, Homo sapien
ctaaacgatctctgggtgaagaatg

SEQ ID NO: 3074750 - DNA, 25 bp, Homo sapien
gatgccctcgaaggaagcctccctg

SEQ ID NO: 3074751 - DNA, 25 bp, Homo sapien
gctgatgccctcgaaggaagcctcc

SEQ ID NO: 3074752 - DNA, 25 bp, Homo sapien
ttgctgatgccctcgaaggaagcct

SEQ ID NO: 3074753 - DNA, 25 bp, Homo sapien
tgatgccctcgaaggaagcctccct

SEQ ID NO: 3074754 - DNA, 25 bp, Homo sapien
tgttgacgccacgcaaagtgaggag

SEQ ID NO: 3074755 - DNA, 25 bp, Homo sapien
gttgacgccacgcaaagtgaggagg

SEQ ID NO: 3074756 - DNA, 25 bp, Homo sapien
ggcaatctcatctgcgtcctggacg

SEQ ID NO: 3074757 - DNA, 25 bp, Homo sapien
tgtcagcgtcgatgaagccgtagca

SEQ ID NO: 3074758 - DNA, 25 bp, Homo sapien
gcctggctcggtgacaccgaatgcg

SEQ ID NO: 3074759 - DNA, 25 bp, Homo sapien
cggtgacaccgaatgcgcagtgaaa

SEQ ID NO: 3074760 - DNA, 25 bp, Homo sapien
ctggcggaagaggaccccggtgtag

SEQ ID NO: 3074761 - DNA, 25 bp, Homo sapien
ggaagaggaccccggtgtaggtgca

SEQ ID NO: 3074762 - DNA, 25 bp, Homo sapien
cggtgtaggtgcagtagcgctgagt

SEQ ID NO: 3074763 - DNA, 25 bp, Homo sapien
agaggaccccggtgtaggtgcagta

SEQ ID NO: 3074764 - DNA, 25 bp, Homo sapien
cagcagggttcttccgcagccgctc

SEQ ID NO: 3074765 - DNA, 25 bp, Homo sapien
agcagggttcttccgcagccgctca

SEQ ID NO: 3074766 - DNA, 25 bp, Homo sapien
acagcagggttcttccgcagccgct

SEQ ID NO: 3074767 - DNA, 25 bp, Homo sapien
cgctgccggttcaaggcaaagagcg

SEQ ID NO: 3074768 - DNA, 25 bp, Homo sapien
ggcgctgccggttcaaggcaaagag

SEQ ID NO: 3074769 - DNA, 25 bp, Homo sapien
gccggttcaaggcaaagagcgccag

SEQ ID NO: 3074770 - DNA, 25 bp, Homo sapien
ctgccggttcaaggcaaagagcgcc

SEQ ID NO: 3074771 - DNA, 25 bp, Homo sapien
gccaaaacgagggtccagtggccgc

SEQ ID NO: 3074772 - DNA, 25 bp, Homo sapien
ccccagccaaaacgagggtccagtg

SEQ ID NO: 3074773 - DNA, 25 bp, Homo sapien
cagccaaaacgagggtccagtggcc

SEQ ID NO: 3074774 - DNA, 25 bp, Homo sapien
caaaacgagggtccagtggccgccg

SEQ ID NO: 3074775 - DNA, 25 bp, Homo sapien
tcgcccagcaccggcgtcacgtgaa

SEQ ID NO: 3074776 - DNA, 25 bp, Homo sapien
ctgttcgcccagcaccggcgtcacg

SEQ ID NO: 3074777 - DNA, 25 bp, Homo sapien
gttcgcccagcaccggcgtcacgtg

SEQ ID NO: 3074778 - DNA, 25 bp, Homo sapien
gcccagcaccggcgtcacgtgaagt

SEQ ID NO: 3074779 - DNA, 25 bp, Homo sapien
tgggtgatgcgggactcagtaaacc

SEQ ID NO: 3074780 - DNA, 25 bp, Homo sapien
agatctcagtggaccctgggtgatg

SEQ ID NO: 3074781 - DNA, 25 bp, Homo sapien
ggaagactttggattttcacagggc

SEQ ID NO: 3074782 - DNA, 25 bp, Homo sapien
catgagtggaattgaggccatcttc

SEQ ID NO: 3074783 - DNA, 25 bp, Homo sapien
cagccatcccgctggtccttgctgg

SEQ ID NO: 3074784 - DNA, 25 bp, Homo sapien
cgacaatagaggacttcactgtcca

SEQ ID NO: 3074785 - DNA, 25 bp, Homo sapien
tcctcatggagcatgtgcgacaata

SEQ ID NO: 3074786 - DNA, 25 bp, Homo sapien
ttcactgtccatactcattagtgtc

SEQ ID NO: 3074787 - DNA, 25 bp, Homo sapien
tcagattgtgggccaccaggtgttt

SEQ ID NO: 3074788 - DNA, 25 bp, Homo sapien
agattgtgggccaccaggtgttttt

SEQ ID NO: 3074789 - DNA, 25 bp, Homo sapien
tttgctttgtcctgcctttcagatt

SEQ ID NO: 3074790 - DNA, 25 bp, Homo sapien
cagattgtgggccaccaggtgtttt

SEQ ID NO: 3074791 - DNA, 25 bp, Homo sapien
tcacagtccctttaacaccataggc

SEQ ID NO: 3074792 - DNA, 25 bp, Homo sapien
tccctttaacaccataggcaagaaa

SEQ ID NO: 3074793 - DNA, 25 bp, Homo sapien
tgcaaacataccaggtacttcctcc

SEQ ID NO: 3074794 - DNA, 25 bp, Homo sapien
tatgaccacaaaatgggctgaggtt

SEQ ID NO: 3074795 - DNA, 25 bp, Homo sapien
gggtgaatagtcctccctcagccca

SEQ ID NO: 3074796 - DNA, 25 bp, Homo sapien
gcttcactaaatcatccagctcaga

SEQ ID NO: 3074797 - DNA, 25 bp, Homo sapien
cctccctcagcccactgcgtccttc

SEQ ID NO: 3074798 - DNA, 25 bp, Homo sapien
ttcactaaatcatccagctcagaaa

SEQ ID NO: 3074799 - DNA, 25 bp, Homo sapien
tctagatttcctagtcctagatcca

SEQ ID NO: 3074800 - DNA, 25 bp, Homo sapien
ggtggaacatgagctctctttttct

SEQ ID NO: 3074801 - DNA, 25 bp, Homo sapien
tcctagtcctagatccaacttggtg

SEQ ID NO: 3074802 - DNA, 25 bp, Homo sapien
tagatccaacttggtggaacatgag

SEQ ID NO: 3074803 - DNA, 25 bp, Homo sapien
tcccagatgtgcaactgttcttcct

SEQ ID NO: 3074804 - DNA, 25 bp, Homo sapien
tttcccagatgtgcaactgttcttc

SEQ ID NO: 3074805 - DNA, 25 bp, Homo sapien
ctttcccagatgtgcaactgttctt

SEQ ID NO: 3074806 - DNA, 25 bp, Homo sapien
ttcccagatgtgcaactgttcttcc

SEQ ID NO: 3074807 - DNA, 25 bp, Homo sapien
tgagttggagtatctctggactgtt

SEQ ID NO: 3074808 - DNA, 25 bp, Homo sapien
aactggacttgtgagttggagtatc

SEQ ID NO: 3074809 - DNA, 25 bp, Homo sapien
agttcctgagttttggaactggact

SEQ ID NO: 3074810 - DNA, 25 bp, Homo sapien
tataatggggtttctgtgcttatgt

SEQ ID NO: 3074811 - DNA, 25 bp, Homo sapien
tattgagatcgagattccttcttac

SEQ ID NO: 3074812 - DNA, 25 bp, Homo sapien
tactttgggaagctgttggggattc

SEQ ID NO: 3074813 - DNA, 25 bp, Homo sapien
gattatgccgatattgagatcgaga

SEQ ID NO: 3074814 - DNA, 25 bp, Homo sapien
cctctctggattatgccgatattga

SEQ ID NO: 3074815 - DNA, 25 bp, Homo sapien
ggaaccagccaatactaatctcaaa

SEQ ID NO: 3074816 - DNA, 25 bp, Homo sapien
gccaatactaatctcaaacaggata

SEQ ID NO: 3074817 - DNA, 25 bp, Homo sapien
aaaggaaccagccaatactaatctc

SEQ ID NO: 3074818 - DNA, 25 bp, Homo sapien
tcaaacaggatatcctttagggaaa

SEQ ID NO: 3074819 - DNA, 25 bp, Homo sapien
catagatcttggtgaatgtatctcc

SEQ ID NO: 3074820 - DNA, 25 bp, Homo sapien
ccttctacatatggttttttgtgtg

SEQ ID NO: 3074821 - DNA, 25 bp, Homo sapien
tctgctgccctgcatagatcttggt

SEQ ID NO: 3074822 - DNA, 25 bp, Homo sapien
ggaccacccagtaaggatatgtgtg

SEQ ID NO: 3074823 - DNA, 25 bp, Homo sapien
tccattgacttctttatgtgctgat

SEQ ID NO: 3074824 - DNA, 25 bp, Homo sapien
tcttttttgccaaggaccttgcttc

SEQ ID NO: 3074825 - DNA, 25 bp, Homo sapien
gacttctttatgtgctgatgtctct

SEQ ID NO: 3074826 - DNA, 25 bp, Homo sapien
gaccttgcttctggagtaggcaagt

SEQ ID NO: 3074827 - DNA, 25 bp, Homo sapien
aaaactcaattctcagtggaagcat

SEQ ID NO: 3074828 - DNA, 25 bp, Homo sapien
cttgtgctcctcatggcaagggaga

SEQ ID NO: 3074829 - DNA, 25 bp, Homo sapien
tgtgctcctcatggcaagggagata

SEQ ID NO: 3074830 - DNA, 25 bp, Homo sapien
ttgtgctcctcatggcaagggagat

SEQ ID NO: 3074831 - DNA, 25 bp, Homo sapien
tcaaggctgggcaagtttggctggg

SEQ ID NO: 3074832 - DNA, 25 bp, Homo sapien
gctgggcaagtttggctgggcctaa

SEQ ID NO: 3074833 - DNA, 25 bp, Homo sapien
ggctgggcaagtttggctgggccta

SEQ ID NO: 3074834 - DNA, 25 bp, Homo sapien
taaacctccaattctgtgtttggtg

SEQ ID NO: 3074835 - DNA, 25 bp, Homo sapien
tctgcggattgaagtcacactgagc

SEQ ID NO: 3074836 - DNA, 25 bp, Homo sapien
gattgaagtcacactgagctcagct

SEQ ID NO: 3074837 - DNA, 25 bp, Homo sapien
agggtttctgcggattgaagtcaca

SEQ ID NO: 3074838 - DNA, 25 bp, Homo sapien
cccgagggtttctgcggattgaagt

SEQ ID NO: 3074839 - DNA, 25 bp, Homo sapien
cttggcttgtgggttgtcaccatac

SEQ ID NO: 3074840 - DNA, 25 bp, Homo sapien
tacaccacctcagcccaaacaggag

SEQ ID NO: 3074841 - DNA, 25 bp, Homo sapien
tgggttgtcaccatactgtgtgtgc

SEQ ID NO: 3074842 - DNA, 25 bp, Homo sapien
gtgccagagtcagtgctacaccacc

SEQ ID NO: 3074843 - DNA, 25 bp, Homo sapien
acagctcgtgcatatctcttctaca

SEQ ID NO: 3074844 - DNA, 25 bp, Homo sapien
cttgctaatttagtgccacgacaca

SEQ ID NO: 3074845 - DNA, 25 bp, Homo sapien
cacagaagggaagtacaatcaacag

SEQ ID NO: 3074846 - DNA, 25 bp, Homo sapien
cagctctctcaacaagtaattcctt

SEQ ID NO: 3074847 - DNA, 25 bp, Homo sapien
cagtcaggacaagtcctggtttgct

SEQ ID NO: 3074848 - DNA, 25 bp, Homo sapien
tcaggacaagtcctggtttgctatt

SEQ ID NO: 3074849 - DNA, 25 bp, Homo sapien
ggacaagtcctggtttgctattcca

SEQ ID NO: 3074850 - DNA, 25 bp, Homo sapien
cacagtcaggacaagtcctggtttg

SEQ ID NO: 3074851 - DNA, 25 bp, Homo sapien
cttgacattgatgattgagttgcat

SEQ ID NO: 3074852 - DNA, 25 bp, Homo sapien
cagcttggcctcttgacattgatga

SEQ ID NO: 3074853 - DNA, 25 bp, Homo sapien
gctcagcttggcctcttgacattga

SEQ ID NO: 3074854 - DNA, 25 bp, Homo sapien
tcagcttggcctcttgacattgatg

SEQ ID NO: 3074855 - DNA, 25 bp, Homo sapien
ccaaagtctatgttaaacagattag

SEQ ID NO: 3074856 - DNA, 25 bp, Homo sapien
cagattagataaccgtagacacagg

SEQ ID NO: 3074857 - DNA, 25 bp, Homo sapien
gattagataaccgtagacacaggaa

SEQ ID NO: 3074858 - DNA, 25 bp, Homo sapien
tggctccaaagtctatgttaaacag

SEQ ID NO: 3074859 - DNA, 25 bp, Homo sapien
aggactccagaggataaaagtacat

SEQ ID NO: 3074860 - DNA, 25 bp, Homo sapien
acatccacactttacagccacggta

SEQ ID NO: 3074861 - DNA, 25 bp, Homo sapien
actttacagccacggtatctctgcc

SEQ ID NO: 3074862 - DNA, 25 bp, Homo sapien
gaggataaaagtacatccacacttt

SEQ ID NO: 3074863 - DNA, 25 bp, Homo sapien
tactgctcgatatctgatcctgcat

SEQ ID NO: 3074864 - DNA, 25 bp, Homo sapien
tctatagctgaatagttactgctcg

SEQ ID NO: 3074865 - DNA, 25 bp, Homo sapien
aacacaggaagctggtatctatagc

SEQ ID NO: 3074866 - DNA, 25 bp, Homo sapien
caggaagctggtatctatagctgaa

SEQ ID NO: 3074867 - DNA, 25 bp, Homo sapien
catatgaaagcccactttggccaaa

SEQ ID NO: 3074868 - DNA, 25 bp, Homo sapien
gctgagggtcatatgaaagcccact

SEQ ID NO: 3074869 - DNA, 25 bp, Homo sapien
aatgctgagggtcatatgaaagccc

SEQ ID NO: 3074870 - DNA, 25 bp, Homo sapien
ggtcatatgaaagcccactttggcc

SEQ ID NO: 3074871 - DNA, 25 bp, Homo sapien
caggcatttctggttgaatgctgcc

SEQ ID NO: 3074872 - DNA, 25 bp, Homo sapien
atctggaagctatttggagttcaaa

SEQ ID NO: 3074873 - DNA, 25 bp, Homo sapien
tggaagctatttggagttcaaaggc

SEQ ID NO: 3074874 - DNA, 25 bp, Homo sapien
acccacagactttagcaaagaaaag

SEQ ID NO: 3074875 - DNA, 25 bp, Homo sapien
cacccacagactttagcaaagaaaa

SEQ ID NO: 3074876 - DNA, 25 bp, Homo sapien
cttcttgatcagagtccagtggtcc

SEQ ID NO: 3074877 - DNA, 25 bp, Homo sapien
acaggtggatgaagttcacgagaaa

SEQ ID NO: 3074878 - DNA, 25 bp, Homo sapien
cctgcagcctattatttcctgcctg

SEQ ID NO: 3074879 - DNA, 25 bp, Homo sapien
gagaaagcactgcaatgggccactt

SEQ ID NO: 3074880 - DNA, 25 bp, Homo sapien
cagtatcctgcagcctattatttcc

SEQ ID NO: 3074881 - DNA, 25 bp, Homo sapien
ccaataaattggcatcagctcttac

SEQ ID NO: 3074882 - DNA, 25 bp, Homo sapien
tgtgacccaataaattggcatcagc

SEQ ID NO: 3074883 - DNA, 25 bp, Homo sapien
aattggcatcagctcttactccacc

SEQ ID NO: 3074884 - DNA, 25 bp, Homo sapien
cacccagttgtgacccaataaattg

SEQ ID NO: 3074885 - DNA, 25 bp, Homo sapien
ggcccatgtcagatgctatttcttc

SEQ ID NO: 3074886 - DNA, 25 bp, Homo sapien
taccaactgaaattctgccccagct

SEQ ID NO: 3074887 - DNA, 25 bp, Homo sapien
gaagtctttcattcctccactctca

SEQ ID NO: 3074888 - DNA, 25 bp, Homo sapien
tcttaatcccaattttaccaactga

SEQ ID NO: 3074889 - DNA, 25 bp, Homo sapien
gcccttttgtgattccggattggat

SEQ ID NO: 3074890 - DNA, 25 bp, Homo sapien
tgaccgtagtaaccggcagaggctc

SEQ ID NO: 3074891 - DNA, 25 bp, Homo sapien
ggctgtagaccacgcagtgaccgta

SEQ ID NO: 3074892 - DNA, 25 bp, Homo sapien
cagaggctctctgatctccgtgctc

SEQ ID NO: 3074893 - DNA, 25 bp, Homo sapien
gcacattataaagttcctgaccaaa

SEQ ID NO: 3074894 - DNA, 25 bp, Homo sapien
attataaagttcctgaccaaagacg

SEQ ID NO: 3074895 - DNA, 25 bp, Homo sapien
cattataaagttcctgaccaaagac

SEQ ID NO: 3074896 - DNA, 25 bp, Homo sapien
atagcacattataaagttcctgacc

SEQ ID NO: 3074897 - DNA, 25 bp, Homo sapien
acttgcaaatgagacaagggaagat

SEQ ID NO: 3074898 - DNA, 25 bp, Homo sapien
gaaggaacctgtccatttgagagaa

SEQ ID NO: 3074899 - DNA, 25 bp, Homo sapien
ggaagatggcaatttggaactgcaa

SEQ ID NO: 3074900 - DNA, 25 bp, Homo sapien
cctaattataatagcacagaaatcc

SEQ ID NO: 3074901 - DNA, 25 bp, Homo sapien
tcatagacatatgcgaaacccaagg

SEQ ID NO: 3074902 - DNA, 25 bp, Homo sapien
cagtctcagaagtagcccttagggt

SEQ ID NO: 3074903 - DNA, 25 bp, Homo sapien
tcttggctactttacagggtgaacc

SEQ ID NO: 3074904 - DNA, 25 bp, Homo sapien
gcaaatgtctagtgtgccaggccta

SEQ ID NO: 3074905 - DNA, 25 bp, Homo sapien
ccagagggactgtggtgatcacaac

SEQ ID NO: 3074906 - DNA, 25 bp, Homo sapien
acgatgccggcgatgaagacaacca

SEQ ID NO: 3074907 - DNA, 25 bp, Homo sapien
gacccatgggaattgaagctgtaag

SEQ ID NO: 3074908 - DNA, 25 bp, Homo sapien
aactgaatctcactgaccagaggga

SEQ ID NO: 3074909 - DNA, 25 bp, Homo sapien
agactagatctggacagtctcacca

SEQ ID NO: 3074910 - DNA, 25 bp, Homo sapien
taagctgggtttacagactagatct

SEQ ID NO: 3074911 - DNA, 25 bp, Homo sapien
gggtttacagactagatctggacag

SEQ ID NO: 3074912 - DNA, 25 bp, Homo sapien
agtgcttctaagctgggtttacaga

SEQ ID NO: 3074913 - DNA, 25 bp, Homo sapien
gtggtctgaagtgtaacaatatctt

SEQ ID NO: 3074914 - DNA, 25 bp, Homo sapien
ggtctgaagtgtaacaatatcttcc

SEQ ID NO: 3074915 - DNA, 25 bp, Homo sapien
aatgaggtggggatttgtggtctga

SEQ ID NO: 3074916 - DNA, 25 bp, Homo sapien
tctgaagtgtaacaatatcttccaa

SEQ ID NO: 3074917 - DNA, 25 bp, Homo sapien
gaaaatcaagatctgtccccaaatt

SEQ ID NO: 3074918 - DNA, 25 bp, Homo sapien
tgagctaacctgaaaatcaagatct

SEQ ID NO: 3074919 - DNA, 25 bp, Homo sapien
ccaaagctgagattgagctaacctg

SEQ ID NO: 3074920 - DNA, 25 bp, Homo sapien
cagagtaaccacttgacttggaaga

SEQ ID NO: 3074921 - DNA, 25 bp, Homo sapien
gagtaaccacttgacttggaagaca

SEQ ID NO: 3074922 - DNA, 25 bp, Homo sapien
cattaccagagtaaccacttgactt

SEQ ID NO: 3074923 - DNA, 25 bp, Homo sapien
gcctgagcctcttcgtccaacttct

SEQ ID NO: 3074924 - DNA, 25 bp, Homo sapien
aaaatactttactatagggtctgct

SEQ ID NO: 3074925 - DNA, 25 bp, Homo sapien
tactttactatagggtctgctctgg

SEQ ID NO: 3074926 - DNA, 25 bp, Homo sapien
tatagggtctgctctggtttgggat

SEQ ID NO: 3074927 - DNA, 25 bp, Homo sapien
ataaaacaataggttagggatctct

SEQ ID NO: 3074928 - DNA, 25 bp, Homo sapien
tgttaccaaagctaaaggtgcaaac

SEQ ID NO: 3074929 - DNA, 25 bp, Homo sapien
ggcccttgagggcaattcccctcta

SEQ ID NO: 3074930 - DNA, 25 bp, Homo sapien
tttctagtaccactttgcctgcaag

SEQ ID NO: 3074931 - DNA, 25 bp, Homo sapien
gcctgcaagatagcccaataactgc

SEQ ID NO: 3074932 - DNA, 25 bp, Homo sapien
ctcagttaggtagcactggccttaa

SEQ ID NO: 3074933 - DNA, 25 bp, Homo sapien
gttgcaggcttggtaagaggagcat

SEQ ID NO: 3074934 - DNA, 25 bp, Homo sapien
gaccagattagccttgtctcagtta

SEQ ID NO: 3074935 - DNA, 25 bp, Homo sapien
aaccataggttttaagttgcaggct

SEQ ID NO: 3074936 - DNA, 25 bp, Homo sapien
gggtgtccaataccataataaactg

SEQ ID NO: 3074937 - DNA, 25 bp, Homo sapien
aattctaggttttcaggttcgcaca

SEQ ID NO: 3074938 - DNA, 25 bp, Homo sapien
tcagtcccaatcagaaattctaggt

SEQ ID NO: 3074939 - DNA, 25 bp, Homo sapien
caaagccaatgcagtaaggagcatg

SEQ ID NO: 3074940 - DNA, 25 bp, Homo sapien
gaagactgataggaaagcccaaggg

SEQ ID NO: 3074941 - DNA, 25 bp, Homo sapien
ttttgtagaagcaactgggctcccc

SEQ ID NO: 3074942 - DNA, 25 bp, Homo sapien
caggagcagccaactttagggaaga

SEQ ID NO: 3074943 - DNA, 25 bp, Homo sapien
catgacgtaagtcggagacctcggt

SEQ ID NO: 3074944 - DNA, 25 bp, Homo sapien
tcttgcatgatgtcgtttgtgttct

SEQ ID NO: 3074945 - DNA, 25 bp, Homo sapien
aatcaaacctttataatggattcct

SEQ ID NO: 3074946 - DNA, 25 bp, Homo sapien
gaagtgcgtgctttatatcttgcat

SEQ ID NO: 3074947 - DNA, 25 bp, Homo sapien
aaacagtgggaaagtatgtctagcc

SEQ ID NO: 3074948 - DNA, 25 bp, Homo sapien
tccccaggatctatcaggaattcct

SEQ ID NO: 3074949 - DNA, 25 bp, Homo sapien
caacttgggttatgaaagttatcct

SEQ ID NO: 3074950 - DNA, 25 bp, Homo sapien
tcttatctgaactattgcactggtc

SEQ ID NO: 3074951 - DNA, 25 bp, Homo sapien
tctaccaagcagcaagaatcacctt

SEQ ID NO: 3074952 - DNA, 25 bp, Homo sapien
cagaaattcaggatgtaaagccaca

SEQ ID NO: 3074953 - DNA, 25 bp, Homo sapien
ccatttggagaagtatcagaggcct

SEQ ID NO: 3074954 - DNA, 25 bp, Homo sapien
gaggcctgaccggacacataatatg

SEQ ID NO: 3074955 - DNA, 25 bp, Homo sapien
gaagtggcatttcgttcagagctga

SEQ ID NO: 3074956 - DNA, 25 bp, Homo sapien
aggttgagtaatcgctgaagctcca

SEQ ID NO: 3074957 - DNA, 25 bp, Homo sapien
tttgtaacttgatggcgaggttgag

SEQ ID NO: 3074958 - DNA, 25 bp, Homo sapien
acttgatggcgaggttgagtaatcg

SEQ ID NO: 3074959 - DNA, 25 bp, Homo sapien
cattttagtttgtaacttgatggcg

SEQ ID NO: 3074960 - DNA, 25 bp, Homo sapien
tgagcaaagacagcatgcgtttcct

SEQ ID NO: 3074961 - DNA, 25 bp, Homo sapien
actcaccccgtctgacatcattggg

SEQ ID NO: 3074962 - DNA, 25 bp, Homo sapien
ccgtctgacatcattgggcgaggtg

SEQ ID NO: 3074963 - DNA, 25 bp, Homo sapien
tgcacatcatcttgtgagaggggag

SEQ ID NO: 3074964 - DNA, 25 bp, Homo sapien
ctagtgtatgggactagaagcagtc

SEQ ID NO: 3074965 - DNA, 25 bp, Homo sapien
gactagaagcagtcagcaggtactt

SEQ ID NO: 3074966 - DNA, 25 bp, Homo sapien
gcaggtacttcttagagataattcg

SEQ ID NO: 3074967 - DNA, 25 bp, Homo sapien
cttcttagagataattcgtggatac

SEQ ID NO: 3074968 - DNA, 25 bp, Homo sapien
gatcacctattttagaacatctctt

SEQ ID NO: 3074969 - DNA, 25 bp, Homo sapien
tcacctattttagaacatctcttct

SEQ ID NO: 3074970 - DNA, 25 bp, Homo sapien
atcacctattttagaacatctcttc

SEQ ID NO: 3074971 - DNA, 25 bp, Homo sapien
tgtgagcctcatctgattattctgg

SEQ ID NO: 3074972 - DNA, 25 bp, Homo sapien
tgagcctcatctgattattctggac

SEQ ID NO: 3074973 - DNA, 25 bp, Homo sapien
agcctcatctgattattctggacag

SEQ ID NO: 3074974 - DNA, 25 bp, Homo sapien
atttgtgagcctcatctgattattc

SEQ ID NO: 3074975 - DNA, 25 bp, Homo sapien
taggtctgcactcaaacgagaaaaa

SEQ ID NO: 3074976 - DNA, 25 bp, Homo sapien
actgcttgcttaaatttaggtctgc

SEQ ID NO: 3074977 - DNA, 25 bp, Homo sapien
gcattgtaacttcacgtagtctgac

SEQ ID NO: 3074978 - DNA, 25 bp, Homo sapien
agaaaaatacttgagtatcagtcat

SEQ ID NO: 3074979 - DNA, 25 bp, Homo sapien
tgacgtggaatctgaatacagcacc

SEQ ID NO: 3074980 - DNA, 25 bp, Homo sapien
tgccaaaaaagtagatattgacgtg

SEQ ID NO: 3074981 - DNA, 25 bp, Homo sapien
tcattggcaccttcactttgctcgg

SEQ ID NO: 3074982 - DNA, 25 bp, Homo sapien
tattgacgtggaatctgaatacagc

SEQ ID NO: 3074983 - DNA, 25 bp, Homo sapien
gaactagcagaactgtcatccaggg

SEQ ID NO: 3074984 - DNA, 25 bp, Homo sapien
gggacaggattgtgtcatagacaac

SEQ ID NO: 3074985 - DNA, 25 bp, Homo sapien
ttactttgacccataagcttcaaag

SEQ ID NO: 3074986 - DNA, 25 bp, Homo sapien
aaagtactcctgtgtggaactagca

SEQ ID NO: 3074987 - DNA, 25 bp, Homo sapien
tacagcccagtagaataatctcttt

SEQ ID NO: 3074988 - DNA, 25 bp, Homo sapien
gcccagtagaataatctctttgtaa

SEQ ID NO: 3074989 - DNA, 25 bp, Homo sapien
agcctggaattcaggtctacagccc

SEQ ID NO: 3074990 - DNA, 25 bp, Homo sapien
ggaattcaggtctacagcccagtag

SEQ ID NO: 3074991 - DNA, 25 bp, Homo sapien
gaatttcatagaggcagcggcggat

SEQ ID NO: 3074992 - DNA, 25 bp, Homo sapien
gtctataaccatgggaatattgttt

SEQ ID NO: 3074993 - DNA, 25 bp, Homo sapien
tattgtttttgattgtagaccaact

SEQ ID NO: 3074994 - DNA, 25 bp, Homo sapien
aagagggctcctcctgtctataacc

SEQ ID NO: 3074995 - DNA, 25 bp, Homo sapien
tggtcctgccgaagagggccgcctc

SEQ ID NO: 3074996 - DNA, 25 bp, Homo sapien
gggcctcagcgactctgcggagggt

SEQ ID NO: 3074997 - DNA, 25 bp, Homo sapien
tcccaggacggcgtccgcgggcctc

SEQ ID NO: 3074998 - DNA, 25 bp, Homo sapien
tcgcctcgaggaacgccttggccat

SEQ ID NO: 3074999 - DNA, 25 bp, Homo sapien
tcagaaaacaggctccgaatggtgt

SEQ ID NO: 3075000 - DNA, 25 bp, Homo sapien
tatcacgccatcttcaaattgagag

SEQ ID NO: 3075001 - DNA, 25 bp, Homo sapien
caagcagagaacaggttcagggtat

SEQ ID NO: 3075002 - DNA, 25 bp, Homo sapien
tatagggtcttgtggttctttgagt

SEQ ID NO: 3075003 - DNA, 25 bp, Homo sapien
tgtctctgcgtaaaggttcttccat

SEQ ID NO: 3075004 - DNA, 25 bp, Homo sapien
tctgctgtctctgcgtaaaggttct

SEQ ID NO: 3075005 - DNA, 25 bp, Homo sapien
ctctacccagtagctgcctcttctg

SEQ ID NO: 3075006 - DNA, 25 bp, Homo sapien
ctcttctgctgtctctgcgtaaagg

SEQ ID NO: 3075007 - DNA, 25 bp, Homo sapien
tctgcttctttaccacccgtgagga

SEQ ID NO: 3075008 - DNA, 25 bp, Homo sapien
gcttctttaccacccgtgaggacac

SEQ ID NO: 3075009 - DNA, 25 bp, Homo sapien
tcactttaagttagactttgtctca

SEQ ID NO: 3075010 - DNA, 25 bp, Homo sapien
taagttagactttgtctcatctgct

SEQ ID NO: 3075011 - DNA, 25 bp, Homo sapien
cagaaagacagttgaaccgaacctt

SEQ ID NO: 3075012 - DNA, 25 bp, Homo sapien
gacagttgaaccgaacctttgtaca

SEQ ID NO: 3075013 - DNA, 25 bp, Homo sapien
tgaaccgaacctttgtacaactctc

SEQ ID NO: 3075014 - DNA, 25 bp, Homo sapien
gccagaaagacagttgaaccgaacc

SEQ ID NO: 3075015 - DNA, 25 bp, Homo sapien
ccataccttctcaatctggaaccaa

SEQ ID NO: 3075016 - DNA, 25 bp, Homo sapien
ggcagcatcgctttatccaccatac

SEQ ID NO: 3075017 - DNA, 25 bp, Homo sapien
ctcaatctggaaccaatttatggga

SEQ ID NO: 3075018 - DNA, 25 bp, Homo sapien
ctctgagcattgtgataccctggga

SEQ ID NO: 3075019 - DNA, 25 bp, Homo sapien
ctgacgctgactttgatcaaaagac

SEQ ID NO: 3075020 - DNA, 25 bp, Homo sapien
actatccaagggctcattgtttggt

SEQ ID NO: 3075021 - DNA, 25 bp, Homo sapien
tgtcctcagtttcttgactagaacc

SEQ ID NO: 3075022 - DNA, 25 bp, Homo sapien
ggtttattgtcatgtaatctgacgc

SEQ ID NO: 3075023 - DNA, 25 bp, Homo sapien
ttttccattgctttgatgtacttta

SEQ ID NO: 3075024 - DNA, 25 bp, Homo sapien
ttccattgctttgatgtactttata

SEQ ID NO: 3075025 - DNA, 25 bp, Homo sapien
tcatgtttttatgtaatttcttttc

SEQ ID NO: 3075026 - DNA, 25 bp, Homo sapien
ccattgctttgatgtactttataaa

SEQ ID NO: 3075027 - DNA, 25 bp, Homo sapien
ccccactataagttggaggtgaata

SEQ ID NO: 3075028 - DNA, 25 bp, Homo sapien
tggcacaaggtgaccaattttcccc

SEQ ID NO: 3075029 - DNA, 25 bp, Homo sapien
ctatggtagtgatgataataacaat

SEQ ID NO: 3075030 - DNA, 25 bp, Homo sapien
tttcctctatagcatgtctgaccat

SEQ ID NO: 3075031 - DNA, 25 bp, Homo sapien
agacagaatgacttcacctctgaag

SEQ ID NO: 3075032 - DNA, 25 bp, Homo sapien
cctagggtgttttcactcgggcaca

SEQ ID NO: 3075033 - DNA, 25 bp, Homo sapien
cacagaggaattgaaagacagaatg

SEQ ID NO: 3075034 - DNA, 25 bp, Homo sapien
attttgatcccagggaccaaccatg

SEQ ID NO: 3075035 - DNA, 25 bp, Homo sapien
tcatggaacccaaagagggcgacat

SEQ ID NO: 3075036 - DNA, 25 bp, Homo sapien
atgcagccttctgtttcccagccag

SEQ ID NO: 3075037 - DNA, 25 bp, Homo sapien
aggagggcagcatgcagccttctgt

SEQ ID NO: 3075038 - DNA, 25 bp, Homo sapien
cagccagagtcagggtttggcaaag

SEQ ID NO: 3075039 - DNA, 25 bp, Homo sapien
gctgttgaaacagagtacggacacc

SEQ ID NO: 3075040 - DNA, 25 bp, Homo sapien
gacacccacatacttatttgtgttg

SEQ ID NO: 3075041 - DNA, 25 bp, Homo sapien
ttggaatagggtatgcagcgcccag

SEQ ID NO: 3075042 - DNA, 25 bp, Homo sapien
tacggacacccttcaatgggctggg

SEQ ID NO: 3075043 - DNA, 25 bp, Homo sapien
aattccacgtagagtattaagcatc

SEQ ID NO: 3075044 - DNA, 25 bp, Homo sapien
tttaattccacgtagagtattaagc

SEQ ID NO: 3075045 - DNA, 25 bp, Homo sapien
tccacgtagagtattaagcatctgc

SEQ ID NO: 3075046 - DNA, 25 bp, Homo sapien
ttatttaattccacgtagagtatta

SEQ ID NO: 3075047 - DNA, 25 bp, Homo sapien
atgtagaacagaaacatgggtaagg

SEQ ID NO: 3075048 - DNA, 25 bp, Homo sapien
gatgtagaacagaaacatgggtaag

SEQ ID NO: 3075049 - DNA, 25 bp, Homo sapien
tcagctgcatcctctcgttcagtgt

SEQ ID NO: 3075050 - DNA, 25 bp, Homo sapien
gctcagctgcatcctctcgttcagt

SEQ ID NO: 3075051 - DNA, 25 bp, Homo sapien
cagctgcatcctctcgttcagtgtc

SEQ ID NO: 3075052 - DNA, 25 bp, Homo sapien
ctgctcagctgcatcctctcgttca

SEQ ID NO: 3075053 - DNA, 25 bp, Homo sapien
cacgtcttgattgtttgcctctgac

SEQ ID NO: 3075054 - DNA, 25 bp, Homo sapien
tgaaggggtgactaaacacgtcttg

SEQ ID NO: 3075055 - DNA, 25 bp, Homo sapien
gggtgactaaacacgtcttgattgt

SEQ ID NO: 3075056 - DNA, 25 bp, Homo sapien
taaacacgtcttgattgtttgcctc

SEQ ID NO: 3075057 - DNA, 25 bp, Homo sapien
gctgagtttcaaaggcatacccggc

SEQ ID NO: 3075058 - DNA, 25 bp, Homo sapien
ggctgagtttcaaaggcatacccgg

SEQ ID NO: 3075059 - DNA, 25 bp, Homo sapien
ttggaatctcttttgaactcccaga

SEQ ID NO: 3075060 - DNA, 25 bp, Homo sapien
ctttggaatctcttttgaactccca

SEQ ID NO: 3075061 - DNA, 25 bp, Homo sapien
cttttgaactcccagaataattcat

SEQ ID NO: 3075062 - DNA, 25 bp, Homo sapien
ctcttttgaactcccagaataattc

SEQ ID NO: 3075063 - DNA, 25 bp, Homo sapien
gctccacacattagttagggatcag

SEQ ID NO: 3075064 - DNA, 25 bp, Homo sapien
cacacattagttagggatcaggctt

SEQ ID NO: 3075065 - DNA, 25 bp, Homo sapien
cactcagctccacacattagttagg

SEQ ID NO: 3075066 - DNA, 25 bp, Homo sapien
cattagttagggatcaggcttcttt

SEQ ID NO: 3075067 - DNA, 25 bp, Homo sapien
ttggccagaatgcagtcacatgact

SEQ ID NO: 3075068 - DNA, 25 bp, Homo sapien
tcacatgacttcacctagctgcaag

SEQ ID NO: 3075069 - DNA, 25 bp, Homo sapien
aatgcagtcacatgacttcacctag

SEQ ID NO: 3075070 - DNA, 25 bp, Homo sapien
cacatgacttcacctagctgcaagg

SEQ ID NO: 3075071 - DNA, 25 bp, Homo sapien
gctatgttaagttgaaaatcctgca

SEQ ID NO: 3075072 - DNA, 25 bp, Homo sapien
tggaggagcaggtgatgttttggct

SEQ ID NO: 3075073 - DNA, 25 bp, Homo sapien
ctatgttaagttgaaaatcctgcat

SEQ ID NO: 3075074 - DNA, 25 bp, Homo sapien
agcaggtgatgttttggctatgtta

SEQ ID NO: 3075075 - DNA, 25 bp, Homo sapien
tgaagtccaatagtactttctgccg

SEQ ID NO: 3075076 - DNA, 25 bp, Homo sapien
gtactttctgccgtttatcaatgcg

SEQ ID NO: 3075077 - DNA, 25 bp, Homo sapien
caacacctcatatggagaagatcca

SEQ ID NO: 3075078 - DNA, 25 bp, Homo sapien
gaagatccattttgaatgtctgcca

SEQ ID NO: 3075079 - DNA, 25 bp, Homo sapien
cagcggaaatcggatgcctgcaaga

SEQ ID NO: 3075080 - DNA, 25 bp, Homo sapien
gaccctggaaaagccagcggtacac

SEQ ID NO: 3075081 - DNA, 25 bp, Homo sapien
gccagcggtacacggtgacaggcaa

SEQ ID NO: 3075082 - DNA, 25 bp, Homo sapien
atcggatgcctgcaagaaaggaccc

SEQ ID NO: 3075083 - DNA, 25 bp, Homo sapien
aatgaaatgaaagggtgcttgtcct

SEQ ID NO: 3075084 - DNA, 25 bp, Homo sapien
acccctgcctgaacagtggctatta

SEQ ID NO: 3075085 - DNA, 25 bp, Homo sapien
cccctgcctgaacagtggctattac

SEQ ID NO: 3075086 - DNA, 25 bp, Homo sapien
tcagttcgcacatcagccttctcgt

SEQ ID NO: 3075087 - DNA, 25 bp, Homo sapien
tatgactcttcaacttcagttcgca

SEQ ID NO: 3075088 - DNA, 25 bp, Homo sapien
tcctctcccacgttaaattggtcca

SEQ ID NO: 3075089 - DNA, 25 bp, Homo sapien
ccttggacactggtaagtagggctt

SEQ ID NO: 3075090 - DNA, 25 bp, Homo sapien
actccgctgccgacaacacatgatg

SEQ ID NO: 3075091 - DNA, 25 bp, Homo sapien
tgcccttgcggcatcctggctacgt

SEQ ID NO: 3075092 - DNA, 25 bp, Homo sapien
tgaaactctgcccttgcggcatcct

SEQ ID NO: 3075093 - DNA, 25 bp, Homo sapien
gctgccgacaacacatgatgtgctt

SEQ ID NO: 3075094 - DNA, 25 bp, Homo sapien
aatctagacggaggtttccaaagct

SEQ ID NO: 3075095 - DNA, 25 bp, Homo sapien
gggctacagattccatgccagtcca

SEQ ID NO: 3075096 - DNA, 25 bp, Homo sapien
catccattgcatgctgatacaaagg

SEQ ID NO: 3075097 - DNA, 25 bp, Homo sapien
gatacaaagggtgagctctcaaggc

SEQ ID NO: 3075098 - DNA, 25 bp, Homo sapien
accatttagtgtaacgtgacaggcc

SEQ ID NO: 3075099 - DNA, 25 bp, Homo sapien
gaccatttagtgtaacgtgacaggc

SEQ ID NO: 3075100 - DNA, 25 bp, Homo sapien
ggtgatggacaccagcaaagtggca

SEQ ID NO: 3075101 - DNA, 25 bp, Homo sapien
gactgctcgaggagctcctcctgaa

SEQ ID NO: 3075102 - DNA, 25 bp, Homo sapien
cactgtggggagcaaacttctctct

SEQ ID NO: 3075103 - DNA, 25 bp, Homo sapien
tgttgtgctcaagggagactgctcg

SEQ ID NO: 3075104 - DNA, 25 bp, Homo sapien
gaacaatgctccaggcagttgccat

SEQ ID NO: 3075105 - DNA, 25 bp, Homo sapien
ctgccagaacaatgctccaggcagt

SEQ ID NO: 3075106 - DNA, 25 bp, Homo sapien
cagaacaatgctccaggcagttgcc

SEQ ID NO: 3075107 - DNA, 25 bp, Homo sapien
ccagaacaatgctccaggcagttgc

SEQ ID NO: 3075108 - DNA, 25 bp, Homo sapien
tttccagtaggtcatctgtccattt

SEQ ID NO: 3075109 - DNA, 25 bp, Homo sapien
gggaaaagcaacagagcctctttcc

SEQ ID NO: 3075110 - DNA, 25 bp, Homo sapien
gcctctttccagtaggtcatctgtc

SEQ ID NO: 3075111 - DNA, 25 bp, Homo sapien
agagcctctttccagtaggtcatct

SEQ ID NO: 3075112 - DNA, 25 bp, Homo sapien
cctctcacctatggcttcatcttcc

SEQ ID NO: 3075113 - DNA, 25 bp, Homo sapien
aacagcccctctatggtctccaagt

SEQ ID NO: 3075114 - DNA, 25 bp, Homo sapien
caggcggggaacagcccctctatgg

SEQ ID NO: 3075115 - DNA, 25 bp, Homo sapien
gggaacagcccctctatggtctcca

SEQ ID NO: 3075116 - DNA, 25 bp, Homo sapien
gcccctctatggtctccaagttggc

SEQ ID NO: 3075117 - DNA, 25 bp, Homo sapien
aggcctctagcagcaatagcaaagc

SEQ ID NO: 3075118 - DNA, 25 bp, Homo sapien
cacggctgggtcccagatgccagag

SEQ ID NO: 3075119 - DNA, 25 bp, Homo sapien
gcaatagcaaagctggagcatgcca

SEQ ID NO: 3075120 - DNA, 25 bp, Homo sapien
ccacggctgggtcccagatgccaga

SEQ ID NO: 3075121 - DNA, 25 bp, Homo sapien
cactttgctgcctctatagaggagg

SEQ ID NO: 3075122 - DNA, 25 bp, Homo sapien
gcatttgggttcatatggcaactct

SEQ ID NO: 3075123 - DNA, 25 bp, Homo sapien
gagtcattgcatttgggttcatatg

SEQ ID NO: 3075124 - DNA, 25 bp, Homo sapien
gaggaggaatgccagtccacatttc

SEQ ID NO: 3075125 - DNA, 25 bp, Homo sapien
tactaatgagtaacctggaaattcc

SEQ ID NO: 3075126 - DNA, 25 bp, Homo sapien
ttactaatgagtaacctggaaattc

SEQ ID NO: 3075127 - DNA, 25 bp, Homo sapien
atttcttactaatgagtaacctgga
